United States Patent Application Publication US 2022/0213167 A1 - sequence listing, part 18

SEQ ID NO: 371508 - protein, 12 aa, Homo sapiens
  CDR3 for beta chain variable domain of TCR clone 185754 (TRBV2, TRBJ2-1)
CAKREGYNEQFF

SEQ ID NO: 371509 - protein, 12 aa, Homo sapiens
  CDR3 for alpha chain variable domain of TCR clone 185755 (TRAV20, TRAJ39)
CAVGNAGNMLIF

SEQ ID NO: 371510 - protein, 16 aa, Homo sapiens
  CDR3 for beta chain variable domain of TCR clone 185755 (TRBV15, TRBJ1-2)
CATSRGPRTGGGGYTF

SEQ ID NO: 371511 - protein, 15 aa, Homo sapiens
  CDR3 for alpha chain variable domain of TCR clone 185756 (TRAV16, TRAJ58)
CALKRGNQWLLVDLW

SEQ ID NO: 371512 - protein, 17 aa, Homo sapiens
  CDR3 for beta chain variable domain of TCR clone 185756 (TRBV18, TRBJ2-1)
CASAKGLSGGADNEQFF

SEQ ID NO: 371513 - protein, 14 aa, Homo sapiens
  CDR3 for alpha chain variable domain of TCR clone 185757 (TRAV1-2, TRAJ16)
CAVNRFSDGQKLLF

SEQ ID NO: 371514 - protein, 13 aa, Homo sapiens
  CDR3 for beta chain variable domain of TCR clone 185757 (TRBV7-2, TRBJ2-5)
CQQLVRGGETQYF

SEQ ID NO: 371515 - protein, 14 aa, Homo sapiens
  CDR3 for alpha chain variable domain of TCR clone 185758 (TRAV38-1, TRAJ45)
CASHSGGGADGLTF

SEQ ID NO: 371516 - protein, 10 aa, Homo sapiens
  CDR3 for beta chain variable domain of TCR clone 185758 (TRBV10-3, TRBJ1-2)
CAISERTAMA

SEQ ID NO: 371517 - protein, 15 aa, Homo sapiens
  CDR3 for alpha chain variable domain of TCR clone 185759 (TRAV20, TRAJ58)
CAVQDLETSGSRLTF

SEQ ID NO: 371518 - protein, 14 aa, Homo sapiens
  CDR3 for beta chain variable domain of TCR clone 185759 (TRBV11-2, TRBJ2-3)
CASSRLARTDTQYF

SEQ ID NO: 371519 - protein, 15 aa, Homo sapiens
  CDR3 for alpha chain variable domain of TCR clone 185760 (TRAV3, TRAJ3)
CAVRDRRSSASKIIF

SEQ ID NO: 371520 - protein, 14 aa, Homo sapiens
  CDR3 for beta chain variable domain of TCR clone 185760 (TRBV7-6, TRBJ2-3)
CASSLGTVTDTQYF

SEQ ID NO: 371521 - protein, 18 aa, Homo sapiens
  CDR3 for alpha chain variable domain of TCR clone 185761 (TRAV26-1, TRAJ56)
CIVRVASRVTGANSKLTV

SEQ ID NO: 371522 - protein, 15 aa, Homo sapiens
  CDR3 for beta chain variable domain of TCR clone 185761 (TRBV7-9, TRBJ2-5)
RASSDTGRGRETQYF

SEQ ID NO: 371523 - protein, 11 aa, Homo sapiens
  CDR3 for alpha chain variable domain of TCR clone 185762 (TRAV12-3, TRAJ43)
CAMSVSNDMRF

SEQ ID NO: 371524 - protein, 15 aa, Homo sapiens
  CDR3 for beta chain variable domain of TCR clone 185762 (TRBV11-3, TRBJ2-3)
CASRSGGPSTDTQYF

SEQ ID NO: 371525 - protein, 11 aa, Homo sapiens
  CDR3 for alpha chain variable domain of TCR clone 185763 (TRAV23/DV6, TRAJ58)
CAARLLRGATS

SEQ ID NO: 371526 - protein, 14 aa, Homo sapiens
  CDR3 for beta chain variable domain of TCR clone 185763 (TRBV2, TRBJ2-7)
CASSLTSGGYEQYF

SEQ ID NO: 371527 - protein, 13 aa, Homo sapiens
  CDR3 for alpha chain variable domain of TCR clone 185764 (TRAV13-2, TRAJ53)
CAENMGSNYKLTF

SEQ ID NO: 371528 - protein, 14 aa, Homo sapiens
  CDR3 for beta chain variable domain of TCR clone 185764 (TRBV3-1, TRBJ2-7)
CASSPSGLPYEQYF

SEQ ID NO: 371529 - protein, 17 aa, Homo sapiens
  CDR3 for alpha chain variable domain of TCR clone 185765 (TRAV4, TRAJ22)
CCVLLPRGGGSARQLTF

SEQ ID NO: 371530 - protein, 14 aa, Homo sapiens
  CDR3 for beta chain variable domain of TCR clone 185765 (TRBV20-1, TRBJ1-1)
CSARAVNVYTEAFF

SEQ ID NO: 371531 - protein, 14 aa, Homo sapiens
  CDR3 for alpha chain variable domain of TCR clone 185766 (TRAV12-3, TRAJ13)
CAMKNSGGYQKVTF

SEQ ID NO: 371532 - protein, 13 aa, Homo sapiens
  CDR3 for beta chain variable domain of TCR clone 185766 (TRBV29-1, TRBJ2-5)
CSERDRVEETQYF

SEQ ID NO: 371533 - protein, 13 aa, Homo sapiens
  CDR3 for alpha chain variable domain of TCR clone 185767 (TRAV21, TRAJ27)
CAARPCNAGKSTF

SEQ ID NO: 371534 - protein, 15 aa, Homo sapiens
  CDR3 for beta chain variable domain of TCR clone 185767 (TRBV12-4, TRBJ2-5)
CASSPPTGLQETQYF

SEQ ID NO: 371535 - protein, 14 aa, Homo sapiens
  CDR3 for alpha chain variable domain of TCR clone 185768 (TRAV12-3, TRAJ22)
CAMSLFGSARQLTF

SEQ ID NO: 371536 - protein, 14 aa, Homo sapiens
  CDR3 for beta chain variable domain of TCR clone 185768 (TRBV7-2, TRBJ2-7)
CAISPKTSFYEQYF

SEQ ID NO: 371537 - protein, 14 aa, Homo sapiens
  CDR3 for alpha chain variable domain of TCR clone 185769 (TRAV3, TRAJ34)
CAVRDIKNTDKLIF

SEQ ID NO: 371538 - protein, 14 aa, Homo sapiens
  CDR3 for beta chain variable domain of TCR clone 185769 (TRBV7-2, TRBJ2-2)
CASSLGQNTGELFF

SEQ ID NO: 371539 - protein, 13 aa, Homo sapiens
  CDR3 for alpha chain variable domain of TCR clone 185770 (TRAV2, TRAJ40)
CAVVTSGTYKYIF

SEQ ID NO: 371540 - protein, 15 aa, Homo sapiens
  CDR3 for beta chain variable domain of TCR clone 185770 (TRBV25-1, TRBJ1-4)
CASSKRIATNEKLFF

SEQ ID NO: 371541 - protein, 14 aa, Homo sapiens
  CDR3 for alpha chain variable domain of TCR clone 185771 (TRAV26-1, TRAJ38)
CIAENAGNNRKLTW

SEQ ID NO: 371542 - protein, 13 aa, Homo sapiens
  CDR3 for beta chain variable domain of TCR clone 185771 (TRBV19, TRBJ1-2)
CASSVPGQDGYTF

SEQ ID NO: 371543 - protein, 13 aa, Homo sapiens
  CDR3 for alpha chain variable domain of TCR clone 185772 (TRAV3, TRAJ21)
CAVREPDFNKFYF

SEQ ID NO: 371544 - protein, 16 aa, Homo sapiens
  CDR3 for beta chain variable domain of TCR clone 185772 (TRBV7-2, TRBJ2-6)
CASSVAGRSGANVLTF

SEQ ID NO: 371545 - protein, 14 aa, Homo sapiens
  CDR3 for alpha chain variable domain of TCR clone 185773 (TRAV16, TRAJ57)
CALPTQCGSERLVF

SEQ ID NO: 371546 - protein, 15 aa, Homo sapiens
  CDR3 for beta chain variable domain of TCR clone 185773 (TRBV28, TRBJ1-3)
CASWGGHLSGNTIYF

SEQ ID NO: 371547 - protein, 16 aa, Homo sapiens
  CDR3 for alpha chain variable domain of TCR clone 185774 (TRAV3, TRAJ18)
CAVRDGRGPTLGRVYF

SEQ ID NO: 371548 - protein, 17 aa, Homo sapiens
  CDR3 for beta chain variable domain of TCR clone 185774 (TRBV5-1, TRBJ2-3)
CASSKIGLVDRTDTQYF

SEQ ID NO: 371549 - protein, 12 aa, Homo sapiens
  CDR3 for alpha chain variable domain of TCR clone 185775 (TRAV25, TRAJ29)
CAGHSGNTPLVF

SEQ ID NO: 371550 - protein, 14 aa, Homo sapiens
  CDR3 for beta chain variable domain of TCR clone 185775 (TRBV6-1, TRBJ2-7)
CAGTRTGDYYEQYF

SEQ ID NO: 371551 - protein, 14 aa, Homo sapiens
  CDR3 for alpha chain variable domain of TCR clone 185776 (TRAV12-1, TRAJ9)
CVVNRGTGGFKTIF

SEQ ID NO: 371552 - protein, 13 aa, Homo sapiens
  CDR3 for beta chain variable domain of TCR clone 185776 (TRBV19, TRBJ2-1)
CASSMYRVNEQFF

SEQ ID NO: 371553 - protein, 12 aa, Homo sapiens
  CDR3 for alpha chain variable domain of TCR clone 185777 (TRAV12-3, TRAJ17)
CAMTLTGNKLTF

SEQ ID NO: 371554 - protein, 13 aa, Homo sapiens
  CDR3 for beta chain variable domain of TCR clone 185777 (TRBV19, TRBJ2-3)
CATWDKITDTQYF

SEQ ID NO: 371555 - protein, 17 aa, Homo sapiens
  CDR3 for alpha chain variable domain of TCR clone 185778 (TRAV25, TRAJ5)
CRNLLLSRGGGRRALTF

SEQ ID NO: 371556 - protein, 15 aa, Homo sapiens
  CDR3 for beta chain variable domain of TCR clone 185778 (TRBV19, TRBJ2-4)
CASRGPRRGENIQYF

SEQ ID NO: 371557 - protein, 17 aa, Homo sapiens
  CDR3 for alpha chain variable domain of TCR clone 185779 (TRAV3, TRAJ6)
CAVRDGPRAGGSYITTF

SEQ ID NO: 371558 - protein, 13 aa, Homo sapiens
  CDR3 for beta chain variable domain of TCR clone 185779 (TRBV27, TRBJ2-1)
CASRTLGVGEQFF

SEQ ID NO: 371559 - protein, 13 aa, Homo sapiens
  CDR3 for alpha chain variable domain of TCR clone 185780 (TRAV29/DV5, TRAJ31)
CAAIRNNNARLMF

SEQ ID NO: 371560 - protein, 11 aa, Homo sapiens
  CDR3 for beta chain variable domain of TCR clone 185780 (TRBV11-2, TRBJ2-2)
CASSLPGELFF

SEQ ID NO: 371561 - protein, 14 aa, Homo sapiens
  CDR3 for alpha chain variable domain of TCR clone 185781 (TRAV2, TRAJ37)
CAVDFTSNTGKLIF

SEQ ID NO: 371562 - protein, 14 aa, Homo sapiens
  CDR3 for beta chain variable domain of TCR clone 185781 (TRBV28, TRBJ1-1)
CASSPPHWGTEAFF

SEQ ID NO: 371563 - protein, 12 aa, Homo sapiens
  CDR3 for alpha chain variable domain of TCR clone 185782 (TRAV13-1, TRAJ5)
CAAKAGRRALTF

SEQ ID NO: 371564 - protein, 13 aa, Homo sapiens
  CDR3 for beta chain variable domain of TCR clone 185782 (TRBV7-9, TRBJ1-2)
CASSLKQNYGYTL

SEQ ID NO: 371565 - protein, 14 aa, Homo sapiens
  CDR3 for alpha chain variable domain of TCR clone 185783 (TRAV38-1, TRAJ29)
CAFITPSGNTPLFF

SEQ ID NO: 371566 - protein, 15 aa, Homo sapiens
  CDR3 for beta chain variable domain of TCR clone 185783 (TRBV5-1, TRBJ2-1)
CASSPPRAPYNEQFF

SEQ ID NO: 371567 - protein, 13 aa, Homo sapiens
  CDR3 for alpha chain variable domain of TCR clone 185784 (TRAV13-2, TRAJ15)
CAERPHAGTALIF

SEQ ID NO: 371568 - protein, 15 aa, Homo sapiens
  CDR3 for beta chain variable domain of TCR clone 185784 (TRBV11-2, TRBJ2-7)
CASRFPGTGGYEQYF

SEQ ID NO: 371569 - protein, 11 aa, Homo sapiens
  CDR3 for alpha chain variable domain of TCR clone 185785 (TRAV12-3, TRAJ27)
CSMANAGKSTF

SEQ ID NO: 371570 - protein, 13 aa, Homo sapiens
  CDR3 for beta chain variable domain of TCR clone 185785 (TRBV5-5, TRBJ1-2)
CASSFWRGEDYTF

SEQ ID NO: 371571 - protein, 11 aa, Homo sapiens
  CDR3 for alpha chain variable domain of TCR clone 185786 (TRAV6, TRAJ39)
CAPDAGNMLTF

SEQ ID NO: 371572 - protein, 14 aa, Homo sapiens
  CDR3 for beta chain variable domain of TCR clone 185786 (TRBV28, TRBJ1-5)
CAGSRTGLKQPQHF

SEQ ID NO: 371573 - protein, 15 aa, Homo sapiens
  CDR3 for alpha chain variable domain of TCR clone 185787 (TRAV21, TRAJ38)
CAVRQDAGNNRKLIW

SEQ ID NO: 371574 - protein, 15 aa, Homo sapiens
  CDR3 for beta chain variable domain of TCR clone 185787 (TRBV4-1, TRBJ1-1)
CASSQEGGHYTEAFF

SEQ ID NO: 371575 - protein, 14 aa, Homo sapiens
  CDR3 for alpha chain variable domain of TCR clone 185788 (TRAV12-1, TRAJ43)
CVVNGRSNNNDMRF

SEQ ID NO: 371576 - protein, 13 aa, Homo sapiens
  CDR3 for beta chain variable domain of TCR clone 185788 (TRBV5-4, TRBJ2-5)
CASSRQEGETQYF

SEQ ID NO: 371577 - protein, 17 aa, Homo sapiens
  CDR3 for alpha chain variable domain of TCR clone 185789 (TRAV3, TRAJ6)
CAVRDGPRAGGSYIPNF

SEQ ID NO: 371578 - protein, 15 aa, Homo sapiens
  CDR3 for beta chain variable domain of TCR clone 185789 (TRBV7-9, TRBJ2-2)
CASRPEGTSTGELFF

SEQ ID NO: 371579 - protein, 13 aa, Homo sapiens
  CDR3 for alpha chain variable domain of TCR clone 185790 (TRAV12-2, TRAJ15)
CAVFNQSGTALIF

SEQ ID NO: 371580 - protein, 14 aa, Homo sapiens
  CDR3 for beta chain variable domain of TCR clone 185790 (TRBV7-8, TRBJ1-5)
CQQPGGGADQPQHF

SEQ ID NO: 371581 - protein, 14 aa, Homo sapiens
  CDR3 for alpha chain variable domain of TCR clone 185791 (TRAV13-1, TRAJ48)
CAASRSFGNEKLTF

SEQ ID NO: 371582 - protein, 13 aa, Homo sapiens
  CDR3 for beta chain variable domain of TCR clone 185791 (TRBV27, TRBJ2-7)
CASSLTTGYEQYF

SEQ ID NO: 371583 - protein, 13 aa, Homo sapiens
  CDR3 for alpha chain variable domain of TCR clone 185792 (TRAV8-1, TRAJ32)
CAADGCATNKLIF

SEQ ID NO: 371584 - protein, 18 aa, Homo sapiens
  CDR3 for beta chain variable domain of TCR clone 185792 (TRBV18, TRBJ2-3)
CASSYTSGAAGGTDTQYF

SEQ ID NO: 371585 - protein, 14 aa, Homo sapiens
  CDR3 for alpha chain variable domain of TCR clone 185793 (TRAV13-2, TRAJ4)
CAEKGPKGYNKLIF

SEQ ID NO: 371586 - protein, 13 aa, Homo sapiens
  CDR3 for beta chain variable domain of TCR clone 185793 (TRBV18, TRBJ2-5)
CASSPPAKETQYF

SEQ ID NO: 371587 - protein, 14 aa, Homo sapiens
  CDR3 for alpha chain variable domain of TCR clone 185794 (TRAV13-1, TRAJ35)
CAASKGGFGNVLHC

SEQ ID NO: 371588 - protein, 14 aa, Homo sapiens
  CDR3 for beta chain variable domain of TCR clone 185794 (TRBV20-1, TRBJ2-2)
CSAPDTANTGELCC

SEQ ID NO: 371589 - protein, 12 aa, Homo sapiens
  CDR3 for alpha chain variable domain of TCR clone 185795 (TRAV8-6, TRAJ15)
CAASSRGAALIF

SEQ ID NO: 371590 - protein, 19 aa, Homo sapiens
  CDR3 for beta chain variable domain of TCR clone 185795 (TRBV25-1, TRBJ2-2)
CAILVYRVDRGRKTGELFF

SEQ ID NO: 371591 - protein, 12 aa, Homo sapiens
  CDR3 for alpha chain variable domain of TCR clone 185796 (TRAV13-1, TRAJ21)
CAAKEGFNKFYF

SEQ ID NO: 371592 - protein, 16 aa, Homo sapiens
  CDR3 for beta chain variable domain of TCR clone 185796 (TRBV2, TRBJ2-7)
YASSEPWTGPSYEQYF

SEQ ID NO: 371593 - protein, 10 aa, Homo sapiens
  CDR3 for alpha chain variable domain of TCR clone 185797 (TRAV12-3, TRAJ49)
CAMNEDQCYF

SEQ ID NO: 371594 - protein, 13 aa, Homo sapiens
  CDR3 for beta chain variable domain of TCR clone 185797 (TRBV12-4, TRBJ1-1)
CASSPGTGFEAFF

SEQ ID NO: 371595 - protein, 18 aa, Homo sapiens
  CDR3 for alpha chain variable domain of TCR clone 185798 (TRAV29/DV5, TRAJ52)
QCTSMQQADGTSYGKLTF

SEQ ID NO: 371596 - protein, 13 aa, Homo sapiens
  CDR3 for beta chain variable domain of TCR clone 185798 (TRBV7-2, TRBJ1-1)
CASNLKGAKVAFF

SEQ ID NO: 371597 - protein, 14 aa, Homo sapiens
  CDR3 for alpha chain variable domain of TCR clone 185799 (TRAV12-1, TRAJ43)
CVVNGRRNNNDMRF

SEQ ID NO: 371598 - protein, 13 aa, Homo sapiens
  CDR3 for beta chain variable domain of TCR clone 185799 (TRBV10-3, TRBJ2-7)
CASKLAVNYEQYF

SEQ ID NO: 371599 - protein, 18 aa, Homo sapiens
  CDR3 for alpha chain variable domain of TCR clone 185800 (TRAV17, TRAJ45)
CATSLDVYSGGGADGLTF

SEQ ID NO: 371600 - protein, 15 aa, Homo sapiens
  CDR3 for beta chain variable domain of TCR clone 185800 (TRBV11-2, TRBJ2-1)
CASSKNRGLIYEQFF

SEQ ID NO: 371601 - protein, 16 aa, Homo sapiens
  CDR3 for alpha chain variable domain of TCR clone 185801 (TRAV8-1, TRAJ33)
CAVNARGGDSNYQLIW

SEQ ID NO: 371602 - protein, 14 aa, Homo sapiens
  CDR3 for beta chain variable domain of TCR clone 185801 (TRBV7-3, TRBJ2-1)
CASRAGPTENEQFF

SEQ ID NO: 371603 - protein, 13 aa, Homo sapiens
  CDR3 for alpha chain variable domain of TCR clone 185802 (TRAV27, TRAJ56)
CAGKPVANSKLTF

SEQ ID NO: 371604 - protein, 18 aa, Homo sapiens
  CDR3 for beta chain variable domain of TCR clone 185802 (TRBV11-2, TRBJ2-3)
CASSLGGASRGAPNTQYF

SEQ ID NO: 371605 - protein, 11 aa, Homo sapiens
  CDR3 for alpha chain variable domain of TCR clone 185803 (TRAV2, TRAJ33)
CAVDSNYQLIW

SEQ ID NO: 371606 - protein, 14 aa, Homo sapiens
  CDR3 for beta chain variable domain of TCR clone 185803 (TRBV12-4, TRBJ1-3)
CASSLSGGVNTIYF

SEQ ID NO: 371607 - protein, 14 aa, Homo sapiens
  CDR3 for alpha chain variable domain of TCR clone 185804 (TRAV1-2, TRAJ16)
CAVNRFSDVQKLLF

SEQ ID NO: 371608 - protein, 16 aa, Homo sapiens
  CDR3 for beta chain variable domain of TCR clone 185804 (TRBV6-6, TRBJ2-1)
CASSYSFSGPYNEQFF

SEQ ID NO: 371609 - protein, 10 aa, Homo sapiens
  CDR3 for alpha chain variable domain of TCR clone 185805 (TRAV1-2, TRAJ20)
CAVTDYKLSF

SEQ ID NO: 371610 - protein, 17 aa, Homo sapiens
  CDR3 for beta chain variable domain of TCR clone 185805 (TRBV20-1, TRBJ2-1)
CSASSSGLAGSYNEQFF

SEQ ID NO: 371611 - protein, 14 aa, Homo sapiens
  CDR3 for alpha chain variable domain of TCR clone 185806 (TRAV38-1, TRAJ40)
CALRPTSGTYKYIF

SEQ ID NO: 371612 - protein, 13 aa, Homo sapiens
  CDR3 for beta chain variable domain of TCR clone 185806 (TRBV19, TRBJ2-1)
CQSDFRFEGEQFF

SEQ ID NO: 371613 - protein, 14 aa, Homo sapiens
  CDR3 for alpha chain variable domain of TCR clone 185807 (TRAV3, TRAJ34)
CAERAPGNTDKLIF

SEQ ID NO: 371614 - protein, 17 aa, Homo sapiens
  CDR3 for beta chain variable domain of TCR clone 185807 (TRBV20-1, TRBJ2-7)
CSAAPGLARGISYEQYF

SEQ ID NO: 371615 - protein, 16 aa, Homo sapiens
  CDR3 for alpha chain variable domain of TCR clone 185808 (TRAV8-3, TRAJ44)
CAVGTLMTGTARKLTF

SEQ ID NO: 371616 - protein, 15 aa, Homo sapiens
  CDR3 for beta chain variable domain of TCR clone 185808 (TRBV10-2, TRBJ2-6)
CASSEQGTGANVLTF

SEQ ID NO: 371617 - protein, 14 aa, Homo sapiens
  CDR3 for alpha chain variable domain of TCR clone 185809 (TRAV13-1, TRAJ44)
CAAKATGTDSKLTF

SEQ ID NO: 371618 - protein, 16 aa, Homo sapiens
  CDR3 for beta chain variable domain of TCR clone 185809 (TRBV15, TRBJ1-2)
CATSRGPRTGGGGYTF

SEQ ID NO: 371619 - protein, 14 aa, Homo sapiens
  CDR3 for alpha chain variable domain of TCR clone 185810 (TRAV12-1, TRAJ43)
CVVNGRSNNNGMRF

SEQ ID NO: 371620 - protein, 13 aa, Homo sapiens
  CDR3 for beta chain variable domain of TCR clone 185810 (TRBV10-3, TRBJ2-7)
CASKLAVNYEQYF

SEQ ID NO: 371621 - protein, 13 aa, Homo sapiens
  CDR3 for alpha chain variable domain of TCR clone 185811 (TRAV3, TRAJ20)
CAVRDTPRYKLSF

SEQ ID NO: 371622 - protein, 16 aa, Homo sapiens
  CDR3 for beta chain variable domain of TCR clone 185811 (TRBV20-1, TRBJ2-7)
GSASAPGLALSYEQYF

SEQ ID NO: 371623 - protein, 14 aa, Homo sapiens
  CDR3 for alpha chain variable domain of TCR clone 185812 (TRAV34, TRAJ44)
CGADGTGAASKLTF

SEQ ID NO: 371624 - protein, 15 aa, Homo sapiens
  CDR3 for beta chain variable domain of TCR clone 185812 (TRBV5-1, TRBJ2-1)
CASSPPRAPYNEQFF

SEQ ID NO: 371625 - protein, 15 aa, Homo sapiens
  CDR3 for alpha chain variable domain of TCR clone 185813 (TRAV3, TRAJ22)
CAVRDRGGYARQLTF

SEQ ID NO: 371626 - protein, 15 aa, Homo sapiens
  CDR3 for beta chain variable domain of TCR clone 185813 (TRBV19, TRBJ2-5)
CASSIVRASQETQYF

SEQ ID NO: 371627 - protein, 12 aa, Homo sapiens
  CDR3 for alpha chain variable domain of TCR clone 185814 (TRAV12-3, TRAJ17)
CAMTLTGNKLTL

SEQ ID NO: 371628 - protein, 15 aa, Homo sapiens
  CDR3 for beta chain variable domain of TCR clone 185814 (TRBV9, TRBJ1-6)
CASSVAGTGDSPLHF

SEQ ID NO: 371629 - protein, 15 aa, Homo sapiens
  CDR3 for alpha chain variable domain of TCR clone 185815 (TRAV8-2, TRAJ40)
CVVLGTTSGTYKYIF

SEQ ID NO: 371630 - protein, 16 aa, Homo sapiens
  CDR3 for beta chain variable domain of TCR clone 185815 (TRBV7-8, TRBJ2-1)
CASSLEGYRSYNEQFF

SEQ ID NO: 371631 - protein, 13 aa, Homo sapiens
  CDR3 for alpha chain variable domain of TCR clone 185816 (TRAV29/DV5, TRAJ29)
CAASAAGNKPLVL

SEQ ID NO: 371632 - protein, 14 aa, Homo sapiens
  CDR3 for beta chain variable domain of TCR clone 185816 (TRBV19, TRBJ2-3)
CASSAPRGTDTQYF

SEQ ID NO: 371633 - protein, 14 aa, Homo sapiens
  CDR3 for alpha chain variable domain of TCR clone 185817 (TRAV1-2, TRAJ33)
CAVIAPDSNYQLIW

SEQ ID NO: 371634 - protein, 15 aa, Homo sapiens
  CDR3 for beta chain variable domain of TCR clone 185817 (TRBV10-3, TRBJ2-3)
CAISLTSGGTDTQYF

SEQ ID NO: 371635 - protein, 14 aa, Homo sapiens
  CDR3 for alpha chain variable domain of TCR clone 185818 (TRAV12-3, TRAJ10)
SHLPLTGGGNKLTF

SEQ ID NO: 371636 - protein, 14 aa, Homo sapiens
  CDR3 for beta chain variable domain of TCR clone 185818 (TRBV4-1, TRBJ2-2)
CASSHAVNTGELFF

SEQ ID NO: 371637 - protein, 16 aa, Homo sapiens
  CDR3 for alpha chain variable domain of TCR clone 185819 (TRAV12-2, TRAJ28)
CAVITDSGPGSYQLTF

SEQ ID NO: 371638 - protein, 14 aa, Homo sapiens
  CDR3 for beta chain variable domain of TCR clone 185819 (TRBV25-1, TRBJ1-1)
CASTHLGGNTEAFF

SEQ ID NO: 371639 - protein, 14 aa, Homo sapiens
  CDR3 for alpha chain variable domain of TCR clone 185820 (TRAV29/DV5, TRAJ36)
CAARRNTGANNLFF

SEQ ID NO: 371640 - protein, 12 aa, Homo sapiens
  CDR3 for beta chain variable domain of TCR clone 185820 (TRBV12-5, TRBJ2-5)
CASGQGVETQYF

SEQ ID NO: 371641 - protein, 11 aa, Homo sapiens
  CDR3 for alpha chain variable domain of TCR clone 185821 (TRAV12-2, TRAJ31)
CAVTRWARLMF

SEQ ID NO: 371642 - protein, 15 aa, Homo sapiens
  CDR3 for beta chain variable domain of TCR clone 185821 (TRBV19, TRBJ2-7)
CASIIGGGLVNEQYF

SEQ ID NO: 371643 - protein, 12 aa, Homo sapiens
  CDR3 for alpha chain variable domain of TCR clone 185822 (TRAV35, TRAJ39)
LAPNNAGNMLTS

SEQ ID NO: 371644 - protein, 13 aa, Homo sapiens
  CDR3 for beta chain variable domain of TCR clone 185822 (TRBV19, TRBJ1-3)
CASRLSLGNTIYF

SEQ ID NO: 371645 - protein, 13 aa, Homo sapiens
  CDR3 for alpha chain variable domain of TCR clone 185823 (TRAV26-2, TRAJ43)
CILRAVNTNDMRF

SEQ ID NO: 371646 - protein, 15 aa, Homo sapiens
  CDR3 for beta chain variable domain of TCR clone 185823 (TRBV7-2, TRBJ2-1)
CASTHGTGIYNEQFF

SEQ ID NO: 371647 - protein, 19 aa, Homo sapiens
  CDR3 for alpha chain variable domain of TCR clone 185824 (TRAV12-2, TRAJ13)
CAVKKTGGYQKVTLELEQS

SEQ ID NO: 371648 - protein, 13 aa, Homo sapiens
  CDR3 for beta chain variable domain of TCR clone 185824 (TRBV10-3, TRBJ2-7)
CASKLAVNYEQYF

SEQ ID NO: 371649 - protein, 11 aa, Homo sapiens
  CDR3 for alpha chain variable domain of TCR clone 185825 (TRAV12-2, TRAJ10)
GVTGGGNKLTF

SEQ ID NO: 371650 - protein, 16 aa, Homo sapiens
  CDR3 for beta chain variable domain of TCR clone 185825 (TRBV6-4, TRBJ1-2)
CASSEAVGGPNYGYTF

SEQ ID NO: 371651 - protein, 13 aa, Homo sapiens
  CDR3 for alpha chain variable domain of TCR clone 185826 (TRAV12-3, TRAJ13)
CAMSSGGNQEVTF

SEQ ID NO: 371652 - protein, 13 aa, Homo sapiens
  CDR3 for beta chain variable domain of TCR clone 185826 (TRBV20-1, TRBJ1-1)
CSAPPGGHTEAFF

SEQ ID NO: 371653 - protein, 14 aa, Homo sapiens
  CDR3 for alpha chain variable domain of TCR clone 185827 (TRAV12-2, TRAJ40)
CAVKIPSGTYKYIF

SEQ ID NO: 371654 - protein, 17 aa, Homo sapiens
  CDR3 for beta chain variable domain of TCR clone 185827 (TRBV25-1, TRBJ2-5)
CASSRRGGRGGQETQYF

SEQ ID NO: 371655 - protein, 11 aa, Homo sapiens
  CDR3 for alpha chain variable domain of TCR clone 185828 (TRAV8-3, TRAJ15)
CAVGPGTALIF

SEQ ID NO: 371656 - protein, 13 aa, Homo sapiens
  CDR3 for beta chain variable domain of TCR clone 185828 (TRBV7-9, TRBJ2-7)
CASSFAGAYEQYF

SEQ ID NO: 371657 - protein, 12 aa, Homo sapiens
  CDR3 for alpha chain variable domain of TCR clone 185829 (TRAV17, TRAJ49)
CATVTTGNQFYF

SEQ ID NO: 371658 - protein, 14 aa, Homo sapiens
  CDR3 for beta chain variable domain of TCR clone 185829 (TRBV7-3, TRBJ2-1)
CASSLAGGTNEQFF

SEQ ID NO: 371659 - protein, 13 aa, Homo sapiens
  CDR3 for alpha chain variable domain of TCR clone 185830 (TRAV13-2, TRAJ15)
CAEKNQAGTALIF

SEQ ID NO: 371660 - protein, 15 aa, Homo sapiens
  CDR3 for beta chain variable domain of TCR clone 185830 (TRBV11-3, TRBJ2-3)
CASLKDGREGDTQYF

SEQ ID NO: 371661 - protein, 13 aa, Homo sapiens
  CDR3 for alpha chain variable domain of TCR clone 185831 (TRAV8-3, TRAJ5)
CAVGSRGRRALTF

SEQ ID NO: 371662 - protein, 16 aa, Homo sapiens
  CDR3 for beta chain variable domain of TCR clone 185831 (TRBV11-3, TRBJ2-3)
CASSPGGLLGTDTQYF

SEQ ID NO: 371663 - protein, 16 aa, Homo sapiens
  CDR3 for alpha chain variable domain of TCR clone 185832 (TRAV17, TRAJ35)
CATAEGGIGFGKVLHC

SEQ ID NO: 371664 - protein, 19 aa, Homo sapiens
  CDR3 for beta chain variable domain of TCR clone 185832 (TRBV19, TRBJ2-5)
CASSIGQVTDFFLRETQYF

SEQ ID NO: 371665 - protein, 17 aa, Homo sapiens
  CDR3 for alpha chain variable domain of TCR clone 185833 (TRAV13-1, TRAJ28)
CAASPPYSGAGSYQLTF

SEQ ID NO: 371666 - protein, 13 aa, Homo sapiens
  CDR3 for beta chain variable domain of TCR clone 185833 (TRBV10-3, TRBJ2-7)
CASKLAVNYEQYF

SEQ ID NO: 371667 - protein, 16 aa, Homo sapiens
  CDR3 for alpha chain variable domain of TCR clone 185834 (TRAV23/DV6, TRAJ9)
CAASIGGNTGGFKTIF

SEQ ID NO: 371668 - protein, 13 aa, Homo sapiens
  CDR3 for beta chain variable domain of TCR clone 185834 (TRBV7-2, TRBJ2-7)
CASSSPSGSEQYF

SEQ ID NO: 371669 - protein, 14 aa, Homo sapiens
  CDR3 for alpha chain variable domain of TCR clone 185835 (TRAV27, TRAJ37)
CAGERSSNTGKLIF

SEQ ID NO: 371670 - protein, 14 aa, Homo sapiens
  CDR3 for beta chain variable domain of TCR clone 185835 (TRBV11-2, TRBJ1-5)
CASSLDRGRQPQHF

SEQ ID NO: 371671 - protein, 16 aa, Homo sapiens
  CDR3 for alpha chain variable domain of TCR clone 185836 (TRAV8-3, TRAJ28)
CAVGATLGLGVTNALS

SEQ ID NO: 371672 - protein, 14 aa, Homo sapiens
  CDR3 for beta chain variable domain of TCR clone 185836 (TRBV7-2, TRBJ2-1)
CASSLGVGYNEQFF

SEQ ID NO: 371673 - protein, 14 aa, Homo sapiens
  CDR3 for alpha chain variable domain of TCR clone 185837 (TRAV1-2, TRAJ8)
CAVREDTGFQKLVF

SEQ ID NO: 371674 - protein, 16 aa, Homo sapiens
  CDR3 for beta chain variable domain of TCR clone 185837 (TRBV7-3, TRBJ2-2)
CASSLERGTLSGELFF

SEQ ID NO: 371675 - protein, 16 aa, Homo sapiens
  CDR3 for alpha chain variable domain of TCR clone 185838 (TRAV14/DV4, TRAJ54)
CAMREGLTWGAQKLVF

SEQ ID NO: 371676 - protein, 19 aa, Homo sapiens
  CDR3 for beta chain variable domain of TCR clone 185838 (TRBV7-9, TRBJ2-6)
CASSLESATVLPGANVLTF

SEQ ID NO: 371677 - protein, 14 aa, Homo sapiens
  CDR3 for alpha chain variable domain of TCR clone 185839 (TRAV35, TRAJ40)
CWAARYLGTYKYIF

SEQ ID NO: 371678 - protein, 14 aa, Homo sapiens
  CDR3 for beta chain variable domain of TCR clone 185839 (TRBV7-3, TRBJ2-1)
CASSVAGGTNEQFF

SEQ ID NO: 371679 - protein, 15 aa, Homo sapiens
  CDR3 for alpha chain variable domain of TCR clone 185840 (TRAV21, TRAJ40)
CAVRPQTSGTHKYIF

SEQ ID NO: 371680 - protein, 13 aa, Homo sapiens
  CDR3 for beta chain variable domain of TCR clone 185840 (TRBV7-2, TRBJ2-2)
CASSSVRAGELFF

SEQ ID NO: 371681 - protein, 12 aa, Homo sapiens
  CDR3 for alpha chain variable domain of TCR clone 185841 (TRAV16, TRAJ10)
CSRPGGGNKLTF

SEQ ID NO: 371682 - protein, 19 aa, Homo sapiens
  CDR3 for beta chain variable domain of TCR clone 185841 (TRBV25-1, TRBJ2-2)
CAILVYRVDRGRKTGELFF

SEQ ID NO: 371683 - protein, 13 aa, Homo sapiens
  CDR3 for alpha chain variable domain of TCR clone 185842 (TRAV17, TRAJ4)
CATKSGVYNKLIF

SEQ ID NO: 371684 - protein, 14 aa, Homo sapiens
  CDR3 for beta chain variable domain of TCR clone 185842 (TRBV20-1, TRBJ1-5)
CSARDDRGNQPQHF

SEQ ID NO: 371685 - protein, 13 aa, Homo sapiens
  CDR3 for alpha chain variable domain of TCR clone 185843 (TRAV2, TRAJ40)
CAVVTSGTYKYIF

SEQ ID NO: 371686 - protein, 14 aa, Homo sapiens
  CDR3 for beta chain variable domain of TCR clone 185843 (TRBV19, TRBJ2-1)
CASTTFVASGEQFF

SEQ ID NO: 371687 - protein, 13 aa, Homo sapiens
  CDR3 for alpha chain variable domain of TCR clone 185844 (TRAV17, TRAJ9)
CATDYTGGSKTIF

SEQ ID NO: 371688 - protein, 16 aa, Homo sapiens
  CDR3 for beta chain variable domain of TCR clone 185844 (TRBV7-7, TRBJ2-1)
CASSLASGTSYNVQFF

SEQ ID NO: 371689 - protein, 13 aa, Homo sapiens
  CDR3 for alpha chain variable domain of TCR clone 185845 (TRAV13-1, TRAJ6)
RAASRGGSYIPTF

SEQ ID NO: 371690 - protein, 15 aa, Homo sapiens
  CDR3 for beta chain variable domain of TCR clone 185845 (TRBV25-1, TRBJ2-5)
CASSDTGTHQETQYF

SEQ ID NO: 371691 - protein, 12 aa, Homo sapiens
  CDR3 for alpha chain variable domain of TCR clone 185846 (TRAV8-4, TRAJ37)
CAKSSNTGKLIF

SEQ ID NO: 371692 - protein, 15 aa, Homo sapiens
  CDR3 for beta chain variable domain of TCR clone 185846 (TRBV7-9, TRBJ2-7)
CASSSSGLAVYEQFF

SEQ ID NO: 371693 - protein, 12 aa, Homo sapiens
  CDR3 for alpha chain variable domain of TCR clone 185847 (TRAV12-2, TRAJ10)
WGVTGGGNKLTF

SEQ ID NO: 371694 - protein, 17 aa, Homo sapiens
  CDR3 for beta chain variable domain of TCR clone 185847 (TRBV20-1, TRBJ2-2)
CSASGSGQGGLTGELFF

SEQ ID NO: 371695 - protein, 15 aa, Homo sapiens
  CDR3 for alpha chain variable domain of TCR clone 185848 (TRAV3, TRAJ32)
CAVSSYGGATNKLIF

SEQ ID NO: 371696 - protein, 13 aa, Homo sapiens
  CDR3 for beta chain variable domain of TCR clone 185848 (TRBV20-1, TRBJ2-5)
CSARPSTNYEQYF

SEQ ID NO: 371697 - protein, 15 aa, Homo sapiens
  CDR3 for alpha chain variable domain of TCR clone 185849 (TRAV27, TRAJ38)
CAGRFNAGNNRKLIW

SEQ ID NO: 371698 - protein, 16 aa, Homo sapiens
  CDR3 for beta chain variable domain of TCR clone 185849 (TRBV5-1, TRBJ2-3)
CASSLGLAVYTDTQYF

SEQ ID NO: 371699 - protein, 11 aa, Homo sapiens
  CDR3 for alpha chain variable domain of TCR clone 185850 (TRAV2, TRAJ33)
CAVDSNYQLIW

SEQ ID NO: 371700 - protein, 17 aa, Homo sapiens
  CDR3 for beta chain variable domain of TCR clone 185850 (TRBV20-1, TRBJ2-3)
CSARDGWNTKERDTQYF

SEQ ID NO: 371701 - protein, 16 aa, Homo sapiens
  CDR3 for alpha chain variable domain of TCR clone 185851 (TRAV3, TRAJ10)
CAVRDMRAGGGNKLTF

SEQ ID NO: 371702 - protein, 20 aa, Homo sapiens
  CDR3 for beta chain variable domain of TCR clone 185851 (TRBV19, TRBJ2-1)
CASSISRTVTSTRLNNEQFF

SEQ ID NO: 371703 - protein, 11 aa, Homo sapiens
  CDR3 for alpha chain variable domain of TCR clone 185852 (TRAV1-1, TRAJ5)
CAVRVRRALTF

SEQ ID NO: 371704 - protein, 14 aa, Homo sapiens
  CDR3 for beta chain variable domain of TCR clone 185852 (TRBV7-9, TRBJ1-2)
CASKRGTLTYGYTF

SEQ ID NO: 371705 - protein, 15 aa, Homo sapiens
  CDR3 for alpha chain variable domain of TCR clone 185853 (TRAV4, TRAJ26)
CLVGDMNNYGQNFDF

SEQ ID NO: 371706 - protein, 16 aa, Homo sapiens
  CDR3 for beta chain variable domain of TCR clone 185853 (TRBV28, TRBJ1-4)
CASSSRTGAANEKLFF

SEQ ID NO: 371707 - protein, 14 aa, Homo sapiens
  CDR3 for alpha chain variable domain of TCR clone 185854 (TRAV26-1, TRAJ45)
CIEVTGGDADGLTF

SEQ ID NO: 371708 - protein, 13 aa, Homo sapiens
  CDR3 for beta chain variable domain of TCR clone 185854 (TRBV7-6, TRBJ1-2)
CASSLVADYGYTF

SEQ ID NO: 371709 - protein, 15 aa, Homo sapiens
  CDR3 for alpha chain variable domain of TCR clone 185855 (TRAV8-1, TRAJ42)
CAVRSYGGSQGNRIF

SEQ ID NO: 371710 - protein, 15 aa, Homo sapiens
  CDR3 for beta chain variable domain of TCR clone 185855 (TRBV25-1, TRBJ2-1)
CASSNGGGSSNEQFF

SEQ ID NO: 371711 - protein, 17 aa, Homo sapiens
  CDR3 for alpha chain variable domain of TCR clone 185856 (TRAV13-1, TRAJ31)
CAPRDRLMFGDGTQLVV

SEQ ID NO: 371712 - protein, 12 aa, Homo sapiens
  CDR3 for beta chain variable domain of TCR clone 185856 (TRBV7-9, TRBJ2-7)
CASSLEGYKQYF

SEQ ID NO: 371713 - protein, 11 aa, Homo sapiens
  CDR3 for alpha chain variable domain of TCR clone 185857 (TRAV2, TRAJ33)
CAVDSNYQLIW

SEQ ID NO: 371714 - protein, 15 aa, Homo sapiens
  CDR3 for beta chain variable domain of TCR clone 185857 (TRBV19, TRBJ1-1)
CASTAGQIQNTEAFF

SEQ ID NO: 371715 - protein, 13 aa, Homo sapiens
  CDR3 for alpha chain variable domain of TCR clone 185858 (TRAV21, TRAJ27)
CAALNTNASKSTF

SEQ ID NO: 371716 - protein, 14 aa, Homo sapiens
  CDR3 for beta chain variable domain of TCR clone 185858 (TRBV27, TRBJ1-1)
CASSLLSGLSEAFF

SEQ ID NO: 371717 - protein, 15 aa, Homo sapiens
  CDR3 for alpha chain variable domain of TCR clone 185859 (TRAV2, TRAJ15)
CAVEAREQAGTALIF

SEQ ID NO: 371718 - protein, 13 aa, Homo sapiens
  CDR3 for beta chain variable domain of TCR clone 185859 (TRBV10-2, TRBJ2-7)
CASGTSGGYEQYF

SEQ ID NO: 371719 - protein, 15 aa, Homo sapiens
  CDR3 for alpha chain variable domain of TCR clone 185860 (TRAV21, TRAJ24)
CAARSSTDGWGKLQF

SEQ ID NO: 371720 - protein, 14 aa, Homo sapiens
  CDR3 for beta chain variable domain of TCR clone 185860 (TRBV7-2, TRBJ2-7)
CASSPKTSFYEQYF

SEQ ID NO: 371721 - protein, 14 aa, Homo sapiens
  CDR3 for alpha chain variable domain of TCR clone 185861 (TRAV12-1, TRAJ17)
CVVNYKAAGNKLTF

SEQ ID NO: 371722 - protein, 15 aa, Homo sapiens
  CDR3 for beta chain variable domain of TCR clone 185861 (TRBV7-2, TRBJ2-1)
CATTHGAGIYNEQFF

SEQ ID NO: 371723 - protein, 13 aa, Homo sapiens
  CDR3 for alpha chain variable domain of TCR clone 185862 (TRAV30, TRAJ34)
CGAVGYNTDKHIF

SEQ ID NO: 371724 - protein, 16 aa, Homo sapiens
  CDR3 for beta chain variable domain of TCR clone 185862 (TRBV7-9, TRBJ1-2)
CASSLGFSSGEDGYTF

SEQ ID NO: 371725 - protein, 18 aa, Homo sapiens
  CDR3 for alpha chain variable domain of TCR clone 185863 (TRAV21, TRAJ52)
CSVRPSPAGGTSYGKLTF

SEQ ID NO: 371726 - protein, 16 aa, Homo sapiens
  CDR3 for beta chain variable domain of TCR clone 185863 (TRBV12-5, TRBJ2-5)
CASGPRTSGNQETQYF

SEQ ID NO: 371727 - protein, 14 aa, Homo sapiens
  CDR3 for alpha chain variable domain of TCR clone 185864 (TRAV13-1, TRAJ3)
CAAEGYSSASKIIF

SEQ ID NO: 371728 - protein, 14 aa, Homo sapiens
  CDR3 for beta chain variable domain of TCR clone 185864 (TRBV19, TRBJ2-5)
CDSSSSGIQETQYF

SEQ ID NO: 371729 - protein, 14 aa, Homo sapiens
  CDR3 for alpha chain variable domain of TCR clone 185865 (TRAV12-3, TRAJ10)
SHLPLTGGGNKLTF

SEQ ID NO: 371730 - protein, 12 aa, Homo sapiens
  CDR3 for beta chain variable domain of TCR clone 185865 (TRBV27, TRBJ2-7)
CASSGGFYEQYF

SEQ ID NO: 371731 - protein, 11 aa, Homo sapiens
  CDR3 for alpha chain variable domain of TCR clone 185866 (TRAV2, TRAJ38)
CAAGDNRKLIW

SEQ ID NO: 371732 - protein, 14 aa, Homo sapiens
  CDR3 for beta chain variable domain of TCR clone 185866 (TRBV19, TRBJ2-3)
CASSAPRGTDTQYF

SEQ ID NO: 371733 - protein, 14 aa, Homo sapiens
  CDR3 for alpha chain variable domain of TCR clone 185867 (TRAV29/DV5, TRAJ20)
CAASAPIEAYKLSF

SEQ ID NO: 371734 - protein, 13 aa, Homo sapiens
  CDR3 for beta chain variable domain of TCR clone 185867 (TRBV24-1, TRBJ1-4)
CATNNGRSEKLFF

SEQ ID NO: 371735 - protein, 13 aa, Homo sapiens
  CDR3 for alpha chain variable domain of TCR clone 185868 (TRAV12-1, TRAJ40)
CVVPTSGTYKYIF

SEQ ID NO: 371736 - protein, 16 aa, Homo sapiens
  CDR3 for beta chain variable domain of TCR clone 185868 (TRBV5-4, TRBJ2-5)
CASSLTSGSAGETQYF

SEQ ID NO: 371737 - protein, 13 aa, Homo sapiens
  CDR3 for alpha chain variable domain of TCR clone 185869 (TRAV2, TRAJ47)
CAVVREYGNKLVF

SEQ ID NO: 371738 - protein, 17 aa, Homo sapiens
  CDR3 for beta chain variable domain of TCR clone 185869 (TRBV15, TRBJ1-5)
CATSRVKGIYSNQPQHF

SEQ ID NO: 371739 - protein, 12 aa, Homo sapiens
  CDR3 for alpha chain variable domain of TCR clone 185870 (TRAV3, TRAJ26)
CAVRDYGQNFVF

SEQ ID NO: 371740 - protein, 15 aa, Homo sapiens
  CDR3 for beta chain variable domain of TCR clone 185870 (TRBV11-2, TRBJ1-3)
CASSIWGSYGNTIYF

SEQ ID NO: 371741 - protein, 14 aa, Homo sapiens
  CDR3 for alpha chain variable domain of TCR clone 185871 (TRAV1-2, TRAJ16)
CAVNRFSDGQKLLF

SEQ ID NO: 371742 - protein, 18 aa, Homo sapiens
  CDR3 for beta chain variable domain of TCR clone 185871 (TRBV20-1, TRBJ2-3)
CSASGLAGGLGTTDTQYF

SEQ ID NO: 371743 - protein, 14 aa, Homo sapiens
  CDR3 for alpha chain variable domain of TCR clone 185872 (TRAV12-1, TRAJ38)
CVVHNAGNSRKLIW

SEQ ID NO: 371744 - protein, 13 aa, Homo sapiens
  CDR3 for beta chain variable domain of TCR clone 185872 (TRBV19, TRBJ2-1)
CATSRGVYNEQFF

SEQ ID NO: 371745 - protein, 12 aa, Homo sapiens
  CDR3 for alpha chain variable domain of TCR clone 185873 (TRAV13-1, TRAJ11)
CAGPSGYSTLTF

SEQ ID NO: 371746 - protein, 16 aa, Homo sapiens
  CDR3 for beta chain variable domain of TCR clone 185873 (TRBV7-3, TRBJ2-2)
CASSLKRGTLSGELFF

SEQ ID NO: 371747 - protein, 13 aa, Homo sapiens
  CDR3 for alpha chain variable domain of TCR clone 185874 (TRAV8-1, TRAJ23)
CAWRDNQGGKLIF

SEQ ID NO: 371748 - protein, 13 aa, Homo sapiens
  CDR3 for beta chain variable domain of TCR clone 185874 (TRBV20-1, TRBJ2-7)
CSATHTSAYEQYF

SEQ ID NO: 371749 - protein, 14 aa, Homo sapiens
  CDR3 for alpha chain variable domain of TCR clone 185875 (TRAV13-1, TRAJ44)
CAAKAAGTASKLTF

SEQ ID NO: 371750 - protein, 13 aa, Homo sapiens
  CDR3 for beta chain variable domain of TCR clone 185875 (TRBV5-5, TRBJ1-2)
CASSFGRGEDYTF

SEQ ID NO: 371751 - protein, 14 aa, Homo sapiens
  CDR3 for alpha chain variable domain of TCR clone 185876 (TRAV16, TRAJ4)
TVLPFSGGYNKLIF

SEQ ID NO: 371752 - protein, 14 aa, Homo sapiens
  CDR3 for beta chain variable domain of TCR clone 185876 (TRBV19, TRBJ2-7)
CASSMGQGAIEQYF

SEQ ID NO: 371753 - protein, 13 aa, Homo sapiens
  CDR3 for alpha chain variable domain of TCR clone 185877 (TRAV8-4, TRAJ30)
CAVSVNRDDKIIF

SEQ ID NO: 371754 - protein, 14 aa, Homo sapiens
  CDR3 for beta chain variable domain of TCR clone 185877 (TRBV19, TRBJ2-1)
CATSQGDTYNEQFF

SEQ ID NO: 371755 - protein, 12 aa, Homo sapiens
  CDR3 for alpha chain variable domain of TCR clone 185878 (TRAV17, TRAJ20)
CATDGDDYQLSF

SEQ ID NO: 371756 - protein, 13 aa, Homo sapiens
  CDR3 for beta chain variable domain of TCR clone 185878 (TRBV20-1, TRBJ1-1)
CSARVGGNTEAFF

SEQ ID NO: 371757 - protein, 14 aa, Homo sapiens
  CDR3 for alpha chain variable domain of TCR clone 185879 (TRAV1-2, TRAJ16)
CAVNRFSDGQKMLF

SEQ ID NO: 371758 - protein, 15 aa, Homo sapiens
  CDR3 for beta chain variable domain of TCR clone 185879 (TRBV5-5, TRBJ1-4)
CASSLVVRSNEKLFF

SEQ ID NO: 371759 - protein, 11 aa, Homo sapiens
  CDR3 for alpha chain variable domain of TCR clone 185880 (TRAV4, TRAJ23)
CLVAPGGKLTF

SEQ ID NO: 371760 - protein, 13 aa, Homo sapiens
  CDR3 for beta chain variable domain of TCR clone 185880 (TRBV7-9, TRBJ1-2)
CASSLKQNYGYTF

SEQ ID NO: 371761 - protein, 16 aa, Homo sapiens
  CDR3 for alpha chain variable domain of TCR clone 185881 (TRAV3, TRAJ40)
CAVRDRIASGTYKYIF

SEQ ID NO: 371762 - protein, 18 aa, Homo sapiens
  CDR3 for beta chain variable domain of TCR clone 185881 (TRBV7-9, TRBJ2-7)
CASSLTTSGSRTWYEQYF

SEQ ID NO: 371763 - protein, 12 aa, Homo sapiens
  CDR3 for alpha chain variable domain of TCR clone 185882 (TRAV27, TRAJ35)
CAGADFGNVLPC

SEQ ID NO: 371764 - protein, 16 aa, Homo sapiens
  CDR3 for beta chain variable domain of TCR clone 185882 (TRBV6-1, TRBJ2-1)
CASISRQGSSYNEQFF

SEQ ID NO: 371765 - protein, 18 aa, Homo sapiens
  CDR3 for alpha chain variable domain of TCR clone 185883 (TRAV29/DV5, TRAJ52)
CAAGFRGAGGTSYGKLTF

SEQ ID NO: 371766 - protein, 15 aa, Homo sapiens
  CDR3 for beta chain variable domain of TCR clone 185883 (TRBV7-2, TRBJ1-2)
CASSPRAGWNYGYTF

SEQ ID NO: 371767 - protein, 13 aa, Homo sapiens
  CDR3 for alpha chain variable domain of TCR clone 185884 (TRAV30, TRAJ39)
CGTENNAGNMLTF

SEQ ID NO: 371768 - protein, 14 aa, Homo sapiens
  CDR3 for beta chain variable domain of TCR clone 185884 (TRBV2, TRBJ2-7)
CASSLTSGGYEQYF

SEQ ID NO: 371769 - protein, 12 aa, Homo sapiens
  CDR3 for alpha chain variable domain of TCR clone 185885 (TRAV26-2, TRAJ34)
CILRISSEKLIF

SEQ ID NO: 371770 - protein, 15 aa, Homo sapiens
  CDR3 for beta chain variable domain of TCR clone 185885 (TRBV18, TRBJ2-7)
CASSPRGGKGYEQYF

SEQ ID NO: 371771 - protein, 16 aa, Homo sapiens
  CDR3 for alpha chain variable domain of TCR clone 185886 (TRAV8-1, TRAJ39)
CAVNVPSYNAGNMLTF

SEQ ID NO: 371772 - protein, 15 aa, Homo sapiens
  CDR3 for beta chain variable domain of TCR clone 185886 (TRBV4-1, TRBJ2-3)
CAGRSTGAGTDTQYF

SEQ ID NO: 371773 - protein, 14 aa, Homo sapiens
  CDR3 for alpha chain variable domain of TCR clone 185887 (TRAV12-3, TRAJ12)
CAMCEADSSYKLIF

SEQ ID NO: 371774 - protein, 12 aa, Homo sapiens
  CDR3 for beta chain variable domain of TCR clone 185887 (TRBV18, TRBJ1-4)
CASSPSREKLFF

SEQ ID NO: 371775 - protein, 12 aa, Homo sapiens
  CDR3 for alpha chain variable domain of TCR clone 185888 (TRAV13-1, TRAJ21)
CAAREGFNKFYF

SEQ ID NO: 371776 - protein, 11 aa, Homo sapiens
  CDR3 for beta chain variable domain of TCR clone 185888 (TRBV11-2, TRBJ2-2)
CASSLPGELFF

SEQ ID NO: 371777 - protein, 16 aa, Homo sapiens
  CDR3 for alpha chain variable domain of TCR clone 185889 (TRAV3, TRAJ10)
CAVRDMRAGGGNKLTF

SEQ ID NO: 371778 - protein, 13 aa, Homo sapiens
  CDR3 for beta chain variable domain of TCR clone 185889 (TRBV6-1, TRBJ1-1)
CASSRRGNTEAFF

SEQ ID NO: 371779 - protein, 13 aa, Homo sapiens
  CDR3 for alpha chain variable domain of TCR clone 185890 (TRAV38-1, TRAJ42)
CARWGGSQGNIIF

SEQ ID NO: 371780 - protein, 10 aa, Homo sapiens
  CDR3 for beta chain variable domain of TCR clone 185890 (TRBV2, TRBJ2-5)
CASSAATQYF

SEQ ID NO: 371781 - protein, 14 aa, Homo sapiens
  CDR3 for alpha chain variable domain of TCR clone 185891 (TRAV17, TRAJ16)
CATADLSDGQKLLF

SEQ ID NO: 371782 - protein, 15 aa, Homo sapiens
  CDR3 for beta chain variable domain of TCR clone 185891 (TRBV18, TRBJ2-1)
CASSPPSASYSEQFF

SEQ ID NO: 371783 - protein, 12 aa, Homo sapiens
  CDR3 for alpha chain variable domain of TCR clone 185892 (TRAV20, TRAJ36)
CAQVTGATNLFF

SEQ ID NO: 371784 - protein, 14 aa, Homo sapiens
  CDR3 for beta chain variable domain of TCR clone 185892 (TRBV6-1, TRBJ2-2)
CASSQRQATGELFF

SEQ ID NO: 371785 - protein, 14 aa, Homo sapiens
  CDR3 for alpha chain variable domain of TCR clone 185893 (TRAV3, TRAJ13)
CAVSYSGGYQKVTF

SEQ ID NO: 371786 - protein, 15 aa, Homo sapiens
  CDR3 for beta chain variable domain of TCR clone 185893 (TRBV2, TRBJ2-5)
CASTRDGGPQETQYF

SEQ ID NO: 371787 - protein, 14 aa, Homo sapiens
  CDR3 for alpha chain variable domain of TCR clone 185894 (TRAV1-2, TRAJ16)
CAVNRFSAGQKLLF

SEQ ID NO: 371788 - protein, 15 aa, Homo sapiens
  CDR3 for beta chain variable domain of TCR clone 185894 (TRBV19, TRBJ1-5)
CASSIVWADNQPQHF

SEQ ID NO: 371789 - protein, 15 aa, Homo sapiens
  CDR3 for alpha chain variable domain of TCR clone 185895 (TRAV38-1, TRAJ37)
CAFIHGFGNTVKLNF

SEQ ID NO: 371790 - protein, 12 aa, Homo sapiens
  CDR3 for beta chain variable domain of TCR clone 185895 (TRBV7-9, TRBJ2-7)
CASSFGSYEQYF

SEQ ID NO: 371791 - protein, 14 aa, Homo sapiens
  CDR3 for alpha chain variable domain of TCR clone 185896 (TRAV1-2, TRAJ16)
CAVNRFSDGQKLLF

SEQ ID NO: 371792 - protein, 12 aa, Homo sapiens
  CDR3 for beta chain variable domain of TCR clone 185896 (TRBV11-2, TRBJ2-5)
CASSLGHETQYF

SEQ ID NO: 371793 - protein, 16 aa, Homo sapiens
  CDR3 for alpha chain variable domain of TCR clone 185897 (TRAV17, TRAJ35)
CATAEGGIGFGNVLHC

SEQ ID NO: 371794 - protein, 15 aa, Homo sapiens
  CDR3 for beta chain variable domain of TCR clone 185897 (TRBV19, TRBJ1-2)
CASSVGQVLNYGYTF

SEQ ID NO: 371795 - protein, 15 aa, Homo sapiens
  CDR3 for alpha chain variable domain of TCR clone 185898 (TRAV20, TRAJ53)
CAVKASGGSNYKLTF

SEQ ID NO: 371796 - protein, 12 aa, Homo sapiens
  CDR3 for beta chain variable domain of TCR clone 185898 (TRBV7-6, TRBJ2-5)
CASSLSQETQYV

SEQ ID NO: 371797 - protein, 14 aa, Homo sapiens
  CDR3 for alpha chain variable domain of TCR clone 185899 (TRAV8-1, TRAJ4)
CAVKFSVGYNKLIF

SEQ ID NO: 371798 - protein, 22 aa, Homo sapiens
  CDR3 for beta chain variable domain of TCR clone 185899 (TRBV7-3, TRBJ2-5)
CASARDRVILRPRDPVLRARHA

SEQ ID NO: 371799 - protein, 13 aa, Homo sapiens
  CDR3 for alpha chain variable domain of TCR clone 185900 (TRAV29/DV5, TRAJ31)
CAASRNNHARLMF

SEQ ID NO: 371800 - protein, 12 aa, Homo sapiens
  CDR3 for beta chain variable domain of TCR clone 185900 (TRBV14, TRBJ2-7)
CASSLYKDEQYF

SEQ ID NO: 371801 - protein, 17 aa, Homo sapiens
  CDR3 for alpha chain variable domain of TCR clone 185901 (TRAV4, TRAJ13)
CIVGVQGSSGCYQKVTF

SEQ ID NO: 371802 - protein, 18 aa, Homo sapiens
  CDR3 for beta chain variable domain of TCR clone 185901 (TRBV15, TRBJ2-3)
CATSRDGARSWDTDTQYF

SEQ ID NO: 371803 - protein, 15 aa, Homo sapiens
  CDR3 for alpha chain variable domain of TCR clone 185902 (TRAV13-2, TRAJ40)
CAENRSRQGTYKYIF

SEQ ID NO: 371804 - protein, 15 aa, Homo sapiens
  CDR3 for beta chain variable domain of TCR clone 185902 (TRBV19, TRBJ2-1)
CASSMGWNSINEQFF

SEQ ID NO: 371805 - protein, 11 aa, Homo sapiens
  CDR3 for alpha chain variable domain of TCR clone 185903 (TRAV19, TRAJ21)
CALSGFNKFYF

SEQ ID NO: 371806 - protein, 13 aa, Homo sapiens
  CDR3 for beta chain variable domain of TCR clone 185903 (TRBV24-1, TRBJ2-2)
CATSDWSTGELFF

SEQ ID NO: 371807 - protein, 16 aa, Homo sapiens
  CDR3 for alpha chain variable domain of TCR clone 185904 (TRAV30, TRAJ24)
CGTEIVDADSWGKFQF

SEQ ID NO: 371808 - protein, 16 aa, Homo sapiens
  CDR3 for beta chain variable domain of TCR clone 185904 (TRBV5-7, TRBJ1-2)
CASSRGVTGGSYGYTF

SEQ ID NO: 371809 - protein, 12 aa, Homo sapiens
  CDR3 for alpha chain variable domain of TCR clone 185905 (TRAV23/DV6, TRAJ30)
CAASKGMTRSSF

SEQ ID NO: 371810 - protein, 17 aa, Homo sapiens
  CDR3 for beta chain variable domain of TCR clone 185905 (TRBV13, TRBJ2-3)
CASSLSRVAGGRNTQYF

SEQ ID NO: 371811 - protein, 15 aa, Homo sapiens
  CDR3 for alpha chain variable domain of TCR clone 185906 (TRAV16, TRAJ26)
CITVLQRNYGQNFVF

SEQ ID NO: 371812 - protein, 15 aa, Homo sapiens
  CDR3 for beta chain variable domain of TCR clone 185906 (TRBV7-2, TRBJ2-3)
CASSLTGTSTDTKYF

SEQ ID NO: 371813 - protein, 13 aa, Homo sapiens
  CDR3 for alpha chain variable domain of TCR clone 185907 (TRAV27, TRAJ6)
CAGGTRGSYIPTF

SEQ ID NO: 371814 - protein, 14 aa, Homo sapiens
  CDR3 for beta chain variable domain of TCR clone 185907 (TRBV6-1, TRBJ1-3)
CASVQGGGGNTIYF

SEQ ID NO: 371815 - protein, 12 aa, Homo sapiens
  CDR3 for alpha chain variable domain of TCR clone 185908 (TRAV13-1, TRAJ21)
CAAKEGFNKFYF

SEQ ID NO: 371816 - protein, 16 aa, Homo sapiens
  CDR3 for beta chain variable domain of TCR clone 185908 (TRBV7-3, TRBJ2-2)
CASSLKRGTLSGELLF

SEQ ID NO: 371817 - protein, 14 aa, Homo sapiens
  CDR3 for alpha chain variable domain of TCR clone 185909 (TRAV12-1, TRAJ37)
CVVIGSSNTGKLIF

SEQ ID NO: 371818 - protein, 20 aa, Homo sapiens
  CDR3 for beta chain variable domain of TCR clone 185909 (TRBV23-1, TRBJ2-5)
CISAPAVPERVLLIQETQYF

SEQ ID NO: 371819 - protein, 14 aa, Homo sapiens
  CDR3 for alpha chain variable domain of TCR clone 185910 (TRAV8-3, TRAJ4)
CAVGAAGGYTKLFF

SEQ ID NO: 371820 - protein, 15 aa, Homo sapiens
  CDR3 for beta chain variable domain of TCR clone 185910 (TRBV6-5, TRBJ2-1)
CASSYDAGAGNEQFF

SEQ ID NO: 371821 - protein, 10 aa, Homo sapiens
  CDR3 for alpha chain variable domain of TCR clone 185911 (TRAV20, TRAJ22)
CAAPARQLTF

SEQ ID NO: 371822 - protein, 14 aa, Homo sapiens
  CDR3 for beta chain variable domain of TCR clone 185911 (TRBV19, TRBJ2-1)
CASGMGSGATEQFF

SEQ ID NO: 371823 - protein, 14 aa, Homo sapiens
  CDR3 for alpha chain variable domain of TCR clone 185912 (TRAV1-1, TRAJ28)
CAAPSGAGRYQLTF

SEQ ID NO: 371824 - protein, 15 aa, Homo sapiens
  CDR3 for beta chain variable domain of TCR clone 185912 (TRBV27, TRBJ2-7)
CASSTAGTGSYEQYF

SEQ ID NO: 371825 - protein, 12 aa, Homo sapiens
  CDR3 for alpha chain variable domain of TCR clone 185913 (TRAV20, TRAJ39)
CAVGNAGNMLTF

SEQ ID NO: 371826 - protein, 17 aa, Homo sapiens
  CDR3 for beta chain variable domain of TCR clone 185913 (TRBV4-1, TRBJ2-3)
CASSQGYVRGGTDTQYF

SEQ ID NO: 371827 - protein, 16 aa, Homo sapiens
  CDR3 for alpha chain variable domain of TCR clone 185914 (TRAV8-3, TRAJ18)
CAVGARRGSTLGRLYF

SEQ ID NO: 371828 - protein, 13 aa, Homo sapiens
  CDR3 for beta chain variable domain of TCR clone 185914 (TRBV7-9, TRBJ2-3)
CASSPGSTDTQYF

SEQ ID NO: 371829 - protein, 17 aa, Homo sapiens
  CDR3 for alpha chain variable domain of TCR clone 185915 (TRAV4, TRAJ18)
CLVGESSVGSTLGRLYF

SEQ ID NO: 371830 - protein, 16 aa, Homo sapiens
  CDR3 for beta chain variable domain of TCR clone 185915 (TRBV15, TRBJ1-4)
CATSRDSPPGREKLFF

SEQ ID NO: 371831 - protein, 15 aa, Homo sapiens
  CDR3 for alpha chain variable domain of TCR clone 185916 (TRAV25, TRAJ10)
CAGPLLTGGGNRLTF

SEQ ID NO: 371832 - protein, 15 aa, Homo sapiens
  CDR3 for beta chain variable domain of TCR clone 185916 (TRBV12-5, TRBJ2-2)
CASGRLGGNTGELFF

SEQ ID NO: 371833 - protein, 16 aa, Homo sapiens
  CDR3 for alpha chain variable domain of TCR clone 185917 (TRAV1-2, TRAJ10)
CAVRGVLAGGGNELTF

SEQ ID NO: 371834 - protein, 12 aa, Homo sapiens
  CDR3 for beta chain variable domain of TCR clone 185917 (TRBV7-8, TRBJ2-7)
CASSLGDREQCF

SEQ ID NO: 371835 - protein, 13 aa, Homo sapiens
  CDR3 for alpha chain variable domain of TCR clone 185918 (TRAV12-2, TRAJ42)
CAVKRGSPGNLIF

SEQ ID NO: 371836 - protein, 13 aa, Homo sapiens
  CDR3 for beta chain variable domain of TCR clone 185918 (TRBV7-9, TRBJ2-3)
CASSPGSTDTQYF

SEQ ID NO: 371837 - protein, 16 aa, Homo sapiens
  CDR3 for alpha chain variable domain of TCR clone 185919 (TRAV2, TRAJ10)
CCGGSTVTGGGNKLTF

SEQ ID NO: 371838 - protein, 16 aa, Homo sapiens
  CDR3 for beta chain variable domain of TCR clone 185919 (TRBV18, TRBJ1-5)
CASSPSTGNSKQPQHF

SEQ ID NO: 371839 - protein, 16 aa, Homo sapiens
  CDR3 for alpha chain variable domain of TCR clone 185920 (TRAV13-2, TRAJ45)
CAENRGSGGGADGLTF

SEQ ID NO: 371840 - protein, 14 aa, Homo sapiens
  CDR3 for beta chain variable domain of TCR clone 185920 (TRBV19, TRBJ2-2)
CASKRAPNTGELFC

SEQ ID NO: 371841 - protein, 15 aa, Homo sapiens
  CDR3 for alpha chain variable domain of TCR clone 185921 (TRAV16, TRAJ16)
CALQGGGSDGQKLHF

SEQ ID NO: 371842 - protein, 15 aa, Homo sapiens
  CDR3 for beta chain variable domain of TCR clone 185921 (TRBV20-1, TRBJ2-7)
CSARDRVSGMDEQYF

SEQ ID NO: 371843 - protein, 14 aa, Homo sapiens
  CDR3 for alpha chain variable domain of TCR clone 185922 (TRAV12-2, TRAJ17)
CAVLFKAAGNKLTF

SEQ ID NO: 371844 - protein, 17 aa, Homo sapiens
  CDR3 for beta chain variable domain of TCR clone 185922 (TRBV11-2, TRBJ2-1)
CASSLYPRGVEYNEQFF

SEQ ID NO: 371845 - protein, 13 aa, Homo sapiens
  CDR3 for alpha chain variable domain of TCR clone 185923 (TRAV2, TRAJ29)
CAVEPSGNTPLVL

SEQ ID NO: 371846 - protein, 15 aa, Homo sapiens
  CDR3 for beta chain variable domain of TCR clone 185923 (TRBV19, TRBJ2-7)
CASSIGGGLVNEQYF

SEQ ID NO: 371847 - protein, 14 aa, Homo sapiens
  CDR3 for alpha chain variable domain of TCR clone 185924 (TRAV12-1, TRAJ12)
CVVTSGDSSYKLIF

SEQ ID NO: 371848 - protein, 13 aa, Homo sapiens
  CDR3 for beta chain variable domain of TCR clone 185924 (TRBV7-8, TRBJ2-7)
CASSLTGGREQYF

SEQ ID NO: 371849 - protein, 13 aa, Homo sapiens
  CDR3 for alpha chain variable domain of TCR clone 185925 (TRAV21, TRAJ11)
CAVPNSGYSTLTF

SEQ ID NO: 371850 - protein, 13 aa, Homo sapiens
  CDR3 for beta chain variable domain of TCR clone 185925 (TRBV7-6, TRBJ1-2)
CASSLVADYGYTF

SEQ ID NO: 371851 - protein, 14 aa, Homo sapiens
  CDR3 for alpha chain variable domain of TCR clone 185926 (TRAV9-2, TRAJ39)
CALYIYNAGNMLIF

SEQ ID NO: 371852 - protein, 15 aa, Homo sapiens
  CDR3 for beta chain variable domain of TCR clone 185926 (TRBV28, TRBJ1-3)
CASSMGWASGNTLYF

SEQ ID NO: 371853 - protein, 14 aa, Homo sapiens
  CDR3 for alpha chain variable domain of TCR clone 185927 (TRAV26-1, TRAJ45)
CIVRVVGCADGLTF

SEQ ID NO: 371854 - protein, 16 aa, Homo sapiens
  CDR3 for beta chain variable domain of TCR clone 185927 (TRBV7-9, TRBJ1-1)
CASSLTQVRSNTEAFF

SEQ ID NO: 371855 - protein, 12 aa, Homo sapiens
  CDR3 for alpha chain variable domain of TCR clone 185928 (TRAV13-1, TRAJ48)
CAANFGNEKLTF

SEQ ID NO: 371856 - protein, 15 aa, Homo sapiens
  CDR3 for beta chain variable domain of TCR clone 185928 (TRBV4-3, TRBJ2-7)
CASSQGGRGIYEQYF

SEQ ID NO: 371857 - protein, 17 aa, Homo sapiens
  CDR3 for alpha chain variable domain of TCR clone 185929 (TRAV3, TRAJ6)
CAVRDGPRAGGSYIPTF

SEQ ID NO: 371858 - protein, 17 aa, Homo sapiens
  CDR3 for beta chain variable domain of TCR clone 185929 (TRBV24-1, TRBJ2-1)
CATSDVSTSGTYNEQFF

SEQ ID NO: 371859 - protein, 14 aa, Homo sapiens
  CDR3 for alpha chain variable domain of TCR clone 185930 (TRAV10, TRAJ34)
CVVSRAGDTDKLIF

SEQ ID NO: 371860 - protein, 17 aa, Homo sapiens
  CDR3 for beta chain variable domain of TCR clone 185930 (TRBV6-3, TRBJ2-3)
CASRRPLGGGSTDTQYF

SEQ ID NO: 371861 - protein, 14 aa, Homo sapiens
  CDR3 for alpha chain variable domain of TCR clone 185931 (TRAV1-2, TRAJ16)
CAVNRFSDGQKLLF

SEQ ID NO: 371862 - protein, 17 aa, Homo sapiens
  CDR3 for beta chain variable domain of TCR clone 185931 (TRBV9, TRBJ1-6)
CASSVAGTGDYPSTLGT

SEQ ID NO: 371863 - protein, 12 aa, Homo sapiens
  CDR3 for alpha chain variable domain of TCR clone 185932 (TRAV8-3, TRAJ26)
CSGDNYGQNFVF

SEQ ID NO: 371864 - protein, 15 aa, Homo sapiens
  CDR3 for beta chain variable domain of TCR clone 185932 (TRBV11-2, TRBJ2-1)
CASSLGTSGLNEQFF

SEQ ID NO: 371865 - protein, 13 aa, Homo sapiens
  CDR3 for alpha chain variable domain of TCR clone 185933 (TRAV2, TRAJ15)
CAVASQAGTALIF

SEQ ID NO: 371866 - protein, 15 aa, Homo sapiens
  CDR3 for beta chain variable domain of TCR clone 185933 (TRBV27, TRBJ1-5)
CASSLGQGSVQPQHF

SEQ ID NO: 371867 - protein, 13 aa, Homo sapiens
  CDR3 for alpha chain variable domain of TCR clone 185934 (TRAV21, TRAJ57)
CAVTQGGSEKLVF

SEQ ID NO: 371868 - protein, 16 aa, Homo sapiens
  CDR3 for beta chain variable domain of TCR clone 185934 (TRBV24-1, TRBJ2-3)
CATSDPGTGATDTQYF

SEQ ID NO: 371869 - protein, 12 aa, Homo sapiens
  CDR3 for alpha chain variable domain of TCR clone 185935 (TRAV2, TRAJ9)
CAVGAGGFKTTF

SEQ ID NO: 371870 - protein, 16 aa, Homo sapiens
  CDR3 for beta chain variable domain of TCR clone 185935 (TRBV13, TRBJ2-2)
CASSPRTGEHTGELLF

SEQ ID NO: 371871 - protein, 16 aa, Homo sapiens
  CDR3 for alpha chain variable domain of TCR clone 185936 (TRAV4, TRAJ22)
CLVGDLYSGSARQLTF

SEQ ID NO: 371872 - protein, 16 aa, Homo sapiens
  CDR3 for beta chain variable domain of TCR clone 185936 (TRBV7-9, TRBJ2-1)
CARRDVAGGSYNEQFF

SEQ ID NO: 371873 - protein, 11 aa, Homo sapiens
  CDR3 for alpha chain variable domain of TCR clone 185937 (TRAV4, TRAJ23)
CLVAPGGKVIF

SEQ ID NO: 371874 - protein, 15 aa, Homo sapiens
  CDR3 for beta chain variable domain of TCR clone 185937 (TRBV7-2, TRBJ2-1)
CASSFQADEYNEQFF

SEQ ID NO: 371875 - protein, 13 aa, Homo sapiens
  CDR3 for alpha chain variable domain of TCR clone 185938 (TRAV12-2, TRAJ20)
CAVYPSNDYKLSF

SEQ ID NO: 371876 - protein, 12 aa, Homo sapiens
  CDR3 for beta chain variable domain of TCR clone 185938 (TRBV12-4, TRBJ2-7)
CASSLGGYEQYF

SEQ ID NO: 371877 - protein, 14 aa, Homo sapiens
  CDR3 for alpha chain variable domain of TCR clone 185939 (TRAV17, TRAJ22)
CATSPSGSARQLTF

SEQ ID NO: 371878 - protein, 14 aa, Homo sapiens
  CDR3 for beta chain variable domain of TCR clone 185939 (TRBV7-8, TRBJ2-3)
CASSFPDGQDTQYF

SEQ ID NO: 371879 - protein, 13 aa, Homo sapiens
  CDR3 for alpha chain variable domain of TCR clone 185940 (TRAV30, TRAJ34)
CVTVGYNTDKLIF

SEQ ID NO: 371880 - protein, 16 aa, Homo sapiens
  CDR3 for beta chain variable domain of TCR clone 185940 (TRBV7-9, TRBJ1-2)
CASSLGFSAGEDGYTF

SEQ ID NO: 371881 - protein, 16 aa, Homo sapiens
  CDR3 for alpha chain variable domain of TCR clone 185941 (TRAV3, TRAJ37)
CAVRPHGPGNTGKLIL

SEQ ID NO: 371882 - protein, 13 aa, Homo sapiens
  CDR3 for beta chain variable domain of TCR clone 185941 (TRBV2, TRBJ1-5)
CASGTGGYQPQHF

SEQ ID NO: 371883 - protein, 11 aa, Homo sapiens
  CDR3 for alpha chain variable domain of TCR clone 185942 (TRAV2, TRAJ13)
CASGGYQKVTF

SEQ ID NO: 371884 - protein, 18 aa, Homo sapiens
  CDR3 for beta chain variable domain of TCR clone 185942 (TRBV7-6, TRBJ2-1)
CASSPRTSGMSSYNEQFF

SEQ ID NO: 371885 - protein, 16 aa, Homo sapiens
  CDR3 for alpha chain variable domain of TCR clone 185943 (TRAV3, TRAJ3)
CAVRDRAKSSASNIIF

SEQ ID NO: 371886 - protein, 16 aa, Homo sapiens
  CDR3 for beta chain variable domain of TCR clone 185943 (TRBV20-1, TRBJ2-4)
CSATSLAELANNIQYF

SEQ ID NO: 371887 - protein, 11 aa, Homo sapiens
  CDR3 for alpha chain variable domain of TCR clone 185944 (TRAV2, TRAJ13)
CASVGYQKVTF

SEQ ID NO: 371888 - protein, 15 aa, Homo sapiens
  CDR3 for beta chain variable domain of TCR clone 185944 (TRBV6-3, TRBJ2-7)
CASSSPGTVFYEQYF

SEQ ID NO: 371889 - protein, 14 aa, Homo sapiens
  CDR3 for alpha chain variable domain of TCR clone 185945 (TRAV13-1, TRAJ35)
CAASKGGFGNVLHF

SEQ ID NO: 371890 - protein, 13 aa, Homo sapiens
  CDR3 for beta chain variable domain of TCR clone 185945 (TRBV7-3, TRBJ1-1)
CASGQDWGAEAFF

SEQ ID NO: 371891 - protein, 16 aa, Homo sapiens
  CDR3 for alpha chain variable domain of TCR clone 185946 (TRAV17, TRAJ28)
CATDPRRGGAELPTHF

SEQ ID NO: 371892 - protein, 16 aa, Homo sapiens
  CDR3 for beta chain variable domain of TCR clone 185946 (TRBV25-1, TRBJ1-1)
CASSGDRDRGRIEAFF

SEQ ID NO: 371893 - protein, 11 aa, Homo sapiens
  CDR3 for alpha chain variable domain of TCR clone 185947 (TRAV1-2, TRAJ31)
CAVNNNARLMF

SEQ ID NO: 371894 - protein, 14 aa, Homo sapiens
  CDR3 for beta chain variable domain of TCR clone 185947 (TRBV19, TRBJ2-2)
CASSTLHRSGELFF

SEQ ID NO: 371895 - protein, 12 aa, Homo sapiens
  CDR3 for alpha chain variable domain of TCR clone 185948 (TRAV3, TRAJ43)
CAVRDPNNDMRF

SEQ ID NO: 371896 - protein, 15 aa, Homo sapiens
  CDR3 for beta chain variable domain of TCR clone 185948 (TRBV20-1, TRBJ2-7)
CSARGPLAGGREQYF

SEQ ID NO: 371897 - protein, 15 aa, Homo sapiens
  CDR3 for alpha chain variable domain of TCR clone 185949 (TRAV21, TRAJ53)
CATLNSGGSNYKLTF

SEQ ID NO: 371898 - protein, 13 aa, Homo sapiens
  CDR3 for beta chain variable domain of TCR clone 185949 (TRBV11-2, TRBJ2-5)
CASSSTGEENQYF

SEQ ID NO: 371899 - protein, 14 aa, Homo sapiens
  CDR3 for alpha chain variable domain of TCR clone 185950 (TRAV2, TRAJ9)
CAVEDRSGGVKTIF

SEQ ID NO: 371900 - protein, 12 aa, Homo sapiens
  CDR3 for beta chain variable domain of TCR clone 185950 (TRBV7-9, TRBJ2-7)
CASSLEGYEQYF

SEQ ID NO: 371901 - protein, 16 aa, Homo sapiens
  CDR3 for alpha chain variable domain of TCR clone 185951 (TRAV20, TRAJ4)
CAVQAEFSGGYNKRIF

SEQ ID NO: 371902 - protein, 14 aa, Homo sapiens
  CDR3 for beta chain variable domain of TCR clone 185951 (TRBV7-8, TRBJ2-3)
CASSLEAGTDTQYF

SEQ ID NO: 371903 - protein, 11 aa, Homo sapiens
  CDR3 for alpha chain variable domain of TCR clone 185952 (TRAV17, TRAJ36)
CAPTGANNLFF

SEQ ID NO: 371904 - protein, 16 aa, Homo sapiens
  CDR3 for beta chain variable domain of TCR clone 185952 (TRBV12-5, TRBJ2-5)
CASGPRTSGNQETQYF

SEQ ID NO: 371905 - protein, 15 aa, Homo sapiens
  CDR3 for alpha chain variable domain of TCR clone 185953 (TRAV23/DV6, TRAJ33)
CAASNSGGGNYQLIW

SEQ ID NO: 371906 - protein, 13 aa, Homo sapiens
  CDR3 for beta chain variable domain of TCR clone 185953 (TRBV10-2, TRBJ2-3)
CASSESGDHTQYF

SEQ ID NO: 371907 - protein, 15 aa, Homo sapiens
  CDR3 for alpha chain variable domain of TCR clone 185954 (TRAV3, TRAJ3)
CAVRDRDSSASKIIF

SEQ ID NO: 371908 - protein, 13 aa, Homo sapiens
  CDR3 for beta chain variable domain of TCR clone 185954 (TRBV5-7, TRBJ1-2)
CASSLGTGYGYTF

SEQ ID NO: 371909 - protein, 14 aa, Homo sapiens
  CDR3 for alpha chain variable domain of TCR clone 185955 (TRAV12-1, TRAJ24)
CVVIPTDSWGKLQF

SEQ ID NO: 371910 - protein, 13 aa, Homo sapiens
  CDR3 for beta chain variable domain of TCR clone 185955 (TRBV19, TRBJ1-2)
CASSVPGQDGYTF

SEQ ID NO: 371911 - protein, 13 aa, Homo sapiens
  CDR3 for alpha chain variable domain of TCR clone 185956 (TRAV13-2, TRAJ40)
CAESLSGTYKYIF

SEQ ID NO: 371912 - protein, 16 aa, Homo sapiens
  CDR3 for beta chain variable domain of TCR clone 185956 (TRBV20-1, TRBJ2-1)
CSARDSSGRIGDEQFF

SEQ ID NO: 371913 - protein, 14 aa, Homo sapiens
  CDR3 for alpha chain variable domain of TCR clone 185957 (TRAV30, TRAJ26)
CGTEIVSYGQNFVF

SEQ ID NO: 371914 - protein, 12 aa, Homo sapiens
  CDR3 for beta chain variable domain of TCR clone 185957 (TRBV7-9, TRBJ2-7)
CASSLEGYEQYF

SEQ ID NO: 371915 - protein, 10 aa, Homo sapiens
  CDR3 for alpha chain variable domain of TCR clone 185958 (TRAV36/DV7, TRAJ49)
WALTGNQFYF

SEQ ID NO: 371916 - protein, 14 aa, Homo sapiens
  CDR3 for beta chain variable domain of TCR clone 185958 (TRBV4-2, TRBJ2-5)
CASSQDRGRETQYF

SEQ ID NO: 371917 - protein, 16 aa, Homo sapiens
  CDR3 for alpha chain variable domain of TCR clone 185959 (TRAV20, TRAJ53)
CAVQGNSGGSNYKLTF

SEQ ID NO: 371918 - protein, 14 aa, Homo sapiens
  CDR3 for beta chain variable domain of TCR clone 185959 (TRBV7-2, TRBJ2-3)
CASRRGLAADTQYF

SEQ ID NO: 371919 - protein, 13 aa, Homo sapiens
  CDR3 for alpha chain variable domain of TCR clone 185960 (TRAV13-2, TRAJ53)
CAENMGSNYKLTF

SEQ ID NO: 371920 - protein, 13 aa, Homo sapiens
  CDR3 for beta chain variable domain of TCR clone 185960 (TRBV4-1, TRBJ2-2)
CASSQENIGELFF

SEQ ID NO: 371921 - protein, 12 aa, Homo sapiens
  CDR3 for alpha chain variable domain of TCR clone 185961 (TRAV17, TRAJ20)
CATDSNDYKLSF

SEQ ID NO: 371922 - protein, 17 aa, Homo sapiens
  CDR3 for beta chain variable domain of TCR clone 185961 (TRBV5-1, TRBJ2-2)
CASSLAGLSGGIGELFF

SEQ ID NO: 371923 - protein, 14 aa, Homo sapiens
  CDR3 for alpha chain variable domain of TCR clone 185962 (TRAV35, TRAJ50)
CAGHRKTSYDKVIF

SEQ ID NO: 371924 - protein, 14 aa, Homo sapiens
  CDR3 for beta chain variable domain of TCR clone 185962 (TRBV7-2, TRBJ2-7)
CASSPKTSFYEQYF

SEQ ID NO: 371925 - protein, 15 aa, Homo sapiens
  CDR3 for alpha chain variable domain of TCR clone 185963 (TRAV4, TRAJ31)
CLVGGFLNNNARLLF

SEQ ID NO: 371926 - protein, 14 aa, Homo sapiens
  CDR3 for beta chain variable domain of TCR clone 185963 (TRBV7-8, TRBJ2-3)
CASSSRDSTDTQYF

SEQ ID NO: 371927 - protein, 12 aa, Homo sapiens
  CDR3 for alpha chain variable domain of TCR clone 185964 (TRAV4, TRAJ26)
CLVGDYGQNFVF

SEQ ID NO: 371928 - protein, 14 aa, Homo sapiens
  CDR3 for beta chain variable domain of TCR clone 185964 (TRBV11-2, TRBJ2-5)
CASSRTGGIETQYF

SEQ ID NO: 371929 - protein, 12 aa, Homo sapiens
  CDR3 for alpha chain variable domain of TCR clone 185965 (TRAV21, TRAJ31)
CVLAGNNARLVF

SEQ ID NO: 371930 - protein, 16 aa, Homo sapiens
  CDR3 for beta chain variable domain of TCR clone 185965 (TRBV27, TRBJ2-5)
CASSFGPGGTKETQYF

SEQ ID NO: 371931 - protein, 14 aa, Homo sapiens
  CDR3 for alpha chain variable domain of TCR clone 185966 (TRAV23/DV6, TRAJ4)
CAANLSGGYTKLTF

SEQ ID NO: 371932 - protein, 11 aa, Homo sapiens
  CDR3 for beta chain variable domain of TCR clone 185966 (TRBV7-9, TRBJ2-3)
CASSPTDTQYF

SEQ ID NO: 371933 - protein, 13 aa, Homo sapiens
  CDR3 for alpha chain variable domain of TCR clone 185967 (TRAV1-2, TRAJ12)
FAVSMDISYKLIF

SEQ ID NO: 371934 - protein, 15 aa, Homo sapiens
  CDR3 for beta chain variable domain of TCR clone 185967 (TRBV27, TRBJ2-5)
CASSLIPSGGETQYF

SEQ ID NO: 371935 - protein, 14 aa, Homo sapiens
  CDR3 for alpha chain variable domain of TCR clone 185968 (TRAV13-1, TRAJ29)
CAASSNSGNTPLVF

SEQ ID NO: 371936 - protein, 14 aa, Homo sapiens
  CDR3 for beta chain variable domain of TCR clone 185968 (TRBV7-2, TRBJ2-7)
CASSPKTSFYEQYF

SEQ ID NO: 371937 - protein, 12 aa, Homo sapiens
  CDR3 for alpha chain variable domain of TCR clone 185969 (TRAV38-1, TRAJ44)
CASAGTASTLTF

SEQ ID NO: 371938 - protein, 13 aa, Homo sapiens
  CDR3 for beta chain variable domain of TCR clone 185969 (TRBV18, TRBJ1-1)
CASSPNGDTEAFF

SEQ ID NO: 371939 - protein, 14 aa, Homo sapiens
  CDR3 for alpha chain variable domain of TCR clone 185970 (TRAV8-3, TRAJ36)
CAVFPITGANNLFF

SEQ ID NO: 371940 - protein, 15 aa, Homo sapiens
  CDR3 for beta chain variable domain of TCR clone 185970 (TRBV4-1, TRBJ2-1)
CASSQDPGNYNEQFF

SEQ ID NO: 371941 - protein, 11 aa, Homo sapiens
  CDR3 for alpha chain variable domain of TCR clone 185971 (TRAV17, TRAJ9)
CATTGGFKTIF

SEQ ID NO: 371942 - protein, 16 aa, Homo sapiens
  CDR3 for beta chain variable domain of TCR clone 185971 (TRBV13, TRBJ2-2)
CASSPRTGEHTGELFF

SEQ ID NO: 371943 - protein, 15 aa, Homo sapiens
  CDR3 for alpha chain variable domain of TCR clone 185972 (TRAV21, TRAJ32)
CAVRRYGGATNKLIF

SEQ ID NO: 371944 - protein, 13 aa, Homo sapiens
  CDR3 for beta chain variable domain of TCR clone 185972 (TRBV11-2, TRBJ2-5)
CASSSTGEETQYF

SEQ ID NO: 371945 - protein, 14 aa, Homo sapiens
  CDR3 for alpha chain variable domain of TCR clone 185973 (TRAV8-2, TRAJ4)
CVVSPSGGYNKLIF

SEQ ID NO: 371946 - protein, 15 aa, Homo sapiens
  CDR3 for beta chain variable domain of TCR clone 185973 (TRBV11-2, TRBJ2-2)
CASSLDTGNTGELFF

SEQ ID NO: 371947 - protein, 12 aa, Homo sapiens
  CDR3 for alpha chain variable domain of TCR clone 185974 (TRAV3, TRAJ29)
CSPNSGNTPLVF

SEQ ID NO: 371948 - protein, 15 aa, Homo sapiens
  CDR3 for beta chain variable domain of TCR clone 185974 (TRBV7-9, TRBJ1-6)
CASSSPGRGNSPLHF

SEQ ID NO: 371949 - protein, 14 aa, Homo sapiens
  CDR3 for alpha chain variable domain of TCR clone 185975 (TRAV13-1, TRAJ9)
CAASALTGCFKTIF

SEQ ID NO: 371950 - protein, 13 aa, Homo sapiens
  CDR3 for beta chain variable domain of TCR clone 185975 (TRBV20-1, TRBJ1-1)
CSAGTVRNTEAFF

SEQ ID NO: 371951 - protein, 22 aa, Homo sapiens
  CDR3 for alpha chain variable domain of TCR clone 185976 (TRAV1-1, TRAJ30)
CAVRDQTEMTRSSLEKGHDFIF

SEQ ID NO: 371952 - protein, 15 aa, Homo sapiens
  CDR3 for beta chain variable domain of TCR clone 185976 (TRBV20-1, TRBJ2-7)
CSARDRVSGMDEQYF

SEQ ID NO: 371953 - protein, 11 aa, Homo sapiens
  CDR3 for alpha chain variable domain of TCR clone 185977 (TRAV21, TRAJ34)
CAVTNTDKLIF

SEQ ID NO: 371954 - protein, 13 aa, Homo sapiens
  CDR3 for beta chain variable domain of TCR clone 185977 (TRBV13, TRBJ2-1)
CASILGGRGEQFF

SEQ ID NO: 371955 - protein, 13 aa, Homo sapiens
  CDR3 for alpha chain variable domain of TCR clone 185978 (TRAV12-1, TRAJ6)
CVVFPGGSYIPTF

SEQ ID NO: 371956 - protein, 16 aa, Homo sapiens
  CDR3 for beta chain variable domain of TCR clone 185978 (TRBV12-4, TRBJ2-7)
CASSPEGQGSSYEQYF

SEQ ID NO: 371957 - protein, 12 aa, Homo sapiens
  CDR3 for alpha chain variable domain of TCR clone 185979 (TRAV17, TRAJ12)
CATLRSSYKLIF

SEQ ID NO: 371958 - protein, 17 aa, Homo sapiens
  CDR3 for beta chain variable domain of TCR clone 185979 (TRBV28, TRBJ2-5)
CASSTPEGDALQETQYF

SEQ ID NO: 371959 - protein, 13 aa, Homo sapiens
  CDR3 for alpha chain variable domain of TCR clone 185980 (TRAV25, TRAJ40)
CAGSASGTYRYIF

SEQ ID NO: 371960 - protein, 14 aa, Homo sapiens
  CDR3 for beta chain variable domain of TCR clone 185980 (TRBV7-2, TRBJ2-7)
CASRSQGAAYEQYF

SEQ ID NO: 371961 - protein, 14 aa, Homo sapiens
  CDR3 for alpha chain variable domain of TCR clone 185981 (TRAV2, TRAJ22)
CAVGRGGSARQLTS

SEQ ID NO: 371962 - protein, 13 aa, Homo sapiens
  CDR3 for beta chain variable domain of TCR clone 185981 (TRBV7-2, TRBJ2-2)
CASSLAVTGELFF

SEQ ID NO: 371963 - protein, 11 aa, Homo sapiens
  CDR3 for alpha chain variable domain of TCR clone 185982 (TRAV17, TRAJ36)
CAPTGANNLFF

SEQ ID NO: 371964 - protein, 13 aa, Homo sapiens
  CDR3 for beta chain variable domain of TCR clone 185982 (TRBV7-2, TRBJ2-2)
CASSLAVTGELFF

SEQ ID NO: 371965 - protein, 14 aa, Homo sapiens
  CDR3 for alpha chain variable domain of TCR clone 185983 (TRAV13-1, TRAJ28)
CAASPGAGSYQLTF

SEQ ID NO: 371966 - protein, 17 aa, Homo sapiens
  CDR3 for beta chain variable domain of TCR clone 185983 (TRBV7-2, TRBJ2-2)
CASSPRGAGGGTGELFF

SEQ ID NO: 371967 - protein, 13 aa, Homo sapiens
  CDR3 for alpha chain variable domain of TCR clone 185984 (TRAV12-3, TRAJ7)
CAMTASGNNRLAF

SEQ ID NO: 371968 - protein, 14 aa, Homo sapiens
  CDR3 for beta chain variable domain of TCR clone 185984 (TRBV13, TRBJ2-5)
CASSLGPRGETQYF

SEQ ID NO: 371969 - protein, 16 aa, Homo sapiens
  CDR3 for alpha chain variable domain of TCR clone 185985 (TRAV1-1, TRAJ29)
CAVRSTRNSGNTPLVF

SEQ ID NO: 371970 - protein, 15 aa, Homo sapiens
  CDR3 for beta chain variable domain of TCR clone 185985 (TRBV29-1, TRBJ2-1)
CSVGRHALFFNEQFF

SEQ ID NO: 371971 - protein, 16 aa, Homo sapiens
  CDR3 for alpha chain variable domain of TCR clone 185986 (TRAV3, TRAJ37)
CAVRDSGSGNTGKLIF

SEQ ID NO: 371972 - protein, 14 aa, Homo sapiens
  CDR3 for beta chain variable domain of TCR clone 185986 (TRBV20-1, TRBJ2-5)
CSAHRQGLWETQYF

SEQ ID NO: 371973 - protein, 13 aa, Homo sapiens
  CDR3 for alpha chain variable domain of TCR clone 185987 (TRAV1-1, TRAJ9)
CAAKNTGGFKTIF

SEQ ID NO: 371974 - protein, 14 aa, Homo sapiens
  CDR3 for beta chain variable domain of TCR clone 185987 (TRBV20-1, TRBJ2-1)
CSAKRGGSANEQFF

SEQ ID NO: 371975 - protein, 14 aa, Homo sapiens
  CDR3 for alpha chain variable domain of TCR clone 185988 (TRAV2, TRAJ9)
CAVEDRSGGFKTIF

SEQ ID NO: 371976 - protein, 13 aa, Homo sapiens
  CDR3 for beta chain variable domain of TCR clone 185988 (TRBV27, TRBJ1-1)
CASSLSIGAESFF

SEQ ID NO: 371977 - protein, 11 aa, Homo sapiens
  CDR3 for alpha chain variable domain of TCR clone 185989 (TRAV3, TRAJ17)
PRGAAGNKLTF

SEQ ID NO: 371978 - protein, 12 aa, Homo sapiens
  CDR3 for beta chain variable domain of TCR clone 185989 (TRBV11-2, TRBJ2-2)
CASSPGGGELFF

SEQ ID NO: 371979 - protein, 12 aa, Homo sapiens
  CDR3 for alpha chain variable domain of TCR clone 185990 (TRAV4, TRAJ18)
CLVVAAGRGSTL

SEQ ID NO: 371980 - protein, 17 aa, Homo sapiens
  CDR3 for beta chain variable domain of TCR clone 185990 (TRBV28, TRBJ2-2)
CASSLATGMGDAGELFF

SEQ ID NO: 371981 - protein, 13 aa, Homo sapiens
  CDR3 for alpha chain variable domain of TCR clone 185991 (TRAV36/DV7, TRAJ49)
CAGESNTGNQFYF

SEQ ID NO: 371982 - protein, 15 aa, Homo sapiens
  CDR3 for beta chain variable domain of TCR clone 185991 (TRBV6-5, TRBJ1-6)
CASSLGQGFRSPLHF

SEQ ID NO: 371983 - protein, 13 aa, Homo sapiens
  CDR3 for alpha chain variable domain of TCR clone 185992 (TRAV3, TRAJ27)
CAVRPLGAGKSTF

SEQ ID NO: 371984 - protein, 14 aa, Homo sapiens
  CDR3 for beta chain variable domain of TCR clone 185992 (TRBV25-1, TRBJ1-1)
CASTHLGGNTEDFF

SEQ ID NO: 371985 - protein, 14 aa, Homo sapiens
  CDR3 for alpha chain variable domain of TCR clone 185993 (TRAV12-3, TRAJ10)
SHLPLTGGENKLTF

SEQ ID NO: 371986 - protein, 15 aa, Homo sapiens
  CDR3 for beta chain variable domain of TCR clone 185993 (TRBV7-3, TRBJ2-2)
CASSETGQVTGELFF

SEQ ID NO: 371987 - protein, 11 aa, Homo sapiens
  CDR3 for alpha chain variable domain of TCR clone 185994 (TRAV3, TRAJ13)
CAVTSYQKVTF

SEQ ID NO: 371988 - protein, 11 aa, Homo sapiens
  CDR3 for beta chain variable domain of TCR clone 185994 (TRBV19, TRBJ1-1)
CASSIGSEAFF

SEQ ID NO: 371989 - protein, 16 aa, Homo sapiens
  CDR3 for alpha chain variable domain of TCR clone 185995 (TRAV12-2, TRAJ32)
CPVNLGQGGATNKLIF

SEQ ID NO: 371990 - protein, 15 aa, Homo sapiens
  CDR3 for beta chain variable domain of TCR clone 185995 (TRBV20-1, TRBJ2-7)
CSARGPLAGGREQYF

SEQ ID NO: 371991 - protein, 12 aa, Homo sapiens
  CDR3 for alpha chain variable domain of TCR clone 185996 (TRAV2, TRAJ5)
CALDTGRRALTF

SEQ ID NO: 371992 - protein, 15 aa, Homo sapiens
  CDR3 for beta chain variable domain of TCR clone 185996 (TRBV10-3, TRBJ2-1)
CAVSDVQDRAYEQFF

SEQ ID NO: 371993 - protein, 16 aa, Homo sapiens
  CDR3 for alpha chain variable domain of TCR clone 185997 (TRAV12-3, TRAJ53)
CAMSPGSGGSNYKLTF

SEQ ID NO: 371994 - protein, 15 aa, Homo sapiens
  CDR3 for beta chain variable domain of TCR clone 185997 (TRBV6-1, TRBJ1-5)
CASSVWVADGQPQHF

SEQ ID NO: 371995 - protein, 13 aa, Homo sapiens
  CDR3 for alpha chain variable domain of TCR clone 185998 (TRAV21, TRAJ26)
CAVLDNYGQNFVF

SEQ ID NO: 371996 - protein, 15 aa, Homo sapiens
  CDR3 for beta chain variable domain of TCR clone 185998 (TRBV20-1, TRBJ2-7)
CSARDRVSGMDEQYF

SEQ ID NO: 371997 - protein, 17 aa, Homo sapiens
  CDR3 for alpha chain variable domain of TCR clone 185999 (TRAV3, TRAJ42)
CAVRDRDYGGSQGNLIF

SEQ ID NO: 371998 - protein, 15 aa, Homo sapiens
  CDR3 for beta chain variable domain of TCR clone 185999 (TRBV2, TRBJ2-7)
CASSEGLAWSYEQYF

SEQ ID NO: 371999 - protein, 15 aa, Homo sapiens
  CDR3 for alpha chain variable domain of TCR clone 186000 (TRAV1-2, TRAJ30)
CAVRPHGNRDDKIIF

SEQ ID NO: 372000 - protein, 15 aa, Homo sapiens
  CDR3 for beta chain variable domain of TCR clone 186000 (TRBV12-4, TRBJ2-5)
CASSLGGQGRETQYF

SEQ ID NO: 372001 - protein, 13 aa, Homo sapiens
  CDR3 for alpha chain variable domain of TCR clone 186001 (TRAV20, TRAJ37)
CAGCSSNTAKLIF

SEQ ID NO: 372002 - protein, 14 aa, Homo sapiens
  CDR3 for beta chain variable domain of TCR clone 186001 (TRBV20-1, TRBJ2-5)
CSARDGRAGETQYF

SEQ ID NO: 372003 - protein, 14 aa, Homo sapiens
  CDR3 for alpha chain variable domain of TCR clone 186002 (TRAV35, TRAJ33)
CWPRGRDSNYQLIW

SEQ ID NO: 372004 - protein, 13 aa, Homo sapiens
  CDR3 for beta chain variable domain of TCR clone 186002 (TRBV7-9, TRBJ2-3)
CASSPGSTDTPYF

SEQ ID NO: 372005 - protein, 16 aa, Homo sapiens
  CDR3 for alpha chain variable domain of TCR clone 186003 (TRAV30, TRAJ24)
CGTEIVDADSWGKFQF

SEQ ID NO: 372006 - protein, 14 aa, Homo sapiens
  CDR3 for beta chain variable domain of TCR clone 186003 (TRBV7-8, TRBJ2-7)
CASSVGQGAYEQYF

SEQ ID NO: 372007 - protein, 11 aa, Homo sapiens
  CDR3 for alpha chain variable domain of TCR clone 186004 (TRAV21, TRAJ31)
CAVRNNARLMF

SEQ ID NO: 372008 - protein, 11 aa, Homo sapiens
  CDR3 for beta chain variable domain of TCR clone 186004 (TRBV12-4, TRBJ2-3)
CASTATDTQYF

SEQ ID NO: 372009 - protein, 15 aa, Homo sapiens
  CDR3 for alpha chain variable domain of TCR clone 186005 (TRAV27, TRAJ38)
CAARRNAGNNRKLIW

SEQ ID NO: 372010 - protein, 12 aa, Homo sapiens
  CDR3 for beta chain variable domain of TCR clone 186005 (TRBV7-9, TRBJ2-7)
CASSLEGYEQYF

SEQ ID NO: 372011 - protein, 13 aa, Homo sapiens
  CDR3 for alpha chain variable domain of TCR clone 186006 (TRAV12-1, TRAJ20)
CVVNRETYYKLSF

SEQ ID NO: 372012 - protein, 15 aa, Homo sapiens
  CDR3 for beta chain variable domain of TCR clone 186006 (TRBV14, TRBJ2-1)
CASSLGLAGGTEQFF

SEQ ID NO: 372013 - protein, 14 aa, Homo sapiens
  CDR3 for alpha chain variable domain of TCR clone 186007 (TRAV35, TRAJ41)
CAGQACVRRNALNF

SEQ ID NO: 372014 - protein, 14 aa, Homo sapiens
  CDR3 for beta chain variable domain of TCR clone 186007 (TRBV20-1, TRBJ1-2)
CSASEQGAVYGYTF

SEQ ID NO: 372015 - protein, 12 aa, Homo sapiens
  CDR3 for alpha chain variable domain of TCR clone 186008 (TRAV13-2, TRAJ23)
CAERHRGGKLIF

SEQ ID NO: 372016 - protein, 16 aa, Homo sapiens
  CDR3 for beta chain variable domain of TCR clone 186008 (TRBV19, TRBJ2-1)
CTSSKAGPSSYNEQFF

SEQ ID NO: 372017 - protein, 14 aa, Homo sapiens
  CDR3 for alpha chain variable domain of TCR clone 186009 (TRAV1-2, TRAJ16)
CAVNRFSDGQKLLF

SEQ ID NO: 372018 - protein, 14 aa, Homo sapiens
  CDR3 for beta chain variable domain of TCR clone 186009 (TRBV7-8, TRBJ2-7)
CASSLNQGASEQYF

SEQ ID NO: 372019 - protein, 17 aa, Homo sapiens
  CDR3 for alpha chain variable domain of TCR clone 186010 (TRAV13-1, TRAJ28)
CAASPPYSGAGSYQLTF

SEQ ID NO: 372020 - protein, 15 aa, Homo sapiens
  CDR3 for beta chain variable domain of TCR clone 186010 (TRBV19, TRBJ2-1)
CASSIQATSYNEQFF

SEQ ID NO: 372021 - protein, 15 aa, Homo sapiens
  CDR3 for alpha chain variable domain of TCR clone 186011 (TRAV26-1, TRAJ29)
CIVKVEGAGNTPLVF

SEQ ID NO: 372022 - protein, 13 aa, Homo sapiens
  CDR3 for beta chain variable domain of TCR clone 186011 (TRBV7-9, TRBJ1-2)
CASSLKQNYGYTF

SEQ ID NO: 372023 - protein, 14 aa, Homo sapiens
  CDR3 for alpha chain variable domain of TCR clone 186012 (TRAV3, TRAJ9)
CAVRLNTGGFKTIF

SEQ ID NO: 372024 - protein, 16 aa, Homo sapiens
  CDR3 for beta chain variable domain of TCR clone 186012 (TRBV5-1, TRBJ2-1)
GASSIRSGGSYNEQFF

SEQ ID NO: 372025 - protein, 13 aa, Homo sapiens
  CDR3 for alpha chain variable domain of TCR clone 186013 (TRAV1-2, TRAJ9)
CAVLNTGGFKNIF

SEQ ID NO: 372026 - protein, 17 aa, Homo sapiens
  CDR3 for beta chain variable domain of TCR clone 186013 (TRBV13, TRBJ2-3)
CASSLSRVAGGRNTQYF

SEQ ID NO: 372027 - protein, 12 aa, Homo sapiens
  CDR3 for alpha chain variable domain of TCR clone 186014 (TRAV21, TRAJ8)
CAVNTGFQKLVF

SEQ ID NO: 372028 - protein, 12 aa, Homo sapiens
  CDR3 for beta chain variable domain of TCR clone 186014 (TRBV28, TRBJ2-1)
CASSFRGNEQFF

SEQ ID NO: 372029 - protein, 12 aa, Homo sapiens
  CDR3 for alpha chain variable domain of TCR clone 186015 (TRAV2, TRAJ3)
CASYSSASTIIF

SEQ ID NO: 372030 - protein, 13 aa, Homo sapiens
  CDR3 for beta chain variable domain of TCR clone 186015 (TRBV20-1, TRBJ1-1)
CSAGTVGNTEAFF

SEQ ID NO: 372031 - protein, 16 aa, Homo sapiens
  CDR3 for alpha chain variable domain of TCR clone 186016 (TRAV21, TRAJ37)
CAVRPRGSSNTGKLIF

SEQ ID NO: 372032 - protein, 14 aa, Homo sapiens
  CDR3 for beta chain variable domain of TCR clone 186016 (TRBV7-3, TRBJ2-2)
CASSLNSNTGELFF

SEQ ID NO: 372033 - protein, 16 aa, Homo sapiens
  CDR3 for alpha chain variable domain of TCR clone 186017 (TRAV27, TRAJ13)
CAGAKSDSGGYQKVTF

SEQ ID NO: 372034 - protein, 11 aa, Homo sapiens
  CDR3 for beta chain variable domain of TCR clone 186017 (TRBV7-8, TRBJ2-7)
CASSLSLEQYF

SEQ ID NO: 372035 - protein, 13 aa, Homo sapiens
  CDR3 for alpha chain variable domain of TCR clone 186018 (TRAV35, TRAJ42)
CAGFPGSQGNLIF

SEQ ID NO: 372036 - protein, 12 aa, Homo sapiens
  CDR3 for beta chain variable domain of TCR clone 186018 (TRBV7-9, TRBJ2-7)
CASSIKREEQYF

SEQ ID NO: 372037 - protein, 18 aa, Homo sapiens
  CDR3 for alpha chain variable domain of TCR clone 186019 (TRAV26-2, TRAJ17)
CCVLLHPAIKAAGSKLTF

SEQ ID NO: 372038 - protein, 12 aa, Homo sapiens
  CDR3 for beta chain variable domain of TCR clone 186019 (TRBV29-1, TRBJ2-7)
CSARDRPDEQYF

SEQ ID NO: 372039 - protein, 12 aa, Homo sapiens
  CDR3 for alpha chain variable domain of TCR clone 186020 (TRAV13-1, TRAJ11)
CAGPSGYSTLTF

SEQ ID NO: 372040 - protein, 16 aa, Homo sapiens
  CDR3 for beta chain variable domain of TCR clone 186020 (TRBV20-1, TRBJ1-2)
CSASMGQGVANYGYTF

SEQ ID NO: 372041 - protein, 16 aa, Homo sapiens
  CDR3 for alpha chain variable domain of TCR clone 186021 (TRAV8-3, TRAJ28)
CAVPPQRGAGSYQLTF

SEQ ID NO: 372042 - protein, 15 aa, Homo sapiens
  CDR3 for beta chain variable domain of TCR clone 186021 (TRBV20-1, TRBJ1-1)
CSASRGVTGNTEAFF

SEQ ID NO: 372043 - protein, 13 aa, Homo sapiens
  CDR3 for alpha chain variable domain of TCR clone 186022 (TRAV35, TRAJ36)
CAGPRIGSNNLFF

SEQ ID NO: 372044 - protein, 15 aa, Homo sapiens
  CDR3 for beta chain variable domain of TCR clone 186022 (TRBV28, TRBJ2-5)
CASSPPWSYQETQFF

SEQ ID NO: 372045 - protein, 14 aa, Homo sapiens
  CDR3 for alpha chain variable domain of TCR clone 186023 (TRAV12-2, TRAJ33)
CAVKRARSNYQLIC

SEQ ID NO: 372046 - protein, 15 aa, Homo sapiens
  CDR3 for beta chain variable domain of TCR clone 186023 (TRBV20-1, TRBJ2-7)
CSARDRVSGMDEQYF

SEQ ID NO: 372047 - protein, 14 aa, Homo sapiens
  CDR3 for alpha chain variable domain of TCR clone 186024 (TRAV13-2, TRAJ41)
CAERPDWAGYALNF

SEQ ID NO: 372048 - protein, 15 aa, Homo sapiens
  CDR3 for beta chain variable domain of TCR clone 186024 (TRBV12-4, TRBJ1-1)
CASSLGGLSDTEAFF

SEQ ID NO: 372049 - protein, 15 aa, Homo sapiens
  CDR3 for alpha chain variable domain of TCR clone 186025 (TRAV13-1, TRAJ17)
CAASIERAAGNKLTF

SEQ ID NO: 372050 - protein, 18 aa, Homo sapiens
  CDR3 for beta chain variable domain of TCR clone 186025 (TRBV19, TRBJ2-2)
CASSSYWRENRDTGELFF

SEQ ID NO: 372051 - protein, 14 aa, Homo sapiens
  CDR3 for alpha chain variable domain of TCR clone 186026 (TRAV12-3, TRAJ10)
SHLPLTGGGNKLTF

SEQ ID NO: 372052 - protein, 15 aa, Homo sapiens
  CDR3 for beta chain variable domain of TCR clone 186026 (TRBV28, TRBJ1-4)
CASSVSGSGLEKLFF

SEQ ID NO: 372053 - protein, 14 aa, Homo sapiens
  CDR3 for alpha chain variable domain of TCR clone 186027 (TRAV16, TRAJ33)
CALSAMDSNYQLIW

SEQ ID NO: 372054 - protein, 14 aa, Homo sapiens
  CDR3 for beta chain variable domain of TCR clone 186027 (TRBV18, TRBJ1-5)
CASSPGNSNQPQHF

SEQ ID NO: 372055 - protein, 14 aa, Homo sapiens
  CDR3 for alpha chain variable domain of TCR clone 186028 (TRAV17, TRAJ45)
CATASGGGADGLTF

SEQ ID NO: 372056 - protein, 15 aa, Homo sapiens
  CDR3 for beta chain variable domain of TCR clone 186028 (TRBV20-1, TRBJ2-2)
CSASPSTLNTGELFF

SEQ ID NO: 372057 - protein, 11 aa, Homo sapiens
  CDR3 for alpha chain variable domain of TCR clone 186029 (TRAV20, TRAJ34)
CRTKGTDKLIF

SEQ ID NO: 372058 - protein, 15 aa, Homo sapiens
  CDR3 for beta chain variable domain of TCR clone 186029 (TRBV9, TRBJ1-6)
CASSVAGTGDSPLHF

SEQ ID NO: 372059 - protein, 11 aa, Homo sapiens
  CDR3 for alpha chain variable domain of TCR clone 186030 (TRAV2, TRAJ13)
CASGGYQKVTF

SEQ ID NO: 372060 - protein, 16 aa, Homo sapiens
  CDR3 for beta chain variable domain of TCR clone 186030 (TRBV7-6, TRBJ2-3)
CASSLWREMGPDTQYF

SEQ ID NO: 372061 - protein, 12 aa, Homo sapiens
  CDR3 for alpha chain variable domain of TCR clone 186031 (TRAV13-1, TRAJ21)
CAAKEGFNRFYF

SEQ ID NO: 372062 - protein, 15 aa, Homo sapiens
  CDR3 for beta chain variable domain of TCR clone 186031 (TRBV25-1, TRBJ1-4)
CASSPGDSTNEKLVF

SEQ ID NO: 372063 - protein, 14 aa, Homo sapiens
  CDR3 for alpha chain variable domain of TCR clone 186032 (TRAV35, TRAJ33)
CAGSPQDSNYQLIW

SEQ ID NO: 372064 - protein, 15 aa, Homo sapiens
  CDR3 for beta chain variable domain of TCR clone 186032 (TRBV6-5, TRBJ2-1)
CASSYDAGAGNEQFF

SEQ ID NO: 372065 - protein, 17 aa, Homo sapiens
  CDR3 for alpha chain variable domain of TCR clone 186033 (TRAV3, TRAJ6)
CAVRDGPRARGSYIPIF

SEQ ID NO: 372066 - protein, 14 aa, Homo sapiens
  CDR3 for beta chain variable domain of TCR clone 186033 (TRBV7-2, TRBJ2-7)
CASSPKTSFYEQYF

SEQ ID NO: 372067 - protein, 12 aa, Homo sapiens
  CDR3 for alpha chain variable domain of TCR clone 186034 (TRAV17, TRAJ39)
CATGAAGNMLTF

SEQ ID NO: 372068 - protein, 15 aa, Homo sapiens
  CDR3 for beta chain variable domain of TCR clone 186034 (TRBV7-3, TRBJ2-1)
CASSQRGGALSEQFF

SEQ ID NO: 372069 - protein, 14 aa, Homo sapiens
  CDR3 for alpha chain variable domain of TCR clone 186035 (TRAV12-3, TRAJ58)
CAMSTETSGSRLTF

SEQ ID NO: 372070 - protein, 15 aa, Homo sapiens
  CDR3 for beta chain variable domain of TCR clone 186035 (TRBV4-1, TRGJ1)
CASSDTGGTNEKLCF

SEQ ID NO: 372071 - protein, 12 aa, Homo sapiens
  CDR3 for alpha chain variable domain of TCR clone 186036 (TRAV8-3, TRAJ26)
CAGDNYGQNFVF

SEQ ID NO: 372072 - protein, 15 aa, Homo sapiens
  CDR3 for beta chain variable domain of TCR clone 186036 (TRBV9, TRBJ2-7)
CASSLAGSSYKEQYF

SEQ ID NO: 372073 - protein, 14 aa, Homo sapiens
  CDR3 for alpha chain variable domain of TCR clone 186037 (TRAV1-2, TRAJ6)
CAVSLSGGTYIPTF

SEQ ID NO: 372074 - protein, 15 aa, Homo sapiens
  CDR3 for beta chain variable domain of TCR clone 186037 (TRBV28, TRBJ2-7)
CASSPGGRGFYEQYF

SEQ ID NO: 372075 - protein, 23 aa, Homo sapiens
  CDR3 for alpha chain variable domain of TCR clone 186038 (TRAV2, )
CAVAALNTGVSQNPDPAVYQLRD

SEQ ID NO: 372076 - protein, 15 aa, Homo sapiens
  CDR3 for beta chain variable domain of TCR clone 186038 (TRBV4-1, TRBJ1-4)
CASSDTGGTNEKLFF

SEQ ID NO: 372077 - protein, 18 aa, Homo sapiens
  CDR3 for alpha chain variable domain of TCR clone 186039 (TRAV12-2, )
CAVEDVQNPDPAVYQLRD

SEQ ID NO: 372078 - protein, 18 aa, Homo sapiens
  CDR3 for beta chain variable domain of TCR clone 186039 (TRBV11-2, TRBJ2-3)
CASSLGGASRGAPNTQYF

SEQ ID NO: 372079 - protein, 14 aa, Homo sapiens
  CDR3 for alpha chain variable domain of TCR clone 186040 (TRAV35, TRAJ10)
CAGILTGGGNKLTF

SEQ ID NO: 372080 - protein, 16 aa, Homo sapiens
  CDR3 for beta chain variable domain of TCR clone 186040 (TRBV12-5, TRBJ2-5)
CASGRRTSGNQETQYF

SEQ ID NO: 372081 - protein, 12 aa, Homo sapiens
  CDR3 for alpha chain variable domain of TCR clone 186041 (TRAV8-3, TRAJ20)
CAVGANDYKLSF

SEQ ID NO: 372082 - protein, 18 aa, Homo sapiens
  CDR3 for beta chain variable domain of TCR clone 186041 (TRBV20-1, TRBJ2-6)
CSAETTPTHGSGANVLTF

SEQ ID NO: 372083 - protein, 12 aa, Homo sapiens
  CDR3 for alpha chain variable domain of TCR clone 186042 (TRAV29/DV5, TRAJ41)
CAASDSGYALNF

SEQ ID NO: 372084 - protein, 14 aa, Homo sapiens
  CDR3 for beta chain variable domain of TCR clone 186042 (TRBV2, TRBJ1-5)
CASHAGEGDQHQHF

SEQ ID NO: 372085 - protein, 14 aa, Homo sapiens
  CDR3 for alpha chain variable domain of TCR clone 186043 (TRAV12-1, TRAJ17)
CVVSYKAAGNKLTF

SEQ ID NO: 372086 - protein, 17 aa, Homo sapiens
  CDR3 for beta chain variable domain of TCR clone 186043 (TRBV20-1, TRBJ2-1)
CSASSSGLAGSYDEQFF

SEQ ID NO: 372087 - protein, 13 aa, Homo sapiens
  CDR3 for alpha chain variable domain of TCR clone 186044 (TRAV27, TRAJ6)
CAVASGGSYIPTF

SEQ ID NO: 372088 - protein, 13 aa, Homo sapiens
  CDR3 for beta chain variable domain of TCR clone 186044 (TRBV20-1, TRBJ1-1)
CSARGGGNTEAFF

SEQ ID NO: 372089 - protein, 14 aa, Homo sapiens
  CDR3 for alpha chain variable domain of TCR clone 186045 (TRAV38-1, TRAJ29)
CAFITPSGKTPLVF

SEQ ID NO: 372090 - protein, 13 aa, Homo sapiens
  CDR3 for beta chain variable domain of TCR clone 186045 (TRBV7-3, TRBJ1-1)
CASSQDWGAEAFF

SEQ ID NO: 372091 - protein, 14 aa, Homo sapiens
  CDR3 for alpha chain variable domain of TCR clone 186046 (TRAV12-2, TRAJ9)
CAVNALEGGFKTIF

SEQ ID NO: 372092 - protein, 16 aa, Homo sapiens
  CDR3 for beta chain variable domain of TCR clone 186046 (TRBV12-5, TRBJ2-5)
CASGPRTSGNQETQYF

SEQ ID NO: 372093 - protein, 15 aa, Homo sapiens
  CDR3 for alpha chain variable domain of TCR clone 186047 (TRAV8-1, TRAJ6)
CAVNTPPGGSYIPTF

SEQ ID NO: 372094 - protein, 15 aa, Homo sapiens
  CDR3 for beta chain variable domain of TCR clone 186047 (TRBV9, TRBJ2-3)
CASSLEVGLTDTQYF

SEQ ID NO: 372095 - protein, 14 aa, Homo sapiens
  CDR3 for alpha chain variable domain of TCR clone 186048 (TRAV1-2, TRAJ16)
CAVNRFSDGQKLLF

SEQ ID NO: 372096 - protein, 16 aa, Homo sapiens
  CDR3 for beta chain variable domain of TCR clone 186048 (TRBV2, TRBJ2-4)
CASSEAPGGEQNIQYF

SEQ ID NO: 372097 - protein, 11 aa, Homo sapiens
  CDR3 for alpha chain variable domain of TCR clone 186049 (TRAV8-3, TRAJ15)
CAVGPGTALIF

SEQ ID NO: 372098 - protein, 16 aa, Homo sapiens
  CDR3 for beta chain variable domain of TCR clone 186049 (TRBV7-2, TRBJ2-5)
CASSLVLWTKQETQYF

SEQ ID NO: 372099 - protein, 15 aa, Homo sapiens
  CDR3 for alpha chain variable domain of TCR clone 186050 (TRAV3, TRAJ22)
CAVRDRGGSARPLTF

SEQ ID NO: 372100 - protein, 15 aa, Homo sapiens
  CDR3 for beta chain variable domain of TCR clone 186050 (TRBV5-4, TRBJ2-3)
CQPAAGAGGADTQYF

SEQ ID NO: 372101 - protein, 12 aa, Homo sapiens
  CDR3 for alpha chain variable domain of TCR clone 186051 (TRAV12-1, TRAJ41)
CVVGNSGYALNF

SEQ ID NO: 372102 - protein, 13 aa, Homo sapiens
  CDR3 for beta chain variable domain of TCR clone 186051 (TRBV10-3, TRBJ2-7)
CASKLAVNYEQYF

SEQ ID NO: 372103 - protein, 13 aa, Homo sapiens
  CDR3 for alpha chain variable domain of TCR clone 186052 (TRAV12-1, TRAJ53)
CVVNAESNYTLTF

SEQ ID NO: 372104 - protein, 15 aa, Homo sapiens
  CDR3 for beta chain variable domain of TCR clone 186052 (TRBV2, TRBJ2-5)
CASSGTVAAGETQYF

SEQ ID NO: 372105 - protein, 18 aa, Homo sapiens
  CDR3 for alpha chain variable domain of TCR clone 186053 (TRAV13-1, TRAJ52)
CAAKNPNACGTSYGKLTF

SEQ ID NO: 372106 - protein, 14 aa, Homo sapiens
  CDR3 for beta chain variable domain of TCR clone 186053 (TRBV7-3, TRBJ2-1)
CASSLAGGTNEQFF

SEQ ID NO: 372107 - protein, 17 aa, Homo sapiens
  CDR3 for alpha chain variable domain of TCR clone 186054 (TRAV8-4, TRAJ11)
CAVSDRGENSGDSTLTF

SEQ ID NO: 372108 - protein, 14 aa, Homo sapiens
  CDR3 for beta chain variable domain of TCR clone 186054 (TRBV20-1, TRBJ2-1)
CSPNDEASYNEQFF

SEQ ID NO: 372109 - protein, 17 aa, Homo sapiens
  CDR3 for alpha chain variable domain of TCR clone 186055 (TRAV3, TRAJ38)
CAVRDCLDAGNNRKLIW

SEQ ID NO: 372110 - protein, 16 aa, Homo sapiens
  CDR3 for beta chain variable domain of TCR clone 186055 (TRBV7-3, TRBJ2-2)
CASSLKRGTLSGELFF

SEQ ID NO: 372111 - protein, 14 aa, Homo sapiens
  CDR3 for alpha chain variable domain of TCR clone 186056 (TRAV12-1, TRAJ17)
FVVNYKAAGNKLTF

SEQ ID NO: 372112 - protein, 17 aa, Homo sapiens
  CDR3 for beta chain variable domain of TCR clone 186056 (TRBV11-2, TRBJ2-1)
CASSLYPPGVEYNEQFF

SEQ ID NO: 372113 - protein, 16 aa, Homo sapiens
  CDR3 for alpha chain variable domain of TCR clone 186057 (TRAV3, TRAJ37)
CAVRGKGSGNTGKLIF

SEQ ID NO: 372114 - protein, 13 aa, Homo sapiens
  CDR3 for beta chain variable domain of TCR clone 186057 (TRBV4-1, TRBJ1-2)
FASSQAQNYGYTF

SEQ ID NO: 372115 - protein, 10 aa, Homo sapiens
  CDR3 for alpha chain variable domain of TCR clone 186058 (TRAV30, TRAJ48)
CGIGNEKLTF

SEQ ID NO: 372116 - protein, 13 aa, Homo sapiens
  CDR3 for beta chain variable domain of TCR clone 186058 (TRBV18, TRBJ2-7)
CASQSGGGYEQYF

SEQ ID NO: 372117 - protein, 12 aa, Homo sapiens
  CDR3 for alpha chain variable domain of TCR clone 186059 (TRAV13-1, TRAJ11)
CAGPSGYSPLTF

SEQ ID NO: 372118 - protein, 13 aa, Homo sapiens
  CDR3 for beta chain variable domain of TCR clone 186059 (TRBV12-4, TRBJ2-1)
CASSLSPSNEQFF

SEQ ID NO: 372119 - protein, 17 aa, Homo sapiens
  CDR3 for alpha chain variable domain of TCR clone 186060 (TRAV16, TRAJ37)
CAFWPKNGPSNTGKLIF

SEQ ID NO: 372120 - protein, 17 aa, Homo sapiens
  CDR3 for beta chain variable domain of TCR clone 186060 (TRBV6-5, TRBJ2-7)
CASSYSCWGQGSYEQYF

SEQ ID NO: 372121 - protein, 14 aa, Homo sapiens
  CDR3 for alpha chain variable domain of TCR clone 186061 (TRAV20, TRAJ22)
CAVQGAGSARQLTF

SEQ ID NO: 372122 - protein, 14 aa, Homo sapiens
  CDR3 for beta chain variable domain of TCR clone 186061 (TRBV2, TRBJ2-7)
CASSLTSGGYEQYF

SEQ ID NO: 372123 - protein, 14 aa, Homo sapiens
  CDR3 for alpha chain variable domain of TCR clone 186062 (TRAV1-2, TRAJ16)
CAVNLFSDCQKLLF

SEQ ID NO: 372124 - protein, 15 aa, Homo sapiens
  CDR3 for beta chain variable domain of TCR clone 186062 (TRBV28, TRBJ2-5)
CASSAPRQVQETQYF

SEQ ID NO: 372125 - protein, 13 aa, Homo sapiens
  CDR3 for alpha chain variable domain of TCR clone 186063 (TRAV12-2, TRAJ39)
CAVNNNAGNMLTF

SEQ ID NO: 372126 - protein, 14 aa, Homo sapiens
  CDR3 for beta chain variable domain of TCR clone 186063 (TRBV5-7, TRBJ1-2)
CASSLVRGDYGYTF

SEQ ID NO: 372127 - protein, 12 aa, Homo sapiens
  CDR3 for alpha chain variable domain of TCR clone 186064 (TRAV35, TRAJ49)
CACWNTGNQFYF

SEQ ID NO: 372128 - protein, 16 aa, Homo sapiens
  CDR3 for beta chain variable domain of TCR clone 186064 (TRBV5-1, TRBJ2-2)
CASSLWDTTNTGELFF

SEQ ID NO: 372129 - protein, 12 aa, Homo sapiens
  CDR3 for alpha chain variable domain of TCR clone 186065 (TRAV17, TRAJ29)
CYASSGNTPLVF

SEQ ID NO: 372130 - protein, 14 aa, Homo sapiens
  CDR3 for beta chain variable domain of TCR clone 186065 (TRBV10-2, TRBJ1-5)
CASSSTGRNQPQHF

SEQ ID NO: 372131 - protein, 16 aa, Homo sapiens
  CDR3 for alpha chain variable domain of TCR clone 186066 (TRAV12-3, TRAJ53)
CAMSPGSGGSNYKLTF

SEQ ID NO: 372132 - protein, 13 aa, Homo sapiens
  CDR3 for beta chain variable domain of TCR clone 186066 (TRBV7-9, TRBJ1-2)
CASSLKQNYRYTF

SEQ ID NO: 372133 - protein, 14 aa, Homo sapiens
  CDR3 for alpha chain variable domain of TCR clone 186067 (TRAV8-4, TRAJ16)
CAVSPVGRWPEAAL

SEQ ID NO: 372134 - protein, 15 aa, Homo sapiens
  CDR3 for beta chain variable domain of TCR clone 186067 (TRBV7-3, TRBJ1-6)
CASSLGRGAGSPPHF

SEQ ID NO: 372135 - protein, 14 aa, Homo sapiens
  CDR3 for alpha chain variable domain of TCR clone 186068 (TRAV13-1, TRAJ20)
CAARPGSNDYKLSF

SEQ ID NO: 372136 - protein, 14 aa, Homo sapiens
  CDR3 for beta chain variable domain of TCR clone 186068 (TRBV5-1, TRBJ2-7)
CASSFRDTGSVQYF

SEQ ID NO: 372137 - protein, 14 aa, Homo sapiens
  CDR3 for alpha chain variable domain of TCR clone 186069 (TRAV1-2, TRAJ16)
CAVNRFSDGQKLLF

SEQ ID NO: 372138 - protein, 15 aa, Homo sapiens
  CDR3 for beta chain variable domain of TCR clone 186069 (TRBV9, TRBJ1-6)
CASSIAGTGDSTLHF

SEQ ID NO: 372139 - protein, 12 aa, Homo sapiens
  CDR3 for alpha chain variable domain of TCR clone 186070 (TRAV35, TRAJ39)
LAPNNAGNMLTF

SEQ ID NO: 372140 - protein, 13 aa, Homo sapiens
  CDR3 for beta chain variable domain of TCR clone 186070 (TRBV2, TRBJ1-2)
CASSVRGNYGYTF

SEQ ID NO: 372141 - protein, 15 aa, Homo sapiens
  CDR3 for alpha chain variable domain of TCR clone 186071 (TRAV27, TRAJ38)
CAARRNAGNNRKLIW

SEQ ID NO: 372142 - protein, 17 aa, Homo sapiens
  CDR3 for beta chain variable domain of TCR clone 186071 (TRBV7-9, TRBJ2-3)
CASSPTVAGDLTDTQYF

SEQ ID NO: 372143 - protein, 15 aa, Homo sapiens
  CDR3 for alpha chain variable domain of TCR clone 186072 (TRAV12-3, TRAJ11)
CARSEENSGYSTLPF

SEQ ID NO: 372144 - protein, 16 aa, Homo sapiens
  CDR3 for beta chain variable domain of TCR clone 186072 (TRBV5-1, TRBJ2-7)
CASSLEGLAGLYEQHF

SEQ ID NO: 372145 - protein, 15 aa, Homo sapiens
  CDR3 for alpha chain variable domain of TCR clone 186073 (TRAV8-2, TRAJ23)
CVVSPLITREESLSS

SEQ ID NO: 372146 - protein, 14 aa, Homo sapiens
  CDR3 for beta chain variable domain of TCR clone 186073 (TRBV19, TRBJ2-1)
CASPTFVLSGEQFF

SEQ ID NO: 372147 - protein, 15 aa, Homo sapiens
  CDR3 for alpha chain variable domain of TCR clone 186074 (TRAV12-2, TRAJ52)
CAVVLVVLAMESRHL

SEQ ID NO: 372148 - protein, 13 aa, Homo sapiens
  CDR3 for beta chain variable domain of TCR clone 186074 (TRBV11-2, TRBJ2-1)
CASSLRLTHEQFF

SEQ ID NO: 372149 - protein, 12 aa, Homo sapiens
  CDR3 for alpha chain variable domain of TCR clone 186075 (TRAV13-2, TRAJ8)
CAPWLGFQKLVF

SEQ ID NO: 372150 - protein, 15 aa, Homo sapiens
  CDR3 for beta chain variable domain of TCR clone 186075 (TRBV12-4, TRBJ2-5)
CASSLSGAFQETQCF

SEQ ID NO: 372151 - protein, 11 aa, Homo sapiens
  CDR3 for alpha chain variable domain of TCR clone 186076 (TRAV27, TRAJ47)
CRSNQGNELVF

SEQ ID NO: 372152 - protein, 16 aa, Homo sapiens
  CDR3 for beta chain variable domain of TCR clone 186076 (TRBV7-9, TRBJ2-1)
CASSDVAGGSYNEQFF

SEQ ID NO: 372153 - protein, 15 aa, Homo sapiens
  CDR3 for alpha chain variable domain of TCR clone 186077 (TRAV2, TRAJ22)
CAVPSRGGSARHLPF

SEQ ID NO: 372154 - protein, 11 aa, Homo sapiens
  CDR3 for beta chain variable domain of TCR clone 186077 (TRBV27, TRBJ2-3)
CASSLGDTQYF

SEQ ID NO: 372155 - protein, 11 aa, Homo sapiens
  CDR3 for alpha chain variable domain of TCR clone 186078 (TRAV4, TRAJ31)
CLAGDNARLMF

SEQ ID NO: 372156 - protein, 16 aa, Homo sapiens
  CDR3 for beta chain variable domain of TCR clone 186078 (TRBV7-2, TRBJ2-5)
CGSSSKWLSGQETQYF

SEQ ID NO: 372157 - protein, 19 aa, Homo sapiens
  CDR3 for alpha chain variable domain of TCR clone 186079 (TRAV27, TRAJ49)
TAAQPGDTGLYPTSNQFYF

SEQ ID NO: 372158 - protein, 12 aa, Homo sapiens
  CDR3 for beta chain variable domain of TCR clone 186079 (TRBV7-3, TRBJ2-1)
CASSFINNEQFF

SEQ ID NO: 372159 - protein, 19 aa, Homo sapiens
  CDR3 for alpha chain variable domain of TCR clone 186080 (TRAV1-2, TRAJ26)
CLLPLCCERPDNYGQNFVF

SEQ ID NO: 372160 - protein, 14 aa, Homo sapiens
  CDR3 for beta chain variable domain of TCR clone 186080 (TRBV7-2, TRBJ1-5)
CASSTQGAGQPQHF

SEQ ID NO: 372161 - protein, 16 aa, Homo sapiens
  CDR3 for alpha chain variable domain of TCR clone 186081 (TRAV12-2, TRAJ45)
CAVKRNPGGGADGLTF

SEQ ID NO: 372162 - protein, 16 aa, Homo sapiens
  CDR3 for beta chain variable domain of TCR clone 186081 (TRBV6-5, TRBJ2-1)
CASSYSLSGGYNEQFF

SEQ ID NO: 372163 - protein, 16 aa, Homo sapiens
  CDR3 for alpha chain variable domain of TCR clone 186082 (TRAV16, TRAJ4)
CALSRMFSGGYNKLIF

SEQ ID NO: 372164 - protein, 13 aa, Homo sapiens
  CDR3 for beta chain variable domain of TCR clone 186082 (TRBV12-4, TRBJ2-7)
CASSLSGVYEQYF

SEQ ID NO: 372165 - protein, 15 aa, Homo sapiens
  CDR3 for alpha chain variable domain of TCR clone 186083 (TRAV3, TRAJ5)
CAVRDLYTGRRALTF

SEQ ID NO: 372166 - protein, 16 aa, Homo sapiens
  CDR3 for beta chain variable domain of TCR clone 186083 (TRBV20-1, TRBJ1-4)
SAVLRQGLLTNEKLFF

SEQ ID NO: 372167 - protein, 14 aa, Homo sapiens
  CDR3 for alpha chain variable domain of TCR clone 186084 (TRAV12-2, TRAJ45)
CAVNIGGGADGLTF

SEQ ID NO: 372168 - protein, 13 aa, Homo sapiens
  CDR3 for beta chain variable domain of TCR clone 186084 (TRBV7-3, TRBJ1-1)
CASSQDWGAEAFF

SEQ ID NO: 372169 - protein, 12 aa, Homo sapiens
  CDR3 for alpha chain variable domain of TCR clone 186085 (TRAV3, TRAJ43)
RAVRDPNNDMRF

SEQ ID NO: 372170 - protein, 13 aa, Homo sapiens
  CDR3 for beta chain variable domain of TCR clone 186085 (TRBV19, TRBJ1-2)
CASSVPGQDGYTF

SEQ ID NO: 372171 - protein, 12 aa, Homo sapiens
  CDR3 for alpha chain variable domain of TCR clone 186086 (TRAV12-3, TRAJ20)
CAMVRGDYKLSF

SEQ ID NO: 372172 - protein, 14 aa, Homo sapiens
  CDR3 for beta chain variable domain of TCR clone 186086 (TRBV7-2, TRBJ1-2)
CASSQTGSTYGYTF

SEQ ID NO: 372173 - protein, 12 aa, Homo sapiens
  CDR3 for alpha chain variable domain of TCR clone 186087 (TRAV13-1, TRAJ53)
AASGGSNYKLTF

SEQ ID NO: 372174 - protein, 15 aa, Homo sapiens
  CDR3 for beta chain variable domain of TCR clone 186087 (TRBV5-1, TRBJ2-1)
CASIPPRAPYNEQFF

SEQ ID NO: 372175 - protein, 15 aa, Homo sapiens
  CDR3 for alpha chain variable domain of TCR clone 186088 (TRAV34, TRAJ38)
CGADFTPGNNRKLIW

SEQ ID NO: 372176 - protein, 15 aa, Homo sapiens
  CDR3 for beta chain variable domain of TCR clone 186088 (TRBV19, TRBJ2-7)
CASSTAGSGEALRYF

SEQ ID NO: 372177 - protein, 10 aa, Homo sapiens
  CDR3 for alpha chain variable domain of TCR clone 186089 (TRAV1-2, TRAJ20)
CALNDYKLSF

SEQ ID NO: 372178 - protein, 16 aa, Homo sapiens
  CDR3 for beta chain variable domain of TCR clone 186089 (TRBV20-1, TRBJ1-1)
CSAMALTQGMNTEAFF

SEQ ID NO: 372179 - protein, 14 aa, Homo sapiens
  CDR3 for alpha chain variable domain of TCR clone 186090 (TRAV2, TRAJ41)
CAVGTSNSGYALNF

SEQ ID NO: 372180 - protein, 13 aa, Homo sapiens
  CDR3 for beta chain variable domain of TCR clone 186090 (TRBV4-1, TRBJ2-1)
CASSQEVQYERFF

SEQ ID NO: 372181 - protein, 12 aa, Homo sapiens
  CDR3 for alpha chain variable domain of TCR clone 186091 (TRAV8-3, TRAJ26)
CAGDNYGQNFVF

SEQ ID NO: 372182 - protein, 19 aa, Homo sapiens
  CDR3 for beta chain variable domain of TCR clone 186091 (TRBV5-7, TRBJ2-1)
CASSLASGIGTGIYNEQFF

SEQ ID NO: 372183 - protein, 15 aa, Homo sapiens
  CDR3 for alpha chain variable domain of TCR clone 186092 (TRAV27, TRAJ38)
CAARRNAGNNRKRIW

SEQ ID NO: 372184 - protein, 16 aa, Homo sapiens
  CDR3 for beta chain variable domain of TCR clone 186092 (TRBV12-5, TRBJ1-5)
CASSRPVGGSNQPQHF

SEQ ID NO: 372185 - protein, 13 aa, Homo sapiens
  CDR3 for alpha chain variable domain of TCR clone 186093 (TRAV16, TRAJ11)
CALNQSGYSTLTF

SEQ ID NO: 372186 - protein, 14 aa, Homo sapiens
  CDR3 for beta chain variable domain of TCR clone 186093 (TRBV19, TRBJ2-7)
CASSTTRSSYEQYV

SEQ ID NO: 372187 - protein, 11 aa, Homo sapiens
  CDR3 for alpha chain variable domain of TCR clone 186094 (TRAV1-2, TRAJ20)
CAVANDYKLSF

SEQ ID NO: 372188 - protein, 14 aa, Homo sapiens
  CDR3 for beta chain variable domain of TCR clone 186094 (TRBV19, TRBJ2-1)
CASPTFVLSGEQFL

SEQ ID NO: 372189 - protein, 13 aa, Homo sapiens
  CDR3 for alpha chain variable domain of TCR clone 186095 (TRAV27, TRAJ45)
CRSPGGGADGLTF

SEQ ID NO: 372190 - protein, 15 aa, Homo sapiens
  CDR3 for beta chain variable domain of TCR clone 186095 (TRBV9, TRBJ2-2)
CASSDFAGASGELFF

SEQ ID NO: 372191 - protein, 13 aa, Homo sapiens
  CDR3 for alpha chain variable domain of TCR clone 186096 (TRAV41, TRAJ49)
CAVYSNTGNQFYF

SEQ ID NO: 372192 - protein, 12 aa, Homo sapiens
  CDR3 for beta chain variable domain of TCR clone 186096 (TRBV11-2, TRBJ2-2)
CASSLGGGELFF

SEQ ID NO: 372193 - protein, 13 aa, Homo sapiens
  CDR3 for alpha chain variable domain of TCR clone 186097 (TRAV21, TRAJ20)
CAVGLRVDSKLSF

SEQ ID NO: 372194 - protein, 11 aa, Homo sapiens
  CDR3 for beta chain variable domain of TCR clone 186097 (TRBV29-1, TRBJ2-5)
CSEDRTGTQYF

SEQ ID NO: 372195 - protein, 15 aa, Homo sapiens
  CDR3 for alpha chain variable domain of TCR clone 186098 (TRAV17, TRAJ23)
CATDAEDNQGGKLIF

SEQ ID NO: 372196 - protein, 12 aa, Homo sapiens
  CDR3 for beta chain variable domain of TCR clone 186098 (TRBV2, TRBJ2-1)
CAKRERYNEQFF

SEQ ID NO: 372197 - protein, 17 aa, Homo sapiens
  CDR3 for alpha chain variable domain of TCR clone 186099 (TRAV3, TRAJ7)
CAVRDMSPLEGTTDKLL

SEQ ID NO: 372198 - protein, 17 aa, Homo sapiens
  CDR3 for beta chain variable domain of TCR clone 186099 (TRBV15, TRBJ1-2)
CATSGREIDVVNYGYTF

SEQ ID NO: 372199 - protein, 13 aa, Homo sapiens
  CDR3 for alpha chain variable domain of TCR clone 186100 (TRAV23/DV6, TRAJ36)
CAAGQTGVNNLFF

SEQ ID NO: 372200 - protein, 13 aa, Homo sapiens
  CDR3 for beta chain variable domain of TCR clone 186100 (TRBV7-8, TRBJ1-5)
CASSLGGDQPQHF

SEQ ID NO: 372201 - protein, 11 aa, Homo sapiens
  CDR3 for alpha chain variable domain of TCR clone 186101 (TRAV27, TRAJ40)
SLTSGTYKYIF

SEQ ID NO: 372202 - protein, 13 aa, Homo sapiens
  CDR3 for beta chain variable domain of TCR clone 186101 (TRBV27, TRBJ1-1)
CASSLSIGAEAFF

SEQ ID NO: 372203 - protein, 10 aa, Homo sapiens
  CDR3 for alpha chain variable domain of TCR clone 186102 (TRAV12-3, TRAJ18)
CAMSAEAQPW

SEQ ID NO: 372204 - protein, 15 aa, Homo sapiens
  CDR3 for beta chain variable domain of TCR clone 186102 (TRBV15, TRBJ1-6)
CATSGGLNSPSTLGT

SEQ ID NO: 372205 - protein, 13 aa, Homo sapiens
  CDR3 for alpha chain variable domain of TCR clone 186103 (TRAV8-3, TRAJ28)
CAVGAVGSYHFIF

SEQ ID NO: 372206 - protein, 15 aa, Homo sapiens
  CDR3 for beta chain variable domain of TCR clone 186103 (TRBV7-9, TRBJ1-5)
CASSQGHQPNQPQHF

SEQ ID NO: 372207 - protein, 13 aa, Homo sapiens
  CDR3 for alpha chain variable domain of TCR clone 186104 (TRAV12-3, TRAJ7)
CAVTPYGNDRLAF

SEQ ID NO: 372208 - protein, 13 aa, Homo sapiens
  CDR3 for beta chain variable domain of TCR clone 186104 (TRBV10-3, TRBJ1-2)
CAINADLNYGYAF

SEQ ID NO: 372209 - protein, 16 aa, Homo sapiens
  CDR3 for alpha chain variable domain of TCR clone 186105 (TRAV3, TRAJ10)
CAVRDMNAGGGNKLTF

SEQ ID NO: 372210 - protein, 19 aa, Homo sapiens
  CDR3 for beta chain variable domain of TCR clone 186105 (TRBV25-1, TRBJ2-2)
CAILVYRVDRGRKTGELFF

SEQ ID NO: 372211 - protein, 14 aa, Homo sapiens
  CDR3 for alpha chain variable domain of TCR clone 186106 (TRAV12-1, TRAJ38)
CVVNNAGNNRKLIC

SEQ ID NO: 372212 - protein, 16 aa, Homo sapiens
  CDR3 for beta chain variable domain of TCR clone 186106 (TRBV7-2, TRBJ1-2)
CASSRQGGGANYGYTF

SEQ ID NO: 372213 - protein, 17 aa, Homo sapiens
  CDR3 for alpha chain variable domain of TCR clone 186107 (TRAV38-1, TRAJ45)
CAFMRSHSGGGADGLTF

SEQ ID NO: 372214 - protein, 15 aa, Homo sapiens
  CDR3 for beta chain variable domain of TCR clone 186107 (TRBV7-2, TRBJ2-3)
CASSLVVRGLDTQYF

SEQ ID NO: 372215 - protein, 13 aa, Homo sapiens
  CDR3 for alpha chain variable domain of TCR clone 186108 (TRAV23/DV6, TRAJ47)
CAASSQYGNKLVF

SEQ ID NO: 372216 - protein, 15 aa, Homo sapiens
  CDR3 for beta chain variable domain of TCR clone 186108 (TRBV7-3, TRBJ2-1)
SASSLDGNSYNEQFF

SEQ ID NO: 372217 - protein, 17 aa, Homo sapiens
  CDR3 for alpha chain variable domain of TCR clone 186109 (TRAV13-1, TRAJ28)
CAASPPYSGAGRYQLTF

SEQ ID NO: 372218 - protein, 13 aa, Homo sapiens
  CDR3 for beta chain variable domain of TCR clone 186109 (TRBV14, TRBJ1-1)
CASSREFGTEAFF

SEQ ID NO: 372219 - protein, 12 aa, Homo sapiens
  CDR3 for alpha chain variable domain of TCR clone 186110 (TRAV27, TRAJ35)
CAGADFGNVLHC

SEQ ID NO: 372220 - protein, 15 aa, Homo sapiens
  CDR3 for beta chain variable domain of TCR clone 186110 (TRBV20-1, TRBJ2-7)
SSARDRVSGMDEQYF

SEQ ID NO: 372221 - protein, 15 aa, Homo sapiens
  CDR3 for alpha chain variable domain of TCR clone 186111 (TRAV12-3, TRAJ11)
CAMSEENSGYSTLTF

SEQ ID NO: 372222 - protein, 17 aa, Homo sapiens
  CDR3 for beta chain variable domain of TCR clone 186111 (TRBV24-1, TRBJ2-3)
CATSDLPSGEDTDTQYF

SEQ ID NO: 372223 - protein, 13 aa, Homo sapiens
  CDR3 for alpha chain variable domain of TCR clone 186112 (TRAV12-1, TRAJ33)
CGDAPDSNYQLIW

SEQ ID NO: 372224 - protein, 15 aa, Homo sapiens
  CDR3 for beta chain variable domain of TCR clone 186112 (TRBV27, TRBJ2-1)
CASRNGGGSSNEQFF

SEQ ID NO: 372225 - protein, 16 aa, Homo sapiens
  CDR3 for alpha chain variable domain of TCR clone 186113 (TRAV30, TRAJ24)
CGTEIVDAYSWGKFQF

SEQ ID NO: 372226 - protein, 14 aa, Homo sapiens
  CDR3 for beta chain variable domain of TCR clone 186113 (TRBV19, TRBJ2-1)
CASPTFVLSGEQFF

SEQ ID NO: 372227 - protein, 13 aa, Homo sapiens
  CDR3 for alpha chain variable domain of TCR clone 186114 (TRAV12-3, TRAJ21)
CAPGPHNFNKFYF

SEQ ID NO: 372228 - protein, 16 aa, Homo sapiens
  CDR3 for beta chain variable domain of TCR clone 186114 (TRBV5-1, TRBJ2-2)
CASSSHREGDTGELFF

SEQ ID NO: 372229 - protein, 16 aa, Homo sapiens
  CDR3 for alpha chain variable domain of TCR clone 186115 (TRAV4, TRAJ22)
CLVGDHYSGSARQLTF

SEQ ID NO: 372230 - protein, 17 aa, Homo sapiens
  CDR3 for beta chain variable domain of TCR clone 186115 (TRBV13, TRBJ2-3)
CASSLSRVAGGRNTQYF

SEQ ID NO: 372231 - protein, 18 aa, Homo sapiens
  CDR3 for alpha chain variable domain of TCR clone 186116 (TRAV26-2, TRAJ45)
CILRVDKYSGGGADGLTF

SEQ ID NO: 372232 - protein, 15 aa, Homo sapiens
  CDR3 for beta chain variable domain of TCR clone 186116 (TRBV7-3, TRBJ2-1)
CASSPTGGGEVEQFF

SEQ ID NO: 372233 - protein, 13 aa, Homo sapiens
  CDR3 for alpha chain variable domain of TCR clone 186117 (TRAV14/DV4, TRAJ4)
CAMKAGGYNKRIF

SEQ ID NO: 372234 - protein, 15 aa, Homo sapiens
  CDR3 for beta chain variable domain of TCR clone 186117 (TRBV11-3, TRBJ1-1)
CASSLGGPGDTEAFF

SEQ ID NO: 372235 - protein, 12 aa, Homo sapiens
  CDR3 for alpha chain variable domain of TCR clone 186118 (TRAV12-1, TRAJ40)
CVVYSGTYKYIF

SEQ ID NO: 372236 - protein, 19 aa, Homo sapiens
  CDR3 for beta chain variable domain of TCR clone 186118 (TRBV7-2, TRBJ2-3)
CAISFLSRNWGGGTDTQYF

SEQ ID NO: 372237 - protein, 14 aa, Homo sapiens
  CDR3 for alpha chain variable domain of TCR clone 186119 (TRAV12-2, TRAJ5)
CAVNRFTGRRALTF

SEQ ID NO: 372238 - protein, 15 aa, Homo sapiens
  CDR3 for beta chain variable domain of TCR clone 186119 (TRBV15, TRBJ1-5)
CATSREQGGNQPQHF

SEQ ID NO: 372239 - protein, 10 aa, Homo sapiens
  CDR3 for alpha chain variable domain of TCR clone 186120 (TRAV12-1, TRAJ43)
GVVHNNDMRF

SEQ ID NO: 372240 - protein, 13 aa, Homo sapiens
  CDR3 for beta chain variable domain of TCR clone 186120 (TRBV12-4, TRBJ1-2)
CASSSGLTVISTF

SEQ ID NO: 372241 - protein, 15 aa, Homo sapiens
  CDR3 for alpha chain variable domain of TCR clone 186121 (TRAV12-3, TRAJ6)
CAMSASTGGSYIPTF

SEQ ID NO: 372242 - protein, 16 aa, Homo sapiens
  CDR3 for beta chain variable domain of TCR clone 186121 (TRBV20-1, TRBJ1-2)
CSASMGQGVAKYGYTF

SEQ ID NO: 372243 - protein, 16 aa, Homo sapiens
  CDR3 for alpha chain variable domain of TCR clone 186122 (TRAV30, TRAJ24)
CGTEIVDADSWGKFQF

SEQ ID NO: 372244 - protein, 17 aa, Homo sapiens
  CDR3 for beta chain variable domain of TCR clone 186122 (TRBV20-1, TRBJ2-1)
CSASPRLAGTRYNEQFF

SEQ ID NO: 372245 - protein, 20 aa, Homo sapiens
  CDR3 for alpha chain variable domain of TCR clone 186123 (TRAV17, TRAJ9)
CFLLLCYGGMGGTGGFKTIF

SEQ ID NO: 372246 - protein, 16 aa, Homo sapiens
  CDR3 for beta chain variable domain of TCR clone 186123 (TRBV19, TRBJ2-1)
CASSKAGPSSYNEQFF

SEQ ID NO: 372247 - protein, 17 aa, Homo sapiens
  CDR3 for alpha chain variable domain of TCR clone 186124 (TRAV3, TRAJ6)
CAVRDGSRAGGSYIPTL

SEQ ID NO: 372248 - protein, 14 aa, Homo sapiens
  CDR3 for beta chain variable domain of TCR clone 186124 (TRBV7-2, TRBJ2-7)
CASSPKTSFYEQYF

SEQ ID NO: 372249 - protein, 14 aa, Homo sapiens
  CDR3 for alpha chain variable domain of TCR clone 186125 (TRAV13-1, TRAJ44)
CAAKATGTASKLTF

SEQ ID NO: 372250 - protein, 13 aa, Homo sapiens
  CDR3 for beta chain variable domain of TCR clone 186125 (TRBV19, TRBJ2-7)
CASSPRQSYEQYF

SEQ ID NO: 372251 - protein, 19 aa, Homo sapiens
  CDR3 for alpha chain variable domain of TCR clone 186126 (TRAV3, TRAJ6)
CAVRDGPRQEETTYLHLEE

SEQ ID NO: 372252 - protein, 14 aa, Homo sapiens
  CDR3 for beta chain variable domain of TCR clone 186126 (TRBV7-2, TRBJ2-7)
CASSPKTSFYEQYL

SEQ ID NO: 372253 - protein, 16 aa, Homo sapiens
  CDR3 for alpha chain variable domain of TCR clone 186127 (TRAV30, TRAJ24)
CGTEIVDADGWGKFQF

SEQ ID NO: 372254 - protein, 13 aa, Homo sapiens
  CDR3 for beta chain variable domain of TCR clone 186127 (TRBV11-2, TRBJ2-5)
CASSSTGEETQYF

SEQ ID NO: 372255 - protein, 21 aa, Homo sapiens
  CDR3 for alpha chain variable domain of TCR clone 186128 (TRAV17, TRAJ53)
TASRAADTASQGGGSNYKLTF

SEQ ID NO: 372256 - protein, 14 aa, Homo sapiens
  CDR3 for beta chain variable domain of TCR clone 186128 (TRBV12-5, TRBJ2-5)
CASGSRTHQETQYF

SEQ ID NO: 372257 - protein, 19 aa, Homo sapiens
  CDR3 for alpha chain variable domain of TCR clone 186129 (TRAV17, TRAJ57)
CFLLLCYGPLQGGSEKLVF

SEQ ID NO: 372258 - protein, 16 aa, Homo sapiens
  CDR3 for beta chain variable domain of TCR clone 186129 (TRBV20-1, TRBJ2-2)
CSASASGIPGAGELFF

SEQ ID NO: 372259 - protein, 17 aa, Homo sapiens
  CDR3 for alpha chain variable domain of TCR clone 186130 (TRAV3, TRAJ6)
CSVRYGPRAGGSYIPTF

SEQ ID NO: 372260 - protein, 14 aa, Homo sapiens
  CDR3 for beta chain variable domain of TCR clone 186130 (TRBV7-2, TRBJ2-7)
CASSPKTSFYEQYF

SEQ ID NO: 372261 - protein, 17 aa, Homo sapiens
  CDR3 for alpha chain variable domain of TCR clone 186131 (TRAV27, TRAJ18)
CAGLHRRRGSTLGRLYF

SEQ ID NO: 372262 - protein, 14 aa, Homo sapiens
  CDR3 for beta chain variable domain of TCR clone 186131 (TRBV20-1, TRBJ1-5)
CSARGRGSNQPQHF

SEQ ID NO: 372263 - protein, 16 aa, Homo sapiens
  CDR3 for alpha chain variable domain of TCR clone 186132 (TRAV30, TRAJ24)
CGTEIVDADSWGKFQF

SEQ ID NO: 372264 - protein, 12 aa, Homo sapiens
  CDR3 for beta chain variable domain of TCR clone 186132 (TRBV7-8, TRBJ2-7)
CASSLGDREQYS

SEQ ID NO: 372265 - protein, 14 aa, Homo sapiens
  CDR3 for alpha chain variable domain of TCR clone 186133 (TRAV23/DV6, TRAJ4)
CAANLSGGYNKLIF

SEQ ID NO: 372266 - protein, 17 aa, Homo sapiens
  CDR3 for beta chain variable domain of TCR clone 186133 (TRBV7-3, TRBJ2-3)
CASSLMKRMRGADTQYF

SEQ ID NO: 372267 - protein, 12 aa, Homo sapiens
  CDR3 for alpha chain variable domain of TCR clone 186134 (TRAV1-2, TRAJ33)
FAALDSNYQLIW

SEQ ID NO: 372268 - protein, 13 aa, Homo sapiens
  CDR3 for beta chain variable domain of TCR clone 186134 (TRBV19, TRBJ2-7)
CASRKAGGSEQYF

SEQ ID NO: 372269 - protein, 14 aa, Homo sapiens
  CDR3 for alpha chain variable domain of TCR clone 186135 (TRAV23/DV6, TRAJ8)
CAASKATGFQKLGF

SEQ ID NO: 372270 - protein, 13 aa, Homo sapiens
  CDR3 for beta chain variable domain of TCR clone 186135 (TRBV11-3, TRBJ2-5)
CASSSGLQETQYF

SEQ ID NO: 372271 - protein, 13 aa, Homo sapiens
  CDR3 for alpha chain variable domain of TCR clone 186136 (TRAV8-2, TRAJ4)
CCESFWCYNKLIF

SEQ ID NO: 372272 - protein, 15 aa, Homo sapiens
  CDR3 for beta chain variable domain of TCR clone 186136 (TRBV4-1, TRBJ1-4)
CASSDTGGTDEKLFF

SEQ ID NO: 372273 - protein, 15 aa, Homo sapiens
  CDR3 for alpha chain variable domain of TCR clone 186137 (TRAV8-3, TRAJ11)
CAVGLLNSGYSTLTF

SEQ ID NO: 372274 - protein, 16 aa, Homo sapiens
  CDR3 for beta chain variable domain of TCR clone 186137 (TRBV19, TRBJ1-1)
CASRPRAQELNTEAFF

SEQ ID NO: 372275 - protein, 11 aa, Homo sapiens
  CDR3 for alpha chain variable domain of TCR clone 186138 (TRAV12-2, TRAJ49)
CAVHTGNQFYF

SEQ ID NO: 372276 - protein, 11 aa, Homo sapiens
  CDR3 for beta chain variable domain of TCR clone 186138 (TRBV12-4, TRBJ2-3)
CASTATDTQYF

SEQ ID NO: 372277 - protein, 14 aa, Homo sapiens
  CDR3 for alpha chain variable domain of TCR clone 186139 (TRAV26-1, TRAJ38)
CIADNAGNNRKLIW

SEQ ID NO: 372278 - protein, 14 aa, Homo sapiens
  CDR3 for beta chain variable domain of TCR clone 186139 (TRBV19, TRBJ2-2)
CASTVTANTGELFF

SEQ ID NO: 372279 - protein, 15 aa, Homo sapiens
  CDR3 for alpha chain variable domain of TCR clone 186140 (TRAV8-3, TRAJ27)
CAVGPSKTNAGKSTF

SEQ ID NO: 372280 - protein, 14 aa, Homo sapiens
  CDR3 for beta chain variable domain of TCR clone 186140 (TRBV4-2, TRBJ2-3)
CASSQERGTDTQYF

SEQ ID NO: 372281 - protein, 13 aa, Homo sapiens
  CDR3 for alpha chain variable domain of TCR clone 186141 (TRAV27, TRAJ57)
CRSAQGGSEKLVF

SEQ ID NO: 372282 - protein, 12 aa, Homo sapiens
  CDR3 for beta chain variable domain of TCR clone 186141 (TRBV7-9, TRBJ2-7)
CASSIKREEQYF

SEQ ID NO: 372283 - protein, 17 aa, Homo sapiens
  CDR3 for alpha chain variable domain of TCR clone 186142 (TRAV3, TRAJ28)
CAVREADSGAGSYQLTF

SEQ ID NO: 372284 - protein, 13 aa, Homo sapiens
  CDR3 for beta chain variable domain of TCR clone 186142 (TRBV15, TRBJ1-6)
CATSGGLNSPLHF

SEQ ID NO: 372285 - protein, 16 aa, Homo sapiens
  CDR3 for alpha chain variable domain of TCR clone 186143 (TRAV30, TRAJ24)
CGTETVDADSWGKFQF

SEQ ID NO: 372286 - protein, 14 aa, Homo sapiens
  CDR3 for beta chain variable domain of TCR clone 186143 (TRBV12-5, TRBJ2-5)
CASGSRTHQGTQYF

SEQ ID NO: 372287 - protein, 22 aa, Homo sapiens
  CDR3 for alpha chain variable domain of TCR clone 186144 (TRAV8-2, TRAJ45)
HLTKPSAHMSDAAEYSADGLTF

SEQ ID NO: 372288 - protein, 13 aa, Homo sapiens
  CDR3 for beta chain variable domain of TCR clone 186144 (TRBV7-3, TRBJ2-1)
CASRPVAYNEQFF

SEQ ID NO: 372289 - protein, 15 aa, Homo sapiens
  CDR3 for alpha chain variable domain of TCR clone 186145 (TRAV27, TRAJ33)
CAGADIMDSNYQLIW

SEQ ID NO: 372290 - protein, 13 aa, Homo sapiens
  CDR3 for beta chain variable domain of TCR clone 186145 (TRBV28, TRBJ1-2)
CASSLQGRSGYTF

SEQ ID NO: 372291 - protein, 11 aa, Homo sapiens
  CDR3 for alpha chain variable domain of TCR clone 186146 (TRAV12-1, TRAJ21)
CVVNNFNKFYF

SEQ ID NO: 372292 - protein, 14 aa, Homo sapiens
  CDR3 for beta chain variable domain of TCR clone 186146 (TRBV6-1, TRBJ1-3)
CASVQGGGGNTIYF

SEQ ID NO: 372293 - protein, 17 aa, Homo sapiens
  CDR3 for alpha chain variable domain of TCR clone 186147 (TRAV3, TRAJ42)
CAVRDRDYGGSQGNLIF

SEQ ID NO: 372294 - protein, 12 aa, Homo sapiens
  CDR3 for beta chain variable domain of TCR clone 186147 (TRBV12-5, TRBJ2-5)
CASGQGVDTQYF

SEQ ID NO: 372295 - protein, 12 aa, Homo sapiens
  CDR3 for alpha chain variable domain of TCR clone 186148 (TRAV13-1, TRAJ21)
CAAKEGFNKFYF

SEQ ID NO: 372296 - protein, 15 aa, Homo sapiens
  CDR3 for beta chain variable domain of TCR clone 186148 (TRBV7-9, TRBJ1-6)
CASSAPGRGNSALHF

SEQ ID NO: 372297 - protein, 12 aa, Homo sapiens
  CDR3 for alpha chain variable domain of TCR clone 186149 (TRAV13-1, TRAJ11)
CAGPSGYSALTF

SEQ ID NO: 372298 - protein, 13 aa, Homo sapiens
  CDR3 for beta chain variable domain of TCR clone 186149 (TRBV12-4, TRBJ1-5)
CASSPDRAQPQHF

SEQ ID NO: 372299 - protein, 12 aa, Homo sapiens
  CDR3 for alpha chain variable domain of TCR clone 186150 (TRAV3, TRAJ26)
CAVRDYGQNFVF

SEQ ID NO: 372300 - protein, 15 aa, Homo sapiens
  CDR3 for beta chain variable domain of TCR clone 186150 (TRBV11-3, TRBJ2-3)
CASLKDGREGDTQYF

SEQ ID NO: 372301 - protein, 15 aa, Homo sapiens
  CDR3 for alpha chain variable domain of TCR clone 186151 (TRAV4, TRAJ48)
CLVGDIDFGNEKLTF

SEQ ID NO: 372302 - protein, 16 aa, Homo sapiens
  CDR3 for beta chain variable domain of TCR clone 186151 (TRBV7-2, TRBJ2-3)
CASSLERASGISTQYF

SEQ ID NO: 372303 - protein, 15 aa, Homo sapiens
  CDR3 for alpha chain variable domain of TCR clone 186152 (TRAV8-4, TRAJ40)
CAVSDDTSGTYKYIF

SEQ ID NO: 372304 - protein, 11 aa, Homo sapiens
  CDR3 for beta chain variable domain of TCR clone 186152 (TRBV19, TRBJ1-2)
CASSISSGYAF

SEQ ID NO: 372305 - protein, 14 aa, Homo sapiens
  CDR3 for alpha chain variable domain of TCR clone 186153 (TRAV12-2, TRAJ44)
CAVNPAGTASKLTF

SEQ ID NO: 372306 - protein, 17 aa, Homo sapiens
  CDR3 for beta chain variable domain of TCR clone 186153 (TRBV28, TRBJ2-5)
CASSTPEGDALQETQYF

SEQ ID NO: 372307 - protein, 12 aa, Homo sapiens
  CDR3 for alpha chain variable domain of TCR clone 186154 (TRAV8-4, TRAJ9)
CAVNTGGFKTNF

SEQ ID NO: 372308 - protein, 15 aa, Homo sapiens
  CDR3 for beta chain variable domain of TCR clone 186154 (TRBV5-4, TRBJ2-1)
CASSSGRAELNEQFF

SEQ ID NO: 372309 - protein, 13 aa, Homo sapiens
  CDR3 for alpha chain variable domain of TCR clone 186155 (TRAV21, TRAJ57)
CAVTQGGSGKLVF

SEQ ID NO: 372310 - protein, 14 aa, Homo sapiens
  CDR3 for beta chain variable domain of TCR clone 186155 (TRBV19, TRBJ2-1)
CASPTFVLSGEQFF

SEQ ID NO: 372311 - protein, 13 aa, Homo sapiens
  CDR3 for alpha chain variable domain of TCR clone 186156 (TRAV8-4, TRAJ30)
CAVSVNRADKIIF

SEQ ID NO: 372312 - protein, 13 aa, Homo sapiens
  CDR3 for beta chain variable domain of TCR clone 186156 (TRBV3-1, TRBJ2-2)
CASLARGSGELFF

SEQ ID NO: 372313 - protein, 15 aa, Homo sapiens
  CDR3 for alpha chain variable domain of TCR clone 186157 (TRAV12-3, TRAJ6)
CAMSATTGGSYIPTF

SEQ ID NO: 372314 - protein, 16 aa, Homo sapiens
  CDR3 for beta chain variable domain of TCR clone 186157 (TRBV7-3, TRBJ2-1)
CASSLSSGGGAKEQFF

SEQ ID NO: 372315 - protein, 15 aa, Homo sapiens
  CDR3 for alpha chain variable domain of TCR clone 186158 (TRAV21, TRAJ13)
CAVPRSFWGYQKVTF

SEQ ID NO: 372316 - protein, 15 aa, Homo sapiens
  CDR3 for beta chain variable domain of TCR clone 186158 (TRBV7-9, TRBJ1-6)
CASSSPGRGNSPLDF

SEQ ID NO: 372317 - protein, 15 aa, Homo sapiens
  CDR3 for alpha chain variable domain of TCR clone 186159 (TRAV16, TRAJ20)
CALKGELRADYKLSF

SEQ ID NO: 372318 - protein, 16 aa, Homo sapiens
  CDR3 for beta chain variable domain of TCR clone 186159 (TRBV11-3, TRBJ2-2)
CASSSRTSPGTGELFF

SEQ ID NO: 372319 - protein, 23 aa, Homo sapiens
  CDR3 for alpha chain variable domain of TCR clone 186160 (TRAV2, TRAJ9)
CAVEDRGTEASKLSLEQEQDYLL

SEQ ID NO: 372320 - protein, 15 aa, Homo sapiens
  CDR3 for beta chain variable domain of TCR clone 186160 (TRBV4-1, TRBJ2-7)
CASSQQGQGFDEQYF

SEQ ID NO: 372321 - protein, 15 aa, Homo sapiens
  CDR3 for alpha chain variable domain of TCR clone 186161 (TRAV21, TRAJ53)
CATLNSGGSNYKLTF

SEQ ID NO: 372322 - protein, 13 aa, Homo sapiens
  CDR3 for beta chain variable domain of TCR clone 186161 (TRBV2, TRBJ2-5)
CASGTPYQETQYF

SEQ ID NO: 372323 - protein, 16 aa, Homo sapiens
  CDR3 for alpha chain variable domain of TCR clone 186162 (TRAV12-2, TRAJ48)
CAVNPTSNFGNEKLNF

SEQ ID NO: 372324 - protein, 12 aa, Homo sapiens
  CDR3 for beta chain variable domain of TCR clone 186162 (TRBV9, TRBJ2-3)
CASSLRAGTQYF

SEQ ID NO: 372325 - protein, 15 aa, Homo sapiens
  CDR3 for alpha chain variable domain of TCR clone 186163 (TRAV8-3, TRAJ20)
CAVEATGSNDYKLSF

SEQ ID NO: 372326 - protein, 12 aa, Homo sapiens
  CDR3 for beta chain variable domain of TCR clone 186163 (TRBV7-2, TRBJ1-2)
CASRDSIYGYTF

SEQ ID NO: 372327 - protein, 13 aa, Homo sapiens
  CDR3 for alpha chain variable domain of TCR clone 186164 (TRAV12-1, TRAJ37)
CVVNIDNTGKLIF

SEQ ID NO: 372328 - protein, 15 aa, Homo sapiens
  CDR3 for beta chain variable domain of TCR clone 186164 (TRBV20-1, TRBJ2-7)
CSARDRVSGMDEQYF

SEQ ID NO: 372329 - protein, 18 aa, Homo sapiens
  CDR3 for alpha chain variable domain of TCR clone 186165 (TRAV21, TRAJ52)
CGLRPSPAGGTSYGKLTF

SEQ ID NO: 372330 - protein, 15 aa, Homo sapiens
  CDR3 for beta chain variable domain of TCR clone 186165 (TRBV7-9, TRBJ2-7)
CASSSSGLAVYEQYF

SEQ ID NO: 372331 - protein, 10 aa, Homo sapiens
  CDR3 for alpha chain variable domain of TCR clone 186166 (TRAV13-1, TRAJ43)
CAASKTDMRF

SEQ ID NO: 372332 - protein, 13 aa, Homo sapiens
  CDR3 for beta chain variable domain of TCR clone 186166 (TRBV20-1, TRBJ1-5)
CSARTGVNQPQHF

SEQ ID NO: 372333 - protein, 11 aa, Homo sapiens
  CDR3 for alpha chain variable domain of TCR clone 186167 (TRAV1-1, TRAJ37)
CAVSPQGKLIF

SEQ ID NO: 372334 - protein, 13 aa, Homo sapiens
  CDR3 for beta chain variable domain of TCR clone 186167 (TRBV7-9, TRBJ1-2)
CASSLKQNYGYTF

SEQ ID NO: 372335 - protein, 18 aa, Homo sapiens
  CDR3 for alpha chain variable domain of TCR clone 186168 (TRAV26-1, TRAJ11)
CIVRVVLGFRIQHPHLLE

SEQ ID NO: 372336 - protein, 14 aa, Homo sapiens
  CDR3 for beta chain variable domain of TCR clone 186168 (TRBV25-1, TRBJ1-4)
CASSGGGQPEKLFF

SEQ ID NO: 372337 - protein, 15 aa, Homo sapiens
  CDR3 for alpha chain variable domain of TCR clone 186169 (TRAV21, TRAJ53)
CATLNSGGSNYKQTF

SEQ ID NO: 372338 - protein, 18 aa, Homo sapiens
  CDR3 for beta chain variable domain of TCR clone 186169 (TRBV4-1, TRBJ1-4)
CASSPRTGGAWTNEKLFF

SEQ ID NO: 372339 - protein, 13 aa, Homo sapiens
  CDR3 for alpha chain variable domain of TCR clone 186170 (TRAV20, TRAJ34)
CAVRSYNTDKLIF

SEQ ID NO: 372340 - protein, 19 aa, Homo sapiens
  CDR3 for beta chain variable domain of TCR clone 186170 (TRBV25-1, TRBJ2-2)
CAILVYRVDRGRKTGKLFF

SEQ ID NO: 372341 - protein, 13 aa, Homo sapiens
  CDR3 for alpha chain variable domain of TCR clone 186171 (TRAV13-1, TRAJ40)
YAAISPGTYKYIF

SEQ ID NO: 372342 - protein, 13 aa, Homo sapiens
  CDR3 for beta chain variable domain of TCR clone 186171 (TRBV10-3, TRBJ2-7)
CAIRAGGPHEQYF

SEQ ID NO: 372343 - protein, 14 aa, Homo sapiens
  CDR3 for alpha chain variable domain of TCR clone 186172 (TRAV12-3, TRAJ10)
SHLPLTGGGNKLTF

SEQ ID NO: 372344 - protein, 16 aa, Homo sapiens
  CDR3 for beta chain variable domain of TCR clone 186172 (TRBV24-1, TRBJ2-3)
CAASDPGTGATDTQYF

SEQ ID NO: 372345 - protein, 12 aa, Homo sapiens
  CDR3 for alpha chain variable domain of TCR clone 186173 (TRAV3, TRAJ20)
CAVRDPDYKPSF

SEQ ID NO: 372346 - protein, 12 aa, Homo sapiens
  CDR3 for beta chain variable domain of TCR clone 186173 (TRBV2, TRBJ2-1)
CAYGPPGNEQFF

SEQ ID NO: 372347 - protein, 17 aa, Homo sapiens
  CDR3 for alpha chain variable domain of TCR clone 186174 (TRAV3, TRAJ28)
CAVREAYSGAGSYQLTF

SEQ ID NO: 372348 - protein, 14 aa, Homo sapiens
  CDR3 for beta chain variable domain of TCR clone 186174 (TRBV12-5, TRBJ2-5)
CASGSRTHQETQYF

SEQ ID NO: 372349 - protein, 14 aa, Homo sapiens
  CDR3 for alpha chain variable domain of TCR clone 186175 (TRAV2, TRAJ9)
CAVEDRSGGFKTIF

SEQ ID NO: 372350 - protein, 13 aa, Homo sapiens
  CDR3 for beta chain variable domain of TCR clone 186175 (TRBV7-3, TRBJ2-5)
CASRFRGGETQYF

SEQ ID NO: 372351 - protein, 14 aa, Homo sapiens
  CDR3 for alpha chain variable domain of TCR clone 186176 (TRAV38-1, TRAJ40)
CALRPTPGTYKYIF

SEQ ID NO: 372352 - protein, 17 aa, Homo sapiens
  CDR3 for beta chain variable domain of TCR clone 186176 (TRBV11-2, TRBJ2-6)
CAGSQRDIFSGANVLTF

SEQ ID NO: 372353 - protein, 16 aa, Homo sapiens
  CDR3 for alpha chain variable domain of TCR clone 186177 (TRAV3, TRAJ37)
CAVRGKGSGNTGKLIF

SEQ ID NO: 372354 - protein, 16 aa, Homo sapiens
  CDR3 for beta chain variable domain of TCR clone 186177 (TRBV12-5, TRBJ2-5)
CASGPRTGGNQETQYF

SEQ ID NO: 372355 - protein, 15 aa, Homo sapiens
  CDR3 for alpha chain variable domain of TCR clone 186178 (TRAV23/DV6, TRAJ4)
CAASPLRVGYNKLIF

SEQ ID NO: 372356 - protein, 15 aa, Homo sapiens
  CDR3 for beta chain variable domain of TCR clone 186178 (TRBV7-9, TRBJ1-6)
CASSSPGRGNSPLHF

SEQ ID NO: 372357 - protein, 11 aa, Homo sapiens
  CDR3 for alpha chain variable domain of TCR clone 186179 (TRAV12-1, TRAJ30)
CVVNGQDKIIF

SEQ ID NO: 372358 - protein, 12 aa, Homo sapiens
  CDR3 for beta chain variable domain of TCR clone 186179 (TRBV27, TRBJ2-2)
CASKLFSGELFF

SEQ ID NO: 372359 - protein, 14 aa, Homo sapiens
  CDR3 for alpha chain variable domain of TCR clone 186180 (TRAV1-2, TRAJ8)
CAVREDTGFQKLVF

SEQ ID NO: 372360 - protein, 14 aa, Homo sapiens
  CDR3 for beta chain variable domain of TCR clone 186180 (TRBV20-1, TRBJ2-5)
CSARYRGLQETQYF

SEQ ID NO: 372361 - protein, 11 aa, Homo sapiens
  CDR3 for alpha chain variable domain of TCR clone 186181 (TRAV12-1, TRAJ26)
CVVAYGQNFVF

SEQ ID NO: 372362 - protein, 17 aa, Homo sapiens
  CDR3 for beta chain variable domain of TCR clone 186181 (TRBV12-4, TRBJ2-3)
CASSLSRVAGGRNTQYF

SEQ ID NO: 372363 - protein, 16 aa, Homo sapiens
  CDR3 for alpha chain variable domain of TCR clone 186182 (TRAV12-1, TRAJ42)
CVVTPYYGGSQGNLIF

SEQ ID NO: 372364 - protein, 16 aa, Homo sapiens
  CDR3 for beta chain variable domain of TCR clone 186182 (TRBV4-2, TRBJ1-1)
CASRPLDGGGDTEAFF

SEQ ID NO: 372365 - protein, 15 aa, Homo sapiens
  CDR3 for alpha chain variable domain of TCR clone 186183 (TRAV26-1, TRAJ29)
CIVRVEGSGNTPLVF

SEQ ID NO: 372366 - protein, 13 aa, Homo sapiens
  CDR3 for beta chain variable domain of TCR clone 186183 (TRBV28, TRBJ2-5)
CASSFAGGETQYS

SEQ ID NO: 372367 - protein, 15 aa, Homo sapiens
  CDR3 for alpha chain variable domain of TCR clone 186184 (TRAV8-4, TRAJ3)
CAVTGENLVQQCFQD

SEQ ID NO: 372368 - protein, 11 aa, Homo sapiens
  CDR3 for beta chain variable domain of TCR clone 186184 (TRBV12-4, TRBJ2-3)
CASTATDTQYF

SEQ ID NO: 372369 - protein, 14 aa, Homo sapiens
  CDR3 for alpha chain variable domain of TCR clone 186185 (TRAV12-2, TRAJ48)
CAVNAFFGNEKLTL

SEQ ID NO: 372370 - protein, 13 aa, Homo sapiens
  CDR3 for beta chain variable domain of TCR clone 186185 (TRBV28, TRBJ2-7)
CAGAQQGLDEQYF

SEQ ID NO: 372371 - protein, 13 aa, Homo sapiens
  CDR3 for alpha chain variable domain of TCR clone 186186 (TRAV36/DV7, TRAJ37)
CAVFSSNTGKLIF

SEQ ID NO: 372372 - protein, 10 aa, Homo sapiens
  CDR3 for beta chain variable domain of TCR clone 186186 (TRBV5-1, TRBJ2-2)
CASSSQGGTP

SEQ ID NO: 372373 - protein, 11 aa, Homo sapiens
  CDR3 for alpha chain variable domain of TCR clone 186187 (TRAV4, TRAJ20)
CLVGDTVTTTS

SEQ ID NO: 372374 - protein, 15 aa, Homo sapiens
  CDR3 for beta chain variable domain of TCR clone 186187 (TRBV18, TRBJ2-7)
CASSPSSTGNYEQYF

SEQ ID NO: 372375 - protein, 13 aa, Homo sapiens
  CDR3 for alpha chain variable domain of TCR clone 186188 (TRAV35, TRAJ32)
CAGVGGATNKLIF

SEQ ID NO: 372376 - protein, 16 aa, Homo sapiens
  CDR3 for beta chain variable domain of TCR clone 186188 (TRBV12-5, TRBJ2-5)
CASGPRTSGNQETQYF

SEQ ID NO: 372377 - protein, 12 aa, Homo sapiens
  CDR3 for alpha chain variable domain of TCR clone 186189 (TRAV2, TRAJ31)
CAVENNNARLMF

SEQ ID NO: 372378 - protein, 16 aa, Homo sapiens
  CDR3 for beta chain variable domain of TCR clone 186189 (TRBV10-3, TRBJ2-1)
CAISGVGDGGGGEQFF

SEQ ID NO: 372379 - protein, 14 aa, Homo sapiens
  CDR3 for alpha chain variable domain of TCR clone 186190 (TRAV20, TRAJ10)
CAVRVEGGGNKLTF

SEQ ID NO: 372380 - protein, 18 aa, Homo sapiens
  CDR3 for beta chain variable domain of TCR clone 186190 (TRBV24-1, TRBJ2-1)
CATSYLMFLGRGVHEQFF

SEQ ID NO: 372381 - protein, 22 aa, Homo sapiens
  CDR3 for alpha chain variable domain of TCR clone 186191 (TRAV40, )
CLLGDGIPDIQNPDPAVYQLRD

SEQ ID NO: 372382 - protein, 16 aa, Homo sapiens
  CDR3 for beta chain variable domain of TCR clone 186191 (TRBV20-1, TRBJ1-5)
CSAELPGQHTNQPQHF

SEQ ID NO: 372383 - protein, 17 aa, Homo sapiens
  CDR3 for alpha chain variable domain of TCR clone 186192 (TRAV8-1, TRAJ42)
CAVKLGNYGGSQGNLIF

SEQ ID NO: 372384 - protein, 15 aa, Homo sapiens
  CDR3 for beta chain variable domain of TCR clone 186192 (TRBV9, TRBJ1-6)
CASSVAGTGDSPLHF

SEQ ID NO: 372385 - protein, 12 aa, Homo sapiens
  CDR3 for alpha chain variable domain of TCR clone 186193 (TRAV25, TRAJ34)
CAGPRNTDKLIF

SEQ ID NO: 372386 - protein, 15 aa, Homo sapiens
  CDR3 for beta chain variable domain of TCR clone 186193 (TRBV6-3, TRBJ2-7)
CASSSPGTVFYEQYF

SEQ ID NO: 372387 - protein, 18 aa, Homo sapiens
  CDR3 for alpha chain variable domain of TCR clone 186194 (TRAV21, TRAJ52)
CAVRPSPAGGTSYGKLTC

SEQ ID NO: 372388 - protein, 17 aa, Homo sapiens
  CDR3 for beta chain variable domain of TCR clone 186194 (TRBV25-1, TRBJ2-1)
CASSAYGQGRGVYEQFF

SEQ ID NO: 372389 - protein, 16 aa, Homo sapiens
  CDR3 for alpha chain variable domain of TCR clone 186195 (TRAV30, TRAJ24)
CGTGIVDADSWGKFPF

SEQ ID NO: 372390 - protein, 14 aa, Homo sapiens
  CDR3 for beta chain variable domain of TCR clone 186195 (TRBV12-5, TRBJ2-5)
CASGSRTHQETQYF

SEQ ID NO: 372391 - protein, 13 aa, Homo sapiens
  CDR3 for alpha chain variable domain of TCR clone 186196 (TRAV39, TRAJ58)
CAGEETSGSRLTF

SEQ ID NO: 372392 - protein, 16 aa, Homo sapiens
  CDR3 for beta chain variable domain of TCR clone 186196 (TRBV4-2, TRBJ1-1)
CASSQAGFGMNTEAFF

SEQ ID NO: 372393 - protein, 14 aa, Homo sapiens
  CDR3 for alpha chain variable domain of TCR clone 186197 (TRAV9-2, TRAJ39)
CALYFYNAGNMLTF

SEQ ID NO: 372394 - protein, 13 aa, Homo sapiens
  CDR3 for beta chain variable domain of TCR clone 186197 (TRBV7-9, TRBJ1-2)
CASSLKQNYGYTF

SEQ ID NO: 372395 - protein, 16 aa, Homo sapiens
  CDR3 for alpha chain variable domain of TCR clone 186198 (TRAV3, TRAJ37)
CAVRVRGSGNTGKLIF

SEQ ID NO: 372396 - protein, 16 aa, Homo sapiens
  CDR3 for beta chain variable domain of TCR clone 186198 (TRBV11-2, TRBJ2-7)
CASSPTTGGASYEQYF

SEQ ID NO: 372397 - protein, 14 aa, Homo sapiens
  CDR3 for alpha chain variable domain of TCR clone 186199 (TRAV12-2, TRAJ17)
CAVLFKAAGNKLTF

SEQ ID NO: 372398 - protein, 15 aa, Homo sapiens
  CDR3 for beta chain variable domain of TCR clone 186199 (TRBV29-1, TRBJ2-6)
CSVGDRGSGANVLSF

SEQ ID NO: 372399 - protein, 14 aa, Homo sapiens
  CDR3 for alpha chain variable domain of TCR clone 186200 (TRAV8-3, TRAJ13)
CAVGARGGYKKVTF

SEQ ID NO: 372400 - protein, 16 aa, Homo sapiens
  CDR3 for beta chain variable domain of TCR clone 186200 (TRBV27, TRBJ2-7)
CASSLGSGTGPYEQYF

SEQ ID NO: 372401 - protein, 14 aa, Homo sapiens
  CDR3 for alpha chain variable domain of TCR clone 186201 (TRAV12-2, TRAJ17)
CAVLSKAAGNKLTF

SEQ ID NO: 372402 - protein, 17 aa, Homo sapiens
  CDR3 for beta chain variable domain of TCR clone 186201 (TRBV7-3, TRBJ2-3)
CASSLMKRMRGADTQYF

SEQ ID NO: 372403 - protein, 11 aa, Homo sapiens
  CDR3 for alpha chain variable domain of TCR clone 186202 (TRAV2, TRAJ23)
CAVETRGKLIF

SEQ ID NO: 372404 - protein, 14 aa, Homo sapiens
  CDR3 for beta chain variable domain of TCR clone 186202 (TRBV2, TRBJ2-3)
CASSEGQNTDTQHF

SEQ ID NO: 372405 - protein, 13 aa, Homo sapiens
  CDR3 for alpha chain variable domain of TCR clone 186203 (TRAV13-1, TRAJ11)
CAAVLAGYSALTF

SEQ ID NO: 372406 - protein, 17 aa, Homo sapiens
  CDR3 for beta chain variable domain of TCR clone 186203 (TRBV25-1, TRBJ2-7)
CASSYARVVFSSYEQYF

SEQ ID NO: 372407 - protein, 18 aa, Homo sapiens
  CDR3 for alpha chain variable domain of TCR clone 186204 (TRAV17, TRAJ28)
CATDPPRGSGAGSYQLTF

SEQ ID NO: 372408 - protein, 14 aa, Homo sapiens
  CDR3 for beta chain variable domain of TCR clone 186204 (TRBV13, TRBJ2-5)
RASSLDYPQETQYF

SEQ ID NO: 372409 - protein, 15 aa, Homo sapiens
  CDR3 for alpha chain variable domain of TCR clone 186205 (TRAV3, TRAJ22)
CAVRDRGGSARQLTI

SEQ ID NO: 372410 - protein, 14 aa, Homo sapiens
  CDR3 for beta chain variable domain of TCR clone 186205 (TRBV20-1, TRBJ2-5)
CSALVPSYQETQYF

SEQ ID NO: 372411 - protein, 11 aa, Homo sapiens
  CDR3 for alpha chain variable domain of TCR clone 186206 (TRAV8-3, TRAJ15)
CAVGPGTALIF

SEQ ID NO: 372412 - protein, 18 aa, Homo sapiens
  CDR3 for beta chain variable domain of TCR clone 186206 (TRBV18, TRBJ2-3)
CASSYTCGAAGGTDTQYF

SEQ ID NO: 372413 - protein, 14 aa, Homo sapiens
  CDR3 for alpha chain variable domain of TCR clone 186207 (TRAV13-2, TRAJ10)
CAVTFTGGGNKLTF

SEQ ID NO: 372414 - protein, 16 aa, Homo sapiens
  CDR3 for beta chain variable domain of TCR clone 186207 (TRBV18, TRBJ2-7)
CASSPRSQGISYEQYF

SEQ ID NO: 372415 - protein, 15 aa, Homo sapiens
  CDR3 for alpha chain variable domain of TCR clone 186208 (TRAV3, TRAJ3)
CAVRDMSSSASKIIF

SEQ ID NO: 372416 - protein, 14 aa, Homo sapiens
  CDR3 for beta chain variable domain of TCR clone 186208 (TRBV19, TRBJ2-1)
CASPAFVLSGEQFF

SEQ ID NO: 372417 - protein, 12 aa, Homo sapiens
  CDR3 for alpha chain variable domain of TCR clone 186209 (TRAV1-1, TRAJ15)
CAVGQAGTALIF

SEQ ID NO: 372418 - protein, 16 aa, Homo sapiens
  CDR3 for beta chain variable domain of TCR clone 186209 (TRBV12-4, TRBJ2-7)
CASSPEEQGSSYEQYF

SEQ ID NO: 372419 - protein, 16 aa, Homo sapiens
  CDR3 for alpha chain variable domain of TCR clone 186210 (TRAV30, TRAJ24)
CGTEIVDADSWEKLQF

SEQ ID NO: 372420 - protein, 14 aa, Homo sapiens
  CDR3 for beta chain variable domain of TCR clone 186210 (TRBV12-5, TRBJ2-5)
CASGSRTHQETQYF

SEQ ID NO: 372421 - protein, 15 aa, Homo sapiens
  CDR3 for alpha chain variable domain of TCR clone 186211 (TRAV17, TRAJ45)
TSVLRTGGGADGLTF

SEQ ID NO: 372422 - protein, 15 aa, Homo sapiens
  CDR3 for beta chain variable domain of TCR clone 186211 (TRBV7-9, TRBJ1-3)
CASSFRGSPGNTIYF

SEQ ID NO: 372423 - protein, 15 aa, Homo sapiens
  CDR3 for alpha chain variable domain of TCR clone 186212 (TRAV8-4, TRAJ10)
CAVSGGPGGGNKLTF

SEQ ID NO: 372424 - protein, 13 aa, Homo sapiens
  CDR3 for beta chain variable domain of TCR clone 186212 (TRBV28, TRBJ1-3)
CASSFLGSGTIYF

SEQ ID NO: 372425 - protein, 13 aa, Homo sapiens
  CDR3 for alpha chain variable domain of TCR clone 186213 (TRAV8-3, TRAJ28)
CAVGAVGSYHLTF

SEQ ID NO: 372426 - protein, 14 aa, Homo sapiens
  CDR3 for beta chain variable domain of TCR clone 186213 (TRBV25-1, TRBJ1-1)
CASTHLGGNTEAFF

SEQ ID NO: 372427 - protein, 15 aa, Homo sapiens
  CDR3 for alpha chain variable domain of TCR clone 186214 (TRAV14/DV4, TRAJ10)
CAMRELTGGGNKLTF

SEQ ID NO: 372428 - protein, 18 aa, Homo sapiens
  CDR3 for beta chain variable domain of TCR clone 186214 (TRBV7-9, TRBJ2-7)
CASSLTTSGSRTWYEQCF

SEQ ID NO: 372429 - protein, 13 aa, Homo sapiens
  CDR3 for alpha chain variable domain of TCR clone 186215 (TRAV17, TRAJ26)
CATVDNYGQNFVF

SEQ ID NO: 372430 - protein, 16 aa, Homo sapiens
  CDR3 for beta chain variable domain of TCR clone 186215 (TRBV2, TRBJ2-1)
CASSVGGYLSYNEQFF

SEQ ID NO: 372431 - protein, 14 aa, Homo sapiens
  CDR3 for alpha chain variable domain of TCR clone 186216 (TRAV9-2, TRAJ36)
RALPWRTGANNLFF

SEQ ID NO: 372432 - protein, 16 aa, Homo sapiens
  CDR3 for beta chain variable domain of TCR clone 186216 (TRBV2, TRBJ1-2)
CASSLGFSSGEDGYTF

SEQ ID NO: 372433 - protein, 14 aa, Homo sapiens
  CDR3 for alpha chain variable domain of TCR clone 186217 (TRAV1-2, TRAJ16)
CAVNRFSDGQRLLL

SEQ ID NO: 372434 - protein, 15 aa, Homo sapiens
  CDR3 for beta chain variable domain of TCR clone 186217 (TRBV9, TRBJ1-6)
CASSVAGTGDSHLHF

SEQ ID NO: 372435 - protein, 13 aa, Homo sapiens
  CDR3 for alpha chain variable domain of TCR clone 186218 (TRAV12-2, TRAJ11)
CAVPNSGYSTPTF

SEQ ID NO: 372436 - protein, 10 aa, Homo sapiens
  CDR3 for beta chain variable domain of TCR clone 186218 (TRBV6-1, TRBJ1-3)
CASSQGQEYF

SEQ ID NO: 372437 - protein, 18 aa, Homo sapiens
  CDR3 for alpha chain variable domain of TCR clone 186219 (TRAV12-3, TRAJ52)
CAMSVGGAGGTSYGKLTF

SEQ ID NO: 372438 - protein, 15 aa, Homo sapiens
  CDR3 for beta chain variable domain of TCR clone 186219 (TRBV11-1, TRBJ1-6)
CACSFDRGLGSPLHF

SEQ ID NO: 372439 - protein, 17 aa, Homo sapiens
  CDR3 for alpha chain variable domain of TCR clone 186220 (TRAV8-6, TRAJ4)
CAVSDLGVAGGYNKLIF

SEQ ID NO: 372440 - protein, 15 aa, Homo sapiens
  CDR3 for beta chain variable domain of TCR clone 186220 (TRBV28, TRBJ1-2)
CASSSPRRGNYGDTF

SEQ ID NO: 372441 - protein, 15 aa, Homo sapiens
  CDR3 for alpha chain variable domain of TCR clone 186221 (TRAV38-1, TRAJ57)
CAFMDFQGGSEKLVF

SEQ ID NO: 372442 - protein, 15 aa, Homo sapiens
  CDR3 for beta chain variable domain of TCR clone 186221 (TRBV19, TRBJ1-2)
CASSVGQVLNYGYTF

SEQ ID NO: 372443 - protein, 17 aa, Homo sapiens
  CDR3 for alpha chain variable domain of TCR clone 186222 (TRAV13-1, TRAJ28)
CAASPPYSGAGRYQLTF

SEQ ID NO: 372444 - protein, 15 aa, Homo sapiens
  CDR3 for beta chain variable domain of TCR clone 186222 (TRBV20-1, TRBJ2-1)
CSARGGTRYYNEQFF

SEQ ID NO: 372445 - protein, 18 aa, Homo sapiens
  CDR3 for alpha chain variable domain of TCR clone 186223 (TRAV17, TRAJ45)
CATSLDLYSGGGADGLTF

SEQ ID NO: 372446 - protein, 15 aa, Homo sapiens
  CDR3 for beta chain variable domain of TCR clone 186223 (TRBV6-3, TRBJ2-7)
CASSSPGTVFYEQYF

SEQ ID NO: 372447 - protein, 13 aa, Homo sapiens
  CDR3 for alpha chain variable domain of TCR clone 186224 (TRAV26-1, TRAJ39)
CIVRVVAGNMLTF

SEQ ID NO: 372448 - protein, 14 aa, Homo sapiens
  CDR3 for beta chain variable domain of TCR clone 186224 (TRBV20-1, TRBJ2-5)
CSARRQGIRGTQYF

SEQ ID NO: 372449 - protein, 20 aa, Homo sapiens
  CDR3 for alpha chain variable domain of TCR clone 186225 (TRAV13-1, )
CAASPMDIQNPDPAVYQLRD

SEQ ID NO: 372450 - protein, 13 aa, Homo sapiens
  CDR3 for beta chain variable domain of TCR clone 186225 (TRBV20-1, TRBJ2-2)
CSARAAGTGELFF

SEQ ID NO: 372451 - protein, 16 aa, Homo sapiens
  CDR3 for alpha chain variable domain of TCR clone 186226 (TRAV30, TRAJ57)
CGTGWAPQGGSEKLVF

SEQ ID NO: 372452 - protein, 14 aa, Homo sapiens
  CDR3 for beta chain variable domain of TCR clone 186226 (TRBV18, TRBJ1-1)
CASSPGFQGVEACF

SEQ ID NO: 372453 - protein, 13 aa, Homo sapiens
  CDR3 for alpha chain variable domain of TCR clone 186227 (TRAV12-3, TRAJ43)
CAMIRPNNNDMRF

SEQ ID NO: 372454 - protein, 12 aa, Homo sapiens
  CDR3 for beta chain variable domain of TCR clone 186227 (TRBV11-2, TRBJ2-5)
CASSLGQETQFF

SEQ ID NO: 372455 - protein, 12 aa, Homo sapiens
  CDR3 for alpha chain variable domain of TCR clone 186228 (TRAV2, TRAJ37)
CAVAGNTGKLIF

SEQ ID NO: 372456 - protein, 14 aa, Homo sapiens
  CDR3 for beta chain variable domain of TCR clone 186228 (TRBV11-2, TRBJ2-5)
CASRPLAGRETQYF

SEQ ID NO: 372457 - protein, 11 aa, Homo sapiens
  CDR3 for alpha chain variable domain of TCR clone 186229 (TRAV26-2, TRAJ8)
CILTGFQKLVF

SEQ ID NO: 372458 - protein, 19 aa, Homo sapiens
  CDR3 for beta chain variable domain of TCR clone 186229 (TRBV20-1, TRBJ2-1)
CSARGGTSGNSPQIDEQFF

SEQ ID NO: 372459 - protein, 13 aa, Homo sapiens
  CDR3 for alpha chain variable domain of TCR clone 186230 (TRAV12-1, TRAJ7)
CVVNMRGDNRLAF

SEQ ID NO: 372460 - protein, 15 aa, Homo sapiens
  CDR3 for beta chain variable domain of TCR clone 186230 (TRBV27, TRBJ2-3)
CASSLGLAATDTQYF

SEQ ID NO: 372461 - protein, 13 aa, Homo sapiens
  CDR3 for alpha chain variable domain of TCR clone 186231 (TRAV8-3, TRAJ36)
CAVGATGANNLFL

SEQ ID NO: 372462 - protein, 15 aa, Homo sapiens
  CDR3 for beta chain variable domain of TCR clone 186231 (TRBV7-2, TRBJ1-2)
CASSPRAGWNYGYIF

SEQ ID NO: 372463 - protein, 13 aa, Homo sapiens
  CDR3 for alpha chain variable domain of TCR clone 186232 (TRAV27, TRAJ42)
CAGARGSQGNPIF

SEQ ID NO: 372464 - protein, 17 aa, Homo sapiens
  CDR3 for beta chain variable domain of TCR clone 186232 (TRBV13, TRBJ2-3)
CASSLSRVAGGRNTQYF

SEQ ID NO: 372465 - protein, 11 aa, Homo sapiens
  CDR3 for alpha chain variable domain of TCR clone 186233 (TRAV21, TRAJ11)
CAVNGYSTLTF

SEQ ID NO: 372466 - protein, 10 aa, Homo sapiens
  CDR3 for beta chain variable domain of TCR clone 186233 (TRBV5-1, TRBJ2-2)
CASSLAGLSG

SEQ ID NO: 372467 - protein, 15 aa, Homo sapiens
  CDR3 for alpha chain variable domain of TCR clone 186234 (TRAV3, TRAJ22)
CAGRARGGSARQMTF

SEQ ID NO: 372468 - protein, 16 aa, Homo sapiens
  CDR3 for beta chain variable domain of TCR clone 186234 (TRBV5-4, TRBJ2-3)
CASQQPGAGGADTQYF

SEQ ID NO: 372469 - protein, 15 aa, Homo sapiens
  CDR3 for alpha chain variable domain of TCR clone 186235 (TRAV26-1, TRAJ29)
CIVRVEGSGNTPLVF

SEQ ID NO: 372470 - protein, 15 aa, Homo sapiens
  CDR3 for beta chain variable domain of TCR clone 186235 (TRBV7-9, TRBJ1-5)
CESSQGHQPNQPQHF

SEQ ID NO: 372471 - protein, 13 aa, Homo sapiens
  CDR3 for alpha chain variable domain of TCR clone 186236 (TRAV8-3, TRAJ48)
CAVVPFGNEKLTF

SEQ ID NO: 372472 - protein, 14 aa, Homo sapiens
  CDR3 for beta chain variable domain of TCR clone 186236 (TRBV18, TRBJ2-7)
CASAPRGGAYEQYF

SEQ ID NO: 372473 - protein, 15 aa, Homo sapiens
  CDR3 for alpha chain variable domain of TCR clone 186237 (TRAV35, TRAJ40)
CAGQLGTSGTYKYIF

SEQ ID NO: 372474 - protein, 15 aa, Homo sapiens
  CDR3 for beta chain variable domain of TCR clone 186237 (TRBV10-3, TRBJ1-3)
CAISDSQGAGNTIYF

SEQ ID NO: 372475 - protein, 14 aa, Homo sapiens
  CDR3 for alpha chain variable domain of TCR clone 186238 (TRAV16, TRAJ17)
CVPRIKAAGNKLTF

SEQ ID NO: 372476 - protein, 17 aa, Homo sapiens
  CDR3 for beta chain variable domain of TCR clone 186238 (TRBV7-2, TRBJ2-3)
CASSSYSGTRRADTQYF

SEQ ID NO: 372477 - protein, 13 aa, Homo sapiens
  CDR3 for alpha chain variable domain of TCR clone 186239 (TRAV8-3, TRAJ28)
CAVGAVGSYKLTF

SEQ ID NO: 372478 - protein, 16 aa, Homo sapiens
  CDR3 for beta chain variable domain of TCR clone 186239 (TRBV19, TRBJ2-1)
CASSKAGPSSYNEQFF

SEQ ID NO: 372479 - protein, 18 aa, Homo sapiens
  CDR3 for alpha chain variable domain of TCR clone 186240 (TRAV29/DV5, TRAJ52)
CAAGFRGAGGTSYGKLTF

SEQ ID NO: 372480 - protein, 13 aa, Homo sapiens
  CDR3 for beta chain variable domain of TCR clone 186240 (TRBV24-1, TRBJ2-2)
CATSDWSTGELFF

SEQ ID NO: 372481 - protein, 11 aa, Homo sapiens
  CDR3 for alpha chain variable domain of TCR clone 186241 (TRAV26-1, TRAJ27)
CIDPNAGKSTF

SEQ ID NO: 372482 - protein, 18 aa, Homo sapiens
  CDR3 for beta chain variable domain of TCR clone 186241 (TRBV7-9, TRBJ2-6)
CASSFPGAGISGERPDFR

SEQ ID NO: 372483 - protein, 16 aa, Homo sapiens
  CDR3 for alpha chain variable domain of TCR clone 186242 (TRAV3, TRAJ3)
CAVRDRAKSSASKIIF

SEQ ID NO: 372484 - protein, 12 aa, Homo sapiens
  CDR3 for beta chain variable domain of TCR clone 186242 (TRBV5-7, TRBJ1-1)
CASSLGRGKAFF

SEQ ID NO: 372485 - protein, 14 aa, Homo sapiens
  CDR3 for alpha chain variable domain of TCR clone 186243 (TRAV20, TRAJ10)
CAVRVEGGGNNLTF

SEQ ID NO: 372486 - protein, 18 aa, Homo sapiens
  CDR3 for beta chain variable domain of TCR clone 186243 (TRBV24-1, TRBJ2-1)
CATSDLTFLGRGVHEQFF

SEQ ID NO: 372487 - protein, 16 aa, Homo sapiens
  CDR3 for alpha chain variable domain of TCR clone 186244 (TRAV12-1, TRAJ42)
CVVTPNYGGSQGNLIF

SEQ ID NO: 372488 - protein, 15 aa, Homo sapiens
  CDR3 for beta chain variable domain of TCR clone 186244 (TRBV4-3, TRBJ2-7)
CASSQGGRGIYEQYF

SEQ ID NO: 372489 - protein, 11 aa, Homo sapiens
  CDR3 for alpha chain variable domain of TCR clone 186245 (TRAV12-3, TRAJ27)
CAMANAGKSTF

SEQ ID NO: 372490 - protein, 15 aa, Homo sapiens
  CDR3 for beta chain variable domain of TCR clone 186245 (TRBV7-8, TRBJ1-5)
CASSLERRGLEPQHF

SEQ ID NO: 372491 - protein, 16 aa, Homo sapiens
  CDR3 for alpha chain variable domain of TCR clone 186246 (TRAV26-1, TRAJ53)
CIVRVAMGGSNYKLTF

SEQ ID NO: 372492 - protein, 12 aa, Homo sapiens
  CDR3 for beta chain variable domain of TCR clone 186246 (TRBV7-9, TRBJ1-5)
CAISPQGQPQHF

SEQ ID NO: 372493 - protein, 16 aa, Homo sapiens
  CDR3 for alpha chain variable domain of TCR clone 186247 (TRAV12-3, TRAJ53)
CAMSPGSGGSNYKLTF

SEQ ID NO: 372494 - protein, 11 aa, Homo sapiens
  CDR3 for beta chain variable domain of TCR clone 186247 (TRBV29-1, TRBJ2-5)
CSEDRAGTQFF

SEQ ID NO: 372495 - protein, 14 aa, Homo sapiens
  CDR3 for alpha chain variable domain of TCR clone 186248 (TRAV8-3, TRAJ33)
CAVGAVDSNYQLIW

SEQ ID NO: 372496 - protein, 13 aa, Homo sapiens
  CDR3 for beta chain variable domain of TCR clone 186248 (TRBV12-4, TRBJ2-7)
CASSPTETYEQYF

SEQ ID NO: 372497 - protein, 14 aa, Homo sapiens
  CDR3 for alpha chain variable domain of TCR clone 186249 (TRAV21, TRAJ45)
CAVSSGGGADGLTF

SEQ ID NO: 372498 - protein, 13 aa, Homo sapiens
  CDR3 for beta chain variable domain of TCR clone 186249 (TRBV12-4, TRBJ1-2)
CASSLRQGKGYTF

SEQ ID NO: 372499 - protein, 15 aa, Homo sapiens
  CDR3 for alpha chain variable domain of TCR clone 186250 (TRAV27, TRAJ38)
CAARRNAVNTRKLIW

SEQ ID NO: 372500 - protein, 13 aa, Homo sapiens
  CDR3 for beta chain variable domain of TCR clone 186250 (TRBV12-5, TRBJ2-3)
CASGDRQSDTQYF

SEQ ID NO: 372501 - protein, 18 aa, Homo sapiens
  CDR3 for alpha chain variable domain of TCR clone 186251 (TRAV21, TRAJ52)
CAVRPSPAGGTSYGKLTF

SEQ ID NO: 372502 - protein, 15 aa, Homo sapiens
  CDR3 for beta chain variable domain of TCR clone 186251 (TRBV19, TRBJ1-1)
CASTSGQIQSTEAFF

SEQ ID NO: 372503 - protein, 15 aa, Homo sapiens
  CDR3 for alpha chain variable domain of TCR clone 186252 (TRAV3, TRAJ22)
CAVRDRGGSARQLTF

SEQ ID NO: 372504 - protein, 18 aa, Homo sapiens
  CDR3 for beta chain variable domain of TCR clone 186252 (TRBV28, TRBJ2-1)
CASSSTSGRDNSYNEQFF

SEQ ID NO: 372505 - protein, 10 aa, Homo sapiens
  CDR3 for alpha chain variable domain of TCR clone 186253 (TRAV21, TRAJ31)
CAVDNARLMF

SEQ ID NO: 372506 - protein, 15 aa, Homo sapiens
  CDR3 for beta chain variable domain of TCR clone 186253 (TRBV2, TRBJ2-7)
CASSEGLARSYEQYF

SEQ ID NO: 372507 - protein, 12 aa, Homo sapiens
  CDR3 for alpha chain variable domain of TCR clone 186254 (TRAV9-2, TRAJ20)
CALSEGDYKLGF

SEQ ID NO: 372508 - protein, 13 aa, Homo sapiens
  CDR3 for beta chain variable domain of TCR clone 186254 (TRBV11-2, TRBJ1-6)
CASSLAGVSPLHF

SEQ ID NO: 372509 - protein, 14 aa, Homo sapiens
  CDR3 for alpha chain variable domain of TCR clone 186255 (TRAV8-1, TRAJ5)
CAVRTDTGRRALTV

SEQ ID NO: 372510 - protein, 12 aa, Homo sapiens
  CDR3 for beta chain variable domain of TCR clone 186255 (TRBV11-2, TRBJ2-1)
CASSPGNNEQFF

SEQ ID NO: 372511 - protein, 13 aa, Homo sapiens
  CDR3 for alpha chain variable domain of TCR clone 186256 (TRAV27, TRAJ42)
RAGARGSQGNPIF

SEQ ID NO: 372512 - protein, 15 aa, Homo sapiens
  CDR3 for beta chain variable domain of TCR clone 186256 (TRBV10-3, TRBJ2-2)
CAIRTDREDTGELFF

SEQ ID NO: 372513 - protein, 12 aa, Homo sapiens
  CDR3 for alpha chain variable domain of TCR clone 186257 (TRAV1-1, TRAJ8)
CAGGTGFQKLVF

SEQ ID NO: 372514 - protein, 15 aa, Homo sapiens
  CDR3 for beta chain variable domain of TCR clone 186257 (TRBV7-9, TRAJ18)
CASSRTGGFNEKLFF

SEQ ID NO: 372515 - protein, 13 aa, Homo sapiens
  CDR3 for alpha chain variable domain of TCR clone 186258 (TRAV27, TRAJ49)
CAPRPYTGNQFYF

SEQ ID NO: 372516 - protein, 18 aa, Homo sapiens
  CDR3 for beta chain variable domain of TCR clone 186258 (TRBV7-3, TRBJ2-5)
WASSVGGAAQGRWETQYF

SEQ ID NO: 372517 - protein, 11 aa, Homo sapiens
  CDR3 for alpha chain variable domain of TCR clone 186259 (TRAV12-1, TRAJ43)
CVEYDNDDMRF

SEQ ID NO: 372518 - protein, 16 aa, Homo sapiens
  CDR3 for beta chain variable domain of TCR clone 186259 (TRBV5-4, TRBJ2-1)
RASSLVGSGQDNEQFF

SEQ ID NO: 372519 - protein, 13 aa, Homo sapiens
  CDR3 for alpha chain variable domain of TCR clone 186260 (TRAV30, TRAJ24)
CGTVTDRWGKLQF

SEQ ID NO: 372520 - protein, 15 aa, Homo sapiens
  CDR3 for beta chain variable domain of TCR clone 186260 (TRBV25-1, TRBJ1-4)
CASSPGDSTNEKLFF

SEQ ID NO: 372521 - protein, 16 aa, Homo sapiens
  CDR3 for alpha chain variable domain of TCR clone 186261 (TRAV30, TRAJ24)
CGTEIVDADSWGKFKF

SEQ ID NO: 372522 - protein, 14 aa, Homo sapiens
  CDR3 for beta chain variable domain of TCR clone 186261 (TRBV12-5, TRBJ2-5)
CASGSRTHQETQYF

SEQ ID NO: 372523 - protein, 14 aa, Homo sapiens
  CDR3 for alpha chain variable domain of TCR clone 186262 (TRAV1-2, TRAJ8)
CAVREDTGLQKLVF

SEQ ID NO: 372524 - protein, 13 aa, Homo sapiens
  CDR3 for beta chain variable domain of TCR clone 186262 (TRBV7-3, TRBJ2-1)
CASSPVAYNEQFF

SEQ ID NO: 372525 - protein, 15 aa, Homo sapiens
  CDR3 for alpha chain variable domain of TCR clone 186263 (TRAV36/DV7, TRAJ54)
CAVEKPVQGAQKLVF

SEQ ID NO: 372526 - protein, 14 aa, Homo sapiens
  CDR3 for beta chain variable domain of TCR clone 186263 (TRBV12-4, TRBJ1-1)
CASSSARGYTEAVF

SEQ ID NO: 372527 - protein, 12 aa, Homo sapiens
  CDR3 for alpha chain variable domain of TCR clone 186264 (TRAV36/DV7, TRAJ40)
CAVGTGTYKYIF

SEQ ID NO: 372528 - protein, 13 aa, Homo sapiens
  CDR3 for beta chain variable domain of TCR clone 186264 (TRBV7-3, TRBJ1-1)
CASSQDWGAEAFF

SEQ ID NO: 372529 - protein, 15 aa, Homo sapiens
  CDR3 for alpha chain variable domain of TCR clone 186265 (TRAV12-3, TRAJ11)
CAMSEENSGYSTLTF

SEQ ID NO: 372530 - protein, 13 aa, Homo sapiens
  CDR3 for beta chain variable domain of TCR clone 186265 (TRBV2, TRBJ2-7)
CASSGAAAYEQYF

SEQ ID NO: 372531 - protein, 11 aa, Homo sapiens
  CDR3 for alpha chain variable domain of TCR clone 186266 (TRAV2, TRAJ21)
CAVFNFNKFCF

SEQ ID NO: 372532 - protein, 14 aa, Homo sapiens
  CDR3 for beta chain variable domain of TCR clone 186266 (TRBV15, TRBJ2-3)
CATRSGTSTDTQYF

SEQ ID NO: 372533 - protein, 15 aa, Homo sapiens
  CDR3 for alpha chain variable domain of TCR clone 186267 (TRAV12-3, TRAJ10)
CASNILTGGGNKLTF

SEQ ID NO: 372534 - protein, 15 aa, Homo sapiens
  CDR3 for beta chain variable domain of TCR clone 186267 (TRBV7-2, TRBJ1-6)
CASSLGPDRGMPLHF

SEQ ID NO: 372535 - protein, 18 aa, Homo sapiens
  CDR3 for alpha chain variable domain of TCR clone 186268 (TRAV3, TRAJ42)
CAVRDPENYGGSQGHLIF

SEQ ID NO: 372536 - protein, 19 aa, Homo sapiens
  CDR3 for beta chain variable domain of TCR clone 186268 (TRBV25-1, TRBJ2-2)
CAILVYRVDRGRKTGELFF

SEQ ID NO: 372537 - protein, 14 aa, Homo sapiens
  CDR3 for alpha chain variable domain of TCR clone 186269 (TRAV2, TRAJ33)
CAVEDQGSNYQLIW

SEQ ID NO: 372538 - protein, 15 aa, Homo sapiens
  CDR3 for beta chain variable domain of TCR clone 186269 (TRBV6-3, TRBJ2-7)
CASSSPGTVFYEQYF

SEQ ID NO: 372539 - protein, 15 aa, Homo sapiens
  CDR3 for alpha chain variable domain of TCR clone 186270 (TRAV26-1, TRAJ27)
CIVRVLTPMQANQPL

SEQ ID NO: 372540 - protein, 19 aa, Homo sapiens
  CDR3 for beta chain variable domain of TCR clone 186270 (TRBV25-1, TRBJ2-2)
CAILVYRVDRGRKTGELFF

SEQ ID NO: 372541 - protein, 19 aa, Homo sapiens
  CDR3 for alpha chain variable domain of TCR clone 186271 (TRAV26-1, TRAJ3)
CCVLLHRQIGYSSASKIIF

SEQ ID NO: 372542 - protein, 14 aa, Homo sapiens
  CDR3 for beta chain variable domain of TCR clone 186271 (TRBV13, TRBJ2-5)
CASYRRLAEETQYF

SEQ ID NO: 372543 - protein, 14 aa, Homo sapiens
  CDR3 for alpha chain variable domain of TCR clone 186272 (TRAV12-2, TRAJ44)
CAVNPAGTASKLTF

SEQ ID NO: 372544 - protein, 13 aa, Homo sapiens
  CDR3 for beta chain variable domain of TCR clone 186272 (TRBV20-1, TRBJ1-1)
CSARGGGNTEAFF

SEQ ID NO: 372545 - protein, 14 aa, Homo sapiens
  CDR3 for alpha chain variable domain of TCR clone 186273 (TRAV12-3, TRAJ9)
CAMSPNTGGFKTIF

SEQ ID NO: 372546 - protein, 12 aa, Homo sapiens
  CDR3 for beta chain variable domain of TCR clone 186273 (TRBV19, TRBJ1-5)
CASSIAQQQQHF

SEQ ID NO: 372547 - protein, 14 aa, Homo sapiens
  CDR3 for alpha chain variable domain of TCR clone 186274 (TRAV12-2, TRAJ6)
CASKCGGGSYIPTF

SEQ ID NO: 372548 - protein, 13 aa, Homo sapiens
  CDR3 for beta chain variable domain of TCR clone 186274 (TRBV2, TRBJ1-1)
CASSEGGNTEAFF

SEQ ID NO: 372549 - protein, 14 aa, Homo sapiens
  CDR3 for alpha chain variable domain of TCR clone 186275 (TRAV13-1, TRAJ44)
CAAKATGTASKLTS

SEQ ID NO: 372550 - protein, 16 aa, Homo sapiens
  CDR3 for beta chain variable domain of TCR clone 186275 (TRBV19, TRBJ2-1)
CASSKAGPSSYNEQFF

SEQ ID NO: 372551 - protein, 14 aa, Homo sapiens
  CDR3 for alpha chain variable domain of TCR clone 186276 (TRAV12-3, TRAJ10)
SHLPLTGGGNKLTF

SEQ ID NO: 372552 - protein, 16 aa, Homo sapiens
  CDR3 for beta chain variable domain of TCR clone 186276 (TRBV10-3, TRBJ2-1)
CAISGVGDGGGGEQFL

SEQ ID NO: 372553 - protein, 12 aa, Homo sapiens
  CDR3 for alpha chain variable domain of TCR clone 186277 (TRAV13-1, TRAJ21)
CAAKEGFNKFYF

SEQ ID NO: 372554 - protein, 16 aa, Homo sapiens
  CDR3 for beta chain variable domain of TCR clone 186277 (TRBV7-8, TRBJ2-4)
CASSAERTLAKNIQYS

SEQ ID NO: 372555 - protein, 12 aa, Homo sapiens
  CDR3 for alpha chain variable domain of TCR clone 186278 (TRAV12-1, TRAJ39)
CVVREAGNMITF

SEQ ID NO: 372556 - protein, 15 aa, Homo sapiens
  CDR3 for beta chain variable domain of TCR clone 186278 (TRBV5-1, TRBJ2-2)
CASSLRQGDTGELFF

SEQ ID NO: 372557 - protein, 14 aa, Homo sapiens
  CDR3 for alpha chain variable domain of TCR clone 186279 (TRAV1-2, TRAJ16)
CAVNRVSDGQKLLF

SEQ ID NO: 372558 - protein, 17 aa, Homo sapiens
  CDR3 for beta chain variable domain of TCR clone 186279 (TRBV7-2, TRBJ2-7)
CASSFETSGSTSSTSGR

SEQ ID NO: 372559 - protein, 12 aa, Homo sapiens
  CDR3 for alpha chain variable domain of TCR clone 186280 (TRAV12-1, TRAJ31)
CVVNLNNARLMF

SEQ ID NO: 372560 - protein, 14 aa, Homo sapiens
  CDR3 for beta chain variable domain of TCR clone 186280 (TRBV12-5, TRBJ2-5)
CASGSRTHQETQYF

SEQ ID NO: 372561 - protein, 13 aa, Homo sapiens
  CDR3 for alpha chain variable domain of TCR clone 186281 (TRAV12-3, TRAJ40)
CAMSDSGTYKYIF

SEQ ID NO: 372562 - protein, 14 aa, Homo sapiens
  CDR3 for beta chain variable domain of TCR clone 186281 (TRBV11-2, TRBJ1-5)
CASSLDRGRQPQHF

SEQ ID NO: 372563 - protein, 13 aa, Homo sapiens
  CDR3 for alpha chain variable domain of TCR clone 186282 (TRAV26-1, TRAJ12)
CIVRPDSSYKLIF

SEQ ID NO: 372564 - protein, 16 aa, Homo sapiens
  CDR3 for beta chain variable domain of TCR clone 186282 (TRBV19, TRBJ2-2)
CASRSPGTGATGELFF

SEQ ID NO: 372565 - protein, 16 aa, Homo sapiens
  CDR3 for alpha chain variable domain of TCR clone 186283 (TRAV3, TRAJ4)
CAVRAFFSGGYNKLIF

SEQ ID NO: 372566 - protein, 15 aa, Homo sapiens
  CDR3 for beta chain variable domain of TCR clone 186283 (TRBV11-1, TRBJ2-1)
CASSNGGGSSNEQFF

SEQ ID NO: 372567 - protein, 12 aa, Homo sapiens
  CDR3 for alpha chain variable domain of TCR clone 186284 (TRAV17, TRAJ21)
CAPRYNFNKFYF

SEQ ID NO: 372568 - protein, 13 aa, Homo sapiens
  CDR3 for beta chain variable domain of TCR clone 186284 (TRBV24-1, TRBJ2-5)
CATSTGGTETQYF

SEQ ID NO: 372569 - protein, 14 aa, Homo sapiens
  CDR3 for alpha chain variable domain of TCR clone 186285 (TRAV1-1, TRAJ27)
CAVIYNTNAGKSTV

SEQ ID NO: 372570 - protein, 15 aa, Homo sapiens
  CDR3 for beta chain variable domain of TCR clone 186285 (TRBV7-2, TRBJ2-1)
CASSSGLAGGNGQFF

SEQ ID NO: 372571 - protein, 13 aa, Homo sapiens
  CDR3 for alpha chain variable domain of TCR clone 186286 (TRAV26-1, TRAJ30)
CIVRVESNDKIIF

SEQ ID NO: 372572 - protein, 17 aa, Homo sapiens
  CDR3 for beta chain variable domain of TCR clone 186286 (TRBV13, TRBJ2-3)
CASSRSRVAGGMNTQYF

SEQ ID NO: 372573 - protein, 13 aa, Homo sapiens
  CDR3 for alpha chain variable domain of TCR clone 186287 (TRAV1-2, TRAJ9)
CAALNTGGFKTIF

SEQ ID NO: 372574 - protein, 20 aa, Homo sapiens
  CDR3 for beta chain variable domain of TCR clone 186287 (TRBV28, TRBJ2-1)
CASTPIGRSPGLAGGNEQFY

SEQ ID NO: 372575 - protein, 14 aa, Homo sapiens
  CDR3 for alpha chain variable domain of TCR clone 186288 (TRAV1-2, TRAJ8)
CAVREDTGFQKLVF

SEQ ID NO: 372576 - protein, 14 aa, Homo sapiens
  CDR3 for beta chain variable domain of TCR clone 186288 (TRBV2, TRBJ1-6)
CASRRLSSNSPLHF

SEQ ID NO: 372577 - protein, 12 aa, Homo sapiens
  CDR3 for alpha chain variable domain of TCR clone 186289 (TRAV8-3, TRAJ26)
RAGDNYGQNFVF

SEQ ID NO: 372578 - protein, 13 aa, Homo sapiens
  CDR3 for beta chain variable domain of TCR clone 186289 (TRBV10-3, TRBJ2-7)
CASKLAVNYEQYF

SEQ ID NO: 372579 - protein, 16 aa, Homo sapiens
  CDR3 for alpha chain variable domain of TCR clone 186290 (TRAV29/DV5, TRAJ48)
CSVLLCSKGGNEKLTF

SEQ ID NO: 372580 - protein, 18 aa, Homo sapiens
  CDR3 for beta chain variable domain of TCR clone 186290 (TRBV20-1, TRBJ2-3)
CSASGLAGGPGTTDTQYF

SEQ ID NO: 372581 - protein, 16 aa, Homo sapiens
  CDR3 for alpha chain variable domain of TCR clone 186291 (TRAV12-1, TRAJ42)
CVVTPYYGGSQGNLNF

SEQ ID NO: 372582 - protein, 15 aa, Homo sapiens
  CDR3 for beta chain variable domain of TCR clone 186291 (TRBV4-3, TRBJ2-7)
CASSQGGRGIYEQYF

SEQ ID NO: 372583 - protein, 14 aa, Homo sapiens
  CDR3 for alpha chain variable domain of TCR clone 186292 (TRAV12-2, TRAJ13)
CAVKKTGGYQKVNF

SEQ ID NO: 372584 - protein, 15 aa, Homo sapiens
  CDR3 for beta chain variable domain of TCR clone 186292 (TRBV9, TRBJ1-6)
CASSVAGIGDSPLHF

SEQ ID NO: 372585 - protein, 15 aa, Homo sapiens
  CDR3 for alpha chain variable domain of TCR clone 186293 (TRAV3, TRAJ22)
CAVRDRGGSARQLTF

SEQ ID NO: 372586 - protein, 17 aa, Homo sapiens
  CDR3 for beta chain variable domain of TCR clone 186293 (TRBV20-1, TRBJ2-1)
CSARDPLAGVWDNEQFF

SEQ ID NO: 372587 - protein, 16 aa, Homo sapiens
  CDR3 for alpha chain variable domain of TCR clone 186294 (TRAV3, TRAJ21)
CAVRDIERGNFNKFYF

SEQ ID NO: 372588 - protein, 16 aa, Homo sapiens
  CDR3 for beta chain variable domain of TCR clone 186294 (TRBV11-2, TRBJ1-2)
CASSLDTGGADYGYTF

SEQ ID NO: 372589 - protein, 15 aa, Homo sapiens
  CDR3 for alpha chain variable domain of TCR clone 186295 (TRAV17, TRAJ54)
CATTQSEQGAQKLVF

SEQ ID NO: 372590 - protein, 16 aa, Homo sapiens
  CDR3 for beta chain variable domain of TCR clone 186295 (TRBV12-4, TRBJ2-3)
CASSLRLAETTDTQYF

SEQ ID NO: 372591 - protein, 14 aa, Homo sapiens
  CDR3 for alpha chain variable domain of TCR clone 186296 (TRAV29/DV5, TRAJ36)
CAARRKTGANNLFF

SEQ ID NO: 372592 - protein, 14 aa, Homo sapiens
  CDR3 for beta chain variable domain of TCR clone 186296 (TRBV7-9, TRBJ2-7)
CASSLGTDPNEQYF

SEQ ID NO: 372593 - protein, 17 aa, Homo sapiens
  CDR3 for alpha chain variable domain of TCR clone 186297 (TRAV3, TRAJ42)
CAVRDRYYGGSQGNLIF

SEQ ID NO: 372594 - protein, 20 aa, Homo sapiens
  CDR3 for beta chain variable domain of TCR clone 186297 (TRBV28, TRBJ2-1)
CASTPIGRSPGLAGGNEQFF

SEQ ID NO: 372595 - protein, 13 aa, Homo sapiens
  CDR3 for alpha chain variable domain of TCR clone 186298 (TRAV12-1, TRAJ9)
CVVLNTGGFKTIC

SEQ ID NO: 372596 - protein, 13 aa, Homo sapiens
  CDR3 for beta chain variable domain of TCR clone 186298 (TRBV20-1, TRBJ1-1)
CSARGGGNTEAFF

SEQ ID NO: 372597 - protein, 13 aa, Homo sapiens
  CDR3 for alpha chain variable domain of TCR clone 186299 (TRAV12-3, TRAJ9)
CAMRNTGGYKTIF

SEQ ID NO: 372598 - protein, 16 aa, Homo sapiens
  CDR3 for beta chain variable domain of TCR clone 186299 (TRBV19, TRBJ2-1)
CASSIDGSFAYNEQFF

SEQ ID NO: 372599 - protein, 15 aa, Homo sapiens
  CDR3 for alpha chain variable domain of TCR clone 186300 (TRAV16, TRAJ12)
CSKWPLRDSSYKLIF

SEQ ID NO: 372600 - protein, 15 aa, Homo sapiens
  CDR3 for beta chain variable domain of TCR clone 186300 (TRBV6-5, TRBJ1-2)
CASSYSQAFNYGYTF

SEQ ID NO: 372601 - protein, 14 aa, Homo sapiens
  CDR3 for alpha chain variable domain of TCR clone 186301 (TRAV17, TRAJ6)
CATDASGGSFIPTF

SEQ ID NO: 372602 - protein, 19 aa, Homo sapiens
  CDR3 for beta chain variable domain of TCR clone 186301 (TRBV4-3, TRBJ2-7)
CASSQEFIGWQVTPYEQYF

SEQ ID NO: 372603 - protein, 16 aa, Homo sapiens
  CDR3 for alpha chain variable domain of TCR clone 186302 (TRAV21, TRAJ37)
CAVRTAGSSNTGKLIF

SEQ ID NO: 372604 - protein, 13 aa, Homo sapiens
  CDR3 for beta chain variable domain of TCR clone 186302 (TRBV7-9, TRBJ2-5)
CASLPSGPETQYF

SEQ ID NO: 372605 - protein, 13 aa, Homo sapiens
  CDR3 for alpha chain variable domain of TCR clone 186303 (TRAV12-3, TRAJ56)
CALATGANSKLTF

SEQ ID NO: 372606 - protein, 15 aa, Homo sapiens
  CDR3 for beta chain variable domain of TCR clone 186303 (TRBV11-3, TRBJ2-3)
CASLKDGREGDTQYF

SEQ ID NO: 372607 - protein, 16 aa, Homo sapiens
  CDR3 for alpha chain variable domain of TCR clone 186304 (TRAV1-2, TRAJ10)
CAVRGVLPGGGNKLTF

SEQ ID NO: 372608 - protein, 15 aa, Homo sapiens
  CDR3 for beta chain variable domain of TCR clone 186304 (TRBV6-3, TRBJ2-7)
CASSSPGTVFYEQYF

SEQ ID NO: 372609 - protein, 14 aa, Homo sapiens
  CDR3 for alpha chain variable domain of TCR clone 186305 (TRAV8-4, TRAJ15)
CAVTIREAGTALIF

SEQ ID NO: 372610 - protein, 14 aa, Homo sapiens
  CDR3 for beta chain variable domain of TCR clone 186305 (TRBV13, TRBJ2-5)
CASSLGPRGETQCF

SEQ ID NO: 372611 - protein, 14 aa, Homo sapiens
  CDR3 for alpha chain variable domain of TCR clone 186306 (TRAV12-2, TRAJ17)
CAVLFKAAGNKLTF

SEQ ID NO: 372612 - protein, 15 aa, Homo sapiens
  CDR3 for beta chain variable domain of TCR clone 186306 (TRBV28, TRBJ2-2)
CASRLQGVGTGELFF

SEQ ID NO: 372613 - protein, 12 aa, Homo sapiens
  CDR3 for alpha chain variable domain of TCR clone 186307 (TRAV2, TRAJ33)
CAFMDSNYQLIW

SEQ ID NO: 372614 - protein, 15 aa, Homo sapiens
  CDR3 for beta chain variable domain of TCR clone 186307 (TRBV2, TRBJ2-3)
CASSDFEKATDTQYF

SEQ ID NO: 372615 - protein, 15 aa, Homo sapiens
  CDR3 for alpha chain variable domain of TCR clone 186308 (TRAV3, TRAJ3)
CAVRDMDSSASKIIF

SEQ ID NO: 372616 - protein, 18 aa, Homo sapiens
  CDR3 for beta chain variable domain of TCR clone 186308 (TRBV25-1, TRBJ1-2)
CASSGLQNGQGLIFGYTF

SEQ ID NO: 372617 - protein, 14 aa, Homo sapiens
  CDR3 for alpha chain variable domain of TCR clone 186309 (TRAV8-2, TRAJ37)
RVVSISGNTGTLIF

SEQ ID NO: 372618 - protein, 13 aa, Homo sapiens
  CDR3 for beta chain variable domain of TCR clone 186309 (TRBV7-8, TRBJ2-7)
RRVRLTEVGEQYF

SEQ ID NO: 372619 - protein, 14 aa, Homo sapiens
  CDR3 for alpha chain variable domain of TCR clone 186310 (TRAV12-2, TRAJ9)
CAVNMEGGGFKTIF

SEQ ID NO: 372620 - protein, 18 aa, Homo sapiens
  CDR3 for beta chain variable domain of TCR clone 186310 (TRBV2, TRBJ2-5)
CASSEVLAQETSTSGQAR

SEQ ID NO: 372621 - protein, 13 aa, Homo sapiens
  CDR3 for alpha chain variable domain of TCR clone 186311 (TRAV13-2, TRAJ53)
CPENMGSNYKLTF

SEQ ID NO: 372622 - protein, 13 aa, Homo sapiens
  CDR3 for beta chain variable domain of TCR clone 186311 (TRBV4-1, TRBJ2-2)
CASSQENTGELFF

SEQ ID NO: 372623 - protein, 14 aa, Homo sapiens
  CDR3 for alpha chain variable domain of TCR clone 186312 (TRAV21, TRAJ23)
CAIMIYNQGGKLIF

SEQ ID NO: 372624 - protein, 18 aa, Homo sapiens
  CDR3 for beta chain variable domain of TCR clone 186312 (TRBV20-1, TRBJ2-6)
CSAETTSTHGSGANVLTF

SEQ ID NO: 372625 - protein, 13 aa, Homo sapiens
  CDR3 for alpha chain variable domain of TCR clone 186313 (TRAV17, TRAJ34)
CATDLYNTDKLIF

SEQ ID NO: 372626 - protein, 12 aa, Homo sapiens
  CDR3 for beta chain variable domain of TCR clone 186313 (TRBV11-2, TRBJ2-2)
CASSLGGGELVF

SEQ ID NO: 372627 - protein, 16 aa, Homo sapiens
  CDR3 for alpha chain variable domain of TCR clone 186314 (TRAV12-3, TRAJ53)
CAMSAGSGGSNYTLTF

SEQ ID NO: 372628 - protein, 13 aa, Homo sapiens
  CDR3 for beta chain variable domain of TCR clone 186314 (TRBV29-1, TRBJ2-3)
CSVGPRGTDTQYF

SEQ ID NO: 372629 - protein, 14 aa, Homo sapiens
  CDR3 for alpha chain variable domain of TCR clone 186315 (TRAV12-2, TRAJ24)
CAVTPADSWGKLQV

SEQ ID NO: 372630 - protein, 14 aa, Homo sapiens
  CDR3 for beta chain variable domain of TCR clone 186315 (TRBV7-2, TRBJ2-7)
CASRSQGAAYEQYF

SEQ ID NO: 372631 - protein, 17 aa, Homo sapiens
  CDR3 for alpha chain variable domain of TCR clone 186316 (TRAV3, TRAJ39)
CAVRDLPIDSRGQHAHL

SEQ ID NO: 372632 - protein, 13 aa, Homo sapiens
  CDR3 for beta chain variable domain of TCR clone 186316 (TRBV7-9, TRBJ1-2)
CASSLKQNYGYTF

SEQ ID NO: 372633 - protein, 12 aa, Homo sapiens
  CDR3 for alpha chain variable domain of TCR clone 186317 (TRAV8-3, TRAJ20)
CAVDFNDYKLSF

SEQ ID NO: 372634 - protein, 12 aa, Homo sapiens
  CDR3 for beta chain variable domain of TCR clone 186317 (TRBV7-8, TRBJ2-7)
CASSLGDREQYF

SEQ ID NO: 372635 - protein, 14 aa, Homo sapiens
  CDR3 for alpha chain variable domain of TCR clone 186318 (TRAV9-2, TRAJ39)
CALYIYNAGNMLTF

SEQ ID NO: 372636 - protein, 13 aa, Homo sapiens
  CDR3 for beta chain variable domain of TCR clone 186318 (TRBV7-7, TRBJ2-2)
CASSLTSAGELFF

SEQ ID NO: 372637 - protein, 14 aa, Homo sapiens
  CDR3 for alpha chain variable domain of TCR clone 186319 (TRAV2, TRAJ37)
CAVDFTSNTGRLIF

SEQ ID NO: 372638 - protein, 12 aa, Homo sapiens
  CDR3 for beta chain variable domain of TCR clone 186319 (TRBV7-9, TRBJ2-7)
CASSIKREEQYF

SEQ ID NO: 372639 - protein, 12 aa, Homo sapiens
  CDR3 for alpha chain variable domain of TCR clone 186320 (TRAV12-1, TRAJ40)
CVFYAGTYKYIF

SEQ ID NO: 372640 - protein, 18 aa, Homo sapiens
  CDR3 for beta chain variable domain of TCR clone 186320 (TRBV12-4, TRBJ2-2)
CASSLVAGTRGRTGELFF

SEQ ID NO: 372641 - protein, 15 aa, Homo sapiens
  CDR3 for alpha chain variable domain of TCR clone 186321 (TRAV12-3, TRAJ52)
CNGGTGGTSYGKLTF

SEQ ID NO: 372642 - protein, 13 aa, Homo sapiens
  CDR3 for beta chain variable domain of TCR clone 186321 (TRBV20-1, TRBJ2-5)
CSARGDYQETQYF

SEQ ID NO: 372643 - protein, 16 aa, Homo sapiens
  CDR3 for alpha chain variable domain of TCR clone 186322 (TRAV3, TRAJ10)
CAVRDMRAGGGNKLTF

SEQ ID NO: 372644 - protein, 16 aa, Homo sapiens
  CDR3 for beta chain variable domain of TCR clone 186322 (TRBV4-1, TRBJ2-1)
CASSQEAGQGSDEQFF

SEQ ID NO: 372645 - protein, 16 aa, Homo sapiens
  CDR3 for alpha chain variable domain of TCR clone 186323 (TRAV35, TRAJ28)
CAGQRYSGAGSYQFTF

SEQ ID NO: 372646 - protein, 13 aa, Homo sapiens
  CDR3 for beta chain variable domain of TCR clone 186323 (TRBV19, TRBJ1-2)
CASSQGQVYGYTF

SEQ ID NO: 372647 - protein, 14 aa, Homo sapiens
  CDR3 for alpha chain variable domain of TCR clone 186324 (TRAV12-1, TRAJ30)
CVVNIGGRDDKTIF

SEQ ID NO: 372648 - protein, 13 aa, Homo sapiens
  CDR3 for beta chain variable domain of TCR clone 186324 (TRBV12-5, TRBJ2-1)
CASGLGRGNEQFF

SEQ ID NO: 372649 - protein, 17 aa, Homo sapiens
  CDR3 for alpha chain variable domain of TCR clone 186325 (TRAV26-1, TRAJ37)
CIVRVITVSSNTGKLIL

SEQ ID NO: 372650 - protein, 14 aa, Homo sapiens
  CDR3 for beta chain variable domain of TCR clone 186325 (TRBV19, TRBJ2-1)
CASPTFVLSGEQFF

SEQ ID NO: 372651 - protein, 15 aa, Homo sapiens
  CDR3 for alpha chain variable domain of TCR clone 186326 (TRAV27, TRAJ45)
CAPVDSGGGADGLTF

SEQ ID NO: 372652 - protein, 14 aa, Homo sapiens
  CDR3 for beta chain variable domain of TCR clone 186326 (TRBV25-1, TRBJ1-1)
CASTHLGGNTEAFF

SEQ ID NO: 372653 - protein, 13 aa, Homo sapiens
  CDR3 for alpha chain variable domain of TCR clone 186327 (TRAV2, TRAJ29)
CAARNSGNTPLVF

SEQ ID NO: 372654 - protein, 14 aa, Homo sapiens
  CDR3 for beta chain variable domain of TCR clone 186327 (TRBV7-9, TRBJ2-4)
CASSLAMGGNIQYF

SEQ ID NO: 372655 - protein, 14 aa, Homo sapiens
  CDR3 for alpha chain variable domain of TCR clone 186328 (TRAV13-1, TRAJ10)
CAAKEPGGGNKLTF

SEQ ID NO: 372656 - protein, 14 aa, Homo sapiens
  CDR3 for beta chain variable domain of TCR clone 186328 (TRBV6-1, TRBJ1-3)
CASVQGGGGNTIYF

SEQ ID NO: 372657 - protein, 16 aa, Homo sapiens
  CDR3 for alpha chain variable domain of TCR clone 186329 (TRAV3, TRAJ37)
CAVRPHGSGKTGKLIF

SEQ ID NO: 372658 - protein, 12 aa, Homo sapiens
  CDR3 for beta chain variable domain of TCR clone 186329 (TRBV11-2, TRBJ2-1)
CASSPGNNEQFF

SEQ ID NO: 372659 - protein, 14 aa, Homo sapiens
  CDR3 for alpha chain variable domain of TCR clone 186330 (TRAV1-2, TRAJ16)
CAVNRFSDGQKLLF

SEQ ID NO: 372660 - protein, 15 aa, Homo sapiens
  CDR3 for beta chain variable domain of TCR clone 186330 (TRBV20-1, TRBJ1-6)
CSARAASSYNSPRHF

SEQ ID NO: 372661 - protein, 16 aa, Homo sapiens
  CDR3 for alpha chain variable domain of TCR clone 186331 (TRAV3, TRAJ37)
CAVRPHGSGSTGKLIF

SEQ ID NO: 372662 - protein, 15 aa, Homo sapiens
  CDR3 for beta chain variable domain of TCR clone 186331 (TRBV5-5, TRBJ2-7)
CASSLAAPLSYEQYF

SEQ ID NO: 372663 - protein, 15 aa, Homo sapiens
  CDR3 for alpha chain variable domain of TCR clone 186332 (TRAV21, TRAJ24)
CAARSSTDSLGKLQF

SEQ ID NO: 372664 - protein, 13 aa, Homo sapiens
  CDR3 for beta chain variable domain of TCR clone 186332 (TRBV11-2, TRBJ2-5)
CASSSTGEETQYL

SEQ ID NO: 372665 - protein, 19 aa, Homo sapiens
  CDR3 for alpha chain variable domain of TCR clone 186333 (TRAV1-2, TRAJ26)
CLLPLCCERPDNYGQNFVF

SEQ ID NO: 372666 - protein, 15 aa, Homo sapiens
  CDR3 for beta chain variable domain of TCR clone 186333 (TRBV9, TRBJ1-6)
CSSSGAGTGDSPLHF

SEQ ID NO: 372667 - protein, 18 aa, Homo sapiens
  CDR3 for alpha chain variable domain of TCR clone 186334 (TRAV12-1, TRAJ52)
CVVKLINAGGTSYGKLTF

SEQ ID NO: 372668 - protein, 20 aa, Homo sapiens
  CDR3 for beta chain variable domain of TCR clone 186334 (TRBV7-8, TRBJ2-2)
CASSHLFPGPTIHITGELFF

SEQ ID NO: 372669 - protein, 14 aa, Homo sapiens
  CDR3 for alpha chain variable domain of TCR clone 186335 (TRAV12-2, TRAJ45)
CAVYSGVGADGLTF

SEQ ID NO: 372670 - protein, 14 aa, Homo sapiens
  CDR3 for beta chain variable domain of TCR clone 186335 (TRBV6-5, TRBJ1-2)
CASTRGGGSDGYTF

SEQ ID NO: 372671 - protein, 14 aa, Homo sapiens
  CDR3 for alpha chain variable domain of TCR clone 186336 (TRAV1-2, TRAJ16)
CVVNRFSDGQKLLF

SEQ ID NO: 372672 - protein, 13 aa, Homo sapiens
  CDR3 for beta chain variable domain of TCR clone 186336 (TRBV10-3, TRBJ1-2)
CAIRERDSYGYTF

SEQ ID NO: 372673 - protein, 13 aa, Homo sapiens
  CDR3 for alpha chain variable domain of TCR clone 186337 (TRAV3, TRAJ20)
CAVRDTPRYKLSF

SEQ ID NO: 372674 - protein, 20 aa, Homo sapiens
  CDR3 for beta chain variable domain of TCR clone 186337 (TRBV28, TRBJ2-1)
CASTPIGRSPGLAGGNEQFF

SEQ ID NO: 372675 - protein, 15 aa, Homo sapiens
  CDR3 for alpha chain variable domain of TCR clone 186338 (TRAV21, TRAJ10)
CAVPLLTGGGNKLTF

SEQ ID NO: 372676 - protein, 13 aa, Homo sapiens
  CDR3 for beta chain variable domain of TCR clone 186338 (TRBV12-4, TRBJ1-1)
CQQSRDRGTEAFF

SEQ ID NO: 372677 - protein, 20 aa, Homo sapiens
  CDR3 for alpha chain variable domain of TCR clone 186339 (TRAV8-6, TRAJ8)
CAVNENTGFQNLYLELAPDF

SEQ ID NO: 372678 - protein, 15 aa, Homo sapiens
  CDR3 for beta chain variable domain of TCR clone 186339 (TRBV27, TRBJ2-3)
CASSSLAGVIDTQYF

SEQ ID NO: 372679 - protein, 14 aa, Homo sapiens
  CDR3 for alpha chain variable domain of TCR clone 186340 (TRAV29/DV5, TRAJ20)
CAATIRSNDYKLSF

SEQ ID NO: 372680 - protein, 15 aa, Homo sapiens
  CDR3 for beta chain variable domain of TCR clone 186340 (TRBV20-1, TRBJ2-1)
GSASSAGSSYNEQFF

SEQ ID NO: 372681 - protein, 12 aa, Homo sapiens
  CDR3 for alpha chain variable domain of TCR clone 186341 (TRAV12-3, TRAJ17)
CAMTLTGNKLTF

SEQ ID NO: 372682 - protein, 13 aa, Homo sapiens
  CDR3 for beta chain variable domain of TCR clone 186341 (TRBV19, TRBJ1-3)
CASRLSLGNTIYF

SEQ ID NO: 372683 - protein, 13 aa, Homo sapiens
  CDR3 for alpha chain variable domain of TCR clone 186342 (TRAV16, TRAJ54)
CALMVQGAQKLVF

SEQ ID NO: 372684 - protein, 12 aa, Homo sapiens
  CDR3 for beta chain variable domain of TCR clone 186342 (TRBV18, TRBJ2-7)
CASSTAMGEQSF

SEQ ID NO: 372685 - protein, 15 aa, Homo sapiens
  CDR3 for alpha chain variable domain of TCR clone 186343 (TRAV2, TRAJ15)
YAVEDREQAGTALIF

SEQ ID NO: 372686 - protein, 13 aa, Homo sapiens
  CDR3 for beta chain variable domain of TCR clone 186343 (TRBV10-2, TRBJ2-3)
CASSESGDHTQYF

SEQ ID NO: 372687 - protein, 15 aa, Homo sapiens
  CDR3 for alpha chain variable domain of TCR clone 186344 (TRAV20, TRAJ43)
CAVQAGKSSNNDMRY

SEQ ID NO: 372688 - protein, 14 aa, Homo sapiens
  CDR3 for beta chain variable domain of TCR clone 186344 (TRBV27, TRBJ2-1)
CASRHLGGGKEQFF

SEQ ID NO: 372689 - protein, 15 aa, Homo sapiens
  CDR3 for alpha chain variable domain of TCR clone 186345 (TRAV8-3, TRAJ40)
CATPSLGSGTYKYFF

SEQ ID NO: 372690 - protein, 16 aa, Homo sapiens
  CDR3 for beta chain variable domain of TCR clone 186345 (TRBV7-3, TRBJ2-3)
CASSLSGYRPEDTQYF

SEQ ID NO: 372691 - protein, 13 aa, Homo sapiens
  CDR3 for alpha chain variable domain of TCR clone 186346 (TRAV3, TRAJ21)
CAVREPDFDKFYF

SEQ ID NO: 372692 - protein, 16 aa, Homo sapiens
  CDR3 for beta chain variable domain of TCR clone 186346 (TRBV5-1, TRBJ2-3)
CASSLGLAVYTDTQYF

SEQ ID NO: 372693 - protein, 14 aa, Homo sapiens
  CDR3 for alpha chain variable domain of TCR clone 186347 (TRAV1-2, TRAJ16)
CAVNRFSDGQKLLF

SEQ ID NO: 372694 - protein, 15 aa, Homo sapiens
  CDR3 for beta chain variable domain of TCR clone 186347 (TRBV7-9, TRBJ1-6)
CASSAPGRGNSHLLF

SEQ ID NO: 372695 - protein, 10 aa, Homo sapiens
  CDR3 for alpha chain variable domain of TCR clone 186348 (TRAV23/DV6, TRAJ57)
CAASSTLSQG

SEQ ID NO: 372696 - protein, 16 aa, Homo sapiens
  CDR3 for beta chain variable domain of TCR clone 186348 (TRBV4-1, TRBJ1-1)
CASSYRQGTGDTEAFF

SEQ ID NO: 372697 - protein, 13 aa, Homo sapiens
  CDR3 for alpha chain variable domain of TCR clone 186349 (TRAV8-3, TRAJ6)
CAVGSGGSYIPTF

SEQ ID NO: 372698 - protein, 15 aa, Homo sapiens
  CDR3 for beta chain variable domain of TCR clone 186349 (TRBV10-3, TRBJ1-4)
CAISENSPSGEKLFF

SEQ ID NO: 372699 - protein, 16 aa, Homo sapiens
  CDR3 for alpha chain variable domain of TCR clone 186350 (TRAV25, TRAJ53)
CAGPKGSGGSNYKLTF

SEQ ID NO: 372700 - protein, 14 aa, Homo sapiens
  CDR3 for beta chain variable domain of TCR clone 186350 (TRBV19, TRBJ1-2)
CASSLQGQAYGYTF

SEQ ID NO: 372701 - protein, 16 aa, Homo sapiens
  CDR3 for alpha chain variable domain of TCR clone 186351 (TRAV12-3, TRAJ53)
CAMSPGSGGSHYKLTF

SEQ ID NO: 372702 - protein, 17 aa, Homo sapiens
  CDR3 for beta chain variable domain of TCR clone 186351 (TRBV28, TRBJ2-5)
CASSTPEGDALQETQYF

SEQ ID NO: 372703 - protein, 12 aa, Homo sapiens
  CDR3 for alpha chain variable domain of TCR clone 186352 (TRAV25, TRAJ38)
CAGTGNNRKLIW

SEQ ID NO: 372704 - protein, 11 aa, Homo sapiens
  CDR3 for beta chain variable domain of TCR clone 186352 (TRBV29-1, TRBJ2-5)
CSEDRTGTQYF

SEQ ID NO: 372705 - protein, 13 aa, Homo sapiens
  CDR3 for alpha chain variable domain of TCR clone 186353 (TRAV12-2, TRAJ20)
CVVYPSNDYKLSF

SEQ ID NO: 372706 - protein, 15 aa, Homo sapiens
  CDR3 for beta chain variable domain of TCR clone 186353 (TRBV18, TRBJ1-2)
CASSPGNGLGYGYTF

SEQ ID NO: 372707 - protein, 14 aa, Homo sapiens
  CDR3 for alpha chain variable domain of TCR clone 186354 (TRAV2, TRAJ9)
CAVEDRSGGFKTIF

SEQ ID NO: 372708 - protein, 14 aa, Homo sapiens
  CDR3 for beta chain variable domain of TCR clone 186354 (TRBV12-4, TRBJ2-3)
CASSLSGATDTQYF

SEQ ID NO: 372709 - protein, 13 aa, Homo sapiens
  CDR3 for alpha chain variable domain of TCR clone 186355 (TRAV8-3, TRAJ48)
CAVEPFGNEKLTF

SEQ ID NO: 372710 - protein, 19 aa, Homo sapiens
  CDR3 for beta chain variable domain of TCR clone 186355 (TRBV25-1, TRBJ2-2)
CAILVYRVDRGRKTGELFF

SEQ ID NO: 372711 - protein, 17 aa, Homo sapiens
  CDR3 for alpha chain variable domain of TCR clone 186356 (TRAV17, TRAJ20)
CATRYKLSFGAGTTVTV

SEQ ID NO: 372712 - protein, 17 aa, Homo sapiens
  CDR3 for beta chain variable domain of TCR clone 186356 (TRBV7-9, TRBJ2-7)
CASSWQGRWREAYEQYF

SEQ ID NO: 372713 - protein, 15 aa, Homo sapiens
  CDR3 for alpha chain variable domain of TCR clone 186357 (TRAV16, TRAJ20)
CARKGGLRADYKLSF

SEQ ID NO: 372714 - protein, 16 aa, Homo sapiens
  CDR3 for beta chain variable domain of TCR clone 186357 (TRBV11-3, TRBJ2-2)
CASSSRTSPGTGELFF

SEQ ID NO: 372715 - protein, 13 aa, Homo sapiens
  CDR3 for alpha chain variable domain of TCR clone 186358 (TRAV2, TRAJ15)
CAVASQAGTALIF

SEQ ID NO: 372716 - protein, 15 aa, Homo sapiens
  CDR3 for beta chain variable domain of TCR clone 186358 (TRBV11-2, TRBJ2-1)
CASSLGASGLNEQFL

SEQ ID NO: 372717 - protein, 13 aa, Homo sapiens
  CDR3 for alpha chain variable domain of TCR clone 186359 (TRAV12-3, TRAJ33)
CAMSVNSNYQLIW

SEQ ID NO: 372718 - protein, 20 aa, Homo sapiens
  CDR3 for beta chain variable domain of TCR clone 186359 (TRBV13, TRBJ2-5)
CASSLRTGGSWETQYFARHA

SEQ ID NO: 372719 - protein, 14 aa, Homo sapiens
  CDR3 for alpha chain variable domain of TCR clone 186360 (TRAV8-4, TRAJ9)
CAVPFNTEGFKTIF

SEQ ID NO: 372720 - protein, 15 aa, Homo sapiens
  CDR3 for beta chain variable domain of TCR clone 186360 (TRBV7-9, TRBJ2-2)
CASSPETGAGGELFF

SEQ ID NO: 372721 - protein, 14 aa, Homo sapiens
  CDR3 for alpha chain variable domain of TCR clone 186361 (TRAV12-3, TRAJ10)
SHLPLTGGGNKLTF

SEQ ID NO: 372722 - protein, 16 aa, Homo sapiens
  CDR3 for beta chain variable domain of TCR clone 186361 (TRBV19, TRBJ2-1)
CASSKAGPSSYKGQFF

SEQ ID NO: 372723 - protein, 14 aa, Homo sapiens
  CDR3 for alpha chain variable domain of TCR clone 186362 (TRAV20, TRAJ42)
CAVQAGGSQGNLIF

SEQ ID NO: 372724 - protein, 14 aa, Homo sapiens
  CDR3 for beta chain variable domain of TCR clone 186362 (TRBV28, TRBJ1-2)
YASRIQGANYGYTF

SEQ ID NO: 372725 - protein, 14 aa, Homo sapiens
  CDR3 for alpha chain variable domain of TCR clone 186363 (TRAV8-3, TRAJ9)
CAVVYNTGGFKTIF

SEQ ID NO: 372726 - protein, 16 aa, Homo sapiens
  CDR3 for beta chain variable domain of TCR clone 186363 (TRBV7-3, TRBJ2-2)
CTSSLKRGTLSGELFF

SEQ ID NO: 372727 - protein, 13 aa, Homo sapiens
  CDR3 for alpha chain variable domain of TCR clone 186364 (TRAV14/DV4, TRAJ20)
CAMRESNDYKLSF

SEQ ID NO: 372728 - protein, 13 aa, Homo sapiens
  CDR3 for beta chain variable domain of TCR clone 186364 (TRBV5-1, TRBJ1-2)
CASSFQDGYGYTF

SEQ ID NO: 372729 - protein, 15 aa, Homo sapiens
  CDR3 for alpha chain variable domain of TCR clone 186365 (TRAV20, TRAJ23)
CAVQAVRKQGGKLIF

SEQ ID NO: 372730 - protein, 13 aa, Homo sapiens
  CDR3 for beta chain variable domain of TCR clone 186365 (TRBV9, TRBJ2-7)
CASSASDSYEQYF

SEQ ID NO: 372731 - protein, 15 aa, Homo sapiens
  CDR3 for alpha chain variable domain of TCR clone 186366 (TRAV14/DV4, TRAJ12)
CAMREERDSSYKLIF

SEQ ID NO: 372732 - protein, 18 aa, Homo sapiens
  CDR3 for beta chain variable domain of TCR clone 186366 (TRBV11-2, TRBJ2-3)
CASSLGGASRGAPNTQYF

SEQ ID NO: 372733 - protein, 13 aa, Homo sapiens
  CDR3 for alpha chain variable domain of TCR clone 186367 (TRAV20, TRAJ37)
CAGCSNNTDKLIF

SEQ ID NO: 372734 - protein, 11 aa, Homo sapiens
  CDR3 for beta chain variable domain of TCR clone 186367 (TRBV12-4, TRBJ2-3)
CASTATDTQYF

SEQ ID NO: 372735 - protein, 11 aa, Homo sapiens
  CDR3 for alpha chain variable domain of TCR clone 186368 (TRAV3, TRAJ21)
CAVGNFNKFYF

SEQ ID NO: 372736 - protein, 13 aa, Homo sapiens
  CDR3 for beta chain variable domain of TCR clone 186368 (TRBV7-9, TRBJ1-2)
CASSLKQNYSYTF

SEQ ID NO: 372737 - protein, 13 aa, Homo sapiens
  CDR3 for alpha chain variable domain of TCR clone 186369 (TRAV27, TRAJ27)
CAGGITNAGKSTF

SEQ ID NO: 372738 - protein, 13 aa, Homo sapiens
  CDR3 for beta chain variable domain of TCR clone 186369 (TRBV20-1, TRBJ1-2)
CSDSLGVGYGYTF

SEQ ID NO: 372739 - protein, 15 aa, Homo sapiens
  CDR3 for alpha chain variable domain of TCR clone 186370 (TRAV8-3, TRAJ27)
CAVGPSKTNAGKSTF

SEQ ID NO: 372740 - protein, 11 aa, Homo sapiens
  CDR3 for beta chain variable domain of TCR clone 186370 (TRBV11-2, TRBJ2-2)
CASSLPGELFF

SEQ ID NO: 372741 - protein, 14 aa, Homo sapiens
  CDR3 for alpha chain variable domain of TCR clone 186371 (TRAV17, TRAJ16)
CATADFSDGQKLLF

SEQ ID NO: 372742 - protein, 12 aa, Homo sapiens
  CDR3 for beta chain variable domain of TCR clone 186371 (TRBV24-1, TRBJ1-1)
CASLYPDTEAFF

SEQ ID NO: 372743 - protein, 17 aa, Homo sapiens
  CDR3 for alpha chain variable domain of TCR clone 186372 (TRAV3, TRAJ6)
CAVRDGPRAGGSYIPTF

SEQ ID NO: 372744 - protein, 12 aa, Homo sapiens
  CDR3 for beta chain variable domain of TCR clone 186372 (TRBV11-2, TRBJ2-1)
FASSPGNNEQFF

SEQ ID NO: 372745 - protein, 19 aa, Homo sapiens
  CDR3 for alpha chain variable domain of TCR clone 186373 (TRAV13-1, TRAJ52)
RAASSSPNAGGTSYGKLTF

SEQ ID NO: 372746 - protein, 15 aa, Homo sapiens
  CDR3 for beta chain variable domain of TCR clone 186373 (TRBV9, TRBJ1-6)
CASSTGGGVDSPLHF

SEQ ID NO: 372747 - protein, 12 aa, Homo sapiens
  CDR3 for alpha chain variable domain of TCR clone 186374 (TRAV3, TRAJ20)
CAVRDPDYKLSF

SEQ ID NO: 372748 - protein, 11 aa, Homo sapiens
  CDR3 for beta chain variable domain of TCR clone 186374 (TRBV28, TRBJ2-5)
CARSLKETQYF

SEQ ID NO: 372749 - protein, 13 aa, Homo sapiens
  CDR3 for alpha chain variable domain of TCR clone 186375 (TRAV4, TRAJ28)
CLFIWGWELATHF

SEQ ID NO: 372750 - protein, 14 aa, Homo sapiens
  CDR3 for beta chain variable domain of TCR clone 186375 (TRBV7-9, TRBJ2-5)
CASSLDTAQETQYF

SEQ ID NO: 372751 - protein, 14 aa, Homo sapiens
  CDR3 for alpha chain variable domain of TCR clone 186376 (TRAV29/DV5, TRAJ47)
CAASSIEYVNKLVF

SEQ ID NO: 372752 - protein, 14 aa, Homo sapiens
  CDR3 for beta chain variable domain of TCR clone 186376 (TRBV10-2, TRBJ1-5)
CASSSTGRNQPQHF

SEQ ID NO: 372753 - protein, 13 aa, Homo sapiens
  CDR3 for alpha chain variable domain of TCR clone 186377 (TRAV38-2/DV8, TRAJ56)
CAYQSRANSKLTF

SEQ ID NO: 372754 - protein, 16 aa, Homo sapiens
  CDR3 for beta chain variable domain of TCR clone 186377 (TRBV28, TRBJ1-1)
GASSSGGQPVATEAFF

SEQ ID NO: 372755 - protein, 13 aa, Homo sapiens
  CDR3 for alpha chain variable domain of TCR clone 186378 (TRAV20, TRAJ54)
CALTFEGAQKLVL

SEQ ID NO: 372756 - protein, 12 aa, Homo sapiens
  CDR3 for beta chain variable domain of TCR clone 186378 (TRBV5-1, TRBJ2-5)
CASSFSWETQYF

SEQ ID NO: 372757 - protein, 14 aa, Homo sapiens
  CDR3 for alpha chain variable domain of TCR clone 186379 (TRAV8-3, TRAJ44)
CAVGLTGTASKLTF

SEQ ID NO: 372758 - protein, 17 aa, Homo sapiens
  CDR3 for beta chain variable domain of TCR clone 186379 (TRBV13, TRBJ2-3)
CASSLSRVAGGRNTQYF

SEQ ID NO: 372759 - protein, 11 aa, Homo sapiens
  CDR3 for alpha chain variable domain of TCR clone 186380 (TRAV13-1, TRAJ39)
CASHAGNMLPF

SEQ ID NO: 372760 - protein, 13 aa, Homo sapiens
  CDR3 for beta chain variable domain of TCR clone 186380 (TRBV11-2, TRBJ1-5)
CQQLRQGRQPQHF

SEQ ID NO: 372761 - protein, 14 aa, Homo sapiens
  CDR3 for alpha chain variable domain of TCR clone 186381 (TRAV1-2, TRAJ16)
CAVNRFSDGQQLLF

SEQ ID NO: 372762 - protein, 14 aa, Homo sapiens
  CDR3 for beta chain variable domain of TCR clone 186381 (TRBV7-9, TRBJ2-2)
CASSTVLGRGELFF

SEQ ID NO: 372763 - protein, 11 aa, Homo sapiens
  CDR3 for alpha chain variable domain of TCR clone 186382 (TRAV2, TRAJ13)
CASGGDKKVTF

SEQ ID NO: 372764 - protein, 14 aa, Homo sapiens
  CDR3 for beta chain variable domain of TCR clone 186382 (TRBV11-2, TRBJ2-3)
CASSRLARTDTQYF

SEQ ID NO: 372765 - protein, 14 aa, Homo sapiens
  CDR3 for alpha chain variable domain of TCR clone 186383 (TRAV12-3, TRAJ10)
SHLPLTGGGNKLTF

SEQ ID NO: 372766 - protein, 14 aa, Homo sapiens
  CDR3 for beta chain variable domain of TCR clone 186383 (TRBV5-1, TRBJ1-2)
CASSLGERNYGYTF

SEQ ID NO: 372767 - protein, 15 aa, Homo sapiens
  CDR3 for alpha chain variable domain of TCR clone 186384 (TRAV38-2/DV8, TRAJ28)
CAYRTSGAGRYQLTF

SEQ ID NO: 372768 - protein, 13 aa, Homo sapiens
  CDR3 for beta chain variable domain of TCR clone 186384 (TRBV5-1, TRBJ1-5)
CASSLAQDQPQHF

SEQ ID NO: 372769 - protein, 14 aa, Homo sapiens
  CDR3 for alpha chain variable domain of TCR clone 186385 (TRAV1-2, TRAJ8)
CAVSEDTGFQKLVF

SEQ ID NO: 372770 - protein, 19 aa, Homo sapiens
  CDR3 for beta chain variable domain of TCR clone 186385 (TRBV28, TRBJ2-1)
CASSFSIRGSGRTRYEQFF

SEQ ID NO: 372771 - protein, 13 aa, Homo sapiens
  CDR3 for alpha chain variable domain of TCR clone 186386 (TRAV26-2, TRAJ43)
CVLRAVNNNDMRF

SEQ ID NO: 372772 - protein, 15 aa, Homo sapiens
  CDR3 for beta chain variable domain of TCR clone 186386 (TRBV9, TRBJ1-6)
CASSVAGTGDSPLHF

SEQ ID NO: 372773 - protein, 18 aa, Homo sapiens
  CDR3 for alpha chain variable domain of TCR clone 186387 (TRAV21, TRAJ52)
CAVRPSPAGGASYGKLTF

SEQ ID NO: 372774 - protein, 15 aa, Homo sapiens
  CDR3 for beta chain variable domain of TCR clone 186387 (TRBV19, TRBJ1-1)
CASTSGQIQNTEAFF

SEQ ID NO: 372775 - protein, 23 aa, Homo sapiens
  CDR3 for alpha chain variable domain of TCR clone 186388 (TRAV12-2, TRAJ22)
CAVRFRVHPGPPIVSGSARQLTF

SEQ ID NO: 372776 - protein, 13 aa, Homo sapiens
  CDR3 for beta chain variable domain of TCR clone 186388 (TRBV12-4, TRBJ1-2)
CASSLDSNYGYTF

SEQ ID NO: 372777 - protein, 12 aa, Homo sapiens
  CDR3 for alpha chain variable domain of TCR clone 186389 (TRAV12-3, TRAJ17)
CAMTLTGNKRTF

SEQ ID NO: 372778 - protein, 12 aa, Homo sapiens
  CDR3 for beta chain variable domain of TCR clone 186389 (TRBV28, TRBJ2-6)
CAIQAGANVLTF

SEQ ID NO: 372779 - protein, 14 aa, Homo sapiens
  CDR3 for alpha chain variable domain of TCR clone 186390 (TRAV6, TRAJ9)
CAPRANTGGFKTIF

SEQ ID NO: 372780 - protein, 14 aa, Homo sapiens
  CDR3 for beta chain variable domain of TCR clone 186390 (TRBV7-2, TRBJ2-1)
CASNLEGGYNEQFF

SEQ ID NO: 372781 - protein, 13 aa, Homo sapiens
  CDR3 for alpha chain variable domain of TCR clone 186391 (TRAV6, TRAJ16)
CALDDSDVQKLLF

SEQ ID NO: 372782 - protein, 14 aa, Homo sapiens
  CDR3 for beta chain variable domain of TCR clone 186391 (TRBV12-4, TRBJ1-6)
CASNLQGKGSPLHF

SEQ ID NO: 372783 - protein, 12 aa, Homo sapiens
  CDR3 for alpha chain variable domain of TCR clone 186392 (TRAV36/DV7, TRAJ54)
CAVVRGAQKLVF

SEQ ID NO: 372784 - protein, 17 aa, Homo sapiens
  CDR3 for beta chain variable domain of TCR clone 186392 (TRBV28, TRBJ2-5)
CASSTPEGDALQETQYF

SEQ ID NO: 372785 - protein, 12 aa, Homo sapiens
  CDR3 for alpha chain variable domain of TCR clone 186393 (TRAV26-1, TRAJ36)
CIVRVRADNRFF

SEQ ID NO: 372786 - protein, 15 aa, Homo sapiens
  CDR3 for beta chain variable domain of TCR clone 186393 (TRBV6-3, TRBJ2-7)
CASSSPGTVFYEQYF

SEQ ID NO: 372787 - protein, 14 aa, Homo sapiens
  CDR3 for alpha chain variable domain of TCR clone 186394 (TRAV12-2, TRAJ29)
CAVRRNSGNTPLVF

SEQ ID NO: 372788 - protein, 13 aa, Homo sapiens
  CDR3 for beta chain variable domain of TCR clone 186394 (TRBV12-4, TRBJ2-1)
CASSHYTDNEKFF

SEQ ID NO: 372789 - protein, 13 aa, Homo sapiens
  CDR3 for alpha chain variable domain of TCR clone 186395 (TRAV8-6, TRAJ21)
CAVSPSSLNKFYF

SEQ ID NO: 372790 - protein, 17 aa, Homo sapiens
  CDR3 for beta chain variable domain of TCR clone 186395 (TRBV28, TRBJ2-7)
CASSPGLAGGYSSEQYF

SEQ ID NO: 372791 - protein, 13 aa, Homo sapiens
  CDR3 for alpha chain variable domain of TCR clone 186396 (TRAV39, TRAJ58)
CAGEETSGSRLTF

SEQ ID NO: 372792 - protein, 16 aa, Homo sapiens
  CDR3 for beta chain variable domain of TCR clone 186396 (TRBV7-9, TRBJ1-2)
CASSLGFSSGEDGYTF

SEQ ID NO: 372793 - protein, 15 aa, Homo sapiens
  CDR3 for alpha chain variable domain of TCR clone 186397 (TRAV21, TRAJ53)
CATLNSGGSNYKLTF

SEQ ID NO: 372794 - protein, 13 aa, Homo sapiens
  CDR3 for beta chain variable domain of TCR clone 186397 (TRBV7-8, TRBJ2-7)
RRVRLTEMGEQYF

SEQ ID NO: 372795 - protein, 15 aa, Homo sapiens
  CDR3 for alpha chain variable domain of TCR clone 186398 (TRAV13-2, TRAJ8)
CAPGGRNTGFQKLVF

SEQ ID NO: 372796 - protein, 14 aa, Homo sapiens
  CDR3 for beta chain variable domain of TCR clone 186398 (TRBV7-3, TRBJ2-1)
CASSLAGGTNEQFF

SEQ ID NO: 372797 - protein, 15 aa, Homo sapiens
  CDR3 for alpha chain variable domain of TCR clone 186399 (TRAV27, TRAJ38)
CAGRFNAGNNRKLIW

SEQ ID NO: 372798 - protein, 13 aa, Homo sapiens
  CDR3 for beta chain variable domain of TCR clone 186399 (TRBV15, TRBJ1-6)
CATSGGLNSPLHF

SEQ ID NO: 372799 - protein, 13 aa, Homo sapiens
  CDR3 for alpha chain variable domain of TCR clone 186400 (TRAV23/DV6, TRAJ36)
CAAGQTGANNLFF

SEQ ID NO: 372800 - protein, 15 aa, Homo sapiens
  CDR3 for beta chain variable domain of TCR clone 186400 (TRBV10-2, TRBJ2-7)
CASWNRGQATYEQYF

SEQ ID NO: 372801 - protein, 15 aa, Homo sapiens
  CDR3 for alpha chain variable domain of TCR clone 186401 (TRAV26-1, TRAJ23)
CIGRVLNNQGGKLIF

SEQ ID NO: 372802 - protein, 15 aa, Homo sapiens
  CDR3 for beta chain variable domain of TCR clone 186401 (TRBV11-3, TRBJ2-1)
CASSLAGQTYNEQFF

SEQ ID NO: 372803 - protein, 11 aa, Homo sapiens
  CDR3 for alpha chain variable domain of TCR clone 186402 (TRAV12-1, TRAJ30)
CVVNGQDEIIF

SEQ ID NO: 372804 - protein, 12 aa, Homo sapiens
  CDR3 for beta chain variable domain of TCR clone 186402 (TRBV27, TRBJ2-2)
CASKLFTGELFS

SEQ ID NO: 372805 - protein, 15 aa, Homo sapiens
  CDR3 for alpha chain variable domain of TCR clone 186403 (TRAV35, TRAJ52)
CWAGSGGTSYGKLTF

SEQ ID NO: 372806 - protein, 17 aa, Homo sapiens
  CDR3 for beta chain variable domain of TCR clone 186403 (TRBV13, TRBJ2-3)
CASSLSRVAGGRNTQYF

SEQ ID NO: 372807 - protein, 13 aa, Homo sapiens
  CDR3 for alpha chain variable domain of TCR clone 186404 (TRAV23/DV6, TRAJ47)
CAASMTRGNKLIF

SEQ ID NO: 372808 - protein, 16 aa, Homo sapiens
  CDR3 for beta chain variable domain of TCR clone 186404 (TRBV7-3, TRBJ2-2)
CASSLKRGTLSGELFF

SEQ ID NO: 372809 - protein, 14 aa, Homo sapiens
  CDR3 for alpha chain variable domain of TCR clone 186405 (TRAV12-2, TRAJ40)
CAVKIPSGTYKYIF

SEQ ID NO: 372810 - protein, 15 aa, Homo sapiens
  CDR3 for beta chain variable domain of TCR clone 186405 (TRBV20-1, TRBJ1-4)
CSARRGWGVNEKLFF

SEQ ID NO: 372811 - protein, 13 aa, Homo sapiens
  CDR3 for alpha chain variable domain of TCR clone 186406 (TRAV17, TRAJ5)
CALRGTGRRALTF

SEQ ID NO: 372812 - protein, 14 aa, Homo sapiens
  CDR3 for beta chain variable domain of TCR clone 186406 (TRBV12-5, TRBJ2-5)
CASGSRTHQEAQYF

SEQ ID NO: 372813 - protein, 14 aa, Homo sapiens
  CDR3 for alpha chain variable domain of TCR clone 186407 (TRAV13-1, TRAJ13)
CAAIPLVGYQKVTF

SEQ ID NO: 372814 - protein, 14 aa, Homo sapiens
  CDR3 for beta chain variable domain of TCR clone 186407 (TRBV5-1, TRBJ2-7)
CASSLGVRAYEQYF

SEQ ID NO: 372815 - protein, 14 aa, Homo sapiens
  CDR3 for alpha chain variable domain of TCR clone 186408 (TRAV12-1, TRAJ3)
CVVNPGSSASKIIF

SEQ ID NO: 372816 - protein, 18 aa, Homo sapiens
  CDR3 for beta chain variable domain of TCR clone 186408 (TRBV4-2, TRBJ1-2)
CASSQDKVGHTVNYGYTV

SEQ ID NO: 372817 - protein, 17 aa, Homo sapiens
  CDR3 for alpha chain variable domain of TCR clone 186409 (TRAV26-1, TRAJ22)
CIVRVSFWFCKATDLCI

SEQ ID NO: 372818 - protein, 13 aa, Homo sapiens
  CDR3 for beta chain variable domain of TCR clone 186409 (TRBV7-9, TRBJ1-2)
CASSLKQNYGYTF

SEQ ID NO: 372819 - protein, 15 aa, Homo sapiens
  CDR3 for alpha chain variable domain of TCR clone 186410 (TRAV8-3, TRAJ32)
CAVGPYGGATNKLIF

SEQ ID NO: 372820 - protein, 14 aa, Homo sapiens
  CDR3 for beta chain variable domain of TCR clone 186410 (TRBV20-1, TRBJ2-2)
CSAPDTANTGELFF

SEQ ID NO: 372821 - protein, 18 aa, Homo sapiens
  CDR3 for alpha chain variable domain of TCR clone 186411 (TRAV13-1, TRAJ52)
CAAKNPNAGGTSYEKLTF

SEQ ID NO: 372822 - protein, 16 aa, Homo sapiens
  CDR3 for beta chain variable domain of TCR clone 186411 (TRBV19, TRBJ2-1)
CASSKAGPSSYNEQFF

SEQ ID NO: 372823 - protein, 14 aa, Homo sapiens
  CDR3 for alpha chain variable domain of TCR clone 186412 (TRAV2, TRAJ9)
CAVEDRSGGFKTIF

SEQ ID NO: 372824 - protein, 13 aa, Homo sapiens
  CDR3 for beta chain variable domain of TCR clone 186412 (TRBV3-1, TRBJ2-2)
CASLARGSGELFF

SEQ ID NO: 372825 - protein, 15 aa, Homo sapiens
  CDR3 for alpha chain variable domain of TCR clone 186413 (TRAV12-2, TRAJ52)
CAVTSGGTSYGKLTF

SEQ ID NO: 372826 - protein, 15 aa, Homo sapiens
  CDR3 for beta chain variable domain of TCR clone 186413 (TRBV7-2, TRBJ2-1)
CASSPGFISGNAQFF

SEQ ID NO: 372827 - protein, 13 aa, Homo sapiens
  CDR3 for alpha chain variable domain of TCR clone 186414 (TRAV8-3, TRAJ36)
CAVGATGANNLFF

SEQ ID NO: 372828 - protein, 13 aa, Homo sapiens
  CDR3 for beta chain variable domain of TCR clone 186414 (TRBV6-1, TRBJ1-1)
CASSPQGNTEAFF

SEQ ID NO: 372829 - protein, 15 aa, Homo sapiens
  CDR3 for alpha chain variable domain of TCR clone 186415 (TRAV2, TRAJ13)
CCLLLCFRGYQKVTF

SEQ ID NO: 372830 - protein, 14 aa, Homo sapiens
  CDR3 for beta chain variable domain of TCR clone 186415 (TRBV25-1, TRBJ2-3)
CASSVHRERDTQYF

SEQ ID NO: 372831 - protein, 15 aa, Homo sapiens
  CDR3 for alpha chain variable domain of TCR clone 186416 (TRAV13-1, TRAJ32)
CAASIYGGATNKLIF

SEQ ID NO: 372832 - protein, 16 aa, Homo sapiens
  CDR3 for beta chain variable domain of TCR clone 186416 (TRBV2, TRBJ2-7)
CASRKGSLGLVYEQYF

SEQ ID NO: 372833 - protein, 14 aa, Homo sapiens
  CDR3 for alpha chain variable domain of TCR clone 186417 (TRAV12-2, TRAJ5)
CAVNRSTGRRALTF

SEQ ID NO: 372834 - protein, 13 aa, Homo sapiens
  CDR3 for beta chain variable domain of TCR clone 186417 (TRBV11-2, TRBJ2-1)
CASSLDLVNEQFF

SEQ ID NO: 372835 - protein, 10 aa, Homo sapiens
  CDR3 for alpha chain variable domain of TCR clone 186418 (TRAV23/DV6, TRAJ43)
CAAAVAALEQ

SEQ ID NO: 372836 - protein, 13 aa, Homo sapiens
  CDR3 for beta chain variable domain of TCR clone 186418 (TRBV12-4, TRBJ2-5)
CASRLAVQETQYF

SEQ ID NO: 372837 - protein, 13 aa, Homo sapiens
  CDR3 for alpha chain variable domain of TCR clone 186419 (TRAV12-2, TRAJ7)
CAGLIYGNNRLAF

SEQ ID NO: 372838 - protein, 15 aa, Homo sapiens
  CDR3 for beta chain variable domain of TCR clone 186419 (TRBV27, TRBJ2-2)
CASSFRGLVRTGELF

SEQ ID NO: 372839 - protein, 15 aa, Homo sapiens
  CDR3 for alpha chain variable domain of TCR clone 186420 (TRAV8-4, TRAJ3)
CAVTGENLVQQCFQD

SEQ ID NO: 372840 - protein, 13 aa, Homo sapiens
  CDR3 for beta chain variable domain of TCR clone 186420 (TRBV4-2, TRBJ1-1)
CASSQAGNTEAFF

SEQ ID NO: 372841 - protein, 13 aa, Homo sapiens
  CDR3 for alpha chain variable domain of TCR clone 186421 (TRAV3, TRAJ41)
CAVSSNSGYALNF

SEQ ID NO: 372842 - protein, 13 aa, Homo sapiens
  CDR3 for beta chain variable domain of TCR clone 186421 (TRBV20-1, TRBJ2-2)
CSALSGGAGELSF

SEQ ID NO: 372843 - protein, 15 aa, Homo sapiens
  CDR3 for alpha chain variable domain of TCR clone 186422 (TRAV3, TRAJ20)
CAVRDSRANDYKLSF

SEQ ID NO: 372844 - protein, 14 aa, Homo sapiens
  CDR3 for beta chain variable domain of TCR clone 186422 (TRBV20-1, TRBJ2-7)
CSARRGNGIYEQYF

SEQ ID NO: 372845 - protein, 16 aa, Homo sapiens
  CDR3 for alpha chain variable domain of TCR clone 186423 (TRAV12-3, TRAJ53)
CVMSPGSGGSNYKLTF

SEQ ID NO: 372846 - protein, 14 aa, Homo sapiens
  CDR3 for beta chain variable domain of TCR clone 186423 (TRBV4-1, TRBJ2-7)
CASSPVAGGDEQYF

SEQ ID NO: 372847 - protein, 15 aa, Homo sapiens
  CDR3 for alpha chain variable domain of TCR clone 186424 (TRAV25, TRAJ52)
CAGTSGGTSYGTLTF

SEQ ID NO: 372848 - protein, 13 aa, Homo sapiens
  CDR3 for beta chain variable domain of TCR clone 186424 (TRBV6-5, TRBJ2-5)
CASSPQGGETQYF

SEQ ID NO: 372849 - protein, 18 aa, Homo sapiens
  CDR3 for alpha chain variable domain of TCR clone 186425 (TRAV1-2, TRAJ18)
CAVRDMGDRGSTLGRLYF

SEQ ID NO: 372850 - protein, 14 aa, Homo sapiens
  CDR3 for beta chain variable domain of TCR clone 186425 (TRBV12-5, TRBJ2-5)
CASGSRTHQETQYF

SEQ ID NO: 372851 - protein, 11 aa, Homo sapiens
  CDR3 for alpha chain variable domain of TCR clone 186426 (TRAV24, TRAJ49)
CASTTGNQFYF

SEQ ID NO: 372852 - protein, 13 aa, Homo sapiens
  CDR3 for beta chain variable domain of TCR clone 186426 (TRBV7-9, TRBJ1-2)
CASSLKQNYGYTF

SEQ ID NO: 372853 - protein, 13 aa, Homo sapiens
  CDR3 for alpha chain variable domain of TCR clone 186427 (TRAV12-1, TRAJ39)
CVARSGAGNMLTF

SEQ ID NO: 372854 - protein, 15 aa, Homo sapiens
  CDR3 for beta chain variable domain of TCR clone 186427 (TRBV12-5, TRBJ2-2)
CASGRLGGNTGELFF

SEQ ID NO: 372855 - protein, 15 aa, Homo sapiens
  CDR3 for alpha chain variable domain of TCR clone 186428 (TRAV21, TRAJ38)
CAVRQDAGNNRKLIW

SEQ ID NO: 372856 - protein, 15 aa, Homo sapiens
  CDR3 for beta chain variable domain of TCR clone 186428 (TRBV27, TRBJ2-1)
CASSNGGGSSNEQFF

SEQ ID NO: 372857 - protein, 18 aa, Homo sapiens
  CDR3 for alpha chain variable domain of TCR clone 186429 (TRAV21, TRAJ52)
CAVRPSPAGGTSYGKLTF

SEQ ID NO: 372858 - protein, 15 aa, Homo sapiens
  CDR3 for beta chain variable domain of TCR clone 186429 (TRBV7-9, TRBJ1-2)
CASSLDREPNYGYTF

SEQ ID NO: 372859 - protein, 11 aa, Homo sapiens
  CDR3 for alpha chain variable domain of TCR clone 186430 (TRAV1-1, TRAJ23)
CAVRQGGKLIF

SEQ ID NO: 372860 - protein, 20 aa, Homo sapiens
  CDR3 for beta chain variable domain of TCR clone 186430 (TRBV7-8, TRBJ2-2)
CASRHLFPGPTIHITGKLFF

SEQ ID NO: 372861 - protein, 16 aa, Homo sapiens
  CDR3 for alpha chain variable domain of TCR clone 186431 (TRAV26-1, TRAJ32)
CIVRTNYGGATNKLIF

SEQ ID NO: 372862 - protein, 14 aa, Homo sapiens
  CDR3 for beta chain variable domain of TCR clone 186431 (TRBV27, TRBJ1-1)
CASSLLSGLSEALF

SEQ ID NO: 372863 - protein, 23 aa, Homo sapiens
  CDR3 for alpha chain variable domain of TCR clone 186432 (TRAV8-3, TRAJ6)
CAVGAEHQEEATYIHLEEDPALL

SEQ ID NO: 372864 - protein, 14 aa, Homo sapiens
  CDR3 for beta chain variable domain of TCR clone 186432 (TRBV6-6, TRBJ2-7)
CASSDSGAGYEQYF

SEQ ID NO: 372865 - protein, 12 aa, Homo sapiens
  CDR3 for alpha chain variable domain of TCR clone 186433 (TRAV12-1, TRAJ34)
CVVTFNTDKLIF

SEQ ID NO: 372866 - protein, 17 aa, Homo sapiens
  CDR3 for beta chain variable domain of TCR clone 186433 (TRBV13, TRBJ2-3)
CASSLSRVAGGRNTQYF

SEQ ID NO: 372867 - protein, 14 aa, Homo sapiens
  CDR3 for alpha chain variable domain of TCR clone 186434 (TRAV1-2, TRAJ16)
CAVNRFSDGQKLLS

SEQ ID NO: 372868 - protein, 12 aa, Homo sapiens
  CDR3 for beta chain variable domain of TCR clone 186434 (TRBV19, TRBJ2-1)
CASSMQDTEQFF

SEQ ID NO: 372869 - protein, 11 aa, Homo sapiens
  CDR3 for alpha chain variable domain of TCR clone 186435 (TRAV13-1, TRAJ43)
CAASGANDMRF

SEQ ID NO: 372870 - protein, 16 aa, Homo sapiens
  CDR3 for beta chain variable domain of TCR clone 186435 (TRBV20-1, TRBJ2-3)
CSAVRDRGPIADTQYF

SEQ ID NO: 372871 - protein, 13 aa, Homo sapiens
  CDR3 for alpha chain variable domain of TCR clone 186436 (TRAV3, TRAJ20)
CCEAFCNDYTLSF

SEQ ID NO: 372872 - protein, 14 aa, Homo sapiens
  CDR3 for beta chain variable domain of TCR clone 186436 (TRBV28, TRBJ2-4)
CASTQVTGVNIQYF

SEQ ID NO: 372873 - protein, 14 aa, Homo sapiens
  CDR3 for alpha chain variable domain of TCR clone 186437 (TRAV13-1, TRAJ15)
CAPGGNQAGTALIF

SEQ ID NO: 372874 - protein, 14 aa, Homo sapiens
  CDR3 for beta chain variable domain of TCR clone 186437 (TRBV11-2, TRBJ2-5)
CASSRTGGIETQYF

SEQ ID NO: 372875 - protein, 13 aa, Homo sapiens
  CDR3 for alpha chain variable domain of TCR clone 186438 (TRAV12-3, TRAJ54)
CAMTLQRAQKLVF

SEQ ID NO: 372876 - protein, 14 aa, Homo sapiens
  CDR3 for beta chain variable domain of TCR clone 186438 (TRBV4-1, TRBJ2-2)
CASSQAVNTGELFF

SEQ ID NO: 372877 - protein, 13 aa, Homo sapiens
  CDR3 for alpha chain variable domain of TCR clone 186439 (TRAV20, TRAJ37)
CAGCSSNTGKLIF

SEQ ID NO: 372878 - protein, 15 aa, Homo sapiens
  CDR3 for beta chain variable domain of TCR clone 186439 (TRBV10-3, TRBJ2-1)
CAIRNGTSGHNEQFF

SEQ ID NO: 372879 - protein, 14 aa, Homo sapiens
  CDR3 for alpha chain variable domain of TCR clone 186440 (TRAV12-2, TRAJ17)
CAVNIKAAGNKLTF

SEQ ID NO: 372880 - protein, 16 aa, Homo sapiens
  CDR3 for beta chain variable domain of TCR clone 186440 (TRBV20-1, TRBJ2-6)
CSASSQGYDGANVVTF

SEQ ID NO: 372881 - protein, 14 aa, Homo sapiens
  CDR3 for alpha chain variable domain of TCR clone 186441 (TRAV12-2, TRAJ36)
CAVKISTGANNLFF

SEQ ID NO: 372882 - protein, 14 aa, Homo sapiens
  CDR3 for beta chain variable domain of TCR clone 186441 (TRBV6-3, TRBJ2-5)
CASLWAGGTETQYF

SEQ ID NO: 372883 - protein, 12 aa, Homo sapiens
  CDR3 for alpha chain variable domain of TCR clone 186442 (TRAV12-3, TRAJ17)
CAMTLTGNKLTF

SEQ ID NO: 372884 - protein, 14 aa, Homo sapiens
  CDR3 for beta chain variable domain of TCR clone 186442 (TRBV4-1, TRBJ2-7)
CASSQDREHVGQYF

SEQ ID NO: 372885 - protein, 15 aa, Homo sapiens
  CDR3 for alpha chain variable domain of TCR clone 186443 (TRAV14/DV4, TRAJ49)
CAMREGRDTCNQFYF

SEQ ID NO: 372886 - protein, 17 aa, Homo sapiens
  CDR3 for beta chain variable domain of TCR clone 186443 (TRBV12-4, TRBJ1-5)
CASSLRGDRGPNQPQHF

SEQ ID NO: 372887 - protein, 14 aa, Homo sapiens
  CDR3 for alpha chain variable domain of TCR clone 186444 (TRAV9-2, TRAJ39)
CALYIYNAGNMLTF

SEQ ID NO: 372888 - protein, 14 aa, Homo sapiens
  CDR3 for beta chain variable domain of TCR clone 186444 (TRBV15, TRBJ2-1)
CATSGVEDYNEQFF

SEQ ID NO: 372889 - protein, 13 aa, Homo sapiens
  CDR3 for alpha chain variable domain of TCR clone 186445 (TRAV12-3, TRAJ33)
CAMRVNGNYQLIW

SEQ ID NO: 372890 - protein, 15 aa, Homo sapiens
  CDR3 for beta chain variable domain of TCR clone 186445 (TRBV20-1, TRBJ2-7)
CSARDRVSGMDEQYF

SEQ ID NO: 372891 - protein, 14 aa, Homo sapiens
  CDR3 for alpha chain variable domain of TCR clone 186446 (TRAV35, TRAJ24)
CSGPRRDSWGKLQF

SEQ ID NO: 372892 - protein, 12 aa, Homo sapiens
  CDR3 for beta chain variable domain of TCR clone 186446 (TRBV12-4, TRBJ2-3)
CASSLGQDTQYF

SEQ ID NO: 372893 - protein, 11 aa, Homo sapiens
  CDR3 for alpha chain variable domain of TCR clone 186447 (TRAV26-2, TRAJ8)
RILTGFRKLVF

SEQ ID NO: 372894 - protein, 19 aa, Homo sapiens
  CDR3 for beta chain variable domain of TCR clone 186447 (TRBV20-1, TRBJ2-1)
CSARGETSGNAPQIDEQFF

SEQ ID NO: 372895 - protein, 14 aa, Homo sapiens
  CDR3 for alpha chain variable domain of TCR clone 186448 (TRAV12-2, TRAJ44)
CAVNKAGTASKLTF

SEQ ID NO: 372896 - protein, 14 aa, Homo sapiens
  CDR3 for beta chain variable domain of TCR clone 186448 (TRBV28, TRBJ2-3)
CASSFVAGTDTQYF

SEQ ID NO: 372897 - protein, 14 aa, Homo sapiens
  CDR3 for alpha chain variable domain of TCR clone 186449 (TRAV26-1, TRAJ34)
CIVRVAYNTDKLIF

SEQ ID NO: 372898 - protein, 14 aa, Homo sapiens
  CDR3 for beta chain variable domain of TCR clone 186449 (TRBV18, TRBJ2-7)
CASSPRGGSYEQYF

SEQ ID NO: 372899 - protein, 14 aa, Homo sapiens
  CDR3 for alpha chain variable domain of TCR clone 186450 (TRAV12-1, TRAJ12)
CVVTSGDSSYKLIF

SEQ ID NO: 372900 - protein, 14 aa, Homo sapiens
  CDR3 for beta chain variable domain of TCR clone 186450 (TRBV12-4, TRBJ2-3)
CASSGLGSTDTQYF

SEQ ID NO: 372901 - protein, 17 aa, Homo sapiens
  CDR3 for alpha chain variable domain of TCR clone 186451 (TRAV13-1, TRAJ52)
CAASSGAGGTSYGKLTF

SEQ ID NO: 372902 - protein, 14 aa, Homo sapiens
  CDR3 for beta chain variable domain of TCR clone 186451 (TRBV18, TRBJ2-5)
CASSPGVSQETQYF

SEQ ID NO: 372903 - protein, 13 aa, Homo sapiens
  CDR3 for alpha chain variable domain of TCR clone 186452 (TRAV36/DV7, TRAJ49)
CAGDSNTGNQFYF

SEQ ID NO: 372904 - protein, 14 aa, Homo sapiens
  CDR3 for beta chain variable domain of TCR clone 186452 (TRBV7-9, TRBJ2-7)
CASSLDRPTDEQYF

SEQ ID NO: 372905 - protein, 12 aa, Homo sapiens
  CDR3 for alpha chain variable domain of TCR clone 186453 (TRAV8-4, TRAJ9)
SAVRAGGFKTIF

SEQ ID NO: 372906 - protein, 16 aa, Homo sapiens
  CDR3 for beta chain variable domain of TCR clone 186453 (TRBV4-2, TRBJ1-1)
CASSQAGFGMNTEAFF

SEQ ID NO: 372907 - protein, 14 aa, Homo sapiens
  CDR3 for alpha chain variable domain of TCR clone 186454 (TRAV17, TRAJ45)
CATASGGGADGLTF

SEQ ID NO: 372908 - protein, 13 aa, Homo sapiens
  CDR3 for beta chain variable domain of TCR clone 186454 (TRBV11-2, TRBJ1-1)
CASSQDWGAEAFF

SEQ ID NO: 372909 - protein, 13 aa, Homo sapiens
  CDR3 for alpha chain variable domain of TCR clone 186455 (TRAV3, TRAJ20)
CAVRSLNDYKLSF

SEQ ID NO: 372910 - protein, 12 aa, Homo sapiens
  CDR3 for beta chain variable domain of TCR clone 186455 (TRBV19, TRBJ2-1)
CASSRQGAEQFF

SEQ ID NO: 372911 - protein, 15 aa, Homo sapiens
  CDR3 for alpha chain variable domain of TCR clone 186456 (TRAV14/DV4, TRAJ26)
RAMREGQNYGQNFVF

SEQ ID NO: 372912 - protein, 13 aa, Homo sapiens
  CDR3 for beta chain variable domain of TCR clone 186456 (TRBV24-1, TRBJ2-2)
CATSGWSTGELFF

SEQ ID NO: 372913 - protein, 10 aa, Homo sapiens
  CDR3 for alpha chain variable domain of TCR clone 186457 (TRAV23/DV6, TRAJ57)
CAASLTLSQG

SEQ ID NO: 372914 - protein, 14 aa, Homo sapiens
  CDR3 for beta chain variable domain of TCR clone 186457 (TRBV25-1, TRBJ1-1)
CASTHLGGNTEAFF

SEQ ID NO: 372915 - protein, 13 aa, Homo sapiens
  CDR3 for alpha chain variable domain of TCR clone 186458 (TRAV2, TRAJ40)
CAVVTSGTYKYIF

SEQ ID NO: 372916 - protein, 14 aa, Homo sapiens
  CDR3 for beta chain variable domain of TCR clone 186458 (TRBV7-6, TRBJ1-6)
CASSQAGGGSPLHF

SEQ ID NO: 372917 - protein, 15 aa, Homo sapiens
  CDR3 for alpha chain variable domain of TCR clone 186459 (TRAV23/DV6, TRAJ18)
CAARYRGSTLGRLYF

SEQ ID NO: 372918 - protein, 13 aa, Homo sapiens
  CDR3 for beta chain variable domain of TCR clone 186459 (TRBV5-1, TRBJ2-4)
CASSLEGGMNQYF

SEQ ID NO: 372919 - protein, 13 aa, Homo sapiens
  CDR3 for alpha chain variable domain of TCR clone 186460 (TRAV26-1, TRAJ33)
CIVRVDSNYQLIW

SEQ ID NO: 372920 - protein, 15 aa, Homo sapiens
  CDR3 for beta chain variable domain of TCR clone 186460 (TRBV7-2, TRBJ1-5)
CASSFSAGINQPQHF

SEQ ID NO: 372921 - protein, 15 aa, Homo sapiens
  CDR3 for alpha chain variable domain of TCR clone 186461 (TRAV13-2, TRAJ53)
CPQAPSGGSNYKLTF

SEQ ID NO: 372922 - protein, 12 aa, Homo sapiens
  CDR3 for beta chain variable domain of TCR clone 186461 (TRBV11-2, TRBJ2-2)
CASSLGGGELFF

SEQ ID NO: 372923 - protein, 14 aa, Homo sapiens
  CDR3 for alpha chain variable domain of TCR clone 186462 (TRAV27, TRAJ22)
CAGVVPGSARQLTF

SEQ ID NO: 372924 - protein, 14 aa, Homo sapiens
  CDR3 for beta chain variable domain of TCR clone 186462 (TRBV18, TRBJ1-2)
CASSPDRVVYGYTF

SEQ ID NO: 372925 - protein, 15 aa, Homo sapiens
  CDR3 for alpha chain variable domain of TCR clone 186463 (TRAV12-1, TRAJ44)
CVAGLPTGTASKLTF

SEQ ID NO: 372926 - protein, 13 aa, Homo sapiens
  CDR3 for beta chain variable domain of TCR clone 186463 (TRBV6-5, TRBJ2-5)
CASSPQGGETQHF

SEQ ID NO: 372927 - protein, 16 aa, Homo sapiens
  CDR3 for alpha chain variable domain of TCR clone 186464 (TRAV30, TRAJ24)
CGPEIGDADSWGKFQF

SEQ ID NO: 372928 - protein, 15 aa, Homo sapiens
  CDR3 for beta chain variable domain of TCR clone 186464 (TRBV6-3, TRBJ2-7)
CASSSPGTVFYEQYF

SEQ ID NO: 372929 - protein, 15 aa, Homo sapiens
  CDR3 for alpha chain variable domain of TCR clone 186465 (TRAV13-2, TRAJ50)
CAEEPLKTSYDKVIF

SEQ ID NO: 372930 - protein, 15 aa, Homo sapiens
  CDR3 for beta chain variable domain of TCR clone 186465 (TRBV20-1, TRBJ1-5)
CSARGSVDSNQPQYF

SEQ ID NO: 372931 - protein, 14 aa, Homo sapiens
  CDR3 for alpha chain variable domain of TCR clone 186466 (TRAV8-4, TRAJ54)
CAVSEVLGDQKLVF

SEQ ID NO: 372932 - protein, 13 aa, Homo sapiens
  CDR3 for beta chain variable domain of TCR clone 186466 (TRBV27, TRBJ2-7)
CASSFVSSYEQYF

SEQ ID NO: 372933 - protein, 13 aa, Homo sapiens
  CDR3 for alpha chain variable domain of TCR clone 186467 (TRAV13-1, TRAJ12)
CAASRDSSYKLIF

SEQ ID NO: 372934 - protein, 16 aa, Homo sapiens
  CDR3 for beta chain variable domain of TCR clone 186467 (TRBV20-1, TRBJ1-4)
CSAPGQGLLTNEKLFF

SEQ ID NO: 372935 - protein, 14 aa, Homo sapiens
  CDR3 for alpha chain variable domain of TCR clone 186468 (TRAV23/DV6, TRAJ41)
CAASMENSGYALNF

SEQ ID NO: 372936 - protein, 13 aa, Homo sapiens
  CDR3 for beta chain variable domain of TCR clone 186468 (TRBV7-9, TRBJ1-2)
CASSLKQNYGYTF

SEQ ID NO: 372937 - protein, 12 aa, Homo sapiens
  CDR3 for alpha chain variable domain of TCR clone 186469 (TRAV13-1, TRAJ21)
CAAKEGFNKFYF

SEQ ID NO: 372938 - protein, 15 aa, Homo sapiens
  CDR3 for beta chain variable domain of TCR clone 186469 (TRBV20-1, TRBJ2-2)
CSARGGQGNTGELFF

SEQ ID NO: 372939 - protein, 14 aa, Homo sapiens
  CDR3 for alpha chain variable domain of TCR clone 186470 (TRAV3, TRAJ6)
CAVRDSGRKLHTYI

SEQ ID NO: 372940 - protein, 15 aa, Homo sapiens
  CDR3 for beta chain variable domain of TCR clone 186470 (TRBV18, TRBJ2-7)
CASSPLQGRAYEQYF

SEQ ID NO: 372941 - protein, 12 aa, Homo sapiens
  CDR3 for alpha chain variable domain of TCR clone 186471 (TRAV12-1, TRAJ37)
CMARGNTGKLIF

SEQ ID NO: 372942 - protein, 15 aa, Homo sapiens
  CDR3 for beta chain variable domain of TCR clone 186471 (TRBV7-2, TRBJ2-3)
CASSLEQGGTDTQYF

SEQ ID NO: 372943 - protein, 13 aa, Homo sapiens
  CDR3 for alpha chain variable domain of TCR clone 186472 (TRAV3, TRAJ21)
CAVREPDFNKFYF

SEQ ID NO: 372944 - protein, 16 aa, Homo sapiens
  CDR3 for beta chain variable domain of TCR clone 186472 (TRBV12-5, TRBJ2-5)
CASGPRTNGNQETQYF

SEQ ID NO: 372945 - protein, 14 aa, Homo sapiens
  CDR3 for alpha chain variable domain of TCR clone 186473 (TRAV13-1, TRAJ40)
CAASMTSGTYKYIF

SEQ ID NO: 372946 - protein, 14 aa, Homo sapiens
  CDR3 for beta chain variable domain of TCR clone 186473 (TRBV15, TRBJ2-3)
CATRSGTSTDTQYF

SEQ ID NO: 372947 - protein, 15 aa, Homo sapiens
  CDR3 for alpha chain variable domain of TCR clone 186474 (TRAV12-1, TRAJ42)
CVVTRDGGSRGNLIF

SEQ ID NO: 372948 - protein, 13 aa, Homo sapiens
  CDR3 for beta chain variable domain of TCR clone 186474 (TRBV27, TRBJ2-7)
CASSLTTGYEQYF

SEQ ID NO: 372949 - protein, 14 aa, Homo sapiens
  CDR3 for alpha chain variable domain of TCR clone 186475 (TRAV8-3, TRAJ4)
CAVGAAGGYNKRIF

SEQ ID NO: 372950 - protein, 16 aa, Homo sapiens
  CDR3 for beta chain variable domain of TCR clone 186475 (TRBV7-2, TRBJ1-2)
CASSRQGGGANYGYTF

SEQ ID NO: 372951 - protein, 18 aa, Homo sapiens
  CDR3 for alpha chain variable domain of TCR clone 186476 (TRAV26-2, TRAJ54)
CILRDVEGGIQGAQKLVF

SEQ ID NO: 372952 - protein, 14 aa, Homo sapiens
  CDR3 for beta chain variable domain of TCR clone 186476 (TRBV7-2, TRBJ2-7)
CASSPKTSFYEQYF

SEQ ID NO: 372953 - protein, 12 aa, Homo sapiens
  CDR3 for alpha chain variable domain of TCR clone 186477 (TRAV1-2, TRAJ37)
CAFPGNTGKLIF

SEQ ID NO: 372954 - protein, 14 aa, Homo sapiens
  CDR3 for beta chain variable domain of TCR clone 186477 (TRBV7-8, TRBJ2-3)
CASSLEAGTDTQYF

SEQ ID NO: 372955 - protein, 15 aa, Homo sapiens
  CDR3 for alpha chain variable domain of TCR clone 186478 (TRAV35, TRAJ42)
FAGQGYGGSQGNLIF

SEQ ID NO: 372956 - protein, 13 aa, Homo sapiens
  CDR3 for beta chain variable domain of TCR clone 186478 (TRBV7-2, TRBJ1-1)
CASSLVQGAEAFF

SEQ ID NO: 372957 - protein, 16 aa, Homo sapiens
  CDR3 for alpha chain variable domain of TCR clone 186479 (TRAV3, TRAJ28)
CAVLPRSGVGSYQLTF

SEQ ID NO: 372958 - protein, 13 aa, Homo sapiens
  CDR3 for beta chain variable domain of TCR clone 186479 (TRBV12-4, TRBJ2-5)
CASRLAVQETQYF

SEQ ID NO: 372959 - protein, 16 aa, Homo sapiens
  CDR3 for alpha chain variable domain of TCR clone 186480 (TRAV8-4, TRAJ5)
CAVSPLTATGRRALTF

SEQ ID NO: 372960 - protein, 14 aa, Homo sapiens
  CDR3 for beta chain variable domain of TCR clone 186480 (TRBV19, TRBJ1-6)
CASSTDGWNSPLLF

SEQ ID NO: 372961 - protein, 15 aa, Homo sapiens
  CDR3 for alpha chain variable domain of TCR clone 186481 (TRAV2, TRAJ22)
CAVPSRVGSARQLTF

SEQ ID NO: 372962 - protein, 11 aa, Homo sapiens
  CDR3 for beta chain variable domain of TCR clone 186481 (TRBV27, TRBJ2-3)
CASSLGDTQYF

SEQ ID NO: 372963 - protein, 17 aa, Homo sapiens
  CDR3 for alpha chain variable domain of TCR clone 186482 (TRAV9-2, TRAJ45)
CALIGYYSGGGADGLTF

SEQ ID NO: 372964 - protein, 14 aa, Homo sapiens
  CDR3 for beta chain variable domain of TCR clone 186482 (TRBV25-1, TRBJ1-1)
CASTHLGGNTEAFF

SEQ ID NO: 372965 - protein, 13 aa, Homo sapiens
  CDR3 for alpha chain variable domain of TCR clone 186483 (TRAV12-1, TRAJ5)
CVVNLPGRRALTF

SEQ ID NO: 372966 - protein, 16 aa, Homo sapiens
  CDR3 for beta chain variable domain of TCR clone 186483 (TRBV7-3, TRBJ2-2)
CASSLKRGTLSGELFF

SEQ ID NO: 372967 - protein, 12 aa, Homo sapiens
  CDR3 for alpha chain variable domain of TCR clone 186484 (TRAV2, TRAJ34)
CAVEDNTDKLIF

SEQ ID NO: 372968 - protein, 15 aa, Homo sapiens
  CDR3 for beta chain variable domain of TCR clone 186484 (TRBV9, TRBJ1-6)
CASSVAGTGDSPLHF

SEQ ID NO: 372969 - protein, 10 aa, Homo sapiens
  CDR3 for alpha chain variable domain of TCR clone 186485 (TRAV14/DV4, TRAJ48)
CSPRSEKLTF

SEQ ID NO: 372970 - protein, 13 aa, Homo sapiens
  CDR3 for beta chain variable domain of TCR clone 186485 (TRBV13, TRBJ2-5)
CASSPEVGETQYF

SEQ ID NO: 372971 - protein, 13 aa, Homo sapiens
  CDR3 for alpha chain variable domain of TCR clone 186486 (TRAV17, TRAJ9)
CATDYTGGFKTIF

SEQ ID NO: 372972 - protein, 14 aa, Homo sapiens
  CDR3 for beta chain variable domain of TCR clone 186486 (TRBV7-9, TRBJ2-2)
CASSGLADTGELFF

SEQ ID NO: 372973 - protein, 18 aa, Homo sapiens
  CDR3 for alpha chain variable domain of TCR clone 186487 (TRAV21, TRAJ53)
CAVKRGENSGGSNYKLTF

SEQ ID NO: 372974 - protein, 13 aa, Homo sapiens
  CDR3 for beta chain variable domain of TCR clone 186487 (TRBV9, TRBJ2-1)
CASSPSGGSEQFF

SEQ ID NO: 372975 - protein, 17 aa, Homo sapiens
  CDR3 for alpha chain variable domain of TCR clone 186488 (TRAV3, TRAJ42)
CAVRDRDYGGSQGNLIF

SEQ ID NO: 372976 - protein, 13 aa, Homo sapiens
  CDR3 for beta chain variable domain of TCR clone 186488 (TRBV18, TRBJ2-3)
CASSTGRTDTQYF

SEQ ID NO: 372977 - protein, 14 aa, Homo sapiens
  CDR3 for alpha chain variable domain of TCR clone 186489 (TRAV12-2, TRAJ13)
CAVKKTGGYHKATF

SEQ ID NO: 372978 - protein, 14 aa, Homo sapiens
  CDR3 for beta chain variable domain of TCR clone 186489 (TRBV25-1, TRBJ1-1)
CASTHLGGNTEAFF

SEQ ID NO: 372979 - protein, 15 aa, Homo sapiens
  CDR3 for alpha chain variable domain of TCR clone 186490 (TRAV13-1, TRAJ44)
CAASRNTGTAGKLTF

SEQ ID NO: 372980 - protein, 14 aa, Homo sapiens
  CDR3 for beta chain variable domain of TCR clone 186490 (TRBV11-2, TRBJ1-2)
CASSLYRGNYGYTF

SEQ ID NO: 372981 - protein, 14 aa, Homo sapiens
  CDR3 for alpha chain variable domain of TCR clone 186491 (TRAV12-2, TRAJ5)
CAVNRSTGRRALTF

SEQ ID NO: 372982 - protein, 15 aa, Homo sapiens
  CDR3 for beta chain variable domain of TCR clone 186491 (TRBV20-1, TRBJ2-7)
CSARERVSGMDEQYF

SEQ ID NO: 372983 - protein, 12 aa, Homo sapiens
  CDR3 for alpha chain variable domain of TCR clone 186492 (TRAV12-3, TRAJ17)
CAMTLTGNKLTF

SEQ ID NO: 372984 - protein, 15 aa, Homo sapiens
  CDR3 for beta chain variable domain of TCR clone 186492 (TRBV20-1, TRBJ2-7)
CSARARVAGMDEQYF

SEQ ID NO: 372985 - protein, 15 aa, Homo sapiens
  CDR3 for alpha chain variable domain of TCR clone 186493 (TRAV12-1, TRAJ5)
CVVNMLETGRRALTF

SEQ ID NO: 372986 - protein, 15 aa, Homo sapiens
  CDR3 for beta chain variable domain of TCR clone 186493 (TRBV9, TRBJ1-6)
CASSVAGTGDSPLHF

SEQ ID NO: 372987 - protein, 14 aa, Homo sapiens
  CDR3 for alpha chain variable domain of TCR clone 186494 (TRAV12-2, TRAJ40)
CAVKIPSGTYKYIF

SEQ ID NO: 372988 - protein, 15 aa, Homo sapiens
  CDR3 for beta chain variable domain of TCR clone 186494 (TRBV7-2, TRBJ2-7)
CASSLKGALTYEQYF

SEQ ID NO: 372989 - protein, 16 aa, Homo sapiens
  CDR3 for alpha chain variable domain of TCR clone 186495 (TRAV12-3, TRAJ53)
CAMSPGSGGSNYKLTF

SEQ ID NO: 372990 - protein, 11 aa, Homo sapiens
  CDR3 for beta chain variable domain of TCR clone 186495 (TRBV29-1, TRBJ2-5)
GSEERTGTQYF

SEQ ID NO: 372991 - protein, 15 aa, Homo sapiens
  CDR3 for alpha chain variable domain of TCR clone 186496 (TRAV8-4, TRAJ11)
CAVSRALSGYSTLTF

SEQ ID NO: 372992 - protein, 15 aa, Homo sapiens
  CDR3 for beta chain variable domain of TCR clone 186496 (TRBV18, TRBJ2-1)
CASSPPSASYNEQFF

SEQ ID NO: 372993 - protein, 13 aa, Homo sapiens
  CDR3 for alpha chain variable domain of TCR clone 186497 (TRAV8-3, TRAJ4)
WVFYSGGSNKLIF

SEQ ID NO: 372994 - protein, 16 aa, Homo sapiens
  CDR3 for beta chain variable domain of TCR clone 186497 (TRBV7-8, TRBJ2-3)
CASSTEGQRETDTQYF

SEQ ID NO: 372995 - protein, 14 aa, Homo sapiens
  CDR3 for alpha chain variable domain of TCR clone 186498 (TRAV27, TRAJ23)
CAGPSYNQGGKLIF

SEQ ID NO: 372996 - protein, 15 aa, Homo sapiens
  CDR3 for beta chain variable domain of TCR clone 186498 (TRBV19, TRBJ2-2)
CASSLNRGVTGELFF

SEQ ID NO: 372997 - protein, 15 aa, Homo sapiens
  CDR3 for alpha chain variable domain of TCR clone 186499 (TRAV21, TRAJ42)
CAVRGYGGSQGNLIF

SEQ ID NO: 372998 - protein, 13 aa, Homo sapiens
  CDR3 for beta chain variable domain of TCR clone 186499 (TRBV4-2, TRBJ1-1)
CASSQAGNTEAFF

SEQ ID NO: 372999 - protein, 20 aa, Homo sapiens
  CDR3 for alpha chain variable domain of TCR clone 186500 (TRAV21, TRAJ27)
CAVRRRMTRSSLEKGHDFIF

SEQ ID NO: 373000 - protein, 15 aa, Homo sapiens
  CDR3 for beta chain variable domain of TCR clone 186500 (TRBV6-6, TRBJ2-7)
CASSYSYGGSYEQYF

SEQ ID NO: 373001 - protein, 15 aa, Homo sapiens
  CDR3 for alpha chain variable domain of TCR clone 186501 (TRAV8-2, TRAJ15)
CVVTMGNQAGTALIC

SEQ ID NO: 373002 - protein, 12 aa, Homo sapiens
  CDR3 for beta chain variable domain of TCR clone 186501 (TRBV6-1, TRBJ2-7)
CASSDYSYEQYF

SEQ ID NO: 373003 - protein, 13 aa, Homo sapiens
  CDR3 for alpha chain variable domain of TCR clone 186502 (TRAV1-1, TRAJ9)
CAAKNTGGFKTIF

SEQ ID NO: 373004 - protein, 14 aa, Homo sapiens
  CDR3 for beta chain variable domain of TCR clone 186502 (TRBV20-1, TRBJ2-1)
GSAQIGGAANEQFF

SEQ ID NO: 373005 - protein, 10 aa, Homo sapiens
  CDR3 for alpha chain variable domain of TCR clone 186503 (TRAV12-2, TRAJ52)
RSTSYGKLTF

SEQ ID NO: 373006 - protein, 13 aa, Homo sapiens
  CDR3 for beta chain variable domain of TCR clone 186503 (TRBV4-2, TRBJ1-1)
CASSQAGNTEAFF

SEQ ID NO: 373007 - protein, 15 aa, Homo sapiens
  CDR3 for alpha chain variable domain of TCR clone 186504 (TRAV8-2, TRAJ24)
CVVSDRTDSWGKFQF

SEQ ID NO: 373008 - protein, 13 aa, Homo sapiens
  CDR3 for beta chain variable domain of TCR clone 186504 (TRBV7-9, TRBJ1-2)
CASSLKQNYGYTF

SEQ ID NO: 373009 - protein, 12 aa, Homo sapiens
  CDR3 for alpha chain variable domain of TCR clone 186505 (TRAV13-1, TRAJ42)
SVLRGSQGNLIF

SEQ ID NO: 373010 - protein, 17 aa, Homo sapiens
  CDR3 for beta chain variable domain of TCR clone 186505 (TRBV7-9, TRBJ2-1)
CASSLVASYPSYNEQFF

SEQ ID NO: 373011 - protein, 14 aa, Homo sapiens
  CDR3 for alpha chain variable domain of TCR clone 186506 (TRAV8-1, TRAJ13)
CAVKSSGGYQKVTF

SEQ ID NO: 373012 - protein, 14 aa, Homo sapiens
  CDR3 for beta chain variable domain of TCR clone 186506 (TRBV7-2, TRBJ2-7)
CASRSQGAAYEQYF

SEQ ID NO: 373013 - protein, 15 aa, Homo sapiens
  CDR3 for alpha chain variable domain of TCR clone 186507 (TRAV16, TRAJ48)
CALFISNFGNEKLTF

SEQ ID NO: 373014 - protein, 13 aa, Homo sapiens
  CDR3 for beta chain variable domain of TCR clone 186507 (TRBV7-6, TRBJ1-2)
CASSLVADYGYTF

SEQ ID NO: 373015 - protein, 15 aa, Homo sapiens
  CDR3 for alpha chain variable domain of TCR clone 186508 (TRAV8-3, TRAJ40)
CAAPSLGSGTYKYIF

SEQ ID NO: 373016 - protein, 16 aa, Homo sapiens
  CDR3 for beta chain variable domain of TCR clone 186508 (TRBV7-3, TRBJ2-3)
CASSLSGYRPEDTQYV

SEQ ID NO: 373017 - protein, 11 aa, Homo sapiens
  CDR3 for alpha chain variable domain of TCR clone 186509 (TRAV17, TRAJ9)
CGFTGGFKTIF

SEQ ID NO: 373018 - protein, 16 aa, Homo sapiens
  CDR3 for beta chain variable domain of TCR clone 186509 (TRBV24-1, TRBJ2-3)
CATSDPGTGATDTQYF

SEQ ID NO: 373019 - protein, 12 aa, Homo sapiens
  CDR3 for alpha chain variable domain of TCR clone 186510 (TRAV13-2, TRAJ32)
RVYGGATNKLIF

SEQ ID NO: 373020 - protein, 15 aa, Homo sapiens
  CDR3 for beta chain variable domain of TCR clone 186510 (TRBV27, TRBJ1-6)
CASSFDRGLGSHLHF

SEQ ID NO: 373021 - protein, 15 aa, Homo sapiens
  CDR3 for alpha chain variable domain of TCR clone 186511 (TRAV26-1, TRAJ22)
CIVRVSFWFCKATDL

SEQ ID NO: 373022 - protein, 13 aa, Homo sapiens
  CDR3 for beta chain variable domain of TCR clone 186511 (TRBV7-3, TRBJ1-1)
CASSQGWGAEAFF

SEQ ID NO: 373023 - protein, 12 aa, Homo sapiens
  CDR3 for alpha chain variable domain of TCR clone 186512 (TRAV12-3, TRAJ17)
CATTLTGNKLTF

SEQ ID NO: 373024 - protein, 16 aa, Homo sapiens
  CDR3 for beta chain variable domain of TCR clone 186512 (TRBV12-4, TRBJ2-5)
CASSLSTSGGKETQYF

SEQ ID NO: 373025 - protein, 14 aa, Homo sapiens
  CDR3 for alpha chain variable domain of TCR clone 186513 (TRAV21, TRAJ32)
CRGDYGGATNKLIF

SEQ ID NO: 373026 - protein, 13 aa, Homo sapiens
  CDR3 for beta chain variable domain of TCR clone 186513 (TRBV2, TRBJ1-6)
CASGRGGISPLHF

SEQ ID NO: 373027 - protein, 16 aa, Homo sapiens
  CDR3 for alpha chain variable domain of TCR clone 186514 (TRAV3, TRAJ21)
CAVRDIERGNFNKFYF

SEQ ID NO: 373028 - protein, 20 aa, Homo sapiens
  CDR3 for beta chain variable domain of TCR clone 186514 (TRBV4-1, TRBJ2-2)
CASSQASPTGLASNTGELFF

SEQ ID NO: 373029 - protein, 14 aa, Homo sapiens
  CDR3 for alpha chain variable domain of TCR clone 186515 (TRAV1-2, TRAJ8)
CAVREDTGFQKLVF

SEQ ID NO: 373030 - protein, 14 aa, Homo sapiens
  CDR3 for beta chain variable domain of TCR clone 186515 (TRBV15, TRBJ2-3)
CATRSGTSTDTQCF

SEQ ID NO: 373031 - protein, 13 aa, Homo sapiens
  CDR3 for alpha chain variable domain of TCR clone 186516 (TRAV23/DV6, TRAJ22)
CAPWGGSARHLTF

SEQ ID NO: 373032 - protein, 14 aa, Homo sapiens
  CDR3 for beta chain variable domain of TCR clone 186516 (TRBV25-1, TRBJ2-1)
CASSPRGPYNEQFF

SEQ ID NO: 373033 - protein, 14 aa, Homo sapiens
  CDR3 for alpha chain variable domain of TCR clone 186517 (TRAV1-2, TRAJ16)
CAVNRFSDGQKLLF

SEQ ID NO: 373034 - protein, 13 aa, Homo sapiens
  CDR3 for beta chain variable domain of TCR clone 186517 (TRBV29-1, TRBJ1-1)
CSVGDSRNTEAFF

SEQ ID NO: 373035 - protein, 14 aa, Homo sapiens
  CDR3 for alpha chain variable domain of TCR clone 186518 (TRAV17, TRAJ57)
CVTDPQGGSEKLVF

SEQ ID NO: 373036 - protein, 16 aa, Homo sapiens
  CDR3 for beta chain variable domain of TCR clone 186518 (TRBV27, TRBJ2-2)
CASSLRGLVRTGELFF

SEQ ID NO: 373037 - protein, 14 aa, Homo sapiens
  CDR3 for alpha chain variable domain of TCR clone 186519 (TRAV12-2, TRAJ5)
CAVNRSTGRRALTF

SEQ ID NO: 373038 - protein, 13 aa, Homo sapiens
  CDR3 for beta chain variable domain of TCR clone 186519 (TRBV20-1, TRBJ2-3)
CSADQGVSDTQYF

SEQ ID NO: 373039 - protein, 18 aa, Homo sapiens
  CDR3 for alpha chain variable domain of TCR clone 186520 (TRAV21, TRAJ52)
CAVRPSPAGGTSYGKLTF

SEQ ID NO: 373040 - protein, 17 aa, Homo sapiens
  CDR3 for beta chain variable domain of TCR clone 186520 (TRBV13, TRBJ2-3)
GAGSLSRVAGGRNTQYF

SEQ ID NO: 373041 - protein, 15 aa, Homo sapiens
  CDR3 for alpha chain variable domain of TCR clone 186521 (TRAV8-3, TRAJ27)
CAVAPLRPMQANQPL

SEQ ID NO: 373042 - protein, 15 aa, Homo sapiens
  CDR3 for beta chain variable domain of TCR clone 186521 (TRBV7-2, TRBJ2-1)
CASSSGLAGGNEQFL

SEQ ID NO: 373043 - protein, 18 aa, Homo sapiens
  CDR3 for alpha chain variable domain of TCR clone 186522 (TRAV9-2, TRAJ52)
CALSDLNLGGTSYGKVTF

SEQ ID NO: 373044 - protein, 15 aa, Homo sapiens
  CDR3 for beta chain variable domain of TCR clone 186522 (TRBV6-5, TRBJ1-2)
CASSYLLQGGYGYTF

SEQ ID NO: 373045 - protein, 15 aa, Homo sapiens
  CDR3 for alpha chain variable domain of TCR clone 186523 (TRAV21, TRAJ24)
CAARSSTHSWGKLQF

SEQ ID NO: 373046 - protein, 13 aa, Homo sapiens
  CDR3 for beta chain variable domain of TCR clone 186523 (TRBV11-2, TRBJ2-5)
CASSPTGEETQYF

SEQ ID NO: 373047 - protein, 14 aa, Homo sapiens
  CDR3 for alpha chain variable domain of TCR clone 186524 (TRAV12-1, TRAJ17)
CVVNYKAAGNKQTF

SEQ ID NO: 373048 - protein, 13 aa, Homo sapiens
  CDR3 for beta chain variable domain of TCR clone 186524 (TRBV7-3, TRBJ1-1)
CASSQDWGAEAFF

SEQ ID NO: 373049 - protein, 12 aa, Homo sapiens
  CDR3 for alpha chain variable domain of TCR clone 186525 (TRAV8-3, TRAJ26)
CAGDNYGQYFVF

SEQ ID NO: 373050 - protein, 17 aa, Homo sapiens
  CDR3 for beta chain variable domain of TCR clone 186525 (TRBV4-1, TRBJ2-5)
CASSQDLTGGPIETQYF

SEQ ID NO: 373051 - protein, 14 aa, Homo sapiens
  CDR3 for alpha chain variable domain of TCR clone 186526 (TRAV12-3, TRAJ10)
SHLPLTGGGNKLTF

SEQ ID NO: 373052 - protein, 15 aa, Homo sapiens
  CDR3 for beta chain variable domain of TCR clone 186526 (TRBV6-3, TRBJ2-7)
CASGSPGAVFYEQYF

SEQ ID NO: 373053 - protein, 16 aa, Homo sapiens
  CDR3 for alpha chain variable domain of TCR clone 186527 (TRAV4, TRAJ9)
CLVGDPNRPRGFKTIF

SEQ ID NO: 373054 - protein, 13 aa, Homo sapiens
  CDR3 for beta chain variable domain of TCR clone 186527 (TRBV5-5, TRBJ1-2)
CASSFRRGEDYTF

SEQ ID NO: 373055 - protein, 13 aa, Homo sapiens
  CDR3 for alpha chain variable domain of TCR clone 186528 (TRAV20, TRAJ37)
CAGWSSNTGKLIF

SEQ ID NO: 373056 - protein, 14 aa, Homo sapiens
  CDR3 for beta chain variable domain of TCR clone 186528 (TRBV20-1, TRBJ2-5)
CSARDGRAGETQYF

SEQ ID NO: 373057 - protein, 16 aa, Homo sapiens
  CDR3 for alpha chain variable domain of TCR clone 186529 (TRAV3, TRAJ10)
CAVRDMRAGGGNKLTF

SEQ ID NO: 373058 - protein, 14 aa, Homo sapiens
  CDR3 for beta chain variable domain of TCR clone 186529 (TRBV20-1, TRBJ2-3)
CSARGGTSTDTQYF

SEQ ID NO: 373059 - protein, 14 aa, Homo sapiens
  CDR3 for alpha chain variable domain of TCR clone 186530 (TRAV8-3, TRAJ4)
CAGGAAGGYNKLIF

SEQ ID NO: 373060 - protein, 15 aa, Homo sapiens
  CDR3 for beta chain variable domain of TCR clone 186530 (TRBV11-3, TRBJ2-3)
CASLKDGREGDTQYF

SEQ ID NO: 373061 - protein, 13 aa, Homo sapiens
  CDR3 for alpha chain variable domain of TCR clone 186531 (TRAV17, TRAJ9)
CATDYTGGFKTIF

SEQ ID NO: 373062 - protein, 13 aa, Homo sapiens
  CDR3 for beta chain variable domain of TCR clone 186531 (TRBV7-9, TRBJ1-2)
CASRLKQNYGYTF

SEQ ID NO: 373063 - protein, 14 aa, Homo sapiens
  CDR3 for alpha chain variable domain of TCR clone 186532 (TRAV12-2, TRAJ45)
CALPERGGADGLTF

SEQ ID NO: 373064 - protein, 15 aa, Homo sapiens
  CDR3 for beta chain variable domain of TCR clone 186532 (TRBV7-9, TRBJ1-6)
CASSSPGRGNSPLHF

SEQ ID NO: 373065 - protein, 11 aa, Homo sapiens
  CDR3 for alpha chain variable domain of TCR clone 186533 (TRAV1-2, TRAJ20)
CAVANDYKLSF

SEQ ID NO: 373066 - protein, 13 aa, Homo sapiens
  CDR3 for beta chain variable domain of TCR clone 186533 (TRBV2, TRBJ1-1)
CASNLLRNTEAFF

SEQ ID NO: 373067 - protein, 13 aa, Homo sapiens
  CDR3 for alpha chain variable domain of TCR clone 186534 (TRAV1-2, TRAJ9)
CAALNTGGFKTIF

SEQ ID NO: 373068 - protein, 16 aa, Homo sapiens
  CDR3 for beta chain variable domain of TCR clone 186534 (TRBV27, TRBJ2-7)
CASSSERRDSAYEQYF

SEQ ID NO: 373069 - protein, 14 aa, Homo sapiens
  CDR3 for alpha chain variable domain of TCR clone 186535 (TRAV17, TRAJ12)
CATDEKDSSYKLFF

SEQ ID NO: 373070 - protein, 16 aa, Homo sapiens
  CDR3 for beta chain variable domain of TCR clone 186535 (TRBV11-2, TRBJ2-1)
CASSPRLAGVYNEQFF

SEQ ID NO: 373071 - protein, 16 aa, Homo sapiens
  CDR3 for alpha chain variable domain of TCR clone 186536 (TRAV12-1, TRAJ48)
CVVNMVSNFGNEKLTF

SEQ ID NO: 373072 - protein, 15 aa, Homo sapiens
  CDR3 for beta chain variable domain of TCR clone 186536 (TRBV12-4, TRBJ2-5)
CASSPPTGLQETQYF

SEQ ID NO: 373073 - protein, 13 aa, Homo sapiens
  CDR3 for alpha chain variable domain of TCR clone 186537 (TRAV8-6, TRAJ8)
CAVSNTGFQKLVF

SEQ ID NO: 373074 - protein, 15 aa, Homo sapiens
  CDR3 for beta chain variable domain of TCR clone 186537 (TRBV28, TRBJ2-5)
CASSSGRTIQETQYY

SEQ ID NO: 373075 - protein, 15 aa, Homo sapiens
  CDR3 for alpha chain variable domain of TCR clone 186538 (TRAV12-1, TRAJ45)
CVVLSGGGGADGLTF

SEQ ID NO: 373076 - protein, 16 aa, Homo sapiens
  CDR3 for beta chain variable domain of TCR clone 186538 (TRBV6-5, TRBJ2-1)
CACSETLAGHYNEQFF

SEQ ID NO: 373077 - protein, 14 aa, Homo sapiens
  CDR3 for alpha chain variable domain of TCR clone 186539 (TRAV13-1, TRAJ35)
CAASKGGFGNVPHC

SEQ ID NO: 373078 - protein, 13 aa, Homo sapiens
  CDR3 for beta chain variable domain of TCR clone 186539 (TRBV7-3, TRBJ1-1)
CASSQDWGAEAFL

SEQ ID NO: 373079 - protein, 11 aa, Homo sapiens
  CDR3 for alpha chain variable domain of TCR clone 186540 (TRAV2, TRAJ13)
CASGGYQKVTF

SEQ ID NO: 373080 - protein, 15 aa, Homo sapiens
  CDR3 for beta chain variable domain of TCR clone 186540 (TRBV5-1, TRBJ1-5)
CASSLGTVSNQPQHF

SEQ ID NO: 373081 - protein, 17 aa, Homo sapiens
  CDR3 for alpha chain variable domain of TCR clone 186541 (TRAV26-1, TRAJ37)
CIVRVITVSSNTGKLIF

SEQ ID NO: 373082 - protein, 17 aa, Homo sapiens
  CDR3 for beta chain variable domain of TCR clone 186541 (TRBV18, TRBJ2-1)
CASSPRVAGGSYNEQFF

SEQ ID NO: 373083 - protein, 14 aa, Homo sapiens
  CDR3 for alpha chain variable domain of TCR clone 186542 (TRAV12-2, TRAJ40)
CAVRIPSGTYKCIF

SEQ ID NO: 373084 - protein, 14 aa, Homo sapiens
  CDR3 for beta chain variable domain of TCR clone 186542 (TRBV20-1, TRBJ1-1)
CSAQTRIGGTEAFF

SEQ ID NO: 373085 - protein, 15 aa, Homo sapiens
  CDR3 for alpha chain variable domain of TCR clone 186543 (TRAV29/DV5, TRAJ29)
CSASERSSGNTPLVF

SEQ ID NO: 373086 - protein, 17 aa, Homo sapiens
  CDR3 for beta chain variable domain of TCR clone 186543 (TRBV4-1, TRBJ1-4)
CASSQEGPRGVEEKLFL

SEQ ID NO: 373087 - protein, 15 aa, Homo sapiens
  CDR3 for alpha chain variable domain of TCR clone 186544 (TRAV34, TRAJ38)
CGADFTPGNNRKLIW

SEQ ID NO: 373088 - protein, 16 aa, Homo sapiens
  CDR3 for beta chain variable domain of TCR clone 186544 (TRBV7-9, TRBJ2-5)
CASSPSGQGVKGTQYF

SEQ ID NO: 373089 - protein, 14 aa, Homo sapiens
  CDR3 for alpha chain variable domain of TCR clone 186545 (TRAV1-2, TRAJ16)
CAVNRLSDGQKLLF

SEQ ID NO: 373090 - protein, 14 aa, Homo sapiens
  CDR3 for beta chain variable domain of TCR clone 186545 (TRBV4-1, TRBJ2-2)
CASSQAVNTGELFF

SEQ ID NO: 373091 - protein, 13 aa, Homo sapiens
  CDR3 for alpha chain variable domain of TCR clone 186546 (TRAV17, TRAJ7)
CATDNYGNNRLAF

SEQ ID NO: 373092 - protein, 13 aa, Homo sapiens
  CDR3 for beta chain variable domain of TCR clone 186546 (TRBV27, TRBJ2-1)
CASSSSSYNEQFF

SEQ ID NO: 373093 - protein, 14 aa, Homo sapiens
  CDR3 for alpha chain variable domain of TCR clone 186547 (TRAV29/DV5, TRAJ45)
CAASFRGGAAGLTF

SEQ ID NO: 373094 - protein, 15 aa, Homo sapiens
  CDR3 for beta chain variable domain of TCR clone 186547 (TRBV19, TRBJ1-2)
CASSVGQVLNYGYTF

SEQ ID NO: 373095 - protein, 14 aa, Homo sapiens
  CDR3 for alpha chain variable domain of TCR clone 186548 (TRAV27, TRAJ22)
CAGVSVLGKRQLTF

SEQ ID NO: 373096 - protein, 16 aa, Homo sapiens
  CDR3 for beta chain variable domain of TCR clone 186548 (TRBV5-1, TRBJ2-1)
CASSLSSLRESNEQFF

SEQ ID NO: 373097 - protein, 13 aa, Homo sapiens
  CDR3 for alpha chain variable domain of TCR clone 186549 (TRAV12-3, TRAJ47)
CAMKKECGNKLVF

SEQ ID NO: 373098 - protein, 16 aa, Homo sapiens
  CDR3 for beta chain variable domain of TCR clone 186549 (TRBV3-1, TRBJ2-6)
CASSLTWVSGANVLTF

SEQ ID NO: 373099 - protein, 12 aa, Homo sapiens
  CDR3 for alpha chain variable domain of TCR clone 186550 (TRAV2, TRAJ10)
CASTGGGNKLTF

SEQ ID NO: 373100 - protein, 15 aa, Homo sapiens
  CDR3 for beta chain variable domain of TCR clone 186550 (TRBV20-1, TRBJ2-1)
CSARVGMAGFNEQFF

SEQ ID NO: 373101 - protein, 12 aa, Homo sapiens
  CDR3 for alpha chain variable domain of TCR clone 186551 (TRAV16, TRAJ10)
CSRLGGGNKLTF

SEQ ID NO: 373102 - protein, 12 aa, Homo sapiens
  CDR3 for beta chain variable domain of TCR clone 186551 (TRBV11-2, TRBJ2-1)
CASSPGNNEQFF

SEQ ID NO: 373103 - protein, 16 aa, Homo sapiens
  CDR3 for alpha chain variable domain of TCR clone 186552 (TRAV30, TRAJ49)
SAAQRVGTNTGNQFYF

SEQ ID NO: 373104 - protein, 15 aa, Homo sapiens
  CDR3 for beta chain variable domain of TCR clone 186552 (TRBV7-2, TRBJ2-1)
CASSSGLAGGNEQFF

SEQ ID NO: 373105 - protein, 12 aa, Homo sapiens
  CDR3 for alpha chain variable domain of TCR clone 186553 (TRAV12-1, TRAJ16)
CVVFRDGQKLLF

SEQ ID NO: 373106 - protein, 13 aa, Homo sapiens
  CDR3 for beta chain variable domain of TCR clone 186553 (TRBV12-4, TRBJ2-2)
CASSITGSGELFF

SEQ ID NO: 373107 - protein, 16 aa, Homo sapiens
  CDR3 for alpha chain variable domain of TCR clone 186554 (TRAV30, TRAJ24)
CGTEIEDADSWGKFQF

SEQ ID NO: 373108 - protein, 14 aa, Homo sapiens
  CDR3 for beta chain variable domain of TCR clone 186554 (TRBV12-5, TRBJ2-5)
CASGSRTRQETQYF

SEQ ID NO: 373109 - protein, 13 aa, Homo sapiens
  CDR3 for alpha chain variable domain of TCR clone 186555 (TRAV12-3, TRAJ54)
CAMTLQGAQKLVF

SEQ ID NO: 373110 - protein, 14 aa, Homo sapiens
  CDR3 for beta chain variable domain of TCR clone 186555 (TRBV4-1, TRBJ2-2)
CASSLAVNTGELFF

SEQ ID NO: 373111 - protein, 16 aa, Homo sapiens
  CDR3 for alpha chain variable domain of TCR clone 186556 (TRAV27, TRAJ52)
CAGAPAGGTSYGKLTF

SEQ ID NO: 373112 - protein, 12 aa, Homo sapiens
  CDR3 for beta chain variable domain of TCR clone 186556 (TRBV27, TRBJ2-1)
CASRGFYNQQFF

SEQ ID NO: 373113 - protein, 14 aa, Homo sapiens
  CDR3 for alpha chain variable domain of TCR clone 186557 (TRAV36/DV7, TRAJ40)
CAVETTSGTYKYIF

SEQ ID NO: 373114 - protein, 16 aa, Homo sapiens
  CDR3 for beta chain variable domain of TCR clone 186557 (TRBV19, TRBJ2-3)
CASSPGAASRTDTQYF

SEQ ID NO: 373115 - protein, 18 aa, Homo sapiens
  CDR3 for alpha chain variable domain of TCR clone 186558 (TRAV12-3, TRAJ52)
CAMSVGGAGGTNYGKRTF

SEQ ID NO: 373116 - protein, 15 aa, Homo sapiens
  CDR3 for beta chain variable domain of TCR clone 186558 (TRBV27, TRBJ1-6)
CASSFDRGLGSPLHF

SEQ ID NO: 373117 - protein, 10 aa, Homo sapiens
  CDR3 for alpha chain variable domain of TCR clone 186559 (TRAV21, TRAJ31)
CAVDNARLMF

SEQ ID NO: 373118 - protein, 12 aa, Homo sapiens
  CDR3 for beta chain variable domain of TCR clone 186559 (TRBV7-8, TRBJ2-7)
CASSLGDREQYF

SEQ ID NO: 373119 - protein, 13 aa, Homo sapiens
  CDR3 for alpha chain variable domain of TCR clone 186560 (TRAV8-3, TRAJ43)
CAVGPDNNNDMRF

SEQ ID NO: 373120 - protein, 13 aa, Homo sapiens
  CDR3 for beta chain variable domain of TCR clone 186560 (TRBV19, TRBJ2-1)
CSPTFVLSGEQFF

SEQ ID NO: 373121 - protein, 17 aa, Homo sapiens
  CDR3 for alpha chain variable domain of TCR clone 186561 (TRAV3, TRAJ6)
CAVRDGPRAGGSYIPTV

SEQ ID NO: 373122 - protein, 14 aa, Homo sapiens
  CDR3 for beta chain variable domain of TCR clone 186561 (TRBV28, TRBJ1-2)
CASSRDRKNYGYTF

SEQ ID NO: 373123 - protein, 23 aa, Homo sapiens
  CDR3 for alpha chain variable domain of TCR clone 186562 (TRAV21, TRAJ9)
CAVEAVALEASKISLEQEQDYLL

SEQ ID NO: 373124 - protein, 13 aa, Homo sapiens
  CDR3 for beta chain variable domain of TCR clone 186562 (TRBV12-4, TRBJ1-2)
CASSSGLTVISTF

SEQ ID NO: 373125 - protein, 15 aa, Homo sapiens
  CDR3 for alpha chain variable domain of TCR clone 186563 (TRAV26-1, TRAJ29)
FIVRVEGSGNTPLVF

SEQ ID NO: 373126 - protein, 15 aa, Homo sapiens
  CDR3 for beta chain variable domain of TCR clone 186563 (TRBV7-9, TRBJ1-5)
CASSQGHQPKQPQHF

SEQ ID NO: 373127 - protein, 15 aa, Homo sapiens
  CDR3 for alpha chain variable domain of TCR clone 186564 (TRAV3, TRAJ22)
CAVRDRGGSARQLTF

SEQ ID NO: 373128 - protein, 14 aa, Homo sapiens
  CDR3 for beta chain variable domain of TCR clone 186564 (TRBV6-1, TRBJ2-1)
CASAKDGFYNEQFF

SEQ ID NO: 373129 - protein, 14 aa, Homo sapiens
  CDR3 for alpha chain variable domain of TCR clone 186565 (TRAV13-1, TRAJ40)
CAARSTSGTYKYIF

SEQ ID NO: 373130 - protein, 13 aa, Homo sapiens
  CDR3 for beta chain variable domain of TCR clone 186565 (TRBV7-3, TRBJ1-1)
CASSQDLGAEAFF

SEQ ID NO: 373131 - protein, 12 aa, Homo sapiens
  CDR3 for alpha chain variable domain of TCR clone 186566 (TRAV17, TRAJ26)
CATVGYGQNFVF

SEQ ID NO: 373132 - protein, 12 aa, Homo sapiens
  CDR3 for beta chain variable domain of TCR clone 186566 (TRBV19, TRBJ1-5)
CASSIAQQPQHF

SEQ ID NO: 373133 - protein, 18 aa, Homo sapiens
  CDR3 for alpha chain variable domain of TCR clone 186567 (TRAV21, TRAJ52)
CAVRPSPPGGTSYGKLTF

SEQ ID NO: 373134 - protein, 13 aa, Homo sapiens
  CDR3 for beta chain variable domain of TCR clone 186567 (TRBV4-2, TRBJ1-1)
CASSQAGNTEAFF

SEQ ID NO: 373135 - protein, 15 aa, Homo sapiens
  CDR3 for alpha chain variable domain of TCR clone 186568 (TRAV12-3, TRAJ6)
CAMSATTGGSYIPTF

SEQ ID NO: 373136 - protein, 16 aa, Homo sapiens
  CDR3 for beta chain variable domain of TCR clone 186568 (TRBV20-1, TRBJ1-2)
CSASMGQGVANFGYTF

SEQ ID NO: 373137 - protein, 14 aa, Homo sapiens
  CDR3 for alpha chain variable domain of TCR clone 186569 (TRAV12-2, TRAJ5)
CAVNRSTGRTALTF

SEQ ID NO: 373138 - protein, 12 aa, Homo sapiens
  CDR3 for beta chain variable domain of TCR clone 186569 (TRBV19, TRBJ1-5)
CASSIAQQPQHF

SEQ ID NO: 373139 - protein, 17 aa, Homo sapiens
  CDR3 for alpha chain variable domain of TCR clone 186570 (TRAV23/DV6, TRAJ57)
CAASSPLSQGGSEKLVF

SEQ ID NO: 373140 - protein, 14 aa, Homo sapiens
  CDR3 for beta chain variable domain of TCR clone 186570 (TRBV19, TRBJ2-1)
CASSKDRGQDEQFF

SEQ ID NO: 373141 - protein, 12 aa, Homo sapiens
  CDR3 for alpha chain variable domain of TCR clone 186571 (TRAV12-3, TRAJ17)
CAMTLTGYKLTF

SEQ ID NO: 373142 - protein, 14 aa, Homo sapiens
  CDR3 for beta chain variable domain of TCR clone 186571 (TRBV19, TRBJ2-1)
CASPTFVLSGEQFF

SEQ ID NO: 373143 - protein, 14 aa, Homo sapiens
  CDR3 for alpha chain variable domain of TCR clone 186572 (TRAV21, TRAJ38)
CAVANAGNSRKLIW

SEQ ID NO: 373144 - protein, 15 aa, Homo sapiens
  CDR3 for beta chain variable domain of TCR clone 186572 (TRBV20-1, TRBJ2-7)
CSARDRVSGMDEQYF

SEQ ID NO: 373145 - protein, 14 aa, Homo sapiens
  CDR3 for alpha chain variable domain of TCR clone 186573 (TRAV12-3, TRAJ10)
SHLPLTGGGNKLTF

SEQ ID NO: 373146 - protein, 16 aa, Homo sapiens
  CDR3 for beta chain variable domain of TCR clone 186573 (TRBV7-9, TRBJ2-1)
CASSSLRQPDYNEQFF

SEQ ID NO: 373147 - protein, 14 aa, Homo sapiens
  CDR3 for alpha chain variable domain of TCR clone 186574 (TRAV1-2, TRAJ8)
CAVREDTGFQKLEF

SEQ ID NO: 373148 - protein, 11 aa, Homo sapiens
  CDR3 for beta chain variable domain of TCR clone 186574 (TRBV11-2, TRBJ2-2)
CASSLPGELFF

SEQ ID NO: 373149 - protein, 14 aa, Homo sapiens
  CDR3 for alpha chain variable domain of TCR clone 186575 (TRAV12-2, TRAJ40)
CAVKIPSGTYKYIF

SEQ ID NO: 373150 - protein, 17 aa, Homo sapiens
  CDR3 for beta chain variable domain of TCR clone 186575 (TRBV20-1, TRBJ2-1)
CSAFSGTSGSLYNEQSF

SEQ ID NO: 373151 - protein, 16 aa, Homo sapiens
  CDR3 for alpha chain variable domain of TCR clone 186576 (TRAV8-3, TRAJ8)
CAVPRDGNTGFQKLVF

SEQ ID NO: 373152 - protein, 17 aa, Homo sapiens
  CDR3 for beta chain variable domain of TCR clone 186576 (TRBV7-8, TRBJ2-6)
CASSAGTGGAGANVLTF

SEQ ID NO: 373153 - protein, 12 aa, Homo sapiens
  CDR3 for alpha chain variable domain of TCR clone 186577 (TRAV36/DV7, TRAJ54)
CAVVRGAQKLVF

SEQ ID NO: 373154 - protein, 15 aa, Homo sapiens
  CDR3 for beta chain variable domain of TCR clone 186577 (TRBV4-1, TRBJ2-3)
CASSNLAGGRDTQYF

SEQ ID NO: 373155 - protein, 15 aa, Homo sapiens
  CDR3 for alpha chain variable domain of TCR clone 186578 (TRAV2, TRAJ28)
CAVPYSWAGSYQLTF

SEQ ID NO: 373156 - protein, 10 aa, Homo sapiens
  CDR3 for beta chain variable domain of TCR clone 186578 (TRBV23-1, TRBJ2-1)
KWSSYNEQFF

SEQ ID NO: 373157 - protein, 16 aa, Homo sapiens
  CDR3 for alpha chain variable domain of TCR clone 186579 (TRAV21, TRAJ33)
CAVSPASMDSHYQLIW

SEQ ID NO: 373158 - protein, 17 aa, Homo sapiens
  CDR3 for beta chain variable domain of TCR clone 186579 (TRBV2, TRBJ1-4)
CASSKRELTQGEEKLFF

SEQ ID NO: 373159 - protein, 14 aa, Homo sapiens
  CDR3 for alpha chain variable domain of TCR clone 186580 (TRAV1-2, TRAJ16)
CAVNRFADGQKLLF

SEQ ID NO: 373160 - protein, 13 aa, Homo sapiens
  CDR3 for beta chain variable domain of TCR clone 186580 (TRBV11-2, TRBJ2-5)
CASSSTGEETQYF

SEQ ID NO: 373161 - protein, 15 aa, Homo sapiens
  CDR3 for alpha chain variable domain of TCR clone 186581 (TRAV8-3, TRAJ40)
CAAPSLVSGTYRYIF

SEQ ID NO: 373162 - protein, 16 aa, Homo sapiens
  CDR3 for beta chain variable domain of TCR clone 186581 (TRBV7-3, TRBJ2-3)
CASSLSGYRPEDTQYF

SEQ ID NO: 373163 - protein, 15 aa, Homo sapiens
  CDR3 for alpha chain variable domain of TCR clone 186582 (TRAV4, TRAJ9)
CLVGGGNTGGFKTIF

SEQ ID NO: 373164 - protein, 13 aa, Homo sapiens
  CDR3 for beta chain variable domain of TCR clone 186582 (TRBV7-9, TRBJ1-2)
CASSLKQNYGYTF

SEQ ID NO: 373165 - protein, 13 aa, Homo sapiens
  CDR3 for alpha chain variable domain of TCR clone 186583 (TRAV39, TRAJ48)
CAAVNFGNEKLTF

SEQ ID NO: 373166 - protein, 11 aa, Homo sapiens
  CDR3 for beta chain variable domain of TCR clone 186583 (TRBV5-5, TRBJ2-5)
CQQLLRETQYF

SEQ ID NO: 373167 - protein, 12 aa, Homo sapiens
  CDR3 for alpha chain variable domain of TCR clone 186584 (TRAV23/DV6, TRAJ30)
CAARKGADKNIF

SEQ ID NO: 373168 - protein, 18 aa, Homo sapiens
  CDR3 for beta chain variable domain of TCR clone 186584 (TRBV10-3, TRBJ2-3)
CAICESRVGPMRGDTQYF

SEQ ID NO: 373169 - protein, 16 aa, Homo sapiens
  CDR3 for alpha chain variable domain of TCR clone 186585 (TRAV12-3, TRAJ53)
CAMSPGSGGSNYKLTV

SEQ ID NO: 373170 - protein, 15 aa, Homo sapiens
  CDR3 for beta chain variable domain of TCR clone 186585 (TRBV27, TRBJ2-1)
CASSNGGGSSNEQFF

SEQ ID NO: 373171 - protein, 14 aa, Homo sapiens
  CDR3 for alpha chain variable domain of TCR clone 186586 (TRAV13-1, TRAJ49)
CAASIGNTGNQFYF

SEQ ID NO: 373172 - protein, 14 aa, Homo sapiens
  CDR3 for beta chain variable domain of TCR clone 186586 (TRBV7-9, TRBJ2-5)
CASSLDTAQETQYF

SEQ ID NO: 373173 - protein, 13 aa, Homo sapiens
  CDR3 for alpha chain variable domain of TCR clone 186587 (TRAV21, TRAJ27)
CAARPGNACKSTF

SEQ ID NO: 373174 - protein, 14 aa, Homo sapiens
  CDR3 for beta chain variable domain of TCR clone 186587 (TRBV7-6, TRBJ2-3)
CDSSLGTVTDTQYF

SEQ ID NO: 373175 - protein, 16 aa, Homo sapiens
  CDR3 for alpha chain variable domain of TCR clone 186588 (TRAV3, TRAJ10)
CAVRDMRAGGGNKRTF

SEQ ID NO: 373176 - protein, 12 aa, Homo sapiens
  CDR3 for beta chain variable domain of TCR clone 186588 (TRBV20-1, TRBJ2-7)
CSAGLKMGEQYF

SEQ ID NO: 373177 - protein, 15 aa, Homo sapiens
  CDR3 for alpha chain variable domain of TCR clone 186589 (TRAV38-2/DV8, TRAJ45)
CAYWDSGGGADGLTF

SEQ ID NO: 373178 - protein, 17 aa, Homo sapiens
  CDR3 for beta chain variable domain of TCR clone 186589 (TRBV13, TRBJ2-3)
CASSLSRVAGGRNTQYF

SEQ ID NO: 373179 - protein, 16 aa, Homo sapiens
  CDR3 for alpha chain variable domain of TCR clone 186590 (TRAV8-6, TRAJ39)
FAVMPMNNNAGNMLTF

SEQ ID NO: 373180 - protein, 16 aa, Homo sapiens
  CDR3 for beta chain variable domain of TCR clone 186590 (TRBV15, TRBJ2-5)
CATSRYLEAAQETQYF

SEQ ID NO: 373181 - protein, 15 aa, Homo sapiens
  CDR3 for alpha chain variable domain of TCR clone 186591 (TRAV13-1, TRAJ52)
CALRTGGTSYGKLTF

SEQ ID NO: 373182 - protein, 12 aa, Homo sapiens
  CDR3 for beta chain variable domain of TCR clone 186591 (TRBV7-8, TRBJ2-7)
CASEGGPHGQYF

SEQ ID NO: 373183 - protein, 13 aa, Homo sapiens
  CDR3 for alpha chain variable domain of TCR clone 186592 (TRAV1-2, TRAJ9)
CAALNTGGFKTIF

SEQ ID NO: 373184 - protein, 14 aa, Homo sapiens
  CDR3 for beta chain variable domain of TCR clone 186592 (TRBV20-1, TRBJ2-3)
CSARGGTSTDTQYF

SEQ ID NO: 373185 - protein, 15 aa, Homo sapiens
  CDR3 for alpha chain variable domain of TCR clone 186593 (TRAV4, TRAJ10)
CLVGDEEGGGNKLTF

SEQ ID NO: 373186 - protein, 15 aa, Homo sapiens
  CDR3 for beta chain variable domain of TCR clone 186593 (TRBV7-2, TRBJ2-7)
CVSSLTGQGTYEEYF

SEQ ID NO: 373187 - protein, 18 aa, Homo sapiens
  CDR3 for alpha chain variable domain of TCR clone 186594 (TRAV21, TRAJ52)
CAVRPSPAGGTSYGKLTF

SEQ ID NO: 373188 - protein, 14 aa, Homo sapiens
  CDR3 for beta chain variable domain of TCR clone 186594 (TRBV4-1, TRBJ2-2)
CASSQAVDTGELFF

SEQ ID NO: 373189 - protein, 13 aa, Homo sapiens
  CDR3 for alpha chain variable domain of TCR clone 186595 (TRAV27, TRAJ41)
CAGAGNSGYALNF

SEQ ID NO: 373190 - protein, 14 aa, Homo sapiens
  CDR3 for beta chain variable domain of TCR clone 186595 (TRBV7-2, TRBJ1-1)
CASSCLTGTTEAFF

SEQ ID NO: 373191 - protein, 11 aa, Homo sapiens
  CDR3 for alpha chain variable domain of TCR clone 186596 (TRAV12-3, TRAJ27)
CAMANAGKSTF

SEQ ID NO: 373192 - protein, 14 aa, Homo sapiens
  CDR3 for beta chain variable domain of TCR clone 186596 (TRBV12-5, TRBJ2-5)
CAGGSRTHQETQYF

SEQ ID NO: 373193 - protein, 16 aa, Homo sapiens
  CDR3 for alpha chain variable domain of TCR clone 186597 (TRAV8-1, TRAJ48)
CAVTLISNFGNEKLTF

SEQ ID NO: 373194 - protein, 12 aa, Homo sapiens
  CDR3 for beta chain variable domain of TCR clone 186597 (TRBV20-1, TRBJ1-2)
CSAPGFNYGYSF

SEQ ID NO: 373195 - protein, 16 aa, Homo sapiens
  CDR3 for alpha chain variable domain of TCR clone 186598 (TRAV26-1, TRAJ37)
CIVRGDGSGNTGKLIF

SEQ ID NO: 373196 - protein, 17 aa, Homo sapiens
  CDR3 for beta chain variable domain of TCR clone 186598 (TRBV4-1, TRBJ2-7)
CASSREPLGVRGGEQYF

SEQ ID NO: 373197 - protein, 11 aa, Homo sapiens
  CDR3 for alpha chain variable domain of TCR clone 186599 (TRAV3, TRAJ21)
CAVGNFNKFYF

SEQ ID NO: 373198 - protein, 12 aa, Homo sapiens
  CDR3 for beta chain variable domain of TCR clone 186599 (TRBV20-1, TRBJ2-5)
CSAGGAGETQYF

SEQ ID NO: 373199 - protein, 14 aa, Homo sapiens
  CDR3 for alpha chain variable domain of TCR clone 186600 (TRAV38-1, TRAJ57)
CAFMNTGGSEKLVF

SEQ ID NO: 373200 - protein, 12 aa, Homo sapiens
  CDR3 for beta chain variable domain of TCR clone 186600 (TRBV20-1, TRBJ1-5)
CSTSQGNQPQYF

SEQ ID NO: 373201 - protein, 14 aa, Homo sapiens
  CDR3 for alpha chain variable domain of TCR clone 186601 (TRAV12-2, TRAJ13)
CAVKKTGGYQKVTF

SEQ ID NO: 373202 - protein, 17 aa, Homo sapiens
  CDR3 for beta chain variable domain of TCR clone 186601 (TRBV5-1, TRBJ2-1)
CASSLGQISFSYNEQFF

SEQ ID NO: 373203 - protein, 16 aa, Homo sapiens
  CDR3 for alpha chain variable domain of TCR clone 186602 (TRAV25, TRAJ53)
CAGPKGSGGSNYKLTF

SEQ ID NO: 373204 - protein, 19 aa, Homo sapiens
  CDR3 for beta chain variable domain of TCR clone 186602 (TRBV2, TRBJ2-7)
CASSDDETSGRANDYEQYF

SEQ ID NO: 373205 - protein, 16 aa, Homo sapiens
  CDR3 for alpha chain variable domain of TCR clone 186603 (TRAV30, TRAJ24)
CGTEIVDADSWGKFQF

SEQ ID NO: 373206 - protein, 14 aa, Homo sapiens
  CDR3 for beta chain variable domain of TCR clone 186603 (TRBV12-5, TRBJ2-5)
CGSGSRTHQGTQYF

SEQ ID NO: 373207 - protein, 13 aa, Homo sapiens
  CDR3 for alpha chain variable domain of TCR clone 186604 (TRAV3, TRAJ21)
CAVREPDFNKFYF

SEQ ID NO: 373208 - protein, 13 aa, Homo sapiens
  CDR3 for beta chain variable domain of TCR clone 186604 (TRBV7-2, TRBJ1-1)
CASSRNTNTEAFF

SEQ ID NO: 373209 - protein, 17 aa, Homo sapiens
  CDR3 for alpha chain variable domain of TCR clone 186605 (TRAV36/DV7, TRAJ52)
CAVAQRAGGTSYGKLTF

SEQ ID NO: 373210 - protein, 16 aa, Homo sapiens
  CDR3 for beta chain variable domain of TCR clone 186605 (TRBV7-2, TRBJ1-4)
CASSPVGRFDREKLFF

SEQ ID NO: 373211 - protein, 23 aa, Homo sapiens
  CDR3 for alpha chain variable domain of TCR clone 186606 (TRAV13-1, )
CAASTRGAQIPDIQNPDPAVYQL

SEQ ID NO: 373212 - protein, 16 aa, Homo sapiens
  CDR3 for beta chain variable domain of TCR clone 186606 (TRBV4-2, TRBJ1-5)
CASSQGQGASNQPQHF

SEQ ID NO: 373213 - protein, 18 aa, Homo sapiens
  CDR3 for alpha chain variable domain of TCR clone 186607 (TRAV12-3, TRAJ52)
CAMSVGGAGGTSYGKLNF

SEQ ID NO: 373214 - protein, 15 aa, Homo sapiens
  CDR3 for beta chain variable domain of TCR clone 186607 (TRBV7-2, TRBJ1-2)
CASSPRAGWNYGYTF

SEQ ID NO: 373215 - protein, 13 aa, Homo sapiens
  CDR3 for alpha chain variable domain of TCR clone 186608 (TRAV12-1, TRAJ6)
CVVFPGGSYIPTF

SEQ ID NO: 373216 - protein, 14 aa, Homo sapiens
  CDR3 for beta chain variable domain of TCR clone 186608 (TRBV20-1, TRBJ1-3)
CSASPRGAGNTIDF

SEQ ID NO: 373217 - protein, 15 aa, Homo sapiens
  CDR3 for alpha chain variable domain of TCR clone 186609 (TRAV9-2, TRAJ49)
CALSPPDHTGNQFYL

SEQ ID NO: 373218 - protein, 14 aa, Homo sapiens
  CDR3 for beta chain variable domain of TCR clone 186609 (TRBV12-4, TRBJ1-1)
CASSLGTGGTEAFF

SEQ ID NO: 373219 - protein, 13 aa, Homo sapiens
  CDR3 for alpha chain variable domain of TCR clone 186610 (TRAV20, TRAJ37)
CAGFSSNTGKLIL

SEQ ID NO: 373220 - protein, 11 aa, Homo sapiens
  CDR3 for beta chain variable domain of TCR clone 186610 (TRBV12-4, TRBJ2-3)
CASTATDTQYF

SEQ ID NO: 373221 - protein, 12 aa, Homo sapiens
  CDR3 for alpha chain variable domain of TCR clone 186611 (TRAV8-4, TRAJ43)
CAVSVNNNDMRV

SEQ ID NO: 373222 - protein, 14 aa, Homo sapiens
  CDR3 for beta chain variable domain of TCR clone 186611 (TRBV11-2, TRBJ1-2)
CASSLGTANYGYTF

SEQ ID NO: 373223 - protein, 15 aa, Homo sapiens
  CDR3 for alpha chain variable domain of TCR clone 186612 (TRAV12-3, TRAJ49)
CAMAVTPNTGNQFYF

SEQ ID NO: 373224 - protein, 20 aa, Homo sapiens
  CDR3 for beta chain variable domain of TCR clone 186612 (TRBV4-1, TRBJ1-5)
CISAPAAKTPGQGLNQPQHF

SEQ ID NO: 373225 - protein, 12 aa, Homo sapiens
  CDR3 for alpha chain variable domain of TCR clone 186613 (TRAV23/DV6, TRAJ33)
CAAEDSNYQLIW

SEQ ID NO: 373226 - protein, 15 aa, Homo sapiens
  CDR3 for beta chain variable domain of TCR clone 186613 (TRBV18, TRBJ2-7)
CASSPLQGRTYEQYF

SEQ ID NO: 373227 - protein, 12 aa, Homo sapiens
  CDR3 for alpha chain variable domain of TCR clone 186614 (TRAV21, TRAJ31)
CSVWGNNARLMF

SEQ ID NO: 373228 - protein, 16 aa, Homo sapiens
  CDR3 for beta chain variable domain of TCR clone 186614 (TRBV27, TRBJ2-5)
CASSYGPGGQKETQYF

SEQ ID NO: 373229 - protein, 16 aa, Homo sapiens
  CDR3 for alpha chain variable domain of TCR clone 186615 (TRAV3, TRAJ37)
CAVRGKGSGNTGKLIF

SEQ ID NO: 373230 - protein, 11 aa, Homo sapiens
  CDR3 for beta chain variable domain of TCR clone 186615 (TRBV5-6, TRBJ2-5)
CASSLMGTQYF

SEQ ID NO: 373231 - protein, 14 aa, Homo sapiens
  CDR3 for alpha chain variable domain of TCR clone 186616 (TRAV12-3, TRAJ10)
RHLPLTGGGNKLTF

SEQ ID NO: 373232 - protein, 16 aa, Homo sapiens
  CDR3 for beta chain variable domain of TCR clone 186616 (TRBV19, TRBJ2-1)
CASSKAGPSSYNEQFF

SEQ ID NO: 373233 - protein, 18 aa, Homo sapiens
  CDR3 for alpha chain variable domain of TCR clone 186617 (TRAV21, TRAJ52)
CAVRPSPAGGTSYGKLTF

SEQ ID NO: 373234 - protein, 17 aa, Homo sapiens
  CDR3 for beta chain variable domain of TCR clone 186617 (TRBV25-1, TRBJ2-1)
CASSAYGQGRGVYEQSF

SEQ ID NO: 373235 - protein, 15 aa, Homo sapiens
  CDR3 for alpha chain variable domain of TCR clone 186618 (TRAV2, TRAJ15)
CAVEDRGQAGTALIF

SEQ ID NO: 373236 - protein, 14 aa, Homo sapiens
  CDR3 for beta chain variable domain of TCR clone 186618 (TRBV19, TRBJ2-1)
CASSPGLAPNEQFF

SEQ ID NO: 373237 - protein, 15 aa, Homo sapiens
  CDR3 for alpha chain variable domain of TCR clone 186619 (TRAV4, TRAJ26)
CLVGDMNNYGQDFVF

SEQ ID NO: 373238 - protein, 16 aa, Homo sapiens
  CDR3 for beta chain variable domain of TCR clone 186619 (TRBV28, TRBJ1-4)
CASSSRTGAANEKLFF

SEQ ID NO: 373239 - protein, 12 aa, Homo sapiens
  CDR3 for alpha chain variable domain of TCR clone 186620 (TRAV2, TRAJ31)
CAVEDTNARLMF

SEQ ID NO: 373240 - protein, 15 aa, Homo sapiens
  CDR3 for beta chain variable domain of TCR clone 186620 (TRBV27, TRBJ2-1)
CASSNGGGSSNEQFF

SEQ ID NO: 373241 - protein, 12 aa, Homo sapiens
  CDR3 for alpha chain variable domain of TCR clone 186621 (TRAV12-3, TRAJ29)
CAAREGNTPLVF

SEQ ID NO: 373242 - protein, 16 aa, Homo sapiens
  CDR3 for beta chain variable domain of TCR clone 186621 (TRBV4-2, TRBJ2-5)
CASSQELVGSQETQYF

SEQ ID NO: 373243 - protein, 18 aa, Homo sapiens
  CDR3 for alpha chain variable domain of TCR clone 186622 (TRAV13-1, TRAJ52)
CAASKRSAGGTSYGKLTF

SEQ ID NO: 373244 - protein, 18 aa, Homo sapiens
  CDR3 for beta chain variable domain of TCR clone 186622 (TRBV7-9, TRBJ2-7)
CASSLTTSGSRTWYEQYF

SEQ ID NO: 373245 - protein, 17 aa, Homo sapiens
  CDR3 for alpha chain variable domain of TCR clone 186623 (TRAV4, TRAJ42)
CLVGVLNYGGSQGNLIF

SEQ ID NO: 373246 - protein, 13 aa, Homo sapiens
  CDR3 for beta chain variable domain of TCR clone 186623 (TRBV7-8, TRBJ2-7)
CASSLTGGREQYF

SEQ ID NO: 373247 - protein, 16 aa, Homo sapiens
  CDR3 for alpha chain variable domain of TCR clone 186624 (TRAV3, TRAJ21)
CAVRDIERGNFNKFYF

SEQ ID NO: 373248 - protein, 13 aa, Homo sapiens
  CDR3 for beta chain variable domain of TCR clone 186624 (TRBV4-3, TRBJ2-3)
CASSQGYTDTQYF

SEQ ID NO: 373249 - protein, 13 aa, Homo sapiens
  CDR3 for alpha chain variable domain of TCR clone 186625 (TRAV12-3, TRAJ13)
CAMSSGGYQKVTF

SEQ ID NO: 373250 - protein, 13 aa, Homo sapiens
  CDR3 for beta chain variable domain of TCR clone 186625 (TRBV20-1, TRBJ1-1)
CSAPPGGYTEAFF

SEQ ID NO: 373251 - protein, 12 aa, Homo sapiens
  CDR3 for alpha chain variable domain of TCR clone 186626 (TRAV26-1, TRAJ26)
CIVFIYGQNFVF

SEQ ID NO: 373252 - protein, 20 aa, Homo sapiens
  CDR3 for beta chain variable domain of TCR clone 186626 (TRBV7-8, TRBJ2-1)
CASSLAHRLAGVRSYNEQFF

SEQ ID NO: 373253 - protein, 15 aa, Homo sapiens
  CDR3 for alpha chain variable domain of TCR clone 186627 (TRAV12-3, TRAJ6)
SAMSATSGGSYIPTF

SEQ ID NO: 373254 - protein, 13 aa, Homo sapiens
  CDR3 for beta chain variable domain of TCR clone 186627 (TRBV7-9, TRBJ1-2)
CASSLKQNYGYTF

SEQ ID NO: 373255 - protein, 12 aa, Homo sapiens
  CDR3 for alpha chain variable domain of TCR clone 186628 (TRAV27, TRAJ58)
CAGARDTSRLTF

SEQ ID NO: 373256 - protein, 15 aa, Homo sapiens
  CDR3 for beta chain variable domain of TCR clone 186628 (TRBV3-1, TRBJ2-7)
CASSQVAGAQYVQYF

SEQ ID NO: 373257 - protein, 14 aa, Homo sapiens
  CDR3 for alpha chain variable domain of TCR clone 186629 (TRAV8-3, TRAJ12)
CAVGARDSSYKLIF

SEQ ID NO: 373258 - protein, 14 aa, Homo sapiens
  CDR3 for beta chain variable domain of TCR clone 186629 (TRBV4-2, TRBJ2-1)
CASGLDRAYNAQFF

SEQ ID NO: 373259 - protein, 16 aa, Homo sapiens
  CDR3 for alpha chain variable domain of TCR clone 186630 (TRAV3, TRAJ10)
CAVRDLRAGGGNKLNF

SEQ ID NO: 373260 - protein, 14 aa, Homo sapiens
  CDR3 for beta chain variable domain of TCR clone 186630 (TRBV25-1, TRBJ1-1)
CASTHLGGNTEAFF

SEQ ID NO: 373261 - protein, 15 aa, Homo sapiens
  CDR3 for alpha chain variable domain of TCR clone 186631 (TRAV23/DV6, TRAJ18)
CAASFRGSTLGRLYV

SEQ ID NO: 373262 - protein, 13 aa, Homo sapiens
  CDR3 for beta chain variable domain of TCR clone 186631 (TRBV28, TRBJ2-7)
CAILDRAGGEQYF

SEQ ID NO: 373263 - protein, 14 aa, Homo sapiens
  CDR3 for alpha chain variable domain of TCR clone 186632 (TRAV1-2, TRAJ8)
CAVREDTGFQKLVF

SEQ ID NO: 373264 - protein, 13 aa, Homo sapiens
  CDR3 for beta chain variable domain of TCR clone 186632 (TRBV24-1, TRBJ1-5)
CATSDRGDQPQHF

SEQ ID NO: 373265 - protein, 11 aa, Homo sapiens
  CDR3 for alpha chain variable domain of TCR clone 186633 (TRAV13-1, TRAJ16)
CAANDGQKLLF

SEQ ID NO: 373266 - protein, 13 aa, Homo sapiens
  CDR3 for beta chain variable domain of TCR clone 186633 (TRBV19, TRBJ2-2)
CASSIWSTGELFF

SEQ ID NO: 373267 - protein, 17 aa, Homo sapiens
  CDR3 for alpha chain variable domain of TCR clone 186634 (TRAV3, TRAJ6)
CAVRDGPRAGGSYIPTV

SEQ ID NO: 373268 - protein, 13 aa, Homo sapiens
  CDR3 for beta chain variable domain of TCR clone 186634 (TRBV4-2, TRBJ1-1)
CASSQAGNTEAFF

SEQ ID NO: 373269 - protein, 14 aa, Homo sapiens
  CDR3 for alpha chain variable domain of TCR clone 186635 (TRAV13-1, TRAJ35)
CAASKGGFGNVLHC

SEQ ID NO: 373270 - protein, 14 aa, Homo sapiens
  CDR3 for beta chain variable domain of TCR clone 186635 (TRBV4-1, TRBJ2-2)
CASSQAMNTGELFF

SEQ ID NO: 373271 - protein, 15 aa, Homo sapiens
  CDR3 for alpha chain variable domain of TCR clone 186636 (TRAV21, TRAJ24)
CAARSSTDSWGKLQF

SEQ ID NO: 373272 - protein, 19 aa, Homo sapiens
  CDR3 for beta chain variable domain of TCR clone 186636 (TRBV19, TRBJ2-5)
CASSIGQVTDFFLGETQYF

SEQ ID NO: 373273 - protein, 12 aa, Homo sapiens
  CDR3 for alpha chain variable domain of TCR clone 186637 (TRAV29/DV5, TRAJ49)
CAATDTVTQFYF

SEQ ID NO: 373274 - protein, 12 aa, Homo sapiens
  CDR3 for beta chain variable domain of TCR clone 186637 (TRBV12-4, TRBJ2-7)
CASSVGSYEQYF

SEQ ID NO: 373275 - protein, 13 aa, Homo sapiens
  CDR3 for alpha chain variable domain of TCR clone 186638 (TRAV2, TRAJ40)
CAVVTSGTYKYIL

SEQ ID NO: 373276 - protein, 14 aa, Homo sapiens
  CDR3 for beta chain variable domain of TCR clone 186638 (TRBV19, TRBJ2-3)
CASSAPRGTDTQYF

SEQ ID NO: 373277 - protein, 13 aa, Homo sapiens
  CDR3 for alpha chain variable domain of TCR clone 186639 (TRAV13-2, TRAJ49)
CAETLHGGNQFYF

SEQ ID NO: 373278 - protein, 17 aa, Homo sapiens
  CDR3 for beta chain variable domain of TCR clone 186639 (TRBV13, TRBJ2-3)
CASSLSRVAGGRNTQYF

SEQ ID NO: 373279 - protein, 14 aa, Homo sapiens
  CDR3 for alpha chain variable domain of TCR clone 186640 (TRAV38-1, TRAJ29)
CAFITPSGNTPLVV

SEQ ID NO: 373280 - protein, 15 aa, Homo sapiens
  CDR3 for beta chain variable domain of TCR clone 186640 (TRBV5-1, TRBJ2-1)
CASSPPRAPYNEQFF

SEQ ID NO: 373281 - protein, 16 aa, Homo sapiens
  CDR3 for alpha chain variable domain of TCR clone 186641 (TRAV13-1, TRAJ22)
CAAKGGRSGSARQLAF

SEQ ID NO: 373282 - protein, 15 aa, Homo sapiens
  CDR3 for beta chain variable domain of TCR clone 186641 (TRBV9, TRBJ1-6)
CASSVAGTGDSPLHF

SEQ ID NO: 373283 - protein, 11 aa, Homo sapiens
  CDR3 for alpha chain variable domain of TCR clone 186642 (TRAV17, TRAJ49)
CATDAGNQIYF

SEQ ID NO: 373284 - protein, 16 aa, Homo sapiens
  CDR3 for beta chain variable domain of TCR clone 186642 (TRBV7-2, TRBJ1-2)
CASSPTSGTAVGGYTF

SEQ ID NO: 373285 - protein, 16 aa, Homo sapiens
  CDR3 for alpha chain variable domain of TCR clone 186643 (TRAV23/DV6, TRAJ9)
CAASIGGNTGGFKTIF

SEQ ID NO: 373286 - protein, 18 aa, Homo sapiens
  CDR3 for beta chain variable domain of TCR clone 186643 (TRBV7-9, TRBJ2-7)
CASSLTTSGNRTWYEQYF

SEQ ID NO: 373287 - protein, 15 aa, Homo sapiens
  CDR3 for alpha chain variable domain of TCR clone 186644 (TRAV12-3, TRAJ49)
CAMAVTPNTGNQFYF

SEQ ID NO: 373288 - protein, 18 aa, Homo sapiens
  CDR3 for beta chain variable domain of TCR clone 186644 (TRBV4-1, TRBJ1-5)
CASSQDPRGQGLNQPQQF

SEQ ID NO: 373289 - protein, 13 aa, Homo sapiens
  CDR3 for alpha chain variable domain of TCR clone 186645 (TRAV12-3, TRAJ40)
CAMSARGTYKYMF

SEQ ID NO: 373290 - protein, 16 aa, Homo sapiens
  CDR3 for beta chain variable domain of TCR clone 186645 (TRBV20-1, TRBJ2-3)
CSGEAGLAGGQDTQYF

SEQ ID NO: 373291 - protein, 16 aa, Homo sapiens
  CDR3 for alpha chain variable domain of TCR clone 186646 (TRAV30, TRAJ24)
CGTEIVDADSWGKCQF

SEQ ID NO: 373292 - protein, 13 aa, Homo sapiens
  CDR3 for beta chain variable domain of TCR clone 186646 (TRBV7-6, TRBJ1-2)
CASSLVADYGYTF

SEQ ID NO: 373293 - protein, 11 aa, Homo sapiens
  CDR3 for alpha chain variable domain of TCR clone 186647 (TRAV12-3, TRAJ27)
CAIANAVKSTF

SEQ ID NO: 373294 - protein, 19 aa, Homo sapiens
  CDR3 for beta chain variable domain of TCR clone 186647 (TRBV6-1, TRBJ2-5)
CANSEQGIAGGLYQETQYF

SEQ ID NO: 373295 - protein, 13 aa, Homo sapiens
  CDR3 for alpha chain variable domain of TCR clone 186648 (TRAV17, TRAJ9)
CATFLTGGFKTVF

SEQ ID NO: 373296 - protein, 16 aa, Homo sapiens
  CDR3 for beta chain variable domain of TCR clone 186648 (TRBV5-7, TRBJ1-4)
CASSPSGGLKTEKLFF

SEQ ID NO: 373297 - protein, 13 aa, Homo sapiens
  CDR3 for alpha chain variable domain of TCR clone 186649 (TRAV26-1, TRAJ36)
CIVVGTGANNLFF

SEQ ID NO: 373298 - protein, 14 aa, Homo sapiens
  CDR3 for beta chain variable domain of TCR clone 186649 (TRBV7-2, TRBJ2-5)
CASSPRGSSETQYF

SEQ ID NO: 373299 - protein, 23 aa, Homo sapiens
  CDR3 for alpha chain variable domain of TCR clone 186650 (TRAV12-2, TRAJ48)
CSSETQPSDSATYLCASNEKLTF

SEQ ID NO: 373300 - protein, 20 aa, Homo sapiens
  CDR3 for beta chain variable domain of TCR clone 186650 (TRBV5-1, TRBJ2-5)
GSWCSVSAGCWGAGEKTQYF

SEQ ID NO: 373301 - protein, 13 aa, Homo sapiens
  CDR3 for alpha chain variable domain of TCR clone 186651 (TRAV12-2, TRAJ9)
CAGGNTGGFKTIF

SEQ ID NO: 373302 - protein, 13 aa, Homo sapiens
  CDR3 for beta chain variable domain of TCR clone 186651 (TRBV7-9, TRBJ2-7)
CASSFAGAYEQYF

SEQ ID NO: 373303 - protein, 16 aa, Homo sapiens
  CDR3 for alpha chain variable domain of TCR clone 186652 (TRAV8-3, TRAJ22)
CAVDLLGPGSARQLTF

SEQ ID NO: 373304 - protein, 14 aa, Homo sapiens
  CDR3 for beta chain variable domain of TCR clone 186652 (TRBV7-8, TRBJ2-3)
CASSFPDGQDTQYF

SEQ ID NO: 373305 - protein, 13 aa, Homo sapiens
  CDR3 for alpha chain variable domain of TCR clone 186653 (TRAV13-1, TRAJ39)
CSKYSNAGNMLTF

SEQ ID NO: 373306 - protein, 16 aa, Homo sapiens
  CDR3 for beta chain variable domain of TCR clone 186653 (TRBV20-1, TRBJ1-4)
CSAPGQGLSTNEKLFF

SEQ ID NO: 373307 - protein, 17 aa, Homo sapiens
  CDR3 for alpha chain variable domain of TCR clone 186654 (TRAV8-6, TRAJ58)
CAVSSWVGETSGASLTF

SEQ ID NO: 373308 - protein, 14 aa, Homo sapiens
  CDR3 for beta chain variable domain of TCR clone 186654 (TRBV4-2, TRBJ2-1)
CASGLDRAYNEQFF

SEQ ID NO: 373309 - protein, 14 aa, Homo sapiens
  CDR3 for alpha chain variable domain of TCR clone 186655 (TRAV2, TRAJ23)
CAVGLRNQGGKRIF

SEQ ID NO: 373310 - protein, 13 aa, Homo sapiens
  CDR3 for beta chain variable domain of TCR clone 186655 (TRBV12-4, TRBJ2-5)
CASSPGTEETQYF

SEQ ID NO: 373311 - protein, 12 aa, Homo sapiens
  CDR3 for alpha chain variable domain of TCR clone 186656 (TRAV17, TRAJ57)
CSTDGGSVKLVF

SEQ ID NO: 373312 - protein, 13 aa, Homo sapiens
  CDR3 for beta chain variable domain of TCR clone 186656 (TRBV7-9, TRBJ2-7)
CASSFAGAYEQYF

SEQ ID NO: 373313 - protein, 14 aa, Homo sapiens
  CDR3 for alpha chain variable domain of TCR clone 186657 (TRAV1-2, TRAJ16)
YAVNRFSDCQKLLF

SEQ ID NO: 373314 - protein, 14 aa, Homo sapiens
  CDR3 for beta chain variable domain of TCR clone 186657 (TRBV7-2, TRBJ1-1)
CASSFLTGTTEAFF

SEQ ID NO: 373315 - protein, 13 aa, Homo sapiens
  CDR3 for alpha chain variable domain of TCR clone 186658 (TRAV8-3, TRAJ36)
CAVGATGVNNLFF

SEQ ID NO: 373316 - protein, 13 aa, Homo sapiens
  CDR3 for beta chain variable domain of TCR clone 186658 (TRBV7-3, TRBJ1-1)
CASSPAGGLEAFF

SEQ ID NO: 373317 - protein, 12 aa, Homo sapiens
  CDR3 for alpha chain variable domain of TCR clone 186659 (TRAV36/DV7, TRAJ54)
CTVVRGAQKLVF

SEQ ID NO: 373318 - protein, 14 aa, Homo sapiens
  CDR3 for beta chain variable domain of TCR clone 186659 (TRBV7-3, TRBJ1-1)
CASSLKGGNTEAFF

SEQ ID NO: 373319 - protein, 13 aa, Homo sapiens
  CDR3 for alpha chain variable domain of TCR clone 186660 (TRAV17, TRAJ5)
CAPMDTGRRTLTF

SEQ ID NO: 373320 - protein, 16 aa, Homo sapiens
  CDR3 for beta chain variable domain of TCR clone 186660 (TRBV27, TRBJ2-7)
CADSSERRDSAYEQYF

SEQ ID NO: 373321 - protein, 12 aa, Homo sapiens
  CDR3 for alpha chain variable domain of TCR clone 186661 (TRAV12-1, TRAJ40)
CVVYSGTYKYIF

SEQ ID NO: 373322 - protein, 17 aa, Homo sapiens
  CDR3 for beta chain variable domain of TCR clone 186661 (TRBV7-3, TRBJ2-2)
CASSLSGTSGGTGELFF

SEQ ID NO: 373323 - protein, 17 aa, Homo sapiens
  CDR3 for alpha chain variable domain of TCR clone 186662 (TRAV3, TRAJ12)
CAVRDGGRMDSSYKLIF

SEQ ID NO: 373324 - protein, 13 aa, Homo sapiens
  CDR3 for beta chain variable domain of TCR clone 186662 (TRBV15, TRBJ1-6)
CATSGGLNSPLRF

SEQ ID NO: 373325 - protein, 14 aa, Homo sapiens
  CDR3 for alpha chain variable domain of TCR clone 186663 (TRAV12-3, TRAJ10)
SHLPLTGGGNKLTF

SEQ ID NO: 373326 - protein, 12 aa, Homo sapiens
  CDR3 for beta chain variable domain of TCR clone 186663 (TRBV18, TRBJ1-1)
CASSPGGTEAFF

SEQ ID NO: 373327 - protein, 13 aa, Homo sapiens
  CDR3 for alpha chain variable domain of TCR clone 186664 (TRAV13-2, TRAJ40)
CAEFTSGTYKYIF

SEQ ID NO: 373328 - protein, 15 aa, Homo sapiens
  CDR3 for beta chain variable domain of TCR clone 186664 (TRBV7-2, TRBJ2-5)
CASTSRSGFVETQYF

SEQ ID NO: 373329 - protein, 17 aa, Homo sapiens
  CDR3 for alpha chain variable domain of TCR clone 186665 (TRAV3, TRAJ6)
CAVRDGPSAGGSYLPTF

SEQ ID NO: 373330 - protein, 14 aa, Homo sapiens
  CDR3 for beta chain variable domain of TCR clone 186665 (TRBV7-2, TRBJ2-7)
CASSPKTSFYEQYF

SEQ ID NO: 373331 - protein, 13 aa, Homo sapiens
  CDR3 for alpha chain variable domain of TCR clone 186666 (TRAV35, TRAJ33)
CAGRHDSNYQLIW

SEQ ID NO: 373332 - protein, 15 aa, Homo sapiens
  CDR3 for beta chain variable domain of TCR clone 186666 (TRBV3-1, TRBJ2-1)
CASSQDYTPRGERFF

SEQ ID NO: 373333 - protein, 16 aa, Homo sapiens
  CDR3 for alpha chain variable domain of TCR clone 186667 (TRAV38-2/DV8, TRAJ57)
CAYRSVGQGGSEKLVF

SEQ ID NO: 373334 - protein, 18 aa, Homo sapiens
  CDR3 for beta chain variable domain of TCR clone 186667 (TRBV20-1, TRBJ2-6)
CSAETTPTHGSGANVLTF

SEQ ID NO: 373335 - protein, 16 aa, Homo sapiens
  CDR3 for alpha chain variable domain of TCR clone 186668 (TRAV12-1, TRAJ43)
CVVNPHRFGAGTRLTV

SEQ ID NO: 373336 - protein, 13 aa, Homo sapiens
  CDR3 for beta chain variable domain of TCR clone 186668 (TRBV20-1, TRBJ1-1)
CSDRGGGNTEAFF

SEQ ID NO: 373337 - protein, 14 aa, Homo sapiens
  CDR3 for alpha chain variable domain of TCR clone 186669 (TRAV16, TRAJ33)
CALPAMDSNYQLIW

SEQ ID NO: 373338 - protein, 15 aa, Homo sapiens
  CDR3 for beta chain variable domain of TCR clone 186669 (TRBV28, TRBJ2-7)
CASSLEAYPIYEQYF

SEQ ID NO: 373339 - protein, 14 aa, Homo sapiens
  CDR3 for alpha chain variable domain of TCR clone 186670 (TRAV13-1, TRAJ26)
CAASSAHYGQDFVF

SEQ ID NO: 373340 - protein, 17 aa, Homo sapiens
  CDR3 for beta chain variable domain of TCR clone 186670 (TRBV25-1, TRBJ2-5)
CASSRRGGRGGQEIQYF

SEQ ID NO: 373341 - protein, 13 aa, Homo sapiens
  CDR3 for alpha chain variable domain of TCR clone 186671 (TRAV12-3, TRAJ33)
CAMSVNSNYQLIW

SEQ ID NO: 373342 - protein, 14 aa, Homo sapiens
  CDR3 for beta chain variable domain of TCR clone 186671 (TRBV5-4, TRBJ1-1)
CASSLDSRRDEAFF

SEQ ID NO: 373343 - protein, 14 aa, Homo sapiens
  CDR3 for alpha chain variable domain of TCR clone 186672 (TRAV20, TRAJ42)
CAVQAGGSQGNLIL

SEQ ID NO: 373344 - protein, 14 aa, Homo sapiens
  CDR3 for beta chain variable domain of TCR clone 186672 (TRBV28, TRBJ1-2)
CASRIQGANYGYTF

SEQ ID NO: 373345 - protein, 14 aa, Homo sapiens
  CDR3 for alpha chain variable domain of TCR clone 186673 (TRAV1-2, TRAJ8)
CAVREDTGLHKLVF

SEQ ID NO: 373346 - protein, 12 aa, Homo sapiens
  CDR3 for beta chain variable domain of TCR clone 186673 (TRBV7-8, TRBJ2-7)
CASSLGDREQYF

SEQ ID NO: 373347 - protein, 15 aa, Homo sapiens
  CDR3 for alpha chain variable domain of TCR clone 186674 (TRAV25, TRAJ52)
CAGRPGGTSCGKLTF

SEQ ID NO: 373348 - protein, 14 aa, Homo sapiens
  CDR3 for beta chain variable domain of TCR clone 186674 (TRBV2, TRBJ2-7)
CASSLTSGGYEQYF

SEQ ID NO: 373349 - protein, 14 aa, Homo sapiens
  CDR3 for alpha chain variable domain of TCR clone 186675 (TRAV3, TRAJ9)
CAVRVNTGGFKTIF

SEQ ID NO: 373350 - protein, 15 aa, Homo sapiens
  CDR3 for beta chain variable domain of TCR clone 186675 (TRBV7-2, TRBJ2-1)
CASSLASGRVNEQFF

SEQ ID NO: 373351 - protein, 14 aa, Homo sapiens
  CDR3 for alpha chain variable domain of TCR clone 186676 (TRAV1-2, TRAJ16)
CAVNRFSDGQKPLF

SEQ ID NO: 373352 - protein, 15 aa, Homo sapiens
  CDR3 for beta chain variable domain of TCR clone 186676 (TRBV6-6, TRBJ2-7)
CASSYSYGGSYEQYF

SEQ ID NO: 373353 - protein, 14 aa, Homo sapiens
  CDR3 for alpha chain variable domain of TCR clone 186677 (TRAV12-1, TRAJ9)
CVVNRGTGVFKTIF

SEQ ID NO: 373354 - protein, 15 aa, Homo sapiens
  CDR3 for beta chain variable domain of TCR clone 186677 (TRBV5-7, TRBJ2-7)
CASSLGPGRGHEQYF

SEQ ID NO: 373355 - protein, 14 aa, Homo sapiens
  CDR3 for alpha chain variable domain of TCR clone 186678 (TRAV8-3, TRAJ4)
CAVGAAGGDNKLIF

SEQ ID NO: 373356 - protein, 16 aa, Homo sapiens
  CDR3 for beta chain variable domain of TCR clone 186678 (TRBV27, TRBJ2-2)
CASSLSGFWVTGELFF

SEQ ID NO: 373357 - protein, 10 aa, Homo sapiens
  CDR3 for alpha chain variable domain of TCR clone 186679 (TRAV20, TRAJ43)
CAVQADDMRF

SEQ ID NO: 373358 - protein, 14 aa, Homo sapiens
  CDR3 for beta chain variable domain of TCR clone 186679 (TRBV20-1, TRBJ2-5)
CSALVPGYQETQYF

SEQ ID NO: 373359 - protein, 13 aa, Homo sapiens
  CDR3 for alpha chain variable domain of TCR clone 186680 (TRAV2, TRAJ15)
CAVASQAGTALIF

SEQ ID NO: 373360 - protein, 13 aa, Homo sapiens
  CDR3 for beta chain variable domain of TCR clone 186680 (TRBV7-9, TRBJ2-5)
CASTPVGQETQYF

SEQ ID NO: 373361 - protein, 15 aa, Homo sapiens
  CDR3 for alpha chain variable domain of TCR clone 186681 (TRAV23/DV6, TRAJ18)
CAARYRGSTLGRLYF

SEQ ID NO: 373362 - protein, 13 aa, Homo sapiens
  CDR3 for beta chain variable domain of TCR clone 186681 (TRBV19, TRBJ1-2)
CASSVPGQDGYTF

SEQ ID NO: 373363 - protein, 15 aa, Homo sapiens
  CDR3 for alpha chain variable domain of TCR clone 186682 (TRAV26-1, TRAJ29)
CIVRVEGSGSKPLVF

SEQ ID NO: 373364 - protein, 14 aa, Homo sapiens
  CDR3 for beta chain variable domain of TCR clone 186682 (TRBV18, TRBJ2-5)
CASSPGVSQETQYF

SEQ ID NO: 373365 - protein, 13 aa, Homo sapiens
  CDR3 for alpha chain variable domain of TCR clone 186683 (TRAV12-3, TRAJ54)
CALVPQGAQKLVF

SEQ ID NO: 373366 - protein, 15 aa, Homo sapiens
  CDR3 for beta chain variable domain of TCR clone 186683 (TRBV4-1, TRBJ2-2)
CASSQDSRGTGELFC

SEQ ID NO: 373367 - protein, 13 aa, Homo sapiens
  CDR3 for alpha chain variable domain of TCR clone 186684 (TRAV8-1, TRAJ41)
CAVNPGSGYALNF

SEQ ID NO: 373368 - protein, 13 aa, Homo sapiens
  CDR3 for beta chain variable domain of TCR clone 186684 (TRBV7-9, TRBJ1-2)
CASSLKQNYGYTF

SEQ ID NO: 373369 - protein, 15 aa, Homo sapiens
  CDR3 for alpha chain variable domain of TCR clone 186685 (TRAV16, TRAJ16)
CALQGWGSDGQKLLF

SEQ ID NO: 373370 - protein, 15 aa, Homo sapiens
  CDR3 for beta chain variable domain of TCR clone 186685 (TRBV20-1, TRBJ2-7)
CSARDRVSGMDEQYF

SEQ ID NO: 373371 - protein, 14 aa, Homo sapiens
  CDR3 for alpha chain variable domain of TCR clone 186686 (TRAV8-2, TRAJ5)
CVVDMDTGRRALTF

SEQ ID NO: 373372 - protein, 13 aa, Homo sapiens
  CDR3 for beta chain variable domain of TCR clone 186686 (TRBV10-3, TRBJ2-7)
CASKLAVNYEQYF

SEQ ID NO: 373373 - protein, 16 aa, Homo sapiens
  CDR3 for alpha chain variable domain of TCR clone 186687 (TRAV30, TRAJ24)
CGTEIVDADSWGKFQF

SEQ ID NO: 373374 - protein, 15 aa, Homo sapiens
  CDR3 for beta chain variable domain of TCR clone 186687 (TRBV20-1, TRBJ2-4)
CSASDLTGGPNNQYF

SEQ ID NO: 373375 - protein, 14 aa, Homo sapiens
  CDR3 for alpha chain variable domain of TCR clone 186688 (TRAV26-1, TRAJ6)
CIVSPVGGSYIPTF

SEQ ID NO: 373376 - protein, 17 aa, Homo sapiens
  CDR3 for beta chain variable domain of TCR clone 186688 (TRBV7-8, TRBJ2-6)
CASSAGTGGAGANVLTF

SEQ ID NO: 373377 - protein, 15 aa, Homo sapiens
  CDR3 for alpha chain variable domain of TCR clone 186689 (TRAV21, TRAJ53)
CATLNSGGSNYKLTF

SEQ ID NO: 373378 - protein, 16 aa, Homo sapiens
  CDR3 for beta chain variable domain of TCR clone 186689 (TRBV24-1, TRBJ2-3)
CATSDAGTGATDTQYF

SEQ ID NO: 373379 - protein, 15 aa, Homo sapiens
  CDR3 for alpha chain variable domain of TCR clone 186690 (TRAV8-4, TRAJ48)
CTVSAAYFGNEKLTF

SEQ ID NO: 373380 - protein, 12 aa, Homo sapiens
  CDR3 for beta chain variable domain of TCR clone 186690 (TRBV3-1, TRBJ2-5)
CASSQRGETQYF

SEQ ID NO: 373381 - protein, 13 aa, Homo sapiens
  CDR3 for alpha chain variable domain of TCR clone 186691 (TRAV27, TRAJ58)
CAGAETSGSRLTF

SEQ ID NO: 373382 - protein, 12 aa, Homo sapiens
  CDR3 for beta chain variable domain of TCR clone 186691 (TRBV29-1, TRBJ2-3)
CSVTGGADTQYF

SEQ ID NO: 373383 - protein, 16 aa, Homo sapiens
  CDR3 for alpha chain variable domain of TCR clone 186692 (TRAV22, TRAJ45)
CAVERGKRGGADGLTF

SEQ ID NO: 373384 - protein, 12 aa, Homo sapiens
  CDR3 for beta chain variable domain of TCR clone 186692 (TRBV11-2, TRBJ2-2)
CASSLGGGELFF

SEQ ID NO: 373385 - protein, 18 aa, Homo sapiens
  CDR3 for alpha chain variable domain of TCR clone 186693 (TRAV26-1, TRAJ23)
CIVRVGLEVWNQGGKLIF

SEQ ID NO: 373386 - protein, 11 aa, Homo sapiens
  CDR3 for beta chain variable domain of TCR clone 186693 (TRBV7-2, TRBJ2-7)
CASILSGRSGL

SEQ ID NO: 373387 - protein, 12 aa, Homo sapiens
  CDR3 for alpha chain variable domain of TCR clone 186694 (TRAV8-6, TRAJ4)
CAVSDHPNKLIF

SEQ ID NO: 373388 - protein, 14 aa, Homo sapiens
  CDR3 for beta chain variable domain of TCR clone 186694 (TRBV19, TRBJ2-5)
CASSMTGQQETQYF

SEQ ID NO: 373389 - protein, 13 aa, Homo sapiens
  CDR3 for alpha chain variable domain of TCR clone 186695 (TRAV30, TRAJ24)
CGTVLTAGGNCSL

SEQ ID NO: 373390 - protein, 15 aa, Homo sapiens
  CDR3 for beta chain variable domain of TCR clone 186695 (TRBV25-1, TRBJ1-4)
CASSPGDITNEKLFF

SEQ ID NO: 373391 - protein, 11 aa, Homo sapiens
  CDR3 for alpha chain variable domain of TCR clone 186696 (TRAV12-3, TRAJ27)
CAMANAGKSTL

SEQ ID NO: 373392 - protein, 19 aa, Homo sapiens
  CDR3 for beta chain variable domain of TCR clone 186696 (TRBV7-2, TRBJ2-3)
CASSCLSRNWGGGTDTQYF

SEQ ID NO: 373393 - protein, 17 aa, Homo sapiens
  CDR3 for alpha chain variable domain of TCR clone 186697 (TRAV38-1, TRAJ45)
CAFMRSHSVGGADGLTF

SEQ ID NO: 373394 - protein, 15 aa, Homo sapiens
  CDR3 for beta chain variable domain of TCR clone 186697 (TRBV7-2, TRBJ2-3)
CASSLVVRGPDTQYF

SEQ ID NO: 373395 - protein, 13 aa, Homo sapiens
  CDR3 for alpha chain variable domain of TCR clone 186698 (TRAV2, TRAJ40)
CAVVTSGTYKYIF

SEQ ID NO: 373396 - protein, 14 aa, Homo sapiens
  CDR3 for beta chain variable domain of TCR clone 186698 (TRBV19, TRBJ2-1)
CASPTFVLSGKQLF

SEQ ID NO: 373397 - protein, 14 aa, Homo sapiens
  CDR3 for alpha chain variable domain of TCR clone 186699 (TRAV12-2, TRAJ11)
CAVRKNSGYSTLTF

SEQ ID NO: 373398 - protein, 16 aa, Homo sapiens
  CDR3 for beta chain variable domain of TCR clone 186699 (TRBV7-3, TRBJ2-2)
CASSLKRGTLSGELFF

SEQ ID NO: 373399 - protein, 14 aa, Homo sapiens
  CDR3 for alpha chain variable domain of TCR clone 186700 (TRAV12-2, TRAJ17)
CAVLFKAAGNELTF

SEQ ID NO: 373400 - protein, 17 aa, Homo sapiens
  CDR3 for beta chain variable domain of TCR clone 186700 (TRBV20-1, TRBJ2-2)
CSASGSGQGGLTGELFC

SEQ ID NO: 373401 - protein, 12 aa, Homo sapiens
  CDR3 for alpha chain variable domain of TCR clone 186701 (TRAV12-3, TRAJ17)
RAMTLTGNKLTF

SEQ ID NO: 373402 - protein, 16 aa, Homo sapiens
  CDR3 for beta chain variable domain of TCR clone 186701 (TRBV2, TRBJ2-1)
CASSVGGSLSYNEQFF

SEQ ID NO: 373403 - protein, 12 aa, Homo sapiens
  CDR3 for alpha chain variable domain of TCR clone 186702 (TRAV12-1, TRAJ40)
CVFYSGTYKYIF

SEQ ID NO: 373404 - protein, 11 aa, Homo sapiens
  CDR3 for beta chain variable domain of TCR clone 186702 (TRBV12-4, TRBJ2-2)
CASSLVGAPED

SEQ ID NO: 373405 - protein, 14 aa, Homo sapiens
  CDR3 for alpha chain variable domain of TCR clone 186703 (TRAV26-1, TRAJ34)
CIVRVAYNTDKLIF

SEQ ID NO: 373406 - protein, 15 aa, Homo sapiens
  CDR3 for beta chain variable domain of TCR clone 186703 (TRBV20-1, TRBJ2-7)
CSSRVPAAYFYERYF

SEQ ID NO: 373407 - protein, 15 aa, Homo sapiens
  CDR3 for alpha chain variable domain of TCR clone 186704 (TRAV26-1, TRAJ48)
CIARWSWFGNEKLTF

SEQ ID NO: 373408 - protein, 19 aa, Homo sapiens
  CDR3 for beta chain variable domain of TCR clone 186704 (TRBV25-1, TRBJ2-2)
CAILVYRVDRGRKTGELFF

SEQ ID NO: 373409 - protein, 13 aa, Homo sapiens
  CDR3 for alpha chain variable domain of TCR clone 186705 (TRAV12-1, TRAJ16)
CVVNTRNGQKLLF

SEQ ID NO: 373410 - protein, 11 aa, Homo sapiens
  CDR3 for beta chain variable domain of TCR clone 186705 (TRBV28, TRBJ2-7)
CASSLTYEQYF

SEQ ID NO: 373411 - protein, 16 aa, Homo sapiens
  CDR3 for alpha chain variable domain of TCR clone 186706 (TRAV30, TRAJ24)
CGTEVVDADSWGKFQF

SEQ ID NO: 373412 - protein, 11 aa, Homo sapiens
  CDR3 for beta chain variable domain of TCR clone 186706 (TRBV12-4, TRBJ2-3)
CASTATDTQYF

SEQ ID NO: 373413 - protein, 14 aa, Homo sapiens
  CDR3 for alpha chain variable domain of TCR clone 186707 (TRAV4, TRAJ26)
CLVGPHNYGQNFVF

SEQ ID NO: 373414 - protein, 15 aa, Homo sapiens
  CDR3 for beta chain variable domain of TCR clone 186707 (TRBV28, TRBJ2-3)
CASSPDRQGANTQYF

SEQ ID NO: 373415 - protein, 18 aa, Homo sapiens
  CDR3 for alpha chain variable domain of TCR clone 186708 (TRAV21, TRAJ52)
CAVRPSPAGGTSYGEPTF

SEQ ID NO: 373416 - protein, 17 aa, Homo sapiens
  CDR3 for beta chain variable domain of TCR clone 186708 (TRBV13, TRBJ2-3)
CASSLSRVAGGRNTQYF

SEQ ID NO: 373417 - protein, 12 aa, Homo sapiens
  CDR3 for alpha chain variable domain of TCR clone 186709 (TRAV13-2, TRAJ23)
CAERHRGGKLIF

SEQ ID NO: 373418 - protein, 13 aa, Homo sapiens
  CDR3 for beta chain variable domain of TCR clone 186709 (TRBV7-3, TRBJ2-2)
CASSLWSVGELFF

SEQ ID NO: 373419 - protein, 13 aa, Homo sapiens
  CDR3 for alpha chain variable domain of TCR clone 186710 (TRAV1-2, TRAJ33)
CAVSEDSNYQLIW

SEQ ID NO: 373420 - protein, 20 aa, Homo sapiens
  CDR3 for beta chain variable domain of TCR clone 186710 (TRBV4-2, TRBJ2-7)
CASSQDGVERLRAVLRAGHQ

SEQ ID NO: 373421 - protein, 13 aa, Homo sapiens
  CDR3 for alpha chain variable domain of TCR clone 186711 (TRAV1-1, TRAJ31)
CASYLNNNARLLF

SEQ ID NO: 373422 - protein, 13 aa, Homo sapiens
  CDR3 for beta chain variable domain of TCR clone 186711 (TRBV15, TRBJ1-6)
CATSGGLNSPLHF

SEQ ID NO: 373423 - protein, 15 aa, Homo sapiens
  CDR3 for alpha chain variable domain of TCR clone 186712 (TRAV26-1, TRAJ44)
CIVRANIGTARKLTF

SEQ ID NO: 373424 - protein, 12 aa, Homo sapiens
  CDR3 for beta chain variable domain of TCR clone 186712 (TRBV2, TRBJ2-1)
GRGLPSYNEQFF

SEQ ID NO: 373425 - protein, 15 aa, Homo sapiens
  CDR3 for alpha chain variable domain of TCR clone 186713 (TRAV38-1, TRAJ37)
CAFIFGSGNTGKLIF

SEQ ID NO: 373426 - protein, 12 aa, Homo sapiens
  CDR3 for beta chain variable domain of TCR clone 186713 (TRBV7-9, TRBJ2-7)
CPSSLEGYEQYF

SEQ ID NO: 373427 - protein, 15 aa, Homo sapiens
  CDR3 for alpha chain variable domain of TCR clone 186714 (TRAV12-3, TRAJ6)
CAISPASGGSYIPTF

SEQ ID NO: 373428 - protein, 16 aa, Homo sapiens
  CDR3 for beta chain variable domain of TCR clone 186714 (TRBV10-3, TRBJ1-2)
CAISDKVSGPFYGYTF

SEQ ID NO: 373429 - protein, 15 aa, Homo sapiens
  CDR3 for alpha chain variable domain of TCR clone 186715 (TRAV13-1, TRAJ32)
CAASNGWGCYKQAHL

SEQ ID NO: 373430 - protein, 15 aa, Homo sapiens
  CDR3 for beta chain variable domain of TCR clone 186715 (TRBV20-1, TRBJ2-7)
CSARDRVSGMDEQYF

SEQ ID NO: 373431 - protein, 14 aa, Homo sapiens
  CDR3 for alpha chain variable domain of TCR clone 186716 (TRAV12-3, TRAJ10)
SHLPLTGGGKKINF

SEQ ID NO: 373432 - protein, 12 aa, Homo sapiens
  CDR3 for beta chain variable domain of TCR clone 186716 (TRBV7-9, TRBJ2-7)
CASSIKREEQYF

SEQ ID NO: 373433 - protein, 16 aa, Homo sapiens
  CDR3 for alpha chain variable domain of TCR clone 186717 (TRAV13-1, TRAJ48)
CAASIFGNFGNEKLTF

SEQ ID NO: 373434 - protein, 13 aa, Homo sapiens
  CDR3 for beta chain variable domain of TCR clone 186717 (TRBV23-1, TRBJ1-4)
CASRGKFNEKLFF

SEQ ID NO: 373435 - protein, 12 aa, Homo sapiens
  CDR3 for alpha chain variable domain of TCR clone 186718 (TRAV22, TRAJ29)
CAPPSGNTPLVF

SEQ ID NO: 373436 - protein, 14 aa, Homo sapiens
  CDR3 for beta chain variable domain of TCR clone 186718 (TRBV12-5, TRBJ2-5)
CASGSRTHQETQYF

SEQ ID NO: 373437 - protein, 15 aa, Homo sapiens
  CDR3 for alpha chain variable domain of TCR clone 186719 (TRAV17, TRAJ22)
CATVAPSGSARQLTF

SEQ ID NO: 373438 - protein, 16 aa, Homo sapiens
  CDR3 for beta chain variable domain of TCR clone 186719 (TRBV10-3, TRBJ2-7)
CAISADFADRPYEQCF

SEQ ID NO: 373439 - protein, 13 aa, Homo sapiens
  CDR3 for alpha chain variable domain of TCR clone 186720 (TRAV17, TRAJ54)
CATDAGGAQKLVF

SEQ ID NO: 373440 - protein, 17 aa, Homo sapiens
  CDR3 for beta chain variable domain of TCR clone 186720 (TRBV25-1, TRBJ1-6)
CASSEYIGERGNSPLHY

SEQ ID NO: 373441 - protein, 11 aa, Homo sapiens
  CDR3 for alpha chain variable domain of TCR clone 186721 (TRAV12-1, TRAJ30)
CVVNGQDKIII

SEQ ID NO: 373442 - protein, 12 aa, Homo sapiens
  CDR3 for beta chain variable domain of TCR clone 186721 (TRBV27, TRBJ2-2)
CASKLFTGELFF

SEQ ID NO: 373443 - protein, 16 aa, Homo sapiens
  CDR3 for alpha chain variable domain of TCR clone 186722 (TRAV12-3, TRAJ53)
CAMSPGSGGSNNKLTF

SEQ ID NO: 373444 - protein, 15 aa, Homo sapiens
  CDR3 for beta chain variable domain of TCR clone 186722 (TRBV18, TRBJ2-7)
CASSPSSTGNYEQYF

SEQ ID NO: 373445 - protein, 14 aa, Homo sapiens
  CDR3 for alpha chain variable domain of TCR clone 186723 (TRAV25, TRAJ27)
CAGEHLTNAGKSTF

SEQ ID NO: 373446 - protein, 16 aa, Homo sapiens
  CDR3 for beta chain variable domain of TCR clone 186723 (TRBV2, TRBJ1-1)
CASSPPNRGMNTEAFF

SEQ ID NO: 373447 - protein, 14 aa, Homo sapiens
  CDR3 for alpha chain variable domain of TCR clone 186724 (TRAV1-2, TRAJ8)
CAAREDKGFQKLVF

SEQ ID NO: 373448 - protein, 13 aa, Homo sapiens
  CDR3 for beta chain variable domain of TCR clone 186724 (TRBV6-4, TRBJ2-3)
CASSVSWADTQYF

SEQ ID NO: 373449 - protein, 12 aa, Homo sapiens
  CDR3 for alpha chain variable domain of TCR clone 186725 (TRAV12-1, TRAJ40)
CVVYSGTYKYIF

SEQ ID NO: 373450 - protein, 14 aa, Homo sapiens
  CDR3 for beta chain variable domain of TCR clone 186725 (TRBV7-9, TRBJ2-5)
CASSLDTALETQYF

SEQ ID NO: 373451 - protein, 13 aa, Homo sapiens
  CDR3 for alpha chain variable domain of TCR clone 186726 (TRAV17, TRAJ22)
CAHHSCSARQLTF

SEQ ID NO: 373452 - protein, 16 aa, Homo sapiens
  CDR3 for beta chain variable domain of TCR clone 186726 (TRBV4-1, TRBJ1-2)
CASSQDAGQVLYGYTF

SEQ ID NO: 373453 - protein, 15 aa, Homo sapiens
  CDR3 for alpha chain variable domain of TCR clone 186727 (TRAV26-1, TRAJ42)
CIVRVKGGSQGNLIC

SEQ ID NO: 373454 - protein, 14 aa, Homo sapiens
  CDR3 for beta chain variable domain of TCR clone 186727 (TRBV19, TRBJ2-2)
CATTGHANTGGLFF

SEQ ID NO: 373455 - protein, 14 aa, Homo sapiens
  CDR3 for alpha chain variable domain of TCR clone 186728 (TRAV10, TRAJ15)
CVVSASQAGTALTF

SEQ ID NO: 373456 - protein, 16 aa, Homo sapiens
  CDR3 for beta chain variable domain of TCR clone 186728 (TRBV2, TRBJ2-5)
CASSTLRDRDRETQYF

SEQ ID NO: 373457 - protein, 13 aa, Homo sapiens
  CDR3 for alpha chain variable domain of TCR clone 186729 (TRAV39, TRAJ48)
CAAVNFGNEKLTF

SEQ ID NO: 373458 - protein, 16 aa, Homo sapiens
  CDR3 for beta chain variable domain of TCR clone 186729 (TRBV5-5, TRBJ2-5)
CASSYFGETVLRARHA

SEQ ID NO: 373459 - protein, 22 aa, Homo sapiens
  CDR3 for alpha chain variable domain of TCR clone 186730 (TRAV8-3, TRAJ8)
CAVGPNEHRLSETCIWNWHPTS

SEQ ID NO: 373460 - protein, 15 aa, Homo sapiens
  CDR3 for beta chain variable domain of TCR clone 186730 (TRBV6-3, TRBJ2-7)
CASSSPGTVFYEQYF

SEQ ID NO: 373461 - protein, 20 aa, Homo sapiens
  CDR3 for alpha chain variable domain of TCR clone 186731 (TRAV21, TRAJ57)
SLVTQPPTSSLQGGSEKLVF

SEQ ID NO: 373462 - protein, 14 aa, Homo sapiens
  CDR3 for beta chain variable domain of TCR clone 186731 (TRBV5-1, TRBJ2-3)
CASSDRGSTDTQYF

SEQ ID NO: 373463 - protein, 13 aa, Homo sapiens
  CDR3 for alpha chain variable domain of TCR clone 186732 (TRAV17, TRAJ54)
CATVIQGAQKLLF

SEQ ID NO: 373464 - protein, 15 aa, Homo sapiens
  CDR3 for beta chain variable domain of TCR clone 186732 (TRBV13, TRBJ2-1)
CASSLLSGLNNEQFF

SEQ ID NO: 373465 - protein, 15 aa, Homo sapiens
  CDR3 for alpha chain variable domain of TCR clone 186733 (TRAV8-3, TRAJ45)
CASSYSGGGADGVTF

SEQ ID NO: 373466 - protein, 12 aa, Homo sapiens
  CDR3 for beta chain variable domain of TCR clone 186733 (TRBV29-1, TRBJ2-3)
CSVTGGADTQYF

SEQ ID NO: 373467 - protein, 15 aa, Homo sapiens
  CDR3 for alpha chain variable domain of TCR clone 186734 (TRAV38-1, TRAJ37)
CAFIFGSGNTGKLIL

SEQ ID NO: 373468 - protein, 12 aa, Homo sapiens
  CDR3 for beta chain variable domain of TCR clone 186734 (TRBV7-9, TRBJ2-7)
CASSLGGYEQYF

SEQ ID NO: 373469 - protein, 16 aa, Homo sapiens
  CDR3 for alpha chain variable domain of TCR clone 186735 (TRAV3, TRAJ18)
CAVRDGRGSTLGRLSF

SEQ ID NO: 373470 - protein, 15 aa, Homo sapiens
  CDR3 for beta chain variable domain of TCR clone 186735 (TRBV7-9, TRBJ1-6)
CGSSSPGRGNSPQHF

SEQ ID NO: 373471 - protein, 13 aa, Homo sapiens
  CDR3 for alpha chain variable domain of TCR clone 186736 (TRAV13-2, TRAJ48)
CAEMDFGNEKLTF

SEQ ID NO: 373472 - protein, 15 aa, Homo sapiens
  CDR3 for beta chain variable domain of TCR clone 186736 (TRBV10-3, TRBJ1-2)
CAITVTGGWDYGYTF

SEQ ID NO: 373473 - protein, 13 aa, Homo sapiens
  CDR3 for alpha chain variable domain of TCR clone 186737 (TRAV21, TRAJ45)
CAVMGGGADGLTF

SEQ ID NO: 373474 - protein, 12 aa, Homo sapiens
  CDR3 for beta chain variable domain of TCR clone 186737 (TRBV2, TRBJ2-3)
CASSGRFDTQYF

SEQ ID NO: 373475 - protein, 13 aa, Homo sapiens
  CDR3 for alpha chain variable domain of TCR clone 186738 (TRAV30, TRAJ6)
CGTEAGGSYIPTF

SEQ ID NO: 373476 - protein, 14 aa, Homo sapiens
  CDR3 for beta chain variable domain of TCR clone 186738 (TRBV12-5, TRBJ2-5)
CASGSRTHQETQYF

SEQ ID NO: 373477 - protein, 16 aa, Homo sapiens
  CDR3 for alpha chain variable domain of TCR clone 186739 (TRAV3, TRAJ37)
CAVRGKGSGNTGKLIF

SEQ ID NO: 373478 - protein, 14 aa, Homo sapiens
  CDR3 for beta chain variable domain of TCR clone 186739 (TRBV4-1, TRBJ2-7)
CASSPVAGGDEQYF

SEQ ID NO: 373479 - protein, 11 aa, Homo sapiens
  CDR3 for alpha chain variable domain of TCR clone 186740 (TRAV3, TRAJ21)
RAVGNLNKFYF

SEQ ID NO: 373480 - protein, 16 aa, Homo sapiens
  CDR3 for beta chain variable domain of TCR clone 186740 (TRBV19, TRBJ2-1)
CASSKAGPSSYNEQFF

SEQ ID NO: 373481 - protein, 15 aa, Homo sapiens
  CDR3 for alpha chain variable domain of TCR clone 186741 (TRAV21, TRAJ38)
CAVRQDAGNNRKLIW

SEQ ID NO: 373482 - protein, 16 aa, Homo sapiens
  CDR3 for beta chain variable domain of TCR clone 186741 (TRBV4-2, TRBJ1-1)
CASRPLDGGGGTEAFF

SEQ ID NO: 373483 - protein, 14 aa, Homo sapiens
  CDR3 for alpha chain variable domain of TCR clone 186742 (TRAV2, TRAJ9)
CAVEDRSGGFKTIF

SEQ ID NO: 373484 - protein, 16 aa, Homo sapiens
  CDR3 for beta chain variable domain of TCR clone 186742 (TRBV4-1, TRBJ2-6)
CASSQVGDPGANVLTF

SEQ ID NO: 373485 - protein, 14 aa, Homo sapiens
  CDR3 for alpha chain variable domain of TCR clone 186743 (TRAV1-2, TRAJ16)
CAVNWFSDGQKLLF

SEQ ID NO: 373486 - protein, 15 aa, Homo sapiens
  CDR3 for beta chain variable domain of TCR clone 186743 (TRBV6-3, TRBJ2-7)
CASSSPGTVFYEQYF

SEQ ID NO: 373487 - protein, 17 aa, Homo sapiens
  CDR3 for alpha chain variable domain of TCR clone 186744 (TRAV3, TRAJ12)
CAVRDGGRMDSSYKLIL

SEQ ID NO: 373488 - protein, 15 aa, Homo sapiens
  CDR3 for beta chain variable domain of TCR clone 186744 (TRBV4-1, TRBJ1-4)
CASSDTGGTNEKLFF

SEQ ID NO: 373489 - protein, 13 aa, Homo sapiens
  CDR3 for alpha chain variable domain of TCR clone 186745 (TRAV20, TRAJ48)
CAVQGVGNEKSTF

SEQ ID NO: 373490 - protein, 19 aa, Homo sapiens
  CDR3 for beta chain variable domain of TCR clone 186745 (TRBV2, TRBJ2-2)
WASSQPGLAGGGNTGELFF

SEQ ID NO: 373491 - protein, 13 aa, Homo sapiens
  CDR3 for alpha chain variable domain of TCR clone 186746 (TRAV36/DV7, TRAJ37)
CAAFSSNTGKLIF

SEQ ID NO: 373492 - protein, 12 aa, Homo sapiens
  CDR3 for beta chain variable domain of TCR clone 186746 (TRBV11-2, TRBJ2-2)
CASSLGGGELFF

SEQ ID NO: 373493 - protein, 12 aa, Homo sapiens
  CDR3 for alpha chain variable domain of TCR clone 186747 (TRAV13-1, TRAJ5)
CAVDTGRRALTF

SEQ ID NO: 373494 - protein, 12 aa, Homo sapiens
  CDR3 for beta chain variable domain of TCR clone 186747 (TRBV28, TRBJ2-1)
CASSFYRHEQFV

SEQ ID NO: 373495 - protein, 14 aa, Homo sapiens
  CDR3 for alpha chain variable domain of TCR clone 186748 (TRAV8-2, TRAJ4)
CVVSPSGGYNKLIF

SEQ ID NO: 373496 - protein, 17 aa, Homo sapiens
  CDR3 for beta chain variable domain of TCR clone 186748 (TRBV7-3, TRBJ2-3)
CASSLMKRMRGADTQYF

SEQ ID NO: 373497 - protein, 12 aa, Homo sapiens
  CDR3 for alpha chain variable domain of TCR clone 186749 (TRAV12-3, TRAJ17)
CAMTLTGNKLTF

SEQ ID NO: 373498 - protein, 15 aa, Homo sapiens
  CDR3 for beta chain variable domain of TCR clone 186749 (TRBV5-7, TRBJ2-7)
CASSPYFEGAYEQYF

SEQ ID NO: 373499 - protein, 14 aa, Homo sapiens
  CDR3 for alpha chain variable domain of TCR clone 186750 (TRAV12-3, TRAJ5)
CAMTWDTGRRALTF

SEQ ID NO: 373500 - protein, 14 aa, Homo sapiens
  CDR3 for beta chain variable domain of TCR clone 186750 (TRBV10-2, TRBJ1-5)
CASSSTGRNQPQQF

SEQ ID NO: 373501 - protein, 14 aa, Homo sapiens
  CDR3 for alpha chain variable domain of TCR clone 186751 (TRAV38-1, TRAJ27)
CAFIHNTNAGKSTF

SEQ ID NO: 373502 - protein, 13 aa, Homo sapiens
  CDR3 for beta chain variable domain of TCR clone 186751 (TRBV29-1, TRBJ2-2)
CSTTGVNTGELFF

SEQ ID NO: 373503 - protein, 14 aa, Homo sapiens
  CDR3 for alpha chain variable domain of TCR clone 186752 (TRAV13-1, TRAJ35)
CAASKGGFGNVLHR

SEQ ID NO: 373504 - protein, 15 aa, Homo sapiens
  CDR3 for beta chain variable domain of TCR clone 186752 (TRBV7-9, TRBJ1-6)
CASSSPGRGNSPLHF

SEQ ID NO: 373505 - protein, 14 aa, Homo sapiens
  CDR3 for alpha chain variable domain of TCR clone 186753 (TRAV9-2, TRAJ39)
CALYIYNAGNMLTF

SEQ ID NO: 373506 - protein, 17 aa, Homo sapiens
  CDR3 for beta chain variable domain of TCR clone 186753 (TRBV10-1, TRBJ2-1)
CASSPQRAGGPFNEQFV

SEQ ID NO: 373507 - protein, 11 aa, Homo sapiens
  CDR3 for alpha chain variable domain of TCR clone 186754 (TRAV13-1, TRAJ57)
QGQGGSEKLVF

SEQ ID NO: 373508 - protein, 15 aa, Homo sapiens
  CDR3 for beta chain variable domain of TCR clone 186754 (TRBV7-9, TRBJ1-4)
CASSRTGGFNEKLFF

SEQ ID NO: 373509 - protein, 13 aa, Homo sapiens
  CDR3 for alpha chain variable domain of TCR clone 186755 (TRAV2, TRAJ40)
CAVVTSGTYKYIF

SEQ ID NO: 373510 - protein, 14 aa, Homo sapiens
  CDR3 for beta chain variable domain of TCR clone 186755 (TRBV28, TRBJ2-1)
CASSRPGLRDEQFF

SEQ ID NO: 373511 - protein, 14 aa, Homo sapiens
  CDR3 for alpha chain variable domain of TCR clone 186756 (TRAV1-2, TRAJ16)
CAVNRFSDGQKLLF

SEQ ID NO: 373512 - protein, 12 aa, Homo sapiens
  CDR3 for beta chain variable domain of TCR clone 186756 (TRBV20-1, TRBJ1-5)
CSAAGWDKPQHF

SEQ ID NO: 373513 - protein, 12 aa, Homo sapiens
  CDR3 for alpha chain variable domain of TCR clone 186757 (TRAV12-1, TRAJ6)
CVVSERSYIPTF

SEQ ID NO: 373514 - protein, 16 aa, Homo sapiens
  CDR3 for beta chain variable domain of TCR clone 186757 (TRBV7-3, TRBJ2-1)
CISVPAAYGRAGAQFF

SEQ ID NO: 373515 - protein, 16 aa, Homo sapiens
  CDR3 for alpha chain variable domain of TCR clone 186758 (TRAV27, TRAJ13)
CAGAKSDSGGYQKVTF

SEQ ID NO: 373516 - protein, 13 aa, Homo sapiens
  CDR3 for beta chain variable domain of TCR clone 186758 (TRBV27, TRBJ2-7)
CASSLTTGYEQYF

SEQ ID NO: 373517 - protein, 16 aa, Homo sapiens
  CDR3 for alpha chain variable domain of TCR clone 186759 (TRAV13-1, TRAJ17)
CAASKGVKAEGNKLTF

SEQ ID NO: 373518 - protein, 15 aa, Homo sapiens
  CDR3 for beta chain variable domain of TCR clone 186759 (TRBV20-1, TRBJ1-5)
CSAREGGYSNQPQHF

SEQ ID NO: 373519 - protein, 12 aa, Homo sapiens
  CDR3 for alpha chain variable domain of TCR clone 186760 (TRAV12-3, TRAJ17)
CAMTLTGNKLIF

SEQ ID NO: 373520 - protein, 12 aa, Homo sapiens
  CDR3 for beta chain variable domain of TCR clone 186760 (TRBV11-2, TRBJ2-7)
CASSLPTYEQYF

SEQ ID NO: 373521 - protein, 21 aa, Homo sapiens
  CDR3 for alpha chain variable domain of TCR clone 186761 (TRAV2, TRAJ20)
AAHPPGAGGRCCCLPRLKLSF

SEQ ID NO: 373522 - protein, 15 aa, Homo sapiens
  CDR3 for beta chain variable domain of TCR clone 186761 (TRBV20-1, TRBJ2-5)
CSAEGTGGLQETQYF

SEQ ID NO: 373523 - protein, 16 aa, Homo sapiens
  CDR3 for alpha chain variable domain of TCR clone 186762 (TRAV26-2, TRAJ45)
CTTASPIGGGADGLTF

SEQ ID NO: 373524 - protein, 20 aa, Homo sapiens
  CDR3 for beta chain variable domain of TCR clone 186762 (TRBV28, TRBJ2-1)
CASTPIGRSLGLAGGNEQFF

SEQ ID NO: 373525 - protein, 13 aa, Homo sapiens
  CDR3 for alpha chain variable domain of TCR clone 186763 (TRAV8-3, TRAJ43)
CAVGPDHNNDMRF

SEQ ID NO: 373526 - protein, 14 aa, Homo sapiens
  CDR3 for beta chain variable domain of TCR clone 186763 (TRBV19, TRBJ2-1)
CASPTFVLSGEQFF

SEQ ID NO: 373527 - protein, 15 aa, Homo sapiens
  CDR3 for alpha chain variable domain of TCR clone 186764 (TRAV16, TRAJ20)
CALKGGLRADYKLRF

SEQ ID NO: 373528 - protein, 16 aa, Homo sapiens
  CDR3 for beta chain variable domain of TCR clone 186764 (TRBV11-3, TRBJ2-2)
CASSSRTSPGTGELFF

SEQ ID NO: 373529 - protein, 12 aa, Homo sapiens
  CDR3 for alpha chain variable domain of TCR clone 186765 (TRAV27, TRAJ21)
CAGVRQLQKILL

SEQ ID NO: 373530 - protein, 14 aa, Homo sapiens
  CDR3 for beta chain variable domain of TCR clone 186765 (TRBV7-9, TRBJ1-4)
CASSLEGQSEKLFF

SEQ ID NO: 373531 - protein, 17 aa, Homo sapiens
  CDR3 for alpha chain variable domain of TCR clone 186766 (TRAV8-3, TRAJ34)
CAIPGKLIFGTGTRLQV

SEQ ID NO: 373532 - protein, 16 aa, Homo sapiens
  CDR3 for beta chain variable domain of TCR clone 186766 (TRBV29-1, TRBJ2-7)
CSVEVVGTSGSYEQYF

SEQ ID NO: 373533 - protein, 16 aa, Homo sapiens
  CDR3 for alpha chain variable domain of TCR clone 186767 (TRAV3, TRAJ37)
CAVRPHGSGNTGKLIF

SEQ ID NO: 373534 - protein, 14 aa, Homo sapiens
  CDR3 for beta chain variable domain of TCR clone 186767 (TRBV20-1, TRBJ2-1)
CSARGGSSYSEQFF

SEQ ID NO: 373535 - protein, 15 aa, Homo sapiens
  CDR3 for alpha chain variable domain of TCR clone 186768 (TRAV12-2, TRAJ53)
CAVNGGGGSNYKLTS

SEQ ID NO: 373536 - protein, 14 aa, Homo sapiens
  CDR3 for beta chain variable domain of TCR clone 186768 (TRBV7-3, TRBJ1-1)
CASSLKGGNTEAFF

SEQ ID NO: 373537 - protein, 17 aa, Homo sapiens
  CDR3 for alpha chain variable domain of TCR clone 186769 (TRAV4, )
CLVDIQNPDPAVYQLRD

SEQ ID NO: 373538 - protein, 17 aa, Homo sapiens
  CDR3 for beta chain variable domain of TCR clone 186769 (TRBV20-1, TRBJ2-1)
CSASSSGLAGSYNEQFF

SEQ ID NO: 373539 - protein, 12 aa, Homo sapiens
  CDR3 for alpha chain variable domain of TCR clone 186770 (TRAV13-1, TRAJ21)
CAAKEGFNKFYF

SEQ ID NO: 373540 - protein, 16 aa, Homo sapiens
  CDR3 for beta chain variable domain of TCR clone 186770 (TRBV15, TRBJ2-1)
CATSRKTPGLRNEQFF

SEQ ID NO: 373541 - protein, 13 aa, Homo sapiens
  CDR3 for alpha chain variable domain of TCR clone 186771 (TRAV12-3, TRAJ6)
CANPSGGSYIPTF

SEQ ID NO: 373542 - protein, 14 aa, Homo sapiens
  CDR3 for beta chain variable domain of TCR clone 186771 (TRBV19, TRBJ1-1)
CAISRDRDATEAFF

SEQ ID NO: 373543 - protein, 15 aa, Homo sapiens
  CDR3 for alpha chain variable domain of TCR clone 186772 (TRAV12-1, TRAJ44)
CVADLPTGTASKLTF

SEQ ID NO: 373544 - protein, 13 aa, Homo sapiens
  CDR3 for beta chain variable domain of TCR clone 186772 (TRBV6-5, TRBJ2-5)
CASSPQGGVTQYF

SEQ ID NO: 373545 - protein, 13 aa, Homo sapiens
  CDR3 for alpha chain variable domain of TCR clone 186773 (TRAV27, TRAJ42)
CAGARGSQGNRIF

SEQ ID NO: 373546 - protein, 15 aa, Homo sapiens
  CDR3 for beta chain variable domain of TCR clone 186773 (TRBV10-3, TRBJ2-2)
CAIRTDREDTGELFF

SEQ ID NO: 373547 - protein, 17 aa, Homo sapiens
  CDR3 for alpha chain variable domain of TCR clone 186774 (TRAV3, TRAJ6)
CAVRDGPRAGGSYIPTF

SEQ ID NO: 373548 - protein, 10 aa, Homo sapiens
  CDR3 for beta chain variable domain of TCR clone 186774 (TRBV12-4, TRBJ2-5)
CASSRETQYF

SEQ ID NO: 373549 - protein, 15 aa, Homo sapiens
  CDR3 for alpha chain variable domain of TCR clone 186775 (TRAV27, TRAJ38)
CAARRNAGTNRKLLW

SEQ ID NO: 373550 - protein, 13 aa, Homo sapiens
  CDR3 for beta chain variable domain of TCR clone 186775 (TRBV12-5, TRBJ2-3)
CASGDRQSDTQYF

SEQ ID NO: 373551 - protein, 14 aa, Homo sapiens
  CDR3 for alpha chain variable domain of TCR clone 186776 (TRAV2, TRAJ20)
CAVDLRKHDYKLSF

SEQ ID NO: 373552 - protein, 11 aa, Homo sapiens
  CDR3 for beta chain variable domain of TCR clone 186776 (TRBV19, TRBJ2-5)
CASSIKETQYF

SEQ ID NO: 373553 - protein, 16 aa, Homo sapiens
  CDR3 for alpha chain variable domain of TCR clone 186777 (TRAV30, TRAJ24)
CGTEIVDADSWGKFQF

SEQ ID NO: 373554 - protein, 13 aa, Homo sapiens
  CDR3 for beta chain variable domain of TCR clone 186777 (TRBV7-2, IGHJ2)
CASSLAGLEKLFF

SEQ ID NO: 373555 - protein, 15 aa, Homo sapiens
  CDR3 for alpha chain variable domain of TCR clone 186778 (TRAV21, TRAJ32)
CAAAPYGGATNKRIF

SEQ ID NO: 373556 - protein, 17 aa, Homo sapiens
  CDR3 for beta chain variable domain of TCR clone 186778 (TRBV18, TRBJ2-3)
CASSPFGDGGFTDTQYF

SEQ ID NO: 373557 - protein, 13 aa, Homo sapiens
  CDR3 for alpha chain variable domain of TCR clone 186779 (TRAV8-4, TRAJ30)
CAVSVNRDDKIIF

SEQ ID NO: 373558 - protein, 12 aa, Homo sapiens
  CDR3 for beta chain variable domain of TCR clone 186779 (TRBV3-1, TRBJ2-2)
CQPGQRLRELFF

SEQ ID NO: 373559 - protein, 11 aa, Homo sapiens
  CDR3 for alpha chain variable domain of TCR clone 186780 (TRAV2, TRAJ13)
CASGGYQKVTF

SEQ ID NO: 373560 - protein, 14 aa, Homo sapiens
  CDR3 for beta chain variable domain of TCR clone 186780 (TRBV7-2, TRBJ2-7)
CASSPKTSLYEQYF

SEQ ID NO: 373561 - protein, 14 aa, Homo sapiens
  CDR3 for alpha chain variable domain of TCR clone 186781 (TRAV12-2, TRAJ13)
CAVKQTGGYQKVTF

SEQ ID NO: 373562 - protein, 17 aa, Homo sapiens
  CDR3 for beta chain variable domain of TCR clone 186781 (TRBV13, TRBJ2-3)
CASSLSRVAGGRNTQYF

SEQ ID NO: 373563 - protein, 13 aa, Homo sapiens
  CDR3 for alpha chain variable domain of TCR clone 186782 (TRAV17, TRAJ20)
CAPLGVDDYKLSF

SEQ ID NO: 373564 - protein, 12 aa, Homo sapiens
  CDR3 for beta chain variable domain of TCR clone 186782 (TRBV29-1, TRBJ2-3)
CSVTGGADAQYF

SEQ ID NO: 373565 - protein, 14 aa, Homo sapiens
  CDR3 for alpha chain variable domain of TCR clone 186783 (TRAV9-2, TRAJ11)
CALSDLGGYSTLTF

SEQ ID NO: 373566 - protein, 13 aa, Homo sapiens
  CDR3 for beta chain variable domain of TCR clone 186783 (TRBV7-9, TRBJ1-2)
CASSLKQNYGYTF

SEQ ID NO: 373567 - protein, 13 aa, Homo sapiens
  CDR3 for alpha chain variable domain of TCR clone 186784 (TRAV4, TRAJ42)
CLVGGGSQGNLIF

SEQ ID NO: 373568 - protein, 16 aa, Homo sapiens
  CDR3 for beta chain variable domain of TCR clone 186784 (TRBV5-1, TRBJ2-3)
CASSLHGRVGADTQYF

SEQ ID NO: 373569 - protein, 14 aa, Homo sapiens
  CDR3 for alpha chain variable domain of TCR clone 186785 (TRAV8-3, TRAJ44)
CAVGLTGTASKLTF

SEQ ID NO: 373570 - protein, 15 aa, Homo sapiens
  CDR3 for beta chain variable domain of TCR clone 186785 (TRBV7-8, TRBJ2-3)
CASSPRTGSTDTQYF

SEQ ID NO: 373571 - protein, 15 aa, Homo sapiens
  CDR3 for alpha chain variable domain of TCR clone 186786 (TRAV8-3, TRAJ27)
CAVGPSKTNAGKSTF

SEQ ID NO: 373572 - protein, 15 aa, Homo sapiens
  CDR3 for beta chain variable domain of TCR clone 186786 (TRBV7-2, TRBJ2-1)
CASSSGLAEGNEQFV

SEQ ID NO: 373573 - protein, 15 aa, Homo sapiens
  CDR3 for alpha chain variable domain of TCR clone 186787 (TRAV25, TRAJ53)
CAATVGGGSNYKLTF

SEQ ID NO: 373574 - protein, 13 aa, Homo sapiens
  CDR3 for beta chain variable domain of TCR clone 186787 (TRBV10-3, TRBJ2-7)
CASKLAVNYEQYF

SEQ ID NO: 373575 - protein, 14 aa, Homo sapiens
  CDR3 for alpha chain variable domain of TCR clone 186788 (TRAV13-1, TRAJ40)
CAASMTSGTYKYIF

SEQ ID NO: 373576 - protein, 15 aa, Homo sapiens
  CDR3 for beta chain variable domain of TCR clone 186788 (TRBV7-3, TRBJ2-1)
CARSPTGGGEVEQFF

SEQ ID NO: 373577 - protein, 14 aa, Homo sapiens
  CDR3 for alpha chain variable domain of TCR clone 186789 (TRAV26-1, TRAJ21)
CIVRVVYNFNKFYF

SEQ ID NO: 373578 - protein, 11 aa, Homo sapiens
  CDR3 for beta chain variable domain of TCR clone 186789 (TRBV5-6, TRBJ2-5)
CASSLEPTQYF

SEQ ID NO: 373579 - protein, 10 aa, Homo sapiens
  CDR3 for alpha chain variable domain of TCR clone 186790 (TRAV21, TRAJ31)
CAVYNARLMF

SEQ ID NO: 373580 - protein, 13 aa, Homo sapiens
  CDR3 for beta chain variable domain of TCR clone 186790 (TRBV4-1, TRBJ1-1)
CASSRRMNTEAFF

SEQ ID NO: 373581 - protein, 12 aa, Homo sapiens
  CDR3 for alpha chain variable domain of TCR clone 186791 (TRAV23/DV6, TRAJ16)
CAATGTGQKLLF

SEQ ID NO: 373582 - protein, 15 aa, Homo sapiens
  CDR3 for beta chain variable domain of TCR clone 186791 (TRBV28, TRBJ1-2)
CASSSYRGLVYGHTF

SEQ ID NO: 373583 - protein, 13 aa, Homo sapiens
  CDR3 for alpha chain variable domain of TCR clone 186792 (TRAV1-1, TRAJ30)
CAVRSDRDDKIIF

SEQ ID NO: 373584 - protein, 10 aa, Homo sapiens
  CDR3 for beta chain variable domain of TCR clone 186792 (TRBV20-1, TRBJ2-7)
IGSRMDEQYF

SEQ ID NO: 373585 - protein, 13 aa, Homo sapiens
  CDR3 for alpha chain variable domain of TCR clone 186793 (TRAV13-2, TRAJ48)
CAEMDFGNDKLTF

SEQ ID NO: 373586 - protein, 15 aa, Homo sapiens
  CDR3 for beta chain variable domain of TCR clone 186793 (TRBV7-9, TRBJ1-6)
CASGSPGRGNSPLHF

SEQ ID NO: 373587 - protein, 14 aa, Homo sapiens
  CDR3 for alpha chain variable domain of TCR clone 186794 (TRAV13-1, TRAJ35)
CAASKGGCGNVLQC

SEQ ID NO: 373588 - protein, 13 aa, Homo sapiens
  CDR3 for beta chain variable domain of TCR clone 186794 (TRBV7-3, TRBJ1-1)
CASSQDWGAEAFF

SEQ ID NO: 373589 - protein, 15 aa, Homo sapiens
  CDR3 for alpha chain variable domain of TCR clone 186795 (TRAV12-3, TRAJ10)
CASYILTGGGKKLTF

SEQ ID NO: 373590 - protein, 15 aa, Homo sapiens
  CDR3 for beta chain variable domain of TCR clone 186795 (TRBV7-2, TRBJ1-6)
CASSLGPDRGMPLHF

SEQ ID NO: 373591 - protein, 10 aa, Homo sapiens
  CDR3 for alpha chain variable domain of TCR clone 186796 (TRAV26-2, TRAJ49)
CILLGNQFYF

SEQ ID NO: 373592 - protein, 13 aa, Homo sapiens
  CDR3 for beta chain variable domain of TCR clone 186796 (TRBV20-1, TRBJ2-7)
CSADPGATHEQYF

SEQ ID NO: 373593 - protein, 14 aa, Homo sapiens
  CDR3 for alpha chain variable domain of TCR clone 186797 (TRAV8-4, TRAJ5)
FAVSTDTGRRALTF

SEQ ID NO: 373594 - protein, 16 aa, Homo sapiens
  CDR3 for beta chain variable domain of TCR clone 186797 (TRBV7-7, TRBJ2-1)
CASSLASGTSYNEQFF

SEQ ID NO: 373595 - protein, 12 aa, Homo sapiens
  CDR3 for alpha chain variable domain of TCR clone 186798 (TRAV25, TRAJ31)
CAGHLNNARLMF

SEQ ID NO: 373596 - protein, 15 aa, Homo sapiens
  CDR3 for beta chain variable domain of TCR clone 186798 (TRBV10-3, TRBJ2-1)
CHPGGARGDYNEQFF

SEQ ID NO: 373597 - protein, 14 aa, Homo sapiens
  CDR3 for alpha chain variable domain of TCR clone 186799 (TRAV13-2, TRAJ17)
CAENSKAAGNKLTF

SEQ ID NO: 373598 - protein, 14 aa, Homo sapiens
  CDR3 for beta chain variable domain of TCR clone 186799 (TRBV6-1, TRBJ1-3)
CASVQGGGGNTIYF

SEQ ID NO: 373599 - protein, 14 aa, Homo sapiens
  CDR3 for alpha chain variable domain of TCR clone 186800 (TRAV23/DV6, TRAJ40)
CAASLTSGTYKYIF

SEQ ID NO: 373600 - protein, 17 aa, Homo sapiens
  CDR3 for beta chain variable domain of TCR clone 186800 (TRBV7-8, TRBJ2-6)
CASSAGTGGAGANVLTF

SEQ ID NO: 373601 - protein, 13 aa, Homo sapiens
  CDR3 for alpha chain variable domain of TCR clone 186801 (TRAV1-2, TRAJ9)
CASLNTGGFKTIL

SEQ ID NO: 373602 - protein, 12 aa, Homo sapiens
  CDR3 for beta chain variable domain of TCR clone 186801 (TRBV11-3, TRBJ1-1)
CASSHRQGEAFF

SEQ ID NO: 373603 - protein, 12 aa, Homo sapiens
  CDR3 for alpha chain variable domain of TCR clone 186802 (TRAV3, TRAJ43)
CAVRDSNNDMRF

SEQ ID NO: 373604 - protein, 15 aa, Homo sapiens
  CDR3 for beta chain variable domain of TCR clone 186802 (TRBV27, TRBJ1-5)
CASSPGTGFDQPQHF

SEQ ID NO: 373605 - protein, 21 aa, Homo sapiens
  CDR3 for alpha chain variable domain of TCR clone 186803 (TRAV1-2, TRAJ37)
CLLPLCRERFHGSGNTGKLIF

SEQ ID NO: 373606 - protein, 14 aa, Homo sapiens
  CDR3 for beta chain variable domain of TCR clone 186803 (TRBV2, TRBJ2-5)
CASSEVLAQETQYF

SEQ ID NO: 373607 - protein, 15 aa, Homo sapiens
  CDR3 for alpha chain variable domain of TCR clone 186804 (TRAV12-2, TRAJ23)
CAVNTLYNQGGKLIL

SEQ ID NO: 373608 - protein, 13 aa, Homo sapiens
  CDR3 for beta chain variable domain of TCR clone 186804 (TRBV10-3, TRBJ1-2)
CAISERDSYGYTF

SEQ ID NO: 373609 - protein, 12 aa, Homo sapiens
  CDR3 for alpha chain variable domain of TCR clone 186805 (TRAV8-3, TRAJ26)
CAGDSYGHNSVF

SEQ ID NO: 373610 - protein, 13 aa, Homo sapiens
  CDR3 for beta chain variable domain of TCR clone 186805 (TRBV27, TRBJ1-1)
CASSLSIGAEAFF

SEQ ID NO: 373611 - protein, 11 aa, Homo sapiens
  CDR3 for alpha chain variable domain of TCR clone 186806 (TRAV26-1, TRAJ27)
CIDPNAGKSSF

SEQ ID NO: 373612 - protein, 18 aa, Homo sapiens
  CDR3 for beta chain variable domain of TCR clone 186806 (TRBV7-9, TRBJ2-6)
CASSFPGAGISGANVLTF

SEQ ID NO: 373613 - protein, 14 aa, Homo sapiens
  CDR3 for alpha chain variable domain of TCR clone 186807 (TRAV26-1, TRAJ48)
CIVRVGFGNEKLTF

SEQ ID NO: 373614 - protein, 15 aa, Homo sapiens
  CDR3 for beta chain variable domain of TCR clone 186807 (TRBV7-3, TRBJ2-1)
CASSLDGNSYNEQFF

SEQ ID NO: 373615 - protein, 14 aa, Homo sapiens
  CDR3 for alpha chain variable domain of TCR clone 186808 (TRAV23/DV6, TRAJ17)
CAARVRAAGNKLTF

SEQ ID NO: 373616 - protein, 12 aa, Homo sapiens
  CDR3 for beta chain variable domain of TCR clone 186808 (TRBV7-9, TRBJ2-3)
CASSSITDTQYF

SEQ ID NO: 373617 - protein, 17 aa, Homo sapiens
  CDR3 for alpha chain variable domain of TCR clone 186809 (TRAV23/DV6, TRAJ57)
CSASSTLSQGGAEKLVF

SEQ ID NO: 373618 - protein, 14 aa, Homo sapiens
  CDR3 for beta chain variable domain of TCR clone 186809 (TRBV25-1, TRBJ1-1)
CASTHLGGNTEAFF

SEQ ID NO: 373619 - protein, 21 aa, Homo sapiens
  CDR3 for alpha chain variable domain of TCR clone 186810 (TRAV1-2, TRAJ37)
CLLPLCCERFHGSGNTGKLIF

SEQ ID NO: 373620 - protein, 14 aa, Homo sapiens
  CDR3 for beta chain variable domain of TCR clone 186810 (TRBV2, TRBJ2-5)
CASGEVLAQETQYF

SEQ ID NO: 373621 - protein, 18 aa, Homo sapiens
  CDR3 for alpha chain variable domain of TCR clone 186811 (TRAV12-2, )
CAVEDIQSPDPAVYQLRD

SEQ ID NO: 373622 - protein, 16 aa, Homo sapiens
  CDR3 for beta chain variable domain of TCR clone 186811 (TRBV6-1, TRBJ1-2)
CASSGAWQGRSHGYPF

SEQ ID NO: 373623 - protein, 16 aa, Homo sapiens
  CDR3 for alpha chain variable domain of TCR clone 186812 (TRAV30, TRAJ48)
GGTEIKSNFGNEKLTF

SEQ ID NO: 373624 - protein, 17 aa, Homo sapiens
  CDR3 for beta chain variable domain of TCR clone 186812 (TRBV27, TRBJ2-1)
CASSSERGGQSADEQFF

SEQ ID NO: 373625 - protein, 16 aa, Homo sapiens
  CDR3 for alpha chain variable domain of TCR clone 186813 (TRAV12-3, TRAJ58)
CAMTDTEETSGSRLTI

SEQ ID NO: 373626 - protein, 22 aa, Homo sapiens
  CDR3 for beta chain variable domain of TCR clone 186813 (TRBV23-1, TRBJ2-7)
CASSRRLDSGQGYVGGGYEQYF

SEQ ID NO: 373627 - protein, 23 aa, Homo sapiens
  CDR3 for alpha chain variable domain of TCR clone 186814 (TRAV26-1, TRAJ38)
CIADNAGNNHIQDPDPAVYQLSD

SEQ ID NO: 373628 - protein, 13 aa, Homo sapiens
  CDR3 for beta chain variable domain of TCR clone 186814 (TRBV20-1, TRBJ1-1)
CSARGGGNTEAFF

SEQ ID NO: 373629 - protein, 14 aa, Homo sapiens
  CDR3 for alpha chain variable domain of TCR clone 186815 (TRAV23/DV6, TRAJ37)
CAASTSSNTGKLIF

SEQ ID NO: 373630 - protein, 18 aa, Homo sapiens
  CDR3 for beta chain variable domain of TCR clone 186815 (TRBV24-1, TRBJ2-2)
CATSDSGQGTANTGELFF

SEQ ID NO: 373631 - protein, 14 aa, Homo sapiens
  CDR3 for alpha chain variable domain of TCR clone 186816 (TRAV3, TRAJ36)
CAVRDGTVANNLFF

SEQ ID NO: 373632 - protein, 16 aa, Homo sapiens
  CDR3 for beta chain variable domain of TCR clone 186816 (TRBV7-3, TRBJ2-5)
CASIQPGGSVQETQYF

SEQ ID NO: 373633 - protein, 15 aa, Homo sapiens
  CDR3 for alpha chain variable domain of TCR clone 186817 (TRAV12-1, TRAJ48)
CVVNKVNFGNEKLTF

SEQ ID NO: 373634 - protein, 13 aa, Homo sapiens
  CDR3 for beta chain variable domain of TCR clone 186817 (TRBV27, TRBJ1-1)
CASSLSIGAEAFF

SEQ ID NO: 373635 - protein, 12 aa, Homo sapiens
  CDR3 for alpha chain variable domain of TCR clone 186818 (TRAV2, TRAJ31)
CTVEDNNARLMF

SEQ ID NO: 373636 - protein, 13 aa, Homo sapiens
  CDR3 for beta chain variable domain of TCR clone 186818 (TRBV11-2, TRBJ2-1)
CASSLDLVNEQFF

SEQ ID NO: 373637 - protein, 15 aa, Homo sapiens
  CDR3 for alpha chain variable domain of TCR clone 186819 (TRAV3, TRAJ20)
CAVRDIKLSDYKLSF

SEQ ID NO: 373638 - protein, 14 aa, Homo sapiens
  CDR3 for beta chain variable domain of TCR clone 186819 (TRBV6-5, TRBJ2-7)
CASSPHRGLREQYF

SEQ ID NO: 373639 - protein, 14 aa, Homo sapiens
  CDR3 for alpha chain variable domain of TCR clone 186820 (TRAV17, TRAJ35)
CSTDRPGFGNVLHC

SEQ ID NO: 373640 - protein, 15 aa, Homo sapiens
  CDR3 for beta chain variable domain of TCR clone 186820 (TRBV28, TRBJ2-5)
CASSSGRVIQETQYF

SEQ ID NO: 373641 - protein, 15 aa, Homo sapiens
  CDR3 for alpha chain variable domain of TCR clone 186821 (TRAV8-1, TRAJ37)
CAVKKGSGNTGKLIF

SEQ ID NO: 373642 - protein, 17 aa, Homo sapiens
  CDR3 for beta chain variable domain of TCR clone 186821 (TRBV12-4, TRBJ1-1)
RASSLSGFRTMNTEAFF

SEQ ID NO: 373643 - protein, 16 aa, Homo sapiens
  CDR3 for alpha chain variable domain of TCR clone 186822 (TRAV17, TRAJ52)
CATDPMGGTSYGKLTF

SEQ ID NO: 373644 - protein, 14 aa, Homo sapiens
  CDR3 for beta chain variable domain of TCR clone 186822 (TRBV7-2, TRBJ2-7)
CASSPKTSFYEQYF

SEQ ID NO: 373645 - protein, 16 aa, Homo sapiens
  CDR3 for alpha chain variable domain of TCR clone 186823 (TRAV26-2, TRAJ45)
CTTASPIGGGADGLNF

SEQ ID NO: 373646 - protein, 20 aa, Homo sapiens
  CDR3 for beta chain variable domain of TCR clone 186823 (TRBV28, TRBJ2-1)
CASTPIGRSPGLAGGNEQFF

SEQ ID NO: 373647 - protein, 13 aa, Homo sapiens
  CDR3 for alpha chain variable domain of TCR clone 186824 (TRAV12-1, TRAJ33)
CGDAPDSNYQLIW

SEQ ID NO: 373648 - protein, 13 aa, Homo sapiens
  CDR3 for beta chain variable domain of TCR clone 186824 (TRBV6-6, TRBJ2-1)
CASSLHQGDEQFF

SEQ ID NO: 373649 - protein, 15 aa, Homo sapiens
  CDR3 for alpha chain variable domain of TCR clone 186825 (TRAV23/DV6, TRAJ13)
CAAWPGGGGYQKVTF

SEQ ID NO: 373650 - protein, 17 aa, Homo sapiens
  CDR3 for beta chain variable domain of TCR clone 186825 (TRBV19, TRBJ2-7)
CASSITFYDSYPYEQYF

SEQ ID NO: 373651 - protein, 10 aa, Homo sapiens
  CDR3 for alpha chain variable domain of TCR clone 186826 (TRAV30, TRAJ24)
CGTEIVMLTA

SEQ ID NO: 373652 - protein, 14 aa, Homo sapiens
  CDR3 for beta chain variable domain of TCR clone 186826 (TRBV7-8, TRBJ2-3)
CASSLEAGTDTQYF

SEQ ID NO: 373653 - protein, 17 aa, Homo sapiens
  CDR3 for alpha chain variable domain of TCR clone 186827 (TRAV13-1, TRAJ28)
CAASPPYSGAVSYQLTF

SEQ ID NO: 373654 - protein, 14 aa, Homo sapiens
  CDR3 for beta chain variable domain of TCR clone 186827 (TRBV7-7, TRBJ2-2)
CASSRDRSTGELFF

SEQ ID NO: 373655 - protein, 16 aa, Homo sapiens
  CDR3 for alpha chain variable domain of TCR clone 186828 (TRAV30, TRAJ24)
CGTEIVGADSWGKFQF

SEQ ID NO: 373656 - protein, 16 aa, Homo sapiens
  CDR3 for beta chain variable domain of TCR clone 186828 (TRBV28, TRBJ2-7)
CASSLFFETGGPEQYF

SEQ ID NO: 373657 - protein, 16 aa, Homo sapiens
  CDR3 for alpha chain variable domain of TCR clone 186829 (TRAV14/DV4, TRAJ12)
CAMREVLMDSSYKLIF

SEQ ID NO: 373658 - protein, 14 aa, Homo sapiens
  CDR3 for beta chain variable domain of TCR clone 186829 (TRBV7-2, TRBJ2-5)
CASSLTQGQETQYF

SEQ ID NO: 373659 - protein, 13 aa, Homo sapiens
  CDR3 for alpha chain variable domain of TCR clone 186830 (TRAV12-1, TRAJ26)
SATYLYYGQNFVF

SEQ ID NO: 373660 - protein, 15 aa, Homo sapiens
  CDR3 for beta chain variable domain of TCR clone 186830 (TRBV5-1, TRBJ2-6)
CASSLGPSGANDLTF

SEQ ID NO: 373661 - protein, 11 aa, Homo sapiens
  CDR3 for alpha chain variable domain of TCR clone 186831 (TRAV29/DV5, TRAJ31)
CAASYRDRLMF

SEQ ID NO: 373662 - protein, 19 aa, Homo sapiens
  CDR3 for beta chain variable domain of TCR clone 186831 (TRBV19, TRBJ2-5)
CASSIVQVTDFFLGETQYF

SEQ ID NO: 373663 - protein, 14 aa, Homo sapiens
  CDR3 for alpha chain variable domain of TCR clone 186832 (TRAV8-4, TRAJ5)
CAVSTDTGRSALTF

SEQ ID NO: 373664 - protein, 16 aa, Homo sapiens
  CDR3 for beta chain variable domain of TCR clone 186832 (TRBV15, TRBJ1-2)
CATSRGPRTGGGGYTV

SEQ ID NO: 373665 - protein, 13 aa, Homo sapiens
  CDR3 for alpha chain variable domain of TCR clone 186833 (TRAV21, TRAJ27)
CAARPGNEGKSTF

SEQ ID NO: 373666 - protein, 14 aa, Homo sapiens
  CDR3 for beta chain variable domain of TCR clone 186833 (TRBV7-9, TRBJ2-7)
CASSIGQGAGEQYF

SEQ ID NO: 373667 - protein, 16 aa, Homo sapiens
  CDR3 for alpha chain variable domain of TCR clone 186834 (TRAV8-6, TRAJ53)
YAVSVSSGGSNYKLTF

SEQ ID NO: 373668 - protein, 18 aa, Homo sapiens
  CDR3 for beta chain variable domain of TCR clone 186834 (TRBV4-2, TRBJ2-6)
CASSQLQGVLTGANVLTF

SEQ ID NO: 373669 - protein, 12 aa, Homo sapiens
  CDR3 for alpha chain variable domain of TCR clone 186835 (TRAV17, TRAJ57)
CATDGGSEKPVF

SEQ ID NO: 373670 - protein, 14 aa, Homo sapiens
  CDR3 for beta chain variable domain of TCR clone 186835 (TRBV28, TRBJ2-7)
CASTLYGRAHEQYF

SEQ ID NO: 373671 - protein, 14 aa, Homo sapiens
  CDR3 for alpha chain variable domain of TCR clone 186836 (TRAV1-2, TRAJ8)
CAVREDTGFQKLVF

SEQ ID NO: 373672 - protein, 19 aa, Homo sapiens
  CDR3 for beta chain variable domain of TCR clone 186836 (TRBV11-2, TRBJ2-2)
LRTRPCISVPAAYPGSCFF

SEQ ID NO: 373673 - protein, 17 aa, Homo sapiens
  CDR3 for alpha chain variable domain of TCR clone 186837 (TRAV8-6, TRAJ58)
CAVSSWVGETSGPRLPF

SEQ ID NO: 373674 - protein, 14 aa, Homo sapiens
  CDR3 for beta chain variable domain of TCR clone 186837 (TRBV4-2, TRBJ2-1)
CASGLDRAYNEQFF

SEQ ID NO: 373675 - protein, 12 aa, Homo sapiens
  CDR3 for alpha chain variable domain of TCR clone 186838 (TRAV8-3, TRAJ26)
CAGDNYVQNFVF

SEQ ID NO: 373676 - protein, 16 aa, Homo sapiens
  CDR3 for beta chain variable domain of TCR clone 186838 (TRBV7-9, TRBJ2-1)
CASSDVAGGSYNEQFF

SEQ ID NO: 373677 - protein, 14 aa, Homo sapiens
  CDR3 for alpha chain variable domain of TCR clone 186839 (TRAV2, TRAJ37)
CAVDFTSNTGKLIF

SEQ ID NO: 373678 - protein, 13 aa, Homo sapiens
  CDR3 for beta chain variable domain of TCR clone 186839 (TRBV12-4, TRBJ1-2)
CASSLRQGKGYTF

SEQ ID NO: 373679 - protein, 14 aa, Homo sapiens
  CDR3 for alpha chain variable domain of TCR clone 186840 (TRAV12-1, TRAJ23)
CVVSVYNQGGKLIF

SEQ ID NO: 373680 - protein, 16 aa, Homo sapiens
  CDR3 for beta chain variable domain of TCR clone 186840 (TRBV7-3, TRBJ2-2)
CASSLKRGTLSGELFF

SEQ ID NO: 373681 - protein, 15 aa, Homo sapiens
  CDR3 for alpha chain variable domain of TCR clone 186841 (TRAV8-4, TRAJ3)
CAVTGESLVQQCFQD

SEQ ID NO: 373682 - protein, 12 aa, Homo sapiens
  CDR3 for beta chain variable domain of TCR clone 186841 (TRBV3-1, TRBJ2-2)
CASSLFPGELFF

SEQ ID NO: 373683 - protein, 15 aa, Homo sapiens
  CDR3 for alpha chain variable domain of TCR clone 186842 (TRAV12-1, TRAJ9)
CVVSFGDTGGVKTIF

SEQ ID NO: 373684 - protein, 13 aa, Homo sapiens
  CDR3 for beta chain variable domain of TCR clone 186842 (TRBV2, TRBJ1-4)
CASSERAGEKLFF

SEQ ID NO: 373685 - protein, 13 aa, Homo sapiens
  CDR3 for alpha chain variable domain of TCR clone 186843 (TRAV12-3, TRAJ7)
CAMTPYGNTRLAF

SEQ ID NO: 373686 - protein, 13 aa, Homo sapiens
  CDR3 for beta chain variable domain of TCR clone 186843 (TRBV20-1, TRBJ1-1)
CSARVGGNTEAFF

SEQ ID NO: 373687 - protein, 13 aa, Homo sapiens
  CDR3 for alpha chain variable domain of TCR clone 186844 (TRAV2, TRAJ15)
CAVASQAGTALFF

SEQ ID NO: 373688 - protein, 16 aa, Homo sapiens
  CDR3 for beta chain variable domain of TCR clone 186844 (TRBV11-3, TRBJ2-3)
CASSSGSGGGTDTQYF

SEQ ID NO: 373689 - protein, 14 aa, Homo sapiens
  CDR3 for alpha chain variable domain of TCR clone 186845 (TRAV39, TRAJ33)
CAVLDMDSNYQLIW

SEQ ID NO: 373690 - protein, 12 aa, Homo sapiens
  CDR3 for beta chain variable domain of TCR clone 186845 (TRBV19, TRBJ1-1)
CASSLSDTEAFF

SEQ ID NO: 373691 - protein, 11 aa, Homo sapiens
  CDR3 for alpha chain variable domain of TCR clone 186846 (TRAV3, TRAJ21)
CSVGNFNKFYF

SEQ ID NO: 373692 - protein, 12 aa, Homo sapiens
  CDR3 for beta chain variable domain of TCR clone 186846 (TRBV7-9, TRBJ2-7)
CASSIKREEQYF

SEQ ID NO: 373693 - protein, 14 aa, Homo sapiens
  CDR3 for alpha chain variable domain of TCR clone 186847 (TRAV13-1, TRAJ44)
CAAKATGTASKLTF

SEQ ID NO: 373694 - protein, 15 aa, Homo sapiens
  CDR3 for beta chain variable domain of TCR clone 186847 (TRBV6-1, TRBJ2-5)
CASPRWGTEGQTQYF

SEQ ID NO: 373695 - protein, 12 aa, Homo sapiens
  CDR3 for alpha chain variable domain of TCR clone 186848 (TRAV13-1, TRAJ53)
AASGGSHYKLTF

SEQ ID NO: 373696 - protein, 15 aa, Homo sapiens
  CDR3 for beta chain variable domain of TCR clone 186848 (TRBV5-1, TRBJ2-1)
GASSPPRAPYNEQFF

SEQ ID NO: 373697 - protein, 13 aa, Homo sapiens
  CDR3 for alpha chain variable domain of TCR clone 186849 (TRAV21, TRAJ45)
CAVMGGGADGLTF

SEQ ID NO: 373698 - protein, 15 aa, Homo sapiens
  CDR3 for beta chain variable domain of TCR clone 186849 (TRBV11-2, TRBJ2-1)
CASSKNRGLIYEQFF

SEQ ID NO: 373699 - protein, 12 aa, Homo sapiens
  CDR3 for alpha chain variable domain of TCR clone 186850 (TRAV17, TRAJ20)
CATYSNDYKRSF

SEQ ID NO: 373700 - protein, 11 aa, Homo sapiens
  CDR3 for beta chain variable domain of TCR clone 186850 (TRBV4-1, TRBJ2-2)
CASEHTGELFF

SEQ ID NO: 373701 - protein, 14 aa, Homo sapiens
  CDR3 for alpha chain variable domain of TCR clone 186851 (TRAV26-1, TRAJ38)
CIADNAGNNRKLIW

SEQ ID NO: 373702 - protein, 18 aa, Homo sapiens
  CDR3 for beta chain variable domain of TCR clone 186851 (TRBV7-8, TRBJ2-1)
CASSPAEGLAGGLNEQFF

SEQ ID NO: 373703 - protein, 12 aa, Homo sapiens
  CDR3 for alpha chain variable domain of TCR clone 186852 (TRAV27, TRAJ13)
CAGAGGYLKVTF

SEQ ID NO: 373704 - protein, 15 aa, Homo sapiens
  CDR3 for beta chain variable domain of TCR clone 186852 (TRBV20-1, TRBJ2-6)
CSARDRGPGANVLTF

SEQ ID NO: 373705 - protein, 15 aa, Homo sapiens
  CDR3 for alpha chain variable domain of TCR clone 186853 (TRAV1-2, TRAJ38)
CAVSENAGNNRKLIW

SEQ ID NO: 373706 - protein, 16 aa, Homo sapiens
  CDR3 for beta chain variable domain of TCR clone 186853 (TRBV4-1, TRBJ2-7)
CASSLTAGRATYEQYF

SEQ ID NO: 373707 - protein, 14 aa, Homo sapiens
  CDR3 for alpha chain variable domain of TCR clone 186854 (TRAV3, TRAJ9)
CAVRLNTGGFKTIF

SEQ ID NO: 373708 - protein, 15 aa, Homo sapiens
  CDR3 for beta chain variable domain of TCR clone 186854 (TRBV7-2, TRBJ2-1)
GASSLASGRVNEQFF

SEQ ID NO: 373709 - protein, 14 aa, Homo sapiens
  CDR3 for alpha chain variable domain of TCR clone 186855 (TRAV3, TRAJ34)
CAVRAPGNTDKLIF

SEQ ID NO: 373710 - protein, 15 aa, Homo sapiens
  CDR3 for beta chain variable domain of TCR clone 186855 (TRBV6-1, TRBJ1-5)
CASIPDRLGNQPQHF

SEQ ID NO: 373711 - protein, 14 aa, Homo sapiens
  CDR3 for alpha chain variable domain of TCR clone 186856 (TRAV6, TRAJ17)
CALDLKAAGNKLTF

SEQ ID NO: 373712 - protein, 17 aa, Homo sapiens
  CDR3 for beta chain variable domain of TCR clone 186856 (TRBV7-8, TRBJ2-7)
CASSLTSGRPPSYEQYF

SEQ ID NO: 373713 - protein, 15 aa, Homo sapiens
  CDR3 for alpha chain variable domain of TCR clone 186857 (TRAV35, TRAJ40)
CAGQLGTSGTYKYIF

SEQ ID NO: 373714 - protein, 14 aa, Homo sapiens
  CDR3 for beta chain variable domain of TCR clone 186857 (TRBV28, TRBJ2-2)
CASRIRSGTGELFF

SEQ ID NO: 373715 - protein, 14 aa, Homo sapiens
  CDR3 for alpha chain variable domain of TCR clone 186858 (TRAV12-3, TRAJ10)
RHLPLTGGGNKLTF

SEQ ID NO: 373716 - protein, 14 aa, Homo sapiens
  CDR3 for beta chain variable domain of TCR clone 186858 (TRBV19, TRBJ1-5)
CASRAPDSFLSQHF

SEQ ID NO: 373717 - protein, 11 aa, Homo sapiens
  CDR3 for alpha chain variable domain of TCR clone 186859 (TRAV35, TRAJ34)
CWARNTDKLIF

SEQ ID NO: 373718 - protein, 14 aa, Homo sapiens
  CDR3 for beta chain variable domain of TCR clone 186859 (TRBV20-1, TRBJ2-7)
CSVGGRGPRSEQYF

SEQ ID NO: 373719 - protein, 13 aa, Homo sapiens
  CDR3 for alpha chain variable domain of TCR clone 186860 (TRAV29/DV5, TRAJ31)
CAASRNNNASPMF

SEQ ID NO: 373720 - protein, 15 aa, Homo sapiens
  CDR3 for beta chain variable domain of TCR clone 186860 (TRBV2, TRBJ2-1)
CASSELAGSYNEQFF

SEQ ID NO: 373721 - protein, 18 aa, Homo sapiens
  CDR3 for alpha chain variable domain of TCR clone 186861 (TRAV13-1, TRAJ52)
CAASKRSAGGTSYGKLTF

SEQ ID NO: 373722 - protein, 13 aa, Homo sapiens
  CDR3 for beta chain variable domain of TCR clone 186861 (TRBV24-1, TRBJ2-2)
CTTSDWSTGELFF

SEQ ID NO: 373723 - protein, 12 aa, Homo sapiens
  CDR3 for alpha chain variable domain of TCR clone 186862 (TRAV13-1, TRAJ21)
CAAKEGFNKFYF

SEQ ID NO: 373724 - protein, 15 aa, Homo sapiens
  CDR3 for beta chain variable domain of TCR clone 186862 (TRBV11-3, TRBJ1-6)
CASSFGQGFRSPLHF

SEQ ID NO: 373725 - protein, 13 aa, Homo sapiens
  CDR3 for alpha chain variable domain of TCR clone 186863 (TRAV2, TRAJ21)
CAVEDLNFNKFYS

SEQ ID NO: 373726 - protein, 15 aa, Homo sapiens
  CDR3 for beta chain variable domain of TCR clone 186863 (TRBV28, TRBJ2-5)
CASSPGQGGIETQYF

SEQ ID NO: 373727 - protein, 15 aa, Homo sapiens
  CDR3 for alpha chain variable domain of TCR clone 186864 (TRAV26-1, TRAJ37)
CIVRVATGNTGKLIF

SEQ ID NO: 373728 - protein, 12 aa, Homo sapiens
  CDR3 for beta chain variable domain of TCR clone 186864 (TRBV11-2, TRBJ2-2)
CASSLGGGELFF

SEQ ID NO: 373729 - protein, 15 aa, Homo sapiens
  CDR3 for alpha chain variable domain of TCR clone 186865 (TRAV20, TRAJ28)
CAVQYSWAGRYQLTF

SEQ ID NO: 373730 - protein, 12 aa, Homo sapiens
  CDR3 for beta chain variable domain of TCR clone 186865 (TRBV12-4, TRBJ1-3)
CASRASGNTIYF

SEQ ID NO: 373731 - protein, 15 aa, Homo sapiens
  CDR3 for alpha chain variable domain of TCR clone 186866 (TRAV12-3, TRAJ6)
CAMSATTGGSYIPTF

SEQ ID NO: 373732 - protein, 16 aa, Homo sapiens
  CDR3 for beta chain variable domain of TCR clone 186866 (TRBV4-1, TRBJ1-1)
CASSLPGQGIRTEAFF

SEQ ID NO: 373733 - protein, 23 aa, Homo sapiens
  CDR3 for alpha chain variable domain of TCR clone 186867 (TRAV8-3, )
CAVVTTRIPDIQNPDPAVYQLRD

SEQ ID NO: 373734 - protein, 14 aa, Homo sapiens
  CDR3 for beta chain variable domain of TCR clone 186867 (TRBV7-3, TRBJ1-1)
CASSLKGGNTEAFF

SEQ ID NO: 373735 - protein, 14 aa, Homo sapiens
  CDR3 for alpha chain variable domain of TCR clone 186868 (TRAV1-2, TRAJ8)
CAVREDTGFENLVF

SEQ ID NO: 373736 - protein, 16 aa, Homo sapiens
  CDR3 for beta chain variable domain of TCR clone 186868 (TRBV7-3, TRBJ2-2)
CASSLKRGTLSGELFF

SEQ ID NO: 373737 - protein, 15 aa, Homo sapiens
  CDR3 for alpha chain variable domain of TCR clone 186869 (TRAV35, TRAJ58)
CAGCRQETSGSRLTF

SEQ ID NO: 373738 - protein, 16 aa, Homo sapiens
  CDR3 for beta chain variable domain of TCR clone 186869 (TRBV2, TRBJ2-1)
CASSVGGSLSYNEQFF

SEQ ID NO: 373739 - protein, 10 aa, Homo sapiens
  CDR3 for alpha chain variable domain of TCR clone 186870 (TRAV25, TRAJ21)
CLYNFNKFYF

SEQ ID NO: 373740 - protein, 14 aa, Homo sapiens
  CDR3 for beta chain variable domain of TCR clone 186870 (TRBV7-8, TRBJ1-5)
CASSTGTVGGPQHF

SEQ ID NO: 373741 - protein, 13 aa, Homo sapiens
  CDR3 for alpha chain variable domain of TCR clone 186871 (TRAV8-6, TRAJ49)
CAVITDTGNQFYF

SEQ ID NO: 373742 - protein, 14 aa, Homo sapiens
  CDR3 for beta chain variable domain of TCR clone 186871 (TRBV7-8, TRBJ2-3)
CASSFPDGQDTQYF

SEQ ID NO: 373743 - protein, 18 aa, Homo sapiens
  CDR3 for alpha chain variable domain of TCR clone 186872 (TRAV29/DV5, TRAJ52)
CAAGFRGAGGTSYGKLTF

SEQ ID NO: 373744 - protein, 17 aa, Homo sapiens
  CDR3 for beta chain variable domain of TCR clone 186872 (TRBV4-1, TRBJ2-5)
CASSQDLTGGPIETQYF

SEQ ID NO: 373745 - protein, 14 aa, Homo sapiens
  CDR3 for alpha chain variable domain of TCR clone 186873 (TRAV2, TRAJ37)
CAVDFTSNTGALIF

SEQ ID NO: 373746 - protein, 15 aa, Homo sapiens
  CDR3 for beta chain variable domain of TCR clone 186873 (TRBV20-1, TRBJ1-1)
CSASRGVTGNTEAFF

SEQ ID NO: 373747 - protein, 13 aa, Homo sapiens
  CDR3 for alpha chain variable domain of TCR clone 186874 (TRAV12-1, TRAJ40)
CVVDSSGTYKYIF

SEQ ID NO: 373748 - protein, 14 aa, Homo sapiens
  CDR3 for beta chain variable domain of TCR clone 186874 (TRBV2, TRBJ1-6)
CASEVSSYNSPLHF

SEQ ID NO: 373749 - protein, 14 aa, Homo sapiens
  CDR3 for alpha chain variable domain of TCR clone 186875 (TRAV8-4, TRAJ13)
CAVTLSGGYQKVTF

SEQ ID NO: 373750 - protein, 14 aa, Homo sapiens
  CDR3 for beta chain variable domain of TCR clone 186875 (TRBV7-9, TRBJ2-4)
CASSLAMGGNIQYF

SEQ ID NO: 373751 - protein, 15 aa, Homo sapiens
  CDR3 for alpha chain variable domain of TCR clone 186876 (TRAV27, TRAJ42)
CAGGNYGGSQGNLIF

SEQ ID NO: 373752 - protein, 19 aa, Homo sapiens
  CDR3 for beta chain variable domain of TCR clone 186876 (TRBV25-1, TRBJ2-2)
CAILVYRVDRGRKTGELFF

SEQ ID NO: 373753 - protein, 14 aa, Homo sapiens
  CDR3 for alpha chain variable domain of TCR clone 186877 (TRAV35, TRAJ33)
CAGSSQDSNYQLIW

SEQ ID NO: 373754 - protein, 20 aa, Homo sapiens
  CDR3 for beta chain variable domain of TCR clone 186877 (TRBV7-8, TRBJ2-2)
CASSHLFPGPTIHITGELFF

SEQ ID NO: 373755 - protein, 13 aa, Homo sapiens
  CDR3 for alpha chain variable domain of TCR clone 186878 (TRAV3, TRAJ21)
CAVREPGFNKFYF

SEQ ID NO: 373756 - protein, 12 aa, Homo sapiens
  CDR3 for beta chain variable domain of TCR clone 186878 (TRBV5-1, TRBJ2-4)
LAGEWTKNIQYF

SEQ ID NO: 373757 - protein, 14 aa, Homo sapiens
  CDR3 for alpha chain variable domain of TCR clone 186879 (TRAV17, TRAJ35)
CATDRPGFGNVLHC

SEQ ID NO: 373758 - protein, 14 aa, Homo sapiens
  CDR3 for beta chain variable domain of TCR clone 186879 (TRBV7-8, TRBJ2-3)
CASSLEAGTDTHYF

SEQ ID NO: 373759 - protein, 12 aa, Homo sapiens
  CDR3 for alpha chain variable domain of TCR clone 186880 (TRAV8-3, TRAJ20)
CAVGANDYKLSF

SEQ ID NO: 373760 - protein, 12 aa, Homo sapiens
  CDR3 for beta chain variable domain of TCR clone 186880 (TRBV11-2, TRBJ2-2)
YASSLPTGELFF

SEQ ID NO: 373761 - protein, 16 aa, Homo sapiens
  CDR3 for alpha chain variable domain of TCR clone 186881 (TRAV26-1, TRAJ53)
CIVRVAMGGSNYKLTF

SEQ ID NO: 373762 - protein, 14 aa, Homo sapiens
  CDR3 for beta chain variable domain of TCR clone 186881 (TRBV19, TRBJ2-1)
CASPTFVLSGEQFF

SEQ ID NO: 373763 - protein, 12 aa, Homo sapiens
  CDR3 for alpha chain variable domain of TCR clone 186882 (TRAV8-2, TRAJ6)
CVVSKGSYIPPF

SEQ ID NO: 373764 - protein, 18 aa, Homo sapiens
  CDR3 for beta chain variable domain of TCR clone 186882 (TRBV4-1, TRBJ2-3)
CASSQGGASGGATDTQYF

SEQ ID NO: 373765 - protein, 15 aa, Homo sapiens
  CDR3 for alpha chain variable domain of TCR clone 186883 (TRAV21, TRAJ53)
CATLNSGGSNYKLTF

SEQ ID NO: 373766 - protein, 13 aa, Homo sapiens
  CDR3 for beta chain variable domain of TCR clone 186883 (TRBV7-7, TRBJ2-2)
CASSLTSAGELFF

SEQ ID NO: 373767 - protein, 14 aa, Homo sapiens
  CDR3 for alpha chain variable domain of TCR clone 186884 (TRAV13-2, TRAJ32)
CAENYGGATNKLIF

SEQ ID NO: 373768 - protein, 15 aa, Homo sapiens
  CDR3 for beta chain variable domain of TCR clone 186884 (TRBV7-8, TRBJ2-1)
CASSLAGGLYNEQFF

SEQ ID NO: 373769 - protein, 14 aa, Homo sapiens
  CDR3 for alpha chain variable domain of TCR clone 186885 (TRAV20, TRAJ56)
CAVQFGGANSKLTF

SEQ ID NO: 373770 - protein, 14 aa, Homo sapiens
  CDR3 for beta chain variable domain of TCR clone 186885 (TRBV7-2, TRBJ2-2)
CASRGQGAAGELFF

SEQ ID NO: 373771 - protein, 16 aa, Homo sapiens
  CDR3 for alpha chain variable domain of TCR clone 186886 (TRAV1-2, TRAJ18)
CAVRVERGSTLGRLYF

SEQ ID NO: 373772 - protein, 14 aa, Homo sapiens
  CDR3 for beta chain variable domain of TCR clone 186886 (TRBV19, TRBJ2-1)
CASPTFVLSGEQFF

SEQ ID NO: 373773 - protein, 12 aa, Homo sapiens
  CDR3 for alpha chain variable domain of TCR clone 186887 (TRAV12-1, TRAJ40)
CVVNGETYKYIF

SEQ ID NO: 373774 - protein, 13 aa, Homo sapiens
  CDR3 for beta chain variable domain of TCR clone 186887 (TRBV6-1, TRBJ1-1)
CASSRQGNTEAFF

SEQ ID NO: 373775 - protein, 14 aa, Homo sapiens
  CDR3 for alpha chain variable domain of TCR clone 186888 (TRAV12-1, TRAJ17)
CVVNYKAAGNKLTF

SEQ ID NO: 373776 - protein, 16 aa, Homo sapiens
  CDR3 for beta chain variable domain of TCR clone 186888 (TRBV10-3, TRBJ2-1)
CAISGVGDGGGGEQFF

SEQ ID NO: 373777 - protein, 14 aa, Homo sapiens
  CDR3 for alpha chain variable domain of TCR clone 186889 (TRAV16, TRAJ17)
CALSGRAAGHKLTF

SEQ ID NO: 373778 - protein, 15 aa, Homo sapiens
  CDR3 for beta chain variable domain of TCR clone 186889 (TRBV3-1, TRBJ1-2)
CASSPTRLPEGGYTF

SEQ ID NO: 373779 - protein, 14 aa, Homo sapiens
  CDR3 for alpha chain variable domain of TCR clone 186890 (TRAV1-2, TRAJ16)
FAVNRFSDGQKLLF

SEQ ID NO: 373780 - protein, 16 aa, Homo sapiens
  CDR3 for beta chain variable domain of TCR clone 186890 (TRBV12-4, TRBJ2-5)
CASSFFVRGRQETQYF

SEQ ID NO: 373781 - protein, 13 aa, Homo sapiens
  CDR3 for alpha chain variable domain of TCR clone 186891 (TRAV29/DV5, TRAJ31)
CAASRNNNARLMF

SEQ ID NO: 373782 - protein, 14 aa, Homo sapiens
  CDR3 for beta chain variable domain of TCR clone 186891 (TRBV7-9, TRBJ2-1)
CASSPRDSLYEQFF

SEQ ID NO: 373783 - protein, 16 aa, Homo sapiens
  CDR3 for alpha chain variable domain of TCR clone 186892 (TRAV4, TRAJ29)
CLVGAYRSQETHLLSF

SEQ ID NO: 373784 - protein, 17 aa, Homo sapiens
  CDR3 for beta chain variable domain of TCR clone 186892 (TRBV25-1, TRBJ2-7)
CASSDARVVFSSYEQYF

SEQ ID NO: 373785 - protein, 17 aa, Homo sapiens
  CDR3 for alpha chain variable domain of TCR clone 186893 (TRAV4, TRAJ18)
CLVGERSVGSTLGRLYF

SEQ ID NO: 373786 - protein, 14 aa, Homo sapiens
  CDR3 for beta chain variable domain of TCR clone 186893 (TRBV7-8, TRBJ2-3)
CASSLEAGTDTQYF

SEQ ID NO: 373787 - protein, 14 aa, Homo sapiens
  CDR3 for alpha chain variable domain of TCR clone 186894 (TRAV14/DV4, TRAJ54)
FAMREAPGAQKLVF

SEQ ID NO: 373788 - protein, 15 aa, Homo sapiens
  CDR3 for beta chain variable domain of TCR clone 186894 (TRBV5-1, TRBJ2-7)
CASSLNGGPAREQYF

SEQ ID NO: 373789 - protein, 13 aa, Homo sapiens
  CDR3 for alpha chain variable domain of TCR clone 186895 (TRAV35, TRAJ57)
CAGSQGGSEKLVF

SEQ ID NO: 373790 - protein, 14 aa, Homo sapiens
  CDR3 for beta chain variable domain of TCR clone 186895 (TRBV25-1, TRBJ1-1)
CASTHLVGNTEAFF

SEQ ID NO: 373791 - protein, 17 aa, Homo sapiens
  CDR3 for alpha chain variable domain of TCR clone 186896 (TRAV3, TRAJ42)
CAVRDRDYGGSHGNLIF

SEQ ID NO: 373792 - protein, 14 aa, Homo sapiens
  CDR3 for beta chain variable domain of TCR clone 186896 (TRBV19, TRBJ2-5)
CASSMTGQQETRYF

SEQ ID NO: 373793 - protein, 15 aa, Homo sapiens
  CDR3 for alpha chain variable domain of TCR clone 186897 (TRAV38-1, TRAJ37)
CALIHRSGNTGKLIF

SEQ ID NO: 373794 - protein, 13 aa, Homo sapiens
  CDR3 for beta chain variable domain of TCR clone 186897 (TRBV7-9, TRBJ1-2)
CASSLVADYGYTF

SEQ ID NO: 373795 - protein, 15 aa, Homo sapiens
  CDR3 for alpha chain variable domain of TCR clone 186898 (TRAV17, TRAJ57)
CATGPSQGGSEKLVF

SEQ ID NO: 373796 - protein, 15 aa, Homo sapiens
  CDR3 for beta chain variable domain of TCR clone 186898 (TRBV11-2, TRBJ2-1)
CASSKNRGLIYEQFF

SEQ ID NO: 373797 - protein, 14 aa, Homo sapiens
  CDR3 for alpha chain variable domain of TCR clone 186899 (TRAV12-3, TRAJ29)
CAMILLSGNTPLVF

SEQ ID NO: 373798 - protein, 15 aa, Homo sapiens
  CDR3 for beta chain variable domain of TCR clone 186899 (TRBV6-1, TRBJ2-3)
CASSERGGITDTQYF

SEQ ID NO: 373799 - protein, 13 aa, Homo sapiens
  CDR3 for alpha chain variable domain of TCR clone 186900 (TRAV26-1, TRAJ29)
CIVRRSGNTPLIF

SEQ ID NO: 373800 - protein, 16 aa, Homo sapiens
  CDR3 for beta chain variable domain of TCR clone 186900 (TRBV11-2, TRBJ2-7)
CASSLAPTGVNYEQYF

SEQ ID NO: 373801 - protein, 14 aa, Homo sapiens
  CDR3 for alpha chain variable domain of TCR clone 186901 (TRAV12-2, TRAJ13)
CAVMKTGGYQKVTF

SEQ ID NO: 373802 - protein, 16 aa, Homo sapiens
  CDR3 for beta chain variable domain of TCR clone 186901 (TRBV12-5, TRBJ2-5)
CASGPRTSGNQETQYF

SEQ ID NO: 373803 - protein, 15 aa, Homo sapiens
  CDR3 for alpha chain variable domain of TCR clone 186902 (TRAV13-2, TRAJ10)
CAENRDTGGGNKLTF

SEQ ID NO: 373804 - protein, 15 aa, Homo sapiens
  CDR3 for beta chain variable domain of TCR clone 186902 (TRBV7-9, TRBJ1-4)
CASSARTGGNEKLFF

SEQ ID NO: 373805 - protein, 18 aa, Homo sapiens
  CDR3 for alpha chain variable domain of TCR clone 186903 (TRAV21, TRAJ52)
CAVRPSPAGGTSYGKLTF

SEQ ID NO: 373806 - protein, 16 aa, Homo sapiens
  CDR3 for beta chain variable domain of TCR clone 186903 (TRBV13, TRBJ2-3)
CQKPLQGSGGGNTQYF

SEQ ID NO: 373807 - protein, 13 aa, Homo sapiens
  CDR3 for alpha chain variable domain of TCR clone 186904 (TRAV14/DV4, TRAJ20)
CAMRESNDYKLSF

SEQ ID NO: 373808 - protein, 15 aa, Homo sapiens
  CDR3 for beta chain variable domain of TCR clone 186904 (TRBV7-9, TRBJ1-1)
CASSRPGTANTEAFF

SEQ ID NO: 373809 - protein, 14 aa, Homo sapiens
  CDR3 for alpha chain variable domain of TCR clone 186905 (TRAV1-2, TRAJ8)
CAVRDPPGFQKIVF

SEQ ID NO: 373810 - protein, 14 aa, Homo sapiens
  CDR3 for beta chain variable domain of TCR clone 186905 (TRBV4-2, TRBJ2-7)
CASSHRTGEYEQYF

SEQ ID NO: 373811 - protein, 10 aa, Homo sapiens
  CDR3 for alpha chain variable domain of TCR clone 186906 (TRAV30, TRAJ48)
CGIGNEKLTF

SEQ ID NO: 373812 - protein, 14 aa, Homo sapiens
  CDR3 for beta chain variable domain of TCR clone 186906 (TRBV7-6, TRBJ2-3)
CASSLGTVTDTQYC

SEQ ID NO: 373813 - protein, 11 aa, Homo sapiens
  CDR3 for alpha chain variable domain of TCR clone 186907 (TRAV1-2, TRAJ20)
CAVSNDYKLSF

SEQ ID NO: 373814 - protein, 15 aa, Homo sapiens
  CDR3 for beta chain variable domain of TCR clone 186907 (TRBV11-2, TRBJ2-2)
CASRGLAANTGELFF

SEQ ID NO: 373815 - protein, 13 aa, Homo sapiens
  CDR3 for alpha chain variable domain of TCR clone 186908 (TRAV27, TRAJ43)
CAGAGNNNNDMRF

SEQ ID NO: 373816 - protein, 14 aa, Homo sapiens
  CDR3 for beta chain variable domain of TCR clone 186908 (TRBV7-2, TRBJ2-7)
CASRSQGVAYEQYF

SEQ ID NO: 373817 - protein, 14 aa, Homo sapiens
  CDR3 for alpha chain variable domain of TCR clone 186909 (TRAV13-1, TRAJ29)
CAASSNSGNTPLVF

SEQ ID NO: 373818 - protein, 12 aa, Homo sapiens
  CDR3 for beta chain variable domain of TCR clone 186909 (TRBV27, TRBJ2-7)
CASSGGFYEQYF

SEQ ID NO: 373819 - protein, 14 aa, Homo sapiens
  CDR3 for alpha chain variable domain of TCR clone 186910 (TRAV12-2, TRAJ17)
CAVLFKAAGNKLTF

SEQ ID NO: 373820 - protein, 13 aa, Homo sapiens
  CDR3 for beta chain variable domain of TCR clone 186910 (TRBV7-2, TRBJ1-5)
CASSFARNQPQHF

SEQ ID NO: 373821 - protein, 16 aa, Homo sapiens
  CDR3 for alpha chain variable domain of TCR clone 186911 (TRAV30, TRAJ24)
CGTEIVDADSWGKFQF

SEQ ID NO: 373822 - protein, 14 aa, Homo sapiens
  CDR3 for beta chain variable domain of TCR clone 186911 (TRBV7-7, TRBJ2-2)
CATRQDSDTGEPFF

SEQ ID NO: 373823 - protein, 16 aa, Homo sapiens
  CDR3 for alpha chain variable domain of TCR clone 186912 (TRAV3, TRAJ37)
CAVRGKGSGNTGKLIF

SEQ ID NO: 373824 - protein, 15 aa, Homo sapiens
  CDR3 for beta chain variable domain of TCR clone 186912 (TRBV9, TRBJ2-1)
CASSVGTGELNEQFF

SEQ ID NO: 373825 - protein, 13 aa, Homo sapiens
  CDR3 for alpha chain variable domain of TCR clone 186913 (TRAV20, TRAJ37)
CAGCSSNTGKLIF

SEQ ID NO: 373826 - protein, 15 aa, Homo sapiens
  CDR3 for beta chain variable domain of TCR clone 186913 (TRBV11-3, TRBJ2-5)
CASSDTSGGIETQYF

SEQ ID NO: 373827 - protein, 12 aa, Homo sapiens
  CDR3 for alpha chain variable domain of TCR clone 186914 (TRAV35, TRAJ28)
GVEGAGSYQLTF

SEQ ID NO: 373828 - protein, 15 aa, Homo sapiens
  CDR3 for beta chain variable domain of TCR clone 186914 (TRBV10-3, TRBJ2-3)
CAISLTSGGTDTQYF

SEQ ID NO: 373829 - protein, 15 aa, Homo sapiens
  CDR3 for alpha chain variable domain of TCR clone 186915 (TRAV38-2/DV8, TRAJ57)
CAYKSRLGGSEKLVF

SEQ ID NO: 373830 - protein, 16 aa, Homo sapiens
  CDR3 for beta chain variable domain of TCR clone 186915 (TRBV28, TRBJ1-5)
CASSFRGGYSNQPQHF

SEQ ID NO: 373831 - protein, 13 aa, Homo sapiens
  CDR3 for alpha chain variable domain of TCR clone 186916 (TRAV12-2, TRAJ7)
CAGLIYGNNRLAF

SEQ ID NO: 373832 - protein, 12 aa, Homo sapiens
  CDR3 for beta chain variable domain of TCR clone 186916 (TRBV12-4, TRBJ2-7)
CASSLGGHEQYF

SEQ ID NO: 373833 - protein, 17 aa, Homo sapiens
  CDR3 for alpha chain variable domain of TCR clone 186917 (TRAV13-1, )
CAANIQNPDPAVYQLRH

SEQ ID NO: 373834 - protein, 14 aa, Homo sapiens
  CDR3 for beta chain variable domain of TCR clone 186917 (TRBV19, TRBJ2-7)
CASSIGPNSYEQYF

SEQ ID NO: 373835 - protein, 15 aa, Homo sapiens
  CDR3 for alpha chain variable domain of TCR clone 186918 (TRAV2, TRAJ11)
CAVGGRNTGYSTLTF

SEQ ID NO: 373836 - protein, 14 aa, Homo sapiens
  CDR3 for beta chain variable domain of TCR clone 186918 (TRBV20-1, TRBJ2-1)
CSAQIGGSANEQFF

SEQ ID NO: 373837 - protein, 14 aa, Homo sapiens
  CDR3 for alpha chain variable domain of TCR clone 186919 (TRAV1-2, TRAJ8)
CAVREDTGFQKLVF

SEQ ID NO: 373838 - protein, 13 aa, Homo sapiens
  CDR3 for beta chain variable domain of TCR clone 186919 (TRBV28, TRBJ2-7)
CASKAGGVYEQYF

SEQ ID NO: 373839 - protein, 16 aa, Homo sapiens
  CDR3 for alpha chain variable domain of TCR clone 186920 (TRAV12-2, TRAJ45)
GAVKRNPGGGADGLTF

SEQ ID NO: 373840 - protein, 12 aa, Homo sapiens
  CDR3 for beta chain variable domain of TCR clone 186920 (TRBV6-1, TRBJ2-5)
CASSEGRETQYF

SEQ ID NO: 373841 - protein, 12 aa, Homo sapiens
  CDR3 for alpha chain variable domain of TCR clone 186921 (TRAV20, TRAJ39)
CAVGNAGNMLTF

SEQ ID NO: 373842 - protein, 17 aa, Homo sapiens
  CDR3 for beta chain variable domain of TCR clone 186921 (TRBV4-3, TRBJ1-5)
CASSQWGDGGPNQPQHF

SEQ ID NO: 373843 - protein, 16 aa, Homo sapiens
  CDR3 for alpha chain variable domain of TCR clone 186922 (TRAV1-2, TRAJ10)
CAVRGVLTGGGNKLPF

SEQ ID NO: 373844 - protein, 14 aa, Homo sapiens
  CDR3 for beta chain variable domain of TCR clone 186922 (TRBV4-1, TRBJ2-2)
CASSQAVNTGELFF

SEQ ID NO: 373845 - protein, 16 aa, Homo sapiens
  CDR3 for alpha chain variable domain of TCR clone 186923 (TRAV4, TRAJ42)
CLVGPIYGGSQGNLIF

SEQ ID NO: 373846 - protein, 13 aa, Homo sapiens
  CDR3 for beta chain variable domain of TCR clone 186923 (TRBV9, TRBJ2-1)
CASSPSGGNEQFF

SEQ ID NO: 373847 - protein, 16 aa, Homo sapiens
  CDR3 for alpha chain variable domain of TCR clone 186924 (TRAV3, TRAJ23)
CAVKIGIYNQGGKLIF

SEQ ID NO: 373848 - protein, 17 aa, Homo sapiens
  CDR3 for beta chain variable domain of TCR clone 186924 (TRBV10-3, TRBJ2-6)
CAIGGSTAPSGANVLTF

SEQ ID NO: 373849 - protein, 14 aa, Homo sapiens
  CDR3 for alpha chain variable domain of TCR clone 186925 (TRAV13-1, TRAJ35)
CAASKGGFGNGLHC

SEQ ID NO: 373850 - protein, 14 aa, Homo sapiens
  CDR3 for beta chain variable domain of TCR clone 186925 (TRBV11-3, TRBJ2-3)
CASSLVTTTDTQYF

SEQ ID NO: 373851 - protein, 10 aa, Homo sapiens
  CDR3 for alpha chain variable domain of TCR clone 186926 (TRAV12-2, )
CAVASLATTI

SEQ ID NO: 373852 - protein, 16 aa, Homo sapiens
  CDR3 for beta chain variable domain of TCR clone 186926 (TRBV5-1, TRBJ2-2)
CASSSRTGGRTGELFF

SEQ ID NO: 373853 - protein, 14 aa, Homo sapiens
  CDR3 for alpha chain variable domain of TCR clone 186927 (TRAV8-3, TRAJ39)
CAVGANNAVNMLTF

SEQ ID NO: 373854 - protein, 13 aa, Homo sapiens
  CDR3 for beta chain variable domain of TCR clone 186927 (TRBV3-1, TRBJ2-5)
CASSPVLSETQYF

SEQ ID NO: 373855 - protein, 14 aa, Homo sapiens
  CDR3 for alpha chain variable domain of TCR clone 186928 (TRAV2, TRAJ37)
CAVDFTSNTGKLIF

SEQ ID NO: 373856 - protein, 16 aa, Homo sapiens
  CDR3 for beta chain variable domain of TCR clone 186928 (TRBV6-1, TRBJ1-5)
CASSALHPRGNQPQHF

SEQ ID NO: 373857 - protein, 12 aa, Homo sapiens
  CDR3 for alpha chain variable domain of TCR clone 186929 (TRAV12-2, TRAJ16)
CAVTRYGQKLLF

SEQ ID NO: 373858 - protein, 17 aa, Homo sapiens
  CDR3 for beta chain variable domain of TCR clone 186929 (TRBV6-1, TRBJ1-1)
CASTARVSSAMNTEAFF

SEQ ID NO: 373859 - protein, 15 aa, Homo sapiens
  CDR3 for alpha chain variable domain of TCR clone 186930 (TRAV8-3, TRAJ45)
CASSYSGGGADVLPF

SEQ ID NO: 373860 - protein, 15 aa, Homo sapiens
  CDR3 for beta chain variable domain of TCR clone 186930 (TRBV20-1, TRBJ2-7)
CSARDRVSGMDEQYF

SEQ ID NO: 373861 - protein, 15 aa, Homo sapiens
  CDR3 for alpha chain variable domain of TCR clone 186931 (TRAV26-1, TRAJ40)
CIVRVTTPGTYKYIL

SEQ ID NO: 373862 - protein, 15 aa, Homo sapiens
  CDR3 for beta chain variable domain of TCR clone 186931 (TRBV20-1, TRBJ2-7)
CSAESGTSGAYEQYF

SEQ ID NO: 373863 - protein, 14 aa, Homo sapiens
  CDR3 for alpha chain variable domain of TCR clone 186932 (TRAV1-2, TRAJ8)
CAVREDAGFQKLVF

SEQ ID NO: 373864 - protein, 15 aa, Homo sapiens
  CDR3 for beta chain variable domain of TCR clone 186932 (TRBV7-6, TRBJ2-3)
CASSYLAGEADTQYF

SEQ ID NO: 373865 - protein, 15 aa, Homo sapiens
  CDR3 for alpha chain variable domain of TCR clone 186933 (TRAV23/DV6, TRAJ38)
CAGRSNPGNNRKLIW

SEQ ID NO: 373866 - protein, 16 aa, Homo sapiens
  CDR3 for beta chain variable domain of TCR clone 186933 (TRBV10-2, TRBJ1-5)
CASSRDRDYSNQPQHF

SEQ ID NO: 373867 - protein, 15 aa, Homo sapiens
  CDR3 for alpha chain variable domain of TCR clone 186934 (TRAV1-2, TRAJ12)
CADARWMDRSYKLIF

SEQ ID NO: 373868 - protein, 11 aa, Homo sapiens
  CDR3 for beta chain variable domain of TCR clone 186934 (TRBV29-1, TRBJ2-5)
CSEDRTGTQYF

SEQ ID NO: 373869 - protein, 11 aa, Homo sapiens
  CDR3 for alpha chain variable domain of TCR clone 186935 (TRAV2, TRAJ13)
CASGGYKKVTF

SEQ ID NO: 373870 - protein, 14 aa, Homo sapiens
  CDR3 for beta chain variable domain of TCR clone 186935 (TRBV6-3, TRBJ1-1)
CASSNLLPGAEAFF

SEQ ID NO: 373871 - protein, 18 aa, Homo sapiens
  CDR3 for alpha chain variable domain of TCR clone 186936 (TRAV16, TRAJ52)
CALSGVDAGGTSYGKLTF

SEQ ID NO: 373872 - protein, 15 aa, Homo sapiens
  CDR3 for beta chain variable domain of TCR clone 186936 (TRBV11-2, TRBJ2-2)
CASSLDGGNTGELFF

SEQ ID NO: 373873 - protein, 13 aa, Homo sapiens
  CDR3 for alpha chain variable domain of TCR clone 186937 (TRAV3, TRAJ20)
CAVRSLNDYKLSF

SEQ ID NO: 373874 - protein, 14 aa, Homo sapiens
  CDR3 for beta chain variable domain of TCR clone 186937 (TRBV7-8, TRBJ2-3)
CASSLEAGTDTQYF

SEQ ID NO: 373875 - protein, 13 aa, Homo sapiens
  CDR3 for alpha chain variable domain of TCR clone 186938 (TRAV12-3, TRAJ33)
CAMSLHSNYQLIW

SEQ ID NO: 373876 - protein, 13 aa, Homo sapiens
  CDR3 for beta chain variable domain of TCR clone 186938 (TRBV7-2, TRBJ2-2)
CASSLAVTGELFF

SEQ ID NO: 373877 - protein, 13 aa, Homo sapiens
  CDR3 for alpha chain variable domain of TCR clone 186939 (TRAV13-1, TRAJ12)
CGASPDSSYKLIF

SEQ ID NO: 373878 - protein, 16 aa, Homo sapiens
  CDR3 for beta chain variable domain of TCR clone 186939 (TRBV15, TRBJ2-1)
CATSRERLAGAYEQFF

SEQ ID NO: 373879 - protein, 13 aa, Homo sapiens
  CDR3 for alpha chain variable domain of TCR clone 186940 (TRAV29/DV5, TRAJ48)
CAASLFGHEKLTF

SEQ ID NO: 373880 - protein, 15 aa, Homo sapiens
  CDR3 for beta chain variable domain of TCR clone 186940 (TRBV20-1, TRBJ1-1)
CSAKPGQKMNTEAFF

SEQ ID NO: 373881 - protein, 14 aa, Homo sapiens
  CDR3 for alpha chain variable domain of TCR clone 186941 (TRAV1-2, TRAJ8)
CAVREDTGFQKLVF

SEQ ID NO: 373882 - protein, 15 aa, Homo sapiens
  CDR3 for beta chain variable domain of TCR clone 186941 (TRBV29-1, TRBJ2-1)
CSVPTVLALYNEQFF

SEQ ID NO: 373883 - protein, 14 aa, Homo sapiens
  CDR3 for alpha chain variable domain of TCR clone 186942 (TRAV3, TRAJ8)
CAVSLNTGFQKLVF

SEQ ID NO: 373884 - protein, 14 aa, Homo sapiens
  CDR3 for beta chain variable domain of TCR clone 186942 (TRBV20-1, TRBJ1-1)
CSAQTRIGGTEAFF

SEQ ID NO: 373885 - protein, 13 aa, Homo sapiens
  CDR3 for alpha chain variable domain of TCR clone 186943 (TRAV12-3, TRAJ33)
CAMSVNSNYQLIW

SEQ ID NO: 373886 - protein, 13 aa, Homo sapiens
  CDR3 for beta chain variable domain of TCR clone 186943 (TRBV6-1, TRBJ2-5)
CASGYQSVETQYF

SEQ ID NO: 373887 - protein, 13 aa, Homo sapiens
  CDR3 for alpha chain variable domain of TCR clone 186944 (TRAV12-1, TRAJ33)
CGDAPDSNYQLIW

SEQ ID NO: 373888 - protein, 13 aa, Homo sapiens
  CDR3 for beta chain variable domain of TCR clone 186944 (TRBV7-6, TRBJ1-2)
CSSSLVADYGYIF

SEQ ID NO: 373889 - protein, 14 aa, Homo sapiens
  CDR3 for alpha chain variable domain of TCR clone 186945 (TRAV38-1, TRAJ45)
CAYYSGGGADGLTF

SEQ ID NO: 373890 - protein, 19 aa, Homo sapiens
  CDR3 for beta chain variable domain of TCR clone 186945 (TRBV28, TRBJ2-1)
CQHPYWTVTGTSGRNEQFF

SEQ ID NO: 373891 - protein, 15 aa, Homo sapiens
  CDR3 for alpha chain variable domain of TCR clone 186946 (TRAV12-2, TRAJ53)
CAVNGGGGSNYKLTF

SEQ ID NO: 373892 - protein, 18 aa, Homo sapiens
  CDR3 for beta chain variable domain of TCR clone 186946 (TRBV12-4, TRBJ2-2)
CASSLVAGTRGRTGELFF

SEQ ID NO: 373893 - protein, 14 aa, Homo sapiens
  CDR3 for alpha chain variable domain of TCR clone 186947 (TRAV12-2, TRAJ5)
CAVNRSTGRRALTF

SEQ ID NO: 373894 - protein, 14 aa, Homo sapiens
  CDR3 for beta chain variable domain of TCR clone 186947 (TRBV15, TRBJ1-5)
CHSREQGGNQPQHF

SEQ ID NO: 373895 - protein, 13 aa, Homo sapiens
  CDR3 for alpha chain variable domain of TCR clone 186948 (TRAV35, TRAJ42)
CAGFPGSQGNLIF

SEQ ID NO: 373896 - protein, 16 aa, Homo sapiens
  CDR3 for beta chain variable domain of TCR clone 186948 (TRBV19, TRBJ2-2)
CASSFPGQGIAGELFF

SEQ ID NO: 373897 - protein, 14 aa, Homo sapiens
  CDR3 for alpha chain variable domain of TCR clone 186949 (TRAV1-2, TRAJ16)
CAVNRFSDGQKLLF

SEQ ID NO: 373898 - protein, 17 aa, Homo sapiens
  CDR3 for beta chain variable domain of TCR clone 186949 (TRBV15, TRBJ1-2)
RATSGREIDVVNYGYAF

SEQ ID NO: 373899 - protein, 15 aa, Homo sapiens
  CDR3 for alpha chain variable domain of TCR clone 186950 (TRAV17, TRAJ22)
CDTVAPSGSARQLTF

SEQ ID NO: 373900 - protein, 14 aa, Homo sapiens
  CDR3 for beta chain variable domain of TCR clone 186950 (TRBV20-1, TRBJ1-5)
CSARDGGSGQPQHF

SEQ ID NO: 373901 - protein, 15 aa, Homo sapiens
  CDR3 for alpha chain variable domain of TCR clone 186951 (TRAV3, TRAJ22)
CAVRDRGGSARQPPF

SEQ ID NO: 373902 - protein, 13 aa, Homo sapiens
  CDR3 for beta chain variable domain of TCR clone 186951 (TRBV12-4, TRBJ1-2)
CASSLRQGKGYTF

SEQ ID NO: 373903 - protein, 11 aa, Homo sapiens
  CDR3 for alpha chain variable domain of TCR clone 186952 (TRAV4, TRAJ23)
CLVAPGGKLIF

SEQ ID NO: 373904 - protein, 13 aa, Homo sapiens
  CDR3 for beta chain variable domain of TCR clone 186952 (TRBV19, TRBJ1-2)
CANSVPGQDGYTF

SEQ ID NO: 373905 - protein, 11 aa, Homo sapiens
  CDR3 for alpha chain variable domain of TCR clone 186953 (TRAV23/DV6, TRAJ56)
CAAPANSKLTF

SEQ ID NO: 373906 - protein, 15 aa, Homo sapiens
  CDR3 for beta chain variable domain of TCR clone 186953 (TRBV28, TRBJ1-3)
CASSMGWASGNTIYF

SEQ ID NO: 373907 - protein, 14 aa, Homo sapiens
  CDR3 for alpha chain variable domain of TCR clone 186954 (TRAV30, TRAJ33)
CGTVAPRSNYQLIW

SEQ ID NO: 373908 - protein, 14 aa, Homo sapiens
  CDR3 for beta chain variable domain of TCR clone 186954 (TRBV19, TRBJ2-1)
CASPTFVSSGEQFF

SEQ ID NO: 373909 - protein, 14 aa, Homo sapiens
  CDR3 for alpha chain variable domain of TCR clone 186955 (TRAV2, TRAJ12)
CAVDAMDSSYKLIF

SEQ ID NO: 373910 - protein, 13 aa, Homo sapiens
  CDR3 for beta chain variable domain of TCR clone 186955 (TRBV19, TRBJ2-1)
CASKVGPVGSSSS

SEQ ID NO: 373911 - protein, 14 aa, Homo sapiens
  CDR3 for alpha chain variable domain of TCR clone 186956 (TRAV12-2, TRAJ13)
CAVKKTGGYQKFNF

SEQ ID NO: 373912 - protein, 12 aa, Homo sapiens
  CDR3 for beta chain variable domain of TCR clone 186956 (TRBV12-4, TRBJ1-2)
CASSFIWLHLRF

SEQ ID NO: 373913 - protein, 12 aa, Homo sapiens
  CDR3 for alpha chain variable domain of TCR clone 186957 (TRAV22, TRAJ22)
CAPGGSARQLTF

SEQ ID NO: 373914 - protein, 14 aa, Homo sapiens
  CDR3 for beta chain variable domain of TCR clone 186957 (TRBV19, TRBJ2-7)
CASSLQGQAYGYTF

SEQ ID NO: 373915 - protein, 13 aa, Homo sapiens
  CDR3 for alpha chain variable domain of TCR clone 186958 (TRAV17, TRAJ5)
CAPMDTGRRALTF

SEQ ID NO: 373916 - protein, 13 aa, Homo sapiens
  CDR3 for beta chain variable domain of TCR clone 186958 (TRBV11-2, TRBJ1-1)
CASSAVVGTEAFF

SEQ ID NO: 373917 - protein, 12 aa, Homo sapiens
  CDR3 for alpha chain variable domain of TCR clone 186959 (TRAV21, TRAJ31)
CVLAGNNARLMF

SEQ ID NO: 373918 - protein, 15 aa, Homo sapiens
  CDR3 for beta chain variable domain of TCR clone 186959 (TRBV29-1, TRBJ2-7)
CSVEFFDRGSYEQYF

SEQ ID NO: 373919 - protein, 16 aa, Homo sapiens
  CDR3 for alpha chain variable domain of TCR clone 186960 (TRAV3, TRAJ37)
CAVRPHGSGNTGKLIF

SEQ ID NO: 373920 - protein, 16 aa, Homo sapiens
  CDR3 for beta chain variable domain of TCR clone 186960 (TRBV3-1, TRBJ2-5)
CASSQDWASGQETQYF

SEQ ID NO: 373921 - protein, 13 aa, Homo sapiens
  CDR3 for alpha chain variable domain of TCR clone 186961 (TRAV23/DV6, TRAJ31)
CAARRGNNARLMF

SEQ ID NO: 373922 - protein, 15 aa, Homo sapiens
  CDR3 for beta chain variable domain of TCR clone 186961 (TRBV5-1, TRBJ2-2)
CASSLFGQNTGELFF

SEQ ID NO: 373923 - protein, 12 aa, Homo sapiens
  CDR3 for alpha chain variable domain of TCR clone 186962 (TRAV10, TRAJ34)
CVVSGKHRQAHL

SEQ ID NO: 373924 - protein, 16 aa, Homo sapiens
  CDR3 for beta chain variable domain of TCR clone 186962 (TRBV19, TRBJ2-1)
CASSKAGPSSYNEQFF

SEQ ID NO: 373925 - protein, 16 aa, Homo sapiens
  CDR3 for alpha chain variable domain of TCR clone 186963 (TRAV8-3, TRAJ8)
CAVPRDGNTGVQKLVF

SEQ ID NO: 373926 - protein, 15 aa, Homo sapiens
  CDR3 for beta chain variable domain of TCR clone 186963 (TRBV6-1, TRBJ2-6)
CASSSRPSGANVLTF

SEQ ID NO: 373927 - protein, 13 aa, Homo sapiens
  CDR3 for alpha chain variable domain of TCR clone 186964 (TRAV35, TRAJ48)
CAGHVSGNEKLTF

SEQ ID NO: 373928 - protein, 14 aa, Homo sapiens
  CDR3 for beta chain variable domain of TCR clone 186964 (TRBV19, TRBJ2-1)
CASPTFVLSGEQFF

SEQ ID NO: 373929 - protein, 14 aa, Homo sapiens
  CDR3 for alpha chain variable domain of TCR clone 186965 (TRAV12-2, TRAJ9)
CAVSFGNGGFKTIF

SEQ ID NO: 373930 - protein, 18 aa, Homo sapiens
  CDR3 for beta chain variable domain of TCR clone 186965 (TRBV3-1, TRBJ2-7)
CASSRISAGGRSAYEQYF

SEQ ID NO: 373931 - protein, 14 aa, Homo sapiens
  CDR3 for alpha chain variable domain of TCR clone 186966 (TRAV26-1, TRAJ22)
CIVRVYGSPRQLTF

SEQ ID NO: 373932 - protein, 17 aa, Homo sapiens
  CDR3 for beta chain variable domain of TCR clone 186966 (TRBV7-3, TRBJ2-3)
CASSPGGLAGFGDTQYF

SEQ ID NO: 373933 - protein, 14 aa, Homo sapiens
  CDR3 for alpha chain variable domain of TCR clone 186967 (TRAV13-2, TRAJ9)
CAENSFTGGFKTIF

SEQ ID NO: 373934 - protein, 13 aa, Homo sapiens
  CDR3 for beta chain variable domain of TCR clone 186967 (TRBV19, TRBJ2-7)
CASSIDRTYGQYF

SEQ ID NO: 373935 - protein, 14 aa, Homo sapiens
  CDR3 for alpha chain variable domain of TCR clone 186968 (TRAV13-1, TRAJ35)
CAASKGGFGNVLHC

SEQ ID NO: 373936 - protein, 16 aa, Homo sapiens
  CDR3 for beta chain variable domain of TCR clone 186968 (TRBV19, TRBJ2-1)
CASSIKLAGSYNEQFF

SEQ ID NO: 373937 - protein, 12 aa, Homo sapiens
  CDR3 for alpha chain variable domain of TCR clone 186969 (TRAV1-1, TRAJ30)
CAVRGRDDKIIF

SEQ ID NO: 373938 - protein, 12 aa, Homo sapiens
  CDR3 for beta chain variable domain of TCR clone 186969 (TRBV7-9, TRBJ2-7)
CASSIKREEQYF

SEQ ID NO: 373939 - protein, 16 aa, Homo sapiens
  CDR3 for alpha chain variable domain of TCR clone 186970 (TRAV30, TRAJ24)
CGTEIVDADSWGKFQF

SEQ ID NO: 373940 - protein, 16 aa, Homo sapiens
  CDR3 for beta chain variable domain of TCR clone 186970 (TRBV7-9, TRBJ1-2)
CASSLGFSSGEDGYTV

SEQ ID NO: 373941 - protein, 18 aa, Homo sapiens
  CDR3 for alpha chain variable domain of TCR clone 186971 (TRAV13-1, TRAJ52)
CAASKRSAGGTSYGKMTF

SEQ ID NO: 373942 - protein, 13 aa, Homo sapiens
  CDR3 for beta chain variable domain of TCR clone 186971 (TRBV12-4, TRBJ1-2)
CASSVRQGKGYVF

SEQ ID NO: 373943 - protein, 14 aa, Homo sapiens
  CDR3 for alpha chain variable domain of TCR clone 186972 (TRAV8-3, TRAJ44)
CAVARRSTASKLTF

SEQ ID NO: 373944 - protein, 16 aa, Homo sapiens
  CDR3 for beta chain variable domain of TCR clone 186972 (TRBV7-3, TRBJ2-1)
CASSLVSGSSNNEQFF

SEQ ID NO: 373945 - protein, 16 aa, Homo sapiens
  CDR3 for alpha chain variable domain of TCR clone 186973 (TRAV17, TRAJ28)
CATASVSGGGSYQLTF

SEQ ID NO: 373946 - protein, 11 aa, Homo sapiens
  CDR3 for beta chain variable domain of TCR clone 186973 (TRBV7-9, TRBJ2-5)
CASSLGETQYF

SEQ ID NO: 373947 - protein, 14 aa, Homo sapiens
  CDR3 for alpha chain variable domain of TCR clone 186974 (TRAV12-2, TRAJ13)
CAVKKTGGYQKATF

SEQ ID NO: 373948 - protein, 14 aa, Homo sapiens
  CDR3 for beta chain variable domain of TCR clone 186974 (TRBV10-3, TRBJ2-1)
CASSSDLAYNEQFF

SEQ ID NO: 373949 - protein, 14 aa, Homo sapiens
  CDR3 for alpha chain variable domain of TCR clone 186975 (TRAV38-1, TRAJ45)
CAYYSGGGADGLTF

SEQ ID NO: 373950 - protein, 19 aa, Homo sapiens
  CDR3 for beta chain variable domain of TCR clone 186975 (TRBV28, TRBJ2-1)
CQHPYWTVTGLAGGNEQFF

SEQ ID NO: 373951 - protein, 16 aa, Homo sapiens
  CDR3 for alpha chain variable domain of TCR clone 186976 (TRAV30, TRAJ24)
CGTEIVDAESWGKFQF

SEQ ID NO: 373952 - protein, 14 aa, Homo sapiens
  CDR3 for beta chain variable domain of TCR clone 186976 (TRBV12-5, TRBJ2-5)
CASGSRTDQETQYF

SEQ ID NO: 373953 - protein, 15 aa, Homo sapiens
  CDR3 for alpha chain variable domain of TCR clone 186977 (TRAV23/DV6, TRAJ18)
CSASFRGSTLGRLDF

SEQ ID NO: 373954 - protein, 13 aa, Homo sapiens
  CDR3 for beta chain variable domain of TCR clone 186977 (TRBV28, TRBJ2-7)
CAILDRAGGEQYF

SEQ ID NO: 373955 - protein, 11 aa, Homo sapiens
  CDR3 for alpha chain variable domain of TCR clone 186978 (TRAV14/DV4, )
CAMREISRALT

SEQ ID NO: 373956 - protein, 14 aa, Homo sapiens
  CDR3 for beta chain variable domain of TCR clone 186978 (TRBV2, TRBJ2-1)
CASSDRAYYNEQFF

SEQ ID NO: 373957 - protein, 16 aa, Homo sapiens
  CDR3 for alpha chain variable domain of TCR clone 186979 (TRAV12-3, TRAJ53)
CAMSPGSGGSNYKLTF

SEQ ID NO: 373958 - protein, 14 aa, Homo sapiens
  CDR3 for beta chain variable domain of TCR clone 186979 (TRBV7-9, TRBJ2-5)
CASSLDTAQETQYF

SEQ ID NO: 373959 - protein, 15 aa, Homo sapiens
  CDR3 for alpha chain variable domain of TCR clone 186980 (TRAV26-1, TRAJ29)
FIVKVEGSGNTPLVF

SEQ ID NO: 373960 - protein, 14 aa, Homo sapiens
  CDR3 for beta chain variable domain of TCR clone 186980 (TRBV18, TRBJ2-5)
CASSPGVSQETQYF

SEQ ID NO: 373961 - protein, 12 aa, Homo sapiens
  CDR3 for alpha chain variable domain of TCR clone 186981 (TRAV12-1, TRAJ40)
CVVYSGTYKYIF

SEQ ID NO: 373962 - protein, 15 aa, Homo sapiens
  CDR3 for beta chain variable domain of TCR clone 186981 (TRBV5-5, TRBJ2-2)
CASSRQASGAGELFF

SEQ ID NO: 373963 - protein, 15 aa, Homo sapiens
  CDR3 for alpha chain variable domain of TCR clone 186982 (TRAV21, TRAJ53)
CATLNSGGSNYKLTF

SEQ ID NO: 373964 - protein, 19 aa, Homo sapiens
  CDR3 for beta chain variable domain of TCR clone 186982 (TRBV7-9, TRBJ2-1)
CASSHNRGALLRSYNEQFF

SEQ ID NO: 373965 - protein, 13 aa, Homo sapiens
  CDR3 for alpha chain variable domain of TCR clone 186983 (TRAV8-3, TRAJ36)
CAVGATGANNLFF

SEQ ID NO: 373966 - protein, 12 aa, Homo sapiens
  CDR3 for beta chain variable domain of TCR clone 186983 (TRBV7-9, TRBJ2-7)
CASSFGSYEQYF

SEQ ID NO: 373967 - protein, 17 aa, Homo sapiens
  CDR3 for alpha chain variable domain of TCR clone 186984 (TRAV3, TRAJ6)
CAVRDGPRAGGSYIPTF

SEQ ID NO: 373968 - protein, 12 aa, Homo sapiens
  CDR3 for beta chain variable domain of TCR clone 186984 (TRBV29-1, TRBJ2-2)
CSVDKYTGELFF

SEQ ID NO: 373969 - protein, 12 aa, Homo sapiens
  CDR3 for alpha chain variable domain of TCR clone 186985 (TRAV29/DV5, TRAJ15)
CAASGEGTALIF

SEQ ID NO: 373970 - protein, 15 aa, Homo sapiens
  CDR3 for beta chain variable domain of TCR clone 186985 (TRBV4-3, TRBJ1-5)
CASSHDSGVGQPQHF

SEQ ID NO: 373971 - protein, 14 aa, Homo sapiens
  CDR3 for alpha chain variable domain of TCR clone 186986 (TRAV12-1, TRAJ4)
CGEQRSGGYNKLIF

SEQ ID NO: 373972 - protein, 15 aa, Homo sapiens
  CDR3 for beta chain variable domain of TCR clone 186986 (TRBV3-1, TRBJ2-5)
CASSANLGGPETQYF

SEQ ID NO: 373973 - protein, 12 aa, Homo sapiens
  CDR3 for alpha chain variable domain of TCR clone 186987 (TRAV21, TRAJ12)
CAVMDSSYTLIF

SEQ ID NO: 373974 - protein, 16 aa, Homo sapiens
  CDR3 for beta chain variable domain of TCR clone 186987 (TRBV7-9, TRBJ2-5)
CASRLEIGTRKETQYF

SEQ ID NO: 373975 - protein, 17 aa, Homo sapiens
  CDR3 for alpha chain variable domain of TCR clone 186988 (TRAV8-2, )
CVVNIQNPDPALYQLRD

SEQ ID NO: 373976 - protein, 14 aa, Homo sapiens
  CDR3 for beta chain variable domain of TCR clone 186988 (TRBV7-9, TRBJ2-5)
CASSLVGGEETQYF

SEQ ID NO: 373977 - protein, 14 aa, Homo sapiens
  CDR3 for alpha chain variable domain of TCR clone 186989 (TRAV1-2, TRAJ16)
CAVNRFSDGQKLLF

SEQ ID NO: 373978 - protein, 16 aa, Homo sapiens
  CDR3 for beta chain variable domain of TCR clone 186989 (TRBV12-4, TRBJ1-5)
CASSRPVGGSNEPQHF

SEQ ID NO: 373979 - protein, 12 aa, Homo sapiens
  CDR3 for alpha chain variable domain of TCR clone 186990 (TRAV2, TRAJ15)
CAVAQAGTALIF

SEQ ID NO: 373980 - protein, 15 aa, Homo sapiens
  CDR3 for beta chain variable domain of TCR clone 186990 (TRBV7-2, TRBJ1-2)
CASSPRAGWNYGYTF

SEQ ID NO: 373981 - protein, 14 aa, Homo sapiens
  CDR3 for alpha chain variable domain of TCR clone 186991 (TRAV2, TRAJ3)
CAVRPYSSASKIIS

SEQ ID NO: 373982 - protein, 17 aa, Homo sapiens
  CDR3 for beta chain variable domain of TCR clone 186991 (TRBV7-6, TRBJ2-5)
CASSSPQAGDPSETQYF

SEQ ID NO: 373983 - protein, 23 aa, Homo sapiens
  CDR3 for alpha chain variable domain of TCR clone 186992 (TRAV21, TRAJ32)
CAVEIMVVLQTSSSLELALCVLS

SEQ ID NO: 373984 - protein, 13 aa, Homo sapiens
  CDR3 for beta chain variable domain of TCR clone 186992 (TRBV2, TRBJ1-6)
CASGRGGISPLHF

SEQ ID NO: 373985 - protein, 14 aa, Homo sapiens
  CDR3 for alpha chain variable domain of TCR clone 186993 (TRAV13-1, TRAJ26)
CAASSAHYGQNFVF

SEQ ID NO: 373986 - protein, 13 aa, Homo sapiens
  CDR3 for beta chain variable domain of TCR clone 186993 (TRBV19, TRBJ1-1)
CASSITGESEAFF

SEQ ID NO: 373987 - protein, 13 aa, Homo sapiens
  CDR3 for alpha chain variable domain of TCR clone 186994 (TRAV27, TRAJ45)
CRSSGGGADGLTF

SEQ ID NO: 373988 - protein, 13 aa, Homo sapiens
  CDR3 for beta chain variable domain of TCR clone 186994 (TRBV7-9, TRBJ1-2)
CASSLKQNYGCTF

SEQ ID NO: 373989 - protein, 22 aa, Homo sapiens
  CDR3 for alpha chain variable domain of TCR clone 186995 (TRAV27, TRAJ38)
CAARRNAGNNHIQNPDPAVYQL

SEQ ID NO: 373990 - protein, 16 aa, Homo sapiens
  CDR3 for beta chain variable domain of TCR clone 186995 (TRBV7-2, TRBJ2-5)
CASSPFPTGGEETQYF

SEQ ID NO: 373991 - protein, 18 aa, Homo sapiens
  CDR3 for alpha chain variable domain of TCR clone 186996 (TRAV21, TRAJ52)
CAVRPSPAGGTSDGKLTF

SEQ ID NO: 373992 - protein, 15 aa, Homo sapiens
  CDR3 for beta chain variable domain of TCR clone 186996 (TRBV27, TRBJ2-1)
CASSNGGGSSNEQFF

SEQ ID NO: 373993 - protein, 13 aa, Homo sapiens
  CDR3 for alpha chain variable domain of TCR clone 186997 (TRAV8-4, TRAJ49)
CAVSDPGGNQFYF

SEQ ID NO: 373994 - protein, 15 aa, Homo sapiens
  CDR3 for beta chain variable domain of TCR clone 186997 (TRBV10-2, TRBJ2-6)
CASSEQGTGANVLTF

SEQ ID NO: 373995 - protein, 13 aa, Homo sapiens
  CDR3 for alpha chain variable domain of TCR clone 186998 (TRAV17, TRAJ9)
CATDGTGGFKTIF

SEQ ID NO: 373996 - protein, 15 aa, Homo sapiens
  CDR3 for beta chain variable domain of TCR clone 186998 (TRBV2, TRBJ2-5)
RASSEQGLIGETQYF

SEQ ID NO: 373997 - protein, 13 aa, Homo sapiens
  CDR3 for alpha chain variable domain of TCR clone 186999 (TRAV27, TRAJ57)
CRSAQGGSEKLVF

SEQ ID NO: 373998 - protein, 11 aa, Homo sapiens
  CDR3 for beta chain variable domain of TCR clone 186999 (TRBV11-2, TRBJ1-1)
CATSINTEAFF

SEQ ID NO: 373999 - protein, 15 aa, Homo sapiens
  CDR3 for alpha chain variable domain of TCR clone 187000 (TRAV14/DV4, TRAJ26)
CAMREGQNYGQNFVF

SEQ ID NO: 374000 - protein, 14 aa, Homo sapiens
  CDR3 for beta chain variable domain of TCR clone 187000 (TRBV7-3, TRBJ2-1)
CASSLAGGTNEQFF

SEQ ID NO: 374001 - protein, 14 aa, Homo sapiens
  CDR3 for alpha chain variable domain of TCR clone 187001 (TRAV20, TRAJ32)
CCGRYGGATNKLIF

SEQ ID NO: 374002 - protein, 16 aa, Homo sapiens
  CDR3 for beta chain variable domain of TCR clone 187001 (TRBV19, TRBJ1-1)
CASSPTRFWPGTEAFF

SEQ ID NO: 374003 - protein, 14 aa, Homo sapiens
  CDR3 for alpha chain variable domain of TCR clone 187002 (TRAV13-1, TRAJ3)
CAAEGYSSASKIIF

SEQ ID NO: 374004 - protein, 14 aa, Homo sapiens
  CDR3 for beta chain variable domain of TCR clone 187002 (TRBV19, TRBJ2-5)
CARSSSGIQETQYF

SEQ ID NO: 374005 - protein, 15 aa, Homo sapiens
  CDR3 for alpha chain variable domain of TCR clone 187003 (TRAV21, TRAJ40)
CAVRPQTSGTYKYIF

SEQ ID NO: 374006 - protein, 16 aa, Homo sapiens
  CDR3 for beta chain variable domain of TCR clone 187003 (TRBV19, TRBJ2-1)
CASSKAGPSSYNEQFF

SEQ ID NO: 374007 - protein, 15 aa, Homo sapiens
  CDR3 for alpha chain variable domain of TCR clone 187004 (TRAV1-2, TRAJ35)
CAVRGPGGFGNVLHC

SEQ ID NO: 374008 - protein, 14 aa, Homo sapiens
  CDR3 for beta chain variable domain of TCR clone 187004 (TRBV5-1, TRBJ2-1)
CASSLDDRFDEHFF

SEQ ID NO: 374009 - protein, 12 aa, Homo sapiens
  CDR3 for alpha chain variable domain of TCR clone 187005 (TRAV1-1, TRAJ8)
CAGGTGFQKLVF

SEQ ID NO: 374010 - protein, 15 aa, Homo sapiens
  CDR3 for beta chain variable domain of TCR clone 187005 (TRBV7-9, TRBJ1-4)
CACSRTGGFNEELFF

SEQ ID NO: 374011 - protein, 15 aa, Homo sapiens
  CDR3 for alpha chain variable domain of TCR clone 187006 (TRAV16, TRAJ52)
CSKWVGGTSYGKLTF

SEQ ID NO: 374012 - protein, 14 aa, Homo sapiens
  CDR3 for beta chain variable domain of TCR clone 187006 (TRBV19, TRBJ1-2)
CASSLQGQAYGYTF

SEQ ID NO: 374013 - protein, 15 aa, Homo sapiens
  CDR3 for alpha chain variable domain of TCR clone 187007 (TRAV23/DV6, TRAJ37)
CAAGEGSSNTGKLIL

SEQ ID NO: 374014 - protein, 17 aa, Homo sapiens
  CDR3 for beta chain variable domain of TCR clone 187007 (TRBV20-1, TRBJ2-7)
CSATRAGGVAGVEEQYF

SEQ ID NO: 374015 - protein, 13 aa, Homo sapiens
  CDR3 for alpha chain variable domain of TCR clone 187008 (TRAV3, TRAJ43)
CAVKAKNNNDMRF

SEQ ID NO: 374016 - protein, 16 aa, Homo sapiens
  CDR3 for beta chain variable domain of TCR clone 187008 (TRBV7-9, TRBJ2-3)
CASSFSVAGGTDTQYF

SEQ ID NO: 374017 - protein, 11 aa, Homo sapiens
  CDR3 for alpha chain variable domain of TCR clone 187009 (TRAV25, TRAJ47)
CAGLYGNKLVF

SEQ ID NO: 374018 - protein, 14 aa, Homo sapiens
  CDR3 for beta chain variable domain of TCR clone 187009 (TRBV19, TRBJ2-1)
CASKEGAQVNEQFF

SEQ ID NO: 374019 - protein, 15 aa, Homo sapiens
  CDR3 for alpha chain variable domain of TCR clone 187010 (TRAV3, TRAJ3)
CAVRDRDSSTSKIIF

SEQ ID NO: 374020 - protein, 18 aa, Homo sapiens
  CDR3 for beta chain variable domain of TCR clone 187010 (TRBV25-1, TRBJ1-2)
CASSGLQNGQGLIFGYTF

SEQ ID NO: 374021 - protein, 18 aa, Homo sapiens
  CDR3 for alpha chain variable domain of TCR clone 187011 (TRAV26-1, TRAJ23)
CCVLLHRQSPNQGGKLIF

SEQ ID NO: 374022 - protein, 18 aa, Homo sapiens
  CDR3 for beta chain variable domain of TCR clone 187011 (TRBV20-1, TRBJ2-6)
CSAETTPTHGSGANVLTF

SEQ ID NO: 374023 - protein, 13 aa, Homo sapiens
  CDR3 for alpha chain variable domain of TCR clone 187012 (TRAV12-2, TRAJ39)
CAVNNNAGNMLTF

SEQ ID NO: 374024 - protein, 13 aa, Homo sapiens
  CDR3 for beta chain variable domain of TCR clone 187012 (TRBV2, TRBJ1-5)
CATAGPGNQPQYF

SEQ ID NO: 374025 - protein, 14 aa, Homo sapiens
  CDR3 for alpha chain variable domain of TCR clone 187013 (TRAV12-2, TRAJ13)
CAVKKTGGYQKVTF

SEQ ID NO: 374026 - protein, 14 aa, Homo sapiens
  CDR3 for beta chain variable domain of TCR clone 187013 (TRBV7-2, TRBJ2-7)
CASSPKTSLYEQYF

SEQ ID NO: 374027 - protein, 14 aa, Homo sapiens
  CDR3 for alpha chain variable domain of TCR clone 187014 (TRAV12-3, TRAJ10)
SHLPLTGGGNKLTF

SEQ ID NO: 374028 - protein, 14 aa, Homo sapiens
  CDR3 for beta chain variable domain of TCR clone 187014 (TRBV27, TRBJ2-7)
CASSLARGHYEQYF

SEQ ID NO: 374029 - protein, 15 aa, Homo sapiens
  CDR3 for alpha chain variable domain of TCR clone 187015 (TRAV14/DV4, TRAJ22)
CAMSRLSVSASQLTF

SEQ ID NO: 374030 - protein, 15 aa, Homo sapiens
  CDR3 for beta chain variable domain of TCR clone 187015 (TRBV28, TRBJ2-5)
CASSFRQGALETQYF

SEQ ID NO: 374031 - protein, 10 aa, Homo sapiens
  CDR3 for alpha chain variable domain of TCR clone 187016 (TRAV1-2, TRAJ31)
CVSEDARLMF

SEQ ID NO: 374032 - protein, 14 aa, Homo sapiens
  CDR3 for beta chain variable domain of TCR clone 187016 (TRBV19, TRBJ2-1)
CASPTFVLSGEQFS

SEQ ID NO: 374033 - protein, 13 aa, Homo sapiens
  CDR3 for alpha chain variable domain of TCR clone 187017 (TRAV8-4, TRAJ27)
CAVSPRNAGKSTF

SEQ ID NO: 374034 - protein, 15 aa, Homo sapiens
  CDR3 for beta chain variable domain of TCR clone 187017 (TRBV27, TRBJ2-1)
CASSNGGGSSNEQFF

SEQ ID NO: 374035 - protein, 15 aa, Homo sapiens
  CDR3 for alpha chain variable domain of TCR clone 187018 (TRAV21, TRAJ53)
CATLNSGGSNYKLTF

SEQ ID NO: 374036 - protein, 15 aa, Homo sapiens
  CDR3 for beta chain variable domain of TCR clone 187018 (TRBV6-1, TRBJ2-4)
CASSEAVWTINIKYF

SEQ ID NO: 374037 - protein, 13 aa, Homo sapiens
  CDR3 for alpha chain variable domain of TCR clone 187019 (TRAV1-2, TRAJ13)
CAVNSGGYQKVTF

SEQ ID NO: 374038 - protein, 14 aa, Homo sapiens
  CDR3 for beta chain variable domain of TCR clone 187019 (TRBV4-1, TRBJ1-5)
CASSPKGDNQLQHF

SEQ ID NO: 374039 - protein, 14 aa, Homo sapiens
  CDR3 for alpha chain variable domain of TCR clone 187020 (TRAV9-2, TRAJ39)
CALYIYNAGNMLTF

SEQ ID NO: 374040 - protein, 15 aa, Homo sapiens
  CDR3 for beta chain variable domain of TCR clone 187020 (TRBV19, TRBJ2-2)
CASSLNRGVTGELFF

SEQ ID NO: 374041 - protein, 13 aa, Homo sapiens
  CDR3 for alpha chain variable domain of TCR clone 187021 (TRAV13-2, TRAJ48)
CAELDFGNEKLTF

SEQ ID NO: 374042 - protein, 13 aa, Homo sapiens
  CDR3 for beta chain variable domain of TCR clone 187021 (TRBV13, TRBJ2-5)
CASSPEVGETQYF

SEQ ID NO: 374043 - protein, 14 aa, Homo sapiens
  CDR3 for alpha chain variable domain of TCR clone 187022 (TRAV12-3, TRAJ22)
CAMSLFGSARQLTF

SEQ ID NO: 374044 - protein, 10 aa, Homo sapiens
  CDR3 for beta chain variable domain of TCR clone 187022 (TRBV12-4, TRBJ2-2)
CQQLPGELFF

SEQ ID NO: 374045 - protein, 14 aa, Homo sapiens
  CDR3 for alpha chain variable domain of TCR clone 187023 (TRAV4, TRAJ22)
CLARLSGSAGQLTF

SEQ ID NO: 374046 - protein, 14 aa, Homo sapiens
  CDR3 for beta chain variable domain of TCR clone 187023 (TRBV7-8, TRBJ2-3)
CASSLEAGTDTQYF

SEQ ID NO: 374047 - protein, 15 aa, Homo sapiens
  CDR3 for alpha chain variable domain of TCR clone 187024 (TRAV12-1, TRAJ44)
CVADLPTGTASKLTF

SEQ ID NO: 374048 - protein, 14 aa, Homo sapiens
  CDR3 for beta chain variable domain of TCR clone 187024 (TRBV6-1, TRBJ1-3)
CASVQGGGGNTIYF

SEQ ID NO: 374049 - protein, 18 aa, Homo sapiens
  CDR3 for alpha chain variable domain of TCR clone 187025 (TRAV1-1, TRAJ29)
CLLLLRCASNSGNTLLVF

SEQ ID NO: 374050 - protein, 14 aa, Homo sapiens
  CDR3 for beta chain variable domain of TCR clone 187025 (TRBV7-2, TRBJ2-3)
CASSFVMPTDTQYF

SEQ ID NO: 374051 - protein, 12 aa, Homo sapiens
  CDR3 for alpha chain variable domain of TCR clone 187026 (TRAV30, TRAJ43)
CGTEERGNDMRF

SEQ ID NO: 374052 - protein, 14 aa, Homo sapiens
  CDR3 for beta chain variable domain of TCR clone 187026 (TRBV2, TRBJ1-6)
CASSEAYAYWALHF

SEQ ID NO: 374053 - protein, 13 aa, Homo sapiens
  CDR3 for alpha chain variable domain of TCR clone 187027 (TRAV12-2, TRAJ39)
CAVNNNAGNMLTF

SEQ ID NO: 374054 - protein, 14 aa, Homo sapiens
  CDR3 for beta chain variable domain of TCR clone 187027 (TRBV25-1, TRBJ1-1)
CASTHLGGNTEAFF

SEQ ID NO: 374055 - protein, 15 aa, Homo sapiens
  CDR3 for alpha chain variable domain of TCR clone 187028 (TRAV12-3, TRAJ49)
CAMAVTPNTGNQFYF

SEQ ID NO: 374056 - protein, 18 aa, Homo sapiens
  CDR3 for beta chain variable domain of TCR clone 187028 (TRBV4-1, TRBJ1-5)
RASSQDPRGQGLNQAQHF

SEQ ID NO: 374057 - protein, 11 aa, Homo sapiens
  CDR3 for alpha chain variable domain of TCR clone 187029 (TRAV12-2, TRAJ39)
CAVNNILTFGG

SEQ ID NO: 374058 - protein, 13 aa, Homo sapiens
  CDR3 for beta chain variable domain of TCR clone 187029 (TRBV27, TRBJ2-1)
CASSSGSYNEQFF

SEQ ID NO: 374059 - protein, 14 aa, Homo sapiens
  CDR3 for alpha chain variable domain of TCR clone 187030 (TRAV1-2, TRAJ16)
CAVNRFSDGQKLLF

SEQ ID NO: 374060 - protein, 15 aa, Homo sapiens
  CDR3 for beta chain variable domain of TCR clone 187030 (TRBV25-1, TRBJ2-5)
CASSDTGTHQETQYF

SEQ ID NO: 374061 - protein, 13 aa, Homo sapiens
  CDR3 for alpha chain variable domain of TCR clone 187031 (TRAV20, TRAJ37)
CAGSSSNTGKLIF

SEQ ID NO: 374062 - protein, 15 aa, Homo sapiens
  CDR3 for beta chain variable domain of TCR clone 187031 (TRBV7-2, TRBJ2-1)
CASSFQADEYNEQFF

SEQ ID NO: 374063 - protein, 17 aa, Homo sapiens
  CDR3 for alpha chain variable domain of TCR clone 187032 (TRAV4, TRAJ13)
CLVGVQGSSGGYQKVTF

SEQ ID NO: 374064 - protein, 14 aa, Homo sapiens
  CDR3 for beta chain variable domain of TCR clone 187032 (TRBV7-2, TRBJ2-7)
CASSPKTSFYEQYF

SEQ ID NO: 374065 - protein, 16 aa, Homo sapiens
  CDR3 for alpha chain variable domain of TCR clone 187033 (TRAV21, TRAJ37)
CAVRTAGSSNTGKLIF

SEQ ID NO: 374066 - protein, 12 aa, Homo sapiens
  CDR3 for beta chain variable domain of TCR clone 187033 (TRBV7-9, TRBJ2-5)
CQPSVGRETQYF

SEQ ID NO: 374067 - protein, 14 aa, Homo sapiens
  CDR3 for alpha chain variable domain of TCR clone 187034 (TRAV21, TRAJ10)
CAVMPIGFGNVLHC

SEQ ID NO: 374068 - protein, 12 aa, Homo sapiens
  CDR3 for beta chain variable domain of TCR clone 187034 (TRBV7-9, TRBJ2-7)
CASSIKREEQYF

SEQ ID NO: 374069 - protein, 14 aa, Homo sapiens
  CDR3 for alpha chain variable domain of TCR clone 187035 (TRAV16, TRAJ39)
CALSKNNAGNIFTF

SEQ ID NO: 374070 - protein, 15 aa, Homo sapiens
  CDR3 for beta chain variable domain of TCR clone 187035 (TRBV6-3, TRBJ2-7)
CASSSPGTVFYEQYF

SEQ ID NO: 374071 - protein, 18 aa, Homo sapiens
  CDR3 for alpha chain variable domain of TCR clone 187036 (TRAV21, TRAJ52)
CAVRPSPAGGTSYGKLTF

SEQ ID NO: 374072 - protein, 15 aa, Homo sapiens
  CDR3 for beta chain variable domain of TCR clone 187036 (TRBV11-2, TRBJ2-1)
CASSSPSTRYNGQFF

SEQ ID NO: 374073 - protein, 12 aa, Homo sapiens
  CDR3 for alpha chain variable domain of TCR clone 187037 (TRAV8-6, TRAJ43)
CAVGHNNNYMRF

SEQ ID NO: 374074 - protein, 14 aa, Homo sapiens
  CDR3 for beta chain variable domain of TCR clone 187037 (TRBV10-3, TRBJ1-1)
CAISDGSGVTEAFF

SEQ ID NO: 374075 - protein, 13 aa, Homo sapiens
  CDR3 for alpha chain variable domain of TCR clone 187038 (TRAV12-2, TRAJ13)
CREEDWGYQKVTF

SEQ ID NO: 374076 - protein, 10 aa, Homo sapiens
  CDR3 for beta chain variable domain of TCR clone 187038 (TRBV12-4, TRBJ1-2)
CASSFIWLHL

SEQ ID NO: 374077 - protein, 13 aa, Homo sapiens
  CDR3 for alpha chain variable domain of TCR clone 187039 (TRAV8-6, TRAJ33)
CAVSEGSNYQLVW

SEQ ID NO: 374078 - protein, 16 aa, Homo sapiens
  CDR3 for beta chain variable domain of TCR clone 187039 (TRBV7-3, TRBJ2-1)
CASSKPLAGGYDEQFF

SEQ ID NO: 374079 - protein, 14 aa, Homo sapiens
  CDR3 for alpha chain variable domain of TCR clone 187040 (TRAV13-1, TRAJ48)
CAASTDFGHEKLTF

SEQ ID NO: 374080 - protein, 14 aa, Homo sapiens
  CDR3 for beta chain variable domain of TCR clone 187040 (TRBV10-3, TRBJ2-5)
CATKGGNNQETQYF

SEQ ID NO: 374081 - protein, 14 aa, Homo sapiens
  CDR3 for alpha chain variable domain of TCR clone 187041 (TRAV12-3, TRAJ10)
SHLPLTGVGTKLTF

SEQ ID NO: 374082 - protein, 16 aa, Homo sapiens
  CDR3 for beta chain variable domain of TCR clone 187041 (TRBV19, TRBJ2-2)
CASRSPGTGATGELFF

SEQ ID NO: 374083 - protein, 18 aa, Homo sapiens
  CDR3 for alpha chain variable domain of TCR clone 187042 (TRAV12-3, TRAJ52)
CAMSRTNAGGTSYGKLTF

SEQ ID NO: 374084 - protein, 15 aa, Homo sapiens
  CDR3 for beta chain variable domain of TCR clone 187042 (TRBV7-2, TRBJ2-1)
CASSSVAGGHNEQFF

SEQ ID NO: 374085 - protein, 15 aa, Homo sapiens
  CDR3 for alpha chain variable domain of TCR clone 187043 (TRAV38-1, TRAJ37)
CAFIHGSGNTGKLLF

SEQ ID NO: 374086 - protein, 12 aa, Homo sapiens
  CDR3 for beta chain variable domain of TCR clone 187043 (TRBV7-9, TRBJ2-7)
CASSFGGYEQYF

SEQ ID NO: 374087 - protein, 15 aa, Homo sapiens
  CDR3 for alpha chain variable domain of TCR clone 187044 (TRAV12-2, TRAJ42)
CAVISHGGSQGNLIF

SEQ ID NO: 374088 - protein, 13 aa, Homo sapiens
  CDR3 for beta chain variable domain of TCR clone 187044 (TRBV27, TRBJ1-1)
CASSVSANTEAFF

SEQ ID NO: 374089 - protein, 14 aa, Homo sapiens
  CDR3 for alpha chain variable domain of TCR clone 187045 (TRAV12-2, TRAJ40)
CAVKIPSGTYKYIF

SEQ ID NO: 374090 - protein, 17 aa, Homo sapiens
  CDR3 for beta chain variable domain of TCR clone 187045 (TRBV11-2, TRBJ2-1)
CARSLYPPGVEYNEQFF

SEQ ID NO: 374091 - protein, 13 aa, Homo sapiens
  CDR3 for alpha chain variable domain of TCR clone 187046 (TRAV36/DV7, TRAJ38)
CVANAGNNRKLIW

SEQ ID NO: 374092 - protein, 16 aa, Homo sapiens
  CDR3 for beta chain variable domain of TCR clone 187046 (TRBV20-1, TRBJ2-3)
CSAVRDRGPIADTQYF

SEQ ID NO: 374093 - protein, 14 aa, Homo sapiens
  CDR3 for alpha chain variable domain of TCR clone 187047 (TRAV26-1, TRAJ34)
CIVRVAYNTDKLIF

SEQ ID NO: 374094 - protein, 13 aa, Homo sapiens
  CDR3 for beta chain variable domain of TCR clone 187047 (TRBV4-2, TRBJ1-1)
CASSQAWNTEAFF

SEQ ID NO: 374095 - protein, 15 aa, Homo sapiens
  CDR3 for alpha chain variable domain of TCR clone 187048 (TRAV3, TRAJ22)
CAVRDRGGFARQTTF

SEQ ID NO: 374096 - protein, 13 aa, Homo sapiens
  CDR3 for beta chain variable domain of TCR clone 187048 (TRBV7-3, TRBJ2-1)
CASSPVAYNEQFF

SEQ ID NO: 374097 - protein, 13 aa, Homo sapiens
  CDR3 for alpha chain variable domain of TCR clone 187049 (TRAV13-1, TRAJ20)
CAARVSNDYKLSF

SEQ ID NO: 374098 - protein, 12 aa, Homo sapiens
  CDR3 for beta chain variable domain of TCR clone 187049 (TRBV20-1, TRBJ2-1)
CSARLGRDEQFF

SEQ ID NO: 374099 - protein, 13 aa, Homo sapiens
  CDR3 for alpha chain variable domain of TCR clone 187050 (TRAV36/DV7, TRAJ37)
CAVFYSNTGKLIF

SEQ ID NO: 374100 - protein, 15 aa, Homo sapiens
  CDR3 for beta chain variable domain of TCR clone 187050 (TRBV12-4, TRBJ2-5)
CQQFFVRGRQETQYF

SEQ ID NO: 374101 - protein, 12 aa, Homo sapiens
  CDR3 for alpha chain variable domain of TCR clone 187051 (TRAV23/DV6, TRAJ53)
CAASKLGSGGSN

SEQ ID NO: 374102 - protein, 14 aa, Homo sapiens
  CDR3 for beta chain variable domain of TCR clone 187051 (TRBV7-9, TRBJ2-3)
CASRLEQGTNTQYF

SEQ ID NO: 374103 - protein, 15 aa, Homo sapiens
  CDR3 for alpha chain variable domain of TCR clone 187052 (TRAV3, TRAJ32)
CAVSSSGGATNKLIF

SEQ ID NO: 374104 - protein, 13 aa, Homo sapiens
  CDR3 for beta chain variable domain of TCR clone 187052 (TRBV20-1, TRBJ2-7)
CSARPSTNYEQYF

SEQ ID NO: 374105 - protein, 12 aa, Homo sapiens
  CDR3 for alpha chain variable domain of TCR clone 187053 (TRAV12-3, TRAJ17)
CAMTLTANKLTF

SEQ ID NO: 374106 - protein, 14 aa, Homo sapiens
  CDR3 for beta chain variable domain of TCR clone 187053 (TRBV11-2, TRBJ2-3)
CASSRLARTDTQYF

SEQ ID NO: 374107 - protein, 14 aa, Homo sapiens
  CDR3 for alpha chain variable domain of TCR clone 187054 (TRAV1-2, TRAJ16)
CAVNRFSDGQKLLF

SEQ ID NO: 374108 - protein, 15 aa, Homo sapiens
  CDR3 for beta chain variable domain of TCR clone 187054 (TRBV7-6, TRBJ2-1)
CASSPGQGPYNEQFF

SEQ ID NO: 374109 - protein, 17 aa, Homo sapiens
  CDR3 for alpha chain variable domain of TCR clone 187055 (TRAV3, TRAJ6)
CAVRDGPRAGGSYIPTF

SEQ ID NO: 374110 - protein, 15 aa, Homo sapiens
  CDR3 for beta chain variable domain of TCR clone 187055 (TRBV2, TRBJ2-2)
RASSRETVGTGELFF

SEQ ID NO: 374111 - protein, 14 aa, Homo sapiens
  CDR3 for alpha chain variable domain of TCR clone 187056 (TRAV23/DV6, TRAJ4)
CAAPSSGGYNKLIF

SEQ ID NO: 374112 - protein, 14 aa, Homo sapiens
  CDR3 for beta chain variable domain of TCR clone 187056 (TRBV19, TRBJ1-1)
CRFGGPVTGTEAFF

SEQ ID NO: 374113 - protein, 16 aa, Homo sapiens
  CDR3 for alpha chain variable domain of TCR clone 187057 (TRAV3, TRAJ37)
CAVRVRGSGNTGKLIF

SEQ ID NO: 374114 - protein, 15 aa, Homo sapiens
  CDR3 for beta chain variable domain of TCR clone 187057 (TRBV7-9, TRBJ1-6)
CASSSPGRGNSPLHF

SEQ ID NO: 374115 - protein, 14 aa, Homo sapiens
  CDR3 for alpha chain variable domain of TCR clone 187058 (TRAV4, TRAJ32)
CLVNYGGATNKLIF

SEQ ID NO: 374116 - protein, 14 aa, Homo sapiens
  CDR3 for beta chain variable domain of TCR clone 187058 (TRBV15, TRBJ2-5)
CAASGGTRTETQCL

SEQ ID NO: 374117 - protein, 13 aa, Homo sapiens
  CDR3 for alpha chain variable domain of TCR clone 187059 (TRAV17, TRAJ22)
CAHHSGSARQLTF

SEQ ID NO: 374118 - protein, 16 aa, Homo sapiens
  CDR3 for beta chain variable domain of TCR clone 187059 (TRBV4-1, TRBJ1-2)
CASSQDAGQVLYGHTF

SEQ ID NO: 374119 - protein, 10 aa, Homo sapiens
  CDR3 for alpha chain variable domain of TCR clone 187060 (TRAV39, TRAJ49)
CAVAGNPFYF

SEQ ID NO: 374120 - protein, 14 aa, Homo sapiens
  CDR3 for beta chain variable domain of TCR clone 187060 (TRBV7-2, TRBJ2-7)
CASSPKTSFYEQYF

SEQ ID NO: 374121 - protein, 17 aa, Homo sapiens
  CDR3 for alpha chain variable domain of TCR clone 187061 (TRAV12-2, TRAJ4)
CAVNVRPVSGGYNKLTF

SEQ ID NO: 374122 - protein, 13 aa, Homo sapiens
  CDR3 for beta chain variable domain of TCR clone 187061 (TRBV12-4, TRBJ1-2)
CASSLRQGKGYTF

SEQ ID NO: 374123 - protein, 13 aa, Homo sapiens
  CDR3 for alpha chain variable domain of TCR clone 187062 (TRAV17, TRAJ54)
CATSWGGAQKLVF

SEQ ID NO: 374124 - protein, 15 aa, Homo sapiens
  CDR3 for beta chain variable domain of TCR clone 187062 (TRBV6-1, TRBJ2-1)
CASSELRGQYNEQFF

SEQ ID NO: 374125 - protein, 15 aa, Homo sapiens
  CDR3 for alpha chain variable domain of TCR clone 187063 (TRAV26-1, TRAJ15)
CIVRMANQAGTALNF

SEQ ID NO: 374126 - protein, 15 aa, Homo sapiens
  CDR3 for beta chain variable domain of TCR clone 187063 (TRBV20-1, TRBJ1-1)
CSARKAETSNTEAFF

SEQ ID NO: 374127 - protein, 13 aa, Homo sapiens
  CDR3 for alpha chain variable domain of TCR clone 187064 (TRAV2, TRAJ15)
CAVASQAGTALIF

SEQ ID NO: 374128 - protein, 15 aa, Homo sapiens
  CDR3 for beta chain variable domain of TCR clone 187064 (TRBV20-1, TRBJ1-1)
CSASRGVTGNTEAFF

SEQ ID NO: 374129 - protein, 13 aa, Homo sapiens
  CDR3 for alpha chain variable domain of TCR clone 187065 (TRAV3, TRAJ21)
CAVREPDFNKFYF

SEQ ID NO: 374130 - protein, 16 aa, Homo sapiens
  CDR3 for beta chain variable domain of TCR clone 187065 (TRBV5-1, TRBJ2-4)
CASSFPTSGRVDQKHA

SEQ ID NO: 374131 - protein, 15 aa, Homo sapiens
  CDR3 for alpha chain variable domain of TCR clone 187066 (TRAV23/DV6, TRAJ18)
CAARYRGSTLGRLYF

SEQ ID NO: 374132 - protein, 15 aa, Homo sapiens
  CDR3 for beta chain variable domain of TCR clone 187066 (TRBV7-8, TRBJ2-3)
CASSLSADSGGAQYF

SEQ ID NO: 374133 - protein, 16 aa, Homo sapiens
  CDR3 for alpha chain variable domain of TCR clone 187067 (TRAV12-3, TRAJ53)
CAMSPGSGGSNYKLTF

SEQ ID NO: 374134 - protein, 15 aa, Homo sapiens
  CDR3 for beta chain variable domain of TCR clone 187067 (TRBV5-1, TRBJ2-1)
CASRLDAGPSYAQFF

SEQ ID NO: 374135 - protein, 11 aa, Homo sapiens
  CDR3 for alpha chain variable domain of TCR clone 187068 (TRAV8-3, TRAJ15)
CAVGPGTALIF

SEQ ID NO: 374136 - protein, 18 aa, Homo sapiens
  CDR3 for beta chain variable domain of TCR clone 187068 (TRBV18, TRBJ2-3)
CASSDTSGAAGGTDTQYF

SEQ ID NO: 374137 - protein, 12 aa, Homo sapiens
  CDR3 for alpha chain variable domain of TCR clone 187069 (TRAV12-1, TRAJ40)
CVVYSVTYKYIF

SEQ ID NO: 374138 - protein, 14 aa, Homo sapiens
  CDR3 for beta chain variable domain of TCR clone 187069 (TRBV19, TRBJ2-3)
CASSAPRGTDTQYF

SEQ ID NO: 374139 - protein, 12 aa, Homo sapiens
  CDR3 for alpha chain variable domain of TCR clone 187070 (TRAV8-3, TRAJ20)
CAVGANDYKLSF

SEQ ID NO: 374140 - protein, 13 aa, Homo sapiens
  CDR3 for beta chain variable domain of TCR clone 187070 (TRBV19, TRBJ2-1)
CATSRGVYNEQFF

SEQ ID NO: 374141 - protein, 15 aa, Homo sapiens
  CDR3 for alpha chain variable domain of TCR clone 187071 (TRAV12-2, TRAJ53)
CAVNGGGGSNYKLTF

SEQ ID NO: 374142 - protein, 14 aa, Homo sapiens
  CDR3 for beta chain variable domain of TCR clone 187071 (TRBV19, TRBJ2-2)
CASSTLHMSGELFF

SEQ ID NO: 374143 - protein, 16 aa, Homo sapiens
  CDR3 for alpha chain variable domain of TCR clone 187072 (TRAV12-3, TRAJ53)
CAMSPGSGGSNYKLNF

SEQ ID NO: 374144 - protein, 16 aa, Homo sapiens
  CDR3 for beta chain variable domain of TCR clone 187072 (TRBV4-2, TRBJ1-1)
CASSQAGFGMNTEAFF

SEQ ID NO: 374145 - protein, 13 aa, Homo sapiens
  CDR3 for alpha chain variable domain of TCR clone 187073 (TRAV27, TRAJ3)
ASLRGSSASKIIF

SEQ ID NO: 374146 - protein, 14 aa, Homo sapiens
  CDR3 for beta chain variable domain of TCR clone 187073 (TRBV12-4, TRBJ1-3)
CASKTGFVGNTIYF

SEQ ID NO: 374147 - protein, 14 aa, Homo sapiens
  CDR3 for alpha chain variable domain of TCR clone 187074 (TRAV12-2, TRAJ17)
CAVLFKAAGNKLPF

SEQ ID NO: 374148 - protein, 11 aa, Homo sapiens
  CDR3 for beta chain variable domain of TCR clone 187074 (TRBV7-2, TRBJ2-3)
CASSSSDTQYF

SEQ ID NO: 374149 - protein, 13 aa, Homo sapiens
  CDR3 for alpha chain variable domain of TCR clone 187075 (TRAV36/DV7, TRAJ54)
CAVCTQGAQKLVF

SEQ ID NO: 374150 - protein, 13 aa, Homo sapiens
  CDR3 for beta chain variable domain of TCR clone 187075 (TRBV7-6, TRBJ2-7)
CATSLDHTHEQYF

SEQ ID NO: 374151 - protein, 23 aa, Homo sapiens
  CDR3 for alpha chain variable domain of TCR clone 187076 (TRAV26-1, TRAJ38)
CIADNAGNNHIQNPDPAVSQLRD

SEQ ID NO: 374152 - protein, 12 aa, Homo sapiens
  CDR3 for beta chain variable domain of TCR clone 187076 (TRBV11-3, TRBJ2-2)
CASSLGGGELFF

SEQ ID NO: 374153 - protein, 15 aa, Homo sapiens
  CDR3 for alpha chain variable domain of TCR clone 187077 (TRAV3, TRAJ5)
CAVRDRKTGRRALPF

SEQ ID NO: 374154 - protein, 15 aa, Homo sapiens
  CDR3 for beta chain variable domain of TCR clone 187077 (TRBV7-9, TRBJ2-2)
CASGPLDTFPGELFF

SEQ ID NO: 374155 - protein, 14 aa, Homo sapiens
  CDR3 for alpha chain variable domain of TCR clone 187078 (TRAV12-2, TRAJ40)
LAVKIPSGNYKYIF

SEQ ID NO: 374156 - protein, 13 aa, Homo sapiens
  CDR3 for beta chain variable domain of TCR clone 187078 (TRBV20-1, TRBJ1-3)
CSARVQGRDTIYF

SEQ ID NO: 374157 - protein, 15 aa, Homo sapiens
  CDR3 for alpha chain variable domain of TCR clone 187079 (TRAV17, TRAJ57)
CATGPSKGGSEKLGF

SEQ ID NO: 374158 - protein, 14 aa, Homo sapiens
  CDR3 for beta chain variable domain of TCR clone 187079 (TRBV12-5, TRBJ2-5)
CASGSRTHQETQYF

SEQ ID NO: 374159 - protein, 13 aa, Homo sapiens
  CDR3 for alpha chain variable domain of TCR clone 187080 (TRAV23/DV6, TRAJ9)
CAGSYTGGFQTIF

SEQ ID NO: 374160 - protein, 12 aa, Homo sapiens
  CDR3 for beta chain variable domain of TCR clone 187080 (TRBV7-8, TRBJ2-4)
CASSLGGNIQYF

SEQ ID NO: 374161 - protein, 16 aa, Homo sapiens
  CDR3 for alpha chain variable domain of TCR clone 187081 (TRAV16, TRAJ52)
CALSAAGGTSYGKLTF

SEQ ID NO: 374162 - protein, 15 aa, Homo sapiens
  CDR3 for beta chain variable domain of TCR clone 187081 (TRBV19, TRBJ1-5)
CASSIVWADNQPQHF

SEQ ID NO: 374163 - protein, 13 aa, Homo sapiens
  CDR3 for alpha chain variable domain of TCR clone 187082 (TRAV35, TRAJ32)
CAGVGGATIKLIF

SEQ ID NO: 374164 - protein, 17 aa, Homo sapiens
  CDR3 for beta chain variable domain of TCR clone 187082 (TRBV4-3, TRBJ2-1)
CASSQFSSGRAPGEQFF

SEQ ID NO: 374165 - protein, 12 aa, Homo sapiens
  CDR3 for alpha chain variable domain of TCR clone 187083 (TRAV26-1, TRAJ43)
CIVRGNNNDMRF

SEQ ID NO: 374166 - protein, 14 aa, Homo sapiens
  CDR3 for beta chain variable domain of TCR clone 187083 (TRBV7-9, TRBJ2-5)
CASSLDTAQETQYF

SEQ ID NO: 374167 - protein, 13 aa, Homo sapiens
  CDR3 for alpha chain variable domain of TCR clone 187084 (TRAV12-3, TRAJ13)
CAMTSGGYQKVTF

SEQ ID NO: 374168 - protein, 13 aa, Homo sapiens
  CDR3 for beta chain variable domain of TCR clone 187084 (TRBV20-1, TRBJ2-2)
CSALSVGAGELFF

SEQ ID NO: 374169 - protein, 11 aa, Homo sapiens
  CDR3 for alpha chain variable domain of TCR clone 187085 (TRAV1-2, TRAJ20)
CAVANDYKLSF

SEQ ID NO: 374170 - protein, 17 aa, Homo sapiens
  CDR3 for beta chain variable domain of TCR clone 187085 (TRBV11-2, TRBJ2-6)
CASSQRDIFSGANVLTF

SEQ ID NO: 374171 - protein, 15 aa, Homo sapiens
  CDR3 for alpha chain variable domain of TCR clone 187086 (TRAV16, TRAJ27)
CSPCGGGTNAGKSTF

SEQ ID NO: 374172 - protein, 15 aa, Homo sapiens
  CDR3 for beta chain variable domain of TCR clone 187086 (TRBV6-6, TRBJ2-3)
CASSYRRGGTDTQYF

SEQ ID NO: 374173 - protein, 16 aa, Homo sapiens
  CDR3 for alpha chain variable domain of TCR clone 187087 (TRAV3, TRAJ4)
CAVRPSPSGGYNKLIV

SEQ ID NO: 374174 - protein, 12 aa, Homo sapiens
  CDR3 for beta chain variable domain of TCR clone 187087 (TRBV7-9, TRBJ2-7)
CASSQGVYEQYF

SEQ ID NO: 374175 - protein, 14 aa, Homo sapiens
  CDR3 for alpha chain variable domain of TCR clone 187088 (TRAV1-2, TRAJ37)
CAVRSKSNTGKLIF

SEQ ID NO: 374176 - protein, 14 aa, Homo sapiens
  CDR3 for beta chain variable domain of TCR clone 187088 (TRBV6-3, TRBJ1-2)
CTSSEGGGSYGYTF

SEQ ID NO: 374177 - protein, 13 aa, Homo sapiens
  CDR3 for alpha chain variable domain of TCR clone 187089 (TRAV12-3, TRAJ33)
CATSVNSNYQLIW

SEQ ID NO: 374178 - protein, 13 aa, Homo sapiens
  CDR3 for beta chain variable domain of TCR clone 187089 (TRBV4-1, TRBJ2-2)
CASSQGNTGELFF

SEQ ID NO: 374179 - protein, 11 aa, Homo sapiens
  CDR3 for alpha chain variable domain of TCR clone 187090 (TRAV21, TRAJ27)
CAVRMQANQPL

SEQ ID NO: 374180 - protein, 13 aa, Homo sapiens
  CDR3 for beta chain variable domain of TCR clone 187090 (TRBV7-3, TRBJ1-1)
CASSQDWGAEAFF

SEQ ID NO: 374181 - protein, 13 aa, Homo sapiens
  CDR3 for alpha chain variable domain of TCR clone 187091 (TRAV2, TRAJ40)
CAVVTSGTSKYIF

SEQ ID NO: 374182 - protein, 16 aa, Homo sapiens
  CDR3 for beta chain variable domain of TCR clone 187091 (TRBV19, TRBJ2-1)
CASSKAGPCSYNEQFF

SEQ ID NO: 374183 - protein, 14 aa, Homo sapiens
  CDR3 for alpha chain variable domain of TCR clone 187092 (TRAV12-1, TRAJ17)
YVVNYKAAGNKLTF

SEQ ID NO: 374184 - protein, 14 aa, Homo sapiens
  CDR3 for beta chain variable domain of TCR clone 187092 (TRBV7-8, TRBJ2-3)
CASSLEAGTDTQYF

SEQ ID NO: 374185 - protein, 12 aa, Homo sapiens
  CDR3 for alpha chain variable domain of TCR clone 187093 (TRAV3, TRAJ20)
CAVRDPDYKLSF

SEQ ID NO: 374186 - protein, 14 aa, Homo sapiens
  CDR3 for beta chain variable domain of TCR clone 187093 (TRBV7-3, TRBJ2-7)
CASSLKADSYEQYF

SEQ ID NO: 374187 - protein, 12 aa, Homo sapiens
  CDR3 for alpha chain variable domain of TCR clone 187094 (TRAV8-1, TRAJ6)
CASSGGSYIPTC

SEQ ID NO: 374188 - protein, 12 aa, Homo sapiens
  CDR3 for beta chain variable domain of TCR clone 187094 (TRBV19, TRBJ1-1)
CASMNRYTEAFF

SEQ ID NO: 374189 - protein, 11 aa, Homo sapiens
  CDR3 for alpha chain variable domain of TCR clone 187095 (TRAV12-3, TRAJ26)
CAMSGGRWDNY

SEQ ID NO: 374190 - protein, 12 aa, Homo sapiens
  CDR3 for beta chain variable domain of TCR clone 187095 (TRBV19, TRBJ1-1)
CASSTTGIEAFF

SEQ ID NO: 374191 - protein, 13 aa, Homo sapiens
  CDR3 for alpha chain variable domain of TCR clone 187096 (TRAV3, TRAJ20)
CAVRDTGDYKLSF

SEQ ID NO: 374192 - protein, 12 aa, Homo sapiens
  CDR3 for beta chain variable domain of TCR clone 187096 (TRBV7-9, TRBJ2-7)
CASSLEGYEQYF

SEQ ID NO: 374193 - protein, 15 aa, Homo sapiens
  CDR3 for alpha chain variable domain of TCR clone 187097 (TRAV8-3, TRAJ45)
CASSYSGGGADGLAF

SEQ ID NO: 374194 - protein, 12 aa, Homo sapiens
  CDR3 for beta chain variable domain of TCR clone 187097 (TRBV29-1, TRBJ2-3)
CSVTGGADTQYF

SEQ ID NO: 374195 - protein, 16 aa, Homo sapiens
  CDR3 for alpha chain variable domain of TCR clone 187098 (TRAV13-2, TRAJ15)
CAENIPSNQAGTALIF

SEQ ID NO: 374196 - protein, 14 aa, Homo sapiens
  CDR3 for beta chain variable domain of TCR clone 187098 (TRBV25-1, TRBJ1-1)
CASTHLGGNTEAFF

SEQ ID NO: 374197 - protein, 17 aa, Homo sapiens
  CDR3 for alpha chain variable domain of TCR clone 187099 (TRAV3, TRAJ42)
CAVRDRDYGGSHGNLIF

SEQ ID NO: 374198 - protein, 13 aa, Homo sapiens
  CDR3 for beta chain variable domain of TCR clone 187099 (TRBV20-1, TRBJ2-5)
CSARRGTGATQYF

SEQ ID NO: 374199 - protein, 14 aa, Homo sapiens
  CDR3 for alpha chain variable domain of TCR clone 187100 (TRAV8-3, TRAJ39)
CAVGANNAGNMLTF

SEQ ID NO: 374200 - protein, 13 aa, Homo sapiens
  CDR3 for beta chain variable domain of TCR clone 187100 (TRBV4-2, TRBJ2-3)
CASSQDWQHTQYF

SEQ ID NO: 374201 - protein, 13 aa, Homo sapiens
  CDR3 for alpha chain variable domain of TCR clone 187101 (TRAV2, TRAJ40)
CAVVTSGTYRYIF

SEQ ID NO: 374202 - protein, 16 aa, Homo sapiens
  CDR3 for beta chain variable domain of TCR clone 187101 (TRBV2, TRBJ2-1)
CASSVGGSLSYNEQFF

SEQ ID NO: 374203 - protein, 11 aa, Homo sapiens
  CDR3 for alpha chain variable domain of TCR clone 187102 (TRAV1-1, TRAJ20)
CAVFNDYKLSF

SEQ ID NO: 374204 - protein, 12 aa, Homo sapiens
  CDR3 for beta chain variable domain of TCR clone 187102 (TRBV20-1, TRBJ2-1)
CSARLGTDEQFF

SEQ ID NO: 374205 - protein, 16 aa, Homo sapiens
  CDR3 for alpha chain variable domain of TCR clone 187103 (TRAV23/DV6, TRAJ9)
CAASIGGNTGGFKTIF

SEQ ID NO: 374206 - protein, 15 aa, Homo sapiens
  CDR3 for beta chain variable domain of TCR clone 187103 (TRBV20-1, TRBJ2-1)
CSARGIGGTYNEQFF

SEQ ID NO: 374207 - protein, 16 aa, Homo sapiens
  CDR3 for alpha chain variable domain of TCR clone 187104 (TRAV30, TRAJ48)
CGTEIKSKFGNEKLTF

SEQ ID NO: 374208 - protein, 11 aa, Homo sapiens
  CDR3 for beta chain variable domain of TCR clone 187104 (TRBV7-8, TRBJ2-7)
CASSLSLEQYF

SEQ ID NO: 374209 - protein, 14 aa, Homo sapiens
  CDR3 for alpha chain variable domain of TCR clone 187105 (TRAV27, TRAJ38)
CAGDRAGNNRKLIW

SEQ ID NO: 374210 - protein, 13 aa, Homo sapiens
  CDR3 for beta chain variable domain of TCR clone 187105 (TRBV12-4, TRBJ1-1)
CASSPGTGFEAFF

SEQ ID NO: 374211 - protein, 15 aa, Homo sapiens
  CDR3 for alpha chain variable domain of TCR clone 187106 (TRAV16, TRAJ10)
CALEGLTGGGNKLTF

SEQ ID NO: 374212 - protein, 20 aa, Homo sapiens
  CDR3 for beta chain variable domain of TCR clone 187106 (TRBV28, TRBJ2-1)
CASTPIGRSPGLAGGNEQFF

SEQ ID NO: 374213 - protein, 17 aa, Homo sapiens
  CDR3 for alpha chain variable domain of TCR clone 187107 (TRAV3, TRAJ6)
CAVRAGPRAGGSYIPTF

SEQ ID NO: 374214 - protein, 12 aa, Homo sapiens
  CDR3 for beta chain variable domain of TCR clone 187107 (TRBV7-9, TRBJ2-7)
CASSLFDYEQYF

SEQ ID NO: 374215 - protein, 15 aa, Homo sapiens
  CDR3 for alpha chain variable domain of TCR clone 187108 (TRAV2, TRAJ9)
CAVEDRGTGGFKTIF

SEQ ID NO: 374216 - protein, 19 aa, Homo sapiens
  CDR3 for beta chain variable domain of TCR clone 187108 (TRBV28, TRBJ2-7)
CASSYSGTSLLGWVYEQYF

SEQ ID NO: 374217 - protein, 17 aa, Homo sapiens
  CDR3 for alpha chain variable domain of TCR clone 187109 (TRAV23/DV6, TRAJ58)
CAARLLRGETSGSRLTF

SEQ ID NO: 374218 - protein, 14 aa, Homo sapiens
  CDR3 for beta chain variable domain of TCR clone 187109 (TRBV23-1, TRBJ2-5)
CASSFLRSQETQYF

SEQ ID NO: 374219 - protein, 12 aa, Homo sapiens
  CDR3 for alpha chain variable domain of TCR clone 187110 (TRAV21, TRAJ8)
CAVNTGFQKLVF

SEQ ID NO: 374220 - protein, 13 aa, Homo sapiens
  CDR3 for beta chain variable domain of TCR clone 187110 (TRBV6-3, TRBJ2-1)
CASIYDNYNEQFF

SEQ ID NO: 374221 - protein, 13 aa, Homo sapiens
  CDR3 for alpha chain variable domain of TCR clone 187111 (TRAV17, TRAJ58)
CARGETSGSRLTF

SEQ ID NO: 374222 - protein, 20 aa, Homo sapiens
  CDR3 for beta chain variable domain of TCR clone 187111 (TRBV7-8, TRBJ2-2)
CASSHLFPGPTIHITGELFF

SEQ ID NO: 374223 - protein, 18 aa, Homo sapiens
  CDR3 for alpha chain variable domain of TCR clone 187112 (TRAV21, TRAJ52)
CAVRPSPAGGTSYGKLTF

SEQ ID NO: 374224 - protein, 13 aa, Homo sapiens
  CDR3 for beta chain variable domain of TCR clone 187112 (TRBV29-1, TRBJ2-2)
CSVYRGDTGELFF

SEQ ID NO: 374225 - protein, 13 aa, Homo sapiens
  CDR3 for alpha chain variable domain of TCR clone 187113 (TRAV2, TRAJ40)
CAVVTSGTYKYIF

SEQ ID NO: 374226 - protein, 14 aa, Homo sapiens
  CDR3 for beta chain variable domain of TCR clone 187113 (TRBV7-3, TRBJ2-1)
CASSLAGATNEQFF

SEQ ID NO: 374227 - protein, 13 aa, Homo sapiens
  CDR3 for alpha chain variable domain of TCR clone 187114 (TRAV27, TRAJ41)
CAGEGNSGYALNF

SEQ ID NO: 374228 - protein, 14 aa, Homo sapiens
  CDR3 for beta chain variable domain of TCR clone 187114 (TRBV24-1, TRBJ1-1)
CATSIPRGDTEAFF

SEQ ID NO: 374229 - protein, 18 aa, Homo sapiens
  CDR3 for alpha chain variable domain of TCR clone 187115 (TRAV26-1, TRAJ52)
CIVRVAGAGGTSYGKLTF

SEQ ID NO: 374230 - protein, 16 aa, Homo sapiens
  CDR3 for beta chain variable domain of TCR clone 187115 (TRBV7-2, TRBJ2-5)
CASSSKWLSGQETQYF

SEQ ID NO: 374231 - protein, 12 aa, Homo sapiens
  CDR3 for alpha chain variable domain of TCR clone 187116 (TRAV17, TRAJ16)
CATVLPGQKLLF

SEQ ID NO: 374232 - protein, 15 aa, Homo sapiens
  CDR3 for beta chain variable domain of TCR clone 187116 (TRBV6-3, TRBJ2-2)
CASSFLATLTGSCFL

SEQ ID NO: 374233 - protein, 13 aa, Homo sapiens
  CDR3 for alpha chain variable domain of TCR clone 187117 (TRAV1-1, TRAJ9)
CAAKNTGGFKTIF

SEQ ID NO: 374234 - protein, 15 aa, Homo sapiens
  CDR3 for beta chain variable domain of TCR clone 187117 (TRBV7-9, TRBJ1-5)
CASSQGHQPNQPQHF

SEQ ID NO: 374235 - protein, 15 aa, Homo sapiens
  CDR3 for alpha chain variable domain of TCR clone 187118 (TRAV13-1, TRAJ57)
QVPPLYQGGSEKLVF

SEQ ID NO: 374236 - protein, 17 aa, Homo sapiens
  CDR3 for beta chain variable domain of TCR clone 187118 (TRBV7-3, TRBJ2-3)
CASSLMKRMRGADTQYF

SEQ ID NO: 374237 - protein, 12 aa, Homo sapiens
  CDR3 for alpha chain variable domain of TCR clone 187119 (TRAV20, TRAJ37)
CALPSNTGKLVF

SEQ ID NO: 374238 - protein, 16 aa, Homo sapiens
  CDR3 for beta chain variable domain of TCR clone 187119 (TRBV28, TRBJ1-2)
CASSHGQGVYKDGYTF

SEQ ID NO: 374239 - protein, 16 aa, Homo sapiens
  CDR3 for alpha chain variable domain of TCR clone 187120 (TRAV14/DV4, TRAJ8)
CAMREGQYTGFQKLVL

SEQ ID NO: 374240 - protein, 15 aa, Homo sapiens
  CDR3 for beta chain variable domain of TCR clone 187120 (TRBV28, TRBJ1-3)
CASGATGNSGNTIYF

SEQ ID NO: 374241 - protein, 13 aa, Homo sapiens
  CDR3 for alpha chain variable domain of TCR clone 187121 (TRAV12-3, TRAJ56)
CALATGANSKLTF

SEQ ID NO: 374242 - protein, 13 aa, Homo sapiens
  CDR3 for beta chain variable domain of TCR clone 187121 (TRBV4-1, TRBJ2-1)
CASSQEVQYEQFF

SEQ ID NO: 374243 - protein, 12 aa, Homo sapiens
  CDR3 for alpha chain variable domain of TCR clone 187122 (TRAV13-1, TRAJ21)
CAAKEGFNKFYF

SEQ ID NO: 374244 - protein, 15 aa, Homo sapiens
  CDR3 for beta chain variable domain of TCR clone 187122 (TRBV12-4, TRBJ2-5)
CASSPPTGRQETQYF

SEQ ID NO: 374245 - protein, 14 aa, Homo sapiens
  CDR3 for alpha chain variable domain of TCR clone 187123 (TRAV8-3, TRAJ11)
CAVGSNSGYSTLTF

SEQ ID NO: 374246 - protein, 17 aa, Homo sapiens
  CDR3 for beta chain variable domain of TCR clone 187123 (TRBV20-1, TRBJ2-2)
CSASGSGQGGLTGELFF

SEQ ID NO: 374247 - protein, 14 aa, Homo sapiens
  CDR3 for alpha chain variable domain of TCR clone 187124 (TRAV26-1, TRAJ38)
CIADNAGNNRKLIW

SEQ ID NO: 374248 - protein, 13 aa, Homo sapiens
  CDR3 for beta chain variable domain of TCR clone 187124 (TRBV29-1, TRBJ2-5)
CSVTIASEETQYF

SEQ ID NO: 374249 - protein, 14 aa, Homo sapiens
  CDR3 for alpha chain variable domain of TCR clone 187125 (TRAV1-2, TRAJ16)
CAVNRFSAGQKLLF

SEQ ID NO: 374250 - protein, 15 aa, Homo sapiens
  CDR3 for beta chain variable domain of TCR clone 187125 (TRBV6-3, TRBJ2-2)
CASSFLATLTGELFF

SEQ ID NO: 374251 - protein, 17 aa, Homo sapiens
  CDR3 for alpha chain variable domain of TCR clone 187126 (TRAV26-2, TRAJ28)
CILRPLLIVAGSYQLTF

SEQ ID NO: 374252 - protein, 14 aa, Homo sapiens
  CDR3 for beta chain variable domain of TCR clone 187126 (TRBV12-5, TRBJ2-5)
CASGSRTHQETQYF

SEQ ID NO: 374253 - protein, 13 aa, Homo sapiens
  CDR3 for alpha chain variable domain of TCR clone 187127 (TRAV21, TRAJ57)
CAVTQGGSEKLVF

SEQ ID NO: 374254 - protein, 16 aa, Homo sapiens
  CDR3 for beta chain variable domain of TCR clone 187127 (TRBV7-3, TRBJ2-2)
CASSLKGARDTGELFF

SEQ ID NO: 374255 - protein, 14 aa, Homo sapiens
  CDR3 for alpha chain variable domain of TCR clone 187128 (TRAV13-1, TRAJ5)
CAAHPDTGRRALTF

SEQ ID NO: 374256 - protein, 14 aa, Homo sapiens
  CDR3 for beta chain variable domain of TCR clone 187128 (TRBV6-4, TRBJ1-1)
CASRADRECTEAFF

SEQ ID NO: 374257 - protein, 17 aa, Homo sapiens
  CDR3 for alpha chain variable domain of TCR clone 187129 (TRAV4, TRAJ18)
CLVGARSVGSTLGGLYF

SEQ ID NO: 374258 - protein, 16 aa, Homo sapiens
  CDR3 for beta chain variable domain of TCR clone 187129 (TRBV15, TRBJ1-4)
CATSRDSPPGREKLFF

SEQ ID NO: 374259 - protein, 14 aa, Homo sapiens
  CDR3 for alpha chain variable domain of TCR clone 187130 (TRAV1-2, TRAJ8)
CDVREDTGFQKLVF

SEQ ID NO: 374260 - protein, 14 aa, Homo sapiens
  CDR3 for beta chain variable domain of TCR clone 187130 (TRBV7-2, TRBJ2-7)
CASSPKTSFYEQYF

SEQ ID NO: 374261 - protein, 15 aa, Homo sapiens
  CDR3 for alpha chain variable domain of TCR clone 187131 (TRAV3, TRAJ5)
CAVRDLDTGRRALTF

SEQ ID NO: 374262 - protein, 15 aa, Homo sapiens
  CDR3 for beta chain variable domain of TCR clone 187131 (TRBV7-6, TRBJ1-1)
CASSPQGGANTEAFF

SEQ ID NO: 374263 - protein, 10 aa, Homo sapiens
  CDR3 for alpha chain variable domain of TCR clone 187132 (TRAV1-2, TRAJ18)
CAVRGEAQPW

SEQ ID NO: 374264 - protein, 19 aa, Homo sapiens
  CDR3 for beta chain variable domain of TCR clone 187132 (TRBV6-3, TRBJ1-2)
CASSYSKGRTWPPNYGYTF

SEQ ID NO: 374265 - protein, 15 aa, Homo sapiens
  CDR3 for alpha chain variable domain of TCR clone 187133 (TRAV38-1, TRAJ37)
CAFIFGSGNTGKLIF

SEQ ID NO: 374266 - protein, 17 aa, Homo sapiens
  CDR3 for beta chain variable domain of TCR clone 187133 (TRBV20-1, TRBJ2-2)
CSASGSGQGGLTGELFF

SEQ ID NO: 374267 - protein, 14 aa, Homo sapiens
  CDR3 for alpha chain variable domain of TCR clone 187134 (TRAV1-1, TRAJ23)
CAVSIYNQGGKIIF

SEQ ID NO: 374268 - protein, 15 aa, Homo sapiens
  CDR3 for beta chain variable domain of TCR clone 187134 (TRBV5-8, TRBJ2-2)
CASSLDRGATGELFF

SEQ ID NO: 374269 - protein, 15 aa, Homo sapiens
  CDR3 for alpha chain variable domain of TCR clone 187135 (TRAV26-1, TRAJ29)
CIVRVEGSGNTPLVF

SEQ ID NO: 374270 - protein, 16 aa, Homo sapiens
  CDR3 for beta chain variable domain of TCR clone 187135 (TRBV4-1, TRBJ2-1)
CASSQARQGWINEQFF

SEQ ID NO: 374271 - protein, 10 aa, Homo sapiens
  CDR3 for alpha chain variable domain of TCR clone 187136 (TRAV12-3, TRAJ49)
CAMNDDQFYF

SEQ ID NO: 374272 - protein, 13 aa, Homo sapiens
  CDR3 for beta chain variable domain of TCR clone 187136 (TRBV12-4, TRBJ1-1)
CASSPGTGFEACF

SEQ ID NO: 374273 - protein, 15 aa, Homo sapiens
  CDR3 for alpha chain variable domain of TCR clone 187137 (TRAV2, TRAJ15)
CAVEDRGQAGTALSF

SEQ ID NO: 374274 - protein, 15 aa, Homo sapiens
  CDR3 for beta chain variable domain of TCR clone 187137 (TRBV20-1, TRBJ1-5)
CSATSDRGLGQPQHF

SEQ ID NO: 374275 - protein, 23 aa, Homo sapiens
  CDR3 for alpha chain variable domain of TCR clone 187138 (TRAV8-3, )
CAVVTTRIPDIQNPDPAVYQLRD

SEQ ID NO: 374276 - protein, 14 aa, Homo sapiens
  CDR3 for beta chain variable domain of TCR clone 187138 (TRBV11-2, TRBJ2-7)
CSSSPSTTSYEQYF

SEQ ID NO: 374277 - protein, 13 aa, Homo sapiens
  CDR3 for alpha chain variable domain of TCR clone 187139 (TRAV2, TRAJ23)
CAVMGNQGGKVIF

SEQ ID NO: 374278 - protein, 13 aa, Homo sapiens
  CDR3 for beta chain variable domain of TCR clone 187139 (TRBV7-2, TRBJ2-7)
CASRTSSSWEQYF

SEQ ID NO: 374279 - protein, 14 aa, Homo sapiens
  CDR3 for alpha chain variable domain of TCR clone 187140 (TRAV40, TRAJ41)
CLLGPPNSGYALNF

SEQ ID NO: 374280 - protein, 11 aa, Homo sapiens
  CDR3 for beta chain variable domain of TCR clone 187140 (TRBV19, TRBJ2-7)
CARSILGEQYF

SEQ ID NO: 374281 - protein, 10 aa, Homo sapiens
  CDR3 for alpha chain variable domain of TCR clone 187141 (TRAV12-1, TRAJ41)
CVVPELKFRV

SEQ ID NO: 374282 - protein, 12 aa, Homo sapiens
  CDR3 for beta chain variable domain of TCR clone 187141 (TRBV14, TRBJ2-5)
CGSSQLKETQYF

SEQ ID NO: 374283 - protein, 16 aa, Homo sapiens
  CDR3 for alpha chain variable domain of TCR clone 187142 (TRAV21, TRAJ37)
CAVRTAGSSNTGKLIF

SEQ ID NO: 374284 - protein, 17 aa, Homo sapiens
  CDR3 for beta chain variable domain of TCR clone 187142 (TRBV28, TRBJ2-5)
CASSTPEGDALQETQYF

SEQ ID NO: 374285 - protein, 15 aa, Homo sapiens
  CDR3 for alpha chain variable domain of TCR clone 187143 (TRAV12-3, TRAJ6)
CAMSAASGGSYIPTF

SEQ ID NO: 374286 - protein, 12 aa, Homo sapiens
  CDR3 for beta chain variable domain of TCR clone 187143 (TRBV11-2, TRBJ2-2)
CASSLGGGELFF

SEQ ID NO: 374287 - protein, 15 aa, Homo sapiens
  CDR3 for alpha chain variable domain of TCR clone 187144 (TRAV27, TRAJ50)
CAGRERGTSYDKVIF

SEQ ID NO: 374288 - protein, 14 aa, Homo sapiens
  CDR3 for beta chain variable domain of TCR clone 187144 (TRBV10-3, TRBJ1-1)
CAISYHSKNTEAFF

SEQ ID NO: 374289 - protein, 15 aa, Homo sapiens
  CDR3 for alpha chain variable domain of TCR clone 187145 (TRAV26-1, TRAJ29)
CIVTVEGSGNTPLVF

SEQ ID NO: 374290 - protein, 14 aa, Homo sapiens
  CDR3 for beta chain variable domain of TCR clone 187145 (TRBV18, TRBJ2-5)
CASSPGVSQETQYF

SEQ ID NO: 374291 - protein, 11 aa, Homo sapiens
  CDR3 for alpha chain variable domain of TCR clone 187146 (TRAV12-2, TRAJ39)
CAVNNMLTFGG

SEQ ID NO: 374292 - protein, 16 aa, Homo sapiens
  CDR3 for beta chain variable domain of TCR clone 187146 (TRBV5-3, TRBJ2-2)
CARSFGTGTNTGELVF

SEQ ID NO: 374293 - protein, 13 aa, Homo sapiens
  CDR3 for alpha chain variable domain of TCR clone 187147 (TRAV12-2, TRAJ20)
CAVYPSNDYKPSF

SEQ ID NO: 374294 - protein, 13 aa, Homo sapiens
  CDR3 for beta chain variable domain of TCR clone 187147 (TRBV27, TRBJ1-1)
CASSLSIGAEAFF

SEQ ID NO: 374295 - protein, 14 aa, Homo sapiens
  CDR3 for alpha chain variable domain of TCR clone 187148 (TRAV12-3, TRAJ10)
SHLPLTGGGNKITF

SEQ ID NO: 374296 - protein, 16 aa, Homo sapiens
  CDR3 for beta chain variable domain of TCR clone 187148 (TRBV12-4, TRBJ2-5)
CASSWRPSGDLETQYF

SEQ ID NO: 374297 - protein, 13 aa, Homo sapiens
  CDR3 for alpha chain variable domain of TCR clone 187149 (TRAV36/DV7, TRAJ7)
CAVERYGNNRLAF

SEQ ID NO: 374298 - protein, 13 aa, Homo sapiens
  CDR3 for beta chain variable domain of TCR clone 187149 (TRBV11-2, TRBJ2-5)
CASSSTGEETQYF

SEQ ID NO: 374299 - protein, 15 aa, Homo sapiens
  CDR3 for alpha chain variable domain of TCR clone 187150 (TRAV26-1, TRAJ44)
CIARVPFGTASKLTF

SEQ ID NO: 374300 - protein, 17 aa, Homo sapiens
  CDR3 for beta chain variable domain of TCR clone 187150 (TRBV24-1, TRBJ2-4)
CATSDAEARGVRNIKYF

SEQ ID NO: 374301 - protein, 14 aa, Homo sapiens
  CDR3 for alpha chain variable domain of TCR clone 187151 (TRAV1-2, TRAJ16)
CAVNRFSEGQKLLF

SEQ ID NO: 374302 - protein, 13 aa, Homo sapiens
  CDR3 for beta chain variable domain of TCR clone 187151 (TRBV19, TRBJ2-7)
CASRKAGGSEQYF

SEQ ID NO: 374303 - protein, 11 aa, Homo sapiens
  CDR3 for alpha chain variable domain of TCR clone 187152 (TRAV21, TRAJ17)
CAAPSGNKLTF

SEQ ID NO: 374304 - protein, 17 aa, Homo sapiens
  CDR3 for beta chain variable domain of TCR clone 187152 (TRBV9, TRBJ2-5)
CASSVAGQGPSIETQYF

SEQ ID NO: 374305 - protein, 14 aa, Homo sapiens
  CDR3 for alpha chain variable domain of TCR clone 187153 (TRAV21, TRAJ35)
CSVMPIGFVNVLHC

SEQ ID NO: 374306 - protein, 12 aa, Homo sapiens
  CDR3 for beta chain variable domain of TCR clone 187153 (TRBV7-9, TRBJ2-7)
CASSIKREEQYF

SEQ ID NO: 374307 - protein, 14 aa, Homo sapiens
  CDR3 for alpha chain variable domain of TCR clone 187154 (TRAV30, TRAJ26)
CGTEIVSYGQNFVF

SEQ ID NO: 374308 - protein, 16 aa, Homo sapiens
  CDR3 for beta chain variable domain of TCR clone 187154 (TRBV19, TRBJ2-1)
CASSSKGTRSYNEQFF

SEQ ID NO: 374309 - protein, 13 aa, Homo sapiens
  CDR3 for alpha chain variable domain of TCR clone 187155 (TRAV2, TRAJ20)
CAVEEPSEYKLSS

SEQ ID NO: 374310 - protein, 16 aa, Homo sapiens
  CDR3 for beta chain variable domain of TCR clone 187155 (TRBV25-1, TRBJ2-7)
CASSELTGGGIYEQYF

SEQ ID NO: 374311 - protein, 12 aa, Homo sapiens
  CDR3 for alpha chain variable domain of TCR clone 187156 (TRAV16, TRAJ13)
CITLRGYQKVTF

SEQ ID NO: 374312 - protein, 17 aa, Homo sapiens
  CDR3 for beta chain variable domain of TCR clone 187156 (TRBV28, TRBJ2-5)
CASSRQGGLAGAETQYL

SEQ ID NO: 374313 - protein, 12 aa, Homo sapiens
  CDR3 for alpha chain variable domain of TCR clone 187157 (TRAV17, TRAJ20)
CPTQSNDYKLSF

SEQ ID NO: 374314 - protein, 13 aa, Homo sapiens
  CDR3 for beta chain variable domain of TCR clone 187157 (TRBV10-3, TRBJ1-1)
CAIIPEGGTEAFF

SEQ ID NO: 374315 - protein, 15 aa, Homo sapiens
  CDR3 for alpha chain variable domain of TCR clone 187158 (TRAV29/DV5, TRAJ40)
CAASAQGSGTYKYIF

SEQ ID NO: 374316 - protein, 14 aa, Homo sapiens
  CDR3 for beta chain variable domain of TCR clone 187158 (TRBV12-5, TRBJ2-5)
CASGSRTHQETQYF

SEQ ID NO: 374317 - protein, 16 aa, Homo sapiens
  CDR3 for alpha chain variable domain of TCR clone 187159 (TRAV3, TRAJ37)
CAGRGKGSGNTGKLIF

SEQ ID NO: 374318 - protein, 13 aa, Homo sapiens
  CDR3 for beta chain variable domain of TCR clone 187159 (TRBV19, TRBJ1-2)
CASSVPGQDGYTF

SEQ ID NO: 374319 - protein, 12 aa, Homo sapiens
  CDR3 for alpha chain variable domain of TCR clone 187160 (TRAV1-2, TRAJ9)
RAGYTGGFKTIF

SEQ ID NO: 374320 - protein, 15 aa, Homo sapiens
  CDR3 for beta chain variable domain of TCR clone 187160 (TRBV11-2, TRBJ2-1)
CASSPAGQSLNEQFF

SEQ ID NO: 374321 - protein, 12 aa, Homo sapiens
  CDR3 for alpha chain variable domain of TCR clone 187161 (TRAV1-2, TRAJ24)
CAVGGSWGKFQL

SEQ ID NO: 374322 - protein, 13 aa, Homo sapiens
  CDR3 for beta chain variable domain of TCR clone 187161 (TRBV12-4, TRBJ1-2)
CASSLRQGKGYTF

SEQ ID NO: 374323 - protein, 13 aa, Homo sapiens
  CDR3 for alpha chain variable domain of TCR clone 187162 (TRAV3, TRAJ36)
CAVRDSGANNLFF

SEQ ID NO: 374324 - protein, 15 aa, Homo sapiens
  CDR3 for beta chain variable domain of TCR clone 187162 (TRBV24-1, TRBJ2-1)
CATSGSGGFYNEQFF

SEQ ID NO: 374325 - protein, 13 aa, Homo sapiens
  CDR3 for alpha chain variable domain of TCR clone 187163 (TRAV12-3, TRAJ9)
CAMSADGGFKTIF

SEQ ID NO: 374326 - protein, 16 aa, Homo sapiens
  CDR3 for beta chain variable domain of TCR clone 187163 (TRBV29-1, TRBJ2-7)
CSVEVVGTSGSYEQYF

SEQ ID NO: 374327 - protein, 15 aa, Homo sapiens
  CDR3 for alpha chain variable domain of TCR clone 187164 (TRAV3, TRAJ22)
CAVRDRGGSARQLTF

SEQ ID NO: 374328 - protein, 14 aa, Homo sapiens
  CDR3 for beta chain variable domain of TCR clone 187164 (TRBV7-8, TRBJ2-2)
CASRGQGAAGELFF

SEQ ID NO: 374329 - protein, 15 aa, Homo sapiens
  CDR3 for alpha chain variable domain of TCR clone 187165 (TRAV8-3, TRAJ11)
CAVGLLNSGYSTLTF

SEQ ID NO: 374330 - protein, 12 aa, Homo sapiens
  CDR3 for beta chain variable domain of TCR clone 187165 (TRBV5-4, TRBJ2-5)
CASSSTRETQYF

SEQ ID NO: 374331 - protein, 13 aa, Homo sapiens
  CDR3 for alpha chain variable domain of TCR clone 187166 (TRAV26-2, TRAJ45)
CIPYRRRCCRTHL

SEQ ID NO: 374332 - protein, 12 aa, Homo sapiens
  CDR3 for beta chain variable domain of TCR clone 187166 (TRBV7-9, TRBJ1-5)
CASSPQGQPQHF

SEQ ID NO: 374333 - protein, 17 aa, Homo sapiens
  CDR3 for alpha chain variable domain of TCR clone 187167 (TRAV26-1, TRAJ58)
CILRAGAEETSGSRLTF

SEQ ID NO: 374334 - protein, 18 aa, Homo sapiens
  CDR3 for beta chain variable domain of TCR clone 187167 (TRBV7-9, TRBJ2-7)
CASSLTTSGSRTWYEQYF

SEQ ID NO: 374335 - protein, 14 aa, Homo sapiens
  CDR3 for alpha chain variable domain of TCR clone 187168 (TRAV12-2, TRAJ29)
CAVRRNSGNTHLVF

SEQ ID NO: 374336 - protein, 13 aa, Homo sapiens
  CDR3 for beta chain variable domain of TCR clone 187168 (TRBV12-4, TRBJ2-1)
CASSHYTDNEQFF

SEQ ID NO: 374337 - protein, 16 aa, Homo sapiens
  CDR3 for alpha chain variable domain of TCR clone 187169 (TRAV26-1, TRAJ33)
CIVPFWGEDSNYQLIW

SEQ ID NO: 374338 - protein, 13 aa, Homo sapiens
  CDR3 for beta chain variable domain of TCR clone 187169 (TRBV19, TRBJ1-2)
CASSRGQVYGYTF

SEQ ID NO: 374339 - protein, 14 aa, Homo sapiens
  CDR3 for alpha chain variable domain of TCR clone 187170 (TRAV12-2, TRAJ9)
CAVNMEGGGFKTIF

SEQ ID NO: 374340 - protein, 14 aa, Homo sapiens
  CDR3 for beta chain variable domain of TCR clone 187170 (TRBV2, TRBJ2-5)
CASSGVLAQETQYL

SEQ ID NO: 374341 - protein, 12 aa, Homo sapiens
  CDR3 for alpha chain variable domain of TCR clone 187171 (TRAV27, TRAJ35)
CAGADFGNVLHC

SEQ ID NO: 374342 - protein, 11 aa, Homo sapiens
  CDR3 for beta chain variable domain of TCR clone 187171 (TRBV7-8, TRBJ2-7)
CASSLSREQYF

SEQ ID NO: 374343 - protein, 14 aa, Homo sapiens
  CDR3 for alpha chain variable domain of TCR clone 187172 (TRAV8-4, TRAJ16)
CAVGPVGRWPGAAL

SEQ ID NO: 374344 - protein, 14 aa, Homo sapiens
  CDR3 for beta chain variable domain of TCR clone 187172 (TRBV23-1, TRBJ2-5)
CASSFLRSQETQYF

SEQ ID NO: 374345 - protein, 14 aa, Homo sapiens
  CDR3 for alpha chain variable domain of TCR clone 187173 (TRAV13-1, TRAJ53)
CSASIRGSNYKLTF

SEQ ID NO: 374346 - protein, 15 aa, Homo sapiens
  CDR3 for beta chain variable domain of TCR clone 187173 (TRBV4-1, TRBJ1-4)
CASSDTGGTNEKLFF

SEQ ID NO: 374347 - protein, 13 aa, Homo sapiens
  CDR3 for alpha chain variable domain of TCR clone 187174 (TRAV17, TRAJ9)
CATDYTGGFKTIF

SEQ ID NO: 374348 - protein, 16 aa, Homo sapiens
  CDR3 for beta chain variable domain of TCR clone 187174 (TRBV7-7, TRBJ2-1)
CASSLASGTSYSRQFF

SEQ ID NO: 374349 - protein, 14 aa, Homo sapiens
  CDR3 for alpha chain variable domain of TCR clone 187175 (TRAV1-2, TRAJ16)
CAVNRFSDGQKLLF

SEQ ID NO: 374350 - protein, 16 aa, Homo sapiens
  CDR3 for beta chain variable domain of TCR clone 187175 (TRBV12-4, TRBJ2-5)
CASSFFVKGRQETQYF

SEQ ID NO: 374351 - protein, 11 aa, Homo sapiens
  CDR3 for alpha chain variable domain of TCR clone 187176 (TRAV2, TRAJ13)
CASGGYQKVTF

SEQ ID NO: 374352 - protein, 14 aa, Homo sapiens
  CDR3 for beta chain variable domain of TCR clone 187176 (TRBV20-1, TRBJ2-7)
CSAKDRKGAYEQYF

SEQ ID NO: 374353 - protein, 14 aa, Homo sapiens
  CDR3 for alpha chain variable domain of TCR clone 187177 (TRAV3, TRAJ34)
CAVRDINNTDKLIF

SEQ ID NO: 374354 - protein, 14 aa, Homo sapiens
  CDR3 for beta chain variable domain of TCR clone 187177 (TRBV7-2, TRBJ2-2)
CARSLGQNTGELSF

SEQ ID NO: 374355 - protein, 10 aa, Homo sapiens
  CDR3 for alpha chain variable domain of TCR clone 187178 (TRAV13-1, TRAJ8)
CAAPFQKLVF

SEQ ID NO: 374356 - protein, 14 aa, Homo sapiens
  CDR3 for beta chain variable domain of TCR clone 187178 (TRBV5-1, TRBJ2-2)
CASSLGGGSGELFF

SEQ ID NO: 374357 - protein, 13 aa, Homo sapiens
  CDR3 for alpha chain variable domain of TCR clone 187179 (TRAV12-3, TRAJ13)
CAMGTGGYQKVTF

SEQ ID NO: 374358 - protein, 14 aa, Homo sapiens
  CDR3 for beta chain variable domain of TCR clone 187179 (TRBV7-2, TRBJ2-5)
CASSTGGELKTQCF

SEQ ID NO: 374359 - protein, 16 aa, Homo sapiens
  CDR3 for alpha chain variable domain of TCR clone 187180 (TRAV16, TRAJ21)
CACGWATTSTNFTLDL

SEQ ID NO: 374360 - protein, 15 aa, Homo sapiens
  CDR3 for beta chain variable domain of TCR clone 187180 (TRBV19, TRBJ2-1)
CTSSIQATSYNEQFF

SEQ ID NO: 374361 - protein, 17 aa, Homo sapiens
  CDR3 for alpha chain variable domain of TCR clone 187181 (TRAV2, TRAJ22)
ILQVREADAAEQRQLTF

SEQ ID NO: 374362 - protein, 19 aa, Homo sapiens
  CDR3 for beta chain variable domain of TCR clone 187181 (TRBV25-1, TRBJ2-2)
CAILVYRVDRGRKSGELFF

SEQ ID NO: 374363 - protein, 12 aa, Homo sapiens
  CDR3 for alpha chain variable domain of TCR clone 187182 (TRAV12-3, TRAJ17)
CAMTLTGNKLNF

SEQ ID NO: 374364 - protein, 15 aa, Homo sapiens
  CDR3 for beta chain variable domain of TCR clone 187182 (TRBV20-1, TRBJ2-7)
FSARDRVSGMDEQYF

SEQ ID NO: 374365 - protein, 13 aa, Homo sapiens
  CDR3 for alpha chain variable domain of TCR clone 187183 (TRAV13-1, TRAJ21)
CAASIYNFNKFYF

SEQ ID NO: 374366 - protein, 12 aa, Homo sapiens
  CDR3 for beta chain variable domain of TCR clone 187183 (TRBV7-6, TRBJ2-7)
CASSLADSEQYF

SEQ ID NO: 374367 - protein, 13 aa, Homo sapiens
  CDR3 for alpha chain variable domain of TCR clone 187184 (TRAV35, TRAJ44)
CAGLSGTASKLTF

SEQ ID NO: 374368 - protein, 13 aa, Homo sapiens
  CDR3 for beta chain variable domain of TCR clone 187184 (TRBV19, TRBJ1-1)
CASSGQVNTEAFF

SEQ ID NO: 374369 - protein, 15 aa, Homo sapiens
  CDR3 for alpha chain variable domain of TCR clone 187185 (TRAV13-1, TRAJ16)
CAARYQMARICSLQG

SEQ ID NO: 374370 - protein, 13 aa, Homo sapiens
  CDR3 for beta chain variable domain of TCR clone 187185 (TRBV4-1, TRBJ2-1)
CASSQAGGDEQFF

SEQ ID NO: 374371 - protein, 14 aa, Homo sapiens
  CDR3 for alpha chain variable domain of TCR clone 187186 (TRAV23/DV6, TRAJ22)
CAADPSGSARQLTF

SEQ ID NO: 374372 - protein, 17 aa, Homo sapiens
  CDR3 for beta chain variable domain of TCR clone 187186 (TRBV25-1, TRBJ2-7)
CASSDARVVFSSYEQYF

SEQ ID NO: 374373 - protein, 12 aa, Homo sapiens
  CDR3 for alpha chain variable domain of TCR clone 187187 (TRAV21, TRAJ49)
CAVNDGGNQFYF

SEQ ID NO: 374374 - protein, 13 aa, Homo sapiens
  CDR3 for beta chain variable domain of TCR clone 187187 (TRBV2, TRBJ1-1)
CASSVLINTEAFF

SEQ ID NO: 374375 - protein, 12 aa, Homo sapiens
  CDR3 for alpha chain variable domain of TCR clone 187188 (TRAV12-2, TRAJ44)
CADTGPASKLTF

SEQ ID NO: 374376 - protein, 17 aa, Homo sapiens
  CDR3 for beta chain variable domain of TCR clone 187188 (TRBV20-1, TRBJ1-1)
CSASGTGGSYGNTGAFF

SEQ ID NO: 374377 - protein, 14 aa, Homo sapiens
  CDR3 for alpha chain variable domain of TCR clone 187189 (TRAV17, TRAJ56)
CATVPAGANSKLTF

SEQ ID NO: 374378 - protein, 13 aa, Homo sapiens
  CDR3 for beta chain variable domain of TCR clone 187189 (TRBV12-4, TRBJ2-2)
CASSITGSGELFC

SEQ ID NO: 374379 - protein, 13 aa, Homo sapiens
  CDR3 for alpha chain variable domain of TCR clone 187190 (TRAV21, TRAJ11)
CAVPNPGYSTLTF

SEQ ID NO: 374380 - protein, 12 aa, Homo sapiens
  CDR3 for beta chain variable domain of TCR clone 187190 (TRBV12-4, TRBJ2-7)
CASSLGGYEQYF

SEQ ID NO: 374381 - protein, 14 aa, Homo sapiens
  CDR3 for alpha chain variable domain of TCR clone 187191 (TRAV23/DV6, TRAJ13)
CAAMYSGGYQKVTF

SEQ ID NO: 374382 - protein, 16 aa, Homo sapiens
  CDR3 for beta chain variable domain of TCR clone 187191 (TRBV9, TRBJ2-1)
WASSALGGIGNNEQFF

SEQ ID NO: 374383 - protein, 15 aa, Homo sapiens
  CDR3 for alpha chain variable domain of TCR clone 187192 (TRAV26-1, TRAJ39)
CIVRVASNASNMLTF

SEQ ID NO: 374384 - protein, 14 aa, Homo sapiens
  CDR3 for beta chain variable domain of TCR clone 187192 (TRBV7-6, TRBJ2-3)
CASSVAGGTDTQYF

SEQ ID NO: 374385 - protein, 16 aa, Homo sapiens
  CDR3 for alpha chain variable domain of TCR clone 187193 (TRAV35, TRAJ31)
CAAARLMFGDGTQLVV

SEQ ID NO: 374386 - protein, 14 aa, Homo sapiens
  CDR3 for beta chain variable domain of TCR clone 187193 (TRBV5-4, TRBJ1-1)
CASSLDSRRDEAFF

SEQ ID NO: 374387 - protein, 12 aa, Homo sapiens
  CDR3 for alpha chain variable domain of TCR clone 187194 (TRAV16, TRAJ10)
CSRTGGGNKLTF

SEQ ID NO: 374388 - protein, 15 aa, Homo sapiens
  CDR3 for beta chain variable domain of TCR clone 187194 (TRBV7-6, TRBJ2-5)
CASSKPTGPQETQYF

SEQ ID NO: 374389 - protein, 14 aa, Homo sapiens
  CDR3 for alpha chain variable domain of TCR clone 187195 (TRAV26-1, TRAJ21)
CIVRPPYNFNKFYF

SEQ ID NO: 374390 - protein, 14 aa, Homo sapiens
  CDR3 for beta chain variable domain of TCR clone 187195 (TRBV4-1, TRBJ2-2)
SASSQAVNTGELFF

SEQ ID NO: 374391 - protein, 15 aa, Homo sapiens
  CDR3 for alpha chain variable domain of TCR clone 187196 (TRAV8-3, TRAJ27)
CAVGPSKTNAGKSTF

SEQ ID NO: 374392 - protein, 14 aa, Homo sapiens
  CDR3 for beta chain variable domain of TCR clone 187196 (TRBV25-1, TRBJ2-1)
CASSEFIGDSKQFF

SEQ ID NO: 374393 - protein, 14 aa, Homo sapiens
  CDR3 for alpha chain variable domain of TCR clone 187197 (TRAV12-2, TRAJ13)
CAVKKTGGSQKVTF

SEQ ID NO: 374394 - protein, 14 aa, Homo sapiens
  CDR3 for beta chain variable domain of TCR clone 187197 (TRBV5-1, TRBJ2-7)
CASSRGESLYEQYF

SEQ ID NO: 374395 - protein, 15 aa, Homo sapiens
  CDR3 for alpha chain variable domain of TCR clone 187198 (TRAV21, TRAJ40)
CAVRPQNSGTYKYIF

SEQ ID NO: 374396 - protein, 13 aa, Homo sapiens
  CDR3 for beta chain variable domain of TCR clone 187198 (TRBV7-2, TRBJ2-2)
CASSAVRAGELFF

SEQ ID NO: 374397 - protein, 13 aa, Homo sapiens
  CDR3 for alpha chain variable domain of TCR clone 187199 (TRAV12-1, TRAJ37)
CVVNAGNTGKLIF

SEQ ID NO: 374398 - protein, 18 aa, Homo sapiens
  CDR3 for beta chain variable domain of TCR clone 187199 (TRBV13, TRBJ2-4)
CAIIDQKHSVLRRRDPAL

SEQ ID NO: 374399 - protein, 14 aa, Homo sapiens
  CDR3 for alpha chain variable domain of TCR clone 187200 (TRAV12-2, TRAJ17)
CAALFKAAGNKLTF

SEQ ID NO: 374400 - protein, 14 aa, Homo sapiens
  CDR3 for beta chain variable domain of TCR clone 187200 (TRBV15, TRBJ2-5)
CATSIGGLGETQYF

SEQ ID NO: 374401 - protein, 10 aa, Homo sapiens
  CDR3 for alpha chain variable domain of TCR clone 187201 (TRAV13-1, TRAJ52)
CAAKTPMLVV

SEQ ID NO: 374402 - protein, 14 aa, Homo sapiens
  CDR3 for beta chain variable domain of TCR clone 187201 (TRBV6-5, TRBJ1-1)
CASSFGQRLTEAFF

SEQ ID NO: 374403 - protein, 15 aa, Homo sapiens
  CDR3 for alpha chain variable domain of TCR clone 187202 (TRAV26-1, TRAJ22)
CIVRVSFWFCKATDL

SEQ ID NO: 374404 - protein, 20 aa, Homo sapiens
  CDR3 for beta chain variable domain of TCR clone 187202 (TRBV7-8, TRBJ2-2)
CASSHLFPGPTIHITGELSF

SEQ ID NO: 374405 - protein, 18 aa, Homo sapiens
  CDR3 for alpha chain variable domain of TCR clone 187203 (TRAV21, TRAJ52)
CAVRPSPAGGTSYGKLTF

SEQ ID NO: 374406 - protein, 11 aa, Homo sapiens
  CDR3 for beta chain variable domain of TCR clone 187203 (TRBV12-4, TRBJ2-3)
CASTATGTQYF

SEQ ID NO: 374407 - protein, 12 aa, Homo sapiens
  CDR3 for alpha chain variable domain of TCR clone 187204 (TRAV8-3, TRAJ41)
CAVALSGYALNF

SEQ ID NO: 374408 - protein, 18 aa, Homo sapiens
  CDR3 for beta chain variable domain of TCR clone 187204 (TRBV20-1, TRBJ2-6)
YSAETTPTHGSGANVLTF

SEQ ID NO: 374409 - protein, 13 aa, Homo sapiens
  CDR3 for alpha chain variable domain of TCR clone 187205 (TRAV3, TRAJ41)
CAVSSHSGYALDF

SEQ ID NO: 374410 - protein, 12 aa, Homo sapiens
  CDR3 for beta chain variable domain of TCR clone 187205 (TRBV2, TRBJ2-1)
CASRPGPREQFF

SEQ ID NO: 374411 - protein, 14 aa, Homo sapiens
  CDR3 for alpha chain variable domain of TCR clone 187206 (TRAV9-2, TRAJ39)
CALYIYNAGNMLTF

SEQ ID NO: 374412 - protein, 14 aa, Homo sapiens
  CDR3 for beta chain variable domain of TCR clone 187206 (TRBV11-2, TRBJ1-2)
CASSLYRGNYGYTF

SEQ ID NO: 374413 - protein, 13 aa, Homo sapiens
  CDR3 for alpha chain variable domain of TCR clone 187207 (TRAV23/DV6, TRAJ49)
CAASHSTGNQFYF

SEQ ID NO: 374414 - protein, 12 aa, Homo sapiens
  CDR3 for beta chain variable domain of TCR clone 187207 (TRBV11-2, TRBJ2-2)
CASSLGGGELFF

SEQ ID NO: 374415 - protein, 12 aa, Homo sapiens
  CDR3 for alpha chain variable domain of TCR clone 187208 (TRAV13-1, TRAJ42)
VSYGGSQGNLIF

SEQ ID NO: 374416 - protein, 12 aa, Homo sapiens
  CDR3 for beta chain variable domain of TCR clone 187208 (TRBV7-9, TRBJ1-5)
CASSSDQAPQHF

SEQ ID NO: 374417 - protein, 12 aa, Homo sapiens
  CDR3 for alpha chain variable domain of TCR clone 187209 (TRAV13-2, TRAJ23)
CAERHRGGKLIF

SEQ ID NO: 374418 - protein, 14 aa, Homo sapiens
  CDR3 for beta chain variable domain of TCR clone 187209 (TRBV7-6, TRBJ2-1)
CASSLGGGADEQFF

SEQ ID NO: 374419 - protein, 12 aa, Homo sapiens
  CDR3 for alpha chain variable domain of TCR clone 187210 (TRAV38-1, TRAJ20)
CAFIWNDYKLRF

SEQ ID NO: 374420 - protein, 14 aa, Homo sapiens
  CDR3 for beta chain variable domain of TCR clone 187210 (TRBV27, TRBJ1-1)
CASSPQGKRAEAFF

SEQ ID NO: 374421 - protein, 14 aa, Homo sapiens
  CDR3 for alpha chain variable domain of TCR clone 187211 (TRAV12-2, TRAJ13)
CAVKTTGGYQKVTF

SEQ ID NO: 374422 - protein, 15 aa, Homo sapiens
  CDR3 for beta chain variable domain of TCR clone 187211 (TRBV28, TRBJ2-5)
CASSPPWSYQETQYF

SEQ ID NO: 374423 - protein, 16 aa, Homo sapiens
  CDR3 for alpha chain variable domain of TCR clone 187212 (TRAV3, TRAJ37)
CAARGKWSGNTGKLIF

SEQ ID NO: 374424 - protein, 13 aa, Homo sapiens
  CDR3 for beta chain variable domain of TCR clone 187212 (TRBV10-3, TRBJ1-2)
CAISERDSYGYTF

SEQ ID NO: 374425 - protein, 14 aa, Homo sapiens
  CDR3 for alpha chain variable domain of TCR clone 187213 (TRAV4, TRAJ17)
CLVGDMATGNKLTF

SEQ ID NO: 374426 - protein, 14 aa, Homo sapiens
  CDR3 for beta chain variable domain of TCR clone 187213 (TRBV4-1, TRBJ2-7)
CASSPVAGGDEQYF

SEQ ID NO: 374427 - protein, 12 aa, Homo sapiens
  CDR3 for alpha chain variable domain of TCR clone 187214 (TRAV9-2, TRAJ36)
CSLKKGANNLFF

SEQ ID NO: 374428 - protein, 17 aa, Homo sapiens
  CDR3 for beta chain variable domain of TCR clone 187214 (TRBV20-1, TRBJ1-5)
CSAREIPQGVGNQPQHF

SEQ ID NO: 374429 - protein, 19 aa, Homo sapiens
  CDR3 for alpha chain variable domain of TCR clone 187215 (TRAV1-2, TRAJ26)
CLLPLCCERPDNYVQNFVF

SEQ ID NO: 374430 - protein, 17 aa, Homo sapiens
  CDR3 for beta chain variable domain of TCR clone 187215 (TRBV28, TRBJ2-5)
CASSRQGGLAGAETQYF

SEQ ID NO: 374431 - protein, 13 aa, Homo sapiens
  CDR3 for alpha chain variable domain of TCR clone 187216 (TRAV38-1, TRAJ42)
CARWGGSQGNLIF

SEQ ID NO: 374432 - protein, 18 aa, Homo sapiens
  CDR3 for beta chain variable domain of TCR clone 187216 (TRBV11-2, TRBJ2-3)
CASSLDLAGLATQDTQYF

SEQ ID NO: 374433 - protein, 11 aa, Homo sapiens
  CDR3 for alpha chain variable domain of TCR clone 187217 (TRAV21, TRAJ34)
CAVTNTDKLIF

SEQ ID NO: 374434 - protein, 13 aa, Homo sapiens
  CDR3 for beta chain variable domain of TCR clone 187217 (TRBV9, TRBJ2-1)
CASSVGQGGEQFF

SEQ ID NO: 374435 - protein, 16 aa, Homo sapiens
  CDR3 for alpha chain variable domain of TCR clone 187218 (TRAV13-1, TRAJ18)
CAASRMRGSTLGRLYF

SEQ ID NO: 374436 - protein, 16 aa, Homo sapiens
  CDR3 for beta chain variable domain of TCR clone 187218 (TRBV7-7, TRBJ2-1)
CASSLASGTSYNEQFF

SEQ ID NO: 374437 - protein, 14 aa, Homo sapiens
  CDR3 for alpha chain variable domain of TCR clone 187219 (TRAV12-3, TRAJ10)
SHLPLTEGGNKLTF

SEQ ID NO: 374438 - protein, 14 aa, Homo sapiens
  CDR3 for beta chain variable domain of TCR clone 187219 (TRBV4-2, TRBJ2-1)
CASGLDRAYNEQFF

SEQ ID NO: 374439 - protein, 13 aa, Homo sapiens
  CDR3 for alpha chain variable domain of TCR clone 187220 (TRAV12-2, TRAJ37)
CAGGSGNTGKLIF

SEQ ID NO: 374440 - protein, 14 aa, Homo sapiens
  CDR3 for beta chain variable domain of TCR clone 187220 (TRBV11-2, TRBJ2-3)
CASSRLARTDTQYF

SEQ ID NO: 374441 - protein, 16 aa, Homo sapiens
  CDR3 for alpha chain variable domain of TCR clone 187221 (TRAV1-2, TRAJ10)
CAVRGVLTGGGNKLTF

SEQ ID NO: 374442 - protein, 16 aa, Homo sapiens
  CDR3 for beta chain variable domain of TCR clone 187221 (TRBV29-1, TRBJ2-7)
CSVEVVGTSGNYEQYF

SEQ ID NO: 374443 - protein, 16 aa, Homo sapiens
  CDR3 for alpha chain variable domain of TCR clone 187222 (TRAV30, TRAJ24)
CGTEIVDADSWGKFQF

SEQ ID NO: 374444 - protein, 13 aa, Homo sapiens
  CDR3 for beta chain variable domain of TCR clone 187222 (TRBV12-4, TRBJ1-4)
CASAMGHNEKLFF

SEQ ID NO: 374445 - protein, 12 aa, Homo sapiens
  CDR3 for alpha chain variable domain of TCR clone 187223 (TRAV35, TRAJ39)
LAPNNAGNMLPF

SEQ ID NO: 374446 - protein, 13 aa, Homo sapiens
  CDR3 for beta chain variable domain of TCR clone 187223 (TRBV19, TRBJ1-3)
CASRLSLGNTIYF

SEQ ID NO: 374447 - protein, 14 aa, Homo sapiens
  CDR3 for alpha chain variable domain of TCR clone 187224 (TRAV26-2, TRAJ32)
CCVGYGGATNKLIF

SEQ ID NO: 374448 - protein, 14 aa, Homo sapiens
  CDR3 for beta chain variable domain of TCR clone 187224 (TRBV19, TRBJ2-7)
CASSMGQGAIEQYF

SEQ ID NO: 374449 - protein, 10 aa, Homo sapiens
  CDR3 for alpha chain variable domain of TCR clone 187225 (TRAV25, TRAJ53)
CAGSNYKQTF

SEQ ID NO: 374450 - protein, 14 aa, Homo sapiens
  CDR3 for beta chain variable domain of TCR clone 187225 (TRBV7-7, TRBJ2-7)
CASSLGRGVGEQYF

SEQ ID NO: 374451 - protein, 11 aa, Homo sapiens
  CDR3 for alpha chain variable domain of TCR clone 187226 (TRAV3, TRAJ21)
CAVGNLNKFYF

SEQ ID NO: 374452 - protein, 15 aa, Homo sapiens
  CDR3 for beta chain variable domain of TCR clone 187226 (TRBV5-1, TRBJ2-1)
CASSLVANSYNEQFF

SEQ ID NO: 374453 - protein, 14 aa, Homo sapiens
  CDR3 for alpha chain variable domain of TCR clone 187227 (TRAV12-2, TRAJ11)
CAVNRESGYSTLTF

SEQ ID NO: 374454 - protein, 14 aa, Homo sapiens
  CDR3 for beta chain variable domain of TCR clone 187227 (TRBV28, TRBJ2-1)
CASSYYTAYNEQFF

SEQ ID NO: 374455 - protein, 14 aa, Homo sapiens
  CDR3 for alpha chain variable domain of TCR clone 187228 (TRAV2, TRAJ9)
CAVEDRSGGFKTIF

SEQ ID NO: 374456 - protein, 18 aa, Homo sapiens
  CDR3 for beta chain variable domain of TCR clone 187228 (TRBV11-3, TRBJ2-1)
CASSSYPGGRDSYNEQFF

SEQ ID NO: 374457 - protein, 14 aa, Homo sapiens
  CDR3 for alpha chain variable domain of TCR clone 187229 (TRAV38-1, TRAJ40)
CALHPTPGTYKYIF

SEQ ID NO: 374458 - protein, 14 aa, Homo sapiens
  CDR3 for beta chain variable domain of TCR clone 187229 (TRBV25-1, TRBJ1-1)
CASTHLGGNTEAFF

SEQ ID NO: 374459 - protein, 14 aa, Homo sapiens
  CDR3 for alpha chain variable domain of TCR clone 187230 (TRAV13-2, TRAJ43)
CAEIPTYNNNDMRF

SEQ ID NO: 374460 - protein, 12 aa, Homo sapiens
  CDR3 for beta chain variable domain of TCR clone 187230 (TRBV11-2, TRBJ2-2)
CASSLGGEELFF

SEQ ID NO: 374461 - protein, 12 aa, Homo sapiens
  CDR3 for alpha chain variable domain of TCR clone 187231 (TRAV1-1, TRAJ39)
CAVPVVGNMLTF

SEQ ID NO: 374462 - protein, 13 aa, Homo sapiens
  CDR3 for beta chain variable domain of TCR clone 187231 (TRBV12-5, TRBJ2-3)
CASGDRQSDTQYF

SEQ ID NO: 374463 - protein, 14 aa, Homo sapiens
  CDR3 for alpha chain variable domain of TCR clone 187232 (TRAV12-3, TRAJ10)
SHLPLTGGGNKLTF

SEQ ID NO: 374464 - protein, 12 aa, Homo sapiens
  CDR3 for beta chain variable domain of TCR clone 187232 (TRBV12-4, TRBJ2-1)
CASRQTENEQFF

SEQ ID NO: 374465 - protein, 12 aa, Homo sapiens
  CDR3 for alpha chain variable domain of TCR clone 187233 (TRAV29/DV5, TRAJ43)
CAAPYNNNDIRF

SEQ ID NO: 374466 - protein, 17 aa, Homo sapiens
  CDR3 for beta chain variable domain of TCR clone 187233 (TRBV19, TRBJ2-6)
CASSTGQVFSGANVPTF

SEQ ID NO: 374467 - protein, 16 aa, Homo sapiens
  CDR3 for alpha chain variable domain of TCR clone 187234 (TRAV12-3, TRAJ53)
CAMSPGSGGSNYKLTF

SEQ ID NO: 374468 - protein, 18 aa, Homo sapiens
  CDR3 for beta chain variable domain of TCR clone 187234 (TRBV7-3, TRBJ2-1)
CAGSLTLASGRAMVSSSS

SEQ ID NO: 374469 - protein, 16 aa, Homo sapiens
  CDR3 for alpha chain variable domain of TCR clone 187235 (TRAV3, TRAJ37)
CAVRGKGSGNTGKLIF

SEQ ID NO: 374470 - protein, 16 aa, Homo sapiens
  CDR3 for beta chain variable domain of TCR clone 187235 (TRBV4-2, TRBJ1-1)
CASSQAGFGMNTEAFF

SEQ ID NO: 374471 - protein, 11 aa, Homo sapiens
  CDR3 for alpha chain variable domain of TCR clone 187236 (TRAV1-1, TRAJ23)
CAVRQGGKLIF

SEQ ID NO: 374472 - protein, 12 aa, Homo sapiens
  CDR3 for beta chain variable domain of TCR clone 187236 (TRBV19, TRBJ2-7)
CASTDRGYEQYF

SEQ ID NO: 374473 - protein, 14 aa, Homo sapiens
  CDR3 for alpha chain variable domain of TCR clone 187237 (TRAV2, TRAJ9)
CAVEDRSGGFKTIF

SEQ ID NO: 374474 - protein, 11 aa, Homo sapiens
  CDR3 for beta chain variable domain of TCR clone 187237 (TRBV12-4, TRBJ2-3)
CASTATDTQYV

SEQ ID NO: 374475 - protein, 15 aa, Homo sapiens
  CDR3 for alpha chain variable domain of TCR clone 187238 (TRAV25, TRAJ52)
CAGRPGGTSYGKLTF

SEQ ID NO: 374476 - protein, 14 aa, Homo sapiens
  CDR3 for beta chain variable domain of TCR clone 187238 (TRBV11-2, TRBJ2-1)
CAGSLEPSGRGKFF

SEQ ID NO: 374477 - protein, 12 aa, Homo sapiens
  CDR3 for alpha chain variable domain of TCR clone 187239 (TRAV8-3, TRAJ20)
CAVGANDYTLSF

SEQ ID NO: 374478 - protein, 16 aa, Homo sapiens
  CDR3 for beta chain variable domain of TCR clone 187239 (TRBV19, TRBJ1-1)
CASRPRSEALNTEAFF

SEQ ID NO: 374479 - protein, 15 aa, Homo sapiens
  CDR3 for alpha chain variable domain of TCR clone 187240 (TRAV12-3, TRAJ6)
CAMSATSGGSYIPTF

SEQ ID NO: 374480 - protein, 11 aa, Homo sapiens
  CDR3 for beta chain variable domain of TCR clone 187240 (TRBV20-1, TRBJ1-5)
CSGQGDQPQHF

SEQ ID NO: 374481 - protein, 14 aa, Homo sapiens
  CDR3 for alpha chain variable domain of TCR clone 187241 (TRAV12-2, TRAJ4)
CALVLSGGYNKLIF

SEQ ID NO: 374482 - protein, 17 aa, Homo sapiens
  CDR3 for beta chain variable domain of TCR clone 187241 (TRBV28, TRBJ2-5)
CASSTPEGDALQETQYF

SEQ ID NO: 374483 - protein, 15 aa, Homo sapiens
  CDR3 for alpha chain variable domain of TCR clone 187242 (TRAV23/DV6, TRAJ13)
CAAWPGGGGYQKVTF

SEQ ID NO: 374484 - protein, 15 aa, Homo sapiens
  CDR3 for beta chain variable domain of TCR clone 187242 (TRBV20-1, TRBJ1-6)
CSARAASSYNSPLHF

SEQ ID NO: 374485 - protein, 13 aa, Homo sapiens
  CDR3 for alpha chain variable domain of TCR clone 187243 (TRAV36/DV7, TRAJ41)
CAVEANSGYALNF

SEQ ID NO: 374486 - protein, 15 aa, Homo sapiens
  CDR3 for beta chain variable domain of TCR clone 187243 (TRBV5-1, TRBJ2-7)
CASSLNGGPAREQYF

SEQ ID NO: 374487 - protein, 14 aa, Homo sapiens
  CDR3 for alpha chain variable domain of TCR clone 187244 (TRAV1-2, TRAJ16)
CAVNRFSDGQKLLF

SEQ ID NO: 374488 - protein, 13 aa, Homo sapiens
  CDR3 for beta chain variable domain of TCR clone 187244 (TRBV7-6, TRBJ1-2)
CQQQVDRDYGYTF

SEQ ID NO: 374489 - protein, 17 aa, Homo sapiens
  CDR3 for alpha chain variable domain of TCR clone 187245 (TRAV2, TRAJ22)
ILQVREADAAEQRQLTF

SEQ ID NO: 374490 - protein, 14 aa, Homo sapiens
  CDR3 for beta chain variable domain of TCR clone 187245 (TRBV7-2, TRBJ2-7)
CASSLYPGRYEQYF

SEQ ID NO: 374491 - protein, 14 aa, Homo sapiens
  CDR3 for alpha chain variable domain of TCR clone 187246 (TRAV1-2, TRAJ16)
CAVNRFSDGQKLLL

SEQ ID NO: 374492 - protein, 14 aa, Homo sapiens
  CDR3 for beta chain variable domain of TCR clone 187246 (TRBV7-9, TRBJ2-3)
CASSLEGGTDTQYF

SEQ ID NO: 374493 - protein, 14 aa, Homo sapiens
  CDR3 for alpha chain variable domain of TCR clone 187247 (TRAV1-2, TRAJ8)
CAVREDTGFQKLVF

SEQ ID NO: 374494 - protein, 16 aa, Homo sapiens
  CDR3 for beta chain variable domain of TCR clone 187247 (TRBV9, TRBJ2-1)
CASSPTTGASYNEQFF

SEQ ID NO: 374495 - protein, 13 aa, Homo sapiens
  CDR3 for alpha chain variable domain of TCR clone 187248 (TRAV3, TRAJ21)
CAVREPDFDKFYF

SEQ ID NO: 374496 - protein, 14 aa, Homo sapiens
  CDR3 for beta chain variable domain of TCR clone 187248 (TRBV19, TRBJ2-7)
CASSIQEWSYEQYF

SEQ ID NO: 374497 - protein, 16 aa, Homo sapiens
  CDR3 for alpha chain variable domain of TCR clone 187249 (TRAV30, TRAJ24)
CGTEIVDADSWGKFQF

SEQ ID NO: 374498 - protein, 20 aa, Homo sapiens
  CDR3 for beta chain variable domain of TCR clone 187249 (TRBV19, TRBJ2-1)
CASSISRTVTSTRLKNEQFF

SEQ ID NO: 374499 - protein, 14 aa, Homo sapiens
  CDR3 for alpha chain variable domain of TCR clone 187250 (TRAV17, TRAJ22)
CATSPSGSARQLTF

SEQ ID NO: 374500 - protein, 18 aa, Homo sapiens
  CDR3 for beta chain variable domain of TCR clone 187250 (TRBV20-1, TRBJ2-3)
CSASGLAGGPGTTDTQYF

SEQ ID NO: 374501 - protein, 18 aa, Homo sapiens
  CDR3 for alpha chain variable domain of TCR clone 187251 (TRAV13-1, TRAJ52)
CAAKNPNAGGTSYGKITF

SEQ ID NO: 374502 - protein, 15 aa, Homo sapiens
  CDR3 for beta chain variable domain of TCR clone 187251 (TRBV2, TRBJ2-2)
CASSRETVGTGELFF

SEQ ID NO: 374503 - protein, 15 aa, Homo sapiens
  CDR3 for alpha chain variable domain of TCR clone 187252 (TRAV25, TRAJ53)
CAATGGGGSNYKLTF

SEQ ID NO: 374504 - protein, 15 aa, Homo sapiens
  CDR3 for beta chain variable domain of TCR clone 187252 (TRBV7-9, TRBJ1-4)
CASSARTGGNEKLFF

SEQ ID NO: 374505 - protein, 16 aa, Homo sapiens
  CDR3 for alpha chain variable domain of TCR clone 187253 (TRAV30, TRAJ24)
CGTEIVDADSWGKFQF

SEQ ID NO: 374506 - protein, 14 aa, Homo sapiens
  CDR3 for beta chain variable domain of TCR clone 187253 (TRBV2, TRBJ1-6)
CASGRGEGYSPLHF

SEQ ID NO: 374507 - protein, 12 aa, Homo sapiens
  CDR3 for alpha chain variable domain of TCR clone 187254 (TRAV9-2, TRAJ57)
CALRSGSEKLVL

SEQ ID NO: 374508 - protein, 15 aa, Homo sapiens
  CDR3 for beta chain variable domain of TCR clone 187254 (TRBV15, TRBJ1-1)
CATSLQGGRNTEAFF

SEQ ID NO: 374509 - protein, 13 aa, Homo sapiens
  CDR3 for alpha chain variable domain of TCR clone 187255 (TRAV8-3, TRAJ37)
CAVPSSNTVKLIF

SEQ ID NO: 374510 - protein, 12 aa, Homo sapiens
  CDR3 for beta chain variable domain of TCR clone 187255 (TRBV11-2, TRBJ2-1)
CASSPGNNEQFF

SEQ ID NO: 374511 - protein, 13 aa, Homo sapiens
  CDR3 for alpha chain variable domain of TCR clone 187256 (TRAV35, TRAJ42)
CAGFPGSQGNLIF

SEQ ID NO: 374512 - protein, 14 aa, Homo sapiens
  CDR3 for beta chain variable domain of TCR clone 187256 (TRBV7-9, TRBJ2-2)
CASSFDRGTGELFF

SEQ ID NO: 374513 - protein, 14 aa, Homo sapiens
  CDR3 for alpha chain variable domain of TCR clone 187257 (TRAV12-2, TRAJ40)
CAVKIPSGTYKYIF

SEQ ID NO: 374514 - protein, 17 aa, Homo sapiens
  CDR3 for beta chain variable domain of TCR clone 187257 (TRBV20-1, TRBJ2-1)
CSAFSGTSGALYNEQFF

SEQ ID NO: 374515 - protein, 17 aa, Homo sapiens
  CDR3 for alpha chain variable domain of TCR clone 187258 (TRAV3, TRAJ6)
CAVRDCPRAGGSYIPTF

SEQ ID NO: 374516 - protein, 14 aa, Homo sapiens
  CDR3 for beta chain variable domain of TCR clone 187258 (TRBV7-2, TRBJ2-7)
CASSPKTSFCEQYF

SEQ ID NO: 374517 - protein, 17 aa, Homo sapiens
  CDR3 for alpha chain variable domain of TCR clone 187259 (TRAV3, TRAJ6)
CAVRDGPGAGGSYIPTF

SEQ ID NO: 374518 - protein, 14 aa, Homo sapiens
  CDR3 for beta chain variable domain of TCR clone 187259 (TRBV7-2, TRBJ2-5)
CASSPKTSFYEQYF

SEQ ID NO: 374519 - protein, 14 aa, Homo sapiens
  CDR3 for alpha chain variable domain of TCR clone 187260 (TRAV1-2, TRAJ8)
CAVREDTGFEKLVF

SEQ ID NO: 374520 - protein, 12 aa, Homo sapiens
  CDR3 for beta chain variable domain of TCR clone 187260 (TRBV11-2, TRBJ2-2)
CASSLPTGELFF

SEQ ID NO: 374521 - protein, 15 aa, Homo sapiens
  CDR3 for alpha chain variable domain of TCR clone 187261 (TRAV17, TRAJ57)
CATGPSQGGSEKLVV

SEQ ID NO: 374522 - protein, 13 aa, Homo sapiens
  CDR3 for beta chain variable domain of TCR clone 187261 (TRBV11-2, TRBJ2-5)
CASSSTGEETQYF

SEQ ID NO: 374523 - protein, 11 aa, Homo sapiens
  CDR3 for alpha chain variable domain of TCR clone 187262 (TRAV12-3, TRAJ27)
CAMANAGKSTI

SEQ ID NO: 374524 - protein, 13 aa, Homo sapiens
  CDR3 for beta chain variable domain of TCR clone 187262 (TRBV20-1, TRBJ1-1)
CSARVGGNTEAFF

SEQ ID NO: 374525 - protein, 11 aa, Homo sapiens
  CDR3 for alpha chain variable domain of TCR clone 187263 (TRAV4, TRAJ23)
CLVAPGGKLIF

SEQ ID NO: 374526 - protein, 15 aa, Homo sapiens
  CDR3 for beta chain variable domain of TCR clone 187263 (TRBV7-2, TRBJ2-1)
CASSFQADEYNEQFV

SEQ ID NO: 374527 - protein, 22 aa, Homo sapiens
  CDR3 for alpha chain variable domain of TCR clone 187264 (TRAV12-2, TRAJ6)
CAVIASGGSYIPHLEEEPALLF

SEQ ID NO: 374528 - protein, 15 aa, Homo sapiens
  CDR3 for beta chain variable domain of TCR clone 187264 (TRBV20-1, TRBJ2-7)
CSARDRVSGMDEQYF

SEQ ID NO: 374529 - protein, 14 aa, Homo sapiens
  CDR3 for alpha chain variable domain of TCR clone 187265 (TRAV13-1, TRAJ35)
CAASKGGCGNVLHF

SEQ ID NO: 374530 - protein, 13 aa, Homo sapiens
  CDR3 for beta chain variable domain of TCR clone 187265 (TRBV7-3, TRBJ1-1)
CASSQDWGAEAFF

SEQ ID NO: 374531 - protein, 16 aa, Homo sapiens
  CDR3 for alpha chain variable domain of TCR clone 187266 (TRAV21, TRAJ37)
CAVRPRGSSNTGILIF

SEQ ID NO: 374532 - protein, 13 aa, Homo sapiens
  CDR3 for beta chain variable domain of TCR clone 187266 (TRBV7-9, TRBJ1-2)
CASSLKQNYGYTF

SEQ ID NO: 374533 - protein, 16 aa, Homo sapiens
  CDR3 for alpha chain variable domain of TCR clone 187267 (TRAV30, TRAJ24)
CGTEIVDADSWGKFQF

SEQ ID NO: 374534 - protein, 14 aa, Homo sapiens
  CDR3 for beta chain variable domain of TCR clone 187267 (TRBV7-3, TRBJ2-1)
CASSLSGSYNEQFF

SEQ ID NO: 374535 - protein, 19 aa, Homo sapiens
  CDR3 for alpha chain variable domain of TCR clone 187268 (TRAV16, )
CALSGDIQNPDPAVYQLRD

SEQ ID NO: 374536 - protein, 13 aa, Homo sapiens
  CDR3 for beta chain variable domain of TCR clone 187268 (TRBV19, TRBJ1-2)
CASSVPGQDGYTF

SEQ ID NO: 374537 - protein, 14 aa, Homo sapiens
  CDR3 for alpha chain variable domain of TCR clone 187269 (TRAV17, TRAJ12)
CAILPMDSSYKLIF

SEQ ID NO: 374538 - protein, 14 aa, Homo sapiens
  CDR3 for beta chain variable domain of TCR clone 187269 (TRBV6-1, TRBJ1-3)
CASVQGGGGNTMYF

SEQ ID NO: 374539 - protein, 14 aa, Homo sapiens
  CDR3 for alpha chain variable domain of TCR clone 187270 (TRAV35, TRAJ13)
CAGRSPGGYQKVTF

SEQ ID NO: 374540 - protein, 14 aa, Homo sapiens
  CDR3 for beta chain variable domain of TCR clone 187270 (TRBV19, TRBJ2-2)
CASSMVGFSGELFF

SEQ ID NO: 374541 - protein, 15 aa, Homo sapiens
  CDR3 for alpha chain variable domain of TCR clone 187271 (TRAV13-1, TRAJ49)
CAASSEGNTGNQFYF

SEQ ID NO: 374542 - protein, 12 aa, Homo sapiens
  CDR3 for beta chain variable domain of TCR clone 187271 (TRBV11-2, TRBJ2-2)
CASSLGGGELFF

SEQ ID NO: 374543 - protein, 13 aa, Homo sapiens
  CDR3 for alpha chain variable domain of TCR clone 187272 (TRAV1-2, TRAJ12)
CAAWMDSSYKLIF

SEQ ID NO: 374544 - protein, 11 aa, Homo sapiens
  CDR3 for beta chain variable domain of TCR clone 187272 (TRBV5-6, TRBJ1-2)
CASSRGGGYTF

SEQ ID NO: 374545 - protein, 14 aa, Homo sapiens
  CDR3 for alpha chain variable domain of TCR clone 187273 (TRAV17, TRAJ15)
CATDRGQAGTALIF

SEQ ID NO: 374546 - protein, 13 aa, Homo sapiens
  CDR3 for beta chain variable domain of TCR clone 187273 (TRBV7-2, TRBJ2-7)
CASSSPSGSEQYF

SEQ ID NO: 374547 - protein, 13 aa, Homo sapiens
  CDR3 for alpha chain variable domain of TCR clone 187274 (TRAV12-3, TRAJ33)
CVMSVNSNYRLIW

SEQ ID NO: 374548 - protein, 16 aa, Homo sapiens
  CDR3 for beta chain variable domain of TCR clone 187274 (TRBV13, TRBJ2-5)
CASSLRTGGSWETQYF

SEQ ID NO: 374549 - protein, 15 aa, Homo sapiens
  CDR3 for alpha chain variable domain of TCR clone 187275 (TRAV8-3, TRAJ11)
CAVGLLNSGYSTIPF

SEQ ID NO: 374550 - protein, 16 aa, Homo sapiens
  CDR3 for beta chain variable domain of TCR clone 187275 (TRBV7-9, TRBJ1-2)
CASSLGFSSGEDGYTF

SEQ ID NO: 374551 - protein, 15 aa, Homo sapiens
  CDR3 for alpha chain variable domain of TCR clone 187276 (TRAV20, TRAJ43)
CAVQAGKSSNNDMRF

SEQ ID NO: 374552 - protein, 13 aa, Homo sapiens
  CDR3 for beta chain variable domain of TCR clone 187276 (TRBV7-3, TRBJ2-2)
CASSLNVLGELFF

SEQ ID NO: 374553 - protein, 14 aa, Homo sapiens
  CDR3 for alpha chain variable domain of TCR clone 187277 (TRAV12-3, TRAJ10)
SHLHLTGGGNKLTF

SEQ ID NO: 374554 - protein, 12 aa, Homo sapiens
  CDR3 for beta chain variable domain of TCR clone 187277 (TRBV7-3, TRBJ2-5)
CASSSPGGTQYF

SEQ ID NO: 374555 - protein, 13 aa, Homo sapiens
  CDR3 for alpha chain variable domain of TCR clone 187278 (TRAV12-3, TRAJ43)
CAMIPFRGNDMRF

SEQ ID NO: 374556 - protein, 14 aa, Homo sapiens
  CDR3 for beta chain variable domain of TCR clone 187278 (TRBV10-3, TRBJ2-7)
CAISAPRGAYEQYF

SEQ ID NO: 374557 - protein, 14 aa, Homo sapiens
  CDR3 for alpha chain variable domain of TCR clone 187279 (TRAV12-3, TRAJ29)
CAMSPYSGNTPLVF

SEQ ID NO: 374558 - protein, 17 aa, Homo sapiens
  CDR3 for beta chain variable domain of TCR clone 187279 (TRBV7-8, TRBJ2-6)
CASSAGTGGAGANDLTF

SEQ ID NO: 374559 - protein, 12 aa, Homo sapiens
  CDR3 for alpha chain variable domain of TCR clone 187280 (TRAV1-2, TRAJ33)
CAALNSNYQLIW

SEQ ID NO: 374560 - protein, 13 aa, Homo sapiens
  CDR3 for beta chain variable domain of TCR clone 187280 (TRBV19, TRBJ2-7)
CASRKAGGSEQYF

SEQ ID NO: 374561 - protein, 14 aa, Homo sapiens
  CDR3 for alpha chain variable domain of TCR clone 187281 (TRAV8-3, TRAJ4)
YAVGAGGGYNKLIF

SEQ ID NO: 374562 - protein, 15 aa, Homo sapiens
  CDR3 for beta chain variable domain of TCR clone 187281 (TRBV6-5, TRBJ2-1)
CASSYDAGAGNEQFF

SEQ ID NO: 374563 - protein, 13 aa, Homo sapiens
  CDR3 for alpha chain variable domain of TCR clone 187282 (TRAV2, TRAJ40)
CAVVTSGTYKYIF

SEQ ID NO: 374564 - protein, 14 aa, Homo sapiens
  CDR3 for beta chain variable domain of TCR clone 187282 (TRBV7-8, TRBJ2-5)
CASSATGGQETQYF

SEQ ID NO: 374565 - protein, 12 aa, Homo sapiens
  CDR3 for alpha chain variable domain of TCR clone 187283 (TRAV8-3, TRAJ43)
CAVGAGNTDMRF

SEQ ID NO: 374566 - protein, 18 aa, Homo sapiens
  CDR3 for beta chain variable domain of TCR clone 187283 (TRBV11-2, TRBJ2-3)
CASSLGGASRGAPNTQYF

SEQ ID NO: 374567 - protein, 10 aa, Homo sapiens
  CDR3 for alpha chain variable domain of TCR clone 187284 (TRAV12-2, TRAJ43)
CAGDDMRFGA

SEQ ID NO: 374568 - protein, 16 aa, Homo sapiens
  CDR3 for beta chain variable domain of TCR clone 187284 (TRBV2, TRBJ2-4)
CASSEAPGGEQSIQYF

SEQ ID NO: 374569 - protein, 14 aa, Homo sapiens
  CDR3 for alpha chain variable domain of TCR clone 187285 (TRAV13-2, TRAJ9)
CAENLETGGFKTIF

SEQ ID NO: 374570 - protein, 16 aa, Homo sapiens
  CDR3 for beta chain variable domain of TCR clone 187285 (TRBV28, TRBJ2-5)
CASSFSPAGGWETQHF

SEQ ID NO: 374571 - protein, 13 aa, Homo sapiens
  CDR3 for alpha chain variable domain of TCR clone 187286 (TRAV26-1, TRAJ48)
CIVRVVGDEKLTF

SEQ ID NO: 374572 - protein, 16 aa, Homo sapiens
  CDR3 for beta chain variable domain of TCR clone 187286 (TRBV19, TRBJ2-1)
CASSKAGPSSYNEQFF

SEQ ID NO: 374573 - protein, 14 aa, Homo sapiens
  CDR3 for alpha chain variable domain of TCR clone 187287 (TRAV12-2, TRAJ13)
CAVKKTGSYQKVTF

SEQ ID NO: 374574 - protein, 14 aa, Homo sapiens
  CDR3 for beta chain variable domain of TCR clone 187287 (TRBV12-5, TRBJ2-5)
CASGSRTHQETQYF

SEQ ID NO: 374575 - protein, 14 aa, Homo sapiens
  CDR3 for alpha chain variable domain of TCR clone 187288 (TRAV4, TRAJ26)
CLVGSHNYGQNFVF

SEQ ID NO: 374576 - protein, 17 aa, Homo sapiens
  CDR3 for beta chain variable domain of TCR clone 187288 (TRBV24-1, TRBJ2-1)
CATSDVSTSGTYNEKFF

SEQ ID NO: 374577 - protein, 12 aa, Homo sapiens
  CDR3 for alpha chain variable domain of TCR clone 187289 (TRAV2, TRAJ40)
CCGSSGTHKYIF

SEQ ID NO: 374578 - protein, 14 aa, Homo sapiens
  CDR3 for beta chain variable domain of TCR clone 187289 (TRBV19, TRBJ2-1)
CASPTFVLSGEQFF

SEQ ID NO: 374579 - protein, 14 aa, Homo sapiens
  CDR3 for alpha chain variable domain of TCR clone 187290 (TRAV35, TRAJ46)
CAGPQKSSGDKLTF

SEQ ID NO: 374580 - protein, 12 aa, Homo sapiens
  CDR3 for beta chain variable domain of TCR clone 187290 (TRBV19, TRBJ2-1)
CASRMQDTEQFF

SEQ ID NO: 374581 - protein, 12 aa, Homo sapiens
  CDR3 for alpha chain variable domain of TCR clone 187291 (TRAV13-1, TRAJ3)
CAATGVQQCFQD

SEQ ID NO: 374582 - protein, 16 aa, Homo sapiens
  CDR3 for beta chain variable domain of TCR clone 187291 (TRBV7-3, TRBJ2-2)
CASSLKRGTLFGELFF

SEQ ID NO: 374583 - protein, 14 aa, Homo sapiens
  CDR3 for alpha chain variable domain of TCR clone 187292 (TRAV38-2/DV8, TRAJ30)
CAYRSADRDDKIIF

SEQ ID NO: 374584 - protein, 12 aa, Homo sapiens
  CDR3 for beta chain variable domain of TCR clone 187292 (TRBV11-2, TRBJ2-2)
CASSLGGGELFF

SEQ ID NO: 374585 - protein, 14 aa, Homo sapiens
  CDR3 for alpha chain variable domain of TCR clone 187293 (TRAV13-1, TRAJ48)
CAASRSFGNEKLTF

SEQ ID NO: 374586 - protein, 18 aa, Homo sapiens
  CDR3 for beta chain variable domain of TCR clone 187293 (TRBV25-1, TRBJ1-2)
CASSGLQNGQGLIFGYPF

SEQ ID NO: 374587 - protein, 15 aa, Homo sapiens
  CDR3 for alpha chain variable domain of TCR clone 187294 (TRAV27, TRAJ24)
CAGSMTTDSWGKLQF

SEQ ID NO: 374588 - protein, 15 aa, Homo sapiens
  CDR3 for beta chain variable domain of TCR clone 187294 (TRBV6-6, TRBJ1-5)
CASSSHRGQGQPQHF

SEQ ID NO: 374589 - protein, 15 aa, Homo sapiens
  CDR3 for alpha chain variable domain of TCR clone 187295 (TRAV12-1, TRAJ44)
CVVFVNTGTASKLTF

SEQ ID NO: 374590 - protein, 17 aa, Homo sapiens
  CDR3 for beta chain variable domain of TCR clone 187295 (TRBV7-8, TRBJ2-6)
CASSAGTGGAGAYVLTF

SEQ ID NO: 374591 - protein, 18 aa, Homo sapiens
  CDR3 for alpha chain variable domain of TCR clone 187296 (TRAV26-1, TRAJ52)
CIVRVEGAGGTSYGKLTF

SEQ ID NO: 374592 - protein, 13 aa, Homo sapiens
  CDR3 for beta chain variable domain of TCR clone 187296 (TRBV7-3, TRBJ1-2)
CASSLQRGYGYTF

SEQ ID NO: 374593 - protein, 14 aa, Homo sapiens
  CDR3 for alpha chain variable domain of TCR clone 187297 (TRAV20, TRAJ29)
CAVQAWVGNTPLAF

SEQ ID NO: 374594 - protein, 15 aa, Homo sapiens
  CDR3 for beta chain variable domain of TCR clone 187297 (TRBV29-1, TRBJ2-7)
CSVGFFDRGSYEQYF

SEQ ID NO: 374595 - protein, 16 aa, Homo sapiens
  CDR3 for alpha chain variable domain of TCR clone 187298 (TRAV3, TRAJ37)
CAVRPRGSGNTGKLIF

SEQ ID NO: 374596 - protein, 15 aa, Homo sapiens
  CDR3 for beta chain variable domain of TCR clone 187298 (TRBV20-1, TRBJ2-7)
CSARDRVSVMDEQYF

SEQ ID NO: 374597 - protein, 15 aa, Homo sapiens
  CDR3 for alpha chain variable domain of TCR clone 187299 (TRAV23/DV6, TRAJ18)
CAARYRGSTLGRLYF

SEQ ID NO: 374598 - protein, 14 aa, Homo sapiens
  CDR3 for beta chain variable domain of TCR clone 187299 (TRBV2, TRBJ1-2)
CASNPDRDNYGYTF

SEQ ID NO: 374599 - protein, 16 aa, Homo sapiens
  CDR3 for alpha chain variable domain of TCR clone 187300 (TRAV12-2, TRAJ45)
CAVNMYSGGGADGLTF

SEQ ID NO: 374600 - protein, 16 aa, Homo sapiens
  CDR3 for beta chain variable domain of TCR clone 187300 (TRBV4-1, TRBJ2-3)
CASSQSTSGAEDTQYF

SEQ ID NO: 374601 - protein, 16 aa, Homo sapiens
  CDR3 for alpha chain variable domain of TCR clone 187301 (TRAV26-1, TRAJ53)
CIVRVAMGGSNYKLTF

SEQ ID NO: 374602 - protein, 12 aa, Homo sapiens
  CDR3 for beta chain variable domain of TCR clone 187301 (TRBV11-2, TRBJ2-5)
CASSLVGETQYV

SEQ ID NO: 374603 - protein, 17 aa, Homo sapiens
  CDR3 for alpha chain variable domain of TCR clone 187302 (TRAV2, TRAJ22)
ILQVREADAAEQRQLTF

SEQ ID NO: 374604 - protein, 16 aa, Homo sapiens
  CDR3 for beta chain variable domain of TCR clone 187302 (TRBV2, TRBJ2-5)
RASSETRGVGEETQYF

SEQ ID NO: 374605 - protein, 23 aa, Homo sapiens
  CDR3 for alpha chain variable domain of TCR clone 187303 (TRAV26-1, TRAJ38)
CIADNAGNNHIQNPDPAVYQLRD

SEQ ID NO: 374606 - protein, 16 aa, Homo sapiens
  CDR3 for beta chain variable domain of TCR clone 187303 (TRBV20-1, TRBJ2-3)
CSARLHSAGAIDTQYF

SEQ ID NO: 374607 - protein, 14 aa, Homo sapiens
  CDR3 for alpha chain variable domain of TCR clone 187304 (TRAV1-2, TRAJ16)
CAVNRFSDGQKLLF

SEQ ID NO: 374608 - protein, 15 aa, Homo sapiens
  CDR3 for beta chain variable domain of TCR clone 187304 (TRBV7-2, TRBJ2-3)
CASSLAGGPTDTQYF

SEQ ID NO: 374609 - protein, 17 aa, Homo sapiens
  CDR3 for alpha chain variable domain of TCR clone 187305 (TRAV3, TRAJ6)
CAVRDVPRAGGSYIPTF

SEQ ID NO: 374610 - protein, 14 aa, Homo sapiens
  CDR3 for beta chain variable domain of TCR clone 187305 (TRBV7-2, TRBJ2-7)
FASSPKTSFYEQYF

SEQ ID NO: 374611 - protein, 11 aa, Homo sapiens
  CDR3 for alpha chain variable domain of TCR clone 187306 (TRAV21, TRAJ11)
FAVNGYSPLTF

SEQ ID NO: 374612 - protein, 11 aa, Homo sapiens
  CDR3 for beta chain variable domain of TCR clone 187306 (TRBV19, TRBJ1-1)
CASSIGSEAFF

SEQ ID NO: 374613 - protein, 16 aa, Homo sapiens
  CDR3 for alpha chain variable domain of TCR clone 187307 (TRAV12-2, TRAJ32)
CAVNLGQGGATNKLIF

SEQ ID NO: 374614 - protein, 15 aa, Homo sapiens
  CDR3 for beta chain variable domain of TCR clone 187307 (TRBV6-1, TRBJ2-3)
CASSERGGITDTQYF

SEQ ID NO: 374615 - protein, 10 aa, Homo sapiens
  CDR3 for alpha chain variable domain of TCR clone 187308 (TRAV13-1, TRAJ5)
CAASRRALTF

SEQ ID NO: 374616 - protein, 16 aa, Homo sapiens
  CDR3 for beta chain variable domain of TCR clone 187308 (TRBV4-3, TRBJ2-3)
CASGKGGLAGTDTQYF

SEQ ID NO: 374617 - protein, 14 aa, Homo sapiens
  CDR3 for alpha chain variable domain of TCR clone 187309 (TRAV1-2, TRAJ16)
CAVNRFSDGPKLLF

SEQ ID NO: 374618 - protein, 19 aa, Homo sapiens
  CDR3 for beta chain variable domain of TCR clone 187309 (TRBV6-3, TRBJ1-2)
CASSYSKGRTGPPNYGYTF

SEQ ID NO: 374619 - protein, 14 aa, Homo sapiens
  CDR3 for alpha chain variable domain of TCR clone 187310 (TRAV25, TRAJ22)
CAVRSSGSARQLTF

SEQ ID NO: 374620 - protein, 16 aa, Homo sapiens
  CDR3 for beta chain variable domain of TCR clone 187310 (TRBV4-2, TRBJ1-1)
CASSPSPVRAAPEAFF

SEQ ID NO: 374621 - protein, 12 aa, Homo sapiens
  CDR3 for alpha chain variable domain of TCR clone 187311 (TRAV21, TRAJ11)
CAATSGYSTLTF

SEQ ID NO: 374622 - protein, 13 aa, Homo sapiens
  CDR3 for beta chain variable domain of TCR clone 187311 (TRBV20-1, TRBJ2-7)
QCPRAGGVGEQYF

SEQ ID NO: 374623 - protein, 14 aa, Homo sapiens
  CDR3 for alpha chain variable domain of TCR clone 187312 (TRAV30, TRAJ26)
CGTEIVSYGQNFVF

SEQ ID NO: 374624 - protein, 13 aa, Homo sapiens
  CDR3 for beta chain variable domain of TCR clone 187312 (TRBV19, TRBJ1-3)
CASTLSLGNTIYF

SEQ ID NO: 374625 - protein, 13 aa, Homo sapiens
  CDR3 for alpha chain variable domain of TCR clone 187313 (TRAV1-2, TRAJ9)
CGALNTGGFKTIF

SEQ ID NO: 374626 - protein, 13 aa, Homo sapiens
  CDR3 for beta chain variable domain of TCR clone 187313 (TRBV19, TRBJ1-2)
CVSSVPGQDGYTF

SEQ ID NO: 374627 - protein, 17 aa, Homo sapiens
  CDR3 for alpha chain variable domain of TCR clone 187314 (TRAV13-1, TRAJ5)
CSNPSLNRDTGRRALTF

SEQ ID NO: 374628 - protein, 17 aa, Homo sapiens
  CDR3 for beta chain variable domain of TCR clone 187314 (TRBV24-1, TRBJ2-1)
CATSDVSTSGTYNEQFF

SEQ ID NO: 374629 - protein, 13 aa, Homo sapiens
  CDR3 for alpha chain variable domain of TCR clone 187315 (TRAV12-3, TRAJ53)
CAMRGGSNYKLTF

SEQ ID NO: 374630 - protein, 13 aa, Homo sapiens
  CDR3 for beta chain variable domain of TCR clone 187315 (TRBV2, TRBJ2-7)
CASTRTGGYEQYF

SEQ ID NO: 374631 - protein, 23 aa, Homo sapiens
  CDR3 for alpha chain variable domain of TCR clone 187316 (TRAV26-1, TRAJ38)
CIADNAGNNHIQNPDPAVYQLRD

SEQ ID NO: 374632 - protein, 12 aa, Homo sapiens
  CDR3 for beta chain variable domain of TCR clone 187316 (TRBV7-9, TRBJ1-4)
CASSTDREKLFF

SEQ ID NO: 374633 - protein, 13 aa, Homo sapiens
  CDR3 for alpha chain variable domain of TCR clone 187317 (TRAV12-3, TRAJ21)
CAPGPHTFNKFYF

SEQ ID NO: 374634 - protein, 11 aa, Homo sapiens
  CDR3 for beta chain variable domain of TCR clone 187317 (TRBV19, TRBJ1-1)
CASSIGSEAFF

SEQ ID NO: 374635 - protein, 13 aa, Homo sapiens
  CDR3 for alpha chain variable domain of TCR clone 187318 (TRAV9-2, TRAJ54)
CALSDQGAQKLVF

SEQ ID NO: 374636 - protein, 15 aa, Homo sapiens
  CDR3 for beta chain variable domain of TCR clone 187318 (TRBV7-2, TRBJ2-3)
CASSSTGLETDTQYF

SEQ ID NO: 374637 - protein, 14 aa, Homo sapiens
  CDR3 for alpha chain variable domain of TCR clone 187319 (TRAV20, TRAJ22)
CAVALGGSSRQLTF

SEQ ID NO: 374638 - protein, 15 aa, Homo sapiens
  CDR3 for beta chain variable domain of TCR clone 187319 (TRBV7-2, TRBJ1-1)
CASSFAGDRDTEAVF

SEQ ID NO: 374639 - protein, 11 aa, Homo sapiens
  CDR3 for alpha chain variable domain of TCR clone 187320 (TRAV23/DV6, TRAJ49)
CAVAPVTSAIL

SEQ ID NO: 374640 - protein, 14 aa, Homo sapiens
  CDR3 for beta chain variable domain of TCR clone 187320 (TRBV19, TRBJ2-1)
CASPTFVLSGEQFF

SEQ ID NO: 374641 - protein, 13 aa, Homo sapiens
  CDR3 for alpha chain variable domain of TCR clone 187321 (TRAV26-1, TRAJ30)
CIVRVESNDKTIF

SEQ ID NO: 374642 - protein, 17 aa, Homo sapiens
  CDR3 for beta chain variable domain of TCR clone 187321 (TRBV13, TRBJ2-3)
CASSLSRVAGGRNTQYF

SEQ ID NO: 374643 - protein, 14 aa, Homo sapiens
  CDR3 for alpha chain variable domain of TCR clone 187322 (TRAV25, TRAJ35)
CARRMEGFGNVLHC

SEQ ID NO: 374644 - protein, 13 aa, Homo sapiens
  CDR3 for beta chain variable domain of TCR clone 187322 (TRBV7-2, TRBJ1-4)
CAGSVAGLEKLFF

SEQ ID NO: 374645 - protein, 13 aa, Homo sapiens
  CDR3 for alpha chain variable domain of TCR clone 187323 (TRAV3, TRAJ30)
CAVSDRGDDKIIF

SEQ ID NO: 374646 - protein, 16 aa, Homo sapiens
  CDR3 for beta chain variable domain of TCR clone 187323 (TRBV7-3, TRBJ2-2)
CASSLKRGTLSGELFF

SEQ ID NO: 374647 - protein, 15 aa, Homo sapiens
  CDR3 for alpha chain variable domain of TCR clone 187324 (TRAV17, TRAJ57)
CATGPSQGGSEKLVF

SEQ ID NO: 374648 - protein, 15 aa, Homo sapiens
  CDR3 for beta chain variable domain of TCR clone 187324 (TRBV9, TRBJ2-1)
CAGSLAGSSHNEQFF

SEQ ID NO: 374649 - protein, 14 aa, Homo sapiens
  CDR3 for alpha chain variable domain of TCR clone 187325 (TRAV1-1, TRAJ23)
CAVSIYNQGGKLIF

SEQ ID NO: 374650 - protein, 15 aa, Homo sapiens
  CDR3 for beta chain variable domain of TCR clone 187325 (TRBV7-2, TRBJ2-1)
CASSSGLAGGNEQFF

SEQ ID NO: 374651 - protein, 11 aa, Homo sapiens
  CDR3 for alpha chain variable domain of TCR clone 187326 (TRAV12-3, TRAJ17)
CAMTLTGKPTF

SEQ ID NO: 374652 - protein, 15 aa, Homo sapiens
  CDR3 for beta chain variable domain of TCR clone 187326 (TRBV20-1, TRBJ2-7)
CSARDRVSGMDEQYF

SEQ ID NO: 374653 - protein, 15 aa, Homo sapiens
  CDR3 for alpha chain variable domain of TCR clone 187327 (TRAV23/DV6, TRAJ15)
CAALPAGRNCSDLWE

SEQ ID NO: 374654 - protein, 14 aa, Homo sapiens
  CDR3 for beta chain variable domain of TCR clone 187327 (TRBV7-9, TRBJ1-2)
CASSRQGANYGYTL

SEQ ID NO: 374655 - protein, 15 aa, Homo sapiens
  CDR3 for alpha chain variable domain of TCR clone 187328 (TRAV16, TRAJ27)
CAPCGGGTNAGKSTF

SEQ ID NO: 374656 - protein, 15 aa, Homo sapiens
  CDR3 for beta chain variable domain of TCR clone 187328 (TRBV2, TRBJ2-3)
CACSGLAGSTDTQYF

SEQ ID NO: 374657 - protein, 12 aa, Homo sapiens
  CDR3 for alpha chain variable domain of TCR clone 187329 (TRAV12-1, TRAJ40)
CVVCSGTYKYIF

SEQ ID NO: 374658 - protein, 14 aa, Homo sapiens
  CDR3 for beta chain variable domain of TCR clone 187329 (TRBV20-1, TRBJ2-2)
CSAPDTANTGELFF

SEQ ID NO: 374659 - protein, 17 aa, Homo sapiens
  CDR3 for alpha chain variable domain of TCR clone 187330 (TRAV3, TRAJ6)
RAVRDGPRAGGSYIPTF

SEQ ID NO: 374660 - protein, 14 aa, Homo sapiens
  CDR3 for beta chain variable domain of TCR clone 187330 (TRBV7-2, TRBJ2-7)
CASSPKTSFYEQYF

SEQ ID NO: 374661 - protein, 14 aa, Homo sapiens
  CDR3 for alpha chain variable domain of TCR clone 187331 (TRAV12-3, TRAJ9)
CAMSVETGGFKTIF

SEQ ID NO: 374662 - protein, 15 aa, Homo sapiens
  CDR3 for beta chain variable domain of TCR clone 187331 (TRBV20-1, TRBJ1-1)
CSASRGVTGNTEAFF

SEQ ID NO: 374663 - protein, 13 aa, Homo sapiens
  CDR3 for alpha chain variable domain of TCR clone 187332 (TRAV8-3, TRAJ36)
CAVGATGANNLFF

SEQ ID NO: 374664 - protein, 14 aa, Homo sapiens
  CDR3 for beta chain variable domain of TCR clone 187332 (TRBV3-1, TRBJ2-5)
CASSQAGPPETQYF

SEQ ID NO: 374665 - protein, 12 aa, Homo sapiens
  CDR3 for alpha chain variable domain of TCR clone 187333 (TRAV20, TRAJ54)
CAVQEGAQKLVF

SEQ ID NO: 374666 - protein, 17 aa, Homo sapiens
  CDR3 for beta chain variable domain of TCR clone 187333 (TRBV13, TRBJ2-3)
CASSLSRVAGVRNTQYF

SEQ ID NO: 374667 - protein, 15 aa, Homo sapiens
  CDR3 for alpha chain variable domain of TCR clone 187334 (TRAV25, TRAJ52)
CAGTSGDTSYGTLTF

SEQ ID NO: 374668 - protein, 16 aa, Homo sapiens
  CDR3 for beta chain variable domain of TCR clone 187334 (TRBV15, TRBJ1-2)
CATSRGPRTGGGGYTF

SEQ ID NO: 374669 - protein, 18 aa, Homo sapiens
  CDR3 for alpha chain variable domain of TCR clone 187335 (TRAV21, TRAJ52)
CAVRPSLTGGTSYGKLTF

SEQ ID NO: 374670 - protein, 17 aa, Homo sapiens
  CDR3 for beta chain variable domain of TCR clone 187335 (TRBV13, TRBJ2-3)
RASSLSRVAGGRNTQYF

SEQ ID NO: 374671 - protein, 13 aa, Homo sapiens
  CDR3 for alpha chain variable domain of TCR clone 187336 (TRAV2, TRAJ40)
CAVVTSGTYKYIF

SEQ ID NO: 374672 - protein, 17 aa, Homo sapiens
  CDR3 for beta chain variable domain of TCR clone 187336 (TRBV5-1, TRBJ1-6)
CASSPSLQGSDNSPLHF

SEQ ID NO: 374673 - protein, 12 aa, Homo sapiens
  CDR3 for alpha chain variable domain of TCR clone 187337 (TRAV13-1, TRAJ53)
CAAGGSNYKLTF

SEQ ID NO: 374674 - protein, 14 aa, Homo sapiens
  CDR3 for beta chain variable domain of TCR clone 187337 (TRBV20-1, TRBJ2-1)
CSAQIGGSANEQFF

SEQ ID NO: 374675 - protein, 17 aa, Homo sapiens
  CDR3 for alpha chain variable domain of TCR clone 187338 (TRAV3, TRAJ28)
CAVRPLYSGAGSYQLTF

SEQ ID NO: 374676 - protein, 13 aa, Homo sapiens
  CDR3 for beta chain variable domain of TCR clone 187338 (TRBV19, TRBJ1-3)
CASRLSLGNTIYF

SEQ ID NO: 374677 - protein, 14 aa, Homo sapiens
  CDR3 for alpha chain variable domain of TCR clone 187339 (TRAV17, TRAJ22)
CATSPSGSARQLTF

SEQ ID NO: 374678 - protein, 13 aa, Homo sapiens
  CDR3 for beta chain variable domain of TCR clone 187339 (TRBV19, TRBJ1-2)
CASSVPGQDGYTF

SEQ ID NO: 374679 - protein, 23 aa, Homo sapiens
  CDR3 for alpha chain variable domain of TCR clone 187340 (TRAV26-1, TRAJ38)
CIADNAGNNHIKNPDPAVYQLRD

SEQ ID NO: 374680 - protein, 15 aa, Homo sapiens
  CDR3 for beta chain variable domain of TCR clone 187340 (TRBV27, TRBJ2-1)
CASSNGGGSSNEQFF

SEQ ID NO: 374681 - protein, 12 aa, Homo sapiens
  CDR3 for alpha chain variable domain of TCR clone 187341 (TRAV27, TRAJ35)
CAGADFGNVLHC

SEQ ID NO: 374682 - protein, 16 aa, Homo sapiens
  CDR3 for beta chain variable domain of TCR clone 187341 (TRBV6-1, TRBJ2-1)
CASILRQGSFYNEQFF

SEQ ID NO: 374683 - protein, 15 aa, Homo sapiens
  CDR3 for alpha chain variable domain of TCR clone 187342 (TRAV8-3, TRAJ37)
CAVGAPSSNTGKLIF

SEQ ID NO: 374684 - protein, 15 aa, Homo sapiens
  CDR3 for beta chain variable domain of TCR clone 187342 (TRBV11-2, TRBJ1-2)
CASSQMRGLNDGYTF

SEQ ID NO: 374685 - protein, 13 aa, Homo sapiens
  CDR3 for alpha chain variable domain of TCR clone 187343 (TRAV12-2, TRAJ52)
CAVSGTSYGKLTF

SEQ ID NO: 374686 - protein, 13 aa, Homo sapiens
  CDR3 for beta chain variable domain of TCR clone 187343 (TRBV19, TRBJ1-2)
CASSVPGQDGYTF

SEQ ID NO: 374687 - protein, 16 aa, Homo sapiens
  CDR3 for alpha chain variable domain of TCR clone 187344 (TRAV23/DV6, TRAJ9)
CAASIGGNTGGFKTNF

SEQ ID NO: 374688 - protein, 13 aa, Homo sapiens
  CDR3 for beta chain variable domain of TCR clone 187344 (TRBV7-9, TRBJ1-2)
CASGLKQNYRYTF

SEQ ID NO: 374689 - protein, 13 aa, Homo sapiens
  CDR3 for alpha chain variable domain of TCR clone 187345 (TRAV21, TRAJ27)
CAAPPGNAGKSTF

SEQ ID NO: 374690 - protein, 15 aa, Homo sapiens
  CDR3 for beta chain variable domain of TCR clone 187345 (TRBV20-1, TRBJ2-7)
CSARDRVSGMDEQYF

SEQ ID NO: 374691 - protein, 14 aa, Homo sapiens
  CDR3 for alpha chain variable domain of TCR clone 187346 (TRAV35, TRAJ10)
CAGILTGGGNKLTF

SEQ ID NO: 374692 - protein, 16 aa, Homo sapiens
  CDR3 for beta chain variable domain of TCR clone 187346 (TRBV12-5, TRBJ2-5)
CASGPRTSGEQETQYF

SEQ ID NO: 374693 - protein, 13 aa, Homo sapiens
  CDR3 for alpha chain variable domain of TCR clone 187347 (TRAV8-3, TRAJ30)
CAVVGGRDDKIIF

SEQ ID NO: 374694 - protein, 14 aa, Homo sapiens
  CDR3 for beta chain variable domain of TCR clone 187347 (TRBV20-1, TRBJ1-1)
CSAPPADMNTEAFF

SEQ ID NO: 374695 - protein, 14 aa, Homo sapiens
  CDR3 for alpha chain variable domain of TCR clone 187348 (TRAV16, TRAJ42)
CALLAGGSQGNLIF

SEQ ID NO: 374696 - protein, 14 aa, Homo sapiens
  CDR3 for beta chain variable domain of TCR clone 187348 (TRBV20-1, TRBJ2-1)
CSAQIGGSANEQFF

SEQ ID NO: 374697 - protein, 11 aa, Homo sapiens
  CDR3 for alpha chain variable domain of TCR clone 187349 (TRAV12-1, TRAJ21)
CVVNNFNKFYF

SEQ ID NO: 374698 - protein, 14 aa, Homo sapiens
  CDR3 for beta chain variable domain of TCR clone 187349 (TRBV15, TRBJ1-5)
CATSREQSNRPQHF

SEQ ID NO: 374699 - protein, 16 aa, Homo sapiens
  CDR3 for alpha chain variable domain of TCR clone 187350 (TRAV12-2, TRAJ45)
CAVKRNPGGGADGLTF

SEQ ID NO: 374700 - protein, 12 aa, Homo sapiens
  CDR3 for beta chain variable domain of TCR clone 187350 (TRBV6-1, TRBJ2-5)
CASREGRETQYF

SEQ ID NO: 374701 - protein, 17 aa, Homo sapiens
  CDR3 for alpha chain variable domain of TCR clone 187351 (TRAV13-1, TRAJ28)
CAASPPYSGDGSYQLTF

SEQ ID NO: 374702 - protein, 19 aa, Homo sapiens
  CDR3 for beta chain variable domain of TCR clone 187351 (TRBV25-1, TRBJ2-2)
CAILVYRVDRGRKTGELFF

SEQ ID NO: 374703 - protein, 18 aa, Homo sapiens
  CDR3 for alpha chain variable domain of TCR clone 187352 (TRAV13-1, TRAJ52)
CAAKNRNAGGTSYGKLTF

SEQ ID NO: 374704 - protein, 14 aa, Homo sapiens
  CDR3 for beta chain variable domain of TCR clone 187352 (TRBV19, TRBJ2-1)
CASPTFVLSGEQFF

SEQ ID NO: 374705 - protein, 14 aa, Homo sapiens
  CDR3 for alpha chain variable domain of TCR clone 187353 (TRAV2, TRAJ9)
CAVEDRSGGFKTSF

SEQ ID NO: 374706 - protein, 16 aa, Homo sapiens
  CDR3 for beta chain variable domain of TCR clone 187353 (TRBV7-3, TRBJ2-1)
CASSLEGYRSYNEQFF

SEQ ID NO: 374707 - protein, 12 aa, Homo sapiens
  CDR3 for alpha chain variable domain of TCR clone 187354 (TRAV12-1, TRAJ40)
FVVYSGTYKYIF

SEQ ID NO: 374708 - protein, 19 aa, Homo sapiens
  CDR3 for beta chain variable domain of TCR clone 187354 (TRBV7-2, TRBJ2-3)
CASSFLSRNWGGGTDTQYF

SEQ ID NO: 374709 - protein, 12 aa, Homo sapiens
  CDR3 for alpha chain variable domain of TCR clone 187355 (TRAV3, TRAJ43)
CCERGQNNDMRF

SEQ ID NO: 374710 - protein, 13 aa, Homo sapiens
  CDR3 for beta chain variable domain of TCR clone 187355 (TRBV19, TRBJ2-7)
CASSIDRTYEQYF

SEQ ID NO: 374711 - protein, 11 aa, Homo sapiens
  CDR3 for alpha chain variable domain of TCR clone 187356 (TRAV25, TRAJ39)
CENNAGNMLTF

SEQ ID NO: 374712 - protein, 15 aa, Homo sapiens
  CDR3 for beta chain variable domain of TCR clone 187356 (TRBV2, TRBJ2-1)
CASSEEREGDNEQFF

SEQ ID NO: 374713 - protein, 11 aa, Homo sapiens
  CDR3 for alpha chain variable domain of TCR clone 187357 (TRAV12-2, TRAJ49)
CAVNTGNQFYF

SEQ ID NO: 374714 - protein, 12 aa, Homo sapiens
  CDR3 for beta chain variable domain of TCR clone 187357 (TRBV2, TRBJ2-3)
CPSSGRFDTQYF

SEQ ID NO: 374715 - protein, 14 aa, Homo sapiens
  CDR3 for alpha chain variable domain of TCR clone 187358 (TRAV12-1, TRAJ17)
CVVNYKAAGNKLTF

SEQ ID NO: 374716 - protein, 12 aa, Homo sapiens
  CDR3 for beta chain variable domain of TCR clone 187358 (TRBV28, TRBJ2-3)
CASSLYRDTQYF

SEQ ID NO: 374717 - protein, 17 aa, Homo sapiens
  CDR3 for alpha chain variable domain of TCR clone 187359 (TRAV3, TRAJ6)
CAVRDGPRAGGSSIPTF

SEQ ID NO: 374718 - protein, 14 aa, Homo sapiens
  CDR3 for beta chain variable domain of TCR clone 187359 (TRBV7-2, TRBJ2-7)
CASNPKTSFYEQYF

SEQ ID NO: 374719 - protein, 11 aa, Homo sapiens
  CDR3 for alpha chain variable domain of TCR clone 187360 (TRAV2, TRAJ13)
CASGGYQKVAF

SEQ ID NO: 374720 - protein, 13 aa, Homo sapiens
  CDR3 for beta chain variable domain of TCR clone 187360 (TRBV10-3, TRBJ1-2)
CAISERDSYGYTF

SEQ ID NO: 374721 - protein, 15 aa, Homo sapiens
  CDR3 for alpha chain variable domain of TCR clone 187361 (TRAV17, TRAJ22)
CATVAPSGSARQLTF

SEQ ID NO: 374722 - protein, 16 aa, Homo sapiens
  CDR3 for beta chain variable domain of TCR clone 187361 (TRBV10-3, TRBJ2-7)
CVISADFADRPYEQYF

SEQ ID NO: 374723 - protein, 15 aa, Homo sapiens
  CDR3 for alpha chain variable domain of TCR clone 187362 (TRAV3, TRAJ13)
CAVRDMAGGYQKVTF

SEQ ID NO: 374724 - protein, 13 aa, Homo sapiens
  CDR3 for beta chain variable domain of TCR clone 187362 (TRBV2, TRBJ2-2)
CASSKKNTGELFF

SEQ ID NO: 374725 - protein, 16 aa, Homo sapiens
  CDR3 for alpha chain variable domain of TCR clone 187363 (TRAV26-1, TRAJ38)
CIVRAYNAGNNRKLIW

SEQ ID NO: 374726 - protein, 10 aa, Homo sapiens
  CDR3 for beta chain variable domain of TCR clone 187363 (TRBV19, TRBJ1-1)
CASRQVEAFF

SEQ ID NO: 374727 - protein, 11 aa, Homo sapiens
  CDR3 for alpha chain variable domain of TCR clone 187364 (TRAV12-2, TRAJ29)
CAVTLRSPLVF

SEQ ID NO: 374728 - protein, 14 aa, Homo sapiens
  CDR3 for beta chain variable domain of TCR clone 187364 (TRBV28, TRBJ1-1)
CASSSEQGYTEAFF

SEQ ID NO: 374729 - protein, 12 aa, Homo sapiens
  CDR3 for alpha chain variable domain of TCR clone 187365 (TRAV12-2, TRAJ16)
CAVNLDGKKLLF

SEQ ID NO: 374730 - protein, 12 aa, Homo sapiens
  CDR3 for beta chain variable domain of TCR clone 187365 (TRBV5-7, TRBJ2-7)
CASSVQGGEQYF

SEQ ID NO: 374731 - protein, 15 aa, Homo sapiens
  CDR3 for alpha chain variable domain of TCR clone 187366 (TRAV26-1, TRAJ44)
CIVRANTGTASKLTF

SEQ ID NO: 374732 - protein, 16 aa, Homo sapiens
  CDR3 for beta chain variable domain of TCR clone 187366 (TRBV7-7, TRBJ2-1)
CASCLASGTSYNEQFF

SEQ ID NO: 374733 - protein, 11 aa, Homo sapiens
  CDR3 for alpha chain variable domain of TCR clone 187367 (TRAV1-2, TRAJ20)
CAVANDYNLSF

SEQ ID NO: 374734 - protein, 18 aa, Homo sapiens
  CDR3 for beta chain variable domain of TCR clone 187367 (TRBV20-1, TRBJ2-6)
CSAETTPTHGSGANGLTF

SEQ ID NO: 374735 - protein, 13 aa, Homo sapiens
  CDR3 for alpha chain variable domain of TCR clone 187368 (TRAV27, TRAJ45)
CRSSGGGVDGLTF

SEQ ID NO: 374736 - protein, 14 aa, Homo sapiens
  CDR3 for beta chain variable domain of TCR clone 187368 (TRBV7-9, TRBJ2-1)
CASSSMVGFGEQFF

SEQ ID NO: 374737 - protein, 15 aa, Homo sapiens
  CDR3 for alpha chain variable domain of TCR clone 187369 (TRAV14/DV4, TRAJ12)
CAMREERDSSYKLIF

SEQ ID NO: 374738 - protein, 12 aa, Homo sapiens
  CDR3 for beta chain variable domain of TCR clone 187369 (TRBV11-2, TRBJ2-2)
CASSLPTGELFF

SEQ ID NO: 374739 - protein, 15 aa, Homo sapiens
  CDR3 for alpha chain variable domain of TCR clone 187370 (TRAV12-3, TRAJ6)
CAMSATSGGSYIPTF

SEQ ID NO: 374740 - protein, 13 aa, Homo sapiens
  CDR3 for beta chain variable domain of TCR clone 187370 (TRBV7-6, TRBJ2-3)
CASSLRSDNTQYF

SEQ ID NO: 374741 - protein, 16 aa, Homo sapiens
  CDR3 for alpha chain variable domain of TCR clone 187371 (TRAV8-3, TRAJ42)
CAVAGDYGGSQGNPIF

SEQ ID NO: 374742 - protein, 15 aa, Homo sapiens
  CDR3 for beta chain variable domain of TCR clone 187371 (TRBV12-4, TRBJ2-7)
CASSQTGAISYEQYF

SEQ ID NO: 374743 - protein, 15 aa, Homo sapiens
  CDR3 for alpha chain variable domain of TCR clone 187372 (TRAV8-2, TRAJ16)
CVVSDWFSDGQKLLF

SEQ ID NO: 374744 - protein, 14 aa, Homo sapiens
  CDR3 for beta chain variable domain of TCR clone 187372 (TRBV7-3, TRBJ1-1)
CASSLGTGYTEAFF

SEQ ID NO: 374745 - protein, 15 aa, Homo sapiens
  CDR3 for alpha chain variable domain of TCR clone 187373 (TRAV12-2, TRAJ53)
CAVNGGGGSNYKLTF

SEQ ID NO: 374746 - protein, 13 aa, Homo sapiens
  CDR3 for beta chain variable domain of TCR clone 187373 (TRBV29-1, TRBJ2-2)
CSTTGVNTGELFF

SEQ ID NO: 374747 - protein, 14 aa, Homo sapiens
  CDR3 for alpha chain variable domain of TCR clone 187374 (TRAV12-3, TRAJ5)
CAMTWETGRRALTF

SEQ ID NO: 374748 - protein, 14 aa, Homo sapiens
  CDR3 for beta chain variable domain of TCR clone 187374 (TRBV10-2, TRBJ1-5)
CASSSTGRNQPQHF

SEQ ID NO: 374749 - protein, 14 aa, Homo sapiens
  CDR3 for alpha chain variable domain of TCR clone 187375 (TRAV12-2, TRAJ15)
CAPHTGEAGTALIF

SEQ ID NO: 374750 - protein, 17 aa, Homo sapiens
  CDR3 for beta chain variable domain of TCR clone 187375 (TRBV5-5, TRBJ1-2)
CASSLGSLDGQSEGYTF

SEQ ID NO: 374751 - protein, 14 aa, Homo sapiens
  CDR3 for alpha chain variable domain of TCR clone 187376 (TRAV12-2, TRAJ17)
CAVLFKAAGNRLTF

SEQ ID NO: 374752 - protein, 12 aa, Homo sapiens
  CDR3 for beta chain variable domain of TCR clone 187376 (TRBV11-2, TRBJ2-2)
CASSLGGGELFV

SEQ ID NO: 374753 - protein, 15 aa, Homo sapiens
  CDR3 for alpha chain variable domain of TCR clone 187377 (TRAV8-3, TRAJ11)
CAVGLLDSGYSTLTF

SEQ ID NO: 374754 - protein, 17 aa, Homo sapiens
  CDR3 for beta chain variable domain of TCR clone 187377 (TRBV4-1, TRBJ1-4)
CASSQEGPRGVEEKLFF

SEQ ID NO: 374755 - protein, 16 aa, Homo sapiens
  CDR3 for alpha chain variable domain of TCR clone 187378 (TRAV12-3, TRAJ53)
CAMSPGSGGSNYKLTF

SEQ ID NO: 374756 - protein, 13 aa, Homo sapiens
  CDR3 for beta chain variable domain of TCR clone 187378 (TRBV12-5, TRBJ2-3)
CASGERQSDTQYF

SEQ ID NO: 374757 - protein, 13 aa, Homo sapiens
  CDR3 for alpha chain variable domain of TCR clone 187379 (TRAV25, TRAJ26)
CAGMDNYGQKFVF

SEQ ID NO: 374758 - protein, 15 aa, Homo sapiens
  CDR3 for beta chain variable domain of TCR clone 187379 (TRBV10-3, TRBJ2-1)
CAIRNGTSGHNERFF

SEQ ID NO: 374759 - protein, 12 aa, Homo sapiens
  CDR3 for alpha chain variable domain of TCR clone 187380 (TRAV8-3, TRAJ13)
WGEPGGYQKVTF

SEQ ID NO: 374760 - protein, 13 aa, Homo sapiens
  CDR3 for beta chain variable domain of TCR clone 187380 (TRBV12-4, TRBJ1-1)
CASSPGTGFEAFF

SEQ ID NO: 374761 - protein, 10 aa, Homo sapiens
  CDR3 for alpha chain variable domain of TCR clone 187381 (TRAV12-1, TRAJ43)
CVVHNNDMRF

SEQ ID NO: 374762 - protein, 13 aa, Homo sapiens
  CDR3 for beta chain variable domain of TCR clone 187381 (TRBV27, TRBJ1-4)
CASSLMGDEKLFF

SEQ ID NO: 374763 - protein, 14 aa, Homo sapiens
  CDR3 for alpha chain variable domain of TCR clone 187382 (TRAV1-2, TRAJ8)
CAVREDTGFQTLVF

SEQ ID NO: 374764 - protein, 17 aa, Homo sapiens
  CDR3 for beta chain variable domain of TCR clone 187382 (TRBV11-3, TRBJ2-3)
CASSPGSSGGRTDTQYF

SEQ ID NO: 374765 - protein, 11 aa, Homo sapiens
  CDR3 for alpha chain variable domain of TCR clone 187383 (TRAV2, TRAJ33)
CAVESNYQLIW

SEQ ID NO: 374766 - protein, 16 aa, Homo sapiens
  CDR3 for beta chain variable domain of TCR clone 187383 (TRBV7-9, TRBJ2-1)
CASSSIAGPPGNEQFF

SEQ ID NO: 374767 - protein, 11 aa, Homo sapiens
  CDR3 for alpha chain variable domain of TCR clone 187384 (TRAV12-1, TRAJ30)
CVVNGQDKIIF

SEQ ID NO: 374768 - protein, 14 aa, Homo sapiens
  CDR3 for beta chain variable domain of TCR clone 187384 (TRBV28, TRBJ2-5)
CSSSGRTIQETQYF

SEQ ID NO: 374769 - protein, 12 aa, Homo sapiens
  CDR3 for alpha chain variable domain of TCR clone 187385 (TRAV8-6, TRAJ43)
CAVSHNNNDMRF

SEQ ID NO: 374770 - protein, 14 aa, Homo sapiens
  CDR3 for beta chain variable domain of TCR clone 187385 (TRBV10-3, TRBJ1-1)
CAISDGSGVTEAVF

SEQ ID NO: 374771 - protein, 15 aa, Homo sapiens
  CDR3 for alpha chain variable domain of TCR clone 187386 (TRAV2, TRAJ15)
CAVEDRGQAGTALMF

SEQ ID NO: 374772 - protein, 14 aa, Homo sapiens
  CDR3 for beta chain variable domain of TCR clone 187386 (TRBV4-1, TRBJ2-2)
CASSQAVNTGELFF

SEQ ID NO: 374773 - protein, 13 aa, Homo sapiens
  CDR3 for alpha chain variable domain of TCR clone 187387 (TRAV21, TRAJ27)
CAARPGNAGKSTF

SEQ ID NO: 374774 - protein, 16 aa, Homo sapiens
  CDR3 for beta chain variable domain of TCR clone 187387 (TRBV20-1, TRBJ1-2)
CSASMGQGVASYGYTF

SEQ ID NO: 374775 - protein, 13 aa, Homo sapiens
  CDR3 for alpha chain variable domain of TCR clone 187388 (TRAV8-3, TRAJ47)
CAVGMEYGNKLVF

SEQ ID NO: 374776 - protein, 16 aa, Homo sapiens
  CDR3 for beta chain variable domain of TCR clone 187388 (TRBV20-1, TRBJ1-2)
CSASMGQGVANYGYTF

SEQ ID NO: 374777 - protein, 15 aa, Homo sapiens
  CDR3 for alpha chain variable domain of TCR clone 187389 (TRAV26-1, TRAJ44)
CIVRANTGTASKLTF

SEQ ID NO: 374778 - protein, 16 aa, Homo sapiens
  CDR3 for beta chain variable domain of TCR clone 187389 (TRBV7-7, TRBJ2-1)
WASSLASGTSYNEQFC

SEQ ID NO: 374779 - protein, 17 aa, Homo sapiens
  CDR3 for alpha chain variable domain of TCR clone 187390 (TRAV17, TRAJ28)
CATDPRRGGAGSYQLTF

SEQ ID NO: 374780 - protein, 16 aa, Homo sapiens
  CDR3 for beta chain variable domain of TCR clone 187390 (TRBV25-1, TRBJ1-1)
CASSGDRERGRIEAFF

SEQ ID NO: 374781 - protein, 14 aa, Homo sapiens
  CDR3 for alpha chain variable domain of TCR clone 187391 (TRAV8-4, TRAJ9)
CSLRINTGGFKTIF

SEQ ID NO: 374782 - protein, 15 aa, Homo sapiens
  CDR3 for beta chain variable domain of TCR clone 187391 (TRBV10-2, TRBJ2-6)
CASSEQGTGANVLTF

SEQ ID NO: 374783 - protein, 18 aa, Homo sapiens
  CDR3 for alpha chain variable domain of TCR clone 187392 (TRAV26-2, TRAJ45)
CILRVDKYSGGGADGLTF

SEQ ID NO: 374784 - protein, 16 aa, Homo sapiens
  CDR3 for beta chain variable domain of TCR clone 187392 (TRBV2, TRBJ1-4)
CASNLLQGATKEKLFF

SEQ ID NO: 374785 - protein, 14 aa, Homo sapiens
  CDR3 for alpha chain variable domain of TCR clone 187393 (TRAV8-4, TRAJ9)
CAVRINTGRFKTIF

SEQ ID NO: 374786 - protein, 15 aa, Homo sapiens
  CDR3 for beta chain variable domain of TCR clone 187393 (TRBV10-2, TRBJ2-6)
CASSEQGTGANVLTF

SEQ ID NO: 374787 - protein, 12 aa, Homo sapiens
  CDR3 for alpha chain variable domain of TCR clone 187394 (TRAV13-2, TRAJ23)
CAERHRGGKLIF

SEQ ID NO: 374788 - protein, 16 aa, Homo sapiens
  CDR3 for beta chain variable domain of TCR clone 187394 (TRBV7-9, TRBJ2-3)
CASSPWREVGTDTQYF

SEQ ID NO: 374789 - protein, 13 aa, Homo sapiens
  CDR3 for alpha chain variable domain of TCR clone 187395 (TRAV12-1, TRAJ16)
CVVNGPDGQKLLF

SEQ ID NO: 374790 - protein, 17 aa, Homo sapiens
  CDR3 for beta chain variable domain of TCR clone 187395 (TRBV15, TRBJ1-4)
CATSRYGTGDPNEKLFF

SEQ ID NO: 374791 - protein, 14 aa, Homo sapiens
  CDR3 for alpha chain variable domain of TCR clone 187396 (TRAV12-2, TRAJ13)
CAVKKTGGYQKVPF

SEQ ID NO: 374792 - protein, 18 aa, Homo sapiens
  CDR3 for beta chain variable domain of TCR clone 187396 (TRBV24-1, TRBJ2-2)
CATSDSGQGTANTGELFF

SEQ ID NO: 374793 - protein, 14 aa, Homo sapiens
  CDR3 for alpha chain variable domain of TCR clone 187397 (TRAV38-2/DV8, TRAJ29)
CAYRSRSGNTPLVF

SEQ ID NO: 374794 - protein, 17 aa, Homo sapiens
  CDR3 for beta chain variable domain of TCR clone 187397 (TRBV6-1, TRBJ1-2)
CARSGTHSQRGNYGYTF

SEQ ID NO: 374795 - protein, 13 aa, Homo sapiens
  CDR3 for alpha chain variable domain of TCR clone 187398 (TRAV1-1, TRAJ13)
CAVNSGGYRKVTF

SEQ ID NO: 374796 - protein, 14 aa, Homo sapiens
  CDR3 for beta chain variable domain of TCR clone 187398 (TRBV25-1, TRBJ1-1)
CASTHLGGNTEAFF

SEQ ID NO: 374797 - protein, 16 aa, Homo sapiens
  CDR3 for alpha chain variable domain of TCR clone 187399 (TRAV16, TRAJ52)
CALSAAVGTSYGKLTF

SEQ ID NO: 374798 - protein, 12 aa, Homo sapiens
  CDR3 for beta chain variable domain of TCR clone 187399 (TRBV12-4, TRBJ1-3)
CASSVSGNTIYF

SEQ ID NO: 374799 - protein, 13 aa, Homo sapiens
  CDR3 for alpha chain variable domain of TCR clone 187400 (TRAV12-1, TRAJ8)
CVNSNTGFQKLVF

SEQ ID NO: 374800 - protein, 16 aa, Homo sapiens
  CDR3 for beta chain variable domain of TCR clone 187400 (TRBV20-1, TRBJ2-2)
CSARDDRVGLTGELFF

SEQ ID NO: 374801 - protein, 15 aa, Homo sapiens
  CDR3 for alpha chain variable domain of TCR clone 187401 (TRAV13-1, TRAJ52)
SYYNAGGTSYGKLTF

SEQ ID NO: 374802 - protein, 16 aa, Homo sapiens
  CDR3 for beta chain variable domain of TCR clone 187401 (TRBV7-2, TRBJ2-5)
CASSPFPTGGEETQYF

SEQ ID NO: 374803 - protein, 10 aa, Homo sapiens
  CDR3 for alpha chain variable domain of TCR clone 187402 (TRAV1-2, TRAJ18)
CAVRGEAQPW

SEQ ID NO: 374804 - protein, 14 aa, Homo sapiens
  CDR3 for beta chain variable domain of TCR clone 187402 (TRBV7-2, TRBJ2-7)
CPSSFKGQDHEQYF

SEQ ID NO: 374805 - protein, 16 aa, Homo sapiens
  CDR3 for alpha chain variable domain of TCR clone 187403 (TRAV26-1, TRAJ36)
CIVRVPDQTGANNLFF

SEQ ID NO: 374806 - protein, 16 aa, Homo sapiens
  CDR3 for beta chain variable domain of TCR clone 187403 (TRBV12-4, TRBJ2-5)
CASSFFVRGRQETQYF

SEQ ID NO: 374807 - protein, 15 aa, Homo sapiens
  CDR3 for alpha chain variable domain of TCR clone 187404 (TRAV26-1, TRAJ44)
CIVRANTGTASKLTF

SEQ ID NO: 374808 - protein, 12 aa, Homo sapiens
  CDR3 for beta chain variable domain of TCR clone 187404 (TRBV29-1, TRBJ2-3)
CSVTGGADTQYF

SEQ ID NO: 374809 - protein, 14 aa, Homo sapiens
  CDR3 for alpha chain variable domain of TCR clone 187405 (TRAV13-1, TRAJ44)
CAAKATGTASKLTF

SEQ ID NO: 374810 - protein, 16 aa, Homo sapiens
  CDR3 for beta chain variable domain of TCR clone 187405 (TRBV4-3, TRBJ2-2)
CASSHLQGSGTGELFF

SEQ ID NO: 374811 - protein, 14 aa, Homo sapiens
  CDR3 for alpha chain variable domain of TCR clone 187406 (TRAV1-2, TRAJ8)
CAVREDTGFQKLVF

SEQ ID NO: 374812 - protein, 12 aa, Homo sapiens
  CDR3 for beta chain variable domain of TCR clone 187406 (TRBV27, TRBJ2-5)
CASSPTGETQYF

SEQ ID NO: 374813 - protein, 13 aa, Homo sapiens
  CDR3 for alpha chain variable domain of TCR clone 187407 (TRAV1-2, TRAJ20)
CAVPRSNDYKLSF

SEQ ID NO: 374814 - protein, 17 aa, Homo sapiens
  CDR3 for beta chain variable domain of TCR clone 187407 (TRBV10-3, TRBJ2-4)
CTSVPSVNKGSKNIQYF

SEQ ID NO: 374815 - protein, 14 aa, Homo sapiens
  CDR3 for alpha chain variable domain of TCR clone 187408 (TRAV12-3, TRAJ10)
SHLPLTGGGNKLTF

SEQ ID NO: 374816 - protein, 13 aa, Homo sapiens
  CDR3 for beta chain variable domain of TCR clone 187408 (TRBV29-1, TRBJ2-3)
CSPTRGGRDTQYF

SEQ ID NO: 374817 - protein, 11 aa, Homo sapiens
  CDR3 for alpha chain variable domain of TCR clone 187409 (TRAV12-2, TRAJ54)
CAVEGAQKLVF

SEQ ID NO: 374818 - protein, 17 aa, Homo sapiens
  CDR3 for beta chain variable domain of TCR clone 187409 (TRBV18, TRBJ1-3)
CASSPSPTGPSGNTIYF

SEQ ID NO: 374819 - protein, 14 aa, Homo sapiens
  CDR3 for alpha chain variable domain of TCR clone 187410 (TRAV2, TRAJ37)
CAVDFTSNTGKPIF

SEQ ID NO: 374820 - protein, 13 aa, Homo sapiens
  CDR3 for beta chain variable domain of TCR clone 187410 (TRBV20-1, TRBJ1-1)
CSAPLGGGTEAFF

SEQ ID NO: 374821 - protein, 17 aa, Homo sapiens
  CDR3 for alpha chain variable domain of TCR clone 187411 (TRAV14/DV4, TRAJ3)
CAMREGPEYSSASKIIF

SEQ ID NO: 374822 - protein, 17 aa, Homo sapiens
  CDR3 for beta chain variable domain of TCR clone 187411 (TRBV20-1, TRBJ1-5)
CSARVGGERQGNQPQHF

SEQ ID NO: 374823 - protein, 16 aa, Homo sapiens
  CDR3 for alpha chain variable domain of TCR clone 187412 (TRAV8-2, TRAJ45)
CVVSEGTGGGADGVTF

SEQ ID NO: 374824 - protein, 15 aa, Homo sapiens
  CDR3 for beta chain variable domain of TCR clone 187412 (TRBV7-9, TRBJ2-5)
CASSLVAGWLETQYF

SEQ ID NO: 374825 - protein, 16 aa, Homo sapiens
  CDR3 for alpha chain variable domain of TCR clone 187413 (TRAV3, TRAJ37)
CAVRPHGPGNTGKLTF

SEQ ID NO: 374826 - protein, 15 aa, Homo sapiens
  CDR3 for beta chain variable domain of TCR clone 187413 (TRBV20-1, TRBJ2-7)
CSARDRVSGMDEQYF

SEQ ID NO: 374827 - protein, 14 aa, Homo sapiens
  CDR3 for alpha chain variable domain of TCR clone 187414 (TRAV12-2, TRAJ17)
CAVNIKAAGNKLTF

SEQ ID NO: 374828 - protein, 15 aa, Homo sapiens
  CDR3 for beta chain variable domain of TCR clone 187414 (TRBV7-9, TRBJ1-4)
CASSATGGNNEKLFF

SEQ ID NO: 374829 - protein, 10 aa, Homo sapiens
  CDR3 for alpha chain variable domain of TCR clone 187415 (TRAV23/DV6, TRAJ57)
CAASSTLSQG

SEQ ID NO: 374830 - protein, 16 aa, Homo sapiens
  CDR3 for beta chain variable domain of TCR clone 187415 (TRBV20-1, TRBJ2-7)
CSANEAGAPTSSTSGR

SEQ ID NO: 374831 - protein, 14 aa, Homo sapiens
  CDR3 for alpha chain variable domain of TCR clone 187416 (TRAV8-2, TRAJ23)
CVVRDDNQGGKLIF

SEQ ID NO: 374832 - protein, 16 aa, Homo sapiens
  CDR3 for beta chain variable domain of TCR clone 187416 (TRBV4-2, TRBJ2-5)
CASSQELVGSQETQYF

SEQ ID NO: 374833 - protein, 13 aa, Homo sapiens
  CDR3 for alpha chain variable domain of TCR clone 187417 (TRAV17, TRAJ5)
CAPMDTGRRALTF

SEQ ID NO: 374834 - protein, 18 aa, Homo sapiens
  CDR3 for beta chain variable domain of TCR clone 187417 (TRBV12-5, TRBJ2-5)
CASGSRTHKRPSTSGQTR

SEQ ID NO: 374835 - protein, 14 aa, Homo sapiens
  CDR3 for alpha chain variable domain of TCR clone 187418 (TRAV12-1, TRAJ43)
CVVNGRSNNNDIRF

SEQ ID NO: 374836 - protein, 15 aa, Homo sapiens
  CDR3 for beta chain variable domain of TCR clone 187418 (TRBV7-9, TRBJ2-2)
CASGPLDTFPGELFF

SEQ ID NO: 374837 - protein, 15 aa, Homo sapiens
  CDR3 for alpha chain variable domain of TCR clone 187419 (TRAV27, TRAJ38)
CAARHNAGNNRKLIW

SEQ ID NO: 374838 - protein, 13 aa, Homo sapiens
  CDR3 for beta chain variable domain of TCR clone 187419 (TRBV28, TRBJ2-5)
CAGVSRGEETQYF

SEQ ID NO: 374839 - protein, 18 aa, Homo sapiens
  CDR3 for alpha chain variable domain of TCR clone 187420 (TRAV26-2, TRAJ45)
CILRLWGYSGGGADGLTF

SEQ ID NO: 374840 - protein, 17 aa, Homo sapiens
  CDR3 for beta chain variable domain of TCR clone 187420 (TRBV28, TRBJ2-3)
CASSPTLAGGRVDTQYF

SEQ ID NO: 374841 - protein, 11 aa, Homo sapiens
  CDR3 for alpha chain variable domain of TCR clone 187421 (TRAV39, TRAJ49)
CVVDISTQFYF

SEQ ID NO: 374842 - protein, 11 aa, Homo sapiens
  CDR3 for beta chain variable domain of TCR clone 187421 (TRBV7-8, TRBJ2-7)
CASSLSLEQYF

SEQ ID NO: 374843 - protein, 14 aa, Homo sapiens
  CDR3 for alpha chain variable domain of TCR clone 187422 (TRAV2, TRAJ23)
CAVGLRNQGGKLIF

SEQ ID NO: 374844 - protein, 15 aa, Homo sapiens
  CDR3 for beta chain variable domain of TCR clone 187422 (TRBV19, TRBJ1-2)
CASSVGQVLNYGYTF

SEQ ID NO: 374845 - protein, 15 aa, Homo sapiens
  CDR3 for alpha chain variable domain of TCR clone 187423 (TRAV8-3, TRAJ6)
CALGPLGGGSYIPTF

SEQ ID NO: 374846 - protein, 14 aa, Homo sapiens
  CDR3 for beta chain variable domain of TCR clone 187423 (TRBV19, TRBJ2-2)
CASSTGQGAGELFF

SEQ ID NO: 374847 - protein, 13 aa, Homo sapiens
  CDR3 for alpha chain variable domain of TCR clone 187424 (TRAV16, TRAJ28)
CARQGAGSYQLTF

SEQ ID NO: 374848 - protein, 14 aa, Homo sapiens
  CDR3 for beta chain variable domain of TCR clone 187424 (TRBV7-2, TRBJ2-7)
CASRSQGAAYEQYF

SEQ ID NO: 374849 - protein, 17 aa, Homo sapiens
  CDR3 for alpha chain variable domain of TCR clone 187425 (TRAV3, TRAJ12)
CAARDGGRMDSSYKLIF

SEQ ID NO: 374850 - protein, 16 aa, Homo sapiens
  CDR3 for beta chain variable domain of TCR clone 187425 (TRBV20-1, TRBJ1-4)
CSAPGQGLLTNEKLFF

SEQ ID NO: 374851 - protein, 14 aa, Homo sapiens
  CDR3 for alpha chain variable domain of TCR clone 187426 (TRAV8-1, TRAJ34)
SAVNPSYNTDKLIF

SEQ ID NO: 374852 - protein, 16 aa, Homo sapiens
  CDR3 for beta chain variable domain of TCR clone 187426 (TRBV7-2, TRBJ2-6)
CASSLAGRSGANDLTF

SEQ ID NO: 374853 - protein, 14 aa, Homo sapiens
  CDR3 for alpha chain variable domain of TCR clone 187427 (TRAV13-1, TRAJ24)
CAASITDSWGKLQF

SEQ ID NO: 374854 - protein, 15 aa, Homo sapiens
  CDR3 for beta chain variable domain of TCR clone 187427 (TRBV7-9, TRBJ1-5)
CASSQGHQPNQPQHF

SEQ ID NO: 374855 - protein, 13 aa, Homo sapiens
  CDR3 for alpha chain variable domain of TCR clone 187428 (TRAV17, TRAJ26)
CATVDNYGQNFVF

SEQ ID NO: 374856 - protein, 15 aa, Homo sapiens
  CDR3 for beta chain variable domain of TCR clone 187428 (TRBV27, TRBJ2-1)
CASSNGGGSSNEQFF

SEQ ID NO: 374857 - protein, 18 aa, Homo sapiens
  CDR3 for alpha chain variable domain of TCR clone 187429 (TRAV1-2, TRAJ29)
CLLPLCCERATSATPLVF

SEQ ID NO: 374858 - protein, 14 aa, Homo sapiens
  CDR3 for beta chain variable domain of TCR clone 187429 (TRBV3-1, TRBJ2-5)
CASSQGPDQETQYF

SEQ ID NO: 374859 - protein, 13 aa, Homo sapiens
  CDR3 for alpha chain variable domain of TCR clone 187430 (TRAV8-4, TRAJ30)
CAVSVNRDDKIVF

SEQ ID NO: 374860 - protein, 13 aa, Homo sapiens
  CDR3 for beta chain variable domain of TCR clone 187430 (TRBV3-1, TRBJ2-2)
CASLARGSGELFF

SEQ ID NO: 374861 - protein, 12 aa, Homo sapiens
  CDR3 for alpha chain variable domain of TCR clone 187431 (TRAV22, TRAJ22)
CAPGGSARQLTF

SEQ ID NO: 374862 - protein, 17 aa, Homo sapiens
  CDR3 for beta chain variable domain of TCR clone 187431 (TRBV18, TRBJ2-6)
CASSPDRGVGGANVLTF

SEQ ID NO: 374863 - protein, 15 aa, Homo sapiens
  CDR3 for alpha chain variable domain of TCR clone 187432 (TRAV12-2, TRAJ9)
YAVNNERTGGFKTIF

SEQ ID NO: 374864 - protein, 14 aa, Homo sapiens
  CDR3 for beta chain variable domain of TCR clone 187432 (TRBV4-1, TRBJ1-4)
CASSQERKNEKLFF

SEQ ID NO: 374865 - protein, 13 aa, Homo sapiens
  CDR3 for alpha chain variable domain of TCR clone 187433 (TRAV8-3, TRAJ44)
CAVVPGTASKLTF

SEQ ID NO: 374866 - protein, 14 aa, Homo sapiens
  CDR3 for beta chain variable domain of TCR clone 187433 (TRBV11-2, TRBJ2-3)
CASSRLARTYTQYF

SEQ ID NO: 374867 - protein, 14 aa, Homo sapiens
  CDR3 for alpha chain variable domain of TCR clone 187434 (TRAV12-3, TRAJ10)
SHLPLTGGGNKLTF

SEQ ID NO: 374868 - protein, 14 aa, Homo sapiens
  CDR3 for beta chain variable domain of TCR clone 187434 (TRBV27, TRBJ2-1)
CASSNGGGEVEQFF

SEQ ID NO: 374869 - protein, 16 aa, Homo sapiens
  CDR3 for alpha chain variable domain of TCR clone 187435 (TRAV3, TRAJ10)
CAVREMRAGGGNKLTF

SEQ ID NO: 374870 - protein, 13 aa, Homo sapiens
  CDR3 for beta chain variable domain of TCR clone 187435 (TRBV12-4, TRBJ2-7)
CASSPTETYEQYF

SEQ ID NO: 374871 - protein, 14 aa, Homo sapiens
  CDR3 for alpha chain variable domain of TCR clone 187436 (TRAV1-2, TRAJ16)
FAVNRFSDGQKLLF

SEQ ID NO: 374872 - protein, 15 aa, Homo sapiens
  CDR3 for beta chain variable domain of TCR clone 187436 (TRBV24-1, TRBJ2-5)
CATSETTGAVGAQYF

SEQ ID NO: 374873 - protein, 15 aa, Homo sapiens
  CDR3 for alpha chain variable domain of TCR clone 187437 (TRAV17, TRAJ4)
CATGTWSGGYNELIF

SEQ ID NO: 374874 - protein, 13 aa, Homo sapiens
  CDR3 for beta chain variable domain of TCR clone 187437 (TRBV6-6, TRBJ2-7)
CASSPKRLAEQYF

SEQ ID NO: 374875 - protein, 14 aa, Homo sapiens
  CDR3 for alpha chain variable domain of TCR clone 187438 (TRAV26-1, TRAJ45)
CIAVTGGGADGLTF

SEQ ID NO: 374876 - protein, 13 aa, Homo sapiens
  CDR3 for beta chain variable domain of TCR clone 187438 (TRBV7-6, TRBJ1-2)
CASSLVADCGYTF

SEQ ID NO: 374877 - protein, 11 aa, Homo sapiens
  CDR3 for alpha chain variable domain of TCR clone 187439 (TRAV2, TRAJ33)
CAVESNYQLIW

SEQ ID NO: 374878 - protein, 16 aa, Homo sapiens
  CDR3 for beta chain variable domain of TCR clone 187439 (TRBV4-3, TRBJ2-7)
CASSPRTSVRSYEQYF

SEQ ID NO: 374879 - protein, 13 aa, Homo sapiens
  CDR3 for alpha chain variable domain of TCR clone 187440 (TRAV26-1, TRAJ34)
CIVRPWITDKLIF

SEQ ID NO: 374880 - protein, 16 aa, Homo sapiens
  CDR3 for beta chain variable domain of TCR clone 187440 (TRBV12-4, TRBJ1-4)
CASSRQGANENLFLAV

SEQ ID NO: 374881 - protein, 14 aa, Homo sapiens
  CDR3 for alpha chain variable domain of TCR clone 187441 (TRAV17, TRAJ37)
GATDGSSNTGKLIL

SEQ ID NO: 374882 - protein, 13 aa, Homo sapiens
  CDR3 for beta chain variable domain of TCR clone 187441 (TRBV11-2, TRBJ2-1)
CASSLDLVNEQFF

SEQ ID NO: 374883 - protein, 16 aa, Homo sapiens
  CDR3 for alpha chain variable domain of TCR clone 187442 (TRAV26-1, TRAJ37)
CIYARHGSSNTGKLIF

SEQ ID NO: 374884 - protein, 18 aa, Homo sapiens
  CDR3 for beta chain variable domain of TCR clone 187442 (TRBV7-9, TRBJ2-7)
CASSLTTSGSRTWYEQYF

SEQ ID NO: 374885 - protein, 16 aa, Homo sapiens
  CDR3 for alpha chain variable domain of TCR clone 187443 (TRAV16, TRAJ52)
CALSAAGGTSYGKLTF

SEQ ID NO: 374886 - protein, 17 aa, Homo sapiens
  CDR3 for beta chain variable domain of TCR clone 187443 (TRBV11-2, TRBJ2-1)
RASSLYPPGVEYNEQFF

SEQ ID NO: 374887 - protein, 14 aa, Homo sapiens
  CDR3 for alpha chain variable domain of TCR clone 187444 (TRAV35, TRAJ13)
CAGSPSGGYKKVTF

SEQ ID NO: 374888 - protein, 17 aa, Homo sapiens
  CDR3 for beta chain variable domain of TCR clone 187444 (TRBV18, TRBJ1-5)
CQLTTCRVRQNNQPQHF

SEQ ID NO: 374889 - protein, 16 aa, Homo sapiens
  CDR3 for alpha chain variable domain of TCR clone 187445 (TRAV23/DV6, )
CAEPDIKNPDPAVYQL

SEQ ID NO: 374890 - protein, 15 aa, Homo sapiens
  CDR3 for beta chain variable domain of TCR clone 187445 (TRBV12-4, TRBJ2-5)
CASTLNSGRGETQYF

SEQ ID NO: 374891 - protein, 12 aa, Homo sapiens
  CDR3 for alpha chain variable domain of TCR clone 187446 (TRAV23/DV6, TRAJ30)
CAASKGDDKIIF

SEQ ID NO: 374892 - protein, 15 aa, Homo sapiens
  CDR3 for beta chain variable domain of TCR clone 187446 (TRBV20-1, TRBJ2-7)
CSARDWVSGMDEQYF

SEQ ID NO: 374893 - protein, 11 aa, Homo sapiens
  CDR3 for alpha chain variable domain of TCR clone 187447 (TRAV8-3, TRAJ18)
CAVGGRQRLNP

SEQ ID NO: 374894 - protein, 12 aa, Homo sapiens
  CDR3 for beta chain variable domain of TCR clone 187447 (TRBV28, TRBJ2-6)
CAIQAGANVLSV

SEQ ID NO: 374895 - protein, 13 aa, Homo sapiens
  CDR3 for alpha chain variable domain of TCR clone 187448 (TRAV25, TRAJ30)
CAGRVDRDDKIIF

SEQ ID NO: 374896 - protein, 18 aa, Homo sapiens
  CDR3 for beta chain variable domain of TCR clone 187448 (TRBV5-1, TRBJ1-6)
CASSPGQTRIPYNSPLHF

SEQ ID NO: 374897 - protein, 14 aa, Homo sapiens
  CDR3 for alpha chain variable domain of TCR clone 187449 (TRAV12-3, TRAJ10)
SHLPLTGGGIKLTF

SEQ ID NO: 374898 - protein, 15 aa, Homo sapiens
  CDR3 for beta chain variable domain of TCR clone 187449 (TRBV29-1, TRBJ2-6)
CSVGDRGSGANVLTF

SEQ ID NO: 374899 - protein, 11 aa, Homo sapiens
  CDR3 for alpha chain variable domain of TCR clone 187450 (TRAV36/DV7, TRAJ36)
CAVIARRQTTS

SEQ ID NO: 374900 - protein, 14 aa, Homo sapiens
  CDR3 for beta chain variable domain of TCR clone 187450 (TRBV7-6, TRBJ2-3)
CASSLGTVTDTQYF

SEQ ID NO: 374901 - protein, 15 aa, Homo sapiens
  CDR3 for alpha chain variable domain of TCR clone 187451 (TRAV12-3, TRAJ6)
CAMSATTGGSYIPTF

SEQ ID NO: 374902 - protein, 14 aa, Homo sapiens
  CDR3 for beta chain variable domain of TCR clone 187451 (TRBV2, TRBJ1-6)
CASSESRNNSPLHF

SEQ ID NO: 374903 - protein, 14 aa, Homo sapiens
  CDR3 for alpha chain variable domain of TCR clone 187452 (TRAV1-2, TRAJ16)
CAVNRFSDCQKLLF

SEQ ID NO: 374904 - protein, 13 aa, Homo sapiens
  CDR3 for beta chain variable domain of TCR clone 187452 (TRBV19, TRBJ1-2)
CASSVPGQDGYTF

SEQ ID NO: 374905 - protein, 14 aa, Homo sapiens
  CDR3 for alpha chain variable domain of TCR clone 187453 (TRAV1-2, TRAJ16)
CAVNWFSDGQKLLF

SEQ ID NO: 374906 - protein, 16 aa, Homo sapiens
  CDR3 for beta chain variable domain of TCR clone 187453 (TRBV4-1, TRBJ1-1)
CASSQDAGMGNTEAFF

SEQ ID NO: 374907 - protein, 17 aa, Homo sapiens
  CDR3 for alpha chain variable domain of TCR clone 187454 (TRAV3, TRAJ42)
CAVRDRDYGGSQGNLIF

SEQ ID NO: 374908 - protein, 13 aa, Homo sapiens
  CDR3 for beta chain variable domain of TCR clone 187454 (TRBV20-1, TRBJ1-1)
CSARAGGNTEAFF

SEQ ID NO: 374909 - protein, 12 aa, Homo sapiens
  CDR3 for alpha chain variable domain of TCR clone 187455 (TRAV25, TRAJ29)
CAGPRGNTPLVF

SEQ ID NO: 374910 - protein, 12 aa, Homo sapiens
  CDR3 for beta chain variable domain of TCR clone 187455 (TRBV7-8, TRBJ2-1)
CASSLGHNEQFF

SEQ ID NO: 374911 - protein, 17 aa, Homo sapiens
  CDR3 for alpha chain variable domain of TCR clone 187456 (TRAV13-1, TRAJ52)
CAASSGSGGTSYGKLTF

SEQ ID NO: 374912 - protein, 14 aa, Homo sapiens
  CDR3 for beta chain variable domain of TCR clone 187456 (TRBV12-4, TRBJ2-3)
CASTIAGWGDTQYF

SEQ ID NO: 374913 - protein, 14 aa, Homo sapiens
  CDR3 for alpha chain variable domain of TCR clone 187457 (TRAV1-1, TRAJ27)
CAVIYNTNAGKSTF

SEQ ID NO: 374914 - protein, 16 aa, Homo sapiens
  CDR3 for beta chain variable domain of TCR clone 187457 (TRBV12-5, TRBJ2-5)
CASGPRTRGNQETQYF

SEQ ID NO: 374915 - protein, 15 aa, Homo sapiens
  CDR3 for alpha chain variable domain of TCR clone 187458 (TRAV13-2, TRAJ5)
CAENPHWTGRRALTF

SEQ ID NO: 374916 - protein, 13 aa, Homo sapiens
  CDR3 for beta chain variable domain of TCR clone 187458 (TRBV2, TRBJ2-7)
CASSVGGSGEQYF

SEQ ID NO: 374917 - protein, 18 aa, Homo sapiens
  CDR3 for alpha chain variable domain of TCR clone 187459 (TRAV26-1, TRAJ23)
CIVRVGLEVWNQGGKLIF

SEQ ID NO: 374918 - protein, 14 aa, Homo sapiens
  CDR3 for beta chain variable domain of TCR clone 187459 (TRBV7-2, TRBJ2-7)
CASSSISGFSEQYF

SEQ ID NO: 374919 - protein, 14 aa, Homo sapiens
  CDR3 for alpha chain variable domain of TCR clone 187460 (TRAV12-2, TRAJ40)
CALKIPSGTYKYIF

SEQ ID NO: 374920 - protein, 12 aa, Homo sapiens
  CDR3 for beta chain variable domain of TCR clone 187460 (TRBV11-2, TRBJ2-1)
CASSPGNNEQFF

SEQ ID NO: 374921 - protein, 14 aa, Homo sapiens
  CDR3 for alpha chain variable domain of TCR clone 187461 (TRAV23/DV6, TRAJ22)
CAASVSGSAGQLTF

SEQ ID NO: 374922 - protein, 16 aa, Homo sapiens
  CDR3 for beta chain variable domain of TCR clone 187461 (TRBV19, TRBJ2-2)
CASSCPGQGLAGELFF

SEQ ID NO: 374923 - protein, 15 aa, Homo sapiens
  CDR3 for alpha chain variable domain of TCR clone 187462 (TRAV17, TRAJ57)
CATGPSQGGSEKLVF

SEQ ID NO: 374924 - protein, 15 aa, Homo sapiens
  CDR3 for beta chain variable domain of TCR clone 187462 (TRBV25-1, TRBJ1-4)
CASSHGDSTNEKLFF

SEQ ID NO: 374925 - protein, 12 aa, Homo sapiens
  CDR3 for alpha chain variable domain of TCR clone 187463 (TRAV12-3, TRAJ17)
CAMTLTGNKLTF

SEQ ID NO: 374926 - protein, 15 aa, Homo sapiens
  CDR3 for beta chain variable domain of TCR clone 187463 (TRBV2, TRBJ2-7)
CASSEGLARYYEQYF

SEQ ID NO: 374927 - protein, 15 aa, Homo sapiens
  CDR3 for alpha chain variable domain of TCR clone 187464 (TRAV3, TRAJ29)
CSVRDINSGNTPLVF

SEQ ID NO: 374928 - protein, 16 aa, Homo sapiens
  CDR3 for beta chain variable domain of TCR clone 187464 (TRBV4-1, TRBJ2-5)
CASSQTFYGDQETQYF

SEQ ID NO: 374929 - protein, 15 aa, Homo sapiens
  CDR3 for alpha chain variable domain of TCR clone 187465 (TRAV2, TRAJ24)
CAVEVLTDSWGKFQF

SEQ ID NO: 374930 - protein, 13 aa, Homo sapiens
  CDR3 for beta chain variable domain of TCR clone 187465 (TRBV19, TRBJ1-1)
CASSGQVNTEAFF

SEQ ID NO: 374931 - protein, 15 aa, Homo sapiens
  CDR3 for alpha chain variable domain of TCR clone 187466 (TRAV12-2, TRAJ57)
CAVSRGQGGSEKLVC

SEQ ID NO: 374932 - protein, 15 aa, Homo sapiens
  CDR3 for beta chain variable domain of TCR clone 187466 (TRBV5-1, TRBJ2-1)
CASSPPRAPYNEQFF

SEQ ID NO: 374933 - protein, 14 aa, Homo sapiens
  CDR3 for alpha chain variable domain of TCR clone 187467 (TRAV9-2, TRAJ9)
CALRDPTGGFKTIF

SEQ ID NO: 374934 - protein, 14 aa, Homo sapiens
  CDR3 for beta chain variable domain of TCR clone 187467 (TRBV20-1, TRBJ2-4)
RSARDRGQGGIQYF

SEQ ID NO: 374935 - protein, 14 aa, Homo sapiens
  CDR3 for alpha chain variable domain of TCR clone 187468 (TRAV26-1, TRAJ48)
CIVRVGFGNEKLTF

SEQ ID NO: 374936 - protein, 16 aa, Homo sapiens
  CDR3 for beta chain variable domain of TCR clone 187468 (TRBV15, TRBJ1-2)
CATSRGPRTGGGGYTF

SEQ ID NO: 374937 - protein, 15 aa, Homo sapiens
  CDR3 for alpha chain variable domain of TCR clone 187469 (TRAV35, TRAJ52)
CAGPRGGTSYGKLIF

SEQ ID NO: 374938 - protein, 15 aa, Homo sapiens
  CDR3 for beta chain variable domain of TCR clone 187469 (TRBV6-5, TRBJ1-2)
CASSYSQAFNYGYTF

SEQ ID NO: 374939 - protein, 13 aa, Homo sapiens
  CDR3 for alpha chain variable domain of TCR clone 187470 (TRAV20, TRAJ9)
GAVPDTGGFKTIF

SEQ ID NO: 374940 - protein, 15 aa, Homo sapiens
  CDR3 for beta chain variable domain of TCR clone 187470 (TRBV27, TRBJ2-7)
CASSKAGRGGYEQYF

SEQ ID NO: 374941 - protein, 14 aa, Homo sapiens
  CDR3 for alpha chain variable domain of TCR clone 187471 (TRAV12-2, TRAJ3)
CAVSLYSSASKIIF

SEQ ID NO: 374942 - protein, 14 aa, Homo sapiens
  CDR3 for beta chain variable domain of TCR clone 187471 (TRBV27, TRBJ2-1)
CAGSIAETYNEQFC

SEQ ID NO: 374943 - protein, 14 aa, Homo sapiens
  CDR3 for alpha chain variable domain of TCR clone 187472 (TRAV35, TRAJ33)
CAGSSQDSNYQLIW

SEQ ID NO: 374944 - protein, 15 aa, Homo sapiens
  CDR3 for beta chain variable domain of TCR clone 187472 (TRBV20-1, TRBJ2-7)
CSADTGTSGAYEQYF

SEQ ID NO: 374945 - protein, 15 aa, Homo sapiens
  CDR3 for alpha chain variable domain of TCR clone 187473 (TRAV12-1, TRAJ9)
CVVSFGDTGGFKTIF

SEQ ID NO: 374946 - protein, 19 aa, Homo sapiens
  CDR3 for beta chain variable domain of TCR clone 187473 (TRBV25-1, TRBJ2-2)
RAILVYRVDRGRKTGELFF

SEQ ID NO: 374947 - protein, 15 aa, Homo sapiens
  CDR3 for alpha chain variable domain of TCR clone 187474 (TRAV17, TRAJ42)
CATDHYGGSQGNLIF

SEQ ID NO: 374948 - protein, 15 aa, Homo sapiens
  CDR3 for beta chain variable domain of TCR clone 187474 (TRBV19, TRBJ2-7)
CASSPAGSGEALRYF

SEQ ID NO: 374949 - protein, 23 aa, Homo sapiens
  CDR3 for alpha chain variable domain of TCR clone 187475 (TRAV13-2, TRAJ6)
CAEEVHQEEATYLHLEEEPALVF

SEQ ID NO: 374950 - protein, 13 aa, Homo sapiens
  CDR3 for beta chain variable domain of TCR clone 187475 (TRBV9, TRBJ2-7)
CASSVAEYYEQYF

SEQ ID NO: 374951 - protein, 11 aa, Homo sapiens
  CDR3 for alpha chain variable domain of TCR clone 187476 (TRAV1-1, TRAJ20)
CAVVNDDKLSF

SEQ ID NO: 374952 - protein, 14 aa, Homo sapiens
  CDR3 for beta chain variable domain of TCR clone 187476 (TRBV11-2, TRBJ2-5)
CASRPLAGRETQYF

SEQ ID NO: 374953 - protein, 15 aa, Homo sapiens
  CDR3 for alpha chain variable domain of TCR clone 187477 (TRAV30, TRAJ32)
CGTEILGGTTNKLIF

SEQ ID NO: 374954 - protein, 13 aa, Homo sapiens
  CDR3 for beta chain variable domain of TCR clone 187477 (TRBV6-3, TRBJ2-7)
CASSFSGGYEQYF

SEQ ID NO: 374955 - protein, 13 aa, Homo sapiens
  CDR3 for alpha chain variable domain of TCR clone 187478 (TRAV27, TRAJ45)
CRSSGGGADGLTF

SEQ ID NO: 374956 - protein, 12 aa, Homo sapiens
  CDR3 for beta chain variable domain of TCR clone 187478 (TRBV14, TRBJ2-7)
CASSLYKDEQYF

SEQ ID NO: 374957 - protein, 17 aa, Homo sapiens
  CDR3 for alpha chain variable domain of TCR clone 187479 (TRAV26-1, TRAJ27)
CIVSTPWINTNAGKSTF

SEQ ID NO: 374958 - protein, 13 aa, Homo sapiens
  CDR3 for beta chain variable domain of TCR clone 187479 (TRBV7-2, TRBJ2-7)
CASSSPSGSEQYF

SEQ ID NO: 374959 - protein, 15 aa, Homo sapiens
  CDR3 for alpha chain variable domain of TCR clone 187480 (TRAV8-2, TRAJ16)
CVVSDGFSDGQKMLF

SEQ ID NO: 374960 - protein, 18 aa, Homo sapiens
  CDR3 for beta chain variable domain of TCR clone 187480 (TRBV11-2, TRBJ2-3)
CASSLGGASRGAPNTQYF

SEQ ID NO: 374961 - protein, 14 aa, Homo sapiens
  CDR3 for alpha chain variable domain of TCR clone 187481 (TRAV2, TRAJ29)
CAVTPPSGNKPLVF

SEQ ID NO: 374962 - protein, 13 aa, Homo sapiens
  CDR3 for beta chain variable domain of TCR clone 187481 (TRBV11-2, TRBJ2-1)
CASSLGLAGGRFF

SEQ ID NO: 374963 - protein, 13 aa, Homo sapiens
  CDR3 for alpha chain variable domain of TCR clone 187482 (TRAV16, TRAJ58)
CALRWASGSRFTF

SEQ ID NO: 374964 - protein, 16 aa, Homo sapiens
  CDR3 for beta chain variable domain of TCR clone 187482 (TRBV18, TRBJ2-2)
CASSPPRTANTGELFF

SEQ ID NO: 374965 - protein, 14 aa, Homo sapiens
  CDR3 for alpha chain variable domain of TCR clone 187483 (TRAV2, TRAJ6)
CAVSSSGGSYIPTF

SEQ ID NO: 374966 - protein, 13 aa, Homo sapiens
  CDR3 for beta chain variable domain of TCR clone 187483 (TRBV6-4, TRBJ1-5)
CASSADLNQPQHF

SEQ ID NO: 374967 - protein, 13 aa, Homo sapiens
  CDR3 for alpha chain variable domain of TCR clone 187484 (TRAV30, TRAJ34)
CGTVGYNTDKLIF

SEQ ID NO: 374968 - protein, 11 aa, Homo sapiens
  CDR3 for beta chain variable domain of TCR clone 187484 (TRBV6-6, TRBJ2-2)
CASQKTGELFF

SEQ ID NO: 374969 - protein, 15 aa, Homo sapiens
  CDR3 for alpha chain variable domain of TCR clone 187485 (TRAV3, TRAJ4)
CAVRDGTGGYNKLIF

SEQ ID NO: 374970 - protein, 16 aa, Homo sapiens
  CDR3 for beta chain variable domain of TCR clone 187485 (TRBV27, TRBJ2-2)
SASSSSGVSNTGELFF

SEQ ID NO: 374971 - protein, 14 aa, Homo sapiens
  CDR3 for alpha chain variable domain of TCR clone 187486 (TRAV13-2, TRAJ17)
CAENGKAAGNKLTF

SEQ ID NO: 374972 - protein, 15 aa, Homo sapiens
  CDR3 for beta chain variable domain of TCR clone 187486 (TRBV14, TRBJ1-1)
CASSQEGMCFTEAFF

SEQ ID NO: 374973 - protein, 14 aa, Homo sapiens
  CDR3 for alpha chain variable domain of TCR clone 187487 (TRAV12-2, TRAJ13)
CAVKRTGGYQKVTF

SEQ ID NO: 374974 - protein, 15 aa, Homo sapiens
  CDR3 for beta chain variable domain of TCR clone 187487 (TRBV19, TRBJ1-2)
CASSVGQVLNYGYTF

SEQ ID NO: 374975 - protein, 15 aa, Homo sapiens
  CDR3 for alpha chain variable domain of TCR clone 187488 (TRAV21, TRAJ32)
CAVNSYGGATNKLIF

SEQ ID NO: 374976 - protein, 18 aa, Homo sapiens
  CDR3 for beta chain variable domain of TCR clone 187488 (TRBV7-9, TRBJ2-1)
CASSTGLAEGSSYNKQFF

SEQ ID NO: 374977 - protein, 14 aa, Homo sapiens
  CDR3 for alpha chain variable domain of TCR clone 187489 (TRAV12-3, TRAJ10)
SHLPLTGGGNKLTF

SEQ ID NO: 374978 - protein, 14 aa, Homo sapiens
  CDR3 for beta chain variable domain of TCR clone 187489 (TRBV19, TRBJ2-2)
CATTGHANTGELFF

SEQ ID NO: 374979 - protein, 13 aa, Homo sapiens
  CDR3 for alpha chain variable domain of TCR clone 187490 (TRAV17, )
CATDPTPGITMIS

SEQ ID NO: 374980 - protein, 14 aa, Homo sapiens
  CDR3 for beta chain variable domain of TCR clone 187490 (TRBV6-1, TRBJ1-3)
CASVQGGGGNTIYF

SEQ ID NO: 374981 - protein, 14 aa, Homo sapiens
  CDR3 for alpha chain variable domain of TCR clone 187491 (TRAV12-2, TRAJ5)
WAVNRSTGRRALTF

SEQ ID NO: 374982 - protein, 12 aa, Homo sapiens
  CDR3 for beta chain variable domain of TCR clone 187491 (TRBV19, TRBJ1-5)
CASSIAQQPQHF

SEQ ID NO: 374983 - protein, 10 aa, Homo sapiens
  CDR3 for alpha chain variable domain of TCR clone 187492 (TRAV12-2, TRAJ52)
RSTNYGKLTF

SEQ ID NO: 374984 - protein, 11 aa, Homo sapiens
  CDR3 for beta chain variable domain of TCR clone 187492 (TRBV11-2, TRBJ2-2)
CASSLPGELFF

SEQ ID NO: 374985 - protein, 14 aa, Homo sapiens
  CDR3 for alpha chain variable domain of TCR clone 187493 (TRAV12-2, TRAJ17)
CAVLFQAAGNKLTF

SEQ ID NO: 374986 - protein, 15 aa, Homo sapiens
  CDR3 for beta chain variable domain of TCR clone 187493 (TRBV20-1, TRBJ2-7)
CSARDRVSGMDEQYF

SEQ ID NO: 374987 - protein, 14 aa, Homo sapiens
  CDR3 for alpha chain variable domain of TCR clone 187494 (TRAV36/DV7, TRAJ57)
CCLSSQGGSGKLVF

SEQ ID NO: 374988 - protein, 14 aa, Homo sapiens
  CDR3 for beta chain variable domain of TCR clone 187494 (TRBV7-2, TRBJ1-1)
CASSFLTGTTEAFF

SEQ ID NO: 374989 - protein, 15 aa, Homo sapiens
  CDR3 for alpha chain variable domain of TCR clone 187495 (TRAV8-2, TRAJ36)
CVVSENWGKHPLLWD

SEQ ID NO: 374990 - protein, 15 aa, Homo sapiens
  CDR3 for beta chain variable domain of TCR clone 187495 (TRBV20-1, TRBJ2-5)
CSAEGTGGLQETQYF

SEQ ID NO: 374991 - protein, 15 aa, Homo sapiens
  CDR3 for alpha chain variable domain of TCR clone 187496 (TRAV21, TRAJ24)
CAARSSTDSWGKLQF

SEQ ID NO: 374992 - protein, 17 aa, Homo sapiens
  CDR3 for beta chain variable domain of TCR clone 187496 (TRBV20-1, TRBJ2-1)
CSASASGLAGSYNEQFF

SEQ ID NO: 374993 - protein, 11 aa, Homo sapiens
  CDR3 for alpha chain variable domain of TCR clone 187497 (TRAV23/DV6, TRAJ48)
CAPRWGEKLTF

SEQ ID NO: 374994 - protein, 16 aa, Homo sapiens
  CDR3 for beta chain variable domain of TCR clone 187497 (TRBV7-2, TRBJ2-7)
CASSLGLAGGAYEQYF

SEQ ID NO: 374995 - protein, 14 aa, Homo sapiens
  CDR3 for alpha chain variable domain of TCR clone 187498 (TRAV17, TRAJ57)
CATYASGGSEKLVF

SEQ ID NO: 374996 - protein, 14 aa, Homo sapiens
  CDR3 for beta chain variable domain of TCR clone 187498 (TRBV4-2, TRBJ2-1)
CASGLDRAYNEQFF

SEQ ID NO: 374997 - protein, 15 aa, Homo sapiens
  CDR3 for alpha chain variable domain of TCR clone 187499 (TRAV38-2/DV8, TRAJ48)
CASRSGGFGNEKLTF

SEQ ID NO: 374998 - protein, 16 aa, Homo sapiens
  CDR3 for beta chain variable domain of TCR clone 187499 (TRBV28, TRBJ2-7)
CASSPWVATGDLSQYF

SEQ ID NO: 374999 - protein, 13 aa, Homo sapiens
  CDR3 for alpha chain variable domain of TCR clone 187500 (TRAV13-1, TRAJ13)
CAAFGGGYQKVTF

SEQ ID NO: 375000 - protein, 14 aa, Homo sapiens
  CDR3 for beta chain variable domain of TCR clone 187500 (TRBV19, TRBJ2-1)
CASPTFVLSGEQFF

SEQ ID NO: 375001 - protein, 14 aa, Homo sapiens
  CDR3 for alpha chain variable domain of TCR clone 187501 (TRAV21, TRAJ24)
CAVMTTDSWGKLQF

SEQ ID NO: 375002 - protein, 20 aa, Homo sapiens
  CDR3 for beta chain variable domain of TCR clone 187501 (TRBV7-8, TRBJ2-2)
CASSHLFPGPTIHITGELFF

SEQ ID NO: 375003 - protein, 17 aa, Homo sapiens
  CDR3 for alpha chain variable domain of TCR clone 187502 (TRAV13-1, TRAJ23)
CAASKRFHRLRKAYLRT

SEQ ID NO: 375004 - protein, 16 aa, Homo sapiens
  CDR3 for beta chain variable domain of TCR clone 187502 (TRBV12-4, TRBJ2-5)
CASSFFVRGRQETQYF

SEQ ID NO: 375005 - protein, 13 aa, Homo sapiens
  CDR3 for alpha chain variable domain of TCR clone 187503 (TRAV13-1, TRAJ11)
CAAVLAGYSTLTF

SEQ ID NO: 375006 - protein, 17 aa, Homo sapiens
  CDR3 for beta chain variable domain of TCR clone 187503 (TRBV25-1, TRBJ2-7)
CASSDARVVFVSYEQYF

SEQ ID NO: 375007 - protein, 13 aa, Homo sapiens
  CDR3 for alpha chain variable domain of TCR clone 187504 (TRAV12-3, TRAJ43)
CAMIRPNNNDMRF

SEQ ID NO: 375008 - protein, 12 aa, Homo sapiens
  CDR3 for beta chain variable domain of TCR clone 187504 (TRBV11-2, TRBJ2-5)
GASSLGQETQYF

SEQ ID NO: 375009 - protein, 14 aa, Homo sapiens
  CDR3 for alpha chain variable domain of TCR clone 187505 (TRAV21, TRAJ3)
CSVTGYSSASKIIF

SEQ ID NO: 375010 - protein, 17 aa, Homo sapiens
  CDR3 for beta chain variable domain of TCR clone 187505 (TRBV28, TRBJ2-5)
CASSRQGGLAGAETKYF

SEQ ID NO: 375011 - protein, 12 aa, Homo sapiens
  CDR3 for alpha chain variable domain of TCR clone 187506 (TRAV12-3, TRAJ17)
CAMTLTGNTLTF

SEQ ID NO: 375012 - protein, 15 aa, Homo sapiens
  CDR3 for beta chain variable domain of TCR clone 187506 (TRBV20-1, TRBJ2-7)
CSARDRVTGMYERYF

SEQ ID NO: 375013 - protein, 11 aa, Homo sapiens
  CDR3 for alpha chain variable domain of TCR clone 187507 (TRAV12-3, TRAJ49)
CAANTGNQFYF

SEQ ID NO: 375014 - protein, 13 aa, Homo sapiens
  CDR3 for beta chain variable domain of TCR clone 187507 (TRBV7-3, TRBJ1-2)
CASSLKRGYGYTF

SEQ ID NO: 375015 - protein, 17 aa, Homo sapiens
  CDR3 for alpha chain variable domain of TCR clone 187508 (TRAV3, TRAJ6)
CAVGDGPRAGGGYIPTF

SEQ ID NO: 375016 - protein, 14 aa, Homo sapiens
  CDR3 for beta chain variable domain of TCR clone 187508 (TRBV7-2, TRBJ2-7)
CASSPKTSFYEQYF

SEQ ID NO: 375017 - protein, 14 aa, Homo sapiens
  CDR3 for alpha chain variable domain of TCR clone 187509 (TRAV13-1, TRAJ35)
YAASKGGFGNVLHC

SEQ ID NO: 375018 - protein, 13 aa, Homo sapiens
  CDR3 for beta chain variable domain of TCR clone 187509 (TRBV7-3, TRBJ1-1)
CASSQGWGAEAFF

SEQ ID NO: 375019 - protein, 11 aa, Homo sapiens
  CDR3 for alpha chain variable domain of TCR clone 187510 (TRAV2, TRAJ13)
CASGGYQKVTF

SEQ ID NO: 375020 - protein, 14 aa, Homo sapiens
  CDR3 for beta chain variable domain of TCR clone 187510 (TRBV12-4, TRBJ1-4)
CASRMIGRSEKLFF

SEQ ID NO: 375021 - protein, 16 aa, Homo sapiens
  CDR3 for alpha chain variable domain of TCR clone 187511 (TRAV3, TRAJ37)
CAVRGKGSGNKGKLIF

SEQ ID NO: 375022 - protein, 13 aa, Homo sapiens
  CDR3 for beta chain variable domain of TCR clone 187511 (TRBV7-2, TRBJ2-2)
CASSSVRAGELFF

SEQ ID NO: 375023 - protein, 14 aa, Homo sapiens
  CDR3 for alpha chain variable domain of TCR clone 187512 (TRAV12-2, TRAJ44)
CAVNPAGTASKLTF

SEQ ID NO: 375024 - protein, 14 aa, Homo sapiens
  CDR3 for beta chain variable domain of TCR clone 187512 (TRBV13, TRBJ1-1)
CASTVITVNTEAFF

SEQ ID NO: 375025 - protein, 12 aa, Homo sapiens
  CDR3 for alpha chain variable domain of TCR clone 187513 (TRAV2, TRAJ9)
CAVGAGGFTTIF

SEQ ID NO: 375026 - protein, 16 aa, Homo sapiens
  CDR3 for beta chain variable domain of TCR clone 187513 (TRBV13, TRBJ2-2)
CSSSPRTGEHTGELFF

SEQ ID NO: 375027 - protein, 14 aa, Homo sapiens
  CDR3 for alpha chain variable domain of TCR clone 187514 (TRAV12-3, TRAJ6)
CAMSATGGSYIPPF

SEQ ID NO: 375028 - protein, 16 aa, Homo sapiens
  CDR3 for beta chain variable domain of TCR clone 187514 (TRBV4-2, TRBJ2-1)
CASSPRAGQGANEQFF

SEQ ID NO: 375029 - protein, 18 aa, Homo sapiens
  CDR3 for alpha chain variable domain of TCR clone 187515 (TRAV26-2, TRAJ45)
CNLRVDKYSGGGADGLTF

SEQ ID NO: 375030 - protein, 15 aa, Homo sapiens
  CDR3 for beta chain variable domain of TCR clone 187515 (TRBV9, TRBJ1-6)
CASSVAGTGDSPLHF

SEQ ID NO: 375031 - protein, 16 aa, Homo sapiens
  CDR3 for alpha chain variable domain of TCR clone 187516 (TRAV30, TRAJ24)
CGTEIVDADSWGKSQF

SEQ ID NO: 375032 - protein, 13 aa, Homo sapiens
  CDR3 for beta chain variable domain of TCR clone 187516 (TRBV11-3, TRBJ2-5)
CASSSTGEETQYF

SEQ ID NO: 375033 - protein, 12 aa, Homo sapiens
  CDR3 for alpha chain variable domain of TCR clone 187517 (TRAV21, TRAJ33)
CAKMDSNYQLIW

SEQ ID NO: 375034 - protein, 15 aa, Homo sapiens
  CDR3 for beta chain variable domain of TCR clone 187517 (TRBV4-1, TRBJ2-5)
CASSQQLAGGETQYF

SEQ ID NO: 375035 - protein, 11 aa, Homo sapiens
  CDR3 for alpha chain variable domain of TCR clone 187518 (TRAV8-3, TRAJ20)
CCGANDYKLSF

SEQ ID NO: 375036 - protein, 16 aa, Homo sapiens
  CDR3 for beta chain variable domain of TCR clone 187518 (TRBV19, TRBJ2-2)
CASRSPGTGATGELVF

SEQ ID NO: 375037 - protein, 13 aa, Homo sapiens
  CDR3 for alpha chain variable domain of TCR clone 187519 (TRAV21, TRAJ57)
CAVNPGGSEKLVF

SEQ ID NO: 375038 - protein, 16 aa, Homo sapiens
  CDR3 for beta chain variable domain of TCR clone 187519 (TRBV29-1, TRBJ2-7)
CSVEDAEDGTAYEQYF

SEQ ID NO: 375039 - protein, 14 aa, Homo sapiens
  CDR3 for alpha chain variable domain of TCR clone 187520 (TRAV24, TRAJ42)
CAQNYGGSQGNLIF

SEQ ID NO: 375040 - protein, 15 aa, Homo sapiens
  CDR3 for beta chain variable domain of TCR clone 187520 (TRBV19, TRBJ1-5)
CASSIPVGAGQPQHF

SEQ ID NO: 375041 - protein, 12 aa, Homo sapiens
  CDR3 for alpha chain variable domain of TCR clone 187521 (TRAV1-1, TRAJ30)
CAVRGRDDKILF

SEQ ID NO: 375042 - protein, 13 aa, Homo sapiens
  CDR3 for beta chain variable domain of TCR clone 187521 (TRBV11-3, TRBJ2-7)
CASSLDKLYEQFF

SEQ ID NO: 375043 - protein, 16 aa, Homo sapiens
  CDR3 for alpha chain variable domain of TCR clone 187522 (TRAV12-2, TRAJ10)
CAVNSVLTGGGNKLPF

SEQ ID NO: 375044 - protein, 12 aa, Homo sapiens
  CDR3 for beta chain variable domain of TCR clone 187522 (TRBV28, TRBJ2-7)
CASSFSSYEQYF

SEQ ID NO: 375045 - protein, 12 aa, Homo sapiens
  CDR3 for alpha chain variable domain of TCR clone 187523 (TRAV13-1, TRAJ20)
CAARQNDYKLSF

SEQ ID NO: 375046 - protein, 14 aa, Homo sapiens
  CDR3 for beta chain variable domain of TCR clone 187523 (TRBV19, TRBJ2-1)
CASPTFVLSGEQFF

SEQ ID NO: 375047 - protein, 13 aa, Homo sapiens
  CDR3 for alpha chain variable domain of TCR clone 187524 (TRAV13-1, TRAJ27)
CAALNTNAGKSTF

SEQ ID NO: 375048 - protein, 17 aa, Homo sapiens
  CDR3 for beta chain variable domain of TCR clone 187524 (TRBV20-1, TRBJ2-3)
CSARGIRRAGRTDTQYF

SEQ ID NO: 375049 - protein, 12 aa, Homo sapiens
  CDR3 for alpha chain variable domain of TCR clone 187525 (TRAV36/DV7, TRAJ54)
CAVVRGAQKLVF

SEQ ID NO: 375050 - protein, 16 aa, Homo sapiens
  CDR3 for beta chain variable domain of TCR clone 187525 (TRBV4-2, TRBJ2-3)
CASSQELAGDTDTQYF

SEQ ID NO: 375051 - protein, 12 aa, Homo sapiens
  CDR3 for alpha chain variable domain of TCR clone 187526 (TRAV25, TRAJ17)
CAGEAAGNKLTF

SEQ ID NO: 375052 - protein, 16 aa, Homo sapiens
  CDR3 for beta chain variable domain of TCR clone 187526 (TRBV7-3, TRBJ2-1)
CASSLEGYRSYNEQFF

SEQ ID NO: 375053 - protein, 14 aa, Homo sapiens
  CDR3 for alpha chain variable domain of TCR clone 187527 (TRAV1-2, TRAJ8)
CAVREDTGSQKLVF

SEQ ID NO: 375054 - protein, 11 aa, Homo sapiens
  CDR3 for beta chain variable domain of TCR clone 187527 (TRBV29-1, TRBJ2-5)
CSEDRTGTQYF

SEQ ID NO: 375055 - protein, 14 aa, Homo sapiens
  CDR3 for alpha chain variable domain of TCR clone 187528 (TRAV12-3, TRAJ10)
SHLPLTGGGNKLTF

SEQ ID NO: 375056 - protein, 13 aa, Homo sapiens
  CDR3 for beta chain variable domain of TCR clone 187528 (TRBV27, TRBJ1-1)
CASSVSIGAEAFF

SEQ ID NO: 375057 - protein, 12 aa, Homo sapiens
  CDR3 for alpha chain variable domain of TCR clone 187529 (TRAV13-1, TRAJ15)
CAARQAGTALIF

SEQ ID NO: 375058 - protein, 14 aa, Homo sapiens
  CDR3 for beta chain variable domain of TCR clone 187529 (TRBV19, TRBJ2-2)
CASSTLHRTGELFF

SEQ ID NO: 375059 - protein, 15 aa, Homo sapiens
  CDR3 for alpha chain variable domain of TCR clone 187530 (TRAV2, TRAJ11)
CAVGGRNSGYSTLTF

SEQ ID NO: 375060 - protein, 14 aa, Homo sapiens
  CDR3 for beta chain variable domain of TCR clone 187530 (TRBV20-1, TRBJ2-1)
CSAQIGGYANEQFF

SEQ ID NO: 375061 - protein, 13 aa, Homo sapiens
  CDR3 for alpha chain variable domain of TCR clone 187531 (TRAV26-1, TRAJ31)
CIVRVDGNARLMF

SEQ ID NO: 375062 - protein, 17 aa, Homo sapiens
  CDR3 for beta chain variable domain of TCR clone 187531 (TRBV11-2, TRBJ2-1)
CASGLYPPGVEYNEQFF

SEQ ID NO: 375063 - protein, 13 aa, Homo sapiens
  CDR3 for alpha chain variable domain of TCR clone 187532 (TRAV13-1, TRAJ43)
CAASKNNNNDMRF

SEQ ID NO: 375064 - protein, 15 aa, Homo sapiens
  CDR3 for beta chain variable domain of TCR clone 187532 (TRBV24-1, TRBJ1-1)
CATSDSKTVNTEAFF

SEQ ID NO: 375065 - protein, 13 aa, Homo sapiens
  CDR3 for alpha chain variable domain of TCR clone 187533 (TRAV8-6, TRAJ21)
CAVSPSSLNKFYF

SEQ ID NO: 375066 - protein, 14 aa, Homo sapiens
  CDR3 for beta chain variable domain of TCR clone 187533 (TRBV7-9, TRBJ2-5)
CASSLDTAQEIQYF

SEQ ID NO: 375067 - protein, 16 aa, Homo sapiens
  CDR3 for alpha chain variable domain of TCR clone 187534 (TRAV12-2, TRAJ40)
SAVIRGGTSGTYKYIF

SEQ ID NO: 375068 - protein, 14 aa, Homo sapiens
  CDR3 for beta chain variable domain of TCR clone 187534 (TRBV20-1, TRBJ2-5)
CSARDGRAGETQYL

SEQ ID NO: 375069 - protein, 23 aa, Homo sapiens
  CDR3 for alpha chain variable domain of TCR clone 187535 (TRAV26-1, TRAJ38)
CIADNAGNNHIQNPDPAVDQLRD

SEQ ID NO: 375070 - protein, 13 aa, Homo sapiens
  CDR3 for beta chain variable domain of TCR clone 187535 (TRBV20-1, TRBJ1-1)
CSARGGGNNEAFF

SEQ ID NO: 375071 - protein, 14 aa, Homo sapiens
  CDR3 for alpha chain variable domain of TCR clone 187536 (TRAV13-1, TRAJ35)
CAASKGGFGNVLHG

SEQ ID NO: 375072 - protein, 14 aa, Homo sapiens
  CDR3 for beta chain variable domain of TCR clone 187536 (TRBV7-8, TRBJ2-3)
CASSFPDGQDTQYF

SEQ ID NO: 375073 - protein, 13 aa, Homo sapiens
  CDR3 for alpha chain variable domain of TCR clone 187537 (TRAV3, TRAJ36)
CAVRDTGANNLFF

SEQ ID NO: 375074 - protein, 15 aa, Homo sapiens
  CDR3 for beta chain variable domain of TCR clone 187537 (TRBV24-1, TRBJ2-1)
RATSGSGGLYNEQFF

SEQ ID NO: 375075 - protein, 11 aa, Homo sapiens
  CDR3 for alpha chain variable domain of TCR clone 187538 (TRAV35, TRAJ30)
CAGPGDDKIIF

SEQ ID NO: 375076 - protein, 16 aa, Homo sapiens
  CDR3 for beta chain variable domain of TCR clone 187538 (TRBV7-6, TRBJ1-6)
CASSQAGGGSPCTLGM

SEQ ID NO: 375077 - protein, 13 aa, Homo sapiens
  CDR3 for alpha chain variable domain of TCR clone 187539 (TRAV36/DV7, TRAJ7)
CAGTRDGNNRLAF

SEQ ID NO: 375078 - protein, 15 aa, Homo sapiens
  CDR3 for beta chain variable domain of TCR clone 187539 (TRBV11-3, TRBJ2-7)
CASSPGPASSYEQYF

SEQ ID NO: 375079 - protein, 16 aa, Homo sapiens
  CDR3 for alpha chain variable domain of TCR clone 187540 (TRAV27, TRAJ13)
CAGAKSDSGGYQKVTF

SEQ ID NO: 375080 - protein, 15 aa, Homo sapiens
  CDR3 for beta chain variable domain of TCR clone 187540 (TRBV29-1, TRBJ2-1)
CILGRHALFYNEQFF

SEQ ID NO: 375081 - protein, 11 aa, Homo sapiens
  CDR3 for alpha chain variable domain of TCR clone 187541 (TRAV2, TRAJ21)
CAVFNFNKFYF

SEQ ID NO: 375082 - protein, 13 aa, Homo sapiens
  CDR3 for beta chain variable domain of TCR clone 187541 (TRBV20-1, TRBJ1-3)
CSAGAYSGNTIYF

SEQ ID NO: 375083 - protein, 12 aa, Homo sapiens
  CDR3 for alpha chain variable domain of TCR clone 187542 (TRAV13-1, TRAJ21)
CAAKEGFNKFYF

SEQ ID NO: 375084 - protein, 18 aa, Homo sapiens
  CDR3 for beta chain variable domain of TCR clone 187542 (TRBV7-3, TRBJ2-1)
CASSLTDPRVAAYNEQFF

SEQ ID NO: 375085 - protein, 13 aa, Homo sapiens
  CDR3 for alpha chain variable domain of TCR clone 187543 (TRAV6, TRAJ13)
CALIPGGYQKVTF

SEQ ID NO: 375086 - protein, 19 aa, Homo sapiens
  CDR3 for beta chain variable domain of TCR clone 187543 (TRBV7-2, TRBJ2-3)
CASSFLSRNWGGGTDTQYF

SEQ ID NO: 375087 - protein, 12 aa, Homo sapiens
  CDR3 for alpha chain variable domain of TCR clone 187544 (TRAV12-3, TRAJ17)
FAMTLTGNKPTF

SEQ ID NO: 375088 - protein, 15 aa, Homo sapiens
  CDR3 for beta chain variable domain of TCR clone 187544 (TRBV20-1, TRBJ2-7)
CSARDRVSGMDEQYF

SEQ ID NO: 375089 - protein, 13 aa, Homo sapiens
  CDR3 for alpha chain variable domain of TCR clone 187545 (TRAV21, TRAJ27)
CAARPGNAGKSTF

SEQ ID NO: 375090 - protein, 22 aa, Homo sapiens
  CDR3 for beta chain variable domain of TCR clone 187545 (TRBV7-6, TRBJ2-1)
AAGLGHVSLGQQLGGGADEQFF

SEQ ID NO: 375091 - protein, 14 aa, Homo sapiens
  CDR3 for alpha chain variable domain of TCR clone 187546 (TRAV12-2, TRAJ17)
CAVLFKAAGDKLTF

SEQ ID NO: 375092 - protein, 14 aa, Homo sapiens
  CDR3 for beta chain variable domain of TCR clone 187546 (TRBV7-2, TRBJ2-7)
CASRSQGAAYEQYF

SEQ ID NO: 375093 - protein, 12 aa, Homo sapiens
  CDR3 for alpha chain variable domain of TCR clone 187547 (TRAV8-3, TRAJ32)
CCGGGATNKLIF

SEQ ID NO: 375094 - protein, 12 aa, Homo sapiens
  CDR3 for beta chain variable domain of TCR clone 187547 (TRBV7-8, TRBJ2-7)
CARSLGDREQYF

SEQ ID NO: 375095 - protein, 15 aa, Homo sapiens
  CDR3 for alpha chain variable domain of TCR clone 187548 (TRAV20, TRAJ50)
CAVRQMKTSYDKVIF

SEQ ID NO: 375096 - protein, 17 aa, Homo sapiens
  CDR3 for beta chain variable domain of TCR clone 187548 (TRBV28, TRBJ2-7)
CASIPLHRASGVYEQYF

SEQ ID NO: 375097 - protein, 12 aa, Homo sapiens
  CDR3 for alpha chain variable domain of TCR clone 187549 (TRAV2, TRAJ10)
CASTGGGNELTS

SEQ ID NO: 375098 - protein, 14 aa, Homo sapiens
  CDR3 for beta chain variable domain of TCR clone 187549 (TRBV7-2, TRBJ2-2)
CASRGQGAAGELFF

SEQ ID NO: 375099 - protein, 15 aa, Homo sapiens
  CDR3 for alpha chain variable domain of TCR clone 187550 (TRAV1-2, TRAJ38)
CAVSENAGNNRKLIW

SEQ ID NO: 375100 - protein, 17 aa, Homo sapiens
  CDR3 for beta chain variable domain of TCR clone 187550 (TRBV20-1, TRBJ2-7)
CSARDQSLGWTSSTSGR

SEQ ID NO: 375101 - protein, 11 aa, Homo sapiens
  CDR3 for alpha chain variable domain of TCR clone 187551 (TRAV12-3, TRAJ43)
CAMSVSNDMPF

SEQ ID NO: 375102 - protein, 13 aa, Homo sapiens
  CDR3 for beta chain variable domain of TCR clone 187551 (TRBV20-1, TRBJ1-1)
CSAPLGGGTEAFF

SEQ ID NO: 375103 - protein, 13 aa, Homo sapiens
  CDR3 for alpha chain variable domain of TCR clone 187552 (TRAV21, TRAJ15)
CAVANHAGTALIF

SEQ ID NO: 375104 - protein, 14 aa, Homo sapiens
  CDR3 for beta chain variable domain of TCR clone 187552 (TRBV27, TRBJ2-2)
CASSLGAATGELFF

SEQ ID NO: 375105 - protein, 11 aa, Homo sapiens
  CDR3 for alpha chain variable domain of TCR clone 187553 (TRAV3, TRAJ21)
CAVGNFNKFYF

SEQ ID NO: 375106 - protein, 16 aa, Homo sapiens
  CDR3 for beta chain variable domain of TCR clone 187553 (TRBV2, TRBJ2-1)
CASRSPAGGKYNEQFF

SEQ ID NO: 375107 - protein, 19 aa, Homo sapiens
  CDR3 for alpha chain variable domain of TCR clone 187554 (TRAV17, TRAJ40)
TASRAADTASYFCASKYIF

SEQ ID NO: 375108 - protein, 12 aa, Homo sapiens
  CDR3 for beta chain variable domain of TCR clone 187554 (TRBV7-8, TRBJ2-7)
CASSLGDREQYF

SEQ ID NO: 375109 - protein, 13 aa, Homo sapiens
  CDR3 for alpha chain variable domain of TCR clone 187555 (TRAV12-2, TRAJ4)
CAVFSGGYNKLIF

SEQ ID NO: 375110 - protein, 14 aa, Homo sapiens
  CDR3 for beta chain variable domain of TCR clone 187555 (TRBV24-1, TRBJ1-1)
CATSIPRGDTEAFF

SEQ ID NO: 375111 - protein, 14 aa, Homo sapiens
  CDR3 for alpha chain variable domain of TCR clone 187556 (TRAV13-1, TRAJ44)
CAAKATGTASKLTF

SEQ ID NO: 375112 - protein, 22 aa, Homo sapiens
  CDR3 for beta chain variable domain of TCR clone 187556 (TRBV19, TRBJ2-1)
CASSVRDRVTGTSGRIYNEQVF

SEQ ID NO: 375113 - protein, 15 aa, Homo sapiens
  CDR3 for alpha chain variable domain of TCR clone 187557 (TRAV12-1, TRAJ45)
CVVLSGGGGADGLTF

SEQ ID NO: 375114 - protein, 20 aa, Homo sapiens
  CDR3 for beta chain variable domain of TCR clone 187557 (TRBV7-3, TRBJ1-1)
GGTQPCISVPAARIGAEAFF

SEQ ID NO: 375115 - protein, 14 aa, Homo sapiens
  CDR3 for alpha chain variable domain of TCR clone 187558 (TRAV12-3, TRAJ10)
SHLPLTGGGNKLTF

SEQ ID NO: 375116 - protein, 16 aa, Homo sapiens
  CDR3 for beta chain variable domain of TCR clone 187558 (TRBV4-1, TRBJ1-4)
CASSQDLRRGGEQLFF

SEQ ID NO: 375117 - protein, 13 aa, Homo sapiens
  CDR3 for alpha chain variable domain of TCR clone 187559 (TRAV20, TRAJ34)
CAVRSYNTDKLIF

SEQ ID NO: 375118 - protein, 17 aa, Homo sapiens
  CDR3 for beta chain variable domain of TCR clone 187559 (TRBV11-2, TRBJ2-1)
CASSLYPPGVEYNEQFF

SEQ ID NO: 375119 - protein, 14 aa, Homo sapiens
  CDR3 for alpha chain variable domain of TCR clone 187560 (TRAV12-2, TRAJ45)
CAVNIGGCADGLTF

SEQ ID NO: 375120 - protein, 17 aa, Homo sapiens
  CDR3 for beta chain variable domain of TCR clone 187560 (TRBV20-1, TRBJ2-2)
CSASGSGQGGLTGELFF

SEQ ID NO: 375121 - protein, 14 aa, Homo sapiens
  CDR3 for alpha chain variable domain of TCR clone 187561 (TRAV4, TRAJ30)
CLVGDMNRDDKIIF

SEQ ID NO: 375122 - protein, 16 aa, Homo sapiens
  CDR3 for beta chain variable domain of TCR clone 187561 (TRBV20-1, TRBJ1-4)
YNAQGQGLLTNEKLFF

SEQ ID NO: 375123 - protein, 12 aa, Homo sapiens
  CDR3 for alpha chain variable domain of TCR clone 187562 (TRAV4, TRAJ26)
CLVGDYGQNLVF

SEQ ID NO: 375124 - protein, 16 aa, Homo sapiens
  CDR3 for beta chain variable domain of TCR clone 187562 (TRBV7-2, TRBJ1-2)
CASSSNQDRRGHGYIF

SEQ ID NO: 375125 - protein, 15 aa, Homo sapiens
  CDR3 for alpha chain variable domain of TCR clone 187563 (TRAV17, TRAJ57)
CATGPSQGGSEKLVV

SEQ ID NO: 375126 - protein, 14 aa, Homo sapiens
  CDR3 for beta chain variable domain of TCR clone 187563 (TRBV12-5, TRBJ2-5)
CASGSRTQQETQYF

SEQ ID NO: 375127 - protein, 12 aa, Homo sapiens
  CDR3 for alpha chain variable domain of TCR clone 187564 (TRAV3, TRAJ43)
CAVRDPNNDMRF

SEQ ID NO: 375128 - protein, 12 aa, Homo sapiens
  CDR3 for beta chain variable domain of TCR clone 187564 (TRBV27, TRBJ2-2)
CASKLFTGELFF

SEQ ID NO: 375129 - protein, 14 aa, Homo sapiens
  CDR3 for alpha chain variable domain of TCR clone 187565 (TRAV13-2, TRAJ32)
CAANYGGATNKLIF

SEQ ID NO: 375130 - protein, 15 aa, Homo sapiens
  CDR3 for beta chain variable domain of TCR clone 187565 (TRBV12-4, TRBJ2-5)
CASTLNSGRGETQYF

SEQ ID NO: 375131 - protein, 14 aa, Homo sapiens
  CDR3 for alpha chain variable domain of TCR clone 187566 (TRAV1-2, TRAJ8)
CAVREDTGFQKLVF

SEQ ID NO: 375132 - protein, 17 aa, Homo sapiens
  CDR3 for beta chain variable domain of TCR clone 187566 (TRBV11-2, TRBJ2-1)
CASSLYPPGVEYNEQFL

SEQ ID NO: 375133 - protein, 12 aa, Homo sapiens
  CDR3 for alpha chain variable domain of TCR clone 187567 (TRAV2, TRAJ9)
CAVGAGGFKTIF

SEQ ID NO: 375134 - protein, 20 aa, Homo sapiens
  CDR3 for beta chain variable domain of TCR clone 187567 (TRBV7-4, TRBJ1-5)
CISVSEAGQGAPYSNQPQHF

SEQ ID NO: 375135 - protein, 12 aa, Homo sapiens
  CDR3 for alpha chain variable domain of TCR clone 187568 (TRAV38-1, TRAJ43)
CAFMTRLADLRF

SEQ ID NO: 375136 - protein, 14 aa, Homo sapiens
  CDR3 for beta chain variable domain of TCR clone 187568 (TRBV27, TRBJ2-2)
CASSLSVVDGRMFF

SEQ ID NO: 375137 - protein, 19 aa, Homo sapiens
  CDR3 for alpha chain variable domain of TCR clone 187569 (TRAV3, TRAJ6)
CAVRDRNLSRSGGRYIPTF

SEQ ID NO: 375138 - protein, 15 aa, Homo sapiens
  CDR3 for beta chain variable domain of TCR clone 187569 (TRBV18, TRBJ2-7)
CASSPTFMDSYEQYF

SEQ ID NO: 375139 - protein, 12 aa, Homo sapiens
  CDR3 for alpha chain variable domain of TCR clone 187570 (TRAV17, TRAJ57)
CATGGGSEKLVF

SEQ ID NO: 375140 - protein, 13 aa, Homo sapiens
  CDR3 for beta chain variable domain of TCR clone 187570 (TRBV7-9, TRBJ2-7)
CASSFAGAYEQYC

SEQ ID NO: 375141 - protein, 14 aa, Homo sapiens
  CDR3 for alpha chain variable domain of TCR clone 187571 (TRAV1-2, TRAJ16)
CAVNRFSDGQKLPF

SEQ ID NO: 375142 - protein, 17 aa, Homo sapiens
  CDR3 for beta chain variable domain of TCR clone 187571 (TRBV20-1, TRBJ2-2)
CSASGSGQGGLTGELFF

SEQ ID NO: 375143 - protein, 14 aa, Homo sapiens
  CDR3 for alpha chain variable domain of TCR clone 187572 (TRAV1-2, TRAJ8)
CAVREDTGFQKLLF

SEQ ID NO: 375144 - protein, 12 aa, Homo sapiens
  CDR3 for beta chain variable domain of TCR clone 187572 (TRBV29-1, TRBJ2-7)
CSARDRPYEQYF

SEQ ID NO: 375145 - protein, 14 aa, Homo sapiens
  CDR3 for alpha chain variable domain of TCR clone 187573 (TRAV8-2, TRAJ5)
CVVDMDTGRRALTF

SEQ ID NO: 375146 - protein, 15 aa, Homo sapiens
  CDR3 for beta chain variable domain of TCR clone 187573 (TRBV5-7, TRBJ2-1)
CASSYISGRGNEQFC

SEQ ID NO: 375147 - protein, 17 aa, Homo sapiens
  CDR3 for alpha chain variable domain of TCR clone 187574 (TRAV26-1, TRAJ53)
CIVIVDDSGGSNYKPTF

SEQ ID NO: 375148 - protein, 15 aa, Homo sapiens
  CDR3 for beta chain variable domain of TCR clone 187574 (TRBV20-1, TRBJ2-7)
CSARVPAAYCYEQYF

SEQ ID NO: 375149 - protein, 17 aa, Homo sapiens
  CDR3 for alpha chain variable domain of TCR clone 187575 (TRAV26-1, TRAJ28)
CIVRVPDSGAGSYQLTF

SEQ ID NO: 375150 - protein, 17 aa, Homo sapiens
  CDR3 for beta chain variable domain of TCR clone 187575 (TRBV28, TRBJ2-7)
CASSPLPAGGQSYEQYF

SEQ ID NO: 375151 - protein, 13 aa, Homo sapiens
  CDR3 for alpha chain variable domain of TCR clone 187576 (TRAV8-3, TRAJ28)
CAVGAAGSYQLTF

SEQ ID NO: 375152 - protein, 17 aa, Homo sapiens
  CDR3 for beta chain variable domain of TCR clone 187576 (TRBV11-2, TRBJ2-1)
CASSLYPPGVEYSEQFF

SEQ ID NO: 375153 - protein, 15 aa, Homo sapiens
  CDR3 for alpha chain variable domain of TCR clone 187577 (TRAV8-3, TRAJ37)
CAVGAPSSNTGKIIF

SEQ ID NO: 375154 - protein, 15 aa, Homo sapiens
  CDR3 for beta chain variable domain of TCR clone 187577 (TRBV11-2, TRBJ1-2)
CASSQMRGLNYGYTF

SEQ ID NO: 375155 - protein, 13 aa, Homo sapiens
  CDR3 for alpha chain variable domain of TCR clone 187578 (TRAV1-2, TRAJ24)
FAVRADSWGKFQF

SEQ ID NO: 375156 - protein, 13 aa, Homo sapiens
  CDR3 for beta chain variable domain of TCR clone 187578 (TRBV20-1, TRBJ2-1)
CSATGLAGDEQFF

SEQ ID NO: 375157 - protein, 12 aa, Homo sapiens
  CDR3 for alpha chain variable domain of TCR clone 187579 (TRAV3, TRAJ43)
CAVRDPNNDMRF

SEQ ID NO: 375158 - protein, 16 aa, Homo sapiens
  CDR3 for beta chain variable domain of TCR clone 187579 (TRBV7-7, TRBJ2-1)
CASSLASGTSYNEQFF

SEQ ID NO: 375159 - protein, 17 aa, Homo sapiens
  CDR3 for alpha chain variable domain of TCR clone 187580 (TRAV3, TRAJ6)
CAVRDGPRAGGSDIPTF

SEQ ID NO: 375160 - protein, 17 aa, Homo sapiens
  CDR3 for beta chain variable domain of TCR clone 187580 (TRBV7-3, TRBJ2-3)
CASSLMKRMRGADTQYF

SEQ ID NO: 375161 - protein, 16 aa, Homo sapiens
  CDR3 for alpha chain variable domain of TCR clone 187581 (TRAV12-3, TRAJ53)
CAMSPGSGRRNYKLTF

SEQ ID NO: 375162 - protein, 11 aa, Homo sapiens
  CDR3 for beta chain variable domain of TCR clone 187581 (TRBV29-1, TRBJ2-5)
CSEDRTGTQYF

SEQ ID NO: 375163 - protein, 13 aa, Homo sapiens
  CDR3 for alpha chain variable domain of TCR clone 187582 (TRAV20, TRAJ37)
CAGCSSNTGKLIF

SEQ ID NO: 375164 - protein, 14 aa, Homo sapiens
  CDR3 for beta chain variable domain of TCR clone 187582 (TRBV12-4, TRBJ2-5)
CASSLERVGETQYF

SEQ ID NO: 375165 - protein, 14 aa, Homo sapiens
  CDR3 for alpha chain variable domain of TCR clone 187583 (TRAV1-2, TRAJ16)
CAVNRFSDGQKLLF

SEQ ID NO: 375166 - protein, 15 aa, Homo sapiens
  CDR3 for beta chain variable domain of TCR clone 187583 (TRBV20-1, TRBJ2-7)
CSAESGTGGAYEQYF

SEQ ID NO: 375167 - protein, 12 aa, Homo sapiens
  CDR3 for alpha chain variable domain of TCR clone 187584 (TRAV21, TRAJ11)
CAATSGYSTLTF

SEQ ID NO: 375168 - protein, 13 aa, Homo sapiens
  CDR3 for beta chain variable domain of TCR clone 187584 (TRBV20-1, TRBJ2-7)
QGPELAGVGEQYF

SEQ ID NO: 375169 - protein, 14 aa, Homo sapiens
  CDR3 for alpha chain variable domain of TCR clone 187585 (TRAV27, TRAJ22)
CAGLPSGSARQLTF

SEQ ID NO: 375170 - protein, 11 aa, Homo sapiens
  CDR3 for beta chain variable domain of TCR clone 187585 (TRBV12-4, TRBJ2-2)
CASSSAGELFF

SEQ ID NO: 375171 - protein, 14 aa, Homo sapiens
  CDR3 for alpha chain variable domain of TCR clone 187586 (TRAV1-2, TRAJ8)
CAVREDTGFQKLEF

SEQ ID NO: 375172 - protein, 14 aa, Homo sapiens
  CDR3 for beta chain variable domain of TCR clone 187586 (TRBV29-1, TRBJ2-3)
CSAGAGVGADTQYF

SEQ ID NO: 375173 - protein, 13 aa, Homo sapiens
  CDR3 for alpha chain variable domain of TCR clone 187587 (TRAV21, TRAJ57)
CAVTEGGSEKLVF

SEQ ID NO: 375174 - protein, 15 aa, Homo sapiens
  CDR3 for beta chain variable domain of TCR clone 187587 (TRBV10-3, TRBJ2-5)
CAISEFGRGQETQYL

SEQ ID NO: 375175 - protein, 13 aa, Homo sapiens
  CDR3 for alpha chain variable domain of TCR clone 187588 (TRAV23/DV6, TRAJ22)
CAHYSGSARQLTF

SEQ ID NO: 375176 - protein, 13 aa, Homo sapiens
  CDR3 for beta chain variable domain of TCR clone 187588 (TRBV6-1, TRBJ1-1)
CASSRQGNTEAFF

SEQ ID NO: 375177 - protein, 11 aa, Homo sapiens
  CDR3 for alpha chain variable domain of TCR clone 187589 (TRAV35, TRAJ12)
RRMDSSHKLIF

SEQ ID NO: 375178 - protein, 14 aa, Homo sapiens
  CDR3 for beta chain variable domain of TCR clone 187589 (TRBV19, TRBJ1-1)
CASSPNRGDTEAFF

SEQ ID NO: 375179 - protein, 15 aa, Homo sapiens
  CDR3 for alpha chain variable domain of TCR clone 187590 (TRAV8-3, TRAJ45)
CASSYSGGGADGLTF

SEQ ID NO: 375180 - protein, 12 aa, Homo sapiens
  CDR3 for beta chain variable domain of TCR clone 187590 (TRBV11-2, TRBJ2-1)
CASSPGNNEQFC

SEQ ID NO: 375181 - protein, 11 aa, Homo sapiens
  CDR3 for alpha chain variable domain of TCR clone 187591 (TRAV17, TRAJ36)
CAPTGANNLFF

SEQ ID NO: 375182 - protein, 18 aa, Homo sapiens
  CDR3 for beta chain variable domain of TCR clone 187591 (TRBV6-6, TRBJ1-3)
CASSYSKWDSISGNTIYF

SEQ ID NO: 375183 - protein, 12 aa, Homo sapiens
  CDR3 for alpha chain variable domain of TCR clone 187592 (TRAV1-2, TRAJ29)
CAVPSGSTPLVF

SEQ ID NO: 375184 - protein, 12 aa, Homo sapiens
  CDR3 for beta chain variable domain of TCR clone 187592 (TRBV7-9, TRBJ2-7)
CASSFGSYEQYF

SEQ ID NO: 375185 - protein, 13 aa, Homo sapiens
  CDR3 for alpha chain variable domain of TCR clone 187593 (TRAV2, TRAJ15)
CAVASQAGTALIF

SEQ ID NO: 375186 - protein, 13 aa, Homo sapiens
  CDR3 for beta chain variable domain of TCR clone 187593 (TRBV4-3, TRBJ2-1)
CASSQKLERQQFF

SEQ ID NO: 375187 - protein, 14 aa, Homo sapiens
  CDR3 for alpha chain variable domain of TCR clone 187594 (TRAV1-2, TRAJ8)
CAVREDTGFQKLVF

SEQ ID NO: 375188 - protein, 13 aa, Homo sapiens
  CDR3 for beta chain variable domain of TCR clone 187594 (TRBV9, TRBJ2-1)
CASSPSGVSEQFF

SEQ ID NO: 375189 - protein, 17 aa, Homo sapiens
  CDR3 for alpha chain variable domain of TCR clone 187595 (TRAV3, TRAJ6)
CAVRDGPRAGGSYIPTL

SEQ ID NO: 375190 - protein, 15 aa, Homo sapiens
  CDR3 for beta chain variable domain of TCR clone 187595 (TRBV29-1, TRBJ2-5)
CSVEGLAVNQETQYF

SEQ ID NO: 375191 - protein, 16 aa, Homo sapiens
  CDR3 for alpha chain variable domain of TCR clone 187596 (TRAV30, TRAJ24)
CCTEIVDADSWGKFQL

SEQ ID NO: 375192 - protein, 14 aa, Homo sapiens
  CDR3 for beta chain variable domain of TCR clone 187596 (TRBV12-5, TRBJ2-5)
CASGSRTHQETQYF

SEQ ID NO: 375193 - protein, 14 aa, Homo sapiens
  CDR3 for alpha chain variable domain of TCR clone 187597 (TRAV8-2, TRAJ4)
CVVSPSCGYNKLIF

SEQ ID NO: 375194 - protein, 15 aa, Homo sapiens
  CDR3 for beta chain variable domain of TCR clone 187597 (TRBV2, TRBJ2-1)
CASSELAGSYNEQFF

SEQ ID NO: 375195 - protein, 12 aa, Homo sapiens
  CDR3 for alpha chain variable domain of TCR clone 187598 (TRAV13-1, TRAJ9)
CASHTGGFKIIF

SEQ ID NO: 375196 - protein, 17 aa, Homo sapiens
  CDR3 for beta chain variable domain of TCR clone 187598 (TRBV11-2, TRBJ2-3)
CQQLRGASRGAPNTQYF

SEQ ID NO: 375197 - protein, 14 aa, Homo sapiens
  CDR3 for alpha chain variable domain of TCR clone 187599 (TRAV38-1, TRAJ27)
CAFIHNTNAGKSTF

SEQ ID NO: 375198 - protein, 13 aa, Homo sapiens
  CDR3 for beta chain variable domain of TCR clone 187599 (TRBV7-6, TRBJ1-2)
CASSLVADYGYTF

SEQ ID NO: 375199 - protein, 17 aa, Homo sapiens
  CDR3 for alpha chain variable domain of TCR clone 187600 (TRAV4, TRAJ20)
CTTASWVKGNNDYKLSF

SEQ ID NO: 375200 - protein, 15 aa, Homo sapiens
  CDR3 for beta chain variable domain of TCR clone 187600 (TRBV28, TRBJ2-1)
CASSLGTRLYNEQFF

SEQ ID NO: 375201 - protein, 16 aa, Homo sapiens
  CDR3 for alpha chain variable domain of TCR clone 187601 (TRAV35, TRAJ28)
CAGQRYSGAGSYQLTF

SEQ ID NO: 375202 - protein, 13 aa, Homo sapiens
  CDR3 for beta chain variable domain of TCR clone 187601 (TRBV19, TRBJ1-2)
CASSQGQVYGDIF

SEQ ID NO: 375203 - protein, 14 aa, Homo sapiens
  CDR3 for alpha chain variable domain of TCR clone 187602 (TRAV1-1, TRAJ30)
CAVRTLNRDDKIIF

SEQ ID NO: 375204 - protein, 15 aa, Homo sapiens
  CDR3 for beta chain variable domain of TCR clone 187602 (TRBV27, TRBJ1-4)
CASSAQQDLNENLFF

SEQ ID NO: 375205 - protein, 15 aa, Homo sapiens
  CDR3 for alpha chain variable domain of TCR clone 187603 (TRAV25, TRAJ53)
CAATGGGGSNYKLTF

SEQ ID NO: 375206 - protein, 19 aa, Homo sapiens
  CDR3 for beta chain variable domain of TCR clone 187603 (TRBV7-2, TRBJ2-3)
CASSYLSRNWGGGTDTQYF

SEQ ID NO: 375207 - protein, 12 aa, Homo sapiens
  CDR3 for alpha chain variable domain of TCR clone 187604 (TRAV12-3, TRAJ17)
CAMTLTGNKLTF

SEQ ID NO: 375208 - protein, 15 aa, Homo sapiens
  CDR3 for beta chain variable domain of TCR clone 187604 (TRBV20-1, TRBJ2-7)
GSARYRVSGMDEQYF

SEQ ID NO: 375209 - protein, 11 aa, Homo sapiens
  CDR3 for alpha chain variable domain of TCR clone 187605 (TRAV13-2, TRAJ45)
VTGGGSDGLTF

SEQ ID NO: 375210 - protein, 17 aa, Homo sapiens
  CDR3 for beta chain variable domain of TCR clone 187605 (TRBV19, TRBJ1-1)
CASSIAGRGLMNTEAFF

SEQ ID NO: 375211 - protein, 13 aa, Homo sapiens
  CDR3 for alpha chain variable domain of TCR clone 187606 (TRAV12-2, TRAJ42)
CAGKRGSQGNLIF

SEQ ID NO: 375212 - protein, 13 aa, Homo sapiens
  CDR3 for beta chain variable domain of TCR clone 187606 (TRBV7-3, TRBJ1-1)
CASSQDWGAEAFF

SEQ ID NO: 375213 - protein, 12 aa, Homo sapiens
  CDR3 for alpha chain variable domain of TCR clone 187607 (TRAV12-1, TRAJ30)
CVVNPRDDKVIF

SEQ ID NO: 375214 - protein, 18 aa, Homo sapiens
  CDR3 for beta chain variable domain of TCR clone 187607 (TRBV5-1, TRBJ2-7)
CASSLAGFGGMSSYEQYF

SEQ ID NO: 375215 - protein, 19 aa, Homo sapiens
  CDR3 for alpha chain variable domain of TCR clone 187608 (TRAV3, TRAJ6)
CAVRDRNPSRSGGSYIPTL

SEQ ID NO: 375216 - protein, 15 aa, Homo sapiens
  CDR3 for beta chain variable domain of TCR clone 187608 (TRBV18, TRBJ2-7)
CASSPTFMDSYEQYF

SEQ ID NO: 375217 - protein, 15 aa, Homo sapiens
  CDR3 for alpha chain variable domain of TCR clone 187609 (TRAV4, TRAJ39)
CLVGPNNKAGNMLTF

SEQ ID NO: 375218 - protein, 14 aa, Homo sapiens
  CDR3 for beta chain variable domain of TCR clone 187609 (TRBV19, TRBJ2-7)
CASNFRDTFTGMYF

SEQ ID NO: 375219 - protein, 15 aa, Homo sapiens
  CDR3 for alpha chain variable domain of TCR clone 187610 (TRAV10, TRAJ42)
SLLHLWGGSQGNLIF

SEQ ID NO: 375220 - protein, 13 aa, Homo sapiens
  CDR3 for beta chain variable domain of TCR clone 187610 (TRBV5-8, TRBJ1-1)
CASSLGGGTEAFF

SEQ ID NO: 375221 - protein, 12 aa, Homo sapiens
  CDR3 for alpha chain variable domain of TCR clone 187611 (TRAV3, TRAJ7)
CADLLWEQQTRF

SEQ ID NO: 375222 - protein, 13 aa, Homo sapiens
  CDR3 for beta chain variable domain of TCR clone 187611 (TRBV7-3, TRBJ2-5)
CASSFGGGETQYF

SEQ ID NO: 375223 - protein, 12 aa, Homo sapiens
  CDR3 for alpha chain variable domain of TCR clone 187612 (TRAV21, TRAJ11)
CAATSGYSTLTF

SEQ ID NO: 375224 - protein, 14 aa, Homo sapiens
  CDR3 for beta chain variable domain of TCR clone 187612 (TRBV18, TRBJ2-7)
CASSPRGGAYEQYF

SEQ ID NO: 375225 - protein, 12 aa, Homo sapiens
  CDR3 for alpha chain variable domain of TCR clone 187613 (TRAV12-3, TRAJ17)
CAMTLTGNNLTF

SEQ ID NO: 375226 - protein, 13 aa, Homo sapiens
  CDR3 for beta chain variable domain of TCR clone 187613 (TRBV7-9, TRBJ1-2)
CASSLKQNYGYTF

SEQ ID NO: 375227 - protein, 18 aa, Homo sapiens
  CDR3 for alpha chain variable domain of TCR clone 187614 (TRAV13-1, TRAJ52)
CAAKNPNAGGTSYGKLTF

SEQ ID NO: 375228 - protein, 14 aa, Homo sapiens
  CDR3 for beta chain variable domain of TCR clone 187614 (TRBV27, TRBJ2-3)
CASSPLGTTDTQYF

SEQ ID NO: 375229 - protein, 12 aa, Homo sapiens
  CDR3 for alpha chain variable domain of TCR clone 187615 (TRAV17, TRAJ42)
CATVTTGNQFYF

SEQ ID NO: 375230 - protein, 13 aa, Homo sapiens
  CDR3 for beta chain variable domain of TCR clone 187615 (TRBV20-1, TRBJ2-7)
CSASPPSSYEQYF

SEQ ID NO: 375231 - protein, 17 aa, Homo sapiens
  CDR3 for alpha chain variable domain of TCR clone 187616 (TRAV3, TRAJ38)
CAVRDCLNAGNNRKLIW

SEQ ID NO: 375232 - protein, 14 aa, Homo sapiens
  CDR3 for beta chain variable domain of TCR clone 187616 (TRBV19, TRBJ2-1)
CASSIKGTYNEQFF

SEQ ID NO: 375233 - protein, 14 aa, Homo sapiens
  CDR3 for alpha chain variable domain of TCR clone 187617 (TRAV27, TRAJ22)
CAGLPSGSARQLTF

SEQ ID NO: 375234 - protein, 16 aa, Homo sapiens
  CDR3 for beta chain variable domain of TCR clone 187617 (TRBV7-3, TRBJ2-2)
CASSLKRGTLCGELFF

SEQ ID NO: 375235 - protein, 13 aa, Homo sapiens
  CDR3 for alpha chain variable domain of TCR clone 187618 (TRAV8-4, TRAJ49)
FAVRTLTGNQFYF

SEQ ID NO: 375236 - protein, 20 aa, Homo sapiens
  CDR3 for beta chain variable domain of TCR clone 187618 (TRBV4-1, TRBJ2-2)
CASSQASPPGLASNTGELFF

SEQ ID NO: 375237 - protein, 13 aa, Homo sapiens
  CDR3 for alpha chain variable domain of TCR clone 187619 (TRAV21, TRAJ27)
CAARPGNAGISNF

SEQ ID NO: 375238 - protein, 14 aa, Homo sapiens
  CDR3 for beta chain variable domain of TCR clone 187619 (TRBV7-6, TRBJ2-3)
CASSLGTVTDTQYF

SEQ ID NO: 375239 - protein, 12 aa, Homo sapiens
  CDR3 for alpha chain variable domain of TCR clone 187620 (TRAV12-3, TRAJ17)
CAMTLTGNKLTF

SEQ ID NO: 375240 - protein, 15 aa, Homo sapiens
  CDR3 for beta chain variable domain of TCR clone 187620 (TRBV7-8, TRBJ2-7)
CASSLGTGNPYEQYF

SEQ ID NO: 375241 - protein, 15 aa, Homo sapiens
  CDR3 for alpha chain variable domain of TCR clone 187621 (TRAV21, TRAJ53)
RATLNSGGSNYKLTF

SEQ ID NO: 375242 - protein, 14 aa, Homo sapiens
  CDR3 for beta chain variable domain of TCR clone 187621 (TRBV15, TRBJ2-5)
CATSIGGLGETQYF

SEQ ID NO: 375243 - protein, 15 aa, Homo sapiens
  CDR3 for alpha chain variable domain of TCR clone 187622 (TRAV3, TRAJ22)
CAVRDRGGTARQLTF

SEQ ID NO: 375244 - protein, 13 aa, Homo sapiens
  CDR3 for beta chain variable domain of TCR clone 187622 (TRBV7-3, TRBJ2-1)
CASSPVAYNEQFF

SEQ ID NO: 375245 - protein, 14 aa, Homo sapiens
  CDR3 for alpha chain variable domain of TCR clone 187623 (TRAV12-1, TRAJ23)
CVVIVYNKGGKLIF

SEQ ID NO: 375246 - protein, 15 aa, Homo sapiens
  CDR3 for beta chain variable domain of TCR clone 187623 (TRBV20-1, TRBJ1-5)
CSAKPPGHGPQPQHF

SEQ ID NO: 375247 - protein, 16 aa, Homo sapiens
  CDR3 for alpha chain variable domain of TCR clone 187624 (TRAV12-3, TRAJ53)
CAMSPGSGGSNYKLTF

SEQ ID NO: 375248 - protein, 19 aa, Homo sapiens
  CDR3 for beta chain variable domain of TCR clone 187624 (TRBV28, TRBJ2-7)
CASSYSGTSRLGWVYEQYF

SEQ ID NO: 375249 - protein, 22 aa, Homo sapiens
  CDR3 for alpha chain variable domain of TCR clone 187625 (TRAV21, )
CAVRQDAGNNHIQNPDPAVYQL

SEQ ID NO: 375250 - protein, 16 aa, Homo sapiens
  CDR3 for beta chain variable domain of TCR clone 187625 (TRBV4-2, TRBJ1-1)
CASIPLDGGGDTEAFF

SEQ ID NO: 375251 - protein, 14 aa, Homo sapiens
  CDR3 for alpha chain variable domain of TCR clone 187626 (TRAV23/DV6, TRAJ36)
CAASRRTGANNPFF

SEQ ID NO: 375252 - protein, 14 aa, Homo sapiens
  CDR3 for beta chain variable domain of TCR clone 187626 (TRBV6-1, TRBJ1-2)
CASSDTGASYGYTF

SEQ ID NO: 375253 - protein, 11 aa, Homo sapiens
  CDR3 for alpha chain variable domain of TCR clone 187627 (TRAV1-2, TRAJ34)
CAGYNTDKLIF

SEQ ID NO: 375254 - protein, 13 aa, Homo sapiens
  CDR3 for beta chain variable domain of TCR clone 187627 (TRBV20-1, TRBJ1-1)
CSARAGGNTEAFF

SEQ ID NO: 375255 - protein, 13 aa, Homo sapiens
  CDR3 for alpha chain variable domain of TCR clone 187628 (TRAV27, TRAJ49)
CAPRPYTGNQSYF

SEQ ID NO: 375256 - protein, 16 aa, Homo sapiens
  CDR3 for beta chain variable domain of TCR clone 187628 (TRBV4-1, TRBJ1-2)
CASSQDAGQVPYGYTF

SEQ ID NO: 375257 - protein, 12 aa, Homo sapiens
  CDR3 for alpha chain variable domain of TCR clone 187629 (TRAV1-2, TRAJ29)
CAVPSGNTPLVF

SEQ ID NO: 375258 - protein, 13 aa, Homo sapiens
  CDR3 for beta chain variable domain of TCR clone 187629 (TRBV5-4, TRBJ1-1)
CASSVDLGAEAFF

SEQ ID NO: 375259 - protein, 14 aa, Homo sapiens
  CDR3 for alpha chain variable domain of TCR clone 187630 (TRAV1-2, TRAJ16)
CAVNRFSDGQKLPF

SEQ ID NO: 375260 - protein, 12 aa, Homo sapiens
  CDR3 for beta chain variable domain of TCR clone 187630 (TRBV7-6, TRBJ2-7)
CASSLADSEQYF

SEQ ID NO: 375261 - protein, 13 aa, Homo sapiens
  CDR3 for alpha chain variable domain of TCR clone 187631 (TRAV13-1, TRAJ6)
CARGSGGSDIPTF

SEQ ID NO: 375262 - protein, 15 aa, Homo sapiens
  CDR3 for beta chain variable domain of TCR clone 187631 (TRBV2, TRBJ2-1)
CASSELAGSYNEQFF

SEQ ID NO: 375263 - protein, 14 aa, Homo sapiens
  CDR3 for alpha chain variable domain of TCR clone 187632 (TRAV8-3, TRAJ4)
CAVGAAGGYNKLIF

SEQ ID NO: 375264 - protein, 14 aa, Homo sapiens
  CDR3 for beta chain variable domain of TCR clone 187632 (TRBV11-2, TRBJ2-3)
CASSRLARTDTQYF

SEQ ID NO: 375265 - protein, 16 aa, Homo sapiens
  CDR3 for alpha chain variable domain of TCR clone 187633 (TRAV17, TRAJ35)
CATAEGGIGFGDVLHC

SEQ ID NO: 375266 - protein, 12 aa, Homo sapiens
  CDR3 for beta chain variable domain of TCR clone 187633 (TRBV11-2, TRBJ2-2)
CASSLGGGELFF

SEQ ID NO: 375267 - protein, 14 aa, Homo sapiens
  CDR3 for alpha chain variable domain of TCR clone 187634 (TRAV12-1, TRAJ9)
CVVTGYTGGFKTIF

SEQ ID NO: 375268 - protein, 13 aa, Homo sapiens
  CDR3 for beta chain variable domain of TCR clone 187634 (TRBV20-1, TRBJ1-1)
CSARAVGNTEAFF

SEQ ID NO: 375269 - protein, 15 aa, Homo sapiens
  CDR3 for alpha chain variable domain of TCR clone 187635 (TRAV4, TRAJ10)
CLVGDEEGGGNKLTF

SEQ ID NO: 375270 - protein, 15 aa, Homo sapiens
  CDR3 for beta chain variable domain of TCR clone 187635 (TRBV7-2, TRBJ2-7)
CASSLTGPGTYEQYF

SEQ ID NO: 375271 - protein, 16 aa, Homo sapiens
  CDR3 for alpha chain variable domain of TCR clone 187636 (TRAV3, TRAJ37)
CAVRVRCSGNTGKLIF

SEQ ID NO: 375272 - protein, 13 aa, Homo sapiens
  CDR3 for beta chain variable domain of TCR clone 187636 (TRBV14, TRBJ2-1)
CASSQDRRNEQFF

SEQ ID NO: 375273 - protein, 16 aa, Homo sapiens
  CDR3 for alpha chain variable domain of TCR clone 187637 (TRAV30, TRAJ24)
CGTEIMDADSWGKFQF

SEQ ID NO: 375274 - protein, 14 aa, Homo sapiens
  CDR3 for beta chain variable domain of TCR clone 187637 (TRBV19, TRBJ2-1)
CASPTFVLSGEQFF

SEQ ID NO: 375275 - protein, 16 aa, Homo sapiens
  CDR3 for alpha chain variable domain of TCR clone 187638 (TRAV5, TRAJ23)
CAGDRLIFGQGTELSV

SEQ ID NO: 375276 - protein, 14 aa, Homo sapiens
  CDR3 for beta chain variable domain of TCR clone 187638 (TRBV20-1, TRBJ1-1)
CSAQTRIGGTEAFF

SEQ ID NO: 375277 - protein, 12 aa, Homo sapiens
  CDR3 for alpha chain variable domain of TCR clone 187639 (TRAV12-3, TRAJ17)
CAMTLTGNKLTF

SEQ ID NO: 375278 - protein, 13 aa, Homo sapiens
  CDR3 for beta chain variable domain of TCR clone 187639 (TRBV18, TRBJ1-1)
CASSPETKPEAFF

SEQ ID NO: 375279 - protein, 14 aa, Homo sapiens
  CDR3 for alpha chain variable domain of TCR clone 187640 (TRAV3, TRAJ33)
CALRDMGSNYQLIW

SEQ ID NO: 375280 - protein, 17 aa, Homo sapiens
  CDR3 for beta chain variable domain of TCR clone 187640 (TRBV19, TRBJ2-1)
CASSIWSAQPTHNEQFF

SEQ ID NO: 375281 - protein, 12 aa, Homo sapiens
  CDR3 for alpha chain variable domain of TCR clone 187641 (TRAV21, TRAJ20)
CAVRDNDYKLSF

SEQ ID NO: 375282 - protein, 14 aa, Homo sapiens
  CDR3 for beta chain variable domain of TCR clone 187641 (TRBV7-8, TRBJ2-7)
CASSQTQGADEQYF

SEQ ID NO: 375283 - protein, 12 aa, Homo sapiens
  CDR3 for alpha chain variable domain of TCR clone 187642 (TRAV12-3, TRAJ17)
CAMTLTGNKLTF

SEQ ID NO: 375284 - protein, 15 aa, Homo sapiens
  CDR3 for beta chain variable domain of TCR clone 187642 (TRBV7-2, TRBJ1-1)
CASSFAGDRDTEAFF

SEQ ID NO: 375285 - protein, 19 aa, Homo sapiens
  CDR3 for alpha chain variable domain of TCR clone 187643 (TRAV38-1, TRAJ53)
CAFMKHGLESGGSNYKLIF

SEQ ID NO: 375286 - protein, 13 aa, Homo sapiens
  CDR3 for beta chain variable domain of TCR clone 187643 (TRBV19, TRBJ2-7)
CASSPRQSYEQYF

SEQ ID NO: 375287 - protein, 13 aa, Homo sapiens
  CDR3 for alpha chain variable domain of TCR clone 187644 (TRAV2, TRAJ40)
CAVVISGTYKYIF

SEQ ID NO: 375288 - protein, 13 aa, Homo sapiens
  CDR3 for beta chain variable domain of TCR clone 187644 (TRBV7-9, TRBJ2-5)
CASLPSGRETQYF

SEQ ID NO: 375289 - protein, 12 aa, Homo sapiens
  CDR3 for alpha chain variable domain of TCR clone 187645 (TRAV1-2, TRAJ42)
CVAGGRQGNLIL

SEQ ID NO: 375290 - protein, 14 aa, Homo sapiens
  CDR3 for beta chain variable domain of TCR clone 187645 (TRBV5-4, TRBJ2-5)
CASSLVRGQETQYF

SEQ ID NO: 375291 - protein, 12 aa, Homo sapiens
  CDR3 for alpha chain variable domain of TCR clone 187646 (TRAV16, TRAJ10)
CSRTGGGNKLTF

SEQ ID NO: 375292 - protein, 16 aa, Homo sapiens
  CDR3 for beta chain variable domain of TCR clone 187646 (TRBV5-7, TRBJ1-4)
CASSPSGGLKTEKLFF

SEQ ID NO: 375293 - protein, 14 aa, Homo sapiens
  CDR3 for alpha chain variable domain of TCR clone 187647 (TRAV13-1, TRAJ39)
CAASYNNAGNMLTF

SEQ ID NO: 375294 - protein, 14 aa, Homo sapiens
  CDR3 for beta chain variable domain of TCR clone 187647 (TRBV25-1, TRBJ1-1)
CASTHLGGNTEAFF

SEQ ID NO: 375295 - protein, 14 aa, Homo sapiens
  CDR3 for alpha chain variable domain of TCR clone 187648 (TRAV1-2, TRAJ16)
CAVNRFSDGQKLLF

SEQ ID NO: 375296 - protein, 16 aa, Homo sapiens
  CDR3 for beta chain variable domain of TCR clone 187648 (TRBV20-1, TRBJ1-4)
CSAPGQGLLANDKLFF

SEQ ID NO: 375297 - protein, 12 aa, Homo sapiens
  CDR3 for alpha chain variable domain of TCR clone 187649 (TRAV3, TRAJ20)
CAVRDGEYKLSF

SEQ ID NO: 375298 - protein, 12 aa, Homo sapiens
  CDR3 for beta chain variable domain of TCR clone 187649 (TRBV19, TRBJ2-3)
CASAGGADTQYF

SEQ ID NO: 375299 - protein, 12 aa, Homo sapiens
  CDR3 for alpha chain variable domain of TCR clone 187650 (TRAV12-2, TRAJ10)
WGVTGGGNKLTF

SEQ ID NO: 375300 - protein, 16 aa, Homo sapiens
  CDR3 for beta chain variable domain of TCR clone 187650 (TRBV24-1, TRBJ2-3)
CATSDRRQDLTDTRYF

SEQ ID NO: 375301 - protein, 14 aa, Homo sapiens
  CDR3 for alpha chain variable domain of TCR clone 187651 (TRAV8-3, TRAJ4)
CAVGAAGGYNKLIF

SEQ ID NO: 375302 - protein, 15 aa, Homo sapiens
  CDR3 for beta chain variable domain of TCR clone 187651 (TRBV5-1, TRBJ2-1)
CASTGSGRTYNEQFF

SEQ ID NO: 375303 - protein, 14 aa, Homo sapiens
  CDR3 for alpha chain variable domain of TCR clone 187652 (TRAV27, TRAJ37)
CVGERSSNTGKLIF

SEQ ID NO: 375304 - protein, 15 aa, Homo sapiens
  CDR3 for beta chain variable domain of TCR clone 187652 (TRBV11-3, TRBJ1-6)
CASSLDWGANSPLHF

SEQ ID NO: 375305 - protein, 13 aa, Homo sapiens
  CDR3 for alpha chain variable domain of TCR clone 187653 (TRAV36/DV7, TRAJ57)
CAVGEGGSEKLVF

SEQ ID NO: 375306 - protein, 15 aa, Homo sapiens
  CDR3 for beta chain variable domain of TCR clone 187653 (TRBV28, TRBJ2-1)
CASSGLAEVDNEQFF

SEQ ID NO: 375307 - protein, 16 aa, Homo sapiens
  CDR3 for alpha chain variable domain of TCR clone 187654 (TRAV3, TRAJ37)
CAVRGKGSGNTGKLIF

SEQ ID NO: 375308 - protein, 12 aa, Homo sapiens
  CDR3 for beta chain variable domain of TCR clone 187654 (TRBV14, TRBJ2-7)
CQQPRPPYEQYF

SEQ ID NO: 375309 - protein, 16 aa, Homo sapiens
  CDR3 for alpha chain variable domain of TCR clone 187655 (TRAV20, TRAJ10)
CAVLRGLTGGGNKLTF

SEQ ID NO: 375310 - protein, 13 aa, Homo sapiens
  CDR3 for beta chain variable domain of TCR clone 187655 (TRBV12-4, TRBJ1-2)
CASSLRQGKGYTF

SEQ ID NO: 375311 - protein, 12 aa, Homo sapiens
  CDR3 for alpha chain variable domain of TCR clone 187656 (TRAV13-1, TRAJ21)
CAAKEGFNKFYF

SEQ ID NO: 375312 - protein, 14 aa, Homo sapiens
  CDR3 for beta chain variable domain of TCR clone 187656 (TRBV7-7, TRBJ2-2)
CASSRDRSTGELFF

SEQ ID NO: 375313 - protein, 13 aa, Homo sapiens
  CDR3 for alpha chain variable domain of TCR clone 187657 (TRAV3, TRAJ21)
CAVREPDFNKFYF

SEQ ID NO: 375314 - protein, 14 aa, Homo sapiens
  CDR3 for beta chain variable domain of TCR clone 187657 (TRBV4-1, TRBJ1-1)
CASSPPGVNTEAFF

SEQ ID NO: 375315 - protein, 16 aa, Homo sapiens
  CDR3 for alpha chain variable domain of TCR clone 187658 (TRAV13-1, TRAJ18)
CAASRMRGSTLGRLYF

SEQ ID NO: 375316 - protein, 18 aa, Homo sapiens
  CDR3 for beta chain variable domain of TCR clone 187658 (TRBV27, TRBJ1-1)
CASSSRGGRDTLKLSLDK

SEQ ID NO: 375317 - protein, 13 aa, Homo sapiens
  CDR3 for alpha chain variable domain of TCR clone 187659 (TRAV21, TRAJ37)
CAVRSGNTGKLIF

SEQ ID NO: 375318 - protein, 14 aa, Homo sapiens
  CDR3 for beta chain variable domain of TCR clone 187659 (TRBV7-2, TRBJ2-7)
CASSPKTSFYEQYF

SEQ ID NO: 375319 - protein, 13 aa, Homo sapiens
  CDR3 for alpha chain variable domain of TCR clone 187660 (TRAV25, TRAJ26)
CAGMDNYGQNFVF

SEQ ID NO: 375320 - protein, 12 aa, Homo sapiens
  CDR3 for beta chain variable domain of TCR clone 187660 (TRBV12-5, TRBJ2-5)
CASGQGVETQYF

SEQ ID NO: 375321 - protein, 18 aa, Homo sapiens
  CDR3 for alpha chain variable domain of TCR clone 187661 (TRAV13-1, TRAJ52)
CAASKRSAGGTSYGKLTF

SEQ ID NO: 375322 - protein, 12 aa, Homo sapiens
  CDR3 for beta chain variable domain of TCR clone 187661 (TRBV20-1, TRBJ2-3)
CSARVGTDTQYC

SEQ ID NO: 375323 - protein, 14 aa, Homo sapiens
  CDR3 for alpha chain variable domain of TCR clone 187662 (TRAV16, TRAJ54)
FALSLIQGAQKLVS

SEQ ID NO: 375324 - protein, 15 aa, Homo sapiens
  CDR3 for beta chain variable domain of TCR clone 187662 (TRBV20-1, TRBJ2-7)
CSARDRVSGMDEQYF

SEQ ID NO: 375325 - protein, 15 aa, Homo sapiens
  CDR3 for alpha chain variable domain of TCR clone 187663 (TRAV23/DV6, TRAJ45)
CAASARGGGADGLTF

SEQ ID NO: 375326 - protein, 15 aa, Homo sapiens
  CDR3 for beta chain variable domain of TCR clone 187663 (TRBV11-2, TRBJ2-1)
CASSLGTSGLNEQFF

SEQ ID NO: 375327 - protein, 12 aa, Homo sapiens
  CDR3 for alpha chain variable domain of TCR clone 187664 (TRAV13-2, TRAJ8)
CAPWLGFQKLVF

SEQ ID NO: 375328 - protein, 16 aa, Homo sapiens
  CDR3 for beta chain variable domain of TCR clone 187664 (TRBV10-3, TRBJ2-7)
CAISADFVDRPYEQYF

SEQ ID NO: 375329 - protein, 12 aa, Homo sapiens
  CDR3 for alpha chain variable domain of TCR clone 187665 (TRAV12-1, TRAJ34)
CVVTFNTDKLIF

SEQ ID NO: 375330 - protein, 14 aa, Homo sapiens
  CDR3 for beta chain variable domain of TCR clone 187665 (TRBV19, TRBJ1-1)
CASLRTGLNAEAFF

SEQ ID NO: 375331 - protein, 12 aa, Homo sapiens
  CDR3 for alpha chain variable domain of TCR clone 187666 (TRAV38-1, TRAJ47)
CAFETYGNKLVF

SEQ ID NO: 375332 - protein, 13 aa, Homo sapiens
  CDR3 for beta chain variable domain of TCR clone 187666 (TRBV7-8, TRBJ2-1)
CASTRDAVDEQFF

SEQ ID NO: 375333 - protein, 12 aa, Homo sapiens
  CDR3 for alpha chain variable domain of TCR clone 187667 (TRAV1-1, TRAJ30)
CAVRGRDDKIIF

SEQ ID NO: 375334 - protein, 13 aa, Homo sapiens
  CDR3 for beta chain variable domain of TCR clone 187667 (TRBV11-3, TRBJ2-7)
CASSLDKLYKQYF

SEQ ID NO: 375335 - protein, 14 aa, Homo sapiens
  CDR3 for alpha chain variable domain of TCR clone 187668 (TRAV20, TRAJ56)
CAVQFGGANSKLIF

SEQ ID NO: 375336 - protein, 13 aa, Homo sapiens
  CDR3 for beta chain variable domain of TCR clone 187668 (TRBV12-4, TRBJ1-2)
CASSSGPNYGYTF

SEQ ID NO: 375337 - protein, 14 aa, Homo sapiens
  CDR3 for alpha chain variable domain of TCR clone 187669 (TRAV12-1, TRAJ17)
CVVNYKAAGNKLTF

SEQ ID NO: 375338 - protein, 13 aa, Homo sapiens
  CDR3 for beta chain variable domain of TCR clone 187669 (TRBV7-3, TRBJ1-5)
CASSLDSNQPQHF

SEQ ID NO: 375339 - protein, 14 aa, Homo sapiens
  CDR3 for alpha chain variable domain of TCR clone 187670 (TRAV34, TRAJ22)
CGADTSGSARQLTF

SEQ ID NO: 375340 - protein, 15 aa, Homo sapiens
  CDR3 for beta chain variable domain of TCR clone 187670 (TRBV5-1, TRBJ2-1)
CASSPPRPPYNEHFF

SEQ ID NO: 375341 - protein, 12 aa, Homo sapiens
  CDR3 for alpha chain variable domain of TCR clone 187671 (TRAV8-3, TRAJ22)
FGGQSSARQLTF

SEQ ID NO: 375342 - protein, 15 aa, Homo sapiens
  CDR3 for beta chain variable domain of TCR clone 187671 (TRBV20-1, TRBJ1-1)
CSASRVVTGNTEAFF

SEQ ID NO: 375343 - protein, 18 aa, Homo sapiens
  CDR3 for alpha chain variable domain of TCR clone 187672 (TRAV21, TRAJ52)
CAVRPSPAGGTRYGKLTF

SEQ ID NO: 375344 - protein, 17 aa, Homo sapiens
  CDR3 for beta chain variable domain of TCR clone 187672 (TRBV13, TRBJ2-3)
CASSRSRVAGGRNTQYF

SEQ ID NO: 375345 - protein, 13 aa, Homo sapiens
  CDR3 for alpha chain variable domain of TCR clone 187673 (TRAV21, TRAJ20)
CAVGLRVDYKLSF

SEQ ID NO: 375346 - protein, 14 aa, Homo sapiens
  CDR3 for beta chain variable domain of TCR clone 187673 (TRBV7-9, TRBJ1-2)
CASSFPLREYGYTF

SEQ ID NO: 375347 - protein, 14 aa, Homo sapiens
  CDR3 for alpha chain variable domain of TCR clone 187674 (TRAV35, TRAJ33)
CWPRGRDSNYQLIW

SEQ ID NO: 375348 - protein, 16 aa, Homo sapiens
  CDR3 for beta chain variable domain of TCR clone 187674 (TRBV11-2, TRBJ1-2)
CASSLDTGGADYGYTF

SEQ ID NO: 375349 - protein, 16 aa, Homo sapiens
  CDR3 for alpha chain variable domain of TCR clone 187675 (TRAV12-1, TRAJ53)
CVVTSVAGGSNYKLTF

SEQ ID NO: 375350 - protein, 20 aa, Homo sapiens
  CDR3 for beta chain variable domain of TCR clone 187675 (TRBV28, TRBJ2-1)
CASAPIGRSPGLAGGNEQFF

SEQ ID NO: 375351 - protein, 14 aa, Homo sapiens
  CDR3 for alpha chain variable domain of TCR clone 187676 (TRAV29/DV5, TRAJ20)
CAASAPIEDYKLSF

SEQ ID NO: 375352 - protein, 13 aa, Homo sapiens
  CDR3 for beta chain variable domain of TCR clone 187676 (TRBV20-1, TRBJ1-1)
CSAGTVGNTEAFF

SEQ ID NO: 375353 - protein, 14 aa, Homo sapiens
  CDR3 for alpha chain variable domain of TCR clone 187677 (TRAV17, TRAJ5)
CATVALTGRRARTF

SEQ ID NO: 375354 - protein, 14 aa, Homo sapiens
  CDR3 for beta chain variable domain of TCR clone 187677 (TRBV28, TRBJ2-7)
CASSPYGMAYEQYF

SEQ ID NO: 375355 - protein, 10 aa, Homo sapiens
  CDR3 for alpha chain variable domain of TCR clone 187678 (TRAV21, TRAJ35)
CAVFGNVLHC

SEQ ID NO: 375356 - protein, 17 aa, Homo sapiens
  CDR3 for beta chain variable domain of TCR clone 187678 (TRBV7-2, TRBJ2-2)
CASSPRGAGEGTGELFC

SEQ ID NO: 375357 - protein, 15 aa, Homo sapiens
  CDR3 for alpha chain variable domain of TCR clone 187679 (TRAV23/DV6, TRAJ33)
CAASNSGGGNYQLFW

SEQ ID NO: 375358 - protein, 14 aa, Homo sapiens
  CDR3 for beta chain variable domain of TCR clone 187679 (TRBV7-2, TRBJ2-7)
CASSLYPGRYEQYF

SEQ ID NO: 375359 - protein, 14 aa, Homo sapiens
  CDR3 for alpha chain variable domain of TCR clone 187680 (TRAV12-1, TRAJ10)
CVAILTGGGNRLTF

SEQ ID NO: 375360 - protein, 15 aa, Homo sapiens
  CDR3 for beta chain variable domain of TCR clone 187680 (TRBV20-1, TRBJ2-7)
CSARGFRPQTYEQYF

SEQ ID NO: 375361 - protein, 18 aa, Homo sapiens
  CDR3 for alpha chain variable domain of TCR clone 187681 (TRAV13-1, TRAJ52)
CAAKNPNAGGTSYGKLTF

SEQ ID NO: 375362 - protein, 13 aa, Homo sapiens
  CDR3 for beta chain variable domain of TCR clone 187681 (TRBV2, TRBJ1-2)
CASTLGTGDGYTF

SEQ ID NO: 375363 - protein, 11 aa, Homo sapiens
  CDR3 for alpha chain variable domain of TCR clone 187682 (TRAV2, TRAJ33)
CAVDSNYELIW

SEQ ID NO: 375364 - protein, 13 aa, Homo sapiens
  CDR3 for beta chain variable domain of TCR clone 187682 (TRBV10-3, TRBJ2-7)
CASKLAVNYEQYF

SEQ ID NO: 375365 - protein, 18 aa, Homo sapiens
  CDR3 for alpha chain variable domain of TCR clone 187683 (TRAV21, TRAJ52)
CAVVPSPAGGTSYGKLTF

SEQ ID NO: 375366 - protein, 17 aa, Homo sapiens
  CDR3 for beta chain variable domain of TCR clone 187683 (TRBV13, TRBJ2-3)
CASSLSRVAGGRNTQYF

SEQ ID NO: 375367 - protein, 16 aa, Homo sapiens
  CDR3 for alpha chain variable domain of TCR clone 187684 (TRAV3, TRAJ37)
CAVRVRGSGNTGKLIF

SEQ ID NO: 375368 - protein, 11 aa, Homo sapiens
  CDR3 for beta chain variable domain of TCR clone 187684 (TRBV7-8, TRBJ2-7)
CASSLSLEQYF

SEQ ID NO: 375369 - protein, 13 aa, Homo sapiens
  CDR3 for alpha chain variable domain of TCR clone 187685 (TRAV12-3, TRAJ33)
CAMSVNSNYQLIW

SEQ ID NO: 375370 - protein, 12 aa, Homo sapiens
  CDR3 for beta chain variable domain of TCR clone 187685 (TRBV7-2, TRBJ2-2)
CQQLSSHRELFF

SEQ ID NO: 375371 - protein, 11 aa, Homo sapiens
  CDR3 for alpha chain variable domain of TCR clone 187686 (TRAV1-1, TRAJ30)
CAQNRDDKIIF

SEQ ID NO: 375372 - protein, 19 aa, Homo sapiens
  CDR3 for beta chain variable domain of TCR clone 187686 (TRBV25-1, TRBJ2-2)
CAILVYRVDRGRKTGELFF

SEQ ID NO: 375373 - protein, 14 aa, Homo sapiens
  CDR3 for alpha chain variable domain of TCR clone 187687 (TRAV1-2, TRAJ8)
CAVREDTGFQKLVF

SEQ ID NO: 375374 - protein, 14 aa, Homo sapiens
  CDR3 for beta chain variable domain of TCR clone 187687 (TRBV7-7, TRBJ2-2)
CASRAGLNTGELFF

SEQ ID NO: 375375 - protein, 13 aa, Homo sapiens
  CDR3 for alpha chain variable domain of TCR clone 187688 (TRAV27, TRAJ45)
CRSSGGGAEGLTF

SEQ ID NO: 375376 - protein, 15 aa, Homo sapiens
  CDR3 for beta chain variable domain of TCR clone 187688 (TRBV3-1, TRBJ2-7)
CASSQVRQGAYEQYF

SEQ ID NO: 375377 - protein, 18 aa, Homo sapiens
  CDR3 for alpha chain variable domain of TCR clone 187689 (TRAV26-1, TRAJ52)
CIVRGRNAGGTSYGKLTF

SEQ ID NO: 375378 - protein, 15 aa, Homo sapiens
  CDR3 for beta chain variable domain of TCR clone 187689 (TRBV5-7, TRBJ1-2)
CASSLGVAANYGYTF

SEQ ID NO: 375379 - protein, 11 aa, Homo sapiens
  CDR3 for alpha chain variable domain of TCR clone 187690 (TRAV13-1, TRAJ52)
SGGTSYGKLTF

SEQ ID NO: 375380 - protein, 16 aa, Homo sapiens
  CDR3 for beta chain variable domain of TCR clone 187690 (TRBV28, TRBJ2-7)
CASSPWVATGDLSQYF

SEQ ID NO: 375381 - protein, 12 aa, Homo sapiens
  CDR3 for alpha chain variable domain of TCR clone 187691 (TRAV12-3, TRAJ17)
CAMTLTGNKLTF

SEQ ID NO: 375382 - protein, 15 aa, Homo sapiens
  CDR3 for beta chain variable domain of TCR clone 187691 (TRBV20-1, TRBJ2-7)
CSAGDRVSGLDEQYF

SEQ ID NO: 375383 - protein, 10 aa, Homo sapiens
  CDR3 for alpha chain variable domain of TCR clone 187692 (TRAV21, TRAJ48)
CCGRNEKLTF

SEQ ID NO: 375384 - protein, 16 aa, Homo sapiens
  CDR3 for beta chain variable domain of TCR clone 187692 (TRBV19, TRBJ2-1)
CASSSKGTRSYNEQFF

SEQ ID NO: 375385 - protein, 14 aa, Homo sapiens
  CDR3 for alpha chain variable domain of TCR clone 187693 (TRAV8-4, TRAJ53)
CAVSFGGSNYKLTF

SEQ ID NO: 375386 - protein, 14 aa, Homo sapiens
  CDR3 for beta chain variable domain of TCR clone 187693 (TRBV20-1, TRBJ1-1)
CSAQTRIGGTEAFF

SEQ ID NO: 375387 - protein, 17 aa, Homo sapiens
  CDR3 for alpha chain variable domain of TCR clone 187694 (TRAV3, TRAJ6)
CAVRDGPRAGGSYITKL

SEQ ID NO: 375388 - protein, 20 aa, Homo sapiens
  CDR3 for beta chain variable domain of TCR clone 187694 (TRBV28, TRBJ2-1)
CASTPIGRSPGLAGGNEQFF

SEQ ID NO: 375389 - protein, 19 aa, Homo sapiens
  CDR3 for alpha chain variable domain of TCR clone 187695 (TRAV3, TRAJ6)
CAVRDGPGQEEATYLHLDE

SEQ ID NO: 375390 - protein, 14 aa, Homo sapiens
  CDR3 for beta chain variable domain of TCR clone 187695 (TRBV7-2, TRBJ2-7)
CASSPKTSFYEQYF

SEQ ID NO: 375391 - protein, 15 aa, Homo sapiens
  CDR3 for alpha chain variable domain of TCR clone 187696 (TRAV12-1, TRAJ45)
CVVLSGGGGDDGLTF

SEQ ID NO: 375392 - protein, 16 aa, Homo sapiens
  CDR3 for beta chain variable domain of TCR clone 187696 (TRBV6-5, TRBJ2-1)
CASSETLAGHYNEQFF

SEQ ID NO: 375393 - protein, 11 aa, Homo sapiens
  CDR3 for alpha chain variable domain of TCR clone 187697 (TRAV3, TRAJ21)
CAVGNFNKFYF

SEQ ID NO: 375394 - protein, 11 aa, Homo sapiens
  CDR3 for beta chain variable domain of TCR clone 187697 (TRBV7-9, TRBJ2-3)
CASSPTDTQYF

SEQ ID NO: 375395 - protein, 10 aa, Homo sapiens
  CDR3 for alpha chain variable domain of TCR clone 187698 (TRAV1-2, TRAJ23)
CAAWAGKLIF

SEQ ID NO: 375396 - protein, 14 aa, Homo sapiens
  CDR3 for beta chain variable domain of TCR clone 187698 (TRBV7-2, TRBJ2-7)
CASSPKTSFYEQYF

SEQ ID NO: 375397 - protein, 15 aa, Homo sapiens
  CDR3 for alpha chain variable domain of TCR clone 187699 (TRAV17, TRAJ35)
CATALVIGFGNVLHC

SEQ ID NO: 375398 - protein, 15 aa, Homo sapiens
  CDR3 for beta chain variable domain of TCR clone 187699 (TRBV7-9, TRBJ2-7)
CASSLALAEAYEQYF

SEQ ID NO: 375399 - protein, 14 aa, Homo sapiens
  CDR3 for alpha chain variable domain of TCR clone 187700 (TRAV14/DV4, TRAJ23)
CAMRYYNQDGKLIF

SEQ ID NO: 375400 - protein, 17 aa, Homo sapiens
  CDR3 for beta chain variable domain of TCR clone 187700 (TRBV7-2, TRBJ2-2)
CASSPRGAGEGTGELFL

SEQ ID NO: 375401 - protein, 13 aa, Homo sapiens
  CDR3 for alpha chain variable domain of TCR clone 187701 (TRAV8-6, TRAJ50)
CAVIKTSYDKVIF

SEQ ID NO: 375402 - protein, 13 aa, Homo sapiens
  CDR3 for beta chain variable domain of TCR clone 187701 (TRBV7-2, TRBJ1-1)
CASNLKGAKVAFF

SEQ ID NO: 375403 - protein, 13 aa, Homo sapiens
  CDR3 for alpha chain variable domain of TCR clone 187702 (TRAV21, TRAJ57)
CAVTQVGSEKLGF

SEQ ID NO: 375404 - protein, 16 aa, Homo sapiens
  CDR3 for beta chain variable domain of TCR clone 187702 (TRBV29-1, TRBJ2-7)
CSVEDAEDGTAYEQYF

SEQ ID NO: 375405 - protein, 12 aa, Homo sapiens
  CDR3 for alpha chain variable domain of TCR clone 187703 (TRAV13-1, TRAJ11)
CAGPSGYGTLTF

SEQ ID NO: 375406 - protein, 13 aa, Homo sapiens
  CDR3 for beta chain variable domain of TCR clone 187703 (TRBV12-4, TRBJ2-1)
CASSVSPSNEQFF

SEQ ID NO: 375407 - protein, 15 aa, Homo sapiens
  CDR3 for alpha chain variable domain of TCR clone 187704 (TRAV3, TRAJ5)
CAVRDLDTGRRALTF

SEQ ID NO: 375408 - protein, 15 aa, Homo sapiens
  CDR3 for beta chain variable domain of TCR clone 187704 (TRBV4-1, TRBJ1-4)
CASSDTGGTNEKLFF

SEQ ID NO: 375409 - protein, 14 aa, Homo sapiens
  CDR3 for alpha chain variable domain of TCR clone 187705 (TRAV12-2, TRAJ13)
CAVKKTGGYQKVTF

SEQ ID NO: 375410 - protein, 13 aa, Homo sapiens
  CDR3 for beta chain variable domain of TCR clone 187705 (TRBV6-1, TRBJ2-1)
CASSPDRNNEQFF

SEQ ID NO: 375411 - protein, 13 aa, Homo sapiens
  CDR3 for alpha chain variable domain of TCR clone 187706 (TRAV23/DV6, TRAJ12)
CPPRVDSSYKLIF

SEQ ID NO: 375412 - protein, 12 aa, Homo sapiens
  CDR3 for beta chain variable domain of TCR clone 187706 (TRBV7-6, TRBJ2-5)
CASSLSQETQYF

SEQ ID NO: 375413 - protein, 14 aa, Homo sapiens
  CDR3 for alpha chain variable domain of TCR clone 187707 (TRAV8-3, TRAJ4)
CAVGAAGGYNKLIF

SEQ ID NO: 375414 - protein, 18 aa, Homo sapiens
  CDR3 for beta chain variable domain of TCR clone 187707 (TRBV6-5, TRBJ1-1)
CASSYLAPGGTGGTEAFF

SEQ ID NO: 375415 - protein, 15 aa, Homo sapiens
  CDR3 for alpha chain variable domain of TCR clone 187708 (TRAV3, TRAJ4)
CAVRDGIGGYNKLIF

SEQ ID NO: 375416 - protein, 16 aa, Homo sapiens
  CDR3 for beta chain variable domain of TCR clone 187708 (TRBV27, TRBJ2-2)
CASSSSGVSNTGELFF

SEQ ID NO: 375417 - protein, 14 aa, Homo sapiens
  CDR3 for alpha chain variable domain of TCR clone 187709 (TRAV26-1, TRAJ38)
CVADNAGNNRKLIW

SEQ ID NO: 375418 - protein, 13 aa, Homo sapiens
  CDR3 for beta chain variable domain of TCR clone 187709 (TRBV7-9, TRBJ1-2)
CASSLKQNYGYTF

SEQ ID NO: 375419 - protein, 23 aa, Homo sapiens
  CDR3 for alpha chain variable domain of TCR clone 187710 (TRAV12-2, TRAJ22)
CAVSFRVHPGPPIVSGSARHLTF

SEQ ID NO: 375420 - protein, 13 aa, Homo sapiens
  CDR3 for beta chain variable domain of TCR clone 187710 (TRBV12-4, TRBJ1-2)
CASSLDSNYGYTF

SEQ ID NO: 375421 - protein, 13 aa, Homo sapiens
  CDR3 for alpha chain variable domain of TCR clone 187711 (TRAV12-3, TRAJ7)
CAMSASGNNRLAF

SEQ ID NO: 375422 - protein, 13 aa, Homo sapiens
  CDR3 for beta chain variable domain of TCR clone 187711 (TRBV12-5, TRBJ2-3)
CASGDRQSDTQYF

SEQ ID NO: 375423 - protein, 12 aa, Homo sapiens
  CDR3 for alpha chain variable domain of TCR clone 187712 (TRAV10, TRAJ43)
CVVVRVGNDMRF

SEQ ID NO: 375424 - protein, 13 aa, Homo sapiens
  CDR3 for beta chain variable domain of TCR clone 187712 (TRBV7-9, TRBJ1-2)
CASSLKQNYGYTF

SEQ ID NO: 375425 - protein, 14 aa, Homo sapiens
  CDR3 for alpha chain variable domain of TCR clone 187713 (TRAV2, TRAJ37)
CAVDFTSDTGKLIF

SEQ ID NO: 375426 - protein, 20 aa, Homo sapiens
  CDR3 for beta chain variable domain of TCR clone 187713 (TRBV7-8, TRBJ2-2)
CASSHLFPGPTIHITGELFF

SEQ ID NO: 375427 - protein, 17 aa, Homo sapiens
  CDR3 for alpha chain variable domain of TCR clone 187714 (TRAV12-1, TRAJ13)
CVVNKRGELWGLPESYL

SEQ ID NO: 375428 - protein, 17 aa, Homo sapiens
  CDR3 for beta chain variable domain of TCR clone 187714 (TRBV28, TRBJ2-5)
CASSTPEGDALQETQYF

SEQ ID NO: 375429 - protein, 11 aa, Homo sapiens
  CDR3 for alpha chain variable domain of TCR clone 187715 (TRAV13-1, TRAJ49)
CACVGGNQFYF

SEQ ID NO: 375430 - protein, 11 aa, Homo sapiens
  CDR3 for beta chain variable domain of TCR clone 187715 (TRBV29-1, TRBJ2-5)
CSEDRTGTQYF

SEQ ID NO: 375431 - protein, 15 aa, Homo sapiens
  CDR3 for alpha chain variable domain of TCR clone 187716 (TRAV26-1, TRAJ22)
CIVRVSFWFCTATDL

SEQ ID NO: 375432 - protein, 16 aa, Homo sapiens
  CDR3 for beta chain variable domain of TCR clone 187716 (TRBV24-1, TRBJ2-3)
CATSDPGTGATDTQYF

SEQ ID NO: 375433 - protein, 14 aa, Homo sapiens
  CDR3 for alpha chain variable domain of TCR clone 187717 (TRAV13-1, TRAJ35)
CAASKGGFGNVLHC

SEQ ID NO: 375434 - protein, 16 aa, Homo sapiens
  CDR3 for beta chain variable domain of TCR clone 187717 (TRBV7-8, TRBJ2-6)
CASRVGDSSGANVLTF

SEQ ID NO: 375435 - protein, 13 aa, Homo sapiens
  CDR3 for alpha chain variable domain of TCR clone 187718 (TRAV12-3, TRAJ9)
CAMSADGGFKTIF

SEQ ID NO: 375436 - protein, 15 aa, Homo sapiens
  CDR3 for beta chain variable domain of TCR clone 187718 (TRBV20-1, TRBJ2-7)
CSARDQVSGMDEQYF

SEQ ID NO: 375437 - protein, 16 aa, Homo sapiens
  CDR3 for alpha chain variable domain of TCR clone 187719 (TRAV16, TRAJ52)
CALSGVGGTSYGKLTF

SEQ ID NO: 375438 - protein, 14 aa, Homo sapiens
  CDR3 for beta chain variable domain of TCR clone 187719 (TRBV19, TRBJ1-2)
CASSLQGQAYGYIF

SEQ ID NO: 375439 - protein, 13 aa, Homo sapiens
  CDR3 for alpha chain variable domain of TCR clone 187720 (TRAV8-2, TRAJ43)
CFASDQGDNDMRF

SEQ ID NO: 375440 - protein, 12 aa, Homo sapiens
  CDR3 for beta chain variable domain of TCR clone 187720 (TRBV7-8, TRBJ2-7)
CASSPGDREQYF

SEQ ID NO: 375441 - protein, 16 aa, Homo sapiens
  CDR3 for alpha chain variable domain of TCR clone 187721 (TRAV12-3, TRAJ53)
CAMSPGSGGSTYQLTF

SEQ ID NO: 375442 - protein, 11 aa, Homo sapiens
  CDR3 for beta chain variable domain of TCR clone 187721 (TRBV29-1, TRBJ2-5)
CSEDRTGTQYF

SEQ ID NO: 375443 - protein, 12 aa, Homo sapiens
  CDR3 for alpha chain variable domain of TCR clone 187722 (TRAV12-1, TRAJ40)
CVVYSGTYKYIL

SEQ ID NO: 375444 - protein, 18 aa, Homo sapiens
  CDR3 for beta chain variable domain of TCR clone 187722 (TRBV11-2, TRBJ2-3)
CASSFGGASRGAPNTQYF

SEQ ID NO: 375445 - protein, 15 aa, Homo sapiens
  CDR3 for alpha chain variable domain of TCR clone 187723 (TRAV29/DV5, TRAJ29)
CAASERSSGNTPLVF

SEQ ID NO: 375446 - protein, 17 aa, Homo sapiens
  CDR3 for beta chain variable domain of TCR clone 187723 (TRBV4-1, TRBJ1-4)
CDSSQEGPRGVEEKLFF

SEQ ID NO: 375447 - protein, 14 aa, Homo sapiens
  CDR3 for alpha chain variable domain of TCR clone 187724 (TRAV1-2, TRAJ6)
CAVSLSGGSYIPTF

SEQ ID NO: 375448 - protein, 15 aa, Homo sapiens
  CDR3 for beta chain variable domain of TCR clone 187724 (TRBV28, TRBJ2-7)
CASSPGGRGFYDQYF

SEQ ID NO: 375449 - protein, 15 aa, Homo sapiens
  CDR3 for alpha chain variable domain of TCR clone 187725 (TRAV2, TRAJ44)
WAVEAYTGTASKLTF

SEQ ID NO: 375450 - protein, 17 aa, Homo sapiens
  CDR3 for beta chain variable domain of TCR clone 187725 (TRBV12-4, TRBJ2-1)
CASSPGLAGGRINEQFF

SEQ ID NO: 375451 - protein, 10 aa, Homo sapiens
  CDR3 for alpha chain variable domain of TCR clone 187726 (TRAV8-4, TRAJ43)
CAVSANDMRF

SEQ ID NO: 375452 - protein, 15 aa, Homo sapiens
  CDR3 for beta chain variable domain of TCR clone 187726 (TRBV5-1, TRBJ2-3)
CASSVTSGSTDTQYF

SEQ ID NO: 375453 - protein, 15 aa, Homo sapiens
  CDR3 for alpha chain variable domain of TCR clone 187727 (TRAV26-1, TRAJ22)
CIVRVSFWFCKATAL

SEQ ID NO: 375454 - protein, 13 aa, Homo sapiens
  CDR3 for beta chain variable domain of TCR clone 187727 (TRBV7-9, TRBJ1-2)
CASSLKQNYGYSF

SEQ ID NO: 375455 - protein, 16 aa, Homo sapiens
  CDR3 for alpha chain variable domain of TCR clone 187728 (TRAV16, TRAJ4)
CALSRMFSGGYNKLIF

SEQ ID NO: 375456 - protein, 16 aa, Homo sapiens
  CDR3 for beta chain variable domain of TCR clone 187728 (TRBV12-4, TRBJ1-5)
CASSRPVGGSNQPQRF

SEQ ID NO: 375457 - protein, 17 aa, Homo sapiens
  CDR3 for alpha chain variable domain of TCR clone 187729 (TRAV8-6, TRAJ58)
CAVSFWVGETSGSRLSF

SEQ ID NO: 375458 - protein, 14 aa, Homo sapiens
  CDR3 for beta chain variable domain of TCR clone 187729 (TRBV4-2, TRBJ2-1)
CASGLDRAYNEQFF

SEQ ID NO: 375459 - protein, 16 aa, Homo sapiens
  CDR3 for alpha chain variable domain of TCR clone 187730 (TRAV26-1, TRAJ3)
CCVLLHRQSSASKIIF

SEQ ID NO: 375460 - protein, 13 aa, Homo sapiens
  CDR3 for beta chain variable domain of TCR clone 187730 (TRBV12-4, TRBJ2-7)
CASSPTETYEQYF

SEQ ID NO: 375461 - protein, 17 aa, Homo sapiens
  CDR3 for alpha chain variable domain of TCR clone 187731 (TRAV3, TRAJ6)
CPVRDGPRAGGSYIPTL

SEQ ID NO: 375462 - protein, 20 aa, Homo sapiens
  CDR3 for beta chain variable domain of TCR clone 187731 (TRBV28, TRBJ2-1)
CASTPIGRSPGLAGGNEQFF

SEQ ID NO: 375463 - protein, 12 aa, Homo sapiens
  CDR3 for alpha chain variable domain of TCR clone 187732 (TRAV16, TRAJ10)
CSRTGGGNKLTF

SEQ ID NO: 375464 - protein, 13 aa, Homo sapiens
  CDR3 for beta chain variable domain of TCR clone 187732 (TRBV10-3, TRBJ2-7)
SASKLAVNYEQYF

SEQ ID NO: 375465 - protein, 12 aa, Homo sapiens
  CDR3 for alpha chain variable domain of TCR clone 187733 (TRAV13-2, TRAJ23)
CAERHRGGKLIF

SEQ ID NO: 375466 - protein, 15 aa, Homo sapiens
  CDR3 for beta chain variable domain of TCR clone 187733 (TRBV9, TRBJ1-6)
CGSSVAGTGDSPLHF

SEQ ID NO: 375467 - protein, 15 aa, Homo sapiens
  CDR3 for alpha chain variable domain of TCR clone 187734 (TRAV25, TRAJ57)
CAGSSIQGGSEKLVF

SEQ ID NO: 375468 - protein, 13 aa, Homo sapiens
  CDR3 for beta chain variable domain of TCR clone 187734 (TRBV7-2, TRBJ1-2)
CASSATGVGGYTF

SEQ ID NO: 375469 - protein, 13 aa, Homo sapiens
  CDR3 for alpha chain variable domain of TCR clone 187735 (TRAV20, TRAJ42)
CAVQGGSQGNLIF

SEQ ID NO: 375470 - protein, 15 aa, Homo sapiens
  CDR3 for beta chain variable domain of TCR clone 187735 (TRBV10-1, TRBJ2-1)
CASIEWRGTYNEQFF

SEQ ID NO: 375471 - protein, 16 aa, Homo sapiens
  CDR3 for alpha chain variable domain of TCR clone 187736 (TRAV3, TRAJ37)
CAVRGKGSGNTGKLIF

SEQ ID NO: 375472 - protein, 14 aa, Homo sapiens
  CDR3 for beta chain variable domain of TCR clone 187736 (TRBV11-2, TRBJ2-3)
CASSRLARTDTQYF

SEQ ID NO: 375473 - protein, 13 aa, Homo sapiens
  CDR3 for alpha chain variable domain of TCR clone 187737 (TRAV13-2, TRAJ15)
CAERPQAGTAMIF

SEQ ID NO: 375474 - protein, 15 aa, Homo sapiens
  CDR3 for beta chain variable domain of TCR clone 187737 (TRBV11-2, TRBJ2-7)
CASRFPGTGGYEQYF

SEQ ID NO: 375475 - protein, 17 aa, Homo sapiens
  CDR3 for alpha chain variable domain of TCR clone 187738 (TRAV4, TRAJ18)
CLVGERSVGSTLGRLYF

SEQ ID NO: 375476 - protein, 13 aa, Homo sapiens
  CDR3 for beta chain variable domain of TCR clone 187738 (TRBV19, TRBJ1-4)
CASPTQGNEKLFF

SEQ ID NO: 375477 - protein, 13 aa, Homo sapiens
  CDR3 for alpha chain variable domain of TCR clone 187739 (TRAV1-2, TRAJ20)
CAVRDGNDYKPSF

SEQ ID NO: 375478 - protein, 14 aa, Homo sapiens
  CDR3 for beta chain variable domain of TCR clone 187739 (TRBV7-2, TRBJ2-3)
CQQLRGGGRDTQYF

SEQ ID NO: 375479 - protein, 14 aa, Homo sapiens
  CDR3 for alpha chain variable domain of TCR clone 187740 (TRAV1-2, TRAJ16)
CAVNRFSDGPKLLF

SEQ ID NO: 375480 - protein, 20 aa, Homo sapiens
  CDR3 for beta chain variable domain of TCR clone 187740 (TRBV11-2, TRBJ2-2)
LRTRPCISVPAASLPGSCFF

SEQ ID NO: 375481 - protein, 14 aa, Homo sapiens
  CDR3 for alpha chain variable domain of TCR clone 187741 (TRAV14/DV4, TRAJ41)
CARGGPDSGNALNF

SEQ ID NO: 375482 - protein, 15 aa, Homo sapiens
  CDR3 for beta chain variable domain of TCR clone 187741 (TRBV19, TRBJ2-1)
CASSIQATSYNEQFF

SEQ ID NO: 375483 - protein, 12 aa, Homo sapiens
  CDR3 for alpha chain variable domain of TCR clone 187742 (TRAV12-1, TRAJ40)
CVVYSGTYKYIF

SEQ ID NO: 375484 - protein, 15 aa, Homo sapiens
  CDR3 for beta chain variable domain of TCR clone 187742 (TRBV15, TRBJ1-1)
CATSLQGGRNTEAFF

SEQ ID NO: 375485 - protein, 17 aa, Homo sapiens
  CDR3 for alpha chain variable domain of TCR clone 187743 (TRAV3, TRAJ42)
CAVRYRDYGGSQGNLIF

SEQ ID NO: 375486 - protein, 12 aa, Homo sapiens
  CDR3 for beta chain variable domain of TCR clone 187743 (TRBV11-2, TRBJ2-1)
CASSPGNNEQFF

SEQ ID NO: 375487 - protein, 12 aa, Homo sapiens
  CDR3 for alpha chain variable domain of TCR clone 187744 (TRAV8-4, TRAJ43)
CAVSVSNNDMRF

SEQ ID NO: 375488 - protein, 14 aa, Homo sapiens
  CDR3 for beta chain variable domain of TCR clone 187744 (TRBV7-2, TRBJ2-7)
CASRSQGAAYEQYF

SEQ ID NO: 375489 - protein, 12 aa, Homo sapiens
  CDR3 for alpha chain variable domain of TCR clone 187745 (TRAV20, TRAJ36)
CAVLTGANNLFF

SEQ ID NO: 375490 - protein, 16 aa, Homo sapiens
  CDR3 for beta chain variable domain of TCR clone 187745 (TRBV5-5, TRBJ1-6)
CASSYLSTGFNSTLHF

SEQ ID NO: 375491 - protein, 14 aa, Homo sapiens
  CDR3 for alpha chain variable domain of TCR clone 187746 (TRAV2, TRAJ9)
CAVEDRSGGFKTIF

SEQ ID NO: 375492 - protein, 15 aa, Homo sapiens
  CDR3 for beta chain variable domain of TCR clone 187746 (TRBV19, TRBJ2-1)
CASSSTGVPLDEQFF

SEQ ID NO: 375493 - protein, 15 aa, Homo sapiens
  CDR3 for alpha chain variable domain of TCR clone 187747 (TRAV3, TRAJ20)
CAVRDIKLSDYKLSF

SEQ ID NO: 375494 - protein, 15 aa, Homo sapiens
  CDR3 for beta chain variable domain of TCR clone 187747 (TRBV11-2, TRBJ1-6)
CASTGFGTAVSPLHF

SEQ ID NO: 375495 - protein, 16 aa, Homo sapiens
  CDR3 for alpha chain variable domain of TCR clone 187748 (TRAV30, TRAJ24)
CCTEIVDADSWVKFQF

SEQ ID NO: 375496 - protein, 14 aa, Homo sapiens
  CDR3 for beta chain variable domain of TCR clone 187748 (TRBV12-5, TRBJ2-5)
CASGSRTHQETQYF

SEQ ID NO: 375497 - protein, 16 aa, Homo sapiens
  CDR3 for alpha chain variable domain of TCR clone 187749 (TRAV3, TRAJ27)
CAVRDPQGTNAVKSTF

SEQ ID NO: 375498 - protein, 15 aa, Homo sapiens
  CDR3 for beta chain variable domain of TCR clone 187749 (TRBV20-1, TRBJ2-7)
CSARDRVSGMDEQYF

SEQ ID NO: 375499 - protein, 15 aa, Homo sapiens
  CDR3 for alpha chain variable domain of TCR clone 187750 (TRAV8-6, TRAJ11)
CAVSDRRSGYSTLTF

SEQ ID NO: 375500 - protein, 15 aa, Homo sapiens
  CDR3 for beta chain variable domain of TCR clone 187750 (TRBV7-3, TRBJ2-1)
CASSPTGGNRNEQFF

SEQ ID NO: 375501 - protein, 16 aa, Homo sapiens
  CDR3 for alpha chain variable domain of TCR clone 187751 (TRAV4, TRAJ22)
CLVGDLYSGSARQLTF

SEQ ID NO: 375502 - protein, 16 aa, Homo sapiens
  CDR3 for beta chain variable domain of TCR clone 187751 (TRBV19, TRBJ2-3)
CASSPGAASRTDTQYF

SEQ ID NO: 375503 - protein, 14 aa, Homo sapiens
  CDR3 for alpha chain variable domain of TCR clone 187752 (TRAV21, TRAJ15)
CAVSLNRAGTALFF

SEQ ID NO: 375504 - protein, 11 aa, Homo sapiens
  CDR3 for beta chain variable domain of TCR clone 187752 (TRBV20-1, TRBJ2-7)
CSARTSYEQYF

SEQ ID NO: 375505 - protein, 10 aa, Homo sapiens
  CDR3 for alpha chain variable domain of TCR clone 187753 (TRAV1-2, TRAJ18)
CAVRGEAQPW

SEQ ID NO: 375506 - protein, 17 aa, Homo sapiens
  CDR3 for beta chain variable domain of TCR clone 187753 (TRBV13, TRBJ2-3)
CASSLSRVAGGRNTQYF

SEQ ID NO: 375507 - protein, 14 aa, Homo sapiens
  CDR3 for alpha chain variable domain of TCR clone 187754 (TRAV3, TRAJ9)
CAVRGNTGGFKTIF

SEQ ID NO: 375508 - protein, 14 aa, Homo sapiens
  CDR3 for beta chain variable domain of TCR clone 187754 (TRBV6-1, TRBJ2-1)
CASAKDGFYNEQFF

SEQ ID NO: 375509 - protein, 14 aa, Homo sapiens
  CDR3 for alpha chain variable domain of TCR clone 187755 (TRAV13-2, TRAJ43)
CAEIPTYYNNDMRF

SEQ ID NO: 375510 - protein, 15 aa, Homo sapiens
  CDR3 for beta chain variable domain of TCR clone 187755 (TRBV7-9, TRBJ2-2)
CASGPLDTFPGELFF

SEQ ID NO: 375511 - protein, 14 aa, Homo sapiens
  CDR3 for alpha chain variable domain of TCR clone 187756 (TRAV2, TRAJ9)
CAVEDRSGGFKTIF

SEQ ID NO: 375512 - protein, 14 aa, Homo sapiens
  CDR3 for beta chain variable domain of TCR clone 187756 (TRBV19, TRBJ2-1)
CACPTFVLSGEQFF

SEQ ID NO: 375513 - protein, 12 aa, Homo sapiens
  CDR3 for alpha chain variable domain of TCR clone 187757 (TRAV12-3, TRAJ20)
CAMVRGDYKLSF

SEQ ID NO: 375514 - protein, 16 aa, Homo sapiens
  CDR3 for beta chain variable domain of TCR clone 187757 (TRBV19, TRBJ2-1)
CASSKAGPSSYNEQSF

SEQ ID NO: 375515 - protein, 15 aa, Homo sapiens
  CDR3 for alpha chain variable domain of TCR clone 187758 (TRAV21, TRAJ53)
CATLNSGGSNYKLTF

SEQ ID NO: 375516 - protein, 15 aa, Homo sapiens
  CDR3 for beta chain variable domain of TCR clone 187758 (TRBV20-1, TRBJ2-7)
CSARDRVSGMDEQSF

SEQ ID NO: 375517 - protein, 15 aa, Homo sapiens
  CDR3 for alpha chain variable domain of TCR clone 187759 (TRAV27, TRAJ39)
ASTSVQENAGNMLTF

SEQ ID NO: 375518 - protein, 14 aa, Homo sapiens
  CDR3 for beta chain variable domain of TCR clone 187759 (TRBV15, TRBJ2-7)
CATSPNRGLYEQYF

SEQ ID NO: 375519 - protein, 14 aa, Homo sapiens
  CDR3 for alpha chain variable domain of TCR clone 187760 (TRAV12-1, TRAJ17)
CVVTYKAAGNKLTF

SEQ ID NO: 375520 - protein, 17 aa, Homo sapiens
  CDR3 for beta chain variable domain of TCR clone 187760 (TRBV20-1, TRBJ2-1)
CRASSSGLAGSYNEQFF

SEQ ID NO: 375521 - protein, 18 aa, Homo sapiens
  CDR3 for alpha chain variable domain of TCR clone 187761 (TRAV9-2, TRAJ52)
CALSRHNAGGTSYGKLTF

SEQ ID NO: 375522 - protein, 14 aa, Homo sapiens
  CDR3 for beta chain variable domain of TCR clone 187761 (TRBV11-2, TRBJ2-3)
CASSRLARTDTQYF

SEQ ID NO: 375523 - protein, 17 aa, Homo sapiens
  CDR3 for alpha chain variable domain of TCR clone 187762 (TRAV3, TRAJ6)
CAVRDGPRAGGSSIPTF

SEQ ID NO: 375524 - protein, 14 aa, Homo sapiens
  CDR3 for beta chain variable domain of TCR clone 187762 (TRBV7-2, TRBJ2-7)
CASRPKTSFYEQYF

SEQ ID NO: 375525 - protein, 16 aa, Homo sapiens
  CDR3 for alpha chain variable domain of TCR clone 187763 (TRAV12-1, TRAJ42)
CVVTPYYGGSQGNLIF

SEQ ID NO: 375526 - protein, 12 aa, Homo sapiens
  CDR3 for beta chain variable domain of TCR clone 187763 (TRBV5-7, TRBJ1-1)
CASSLGRGKAFF

SEQ ID NO: 375527 - protein, 15 aa, Homo sapiens
  CDR3 for alpha chain variable domain of TCR clone 187764 (TRAV3, TRAJ27)
CAVRDPLTNAGKSTF

SEQ ID NO: 375528 - protein, 15 aa, Homo sapiens
  CDR3 for beta chain variable domain of TCR clone 187764 (TRBV28, TRBJ2-1)
CASSIIAGGRSEQFF

SEQ ID NO: 375529 - protein, 11 aa, Homo sapiens
  CDR3 for alpha chain variable domain of TCR clone 187765 (TRAV3, TRAJ21)
CAVGNFNRFHF

SEQ ID NO: 375530 - protein, 16 aa, Homo sapiens
  CDR3 for beta chain variable domain of TCR clone 187765 (TRBV19, TRBJ2-1)
CASSKAGPSSYNEQFF

SEQ ID NO: 375531 - protein, 15 aa, Homo sapiens
  CDR3 for alpha chain variable domain of TCR clone 187766 (TRAV8-3, TRAJ13)
CAVAPNSGGYQKVTF

SEQ ID NO: 375532 - protein, 12 aa, Homo sapiens
  CDR3 for beta chain variable domain of TCR clone 187766 (TRBV12-4, TRBJ2-7)
CASSLGGYEQYF

SEQ ID NO: 375533 - protein, 13 aa, Homo sapiens
  CDR3 for alpha chain variable domain of TCR clone 187767 (TRAV21, TRAJ57)
CAVTQGGSEKLVF

SEQ ID NO: 375534 - protein, 14 aa, Homo sapiens
  CDR3 for beta chain variable domain of TCR clone 187767 (TRBV7-6, TRBJ2-7)
CASSFRQGADEQYF

SEQ ID NO: 375535 - protein, 12 aa, Homo sapiens
  CDR3 for alpha chain variable domain of TCR clone 187768 (TRAV21, TRAJ24)
CAVMDSWGKLQF

SEQ ID NO: 375536 - protein, 16 aa, Homo sapiens
  CDR3 for beta chain variable domain of TCR clone 187768 (TRBV13, TRBJ2-2)
CASSEVFGANTGDLFF

SEQ ID NO: 375537 - protein, 16 aa, Homo sapiens
  CDR3 for alpha chain variable domain of TCR clone 187769 (TRAV3, TRAJ37)
CAMRGKGSGNTGKLIF

SEQ ID NO: 375538 - protein, 13 aa, Homo sapiens
  CDR3 for beta chain variable domain of TCR clone 187769 (TRBV14, TRBJ2-7)
CASSQDRRYEQYF

SEQ ID NO: 375539 - protein, 14 aa, Homo sapiens
  CDR3 for alpha chain variable domain of TCR clone 187770 (TRAV13-1, TRAJ44)
CAAKATGTASKLTF

SEQ ID NO: 375540 - protein, 14 aa, Homo sapiens
  CDR3 for beta chain variable domain of TCR clone 187770 (TRBV5-4, TRBJ1-1)
CASSLDSRRDEAFF

SEQ ID NO: 375541 - protein, 12 aa, Homo sapiens
  CDR3 for alpha chain variable domain of TCR clone 187771 (TRAV13-2, TRAJ23)
CAERHRGGKLIF

SEQ ID NO: 375542 - protein, 13 aa, Homo sapiens
  CDR3 for beta chain variable domain of TCR clone 187771 (TRBV28, TRBJ2-7)
CASKAGGVYEQYF

SEQ ID NO: 375543 - protein, 13 aa, Homo sapiens
  CDR3 for alpha chain variable domain of TCR clone 187772 (TRAV12-3, TRAJ47)
CAMKKEYGNTLVF

SEQ ID NO: 375544 - protein, 15 aa, Homo sapiens
  CDR3 for beta chain variable domain of TCR clone 187772 (TRBV20-1, TRBJ2-7)
CSARDRVSGMDEQYF

SEQ ID NO: 375545 - protein, 10 aa, Homo sapiens
  CDR3 for alpha chain variable domain of TCR clone 187773 (TRAV17, TRAJ45)
TGVGADGLTF

SEQ ID NO: 375546 - protein, 15 aa, Homo sapiens
  CDR3 for beta chain variable domain of TCR clone 187773 (TRBV5-7, TRBJ1-5)
CASSYGKLWDQPQHF

SEQ ID NO: 375547 - protein, 11 aa, Homo sapiens
  CDR3 for alpha chain variable domain of TCR clone 187774 (TRAV12-3, TRAJ27)
RAMANAGKSTF

SEQ ID NO: 375548 - protein, 14 aa, Homo sapiens
  CDR3 for beta chain variable domain of TCR clone 187774 (TRBV7-2, TRBJ2-2)
CASRGQGAAGELFF

SEQ ID NO: 375549 - protein, 12 aa, Homo sapiens
  CDR3 for alpha chain variable domain of TCR clone 187775 (TRAV12-1, TRAJ40)
CVVPSGAYKYIF

SEQ ID NO: 375550 - protein, 16 aa, Homo sapiens
  CDR3 for beta chain variable domain of TCR clone 187775 (TRBV4-2, TRBJ1-1)
CASSQAGFGMNTEAFF

SEQ ID NO: 375551 - protein, 12 aa, Homo sapiens
  CDR3 for alpha chain variable domain of TCR clone 187776 (TRAV12-3, TRAJ17)
CAMTLTGNKLTF

SEQ ID NO: 375552 - protein, 15 aa, Homo sapiens
  CDR3 for beta chain variable domain of TCR clone 187776 (TRBV20-1, TRBJ2-7)
CSARGRVAGMDEQYF

SEQ ID NO: 375553 - protein, 16 aa, Homo sapiens
  CDR3 for alpha chain variable domain of TCR clone 187777 (TRAV21, TRAJ52)
CAVTNAGGTSYGKLPF

SEQ ID NO: 375554 - protein, 17 aa, Homo sapiens
  CDR3 for beta chain variable domain of TCR clone 187777 (TRBV28, TRBJ2-5)
CASSRQGGLAGAETQYF

SEQ ID NO: 375555 - protein, 12 aa, Homo sapiens
  CDR3 for alpha chain variable domain of TCR clone 187778 (TRAV8-4, TRAJ31)
CAVSDSNARLMF

SEQ ID NO: 375556 - protein, 13 aa, Homo sapiens
  CDR3 for beta chain variable domain of TCR clone 187778 (TRBV7-7, TRBJ2-3)
CASSLSRADTQYF

SEQ ID NO: 375557 - protein, 14 aa, Homo sapiens
  CDR3 for alpha chain variable domain of TCR clone 187779 (TRAV17, TRAJ54)
CATDANQGAQKLGL

SEQ ID NO: 375558 - protein, 12 aa, Homo sapiens
  CDR3 for beta chain variable domain of TCR clone 187779 (TRBV7-9, TRBJ2-7)
CASSIKREEQYF

SEQ ID NO: 375559 - protein, 13 aa, Homo sapiens
  CDR3 for alpha chain variable domain of TCR clone 187780 (TRAV3, TRAJ5)
CAVRDTGRRGLTF

SEQ ID NO: 375560 - protein, 13 aa, Homo sapiens
  CDR3 for beta chain variable domain of TCR clone 187780 (TRBV12-4, TRBJ1-2)
CASSLRQGKGYTF

SEQ ID NO: 375561 - protein, 14 aa, Homo sapiens
  CDR3 for alpha chain variable domain of TCR clone 187781 (TRAV9-2, TRAJ39)
CALYIYNAGNMLTF

SEQ ID NO: 375562 - protein, 18 aa, Homo sapiens
  CDR3 for beta chain variable domain of TCR clone 187781 (TRBV6-5, TRBJ2-5)
CASSYSQAGGSYQETQYF

SEQ ID NO: 375563 - protein, 14 aa, Homo sapiens
  CDR3 for alpha chain variable domain of TCR clone 187782 (TRAV17, TRAJ31)
CATAPLSGNARLMF

SEQ ID NO: 375564 - protein, 15 aa, Homo sapiens
  CDR3 for beta chain variable domain of TCR clone 187782 (TRBV15, TRBJ2-2)
CATSGTGGRVGELFF

SEQ ID NO: 375565 - protein, 15 aa, Homo sapiens
  CDR3 for alpha chain variable domain of TCR clone 187783 (TRAV8-3, TRAJ45)
CASSYSGGGADGITF

SEQ ID NO: 375566 - protein, 16 aa, Homo sapiens
  CDR3 for beta chain variable domain of TCR clone 187783 (TRBV20-1, TRBJ2-2)
CSASASGIPGAGELFF

SEQ ID NO: 375567 - protein, 13 aa, Homo sapiens
  CDR3 for alpha chain variable domain of TCR clone 187784 (TRAV21, TRAJ27)
CAALNTNAAKSTF

SEQ ID NO: 375568 - protein, 14 aa, Homo sapiens
  CDR3 for beta chain variable domain of TCR clone 187784 (TRBV27, TRBJ1-1)
CASSLLSGLSEAFF

SEQ ID NO: 375569 - protein, 12 aa, Homo sapiens
  CDR3 for alpha chain variable domain of TCR clone 187785 (TRAV10, TRAJ43)
CVVVRVGNDMRF

SEQ ID NO: 375570 - protein, 14 aa, Homo sapiens
  CDR3 for beta chain variable domain of TCR clone 187785 (TRBV18, TRBJ2-5)
CASSPGVSQETQYF

SEQ ID NO: 375571 - protein, 14 aa, Homo sapiens
  CDR3 for alpha chain variable domain of TCR clone 187786 (TRAV26-1, TRAJ34)
CIVRGAYNTDKRIF

SEQ ID NO: 375572 - protein, 15 aa, Homo sapiens
  CDR3 for beta chain variable domain of TCR clone 187786 (TRBV20-1, TRBJ2-7)
CSARVPAAYFYEQYF

SEQ ID NO: 375573 - protein, 11 aa, Homo sapiens
  CDR3 for alpha chain variable domain of TCR clone 187787 (TRAV13-1, TRAJ43)
CAAHNNNDMRF

SEQ ID NO: 375574 - protein, 15 aa, Homo sapiens
  CDR3 for beta chain variable domain of TCR clone 187787 (TRBV6-1, TRBJ2-2)
CASSRLRGDTGEVFF

SEQ ID NO: 375575 - protein, 16 aa, Homo sapiens
  CDR3 for alpha chain variable domain of TCR clone 187788 (TRAV30, TRAJ24)
CGTESVDADSWGKFQF

SEQ ID NO: 375576 - protein, 15 aa, Homo sapiens
  CDR3 for beta chain variable domain of TCR clone 187788 (TRBV27, TRBJ2-1)
CASSNGGGSSNEQFF

SEQ ID NO: 375577 - protein, 15 aa, Homo sapiens
  CDR3 for alpha chain variable domain of TCR clone 187789 (TRAV3, TRAJ10)
CAVSDGTGGGNKLTF

SEQ ID NO: 375578 - protein, 15 aa, Homo sapiens
  CDR3 for beta chain variable domain of TCR clone 187789 (TRBV4-2, TRBJ1-4)
CASSLVQREVEKLFF

SEQ ID NO: 375579 - protein, 18 aa, Homo sapiens
  CDR3 for alpha chain variable domain of TCR clone 187790 (TRAV26-2, TRAJ45)
CILRLWGYSGGGADGLTC

SEQ ID NO: 375580 - protein, 17 aa, Homo sapiens
  CDR3 for beta chain variable domain of TCR clone 187790 (TRBV28, TRBJ2-3)
CASSPTPAGGRVDTQYF

SEQ ID NO: 375581 - protein, 12 aa, Homo sapiens
  CDR3 for alpha chain variable domain of TCR clone 187791 (TRAV1-1, TRAJ39)
CAVPVVGSMLTF

SEQ ID NO: 375582 - protein, 18 aa, Homo sapiens
  CDR3 for beta chain variable domain of TCR clone 187791 (TRBV4-1, TRBJ1-5)
CASSQDPRGQGLNQPQHF

SEQ ID NO: 375583 - protein, 12 aa, Homo sapiens
  CDR3 for alpha chain variable domain of TCR clone 187792 (TRAV3, TRAJ43)
CAVRDPNNDMRF

SEQ ID NO: 375584 - protein, 13 aa, Homo sapiens
  CDR3 for beta chain variable domain of TCR clone 187792 (TRBV5-5, TRBJ2-3)
CASSWTGGDTQYF

SEQ ID NO: 375585 - protein, 14 aa, Homo sapiens
  CDR3 for alpha chain variable domain of TCR clone 187793 (TRAV26-1, TRAJ38)
CIADNAGNNRKLIW

SEQ ID NO: 375586 - protein, 15 aa, Homo sapiens
  CDR3 for beta chain variable domain of TCR clone 187793 (TRBV5-1, TRBJ1-1)
CASSSGGRRVTEAFF

SEQ ID NO: 375587 - protein, 14 aa, Homo sapiens
  CDR3 for alpha chain variable domain of TCR clone 187794 (TRAV1-2, TRAJ16)
CAVNRFSDGQKLPF

SEQ ID NO: 375588 - protein, 17 aa, Homo sapiens
  CDR3 for beta chain variable domain of TCR clone 187794 (TRBV5-1, TRBJ2-2)
CASSLAGLSGGTGELFF

SEQ ID NO: 375589 - protein, 15 aa, Homo sapiens
  CDR3 for alpha chain variable domain of TCR clone 187795 (TRAV12-2, TRAJ11)
CAAPGLNSGYSTLTF

SEQ ID NO: 375590 - protein, 14 aa, Homo sapiens
  CDR3 for beta chain variable domain of TCR clone 187795 (TRBV7-9, TRBJ2-2)
CASSGLADTGELFF

SEQ ID NO: 375591 - protein, 12 aa, Homo sapiens
  CDR3 for alpha chain variable domain of TCR clone 187796 (TRAV4, TRAJ21)
CLVGDNFNKFYF

SEQ ID NO: 375592 - protein, 13 aa, Homo sapiens
  CDR3 for beta chain variable domain of TCR clone 187796 (TRBV12-4, TRBJ1-2)
CASSLDSNYGYTF

SEQ ID NO: 375593 - protein, 16 aa, Homo sapiens
  CDR3 for alpha chain variable domain of TCR clone 187797 (TRAV1-2, TRAJ10)
CAVRRVLTGGGNKITF

SEQ ID NO: 375594 - protein, 15 aa, Homo sapiens
  CDR3 for beta chain variable domain of TCR clone 187797 (TRBV7-9, TRBJ1-6)
CASSSPGRGNSPLHF

SEQ ID NO: 375595 - protein, 13 aa, Homo sapiens
  CDR3 for alpha chain variable domain of TCR clone 187798 (TRAV27, TRAJ29)
CAGAHSGNTPLVF

SEQ ID NO: 375596 - protein, 15 aa, Homo sapiens
  CDR3 for beta chain variable domain of TCR clone 187798 (TRBV29-1, TRBJ2-1)
CSVPTGLALYNEQFF

SEQ ID NO: 375597 - protein, 17 aa, Homo sapiens
  CDR3 for alpha chain variable domain of TCR clone 187799 (TRAV13-1, TRAJ28)
CAASPPYSGAGRYQLTF

SEQ ID NO: 375598 - protein, 15 aa, Homo sapiens
  CDR3 for beta chain variable domain of TCR clone 187799 (TRBV20-1, TRBJ2-7)
CSARDRVSGMDEQYF

SEQ ID NO: 375599 - protein, 15 aa, Homo sapiens
  CDR3 for alpha chain variable domain of TCR clone 187800 (TRAV12-2, TRAJ32)
CAVNHYGGATNKPIF

SEQ ID NO: 375600 - protein, 13 aa, Homo sapiens
  CDR3 for beta chain variable domain of TCR clone 187800 (TRBV7-9, TRBJ1-2)
CASSLKQNYGYTF

SEQ ID NO: 375601 - protein, 15 aa, Homo sapiens
  CDR3 for alpha chain variable domain of TCR clone 187801 (TRAV21, TRAJ57)
CSVIITQGVSEKLVF

SEQ ID NO: 375602 - protein, 14 aa, Homo sapiens
  CDR3 for beta chain variable domain of TCR clone 187801 (TRBV5-1, TRBJ2-2)
CASSLIWIPGELFF

SEQ ID NO: 375603 - protein, 12 aa, Homo sapiens
  CDR3 for alpha chain variable domain of TCR clone 187802 (TRAV17, TRAJ48)
CARNFGNEKLTF

SEQ ID NO: 375604 - protein, 13 aa, Homo sapiens
  CDR3 for beta chain variable domain of TCR clone 187802 (TRBV6-5, TRBJ2-5)
CASSSPGGETQYF

SEQ ID NO: 375605 - protein, 12 aa, Homo sapiens
  CDR3 for alpha chain variable domain of TCR clone 187803 (TRAV13-1, TRAJ53)
CAAGGSNYKLTF

SEQ ID NO: 375606 - protein, 16 aa, Homo sapiens
  CDR3 for beta chain variable domain of TCR clone 187803 (TRBV5-4, TRBJ2-3)
CASQPPGAGGADTQYF

SEQ ID NO: 375607 - protein, 14 aa, Homo sapiens
  CDR3 for alpha chain variable domain of TCR clone 187804 (TRAV12-3, TRAJ12)
CAMSALDSSYKLIF

SEQ ID NO: 375608 - protein, 16 aa, Homo sapiens
  CDR3 for beta chain variable domain of TCR clone 187804 (TRBV7-9, TRBJ2-3)
CASSLQGNPVTDTQYF

SEQ ID NO: 375609 - protein, 15 aa, Homo sapiens
  CDR3 for alpha chain variable domain of TCR clone 187805 (TRAV8-4, TRAJ3)
CAVTGENLVQQCFQD

SEQ ID NO: 375610 - protein, 14 aa, Homo sapiens
  CDR3 for beta chain variable domain of TCR clone 187805 (TRBV27, TRBJ2-1)
CAGSIAETYNEQFF

SEQ ID NO: 375611 - protein, 14 aa, Homo sapiens
  CDR3 for alpha chain variable domain of TCR clone 187806 (TRAV2, TRAJ9)
CAVEDRSGGFKTIF

SEQ ID NO: 375612 - protein, 13 aa, Homo sapiens
  CDR3 for beta chain variable domain of TCR clone 187806 (TRBV4-1, TRBJ2-5)
CASSLTRGETQYF

SEQ ID NO: 375613 - protein, 11 aa, Homo sapiens
  CDR3 for alpha chain variable domain of TCR clone 187807 (TRAV12-2, TRAJ21)
CAVEGFNKFYF

SEQ ID NO: 375614 - protein, 13 aa, Homo sapiens
  CDR3 for beta chain variable domain of TCR clone 187807 (TRBV19, TRBJ1-2)
CASSQGQVYGYTF

SEQ ID NO: 375615 - protein, 16 aa, Homo sapiens
  CDR3 for alpha chain variable domain of TCR clone 187808 (TRAV8-3, TRAJ13)
CAVGAYPSGGYQKVTF

SEQ ID NO: 375616 - protein, 12 aa, Homo sapiens
  CDR3 for beta chain variable domain of TCR clone 187808 (TRBV19, TRBJ1-5)
CASSIAQQPQHF

SEQ ID NO: 375617 - protein, 16 aa, Homo sapiens
  CDR3 for alpha chain variable domain of TCR clone 187809 (TRAV21, TRAJ17)
CAVRPGAEAAGNKLTV

SEQ ID NO: 375618 - protein, 16 aa, Homo sapiens
  CDR3 for beta chain variable domain of TCR clone 187809 (TRBV2, TRBJ2-7)
CASSEPWTGPSYEQYF

SEQ ID NO: 375619 - protein, 16 aa, Homo sapiens
  CDR3 for alpha chain variable domain of TCR clone 187810 (TRAV30, TRAJ24)
CGTEIVDVDSWGKFHF

SEQ ID NO: 375620 - protein, 14 aa, Homo sapiens
  CDR3 for beta chain variable domain of TCR clone 187810 (TRBV12-5, TRBJ2-5)
CASGSRTHQETQYF

SEQ ID NO: 375621 - protein, 23 aa, Homo sapiens
  CDR3 for alpha chain variable domain of TCR clone 187811 (TRAV26-1, TRAJ38)
CLADNAGNNHIQNPDPAVYQLRD

SEQ ID NO: 375622 - protein, 14 aa, Homo sapiens
  CDR3 for beta chain variable domain of TCR clone 187811 (TRBV19, TRBJ2-2)
CATTGHANTGELFF

SEQ ID NO: 375623 - protein, 14 aa, Homo sapiens
  CDR3 for alpha chain variable domain of TCR clone 187812 (TRAV16, TRAJ33)
CALSAMDSNYQLIW

SEQ ID NO: 375624 - protein, 16 aa, Homo sapiens
  CDR3 for beta chain variable domain of TCR clone 187812 (TRBV12-4, TRBJ2-3)
CASSFPSNTNTETQCF

SEQ ID NO: 375625 - protein, 12 aa, Homo sapiens
  CDR3 for alpha chain variable domain of TCR clone 187813 (TRAV1-1, TRAJ30)
CALRGRDDKIIF

SEQ ID NO: 375626 - protein, 13 aa, Homo sapiens
  CDR3 for beta chain variable domain of TCR clone 187813 (TRBV11-3, TRBJ2-7)
CASSLDKLYEQYL

SEQ ID NO: 375627 - protein, 17 aa, Homo sapiens
  CDR3 for alpha chain variable domain of TCR clone 187814 (TRAV3, TRAJ6)
CAVRYGPRAGGSYIPTF

SEQ ID NO: 375628 - protein, 17 aa, Homo sapiens
  CDR3 for beta chain variable domain of TCR clone 187814 (TRBV20-1, TRBJ2-7)
CSATRAGGVAGVEEQYF

SEQ ID NO: 375629 - protein, 14 aa, Homo sapiens
  CDR3 for alpha chain variable domain of TCR clone 187815 (TRAV1-2, TRAJ16)
CAVNRFSDGQNLLF

SEQ ID NO: 375630 - protein, 15 aa, Homo sapiens
  CDR3 for beta chain variable domain of TCR clone 187815 (TRBV12-4, TRBJ2-5)
CASSPPTGLQETQYF

SEQ ID NO: 375631 - protein, 11 aa, Homo sapiens
  CDR3 for alpha chain variable domain of TCR clone 187816 (TRAV16, TRAJ31)
CAPFNNARLMF

SEQ ID NO: 375632 - protein, 15 aa, Homo sapiens
  CDR3 for beta chain variable domain of TCR clone 187816 (TRBV18, TRBJ1-1)
CASSPRQGENTEAFF

SEQ ID NO: 375633 - protein, 13 aa, Homo sapiens
  CDR3 for alpha chain variable domain of TCR clone 187817 (TRAV21, TRAJ20)
CAVGLRVDYKLSF

SEQ ID NO: 375634 - protein, 12 aa, Homo sapiens
  CDR3 for beta chain variable domain of TCR clone 187817 (TRBV20-1, TRBJ2-7)
CSAGLKMGEQYF

SEQ ID NO: 375635 - protein, 20 aa, Homo sapiens
  CDR3 for alpha chain variable domain of TCR clone 187818 (TRAV12-1, TRAJ18)
CVPRTDIGPDRGSTLGRLYF

SEQ ID NO: 375636 - protein, 14 aa, Homo sapiens
  CDR3 for beta chain variable domain of TCR clone 187818 (TRBV7-9, TRBJ2-7)
CASSWSQGSYEQYF

SEQ ID NO: 375637 - protein, 15 aa, Homo sapiens
  CDR3 for alpha chain variable domain of TCR clone 187819 (TRAV20, TRAJ58)
CAVQDLETSGSRLTF

SEQ ID NO: 375638 - protein, 13 aa, Homo sapiens
  CDR3 for beta chain variable domain of TCR clone 187819 (TRBV20-1, TRBJ1-1)
CRARGGGNTEAFF

SEQ ID NO: 375639 - protein, 16 aa, Homo sapiens
  CDR3 for alpha chain variable domain of TCR clone 187820 (TRAV8-3, TRAJ10)
CAVGPILTGGGNKLTF

SEQ ID NO: 375640 - protein, 11 aa, Homo sapiens
  CDR3 for beta chain variable domain of TCR clone 187820 (TRBV29-1, TRBJ2-5)
CSEGRTGTQYF

SEQ ID NO: 375641 - protein, 16 aa, Homo sapiens
  CDR3 for alpha chain variable domain of TCR clone 187821 (TRAV30, TRAJ24)
CGTEIVDAASWGKFQF

SEQ ID NO: 375642 - protein, 14 aa, Homo sapiens
  CDR3 for beta chain variable domain of TCR clone 187821 (TRBV12-5, TRBJ2-5)
CASGARTQQETQYF

SEQ ID NO: 375643 - protein, 14 aa, Homo sapiens
  CDR3 for alpha chain variable domain of TCR clone 187822 (TRAV3, TRAJ37)
CAGKESGNTGKLIF

SEQ ID NO: 375644 - protein, 16 aa, Homo sapiens
  CDR3 for beta chain variable domain of TCR clone 187822 (TRBV19, TRBJ1-1)
CASSPTRFWPGTEAFF

SEQ ID NO: 375645 - protein, 14 aa, Homo sapiens
  CDR3 for alpha chain variable domain of TCR clone 187823 (TRAV8-3, TRAJ12)
CAVGSRDSSYKLIF

SEQ ID NO: 375646 - protein, 15 aa, Homo sapiens
  CDR3 for beta chain variable domain of TCR clone 187823 (TRBV11-2, TRBJ2-1)
CASSLGTSGLNEQFF

SEQ ID NO: 375647 - protein, 11 aa, Homo sapiens
  CDR3 for alpha chain variable domain of TCR clone 187824 (TRAV13-1, TRAJ49)
CACVGGNQFYF

SEQ ID NO: 375648 - protein, 16 aa, Homo sapiens
  CDR3 for beta chain variable domain of TCR clone 187824 (TRBV11-2, TRBJ2-2)
CASSLRTGNRIGELFF

SEQ ID NO: 375649 - protein, 14 aa, Homo sapiens
  CDR3 for alpha chain variable domain of TCR clone 187825 (TRAV35, TRAJ33)
CAGSSQDGNYQLIW

SEQ ID NO: 375650 - protein, 15 aa, Homo sapiens
  CDR3 for beta chain variable domain of TCR clone 187825 (TRBV29-1, TRBJ2-7)
CSVEFFDRASYEQYF

SEQ ID NO: 375651 - protein, 14 aa, Homo sapiens
  CDR3 for alpha chain variable domain of TCR clone 187826 (TRAV1-2, TRAJ16)
CAVNRFSDVQKLLF

SEQ ID NO: 375652 - protein, 13 aa, Homo sapiens
  CDR3 for beta chain variable domain of TCR clone 187826 (TRBV20-1, TRBJ1-1)
CSARAGGNTEAFF

SEQ ID NO: 375653 - protein, 14 aa, Homo sapiens
  CDR3 for alpha chain variable domain of TCR clone 187827 (TRAV13-1, TRAJ40)
CAASMTSGTYKYIF

SEQ ID NO: 375654 - protein, 13 aa, Homo sapiens
  CDR3 for beta chain variable domain of TCR clone 187827 (TRBV12-4, TRBJ2-5)
CASSPGTEETQYF

SEQ ID NO: 375655 - protein, 13 aa, Homo sapiens
  CDR3 for alpha chain variable domain of TCR clone 187828 (TRAV8-3, TRAJ28)
CAVGAVGSYQLTF

SEQ ID NO: 375656 - protein, 15 aa, Homo sapiens
  CDR3 for beta chain variable domain of TCR clone 187828 (TRBV19, TRBJ2-3)
CAAGDTNAPNDTQYF

SEQ ID NO: 375657 - protein, 14 aa, Homo sapiens
  CDR3 for alpha chain variable domain of TCR clone 187829 (TRAV12-2, TRAJ45)
CAVNKGGGADGLTF

SEQ ID NO: 375658 - protein, 16 aa, Homo sapiens
  CDR3 for beta chain variable domain of TCR clone 187829 (TRBV7-3, TRBJ2-2)
CASSLKRGTLSGELFF

SEQ ID NO: 375659 - protein, 14 aa, Homo sapiens
  CDR3 for alpha chain variable domain of TCR clone 187830 (TRAV26-2, TRAJ31)
CILIPANNNARLMF

SEQ ID NO: 375660 - protein, 14 aa, Homo sapiens
  CDR3 for beta chain variable domain of TCR clone 187830 (TRBV7-2, TRBJ2-7)
CASSPKTSFYEQYF

SEQ ID NO: 375661 - protein, 11 aa, Homo sapiens
  CDR3 for alpha chain variable domain of TCR clone 187831 (TRAV13-1, TRAJ30)
CAARRDDKIIF

SEQ ID NO: 375662 - protein, 15 aa, Homo sapiens
  CDR3 for beta chain variable domain of TCR clone 187831 (TRBV18, TRBJ1-1)
CASSPSSWVDTEAFF

SEQ ID NO: 375663 - protein, 15 aa, Homo sapiens
  CDR3 for alpha chain variable domain of TCR clone 187832 (TRAV3, TRAJ3)
CAVRDRDSSASKIIF

SEQ ID NO: 375664 - protein, 13 aa, Homo sapiens
  CDR3 for beta chain variable domain of TCR clone 187832 (TRBV12-4, TRBJ2-7)
CASSPTETYEQYF

SEQ ID NO: 375665 - protein, 14 aa, Homo sapiens
  CDR3 for alpha chain variable domain of TCR clone 187833 (TRAV23/DV6, TRAJ49)
CAASKSFVGNQFYF

SEQ ID NO: 375666 - protein, 16 aa, Homo sapiens
  CDR3 for beta chain variable domain of TCR clone 187833 (TRBV19, TRBJ2-1)
CASSKAGPSSYNEQFF

SEQ ID NO: 375667 - protein, 15 aa, Homo sapiens
  CDR3 for alpha chain variable domain of TCR clone 187834 (TRAV26-1, TRAJ29)
CIVRVEGSGNQPLVF

SEQ ID NO: 375668 - protein, 14 aa, Homo sapiens
  CDR3 for beta chain variable domain of TCR clone 187834 (TRBV18, TRBJ2-5)
CASSPGVSQETQYF

SEQ ID NO: 375669 - protein, 15 aa, Homo sapiens
  CDR3 for alpha chain variable domain of TCR clone 187835 (TRAV12-3, TRAJ6)
CAMSATSGGSYIPTF

SEQ ID NO: 375670 - protein, 15 aa, Homo sapiens
  CDR3 for beta chain variable domain of TCR clone 187835 (TRBV7-9, TRBJ1-6)
CASSSPGRGKSPLHF

SEQ ID NO: 375671 - protein, 12 aa, Homo sapiens
  CDR3 for alpha chain variable domain of TCR clone 187836 (TRAV21, TRAJ20)
CAVRGNDYKPSF

SEQ ID NO: 375672 - protein, 14 aa, Homo sapiens
  CDR3 for beta chain variable domain of TCR clone 187836 (TRBV7-8, TRBJ2-7)
YASSQTQGADEQYF

SEQ ID NO: 375673 - protein, 13 aa, Homo sapiens
  CDR3 for alpha chain variable domain of TCR clone 187837 (TRAV12-1, TRAJ6)
CVVFPGGSYIPTF

SEQ ID NO: 375674 - protein, 11 aa, Homo sapiens
  CDR3 for beta chain variable domain of TCR clone 187837 (TRBV29-1, TRBJ2-5)
CSEDRTGTQYF

SEQ ID NO: 375675 - protein, 14 aa, Homo sapiens
  CDR3 for alpha chain variable domain of TCR clone 187838 (TRAV12-1, TRAJ17)
CVVNYKAAGNKLTF

SEQ ID NO: 375676 - protein, 13 aa, Homo sapiens
  CDR3 for beta chain variable domain of TCR clone 187838 (TRBV7-9, TRBJ1-2)
CAISLKQNYGYTF

SEQ ID NO: 375677 - protein, 15 aa, Homo sapiens
  CDR3 for alpha chain variable domain of TCR clone 187839 (TRAV12-1, TRAJ9)
CVVSFGDTGGFKTIF

SEQ ID NO: 375678 - protein, 14 aa, Homo sapiens
  CDR3 for beta chain variable domain of TCR clone 187839 (TRBV20-1, TRBJ2-7)
CSAPELAGVGEQYF

SEQ ID NO: 375679 - protein, 20 aa, Homo sapiens
  CDR3 for alpha chain variable domain of TCR clone 187840 (TRAV12-3, TRAJ41)
SLFIRVSQPSDSATPEALNF

SEQ ID NO: 375680 - protein, 18 aa, Homo sapiens
  CDR3 for beta chain variable domain of TCR clone 187840 (TRBV11-2, TRBJ2-7)
CASSPRGVAGFLIYEQYF

SEQ ID NO: 375681 - protein, 15 aa, Homo sapiens
  CDR3 for alpha chain variable domain of TCR clone 187841 (TRAV8-3, TRAJ27)
CAVGPSKPMQANQPL

SEQ ID NO: 375682 - protein, 15 aa, Homo sapiens
  CDR3 for beta chain variable domain of TCR clone 187841 (TRBV7-2, TRBJ2-1)
CASSSGLAGGNEQFF

SEQ ID NO: 375683 - protein, 15 aa, Homo sapiens
  CDR3 for alpha chain variable domain of TCR clone 187842 (TRAV3, TRAJ13)
CVVRVYSGGYQKVTF

SEQ ID NO: 375684 - protein, 15 aa, Homo sapiens
  CDR3 for beta chain variable domain of TCR clone 187842 (TRBV7-2, TRBJ2-1)
CASSSGLAGGNEQFF

SEQ ID NO: 375685 - protein, 15 aa, Homo sapiens
  CDR3 for alpha chain variable domain of TCR clone 187843 (TRAV17, TRAJ13)
CATDAGSGGYQKVTF

SEQ ID NO: 375686 - protein, 17 aa, Homo sapiens
  CDR3 for beta chain variable domain of TCR clone 187843 (TRBV11-2, TRBJ2-1)
CASSFYPPGVEYNEQFF

SEQ ID NO: 375687 - protein, 14 aa, Homo sapiens
  CDR3 for alpha chain variable domain of TCR clone 187844 (TRAV12-2, TRAJ29)
CAVRRNSGNTPLVF

SEQ ID NO: 375688 - protein, 13 aa, Homo sapiens
  CDR3 for beta chain variable domain of TCR clone 187844 (TRBV12-4, TRBJ2-1)
CAGSHYTDNEQFF

SEQ ID NO: 375689 - protein, 11 aa, Homo sapiens
  CDR3 for alpha chain variable domain of TCR clone 187845 (TRAV12-3, TRAJ9)
CATTGGFKTIF

SEQ ID NO: 375690 - protein, 14 aa, Homo sapiens
  CDR3 for beta chain variable domain of TCR clone 187845 (TRBV7-9, TRBJ2-2)
CASSGLADTGELFF

SEQ ID NO: 375691 - protein, 12 aa, Homo sapiens
  CDR3 for alpha chain variable domain of TCR clone 187846 (TRAV25, TRAJ53)
CQSGGSNYKLTF

SEQ ID NO: 375692 - protein, 12 aa, Homo sapiens
  CDR3 for beta chain variable domain of TCR clone 187846 (TRBV14, TRBJ2-7)
CASSSLKSEQYF

SEQ ID NO: 375693 - protein, 15 aa, Homo sapiens
  CDR3 for alpha chain variable domain of TCR clone 187847 (TRAV2, TRAJ37)
CAVGVGSSNTGKLIF

SEQ ID NO: 375694 - protein, 13 aa, Homo sapiens
  CDR3 for beta chain variable domain of TCR clone 187847 (TRBV20-1, TRBJ2-7)
CSAQTGLSYEQYF

SEQ ID NO: 375695 - protein, 15 aa, Homo sapiens
  CDR3 for alpha chain variable domain of TCR clone 187848 (TRAV1-2, TRAJ15)
CAVAVMGSAGTALIF

SEQ ID NO: 375696 - protein, 13 aa, Homo sapiens
  CDR3 for beta chain variable domain of TCR clone 187848 (TRBV20-1, TRBJ1-1)
CSAFDGENTEAFF

SEQ ID NO: 375697 - protein, 14 aa, Homo sapiens
  CDR3 for alpha chain variable domain of TCR clone 187849 (TRAV8-3, TRAJ10)
CAVGNAGGGNKLTF

SEQ ID NO: 375698 - protein, 11 aa, Homo sapiens
  CDR3 for beta chain variable domain of TCR clone 187849 (TRBV19, TRBJ1-1)
CASSIGSEAFF

SEQ ID NO: 375699 - protein, 18 aa, Homo sapiens
  CDR3 for alpha chain variable domain of TCR clone 187850 (TRAV21, TRAJ52)
CAVRPSPAGGTSYGKLTF

SEQ ID NO: 375700 - protein, 15 aa, Homo sapiens
  CDR3 for beta chain variable domain of TCR clone 187850 (TRBV4-1, TRBJ2-5)
CASSQWDLYQETQYV

SEQ ID NO: 375701 - protein, 14 aa, Homo sapiens
  CDR3 for alpha chain variable domain of TCR clone 187851 (TRAV3, TRAJ36)
GAVRDGTGANNLFF

SEQ ID NO: 375702 - protein, 16 aa, Homo sapiens
  CDR3 for beta chain variable domain of TCR clone 187851 (TRBV20-1, TRBJ2-6)
CSAREGPGVGANVLTF

SEQ ID NO: 375703 - protein, 11 aa, Homo sapiens
  CDR3 for alpha chain variable domain of TCR clone 187852 (TRAV1-1, TRAJ30)
CAQNRDDKIIF

SEQ ID NO: 375704 - protein, 14 aa, Homo sapiens
  CDR3 for beta chain variable domain of TCR clone 187852 (TRBV18, TRBJ2-7)
CASSPRGGAYEQYF

SEQ ID NO: 375705 - protein, 17 aa, Homo sapiens
  CDR3 for alpha chain variable domain of TCR clone 187853 (TRAV13-1, TRAJ28)
CAASPPYSGAGSSQLTF

SEQ ID NO: 375706 - protein, 13 aa, Homo sapiens
  CDR3 for beta chain variable domain of TCR clone 187853 (TRBV7-2, TRBJ2-7)
CASSSPSGSEQYS

SEQ ID NO: 375707 - protein, 13 aa, Homo sapiens
  CDR3 for alpha chain variable domain of TCR clone 187854 (TRAV13-2, TRAJ13)
CAERPGGYQKFTF

SEQ ID NO: 375708 - protein, 14 aa, Homo sapiens
  CDR3 for beta chain variable domain of TCR clone 187854 (TRBV23-1, TRBJ2-5)
CASSFLRSQETQYF

SEQ ID NO: 375709 - protein, 13 aa, Homo sapiens
  CDR3 for alpha chain variable domain of TCR clone 187855 (TRAV36/DV7, TRAJ38)
CVANAGNNRKLIW

SEQ ID NO: 375710 - protein, 16 aa, Homo sapiens
  CDR3 for beta chain variable domain of TCR clone 187855 (TRBV12-4, TRBJ2-5)
CASSLSTSGGKETQYF

SEQ ID NO: 375711 - protein, 13 aa, Homo sapiens
  CDR3 for alpha chain variable domain of TCR clone 187856 (TRAV27, TRAJ41)
CAGEGNSGYALNF

SEQ ID NO: 375712 - protein, 14 aa, Homo sapiens
  CDR3 for beta chain variable domain of TCR clone 187856 (TRBV4-1, TRBJ1-2)
CASSQDGQVRGYTF

SEQ ID NO: 375713 - protein, 15 aa, Homo sapiens
  CDR3 for alpha chain variable domain of TCR clone 187857 (TRAV8-3, TRAJ21)
CAVGALPPRGCKFYF

SEQ ID NO: 375714 - protein, 13 aa, Homo sapiens
  CDR3 for beta chain variable domain of TCR clone 187857 (TRBV27, TRBJ1-4)
CASSLMGDEKLFF

SEQ ID NO: 375715 - protein, 14 aa, Homo sapiens
  CDR3 for alpha chain variable domain of TCR clone 187858 (TRAV13-1, TRAJ35)
CAASKGGFGNVLHC

SEQ ID NO: 375716 - protein, 13 aa, Homo sapiens
  CDR3 for beta chain variable domain of TCR clone 187858 (TRBV7-3, TRBJ1-1)
CASSQDWGVESFF

SEQ ID NO: 375717 - protein, 14 aa, Homo sapiens
  CDR3 for alpha chain variable domain of TCR clone 187859 (TRAV38-1, TRAJ40)
CALRPTSGTYKYIF

SEQ ID NO: 375718 - protein, 16 aa, Homo sapiens
  CDR3 for beta chain variable domain of TCR clone 187859 (TRBV12-4, TRBJ2-1)
CASSAVGQGNGDEQFF

SEQ ID NO: 375719 - protein, 23 aa, Homo sapiens
  CDR3 for alpha chain variable domain of TCR clone 187860 (TRAV1-1, TRAJ29)
LLQELHMKDSASYFLGGNTPLVF

SEQ ID NO: 375720 - protein, 13 aa, Homo sapiens
  CDR3 for beta chain variable domain of TCR clone 187860 (TRBV25-1, TRBJ2-7)
CASSEDGDYERYF

SEQ ID NO: 375721 - protein, 15 aa, Homo sapiens
  CDR3 for alpha chain variable domain of TCR clone 187861 (TRAV13-1, TRAJ44)
CAASRNTGTASKLTF

SEQ ID NO: 375722 - protein, 14 aa, Homo sapiens
  CDR3 for beta chain variable domain of TCR clone 187861 (TRBV12-4, TRBJ1-1)
CASSLGTGGTEAFF

SEQ ID NO: 375723 - protein, 10 aa, Homo sapiens
  CDR3 for alpha chain variable domain of TCR clone 187862 (TRAV12-2, TRAJ10)
CAAWTGVETH

SEQ ID NO: 375724 - protein, 15 aa, Homo sapiens
  CDR3 for beta chain variable domain of TCR clone 187862 (TRBV7-9, TRBJ1-6)
CASSSPGRGNSPLHF

SEQ ID NO: 375725 - protein, 14 aa, Homo sapiens
  CDR3 for alpha chain variable domain of TCR clone 187863 (TRAV13-1, TRAJ8)
CAASEDTGFQKLVS

SEQ ID NO: 375726 - protein, 13 aa, Homo sapiens
  CDR3 for beta chain variable domain of TCR clone 187863 (TRBV19, TRBJ1-5)
CASSTRRDQPQHF

SEQ ID NO: 375727 - protein, 13 aa, Homo sapiens
  CDR3 for alpha chain variable domain of TCR clone 187864 (TRAV17, TRAJ5)
CAPMDTGRRALTF

SEQ ID NO: 375728 - protein, 15 aa, Homo sapiens
  CDR3 for beta chain variable domain of TCR clone 187864 (TRBV7-3, TRBJ2-2)
CQQLKAGDLVRGLFF

SEQ ID NO: 375729 - protein, 16 aa, Homo sapiens
  CDR3 for alpha chain variable domain of TCR clone 187865 (TRAV23/DV6, TRAJ21)
CAASSGGGPTSTNFTL

SEQ ID NO: 375730 - protein, 14 aa, Homo sapiens
  CDR3 for beta chain variable domain of TCR clone 187865 (TRBV12-5, TRBJ2-5)
CASGSRTHQETQYF

SEQ ID NO: 375731 - protein, 13 aa, Homo sapiens
  CDR3 for alpha chain variable domain of TCR clone 187866 (TRAV2, TRAJ47)
CAVDREYGNKLFF

SEQ ID NO: 375732 - protein, 17 aa, Homo sapiens
  CDR3 for beta chain variable domain of TCR clone 187866 (TRBV15, TRBJ1-5)
CATSRVKGIYSNQPQHF

SEQ ID NO: 375733 - protein, 14 aa, Homo sapiens
  CDR3 for alpha chain variable domain of TCR clone 187867 (TRAV3, TRAJ17)
CAGRDAAAGNKLTF

SEQ ID NO: 375734 - protein, 15 aa, Homo sapiens
  CDR3 for beta chain variable domain of TCR clone 187867 (TRBV4-1, TRBJ1-4)
CASSDTGGTNEKLFF

SEQ ID NO: 375735 - protein, 14 aa, Homo sapiens
  CDR3 for alpha chain variable domain of TCR clone 187868 (TRAV2, TRAJ9)
CAVEDRSGGFKTIF

SEQ ID NO: 375736 - protein, 14 aa, Homo sapiens
  CDR3 for beta chain variable domain of TCR clone 187868 (TRBV7-9, TRBJ2-7)
CASSPSGGQNEKYF

SEQ ID NO: 375737 - protein, 14 aa, Homo sapiens
  CDR3 for alpha chain variable domain of TCR clone 187869 (TRAV1-2, TRAJ16)
RAVNRFSDGQKLLF

SEQ ID NO: 375738 - protein, 14 aa, Homo sapiens
  CDR3 for beta chain variable domain of TCR clone 187869 (TRBV19, TRBJ1-1)
CASTGHRLNTEAFF

SEQ ID NO: 375739 - protein, 14 aa, Homo sapiens
  CDR3 for alpha chain variable domain of TCR clone 187870 (TRAV12-1, TRAJ17)
CVVNYKAAGNKLTF

SEQ ID NO: 375740 - protein, 17 aa, Homo sapiens
  CDR3 for beta chain variable domain of TCR clone 187870 (TRBV11-2, TRBJ2-1)
CASSLYPPGVEYNEKFF

SEQ ID NO: 375741 - protein, 15 aa, Homo sapiens
  CDR3 for alpha chain variable domain of TCR clone 187871 (TRAV12-1, TRAJ9)
CVVSFGDTGGFKTIF

SEQ ID NO: 375742 - protein, 16 aa, Homo sapiens
  CDR3 for beta chain variable domain of TCR clone 187871 (TRBV27, TRBJ2-2)
CASSFRGLVRTGELFF

SEQ ID NO: 375743 - protein, 14 aa, Homo sapiens
  CDR3 for alpha chain variable domain of TCR clone 187872 (TRAV20, TRAJ18)
CAVGRGTTLGRLYF

SEQ ID NO: 375744 - protein, 14 aa, Homo sapiens
  CDR3 for beta chain variable domain of TCR clone 187872 (TRBV28, TRBJ2-4)
CASTHVTGVNIQYF

SEQ ID NO: 375745 - protein, 13 aa, Homo sapiens
  CDR3 for alpha chain variable domain of TCR clone 187873 (TRAV26-2, TRAJ43)
CILRAVNNNDMRF

SEQ ID NO: 375746 - protein, 22 aa, Homo sapiens
  CDR3 for beta chain variable domain of TCR clone 187873 (TRBV11-2, TRBJ1-4)
CASSLDITRRGIPRKDNEKLFF

SEQ ID NO: 375747 - protein, 12 aa, Homo sapiens
  CDR3 for alpha chain variable domain of TCR clone 187874 (TRAV21, TRAJ33)
CAKMDSNYQLIW

SEQ ID NO: 375748 - protein, 12 aa, Homo sapiens
  CDR3 for beta chain variable domain of TCR clone 187874 (TRBV7-9, TRBJ2-7)
CASSLEGYEQYF

SEQ ID NO: 375749 - protein, 14 aa, Homo sapiens
  CDR3 for alpha chain variable domain of TCR clone 187875 (TRAV12-2, TRAJ40)
CAVKIPSGTYKYIL

SEQ ID NO: 375750 - protein, 14 aa, Homo sapiens
  CDR3 for beta chain variable domain of TCR clone 187875 (TRBV11-2, TRBJ1-5)
CASSLDRGRQPQHF

SEQ ID NO: 375751 - protein, 14 aa, Homo sapiens
  CDR3 for alpha chain variable domain of TCR clone 187876 (TRAV9-2, TRAJ39)
CALYIYNAGNMLTF

SEQ ID NO: 375752 - protein, 13 aa, Homo sapiens
  CDR3 for beta chain variable domain of TCR clone 187876 (TRBV29-1, TRBJ1-1)
CSVGDSRNTEAFF

SEQ ID NO: 375753 - protein, 14 aa, Homo sapiens
  CDR3 for alpha chain variable domain of TCR clone 187877 (TRAV12-2, TRAJ9)
CAMNALEGGFKTIF

SEQ ID NO: 375754 - protein, 14 aa, Homo sapiens
  CDR3 for beta chain variable domain of TCR clone 187877 (TRBV6-1, TRBJ1-3)
CASVQGGGGNTIYF

SEQ ID NO: 375755 - protein, 13 aa, Homo sapiens
  CDR3 for alpha chain variable domain of TCR clone 187878 (TRAV23/DV6, TRAJ47)
CSASMTRGNKLVF

SEQ ID NO: 375756 - protein, 14 aa, Homo sapiens
  CDR3 for beta chain variable domain of TCR clone 187878 (TRBV7-3, TRBJ1-1)
CASSLKGGNTEAFF

SEQ ID NO: 375757 - protein, 14 aa, Homo sapiens
  CDR3 for alpha chain variable domain of TCR clone 187879 (TRAV12-2, TRAJ15)
CAPHTGQAGTALIF

SEQ ID NO: 375758 - protein, 15 aa, Homo sapiens
  CDR3 for beta chain variable domain of TCR clone 187879 (TRBV11-2, TRBJ2-2)
CASSLDTGNTGELFL

SEQ ID NO: 375759 - protein, 12 aa, Homo sapiens
  CDR3 for alpha chain variable domain of TCR clone 187880 (TRAV27, TRAJ21)
CAGVRQLQQMLL

SEQ ID NO: 375760 - protein, 14 aa, Homo sapiens
  CDR3 for beta chain variable domain of TCR clone 187880 (TRBV7-9, TRBJ1-4)
CASSLEGQSEKLFF

SEQ ID NO: 375761 - protein, 12 aa, Homo sapiens
  CDR3 for alpha chain variable domain of TCR clone 187881 (TRAV12-3, TRAJ17)
CAMTLTGNKLTF

SEQ ID NO: 375762 - protein, 10 aa, Homo sapiens
  CDR3 for beta chain variable domain of TCR clone 187881 (TRBV7-3, TRBJ2-2)
CASSLSGTSG

SEQ ID NO: 375763 - protein, 15 aa, Homo sapiens
  CDR3 for alpha chain variable domain of TCR clone 187882 (TRAV12-2, TRAJ29)
CAVRSRNSGNTPLVF

SEQ ID NO: 375764 - protein, 14 aa, Homo sapiens
  CDR3 for beta chain variable domain of TCR clone 187882 (TRBV12-4, TRBJ1-5)
CASSSDNSNQPQHF

SEQ ID NO: 375765 - protein, 18 aa, Homo sapiens
  CDR3 for alpha chain variable domain of TCR clone 187883 (TRAV17, TRAJ28)
CATDPPRGSGAGSYQLTF

SEQ ID NO: 375766 - protein, 14 aa, Homo sapiens
  CDR3 for beta chain variable domain of TCR clone 187883 (TRBV13, TRBJ2-5)
CASSVDYPQETQYF

SEQ ID NO: 375767 - protein, 13 aa, Homo sapiens
  CDR3 for alpha chain variable domain of TCR clone 187884 (TRAV26-1, TRAJ29)
CIVRRSGNTPLVF

SEQ ID NO: 375768 - protein, 16 aa, Homo sapiens
  CDR3 for beta chain variable domain of TCR clone 187884 (TRBV11-2, TRBJ2-7)
CASSLAPTGVNYEQYL

SEQ ID NO: 375769 - protein, 10 aa, Homo sapiens
  CDR3 for alpha chain variable domain of TCR clone 187885 (TRAV20, TRAJ22)
CAVPARQLTF

SEQ ID NO: 375770 - protein, 14 aa, Homo sapiens
  CDR3 for beta chain variable domain of TCR clone 187885 (TRBV19, TRBJ2-1)
CASSMGSGATEQFF

SEQ ID NO: 375771 - protein, 15 aa, Homo sapiens
  CDR3 for alpha chain variable domain of TCR clone 187886 (TRAV35, TRAJ40)
WAGQLWDSGTYKYIF

SEQ ID NO: 375772 - protein, 12 aa, Homo sapiens
  CDR3 for beta chain variable domain of TCR clone 187886 (TRBV7-8, TRBJ2-7)
CASSLAGYEQYF

SEQ ID NO: 375773 - protein, 14 aa, Homo sapiens
  CDR3 for alpha chain variable domain of TCR clone 187887 (TRAV13-1, TRAJ6)
CASSITGGSYIPTF

SEQ ID NO: 375774 - protein, 14 aa, Homo sapiens
  CDR3 for beta chain variable domain of TCR clone 187887 (TRBV6-3, TRBJ2-1)
CASLHSAYYNEQFF

SEQ ID NO: 375775 - protein, 13 aa, Homo sapiens
  CDR3 for alpha chain variable domain of TCR clone 187888 (TRAV1-2, TRAJ13)
CAVNSGGYQKVTF

SEQ ID NO: 375776 - protein, 14 aa, Homo sapiens
  CDR3 for beta chain variable domain of TCR clone 187888 (TRBV4-1, TRBJ1-5)
CASSPKGDNQPEHF

SEQ ID NO: 375777 - protein, 19 aa, Homo sapiens
  CDR3 for alpha chain variable domain of TCR clone 187889 (TRAV2, TRAJ20)
ILQLREADAAVYRDCKLSF

SEQ ID NO: 375778 - protein, 17 aa, Homo sapiens
  CDR3 for beta chain variable domain of TCR clone 187889 (TRBV11-2, TRBJ2-1)
CASSLYPPGVEYNEQFF

SEQ ID NO: 375779 - protein, 18 aa, Homo sapiens
  CDR3 for alpha chain variable domain of TCR clone 187890 (TRAV21, TRAJ52)
CAMRPSPAGGTSYGKLTF

SEQ ID NO: 375780 - protein, 13 aa, Homo sapiens
  CDR3 for beta chain variable domain of TCR clone 187890 (TRBV20-1, TRBJ1-1)
CSARVGGNTEAFF

SEQ ID NO: 375781 - protein, 13 aa, Homo sapiens
  CDR3 for alpha chain variable domain of TCR clone 187891 (TRAV13-1, TRAJ21)
FSASRYNFNKFYF

SEQ ID NO: 375782 - protein, 14 aa, Homo sapiens
  CDR3 for beta chain variable domain of TCR clone 187891 (TRBV11-2, TRBJ2-3)
CASSRLARTDTQYF

SEQ ID NO: 375783 - protein, 14 aa, Homo sapiens
  CDR3 for alpha chain variable domain of TCR clone 187892 (TRAV17, TRAJ22)
CATSPFGSARQLTF

SEQ ID NO: 375784 - protein, 15 aa, Homo sapiens
  CDR3 for beta chain variable domain of TCR clone 187892 (TRBV4-1, TRBJ2-5)
CASSQWDLCQETQYF

SEQ ID NO: 375785 - protein, 12 aa, Homo sapiens
  CDR3 for alpha chain variable domain of TCR clone 187893 (TRAV38-1, TRAJ47)
CAFETYGNKLVL

SEQ ID NO: 375786 - protein, 15 aa, Homo sapiens
  CDR3 for beta chain variable domain of TCR clone 187893 (TRBV20-1, TRBJ2-7)
CSARKGLAESYEQYF

SEQ ID NO: 375787 - protein, 16 aa, Homo sapiens
  CDR3 for alpha chain variable domain of TCR clone 187894 (TRAV30, TRAJ24)
CGTEIVDADSWGKFQF

SEQ ID NO: 375788 - protein, 12 aa, Homo sapiens
  CDR3 for beta chain variable domain of TCR clone 187894 (TRBV20-1, TRBJ1-5)
CSARAPDQPQHF

SEQ ID NO: 375789 - protein, 14 aa, Homo sapiens
  CDR3 for alpha chain variable domain of TCR clone 187895 (TRAV8-1, TRAJ5)
CAVRTDTGRRALTF

SEQ ID NO: 375790 - protein, 11 aa, Homo sapiens
  CDR3 for beta chain variable domain of TCR clone 187895 (TRBV19, TRBJ1-1)
CASSIGSEAFF

SEQ ID NO: 375791 - protein, 15 aa, Homo sapiens
  CDR3 for alpha chain variable domain of TCR clone 187896 (TRAV21, TRAJ24)
CAARSSTDRWGKLQF

SEQ ID NO: 375792 - protein, 15 aa, Homo sapiens
  CDR3 for beta chain variable domain of TCR clone 187896 (TRBV20-1, TRBJ1-1)
CSASRGVTGNTEAFF

SEQ ID NO: 375793 - protein, 16 aa, Homo sapiens
  CDR3 for alpha chain variable domain of TCR clone 187897 (TRAV12-3, TRAJ53)
CAMSPGSGGSTYKLTF

SEQ ID NO: 375794 - protein, 12 aa, Homo sapiens
  CDR3 for beta chain variable domain of TCR clone 187897 (TRBV7-8, TRBJ2-7)
CASSLGDREQYF

SEQ ID NO: 375795 - protein, 13 aa, Homo sapiens
  CDR3 for alpha chain variable domain of TCR clone 187898 (TRAV17, TRAJ37)
CATDPGNTGKIIF

SEQ ID NO: 375796 - protein, 13 aa, Homo sapiens
  CDR3 for beta chain variable domain of TCR clone 187898 (TRBV5-5, TRBJ2-5)
CASSSLGQETQYF

SEQ ID NO: 375797 - protein, 15 aa, Homo sapiens
  CDR3 for alpha chain variable domain of TCR clone 187899 (TRAV26-1, TRAJ29)
CIVRVEGSGNKPLVF

SEQ ID NO: 375798 - protein, 17 aa, Homo sapiens
  CDR3 for beta chain variable domain of TCR clone 187899 (TRBV13, TRBJ2-3)
CASSLSRVAGGRNTQYF

SEQ ID NO: 375799 - protein, 14 aa, Homo sapiens
  CDR3 for alpha chain variable domain of TCR clone 187900 (TRAV12-2, TRAJ31)
CAVSKGNNNARLMF

SEQ ID NO: 375800 - protein, 13 aa, Homo sapiens
  CDR3 for beta chain variable domain of TCR clone 187900 (TRBV20-1, TRBJ1-1)
CSAPLGGGTEAFF

SEQ ID NO: 375801 - protein, 14 aa, Homo sapiens
  CDR3 for alpha chain variable domain of TCR clone 187901 (TRAV12-3, TRAJ15)
CAMIPPQAGTALIV

SEQ ID NO: 375802 - protein, 14 aa, Homo sapiens
  CDR3 for beta chain variable domain of TCR clone 187901 (TRBV20-1, TRBJ2-2)
CSARRRLATGELFF

SEQ ID NO: 375803 - protein, 13 aa, Homo sapiens
  CDR3 for alpha chain variable domain of TCR clone 187902 (TRAV21, TRAJ27)
CAARPGNAGKSTF

SEQ ID NO: 375804 - protein, 13 aa, Homo sapiens
  CDR3 for beta chain variable domain of TCR clone 187902 (TRBV7-3, TRBJ2-2)
CASSLNVLGELFF

SEQ ID NO: 375805 - protein, 14 aa, Homo sapiens
  CDR3 for alpha chain variable domain of TCR clone 187903 (TRAV38-1, TRAJ40)
CALRPTSGTYKYIF

SEQ ID NO: 375806 - protein, 13 aa, Homo sapiens
  CDR3 for beta chain variable domain of TCR clone 187903 (TRBV2, TRBJ1-4)
CASNRGTNEKLFF

SEQ ID NO: 375807 - protein, 12 aa, Homo sapiens
  CDR3 for alpha chain variable domain of TCR clone 187904 (TRAV3, TRAJ20)
CAVRDGDYKLSF

SEQ ID NO: 375808 - protein, 13 aa, Homo sapiens
  CDR3 for beta chain variable domain of TCR clone 187904 (TRBV9, TRBJ2-1)
CASSVGQGGEQLF

SEQ ID NO: 375809 - protein, 14 aa, Homo sapiens
  CDR3 for alpha chain variable domain of TCR clone 187905 (TRAV21, TRAJ57)
CAPHFRGGSEKLVF

SEQ ID NO: 375810 - protein, 15 aa, Homo sapiens
  CDR3 for beta chain variable domain of TCR clone 187905 (TRBV28, TRBJ2-1)
CASSIIAGGRSEQFF

SEQ ID NO: 375811 - protein, 22 aa, Homo sapiens
  CDR3 for alpha chain variable domain of TCR clone 187906 (TRAV30, TRAJ48)
TASQLSYSVTYSCGIGNEKLTF

SEQ ID NO: 375812 - protein, 14 aa, Homo sapiens
  CDR3 for beta chain variable domain of TCR clone 187906 (TRBV7-6, TRBJ2-3)
CASGVAGGTDTQYF

SEQ ID NO: 375813 - protein, 14 aa, Homo sapiens
  CDR3 for alpha chain variable domain of TCR clone 187907 (TRAV38-2/DV8, TRAJ54)
AAMNQIQGAQKLVF

SEQ ID NO: 375814 - protein, 17 aa, Homo sapiens
  CDR3 for beta chain variable domain of TCR clone 187907 (TRBV6-1, TRBJ2-3)
CASSEALRLISTDTQYF

SEQ ID NO: 375815 - protein, 18 aa, Homo sapiens
  CDR3 for alpha chain variable domain of TCR clone 187908 (TRAV21, TRAJ52)
GAVRPSPAGGTSYGKLTF

SEQ ID NO: 375816 - protein, 17 aa, Homo sapiens
  CDR3 for beta chain variable domain of TCR clone 187908 (TRBV13, TRBJ2-3)
CASCLSRVAGGRNTQYF

SEQ ID NO: 375817 - protein, 15 aa, Homo sapiens
  CDR3 for alpha chain variable domain of TCR clone 187909 (TRAV12-2, TRAJ23)
CAVNTLYNQGGKLIF

SEQ ID NO: 375818 - protein, 17 aa, Homo sapiens
  CDR3 for beta chain variable domain of TCR clone 187909 (TRBV20-1, TRBJ2-2)
CSASGSGQGGLTGELFF

SEQ ID NO: 375819 - protein, 14 aa, Homo sapiens
  CDR3 for alpha chain variable domain of TCR clone 187910 (TRAV12-2, TRAJ13)
CAVKKTGGYQKVTF

SEQ ID NO: 375820 - protein, 14 aa, Homo sapiens
  CDR3 for beta chain variable domain of TCR clone 187910 (TRBV10-3, TRBJ2-5)
CAIRTSGGQETQYF

SEQ ID NO: 375821 - protein, 15 aa, Homo sapiens
  CDR3 for alpha chain variable domain of TCR clone 187911 (TRAV4, TRAJ39)
CLVGPNNNAGNMLTF

SEQ ID NO: 375822 - protein, 15 aa, Homo sapiens
  CDR3 for beta chain variable domain of TCR clone 187911 (TRBV7-3, TRBJ1-3)
CASSLTGTGGNTIYF

SEQ ID NO: 375823 - protein, 12 aa, Homo sapiens
  CDR3 for alpha chain variable domain of TCR clone 187912 (TRAV13-2, TRAJ23)
CAERHRGGKLIF

SEQ ID NO: 375824 - protein, 13 aa, Homo sapiens
  CDR3 for beta chain variable domain of TCR clone 187912 (TRBV4-1, TRBJ2-2)
CASSQENTGELFF

SEQ ID NO: 375825 - protein, 23 aa, Homo sapiens
  CDR3 for alpha chain variable domain of TCR clone 187913 (TRAV3, TRAJ17)
CAVRARRGGRSCRQQANFCRRNQ

SEQ ID NO: 375826 - protein, 14 aa, Homo sapiens
  CDR3 for beta chain variable domain of TCR clone 187913 (TRBV4-1, TRBJ2-2)
CASSQAVNTGELFF

SEQ ID NO: 375827 - protein, 13 aa, Homo sapiens
  CDR3 for alpha chain variable domain of TCR clone 187914 (TRAV30, TRAJ24)
CGTVTDSWGKLQF

SEQ ID NO: 375828 - protein, 16 aa, Homo sapiens
  CDR3 for beta chain variable domain of TCR clone 187914 (TRBV19, TRBJ2-1)
CASSKAGPSAYNEQFF

SEQ ID NO: 375829 - protein, 14 aa, Homo sapiens
  CDR3 for alpha chain variable domain of TCR clone 187915 (TRAV8-3, TRAJ4)
CAVGAAGGYNKLIF

SEQ ID NO: 375830 - protein, 13 aa, Homo sapiens
  CDR3 for beta chain variable domain of TCR clone 187915 (TRBV20-1, TRBJ2-7)
CSARGRGAYEQYF

SEQ ID NO: 375831 - protein, 14 aa, Homo sapiens
  CDR3 for alpha chain variable domain of TCR clone 187916 (TRAV4, TRAJ39)
CLVGPNNNAGNISP

SEQ ID NO: 375832 - protein, 13 aa, Homo sapiens
  CDR3 for beta chain variable domain of TCR clone 187916 (TRBV11-2, TRBJ2-5)
CASSSTGEETQYF

SEQ ID NO: 375833 - protein, 15 aa, Homo sapiens
  CDR3 for alpha chain variable domain of TCR clone 187917 (TRAV3, TRAJ47)
CAVRDIEEYGNKLVF

SEQ ID NO: 375834 - protein, 14 aa, Homo sapiens
  CDR3 for beta chain variable domain of TCR clone 187917 (TRBV13, TRBJ2-5)
CASSLERVGETQYF

SEQ ID NO: 375835 - protein, 18 aa, Homo sapiens
  CDR3 for alpha chain variable domain of TCR clone 187918 (TRAV12-2, )
CAVEDIQNPDPAVYPLTD

SEQ ID NO: 375836 - protein, 16 aa, Homo sapiens
  CDR3 for beta chain variable domain of TCR clone 187918 (TRBV6-1, TRBJ1-2)
CASSGAWQGRSHGYTF

SEQ ID NO: 375837 - protein, 16 aa, Homo sapiens
  CDR3 for alpha chain variable domain of TCR clone 187919 (TRAV30, TRAJ24)
CGTESVDADSWGKFQF

SEQ ID NO: 375838 - protein, 13 aa, Homo sapiens
  CDR3 for beta chain variable domain of TCR clone 187919 (TRBV20-1, TRBJ1-1)
CSAPPGGHTEAFF

SEQ ID NO: 375839 - protein, 18 aa, Homo sapiens
  CDR3 for alpha chain variable domain of TCR clone 187920 (TRAV21, TRAJ52)
WAVRPSPAGGTSYGKLTF

SEQ ID NO: 375840 - protein, 16 aa, Homo sapiens
  CDR3 for beta chain variable domain of TCR clone 187920 (TRBV7-3, TRBJ2-1)
CASSLEGYRSYNEQFF

SEQ ID NO: 375841 - protein, 13 aa, Homo sapiens
  CDR3 for alpha chain variable domain of TCR clone 187921 (TRAV12-2, TRAJ11)
CAVPNSGYSTLTF

SEQ ID NO: 375842 - protein, 15 aa, Homo sapiens
  CDR3 for beta chain variable domain of TCR clone 187921 (TRBV7-9, TRBJ2-7)
CASSPGGGLTYEQYF

SEQ ID NO: 375843 - protein, 11 aa, Homo sapiens
  CDR3 for alpha chain variable domain of TCR clone 187922 (TRAV8-3, TRAJ18)
CAVGGRQRLNP

SEQ ID NO: 375844 - protein, 13 aa, Homo sapiens
  CDR3 for beta chain variable domain of TCR clone 187922 (TRBV29-1, TRBJ1-3)
CSVEGGSGNTIYF

SEQ ID NO: 375845 - protein, 13 aa, Homo sapiens
  CDR3 for alpha chain variable domain of TCR clone 187923 (TRAV8-2, TRAJ43)
CVVSDQGDNDMRF

SEQ ID NO: 375846 - protein, 14 aa, Homo sapiens
  CDR3 for beta chain variable domain of TCR clone 187923 (TRBV4-1, TRBJ2-2)
CASSQAVNTGELFF

SEQ ID NO: 375847 - protein, 15 aa, Homo sapiens
  CDR3 for alpha chain variable domain of TCR clone 187924 (TRAV8-6, TRAJ10)
CAVSDQAVGGNKLTF

SEQ ID NO: 375848 - protein, 15 aa, Homo sapiens
  CDR3 for beta chain variable domain of TCR clone 187924 (TRBV3-1, TRBJ2-5)
CASSANLGGPETQYF

SEQ ID NO: 375849 - protein, 14 aa, Homo sapiens
  CDR3 for alpha chain variable domain of TCR clone 187925 (TRAV13-1, TRAJ35)
CAARKGGFGNGLHC

SEQ ID NO: 375850 - protein, 13 aa, Homo sapiens
  CDR3 for beta chain variable domain of TCR clone 187925 (TRBV7-3, TRBJ1-1)
CASSQDWGAEAFF

SEQ ID NO: 375851 - protein, 13 aa, Homo sapiens
  CDR3 for alpha chain variable domain of TCR clone 187926 (TRAV27, TRAJ45)
CRSSGGGADGLTF

SEQ ID NO: 375852 - protein, 16 aa, Homo sapiens
  CDR3 for beta chain variable domain of TCR clone 187926 (TRBV11-2, TRBJ2-1)
CASSKAGPSSYNEQFF

SEQ ID NO: 375853 - protein, 12 aa, Homo sapiens
  CDR3 for alpha chain variable domain of TCR clone 187927 (TRAV23/DV6, TRAJ30)
CAASKGDDKIIF

SEQ ID NO: 375854 - protein, 14 aa, Homo sapiens
  CDR3 for beta chain variable domain of TCR clone 187927 (TRBV7-9, TRBJ2-1)
CASSPRDSLYEQFF

SEQ ID NO: 375855 - protein, 17 aa, Homo sapiens
  CDR3 for alpha chain variable domain of TCR clone 187928 (TRAV1-1, TRAJ32)
CAVRVDELWWCYKQAHL

SEQ ID NO: 375856 - protein, 12 aa, Homo sapiens
  CDR3 for beta chain variable domain of TCR clone 187928 (TRBV19, TRBJ2-1)
CASSRQEAEQFF

SEQ ID NO: 375857 - protein, 14 aa, Homo sapiens
  CDR3 for alpha chain variable domain of TCR clone 187929 (TRAV1-2, TRAJ16)
CAVNRFSDVTKLLF

SEQ ID NO: 375858 - protein, 15 aa, Homo sapiens
  CDR3 for beta chain variable domain of TCR clone 187929 (TRBV9, TRBJ1-6)
CASSVAGTGDSPLHF

SEQ ID NO: 375859 - protein, 13 aa, Homo sapiens
  CDR3 for alpha chain variable domain of TCR clone 187930 (TRAV13-1, TRAJ37)
CAARSGNTGTLIF

SEQ ID NO: 375860 - protein, 14 aa, Homo sapiens
  CDR3 for beta chain variable domain of TCR clone 187930 (TRBV5-1, TRBJ2-5)
CASSLAGKQETQYF

SEQ ID NO: 375861 - protein, 14 aa, Homo sapiens
  CDR3 for alpha chain variable domain of TCR clone 187931 (TRAV8-3, TRAJ23)
CAVIIYNQGGKLIF

SEQ ID NO: 375862 - protein, 15 aa, Homo sapiens
  CDR3 for beta chain variable domain of TCR clone 187931 (TRBV18, TRBJ2-1)
RSSSPPSASYNEQFF

SEQ ID NO: 375863 - protein, 13 aa, Homo sapiens
  CDR3 for alpha chain variable domain of TCR clone 187932 (TRAV1-2, TRAJ9)
CAALNTGCFKTIF

SEQ ID NO: 375864 - protein, 13 aa, Homo sapiens
  CDR3 for beta chain variable domain of TCR clone 187932 (TRBV15, TRBJ1-6)
CATSGGLNSPLHF

SEQ ID NO: 375865 - protein, 15 aa, Homo sapiens
  CDR3 for alpha chain variable domain of TCR clone 187933 (TRAV8-3, TRAJ27)
CAVGPSKTNAGTSTC

SEQ ID NO: 375866 - protein, 15 aa, Homo sapiens
  CDR3 for beta chain variable domain of TCR clone 187933 (TRBV7-2, TRBJ2-1)
CASSSGLAGGNEQFF

SEQ ID NO: 375867 - protein, 14 aa, Homo sapiens
  CDR3 for alpha chain variable domain of TCR clone 187934 (TRAV12-2, TRAJ13)
CAVKKTGGYHKVTF

SEQ ID NO: 375868 - protein, 15 aa, Homo sapiens
  CDR3 for beta chain variable domain of TCR clone 187934 (TRBV6-3, TRBJ2-7)
CASSSPGTVFYEQYF

SEQ ID NO: 375869 - protein, 14 aa, Homo sapiens
  CDR3 for alpha chain variable domain of TCR clone 187935 (TRAV1-2, TRAJ8)
CAVRGDTGFQKLVF

SEQ ID NO: 375870 - protein, 17 aa, Homo sapiens
  CDR3 for beta chain variable domain of TCR clone 187935 (TRBV9, TRBJ2-2)
CASSVGGQGTDTGELFI

SEQ ID NO: 375871 - protein, 14 aa, Homo sapiens
  CDR3 for alpha chain variable domain of TCR clone 187936 (TRAV8-1, TRAJ49)
CASSIANTGNQFYF

SEQ ID NO: 375872 - protein, 16 aa, Homo sapiens
  CDR3 for beta chain variable domain of TCR clone 187936 (TRBV19, TRBJ2-7)
CASSTPGQASSYEQYF

SEQ ID NO: 375873 - protein, 13 aa, Homo sapiens
  CDR3 for alpha chain variable domain of TCR clone 187937 (TRAV8-4, TRAJ48)
CSVSLFGNEKLTF

SEQ ID NO: 375874 - protein, 15 aa, Homo sapiens
  CDR3 for beta chain variable domain of TCR clone 187937 (TRBV20-1, TRBJ2-7)
CSARKGLAESYEQYF

SEQ ID NO: 375875 - protein, 11 aa, Homo sapiens
  CDR3 for alpha chain variable domain of TCR clone 187938 (TRAV12-2, TRAJ43)
CASPIGNNMRF

SEQ ID NO: 375876 - protein, 12 aa, Homo sapiens
  CDR3 for beta chain variable domain of TCR clone 187938 (TRBV20-1, TRBJ2-7)
CSAGLKMGEQYF

SEQ ID NO: 375877 - protein, 13 aa, Homo sapiens
  CDR3 for alpha chain variable domain of TCR clone 187939 (TRAV13-1, TRAJ9)
CAARITGGFKTIL

SEQ ID NO: 375878 - protein, 13 aa, Homo sapiens
  CDR3 for beta chain variable domain of TCR clone 187939 (TRBV12-4, TRBJ2-5)
CASSPGTEETQYF

SEQ ID NO: 375879 - protein, 14 aa, Homo sapiens
  CDR3 for alpha chain variable domain of TCR clone 187940 (TRAV1-2, TRAJ16)
CAVNRFSDGQKLLF

SEQ ID NO: 375880 - protein, 12 aa, Homo sapiens
  CDR3 for beta chain variable domain of TCR clone 187940 (TRBV29-1, TRBJ2-3)
CGVTGGADTQYF

SEQ ID NO: 375881 - protein, 14 aa, Homo sapiens
  CDR3 for alpha chain variable domain of TCR clone 187941 (TRAV12-3, TRAJ42)
CAMNYGGSQGNLIF

SEQ ID NO: 375882 - protein, 15 aa, Homo sapiens
  CDR3 for beta chain variable domain of TCR clone 187941 (TRBV28, TRBJ2-5)
CASSPPWSYQETQYF

SEQ ID NO: 375883 - protein, 16 aa, Homo sapiens
  CDR3 for alpha chain variable domain of TCR clone 187942 (TRAV3, TRAJ10)
CAVRDMRAGGGNKLTF

SEQ ID NO: 375884 - protein, 20 aa, Homo sapiens
  CDR3 for beta chain variable domain of TCR clone 187942 (TRBV11-3, TRBJ2-7)
CASGQRTSGSLRAVLRAGHQ

SEQ ID NO: 375885 - protein, 14 aa, Homo sapiens
  CDR3 for alpha chain variable domain of TCR clone 187943 (TRAV12-2, TRAJ13)
CAVKNTGGYQKVTF

SEQ ID NO: 375886 - protein, 16 aa, Homo sapiens
  CDR3 for beta chain variable domain of TCR clone 187943 (TRBV20-1, TRBJ1-4)
CSAPGQGLLTNEKLFF

SEQ ID NO: 375887 - protein, 12 aa, Homo sapiens
  CDR3 for alpha chain variable domain of TCR clone 187944 (TRAV12-2, TRAJ47)
CAVAEYGNKLVF

SEQ ID NO: 375888 - protein, 16 aa, Homo sapiens
  CDR3 for beta chain variable domain of TCR clone 187944 (TRBV7-3, TRBJ2-2)
CASSLKRGTLSGELFF

SEQ ID NO: 375889 - protein, 19 aa, Homo sapiens
  CDR3 for alpha chain variable domain of TCR clone 187945 (TRAV26-1, TRAJ50)
CCVLLHRQNPKTSYDKVIF

SEQ ID NO: 375890 - protein, 17 aa, Homo sapiens
  CDR3 for beta chain variable domain of TCR clone 187945 (TRBV4-1, TRBJ1-4)
CASSQDGPRGVEEKLFF

SEQ ID NO: 375891 - protein, 14 aa, Homo sapiens
  CDR3 for alpha chain variable domain of TCR clone 187946 (TRAV26-1, TRAJ34)
CIVRESYNTDKLNF

SEQ ID NO: 375892 - protein, 16 aa, Homo sapiens
  CDR3 for beta chain variable domain of TCR clone 187946 (TRBV10-3, TRBJ2-1)
CAISGVGDGGGGEQFF

SEQ ID NO: 375893 - protein, 21 aa, Homo sapiens
  CDR3 for alpha chain variable domain of TCR clone 187947 (TRAV17, TRAJ7)
CATLGRLAFGKGNQVWSYQIS

SEQ ID NO: 375894 - protein, 13 aa, Homo sapiens
  CDR3 for beta chain variable domain of TCR clone 187947 (TRBV12-4, TRBJ2-7)
CASSLERVREQYF

SEQ ID NO: 375895 - protein, 13 aa, Homo sapiens
  CDR3 for alpha chain variable domain of TCR clone 187948 (TRAV1-2, TRAJ11)
CAVRDSGYSTLTF

SEQ ID NO: 375896 - protein, 14 aa, Homo sapiens
  CDR3 for beta chain variable domain of TCR clone 187948 (TRBV19, TRBJ2-1)
CAISGTNLQGEQFF

SEQ ID NO: 375897 - protein, 11 aa, Homo sapiens
  CDR3 for alpha chain variable domain of TCR clone 187949 (TRAV13-2, TRAJ23)
CAESPRGKLIF

SEQ ID NO: 375898 - protein, 13 aa, Homo sapiens
  CDR3 for beta chain variable domain of TCR clone 187949 (TRBV7-2, TRBJ2-2)
CASSLAVTGELFF

SEQ ID NO: 375899 - protein, 12 aa, Homo sapiens
  CDR3 for alpha chain variable domain of TCR clone 187950 (TRAV12-3, TRAJ17)
CAMTLTGNKQTF

SEQ ID NO: 375900 - protein, 15 aa, Homo sapiens
  CDR3 for beta chain variable domain of TCR clone 187950 (TRBV6-3, TRBJ2-7)
CASSSPGTVFYEQYF

SEQ ID NO: 375901 - protein, 12 aa, Homo sapiens
  CDR3 for alpha chain variable domain of TCR clone 187951 (TRAV8-6, TRAJ11)
CAVSPGYSTLTF

SEQ ID NO: 375902 - protein, 11 aa, Homo sapiens
  CDR3 for beta chain variable domain of TCR clone 187951 (TRBV20-1, TRBJ1-5)
CSAQGDQPQHF

SEQ ID NO: 375903 - protein, 14 aa, Homo sapiens
  CDR3 for alpha chain variable domain of TCR clone 187952 (TRAV35, TRAJ13)
CAGSPSGGYQKVTF

SEQ ID NO: 375904 - protein, 17 aa, Homo sapiens
  CDR3 for beta chain variable domain of TCR clone 187952 (TRBV18, TRBJ1-5)
CQLATCRVRQNNQPQHF

SEQ ID NO: 375905 - protein, 14 aa, Homo sapiens
  CDR3 for alpha chain variable domain of TCR clone 187953 (TRAV17, TRAJ57)
CATDSQGGSEKLVF

SEQ ID NO: 375906 - protein, 14 aa, Homo sapiens
  CDR3 for beta chain variable domain of TCR clone 187953 (TRBV25-1, TRBJ1-1)
CASTHLGGNTEAFF

SEQ ID NO: 375907 - protein, 14 aa, Homo sapiens
  CDR3 for alpha chain variable domain of TCR clone 187954 (TRAV12-2, TRAJ13)
CAVKKTGGNQKVTF

SEQ ID NO: 375908 - protein, 15 aa, Homo sapiens
  CDR3 for beta chain variable domain of TCR clone 187954 (TRBV12-4, TRBJ2-1)
CASSNGGGSSNEQFF

SEQ ID NO: 375909 - protein, 11 aa, Homo sapiens
  CDR3 for alpha chain variable domain of TCR clone 187955 (TRAV27, TRAJ43)
CAGANNNDMRF

SEQ ID NO: 375910 - protein, 15 aa, Homo sapiens
  CDR3 for beta chain variable domain of TCR clone 187955 (TRBV6-1, TRBJ2-6)
CASSSRPSGANVLTF

SEQ ID NO: 375911 - protein, 11 aa, Homo sapiens
  CDR3 for alpha chain variable domain of TCR clone 187956 (TRAV3, TRAJ13)
FAVTSYQKVTC

SEQ ID NO: 375912 - protein, 15 aa, Homo sapiens
  CDR3 for beta chain variable domain of TCR clone 187956 (TRBV7-9, TRBJ2-7)
CASSSSGLAVYEQYF

SEQ ID NO: 375913 - protein, 12 aa, Homo sapiens
  CDR3 for alpha chain variable domain of TCR clone 187957 (TRAV21, TRAJ30)
CAALNRDDKIIF

SEQ ID NO: 375914 - protein, 14 aa, Homo sapiens
  CDR3 for beta chain variable domain of TCR clone 187957 (TRBV23-1, TRBJ2-5)
CASSFLRSQETQYF

SEQ ID NO: 375915 - protein, 15 aa, Homo sapiens
  CDR3 for alpha chain variable domain of TCR clone 187958 (TRAV20, TRAJ50)
CAVRQMKTSYDKVIF

SEQ ID NO: 375916 - protein, 14 aa, Homo sapiens
  CDR3 for beta chain variable domain of TCR clone 187958 (TRBV7-2, TRBJ2-7)
CASSPKTSFYEQYF

SEQ ID NO: 375917 - protein, 12 aa, Homo sapiens
  CDR3 for alpha chain variable domain of TCR clone 187959 (TRAV12-2, TRAJ8)
CAVNTGFQKLVF

SEQ ID NO: 375918 - protein, 16 aa, Homo sapiens
  CDR3 for beta chain variable domain of TCR clone 187959 (TRBV6-1, TRBJ2-5)
CASSETLDRGAETQYF

SEQ ID NO: 375919 - protein, 16 aa, Homo sapiens
  CDR3 for alpha chain variable domain of TCR clone 187960 (TRAV30, TRAJ24)
CGTEIVDADSWGKFQV

SEQ ID NO: 375920 - protein, 16 aa, Homo sapiens
  CDR3 for beta chain variable domain of TCR clone 187960 (TRBV4-2, TRBJ2-3)
CASSQELAGDTDTQYF

SEQ ID NO: 375921 - protein, 13 aa, Homo sapiens
  CDR3 for alpha chain variable domain of TCR clone 187961 (TRAV12-3, TRAJ7)
CAMSASGNNRLAF

SEQ ID NO: 375922 - protein, 17 aa, Homo sapiens
  CDR3 for beta chain variable domain of TCR clone 187961 (TRBV7-8, TRBJ2-6)
CASSAGTGGAGANDLTF

SEQ ID NO: 375923 - protein, 16 aa, Homo sapiens
  CDR3 for alpha chain variable domain of TCR clone 187962 (TRAV3, TRAJ10)
CAVRDMRAGGGNKLTF

SEQ ID NO: 375924 - protein, 12 aa, Homo sapiens
  CDR3 for beta chain variable domain of TCR clone 187962 (TRBV7-6, TRBJ2-5)
CASSLSQETQYF

SEQ ID NO: 375925 - protein, 13 aa, Homo sapiens
  CDR3 for alpha chain variable domain of TCR clone 187963 (TRAV9-2, TRAJ49)
CALIQIGGNPFYF

SEQ ID NO: 375926 - protein, 16 aa, Homo sapiens
  CDR3 for beta chain variable domain of TCR clone 187963 (TRBV12-4, TRBJ2-5)
CASSFFVRGRQETQYF

SEQ ID NO: 375927 - protein, 14 aa, Homo sapiens
  CDR3 for alpha chain variable domain of TCR clone 187964 (TRAV20, TRAJ26)
CAVQAASYGQNFVF

SEQ ID NO: 375928 - protein, 14 aa, Homo sapiens
  CDR3 for beta chain variable domain of TCR clone 187964 (TRBV27, TRBJ2-2)
CASSLGDTTGELFF

SEQ ID NO: 375929 - protein, 16 aa, Homo sapiens
  CDR3 for alpha chain variable domain of TCR clone 187965 (TRAV12-3, TRAJ20)
CAMDKLSFGAGTTVTV

SEQ ID NO: 375930 - protein, 16 aa, Homo sapiens
  CDR3 for beta chain variable domain of TCR clone 187965 (TRBV7-9, TRBJ1-2)
CASSLGFSSGEDGYTF

SEQ ID NO: 375931 - protein, 13 aa, Homo sapiens
  CDR3 for alpha chain variable domain of TCR clone 187966 (TRAV13-2, TRAJ48)
CAEMDSGNEKLTF

SEQ ID NO: 375932 - protein, 13 aa, Homo sapiens
  CDR3 for beta chain variable domain of TCR clone 187966 (TRBV11-3, TRBJ1-2)
CASSLLQGEGYTF

SEQ ID NO: 375933 - protein, 18 aa, Homo sapiens
  CDR3 for alpha chain variable domain of TCR clone 187967 (TRAV12-3, TRAJ52)
CAMSVGGAGGTSYGKLTF

SEQ ID NO: 375934 - protein, 15 aa, Homo sapiens
  CDR3 for beta chain variable domain of TCR clone 187967 (TRBV7-3, TRBJ2-1)
CASSLDGNSYNEQFF

SEQ ID NO: 375935 - protein, 15 aa, Homo sapiens
  CDR3 for alpha chain variable domain of TCR clone 187968 (TRAV3, TRAJ13)
CAVRVYSGGYQKVIF

SEQ ID NO: 375936 - protein, 15 aa, Homo sapiens
  CDR3 for beta chain variable domain of TCR clone 187968 (TRBV5-7, TRBJ1-2)
CASSLGVAANYGYTF

SEQ ID NO: 375937 - protein, 17 aa, Homo sapiens
  CDR3 for alpha chain variable domain of TCR clone 187969 (TRAV17, TRAJ28)
CATDAVYSGAGSYQPTF

SEQ ID NO: 375938 - protein, 16 aa, Homo sapiens
  CDR3 for beta chain variable domain of TCR clone 187969 (TRBV6-1, TRBJ2-5)
CASSETLDRGAETQYF

SEQ ID NO: 375939 - protein, 11 aa, Homo sapiens
  CDR3 for alpha chain variable domain of TCR clone 187970 (TRAV2, TRAJ13)
CASVGYQKVTF

SEQ ID NO: 375940 - protein, 14 aa, Homo sapiens
  CDR3 for beta chain variable domain of TCR clone 187970 (TRBV7-2, TRBJ2-7)
CASRSQGAAYEQYF

SEQ ID NO: 375941 - protein, 22 aa, Homo sapiens
  CDR3 for alpha chain variable domain of TCR clone 187971 (TRAV13-1, TRAJ41)
CAASGPRRTQIPDIQNPAPAVY

SEQ ID NO: 375942 - protein, 16 aa, Homo sapiens
  CDR3 for beta chain variable domain of TCR clone 187971 (TRBV18, TRBJ2-3)
CASSPPAGGPRKYAVF

SEQ ID NO: 375943 - protein, 13 aa, Homo sapiens
  CDR3 for alpha chain variable domain of TCR clone 187972 (TRAV12-1, TRAJ40)
CVVPTSGTYKYIF

SEQ ID NO: 375944 - protein, 18 aa, Homo sapiens
  CDR3 for beta chain variable domain of TCR clone 187972 (TRBV7-6, TRBJ2-1)
CASSPRTSGMSSYHEQFF

SEQ ID NO: 375945 - protein, 14 aa, Homo sapiens
  CDR3 for alpha chain variable domain of TCR clone 187973 (TRAV8-6, TRAJ39)
CAVSERDAGNMLTF

SEQ ID NO: 375946 - protein, 14 aa, Homo sapiens
  CDR3 for beta chain variable domain of TCR clone 187973 (TRBV4-2, TRBJ2-1)
CASGLDRAYNEQFF

SEQ ID NO: 375947 - protein, 15 aa, Homo sapiens
  CDR3 for alpha chain variable domain of TCR clone 187974 (TRAV21, TRAJ24)
CAARSSTDSWGKLHF

SEQ ID NO: 375948 - protein, 11 aa, Homo sapiens
  CDR3 for beta chain variable domain of TCR clone 187974 (TRBV11-2, TRBJ2-2)
CASSLPGELFF

SEQ ID NO: 375949 - protein, 17 aa, Homo sapiens
  CDR3 for alpha chain variable domain of TCR clone 187975 (TRAV3, TRAJ12)
CAVRDGGRMDSSYKLIF

SEQ ID NO: 375950 - protein, 14 aa, Homo sapiens
  CDR3 for beta chain variable domain of TCR clone 187975 (TRBV7-2, TRBJ2-2)
CASRGQGAAGELFV

SEQ ID NO: 375951 - protein, 12 aa, Homo sapiens
  CDR3 for alpha chain variable domain of TCR clone 187976 (TRAV27, TRAJ13)
CAGAGGYQKATF

SEQ ID NO: 375952 - protein, 15 aa, Homo sapiens
  CDR3 for beta chain variable domain of TCR clone 187976 (TRBV20-1, TRBJ2-6)
CSARDRGPGANVLTF

SEQ ID NO: 375953 - protein, 21 aa, Homo sapiens
  CDR3 for alpha chain variable domain of TCR clone 187977 (TRAV6, TRAJ36)
CARQTTSSLGLERDSPLFPIS

SEQ ID NO: 375954 - protein, 14 aa, Homo sapiens
  CDR3 for beta chain variable domain of TCR clone 187977 (TRBV10-2, TRBJ1-5)
CASSSTRRNQPQHF

SEQ ID NO: 375955 - protein, 13 aa, Homo sapiens
  CDR3 for alpha chain variable domain of TCR clone 187978 (TRAV27, TRAJ6)
CARGTRGSYIPTF

SEQ ID NO: 375956 - protein, 14 aa, Homo sapiens
  CDR3 for beta chain variable domain of TCR clone 187978 (TRBV6-1, TRBJ1-3)
CASVQGGGGNTIYF

SEQ ID NO: 375957 - protein, 13 aa, Homo sapiens
  CDR3 for alpha chain variable domain of TCR clone 187979 (TRAV21, TRAJ20)
CAVCLRVDYKLSF

SEQ ID NO: 375958 - protein, 13 aa, Homo sapiens
  CDR3 for beta chain variable domain of TCR clone 187979 (TRBV29-1, TRBJ2-1)
CSVEGGRVNEQFF

SEQ ID NO: 375959 - protein, 14 aa, Homo sapiens
  CDR3 for alpha chain variable domain of TCR clone 187980 (TRAV17, TRAJ23)
CATALGGQGGKLIF

SEQ ID NO: 375960 - protein, 15 aa, Homo sapiens
  CDR3 for beta chain variable domain of TCR clone 187980 (TRBV9, TRBJ1-6)
CASSVAGTGDSPLHF

SEQ ID NO: 375961 - protein, 15 aa, Homo sapiens
  CDR3 for alpha chain variable domain of TCR clone 187981 (TRAV8-3, TRAJ27)
CAVGPSKTNAGKSTF

SEQ ID NO: 375962 - protein, 16 aa, Homo sapiens
  CDR3 for beta chain variable domain of TCR clone 187981 (TRBV27, TRBJ2-2)
CASSLRPGGAPGELFF

SEQ ID NO: 375963 - protein, 13 aa, Homo sapiens
  CDR3 for alpha chain variable domain of TCR clone 187982 (TRAV6, TRAJ4)
CALLRGGYNKLIF

SEQ ID NO: 375964 - protein, 16 aa, Homo sapiens
  CDR3 for beta chain variable domain of TCR clone 187982 (TRBV5-1, TRBJ2-1)
GASSIRSGGSYNEQFF

SEQ ID NO: 375965 - protein, 15 aa, Homo sapiens
  CDR3 for alpha chain variable domain of TCR clone 187983 (TRAV26-1, TRAJ28)
CIVRVAGAGSYQLTF

SEQ ID NO: 375966 - protein, 19 aa, Homo sapiens
  CDR3 for beta chain variable domain of TCR clone 187983 (TRBV7-3, TRBJ2-7)
CASSLTGVAGGWPSYEQFF

SEQ ID NO: 375967 - protein, 14 aa, Homo sapiens
  CDR3 for alpha chain variable domain of TCR clone 187984 (TRAV2, TRAJ22)
CAVGRGGSARQLTL

SEQ ID NO: 375968 - protein, 12 aa, Homo sapiens
  CDR3 for beta chain variable domain of TCR clone 187984 (TRBV19, TRBJ2-1)
CASSMQDTEQFF

SEQ ID NO: 375969 - protein, 12 aa, Homo sapiens
  CDR3 for alpha chain variable domain of TCR clone 187985 (TRAV12-3, TRAJ20)
CAMVRGDYKLSF

SEQ ID NO: 375970 - protein, 13 aa, Homo sapiens
  CDR3 for beta chain variable domain of TCR clone 187985 (TRBV7-2, TRBJ2-5)
CASSQTSVETQYF

SEQ ID NO: 375971 - protein, 14 aa, Homo sapiens
  CDR3 for alpha chain variable domain of TCR clone 187986 (TRAV8-4, TRAJ9)
CAVRLNTGGFKTIF

SEQ ID NO: 375972 - protein, 15 aa, Homo sapiens
  CDR3 for beta chain variable domain of TCR clone 187986 (TRBV20-1, TRBJ2-7)
CSVRDRVSGMDEQYF

SEQ ID NO: 375973 - protein, 13 aa, Homo sapiens
  CDR3 for alpha chain variable domain of TCR clone 187987 (TRAV13-2, TRAJ15)
GAERPQAGTALIF

SEQ ID NO: 375974 - protein, 15 aa, Homo sapiens
  CDR3 for beta chain variable domain of TCR clone 187987 (TRBV11-2, TRBJ2-7)
CASRFPGTGGYEQYF

SEQ ID NO: 375975 - protein, 12 aa, Homo sapiens
  CDR3 for alpha chain variable domain of TCR clone 187988 (TRAV13-2, TRAJ23)
CAERHRGGKVIF

SEQ ID NO: 375976 - protein, 16 aa, Homo sapiens
  CDR3 for beta chain variable domain of TCR clone 187988 (TRBV4-1, TRBJ2-5)
CASSHADRAGGETQYF

SEQ ID NO: 375977 - protein, 16 aa, Homo sapiens
  CDR3 for alpha chain variable domain of TCR clone 187989 (TRAV12-3, TRAJ53)
CAMSPGSGSSNYKLTF

SEQ ID NO: 375978 - protein, 17 aa, Homo sapiens
  CDR3 for beta chain variable domain of TCR clone 187989 (TRBV28, TRBJ2-5)
CASSTPEGDALQETQYF

SEQ ID NO: 375979 - protein, 13 aa, Homo sapiens
  CDR3 for alpha chain variable domain of TCR clone 187990 (TRAV1-2, TRAJ9)
CAALNTGGFKTIF

SEQ ID NO: 375980 - protein, 14 aa, Homo sapiens
  CDR3 for beta chain variable domain of TCR clone 187990 (TRBV5-5, TRBJ1-4)
CASSPRGYNEELFF

SEQ ID NO: 375981 - protein, 15 aa, Homo sapiens
  CDR3 for alpha chain variable domain of TCR clone 187991 (TRAV8-4, TRAJ37)
CAVTYGSSNTGKLIF

SEQ ID NO: 375982 - protein, 13 aa, Homo sapiens
  CDR3 for beta chain variable domain of TCR clone 187991 (TRBV12-4, TRBJ1-1)
CASSPGTGFEAFF

SEQ ID NO: 375983 - protein, 14 aa, Homo sapiens
  CDR3 for alpha chain variable domain of TCR clone 187992 (TRAV35, TRAJ40)
SAGSTTSGTYKYIF

SEQ ID NO: 375984 - protein, 15 aa, Homo sapiens
  CDR3 for beta chain variable domain of TCR clone 187992 (TRBV20-1, TRBJ2-7)
CSARDRVSGMDEQYF

SEQ ID NO: 375985 - protein, 12 aa, Homo sapiens
  CDR3 for alpha chain variable domain of TCR clone 187993 (TRAV34, TRAJ27)
CGADTNAGKSTF

SEQ ID NO: 375986 - protein, 17 aa, Homo sapiens
  CDR3 for beta chain variable domain of TCR clone 187993 (TRBV13, TRBJ2-3)
CASSLSRVAGGRNTQYF

SEQ ID NO: 375987 - protein, 12 aa, Homo sapiens
  CDR3 for alpha chain variable domain of TCR clone 187994 (TRAV25, TRAJ31)
CAGHLNNARLMF

SEQ ID NO: 375988 - protein, 15 aa, Homo sapiens
  CDR3 for beta chain variable domain of TCR clone 187994 (TRBV27, TRBJ2-3)
CASSSLAGVIDTQYF

SEQ ID NO: 375989 - protein, 16 aa, Homo sapiens
  CDR3 for alpha chain variable domain of TCR clone 187995 (TRAV2, TRAJ4)
RAVEDRFSGGYNKLIF

SEQ ID NO: 375990 - protein, 13 aa, Homo sapiens
  CDR3 for beta chain variable domain of TCR clone 187995 (TRBV7-7, TRBJ2-5)
CASSRSGQETQYF

SEQ ID NO: 375991 - protein, 13 aa, Homo sapiens
  CDR3 for alpha chain variable domain of TCR clone 187996 (TRAV12-2, TRAJ49)
CAVKPNTGNQFYF

SEQ ID NO: 375992 - protein, 14 aa, Homo sapiens
  CDR3 for beta chain variable domain of TCR clone 187996 (TRBV19, TRBJ2-3)
CASSIRQGADTQYF

SEQ ID NO: 375993 - protein, 16 aa, Homo sapiens
  CDR3 for alpha chain variable domain of TCR clone 187997 (TRAV26-1, TRAJ36)
CIVRVSYQTGANNLFF

SEQ ID NO: 375994 - protein, 16 aa, Homo sapiens
  CDR3 for beta chain variable domain of TCR clone 187997 (TRBV20-1, TRBJ2-1)
CSARDFSGRIGDEQFF

SEQ ID NO: 375995 - protein, 17 aa, Homo sapiens
  CDR3 for alpha chain variable domain of TCR clone 187998 (TRAV17, TRAJ7)
CATLGRLAFGKGNQVVV

SEQ ID NO: 375996 - protein, 13 aa, Homo sapiens
  CDR3 for beta chain variable domain of TCR clone 187998 (TRBV12-4, TRBJ2-7)
SASSLERVREQYF

SEQ ID NO: 375997 - protein, 11 aa, Homo sapiens
  CDR3 for alpha chain variable domain of TCR clone 187999 (TRAV17, TRAJ36)
CAPTGANNLFF

SEQ ID NO: 375998 - protein, 12 aa, Homo sapiens
  CDR3 for beta chain variable domain of TCR clone 187999 (TRBV29-1, TRBJ2-3)
CSVTGGADKQYY

SEQ ID NO: 375999 - protein, 10 aa, Homo sapiens
  CDR3 for alpha chain variable domain of TCR clone 188000 (TRAV8-4, TRAJ43)
SVVSADDMRF

SEQ ID NO: 376000 - protein, 15 aa, Homo sapiens
  CDR3 for beta chain variable domain of TCR clone 188000 (TRBV5-1, TRBJ2-3)
CASSVTSGSTDTQYF

SEQ ID NO: 376001 - protein, 23 aa, Homo sapiens
  CDR3 for alpha chain variable domain of TCR clone 188001 (TRAV30, TRAJ43)
CTLRPPSSVTQEPTSAALSDMRF

SEQ ID NO: 376002 - protein, 17 aa, Homo sapiens
  CDR3 for beta chain variable domain of TCR clone 188001 (TRBV7-3, TRBJ2-2)
CASSLSGTSGGTGELFF

SEQ ID NO: 376003 - protein, 17 aa, Homo sapiens
  CDR3 for alpha chain variable domain of TCR clone 188002 (TRAV23/DV6, TRAJ12)
CAAIDLGAMDSIYKLIF

SEQ ID NO: 376004 - protein, 12 aa, Homo sapiens
  CDR3 for beta chain variable domain of TCR clone 188002 (TRBV10-3, TRBJ2-2)
CAIRENTGELFF

SEQ ID NO: 376005 - protein, 21 aa, Homo sapiens
  CDR3 for alpha chain variable domain of TCR clone 188003 (TRAV8-3, TRAJ6)
CAVGGEEATYLHLEEEPALLF

SEQ ID NO: 376006 - protein, 14 aa, Homo sapiens
  CDR3 for beta chain variable domain of TCR clone 188003 (TRBV5-1, TRBJ2-7)
CASSRGDSLYEQYF

SEQ ID NO: 376007 - protein, 15 aa, Homo sapiens
  CDR3 for alpha chain variable domain of TCR clone 188004 (TRAV8-3, TRAJ11)
CAVGLLTSGYSTLTF

SEQ ID NO: 376008 - protein, 16 aa, Homo sapiens
  CDR3 for beta chain variable domain of TCR clone 188004 (TRBV28, TRBJ2-1)
CASSLWGRTSGTLQFF

SEQ ID NO: 376009 - protein, 16 aa, Homo sapiens
  CDR3 for alpha chain variable domain of TCR clone 188005 (TRAV3, TRAJ37)
CAVRVRGSGNTGKLIF

SEQ ID NO: 376010 - protein, 16 aa, Homo sapiens
  CDR3 for beta chain variable domain of TCR clone 188005 (TRBV11-2, TRBJ2-7)
CASSTTTGGVSYEQYF

SEQ ID NO: 376011 - protein, 11 aa, Homo sapiens
  CDR3 for alpha chain variable domain of TCR clone 188006 (TRAV12-2, TRAJ31)
CAVTRWARLMF

SEQ ID NO: 376012 - protein, 14 aa, Homo sapiens
  CDR3 for beta chain variable domain of TCR clone 188006 (TRBV19, TRBJ1-5)
CASNSYGTHQPQHF

SEQ ID NO: 376013 - protein, 18 aa, Homo sapiens
  CDR3 for alpha chain variable domain of TCR clone 188007 (TRAV26-2, TRAJ45)
CILRVDKYSGEGADGLTF

SEQ ID NO: 376014 - protein, 14 aa, Homo sapiens
  CDR3 for beta chain variable domain of TCR clone 188007 (TRBV7-2, TRBJ2-7)
CASRSQGAAYEQYF

SEQ ID NO: 376015 - protein, 14 aa, Homo sapiens
  CDR3 for alpha chain variable domain of TCR clone 188008 (TRAV1-2, TRAJ16)
CAVNRFSDGQKLLF

SEQ ID NO: 376016 - protein, 15 aa, Homo sapiens
  CDR3 for beta chain variable domain of TCR clone 188008 (TRBV7-2, TRBJ2-5)
CASSFLRGGKRPSTS

SEQ ID NO: 376017 - protein, 11 aa, Homo sapiens
  CDR3 for alpha chain variable domain of TCR clone 188009 (TRAV4, TRAJ31)
CLVGDNARLMF

SEQ ID NO: 376018 - protein, 14 aa, Homo sapiens
  CDR3 for beta chain variable domain of TCR clone 188009 (TRBV7-9, TRBJ2-1)
CASSPRDSLYEQFF

SEQ ID NO: 376019 - protein, 11 aa, Homo sapiens
  CDR3 for alpha chain variable domain of TCR clone 188010 (TRAV2, TRAJ31)
CAAWPPARLMF

SEQ ID NO: 376020 - protein, 13 aa, Homo sapiens
  CDR3 for beta chain variable domain of TCR clone 188010 (TRBV4-1, TRBJ2-3)
CASSQPPTDTQYF

SEQ ID NO: 376021 - protein, 13 aa, Homo sapiens
  CDR3 for alpha chain variable domain of TCR clone 188011 (TRAV12-3, TRAJ33)
CAMSVKSNYQLIW

SEQ ID NO: 376022 - protein, 14 aa, Homo sapiens
  CDR3 for beta chain variable domain of TCR clone 188011 (TRBV24-1, TRBJ1-1)
CATSIPRGDTEAFF

SEQ ID NO: 376023 - protein, 14 aa, Homo sapiens
  CDR3 for alpha chain variable domain of TCR clone 188012 (TRAV10, TRAJ36)
CVVKYEGGANNLFF

SEQ ID NO: 376024 - protein, 15 aa, Homo sapiens
  CDR3 for beta chain variable domain of TCR clone 188012 (TRBV11-3, TRBJ2-3)
CASLKDGREGDTQYF

SEQ ID NO: 376025 - protein, 23 aa, Homo sapiens
  CDR3 for alpha chain variable domain of TCR clone 188013 (TRAV1-1, TRAJ29)
LLQELQMKDSASYFLVGNTPLVF

SEQ ID NO: 376026 - protein, 13 aa, Homo sapiens
  CDR3 for beta chain variable domain of TCR clone 188013 (TRBV25-1, TRBJ2-7)
CASSEDGDYEQYF

SEQ ID NO: 376027 - protein, 14 aa, Homo sapiens
  CDR3 for alpha chain variable domain of TCR clone 188014 (TRAV12-2, TRAJ13)
CAVKKTGGYQKVTF

SEQ ID NO: 376028 - protein, 18 aa, Homo sapiens
  CDR3 for beta chain variable domain of TCR clone 188014 (TRBV12-4, TRBJ2-7)
CASSSSDSQPTGSYEQYF

SEQ ID NO: 376029 - protein, 15 aa, Homo sapiens
  CDR3 for alpha chain variable domain of TCR clone 188015 (TRAV8-3, TRAJ45)
CASSYSGGGADGLTF

SEQ ID NO: 376030 - protein, 15 aa, Homo sapiens
  CDR3 for beta chain variable domain of TCR clone 188015 (TRBV6-1, TRBJ2-4)
CASSEAVWTINIQYF

SEQ ID NO: 376031 - protein, 13 aa, Homo sapiens
  CDR3 for alpha chain variable domain of TCR clone 188016 (TRAV12-3, TRAJ31)
CAMSANNNARVMF

SEQ ID NO: 376032 - protein, 16 aa, Homo sapiens
  CDR3 for beta chain variable domain of TCR clone 188016 (TRBV7-9, TRBJ1-2)
CASSLGFSSGEDGYTF

SEQ ID NO: 376033 - protein, 15 aa, Homo sapiens
  CDR3 for alpha chain variable domain of TCR clone 188017 (TRAV27, TRAJ50)
CAGRERGTSYDKVIF

SEQ ID NO: 376034 - protein, 16 aa, Homo sapiens
  CDR3 for beta chain variable domain of TCR clone 188017 (TRBV10-3, TRBJ1-5)
CAISDQVGAPNQLQHF

SEQ ID NO: 376035 - protein, 14 aa, Homo sapiens
  CDR3 for alpha chain variable domain of TCR clone 188018 (TRAV26-1, TRAJ21)
CIVRPPDNFNKFYF

SEQ ID NO: 376036 - protein, 14 aa, Homo sapiens
  CDR3 for beta chain variable domain of TCR clone 188018 (TRBV19, TRBJ2-1)
CASPTFVLSGEQFF

SEQ ID NO: 376037 - protein, 18 aa, Homo sapiens
  CDR3 for alpha chain variable domain of TCR clone 188019 (TRAV26-2, TRAJ45)
CILRVDKYSGGGADGLTF

SEQ ID NO: 376038 - protein, 15 aa, Homo sapiens
  CDR3 for beta chain variable domain of TCR clone 188019 (TRBV7-8, TRBJ2-3)
CASSPRTGSTDTQYF

SEQ ID NO: 376039 - protein, 14 aa, Homo sapiens
  CDR3 for alpha chain variable domain of TCR clone 188020 (TRAV12-1, TRAJ34)
CVVNLDYNTDKLIF

SEQ ID NO: 376040 - protein, 15 aa, Homo sapiens
  CDR3 for beta chain variable domain of TCR clone 188020 (TRBV7-3, TRBJ2-1)
CASSPTGGGEVEQFF

SEQ ID NO: 376041 - protein, 13 aa, Homo sapiens
  CDR3 for alpha chain variable domain of TCR clone 188021 (TRAV12-2, TRAJ22)
CALYSGSARLLTF

SEQ ID NO: 376042 - protein, 13 aa, Homo sapiens
  CDR3 for beta chain variable domain of TCR clone 188021 (TRBV19, TRBJ2-1)
CASMEFRSNEQFF

SEQ ID NO: 376043 - protein, 14 aa, Homo sapiens
  CDR3 for alpha chain variable domain of TCR clone 188022 (TRAV23/DV6, TRAJ39)
CAARIGNAGNMLTF

SEQ ID NO: 376044 - protein, 12 aa, Homo sapiens
  CDR3 for beta chain variable domain of TCR clone 188022 (TRBV20-1, TRBJ2-5)
CSVGTGSETQYF

SEQ ID NO: 376045 - protein, 14 aa, Homo sapiens
  CDR3 for alpha chain variable domain of TCR clone 188023 (TRAV1-2, TRAJ16)
CAVNPFSDGQKLLF

SEQ ID NO: 376046 - protein, 14 aa, Homo sapiens
  CDR3 for beta chain variable domain of TCR clone 188023 (TRBV10-2, TRBJ1-5)
CASSSTGRNQPQHF

SEQ ID NO: 376047 - protein, 15 aa, Homo sapiens
  CDR3 for alpha chain variable domain of TCR clone 188024 (TRAV13-1, TRAJ57)
CAAGNTQGGAEKLVF

SEQ ID NO: 376048 - protein, 13 aa, Homo sapiens
  CDR3 for beta chain variable domain of TCR clone 188024 (TRBV7-6, TRBJ1-5)
CASSQGPNRPQHF

SEQ ID NO: 376049 - protein, 14 aa, Homo sapiens
  CDR3 for alpha chain variable domain of TCR clone 188025 (TRAV1-1, TRAJ33)
CAVRPEDSNYQLIW

SEQ ID NO: 376050 - protein, 15 aa, Homo sapiens
  CDR3 for beta chain variable domain of TCR clone 188025 (TRBV20-1, TRBJ2-1)
CRARSPGGPGNEQFF

SEQ ID NO: 376051 - protein, 15 aa, Homo sapiens
  CDR3 for alpha chain variable domain of TCR clone 188026 (TRAV8-3, TRAJ45)
CDSSYSGGGADGLTF

SEQ ID NO: 376052 - protein, 14 aa, Homo sapiens
  CDR3 for beta chain variable domain of TCR clone 188026 (TRBV7-8, TRBJ1-2)
CASSPDSLSYGYTF

SEQ ID NO: 376053 - protein, 14 aa, Homo sapiens
  CDR3 for alpha chain variable domain of TCR clone 188027 (TRAV38-1, TRAJ40)
CALRPTSGTYKYIF

SEQ ID NO: 376054 - protein, 12 aa, Homo sapiens
  CDR3 for beta chain variable domain of TCR clone 188027 (TRBV6-3, TRBJ2-7)
CASSEPGFEQYF

SEQ ID NO: 376055 - protein, 15 aa, Homo sapiens
  CDR3 for alpha chain variable domain of TCR clone 188028 (TRAV27, TRAJ38)
CAARRNAGNNRKLIC

SEQ ID NO: 376056 - protein, 13 aa, Homo sapiens
  CDR3 for beta chain variable domain of TCR clone 188028 (TRBV7-3, TRBJ2-1)
CASSLDSYNEQFF

SEQ ID NO: 376057 - protein, 14 aa, Homo sapiens
  CDR3 for alpha chain variable domain of TCR clone 188029 (TRAV8-1, TRAJ23)
CAVGTYNQGGKLIF

SEQ ID NO: 376058 - protein, 16 aa, Homo sapiens
  CDR3 for beta chain variable domain of TCR clone 188029 (TRBV18, TRBJ1-5)
CASAPSTGNSNQPQHF

SEQ ID NO: 376059 - protein, 15 aa, Homo sapiens
  CDR3 for alpha chain variable domain of TCR clone 188030 (TRAV2, TRAJ9)
CAVEDRGTAGFKTIF

SEQ ID NO: 376060 - protein, 13 aa, Homo sapiens
  CDR3 for beta chain variable domain of TCR clone 188030 (TRBV19, TRBJ1-5)
CASSIGGNQPQHF

SEQ ID NO: 376061 - protein, 14 aa, Homo sapiens
  CDR3 for alpha chain variable domain of TCR clone 188031 (TRAV26-1, TRAJ21)
CIVRPPYNFNKFYF

SEQ ID NO: 376062 - protein, 13 aa, Homo sapiens
  CDR3 for beta chain variable domain of TCR clone 188031 (TRBV24-1, TRBJ1-4)
CATNNGRSEKLFF

SEQ ID NO: 376063 - protein, 14 aa, Homo sapiens
  CDR3 for alpha chain variable domain of TCR clone 188032 (TRAV8-1, TRAJ34)
CALPRGTTSSSLVL

SEQ ID NO: 376064 - protein, 16 aa, Homo sapiens
  CDR3 for beta chain variable domain of TCR clone 188032 (TRBV11-2, TRBJ1-2)
CASSLDTGGADYGYTF

SEQ ID NO: 376065 - protein, 13 aa, Homo sapiens
  CDR3 for alpha chain variable domain of TCR clone 188033 (TRAV35, TRAJ37)
CAGHAGNTGKLIF

SEQ ID NO: 376066 - protein, 14 aa, Homo sapiens
  CDR3 for beta chain variable domain of TCR clone 188033 (TRBV7-8, TRBJ2-3)
CASSLEAGTDTQYF

SEQ ID NO: 376067 - protein, 17 aa, Homo sapiens
  CDR3 for alpha chain variable domain of TCR clone 188034 (TRAV8-6, TRAJ58)
CAVSSWVGETSGSRLTF

SEQ ID NO: 376068 - protein, 16 aa, Homo sapiens
  CDR3 for beta chain variable domain of TCR clone 188034 (TRBV27, TRBJ2-2)
CASSFRGLVRTGELFF

SEQ ID NO: 376069 - protein, 21 aa, Homo sapiens
  CDR3 for alpha chain variable domain of TCR clone 188035 (TRAV1-1, TRAJ6)
CLLLLRCERIERTGGSYIPTF

SEQ ID NO: 376070 - protein, 13 aa, Homo sapiens
  CDR3 for beta chain variable domain of TCR clone 188035 (TRBV10-2, TRBJ2-7)
CASGASGGYEQYF

SEQ ID NO: 376071 - protein, 15 aa, Homo sapiens
  CDR3 for alpha chain variable domain of TCR clone 188036 (TRAV13-1, TRAJ17)
CAASIERAAGNKLTF

SEQ ID NO: 376072 - protein, 15 aa, Homo sapiens
  CDR3 for beta chain variable domain of TCR clone 188036 (TRBV5-1, TRBJ2-7)
CASSLNGGPAREQYF

SEQ ID NO: 376073 - protein, 15 aa, Homo sapiens
  CDR3 for alpha chain variable domain of TCR clone 188037 (TRAV21, TRAJ40)
CAVRPQTSGTYKYIF

SEQ ID NO: 376074 - protein, 13 aa, Homo sapiens
  CDR3 for beta chain variable domain of TCR clone 188037 (TRBV4-1, TRBJ2-1)
CASSQAGGDEQFF

SEQ ID NO: 376075 - protein, 15 aa, Homo sapiens
  CDR3 for alpha chain variable domain of TCR clone 188038 (TRAV23/DV6, TRAJ13)
CAACPGVGGYQKVTF

SEQ ID NO: 376076 - protein, 17 aa, Homo sapiens
  CDR3 for beta chain variable domain of TCR clone 188038 (TRBV19, TRBJ2-7)
CASSISFYDSYPYEQYF

SEQ ID NO: 376077 - protein, 13 aa, Homo sapiens
  CDR3 for alpha chain variable domain of TCR clone 188039 (TRAV39, TRAJ58)
CAGEETNGSRLTF

SEQ ID NO: 376078 - protein, 13 aa, Homo sapiens
  CDR3 for beta chain variable domain of TCR clone 188039 (TRBV15, TRBJ2-7)
CATSTTGHYEQYF

SEQ ID NO: 376079 - protein, 17 aa, Homo sapiens
  CDR3 for alpha chain variable domain of TCR clone 188040 (TRAV21, TRAJ52)
CAVGVNAGGTSYGKLAF

SEQ ID NO: 376080 - protein, 14 aa, Homo sapiens
  CDR3 for beta chain variable domain of TCR clone 188040 (TRBV5-1, TRBJ2-7)
CASSRGESLYEQYF

SEQ ID NO: 376081 - protein, 15 aa, Homo sapiens
  CDR3 for alpha chain variable domain of TCR clone 188041 (TRAV21, TRAJ32)
CAVTSYGGATNKLIF

SEQ ID NO: 376082 - protein, 18 aa, Homo sapiens
  CDR3 for beta chain variable domain of TCR clone 188041 (TRBV7-9, TRBJ2-1)
CASSTGLAEGSSYNEQFF

SEQ ID NO: 376083 - protein, 14 aa, Homo sapiens
  CDR3 for alpha chain variable domain of TCR clone 188042 (TRAV3, TRAJ17)
CCERHGSCRQQATF

SEQ ID NO: 376084 - protein, 14 aa, Homo sapiens
  CDR3 for beta chain variable domain of TCR clone 188042 (TRBV6-3, TRBJ1-1)
CASSNLLPGAEAFF

SEQ ID NO: 376085 - protein, 11 aa, Homo sapiens
  CDR3 for alpha chain variable domain of TCR clone 188043 (TRAV2, TRAJ21)
CAVFYFNKFYF

SEQ ID NO: 376086 - protein, 14 aa, Homo sapiens
  CDR3 for beta chain variable domain of TCR clone 188043 (TRBV15, TRBJ2-3)
CAMRSGTSTDTQYF

SEQ ID NO: 376087 - protein, 13 aa, Homo sapiens
  CDR3 for alpha chain variable domain of TCR clone 188044 (TRAV29/DV5, TRAJ31)
CAASRNNNARLMF

SEQ ID NO: 376088 - protein, 15 aa, Homo sapiens
  CDR3 for beta chain variable domain of TCR clone 188044 (TRBV9, TRBJ1-6)
CASSVAGTGDSTLHF

SEQ ID NO: 376089 - protein, 13 aa, Homo sapiens
  CDR3 for alpha chain variable domain of TCR clone 188045 (TRAV17, TRAJ9)
CATDYTGGFKTIF

SEQ ID NO: 376090 - protein, 16 aa, Homo sapiens
  CDR3 for beta chain variable domain of TCR clone 188045 (TRBV20-1, TRBJ2-6)
CSASSQGYDGANVLTF

SEQ ID NO: 376091 - protein, 13 aa, Homo sapiens
  CDR3 for alpha chain variable domain of TCR clone 188046 (TRAV20, TRAJ34)
CAVRSYTTDKLIF

SEQ ID NO: 376092 - protein, 12 aa, Homo sapiens
  CDR3 for beta chain variable domain of TCR clone 188046 (TRBV11-2, TRBJ2-1)
CASSPGNNEQFF

SEQ ID NO: 376093 - protein, 16 aa, Homo sapiens
  CDR3 for alpha chain variable domain of TCR clone 188047 (TRAV8-3, TRAJ10)
CAVGPGVTGGGNKLAF

SEQ ID NO: 376094 - protein, 13 aa, Homo sapiens
  CDR3 for beta chain variable domain of TCR clone 188047 (TRBV18, TRBJ1-1)
CASSPGPSGEAFF

SEQ ID NO: 376095 - protein, 13 aa, Homo sapiens
  CDR3 for alpha chain variable domain of TCR clone 188048 (TRAV2, TRAJ40)
CAVVTSGTYKYIF

SEQ ID NO: 376096 - protein, 13 aa, Homo sapiens
  CDR3 for beta chain variable domain of TCR clone 188048 (TRBV7-9, TRBJ2-5)
CASLPSGRESQYF

SEQ ID NO: 376097 - protein, 15 aa, Homo sapiens
  CDR3 for alpha chain variable domain of TCR clone 188049 (TRAV26-1, TRAJ24)
CIVPLTTDSGGKFQF

SEQ ID NO: 376098 - protein, 14 aa, Homo sapiens
  CDR3 for beta chain variable domain of TCR clone 188049 (TRBV10-3, TRBJ2-3)
CAISEKGLGDTQYF

SEQ ID NO: 376099 - protein, 16 aa, Homo sapiens
  CDR3 for alpha chain variable domain of TCR clone 188050 (TRAV30, TRAJ24)
CGTEIVDADSWGKFQF

SEQ ID NO: 376100 - protein, 12 aa, Homo sapiens
  CDR3 for beta chain variable domain of TCR clone 188050 (TRBV7-8, TRBJ2-7)
CASSLGDREQYF

SEQ ID NO: 376101 - protein, 12 aa, Homo sapiens
  CDR3 for alpha chain variable domain of TCR clone 188051 (TRAV12-1, TRAJ40)
CVFYSGTYKYIF

SEQ ID NO: 376102 - protein, 12 aa, Homo sapiens
  CDR3 for beta chain variable domain of TCR clone 188051 (TRBV7-3, TRBJ2-1)
CASSFINNEQYF

SEQ ID NO: 376103 - protein, 14 aa, Homo sapiens
  CDR3 for alpha chain variable domain of TCR clone 188052 (TRAV1-1, TRAJ27)
CAVIYNTNAGKSTF

SEQ ID NO: 376104 - protein, 15 aa, Homo sapiens
  CDR3 for beta chain variable domain of TCR clone 188052 (TRBV7-2, TRBJ2-2)
CASSLAGGLTGELFF

SEQ ID NO: 376105 - protein, 14 aa, Homo sapiens
  CDR3 for alpha chain variable domain of TCR clone 188053 (TRAV3, TRAJ36)
CAVREGTGANNLFF

SEQ ID NO: 376106 - protein, 16 aa, Homo sapiens
  CDR3 for beta chain variable domain of TCR clone 188053 (TRBV20-1, TRBJ2-6)
CSAREGPGVGANVLTF

SEQ ID NO: 376107 - protein, 15 aa, Homo sapiens
  CDR3 for alpha chain variable domain of TCR clone 188054 (TRAV8-3, TRAJ45)
CASSYSGGGADGLTF

SEQ ID NO: 376108 - protein, 15 aa, Homo sapiens
  CDR3 for beta chain variable domain of TCR clone 188054 (TRBV7-2, TRBJ1-2)
CASSPRAGWNYGYTF

SEQ ID NO: 376109 - protein, 13 aa, Homo sapiens
  CDR3 for alpha chain variable domain of TCR clone 188055 (TRAV21, TRAJ20)
CAVGLRVDYKLSF

SEQ ID NO: 376110 - protein, 13 aa, Homo sapiens
  CDR3 for beta chain variable domain of TCR clone 188055 (TRBV29-1, TRBJ2-1)
CSVEGGRVNEQFV

SEQ ID NO: 376111 - protein, 16 aa, Homo sapiens
  CDR3 for alpha chain variable domain of TCR clone 188056 (TRAV3, TRAJ10)
CAVRDMNAGGGDKLTL

SEQ ID NO: 376112 - protein, 16 aa, Homo sapiens
  CDR3 for beta chain variable domain of TCR clone 188056 (TRBV6-3, TRBJ1-2)
CASSYSRRASNYGYTF

SEQ ID NO: 376113 - protein, 15 aa, Homo sapiens
  CDR3 for alpha chain variable domain of TCR clone 188057 (TRAV12-1, TRAJ42)
CVVTRDGGSQGNLIF

SEQ ID NO: 376114 - protein, 13 aa, Homo sapiens
  CDR3 for beta chain variable domain of TCR clone 188057 (TRBV27, TRBJ2-7)
CASSLPTGYEQYF

SEQ ID NO: 376115 - protein, 11 aa, Homo sapiens
  CDR3 for alpha chain variable domain of TCR clone 188058 (TRAV1-2, TRAJ20)
CAVANDYKLSF

SEQ ID NO: 376116 - protein, 14 aa, Homo sapiens
  CDR3 for beta chain variable domain of TCR clone 188058 (TRBV29-1, TRBJ2-3)
CSARAGAGTDTQYF

SEQ ID NO: 376117 - protein, 12 aa, Homo sapiens
  CDR3 for alpha chain variable domain of TCR clone 188059 (TRAV12-1, TRAJ23)
CVVNIPGGKLIF

SEQ ID NO: 376118 - protein, 15 aa, Homo sapiens
  CDR3 for beta chain variable domain of TCR clone 188059 (TRBV7-2, TRBJ2-7)
CVSSLVSSGSYEQYF

SEQ ID NO: 376119 - protein, 12 aa, Homo sapiens
  CDR3 for alpha chain variable domain of TCR clone 188060 (TRAV12-3, TRAJ17)
CAMTLTGNKLTF

SEQ ID NO: 376120 - protein, 23 aa, Homo sapiens
  CDR3 for beta chain variable domain of TCR clone 188060 (TRBV20-1, TRBJ2-6)
CPSCRQQLLHLPVRGSGANVLTF

SEQ ID NO: 376121 - protein, 15 aa, Homo sapiens
  CDR3 for alpha chain variable domain of TCR clone 188061 (TRAV20, TRAJ6)
CAVRLQSGGSYIPTF

SEQ ID NO: 376122 - protein, 15 aa, Homo sapiens
  CDR3 for beta chain variable domain of TCR clone 188061 (TRBV20-1, TRBJ2-7)
CSARDRVSGMDEQYF

SEQ ID NO: 376123 - protein, 12 aa, Homo sapiens
  CDR3 for alpha chain variable domain of TCR clone 188062 (TRAV12-3, TRAJ21)
CAMFNNFNKVYL

SEQ ID NO: 376124 - protein, 14 aa, Homo sapiens
  CDR3 for beta chain variable domain of TCR clone 188062 (TRBV28, TRBJ2-1)
CASSIQGTVGEQFF

SEQ ID NO: 376125 - protein, 15 aa, Homo sapiens
  CDR3 for alpha chain variable domain of TCR clone 188063 (TRAV20, TRAJ4)
CAVEGSSGGYNKLIF

SEQ ID NO: 376126 - protein, 19 aa, Homo sapiens
  CDR3 for beta chain variable domain of TCR clone 188063 (TRBV7-8, TRBJ2-7)
CASTLGGGPWRAVLRAGHQ

SEQ ID NO: 376127 - protein, 12 aa, Homo sapiens
  CDR3 for alpha chain variable domain of TCR clone 188064 (TRAV4, TRAJ26)
CLVGDYGQNFVF

SEQ ID NO: 376128 - protein, 12 aa, Homo sapiens
  CDR3 for beta chain variable domain of TCR clone 188064 (TRBV7-9, TRBJ1-1)
CASSPSSTEAFF

SEQ ID NO: 376129 - protein, 15 aa, Homo sapiens
  CDR3 for alpha chain variable domain of TCR clone 188065 (TRAV8-3, TRAJ11)
CAVGLLNSGYSTLTF

SEQ ID NO: 376130 - protein, 14 aa, Homo sapiens
  CDR3 for beta chain variable domain of TCR clone 188065 (TRBV4-3, TRBJ1-1)
CASSQGWTPARAFF

SEQ ID NO: 376131 - protein, 13 aa, Homo sapiens
  CDR3 for alpha chain variable domain of TCR clone 188066 (TRAV12-1, TRAJ21)
CVVIGDNFNKFYF

SEQ ID NO: 376132 - protein, 17 aa, Homo sapiens
  CDR3 for beta chain variable domain of TCR clone 188066 (TRBV13, TRBJ2-3)
CASSLSRVAGGRNTQYF

SEQ ID NO: 376133 - protein, 15 aa, Homo sapiens
  CDR3 for alpha chain variable domain of TCR clone 188067 (TRAV3, TRAJ20)
CAERDIKLSDYKLSF

SEQ ID NO: 376134 - protein, 15 aa, Homo sapiens
  CDR3 for beta chain variable domain of TCR clone 188067 (TRBV7-9, TRBJ1-6)
CASSSPGRGNSPLHF

SEQ ID NO: 376135 - protein, 12 aa, Homo sapiens
  CDR3 for alpha chain variable domain of TCR clone 188068 (TRAV34, TRAJ27)
CGADTNAGKSTF

SEQ ID NO: 376136 - protein, 13 aa, Homo sapiens
  CDR3 for beta chain variable domain of TCR clone 188068 (TRBV10-2, TRBJ1-5)
CASSGNSNQPQHF

SEQ ID NO: 376137 - protein, 14 aa, Homo sapiens
  CDR3 for alpha chain variable domain of TCR clone 188069 (TRAV12-1, TRAJ30)
CVPTGTNRDYKILF

SEQ ID NO: 376138 - protein, 11 aa, Homo sapiens
  CDR3 for beta chain variable domain of TCR clone 188069 (TRBV4-1, TRBJ2-2)
CASEHTGELFF

SEQ ID NO: 376139 - protein, 15 aa, Homo sapiens
  CDR3 for alpha chain variable domain of TCR clone 188070 (TRAV12-1, TRAJ9)
CVVSFGDTGGFKTIF

SEQ ID NO: 376140 - protein, 14 aa, Homo sapiens
  CDR3 for beta chain variable domain of TCR clone 188070 (TRBV7-6, TRBJ1-6)
CASSQAGGGSPLHF

SEQ ID NO: 376141 - protein, 17 aa, Homo sapiens
  CDR3 for alpha chain variable domain of TCR clone 188071 (TRAV17, TRAJ28)
CATDPRRGGAGIYQLTF

SEQ ID NO: 376142 - protein, 16 aa, Homo sapiens
  CDR3 for beta chain variable domain of TCR clone 188071 (TRBV25-1, TRBJ1-1)
CASSGDRDRGRIEAFF

SEQ ID NO: 376143 - protein, 11 aa, Homo sapiens
  CDR3 for alpha chain variable domain of TCR clone 188072 (TRAV12-1, TRAJ21)
FVVNNFNKFYF

SEQ ID NO: 376144 - protein, 17 aa, Homo sapiens
  CDR3 for beta chain variable domain of TCR clone 188072 (TRBV7-8, TRBJ2-1)
CASSPPTGTLAYNEQFF

SEQ ID NO: 376145 - protein, 15 aa, Homo sapiens
  CDR3 for alpha chain variable domain of TCR clone 188073 (TRAV8-3, TRAJ27)
CAVGPSKTNAGKSTF

SEQ ID NO: 376146 - protein, 14 aa, Homo sapiens
  CDR3 for beta chain variable domain of TCR clone 188073 (TRBV12-5, TRBJ2-5)
CAGGSRTHKAAQYF

SEQ ID NO: 376147 - protein, 12 aa, Homo sapiens
  CDR3 for alpha chain variable domain of TCR clone 188074 (TRAV12-3, TRAJ17)
CAMTLTGNKLTF

SEQ ID NO: 376148 - protein, 16 aa, Homo sapiens
  CDR3 for beta chain variable domain of TCR clone 188074 (TRBV5-1, TRBJ2-3)
CASSSQGRVGADTQYF

SEQ ID NO: 376149 - protein, 14 aa, Homo sapiens
  CDR3 for alpha chain variable domain of TCR clone 188075 (TRAV12-3, TRAJ10)
SHLPLTGGGNKLTF

SEQ ID NO: 376150 - protein, 16 aa, Homo sapiens
  CDR3 for beta chain variable domain of TCR clone 188075 (TRBV10-3, TRBJ2-1)
CAISGVGDGGGGEQSF

SEQ ID NO: 376151 - protein, 11 aa, Homo sapiens
  CDR3 for alpha chain variable domain of TCR clone 188076 (TRAV1-2, TRAJ20)
CAVSNDYKLSF

SEQ ID NO: 376152 - protein, 14 aa, Homo sapiens
  CDR3 for beta chain variable domain of TCR clone 188076 (TRBV7-2, TRBJ2-5)
CASSFTQGQETQYF

SEQ ID NO: 376153 - protein, 11 aa, Homo sapiens
  CDR3 for alpha chain variable domain of TCR clone 188077 (TRAV2, TRAJ4)
CAVEWYNKLIF

SEQ ID NO: 376154 - protein, 15 aa, Homo sapiens
  CDR3 for beta chain variable domain of TCR clone 188077 (TRBV7-2, TRBJ2-2)
CASSFQRGETGELFF

SEQ ID NO: 376155 - protein, 14 aa, Homo sapiens
  CDR3 for alpha chain variable domain of TCR clone 188078 (TRAV1-2, TRAJ8)
CAVSEDTGFQKLVF

SEQ ID NO: 376156 - protein, 14 aa, Homo sapiens
  CDR3 for beta chain variable domain of TCR clone 188078 (TRBV5-1, TRBJ1-1)
CASSLERVGTEAFF

SEQ ID NO: 376157 - protein, 15 aa, Homo sapiens
  CDR3 for alpha chain variable domain of TCR clone 188079 (TRAV38-1, TRAJ45)
CAFMKGGGGADGLTI

SEQ ID NO: 376158 - protein, 13 aa, Homo sapiens
  CDR3 for beta chain variable domain of TCR clone 188079 (TRBV7-9, TRBJ1-2)
CASSLKQNYGYTF

SEQ ID NO: 376159 - protein, 13 aa, Homo sapiens
  CDR3 for alpha chain variable domain of TCR clone 188080 (TRAV23/DV6, TRAJ22)
YAPYSGSARQLTF

SEQ ID NO: 376160 - protein, 15 aa, Homo sapiens
  CDR3 for beta chain variable domain of TCR clone 188080 (TRBV11-2, TRBJ1-6)
CASSLDPWAVSPLHF

SEQ ID NO: 376161 - protein, 11 aa, Homo sapiens
  CDR3 for alpha chain variable domain of TCR clone 188081 (TRAV16, TRAJ33)
CALHSNYQLIW

SEQ ID NO: 376162 - protein, 16 aa, Homo sapiens
  CDR3 for beta chain variable domain of TCR clone 188081 (TRBV2, TRBJ2-1)
CASSVGGSLSYNEQFF

SEQ ID NO: 376163 - protein, 16 aa, Homo sapiens
  CDR3 for alpha chain variable domain of TCR clone 188082 (TRAV12-2, TRAJ10)
YAVNRVLTGGGNKLTF

SEQ ID NO: 376164 - protein, 12 aa, Homo sapiens
  CDR3 for beta chain variable domain of TCR clone 188082 (TRBV28, TRBJ2-7)
CASSFSSYEQYF

SEQ ID NO: 376165 - protein, 14 aa, Homo sapiens
  CDR3 for alpha chain variable domain of TCR clone 188083 (TRAV12-2, TRAJ53)
CAVKGGGSNYKLTF

SEQ ID NO: 376166 - protein, 14 aa, Homo sapiens
  CDR3 for beta chain variable domain of TCR clone 188083 (TRBV7-7, TRBJ2-2)
CATRQDPDTGELFL

SEQ ID NO: 376167 - protein, 12 aa, Homo sapiens
  CDR3 for alpha chain variable domain of TCR clone 188084 (TRAV1-2, TRAJ29)
CAVPSGNTPLVF

SEQ ID NO: 376168 - protein, 18 aa, Homo sapiens
  CDR3 for beta chain variable domain of TCR clone 188084 (TRBV28, TRBJ2-1)
CASSSGLAGGGSYNEQFF

SEQ ID NO: 376169 - protein, 15 aa, Homo sapiens
  CDR3 for alpha chain variable domain of TCR clone 188085 (TRAV4, TRAJ28)
CLVAGSGAGSYQLTF

SEQ ID NO: 376170 - protein, 15 aa, Homo sapiens
  CDR3 for beta chain variable domain of TCR clone 188085 (TRBV9, TRBJ2-3)
CASSVRGLAVDTQYF

SEQ ID NO: 376171 - protein, 13 aa, Homo sapiens
  CDR3 for alpha chain variable domain of TCR clone 188086 (TRAV17, TRAJ26)
CATVDNYGQNFVF

SEQ ID NO: 376172 - protein, 16 aa, Homo sapiens
  CDR3 for beta chain variable domain of TCR clone 188086 (TRBV2, TRBJ2-1)
CAISVGGSLSYNEQFF

SEQ ID NO: 376173 - protein, 14 aa, Homo sapiens
  CDR3 for alpha chain variable domain of TCR clone 188087 (TRAV12-3, TRAJ10)
SHLPLTGGGNKITF

SEQ ID NO: 376174 - protein, 15 aa, Homo sapiens
  CDR3 for beta chain variable domain of TCR clone 188087 (TRBV11-2, TRBJ1-3)
CASSLDGTVGNTIYF

SEQ ID NO: 376175 - protein, 13 aa, Homo sapiens
  CDR3 for alpha chain variable domain of TCR clone 188088 (TRAV2, TRAJ40)
CAVVTSGTYKYIF

SEQ ID NO: 376176 - protein, 14 aa, Homo sapiens
  CDR3 for beta chain variable domain of TCR clone 188088 (TRBV20-1, TRBJ2-4)
CSASGRVGENIQYF

SEQ ID NO: 376177 - protein, 18 aa, Homo sapiens
  CDR3 for alpha chain variable domain of TCR clone 188089 (TRAV12-3, TRAJ52)
CAMSRTNAGGTSHGKLTI

SEQ ID NO: 376178 - protein, 17 aa, Homo sapiens
  CDR3 for beta chain variable domain of TCR clone 188089 (TRBV7-3, TRBJ2-3)
CASSLMKRMRGADTQYF

SEQ ID NO: 376179 - protein, 15 aa, Homo sapiens
  CDR3 for alpha chain variable domain of TCR clone 188090 (TRAV8-3, TRAJ27)
CAVGPSKTNAGKSTF

SEQ ID NO: 376180 - protein, 13 aa, Homo sapiens
  CDR3 for beta chain variable domain of TCR clone 188090 (TRBV12-5, TRBJ2-3)
CASGDRQSDTQYF

SEQ ID NO: 376181 - protein, 14 aa, Homo sapiens
  CDR3 for alpha chain variable domain of TCR clone 188091 (TRAV34, TRAJ44)
CGADGTGTASKLTF

SEQ ID NO: 376182 - protein, 13 aa, Homo sapiens
  CDR3 for beta chain variable domain of TCR clone 188091 (TRBV10-2, TRBJ2-3)
CASSESGDHTQYF

SEQ ID NO: 376183 - protein, 14 aa, Homo sapiens
  CDR3 for alpha chain variable domain of TCR clone 188092 (TRAV16, TRAJ33)
CALSAMDSNYQLIW

SEQ ID NO: 376184 - protein, 14 aa, Homo sapiens
  CDR3 for beta chain variable domain of TCR clone 188092 (TRBV7-8, TRBJ1-2)
CASSPDSLSYGYTF

SEQ ID NO: 376185 - protein, 12 aa, Homo sapiens
  CDR3 for alpha chain variable domain of TCR clone 188093 (TRAV17, TRAJ31)
CATEQGNARLMF

SEQ ID NO: 376186 - protein, 12 aa, Homo sapiens
  CDR3 for beta chain variable domain of TCR clone 188093 (TRBV12-4, TRBJ1-3)
CASSFSGNTIYF

SEQ ID NO: 376187 - protein, 16 aa, Homo sapiens
  CDR3 for alpha chain variable domain of TCR clone 188094 (TRAV4, TRAJ22)
CLVGDLYSGSARQLTF

SEQ ID NO: 376188 - protein, 16 aa, Homo sapiens
  CDR3 for beta chain variable domain of TCR clone 188094 (TRBV7-9, TRBJ2-3)
CGSSPWREVGTDTQYF

SEQ ID NO: 376189 - protein, 13 aa, Homo sapiens
  CDR3 for alpha chain variable domain of TCR clone 188095 (TRAV36/DV7, TRAJ49)
CAGDSNTGNQFYF

SEQ ID NO: 376190 - protein, 14 aa, Homo sapiens
  CDR3 for beta chain variable domain of TCR clone 188095 (TRBV7-9, TRBJ2-3)
CASSVEDGTDTQYF

SEQ ID NO: 376191 - protein, 16 aa, Homo sapiens
  CDR3 for alpha chain variable domain of TCR clone 188096 (TRAV3, TRAJ10)
CAVRDMRAGGGNKLTF

SEQ ID NO: 376192 - protein, 13 aa, Homo sapiens
  CDR3 for beta chain variable domain of TCR clone 188096 (TRBV7-9, TRBJ1-2)
CASSLNQNYGYTF

SEQ ID NO: 376193 - protein, 15 aa, Homo sapiens
  CDR3 for alpha chain variable domain of TCR clone 188097 (TRAV3, TRAJ32)
CAVRDPGGATNKLIF

SEQ ID NO: 376194 - protein, 14 aa, Homo sapiens
  CDR3 for beta chain variable domain of TCR clone 188097 (TRBV9, TRBJ1-2)
CASSAKGDNYGYTF

SEQ ID NO: 376195 - protein, 15 aa, Homo sapiens
  CDR3 for alpha chain variable domain of TCR clone 188098 (TRAV21, TRAJ53)
CATLNSGGSNYKLTF

SEQ ID NO: 376196 - protein, 16 aa, Homo sapiens
  CDR3 for beta chain variable domain of TCR clone 188098 (TRBV4-2, TRBJ2-7)
CASSQDTSGGPSEQYF

SEQ ID NO: 376197 - protein, 15 aa, Homo sapiens
  CDR3 for alpha chain variable domain of TCR clone 188099 (TRAV2, TRAJ15)
CAVGGPNQAGTALIF

SEQ ID NO: 376198 - protein, 13 aa, Homo sapiens
  CDR3 for beta chain variable domain of TCR clone 188099 (TRBV2, TRBJ1-5)
CATAGPGNQPQQF

SEQ ID NO: 376199 - protein, 12 aa, Homo sapiens
  CDR3 for alpha chain variable domain of TCR clone 188100 (TRAV35, TRAJ52)
NAGGTSYGKLTC

SEQ ID NO: 376200 - protein, 14 aa, Homo sapiens
  CDR3 for beta chain variable domain of TCR clone 188100 (TRBV25-1, TRBJ1-1)
CASTHLGGNTEAFF

SEQ ID NO: 376201 - protein, 14 aa, Homo sapiens
  CDR3 for alpha chain variable domain of TCR clone 188101 (TRAV12-2, TRAJ11)
CAVRKNSGYSTLPF

SEQ ID NO: 376202 - protein, 14 aa, Homo sapiens
  CDR3 for beta chain variable domain of TCR clone 188101 (TRBV7-2, TRBJ2-5)
CASWQERFRETQYF

SEQ ID NO: 376203 - protein, 16 aa, Homo sapiens
  CDR3 for alpha chain variable domain of TCR clone 188102 (TRAV3, TRAJ21)
CAVRDIERGNFNKFYF

SEQ ID NO: 376204 - protein, 14 aa, Homo sapiens
  CDR3 for beta chain variable domain of TCR clone 188102 (TRBV19, TRBJ2-5)
CASSMTGQQETQYF

SEQ ID NO: 376205 - protein, 13 aa, Homo sapiens
  CDR3 for alpha chain variable domain of TCR clone 188103 (TRAV21, TRAJ45)
CAVMGGGADGLTF

SEQ ID NO: 376206 - protein, 13 aa, Homo sapiens
  CDR3 for beta chain variable domain of TCR clone 188103 (TRBV4-2, TRBJ1-1)
CASSQAGNTEAFF

SEQ ID NO: 376207 - protein, 11 aa, Homo sapiens
  CDR3 for alpha chain variable domain of TCR clone 188104 (TRAV38-2/DV8, TRAJ31)
CAYFSNSRLMF

SEQ ID NO: 376208 - protein, 13 aa, Homo sapiens
  CDR3 for beta chain variable domain of TCR clone 188104 (TRBV20-1, TRBJ2-7)
CSARDGKSYEQYF

SEQ ID NO: 376209 - protein, 14 aa, Homo sapiens
  CDR3 for alpha chain variable domain of TCR clone 188105 (TRAV2, TRAJ37)
CAVAFTSNTGKLII

SEQ ID NO: 376210 - protein, 15 aa, Homo sapiens
  CDR3 for beta chain variable domain of TCR clone 188105 (TRBV20-1, TRBJ1-1)
CSASRGVTGNTEAFF

SEQ ID NO: 376211 - protein, 15 aa, Homo sapiens
  CDR3 for alpha chain variable domain of TCR clone 188106 (TRAV12-3, TRAJ6)
CAMSATTGGSYIPTF

SEQ ID NO: 376212 - protein, 16 aa, Homo sapiens
  CDR3 for beta chain variable domain of TCR clone 188106 (TRBV27, TRBJ2-7)
CASSSERRDSAYEQYF

SEQ ID NO: 376213 - protein, 15 aa, Homo sapiens
  CDR3 for alpha chain variable domain of TCR clone 188107 (TRAV12-1, TRAJ33)
CVVNGNLDSNYQLIW

SEQ ID NO: 376214 - protein, 13 aa, Homo sapiens
  CDR3 for beta chain variable domain of TCR clone 188107 (TRBV9, TRBJ2-7)
CASSKTGTYDQYF

SEQ ID NO: 376215 - protein, 13 aa, Homo sapiens
  CDR3 for alpha chain variable domain of TCR clone 188108 (TRAV16, TRAJ52)
CALRGTSYGKLTF

SEQ ID NO: 376216 - protein, 18 aa, Homo sapiens
  CDR3 for beta chain variable domain of TCR clone 188108 (TRBV13, TRBJ2-6)
CASSPMSSGGSGANVLTF

SEQ ID NO: 376217 - protein, 16 aa, Homo sapiens
  CDR3 for alpha chain variable domain of TCR clone 188109 (TRAV3, TRAJ10)
CAVRDMRAGGGNKPTF

SEQ ID NO: 376218 - protein, 13 aa, Homo sapiens
  CDR3 for beta chain variable domain of TCR clone 188109 (TRBV7-9, TRBJ1-2)
CASSLKQDYGYTF

SEQ ID NO: 376219 - protein, 17 aa, Homo sapiens
  CDR3 for alpha chain variable domain of TCR clone 188110 (TRAV23/DV6, TRAJ3)
CSNHFCFGWSSASKIIF

SEQ ID NO: 376220 - protein, 15 aa, Homo sapiens
  CDR3 for beta chain variable domain of TCR clone 188110 (TRBV19, TRBJ1-6)
CASSTQGAVGSHLHF

SEQ ID NO: 376221 - protein, 13 aa, Homo sapiens
  CDR3 for alpha chain variable domain of TCR clone 188111 (TRAV1-2, TRAJ9)
CAASNTGGFKTIF

SEQ ID NO: 376222 - protein, 15 aa, Homo sapiens
  CDR3 for beta chain variable domain of TCR clone 188111 (TRBV19, TRBJ1-2)
CASSVPGQDGYTLVR

SEQ ID NO: 376223 - protein, 18 aa, Homo sapiens
  CDR3 for alpha chain variable domain of TCR clone 188112 (TRAV21, TRAJ52)
CAVRPSPAGGTSYGKLTF

SEQ ID NO: 376224 - protein, 19 aa, Homo sapiens
  CDR3 for beta chain variable domain of TCR clone 188112 (TRBV7-2, TRBJ2-3)
WASSFLSRNWGGGTDTQYF

SEQ ID NO: 376225 - protein, 11 aa, Homo sapiens
  CDR3 for alpha chain variable domain of TCR clone 188113 (TRAV23/DV6, TRAJ58)
CAARLLRGETS

SEQ ID NO: 376226 - protein, 15 aa, Homo sapiens
  CDR3 for beta chain variable domain of TCR clone 188113 (TRBV18, TRBJ1-1)
CASSGRTGEVTEAFF

SEQ ID NO: 376227 - protein, 18 aa, Homo sapiens
  CDR3 for alpha chain variable domain of TCR clone 188114 (TRAV21, TRAJ52)
CAVRPSPAGGTSYGKLTF

SEQ ID NO: 376228 - protein, 19 aa, Homo sapiens
  CDR3 for beta chain variable domain of TCR clone 188114 (TRBV7-2, TRBJ2-3)
CASSFLSRNWGGRTDTQYF

SEQ ID NO: 376229 - protein, 11 aa, Homo sapiens
  CDR3 for alpha chain variable domain of TCR clone 188115 (TRAV20, TRAJ34)
CTRDNTDKLLF

SEQ ID NO: 376230 - protein, 15 aa, Homo sapiens
  CDR3 for beta chain variable domain of TCR clone 188115 (TRBV2, TRBJ2-1)
CASSVTSEGTDEQFF

SEQ ID NO: 376231 - protein, 11 aa, Homo sapiens
  CDR3 for alpha chain variable domain of TCR clone 188116 (TRAV1-1, TRAJ16)
CAAGDGQKLLF

SEQ ID NO: 376232 - protein, 15 aa, Homo sapiens
  CDR3 for beta chain variable domain of TCR clone 188116 (TRBV28, TRBJ1-2)
CASIPQGADDYGYTF

SEQ ID NO: 376233 - protein, 13 aa, Homo sapiens
  CDR3 for alpha chain variable domain of TCR clone 188117 (TRAV8-3, TRAJ48)
CAVVPFGNEKLTF

SEQ ID NO: 376234 - protein, 14 aa, Homo sapiens
  CDR3 for beta chain variable domain of TCR clone 188117 (TRBV20-1, TRBJ1-1)
CSAQTRIGGTEAFF

SEQ ID NO: 376235 - protein, 15 aa, Homo sapiens
  CDR3 for alpha chain variable domain of TCR clone 188118 (TRAV3, TRAJ5)
CAVRDRKTGRRALTF

SEQ ID NO: 376236 - protein, 13 aa, Homo sapiens
  CDR3 for beta chain variable domain of TCR clone 188118 (TRBV7-9, TRBJ2-2)
CASSLDPTGELFF

SEQ ID NO: 376237 - protein, 14 aa, Homo sapiens
  CDR3 for alpha chain variable domain of TCR clone 188119 (TRAV26-1, TRAJ34)
CIVRVAYNTDKLIF

SEQ ID NO: 376238 - protein, 15 aa, Homo sapiens
  CDR3 for beta chain variable domain of TCR clone 188119 (TRBV7-9, TRBJ1-4)
CAGSRTEGFNEKLFF

SEQ ID NO: 376239 - protein, 12 aa, Homo sapiens
  CDR3 for alpha chain variable domain of TCR clone 188120 (TRAV21, TRAJ31)
CAVSPARGRLMF

SEQ ID NO: 376240 - protein, 16 aa, Homo sapiens
  CDR3 for beta chain variable domain of TCR clone 188120 (TRBV12-5, TRBJ2-5)
CASGPRTSGNQETQYV

SEQ ID NO: 376241 - protein, 14 aa, Homo sapiens
  CDR3 for alpha chain variable domain of TCR clone 188121 (TRAV20, TRAJ29)
CAVQAWVGNTPLVV

SEQ ID NO: 376242 - protein, 15 aa, Homo sapiens
  CDR3 for beta chain variable domain of TCR clone 188121 (TRBV29-1, TRBJ2-7)
CSVEFFDRGSYEQYF

SEQ ID NO: 376243 - protein, 13 aa, Homo sapiens
  CDR3 for alpha chain variable domain of TCR clone 188122 (TRAV13-1, TRAJ13)
CAASKGGYQKVTY

SEQ ID NO: 376244 - protein, 16 aa, Homo sapiens
  CDR3 for beta chain variable domain of TCR clone 188122 (TRBV18, TRBJ1-2)
CASSPPERVTIYGYTF

SEQ ID NO: 376245 - protein, 13 aa, Homo sapiens
  CDR3 for alpha chain variable domain of TCR clone 188123 (TRAV36/DV7, TRAJ54)
CAVGREGAQKLVF

SEQ ID NO: 376246 - protein, 15 aa, Homo sapiens
  CDR3 for beta chain variable domain of TCR clone 188123 (TRBV2, TRBJ2-1)
CASSELAGSYNEQFF

SEQ ID NO: 376247 - protein, 15 aa, Homo sapiens
  CDR3 for alpha chain variable domain of TCR clone 188124 (TRAV3, TRAJ5)
CAVRDLDTGRRALTF

SEQ ID NO: 376248 - protein, 14 aa, Homo sapiens
  CDR3 for beta chain variable domain of TCR clone 188124 (TRBV5-5, TRBJ1-5)
CASSGQGVDQPQHF

SEQ ID NO: 376249 - protein, 15 aa, Homo sapiens
  CDR3 for alpha chain variable domain of TCR clone 188125 (TRAV27, TRAJ33)
CAGADTMDSNYQLIW

SEQ ID NO: 376250 - protein, 13 aa, Homo sapiens
  CDR3 for beta chain variable domain of TCR clone 188125 (TRBV28, TRBJ1-2)
CASSLQGRGGYTF

SEQ ID NO: 376251 - protein, 15 aa, Homo sapiens
  CDR3 for alpha chain variable domain of TCR clone 188126 (TRAV8-3, TRAJ27)
CAVGPSKTNAGKSTF

SEQ ID NO: 376252 - protein, 15 aa, Homo sapiens
  CDR3 for beta chain variable domain of TCR clone 188126 (TRBV15, TRBJ2-7)
CATSRDRSPRNEQYF

SEQ ID NO: 376253 - protein, 14 aa, Homo sapiens
  CDR3 for alpha chain variable domain of TCR clone 188127 (TRAV8-4, TRAJ9)
CAVRINTGGFKTIF

SEQ ID NO: 376254 - protein, 13 aa, Homo sapiens
  CDR3 for beta chain variable domain of TCR clone 188127 (TRBV4-1, TRBJ2-7)
CASSQGQAYEQYF

SEQ ID NO: 376255 - protein, 15 aa, Homo sapiens
  CDR3 for alpha chain variable domain of TCR clone 188128 (TRAV4, TRAJ8)
CLVGDSNTGFQKLVF

SEQ ID NO: 376256 - protein, 13 aa, Homo sapiens
  CDR3 for beta chain variable domain of TCR clone 188128 (TRBV7-9, TRBJ1-2)
CASSLKQNYGYTF

SEQ ID NO: 376257 - protein, 12 aa, Homo sapiens
  CDR3 for alpha chain variable domain of TCR clone 188129 (TRAV8-1, TRAJ6)
CASSGGSYIPTF

SEQ ID NO: 376258 - protein, 12 aa, Homo sapiens
  CDR3 for beta chain variable domain of TCR clone 188129 (TRBV19, TRBJ1-1)
CASMNRYTEAFL

SEQ ID NO: 376259 - protein, 14 aa, Homo sapiens
  CDR3 for alpha chain variable domain of TCR clone 188130 (TRAV1-2, TRAJ33)
CAVRAPDSNYQLIW

SEQ ID NO: 376260 - protein, 14 aa, Homo sapiens
  CDR3 for beta chain variable domain of TCR clone 188130 (TRBV5-4, TRBJ1-1)
CASSLDSRRDEAFF

SEQ ID NO: 376261 - protein, 14 aa, Homo sapiens
  CDR3 for alpha chain variable domain of TCR clone 188131 (TRAV26-1, TRAJ38)
CIADNAGNNRKLIW

SEQ ID NO: 376262 - protein, 13 aa, Homo sapiens
  CDR3 for beta chain variable domain of TCR clone 188131 (TRBV20-1, TRBJ1-3)
CSARLGVGNTIYF

SEQ ID NO: 376263 - protein, 14 aa, Homo sapiens
  CDR3 for alpha chain variable domain of TCR clone 188132 (TRAV1-2, TRAJ6)
CAVSLSGGSYIPTF

SEQ ID NO: 376264 - protein, 15 aa, Homo sapiens
  CDR3 for beta chain variable domain of TCR clone 188132 (TRBV28, TRBJ2-5)
CASSPGGRGFYEQYF

SEQ ID NO: 376265 - protein, 18 aa, Homo sapiens
  CDR3 for alpha chain variable domain of TCR clone 188133 (TRAV8-3, TRAJ6)
CAVGAEHQEEATSLHLEE

SEQ ID NO: 376266 - protein, 14 aa, Homo sapiens
  CDR3 for beta chain variable domain of TCR clone 188133 (TRBV6-6, TRBJ2-7)
CASSDSGAGYEQYF

SEQ ID NO: 376267 - protein, 14 aa, Homo sapiens
  CDR3 for alpha chain variable domain of TCR clone 188134 (TRAV1-2, TRAJ6)
CAVSLSGGSYIPTF

SEQ ID NO: 376268 - protein, 15 aa, Homo sapiens
  CDR3 for beta chain variable domain of TCR clone 188134 (TRBV28, TRBJ2-1)
CASSPGGRGFYEQYF

SEQ ID NO: 376269 - protein, 14 aa, Homo sapiens
  CDR3 for alpha chain variable domain of TCR clone 188135 (TRAV20, TRAJ10)
CAVRVEGGGNKLTF

SEQ ID NO: 376270 - protein, 14 aa, Homo sapiens
  CDR3 for beta chain variable domain of TCR clone 188135 (TRBV18, TRBJ2-7)
CASSPRGGAYEQCF

SEQ ID NO: 376271 - protein, 16 aa, Homo sapiens
  CDR3 for alpha chain variable domain of TCR clone 188136 (TRAV30, TRAJ24)
CGTEIVDADSWGKFQL

SEQ ID NO: 376272 - protein, 15 aa, Homo sapiens
  CDR3 for beta chain variable domain of TCR clone 188136 (TRBV20-1, TRBJ2-4)
CSARDLTGGPNIQYF

SEQ ID NO: 376273 - protein, 17 aa, Homo sapiens
  CDR3 for alpha chain variable domain of TCR clone 188137 (TRAV3, TRAJ6)
CAVSDGPRAGGRYIPTF

SEQ ID NO: 376274 - protein, 14 aa, Homo sapiens
  CDR3 for beta chain variable domain of TCR clone 188137 (TRBV7-2, TRBJ2-7)
CASSPKTSFYEQYF

SEQ ID NO: 376275 - protein, 10 aa, Homo sapiens
  CDR3 for alpha chain variable domain of TCR clone 188138 (TRAV30, TRAJ48)
CGIGNEKLTF

SEQ ID NO: 376276 - protein, 15 aa, Homo sapiens
  CDR3 for beta chain variable domain of TCR clone 188138 (TRBV28, TRBJ2-1)
CASRKTGRAYNEQFF

SEQ ID NO: 376277 - protein, 12 aa, Homo sapiens
  CDR3 for alpha chain variable domain of TCR clone 188139 (TRAV22, TRAJ22)
CAPGGSTRQLTF

SEQ ID NO: 376278 - protein, 13 aa, Homo sapiens
  CDR3 for beta chain variable domain of TCR clone 188139 (TRBV15, TRBJ1-6)
CATSGGLNSPLHF

SEQ ID NO: 376279 - protein, 14 aa, Homo sapiens
  CDR3 for alpha chain variable domain of TCR clone 188140 (TRAV12-1, TRAJ23)
CVVNIPNQGGKLIF

SEQ ID NO: 376280 - protein, 16 aa, Homo sapiens
  CDR3 for beta chain variable domain of TCR clone 188140 (TRBV7-3, TRBJ2-1)
CASSKPLAGGYNEQFF

SEQ ID NO: 376281 - protein, 13 aa, Homo sapiens
  CDR3 for alpha chain variable domain of TCR clone 188141 (TRAV27, TRAJ45)
CAGARGGADGLTF

SEQ ID NO: 376282 - protein, 17 aa, Homo sapiens
  CDR3 for beta chain variable domain of TCR clone 188141 (TRBV11-2, TRBJ2-6)
CASSQRDIFSGANVLTF

SEQ ID NO: 376283 - protein, 12 aa, Homo sapiens
  CDR3 for alpha chain variable domain of TCR clone 188142 (TRAV13-1, TRAJ5)
CAAKAGRRALTF

SEQ ID NO: 376284 - protein, 13 aa, Homo sapiens
  CDR3 for beta chain variable domain of TCR clone 188142 (TRBV7-9, TRBJ1-2)
CASSLKRNYGYTF

SEQ ID NO: 376285 - protein, 13 aa, Homo sapiens
  CDR3 for alpha chain variable domain of TCR clone 188143 (TRAV21, TRAJ57)
CAVIEGGSEKLVS

SEQ ID NO: 376286 - protein, 15 aa, Homo sapiens
  CDR3 for beta chain variable domain of TCR clone 188143 (TRBV10-3, TRBJ2-5)
CAISGFGRGQETQYF

SEQ ID NO: 376287 - protein, 12 aa, Homo sapiens
  CDR3 for alpha chain variable domain of TCR clone 188144 (TRAV12-3, TRAJ17)
CAMTLTGNKLTF

SEQ ID NO: 376288 - protein, 15 aa, Homo sapiens
  CDR3 for beta chain variable domain of TCR clone 188144 (TRBV12-4, TRBJ2-5)
CASGPPTGLQETQYF

SEQ ID NO: 376289 - protein, 13 aa, Homo sapiens
  CDR3 for alpha chain variable domain of TCR clone 188145 (TRAV27, TRAJ45)
CRSSGGGADGLTF

SEQ ID NO: 376290 - protein, 17 aa, Homo sapiens
  CDR3 for beta chain variable domain of TCR clone 188145 (TRBV11-2, TRBJ2-5)
CASSLYPPGVEYNEQFF

SEQ ID NO: 376291 - protein, 15 aa, Homo sapiens
  CDR3 for alpha chain variable domain of TCR clone 188146 (TRAV3, TRAJ20)
CAVRDIKLTDYKLSF

SEQ ID NO: 376292 - protein, 15 aa, Homo sapiens
  CDR3 for beta chain variable domain of TCR clone 188146 (TRBV7-9, TRBJ1-6)
CASSSPGRGNSPLHF

SEQ ID NO: 376293 - protein, 12 aa, Homo sapiens
  CDR3 for alpha chain variable domain of TCR clone 188147 (TRAV12-3, TRAJ17)
CAMTLTGSKLTF

SEQ ID NO: 376294 - protein, 16 aa, Homo sapiens
  CDR3 for beta chain variable domain of TCR clone 188147 (TRBV12-4, TRBJ2-5)
CASSFFVRGRQETQYF

SEQ ID NO: 376295 - protein, 14 aa, Homo sapiens
  CDR3 for alpha chain variable domain of TCR clone 188148 (TRAV12-2, TRAJ44)
CAVNPAGTASKLTF

SEQ ID NO: 376296 - protein, 15 aa, Homo sapiens
  CDR3 for beta chain variable domain of TCR clone 188148 (TRBV12-4, TRBJ2-5)
CASSPPTGLQETQYF

SEQ ID NO: 376297 - protein, 13 aa, Homo sapiens
  CDR3 for alpha chain variable domain of TCR clone 188149 (TRAV12-2, TRAJ15)
CPHTGQAGTALIF

SEQ ID NO: 376298 - protein, 13 aa, Homo sapiens
  CDR3 for beta chain variable domain of TCR clone 188149 (TRBV20-1, TRBJ2-3)
CSARLAGTDTQYF

SEQ ID NO: 376299 - protein, 14 aa, Homo sapiens
  CDR3 for alpha chain variable domain of TCR clone 188150 (TRAV30, TRAJ26)
CGTEIVSYGQNFVF

SEQ ID NO: 376300 - protein, 13 aa, Homo sapiens
  CDR3 for beta chain variable domain of TCR clone 188150 (TRBV28, TRBJ1-5)
CASSLRGNQPQHF

SEQ ID NO: 376301 - protein, 15 aa, Homo sapiens
  CDR3 for alpha chain variable domain of TCR clone 188151 (TRAV26-2, TRAJ28)
CILVESGAGCYQLTF

SEQ ID NO: 376302 - protein, 19 aa, Homo sapiens
  CDR3 for beta chain variable domain of TCR clone 188151 (TRBV11-3, TRBJ2-2)
CASSTRPGAKTTNTGELFF

SEQ ID NO: 376303 - protein, 16 aa, Homo sapiens
  CDR3 for alpha chain variable domain of TCR clone 188152 (TRAV12-1, TRAJ4)
CLVNPRISGGYNKLIF

SEQ ID NO: 376304 - protein, 14 aa, Homo sapiens
  CDR3 for beta chain variable domain of TCR clone 188152 (TRBV5-7, TRBJ2-3)
CASRTSGGTDTQYF

SEQ ID NO: 376305 - protein, 14 aa, Homo sapiens
  CDR3 for alpha chain variable domain of TCR clone 188153 (TRAV1-2, TRAJ8)
CAVREDTGLQKLVF

SEQ ID NO: 376306 - protein, 13 aa, Homo sapiens
  CDR3 for beta chain variable domain of TCR clone 188153 (TRBV10-3, TRBJ2-7)
CASKLAVNYEQYF

SEQ ID NO: 376307 - protein, 15 aa, Homo sapiens
  CDR3 for alpha chain variable domain of TCR clone 188154 (TRAV2, TRAJ15)
CAVEDRGQAGTALIF

SEQ ID NO: 376308 - protein, 13 aa, Homo sapiens
  CDR3 for beta chain variable domain of TCR clone 188154 (TRBV12-4, TRBJ2-5)
CASSWGGSRTQYF

SEQ ID NO: 376309 - protein, 13 aa, Homo sapiens
  CDR3 for alpha chain variable domain of TCR clone 188155 (TRAV17, TRAJ34)
CATVPFNTDKLIF

SEQ ID NO: 376310 - protein, 14 aa, Homo sapiens
  CDR3 for beta chain variable domain of TCR clone 188155 (TRBV9, TRBJ2-3)
CASSAGGGPDTQYF

SEQ ID NO: 376311 - protein, 14 aa, Homo sapiens
  CDR3 for alpha chain variable domain of TCR clone 188156 (TRAV1-2, TRAJ8)
CAVREDTGFQKLVF

SEQ ID NO: 376312 - protein, 16 aa, Homo sapiens
  CDR3 for beta chain variable domain of TCR clone 188156 (TRBV4-1, TRBJ2-3)
CASGQSTSGAEDKQYF

SEQ ID NO: 376313 - protein, 13 aa, Homo sapiens
  CDR3 for alpha chain variable domain of TCR clone 188157 (TRAV35, TRAJ32)
CAGVGGATNKLIF

SEQ ID NO: 376314 - protein, 14 aa, Homo sapiens
  CDR3 for beta chain variable domain of TCR clone 188157 (TRBV27, TRBJ2-5)
CASSSLKGWETQYF

SEQ ID NO: 376315 - protein, 15 aa, Homo sapiens
  CDR3 for alpha chain variable domain of TCR clone 188158 (TRAV8-3, TRAJ23)
CAVGDRYNQGGKLIF

SEQ ID NO: 376316 - protein, 16 aa, Homo sapiens
  CDR3 for beta chain variable domain of TCR clone 188158 (TRBV28, TRBJ2-7)
CASSLTASGSKYEQYF

SEQ ID NO: 376317 - protein, 14 aa, Homo sapiens
  CDR3 for alpha chain variable domain of TCR clone 188159 (TRAV3, TRAJ21)
CAVRDAYNFNKFYF

SEQ ID NO: 376318 - protein, 14 aa, Homo sapiens
  CDR3 for beta chain variable domain of TCR clone 188159 (TRBV12-4, TRBJ2-7)
CASSPAGLKYEQYF

SEQ ID NO: 376319 - protein, 12 aa, Homo sapiens
  CDR3 for alpha chain variable domain of TCR clone 188160 (TRAV17, TRAJ30)
CVPERRDDKIIF

SEQ ID NO: 376320 - protein, 14 aa, Homo sapiens
  CDR3 for beta chain variable domain of TCR clone 188160 (TRBV7-7, TRBJ2-2)
CASSRDRSTGVLFF

SEQ ID NO: 376321 - protein, 16 aa, Homo sapiens
  CDR3 for alpha chain variable domain of TCR clone 188161 (TRAV1-2, TRAJ10)
CAVRGVLTGGGNELTF

SEQ ID NO: 376322 - protein, 15 aa, Homo sapiens
  CDR3 for beta chain variable domain of TCR clone 188161 (TRBV7-9, TRBJ1-6)
CASSSPGRGNSPLHF

SEQ ID NO: 376323 - protein, 11 aa, Homo sapiens
  CDR3 for alpha chain variable domain of TCR clone 188162 (TRAV13-2, TRAJ26)
CAEIPGQNFVF

SEQ ID NO: 376324 - protein, 19 aa, Homo sapiens
  CDR3 for beta chain variable domain of TCR clone 188162 (TRBV19, TRBJ2-2)
CASNRPGLAGGRVTGELFF

SEQ ID NO: 376325 - protein, 16 aa, Homo sapiens
  CDR3 for alpha chain variable domain of TCR clone 188163 (TRAV30, TRAJ24)
CATEIVDSDSWGKFQF

SEQ ID NO: 376326 - protein, 18 aa, Homo sapiens
  CDR3 for beta chain variable domain of TCR clone 188163 (TRBV7-9, TRBJ2-7)
CASSLTTSGSRTWYEQYF

SEQ ID NO: 376327 - protein, 14 aa, Homo sapiens
  CDR3 for alpha chain variable domain of TCR clone 188164 (TRAV12-1, TRAJ27)
CGEHIRTNAGKSTF

SEQ ID NO: 376328 - protein, 15 aa, Homo sapiens
  CDR3 for beta chain variable domain of TCR clone 188164 (TRBV19, TRBJ1-1)
CAGTSGQIQNTEAFF

SEQ ID NO: 376329 - protein, 13 aa, Homo sapiens
  CDR3 for alpha chain variable domain of TCR clone 188165 (TRAV13-2, TRAJ40)
CAEFTSGTYKYIF

SEQ ID NO: 376330 - protein, 11 aa, Homo sapiens
  CDR3 for beta chain variable domain of TCR clone 188165 (TRBV12-4, TRBJ2-7)
CASALKYEQYF

SEQ ID NO: 376331 - protein, 12 aa, Homo sapiens
  CDR3 for alpha chain variable domain of TCR clone 188166 (TRAV25, TRAJ31)
CAGHLNNARLMF

SEQ ID NO: 376332 - protein, 15 aa, Homo sapiens
  CDR3 for beta chain variable domain of TCR clone 188166 (TRBV20-1, TRBJ1-6)
CSARAASSYNSPLHF

SEQ ID NO: 376333 - protein, 11 aa, Homo sapiens
  CDR3 for alpha chain variable domain of TCR clone 188167 (TRAV2, TRAJ13)
CASGGYQKVTF

SEQ ID NO: 376334 - protein, 18 aa, Homo sapiens
  CDR3 for beta chain variable domain of TCR clone 188167 (TRBV11-3, TRBJ2-3)
CASSLRGASRGAPNTQYF

SEQ ID NO: 376335 - protein, 14 aa, Homo sapiens
  CDR3 for alpha chain variable domain of TCR clone 188168 (TRAV17, TRAJ6)
CATDTSGGSYIPTF

SEQ ID NO: 376336 - protein, 15 aa, Homo sapiens
  CDR3 for beta chain variable domain of TCR clone 188168 (TRBV7-3, TRBJ2-1)
CASSPTGGGEVEQFF

SEQ ID NO: 376337 - protein, 12 aa, Homo sapiens
  CDR3 for alpha chain variable domain of TCR clone 188169 (TRAV2, TRAJ33)
CAFMDSNYQLIW

SEQ ID NO: 376338 - protein, 18 aa, Homo sapiens
  CDR3 for beta chain variable domain of TCR clone 188169 (TRBV2, TRBJ2-7)
CASSEPWTGPSYEQYSCR

SEQ ID NO: 376339 - protein, 14 aa, Homo sapiens
  CDR3 for alpha chain variable domain of TCR clone 188170 (TRAV1-2, TRAJ40)
CAVREDTGFQKLVF

SEQ ID NO: 376340 - protein, 14 aa, Homo sapiens
  CDR3 for beta chain variable domain of TCR clone 188170 (TRBV19, TRBJ2-1)
CASPTFVLSGEQFF

SEQ ID NO: 376341 - protein, 15 aa, Homo sapiens
  CDR3 for alpha chain variable domain of TCR clone 188171 (TRAV26-1, TRAJ42)
FIVRGKGGSHGNLIF

SEQ ID NO: 376342 - protein, 14 aa, Homo sapiens
  CDR3 for beta chain variable domain of TCR clone 188171 (TRBV19, TRBJ2-2)
CATTGHANTGELFF

SEQ ID NO: 376343 - protein, 15 aa, Homo sapiens
  CDR3 for alpha chain variable domain of TCR clone 188172 (TRAV21, TRAJ24)
CAARSSTDSWGNCSL

SEQ ID NO: 376344 - protein, 20 aa, Homo sapiens
  CDR3 for beta chain variable domain of TCR clone 188172 (TRBV7-8, TRBJ2-2)
CASSHLFPGPTIHITGELFF

SEQ ID NO: 376345 - protein, 15 aa, Homo sapiens
  CDR3 for alpha chain variable domain of TCR clone 188173 (TRAV21, TRAJ32)
CAVNSYGGATNKLIF

SEQ ID NO: 376346 - protein, 15 aa, Homo sapiens
  CDR3 for beta chain variable domain of TCR clone 188173 (TRBV10-2, TRBJ2-6)
CASSEQGTGANVLTF

SEQ ID NO: 376347 - protein, 13 aa, Homo sapiens
  CDR3 for alpha chain variable domain of TCR clone 188174 (TRAV12-2, TRAJ17)
CRAFQSCRNKLTF

SEQ ID NO: 376348 - protein, 17 aa, Homo sapiens
  CDR3 for beta chain variable domain of TCR clone 188174 (TRBV20-1, TRBJ2-2)
CSASGSGQGGLTGELFS

SEQ ID NO: 376349 - protein, 16 aa, Homo sapiens
  CDR3 for alpha chain variable domain of TCR clone 188175 (TRAV8-6, TRAJ32)
CAVSDPYGGATNKLIF

SEQ ID NO: 376350 - protein, 18 aa, Homo sapiens
  CDR3 for beta chain variable domain of TCR clone 188175 (TRBV4-2, TRBJ2-6)
CASSQLQGVLTGAYVLTF

SEQ ID NO: 376351 - protein, 14 aa, Homo sapiens
  CDR3 for alpha chain variable domain of TCR clone 188176 (TRAV2, TRAJ23)
CAVGLRNQGGKLIF

SEQ ID NO: 376352 - protein, 14 aa, Homo sapiens
  CDR3 for beta chain variable domain of TCR clone 188176 (TRBV12-5, TRBJ2-5)
CASGSRTHQETQYF

SEQ ID NO: 376353 - protein, 15 aa, Homo sapiens
  CDR3 for alpha chain variable domain of TCR clone 188177 (TRAV8-3, TRAJ27)
CAVGPSKTNAGKSTF

SEQ ID NO: 376354 - protein, 12 aa, Homo sapiens
  CDR3 for beta chain variable domain of TCR clone 188177 (TRBV11-2, TRBJ2-2)
CGSSLGGGELFF

SEQ ID NO: 376355 - protein, 15 aa, Homo sapiens
  CDR3 for alpha chain variable domain of TCR clone 188178 (TRAV12-3, TRAJ6)
CAMSATSGGSYIPTF

SEQ ID NO: 376356 - protein, 11 aa, Homo sapiens
  CDR3 for beta chain variable domain of TCR clone 188178 (TRBV20-1, TRBJ1-5)
CSAQGDQPQHC

SEQ ID NO: 376357 - protein, 15 aa, Homo sapiens
  CDR3 for alpha chain variable domain of TCR clone 188179 (TRAV21, TRAJ37)
CAVRPTLSTTGKLIF

SEQ ID NO: 376358 - protein, 16 aa, Homo sapiens
  CDR3 for beta chain variable domain of TCR clone 188179 (TRBV24-1, TRBJ2-3)
CATSDRRQDLTDTQYF

SEQ ID NO: 376359 - protein, 14 aa, Homo sapiens
  CDR3 for alpha chain variable domain of TCR clone 188180 (TRAV12-1, TRAJ38)
CVVNDAGNNRKLIW

SEQ ID NO: 376360 - protein, 15 aa, Homo sapiens
  CDR3 for beta chain variable domain of TCR clone 188180 (TRBV7-2, TRBJ1-2)
CASSITWTGNYGYTF

SEQ ID NO: 376361 - protein, 14 aa, Homo sapiens
  CDR3 for alpha chain variable domain of TCR clone 188181 (TRAV12-2, TRAJ13)
CAVKKTGGYQKVTF

SEQ ID NO: 376362 - protein, 13 aa, Homo sapiens
  CDR3 for beta chain variable domain of TCR clone 188181 (TRBV18, TRBJ1-1)
CASSPETKPEAFF

SEQ ID NO: 376363 - protein, 13 aa, Homo sapiens
  CDR3 for alpha chain variable domain of TCR clone 188182 (TRAV12-2, TRAJ42)
CAVKRGSQGNLIF

SEQ ID NO: 376364 - protein, 14 aa, Homo sapiens
  CDR3 for beta chain variable domain of TCR clone 188182 (TRBV7-8, TRBJ1-5)
CASSTGTVGGPQHF

SEQ ID NO: 376365 - protein, 15 aa, Homo sapiens
  CDR3 for alpha chain variable domain of TCR clone 188183 (TRAV3, TRAJ22)
CAVRDRGGSARQLTF

SEQ ID NO: 376366 - protein, 16 aa, Homo sapiens
  CDR3 for beta chain variable domain of TCR clone 188183 (TRBV6-1, TRBJ2-5)
CASSETLDRGAETQYF

SEQ ID NO: 376367 - protein, 18 aa, Homo sapiens
  CDR3 for alpha chain variable domain of TCR clone 188184 (TRAV21, TRAJ52)
CAVRLSPPGGTSYGKLTF

SEQ ID NO: 376368 - protein, 17 aa, Homo sapiens
  CDR3 for beta chain variable domain of TCR clone 188184 (TRBV13, TRBJ2-3)
CASSLSRVAGGRNTQYF

SEQ ID NO: 376369 - protein, 16 aa, Homo sapiens
  CDR3 for alpha chain variable domain of TCR clone 188185 (TRAV30, TRAJ24)
CGTEIVDVDSWGKFQF

SEQ ID NO: 376370 - protein, 15 aa, Homo sapiens
  CDR3 for beta chain variable domain of TCR clone 188185 (TRBV15, TRBJ1-5)
CATSRDPVSNQHQHF

SEQ ID NO: 376371 - protein, 14 aa, Homo sapiens
  CDR3 for alpha chain variable domain of TCR clone 188186 (TRAV12-2, TRAJ40)
CAVKIPSGTYKYIF

SEQ ID NO: 376372 - protein, 12 aa, Homo sapiens
  CDR3 for beta chain variable domain of TCR clone 188186 (TRBV7-8, TRBJ2-4)
CASSLGGNIQYF

SEQ ID NO: 376373 - protein, 15 aa, Homo sapiens
  CDR3 for alpha chain variable domain of TCR clone 188187 (TRAV8-3, TRAJ45)
CASSYFGGGADGLTF

SEQ ID NO: 376374 - protein, 13 aa, Homo sapiens
  CDR3 for beta chain variable domain of TCR clone 188187 (TRBV10-3, TRBJ2-7)
CASKLAVNYEQYF

SEQ ID NO: 376375 - protein, 11 aa, Homo sapiens
  CDR3 for alpha chain variable domain of TCR clone 188188 (TRAV12-3, TRAJ43)
SAMSVANDMRF

SEQ ID NO: 376376 - protein, 13 aa, Homo sapiens
  CDR3 for beta chain variable domain of TCR clone 188188 (TRBV20-1, TRBJ1-1)
CSAPLGGGTEAFF

SEQ ID NO: 376377 - protein, 13 aa, Homo sapiens
  CDR3 for alpha chain variable domain of TCR clone 188189 (TRAV13-1, TRAJ53)
CAASKGSNYKLTF

SEQ ID NO: 376378 - protein, 13 aa, Homo sapiens
  CDR3 for beta chain variable domain of TCR clone 188189 (TRBV2, TRBJ2-7)
CASSGGIAYEQYF

SEQ ID NO: 376379 - protein, 15 aa, Homo sapiens
  CDR3 for alpha chain variable domain of TCR clone 188190 (TRAV8-6, TRAJ23)
CAVSPRGNQGGKLIF

SEQ ID NO: 376380 - protein, 15 aa, Homo sapiens
  CDR3 for beta chain variable domain of TCR clone 188190 (TRBV12-4, TRBJ2-5)
CASSPPTGLQETQYF

SEQ ID NO: 376381 - protein, 10 aa, Homo sapiens
  CDR3 for alpha chain variable domain of TCR clone 188191 (TRAV13-1, TRAJ41)
CAASGPRRTQ

SEQ ID NO: 376382 - protein, 21 aa, Homo sapiens
  CDR3 for beta chain variable domain of TCR clone 188191 (TRBV18, TRBJ2-3)
CASSPPAGGPRKYAVLWPRHP

SEQ ID NO: 376383 - protein, 15 aa, Homo sapiens
  CDR3 for alpha chain variable domain of TCR clone 188192 (TRAV23/DV6, TRAJ18)
CAARNRGSPLGRLYF

SEQ ID NO: 376384 - protein, 13 aa, Homo sapiens
  CDR3 for beta chain variable domain of TCR clone 188192 (TRBV7-2, TRBJ2-7)
CASSSPSGSEQYF

SEQ ID NO: 376385 - protein, 11 aa, Homo sapiens
  CDR3 for alpha chain variable domain of TCR clone 188193 (TRAV4, TRAJ31)
CLVGLNARLMF

SEQ ID NO: 376386 - protein, 16 aa, Homo sapiens
  CDR3 for beta chain variable domain of TCR clone 188193 (TRBV15, TRBJ2-6)
CATCVNGGFLANVLTF

SEQ ID NO: 376387 - protein, 14 aa, Homo sapiens
  CDR3 for alpha chain variable domain of TCR clone 188194 (TRAV26-1, TRAJ26)
CIVRATFLGQNFVF

SEQ ID NO: 376388 - protein, 16 aa, Homo sapiens
  CDR3 for beta chain variable domain of TCR clone 188194 (TRBV12-4, TRBJ2-7)
CSSRSTGTGPSYEQYF

SEQ ID NO: 376389 - protein, 14 aa, Homo sapiens
  CDR3 for alpha chain variable domain of TCR clone 188195 (TRAV12-2, TRAJ32)
CAHPESGATNKLIF

SEQ ID NO: 376390 - protein, 14 aa, Homo sapiens
  CDR3 for beta chain variable domain of TCR clone 188195 (TRBV19, TRBJ2-1)
CASPTFVLSGEQFF

SEQ ID NO: 376391 - protein, 14 aa, Homo sapiens
  CDR3 for alpha chain variable domain of TCR clone 188196 (TRAV16, TRAJ33)
CALSAMDSNYQLIW

SEQ ID NO: 376392 - protein, 17 aa, Homo sapiens
  CDR3 for beta chain variable domain of TCR clone 188196 (TRBV25-1, TRBJ2-7)
CASSDARVVFSSYEQYF

SEQ ID NO: 376393 - protein, 13 aa, Homo sapiens
  CDR3 for alpha chain variable domain of TCR clone 188197 (TRAV17, TRAJ22)
CAHHSGSARQLTF

SEQ ID NO: 376394 - protein, 12 aa, Homo sapiens
  CDR3 for beta chain variable domain of TCR clone 188197 (TRBV7-2, TRBJ1-6)
CASSLSSSPLHF

SEQ ID NO: 376395 - protein, 16 aa, Homo sapiens
  CDR3 for alpha chain variable domain of TCR clone 188198 (TRAV26-1, TRAJ23)
CIVRVHPYNQGGKLIF

SEQ ID NO: 376396 - protein, 15 aa, Homo sapiens
  CDR3 for beta chain variable domain of TCR clone 188198 (TRBV5-1, TRBJ2-7)
CASSLNGGPAREQYF

SEQ ID NO: 376397 - protein, 14 aa, Homo sapiens
  CDR3 for alpha chain variable domain of TCR clone 188199 (TRAV26-1, TRAJ38)
CIADNAGNNRKLMW

SEQ ID NO: 376398 - protein, 15 aa, Homo sapiens
  CDR3 for beta chain variable domain of TCR clone 188199 (TRBV7-9, TRBJ1-4)
CASSARTGGNEKLFF

SEQ ID NO: 376399 - protein, 16 aa, Homo sapiens
  CDR3 for alpha chain variable domain of TCR clone 188200 (TRAV12-2, TRAJ32)
CAVNLGQGGATNKLIF

SEQ ID NO: 376400 - protein, 15 aa, Homo sapiens
  CDR3 for beta chain variable domain of TCR clone 188200 (TRBV7-2, TRBJ2-3)
CASSLAGAFIDTQYF

SEQ ID NO: 376401 - protein, 12 aa, Homo sapiens
  CDR3 for alpha chain variable domain of TCR clone 188201 (TRAV12-3, TRAJ20)
CAMVRGDYKLSF

SEQ ID NO: 376402 - protein, 13 aa, Homo sapiens
  CDR3 for beta chain variable domain of TCR clone 188201 (TRBV12-4, TRBJ2-7)
CASSFVPTAEQYF

SEQ ID NO: 376403 - protein, 11 aa, Homo sapiens
  CDR3 for alpha chain variable domain of TCR clone 188202 (TRAV21, TRAJ31)
CAVRNNARLMF

SEQ ID NO: 376404 - protein, 12 aa, Homo sapiens
  CDR3 for beta chain variable domain of TCR clone 188202 (TRBV7-9, TRBJ1-4)
CASSTDREKLFF

SEQ ID NO: 376405 - protein, 17 aa, Homo sapiens
  CDR3 for alpha chain variable domain of TCR clone 188203 (TRAV3, TRAJ6)
CAVRDGPRAGGSDIPTF

SEQ ID NO: 376406 - protein, 14 aa, Homo sapiens
  CDR3 for beta chain variable domain of TCR clone 188203 (TRBV7-2, TRBJ2-7)
CASSPKASFYEQYF

SEQ ID NO: 376407 - protein, 17 aa, Homo sapiens
  CDR3 for alpha chain variable domain of TCR clone 188204 (TRAV3, TRAJ28)
CAVREAYSGAGSYQLTF

SEQ ID NO: 376408 - protein, 18 aa, Homo sapiens
  CDR3 for beta chain variable domain of TCR clone 188204 (TRBV27, TRBJ2-1)
CASGNRAVGVGSKNEQCF

SEQ ID NO: 376409 - protein, 13 aa, Homo sapiens
  CDR3 for alpha chain variable domain of TCR clone 188205 (TRAV17, TRAJ22)
CAHHSGSASQLTF

SEQ ID NO: 376410 - protein, 16 aa, Homo sapiens
  CDR3 for beta chain variable domain of TCR clone 188205 (TRBV4-1, TRBJ1-2)
CASSQVAGQVLYGYTF

SEQ ID NO: 376411 - protein, 15 aa, Homo sapiens
  CDR3 for alpha chain variable domain of TCR clone 188206 (TRAV12-1, TRAJ44)
CVAALPTGTASKLTF

SEQ ID NO: 376412 - protein, 16 aa, Homo sapiens
  CDR3 for beta chain variable domain of TCR clone 188206 (TRBV12-5, TRBJ2-5)
CASGPRTSGNQETQYF

SEQ ID NO: 376413 - protein, 12 aa, Homo sapiens
  CDR3 for alpha chain variable domain of TCR clone 188207 (TRAV13-1, TRAJ21)
CAAKEGSNKFYF

SEQ ID NO: 376414 - protein, 16 aa, Homo sapiens
  CDR3 for beta chain variable domain of TCR clone 188207 (TRBV4-1, TRBJ2-1)
CASSLNTGIVYNEQFF

SEQ ID NO: 376415 - protein, 17 aa, Homo sapiens
  CDR3 for alpha chain variable domain of TCR clone 188208 (TRAV3, TRAJ6)
CAVSAGPRAGGSYIPTF

SEQ ID NO: 376416 - protein, 13 aa, Homo sapiens
  CDR3 for beta chain variable domain of TCR clone 188208 (TRBV19, TRBJ1-1)
CASSITGESEAFF

SEQ ID NO: 376417 - protein, 19 aa, Homo sapiens
  CDR3 for alpha chain variable domain of TCR clone 188209 (TRAV1-2, TRAJ26)
CLLPLCCERPDNYGQNFVF

SEQ ID NO: 376418 - protein, 15 aa, Homo sapiens
  CDR3 for beta chain variable domain of TCR clone 188209 (TRBV11-3, TRBJ2-3)
CASNGGLDSTDTQYF

SEQ ID NO: 376419 - protein, 12 aa, Homo sapiens
  CDR3 for alpha chain variable domain of TCR clone 188210 (TRAV13-1, TRAJ21)
CAAKEGVNKFYF

SEQ ID NO: 376420 - protein, 14 aa, Homo sapiens
  CDR3 for beta chain variable domain of TCR clone 188210 (TRBV5-4, TRBJ1-1)
CDSSLDSRRDEAFF

SEQ ID NO: 376421 - protein, 12 aa, Homo sapiens
  CDR3 for alpha chain variable domain of TCR clone 188211 (TRAV22, TRAJ29)
CAPPSGSTPLVF

SEQ ID NO: 376422 - protein, 14 aa, Homo sapiens
  CDR3 for beta chain variable domain of TCR clone 188211 (TRBV11-2, TRBJ2-7)
CASSLGAGAYEQYF

SEQ ID NO: 376423 - protein, 13 aa, Homo sapiens
  CDR3 for alpha chain variable domain of TCR clone 188212 (TRAV13-1, TRAJ6)
CAASKGGSYIPTF

SEQ ID NO: 376424 - protein, 13 aa, Homo sapiens
  CDR3 for beta chain variable domain of TCR clone 188212 (TRBV20-1, TRBJ2-5)
CSAREAFQETQYF

SEQ ID NO: 376425 - protein, 15 aa, Homo sapiens
  CDR3 for alpha chain variable domain of TCR clone 188213 (TRAV21, TRAJ24)
CAARSSTDGWGTLQF

SEQ ID NO: 376426 - protein, 11 aa, Homo sapiens
  CDR3 for beta chain variable domain of TCR clone 188213 (TRBV11-2, TRBJ2-2)
CASSLPGELFF

SEQ ID NO: 376427 - protein, 14 aa, Homo sapiens
  CDR3 for alpha chain variable domain of TCR clone 188214 (TRAV10, TRAJ29)
CVVSANSGNTPLVF

SEQ ID NO: 376428 - protein, 16 aa, Homo sapiens
  CDR3 for beta chain variable domain of TCR clone 188214 (TRBV29-1, TRBJ2-7)
CSVEGAEDGTAYEQYF

SEQ ID NO: 376429 - protein, 13 aa, Homo sapiens
  CDR3 for alpha chain variable domain of TCR clone 188215 (TRAV23/DV6, TRAJ45)
CAARRGGADGLTF

SEQ ID NO: 376430 - protein, 14 aa, Homo sapiens
  CDR3 for beta chain variable domain of TCR clone 188215 (TRBV7-2, TRBJ2-3)
RASSLARGTDTQYF

SEQ ID NO: 376431 - protein, 16 aa, Homo sapiens
  CDR3 for alpha chain variable domain of TCR clone 188216 (TRAV23/DV6, TRAJ57)
CAASSPLSTGGSEKLF

SEQ ID NO: 376432 - protein, 14 aa, Homo sapiens
  CDR3 for beta chain variable domain of TCR clone 188216 (TRBV25-1, TRBJ1-1)
CASTHLGGNTEAFF

SEQ ID NO: 376433 - protein, 14 aa, Homo sapiens
  CDR3 for alpha chain variable domain of TCR clone 188217 (TRAV12-1, TRAJ30)
CVVNIGGRDDKIIF

SEQ ID NO: 376434 - protein, 19 aa, Homo sapiens
  CDR3 for beta chain variable domain of TCR clone 188217 (TRBV19, TRBJ2-2)
CASTRPGLAGGRVTGELFF

SEQ ID NO: 376435 - protein, 14 aa, Homo sapiens
  CDR3 for alpha chain variable domain of TCR clone 188218 (TRAV14/DV4, TRAJ22)
CAMSPSGSARQLTF

SEQ ID NO: 376436 - protein, 11 aa, Homo sapiens
  CDR3 for beta chain variable domain of TCR clone 188218 (TRBV12-4, TRBJ2-3)
CASTATDTQYF

SEQ ID NO: 376437 - protein, 11 aa, Homo sapiens
  CDR3 for alpha chain variable domain of TCR clone 188219 (TRAV25, TRAJ49)
CAGGTGNQFYF

SEQ ID NO: 376438 - protein, 12 aa, Homo sapiens
  CDR3 for beta chain variable domain of TCR clone 188219 (TRBV6-5, TRBJ2-1)
CASRNDLGQQFF

SEQ ID NO: 376439 - protein, 12 aa, Homo sapiens
  CDR3 for alpha chain variable domain of TCR clone 188220 (TRAV8-3, TRAJ41)
CSVGALGYALNF

SEQ ID NO: 376440 - protein, 16 aa, Homo sapiens
  CDR3 for beta chain variable domain of TCR clone 188220 (TRBV7-6, TRBJ2-3)
CASSDSRGEGTDTQYF

SEQ ID NO: 376441 - protein, 14 aa, Homo sapiens
  CDR3 for alpha chain variable domain of TCR clone 188221 (TRAV16, TRAJ32)
CALKSGGATNKLIF

SEQ ID NO: 376442 - protein, 15 aa, Homo sapiens
  CDR3 for beta chain variable domain of TCR clone 188221 (TRBV4-1, TRBJ2-7)
CASSQNTGRLYEQYF

SEQ ID NO: 376443 - protein, 15 aa, Homo sapiens
  CDR3 for alpha chain variable domain of TCR clone 188222 (TRAV3, TRAJ23)
CAVRDRGNQGGKLIF

SEQ ID NO: 376444 - protein, 13 aa, Homo sapiens
  CDR3 for beta chain variable domain of TCR clone 188222 (TRBV18, TRBJ2-7)
CQLTERGAYEQYF

SEQ ID NO: 376445 - protein, 13 aa, Homo sapiens
  CDR3 for alpha chain variable domain of TCR clone 188223 (TRAV26-1, TRAJ43)
CIVRVGLNNDMRF

SEQ ID NO: 376446 - protein, 17 aa, Homo sapiens
  CDR3 for beta chain variable domain of TCR clone 188223 (TRBV13, TRBJ2-3)
CASSLSRVAGGRNTQYF

SEQ ID NO: 376447 - protein, 20 aa, Homo sapiens
  CDR3 for alpha chain variable domain of TCR clone 188224 (TRAV26-1, TRAJ22)
CCVLLHRQFKFLGSARQLTF

SEQ ID NO: 376448 - protein, 15 aa, Homo sapiens
  CDR3 for beta chain variable domain of TCR clone 188224 (TRBV4-2, TRBJ1-2)
CASSQRTGGRDGYTF

SEQ ID NO: 376449 - protein, 14 aa, Homo sapiens
  CDR3 for alpha chain variable domain of TCR clone 188225 (TRAV13-1, TRAJ39)
CAASYNNAGNMLTF

SEQ ID NO: 376450 - protein, 15 aa, Homo sapiens
  CDR3 for beta chain variable domain of TCR clone 188225 (TRBV7-3, TRBJ2-1)
CASSLGQGPFGEQFF

SEQ ID NO: 376451 - protein, 18 aa, Homo sapiens
  CDR3 for alpha chain variable domain of TCR clone 188226 (TRAV21, TRAJ52)
CAVRPSPAGGTSYGKLTF

SEQ ID NO: 376452 - protein, 16 aa, Homo sapiens
  CDR3 for beta chain variable domain of TCR clone 188226 (TRBV6-1, TRBJ2-1)
CASILRQGSSYNEQFF

SEQ ID NO: 376453 - protein, 12 aa, Homo sapiens
  CDR3 for alpha chain variable domain of TCR clone 188227 (TRAV14/DV4, TRAJ9)
CAMNTGGFKTIF

SEQ ID NO: 376454 - protein, 16 aa, Homo sapiens
  CDR3 for beta chain variable domain of TCR clone 188227 (TRBV28, TRBJ2-5)
CASSFSPAGGWETQYF

SEQ ID NO: 376455 - protein, 12 aa, Homo sapiens
  CDR3 for alpha chain variable domain of TCR clone 188228 (TRAV21, TRAJ13)
PGPSGGYQKVTF

SEQ ID NO: 376456 - protein, 15 aa, Homo sapiens
  CDR3 for beta chain variable domain of TCR clone 188228 (TRBV7-9, TRBJ1-6)
CASSSPGRGNSALHF

SEQ ID NO: 376457 - protein, 17 aa, Homo sapiens
  CDR3 for alpha chain variable domain of TCR clone 188229 (TRAV23/DV6, TRAJ58)
CAARLLRGETSGSRLTF

SEQ ID NO: 376458 - protein, 13 aa, Homo sapiens
  CDR3 for beta chain variable domain of TCR clone 188229 (TRBV6-4, TRBJ1-5)
CASSEDLNQPQHF

SEQ ID NO: 376459 - protein, 12 aa, Homo sapiens
  CDR3 for alpha chain variable domain of TCR clone 188230 (TRAV13-2, TRAJ58)
CAERRLDSRLTF

SEQ ID NO: 376460 - protein, 14 aa, Homo sapiens
  CDR3 for beta chain variable domain of TCR clone 188230 (TRBV19, TRBJ2-1)
CASPTFVLRGEQYF

SEQ ID NO: 376461 - protein, 14 aa, Homo sapiens
  CDR3 for alpha chain variable domain of TCR clone 188231 (TRAV29/DV5, TRAJ49)
CAASLSNPGNQFYF

SEQ ID NO: 376462 - protein, 15 aa, Homo sapiens
  CDR3 for beta chain variable domain of TCR clone 188231 (TRBV20-1, TRBJ2-1)
CSARGIGGTYNEQFF

SEQ ID NO: 376463 - protein, 15 aa, Homo sapiens
  CDR3 for alpha chain variable domain of TCR clone 188232 (TRAV26-1, TRAJ47)
CIVRVGWGYGNQLVF

SEQ ID NO: 376464 - protein, 13 aa, Homo sapiens
  CDR3 for beta chain variable domain of TCR clone 188232 (TRBV20-1, TRBJ2-7)
CSARGDTQDEQYF

SEQ ID NO: 376465 - protein, 15 aa, Homo sapiens
  CDR3 for alpha chain variable domain of TCR clone 188233 (TRAV4, TRAJ39)
CLVGPNNNAGNMLTF

SEQ ID NO: 376466 - protein, 16 aa, Homo sapiens
  CDR3 for beta chain variable domain of TCR clone 188233 (TRBV7-3, TRBJ2-1)
CASSLSSGGGAKEQFF

SEQ ID NO: 376467 - protein, 15 aa, Homo sapiens
  CDR3 for alpha chain variable domain of TCR clone 188234 (TRAV12-3, TRAJ17)
CAVSPSLAAGNKLTF

SEQ ID NO: 376468 - protein, 13 aa, Homo sapiens
  CDR3 for beta chain variable domain of TCR clone 188234 (TRBV14, TRBJ1-1)
CASSREFGTEAFF

SEQ ID NO: 376469 - protein, 15 aa, Homo sapiens
  CDR3 for alpha chain variable domain of TCR clone 188235 (TRAV3, TRAJ9)
CAVRDINTGGFKTIL

SEQ ID NO: 376470 - protein, 13 aa, Homo sapiens
  CDR3 for beta chain variable domain of TCR clone 188235 (TRBV19, TRBJ2-7)
CASSIPSVREQYF

SEQ ID NO: 376471 - protein, 20 aa, Homo sapiens
  CDR3 for alpha chain variable domain of TCR clone 188236 (TRAV26-1, TRAJ42)
CWVLLHRQTYYGGSQGNPIF

SEQ ID NO: 376472 - protein, 16 aa, Homo sapiens
  CDR3 for beta chain variable domain of TCR clone 188236 (TRBV7-3, TRBJ2-2)
CASSLKRGTLSGELFF

SEQ ID NO: 376473 - protein, 15 aa, Homo sapiens
  CDR3 for alpha chain variable domain of TCR clone 188237 (TRAV3, TRAJ22)
CAVRDRGGSARQLTF

SEQ ID NO: 376474 - protein, 14 aa, Homo sapiens
  CDR3 for beta chain variable domain of TCR clone 188237 (TRBV4-1, TRBJ2-5)
CASSQERGRETQYF

SEQ ID NO: 376475 - protein, 15 aa, Homo sapiens
  CDR3 for alpha chain variable domain of TCR clone 188238 (TRAV3, TRAJ22)
CSVRDRGGSARQLTF

SEQ ID NO: 376476 - protein, 12 aa, Homo sapiens
  CDR3 for beta chain variable domain of TCR clone 188238 (TRBV7-8, TRBJ2-1)
CASSLGHNEQFF

SEQ ID NO: 376477 - protein, 14 aa, Homo sapiens
  CDR3 for alpha chain variable domain of TCR clone 188239 (TRAV13-1, TRAJ44)
CEAKATGTASKLTF

SEQ ID NO: 376478 - protein, 14 aa, Homo sapiens
  CDR3 for beta chain variable domain of TCR clone 188239 (TRBV19, TRBJ2-2)
CASSTLHRSGELFF

SEQ ID NO: 376479 - protein, 15 aa, Homo sapiens
  CDR3 for alpha chain variable domain of TCR clone 188240 (TRAV20, TRAJ50)
RAVRQMKTSYDKVIF

SEQ ID NO: 376480 - protein, 13 aa, Homo sapiens
  CDR3 for beta chain variable domain of TCR clone 188240 (TRBV7-9, TRBJ1-2)
CASSLKQNYGYTF

SEQ ID NO: 376481 - protein, 14 aa, Homo sapiens
  CDR3 for alpha chain variable domain of TCR clone 188241 (TRAV17, TRAJ22)
CATSPSGSARQLTF

SEQ ID NO: 376482 - protein, 15 aa, Homo sapiens
  CDR3 for beta chain variable domain of TCR clone 188241 (TRBV6-3, TRBJ2-7)
CASSYPGTVFYEQYF

SEQ ID NO: 376483 - protein, 14 aa, Homo sapiens
  CDR3 for alpha chain variable domain of TCR clone 188242 (TRAV1-2, TRAJ16)
CAVNQFSDGQKLLF

SEQ ID NO: 376484 - protein, 17 aa, Homo sapiens
  CDR3 for beta chain variable domain of TCR clone 188242 (TRBV20-1, TRBJ2-1)
CSASSSGLAGSYNEQFF

SEQ ID NO: 376485 - protein, 13 aa, Homo sapiens
  CDR3 for alpha chain variable domain of TCR clone 188243 (TRAV13-1, TRAJ43)
CAASLSNNNDILF

SEQ ID NO: 376486 - protein, 15 aa, Homo sapiens
  CDR3 for beta chain variable domain of TCR clone 188243 (TRBV5-1, TRBJ2-1)
CASSQAGYWWNEQFF

SEQ ID NO: 376487 - protein, 16 aa, Homo sapiens
  CDR3 for alpha chain variable domain of TCR clone 188244 (TRAV1-2, TRAJ10)
CAVRGVLTGGGNKLTF

SEQ ID NO: 376488 - protein, 13 aa, Homo sapiens
  CDR3 for beta chain variable domain of TCR clone 188244 (TRBV27, TRBJ1-1)
CASSLSIGAEAFF

SEQ ID NO: 376489 - protein, 14 aa, Homo sapiens
  CDR3 for alpha chain variable domain of TCR clone 188245 (TRAV12-3, TRAJ15)
CAMIPPQAGTALIF

SEQ ID NO: 376490 - protein, 14 aa, Homo sapiens
  CDR3 for beta chain variable domain of TCR clone 188245 (TRBV19, TRBJ2-1)
CASPTFVLSGEQFF

SEQ ID NO: 376491 - protein, 10 aa, Homo sapiens
  CDR3 for alpha chain variable domain of TCR clone 188246 (TRAV13-1, TRAJ8)
CAAPFQKLVF

SEQ ID NO: 376492 - protein, 20 aa, Homo sapiens
  CDR3 for beta chain variable domain of TCR clone 188246 (TRBV3-1, TRBJ2-6)
CASSPRPGLEGGAGANVLTV

SEQ ID NO: 376493 - protein, 13 aa, Homo sapiens
  CDR3 for alpha chain variable domain of TCR clone 188247 (TRAV20, TRAJ20)
CAVRDFNDYKLSF

SEQ ID NO: 376494 - protein, 14 aa, Homo sapiens
  CDR3 for beta chain variable domain of TCR clone 188247 (TRBV13, TRBJ2-5)
CASSSWIEGETQYF

SEQ ID NO: 376495 - protein, 14 aa, Homo sapiens
  CDR3 for alpha chain variable domain of TCR clone 188248 (TRAV1-2, TRAJ16)
CAVNRFSDGQKLPF

SEQ ID NO: 376496 - protein, 15 aa, Homo sapiens
  CDR3 for beta chain variable domain of TCR clone 188248 (TRBV9, TRBJ2-1)
CASSLAGSSYNEQFF

SEQ ID NO: 376497 - protein, 14 aa, Homo sapiens
  CDR3 for alpha chain variable domain of TCR clone 188249 (TRAV3, TRAJ9)
CAVRGNTGGFKTIF

SEQ ID NO: 376498 - protein, 13 aa, Homo sapiens
  CDR3 for beta chain variable domain of TCR clone 188249 (TRBV7-9, TRBJ1-2)
CASSLKQNYGYTF

SEQ ID NO: 376499 - protein, 16 aa, Homo sapiens
  CDR3 for alpha chain variable domain of TCR clone 188250 (TRAV13-1, TRAJ48)
CAASIFGNFGNEKLTF

SEQ ID NO: 376500 - protein, 14 aa, Homo sapiens
  CDR3 for beta chain variable domain of TCR clone 188250 (TRBV4-1, TRBJ2-2)
CASSQAVNTGELFF

SEQ ID NO: 376501 - protein, 13 aa, Homo sapiens
  CDR3 for alpha chain variable domain of TCR clone 188251 (TRAV27, TRAJ42)
CAGARGSQGNLIF

SEQ ID NO: 376502 - protein, 14 aa, Homo sapiens
  CDR3 for beta chain variable domain of TCR clone 188251 (TRBV20-1, TRBJ1-1)
FSAQTRIGGTEAFF

SEQ ID NO: 376503 - protein, 16 aa, Homo sapiens
  CDR3 for alpha chain variable domain of TCR clone 188252 (TRAV4, TRAJ18)
CCVLLIGGSTLGRLYF

SEQ ID NO: 376504 - protein, 17 aa, Homo sapiens
  CDR3 for beta chain variable domain of TCR clone 188252 (TRBV13, TRBJ2-3)
CASSLSRVAGGRNTQYF

SEQ ID NO: 376505 - protein, 14 aa, Homo sapiens
  CDR3 for alpha chain variable domain of TCR clone 188253 (TRAV16, TRAJ54)
CALSLIQGAHKLVS

SEQ ID NO: 376506 - protein, 15 aa, Homo sapiens
  CDR3 for beta chain variable domain of TCR clone 188253 (TRBV20-1, TRBJ2-7)
CSARDRVSGMDEQYF

SEQ ID NO: 376507 - protein, 12 aa, Homo sapiens
  CDR3 for alpha chain variable domain of TCR clone 188254 (TRAV21, TRAJ20)
CAVRGNDYKLSF

SEQ ID NO: 376508 - protein, 14 aa, Homo sapiens
  CDR3 for beta chain variable domain of TCR clone 188254 (TRBV7-8, TRBJ2-7)
CASSQTHGADEQYF

SEQ ID NO: 376509 - protein, 17 aa, Homo sapiens
  CDR3 for alpha chain variable domain of TCR clone 188255 (TRAV8-3, TRAJ34)
CAIPGKLIFGTGTRLQV

SEQ ID NO: 376510 - protein, 15 aa, Homo sapiens
  CDR3 for beta chain variable domain of TCR clone 188255 (TRBV20-1, TRBJ1-5)
CSARGSVDSNQPQHF

SEQ ID NO: 376511 - protein, 16 aa, Homo sapiens
  CDR3 for alpha chain variable domain of TCR clone 188256 (TRAV12-3, TRAJ53)
CAMSPGGGGSNYKRTF

SEQ ID NO: 376512 - protein, 16 aa, Homo sapiens
  CDR3 for beta chain variable domain of TCR clone 188256 (TRBV27, TRBJ2-7)
CASSSERRDSAYEQYF

SEQ ID NO: 376513 - protein, 13 aa, Homo sapiens
  CDR3 for alpha chain variable domain of TCR clone 188257 (TRAV30, TRAJ49)
CGTESQPVTSSIL

SEQ ID NO: 376514 - protein, 13 aa, Homo sapiens
  CDR3 for beta chain variable domain of TCR clone 188257 (TRBV10-2, TRBJ2-7)
CASGASGGYEQYF

SEQ ID NO: 376515 - protein, 22 aa, Homo sapiens
  CDR3 for alpha chain variable domain of TCR clone 188258 (TRAV2, TRAJ10)
ILQVREADAAVYYTGGGNKLTF

SEQ ID NO: 376516 - protein, 15 aa, Homo sapiens
  CDR3 for beta chain variable domain of TCR clone 188258 (TRBV7-2, TRBJ2-1)
CASSFQADEYNEQFF

SEQ ID NO: 376517 - protein, 14 aa, Homo sapiens
  CDR3 for alpha chain variable domain of TCR clone 188259 (TRAV17, TRAJ6)
CATDASGGSYIPKF

SEQ ID NO: 376518 - protein, 14 aa, Homo sapiens
  CDR3 for beta chain variable domain of TCR clone 188259 (TRBV4-1, TRBJ2-2)
CASSQAVNTGELFF

SEQ ID NO: 376519 - protein, 20 aa, Homo sapiens
  CDR3 for alpha chain variable domain of TCR clone 188260 (TRAV14/DV4, TRAJ22)
CAMREGPFSISSGSARQLTF

SEQ ID NO: 376520 - protein, 13 aa, Homo sapiens
  CDR3 for beta chain variable domain of TCR clone 188260 (TRBV4-2, TRBJ2-3)
CASSQVWQHTQYF

SEQ ID NO: 376521 - protein, 14 aa, Homo sapiens
  CDR3 for alpha chain variable domain of TCR clone 188261 (TRAV12-2, TRAJ17)
CAVLFEAAGNKLTF

SEQ ID NO: 376522 - protein, 17 aa, Homo sapiens
  CDR3 for beta chain variable domain of TCR clone 188261 (TRBV11-2, TRBJ2-1)
CASSLYPPEVEYNEQFF

SEQ ID NO: 376523 - protein, 19 aa, Homo sapiens
  CDR3 for alpha chain variable domain of TCR clone 188262 (TRAV26-1, TRAJ52)
WIVRAHRNAGGTSYGKLTF

SEQ ID NO: 376524 - protein, 15 aa, Homo sapiens
  CDR3 for beta chain variable domain of TCR clone 188262 (TRBV29-1, TRBJ2-1)
CSGRDRKSSYNEQFF

SEQ ID NO: 376525 - protein, 16 aa, Homo sapiens
  CDR3 for alpha chain variable domain of TCR clone 188263 (TRAV26-1, TRAJ37)
CIVRGDGSGNTGKLLF

SEQ ID NO: 376526 - protein, 17 aa, Homo sapiens
  CDR3 for beta chain variable domain of TCR clone 188263 (TRBV11-2, TRBJ2-1)
CASSLYPPGVEYNEQFF

SEQ ID NO: 376527 - protein, 16 aa, Homo sapiens
  CDR3 for alpha chain variable domain of TCR clone 188264 (TRAV38-1, TRAJ39)
CAFMKHYLGAGNMLTF

SEQ ID NO: 376528 - protein, 12 aa, Homo sapiens
  CDR3 for beta chain variable domain of TCR clone 188264 (TRBV19, TRBJ1-4)
CASKDWPGGLFF

SEQ ID NO: 376529 - protein, 16 aa, Homo sapiens
  CDR3 for alpha chain variable domain of TCR clone 188265 (TRAV12-2, TRAJ10)
CAVNRVLTGGGNKLTF

SEQ ID NO: 376530 - protein, 13 aa, Homo sapiens
  CDR3 for beta chain variable domain of TCR clone 188265 (TRBV12-4, TRBJ2-7)
CASSPTETYEQYF

SEQ ID NO: 376531 - protein, 15 aa, Homo sapiens
  CDR3 for alpha chain variable domain of TCR clone 188266 (TRAV16, TRAJ4)
CALEDPSGGYNKLIF

SEQ ID NO: 376532 - protein, 12 aa, Homo sapiens
  CDR3 for beta chain variable domain of TCR clone 188266 (TRBV7-3, TRBJ2-7)
CQQPSGGYEQYF

SEQ ID NO: 376533 - protein, 17 aa, Homo sapiens
  CDR3 for alpha chain variable domain of TCR clone 188267 (TRAV3, TRAJ6)
CTVRDGPRAGGSYIPTF

SEQ ID NO: 376534 - protein, 15 aa, Homo sapiens
  CDR3 for beta chain variable domain of TCR clone 188267 (TRBV6-3, TRBJ2-7)
CASSSPGTVFYEQYF

SEQ ID NO: 376535 - protein, 16 aa, Homo sapiens
  CDR3 for alpha chain variable domain of TCR clone 188268 (TRAV12-1, TRAJ6)
CGEGGVPSGGSYITTF

SEQ ID NO: 376536 - protein, 13 aa, Homo sapiens
  CDR3 for beta chain variable domain of TCR clone 188268 (TRBV5-1, TRBJ2-5)
CASSLIPAETQYF

SEQ ID NO: 376537 - protein, 13 aa, Homo sapiens
  CDR3 for alpha chain variable domain of TCR clone 188269 (TRAV20, TRAJ37)
CAGCSSNTGQLIF

SEQ ID NO: 376538 - protein, 14 aa, Homo sapiens
  CDR3 for beta chain variable domain of TCR clone 188269 (TRBV12-5, TRBJ2-5)
CASGSRTHQETQYF

SEQ ID NO: 376539 - protein, 11 aa, Homo sapiens
  CDR3 for alpha chain variable domain of TCR clone 188270 (TRAV29/DV5, TRAJ47)
CAATYGNKLVF

SEQ ID NO: 376540 - protein, 14 aa, Homo sapiens
  CDR3 for beta chain variable domain of TCR clone 188270 (TRBV7-2, TRBJ2-7)
CASSPKTSFYEQYF

SEQ ID NO: 376541 - protein, 16 aa, Homo sapiens
  CDR3 for alpha chain variable domain of TCR clone 188271 (TRAV30, TRAJ24)
CGTEIVDADSWGKFQF

SEQ ID NO: 376542 - protein, 14 aa, Homo sapiens
  CDR3 for beta chain variable domain of TCR clone 188271 (TRBV19, TRBJ2-1)
CASPTFVLSGEQFF

SEQ ID NO: 376543 - protein, 14 aa, Homo sapiens
  CDR3 for alpha chain variable domain of TCR clone 188272 (TRAV20, TRAJ42)
CCAAAGGSQGNLIF

SEQ ID NO: 376544 - protein, 14 aa, Homo sapiens
  CDR3 for beta chain variable domain of TCR clone 188272 (TRBV14, TRBJ2-3)
CASSRKLAADTQYF

SEQ ID NO: 376545 - protein, 13 aa, Homo sapiens
  CDR3 for alpha chain variable domain of TCR clone 188273 (TRAV2, TRAJ40)
CAVVTSGTYKYIF

SEQ ID NO: 376546 - protein, 15 aa, Homo sapiens
  CDR3 for beta chain variable domain of TCR clone 188273 (TRBV18, TRBJ2-7)
CASSPSSTGNYEQYF

SEQ ID NO: 376547 - protein, 17 aa, Homo sapiens
  CDR3 for alpha chain variable domain of TCR clone 188274 (TRAV4, )
CLVDIQNPDPAVYQLRD

SEQ ID NO: 376548 - protein, 14 aa, Homo sapiens
  CDR3 for beta chain variable domain of TCR clone 188274 (TRBV20-1, TRBJ1-1)
CSAQTRIGGTEAFF

SEQ ID NO: 376549 - protein, 14 aa, Homo sapiens
  CDR3 for alpha chain variable domain of TCR clone 188275 (TRAV12-1, TRAJ39)
CVVNFNNAGNMLTF

SEQ ID NO: 376550 - protein, 14 aa, Homo sapiens
  CDR3 for beta chain variable domain of TCR clone 188275 (TRBV5-1, TRBJ2-3)
CASRGRTSTDTQYF

SEQ ID NO: 376551 - protein, 12 aa, Homo sapiens
  CDR3 for alpha chain variable domain of TCR clone 188276 (TRAV13-2, TRAJ16)
CAASPDGQKLLF

SEQ ID NO: 376552 - protein, 16 aa, Homo sapiens
  CDR3 for beta chain variable domain of TCR clone 188276 (TRBV9, TRBJ2-1)
CASSVGGGGNYNEQFV

SEQ ID NO: 376553 - protein, 15 aa, Homo sapiens
  CDR3 for alpha chain variable domain of TCR clone 188277 (TRAV1-2, TRAJ35)
CAVRDPGGFGNVLHC

SEQ ID NO: 376554 - protein, 14 aa, Homo sapiens
  CDR3 for beta chain variable domain of TCR clone 188277 (TRBV5-1, TRBJ2-1)
CASSLDERFDEQFF

SEQ ID NO: 376555 - protein, 11 aa, Homo sapiens
  CDR3 for alpha chain variable domain of TCR clone 188278 (TRAV2, TRAJ13)
CASGGYQKVTF

SEQ ID NO: 376556 - protein, 13 aa, Homo sapiens
  CDR3 for beta chain variable domain of TCR clone 188278 (TRBV11-2, TRBJ2-7)
CASSTSRSLEQYF

SEQ ID NO: 376557 - protein, 14 aa, Homo sapiens
  CDR3 for alpha chain variable domain of TCR clone 188279 (TRAV13-1, TRAJ32)
CAARGSGATNKLIF

SEQ ID NO: 376558 - protein, 15 aa, Homo sapiens
  CDR3 for beta chain variable domain of TCR clone 188279 (TRBV20-1, TRBJ2-7)
CSARDRVSGMDEQYF

SEQ ID NO: 376559 - protein, 15 aa, Homo sapiens
  CDR3 for alpha chain variable domain of TCR clone 188280 (TRAV26-1, TRAJ29)
CIVRVEGSGNTTLVF

SEQ ID NO: 376560 - protein, 15 aa, Homo sapiens
  CDR3 for beta chain variable domain of TCR clone 188280 (TRBV7-9, TRBJ1-5)
CASSQGRQPNQPQHF

SEQ ID NO: 376561 - protein, 15 aa, Homo sapiens
  CDR3 for alpha chain variable domain of TCR clone 188281 (TRAV26-2, TRAJ57)
CILRDILGGSEKLVF

SEQ ID NO: 376562 - protein, 15 aa, Homo sapiens
  CDR3 for beta chain variable domain of TCR clone 188281 (TRBV2, TRBJ2-1)
CASDIGLAGEGEQFF

SEQ ID NO: 376563 - protein, 16 aa, Homo sapiens
  CDR3 for alpha chain variable domain of TCR clone 188282 (TRAV3, TRAJ37)
CAMRPHGSGNTGKLTF

SEQ ID NO: 376564 - protein, 14 aa, Homo sapiens
  CDR3 for beta chain variable domain of TCR clone 188282 (TRBV7-2, TRBJ2-2)
CASSSDGHTGELFF

SEQ ID NO: 376565 - protein, 11 aa, Homo sapiens
  CDR3 for alpha chain variable domain of TCR clone 188283 (TRAV12-2, TRAJ23)
CAVDQGGKLIF

SEQ ID NO: 376566 - protein, 13 aa, Homo sapiens
  CDR3 for beta chain variable domain of TCR clone 188283 (TRBV11-2, TRBJ1-6)
CASSLAGVSPLHF

SEQ ID NO: 376567 - protein, 15 aa, Homo sapiens
  CDR3 for alpha chain variable domain of TCR clone 188284 (TRAV17, TRAJ57)
CATGPSQGGSEQLFF

SEQ ID NO: 376568 - protein, 16 aa, Homo sapiens
  CDR3 for beta chain variable domain of TCR clone 188284 (TRBV12-4, TRBJ1-5)
CASSRPVGGSNQPQHF

SEQ ID NO: 376569 - protein, 12 aa, Homo sapiens
  CDR3 for alpha chain variable domain of TCR clone 188285 (TRAV23/DV6, TRAJ30)
CAASKGDDKIIF

SEQ ID NO: 376570 - protein, 14 aa, Homo sapiens
  CDR3 for beta chain variable domain of TCR clone 188285 (TRBV7-9, TRBJ2-2)
CASSGLADTGELFF

SEQ ID NO: 376571 - protein, 14 aa, Homo sapiens
  CDR3 for alpha chain variable domain of TCR clone 188286 (TRAV12-3, TRAJ58)
CAMSTETSGSSLTF

SEQ ID NO: 376572 - protein, 11 aa, Homo sapiens
  CDR3 for beta chain variable domain of TCR clone 188286 (TRBV29-1, TRBJ2-5)
CSEDRTGTQYF

SEQ ID NO: 376573 - protein, 14 aa, Homo sapiens
  CDR3 for alpha chain variable domain of TCR clone 188287 (TRAV12-3, TRAJ10)
SHLPLTGGGDKLTF

SEQ ID NO: 376574 - protein, 20 aa, Homo sapiens
  CDR3 for beta chain variable domain of TCR clone 188287 (TRBV7-8, TRBJ2-2)
CASSHLFPGPTIHITGELFF

SEQ ID NO: 376575 - protein, 15 aa, Homo sapiens
  CDR3 for alpha chain variable domain of TCR clone 188288 (TRAV3, TRAJ22)
CAVRDRGGSARQLTF

SEQ ID NO: 376576 - protein, 14 aa, Homo sapiens
  CDR3 for beta chain variable domain of TCR clone 188288 (TRBV19, TRBJ2-1)
CASKDPSSYNEQFF

SEQ ID NO: 376577 - protein, 11 aa, Homo sapiens
  CDR3 for alpha chain variable domain of TCR clone 188289 (TRAV12-3, TRAJ43)
CAMSVSNDMRF

SEQ ID NO: 376578 - protein, 12 aa, Homo sapiens
  CDR3 for beta chain variable domain of TCR clone 188289 (TRBV19, TRBJ1-2)
CASKSRTVCYTF

SEQ ID NO: 376579 - protein, 13 aa, Homo sapiens
  CDR3 for alpha chain variable domain of TCR clone 188290 (TRAV12-2, TRAJ13)
CAVTAGGYQKVTF

SEQ ID NO: 376580 - protein, 14 aa, Homo sapiens
  CDR3 for beta chain variable domain of TCR clone 188290 (TRBV2, TRBJ2-1)
CASSEARQGVSEFF

SEQ ID NO: 376581 - protein, 11 aa, Homo sapiens
  CDR3 for alpha chain variable domain of TCR clone 188291 (TRAV3, TRAJ21)
CAVGNFNKFYF

SEQ ID NO: 376582 - protein, 15 aa, Homo sapiens
  CDR3 for beta chain variable domain of TCR clone 188291 (TRBV15, TRBJ1-5)
CATSTTGVVNQPQHF

SEQ ID NO: 376583 - protein, 11 aa, Homo sapiens
  CDR3 for alpha chain variable domain of TCR clone 188292 (TRAV3, TRAJ21)
CAVGNFNKFYF

SEQ ID NO: 376584 - protein, 16 aa, Homo sapiens
  CDR3 for beta chain variable domain of TCR clone 188292 (TRBV28, TRBJ2-6)
CAGSNRRGSGANVLTF

SEQ ID NO: 376585 - protein, 14 aa, Homo sapiens
  CDR3 for alpha chain variable domain of TCR clone 188293 (TRAV8-3, TRAJ9)
CAVVYNTGGFKTIF

SEQ ID NO: 376586 - protein, 12 aa, Homo sapiens
  CDR3 for beta chain variable domain of TCR clone 188293 (TRBV19, TRBJ2-1)
CASSQISNEQFF

SEQ ID NO: 376587 - protein, 17 aa, Homo sapiens
  CDR3 for alpha chain variable domain of TCR clone 188294 (TRAV2, TRAJ32)
CLLLCFHFGGATNKLIF

SEQ ID NO: 376588 - protein, 16 aa, Homo sapiens
  CDR3 for beta chain variable domain of TCR clone 188294 (TRBV7-9, TRBJ2-7)
CASSYPDREGGYEQYF

SEQ ID NO: 376589 - protein, 14 aa, Homo sapiens
  CDR3 for alpha chain variable domain of TCR clone 188295 (TRAV12-2, TRAJ45)
CAVYSGGGADGLTF

SEQ ID NO: 376590 - protein, 17 aa, Homo sapiens
  CDR3 for beta chain variable domain of TCR clone 188295 (TRBV20-1, TRBJ2-2)
CSASGSGQGGLTGELFF

SEQ ID NO: 376591 - protein, 16 aa, Homo sapiens
  CDR3 for alpha chain variable domain of TCR clone 188296 (TRAV30, TRAJ24)
CGTEIVDADSWGKFQF

SEQ ID NO: 376592 - protein, 13 aa, Homo sapiens
  CDR3 for beta chain variable domain of TCR clone 188296 (TRBV29-1, TRBJ2-2)
CSVYREDTGELFF

SEQ ID NO: 376593 - protein, 15 aa, Homo sapiens
  CDR3 for alpha chain variable domain of TCR clone 188297 (TRAV8-3, TRAJ27)
CAVGPSKTNAGKSTF

SEQ ID NO: 376594 - protein, 14 aa, Homo sapiens
  CDR3 for beta chain variable domain of TCR clone 188297 (TRBV12-4, TRBJ2-5)
CASSLPAGVGTQYF

SEQ ID NO: 376595 - protein, 13 aa, Homo sapiens
  CDR3 for alpha chain variable domain of TCR clone 188298 (TRAV21, TRAJ27)
CAARHGNAGKSTF

SEQ ID NO: 376596 - protein, 14 aa, Homo sapiens
  CDR3 for beta chain variable domain of TCR clone 188298 (TRBV7-6, TRBJ2-3)
CASSLGTVTDTPYF

SEQ ID NO: 376597 - protein, 12 aa, Homo sapiens
  CDR3 for alpha chain variable domain of TCR clone 188299 (TRAV12-1, TRAJ40)
RVVYSGTYKYIF

SEQ ID NO: 376598 - protein, 17 aa, Homo sapiens
  CDR3 for beta chain variable domain of TCR clone 188299 (TRBV7-3, TRBJ2-3)
CASSPRGQGYGTDTQYF

SEQ ID NO: 376599 - protein, 11 aa, Homo sapiens
  CDR3 for alpha chain variable domain of TCR clone 188300 (TRAV1-1, TRAJ23)
CAVRQGGKLIF

SEQ ID NO: 376600 - protein, 13 aa, Homo sapiens
  CDR3 for beta chain variable domain of TCR clone 188300 (TRBV24-1, TRBJ2-1)
CATSAGPYNEQFF

SEQ ID NO: 376601 - protein, 11 aa, Homo sapiens
  CDR3 for alpha chain variable domain of TCR clone 188301 (TRAV1-2, TRAJ20)
CAVSNDYKPSF

SEQ ID NO: 376602 - protein, 19 aa, Homo sapiens
  CDR3 for beta chain variable domain of TCR clone 188301 (TRBV11-3, TRBJ2-2)
CASSTRPGAKTTNTGELFF

SEQ ID NO: 376603 - protein, 14 aa, Homo sapiens
  CDR3 for alpha chain variable domain of TCR clone 188302 (TRAV35, TRAJ22)
CAGLRPGSARQLTF

SEQ ID NO: 376604 - protein, 19 aa, Homo sapiens
  CDR3 for beta chain variable domain of TCR clone 188302 (TRBV12-4, TRBJ2-5)
CASSPPTGLRDPVLRARHA

SEQ ID NO: 376605 - protein, 16 aa, Homo sapiens
  CDR3 for alpha chain variable domain of TCR clone 188303 (TRAV30, TRAJ24)
CGTEIGDADSWGKFQF

SEQ ID NO: 376606 - protein, 14 aa, Homo sapiens
  CDR3 for beta chain variable domain of TCR clone 188303 (TRBV12-5, TRBJ2-5)
CAGGSRTHQETQYF

SEQ ID NO: 376607 - protein, 11 aa, Homo sapiens
  CDR3 for alpha chain variable domain of TCR clone 188304 (TRAV12-3, TRAJ43)
CAMSVSNDMRF

SEQ ID NO: 376608 - protein, 15 aa, Homo sapiens
  CDR3 for beta chain variable domain of TCR clone 188304 (TRBV5-1, TRBJ2-1)
CASSSPRAPYNEQFF

SEQ ID NO: 376609 - protein, 12 aa, Homo sapiens
  CDR3 for alpha chain variable domain of TCR clone 188305 (TRAV13-1, TRAJ42)
SVLRGSQGNLIF

SEQ ID NO: 376610 - protein, 13 aa, Homo sapiens
  CDR3 for beta chain variable domain of TCR clone 188305 (TRBV2, TRBJ1-4)
CASSELGVKKLFF

SEQ ID NO: 376611 - protein, 15 aa, Homo sapiens
  CDR3 for alpha chain variable domain of TCR clone 188306 (TRAV25, TRAJ52)
CAGTSGSTSYGKLTF

SEQ ID NO: 376612 - protein, 16 aa, Homo sapiens
  CDR3 for beta chain variable domain of TCR clone 188306 (TRBV15, TRBJ1-2)
RATSRGPRTGGGGYTF

SEQ ID NO: 376613 - protein, 17 aa, Homo sapiens
  CDR3 for alpha chain variable domain of TCR clone 188307 (TRAV23/DV6, TRAJ53)
CAASKLGSGGRNYKLTF

SEQ ID NO: 376614 - protein, 14 aa, Homo sapiens
  CDR3 for beta chain variable domain of TCR clone 188307 (TRBV7-9, TRBJ2-3)
CASSLEQGTNTQYF

SEQ ID NO: 376615 - protein, 11 aa, Homo sapiens
  CDR3 for alpha chain variable domain of TCR clone 188308 (TRAV12-1, TRAJ15)
CVVNAGTALIF

SEQ ID NO: 376616 - protein, 16 aa, Homo sapiens
  CDR3 for beta chain variable domain of TCR clone 188308 (TRBV28, TRBJ2-1)
CASSSRVRDSYNKQFF

SEQ ID NO: 376617 - protein, 15 aa, Homo sapiens
  CDR3 for alpha chain variable domain of TCR clone 188309 (TRAV27, TRAJ38)
CAARRNAGNNRKLIW

SEQ ID NO: 376618 - protein, 13 aa, Homo sapiens
  CDR3 for beta chain variable domain of TCR clone 188309 (TRBV20-1, TRBJ1-1)
CSARAGGNTEAFC

SEQ ID NO: 376619 - protein, 14 aa, Homo sapiens
  CDR3 for alpha chain variable domain of TCR clone 188310 (TRAV29/DV5, TRAJ49)
CAASLSNTGNQFYF

SEQ ID NO: 376620 - protein, 16 aa, Homo sapiens
  CDR3 for beta chain variable domain of TCR clone 188310 (TRBV19, TRBJ2-1)
CASSKAGPSSYNEQFF

SEQ ID NO: 376621 - protein, 12 aa, Homo sapiens
  CDR3 for alpha chain variable domain of TCR clone 188311 (TRAV27, TRAJ21)
CAGVRQLQQILL

SEQ ID NO: 376622 - protein, 14 aa, Homo sapiens
  CDR3 for beta chain variable domain of TCR clone 188311 (TRBV7-9, IGLJ4)
CASSLEGQSEKLFF

SEQ ID NO: 376623 - protein, 14 aa, Homo sapiens
  CDR3 for alpha chain variable domain of TCR clone 188312 (TRAV8-4, TRAJ8)
CAVSLNTGFQKLLF

SEQ ID NO: 376624 - protein, 13 aa, Homo sapiens
  CDR3 for beta chain variable domain of TCR clone 188312 (TRBV7-9, TRBJ2-3)
CASSPGSTDTQYF

SEQ ID NO: 376625 - protein, 14 aa, Homo sapiens
  CDR3 for alpha chain variable domain of TCR clone 188313 (TRAV17, TRAJ54)
CATDANQGAQKLVF

SEQ ID NO: 376626 - protein, 18 aa, Homo sapiens
  CDR3 for beta chain variable domain of TCR clone 188313 (TRBV7-7, TRBJ2-1)
CASSLALTSGRSYNEQFF

SEQ ID NO: 376627 - protein, 10 aa, Homo sapiens
  CDR3 for alpha chain variable domain of TCR clone 188314 (TRAV1-2, TRAJ20)
CACNDYKLSF

SEQ ID NO: 376628 - protein, 12 aa, Homo sapiens
  CDR3 for beta chain variable domain of TCR clone 188314 (TRBV5-1, TRBJ1-1)
CASSLTGAEAFF

SEQ ID NO: 376629 - protein, 21 aa, Homo sapiens
  CDR3 for alpha chain variable domain of TCR clone 188315 (TRAV1-1, TRAJ9)
CAAKNTGGFKLSLEQEQDYLL

SEQ ID NO: 376630 - protein, 14 aa, Homo sapiens
  CDR3 for beta chain variable domain of TCR clone 188315 (TRBV20-1, TRBJ2-1)
CSAQIGGSANEQFF

SEQ ID NO: 376631 - protein, 14 aa, Homo sapiens
  CDR3 for alpha chain variable domain of TCR clone 188316 (TRAV14/DV4, TRAJ34)
CAMRGLYNTDTLIF

SEQ ID NO: 376632 - protein, 15 aa, Homo sapiens
  CDR3 for beta chain variable domain of TCR clone 188316 (TRBV18, TRBJ2-5)
CASSPDPGLQETQYF

SEQ ID NO: 376633 - protein, 21 aa, Homo sapiens
  CDR3 for alpha chain variable domain of TCR clone 188317 (TRAV1-1, TRAJ6)
CLLLLCCERLERKGGSYIPTF

SEQ ID NO: 376634 - protein, 13 aa, Homo sapiens
  CDR3 for beta chain variable domain of TCR clone 188317 (TRBV10-2, TRBJ2-7)
CASGASGGYEQYF

SEQ ID NO: 376635 - protein, 14 aa, Homo sapiens
  CDR3 for alpha chain variable domain of TCR clone 188318 (TRAV12-3, TRAJ11)
CAMTTNSGYSTLPF

SEQ ID NO: 376636 - protein, 16 aa, Homo sapiens
  CDR3 for beta chain variable domain of TCR clone 188318 (TRBV20-1, TRBJ1-1)
CSARALTQGMNTEAFF

SEQ ID NO: 376637 - protein, 15 aa, Homo sapiens
  CDR3 for alpha chain variable domain of TCR clone 188319 (TRAV3, TRAJ17)
CAVSPKEAAGNKLTF

SEQ ID NO: 376638 - protein, 14 aa, Homo sapiens
  CDR3 for beta chain variable domain of TCR clone 188319 (TRBV20-1, TRBJ1-1)
CSAQTRIGGTEAFF

SEQ ID NO: 376639 - protein, 14 aa, Homo sapiens
  CDR3 for alpha chain variable domain of TCR clone 188320 (TRAV26-1, TRAJ38)
CIADNAGNNRKLLW

SEQ ID NO: 376640 - protein, 13 aa, Homo sapiens
  CDR3 for beta chain variable domain of TCR clone 188320 (TRBV20-1, TRBJ1-1)
CSARGGGNTEAVF

SEQ ID NO: 376641 - protein, 15 aa, Homo sapiens
  CDR3 for alpha chain variable domain of TCR clone 188321 (TRAV3, TRAJ5)
CAVRDRKTGRRALTF

SEQ ID NO: 376642 - protein, 12 aa, Homo sapiens
  CDR3 for beta chain variable domain of TCR clone 188321 (TRBV2, TRBJ2-1)
CAYGPPGNEQFF

SEQ ID NO: 376643 - protein, 15 aa, Homo sapiens
  CDR3 for alpha chain variable domain of TCR clone 188322 (TRAV17, TRAJ40)
CATVSSTSGTYKYIF

SEQ ID NO: 376644 - protein, 16 aa, Homo sapiens
  CDR3 for beta chain variable domain of TCR clone 188322 (TRBV5-1, TRBJ2-7)
CASSLEGLAGLYEQYF

SEQ ID NO: 376645 - protein, 12 aa, Homo sapiens
  CDR3 for alpha chain variable domain of TCR clone 188323 (TRAV13-2, TRAJ49)
CAETDTGNQFYF

SEQ ID NO: 376646 - protein, 14 aa, Homo sapiens
  CDR3 for beta chain variable domain of TCR clone 188323 (TRBV20-1, TRBJ2-4)
CSARDRGQGGIQYF

SEQ ID NO: 376647 - protein, 13 aa, Homo sapiens
  CDR3 for alpha chain variable domain of TCR clone 188324 (TRAV8-3, TRAJ48)
CAVVPFGNEKLTF

SEQ ID NO: 376648 - protein, 14 aa, Homo sapiens
  CDR3 for beta chain variable domain of TCR clone 188324 (TRBV6-1, TRBJ1-3)
CASVQGGGGNTIYF

SEQ ID NO: 376649 - protein, 16 aa, Homo sapiens
  CDR3 for alpha chain variable domain of TCR clone 188325 (TRAV30, TRAJ24)
CGTEIVDADSWGKFQF

SEQ ID NO: 376650 - protein, 14 aa, Homo sapiens
  CDR3 for beta chain variable domain of TCR clone 188325 (TRBV12-4, TRBJ2-3)
CASSLQSSTDTQYF

SEQ ID NO: 376651 - protein, 16 aa, Homo sapiens
  CDR3 for alpha chain variable domain of TCR clone 188326 (TRAV13-2, TRAJ32)
CAENMIYGGATNKLIF

SEQ ID NO: 376652 - protein, 14 aa, Homo sapiens
  CDR3 for beta chain variable domain of TCR clone 188326 (TRBV15, TRBJ2-5)
CATSSTGYQETQYF

SEQ ID NO: 376653 - protein, 15 aa, Homo sapiens
  CDR3 for alpha chain variable domain of TCR clone 188327 (TRAV38-1, TRAJ37)
CAFIFGSRNTGKLIF

SEQ ID NO: 376654 - protein, 12 aa, Homo sapiens
  CDR3 for beta chain variable domain of TCR clone 188327 (TRBV7-9, TRBJ2-7)
CASSLEGYEQYF

SEQ ID NO: 376655 - protein, 16 aa, Homo sapiens
  CDR3 for alpha chain variable domain of TCR clone 188328 (TRAV12-1, TRAJ43)
CVVNPHRFGAGIRLTV

SEQ ID NO: 376656 - protein, 13 aa, Homo sapiens
  CDR3 for beta chain variable domain of TCR clone 188328 (TRBV12-4, TRBJ1-2)
CDSSSGPNYGYTF

SEQ ID NO: 376657 - protein, 15 aa, Homo sapiens
  CDR3 for alpha chain variable domain of TCR clone 188329 (TRAV38-1, TRAJ57)
CAFMDSQGGSEKLVF

SEQ ID NO: 376658 - protein, 16 aa, Homo sapiens
  CDR3 for beta chain variable domain of TCR clone 188329 (TRBV10-3, TRBJ2-1)
CAIRGRGRGDYNEQFF

SEQ ID NO: 376659 - protein, 13 aa, Homo sapiens
  CDR3 for alpha chain variable domain of TCR clone 188330 (TRAV3, TRAJ43)
CAVRDTRGGDMRF

SEQ ID NO: 376660 - protein, 15 aa, Homo sapiens
  CDR3 for beta chain variable domain of TCR clone 188330 (TRBV6-5, TRBJ1-5)
CASSYSRRSNQPQHL

SEQ ID NO: 376661 - protein, 14 aa, Homo sapiens
  CDR3 for alpha chain variable domain of TCR clone 188331 (TRAV8-6, TRAJ53)
CAALVLCSNYKLTF

SEQ ID NO: 376662 - protein, 15 aa, Homo sapiens
  CDR3 for beta chain variable domain of TCR clone 188331 (TRBV20-1, TRBJ2-3)
CSAEPLAGHGDTQYF

SEQ ID NO: 376663 - protein, 19 aa, Homo sapiens
  CDR3 for alpha chain variable domain of TCR clone 188332 (TRAV2, TRAJ32)
CAFNPPESGWCYNQAHLWN

SEQ ID NO: 376664 - protein, 12 aa, Homo sapiens
  CDR3 for beta chain variable domain of TCR clone 188332 (TRBV20-1, TRBJ2-7)
CSAITPTKEQYF

SEQ ID NO: 376665 - protein, 15 aa, Homo sapiens
  CDR3 for alpha chain variable domain of TCR clone 188333 (TRAV12-2, TRAJ42)
CAVTSHGGSQGNLIF

SEQ ID NO: 376666 - protein, 13 aa, Homo sapiens
  CDR3 for beta chain variable domain of TCR clone 188333 (TRBV27, TRBJ1-1)
CASSVSANTEAFF

SEQ ID NO: 376667 - protein, 15 aa, Homo sapiens
  CDR3 for alpha chain variable domain of TCR clone 188334 (TRAV34, TRAJ38)
CAADFTPGNNRKLIW

SEQ ID NO: 376668 - protein, 16 aa, Homo sapiens
  CDR3 for beta chain variable domain of TCR clone 188334 (TRBV13, TRBJ2-2)
CASSPRTGEHTGELFF

SEQ ID NO: 376669 - protein, 12 aa, Homo sapiens
  CDR3 for alpha chain variable domain of TCR clone 188335 (TRAV8-3, TRAJ26)
CAGDNYGQNFVF

SEQ ID NO: 376670 - protein, 15 aa, Homo sapiens
  CDR3 for beta chain variable domain of TCR clone 188335 (TRBV11-2, TRBJ2-1)
CASSLGTSGLNEKFF

SEQ ID NO: 376671 - protein, 13 aa, Homo sapiens
  CDR3 for alpha chain variable domain of TCR clone 188336 (TRAV12-3, TRAJ13)
CAMTSGGYQKVTF

SEQ ID NO: 376672 - protein, 18 aa, Homo sapiens
  CDR3 for beta chain variable domain of TCR clone 188336 (TRBV25-1, TRBJ1-2)
CASSGLQNGQGLIFGYTF

SEQ ID NO: 376673 - protein, 14 aa, Homo sapiens
  CDR3 for alpha chain variable domain of TCR clone 188337 (TRAV26-1, TRAJ17)
CIVRSSVSGNKLTF

SEQ ID NO: 376674 - protein, 12 aa, Homo sapiens
  CDR3 for beta chain variable domain of TCR clone 188337 (TRBV7-9, TRBJ2-7)
CASSIKREEQYF

SEQ ID NO: 376675 - protein, 21 aa, Homo sapiens
  CDR3 for alpha chain variable domain of TCR clone 188338 (TRAV1-1, TRAJ9)
CAAKILEASKLSLEQEQDYLL

SEQ ID NO: 376676 - protein, 14 aa, Homo sapiens
  CDR3 for beta chain variable domain of TCR clone 188338 (TRBV20-1, TRBJ2-1)
CSAQIGGSANEQFF

SEQ ID NO: 376677 - protein, 12 aa, Homo sapiens
  CDR3 for alpha chain variable domain of TCR clone 188339 (TRAV8-3, TRAJ26)
CAGDNYCQNFVF

SEQ ID NO: 376678 - protein, 16 aa, Homo sapiens
  CDR3 for beta chain variable domain of TCR clone 188339 (TRBV20-1, TRBJ1-4)
CSAPGQGLLTNEKLFF

SEQ ID NO: 376679 - protein, 14 aa, Homo sapiens
  CDR3 for alpha chain variable domain of TCR clone 188340 (TRAV29/DV5, TRAJ45)
CAASFRGGADGLTF

SEQ ID NO: 376680 - protein, 14 aa, Homo sapiens
  CDR3 for beta chain variable domain of TCR clone 188340 (TRBV18, TRBJ2-7)
CASSPRGGAYEQYF

SEQ ID NO: 376681 - protein, 14 aa, Homo sapiens
  CDR3 for alpha chain variable domain of TCR clone 188341 (TRAV12-3, TRAJ21)
CAMEGHQGFDKFYF

SEQ ID NO: 376682 - protein, 16 aa, Homo sapiens
  CDR3 for beta chain variable domain of TCR clone 188341 (TRBV19, TRBJ2-1)
CASSKAGPSSYNEQFF

SEQ ID NO: 376683 - protein, 14 aa, Homo sapiens
  CDR3 for alpha chain variable domain of TCR clone 188342 (TRAV20, TRAJ44)
CAVQDTGTASKLTF

SEQ ID NO: 376684 - protein, 16 aa, Homo sapiens
  CDR3 for beta chain variable domain of TCR clone 188342 (TRBV19, TRBJ2-2)
CASRSPGTGATGELFF

SEQ ID NO: 376685 - protein, 12 aa, Homo sapiens
  CDR3 for alpha chain variable domain of TCR clone 188343 (TRAV13-1, TRAJ21)
FAAKEGFNKFYF

SEQ ID NO: 376686 - protein, 15 aa, Homo sapiens
  CDR3 for beta chain variable domain of TCR clone 188343 (TRBV25-1, TRBJ1-4)
CASSPGDSTNEKLFF

SEQ ID NO: 376687 - protein, 10 aa, Homo sapiens
  CDR3 for alpha chain variable domain of TCR clone 188344 (TRAV8-2, TRAJ29)
CTGGNTPLVF

SEQ ID NO: 376688 - protein, 17 aa, Homo sapiens
  CDR3 for beta chain variable domain of TCR clone 188344 (TRBV2, TRBJ2-7)
CASSQARTGWDSYEQYF

SEQ ID NO: 376689 - protein, 13 aa, Homo sapiens
  CDR3 for alpha chain variable domain of TCR clone 188345 (TRAV8-3, TRAJ43)
CAVVPYNNNDIRF

SEQ ID NO: 376690 - protein, 14 aa, Homo sapiens
  CDR3 for beta chain variable domain of TCR clone 188345 (TRBV7-2, TRBJ1-5)
CASSPRGGPQPQHF

SEQ ID NO: 376691 - protein, 16 aa, Homo sapiens
  CDR3 for alpha chain variable domain of TCR clone 188346 (TRAV23/DV6, TRAJ9)
CAASIGGNTGGCKTIF

SEQ ID NO: 376692 - protein, 12 aa, Homo sapiens
  CDR3 for beta chain variable domain of TCR clone 188346 (TRBV6-3, TRBJ2-7)
CASSEPGFEQYF

SEQ ID NO: 376693 - protein, 16 aa, Homo sapiens
  CDR3 for alpha chain variable domain of TCR clone 188347 (TRAV3, TRAJ10)
CAVRDMRAGGGNKLTV

SEQ ID NO: 376694 - protein, 13 aa, Homo sapiens
  CDR3 for beta chain variable domain of TCR clone 188347 (TRBV11-2, TRBJ2-5)
CASSRGPSETQYF

SEQ ID NO: 376695 - protein, 12 aa, Homo sapiens
  CDR3 for alpha chain variable domain of TCR clone 188348 (TRAV2, TRAJ31)
CAVEDNNARLMF

SEQ ID NO: 376696 - protein, 16 aa, Homo sapiens
  CDR3 for beta chain variable domain of TCR clone 188348 (TRBV10-3, TRBJ2-1)
CAISGVGDGGGGEPFF

SEQ ID NO: 376697 - protein, 13 aa, Homo sapiens
  CDR3 for alpha chain variable domain of TCR clone 188349 (TRAV3, TRAJ29)
CAVRDIIDTPLVF

SEQ ID NO: 376698 - protein, 15 aa, Homo sapiens
  CDR3 for beta chain variable domain of TCR clone 188349 (TRBV7-2, TRBJ2-3)
CASSLEQGGTDTQYF

SEQ ID NO: 376699 - protein, 14 aa, Homo sapiens
  CDR3 for alpha chain variable domain of TCR clone 188350 (TRAV12-1, TRAJ17)
CVVNYKAAGNKLTF

SEQ ID NO: 376700 - protein, 17 aa, Homo sapiens
  CDR3 for beta chain variable domain of TCR clone 188350 (TRBV20-1, TRBJ2-1)
GSASSSGLAGSYKEQFF

SEQ ID NO: 376701 - protein, 12 aa, Homo sapiens
  CDR3 for alpha chain variable domain of TCR clone 188351 (TRAV20, TRAJ39)
CAVGNAGNMLTF

SEQ ID NO: 376702 - protein, 13 aa, Homo sapiens
  CDR3 for beta chain variable domain of TCR clone 188351 (TRBV7-2, TRBJ2-2)
CASSSVRAGELFF

SEQ ID NO: 376703 - protein, 13 aa, Homo sapiens
  CDR3 for alpha chain variable domain of TCR clone 188352 (TRAV30, TRAJ49)
CGTESQPVTSSIL

SEQ ID NO: 376704 - protein, 13 aa, Homo sapiens
  CDR3 for beta chain variable domain of TCR clone 188352 (TRBV12-4, TRBJ2-5)
CASSLGGSRTQYF

SEQ ID NO: 376705 - protein, 16 aa, Homo sapiens
  CDR3 for alpha chain variable domain of TCR clone 188353 (TRAV17, TRAJ22)
CATDAISSGSARQLTF

SEQ ID NO: 376706 - protein, 15 aa, Homo sapiens
  CDR3 for beta chain variable domain of TCR clone 188353 (TRBV5-1, TRBJ2-1)
CASSPPGAPYNEQFF

SEQ ID NO: 376707 - protein, 13 aa, Homo sapiens
  CDR3 for alpha chain variable domain of TCR clone 188354 (TRAV27, TRAJ54)
CAGASQGAQKLVF

SEQ ID NO: 376708 - protein, 15 aa, Homo sapiens
  CDR3 for beta chain variable domain of TCR clone 188354 (TRBV18, TRBJ2-6)
CASSPSYAGANVLTF

SEQ ID NO: 376709 - protein, 17 aa, Homo sapiens
  CDR3 for alpha chain variable domain of TCR clone 188355 (TRAV13-1, TRAJ29)
CAATTPLAFGKGTRLSV

SEQ ID NO: 376710 - protein, 16 aa, Homo sapiens
  CDR3 for beta chain variable domain of TCR clone 188355 (TRBV7-2, TRBJ2-1)
CASSSQGAAAYNEQFF

SEQ ID NO: 376711 - protein, 11 aa, Homo sapiens
  CDR3 for alpha chain variable domain of TCR clone 188356 (TRAV12-1, TRAJ43)
CVEYDNNDMSF

SEQ ID NO: 376712 - protein, 17 aa, Homo sapiens
  CDR3 for beta chain variable domain of TCR clone 188356 (TRBV20-1, TRBJ2-1)
CSARDPLAGVWDNEQFF

SEQ ID NO: 376713 - protein, 11 aa, Homo sapiens
  CDR3 for alpha chain variable domain of TCR clone 188357 (TRAV8-3, TRAJ49)
CAVNTGNQFYF

SEQ ID NO: 376714 - protein, 11 aa, Homo sapiens
  CDR3 for beta chain variable domain of TCR clone 188357 (TRBV29-1, TRBJ2-5)
CSEDRTGTQYF

SEQ ID NO: 376715 - protein, 17 aa, Homo sapiens
  CDR3 for alpha chain variable domain of TCR clone 188358 (TRAV13-1, TRAJ28)
CAASPPYSGAGSYQLTF

SEQ ID NO: 376716 - protein, 12 aa, Homo sapiens
  CDR3 for beta chain variable domain of TCR clone 188358 (TRBV11-2, TRBJ2-1)
CASSPGNNEQFF

SEQ ID NO: 376717 - protein, 11 aa, Homo sapiens
  CDR3 for alpha chain variable domain of TCR clone 188359 (TRAV12-2, TRAJ23)
CARGRGGKLIF

SEQ ID NO: 376718 - protein, 13 aa, Homo sapiens
  CDR3 for beta chain variable domain of TCR clone 188359 (TRBV28, TRBJ2-5)
CQQPGHRAETQYF

SEQ ID NO: 376719 - protein, 16 aa, Homo sapiens
  CDR3 for alpha chain variable domain of TCR clone 188360 (TRAV3, TRAJ18)
CAVRDGRGSTLGRLYF

SEQ ID NO: 376720 - protein, 18 aa, Homo sapiens
  CDR3 for beta chain variable domain of TCR clone 188360 (TRBV11-2, TRBJ2-3)
CASSLGGASRGAPNTQYF

SEQ ID NO: 376721 - protein, 12 aa, Homo sapiens
  CDR3 for alpha chain variable domain of TCR clone 188361 (TRAV27, TRAJ35)
CAGADFGNALHF

SEQ ID NO: 376722 - protein, 16 aa, Homo sapiens
  CDR3 for beta chain variable domain of TCR clone 188361 (TRBV6-1, TRBJ2-1)
CASILRQGSSYNEQFF

SEQ ID NO: 376723 - protein, 13 aa, Homo sapiens
  CDR3 for alpha chain variable domain of TCR clone 188362 (TRAV21, TRAJ20)
CAVGLRVDYKLSF

SEQ ID NO: 376724 - protein, 13 aa, Homo sapiens
  CDR3 for beta chain variable domain of TCR clone 188362 (TRBV7-9, TRBJ2-3)
CASSPGSTDTQYF

SEQ ID NO: 376725 - protein, 14 aa, Homo sapiens
  CDR3 for alpha chain variable domain of TCR clone 188363 (TRAV1-2, TRAJ16)
CAVNRFSAGQKLRF

SEQ ID NO: 376726 - protein, 15 aa, Homo sapiens
  CDR3 for beta chain variable domain of TCR clone 188363 (TRBV7-9, TRBJ1-6)
CASSSPGRGNSPLHF

SEQ ID NO: 376727 - protein, 13 aa, Homo sapiens
  CDR3 for alpha chain variable domain of TCR clone 188364 (TRAV27, TRAJ6)
CAGGTRGSYIPTF

SEQ ID NO: 376728 - protein, 16 aa, Homo sapiens
  CDR3 for beta chain variable domain of TCR clone 188364 (TRBV7-7, TRBJ2-1)
CASSPGLAGGFNEQFF

SEQ ID NO: 376729 - protein, 12 aa, Homo sapiens
  CDR3 for alpha chain variable domain of TCR clone 188365 (TRAV13-1, TRAJ49)
CAASPMGNQFYF

SEQ ID NO: 376730 - protein, 17 aa, Homo sapiens
  CDR3 for beta chain variable domain of TCR clone 188365 (TRBV11-2, TRBJ2-1)
CASSLYPPGIEYNEQFF

SEQ ID NO: 376731 - protein, 14 aa, Homo sapiens
  CDR3 for alpha chain variable domain of TCR clone 188366 (TRAV12-3, TRAJ54)
CAMSALQGAQELVF

SEQ ID NO: 376732 - protein, 15 aa, Homo sapiens
  CDR3 for beta chain variable domain of TCR clone 188366 (TRBV19, TRBJ2-4)
CASSTPGIAKNIQYF

SEQ ID NO: 376733 - protein, 14 aa, Homo sapiens
  CDR3 for alpha chain variable domain of TCR clone 188367 (TRAV38-1, TRAJ40)
CALLPTSGTYKYIF

SEQ ID NO: 376734 - protein, 14 aa, Homo sapiens
  CDR3 for beta chain variable domain of TCR clone 188367 (TRBV25-1, TRBJ1-1)
CASTHLVGNTEAFF

SEQ ID NO: 376735 - protein, 14 aa, Homo sapiens
  CDR3 for alpha chain variable domain of TCR clone 188368 (TRAV16, TRAJ37)
CALDISGNTDKLIF

SEQ ID NO: 376736 - protein, 15 aa, Homo sapiens
  CDR3 for beta chain variable domain of TCR clone 188368 (TRBV7-9, TRBJ1-5)
CASSQGHQPNQPQHF

SEQ ID NO: 376737 - protein, 14 aa, Homo sapiens
  CDR3 for alpha chain variable domain of TCR clone 188369 (TRAV38-1, TRAJ40)
CALRPTSGTYKYIF

SEQ ID NO: 376738 - protein, 15 aa, Homo sapiens
  CDR3 for beta chain variable domain of TCR clone 188369 (TRBV3-1, TRBJ2-5)
CASSANLGGPETQYF

SEQ ID NO: 376739 - protein, 14 aa, Homo sapiens
  CDR3 for alpha chain variable domain of TCR clone 188370 (TRAV35, TRAJ30)
CAGHQPNRDDKIIF

SEQ ID NO: 376740 - protein, 14 aa, Homo sapiens
  CDR3 for beta chain variable domain of TCR clone 188370 (TRBV7-2, TRBJ2-7)
CASSPKTSFYEQYF

SEQ ID NO: 376741 - protein, 17 aa, Homo sapiens
  CDR3 for alpha chain variable domain of TCR clone 188371 (TRAV3, TRAJ12)
CAVRDGGRMDSSYKWIV

SEQ ID NO: 376742 - protein, 14 aa, Homo sapiens
  CDR3 for beta chain variable domain of TCR clone 188371 (TRBV7-9, TRBJ1-2)
CASSRQGANYGYTF

SEQ ID NO: 376743 - protein, 15 aa, Homo sapiens
  CDR3 for alpha chain variable domain of TCR clone 188372 (TRAV26-1, TRAJ29)
CFVRVEGSGNTPLVL

SEQ ID NO: 376744 - protein, 14 aa, Homo sapiens
  CDR3 for beta chain variable domain of TCR clone 188372 (TRBV18, TRBJ2-5)
CASSPGVSQETQYF

SEQ ID NO: 376745 - protein, 15 aa, Homo sapiens
  CDR3 for alpha chain variable domain of TCR clone 188373 (TRAV3, TRAJ22)
CAVRDRRGSARQLTF

SEQ ID NO: 376746 - protein, 17 aa, Homo sapiens
  CDR3 for beta chain variable domain of TCR clone 188373 (TRBV13, TRBJ2-3)
CASSLSRVAGGRNTQYF

SEQ ID NO: 376747 - protein, 17 aa, Homo sapiens
  CDR3 for alpha chain variable domain of TCR clone 188374 (TRAV3, TRAJ6)
SAVSRRTDTGGSYIPTF

SEQ ID NO: 376748 - protein, 18 aa, Homo sapiens
  CDR3 for beta chain variable domain of TCR clone 188374 (TRBV7-2, TRBJ2-3)
CASSLDTSRGRKADTQYF

SEQ ID NO: 376749 - protein, 14 aa, Homo sapiens
  CDR3 for alpha chain variable domain of TCR clone 188375 (TRAV8-2, TRAJ37)
CVVSISGNTGKLIF

SEQ ID NO: 376750 - protein, 17 aa, Homo sapiens
  CDR3 for beta chain variable domain of TCR clone 188375 (TRBV11-2, TRBJ2-1)
CASSLYPPGVEYNEQFF

SEQ ID NO: 376751 - protein, 17 aa, Homo sapiens
  CDR3 for alpha chain variable domain of TCR clone 188376 (TRAV3, TRAJ42)
CAVRDRDYGGSQGNLIF

SEQ ID NO: 376752 - protein, 14 aa, Homo sapiens
  CDR3 for beta chain variable domain of TCR clone 188376 (TRBV19, TRBJ2-1)
CASSPGLAPNEQFF

SEQ ID NO: 376753 - protein, 16 aa, Homo sapiens
  CDR3 for alpha chain variable domain of TCR clone 188377 (TRAV2, TRAJ4)
CAMEDRFSGGYNKLIF

SEQ ID NO: 376754 - protein, 13 aa, Homo sapiens
  CDR3 for beta chain variable domain of TCR clone 188377 (TRBV7-7, TRBJ2-5)
CASSRSGQETQYF

SEQ ID NO: 376755 - protein, 17 aa, Homo sapiens
  CDR3 for alpha chain variable domain of TCR clone 188378 (TRAV8-6, TRAJ44)
CAVRLIYRHCQSTHLWD

SEQ ID NO: 376756 - protein, 13 aa, Homo sapiens
  CDR3 for beta chain variable domain of TCR clone 188378 (TRBV27, TRBJ2-7)
CASSFSQGYEQYF

SEQ ID NO: 376757 - protein, 14 aa, Homo sapiens
  CDR3 for alpha chain variable domain of TCR clone 188379 (TRAV13-1, TRAJ44)
CAAKAAGTASKLTF

SEQ ID NO: 376758 - protein, 13 aa, Homo sapiens
  CDR3 for beta chain variable domain of TCR clone 188379 (TRBV5-5, TRBJ1-2)
CASSFWRGEDYSF

SEQ ID NO: 376759 - protein, 13 aa, Homo sapiens
  CDR3 for alpha chain variable domain of TCR clone 188380 (TRAV8-3, TRAJ43)
CAVVPYNNNDMRF

SEQ ID NO: 376760 - protein, 16 aa, Homo sapiens
  CDR3 for beta chain variable domain of TCR clone 188380 (TRBV7-2, TRBJ2-5)
CDSSPPPTGGEETQYF

SEQ ID NO: 376761 - protein, 12 aa, Homo sapiens
  CDR3 for alpha chain variable domain of TCR clone 188381 (TRAV13-2, TRAJ23)
CAERHRGGKLIF

SEQ ID NO: 376762 - protein, 13 aa, Homo sapiens
  CDR3 for beta chain variable domain of TCR clone 188381 (TRBV4-1, TRBJ2-7)
CASSQGQAYEQYF

SEQ ID NO: 376763 - protein, 12 aa, Homo sapiens
  CDR3 for alpha chain variable domain of TCR clone 188382 (TRAV25, TRAJ11)
CAGASGYRPLTF

SEQ ID NO: 376764 - protein, 14 aa, Homo sapiens
  CDR3 for beta chain variable domain of TCR clone 188382 (TRBV5-8, TRBJ2-3)
CASSLGQGTDTQYF

SEQ ID NO: 376765 - protein, 15 aa, Homo sapiens
  CDR3 for alpha chain variable domain of TCR clone 188383 (TRAV2, TRAJ9)
CAVAALNTGGFKTIF

SEQ ID NO: 376766 - protein, 15 aa, Homo sapiens
  CDR3 for beta chain variable domain of TCR clone 188383 (TRBV10-2, TRBJ2-6)
CASSEQGTGANVLTF

SEQ ID NO: 376767 - protein, 10 aa, Homo sapiens
  CDR3 for alpha chain variable domain of TCR clone 188384 (TRAV12-3, TRAJ4)
CAMTGAGTRL

SEQ ID NO: 376768 - protein, 14 aa, Homo sapiens
  CDR3 for beta chain variable domain of TCR clone 188384 (TRBV10-3, TRBJ1-1)
CAISDTDRGVEASF

SEQ ID NO: 376769 - protein, 11 aa, Homo sapiens
  CDR3 for alpha chain variable domain of TCR clone 188385 (TRAV4, TRAJ23)
CLVGRKAYLRT

SEQ ID NO: 376770 - protein, 16 aa, Homo sapiens
  CDR3 for beta chain variable domain of TCR clone 188385 (TRBV5-1, TRBJ1-1)
CASSSGGNSLNTEAFF

SEQ ID NO: 376771 - protein, 19 aa, Homo sapiens
  CDR3 for alpha chain variable domain of TCR clone 188386 (TRAV1-2, TRAJ26)
CLLPLCCERPDNYDQNFVF

SEQ ID NO: 376772 - protein, 15 aa, Homo sapiens
  CDR3 for beta chain variable domain of TCR clone 188386 (TRBV9, TRBJ1-6)
CASSVAGTGDSPLHF

SEQ ID NO: 376773 - protein, 13 aa, Homo sapiens
  CDR3 for alpha chain variable domain of TCR clone 188387 (TRAV1-1, TRAJ21)
CAVAGIQLQQILL

SEQ ID NO: 376774 - protein, 16 aa, Homo sapiens
  CDR3 for beta chain variable domain of TCR clone 188387 (TRBV10-2, TRBJ1-5)
CASSVRDRASNQPQHF

SEQ ID NO: 376775 - protein, 13 aa, Homo sapiens
  CDR3 for alpha chain variable domain of TCR clone 188388 (TRAV27, TRAJ11)
CAAARSGYSTLTF

SEQ ID NO: 376776 - protein, 16 aa, Homo sapiens
  CDR3 for beta chain variable domain of TCR clone 188388 (TRBV10-2, TRBJ2-2)
CASSESRDRGSGELFF

SEQ ID NO: 376777 - protein, 17 aa, Homo sapiens
  CDR3 for alpha chain variable domain of TCR clone 188389 (TRAV38-1, TRAJ28)
CAFIKPTSGAGSYQLTF

SEQ ID NO: 376778 - protein, 15 aa, Homo sapiens
  CDR3 for beta chain variable domain of TCR clone 188389 (TRBV5-1, TRBJ2-4)
CPSSLGGGGSYIQYF

SEQ ID NO: 376779 - protein, 13 aa, Homo sapiens
  CDR3 for alpha chain variable domain of TCR clone 188390 (TRAV21, TRAJ20)
CAVSRLGDYKPSF

SEQ ID NO: 376780 - protein, 13 aa, Homo sapiens
  CDR3 for beta chain variable domain of TCR clone 188390 (TRBV7-3, TRBJ1-1)
CASSPAGGHEAFF

SEQ ID NO: 376781 - protein, 12 aa, Homo sapiens
  CDR3 for alpha chain variable domain of TCR clone 188391 (TRAV2, TRAJ5)
CALDTGRRALTF

SEQ ID NO: 376782 - protein, 15 aa, Homo sapiens
  CDR3 for beta chain variable domain of TCR clone 188391 (TRBV10-3, TRBJ2-1)
CVISDVQDRAYEQFF

SEQ ID NO: 376783 - protein, 14 aa, Homo sapiens
  CDR3 for alpha chain variable domain of TCR clone 188392 (TRAV1-2, TRAJ8)
CAVREETGFQKLVF

SEQ ID NO: 376784 - protein, 15 aa, Homo sapiens
  CDR3 for beta chain variable domain of TCR clone 188392 (TRBV2, TRBJ2-3)
CASTYGGLPGDTQYF

SEQ ID NO: 376785 - protein, 16 aa, Homo sapiens
  CDR3 for alpha chain variable domain of TCR clone 188393 (TRAV12-3, TRAJ53)
CAMSPGSGGSNYKLTF

SEQ ID NO: 376786 - protein, 15 aa, Homo sapiens
  CDR3 for beta chain variable domain of TCR clone 188393 (TRBV7-2, TRBJ2-7)
CASSLALGSAYEQYF

SEQ ID NO: 376787 - protein, 14 aa, Homo sapiens
  CDR3 for alpha chain variable domain of TCR clone 188394 (TRAV1-2, TRAJ16)
CAVNWFSDGQKLLF

SEQ ID NO: 376788 - protein, 15 aa, Homo sapiens
  CDR3 for beta chain variable domain of TCR clone 188394 (TRBV7-9, TRBJ1-4)
CASSARTGGNEKLFF

SEQ ID NO: 376789 - protein, 14 aa, Homo sapiens
  CDR3 for alpha chain variable domain of TCR clone 188395 (TRAV12-2, TRAJ13)
CAVKKTVGYQKVTF

SEQ ID NO: 376790 - protein, 15 aa, Homo sapiens
  CDR3 for beta chain variable domain of TCR clone 188395 (TRBV27, TRBJ2-1)
CASSNEGGSSNEQFF

SEQ ID NO: 376791 - protein, 12 aa, Homo sapiens
  CDR3 for alpha chain variable domain of TCR clone 188396 (TRAV13-1, TRAJ20)
CAAASNDYKLSF

SEQ ID NO: 376792 - protein, 14 aa, Homo sapiens
  CDR3 for beta chain variable domain of TCR clone 188396 (TRBV12-4, TRBJ2-1)
CASSPPGGGNQQFF

SEQ ID NO: 376793 - protein, 15 aa, Homo sapiens
  CDR3 for alpha chain variable domain of TCR clone 188397 (TRAV4, TRAJ12)
CLVGDWMDSSYKLIF

SEQ ID NO: 376794 - protein, 14 aa, Homo sapiens
  CDR3 for beta chain variable domain of TCR clone 188397 (TRBV7-2, TRBJ1-1)
CASSHRQGRTEAFF

SEQ ID NO: 376795 - protein, 14 aa, Homo sapiens
  CDR3 for alpha chain variable domain of TCR clone 188398 (TRAV20, TRAJ32)
CCGRYGGATNKLIF

SEQ ID NO: 376796 - protein, 16 aa, Homo sapiens
  CDR3 for beta chain variable domain of TCR clone 188398 (TRBV12-5, TRBJ2-5)
CASGPRTSGNQETQYF

SEQ ID NO: 376797 - protein, 12 aa, Homo sapiens
  CDR3 for alpha chain variable domain of TCR clone 188399 (TRAV2, TRAJ32)
CAVGGASNKLIF

SEQ ID NO: 376798 - protein, 15 aa, Homo sapiens
  CDR3 for beta chain variable domain of TCR clone 188399 (TRBV7-2, TRBJ2-1)
CASSSRTSREDEQFF

SEQ ID NO: 376799 - protein, 15 aa, Homo sapiens
  CDR3 for alpha chain variable domain of TCR clone 188400 (TRAV38-1, TRAJ37)
CAFIHGSGNTGKLIL

SEQ ID NO: 376800 - protein, 13 aa, Homo sapiens
  CDR3 for beta chain variable domain of TCR clone 188400 (TRBV4-1, TRBJ2-7)
CASSQGQAYEQYF

SEQ ID NO: 376801 - protein, 17 aa, Homo sapiens
  CDR3 for alpha chain variable domain of TCR clone 188401 (TRAV36/DV7, TRAJ52)
CAVAQRAGGTSYGKLTF

SEQ ID NO: 376802 - protein, 15 aa, Homo sapiens
  CDR3 for beta chain variable domain of TCR clone 188401 (TRBV20-1, TRBJ2-7)
CSARKGLAESYEQYF

SEQ ID NO: 376803 - protein, 13 aa, Homo sapiens
  CDR3 for alpha chain variable domain of TCR clone 188402 (TRAV8-3, TRAJ48)
CAVVPFGNEKLTF

SEQ ID NO: 376804 - protein, 14 aa, Homo sapiens
  CDR3 for beta chain variable domain of TCR clone 188402 (TRBV18, TRBJ2-7)
CASSLRGGAYEQYF

SEQ ID NO: 376805 - protein, 13 aa, Homo sapiens
  CDR3 for alpha chain variable domain of TCR clone 188403 (TRAV2, TRAJ40)
CAVFTSGTYKYIF

SEQ ID NO: 376806 - protein, 12 aa, Homo sapiens
  CDR3 for beta chain variable domain of TCR clone 188403 (TRBV12-4, TRBJ2-7)
CASSLGGYEQYF

SEQ ID NO: 376807 - protein, 12 aa, Homo sapiens
  CDR3 for alpha chain variable domain of TCR clone 188404 (TRAV12-3, TRAJ17)
CAMTLTGNKLTF

SEQ ID NO: 376808 - protein, 15 aa, Homo sapiens
  CDR3 for beta chain variable domain of TCR clone 188404 (TRBV20-1, TRBJ2-3)
CSASSGGPRTDTQYF

SEQ ID NO: 376809 - protein, 14 aa, Homo sapiens
  CDR3 for alpha chain variable domain of TCR clone 188405 (TRAV8-3, TRAJ21)
CAVDASDNFNKFYF

SEQ ID NO: 376810 - protein, 16 aa, Homo sapiens
  CDR3 for beta chain variable domain of TCR clone 188405 (TRBV20-1, TRBJ2-1)
CSARDLAGHSYNEQFF

SEQ ID NO: 376811 - protein, 15 aa, Homo sapiens
  CDR3 for alpha chain variable domain of TCR clone 188406 (TRAV3, TRAJ3)
CAVRDRDSSASKIIF

SEQ ID NO: 376812 - protein, 13 aa, Homo sapiens
  CDR3 for beta chain variable domain of TCR clone 188406 (TRBV13, TRBJ2-5)
CASSLGGEETQYF

SEQ ID NO: 376813 - protein, 15 aa, Homo sapiens
  CDR3 for alpha chain variable domain of TCR clone 188407 (TRAV17, TRAJ56)
CATDANTGANSKLTF

SEQ ID NO: 376814 - protein, 14 aa, Homo sapiens
  CDR3 for beta chain variable domain of TCR clone 188407 (TRBV20-1, TRBJ1-1)
CSAQTRIGGTEAFF

SEQ ID NO: 376815 - protein, 14 aa, Homo sapiens
  CDR3 for alpha chain variable domain of TCR clone 188408 (TRAV26-1, TRAJ34)
FIVRVAHNTDKLIF

SEQ ID NO: 376816 - protein, 15 aa, Homo sapiens
  CDR3 for beta chain variable domain of TCR clone 188408 (TRBV20-1, TRBJ2-7)
CSARVPAAYFYEQYF

SEQ ID NO: 376817 - protein, 10 aa, Homo sapiens
  CDR3 for alpha chain variable domain of TCR clone 188409 (TRAV26-1, TRAJ40)
CIAGTYKYIF

SEQ ID NO: 376818 - protein, 14 aa, Homo sapiens
  CDR3 for beta chain variable domain of TCR clone 188409 (TRBV19, TRBJ1-2)
CASSVLGYNYGYTF

SEQ ID NO: 376819 - protein, 16 aa, Homo sapiens
  CDR3 for alpha chain variable domain of TCR clone 188410 (TRAV3, TRAJ10)
CAVRDMRAGGGNKLTF

SEQ ID NO: 376820 - protein, 14 aa, Homo sapiens
  CDR3 for beta chain variable domain of TCR clone 188410 (TRBV28, TRBJ2-2)
CASTRRSVDGELFF

SEQ ID NO: 376821 - protein, 11 aa, Homo sapiens
  CDR3 for alpha chain variable domain of TCR clone 188411 (TRAV21, TRAJ20)
CCRVNDYKLSF

SEQ ID NO: 376822 - protein, 15 aa, Homo sapiens
  CDR3 for beta chain variable domain of TCR clone 188411 (TRBV2, TRBJ2-2)
CASSRQGPNTGDLFF

SEQ ID NO: 376823 - protein, 12 aa, Homo sapiens
  CDR3 for alpha chain variable domain of TCR clone 188412 (TRAV12-1, TRAJ40)
CVFYSGTYKYIF

SEQ ID NO: 376824 - protein, 21 aa, Homo sapiens
  CDR3 for beta chain variable domain of TCR clone 188412 (TRBV12-4, TRBJ2-2)
CTSVPAVWYRAPEDGPGSCFF

SEQ ID NO: 376825 - protein, 15 aa, Homo sapiens
  CDR3 for alpha chain variable domain of TCR clone 188413 (TRAV8-6, TRAJ11)
CAVSDRRSGCSTLTF

SEQ ID NO: 376826 - protein, 15 aa, Homo sapiens
  CDR3 for beta chain variable domain of TCR clone 188413 (TRBV7-3, TRBJ2-1)
CASSPTGGSRNEQFF

SEQ ID NO: 376827 - protein, 11 aa, Homo sapiens
  CDR3 for alpha chain variable domain of TCR clone 188414 (TRAV3, TRAJ21)
CAVCNFNKFYF

SEQ ID NO: 376828 - protein, 16 aa, Homo sapiens
  CDR3 for beta chain variable domain of TCR clone 188414 (TRBV19, TRBJ2-1)
CASSKAGPSSYDEQFF

SEQ ID NO: 376829 - protein, 12 aa, Homo sapiens
  CDR3 for alpha chain variable domain of TCR clone 188415 (TRAV8-3, TRAJ26)
CAGDNYGQNFVF

SEQ ID NO: 376830 - protein, 18 aa, Homo sapiens
  CDR3 for beta chain variable domain of TCR clone 188415 (TRBV7-9, TRBJ2-7)
CASSLTTSGSRTWYEQYF

SEQ ID NO: 376831 - protein, 17 aa, Homo sapiens
  CDR3 for alpha chain variable domain of TCR clone 188416 (TRAV26-1, TRAJ11)
CIVRVGQSNSGYSTLTF

SEQ ID NO: 376832 - protein, 15 aa, Homo sapiens
  CDR3 for beta chain variable domain of TCR clone 188416 (TRBV27, TRBJ2-5)
CASGLIPSGGETQYF

SEQ ID NO: 376833 - protein, 14 aa, Homo sapiens
  CDR3 for alpha chain variable domain of TCR clone 188417 (TRAV1-2, TRAJ8)
CAVIEDTGFQKLVF

SEQ ID NO: 376834 - protein, 15 aa, Homo sapiens
  CDR3 for beta chain variable domain of TCR clone 188417 (TRBV28, TRBJ2-1)
CASSIIAGGRSEQFF

SEQ ID NO: 376835 - protein, 15 aa, Homo sapiens
  CDR3 for alpha chain variable domain of TCR clone 188418 (TRAV23/DV6, TRAJ13)
CAAWPGGGGYQKVTF

SEQ ID NO: 376836 - protein, 13 aa, Homo sapiens
  CDR3 for beta chain variable domain of TCR clone 188418 (TRBV29-1, TRBJ2-3)
CSVDEGGTDTQYF

SEQ ID NO: 376837 - protein, 14 aa, Homo sapiens
  CDR3 for alpha chain variable domain of TCR clone 188419 (TRAV1-2, TRAJ16)
CAVNRFSDGKKLLF

SEQ ID NO: 376838 - protein, 13 aa, Homo sapiens
  CDR3 for beta chain variable domain of TCR clone 188419 (TRBV3-1, TRBJ2-2)
CASLARGSGELFF

SEQ ID NO: 376839 - protein, 14 aa, Homo sapiens
  CDR3 for alpha chain variable domain of TCR clone 188420 (TRAV25, TRAJ23)
CAGQGDNQGGQLIF

SEQ ID NO: 376840 - protein, 12 aa, Homo sapiens
  CDR3 for beta chain variable domain of TCR clone 188420 (TRBV7-9, TRBJ1-1)
CASSLVRGEAFF

SEQ ID NO: 376841 - protein, 16 aa, Homo sapiens
  CDR3 for alpha chain variable domain of TCR clone 188421 (TRAV1-2, TRAJ10)
CAVRGVLTGGGNKLTF

SEQ ID NO: 376842 - protein, 13 aa, Homo sapiens
  CDR3 for beta chain variable domain of TCR clone 188421 (TRBV11-2, TRBJ2-5)
CASSSTGEETQYF

SEQ ID NO: 376843 - protein, 14 aa, Homo sapiens
  CDR3 for alpha chain variable domain of TCR clone 188422 (TRAV8-3, TRAJ39)
CAVGANNAGSMLTF

SEQ ID NO: 376844 - protein, 12 aa, Homo sapiens
  CDR3 for beta chain variable domain of TCR clone 188422 (TRBV11-3, TRBJ1-1)
CASSHRQGEAFF

SEQ ID NO: 376845 - protein, 13 aa, Homo sapiens
  CDR3 for alpha chain variable domain of TCR clone 188423 (TRAV30, TRAJ24)
CGSVTDSWGKLQF

SEQ ID NO: 376846 - protein, 15 aa, Homo sapiens
  CDR3 for beta chain variable domain of TCR clone 188423 (TRBV25-1, TRBJ1-4)
CASSPGDSTNEKLFF

SEQ ID NO: 376847 - protein, 12 aa, Homo sapiens
  CDR3 for alpha chain variable domain of TCR clone 188424 (TRAV8-3, TRAJ20)
CAVCANDYKLSF

SEQ ID NO: 376848 - protein, 16 aa, Homo sapiens
  CDR3 for beta chain variable domain of TCR clone 188424 (TRBV19, TRBJ2-2)
WASRSPGTGATGELFF

SEQ ID NO: 376849 - protein, 14 aa, Homo sapiens
  CDR3 for alpha chain variable domain of TCR clone 188425 (TRAV21, TRAJ45)
CAVSSVGGADGLTF

SEQ ID NO: 376850 - protein, 16 aa, Homo sapiens
  CDR3 for beta chain variable domain of TCR clone 188425 (TRBV7-3, TRBJ2-2)
CASSLKRGTLSGELFF

SEQ ID NO: 376851 - protein, 14 aa, Homo sapiens
  CDR3 for alpha chain variable domain of TCR clone 188426 (TRAV13-2, TRAJ17)
CAENSNAAGNKLTF

SEQ ID NO: 376852 - protein, 15 aa, Homo sapiens
  CDR3 for beta chain variable domain of TCR clone 188426 (TRBV27, TRBJ2-1)
CASSNGGGSSNEQFF

SEQ ID NO: 376853 - protein, 12 aa, Homo sapiens
  CDR3 for alpha chain variable domain of TCR clone 188427 (TRAV12-2, TRAJ43)
CAVNVNNNDMRF

SEQ ID NO: 376854 - protein, 14 aa, Homo sapiens
  CDR3 for beta chain variable domain of TCR clone 188427 (TRBV25-1, TRBJ2-2)
CASSELGPPGELFF

SEQ ID NO: 376855 - protein, 12 aa, Homo sapiens
  CDR3 for alpha chain variable domain of TCR clone 188428 (TRAV24, TRAJ47)
CAFGEYGNKLVF

SEQ ID NO: 376856 - protein, 14 aa, Homo sapiens
  CDR3 for beta chain variable domain of TCR clone 188428 (TRBV7-9, TRBJ2-5)
CASSLAPDQETQYF

SEQ ID NO: 376857 - protein, 15 aa, Homo sapiens
  CDR3 for alpha chain variable domain of TCR clone 188429 (TRAV17, TRAJ13)
CATVPNSGGYQKVTF

SEQ ID NO: 376858 - protein, 13 aa, Homo sapiens
  CDR3 for beta chain variable domain of TCR clone 188429 (TRBV3-1, TRBJ1-5)
CASSQAGGQPQHY

SEQ ID NO: 376859 - protein, 14 aa, Homo sapiens
  CDR3 for alpha chain variable domain of TCR clone 188430 (TRAV35, TRAJ22)
CAGLRPRSAGQLTF

SEQ ID NO: 376860 - protein, 14 aa, Homo sapiens
  CDR3 for beta chain variable domain of TCR clone 188430 (TRBV11-3, TRBJ2-3)
CASSSGQGPDTQYF

SEQ ID NO: 376861 - protein, 13 aa, Homo sapiens
  CDR3 for alpha chain variable domain of TCR clone 188431 (TRAV21, TRAJ20)
CAVGLRVDYKLSF

SEQ ID NO: 376862 - protein, 12 aa, Homo sapiens
  CDR3 for beta chain variable domain of TCR clone 188431 (TRBV7-9, TRBJ1-5)
CASSPQGQPQHF

SEQ ID NO: 376863 - protein, 16 aa, Homo sapiens
  CDR3 for alpha chain variable domain of TCR clone 188432 (TRAV12-3, TRAJ53)
CAMSPGSGGSNYNLTF

SEQ ID NO: 376864 - protein, 13 aa, Homo sapiens
  CDR3 for beta chain variable domain of TCR clone 188432 (TRBV7-3, TRBJ1-1)
CASSQDWGAEAFF

SEQ ID NO: 376865 - protein, 15 aa, Homo sapiens
  CDR3 for alpha chain variable domain of TCR clone 188433 (TRAV13-1, TRAJ32)
CAASLYGGATNKLIF

SEQ ID NO: 376866 - protein, 17 aa, Homo sapiens
  CDR3 for beta chain variable domain of TCR clone 188433 (TRBV7-3, TRBJ2-5)
CASSLGSGRSGSETQYF

SEQ ID NO: 376867 - protein, 14 aa, Homo sapiens
  CDR3 for alpha chain variable domain of TCR clone 188434 (TRAV27, TRAJ13)
CRSSNSGGYQKVTF

SEQ ID NO: 376868 - protein, 16 aa, Homo sapiens
  CDR3 for beta chain variable domain of TCR clone 188434 (TRBV7-6, TRBJ2-1)
CIAVSAAWGGADEQFF

SEQ ID NO: 376869 - protein, 11 aa, Homo sapiens
  CDR3 for alpha chain variable domain of TCR clone 188435 (TRAV12-2, TRAJ39)
CAVNNLLTFGG

SEQ ID NO: 376870 - protein, 16 aa, Homo sapiens
  CDR3 for beta chain variable domain of TCR clone 188435 (TRBV5-3, TRBJ2-2)
CARSFGTGTNTGELFF

SEQ ID NO: 376871 - protein, 14 aa, Homo sapiens
  CDR3 for alpha chain variable domain of TCR clone 188436 (TRAV13-1, TRAJ35)
CAASKGGFGNVRHY

SEQ ID NO: 376872 - protein, 13 aa, Homo sapiens
  CDR3 for beta chain variable domain of TCR clone 188436 (TRBV7-3, TRBJ1-1)
CASSQDWGAKAFF

SEQ ID NO: 376873 - protein, 14 aa, Homo sapiens
  CDR3 for alpha chain variable domain of TCR clone 188437 (TRAV27, TRAJ22)
CAGVSVLGKRQLTF

SEQ ID NO: 376874 - protein, 15 aa, Homo sapiens
  CDR3 for beta chain variable domain of TCR clone 188437 (TRBV20-1, TRBJ2-7)
CSARDRVSGMDEQYF

SEQ ID NO: 376875 - protein, 14 aa, Homo sapiens
  CDR3 for alpha chain variable domain of TCR clone 188438 (TRAV23/DV6, TRAJ8)
CAASKATAFQKLVF

SEQ ID NO: 376876 - protein, 15 aa, Homo sapiens
  CDR3 for beta chain variable domain of TCR clone 188438 (TRBV28, TRBJ2-3)
CASSPDRQGANTQYF

SEQ ID NO: 376877 - protein, 14 aa, Homo sapiens
  CDR3 for alpha chain variable domain of TCR clone 188439 (TRAV23/DV6, TRAJ8)
CAASKNNGFQKLVF

SEQ ID NO: 376878 - protein, 16 aa, Homo sapiens
  CDR3 for beta chain variable domain of TCR clone 188439 (TRBV4-1, TRBJ2-6)
CASSQVGDPGANVLTF

SEQ ID NO: 376879 - protein, 13 aa, Homo sapiens
  CDR3 for alpha chain variable domain of TCR clone 188440 (TRAV21, TRAJ27)
CAALNTNAGKSTF

SEQ ID NO: 376880 - protein, 14 aa, Homo sapiens
  CDR3 for beta chain variable domain of TCR clone 188440 (TRBV27, TRBJ1-1)
CASSLLSGLSAAFF

SEQ ID NO: 376881 - protein, 14 aa, Homo sapiens
  CDR3 for alpha chain variable domain of TCR clone 188441 (TRAV4, TRAJ9)
CLVGSGTGGFKTIF

SEQ ID NO: 376882 - protein, 13 aa, Homo sapiens
  CDR3 for beta chain variable domain of TCR clone 188441 (TRBV2, TRBJ1-5)
CASSQGGSQPQHF

SEQ ID NO: 376883 - protein, 13 aa, Homo sapiens
  CDR3 for alpha chain variable domain of TCR clone 188442 (TRAV21, TRAJ17)
CAPVKAAGNKLTF

SEQ ID NO: 376884 - protein, 15 aa, Homo sapiens
  CDR3 for beta chain variable domain of TCR clone 188442 (TRBV6-1, TRBJ2-3)
CASSERGGITDTQYF

SEQ ID NO: 376885 - protein, 17 aa, Homo sapiens
  CDR3 for alpha chain variable domain of TCR clone 188443 (TRAV27, TRAJ52)
CAGAGWAGGTSYGQLTF

SEQ ID NO: 376886 - protein, 16 aa, Homo sapiens
  CDR3 for beta chain variable domain of TCR clone 188443 (TRBV19, TRBJ2-1)
CASSKAGPSSYNEQFF

SEQ ID NO: 376887 - protein, 13 aa, Homo sapiens
  CDR3 for alpha chain variable domain of TCR clone 188444 (TRAV12-3, TRAJ33)
CAMSVNSNYQLIW

SEQ ID NO: 376888 - protein, 11 aa, Homo sapiens
  CDR3 for beta chain variable domain of TCR clone 188444 (TRBV7-3, TRBJ2-5)
CASSLNETQYF

SEQ ID NO: 376889 - protein, 22 aa, Homo sapiens
  CDR3 for alpha chain variable domain of TCR clone 188445 (TRAV12-2, TRAJ32)
CSSETPSPVIQPPKSATNKLIF

SEQ ID NO: 376890 - protein, 20 aa, Homo sapiens
  CDR3 for beta chain variable domain of TCR clone 188445 (TRBV28, TRBJ2-1)
CASTPIGRSPGLAGGNEQFF

SEQ ID NO: 376891 - protein, 12 aa, Homo sapiens
  CDR3 for alpha chain variable domain of TCR clone 188446 (TRAV1-1, TRAJ8)
CAGGTGFQKLVF

SEQ ID NO: 376892 - protein, 13 aa, Homo sapiens
  CDR3 for beta chain variable domain of TCR clone 188446 (TRBV7-9, TRBJ1-2)
CASSLKQNYSYTF

SEQ ID NO: 376893 - protein, 14 aa, Homo sapiens
  CDR3 for alpha chain variable domain of TCR clone 188447 (TRAV4, TRAJ26)
CLVGPHNYGQNFVF

SEQ ID NO: 376894 - protein, 15 aa, Homo sapiens
  CDR3 for beta chain variable domain of TCR clone 188447 (TRBV7-2, TRBJ1-1)
CASSPQGGANTEAFF

SEQ ID NO: 376895 - protein, 13 aa, Homo sapiens
  CDR3 for alpha chain variable domain of TCR clone 188448 (TRAV12-2, TRAJ39)
CAVTDNAGNMLTF

SEQ ID NO: 376896 - protein, 15 aa, Homo sapiens
  CDR3 for beta chain variable domain of TCR clone 188448 (TRBV5-1, TRBJ2-7)
CASSTSGGPTYEQYF

SEQ ID NO: 376897 - protein, 17 aa, Homo sapiens
  CDR3 for alpha chain variable domain of TCR clone 188449 (TRAV36/DV7, TRAJ52)
CAVAQRAGGTSYGKLTF

SEQ ID NO: 376898 - protein, 15 aa, Homo sapiens
  CDR3 for beta chain variable domain of TCR clone 188449 (TRBV27, TRBJ2-7)
CASRFWGQGADEQYF

SEQ ID NO: 376899 - protein, 19 aa, Homo sapiens
  CDR3 for alpha chain variable domain of TCR clone 188450 (TRAV26-1, TRAJ28)
CIVRVAHAYSGAGGYQLTF

SEQ ID NO: 376900 - protein, 17 aa, Homo sapiens
  CDR3 for beta chain variable domain of TCR clone 188450 (TRBV9, TRBJ2-2)
CASSVGGQGTDTGELFF

SEQ ID NO: 376901 - protein, 12 aa, Homo sapiens
  CDR3 for alpha chain variable domain of TCR clone 188451 (TRAV12-3, TRAJ40)
CAMSSGTYKYIF

SEQ ID NO: 376902 - protein, 20 aa, Homo sapiens
  CDR3 for beta chain variable domain of TCR clone 188451 (TRBV7-8, TRBJ2-2)
CASSHLFPGPTSHITGELFF

SEQ ID NO: 376903 - protein, 14 aa, Homo sapiens
  CDR3 for alpha chain variable domain of TCR clone 188452 (TRAV8-3, TRAJ4)
CAVGAAGGYNKLIF

SEQ ID NO: 376904 - protein, 15 aa, Homo sapiens
  CDR3 for beta chain variable domain of TCR clone 188452 (TRBV6-5, TRBJ2-1)
CASCYDAGAGNEQFF

SEQ ID NO: 376905 - protein, 12 aa, Homo sapiens
  CDR3 for alpha chain variable domain of TCR clone 188453 (TRAV12-2, TRAJ10)
WGVTGGGNKLTF

SEQ ID NO: 376906 - protein, 14 aa, Homo sapiens
  CDR3 for beta chain variable domain of TCR clone 188453 (TRBV7-8, TRBJ2-3)
CASSFPDGQDTQYF

SEQ ID NO: 376907 - protein, 15 aa, Homo sapiens
  CDR3 for alpha chain variable domain of TCR clone 188454 (TRAV8-3, TRAJ27)
CAVGPSKPNAGKSTV

SEQ ID NO: 376908 - protein, 14 aa, Homo sapiens
  CDR3 for beta chain variable domain of TCR clone 188454 (TRBV11-2, TRBJ2-3)
CASSRLARTDTQYF

SEQ ID NO: 376909 - protein, 14 aa, Homo sapiens
  CDR3 for alpha chain variable domain of TCR clone 188455 (TRAV12-1, TRAJ17)
CVVNYKAAGNKLTF

SEQ ID NO: 376910 - protein, 17 aa, Homo sapiens
  CDR3 for beta chain variable domain of TCR clone 188455 (TRBV20-1, TRBJ2-1)
CSASASGLAGAYNEQFF

SEQ ID NO: 376911 - protein, 16 aa, Homo sapiens
  CDR3 for alpha chain variable domain of TCR clone 188456 (TRAV30, TRAJ24)
CGTEIVDADSWGRFQF

SEQ ID NO: 376912 - protein, 13 aa, Homo sapiens
  CDR3 for beta chain variable domain of TCR clone 188456 (TRBV7-2, TRBJ1-4)
CASSLAGLEKLFF

SEQ ID NO: 376913 - protein, 13 aa, Homo sapiens
  CDR3 for alpha chain variable domain of TCR clone 188457 (TRAV12-2, TRAJ47)
CAVFMEYGNKMVF

SEQ ID NO: 376914 - protein, 13 aa, Homo sapiens
  CDR3 for beta chain variable domain of TCR clone 188457 (TRBV6-5, TRBJ2-5)
CASSPQGGETQYF

SEQ ID NO: 376915 - protein, 13 aa, Homo sapiens
  CDR3 for alpha chain variable domain of TCR clone 188458 (TRAV25, TRAJ40)
CAGSASVTYKYIF

SEQ ID NO: 376916 - protein, 14 aa, Homo sapiens
  CDR3 for beta chain variable domain of TCR clone 188458 (TRBV7-2, TRBJ2-7)
CASRSQGAAYEQYF

SEQ ID NO: 376917 - protein, 12 aa, Homo sapiens
  CDR3 for alpha chain variable domain of TCR clone 188459 (TRAV12-2, TRAJ47)
CAAQKYGNKLVF

SEQ ID NO: 376918 - protein, 13 aa, Homo sapiens
  CDR3 for beta chain variable domain of TCR clone 188459 (TRBV7-2, TRBJ1-6)
CASSLKFDSPLHF

SEQ ID NO: 376919 - protein, 13 aa, Homo sapiens
  CDR3 for alpha chain variable domain of TCR clone 188460 (TRAV21, TRAJ27)
CAARPGNAGKSTF

SEQ ID NO: 376920 - protein, 16 aa, Homo sapiens
  CDR3 for beta chain variable domain of TCR clone 188460 (TRBV7-6, TRBJ2-1)
CASSLGGGQMSSSAGQ

SEQ ID NO: 376921 - protein, 13 aa, Homo sapiens
  CDR3 for alpha chain variable domain of TCR clone 188461 (TRAV13-1, TRAJ5)
RAARVTGRRALTS

SEQ ID NO: 376922 - protein, 15 aa, Homo sapiens
  CDR3 for beta chain variable domain of TCR clone 188461 (TRBV7-9, TRBJ2-7)
CASSPGGGLTYEQYF

SEQ ID NO: 376923 - protein, 14 aa, Homo sapiens
  CDR3 for alpha chain variable domain of TCR clone 188462 (TRAV12-1, TRAJ30)
CVVNIGGRDDKIIF

SEQ ID NO: 376924 - protein, 13 aa, Homo sapiens
  CDR3 for beta chain variable domain of TCR clone 188462 (TRBV12-5, TRBJ2-1)
CTSGLGRGNEQFF

SEQ ID NO: 376925 - protein, 15 aa, Homo sapiens
  CDR3 for alpha chain variable domain of TCR clone 188463 (TRAV3, TRAJ5)
CAVRDRKTGRRALTF

SEQ ID NO: 376926 - protein, 18 aa, Homo sapiens
  CDR3 for beta chain variable domain of TCR clone 188463 (TRBV7-2, TRBJ2-3)
CASSLKREGSGITDTQYF

SEQ ID NO: 376927 - protein, 17 aa, Homo sapiens
  CDR3 for alpha chain variable domain of TCR clone 188464 (TRAV3, TRAJ6)
CAVRDGPRAGGDYIPTF

SEQ ID NO: 376928 - protein, 13 aa, Homo sapiens
  CDR3 for beta chain variable domain of TCR clone 188464 (TRBV4-1, TRBJ2-2)
CASSQENTGELFF

SEQ ID NO: 376929 - protein, 17 aa, Homo sapiens
  CDR3 for alpha chain variable domain of TCR clone 188465 (TRAV4, TRAJ18)
CLVGERSVGSTLGWLYF

SEQ ID NO: 376930 - protein, 18 aa, Homo sapiens
  CDR3 for beta chain variable domain of TCR clone 188465 (TRBV11-2, TRBJ2-3)
CASSLGGASRGAPNTQYF

SEQ ID NO: 376931 - protein, 13 aa, Homo sapiens
  CDR3 for alpha chain variable domain of TCR clone 188466 (TRAV17, TRAJ5)
CAPMDTGRRALTF

SEQ ID NO: 376932 - protein, 13 aa, Homo sapiens
  CDR3 for beta chain variable domain of TCR clone 188466 (TRBV7-2, TRBJ2-7)
CASSSPSGSEQYF

SEQ ID NO: 376933 - protein, 12 aa, Homo sapiens
  CDR3 for alpha chain variable domain of TCR clone 188467 (TRAV38-2/DV8, TRAJ57)
CAWKGGSETLVF

SEQ ID NO: 376934 - protein, 13 aa, Homo sapiens
  CDR3 for beta chain variable domain of TCR clone 188467 (TRBV5-1, TRBJ1-5)
CASSLAQDQPQHF

SEQ ID NO: 376935 - protein, 13 aa, Homo sapiens
  CDR3 for alpha chain variable domain of TCR clone 188468 (TRAV1-2, TRAJ9)
CAVLHTGGFKTIF

SEQ ID NO: 376936 - protein, 14 aa, Homo sapiens
  CDR3 for beta chain variable domain of TCR clone 188468 (TRBV20-1, TRBJ2-3)
CSARGGTSTDTQYF

SEQ ID NO: 376937 - protein, 12 aa, Homo sapiens
  CDR3 for alpha chain variable domain of TCR clone 188469 (TRAV12-3, TRAJ17)
CAMTLTGNKLTF

SEQ ID NO: 376938 - protein, 15 aa, Homo sapiens
  CDR3 for beta chain variable domain of TCR clone 188469 (TRBV20-1, TRBJ2-7)
CSAIDRVSGTDEQYF

SEQ ID NO: 376939 - protein, 16 aa, Homo sapiens
  CDR3 for alpha chain variable domain of TCR clone 188470 (TRAV14/DV4, TRAJ53)
CAMREGGGGSNYKLTF

SEQ ID NO: 376940 - protein, 13 aa, Homo sapiens
  CDR3 for beta chain variable domain of TCR clone 188470 (TRBV12-5, TRBJ2-3)
CASGDRQSDTQYF

SEQ ID NO: 376941 - protein, 18 aa, Homo sapiens
  CDR3 for alpha chain variable domain of TCR clone 188471 (TRAV1-2, TRAJ18)
CAVRDMGDRGSTLGRRYF

SEQ ID NO: 376942 - protein, 16 aa, Homo sapiens
  CDR3 for beta chain variable domain of TCR clone 188471 (TRBV29-1, TRBJ1-2)
CSVEANRDMANYGYTF

SEQ ID NO: 376943 - protein, 13 aa, Homo sapiens
  CDR3 for alpha chain variable domain of TCR clone 188472 (TRAV8-3, TRAJ44)
CAVVPGTASKLTF

SEQ ID NO: 376944 - protein, 14 aa, Homo sapiens
  CDR3 for beta chain variable domain of TCR clone 188472 (TRBV11-2, TRBJ2-3)
CASRRMARTDTQYF

SEQ ID NO: 376945 - protein, 15 aa, Homo sapiens
  CDR3 for alpha chain variable domain of TCR clone 188473 (TRAV12-1, TRAJ9)
CVVSFGDTGGFKTIF

SEQ ID NO: 376946 - protein, 15 aa, Homo sapiens
  CDR3 for beta chain variable domain of TCR clone 188473 (TRBV2, TRBJ1-4)
CASSERAGKNCFLAV

SEQ ID NO: 376947 - protein, 15 aa, Homo sapiens
  CDR3 for alpha chain variable domain of TCR clone 188474 (TRAV12-1, TRAJ44)
CVADLPTGTASKLTF

SEQ ID NO: 376948 - protein, 15 aa, Homo sapiens
  CDR3 for beta chain variable domain of TCR clone 188474 (TRBV7-9, TRBJ2-5)
CASSLTLMTQETQYF

SEQ ID NO: 376949 - protein, 12 aa, Homo sapiens
  CDR3 for alpha chain variable domain of TCR clone 188475 (TRAV12-3, TRAJ17)
CAMTLTGNKLTF

SEQ ID NO: 376950 - protein, 15 aa, Homo sapiens
  CDR3 for beta chain variable domain of TCR clone 188475 (TRBV20-1, TRBJ2-7)
CSARDRVSGRDEQYF

SEQ ID NO: 376951 - protein, 17 aa, Homo sapiens
  CDR3 for alpha chain variable domain of TCR clone 188476 (TRAV38-1, TRAJ28)
CAFMKSYSGAGSYQLTF

SEQ ID NO: 376952 - protein, 12 aa, Homo sapiens
  CDR3 for beta chain variable domain of TCR clone 188476 (TRBV20-1, TRBJ2-5)
CSAGGAGETQYF

SEQ ID NO: 376953 - protein, 16 aa, Homo sapiens
  CDR3 for alpha chain variable domain of TCR clone 188477 (TRAV21, TRAJ37)
CAVRTAGFSNTGTLIF

SEQ ID NO: 376954 - protein, 13 aa, Homo sapiens
  CDR3 for beta chain variable domain of TCR clone 188477 (TRBV7-9, TRBJ2-5)
CASLPSGRETQYF

SEQ ID NO: 376955 - protein, 14 aa, Homo sapiens
  CDR3 for alpha chain variable domain of TCR clone 188478 (TRAV2, TRAJ15)
CAVGTGQAGTALIF

SEQ ID NO: 376956 - protein, 16 aa, Homo sapiens
  CDR3 for beta chain variable domain of TCR clone 188478 (TRBV12-4, TRBJ1-5)
CASSRPVGGSNQPQHF

SEQ ID NO: 376957 - protein, 13 aa, Homo sapiens
  CDR3 for alpha chain variable domain of TCR clone 188479 (TRAV13-1, TRAJ6)
CAASSGGSYIPIF

SEQ ID NO: 376958 - protein, 13 aa, Homo sapiens
  CDR3 for beta chain variable domain of TCR clone 188479 (TRBV7-8, TRBJ2-7)
CASSLTGGREQYF

SEQ ID NO: 376959 - protein, 14 aa, Homo sapiens
  CDR3 for alpha chain variable domain of TCR clone 188480 (TRAV8-6, TRAJ5)
CAVSVDTGRRALTF

SEQ ID NO: 376960 - protein, 14 aa, Homo sapiens
  CDR3 for beta chain variable domain of TCR clone 188480 (TRBV6-1, TRBJ1-3)
CASVKGGGGNTIYF

SEQ ID NO: 376961 - protein, 13 aa, Homo sapiens
  CDR3 for alpha chain variable domain of TCR clone 188481 (TRAV13-1, TRAJ5)
CAASDTGRRALTF

SEQ ID NO: 376962 - protein, 14 aa, Homo sapiens
  CDR3 for beta chain variable domain of TCR clone 188481 (TRBV7-8, TRBJ2-7)
CASSPRDRVYEQYF

SEQ ID NO: 376963 - protein, 11 aa, Homo sapiens
  CDR3 for alpha chain variable domain of TCR clone 188482 (TRAV12-2, TRAJ36)
CAVDGANNLFF

SEQ ID NO: 376964 - protein, 18 aa, Homo sapiens
  CDR3 for beta chain variable domain of TCR clone 188482 (TRBV6-6, TRBJ1-3)
CASSYSKWDSISGNTIYF

SEQ ID NO: 376965 - protein, 16 aa, Homo sapiens
  CDR3 for alpha chain variable domain of TCR clone 188483 (TRAV17, TRAJ52)
CATSNAGGTSYGKLTF

SEQ ID NO: 376966 - protein, 14 aa, Homo sapiens
  CDR3 for beta chain variable domain of TCR clone 188483 (TRBV19, TRBJ2-1)
CAGPTFVLSGEQFF

SEQ ID NO: 376967 - protein, 16 aa, Homo sapiens
  CDR3 for alpha chain variable domain of TCR clone 188484 (TRAV1-2, TRAJ10)
CAVRGVLTGGGNKLTF

SEQ ID NO: 376968 - protein, 16 aa, Homo sapiens
  CDR3 for beta chain variable domain of TCR clone 188484 (TRBV11-2, TRBJ1-2)
CASSPSGREANYGYTF

SEQ ID NO: 376969 - protein, 14 aa, Homo sapiens
  CDR3 for alpha chain variable domain of TCR clone 188485 (TRAV27, TRAJ38)
CAGDRAGNNRKLIW

SEQ ID NO: 376970 - protein, 14 aa, Homo sapiens
  CDR3 for beta chain variable domain of TCR clone 188485 (TRBV15, TRBJ2-7)
CATSRVARGYEQYF

SEQ ID NO: 376971 - protein, 17 aa, Homo sapiens
  CDR3 for alpha chain variable domain of TCR clone 188486 (TRAV3, TRAJ12)
CAVRDGGRMDSSYKLIF

SEQ ID NO: 376972 - protein, 13 aa, Homo sapiens
  CDR3 for beta chain variable domain of TCR clone 188486 (TRBV6-6, TRBJ2-3)
CASSQGGRDTQYF

SEQ ID NO: 376973 - protein, 15 aa, Homo sapiens
  CDR3 for alpha chain variable domain of TCR clone 188487 (TRAV17, TRAJ56)
CATEPFTGANSKLTF

SEQ ID NO: 376974 - protein, 15 aa, Homo sapiens
  CDR3 for beta chain variable domain of TCR clone 188487 (TRBV28, TRBJ1-5)
CASSMTGGYVQPQHF

SEQ ID NO: 376975 - protein, 18 aa, Homo sapiens
  CDR3 for alpha chain variable domain of TCR clone 188488 (TRAV21, TRAJ52)
CAVRPSPAAGTSYGKLTF

SEQ ID NO: 376976 - protein, 15 aa, Homo sapiens
  CDR3 for beta chain variable domain of TCR clone 188488 (TRBV27, TRBJ2-1)
CASSNGGGSSNEQFF

SEQ ID NO: 376977 - protein, 12 aa, Homo sapiens
  CDR3 for alpha chain variable domain of TCR clone 188489 (TRAV16, TRAJ49)
CALNEGGNQFYF

SEQ ID NO: 376978 - protein, 14 aa, Homo sapiens
  CDR3 for beta chain variable domain of TCR clone 188489 (TRBV7-6, TRBJ2-3)
CASSLGAVTDTQYF

SEQ ID NO: 376979 - protein, 10 aa, Homo sapiens
  CDR3 for alpha chain variable domain of TCR clone 188490 (TRAV13-2, TRAJ49)
CADTGNQFYF

SEQ ID NO: 376980 - protein, 13 aa, Homo sapiens
  CDR3 for beta chain variable domain of TCR clone 188490 (TRBV10-3, TRBJ1-2)
CAISERDSYGYTV

SEQ ID NO: 376981 - protein, 11 aa, Homo sapiens
  CDR3 for alpha chain variable domain of TCR clone 188491 (TRAV12-2, TRAJ49)
CAVWAGNQFYF

SEQ ID NO: 376982 - protein, 15 aa, Homo sapiens
  CDR3 for beta chain variable domain of TCR clone 188491 (TRBV5-1, TRBJ2-2)
CASSSQGGNTGELFF

SEQ ID NO: 376983 - protein, 13 aa, Homo sapiens
  CDR3 for alpha chain variable domain of TCR clone 188492 (TRAV8-4, TRAJ4)
CAVSDIGYHKLIF

SEQ ID NO: 376984 - protein, 13 aa, Homo sapiens
  CDR3 for beta chain variable domain of TCR clone 188492 (TRBV19, TRBJ1-2)
CASSQGQVYDYTF

SEQ ID NO: 376985 - protein, 14 aa, Homo sapiens
  CDR3 for alpha chain variable domain of TCR clone 188493 (TRAV12-2, TRAJ13)
CPVKKTGGYQKVTF

SEQ ID NO: 376986 - protein, 17 aa, Homo sapiens
  CDR3 for beta chain variable domain of TCR clone 188493 (TRBV13, TRBJ2-3)
CASSLSRVAGGRNTQYF

SEQ ID NO: 376987 - protein, 14 aa, Homo sapiens
  CDR3 for alpha chain variable domain of TCR clone 188494 (TRAV1-2, TRAJ16)
CAVNRFSGGQKLLF

SEQ ID NO: 376988 - protein, 12 aa, Homo sapiens
  CDR3 for beta chain variable domain of TCR clone 188494 (TRBV7-8, TRBJ2-7)
CASSLGDREQYF

SEQ ID NO: 376989 - protein, 19 aa, Homo sapiens
  CDR3 for alpha chain variable domain of TCR clone 188495 (TRAV3, TRAJ37)
CAVRDIVWGYPSNTGKLIF

SEQ ID NO: 376990 - protein, 14 aa, Homo sapiens
  CDR3 for beta chain variable domain of TCR clone 188495 (TRBV7-8, TRBJ2-3)
CASSLEAGTDTQYF

SEQ ID NO: 376991 - protein, 15 aa, Homo sapiens
  CDR3 for alpha chain variable domain of TCR clone 188496 (TRAV8-3, TRAJ45)
CASSYSGGGADVLTF

SEQ ID NO: 376992 - protein, 15 aa, Homo sapiens
  CDR3 for beta chain variable domain of TCR clone 188496 (TRBV27, TRBJ1-4)
CASSPRHATNEKLFF

SEQ ID NO: 376993 - protein, 16 aa, Homo sapiens
  CDR3 for alpha chain variable domain of TCR clone 188497 (TRAV23/DV6, TRAJ9)
CAASIGGNTGGFTTIF

SEQ ID NO: 376994 - protein, 14 aa, Homo sapiens
  CDR3 for beta chain variable domain of TCR clone 188497 (TRBV7-2, TRBJ2-7)
CASSPKTSFYEQYF

SEQ ID NO: 376995 - protein, 13 aa, Homo sapiens
  CDR3 for alpha chain variable domain of TCR clone 188498 (TRAV23/DV6, TRAJ15)
CAALPPGRNCSDL

SEQ ID NO: 376996 - protein, 14 aa, Homo sapiens
  CDR3 for beta chain variable domain of TCR clone 188498 (TRBV7-9, TRBJ1-2)
CASSRQGANYGYTF

SEQ ID NO: 376997 - protein, 17 aa, Homo sapiens
  CDR3 for alpha chain variable domain of TCR clone 188499 (TRAV12-3, TRAJ26)
CAMSGGRWDNYGQNFVF

SEQ ID NO: 376998 - protein, 14 aa, Homo sapiens
  CDR3 for beta chain variable domain of TCR clone 188499 (TRBV20-1, TRBJ1-3)
CSASPTGAGNTIYF

SEQ ID NO: 376999 - protein, 14 aa, Homo sapiens
  CDR3 for alpha chain variable domain of TCR clone 188500 (TRAV21, TRAJ28)
CAVGSGAGSYQLTF

SEQ ID NO: 377000 - protein, 13 aa, Homo sapiens
  CDR3 for beta chain variable domain of TCR clone 188500 (TRBV10-3, TRBJ2-7)
CASKLAVNYEQYF

SEQ ID NO: 377001 - protein, 18 aa, Homo sapiens
  CDR3 for alpha chain variable domain of TCR clone 188501 (TRAV26-2, TRAJ54)
CILRDVEVGIQGAQKLGF

SEQ ID NO: 377002 - protein, 17 aa, Homo sapiens
  CDR3 for beta chain variable domain of TCR clone 188501 (TRBV20-1, TRBJ1-5)
CSASLSQGQGGNQPQHF

SEQ ID NO: 377003 - protein, 15 aa, Homo sapiens
  CDR3 for alpha chain variable domain of TCR clone 188502 (TRAV25, TRAJ53)
CPTSNSGGSNYKLTF

SEQ ID NO: 377004 - protein, 14 aa, Homo sapiens
  CDR3 for beta chain variable domain of TCR clone 188502 (TRBV11-2, TRBJ2-3)
CASSSLARTDTQYF

SEQ ID NO: 377005 - protein, 13 aa, Homo sapiens
  CDR3 for alpha chain variable domain of TCR clone 188503 (TRAV13-2, TRAJ11)
CAEGDSGYSTLSF

SEQ ID NO: 377006 - protein, 12 aa, Homo sapiens
  CDR3 for beta chain variable domain of TCR clone 188503 (TRBV7-9, TRBJ1-1)
FASSLEGTEAFF

SEQ ID NO: 377007 - protein, 14 aa, Homo sapiens
  CDR3 for alpha chain variable domain of TCR clone 188504 (TRAV12-1, TRAJ12)
CVVTSGDSSYKLIF

SEQ ID NO: 377008 - protein, 15 aa, Homo sapiens
  CDR3 for beta chain variable domain of TCR clone 188504 (TRBV10-2, TRBJ2-6)
CASSEQGTGANVLTF

SEQ ID NO: 377009 - protein, 14 aa, Homo sapiens
  CDR3 for alpha chain variable domain of TCR clone 188505 (TRAV1-2, TRAJ16)
CAVNRFSDGQKLLF

SEQ ID NO: 377010 - protein, 20 aa, Homo sapiens
  CDR3 for beta chain variable domain of TCR clone 188505 (TRBV5-1, TRBJ2-3)
CASSLWLAGAITTRTDTQYF

SEQ ID NO: 377011 - protein, 13 aa, Homo sapiens
  CDR3 for alpha chain variable domain of TCR clone 188506 (TRAV21, TRAJ20)
CAVGLRVDYKLSF

SEQ ID NO: 377012 - protein, 15 aa, Homo sapiens
  CDR3 for beta chain variable domain of TCR clone 188506 (TRBV5-1, TRBJ2-5)
CASSFKGGDQETQYF

SEQ ID NO: 377013 - protein, 13 aa, Homo sapiens
  CDR3 for alpha chain variable domain of TCR clone 188507 (TRAV12-1, TRAJ6)
CVVFPGGSYIPTF

SEQ ID NO: 377014 - protein, 14 aa, Homo sapiens
  CDR3 for beta chain variable domain of TCR clone 188507 (TRBV7-9, TRBJ1-2)
CASSSNRGGDGYTF

SEQ ID NO: 377015 - protein, 18 aa, Homo sapiens
  CDR3 for alpha chain variable domain of TCR clone 188508 (TRAV21, TRAJ52)
CAVRPSPTGGTSYGKLTF

SEQ ID NO: 377016 - protein, 16 aa, Homo sapiens
  CDR3 for beta chain variable domain of TCR clone 188508 (TRBV13, TRBJ2-3)
CQQPLQGSGGRNTQYF

SEQ ID NO: 377017 - protein, 15 aa, Homo sapiens
  CDR3 for alpha chain variable domain of TCR clone 188509 (TRAV8-6, TRAJ45)
CAVSEQGGGAAGLTF

SEQ ID NO: 377018 - protein, 14 aa, Homo sapiens
  CDR3 for beta chain variable domain of TCR clone 188509 (TRBV28, TRBJ2-5)
CASRGSSFWETQYF

SEQ ID NO: 377019 - protein, 12 aa, Homo sapiens
  CDR3 for alpha chain variable domain of TCR clone 188510 (TRAV12-2, TRAJ31)
CAVNTPDARLMF

SEQ ID NO: 377020 - protein, 12 aa, Homo sapiens
  CDR3 for beta chain variable domain of TCR clone 188510 (TRBV12-4, TRBJ2-7)
CASSLGCYEQYF

SEQ ID NO: 377021 - protein, 17 aa, Homo sapiens
  CDR3 for alpha chain variable domain of TCR clone 188511 (TRAV3, TRAJ12)
CAVRDGGRVDSSYKLIF

SEQ ID NO: 377022 - protein, 13 aa, Homo sapiens
  CDR3 for beta chain variable domain of TCR clone 188511 (TRBV15, TRBJ1-6)
CATSGGLNSPLHF

SEQ ID NO: 377023 - protein, 16 aa, Homo sapiens
  CDR3 for alpha chain variable domain of TCR clone 188512 (TRAV3, TRAJ10)
CAVRDMNAGGGNKLTF

SEQ ID NO: 377024 - protein, 16 aa, Homo sapiens
  CDR3 for beta chain variable domain of TCR clone 188512 (TRBV4-3, TRBJ2-1)
CASSPALDRGVNEQFF

SEQ ID NO: 377025 - protein, 12 aa, Homo sapiens
  CDR3 for alpha chain variable domain of TCR clone 188513 (TRAV13-1, TRAJ9)
FASYTGGFKTIF

SEQ ID NO: 377026 - protein, 13 aa, Homo sapiens
  CDR3 for beta chain variable domain of TCR clone 188513 (TRBV12-4, TRBJ1-2)
CASSSGSKDGYTF

SEQ ID NO: 377027 - protein, 12 aa, Homo sapiens
  CDR3 for alpha chain variable domain of TCR clone 188514 (TRAV21, TRAJ3)
CCFYSSASKIIF

SEQ ID NO: 377028 - protein, 16 aa, Homo sapiens
  CDR3 for beta chain variable domain of TCR clone 188514 (TRBV19, TRBJ2-1)
CASSKAGPSSYNESSS

SEQ ID NO: 377029 - protein, 14 aa, Homo sapiens
  CDR3 for alpha chain variable domain of TCR clone 188515 (TRAV29/DV5, TRAJ36)
CAARRKTGANNLFF

SEQ ID NO: 377030 - protein, 13 aa, Homo sapiens
  CDR3 for beta chain variable domain of TCR clone 188515 (TRBV11-2, TRBJ2-1)
CASSLGLAGGRFF

SEQ ID NO: 377031 - protein, 13 aa, Homo sapiens
  CDR3 for alpha chain variable domain of TCR clone 188516 (TRAV23/DV6, TRAJ22)
CAPYSGSARQMPF

SEQ ID NO: 377032 - protein, 13 aa, Homo sapiens
  CDR3 for beta chain variable domain of TCR clone 188516 (TRBV6-1, TRBJ1-1)
CASSRQGNTEAFF

SEQ ID NO: 377033 - protein, 11 aa, Homo sapiens
  CDR3 for alpha chain variable domain of TCR clone 188517 (TRAV35, TRAJ34)
CWARNTAKLIF

SEQ ID NO: 377034 - protein, 13 aa, Homo sapiens
  CDR3 for beta chain variable domain of TCR clone 188517 (TRBV19, TRBJ2-7)
CASSIDRTYEQYF

SEQ ID NO: 377035 - protein, 15 aa, Homo sapiens
  CDR3 for alpha chain variable domain of TCR clone 188518 (TRAV17, TRAJ22)
CATVAPSGSSRQLTF

SEQ ID NO: 377036 - protein, 14 aa, Homo sapiens
  CDR3 for beta chain variable domain of TCR clone 188518 (TRBV20-1, TRBJ1-5)
CSARDGGSGQPQHF

SEQ ID NO: 377037 - protein, 14 aa, Homo sapiens
  CDR3 for alpha chain variable domain of TCR clone 188519 (TRAV16, TRAJ44)
CSKRRTGTASKLTF

SEQ ID NO: 377038 - protein, 15 aa, Homo sapiens
  CDR3 for beta chain variable domain of TCR clone 188519 (TRBV4-2, TRBJ2-5)
CASSQRESRGETQYF

SEQ ID NO: 377039 - protein, 23 aa, Homo sapiens
  CDR3 for alpha chain variable domain of TCR clone 188520 (TRAV26-1, TRAJ38)
CIADNAGNNHIQNPYPAVYQLRD

SEQ ID NO: 377040 - protein, 13 aa, Homo sapiens
  CDR3 for beta chain variable domain of TCR clone 188520 (TRBV10-3, TRBJ2-7)
CASKLAVNYEQYF

SEQ ID NO: 377041 - protein, 14 aa, Homo sapiens
  CDR3 for alpha chain variable domain of TCR clone 188521 (TRAV26-1, TRAJ49)
CIVRPSNTGHQFYF

SEQ ID NO: 377042 - protein, 15 aa, Homo sapiens
  CDR3 for beta chain variable domain of TCR clone 188521 (TRBV19, TRBJ1-1)
CASMGFRDVNTEALF

SEQ ID NO: 377043 - protein, 12 aa, Homo sapiens
  CDR3 for alpha chain variable domain of TCR clone 188522 (TRAV12-1, TRAJ31)
CVSWNNNARLMF

SEQ ID NO: 377044 - protein, 18 aa, Homo sapiens
  CDR3 for beta chain variable domain of TCR clone 188522 (TRBV11-2, TRBJ2-3)
CASSLGGASRGAPNTQYF

SEQ ID NO: 377045 - protein, 15 aa, Homo sapiens
  CDR3 for alpha chain variable domain of TCR clone 188523 (TRAV26-1, TRAJ29)
CIVRVAGSGNTPLVF

SEQ ID NO: 377046 - protein, 15 aa, Homo sapiens
  CDR3 for beta chain variable domain of TCR clone 188523 (TRBV19, TRBJ1-5)
CASSIVWADNQPQHF

SEQ ID NO: 377047 - protein, 15 aa, Homo sapiens
  CDR3 for alpha chain variable domain of TCR clone 188524 (TRAV22, TRAJ24)
CAVPLSTDSWGKWQF

SEQ ID NO: 377048 - protein, 14 aa, Homo sapiens
  CDR3 for beta chain variable domain of TCR clone 188524 (TRBV7-2, TRBJ2-7)
CASRSQGAAYEQYF

SEQ ID NO: 377049 - protein, 12 aa, Homo sapiens
  CDR3 for alpha chain variable domain of TCR clone 188525 (TRAV1-1, TRAJ24)
CAVRGSGGKFQF

SEQ ID NO: 377050 - protein, 16 aa, Homo sapiens
  CDR3 for beta chain variable domain of TCR clone 188525 (TRBV27, TRBJ2-5)
CASSSQTSGFQETQYF

SEQ ID NO: 377051 - protein, 15 aa, Homo sapiens
  CDR3 for alpha chain variable domain of TCR clone 188526 (TRAV16, TRAJ10)
CSLEGLTGGGNKLTF

SEQ ID NO: 377052 - protein, 14 aa, Homo sapiens
  CDR3 for beta chain variable domain of TCR clone 188526 (TRBV7-6, TRBJ2-3)
CASSLGTVTDTQYF

SEQ ID NO: 377053 - protein, 11 aa, Homo sapiens
  CDR3 for alpha chain variable domain of TCR clone 188527 (TRAV3, TRAJ32)
CAVREGIMVVL

SEQ ID NO: 377054 - protein, 13 aa, Homo sapiens
  CDR3 for beta chain variable domain of TCR clone 188527 (TRBV2, TRBJ1-1)
CASSEGGDTEAFF

SEQ ID NO: 377055 - protein, 15 aa, Homo sapiens
  CDR3 for alpha chain variable domain of TCR clone 188528 (TRAV8-2, TRAJ16)
WVVSDGFSDGQQLLF

SEQ ID NO: 377056 - protein, 14 aa, Homo sapiens
  CDR3 for beta chain variable domain of TCR clone 188528 (TRBV7-3, TRBJ1-1)
CASSLGTGYTEAFF

SEQ ID NO: 377057 - protein, 11 aa, Homo sapiens
  CDR3 for alpha chain variable domain of TCR clone 188529 (TRAV2, TRAJ13)
CASGGYQKVTF

SEQ ID NO: 377058 - protein, 18 aa, Homo sapiens
  CDR3 for beta chain variable domain of TCR clone 188529 (TRBV12-4, TRBJ2-2)
CACSLVAGTRGRTGELFF

SEQ ID NO: 377059 - protein, 18 aa, Homo sapiens
  CDR3 for alpha chain variable domain of TCR clone 188530 (TRAV21, TRAJ52)
CAVGPSPAGGTSYGKLTF

SEQ ID NO: 377060 - protein, 17 aa, Homo sapiens
  CDR3 for beta chain variable domain of TCR clone 188530 (TRBV13, TRBJ2-3)
CTSSLSRVAGGRNTQYF

SEQ ID NO: 377061 - protein, 14 aa, Homo sapiens
  CDR3 for alpha chain variable domain of TCR clone 188531 (TRAV12-3, TRAJ42)
CAMNYGGSQGNLIF

SEQ ID NO: 377062 - protein, 15 aa, Homo sapiens
  CDR3 for beta chain variable domain of TCR clone 188531 (TRBV5-7, TRBJ1-5)
CASSCGKLWDQPQHF

SEQ ID NO: 377063 - protein, 12 aa, Homo sapiens
  CDR3 for alpha chain variable domain of TCR clone 188532 (TRAV12-3, TRAJ17)
CAMTLTGKKLTF

SEQ ID NO: 377064 - protein, 15 aa, Homo sapiens
  CDR3 for beta chain variable domain of TCR clone 188532 (TRBV9, TRBJ1-6)
CASSVAGTGDSPLHF

SEQ ID NO: 377065 - protein, 13 aa, Homo sapiens
  CDR3 for alpha chain variable domain of TCR clone 188533 (TRAV21, TRAJ57)
CAVTQGGSEKLVL

SEQ ID NO: 377066 - protein, 16 aa, Homo sapiens
  CDR3 for beta chain variable domain of TCR clone 188533 (TRBV29-1, TRBJ2-7)
CSVEDADDGTAYEQYF

SEQ ID NO: 377067 - protein, 16 aa, Homo sapiens
  CDR3 for alpha chain variable domain of TCR clone 188534 (TRAV30, TRAJ24)
CGTEIVDADSWGKFQF

SEQ ID NO: 377068 - protein, 13 aa, Homo sapiens
  CDR3 for beta chain variable domain of TCR clone 188534 (TRBV11-2, TRBJ2-5)
CASISTGEETQYF

SEQ ID NO: 377069 - protein, 14 aa, Homo sapiens
  CDR3 for alpha chain variable domain of TCR clone 188535 (TRAV26-1, TRAJ38)
CIADNAGNNRKLIW

SEQ ID NO: 377070 - protein, 13 aa, Homo sapiens
  CDR3 for beta chain variable domain of TCR clone 188535 (TRBV20-1, TRBJ1-1)
CSARGGGNTEPFF

SEQ ID NO: 377071 - protein, 13 aa, Homo sapiens
  CDR3 for alpha chain variable domain of TCR clone 188536 (TRAV12-3, TRAJ21)
CAPGPHNFNKFYF

SEQ ID NO: 377072 - protein, 16 aa, Homo sapiens
  CDR3 for beta chain variable domain of TCR clone 188536 (TRBV2, TRBJ2-5)
CASSETQGVGEETQYF

SEQ ID NO: 377073 - protein, 17 aa, Homo sapiens
  CDR3 for alpha chain variable domain of TCR clone 188537 (TRAV19, TRAJ58)
CALRGLRVGTSGSRLTF

SEQ ID NO: 377074 - protein, 15 aa, Homo sapiens
  CDR3 for beta chain variable domain of TCR clone 188537 (TRBV27, TRBJ2-7)
CASSTAGTGSYEQYF

SEQ ID NO: 377075 - protein, 17 aa, Homo sapiens
  CDR3 for alpha chain variable domain of TCR clone 188538 (TRAV4, TRAJ18)
CLVGERSVGSTLGRLYF

SEQ ID NO: 377076 - protein, 14 aa, Homo sapiens
  CDR3 for beta chain variable domain of TCR clone 188538 (TRBV6-5, TRBJ1-2)
CASSYDGTRGGYTF

SEQ ID NO: 377077 - protein, 14 aa, Homo sapiens
  CDR3 for alpha chain variable domain of TCR clone 188539 (TRAV26-1, TRAJ34)
CIVIVAYNTDKIIF

SEQ ID NO: 377078 - protein, 14 aa, Homo sapiens
  CDR3 for beta chain variable domain of TCR clone 188539 (TRBV19, TRBJ2-1)
CASPTFVLSGEQFF

SEQ ID NO: 377079 - protein, 14 aa, Homo sapiens
  CDR3 for alpha chain variable domain of TCR clone 188540 (TRAV4, TRAJ17)
CLVGYMAAGNKLTF

SEQ ID NO: 377080 - protein, 19 aa, Homo sapiens
  CDR3 for beta chain variable domain of TCR clone 188540 (TRBV4-1, TRBJ2-7)
CASSPVAGGGRAVLRAGHQ

SEQ ID NO: 377081 - protein, 12 aa, Homo sapiens
  CDR3 for alpha chain variable domain of TCR clone 188541 (TRAV13-2, TRAJ8)
CAPWLGFQKLVF

SEQ ID NO: 377082 - protein, 16 aa, Homo sapiens
  CDR3 for beta chain variable domain of TCR clone 188541 (TRBV13, TRBJ2-2)
CASSLGRGYGTGELFF

SEQ ID NO: 377083 - protein, 12 aa, Homo sapiens
  CDR3 for alpha chain variable domain of TCR clone 188542 (TRAV8-6, TRAJ33)
CAVTDSIYQLIW

SEQ ID NO: 377084 - protein, 15 aa, Homo sapiens
  CDR3 for beta chain variable domain of TCR clone 188542 (TRBV4-3, TRBJ1-2)
CASSRGQGRNYGYTF

SEQ ID NO: 377085 - protein, 14 aa, Homo sapiens
  CDR3 for alpha chain variable domain of TCR clone 188543 (TRAV1-2, TRAJ8)
CAVREDTGFQKLVF

SEQ ID NO: 377086 - protein, 15 aa, Homo sapiens
  CDR3 for beta chain variable domain of TCR clone 188543 (TRBV7-9, TRBJ2-7)
CISVSEAPPMNEQYF

SEQ ID NO: 377087 - protein, 16 aa, Homo sapiens
  CDR3 for alpha chain variable domain of TCR clone 188544 (TRAV13-2, TRAJ28)
CAEKSYSGAGSYQLTF

SEQ ID NO: 377088 - protein, 16 aa, Homo sapiens
  CDR3 for beta chain variable domain of TCR clone 188544 (TRBV19, TRBJ2-1)
CASSKAGPGSYNEQFF

SEQ ID NO: 377089 - protein, 10 aa, Homo sapiens
  CDR3 for alpha chain variable domain of TCR clone 188545 (TRAV23/DV6, TRAJ43)
CAAAVAALEQ

SEQ ID NO: 377090 - protein, 14 aa, Homo sapiens
  CDR3 for beta chain variable domain of TCR clone 188545 (TRBV5-4, TRBJ1-1)
CASSLDSRRDEAFF

SEQ ID NO: 377091 - protein, 17 aa, Homo sapiens
  CDR3 for alpha chain variable domain of TCR clone 188546 (TRAV3, TRAJ6)
CAVRDGPRAGGSYIPTF

SEQ ID NO: 377092 - protein, 13 aa, Homo sapiens
  CDR3 for beta chain variable domain of TCR clone 188546 (TRBV3-1, TRBJ2-2)
CASLARGSGELFF

SEQ ID NO: 377093 - protein, 14 aa, Homo sapiens
  CDR3 for alpha chain variable domain of TCR clone 188547 (TRAV27, TRAJ36)
CAGPPKRGANNLFF

SEQ ID NO: 377094 - protein, 16 aa, Homo sapiens
  CDR3 for beta chain variable domain of TCR clone 188547 (TRBV18, TRBJ2-7)
LIPRPPASTPNYEQYF

SEQ ID NO: 377095 - protein, 14 aa, Homo sapiens
  CDR3 for alpha chain variable domain of TCR clone 188548 (TRAV1-2, TRAJ8)
CAVREDTGFQKLVF

SEQ ID NO: 377096 - protein, 13 aa, Homo sapiens
  CDR3 for beta chain variable domain of TCR clone 188548 (TRBV7-3, TRBJ1-1)
CASGQDWGAEAFF

SEQ ID NO: 377097 - protein, 15 aa, Homo sapiens
  CDR3 for alpha chain variable domain of TCR clone 188549 (TRAV8-4, TRAJ3)
CALTGENLVQHCFQD

SEQ ID NO: 377098 - protein, 16 aa, Homo sapiens
  CDR3 for beta chain variable domain of TCR clone 188549 (TRBV4-2, TRBJ1-1)
CASSQAGFGMNTEAFF

SEQ ID NO: 377099 - protein, 14 aa, Homo sapiens
  CDR3 for alpha chain variable domain of TCR clone 188550 (TRAV1-2, TRAJ16)
CAVNRFSDGQSLLF

SEQ ID NO: 377100 - protein, 15 aa, Homo sapiens
  CDR3 for beta chain variable domain of TCR clone 188550 (TRBV10-3, TRBJ2-1)
CAIRNGTSGHNEQFF

SEQ ID NO: 377101 - protein, 14 aa, Homo sapiens
  CDR3 for alpha chain variable domain of TCR clone 188551 (TRAV1-2, TRAJ6)
CAVSLSGGSYIPTF

SEQ ID NO: 377102 - protein, 19 aa, Homo sapiens
  CDR3 for beta chain variable domain of TCR clone 188551 (TRBV19, TRBJ2-5)
CASSIGQVTDFFLGETQYF

SEQ ID NO: 377103 - protein, 17 aa, Homo sapiens
  CDR3 for alpha chain variable domain of TCR clone 188552 (TRAV8-6, TRAJ58)
CAVSSWVGETSGSRLTF

SEQ ID NO: 377104 - protein, 13 aa, Homo sapiens
  CDR3 for beta chain variable domain of TCR clone 188552 (TRBV4-1, TRBJ2-1)
CASSQAGGDEQFF

SEQ ID NO: 377105 - protein, 12 aa, Homo sapiens
  CDR3 for alpha chain variable domain of TCR clone 188553 (TRAV12-1, TRAJ40)
CVVYSGTYKYIF

SEQ ID NO: 377106 - protein, 17 aa, Homo sapiens
  CDR3 for beta chain variable domain of TCR clone 188553 (TRBV11-2, TRBJ2-3)
GQQLRGGLAGAPNTQYF

SEQ ID NO: 377107 - protein, 18 aa, Homo sapiens
  CDR3 for alpha chain variable domain of TCR clone 188554 (TRAV26-2, TRAJ45)
CILRLWGYSGGGADGHTF

SEQ ID NO: 377108 - protein, 17 aa, Homo sapiens
  CDR3 for beta chain variable domain of TCR clone 188554 (TRBV28, TRBJ2-3)
CASSPTPAGGRVDTQYF

SEQ ID NO: 377109 - protein, 11 aa, Homo sapiens
  CDR3 for alpha chain variable domain of TCR clone 188555 (TRAV1-1, TRAJ23)
CAVRQGGKLIF

SEQ ID NO: 377110 - protein, 16 aa, Homo sapiens
  CDR3 for beta chain variable domain of TCR clone 188555 (TRBV7-2, TRBJ2-3)
CASSLVALYSTDTQYF

SEQ ID NO: 377111 - protein, 13 aa, Homo sapiens
  CDR3 for alpha chain variable domain of TCR clone 188556 (TRAV21, TRAJ20)
CAVGLRVDYKLSF

SEQ ID NO: 377112 - protein, 15 aa, Homo sapiens
  CDR3 for beta chain variable domain of TCR clone 188556 (TRBV7-3, TRBJ2-3)
CASSLGLTLGDTQYF

SEQ ID NO: 377113 - protein, 15 aa, Homo sapiens
  CDR3 for alpha chain variable domain of TCR clone 188557 (TRAV25, TRAJ52)
CAGRPGGTSYGKLTF

SEQ ID NO: 377114 - protein, 13 aa, Homo sapiens
  CDR3 for beta chain variable domain of TCR clone 188557 (TRBV4-1, TRBJ2-1)
CASSQAGGDEQFF

SEQ ID NO: 377115 - protein, 11 aa, Homo sapiens
  CDR3 for alpha chain variable domain of TCR clone 188558 (TRAV35, TRAJ34)
CWARNTDKLLF

SEQ ID NO: 377116 - protein, 13 aa, Homo sapiens
  CDR3 for beta chain variable domain of TCR clone 188558 (TRBV19, TRBJ2-7)
CASSIDRTYEQYF

SEQ ID NO: 377117 - protein, 13 aa, Homo sapiens
  CDR3 for alpha chain variable domain of TCR clone 188559 (TRAV2, TRAJ40)
CAVVTSGTYKYIF

SEQ ID NO: 377118 - protein, 12 aa, Homo sapiens
  CDR3 for beta chain variable domain of TCR clone 188559 (TRBV7-9, TRBJ2-7)
SASRTGFDEQYF

SEQ ID NO: 377119 - protein, 14 aa, Homo sapiens
  CDR3 for alpha chain variable domain of TCR clone 188560 (TRAV12-2, TRAJ13)
CAVKKNGGDQKVTF

SEQ ID NO: 377120 - protein, 11 aa, Homo sapiens
  CDR3 for beta chain variable domain of TCR clone 188560 (TRBV29-1, TRBJ2-5)
CSEDRTGTQYF

SEQ ID NO: 377121 - protein, 17 aa, Homo sapiens
  CDR3 for alpha chain variable domain of TCR clone 188561 (TRAV3, TRAJ42)
CAVRDRYYGGSQGNLIF

SEQ ID NO: 377122 - protein, 13 aa, Homo sapiens
  CDR3 for beta chain variable domain of TCR clone 188561 (TRBV10-3, TRBJ2-7)
CASKLAVNYEQYF

SEQ ID NO: 377123 - protein, 14 aa, Homo sapiens
  CDR3 for alpha chain variable domain of TCR clone 188562 (TRAV20, TRAJ10)
CAVRVEGGGNKLTF

SEQ ID NO: 377124 - protein, 18 aa, Homo sapiens
  CDR3 for beta chain variable domain of TCR clone 188562 (TRBV24-1, TRBJ2-1)
CATSDLMFLGRGVHEHFF

SEQ ID NO: 377125 - protein, 12 aa, Homo sapiens
  CDR3 for alpha chain variable domain of TCR clone 188563 (TRAV35, TRAJ49)
CAGWNTDNQFYF

SEQ ID NO: 377126 - protein, 16 aa, Homo sapiens
  CDR3 for beta chain variable domain of TCR clone 188563 (TRBV5-1, TRBJ2-2)
CASSLWDTTNTGELFF

SEQ ID NO: 377127 - protein, 16 aa, Homo sapiens
  CDR3 for alpha chain variable domain of TCR clone 188564 (TRAV27, TRAJ13)
CAGAKSDSGGFQKVTF

SEQ ID NO: 377128 - protein, 15 aa, Homo sapiens
  CDR3 for beta chain variable domain of TCR clone 188564 (TRBV29-1, TRBJ2-1)
CSVGRHALFYNEQFF

SEQ ID NO: 377129 - protein, 13 aa, Homo sapiens
  CDR3 for alpha chain variable domain of TCR clone 188565 (TRAV17, TRAJ40)
CATGEGGTYKYIF

SEQ ID NO: 377130 - protein, 13 aa, Homo sapiens
  CDR3 for beta chain variable domain of TCR clone 188565 (TRBV6-3, TRBJ2-5)
CASSDRMTETQYF

SEQ ID NO: 377131 - protein, 15 aa, Homo sapiens
  CDR3 for alpha chain variable domain of TCR clone 188566 (TRAV21, TRAJ22)
CAVRLFFWFCKATDL

SEQ ID NO: 377132 - protein, 12 aa, Homo sapiens
  CDR3 for beta chain variable domain of TCR clone 188566 (TRBV29-1, TRBJ2-3)
CSVTGGADTQYF

SEQ ID NO: 377133 - protein, 14 aa, Homo sapiens
  CDR3 for alpha chain variable domain of TCR clone 188567 (TRAV1-2, TRAJ16)
CAVNRFSDGQKLLF

SEQ ID NO: 377134 - protein, 15 aa, Homo sapiens
  CDR3 for beta chain variable domain of TCR clone 188567 (TRBV5-7, TRBJ1-4)
CASSLFRVQDEKLFF

SEQ ID NO: 377135 - protein, 13 aa, Homo sapiens
  CDR3 for alpha chain variable domain of TCR clone 188568 (TRAV17, TRAJ40)
CAGALGGTYKYIF

SEQ ID NO: 377136 - protein, 15 aa, Homo sapiens
  CDR3 for beta chain variable domain of TCR clone 188568 (TRBV7-9, TRBJ1-6)
CASSSPGRGNSPLHF

SEQ ID NO: 377137 - protein, 12 aa, Homo sapiens
  CDR3 for alpha chain variable domain of TCR clone 188569 (TRAV12-2, TRAJ9)
CAVNTGGFKTIF

SEQ ID NO: 377138 - protein, 13 aa, Homo sapiens
  CDR3 for beta chain variable domain of TCR clone 188569 (TRBV10-3, TRBJ2-7)
CASKLAVNYEQYL

SEQ ID NO: 377139 - protein, 12 aa, Homo sapiens
  CDR3 for alpha chain variable domain of TCR clone 188570 (TRAV13-2, TRAJ23)
CAERHRGGKLIF

SEQ ID NO: 377140 - protein, 14 aa, Homo sapiens
  CDR3 for beta chain variable domain of TCR clone 188570 (TRBV20-1, TRBJ2-7)
CSAPELAGVGEQYF

SEQ ID NO: 377141 - protein, 13 aa, Homo sapiens
  CDR3 for alpha chain variable domain of TCR clone 188571 (TRAV8-1, TRAJ28)
CAVSGAGSYQLTF

SEQ ID NO: 377142 - protein, 14 aa, Homo sapiens
  CDR3 for beta chain variable domain of TCR clone 188571 (TRBV11-2, TRBJ1-5)
CASSLDRGRQPQHF

SEQ ID NO: 377143 - protein, 23 aa, Homo sapiens
  CDR3 for alpha chain variable domain of TCR clone 188572 (TRAV8-3, TRAJ8)
CAVGPNEHRLSETCIWNWHPTSY

SEQ ID NO: 377144 - protein, 15 aa, Homo sapiens
  CDR3 for beta chain variable domain of TCR clone 188572 (TRBV3-1, TRBJ2-5)
CASSANLGGPETQYF

SEQ ID NO: 377145 - protein, 16 aa, Homo sapiens
  CDR3 for alpha chain variable domain of TCR clone 188573 (TRAV30, TRAJ24)
CGTEIVDADSWGKFQF

SEQ ID NO: 377146 - protein, 13 aa, Homo sapiens
  CDR3 for beta chain variable domain of TCR clone 188573 (TRBV27, TRBJ1-4)
CASSLMGDEKLLF

SEQ ID NO: 377147 - protein, 13 aa, Homo sapiens
  CDR3 for alpha chain variable domain of TCR clone 188574 (TRAV10, TRAJ40)
CVGSALGTYKYIF

SEQ ID NO: 377148 - protein, 13 aa, Homo sapiens
  CDR3 for beta chain variable domain of TCR clone 188574 (TRBV20-1, TRBJ2-3)
CSARLAGTDTQYF

SEQ ID NO: 377149 - protein, 14 aa, Homo sapiens
  CDR3 for alpha chain variable domain of TCR clone 188575 (TRAV14/DV4, TRAJ20)
FAMREGYNDYKLSF

SEQ ID NO: 377150 - protein, 15 aa, Homo sapiens
  CDR3 for beta chain variable domain of TCR clone 188575 (TRBV28, TRBJ2-7)
CACSSISGGSYEQYF

SEQ ID NO: 377151 - protein, 16 aa, Homo sapiens
  CDR3 for alpha chain variable domain of TCR clone 188576 (TRAV30, TRAJ24)
CGTEIVDADGWGKFPF

SEQ ID NO: 377152 - protein, 16 aa, Homo sapiens
  CDR3 for beta chain variable domain of TCR clone 188576 (TRBV4-1, TRBJ2-7)
CASSQEGTASSYEQYF

SEQ ID NO: 377153 - protein, 18 aa, Homo sapiens
  CDR3 for alpha chain variable domain of TCR clone 188577 (TRAV21, TRAJ52)
CAVRPSPAGGTSYGNLTF

SEQ ID NO: 377154 - protein, 17 aa, Homo sapiens
  CDR3 for beta chain variable domain of TCR clone 188577 (TRBV13, TRBJ2-3)
CASRLSRVAGGRNTQYF

SEQ ID NO: 377155 - protein, 12 aa, Homo sapiens
  CDR3 for alpha chain variable domain of TCR clone 188578 (TRAV1-1, TRAJ30)
CAVRGRDDKIIF

SEQ ID NO: 377156 - protein, 16 aa, Homo sapiens
  CDR3 for beta chain variable domain of TCR clone 188578 (TRBV5-1, TRBJ2-3)
CASSLGLAVYTDTQYF

SEQ ID NO: 377157 - protein, 12 aa, Homo sapiens
  CDR3 for alpha chain variable domain of TCR clone 188579 (TRAV13-2, TRAJ8)
CAPWLGFQKLVF

SEQ ID NO: 377158 - protein, 12 aa, Homo sapiens
  CDR3 for beta chain variable domain of TCR clone 188579 (TRBV28, TRBJ2-3)
CASSVYRDTQYF

SEQ ID NO: 377159 - protein, 14 aa, Homo sapiens
  CDR3 for alpha chain variable domain of TCR clone 188580 (TRAV12-1, TRAJ17)
CVVNPKAAGNTLAF

SEQ ID NO: 377160 - protein, 16 aa, Homo sapiens
  CDR3 for beta chain variable domain of TCR clone 188580 (TRBV20-1, TRBJ2-1)
CSASASGYSSYNEQFF

SEQ ID NO: 377161 - protein, 14 aa, Homo sapiens
  CDR3 for alpha chain variable domain of TCR clone 188581 (TRAV17, TRAJ31)
CATVLRNNNARLMF

SEQ ID NO: 377162 - protein, 14 aa, Homo sapiens
  CDR3 for beta chain variable domain of TCR clone 188581 (TRBV12-4, TRBJ2-5)
CASSLWQKLETQYF

SEQ ID NO: 377163 - protein, 16 aa, Homo sapiens
  CDR3 for alpha chain variable domain of TCR clone 188582 (TRAV12-3, TRAJ53)
CAMSPGSGGSNYKRTF

SEQ ID NO: 377164 - protein, 12 aa, Homo sapiens
  CDR3 for beta chain variable domain of TCR clone 188582 (TRBV7-8, TRBJ2-7)
CASSLGDREQYF

SEQ ID NO: 377165 - protein, 11 aa, Homo sapiens
  CDR3 for alpha chain variable domain of TCR clone 188583 (TRAV16, TRAJ49)
CALRSCNQFYF

SEQ ID NO: 377166 - protein, 16 aa, Homo sapiens
  CDR3 for beta chain variable domain of TCR clone 188583 (TRBV20-1, TRBJ1-5)
CSARDVGGGWIQPQHF

SEQ ID NO: 377167 - protein, 14 aa, Homo sapiens
  CDR3 for alpha chain variable domain of TCR clone 188584 (TRAV1-2, TRAJ8)
CAVREDTGFQKLVF

SEQ ID NO: 377168 - protein, 14 aa, Homo sapiens
  CDR3 for beta chain variable domain of TCR clone 188584 (TRBV7-9, TRBJ2-7)
CASSLGTDPNEQYF

SEQ ID NO: 377169 - protein, 18 aa, Homo sapiens
  CDR3 for alpha chain variable domain of TCR clone 188585 (TRAV3, TRAJ17)
CAVRARRGGRCCRQQANF

SEQ ID NO: 377170 - protein, 14 aa, Homo sapiens
  CDR3 for beta chain variable domain of TCR clone 188585 (TRBV4-1, TRBJ2-2)
CASSQAVNTGELFF

SEQ ID NO: 377171 - protein, 17 aa, Homo sapiens
  CDR3 for alpha chain variable domain of TCR clone 188586 (TRAV3, TRAJ6)
CAVRDGPRAGGSYMPKF

SEQ ID NO: 377172 - protein, 14 aa, Homo sapiens
  CDR3 for beta chain variable domain of TCR clone 188586 (TRBV7-2, TRBJ2-7)
CASSPKTSFYEQYF

SEQ ID NO: 377173 - protein, 21 aa, Homo sapiens
  CDR3 for alpha chain variable domain of TCR clone 188587 (TRAV6, TRAJ36)
CARQTTSSLGLERDSPFFPIS

SEQ ID NO: 377174 - protein, 14 aa, Homo sapiens
  CDR3 for beta chain variable domain of TCR clone 188587 (TRBV10-2, TRBJ1-5)
CASSSTGRNQPQHF

SEQ ID NO: 377175 - protein, 17 aa, Homo sapiens
  CDR3 for alpha chain variable domain of TCR clone 188588 (TRAV26-1, TRAJ27)
CIVSTPLINTNAGKSTF

SEQ ID NO: 377176 - protein, 16 aa, Homo sapiens
  CDR3 for beta chain variable domain of TCR clone 188588 (TRBV7-9, TRBJ2-1)
CASSLDPGLAIDEQFF

SEQ ID NO: 377177 - protein, 16 aa, Homo sapiens
  CDR3 for alpha chain variable domain of TCR clone 188589 (TRAV1-2, TRAJ10)
CAVRGVLTGGGNKLTF

SEQ ID NO: 377178 - protein, 15 aa, Homo sapiens
  CDR3 for beta chain variable domain of TCR clone 188589 (TRBV7-9, TRBJ1-4)
CASSRAGGFNEKLFF

SEQ ID NO: 377179 - protein, 14 aa, Homo sapiens
  CDR3 for alpha chain variable domain of TCR clone 188590 (TRAV14/DV4, TRAJ42)
CPRGSLRSQGNLIF

SEQ ID NO: 377180 - protein, 13 aa, Homo sapiens
  CDR3 for beta chain variable domain of TCR clone 188590 (TRBV12-4, TRBJ2-1)
CASSLSPSNEQFF

SEQ ID NO: 377181 - protein, 15 aa, Homo sapiens
  CDR3 for alpha chain variable domain of TCR clone 188591 (TRAV21, TRAJ53)
CAVRQSGGSNYKLIF

SEQ ID NO: 377182 - protein, 13 aa, Homo sapiens
  CDR3 for beta chain variable domain of TCR clone 188591 (TRBV7-9, TRBJ1-2)
CASSLKQNYGYSF

SEQ ID NO: 377183 - protein, 15 aa, Homo sapiens
  CDR3 for alpha chain variable domain of TCR clone 188592 (TRAV12-2, TRAJ53)
CAVNGGGGSNYKLTF

SEQ ID NO: 377184 - protein, 15 aa, Homo sapiens
  CDR3 for beta chain variable domain of TCR clone 188592 (TRBV7-2, TRBJ2-7)
CASSLALGSAYEQYF

SEQ ID NO: 377185 - protein, 13 aa, Homo sapiens
  CDR3 for alpha chain variable domain of TCR clone 188593 (TRAV1-2, TRAJ9)
CAFLNTGGFKTIF

SEQ ID NO: 377186 - protein, 14 aa, Homo sapiens
  CDR3 for beta chain variable domain of TCR clone 188593 (TRBV5-1, TRBJ2-2)
CASSLGGGSGELFF

SEQ ID NO: 377187 - protein, 14 aa, Homo sapiens
  CDR3 for alpha chain variable domain of TCR clone 188594 (TRAV1-2, TRAJ8)
CAVREDTSFQKLVF

SEQ ID NO: 377188 - protein, 12 aa, Homo sapiens
  CDR3 for beta chain variable domain of TCR clone 188594 (TRBV11-2, TRBJ2-2)
CASSLGGGELFF

SEQ ID NO: 377189 - protein, 17 aa, Homo sapiens
  CDR3 for alpha chain variable domain of TCR clone 188595 (TRAV36/DV7, TRAJ52)
CAVAQRAGGTSYGKLTF

SEQ ID NO: 377190 - protein, 14 aa, Homo sapiens
  CDR3 for beta chain variable domain of TCR clone 188595 (TRBV4-3, TRBJ1-1)
CASSQGWTPARAFF

SEQ ID NO: 377191 - protein, 19 aa, Homo sapiens
  CDR3 for alpha chain variable domain of TCR clone 188596 (TRAV17, TRAJ40)
TASRAADTASYFCASKYIF

SEQ ID NO: 377192 - protein, 14 aa, Homo sapiens
  CDR3 for beta chain variable domain of TCR clone 188596 (TRBV7-2, TRBJ2-7)
CASSLPPGQGPQYF

SEQ ID NO: 377193 - protein, 14 aa, Homo sapiens
  CDR3 for alpha chain variable domain of TCR clone 188597 (TRAV17, TRAJ32)
CATDPGGATNNLIF

SEQ ID NO: 377194 - protein, 14 aa, Homo sapiens
  CDR3 for beta chain variable domain of TCR clone 188597 (TRBV2, TRBJ1-5)
CASSENRGGQPQHF

SEQ ID NO: 377195 - protein, 12 aa, Homo sapiens
  CDR3 for alpha chain variable domain of TCR clone 188598 (TRAV25, TRAJ38)
CAGTGNNRKLIW

SEQ ID NO: 377196 - protein, 14 aa, Homo sapiens
  CDR3 for beta chain variable domain of TCR clone 188598 (TRBV5-4, TRBJ1-1)
CVSSLGSRRDKAFF

SEQ ID NO: 377197 - protein, 13 aa, Homo sapiens
  CDR3 for alpha chain variable domain of TCR clone 188599 (TRAV27, TRAJ6)
CAGGTRGSYIPTF

SEQ ID NO: 377198 - protein, 13 aa, Homo sapiens
  CDR3 for beta chain variable domain of TCR clone 188599 (TRBV12-4, TRBJ2-2)
CASSITGSGELFF

SEQ ID NO: 377199 - protein, 14 aa, Homo sapiens
  CDR3 for alpha chain variable domain of TCR clone 188600 (TRAV16, TRAJ33)
CALSAIDSNYQLIW

SEQ ID NO: 377200 - protein, 17 aa, Homo sapiens
  CDR3 for beta chain variable domain of TCR clone 188600 (TRBV25-1, TRBJ2-7)
CASSDARVVFSSYEQYF

SEQ ID NO: 377201 - protein, 17 aa, Homo sapiens
  CDR3 for alpha chain variable domain of TCR clone 188601 (TRAV38-1, TRAJ48)
CAFMRPRSNFGNEKLTF

SEQ ID NO: 377202 - protein, 17 aa, Homo sapiens
  CDR3 for beta chain variable domain of TCR clone 188601 (TRBV7-3, TRBJ2-3)
RASSLMKRMRGADTQYF

SEQ ID NO: 377203 - protein, 12 aa, Homo sapiens
  CDR3 for alpha chain variable domain of TCR clone 188602 (TRAV35, TRAJ43)
CAGAYNNNDMRF

SEQ ID NO: 377204 - protein, 14 aa, Homo sapiens
  CDR3 for beta chain variable domain of TCR clone 188602 (TRBV2, TRBJ2-2)
CASSWHGATGELFF

SEQ ID NO: 377205 - protein, 15 aa, Homo sapiens
  CDR3 for alpha chain variable domain of TCR clone 188603 (TRAV4, TRAJ32)
CLVGEDGGATNKRIF

SEQ ID NO: 377206 - protein, 14 aa, Homo sapiens
  CDR3 for beta chain variable domain of TCR clone 188603 (TRBV7-2, TRBJ2-5)
CASSPRGSSETQYF

SEQ ID NO: 377207 - protein, 12 aa, Homo sapiens
  CDR3 for alpha chain variable domain of TCR clone 188604 (TRAV8-1, TRAJ6)
CASSGGSYIHTF

SEQ ID NO: 377208 - protein, 12 aa, Homo sapiens
  CDR3 for beta chain variable domain of TCR clone 188604 (TRBV19, TRBJ1-1)
CASMNRYTEAFF

SEQ ID NO: 377209 - protein, 16 aa, Homo sapiens
  CDR3 for alpha chain variable domain of TCR clone 188605 (TRAV20, TRAJ26)
CAVQHRRDNYGQNFVF

SEQ ID NO: 377210 - protein, 12 aa, Homo sapiens
  CDR3 for beta chain variable domain of TCR clone 188605 (TRBV9, TRBJ2-2)
CASSARTGELFF

SEQ ID NO: 377211 - protein, 14 aa, Homo sapiens
  CDR3 for alpha chain variable domain of TCR clone 188606 (TRAV2, TRAJ9)
CAVEDRSGGFKTIF

SEQ ID NO: 377212 - protein, 16 aa, Homo sapiens
  CDR3 for beta chain variable domain of TCR clone 188606 (TRBV7-3, TRBJ2-1)
CASSLGGYRSYNEQFF

SEQ ID NO: 377213 - protein, 14 aa, Homo sapiens
  CDR3 for alpha chain variable domain of TCR clone 188607 (TRAV12-2, TRAJ13)
CAVKKTGGCQKVTF

SEQ ID NO: 377214 - protein, 16 aa, Homo sapiens
  CDR3 for beta chain variable domain of TCR clone 188607 (TRBV20-1, TRBJ1-2)
CSASMGQGVANYGYTF

SEQ ID NO: 377215 - protein, 14 aa, Homo sapiens
  CDR3 for alpha chain variable domain of TCR clone 188608 (TRAV23/DV6, TRAJ22)
CADISAGSARQLTF

SEQ ID NO: 377216 - protein, 16 aa, Homo sapiens
  CDR3 for beta chain variable domain of TCR clone 188608 (TRBV5-7, TRBJ2-5)
CASIRGQTGYQETQYF

SEQ ID NO: 377217 - protein, 14 aa, Homo sapiens
  CDR3 for alpha chain variable domain of TCR clone 188609 (TRAV25, TRAJ35)
CARRMEGFGNVLHC

SEQ ID NO: 377218 - protein, 16 aa, Homo sapiens
  CDR3 for beta chain variable domain of TCR clone 188609 (TRBV6-3, TRBJ2-7)
CASSYSLALYSYEQYF

SEQ ID NO: 377219 - protein, 15 aa, Homo sapiens
  CDR3 for alpha chain variable domain of TCR clone 188610 (TRAV35, TRAJ23)
CAGQRGYNQGGKLIF

SEQ ID NO: 377220 - protein, 16 aa, Homo sapiens
  CDR3 for beta chain variable domain of TCR clone 188610 (TRBV27, TRBJ2-1)
CASSSRLAGNYNERFF

SEQ ID NO: 377221 - protein, 14 aa, Homo sapiens
  CDR3 for alpha chain variable domain of TCR clone 188611 (TRAV13-1, TRAJ3)
CAAEGYSSASKIIF

SEQ ID NO: 377222 - protein, 16 aa, Homo sapiens
  CDR3 for beta chain variable domain of TCR clone 188611 (TRBV10-3, TRBJ2-1)
CAISGVGDGGGGEQFF

SEQ ID NO: 377223 - protein, 14 aa, Homo sapiens
  CDR3 for alpha chain variable domain of TCR clone 188612 (TRAV17, TRAJ22)
CATSPSGSARQPTF

SEQ ID NO: 377224 - protein, 15 aa, Homo sapiens
  CDR3 for beta chain variable domain of TCR clone 188612 (TRBV6-3, TRBJ2-7)
CASSSPGTVFYEQYF

SEQ ID NO: 377225 - protein, 12 aa, Homo sapiens
  CDR3 for alpha chain variable domain of TCR clone 188613 (TRAV8-3, TRAJ20)
CAVCANDYKLSF

SEQ ID NO: 377226 - protein, 13 aa, Homo sapiens
  CDR3 for beta chain variable domain of TCR clone 188613 (TRBV12-4, TRBJ1-2)
CAISLRQGKGYTF

SEQ ID NO: 377227 - protein, 16 aa, Homo sapiens
  CDR3 for alpha chain variable domain of TCR clone 188614 (TRAV2, TRAJ20)
TTVLWSFRYNDYKLSF

SEQ ID NO: 377228 - protein, 12 aa, Homo sapiens
  CDR3 for beta chain variable domain of TCR clone 188614 (TRBV7-6, TRBJ2-3)
CASSTGTDTQYF

SEQ ID NO: 377229 - protein, 13 aa, Homo sapiens
  CDR3 for alpha chain variable domain of TCR clone 188615 (TRAV12-2, TRAJ37)
CAGGSGNTGKLIF

SEQ ID NO: 377230 - protein, 17 aa, Homo sapiens
  CDR3 for beta chain variable domain of TCR clone 188615 (TRBV11-2, TRBJ2-1)
CASSLYPPGVEYNEQFL

SEQ ID NO: 377231 - protein, 12 aa, Homo sapiens
  CDR3 for alpha chain variable domain of TCR clone 188616 (TRAV12-3, TRAJ17)
CAMTLTGNKLTF

SEQ ID NO: 377232 - protein, 14 aa, Homo sapiens
  CDR3 for beta chain variable domain of TCR clone 188616 (TRBV11-2, TRBJ2-7)
CASSTTGEGYEQYF

SEQ ID NO: 377233 - protein, 11 aa, Homo sapiens
  CDR3 for alpha chain variable domain of TCR clone 188617 (TRAV12-3, TRAJ20)
CAMSYDYKLSF

SEQ ID NO: 377234 - protein, 13 aa, Homo sapiens
  CDR3 for beta chain variable domain of TCR clone 188617 (TRBV19, TRBJ1-2)
CASSVPGQDGYTF

SEQ ID NO: 377235 - protein, 15 aa, Homo sapiens
  CDR3 for alpha chain variable domain of TCR clone 188618 (TRAV13-1, TRAJ44)
CAASRNTGTASKLTF

SEQ ID NO: 377236 - protein, 13 aa, Homo sapiens
  CDR3 for beta chain variable domain of TCR clone 188618 (TRBV7-9, TRBJ1-2)
CASSLKQNYGYTF

SEQ ID NO: 377237 - protein, 11 aa, Homo sapiens
  CDR3 for alpha chain variable domain of TCR clone 188619 (TRAV17, TRAJ9)
CGFTGGFKTIF

SEQ ID NO: 377238 - protein, 16 aa, Homo sapiens
  CDR3 for beta chain variable domain of TCR clone 188619 (TRBV11-2, TRBJ1-1)
CASSLRQGGEHSKAFF

SEQ ID NO: 377239 - protein, 18 aa, Homo sapiens
  CDR3 for alpha chain variable domain of TCR clone 188620 (TRAV21, TRAJ52)
CSVRPSPAGGTSYGKLPF

SEQ ID NO: 377240 - protein, 17 aa, Homo sapiens
  CDR3 for beta chain variable domain of TCR clone 188620 (TRBV13, TRBJ2-3)
CASSLSRVAGGRNTQYF

SEQ ID NO: 377241 - protein, 18 aa, Homo sapiens
  CDR3 for alpha chain variable domain of TCR clone 188621 (TRAV13-1, TRAJ52)
CAASKRSAGGTSYGKLTF

SEQ ID NO: 377242 - protein, 12 aa, Homo sapiens
  CDR3 for beta chain variable domain of TCR clone 188621 (TRBV7-2, TRBJ2-1)
CASSPQDIEQFF

SEQ ID NO: 377243 - protein, 15 aa, Homo sapiens
  CDR3 for alpha chain variable domain of TCR clone 188622 (TRAV20, TRAJ43)
CAVQAGKSSNNDMRF

SEQ ID NO: 377244 - protein, 13 aa, Homo sapiens
  CDR3 for beta chain variable domain of TCR clone 188622 (TRBV27, TRBJ1-1)
CASSLSIGSEAFF

SEQ ID NO: 377245 - protein, 17 aa, Homo sapiens
  CDR3 for alpha chain variable domain of TCR clone 188623 (TRAV16, TRAJ58)
CITVLSNGETSGSRLTF

SEQ ID NO: 377246 - protein, 17 aa, Homo sapiens
  CDR3 for beta chain variable domain of TCR clone 188623 (TRBV18, TRBJ2-1)
CASSKGLSGGGDNEQFF

SEQ ID NO: 377247 - protein, 16 aa, Homo sapiens
  CDR3 for alpha chain variable domain of TCR clone 188624 (TRAV13-2, TRAJ32)
CAENMNYGGATNKLIF

SEQ ID NO: 377248 - protein, 14 aa, Homo sapiens
  CDR3 for beta chain variable domain of TCR clone 188624 (TRBV15, TRBJ2-5)
GATSSTGDQETQYF

SEQ ID NO: 377249 - protein, 17 aa, Homo sapiens
  CDR3 for alpha chain variable domain of TCR clone 188625 (TRAV3, TRAJ6)
CAVRDDPRAGGSYIPTF

SEQ ID NO: 377250 - protein, 14 aa, Homo sapiens
  CDR3 for beta chain variable domain of TCR clone 188625 (TRBV7-3, TRBJ2-2)
CASSSGGYTGELFF

SEQ ID NO: 377251 - protein, 15 aa, Homo sapiens
  CDR3 for alpha chain variable domain of TCR clone 188626 (TRAV12-3, TRAJ6)
CAMSATTGGSYIPTF

SEQ ID NO: 377252 - protein, 12 aa, Homo sapiens
  CDR3 for beta chain variable domain of TCR clone 188626 (TRBV14, TRBJ2-5)
CASSQLKETQYF

SEQ ID NO: 377253 - protein, 18 aa, Homo sapiens
  CDR3 for alpha chain variable domain of TCR clone 188627 (TRAV12-3, TRAJ52)
CAMSRTNAGGTSYGKLTF

SEQ ID NO: 377254 - protein, 11 aa, Homo sapiens
  CDR3 for beta chain variable domain of TCR clone 188627 (TRBV4-1, TRBJ2-2)
CASEHTGELFF

SEQ ID NO: 377255 - protein, 14 aa, Homo sapiens
  CDR3 for alpha chain variable domain of TCR clone 188628 (TRAV1-2, TRAJ6)
CAVSLSGGSYITTF

SEQ ID NO: 377256 - protein, 17 aa, Homo sapiens
  CDR3 for beta chain variable domain of TCR clone 188628 (TRBV11-2, TRBJ2-1)
CASSLYPPGVEYNEQFF

SEQ ID NO: 377257 - protein, 17 aa, Homo sapiens
  CDR3 for alpha chain variable domain of TCR clone 188629 (TRAV26-1, TRAJ22)
CIVRVPSHSGYARQLTF

SEQ ID NO: 377258 - protein, 16 aa, Homo sapiens
  CDR3 for beta chain variable domain of TCR clone 188629 (TRBV28, TRBJ2-1)
CASRRSGRGVGNEQFF

SEQ ID NO: 377259 - protein, 13 aa, Homo sapiens
  CDR3 for alpha chain variable domain of TCR clone 188630 (TRAV17, TRAJ5)
CAPMDTGRRALTF

SEQ ID NO: 377260 - protein, 15 aa, Homo sapiens
  CDR3 for beta chain variable domain of TCR clone 188630 (TRBV19, TRBJ2-4)
CASRGPRRGENIQYF

SEQ ID NO: 377261 - protein, 15 aa, Homo sapiens
  CDR3 for alpha chain variable domain of TCR clone 188631 (TRAV26-1, TRAJ40)
CIDRYVTSGTYKYIF

SEQ ID NO: 377262 - protein, 11 aa, Homo sapiens
  CDR3 for beta chain variable domain of TCR clone 188631 (TRBV7-9, TRBJ2-1)
CASSSQNEQFF

SEQ ID NO: 377263 - protein, 12 aa, Homo sapiens
  CDR3 for alpha chain variable domain of TCR clone 188632 (TRAV35, TRAJ40)
CAGRAGTYTYIF

SEQ ID NO: 377264 - protein, 14 aa, Homo sapiens
  CDR3 for beta chain variable domain of TCR clone 188632 (TRBV7-2, TRBJ1-3)
CASSRGGTGNTIYF

SEQ ID NO: 377265 - protein, 14 aa, Homo sapiens
  CDR3 for alpha chain variable domain of TCR clone 188633 (TRAV4, TRAJ10)
CLVGDTGGGNKLTF

SEQ ID NO: 377266 - protein, 13 aa, Homo sapiens
  CDR3 for beta chain variable domain of TCR clone 188633 (TRBV7-3, TRBJ1-1)
CASSQDWGAEAVF

SEQ ID NO: 377267 - protein, 15 aa, Homo sapiens
  CDR3 for alpha chain variable domain of TCR clone 188634 (TRAV3, TRAJ22)
CAVRDRGGSARQLTF

SEQ ID NO: 377268 - protein, 14 aa, Homo sapiens
  CDR3 for beta chain variable domain of TCR clone 188634 (TRBV19, TRBJ2-1)
CASSRRGSINEQFF

SEQ ID NO: 377269 - protein, 12 aa, Homo sapiens
  CDR3 for alpha chain variable domain of TCR clone 188635 (TRAV13-2, TRAJ8)
SAPWLGFQKLVF

SEQ ID NO: 377270 - protein, 15 aa, Homo sapiens
  CDR3 for beta chain variable domain of TCR clone 188635 (TRBV12-4, TRBJ2-5)
CASSLSGAFQETQYF

SEQ ID NO: 377271 - protein, 14 aa, Homo sapiens
  CDR3 for alpha chain variable domain of TCR clone 188636 (TRAV12-2, TRAJ40)
SAVKIPSGTYKYIF

SEQ ID NO: 377272 - protein, 14 aa, Homo sapiens
  CDR3 for beta chain variable domain of TCR clone 188636 (TRBV7-9, TRBJ1-2)
CASSRQGANYGYTF

SEQ ID NO: 377273 - protein, 15 aa, Homo sapiens
  CDR3 for alpha chain variable domain of TCR clone 188637 (TRAV10, TRAJ6)
CVVSGGSGGSYIPTF

SEQ ID NO: 377274 - protein, 15 aa, Homo sapiens
  CDR3 for beta chain variable domain of TCR clone 188637 (TRBV6-5, TRBJ2-1)
CASRGDFDSYNAQFF

SEQ ID NO: 377275 - protein, 14 aa, Homo sapiens
  CDR3 for alpha chain variable domain of TCR clone 188638 (TRAV1-2, TRAJ16)
CAVNRFSDGQKLLF

SEQ ID NO: 377276 - protein, 12 aa, Homo sapiens
  CDR3 for beta chain variable domain of TCR clone 188638 (TRBV28, TRBJ2-7)
CASTGNHYEQYF

SEQ ID NO: 377277 - protein, 14 aa, Homo sapiens
  CDR3 for alpha chain variable domain of TCR clone 188639 (TRAV17, TRAJ11)
CATDTSRGYSTLTL

SEQ ID NO: 377278 - protein, 13 aa, Homo sapiens
  CDR3 for beta chain variable domain of TCR clone 188639 (TRBV19, TRBJ2-5)
CASRDSRRETQYF

SEQ ID NO: 377279 - protein, 14 aa, Homo sapiens
  CDR3 for alpha chain variable domain of TCR clone 188640 (TRAV8-3, TRAJ15)
CAVGRHQAGTALSF

SEQ ID NO: 377280 - protein, 15 aa, Homo sapiens
  CDR3 for beta chain variable domain of TCR clone 188640 (TRBV27, TRBJ2-1)
CASSNGGGSSNEQFF

SEQ ID NO: 377281 - protein, 10 aa, Homo sapiens
  CDR3 for alpha chain variable domain of TCR clone 188641 (TRAV8-4, TRAJ43)
CAVSADDMRF

SEQ ID NO: 377282 - protein, 16 aa, Homo sapiens
  CDR3 for beta chain variable domain of TCR clone 188641 (TRBV10-3, TRBJ2-7)
CAISADFADRPYEQYF

SEQ ID NO: 377283 - protein, 15 aa, Homo sapiens
  CDR3 for alpha chain variable domain of TCR clone 188642 (TRAV27, TRAJ38)
CVARRNAGNNRKLIL

SEQ ID NO: 377284 - protein, 13 aa, Homo sapiens
  CDR3 for beta chain variable domain of TCR clone 188642 (TRBV12-5, TRBJ2-3)
CASGDRQSDTQYF

SEQ ID NO: 377285 - protein, 13 aa, Homo sapiens
  CDR3 for alpha chain variable domain of TCR clone 188643 (TRAV8-3, TRAJ48)
CCGCNFGNEKLTF

SEQ ID NO: 377286 - protein, 12 aa, Homo sapiens
  CDR3 for beta chain variable domain of TCR clone 188643 (TRBV7-2, TRBJ2-5)
CACSQYQETQYF

SEQ ID NO: 377287 - protein, 12 aa, Homo sapiens
  CDR3 for alpha chain variable domain of TCR clone 188644 (TRAV13-1, TRAJ11)
CAGPSGYSTLTF

SEQ ID NO: 377288 - protein, 16 aa, Homo sapiens
  CDR3 for beta chain variable domain of TCR clone 188644 (TRBV4-3, TRBJ1-5)
CASSQAWGEANQPQHF

SEQ ID NO: 377289 - protein, 14 aa, Homo sapiens
  CDR3 for alpha chain variable domain of TCR clone 188645 (TRAV1-2, TRAJ8)
CAVREDTGFQKLVF

SEQ ID NO: 377290 - protein, 15 aa, Homo sapiens
  CDR3 for beta chain variable domain of TCR clone 188645 (TRBV10-2, TRBJ2-6)
CASSEQGIGANVLTF

SEQ ID NO: 377291 - protein, 19 aa, Homo sapiens
  CDR3 for alpha chain variable domain of TCR clone 188646 (TRAV25, TRAJ20)
TATQTTDVGILPHDYKLSF

SEQ ID NO: 377292 - protein, 17 aa, Homo sapiens
  CDR3 for beta chain variable domain of TCR clone 188646 (TRBV4-3, TRBJ2-1)
CASSQFSSGRASGEHFF

SEQ ID NO: 377293 - protein, 16 aa, Homo sapiens
  CDR3 for alpha chain variable domain of TCR clone 188647 (TRAV30, TRAJ24)
CGTEIVDADSWGKFQF

SEQ ID NO: 377294 - protein, 16 aa, Homo sapiens
  CDR3 for beta chain variable domain of TCR clone 188647 (TRBV4-1, TRBJ2-1)
CASSQEAGQGSGEQFF

SEQ ID NO: 377295 - protein, 14 aa, Homo sapiens
  CDR3 for alpha chain variable domain of TCR clone 188648 (TRAV12-3, TRAJ10)
SNLPLTGGGNKLTF

SEQ ID NO: 377296 - protein, 20 aa, Homo sapiens
  CDR3 for beta chain variable domain of TCR clone 188648 (TRBV28, TRBJ2-1)
CASTPIGRSPGLAGGNEQFF

SEQ ID NO: 377297 - protein, 10 aa, Homo sapiens
  CDR3 for alpha chain variable domain of TCR clone 188649 (TRAV1-2, TRAJ20)
CACNDYKLSF

SEQ ID NO: 377298 - protein, 19 aa, Homo sapiens
  CDR3 for beta chain variable domain of TCR clone 188649 (TRBV7-2, TRBJ2-3)
CASSFLSRNWGGGTDTQYF

SEQ ID NO: 377299 - protein, 14 aa, Homo sapiens
  CDR3 for alpha chain variable domain of TCR clone 188650 (TRAV2, TRAJ37)
CAVDFTSNTGKLIF

SEQ ID NO: 377300 - protein, 17 aa, Homo sapiens
  CDR3 for beta chain variable domain of TCR clone 188650 (TRBV19, TRBJ2-7)
CASSISFYDSYPYEQYV

SEQ ID NO: 377301 - protein, 16 aa, Homo sapiens
  CDR3 for alpha chain variable domain of TCR clone 188651 (TRAV30, TRAJ24)
CGTEIVDSDSWGKFKF

SEQ ID NO: 377302 - protein, 14 aa, Homo sapiens
  CDR3 for beta chain variable domain of TCR clone 188651 (TRBV12-5, TRBJ2-5)
CASGSRTHQETQYF

SEQ ID NO: 377303 - protein, 14 aa, Homo sapiens
  CDR3 for alpha chain variable domain of TCR clone 188652 (TRAV8-4, TRAJ8)
CAVSEEPGFQKLVF

SEQ ID NO: 377304 - protein, 12 aa, Homo sapiens
  CDR3 for beta chain variable domain of TCR clone 188652 (TRBV14, TRBJ1-1)
CASRPYETEAFF

SEQ ID NO: 377305 - protein, 15 aa, Homo sapiens
  CDR3 for alpha chain variable domain of TCR clone 188653 (TRAV8-3, TRAJ37)
CDVGARASNTGKLIF

SEQ ID NO: 377306 - protein, 15 aa, Homo sapiens
  CDR3 for beta chain variable domain of TCR clone 188653 (TRBV5-4, TRBJ2-3)
CASSLAGRVTDTQYF

SEQ ID NO: 377307 - protein, 11 aa, Homo sapiens
  CDR3 for alpha chain variable domain of TCR clone 188654 (TRAV12-2, TRAJ29)
CAVTLRSPLVF

SEQ ID NO: 377308 - protein, 16 aa, Homo sapiens
  CDR3 for beta chain variable domain of TCR clone 188654 (TRBV19, TRBJ1-5)
CASSMDRGGPRQPQHF

SEQ ID NO: 377309 - protein, 12 aa, Homo sapiens
  CDR3 for alpha chain variable domain of TCR clone 188655 (TRAV1-1, TRAJ8)
CAGGTGFQKLVF

SEQ ID NO: 377310 - protein, 11 aa, Homo sapiens
  CDR3 for beta chain variable domain of TCR clone 188655 (TRBV12-4, TRBJ2-3)
CASTATDTQYF

SEQ ID NO: 377311 - protein, 12 aa, Homo sapiens
  CDR3 for alpha chain variable domain of TCR clone 188656 (TRAV17, TRAJ57)
CATDGGSEKLVF

SEQ ID NO: 377312 - protein, 15 aa, Homo sapiens
  CDR3 for beta chain variable domain of TCR clone 188656 (TRBV6-6, TRBJ2-7)
CASSYSYGGSYEQYF

SEQ ID NO: 377313 - protein, 15 aa, Homo sapiens
  CDR3 for alpha chain variable domain of TCR clone 188657 (TRAV12-3, TRAJ5)
CAMSGLGTSRRALTF

SEQ ID NO: 377314 - protein, 15 aa, Homo sapiens
  CDR3 for beta chain variable domain of TCR clone 188657 (TRBV19, TRBJ1-1)
CASTSGQIQNTEAFF

SEQ ID NO: 377315 - protein, 11 aa, Homo sapiens
  CDR3 for alpha chain variable domain of TCR clone 188658 (TRAV13-2, TRAJ36)
WAETGANNLFF

SEQ ID NO: 377316 - protein, 13 aa, Homo sapiens
  CDR3 for beta chain variable domain of TCR clone 188658 (TRBV7-9, TRBJ2-4)
CATEGLAGNIQYF

SEQ ID NO: 377317 - protein, 13 aa, Homo sapiens
  CDR3 for alpha chain variable domain of TCR clone 188659 (TRAV2, TRAJ15)
CAVASQAGTALIF

SEQ ID NO: 377318 - protein, 14 aa, Homo sapiens
  CDR3 for beta chain variable domain of TCR clone 188659 (TRBV9, TRBJ2-7)
CASSVGVGSYEQYF

SEQ ID NO: 377319 - protein, 14 aa, Homo sapiens
  CDR3 for alpha chain variable domain of TCR clone 188660 (TRAV12-2, TRAJ40)
CAVKIPSGTYKYIF

SEQ ID NO: 377320 - protein, 14 aa, Homo sapiens
  CDR3 for beta chain variable domain of TCR clone 188660 (TRBV11-2, TRBJ2-1)
CASSLSGPYNEQFF

SEQ ID NO: 377321 - protein, 14 aa, Homo sapiens
  CDR3 for alpha chain variable domain of TCR clone 188661 (TRAV16, TRAJ32)
CALKSGGATNKLIF

SEQ ID NO: 377322 - protein, 13 aa, Homo sapiens
  CDR3 for beta chain variable domain of TCR clone 188661 (TRBV15, TRBJ1-6)
CATSGGLDSPLHF

SEQ ID NO: 377323 - protein, 15 aa, Homo sapiens
  CDR3 for alpha chain variable domain of TCR clone 188662 (TRAV4, TRAJ39)
CLVGPNNNAGNMPTF

SEQ ID NO: 377324 - protein, 15 aa, Homo sapiens
  CDR3 for beta chain variable domain of TCR clone 188662 (TRBV11-2, TRBJ1-3)
CASSLSPLVRDTIYF

SEQ ID NO: 377325 - protein, 13 aa, Homo sapiens
  CDR3 for alpha chain variable domain of TCR clone 188663 (TRAV12-2, TRAJ18)
CAVRGSTLRRLYF

SEQ ID NO: 377326 - protein, 18 aa, Homo sapiens
  CDR3 for beta chain variable domain of TCR clone 188663 (TRBV27, TRBJ2-3)
CASSLSGTSGRGTDTQYF

SEQ ID NO: 377327 - protein, 17 aa, Homo sapiens
  CDR3 for alpha chain variable domain of TCR clone 188664 (TRAV12-2, TRAJ53)
CAPLTDSQEGSNYKLTF

SEQ ID NO: 377328 - protein, 12 aa, Homo sapiens
  CDR3 for beta chain variable domain of TCR clone 188664 (TRBV11-2, TRBJ2-2)
CASSLGGGELFV

SEQ ID NO: 377329 - protein, 16 aa, Homo sapiens
  CDR3 for alpha chain variable domain of TCR clone 188665 (TRAV30, TRAJ24)
CGTEIVDADSWAKFQF

SEQ ID NO: 377330 - protein, 14 aa, Homo sapiens
  CDR3 for beta chain variable domain of TCR clone 188665 (TRBV7-9, TRBJ2-4)
CASSLAMGGNIQYF

SEQ ID NO: 377331 - protein, 13 aa, Homo sapiens
  CDR3 for alpha chain variable domain of TCR clone 188666 (TRAV30, TRAJ24)
CGTVTDSWGKLQF

SEQ ID NO: 377332 - protein, 15 aa, Homo sapiens
  CDR3 for beta chain variable domain of TCR clone 188666 (TRBV29-1, TRBJ2-1)
CSGRERKSSYNEQFF

SEQ ID NO: 377333 - protein, 13 aa, Homo sapiens
  CDR3 for alpha chain variable domain of TCR clone 188667 (TRAV8-6, TRAJ13)
WAVRDGGYQKVTF

SEQ ID NO: 377334 - protein, 15 aa, Homo sapiens
  CDR3 for beta chain variable domain of TCR clone 188667 (TRBV7-9, TRBJ2-2)
CASRPEGTSTGELFF

SEQ ID NO: 377335 - protein, 11 aa, Homo sapiens
  CDR3 for alpha chain variable domain of TCR clone 188668 (TRAV26-1, TRAJ27)
CIDPNAVKSTF

SEQ ID NO: 377336 - protein, 18 aa, Homo sapiens
  CDR3 for beta chain variable domain of TCR clone 188668 (TRBV7-9, TRBJ2-6)
CASSFPGAGISGANVLTF

SEQ ID NO: 377337 - protein, 14 aa, Homo sapiens
  CDR3 for alpha chain variable domain of TCR clone 188669 (TRAV12-2, TRAJ45)
SALPERGGADGLTF

SEQ ID NO: 377338 - protein, 14 aa, Homo sapiens
  CDR3 for beta chain variable domain of TCR clone 188669 (TRBV18, TRBJ1-5)
CASSPGNSNQPQHF

SEQ ID NO: 377339 - protein, 23 aa, Homo sapiens
  CDR3 for alpha chain variable domain of TCR clone 188670 (TRAV8-3, )
CAVVTTRIPDIQSPDPAVYQLRD

SEQ ID NO: 377340 - protein, 14 aa, Homo sapiens
  CDR3 for beta chain variable domain of TCR clone 188670 (TRBV11-2, TRBJ2-7)
CASRPSTTSYEQYF

SEQ ID NO: 377341 - protein, 13 aa, Homo sapiens
  CDR3 for alpha chain variable domain of TCR clone 188671 (TRAV35, TRAJ42)
CAGFPGSQGNRIF

SEQ ID NO: 377342 - protein, 14 aa, Homo sapiens
  CDR3 for beta chain variable domain of TCR clone 188671 (TRBV4-1, TRBJ2-2)
CASSQAVSTGELFF

SEQ ID NO: 377343 - protein, 13 aa, Homo sapiens
  CDR3 for alpha chain variable domain of TCR clone 188672 (TRAV8-4, TRAJ10)
CAAFTGGGTKLTF

SEQ ID NO: 377344 - protein, 12 aa, Homo sapiens
  CDR3 for beta chain variable domain of TCR clone 188672 (TRBV3-1, TRBJ2-1)
CASSQGSSGQFF

SEQ ID NO: 377345 - protein, 15 aa, Homo sapiens
  CDR3 for alpha chain variable domain of TCR clone 188673 (TRAV13-1, TRAJ52)
CALRTGGTSYGKLTF

SEQ ID NO: 377346 - protein, 15 aa, Homo sapiens
  CDR3 for beta chain variable domain of TCR clone 188673 (TRBV7-2, TRBJ2-1)
CASSSGLAGGNEQFF

SEQ ID NO: 377347 - protein, 15 aa, Homo sapiens
  CDR3 for alpha chain variable domain of TCR clone 188674 (TRAV21, TRAJ53)
CATLNSGGSNYKLKF

SEQ ID NO: 377348 - protein, 14 aa, Homo sapiens
  CDR3 for beta chain variable domain of TCR clone 188674 (TRBV9, TRBJ1-2)
CASSVSTRSYGYTF

SEQ ID NO: 377349 - protein, 14 aa, Homo sapiens
  CDR3 for alpha chain variable domain of TCR clone 188675 (TRAV1-2, TRAJ8)
CAVRDDTGFQKLVF

SEQ ID NO: 377350 - protein, 15 aa, Homo sapiens
  CDR3 for beta chain variable domain of TCR clone 188675 (TRBV20-1, TRBJ2-7)
CSARDRVSGMDEQYF

SEQ ID NO: 377351 - protein, 13 aa, Homo sapiens
  CDR3 for alpha chain variable domain of TCR clone 188676 (TRAV2, TRAJ21)
CAVPFYNFNEFYF

SEQ ID NO: 377352 - protein, 16 aa, Homo sapiens
  CDR3 for beta chain variable domain of TCR clone 188676 (TRBV29-1, TRBJ1-2)
CSVEANRDIANYGYTF

SEQ ID NO: 377353 - protein, 11 aa, Homo sapiens
  CDR3 for alpha chain variable domain of TCR clone 188677 (TRAV35, TRAJ30)
CVVERDDKIIF

SEQ ID NO: 377354 - protein, 14 aa, Homo sapiens
  CDR3 for beta chain variable domain of TCR clone 188677 (TRBV15, TRBJ2-5)
CATSGDRGQETQYL

SEQ ID NO: 377355 - protein, 12 aa, Homo sapiens
  CDR3 for alpha chain variable domain of TCR clone 188678 (TRAV8-6, TRAJ4)
CAVSDNPNKLIF

SEQ ID NO: 377356 - protein, 12 aa, Homo sapiens
  CDR3 for beta chain variable domain of TCR clone 188678 (TRBV7-8, TRBJ2-7)
CASSLGDREQYF

SEQ ID NO: 377357 - protein, 15 aa, Homo sapiens
  CDR3 for alpha chain variable domain of TCR clone 188679 (TRAV3, TRAJ5)
CAVRDLATGRRALTF

SEQ ID NO: 377358 - protein, 20 aa, Homo sapiens
  CDR3 for beta chain variable domain of TCR clone 188679 (TRBV7-8, TRBJ2-2)
CASSHLFPGPTIHITGELFF

SEQ ID NO: 377359 - protein, 11 aa, Homo sapiens
  CDR3 for alpha chain variable domain of TCR clone 188680 (TRAV23/DV6, )
CAATALIPDIQ

SEQ ID NO: 377360 - protein, 16 aa, Homo sapiens
  CDR3 for beta chain variable domain of TCR clone 188680 (TRBV10-3, TRBJ2-7)
CAISPRGQEQTYEQYF

SEQ ID NO: 377361 - protein, 16 aa, Homo sapiens
  CDR3 for alpha chain variable domain of TCR clone 188681 (TRAV3, TRAJ10)
CAVRDVRAGGGNKLTF

SEQ ID NO: 377362 - protein, 11 aa, Homo sapiens
  CDR3 for beta chain variable domain of TCR clone 188681 (TRBV29-1, TRBJ2-5)
CSEDRTGTQYF

SEQ ID NO: 377363 - protein, 13 aa, Homo sapiens
  CDR3 for alpha chain variable domain of TCR clone 188682 (TRAV38-1, TRAJ42)
CARWGGTQGNLIF

SEQ ID NO: 377364 - protein, 10 aa, Homo sapiens
  CDR3 for beta chain variable domain of TCR clone 188682 (TRBV2, TRBJ2-5)
CASSAATQYF

SEQ ID NO: 377365 - protein, 14 aa, Homo sapiens
  CDR3 for alpha chain variable domain of TCR clone 188683 (TRAV12-2, TRAJ40)
CAMKIPSGTYKYIF

SEQ ID NO: 377366 - protein, 14 aa, Homo sapiens
  CDR3 for beta chain variable domain of TCR clone 188683 (TRBV7-9, TRBJ1-2)
CASSRQGANYGYTF

SEQ ID NO: 377367 - protein, 12 aa, Homo sapiens
  CDR3 for alpha chain variable domain of TCR clone 188684 (TRAV20, TRAJ39)
CAVGNAGNMLTF

SEQ ID NO: 377368 - protein, 14 aa, Homo sapiens
  CDR3 for beta chain variable domain of TCR clone 188684 (TRBV25-1, TRBJ1-1)
CASTHLGGNTEAFF

SEQ ID NO: 377369 - protein, 12 aa, Homo sapiens
  CDR3 for alpha chain variable domain of TCR clone 188685 (TRAV9-2, TRAJ36)
CALKKGANNLFF

SEQ ID NO: 377370 - protein, 15 aa, Homo sapiens
  CDR3 for beta chain variable domain of TCR clone 188685 (TRBV12-4, TRBJ1-1)
CASSGRTGMNTEAFF

SEQ ID NO: 377371 - protein, 14 aa, Homo sapiens
  CDR3 for alpha chain variable domain of TCR clone 188686 (TRAV38-1, TRAJ45)
CASHSGGGADGLTF

SEQ ID NO: 377372 - protein, 16 aa, Homo sapiens
  CDR3 for beta chain variable domain of TCR clone 188686 (TRBV27, TRBJ2-2)
CASSFRGLVGTGELFF

SEQ ID NO: 377373 - protein, 12 aa, Homo sapiens
  CDR3 for alpha chain variable domain of TCR clone 188687 (TRAV38-2/DV8, TRAJ48)
CALLSRNEKLIF

SEQ ID NO: 377374 - protein, 15 aa, Homo sapiens
  CDR3 for beta chain variable domain of TCR clone 188687 (TRBV6-1, TRBJ2-1)
CASSELRGQYNEQFF

SEQ ID NO: 377375 - protein, 13 aa, Homo sapiens
  CDR3 for alpha chain variable domain of TCR clone 188688 (TRAV16, TRAJ22)
SAMSAGSARQLTF

SEQ ID NO: 377376 - protein, 18 aa, Homo sapiens
  CDR3 for beta chain variable domain of TCR clone 188688 (TRBV7-2, TRBJ2-3)
CASSLETSRGRKADTQYF

SEQ ID NO: 377377 - protein, 15 aa, Homo sapiens
  CDR3 for alpha chain variable domain of TCR clone 188689 (TRAV2, TRAJ8)
CAVEDLNTGFQKLVF

SEQ ID NO: 377378 - protein, 15 aa, Homo sapiens
  CDR3 for beta chain variable domain of TCR clone 188689 (TRBV20-1, TRBJ1-1)
CSASRGVTGNTEAFF

SEQ ID NO: 377379 - protein, 14 aa, Homo sapiens
  CDR3 for alpha chain variable domain of TCR clone 188690 (TRAV23/DV6, TRAJ22)
CAASVSGSARQLTF

SEQ ID NO: 377380 - protein, 13 aa, Homo sapiens
  CDR3 for beta chain variable domain of TCR clone 188690 (TRBV20-1, TRBJ2-7)
CSATHTSGYEQYF

SEQ ID NO: 377381 - protein, 14 aa, Homo sapiens
  CDR3 for alpha chain variable domain of TCR clone 188691 (TRAV17, TRAJ56)
CATVPAGANSKLTF

SEQ ID NO: 377382 - protein, 16 aa, Homo sapiens
  CDR3 for beta chain variable domain of TCR clone 188691 (TRBV20-1, TRBJ1-4)
CSAPGQGLFTNEKLFF

SEQ ID NO: 377383 - protein, 13 aa, Homo sapiens
  CDR3 for alpha chain variable domain of TCR clone 188692 (TRAV1-1, TRAJ5)
CAVRQAGRRALTF

SEQ ID NO: 377384 - protein, 11 aa, Homo sapiens
  CDR3 for beta chain variable domain of TCR clone 188692 (TRBV7-9, TRBJ2-3)
CASSYTDTQYF

SEQ ID NO: 377385 - protein, 16 aa, Homo sapiens
  CDR3 for alpha chain variable domain of TCR clone 188693 (TRAV8-3, TRAJ22)
CSVDLLGPGSARQLTF

SEQ ID NO: 377386 - protein, 14 aa, Homo sapiens
  CDR3 for beta chain variable domain of TCR clone 188693 (TRBV11-2, TRBJ2-7)
CASSLELEGYEQYF

SEQ ID NO: 377387 - protein, 23 aa, Homo sapiens
  CDR3 for alpha chain variable domain of TCR clone 188694 (TRAV8-3, )
CAVGASNDGNNHIQNPDPAVYQL

SEQ ID NO: 377388 - protein, 15 aa, Homo sapiens
  CDR3 for beta chain variable domain of TCR clone 188694 (TRBV11-3, TRBJ1-3)
CASSLFGPSGNTIYF

SEQ ID NO: 377389 - protein, 15 aa, Homo sapiens
  CDR3 for alpha chain variable domain of TCR clone 188695 (TRAV8-4, TRAJ3)
CAVTGENLVQQCFQD

SEQ ID NO: 377390 - protein, 16 aa, Homo sapiens
  CDR3 for beta chain variable domain of TCR clone 188695 (TRBV4-2, TRBJ1-1)
CASSQSGFGMNTEAFF

SEQ ID NO: 377391 - protein, 14 aa, Homo sapiens
  CDR3 for alpha chain variable domain of TCR clone 188696 (TRAV8-3, TRAJ13)
CAVGARGGYQRVTF

SEQ ID NO: 377392 - protein, 16 aa, Homo sapiens
  CDR3 for beta chain variable domain of TCR clone 188696 (TRBV27, TRBJ2-7)
CASSLGSGTGPYEQYF

SEQ ID NO: 377393 - protein, 12 aa, Homo sapiens
  CDR3 for alpha chain variable domain of TCR clone 188697 (TRAV1-1, TRAJ23)
CAVTNQGGKLIF

SEQ ID NO: 377394 - protein, 14 aa, Homo sapiens
  CDR3 for beta chain variable domain of TCR clone 188697 (TRBV7-2, TRBJ2-7)
CASRSQGAAYEQYF

SEQ ID NO: 377395 - protein, 11 aa, Homo sapiens
  CDR3 for alpha chain variable domain of TCR clone 188698 (TRAV17, TRAJ9)
FGFTGGFKTIF

SEQ ID NO: 377396 - protein, 14 aa, Homo sapiens
  CDR3 for beta chain variable domain of TCR clone 188698 (TRBV11-2, TRBJ2-5)
CASSRTGGIETQYF

SEQ ID NO: 377397 - protein, 13 aa, Homo sapiens
  CDR3 for alpha chain variable domain of TCR clone 188699 (TRAV29/DV5, TRAJ31)
CAASRNNNARPRF

SEQ ID NO: 377398 - protein, 14 aa, Homo sapiens
  CDR3 for beta chain variable domain of TCR clone 188699 (TRBV7-2, TRBJ2-7)
CASSPKTSFYEQYF

SEQ ID NO: 377399 - protein, 11 aa, Homo sapiens
  CDR3 for alpha chain variable domain of TCR clone 188700 (TRAV1-1, TRAJ9)
CAVAGGFKTIF

SEQ ID NO: 377400 - protein, 15 aa, Homo sapiens
  CDR3 for beta chain variable domain of TCR clone 188700 (TRBV18, TRBJ2-7)
CASSPASTPNYEQYF

SEQ ID NO: 377401 - protein, 13 aa, Homo sapiens
  CDR3 for alpha chain variable domain of TCR clone 188701 (TRAV30, TRAJ16)
CGTFGGDRQKLLF

SEQ ID NO: 377402 - protein, 13 aa, Homo sapiens
  CDR3 for beta chain variable domain of TCR clone 188701 (TRBV7-3, TRBJ2-1)
CASSLDSYNEQFF

SEQ ID NO: 377403 - protein, 13 aa, Homo sapiens
  CDR3 for alpha chain variable domain of TCR clone 188702 (TRAV12-2, TRAJ52)
CAVSGTSYGKLTF

SEQ ID NO: 377404 - protein, 17 aa, Homo sapiens
  CDR3 for beta chain variable domain of TCR clone 188702 (TRBV11-2, TRBJ2-1)
CASSLYSPGVEYNEQFF

SEQ ID NO: 377405 - protein, 12 aa, Homo sapiens
  CDR3 for alpha chain variable domain of TCR clone 188703 (TRAV23/DV6, TRAJ32)
CSMLGATNKLIF

SEQ ID NO: 377406 - protein, 17 aa, Homo sapiens
  CDR3 for beta chain variable domain of TCR clone 188703 (TRBV13, TRBJ2-3)
CASSSLGTSGLTDTQYF

SEQ ID NO: 377407 - protein, 16 aa, Homo sapiens
  CDR3 for alpha chain variable domain of TCR clone 188704 (TRAV14/DV4, TRAJ20)
CAMREGRSRDDYKLSF

SEQ ID NO: 377408 - protein, 17 aa, Homo sapiens
  CDR3 for beta chain variable domain of TCR clone 188704 (TRBV15, TRBJ1-4)
CATSRYGTGDPNEKLFF

SEQ ID NO: 377409 - protein, 16 aa, Homo sapiens
  CDR3 for alpha chain variable domain of TCR clone 188705 (TRAV23/DV6, TRAJ9)
CAASIGGNTGGLKTIF

SEQ ID NO: 377410 - protein, 12 aa, Homo sapiens
  CDR3 for beta chain variable domain of TCR clone 188705 (TRBV5-1, TRBJ2-3)
CASSLAADTQYF

SEQ ID NO: 377411 - protein, 13 aa, Homo sapiens
  CDR3 for alpha chain variable domain of TCR clone 188706 (TRAV23/DV6, TRAJ22)
CAPYSGSARQLTF

SEQ ID NO: 377412 - protein, 15 aa, Homo sapiens
  CDR3 for beta chain variable domain of TCR clone 188706 (TRBV11-2, TRBJ2-1)
CASSPRTSGTNEQFF

SEQ ID NO: 377413 - protein, 14 aa, Homo sapiens
  CDR3 for alpha chain variable domain of TCR clone 188707 (TRAV13-1, TRAJ35)
CAASKGGFGNVLHG

SEQ ID NO: 377414 - protein, 14 aa, Homo sapiens
  CDR3 for beta chain variable domain of TCR clone 188707 (TRBV4-1, TRBJ2-2)
CASSQAVNTGELFL

SEQ ID NO: 377415 - protein, 16 aa, Homo sapiens
  CDR3 for alpha chain variable domain of TCR clone 188708 (TRAV3, TRAJ18)
CAVRDGRGSTLGGLSF

SEQ ID NO: 377416 - protein, 15 aa, Homo sapiens
  CDR3 for beta chain variable domain of TCR clone 188708 (TRBV7-9, TRBJ1-6)
CASSSPGRGNSPLHF

SEQ ID NO: 377417 - protein, 12 aa, Homo sapiens
  CDR3 for alpha chain variable domain of TCR clone 188709 (TRAV29/DV5, TRAJ49)
CAATDTGNQFYF

SEQ ID NO: 377418 - protein, 13 aa, Homo sapiens
  CDR3 for beta chain variable domain of TCR clone 188709 (TRBV20-1, TRBJ2-2)
CSALSGGAGELFF

SEQ ID NO: 377419 - protein, 15 aa, Homo sapiens
  CDR3 for alpha chain variable domain of TCR clone 188710 (TRAV12-3, TRAJ6)
CAMSAASGGSYIPTF

SEQ ID NO: 377420 - protein, 13 aa, Homo sapiens
  CDR3 for beta chain variable domain of TCR clone 188710 (TRBV20-1, TRBJ1-2)
CSASTERIYGYFF

SEQ ID NO: 377421 - protein, 14 aa, Homo sapiens
  CDR3 for alpha chain variable domain of TCR clone 188711 (TRAV1-2, TRAJ16)
CAVNRFSDGQKLLF

SEQ ID NO: 377422 - protein, 18 aa, Homo sapiens
  CDR3 for beta chain variable domain of TCR clone 188711 (TRBV20-1, TRBJ2-6)
CSDETTPTHGSGANVLTF

SEQ ID NO: 377423 - protein, 12 aa, Homo sapiens
  CDR3 for alpha chain variable domain of TCR clone 188712 (TRAV13-1, TRAJ45)
VGSGGGADGLTF

SEQ ID NO: 377424 - protein, 13 aa, Homo sapiens
  CDR3 for beta chain variable domain of TCR clone 188712 (TRBV12-5, TRBJ2-3)
CASGDRQSDTQYF

SEQ ID NO: 377425 - protein, 14 aa, Homo sapiens
  CDR3 for alpha chain variable domain of TCR clone 188713 (TRAV35, TRAJ10)
CAGILTGGGNKLTF

SEQ ID NO: 377426 - protein, 14 aa, Homo sapiens
  CDR3 for beta chain variable domain of TCR clone 188713 (TRBV7-9, TRBJ2-7)
CASSLSAATYEQYF

SEQ ID NO: 377427 - protein, 16 aa, Homo sapiens
  CDR3 for alpha chain variable domain of TCR clone 188714 (TRAV21, TRAJ52)
CAVTNAGGTSYGKLTF

SEQ ID NO: 377428 - protein, 16 aa, Homo sapiens
  CDR3 for beta chain variable domain of TCR clone 188714 (TRBV2, TRBJ2-1)
CASSVGGALAYNEQFF

SEQ ID NO: 377429 - protein, 15 aa, Homo sapiens
  CDR3 for alpha chain variable domain of TCR clone 188715 (TRAV3, TRAJ11)
CAVRDRGSGYSTLTL

SEQ ID NO: 377430 - protein, 13 aa, Homo sapiens
  CDR3 for beta chain variable domain of TCR clone 188715 (TRBV7-9, TRBJ1-2)
CASSLKQNCGYTF

SEQ ID NO: 377431 - protein, 21 aa, Homo sapiens
  CDR3 for alpha chain variable domain of TCR clone 188716 (TRAV3, )
CAVRPTPDIQNPDPAVSQLRD

SEQ ID NO: 377432 - protein, 15 aa, Homo sapiens
  CDR3 for beta chain variable domain of TCR clone 188716 (TRBV11-3, TRBJ2-5)
CASSDTSGGIETQCF

SEQ ID NO: 377433 - protein, 14 aa, Homo sapiens
  CDR3 for alpha chain variable domain of TCR clone 188717 (TRAV12-1, TRAJ30)
CVVDIGGRDDKIIF

SEQ ID NO: 377434 - protein, 14 aa, Homo sapiens
  CDR3 for beta chain variable domain of TCR clone 188717 (TRBV7-6, TRBJ2-3)
CASSLGTVTDTQYF

SEQ ID NO: 377435 - protein, 13 aa, Homo sapiens
  CDR3 for alpha chain variable domain of TCR clone 188718 (TRAV17, TRAJ54)
CATAWGGAQKLVF

SEQ ID NO: 377436 - protein, 15 aa, Homo sapiens
  CDR3 for beta chain variable domain of TCR clone 188718 (TRBV4-3, TRBJ2-3)
CASSPSLLSTDTQYF

SEQ ID NO: 377437 - protein, 15 aa, Homo sapiens
  CDR3 for alpha chain variable domain of TCR clone 188719 (TRAV23/DV6, TRAJ33)
CAASNSGGGNYQLIW

SEQ ID NO: 377438 - protein, 14 aa, Homo sapiens
  CDR3 for beta chain variable domain of TCR clone 188719 (TRBV2, TRBJ2-1)
CASSEALIYNEQFF

SEQ ID NO: 377439 - protein, 12 aa, Homo sapiens
  CDR3 for alpha chain variable domain of TCR clone 188720 (TRAV16, TRAJ12)
CALEDSSYKLIF

SEQ ID NO: 377440 - protein, 17 aa, Homo sapiens
  CDR3 for beta chain variable domain of TCR clone 188720 (TRBV28, TRBJ2-5)
CASSRQGGLAGAETQYF

SEQ ID NO: 377441 - protein, 16 aa, Homo sapiens
  CDR3 for alpha chain variable domain of TCR clone 188721 (TRAV35, TRAJ28)
CAGQRYSGAGSYQLTF

SEQ ID NO: 377442 - protein, 13 aa, Homo sapiens
  CDR3 for beta chain variable domain of TCR clone 188721 (TRBV19, TRBJ1-2)
CASSQGQVYGYNF

SEQ ID NO: 377443 - protein, 13 aa, Homo sapiens
  CDR3 for alpha chain variable domain of TCR clone 188722 (TRAV16, TRAJ31)
CALSAHNNARLMV

SEQ ID NO: 377444 - protein, 14 aa, Homo sapiens
  CDR3 for beta chain variable domain of TCR clone 188722 (TRBV7-2, TRBJ2-5)
CVSSFTQGQETQYF

SEQ ID NO: 377445 - protein, 15 aa, Homo sapiens
  CDR3 for alpha chain variable domain of TCR clone 188723 (TRAV21, TRAJ38)
CAVRQDAGNNRTLIW

SEQ ID NO: 377446 - protein, 11 aa, Homo sapiens
  CDR3 for beta chain variable domain of TCR clone 188723 (TRBV12-4, TRBJ2-3)
CASTATDTQYF

SEQ ID NO: 377447 - protein, 15 aa, Homo sapiens
  CDR3 for alpha chain variable domain of TCR clone 188724 (TRAV3, TRAJ12)
CAVRDIRDSSYKLIF

SEQ ID NO: 377448 - protein, 16 aa, Homo sapiens
  CDR3 for beta chain variable domain of TCR clone 188724 (TRBV4-1, TRBJ2-7)
CASSQNDRDNSYEQYF

SEQ ID NO: 377449 - protein, 15 aa, Homo sapiens
  CDR3 for alpha chain variable domain of TCR clone 188725 (TRAV8-3, TRAJ40)
CAAPSLGSGTYKYIF

SEQ ID NO: 377450 - protein, 16 aa, Homo sapiens
  CDR3 for beta chain variable domain of TCR clone 188725 (TRBV7-3, TRBJ2-3)
CASSLRGYRPEDTKYF

SEQ ID NO: 377451 - protein, 14 aa, Homo sapiens
  CDR3 for alpha chain variable domain of TCR clone 188726 (TRAV12-3, TRAJ20)
CAMSARWGDYKLSF

SEQ ID NO: 377452 - protein, 14 aa, Homo sapiens
  CDR3 for beta chain variable domain of TCR clone 188726 (TRBV7-3, TRBJ2-3)
CASSPSARTDTQYF

SEQ ID NO: 377453 - protein, 16 aa, Homo sapiens
  CDR3 for alpha chain variable domain of TCR clone 188727 (TRAV13-2, TRAJ52)
CRESPTGGTSYGKLTF

SEQ ID NO: 377454 - protein, 14 aa, Homo sapiens
  CDR3 for beta chain variable domain of TCR clone 188727 (TRBV4-1, TRBJ2-2)
CASSQAVNTGELFF

SEQ ID NO: 377455 - protein, 17 aa, Homo sapiens
  CDR3 for alpha chain variable domain of TCR clone 188728 (TRAV13-1, TRAJ31)
CAARDRLMFGDGTQLVV

SEQ ID NO: 377456 - protein, 12 aa, Homo sapiens
  CDR3 for beta chain variable domain of TCR clone 188728 (TRBV7-9, TRBJ2-7)
CASSLEGYEQYF

SEQ ID NO: 377457 - protein, 12 aa, Homo sapiens
  CDR3 for alpha chain variable domain of TCR clone 188729 (TRAV12-2, TRAJ42)
CAVGGSQGNLIF

SEQ ID NO: 377458 - protein, 16 aa, Homo sapiens
  CDR3 for beta chain variable domain of TCR clone 188729 (TRBV7-3, TRBJ2-2)
CASSLKRGTLSVELFF

SEQ ID NO: 377459 - protein, 14 aa, Homo sapiens
  CDR3 for alpha chain variable domain of TCR clone 188730 (TRAV12-2, TRAJ15)
CAPHTGQAGTALIF

SEQ ID NO: 377460 - protein, 19 aa, Homo sapiens
  CDR3 for beta chain variable domain of TCR clone 188730 (TRBV28, TRBJ2-4)
CASSFQPGGPAHSKNIQYF

SEQ ID NO: 377461 - protein, 15 aa, Homo sapiens
  CDR3 for alpha chain variable domain of TCR clone 188731 (TRAV8-6, TRAJ10)
CAVRYQAGGGNKLTF

SEQ ID NO: 377462 - protein, 15 aa, Homo sapiens
  CDR3 for beta chain variable domain of TCR clone 188731 (TRBV3-1, TRBJ2-5)
CASSANLGGPETQYF

SEQ ID NO: 377463 - protein, 14 aa, Homo sapiens
  CDR3 for alpha chain variable domain of TCR clone 188732 (TRAV12-2, TRAJ13)
LAVKKTGGYQKVTF

SEQ ID NO: 377464 - protein, 15 aa, Homo sapiens
  CDR3 for beta chain variable domain of TCR clone 188732 (TRBV27, TRBJ2-1)
CASSNGGGSSNEQFF

SEQ ID NO: 377465 - protein, 14 aa, Homo sapiens
  CDR3 for alpha chain variable domain of TCR clone 188733 (TRAV27, TRAJ49)
CAGRPEGTGNQFYF

SEQ ID NO: 377466 - protein, 19 aa, Homo sapiens
  CDR3 for beta chain variable domain of TCR clone 188733 (TRBV7-2, TRBJ2-3)
CASSFLSRNWGGGTDTQYF

SEQ ID NO: 377467 - protein, 18 aa, Homo sapiens
  CDR3 for alpha chain variable domain of TCR clone 188734 (TRAV3, TRAJ42)
CAVRDPENYGGSQGNLIF

SEQ ID NO: 377468 - protein, 12 aa, Homo sapiens
  CDR3 for beta chain variable domain of TCR clone 188734 (TRBV7-2, TRBJ1-5)
CASSLWSQPQHF

SEQ ID NO: 377469 - protein, 10 aa, Homo sapiens
  CDR3 for alpha chain variable domain of TCR clone 188735 (TRAV17, TRAJ36)
CATVAGNLFF

SEQ ID NO: 377470 - protein, 16 aa, Homo sapiens
  CDR3 for beta chain variable domain of TCR clone 188735 (TRBV19, TRBJ2-1)
CASSKAGPSSYNEQFF

SEQ ID NO: 377471 - protein, 15 aa, Homo sapiens
  CDR3 for alpha chain variable domain of TCR clone 188736 (TRAV3, TRAJ5)
RAVRDLDTGRRALTF

SEQ ID NO: 377472 - protein, 13 aa, Homo sapiens
  CDR3 for beta chain variable domain of TCR clone 188736 (TRBV12-4, TRBJ1-1)
CASSPGTGFEAFF

SEQ ID NO: 377473 - protein, 12 aa, Homo sapiens
  CDR3 for alpha chain variable domain of TCR clone 188737 (TRAV26-1, TRAJ36)
CIVRVRADNLFF

SEQ ID NO: 377474 - protein, 14 aa, Homo sapiens
  CDR3 for beta chain variable domain of TCR clone 188737 (TRBV7-3, TRBJ1-1)
CASSLKGGNTEAFF

SEQ ID NO: 377475 - protein, 14 aa, Homo sapiens
  CDR3 for alpha chain variable domain of TCR clone 188738 (TRAV12-2, TRAJ33)
CAVKRARSNYQLIW

SEQ ID NO: 377476 - protein, 13 aa, Homo sapiens
  CDR3 for beta chain variable domain of TCR clone 188738 (TRBV27, TRBJ1-1)
CASSLSIGAEAFF

SEQ ID NO: 377477 - protein, 13 aa, Homo sapiens
  CDR3 for alpha chain variable domain of TCR clone 188739 (TRAV2, TRAJ40)
CAVVTSGTYKYIF

SEQ ID NO: 377478 - protein, 14 aa, Homo sapiens
  CDR3 for beta chain variable domain of TCR clone 188739 (TRBV19, TRBJ2-1)
CTSPTFVLGGEQFF

SEQ ID NO: 377479 - protein, 16 aa, Homo sapiens
  CDR3 for alpha chain variable domain of TCR clone 188740 (TRAV16, TRAJ57)
CAPYLITQGGSEKPVF

SEQ ID NO: 377480 - protein, 17 aa, Homo sapiens
  CDR3 for beta chain variable domain of TCR clone 188740 (TRBV24-1, TRBJ2-4)
CATSDAEARGVRNIQYF

SEQ ID NO: 377481 - protein, 15 aa, Homo sapiens
  CDR3 for alpha chain variable domain of TCR clone 188741 (TRAV38-2/DV8, TRAJ28)
CAYRTSGAGSYQLTF

SEQ ID NO: 377482 - protein, 13 aa, Homo sapiens
  CDR3 for beta chain variable domain of TCR clone 188741 (TRBV19, TRBJ2-2)
CASSIWSTGELFF

SEQ ID NO: 377483 - protein, 13 aa, Homo sapiens
  CDR3 for alpha chain variable domain of TCR clone 188742 (TRAV3, TRAJ8)
CAVRFTGFQKLVF

SEQ ID NO: 377484 - protein, 17 aa, Homo sapiens
  CDR3 for beta chain variable domain of TCR clone 188742 (TRBV20-1, TRBJ2-7)
CSASSPERRAATYEQYF

SEQ ID NO: 377485 - protein, 14 aa, Homo sapiens
  CDR3 for alpha chain variable domain of TCR clone 188743 (TRAV2, TRAJ9)
CAVEDRRVGFKTIF

SEQ ID NO: 377486 - protein, 14 aa, Homo sapiens
  CDR3 for beta chain variable domain of TCR clone 188743 (TRBV7-2, TRBJ2-7)
CASRSQGAAYEQYF

SEQ ID NO: 377487 - protein, 13 aa, Homo sapiens
  CDR3 for alpha chain variable domain of TCR clone 188744 (TRAV20, TRAJ20)
CAVWDFNDYKLSF

SEQ ID NO: 377488 - protein, 12 aa, Homo sapiens
  CDR3 for beta chain variable domain of TCR clone 188744 (TRBV9, TRBJ2-1)
CASSITYNEQFF

SEQ ID NO: 377489 - protein, 12 aa, Homo sapiens
  CDR3 for alpha chain variable domain of TCR clone 188745 (TRAV25, TRAJ38)
CAGTGNNRKLIW

SEQ ID NO: 377490 - protein, 14 aa, Homo sapiens
  CDR3 for beta chain variable domain of TCR clone 188745 (TRBV19, TRBJ1-5)
CASSKMKGPQPQHF

SEQ ID NO: 377491 - protein, 16 aa, Homo sapiens
  CDR3 for alpha chain variable domain of TCR clone 188746 (TRAV29/DV5, TRAJ54)
CAARAPLIQGAQKLVF

SEQ ID NO: 377492 - protein, 18 aa, Homo sapiens
  CDR3 for beta chain variable domain of TCR clone 188746 (TRBV4-1, TRBJ1-5)
CASSQDPRGQGLNQPQHF

SEQ ID NO: 377493 - protein, 12 aa, Homo sapiens
  CDR3 for alpha chain variable domain of TCR clone 188747 (TRAV35, TRAJ34)
CWAFYNTDKLIF

SEQ ID NO: 377494 - protein, 15 aa, Homo sapiens
  CDR3 for beta chain variable domain of TCR clone 188747 (TRBV6-1, TRBJ2-3)
CASSERGGITDTQYF

SEQ ID NO: 377495 - protein, 14 aa, Homo sapiens
  CDR3 for alpha chain variable domain of TCR clone 188748 (TRAV3, TRAJ36)
CAVRDGTGANNLFF

SEQ ID NO: 377496 - protein, 16 aa, Homo sapiens
  CDR3 for beta chain variable domain of TCR clone 188748 (TRBV20-1, TRBJ2-6)
CSAREGPGVGANGLTF

SEQ ID NO: 377497 - protein, 16 aa, Homo sapiens
  CDR3 for alpha chain variable domain of TCR clone 188749 (TRAV30, TRAJ24)
CGTEIVDADSWGKFQF

SEQ ID NO: 377498 - protein, 16 aa, Homo sapiens
  CDR3 for beta chain variable domain of TCR clone 188749 (TRBV6-5, TRBJ1-1)
CASSYSTGQGGTEAFF

SEQ ID NO: 377499 - protein, 12 aa, Homo sapiens
  CDR3 for alpha chain variable domain of TCR clone 188750 (TRAV12-3, TRAJ40)
CAMSSGTYKYIF

SEQ ID NO: 377500 - protein, 15 aa, Homo sapiens
  CDR3 for beta chain variable domain of TCR clone 188750 (TRBV7-3, TRBJ2-2)
CANSETGQGTGELFF

SEQ ID NO: 377501 - protein, 12 aa, Homo sapiens
  CDR3 for alpha chain variable domain of TCR clone 188751 (TRAV12-1, TRAJ34)
CVVAGATDQPIF

SEQ ID NO: 377502 - protein, 14 aa, Homo sapiens
  CDR3 for beta chain variable domain of TCR clone 188751 (TRBV7-2, TRBJ2-1)
CASSPGTFYNEQFF

SEQ ID NO: 377503 - protein, 11 aa, Homo sapiens
  CDR3 for alpha chain variable domain of TCR clone 188752 (TRAV3, TRAJ21)
CAVGNFNKFYF

SEQ ID NO: 377504 - protein, 16 aa, Homo sapiens
  CDR3 for beta chain variable domain of TCR clone 188752 (TRBV19, TRBJ2-1)
CASSMGGGSSYNEQFF

SEQ ID NO: 377505 - protein, 12 aa, Homo sapiens
  CDR3 for alpha chain variable domain of TCR clone 188753 (TRAV12-1, TRAJ40)
CVFYSGTYKYIF

SEQ ID NO: 377506 - protein, 18 aa, Homo sapiens
  CDR3 for beta chain variable domain of TCR clone 188753 (TRBV12-4, TRBJ2-2)
CASSLVAGTRGRTGELYF

SEQ ID NO: 377507 - protein, 12 aa, Homo sapiens
  CDR3 for alpha chain variable domain of TCR clone 188754 (TRAV16, TRAJ10)
CSRTGGGNKLTF

SEQ ID NO: 377508 - protein, 14 aa, Homo sapiens
  CDR3 for beta chain variable domain of TCR clone 188754 (TRBV11-2, TRBJ1-2)
CASSLGTANYGYTF

SEQ ID NO: 377509 - protein, 17 aa, Homo sapiens
  CDR3 for alpha chain variable domain of TCR clone 188755 (TRAV13-1, TRAJ52)
CAASSGAGGTSYGKLTF

SEQ ID NO: 377510 - protein, 15 aa, Homo sapiens
  CDR3 for beta chain variable domain of TCR clone 188755 (TRBV2, TRBJ2-1)
CASSELAGSYNEKFF

SEQ ID NO: 377511 - protein, 13 aa, Homo sapiens
  CDR3 for alpha chain variable domain of TCR clone 188756 (TRAV3, TRAJ35)
CGMRKSFGNVLHC

SEQ ID NO: 377512 - protein, 14 aa, Homo sapiens
  CDR3 for beta chain variable domain of TCR clone 188756 (TRBV6-5, TRBJ1-4)
CASSYLAAEEKLFF

SEQ ID NO: 377513 - protein, 14 aa, Homo sapiens
  CDR3 for alpha chain variable domain of TCR clone 188757 (TRAV1-2, TRAJ8)
CAVREDTGFQKPVF

SEQ ID NO: 377514 - protein, 12 aa, Homo sapiens
  CDR3 for beta chain variable domain of TCR clone 188757 (TRBV29-1, TRBJ2-3)
CSVTGGADTQYF

SEQ ID NO: 377515 - protein, 14 aa, Homo sapiens
  CDR3 for alpha chain variable domain of TCR clone 188758 (TRAV14/DV4, TRAJ41)
CARGGPDSGYALNF

SEQ ID NO: 377516 - protein, 15 aa, Homo sapiens
  CDR3 for beta chain variable domain of TCR clone 188758 (TRBV19, TRBJ2-1)
CASSIEATSYNEQFF

SEQ ID NO: 377517 - protein, 13 aa, Homo sapiens
  CDR3 for alpha chain variable domain of TCR clone 188759 (TRAV8-4, TRAJ48)
CAVSLFGNEKLTF

SEQ ID NO: 377518 - protein, 15 aa, Homo sapiens
  CDR3 for beta chain variable domain of TCR clone 188759 (TRBV20-1, TRBJ2-7)
CSAKKGLAESYEQYF

SEQ ID NO: 377519 - protein, 12 aa, Homo sapiens
  CDR3 for alpha chain variable domain of TCR clone 188760 (TRAV8-3, TRAJ20)
CAVGANDYKLSF

SEQ ID NO: 377520 - protein, 13 aa, Homo sapiens
  CDR3 for beta chain variable domain of TCR clone 188760 (TRBV19, TRBJ1-5)
CASSTGGEQPQHF

SEQ ID NO: 377521 - protein, 13 aa, Homo sapiens
  CDR3 for alpha chain variable domain of TCR clone 188761 (TRAV17, TRAJ11)
CATRNSGYSTLTF

SEQ ID NO: 377522 - protein, 14 aa, Homo sapiens
  CDR3 for beta chain variable domain of TCR clone 188761 (TRBV11-1, TRBJ2-7)
CASSFRQGSYEQYF

SEQ ID NO: 377523 - protein, 11 aa, Homo sapiens
  CDR3 for alpha chain variable domain of TCR clone 188762 (TRAV21, TRAJ39)
LLVNAGNMLTF

SEQ ID NO: 377524 - protein, 13 aa, Homo sapiens
  CDR3 for beta chain variable domain of TCR clone 188762 (TRBV19, TRBJ1-2)
CASSQGQVYGYTF

SEQ ID NO: 377525 - protein, 21 aa, Homo sapiens
  CDR3 for alpha chain variable domain of TCR clone 188763 (TRAV8-4, TRAJ47)
HLTKPSAHTSDAAERGNKLVF

SEQ ID NO: 377526 - protein, 14 aa, Homo sapiens
  CDR3 for beta chain variable domain of TCR clone 188763 (TRBV7-9, TRBJ2-1)
CASSPRDSLYEQFF

SEQ ID NO: 377527 - protein, 13 aa, Homo sapiens
  CDR3 for alpha chain variable domain of TCR clone 188764 (TRAV16, TRAJ5)
CALTNTGRGALTF

SEQ ID NO: 377528 - protein, 15 aa, Homo sapiens
  CDR3 for beta chain variable domain of TCR clone 188764 (TRBV11-2, TRBJ2-4)
CASSRPGTGINIQYF

SEQ ID NO: 377529 - protein, 15 aa, Homo sapiens
  CDR3 for alpha chain variable domain of TCR clone 188765 (TRAV29/DV5, TRAJ47)
CAARPTMEYGNKLVF

SEQ ID NO: 377530 - protein, 13 aa, Homo sapiens
  CDR3 for beta chain variable domain of TCR clone 188765 (TRBV20-1, TRBJ2-5)
CSAREGGKETQYF

SEQ ID NO: 377531 - protein, 15 aa, Homo sapiens
  CDR3 for alpha chain variable domain of TCR clone 188766 (TRAV26-1, TRAJ48)
CIARWSWFGNEKLTL

SEQ ID NO: 377532 - protein, 12 aa, Homo sapiens
  CDR3 for beta chain variable domain of TCR clone 188766 (TRBV19, TRBJ2-5)
CASSISEETQYF

SEQ ID NO: 377533 - protein, 20 aa, Homo sapiens
  CDR3 for alpha chain variable domain of TCR clone 188767 (TRAV21, TRAJ4)
AASQPGDSATLAGGYNTLIF

SEQ ID NO: 377534 - protein, 19 aa, Homo sapiens
  CDR3 for beta chain variable domain of TCR clone 188767 (TRBV18, TRBJ1-3)
CASSPLSRTGMSSGNTIYF

SEQ ID NO: 377535 - protein, 16 aa, Homo sapiens
  CDR3 for alpha chain variable domain of TCR clone 188768 (TRAV8-3, TRAJ18)
CAVALDRGSTLGRLYF

SEQ ID NO: 377536 - protein, 11 aa, Homo sapiens
  CDR3 for beta chain variable domain of TCR clone 188768 (TRBV29-1, TRBJ1-1)
RSVEILTEAFF

SEQ ID NO: 377537 - protein, 13 aa, Homo sapiens
  CDR3 for alpha chain variable domain of TCR clone 188769 (TRAV21, TRAJ27)
CAALNTNGGKSTF

SEQ ID NO: 377538 - protein, 14 aa, Homo sapiens
  CDR3 for beta chain variable domain of TCR clone 188769 (TRBV27, TRBJ1-1)
CASSLLSGLSEAFF

SEQ ID NO: 377539 - protein, 13 aa, Homo sapiens
  CDR3 for alpha chain variable domain of TCR clone 188770 (TRAV12-3, TRAJ9)
CAMSADGGFKTIF

SEQ ID NO: 377540 - protein, 16 aa, Homo sapiens
  CDR3 for beta chain variable domain of TCR clone 188770 (TRBV7-3, TRBJ2-2)
CASSLKRGTLSGELFF

SEQ ID NO: 377541 - protein, 13 aa, Homo sapiens
  CDR3 for alpha chain variable domain of TCR clone 188771 (TRAV30, TRAJ24)
CGTVTDSWGKLQF

SEQ ID NO: 377542 - protein, 14 aa, Homo sapiens
  CDR3 for beta chain variable domain of TCR clone 188771 (TRBV7-8, TRBJ2-3)
CASSFKSSTDTQYF

SEQ ID NO: 377543 - protein, 13 aa, Homo sapiens
  CDR3 for alpha chain variable domain of TCR clone 188772 (TRAV8-4, TRAJ48)
CAVSLFGNEKLTF

SEQ ID NO: 377544 - protein, 14 aa, Homo sapiens
  CDR3 for beta chain variable domain of TCR clone 188772 (TRBV19, TRBJ2-1)
CASKDPSSYNEQFF

SEQ ID NO: 377545 - protein, 14 aa, Homo sapiens
  CDR3 for alpha chain variable domain of TCR clone 188773 (TRAV26-1, TRAJ38)
CIADNAGNNRKLIW

SEQ ID NO: 377546 - protein, 13 aa, Homo sapiens
  CDR3 for beta chain variable domain of TCR clone 188773 (TRBV20-1, TRBJ1-1)
CRCRGGGNTEAFF

SEQ ID NO: 377547 - protein, 14 aa, Homo sapiens
  CDR3 for alpha chain variable domain of TCR clone 188774 (TRAV12-2, TRAJ44)
CAVNPAGTASKLTF

SEQ ID NO: 377548 - protein, 15 aa, Homo sapiens
  CDR3 for beta chain variable domain of TCR clone 188774 (TRBV7-2, TRBJ1-2)
CASSPRAGWNYGYTF

SEQ ID NO: 377549 - protein, 16 aa, Homo sapiens
  CDR3 for alpha chain variable domain of TCR clone 188775 (TRAV3, TRAJ37)
CAVRPHGSGNTGKLIF

SEQ ID NO: 377550 - protein, 14 aa, Homo sapiens
  CDR3 for beta chain variable domain of TCR clone 188775 (TRBV5-8, TRBJ2-3)
CASSLGQGTDTQYF

SEQ ID NO: 377551 - protein, 12 aa, Homo sapiens
  CDR3 for alpha chain variable domain of TCR clone 188776 (TRAV27, TRAJ9)
CAGESGGFKTIF

SEQ ID NO: 377552 - protein, 18 aa, Homo sapiens
  CDR3 for beta chain variable domain of TCR clone 188776 (TRBV10-2, TRBJ2-2)
CISAPVVHRQADAGELFF

SEQ ID NO: 377553 - protein, 14 aa, Homo sapiens
  CDR3 for alpha chain variable domain of TCR clone 188777 (TRAV26-1, TRAJ31)
CIALPPTNNARLMF

SEQ ID NO: 377554 - protein, 16 aa, Homo sapiens
  CDR3 for beta chain variable domain of TCR clone 188777 (TRBV10-2, TRBJ2-7)
CASSESPGSSGFEQYF

SEQ ID NO: 377555 - protein, 14 aa, Homo sapiens
  CDR3 for alpha chain variable domain of TCR clone 188778 (TRAV13-1, TRAJ12)
CAASNMDSSYKLIF

SEQ ID NO: 377556 - protein, 13 aa, Homo sapiens
  CDR3 for beta chain variable domain of TCR clone 188778 (TRBV2, TRBJ2-5)
CASSDGIQETQYF

SEQ ID NO: 377557 - protein, 14 aa, Homo sapiens
  CDR3 for alpha chain variable domain of TCR clone 188779 (TRAV12-2, TRAJ13)
CAVKQTGGYQKVIF

SEQ ID NO: 377558 - protein, 15 aa, Homo sapiens
  CDR3 for beta chain variable domain of TCR clone 188779 (TRBV27, TRBJ2-1)
CASSNGGGSSNEQFF

SEQ ID NO: 377559 - protein, 11 aa, Homo sapiens
  CDR3 for alpha chain variable domain of TCR clone 188780 (TRAV4, TRAJ23)
CLVAPGGKLIF

SEQ ID NO: 377560 - protein, 15 aa, Homo sapiens
  CDR3 for beta chain variable domain of TCR clone 188780 (TRBV2, TRBJ2-1)
CASDIGLAGEGEQFF

SEQ ID NO: 377561 - protein, 12 aa, Homo sapiens
  CDR3 for alpha chain variable domain of TCR clone 188781 (TRAV17, TRAJ57)
CATDGGSEKLVF

SEQ ID NO: 377562 - protein, 13 aa, Homo sapiens
  CDR3 for beta chain variable domain of TCR clone 188781 (TRBV12-4, TRBJ2-7)
CASSPTETYEQYF

SEQ ID NO: 377563 - protein, 13 aa, Homo sapiens
  CDR3 for alpha chain variable domain of TCR clone 188782 (TRAV17, TRAJ40)
CAGALGGTYKYIF

SEQ ID NO: 377564 - protein, 15 aa, Homo sapiens
  CDR3 for beta chain variable domain of TCR clone 188782 (TRBV7-9, TRBJ1-4)
CASSRTGGFNEKLFF

SEQ ID NO: 377565 - protein, 12 aa, Homo sapiens
  CDR3 for alpha chain variable domain of TCR clone 188783 (TRAV13-1, TRAJ43)
CAASIGDNDMRF

SEQ ID NO: 377566 - protein, 17 aa, Homo sapiens
  CDR3 for beta chain variable domain of TCR clone 188783 (TRBV11-3, TRBJ2-3)
CSSSPGSSGGRTDTQYF

SEQ ID NO: 377567 - protein, 13 aa, Homo sapiens
  CDR3 for alpha chain variable domain of TCR clone 188784 (TRAV12-3, TRAJ33)
CAMSVNSNYQLIW

SEQ ID NO: 377568 - protein, 17 aa, Homo sapiens
  CDR3 for beta chain variable domain of TCR clone 188784 (TRBV6-1, TRBJ1-5)
CASSEAEFIRARQPQHF

SEQ ID NO: 377569 - protein, 14 aa, Homo sapiens
  CDR3 for alpha chain variable domain of TCR clone 188785 (TRAV12-2, TRAJ13)
CAVKTTGGYQTVTF

SEQ ID NO: 377570 - protein, 15 aa, Homo sapiens
  CDR3 for beta chain variable domain of TCR clone 188785 (TRBV27, TRBJ2-1)
CASSNGGGSSNEQFF

SEQ ID NO: 377571 - protein, 14 aa, Homo sapiens
  CDR3 for alpha chain variable domain of TCR clone 188786 (TRAV12-3, TRAJ57)
CAMSAWGGSEKLVF

SEQ ID NO: 377572 - protein, 14 aa, Homo sapiens
  CDR3 for beta chain variable domain of TCR clone 188786 (TRBV18, TRBJ2-5)
CASSPGVAQETQYF

SEQ ID NO: 377573 - protein, 14 aa, Homo sapiens
  CDR3 for alpha chain variable domain of TCR clone 188787 (TRAV1-2, TRAJ8)
CAVREDTGFQKLVF

SEQ ID NO: 377574 - protein, 15 aa, Homo sapiens
  CDR3 for beta chain variable domain of TCR clone 188787 (TRBV5-5, TRBJ1-5)
RASSSTPGSNQPQHF

SEQ ID NO: 377575 - protein, 17 aa, Homo sapiens
  CDR3 for alpha chain variable domain of TCR clone 188788 (TRAV3, TRAJ38)
CAVRDCLNAGNNRKLIW

SEQ ID NO: 377576 - protein, 14 aa, Homo sapiens
  CDR3 for beta chain variable domain of TCR clone 188788 (TRBV5-5, TRBJ1-5)
CASSGQGVDLPQHF

SEQ ID NO: 377577 - protein, 13 aa, Homo sapiens
  CDR3 for alpha chain variable domain of TCR clone 188789 (TRAV35, TRAJ43)
RAGYPYNNNDMRF

SEQ ID NO: 377578 - protein, 15 aa, Homo sapiens
  CDR3 for beta chain variable domain of TCR clone 188789 (TRBV25-1, TRBJ1-4)
CASSKRIATNEKLFF

SEQ ID NO: 377579 - protein, 16 aa, Homo sapiens
  CDR3 for alpha chain variable domain of TCR clone 188790 (TRAV12-3, TRAJ53)
CAMSPGSGGSNYKLTF

SEQ ID NO: 377580 - protein, 16 aa, Homo sapiens
  CDR3 for beta chain variable domain of TCR clone 188790 (TRBV28, TRBJ2-6)
CASSNRRGSGANVLTF

SEQ ID NO: 377581 - protein, 12 aa, Homo sapiens
  CDR3 for alpha chain variable domain of TCR clone 188791 (TRAV13-1, TRAJ21)
CAAKEGFNKFYF

SEQ ID NO: 377582 - protein, 14 aa, Homo sapiens
  CDR3 for beta chain variable domain of TCR clone 188791 (TRBV23-1, TRBJ2-5)
CARSFLRSQETQYF

SEQ ID NO: 377583 - protein, 14 aa, Homo sapiens
  CDR3 for alpha chain variable domain of TCR clone 188792 (TRAV26-1, TRAJ38)
CIADNAVNNRKLIW

SEQ ID NO: 377584 - protein, 15 aa, Homo sapiens
  CDR3 for beta chain variable domain of TCR clone 188792 (TRBV27, TRBJ2-7)
CASSTAGTGSYEQYF

SEQ ID NO: 377585 - protein, 14 aa, Homo sapiens
  CDR3 for alpha chain variable domain of TCR clone 188793 (TRAV12-3, TRAJ58)
CAMSTETSGSRLTF

SEQ ID NO: 377586 - protein, 15 aa, Homo sapiens
  CDR3 for beta chain variable domain of TCR clone 188793 (TRBV7-9, TRBJ1-5)
CASSQGHQPNQPQHF

SEQ ID NO: 377587 - protein, 14 aa, Homo sapiens
  CDR3 for alpha chain variable domain of TCR clone 188794 (TRAV17, TRAJ11)
CATDTSRGYSTLTF

SEQ ID NO: 377588 - protein, 13 aa, Homo sapiens
  CDR3 for beta chain variable domain of TCR clone 188794 (TRBV7-9, TRBJ1-2)
CASSLKQNYGYTF

SEQ ID NO: 377589 - protein, 17 aa, Homo sapiens
  CDR3 for alpha chain variable domain of TCR clone 188795 (TRAV3, TRAJ6)
CAVRDGPRAGGSYIPTL

SEQ ID NO: 377590 - protein, 13 aa, Homo sapiens
  CDR3 for beta chain variable domain of TCR clone 188795 (TRBV20-1, TRBJ1-6)
CSAPVGVGSPLHF

SEQ ID NO: 377591 - protein, 14 aa, Homo sapiens
  CDR3 for alpha chain variable domain of TCR clone 188796 (TRAV8-4, TRAJ17)
CAVRDQAAGNKLTF

SEQ ID NO: 377592 - protein, 16 aa, Homo sapiens
  CDR3 for beta chain variable domain of TCR clone 188796 (TRBV7-3, TRBJ2-1)
CASSKPLAGGYNEQFF

SEQ ID NO: 377593 - protein, 16 aa, Homo sapiens
  CDR3 for alpha chain variable domain of TCR clone 188797 (TRAV2, TRAJ4)
CAVEDRLSGGYNKLSC

SEQ ID NO: 377594 - protein, 13 aa, Homo sapiens
  CDR3 for beta chain variable domain of TCR clone 188797 (TRBV7-7, TRBJ2-5)
CARSRSGQETQYF

SEQ ID NO: 377595 - protein, 15 aa, Homo sapiens
  CDR3 for alpha chain variable domain of TCR clone 188798 (TRAV26-2, TRAJ54)
CILRDVGQGAQKLVF

SEQ ID NO: 377596 - protein, 14 aa, Homo sapiens
  CDR3 for beta chain variable domain of TCR clone 188798 (TRBV7-9, TRBJ2-7)
CASSPRDRVYEQYF

SEQ ID NO: 377597 - protein, 14 aa, Homo sapiens
  CDR3 for alpha chain variable domain of TCR clone 188799 (TRAV3, TRAJ21)
CAVRDKYNFNNFYF

SEQ ID NO: 377598 - protein, 14 aa, Homo sapiens
  CDR3 for beta chain variable domain of TCR clone 188799 (TRBV27, TRBJ2-3)
CASRDSPITDTQYF

SEQ ID NO: 377599 - protein, 15 aa, Homo sapiens
  CDR3 for alpha chain variable domain of TCR clone 188800 (TRAV34, TRAJ38)
CGADFTPGNNRKLIW

SEQ ID NO: 377600 - protein, 15 aa, Homo sapiens
  CDR3 for beta chain variable domain of TCR clone 188800 (TRBV7-9, TRBJ2-7)
CASSLALAEAYEQYF

SEQ ID NO: 377601 - protein, 14 aa, Homo sapiens
  CDR3 for alpha chain variable domain of TCR clone 188801 (TRAV2, TRAJ37)
CAVDFTSNTGKLIF

SEQ ID NO: 377602 - protein, 15 aa, Homo sapiens
  CDR3 for beta chain variable domain of TCR clone 188801 (TRBV20-1, TRBJ2-7)
CSARVPAAYFYEQYF

SEQ ID NO: 377603 - protein, 22 aa, Homo sapiens
  CDR3 for alpha chain variable domain of TCR clone 188802 (TRAV4, TRAJ37)
CLVGDGRLWEHRQTNLWARDNF

SEQ ID NO: 377604 - protein, 15 aa, Homo sapiens
  CDR3 for beta chain variable domain of TCR clone 188802 (TRBV6-6, TRBJ1-1)
CASSYASGAGTEAFF

SEQ ID NO: 377605 - protein, 16 aa, Homo sapiens
  CDR3 for alpha chain variable domain of TCR clone 188803 (TRAV3, TRAJ21)
CAVRDIERGNFNKFYF

SEQ ID NO: 377606 - protein, 13 aa, Homo sapiens
  CDR3 for beta chain variable domain of TCR clone 188803 (TRBV7-7, TRBJ2-3)
CASSLSRADTQYF

SEQ ID NO: 377607 - protein, 12 aa, Homo sapiens
  CDR3 for alpha chain variable domain of TCR clone 188804 (TRAV1-2, TRAJ29)
CAVPSGNTPLVF

SEQ ID NO: 377608 - protein, 16 aa, Homo sapiens
  CDR3 for beta chain variable domain of TCR clone 188804 (TRBV4-3, TRBJ2-2)
CASSHLQGSGTGELFF

SEQ ID NO: 377609 - protein, 12 aa, Homo sapiens
  CDR3 for alpha chain variable domain of TCR clone 188805 (TRAV25, TRAJ11)
CAGYSGYSTITF

SEQ ID NO: 377610 - protein, 13 aa, Homo sapiens
  CDR3 for beta chain variable domain of TCR clone 188805 (TRBV7-9, TRBJ1-2)
CASSLKQNYGYTF

SEQ ID NO: 377611 - protein, 16 aa, Homo sapiens
  CDR3 for alpha chain variable domain of TCR clone 188806 (TRAV8-3, TRAJ13)
CAVGGYHSGGYQKVTF

SEQ ID NO: 377612 - protein, 14 aa, Homo sapiens
  CDR3 for beta chain variable domain of TCR clone 188806 (TRBV18, TRBJ2-5)
CASSPRASSETQYF

SEQ ID NO: 377613 - protein, 15 aa, Homo sapiens
  CDR3 for alpha chain variable domain of TCR clone 188807 (TRAV12-1, TRAJ45)
CVVLRGGGGADGLTF

SEQ ID NO: 377614 - protein, 14 aa, Homo sapiens
  CDR3 for beta chain variable domain of TCR clone 188807 (TRBV11-2, TRBJ2-5)
CASSRTGGIETQYF

SEQ ID NO: 377615 - protein, 18 aa, Homo sapiens
  CDR3 for alpha chain variable domain of TCR clone 188808 (TRAV26-1, TRAJ22)
CIVRVSFWFCKATDLCIW

SEQ ID NO: 377616 - protein, 13 aa, Homo sapiens
  CDR3 for beta chain variable domain of TCR clone 188808 (TRBV7-9, TRBJ1-2)
CASSLKQNYGYTF

SEQ ID NO: 377617 - protein, 13 aa, Homo sapiens
  CDR3 for alpha chain variable domain of TCR clone 188809 (TRAV3, TRAJ21)
CAVREPDFNKFYF

SEQ ID NO: 377618 - protein, 16 aa, Homo sapiens
  CDR3 for beta chain variable domain of TCR clone 188809 (TRBV7-2, TRBJ2-6)
CASSLAVRSGANVLTF

SEQ ID NO: 377619 - protein, 11 aa, Homo sapiens
  CDR3 for alpha chain variable domain of TCR clone 188810 (TRAV2, TRAJ33)
CAVDSNYQLIW

SEQ ID NO: 377620 - protein, 16 aa, Homo sapiens
  CDR3 for beta chain variable domain of TCR clone 188810 (TRBV12-5, TRBJ2-5)
CASGPRTSGNQETQYL

SEQ ID NO: 377621 - protein, 13 aa, Homo sapiens
  CDR3 for alpha chain variable domain of TCR clone 188811 (TRAV12-3, TRAJ9)
CAMRNTGGFKTIF

SEQ ID NO: 377622 - protein, 15 aa, Homo sapiens
  CDR3 for beta chain variable domain of TCR clone 188811 (TRBV5-1, TRBJ2-1)
CASSPPRAPYNEQFF

SEQ ID NO: 377623 - protein, 12 aa, Homo sapiens
  CDR3 for alpha chain variable domain of TCR clone 188812 (TRAV13-1, TRAJ20)
SVQQVNDYKLSF

SEQ ID NO: 377624 - protein, 14 aa, Homo sapiens
  CDR3 for beta chain variable domain of TCR clone 188812 (TRBV7-7, TRBJ2-3)
CASSLTGGTDTQYF

SEQ ID NO: 377625 - protein, 11 aa, Homo sapiens
  CDR3 for alpha chain variable domain of TCR clone 188813 (TRAV35, TRAJ34)
CWARNTDKLIF

SEQ ID NO: 377626 - protein, 15 aa, Homo sapiens
  CDR3 for beta chain variable domain of TCR clone 188813 (TRBV6-1, TRBJ2-1)
CASSEEGPSYNEQFF

SEQ ID NO: 377627 - protein, 15 aa, Homo sapiens
  CDR3 for alpha chain variable domain of TCR clone 188814 (TRAV16, TRAJ23)
CALSGPYNQGGKLIF

SEQ ID NO: 377628 - protein, 15 aa, Homo sapiens
  CDR3 for beta chain variable domain of TCR clone 188814 (TRBV28, TRBJ2-1)
CASSIIAGGRSEQFF

SEQ ID NO: 377629 - protein, 15 aa, Homo sapiens
  CDR3 for alpha chain variable domain of TCR clone 188815 (TRAV3, TRAJ22)
CAVRDRGGSARQLTF

SEQ ID NO: 377630 - protein, 16 aa, Homo sapiens
  CDR3 for beta chain variable domain of TCR clone 188815 (TRBV5-4, TRBJ2-3)
WASQQPGAGGADTQYF

SEQ ID NO: 377631 - protein, 13 aa, Homo sapiens
  CDR3 for alpha chain variable domain of TCR clone 188816 (TRAV23/DV6, TRAJ47)
CAASIRNGIWKQT

SEQ ID NO: 377632 - protein, 16 aa, Homo sapiens
  CDR3 for beta chain variable domain of TCR clone 188816 (TRBV7-3, TRBJ2-1)
CASSKPLAGGYNEQFF

SEQ ID NO: 377633 - protein, 11 aa, Homo sapiens
  CDR3 for alpha chain variable domain of TCR clone 188817 (TRAV1-1, TRAJ23)
CAVRQGGKLIF

SEQ ID NO: 377634 - protein, 16 aa, Homo sapiens
  CDR3 for beta chain variable domain of TCR clone 188817 (TRBV28, TRBJ2-7)
CASSCHLSGLSYEQYF

SEQ ID NO: 377635 - protein, 16 aa, Homo sapiens
  CDR3 for alpha chain variable domain of TCR clone 188818 (TRAV3, TRAJ6)
CAVRDGMGRRKLHTYL

SEQ ID NO: 377636 - protein, 15 aa, Homo sapiens
  CDR3 for beta chain variable domain of TCR clone 188818 (TRBV9, TRBJ2-1)
CASSLAGSSYNEQFF

SEQ ID NO: 377637 - protein, 11 aa, Homo sapiens
  CDR3 for alpha chain variable domain of TCR clone 188819 (TRAV21, TRAJ34)
CAVNNTDKLIF

SEQ ID NO: 377638 - protein, 16 aa, Homo sapiens
  CDR3 for beta chain variable domain of TCR clone 188819 (TRBV18, TRBJ1-1)
CASSPGVGGRGGEAFF

SEQ ID NO: 377639 - protein, 15 aa, Homo sapiens
  CDR3 for alpha chain variable domain of TCR clone 188820 (TRAV2, TRAJ21)
CAVDFTTSTNFTLDL

SEQ ID NO: 377640 - protein, 13 aa, Homo sapiens
  CDR3 for beta chain variable domain of TCR clone 188820 (TRBV24-1, TRBJ2-2)
CATSDWSTGELFF

SEQ ID NO: 377641 - protein, 16 aa, Homo sapiens
  CDR3 for alpha chain variable domain of TCR clone 188821 (TRAV8-3, TRAJ8)
CAVPRDGNTGFQKLVF

SEQ ID NO: 377642 - protein, 14 aa, Homo sapiens
  CDR3 for beta chain variable domain of TCR clone 188821 (TRBV28, TRBJ1-1)
CASSESGRGTEALF

SEQ ID NO: 377643 - protein, 17 aa, Homo sapiens
  CDR3 for alpha chain variable domain of TCR clone 188822 (TRAV3, TRAJ6)
CAVRDGPRAGGSFIPTF

SEQ ID NO: 377644 - protein, 14 aa, Homo sapiens
  CDR3 for beta chain variable domain of TCR clone 188822 (TRBV11-2, TRBJ2-3)
CASSRLARTDTQYF

SEQ ID NO: 377645 - protein, 16 aa, Homo sapiens
  CDR3 for alpha chain variable domain of TCR clone 188823 (TRAV8-3, TRAJ10)
CAVGPGVTGGGNKLTF

SEQ ID NO: 377646 - protein, 12 aa, Homo sapiens
  CDR3 for beta chain variable domain of TCR clone 188823 (TRBV18, TRBJ1-1)
CQLTGPSGEAFF

SEQ ID NO: 377647 - protein, 14 aa, Homo sapiens
  CDR3 for alpha chain variable domain of TCR clone 188824 (TRAV8-2, TRAJ11)
CVVSEKSGYSTLTF

SEQ ID NO: 377648 - protein, 15 aa, Homo sapiens
  CDR3 for beta chain variable domain of TCR clone 188824 (TRBV27, TRBJ2-5)
CASSLIPSGGETQYF

SEQ ID NO: 377649 - protein, 15 aa, Homo sapiens
  CDR3 for alpha chain variable domain of TCR clone 188825 (TRAV27, TRAJ38)
CAARRNAGNNRKLIW

SEQ ID NO: 377650 - protein, 17 aa, Homo sapiens
  CDR3 for beta chain variable domain of TCR clone 188825 (TRBV20-1, TRBJ2-1)
CSAPPRLAGTRHNEQFF

SEQ ID NO: 377651 - protein, 14 aa, Homo sapiens
  CDR3 for alpha chain variable domain of TCR clone 188826 (TRAV12-2, TRAJ6)
CASKWGGGSYIPTF

SEQ ID NO: 377652 - protein, 15 aa, Homo sapiens
  CDR3 for beta chain variable domain of TCR clone 188826 (TRBV18, TRBJ2-1)
CASSPPSASYNEQFF

SEQ ID NO: 377653 - protein, 13 aa, Homo sapiens
  CDR3 for alpha chain variable domain of TCR clone 188827 (TRAV20, TRAJ31)
CAVQAWNNARLMF

SEQ ID NO: 377654 - protein, 12 aa, Homo sapiens
  CDR3 for beta chain variable domain of TCR clone 188827 (TRBV11-2, TRBJ2-2)
CASSLGGWELFF

SEQ ID NO: 377655 - protein, 14 aa, Homo sapiens
  CDR3 for alpha chain variable domain of TCR clone 188828 (TRAV13-1, TRAJ6)
CAAIGPGGSYIPTF

SEQ ID NO: 377656 - protein, 15 aa, Homo sapiens
  CDR3 for beta chain variable domain of TCR clone 188828 (TRBV27, TRBJ2-1)
CASSPLAGGANEQFF

SEQ ID NO: 377657 - protein, 13 aa, Homo sapiens
  CDR3 for alpha chain variable domain of TCR clone 188829 (TRAV8-3, TRAJ28)
CAVGAVGSYRLTF

SEQ ID NO: 377658 - protein, 13 aa, Homo sapiens
  CDR3 for beta chain variable domain of TCR clone 188829 (TRBV29-1, TRBJ2-1)
CSVEGGRVNEQFF

SEQ ID NO: 377659 - protein, 13 aa, Homo sapiens
  CDR3 for alpha chain variable domain of TCR clone 188830 (TRAV38-2/DV8, TRAJ34)
CAYRTWNTDKLIF

SEQ ID NO: 377660 - protein, 14 aa, Homo sapiens
  CDR3 for beta chain variable domain of TCR clone 188830 (TRBV4-2, TRBJ2-1)
CASGLDRAYNEQFF

SEQ ID NO: 377661 - protein, 16 aa, Homo sapiens
  CDR3 for alpha chain variable domain of TCR clone 188831 (TRAV29/DV5, TRAJ54)
CAARAPLIQGAQKLVF

SEQ ID NO: 377662 - protein, 17 aa, Homo sapiens
  CDR3 for beta chain variable domain of TCR clone 188831 (TRBV20-1, TRBJ2-1)
CSARDPLAGVWDNEQFF

SEQ ID NO: 377663 - protein, 16 aa, Homo sapiens
  CDR3 for alpha chain variable domain of TCR clone 188832 (TRAV30, TRAJ24)
CGTEIVDADSWGKFQF

SEQ ID NO: 377664 - protein, 16 aa, Homo sapiens
  CDR3 for beta chain variable domain of TCR clone 188832 (TRBV4-2, TRBJ2-1)
CASSQGEGRTVNEQFF

SEQ ID NO: 377665 - protein, 14 aa, Homo sapiens
  CDR3 for alpha chain variable domain of TCR clone 188833 (TRAV17, TRAJ4)
CATAPLGGYNKLIF

SEQ ID NO: 377666 - protein, 15 aa, Homo sapiens
  CDR3 for beta chain variable domain of TCR clone 188833 (TRBV7-2, TRBJ2-1)
CASSSGLAGGNEQFF

SEQ ID NO: 377667 - protein, 15 aa, Homo sapiens
  CDR3 for alpha chain variable domain of TCR clone 188834 (TRAV21, TRAJ53)
CATLNSGGSNYKLTF

SEQ ID NO: 377668 - protein, 15 aa, Homo sapiens
  CDR3 for beta chain variable domain of TCR clone 188834 (TRBV19, TRBJ2-7)
CASRPTPGLSIEQYF

SEQ ID NO: 377669 - protein, 11 aa, Homo sapiens
  CDR3 for alpha chain variable domain of TCR clone 188835 (TRAV1-2, TRAJ31)
CAVNNNARLMF

SEQ ID NO: 377670 - protein, 14 aa, Homo sapiens
  CDR3 for beta chain variable domain of TCR clone 188835 (TRBV7-9, TRBJ2-7)
CASSLSQGSYEQYF

SEQ ID NO: 377671 - protein, 11 aa, Homo sapiens
  CDR3 for alpha chain variable domain of TCR clone 188836 (TRAV2, TRAJ33)
CAVDSNYQLIW

SEQ ID NO: 377672 - protein, 12 aa, Homo sapiens
  CDR3 for beta chain variable domain of TCR clone 188836 (TRBV5-5, TRBJ2-5)
CASSYFGETQYF

SEQ ID NO: 377673 - protein, 12 aa, Homo sapiens
  CDR3 for alpha chain variable domain of TCR clone 188837 (TRAV8-3, TRAJ41)
CAVGALGYALNF

SEQ ID NO: 377674 - protein, 11 aa, Homo sapiens
  CDR3 for beta chain variable domain of TCR clone 188837 (TRBV6-3, TRBJ2-3)
CATGQADTQYF

SEQ ID NO: 377675 - protein, 16 aa, Homo sapiens
  CDR3 for alpha chain variable domain of TCR clone 188838 (TRAV30, TRAJ24)
CGTEIVDADSWGKFQF

SEQ ID NO: 377676 - protein, 16 aa, Homo sapiens
  CDR3 for beta chain variable domain of TCR clone 188838 (TRBV2, TRBJ1-3)
CASSGGAGRSGITIYF

SEQ ID NO: 377677 - protein, 13 aa, Homo sapiens
  CDR3 for alpha chain variable domain of TCR clone 188839 (TRAV26-1, TRAJ34)
CIVRPWITDKLIF

SEQ ID NO: 377678 - protein, 19 aa, Homo sapiens
  CDR3 for beta chain variable domain of TCR clone 188839 (TRBV28, TRBJ2-7)
CASSYSGTSRLGWVYEQYF

SEQ ID NO: 377679 - protein, 12 aa, Homo sapiens
  CDR3 for alpha chain variable domain of TCR clone 188840 (TRAV30, TRAJ43)
CDTEERGNDMRF

SEQ ID NO: 377680 - protein, 17 aa, Homo sapiens
  CDR3 for beta chain variable domain of TCR clone 188840 (TRBV11-2, TRBJ2-1)
CASSLYPPGVEYNEQFF

SEQ ID NO: 377681 - protein, 13 aa, Homo sapiens
  CDR3 for alpha chain variable domain of TCR clone 188841 (TRAV12-2, TRAJ20)
CAVYPSNDYKLSS

SEQ ID NO: 377682 - protein, 15 aa, Homo sapiens
  CDR3 for beta chain variable domain of TCR clone 188841 (TRBV27, TRBJ2-5)
CASSVYPRGGETQYF

SEQ ID NO: 377683 - protein, 11 aa, Homo sapiens
  CDR3 for alpha chain variable domain of TCR clone 188842 (TRAV21, TRAJ41)
CAVRSGYALNF

SEQ ID NO: 377684 - protein, 15 aa, Homo sapiens
  CDR3 for beta chain variable domain of TCR clone 188842 (TRBV10-3, TRBJ2-3)
CAISLTSGGTDTQYF

SEQ ID NO: 377685 - protein, 12 aa, Homo sapiens
  CDR3 for alpha chain variable domain of TCR clone 188843 (TRAV16, TRAJ10)
CSRTGGGNKLTF

SEQ ID NO: 377686 - protein, 15 aa, Homo sapiens
  CDR3 for beta chain variable domain of TCR clone 188843 (TRBV7-3, TRBJ1-1)
CASSPRADRNTEAFF

SEQ ID NO: 377687 - protein, 14 aa, Homo sapiens
  CDR3 for alpha chain variable domain of TCR clone 188844 (TRAV17, TRAJ32)
CATDSGGATNKLIF

SEQ ID NO: 377688 - protein, 14 aa, Homo sapiens
  CDR3 for beta chain variable domain of TCR clone 188844 (TRBV2, TRBJ1-5)
CASSENRGGQPQHF

SEQ ID NO: 377689 - protein, 10 aa, Homo sapiens
  CDR3 for alpha chain variable domain of TCR clone 188845 (TRAV35, TRAJ41)
DANSGDALNF

SEQ ID NO: 377690 - protein, 14 aa, Homo sapiens
  CDR3 for beta chain variable domain of TCR clone 188845 (TRBV9, TRBJ2-3)
CASSVGLSTDTQYF

SEQ ID NO: 377691 - protein, 13 aa, Homo sapiens
  CDR3 for alpha chain variable domain of TCR clone 188846 (TRAV21, TRAJ57)
CALTQGGSEKLVV

SEQ ID NO: 377692 - protein, 11 aa, Homo sapiens
  CDR3 for beta chain variable domain of TCR clone 188846 (TRBV11-2, TRBJ2-2)
CASSLPGELFF

SEQ ID NO: 377693 - protein, 13 aa, Homo sapiens
  CDR3 for alpha chain variable domain of TCR clone 188847 (TRAV13-2, TRAJ48)
CAEMDFGNEQLTF

SEQ ID NO: 377694 - protein, 12 aa, Homo sapiens
  CDR3 for beta chain variable domain of TCR clone 188847 (TRBV11-2, TRBJ2-2)
CASSLGGGELFF

SEQ ID NO: 377695 - protein, 16 aa, Homo sapiens
  CDR3 for alpha chain variable domain of TCR clone 188848 (TRAV17, TRAJ22)
CATGPISSGSARQLTF

SEQ ID NO: 377696 - protein, 14 aa, Homo sapiens
  CDR3 for beta chain variable domain of TCR clone 188848 (TRBV19, TRBJ2-1)
CASPTFVLSGEQFF

SEQ ID NO: 377697 - protein, 14 aa, Homo sapiens
  CDR3 for alpha chain variable domain of TCR clone 188849 (TRAV8-3, TRAJ7)
CAAIELYGNNRLAF

SEQ ID NO: 377698 - protein, 16 aa, Homo sapiens
  CDR3 for beta chain variable domain of TCR clone 188849 (TRBV5-4, TRBJ2-3)
CASQQPGAGGADTQYF

SEQ ID NO: 377699 - protein, 15 aa, Homo sapiens
  CDR3 for alpha chain variable domain of TCR clone 188850 (TRAV21, TRAJ40)
CAVRPHTSGTYKYIF

SEQ ID NO: 377700 - protein, 13 aa, Homo sapiens
  CDR3 for beta chain variable domain of TCR clone 188850 (TRBV7-2, TRBJ2-2)
CASSSVRAGELFF

SEQ ID NO: 377701 - protein, 13 aa, Homo sapiens
  CDR3 for alpha chain variable domain of TCR clone 188851 (TRAV13-1, TRAJ37)
CAAVSGNTGKLIF

SEQ ID NO: 377702 - protein, 17 aa, Homo sapiens
  CDR3 for beta chain variable domain of TCR clone 188851 (TRBV10-2, TRBJ1-6)
CASSENMGSSYNSPLHF

SEQ ID NO: 377703 - protein, 12 aa, Homo sapiens
  CDR3 for alpha chain variable domain of TCR clone 188852 (TRAV12-2, TRAJ9)
CAANTGGFKTIF

SEQ ID NO: 377704 - protein, 13 aa, Homo sapiens
  CDR3 for beta chain variable domain of TCR clone 188852 (TRBV10-3, TRBJ2-7)
CASKLAVNYEQYF

SEQ ID NO: 377705 - protein, 15 aa, Homo sapiens
  CDR3 for alpha chain variable domain of TCR clone 188853 (TRAV3, TRAJ32)
CAVSSYGGATNKLIF

SEQ ID NO: 377706 - protein, 15 aa, Homo sapiens
  CDR3 for beta chain variable domain of TCR clone 188853 (TRBV20-1, TRBJ2-7)
CSARPSTNYEQTSGR

SEQ ID NO: 377707 - protein, 14 aa, Homo sapiens
  CDR3 for alpha chain variable domain of TCR clone 188854 (TRAV1-2, TRAJ8)
CAVREDTGFQKLVF

SEQ ID NO: 377708 - protein, 13 aa, Homo sapiens
  CDR3 for beta chain variable domain of TCR clone 188854 (TRBV20-1, TRBJ1-4)
CCARTPYNEKLFF

SEQ ID NO: 377709 - protein, 14 aa, Homo sapiens
  CDR3 for alpha chain variable domain of TCR clone 188855 (TRAV13-2, TRAJ10)
CAARGTGGGNKLTF

SEQ ID NO: 377710 - protein, 15 aa, Homo sapiens
  CDR3 for beta chain variable domain of TCR clone 188855 (TRBV5-1, TRBJ1-1)
CASSLGMGTSTEAFF

SEQ ID NO: 377711 - protein, 15 aa, Homo sapiens
  CDR3 for alpha chain variable domain of TCR clone 188856 (TRAV21, TRAJ53)
CATLNSGGSNYKLTF

SEQ ID NO: 377712 - protein, 13 aa, Homo sapiens
  CDR3 for beta chain variable domain of TCR clone 188856 (TRBV12-5, TRBJ2-1)
CASGLGRGYEQFF

SEQ ID NO: 377713 - protein, 11 aa, Homo sapiens
  CDR3 for alpha chain variable domain of TCR clone 188857 (TRAV1-2, TRAJ40)
CAVPGTYKYIF

SEQ ID NO: 377714 - protein, 16 aa, Homo sapiens
  CDR3 for beta chain variable domain of TCR clone 188857 (TRBV7-3, TRBJ2-2)
CASSLKRGTLSGELSF

SEQ ID NO: 377715 - protein, 15 aa, Homo sapiens
  CDR3 for alpha chain variable domain of TCR clone 188858 (TRAV34, TRAJ38)
CGADFTPGNNRKLIW

SEQ ID NO: 377716 - protein, 14 aa, Homo sapiens
  CDR3 for beta chain variable domain of TCR clone 188858 (TRBV12-5, TRBJ2-5)
CASGSRTHQETKYF

SEQ ID NO: 377717 - protein, 14 aa, Homo sapiens
  CDR3 for alpha chain variable domain of TCR clone 188859 (TRAV26-1, TRAJ57)
CIRAGQGGSEKLVF

SEQ ID NO: 377718 - protein, 12 aa, Homo sapiens
  CDR3 for beta chain variable domain of TCR clone 188859 (TRBV28, TRBJ1-2)
CASLTLAEGYTF

SEQ ID NO: 377719 - protein, 14 aa, Homo sapiens
  CDR3 for alpha chain variable domain of TCR clone 188860 (TRAV8-4, TRAJ13)
CAVTLSGGYQKVTF

SEQ ID NO: 377720 - protein, 16 aa, Homo sapiens
  CDR3 for beta chain variable domain of TCR clone 188860 (TRBV7-9, TRBJ2-1)
CASSSPQGTTRNEQFF

SEQ ID NO: 377721 - protein, 13 aa, Homo sapiens
  CDR3 for alpha chain variable domain of TCR clone 188861 (TRAV16, TRAJ29)
CALSRRGNTPFVF

SEQ ID NO: 377722 - protein, 15 aa, Homo sapiens
  CDR3 for beta chain variable domain of TCR clone 188861 (TRBV4-1, TRBJ2-3)
CASSRGQGIPDTQYF

SEQ ID NO: 377723 - protein, 11 aa, Homo sapiens
  CDR3 for alpha chain variable domain of TCR clone 188862 (TRAV2, TRAJ13)
CASGGYQKVTF

SEQ ID NO: 377724 - protein, 14 aa, Homo sapiens
  CDR3 for beta chain variable domain of TCR clone 188862 (TRBV19, TRBJ2-1)
CASAGWANYNEQFF

SEQ ID NO: 377725 - protein, 14 aa, Homo sapiens
  CDR3 for alpha chain variable domain of TCR clone 188863 (TRAV1-2, TRAJ16)
CSVNRFSDGQKLPF

SEQ ID NO: 377726 - protein, 15 aa, Homo sapiens
  CDR3 for beta chain variable domain of TCR clone 188863 (TRBV7-9, TRBJ1-6)
CASSSPGRGNSPLHF

SEQ ID NO: 377727 - protein, 14 aa, Homo sapiens
  CDR3 for alpha chain variable domain of TCR clone 188864 (TRAV12-2, TRAJ15)
CAPHTGQAGTALIF

SEQ ID NO: 377728 - protein, 17 aa, Homo sapiens
  CDR3 for beta chain variable domain of TCR clone 188864 (TRBV24-1, TRBJ2-1)
CATSDVSTSGTYNEQFF

SEQ ID NO: 377729 - protein, 13 aa, Homo sapiens
  CDR3 for alpha chain variable domain of TCR clone 188865 (TRAV16, TRAJ28)
CAPTGAGSYQHTF

SEQ ID NO: 377730 - protein, 16 aa, Homo sapiens
  CDR3 for beta chain variable domain of TCR clone 188865 (TRBV28, TRBJ1-5)
CASSLTGQGWNQPQHF

SEQ ID NO: 377731 - protein, 11 aa, Homo sapiens
  CDR3 for alpha chain variable domain of TCR clone 188866 (TRAV16, TRAJ26)
CALTRWSEFCL

SEQ ID NO: 377732 - protein, 16 aa, Homo sapiens
  CDR3 for beta chain variable domain of TCR clone 188866 (TRBV9, TRBJ2-1)
CASSVGGGGNYNVQFF

SEQ ID NO: 377733 - protein, 16 aa, Homo sapiens
  CDR3 for alpha chain variable domain of TCR clone 188867 (TRAV8-3, TRAJ8)
CAVPRDGNTGFQKLVF

SEQ ID NO: 377734 - protein, 15 aa, Homo sapiens
  CDR3 for beta chain variable domain of TCR clone 188867 (TRBV6-1, TRBJ2-6)
CASSSRPSGANVLTV

SEQ ID NO: 377735 - protein, 11 aa, Homo sapiens
  CDR3 for alpha chain variable domain of TCR clone 188868 (TRAV3, TRAJ17)
CAEAAGNKLTF

SEQ ID NO: 377736 - protein, 14 aa, Homo sapiens
  CDR3 for beta chain variable domain of TCR clone 188868 (TRBV7-6, TRBJ2-3)
CASSLGTVTDTQYF

SEQ ID NO: 377737 - protein, 15 aa, Homo sapiens
  CDR3 for alpha chain variable domain of TCR clone 188869 (TRAV13-2, TRAJ35)
CAESPNIGFGNLLHC

SEQ ID NO: 377738 - protein, 13 aa, Homo sapiens
  CDR3 for beta chain variable domain of TCR clone 188869 (TRBV10-2, TRBJ2-5)
CASSTLARETQYF

SEQ ID NO: 377739 - protein, 12 aa, Homo sapiens
  CDR3 for alpha chain variable domain of TCR clone 188870 (TRAV3, TRAJ31)
CAVRDRNARLMF

SEQ ID NO: 377740 - protein, 18 aa, Homo sapiens
  CDR3 for beta chain variable domain of TCR clone 188870 (TRBV7-2, TRBJ2-3)
CASSLKREGSGITDTQYF

SEQ ID NO: 377741 - protein, 14 aa, Homo sapiens
  CDR3 for alpha chain variable domain of TCR clone 188871 (TRAV2, TRAJ9)
CAVEDRRGGFKTIF

SEQ ID NO: 377742 - protein, 14 aa, Homo sapiens
  CDR3 for beta chain variable domain of TCR clone 188871 (TRBV18, TRBJ1-5)
CASSRQQRNRPQHF

SEQ ID NO: 377743 - protein, 13 aa, Homo sapiens
  CDR3 for alpha chain variable domain of TCR clone 188872 (TRAV8-3, TRAJ28)
CAVGAVGSYQLTF

SEQ ID NO: 377744 - protein, 15 aa, Homo sapiens
  CDR3 for beta chain variable domain of TCR clone 188872 (TRBV7-3, TRBJ2-1)
CASSQRGGALIEQFF

SEQ ID NO: 377745 - protein, 14 aa, Homo sapiens
  CDR3 for alpha chain variable domain of TCR clone 188873 (TRAV2, TRAJ37)
CAVDFTSNTGKLIF

SEQ ID NO: 377746 - protein, 15 aa, Homo sapiens
  CDR3 for beta chain variable domain of TCR clone 188873 (TRBV20-1, TRBJ1-1)
GSASRGVTGNTEAFF

SEQ ID NO: 377747 - protein, 10 aa, Homo sapiens
  CDR3 for alpha chain variable domain of TCR clone 188874 (TRAV12-2, TRAJ43)
CAVKVLSMRF

SEQ ID NO: 377748 - protein, 15 aa, Homo sapiens
  CDR3 for beta chain variable domain of TCR clone 188874 (TRBV7-8, TRBJ2-5)
CASSYAGGEQETQYF

SEQ ID NO: 377749 - protein, 11 aa, Homo sapiens
  CDR3 for alpha chain variable domain of TCR clone 188875 (TRAV12-1, TRAJ26)
CVVAYGQNFVF

SEQ ID NO: 377750 - protein, 14 aa, Homo sapiens
  CDR3 for beta chain variable domain of TCR clone 188875 (TRBV7-9, TRBJ2-7)
CASSLDRPTDEQYF

SEQ ID NO: 377751 - protein, 13 aa, Homo sapiens
  CDR3 for alpha chain variable domain of TCR clone 188876 (TRAV12-1, TRAJ26)
CVVRRNYGQNFVF

SEQ ID NO: 377752 - protein, 14 aa, Homo sapiens
  CDR3 for beta chain variable domain of TCR clone 188876 (TRBV19, TRBJ2-7)
CASSIFAGTYEQYF

SEQ ID NO: 377753 - protein, 11 aa, Homo sapiens
  CDR3 for alpha chain variable domain of TCR clone 188877 (TRAV21, TRAJ39)
LLVNAGNMLTF

SEQ ID NO: 377754 - protein, 18 aa, Homo sapiens
  CDR3 for beta chain variable domain of TCR clone 188877 (TRBV7-2, TRBJ2-7)
CASSVSGRGLAGGYEQYF

SEQ ID NO: 377755 - protein, 11 aa, Homo sapiens
  CDR3 for alpha chain variable domain of TCR clone 188878 (TRAV27, TRAJ20)
CAGLNAYKLSF

SEQ ID NO: 377756 - protein, 14 aa, Homo sapiens
  CDR3 for beta chain variable domain of TCR clone 188878 (TRBV6-1, TRBJ1-1)
CASTPLQMNTEAFF

SEQ ID NO: 377757 - protein, 17 aa, Homo sapiens
  CDR3 for alpha chain variable domain of TCR clone 188879 (TRAV26-1, TRAJ22)
CIVRVPTHSGSARHLTF

SEQ ID NO: 377758 - protein, 16 aa, Homo sapiens
  CDR3 for beta chain variable domain of TCR clone 188879 (TRBV28, TRBJ2-1)
CASRRSGRVVGNEQFF

SEQ ID NO: 377759 - protein, 18 aa, Homo sapiens
  CDR3 for alpha chain variable domain of TCR clone 188880 (TRAV21, TRAJ52)
CAVRPSPAGGISYGKLTF

SEQ ID NO: 377760 - protein, 14 aa, Homo sapiens
  CDR3 for beta chain variable domain of TCR clone 188880 (TRBV7-2, TRBJ2-1)
CASSLEGGYNEQFF

SEQ ID NO: 377761 - protein, 17 aa, Homo sapiens
  CDR3 for alpha chain variable domain of TCR clone 188881 (TRAV13-1, TRAJ52)
CAASSGAGGTSYGKLTF

SEQ ID NO: 377762 - protein, 16 aa, Homo sapiens
  CDR3 for beta chain variable domain of TCR clone 188881 (TRBV27, TRBJ2-2)
CASSFRGLGRTGELFF

SEQ ID NO: 377763 - protein, 15 aa, Homo sapiens
  CDR3 for alpha chain variable domain of TCR clone 188882 (TRAV27, TRAJ38)
CAGRFNAGNNRKLIW

SEQ ID NO: 377764 - protein, 16 aa, Homo sapiens
  CDR3 for beta chain variable domain of TCR clone 188882 (TRBV12-4, TRBJ2-5)
CASSFFVRGRQETQYF

SEQ ID NO: 377765 - protein, 15 aa, Homo sapiens
  CDR3 for alpha chain variable domain of TCR clone 188883 (TRAV2, TRAJ9)
CAVEDRGTGGFKTIF

SEQ ID NO: 377766 - protein, 16 aa, Homo sapiens
  CDR3 for beta chain variable domain of TCR clone 188883 (TRBV19, TRBJ2-2)
CASRSPGTGATGELLF

SEQ ID NO: 377767 - protein, 13 aa, Homo sapiens
  CDR3 for alpha chain variable domain of TCR clone 188884 (TRAV21, TRAJ27)
CAALNTNAGKSTF

SEQ ID NO: 377768 - protein, 15 aa, Homo sapiens
  CDR3 for beta chain variable domain of TCR clone 188884 (TRBV5-1, TRBJ2-7)
CASSLNGGPAREQYF

SEQ ID NO: 377769 - protein, 12 aa, Homo sapiens
  CDR3 for alpha chain variable domain of TCR clone 188885 (TRAV12-3, TRAJ40)
FAMSSGTYKYIS

SEQ ID NO: 377770 - protein, 15 aa, Homo sapiens
  CDR3 for beta chain variable domain of TCR clone 188885 (TRBV7-3, TRBJ2-2)
CASSETGQGTGELFF

SEQ ID NO: 377771 - protein, 15 aa, Homo sapiens
  CDR3 for alpha chain variable domain of TCR clone 188886 (TRAV35, TRAJ58)
CAVRRQETSVSRFTF

SEQ ID NO: 377772 - protein, 16 aa, Homo sapiens
  CDR3 for beta chain variable domain of TCR clone 188886 (TRBV2, TRBJ2-1)
CASSVGGSLSYNEQFF

SEQ ID NO: 377773 - protein, 14 aa, Homo sapiens
  CDR3 for alpha chain variable domain of TCR clone 188887 (TRAV13-1, TRAJ24)
CAASRTDSWGKLQF

SEQ ID NO: 377774 - protein, 16 aa, Homo sapiens
  CDR3 for beta chain variable domain of TCR clone 188887 (TRBV5-1, TRBJ2-5)
CASSLRRTSGQETQYF

SEQ ID NO: 377775 - protein, 17 aa, Homo sapiens
  CDR3 for alpha chain variable domain of TCR clone 188888 (TRAV1-1, TRAJ32)
CAVRVDELWWCYKQAHL

SEQ ID NO: 377776 - protein, 15 aa, Homo sapiens
  CDR3 for beta chain variable domain of TCR clone 188888 (TRBV27, TRBJ1-4)
CASSAQHDLNEKLFF

SEQ ID NO: 377777 - protein, 15 aa, Homo sapiens
  CDR3 for alpha chain variable domain of TCR clone 188889 (TRAV26-1, TRAJ48)
FIVRVGDFGNEKLTF

SEQ ID NO: 377778 - protein, 16 aa, Homo sapiens
  CDR3 for beta chain variable domain of TCR clone 188889 (TRBV4-1, TRBJ2-3)
CASSQRAGGLTDTQYF

SEQ ID NO: 377779 - protein, 13 aa, Homo sapiens
  CDR3 for alpha chain variable domain of TCR clone 188890 (TRAV12-3, TRAJ13)
CAMSSGGYQKVTF

SEQ ID NO: 377780 - protein, 14 aa, Homo sapiens
  CDR3 for beta chain variable domain of TCR clone 188890 (TRBV2, TRBJ2-1)
CASRTGSSYNEHFF

SEQ ID NO: 377781 - protein, 16 aa, Homo sapiens
  CDR3 for alpha chain variable domain of TCR clone 188891 (TRAV21, TRAJ52)
CAVTNAGGTSSGKPTF

SEQ ID NO: 377782 - protein, 11 aa, Homo sapiens
  CDR3 for beta chain variable domain of TCR clone 188891 (TRBV2, TRBJ1-1)
CASREGTEAFF

SEQ ID NO: 377783 - protein, 14 aa, Homo sapiens
  CDR3 for alpha chain variable domain of TCR clone 188892 (TRAV27, TRAJ44)
CAASFTGTASNLTF

SEQ ID NO: 377784 - protein, 13 aa, Homo sapiens
  CDR3 for beta chain variable domain of TCR clone 188892 (TRBV27, TRBJ2-3)
CATSRGGLYTQYF

SEQ ID NO: 377785 - protein, 14 aa, Homo sapiens
  CDR3 for alpha chain variable domain of TCR clone 188893 (TRAV8-4, TRAJ9)
CAVRINTGGFKTIF

SEQ ID NO: 377786 - protein, 15 aa, Homo sapiens
  CDR3 for beta chain variable domain of TCR clone 188893 (TRBV10-2, TRBJ2-6)
CASSEQGTGANGLSF

SEQ ID NO: 377787 - protein, 16 aa, Homo sapiens
  CDR3 for alpha chain variable domain of TCR clone 188894 (TRAV30, TRAJ24)
CGTEIVDADSWVKFQF

SEQ ID NO: 377788 - protein, 12 aa, Homo sapiens
  CDR3 for beta chain variable domain of TCR clone 188894 (TRBV11-2, TRBJ2-1)
CASSPGNNEQFF

SEQ ID NO: 377789 - protein, 14 aa, Homo sapiens
  CDR3 for alpha chain variable domain of TCR clone 188895 (TRAV21, TRAJ15)
CAVSLNQAGTALIF

SEQ ID NO: 377790 - protein, 16 aa, Homo sapiens
  CDR3 for beta chain variable domain of TCR clone 188895 (TRBV12-4, TRBJ2-5)
CASSWRPSGDLGTQYF

SEQ ID NO: 377791 - protein, 13 aa, Homo sapiens
  CDR3 for alpha chain variable domain of TCR clone 188896 (TRAV21, TRAJ20)
CAVGLRVDYKLSF

SEQ ID NO: 377792 - protein, 15 aa, Homo sapiens
  CDR3 for beta chain variable domain of TCR clone 188896 (TRBV27, TRBJ1-4)
CASSAQQDLNEKLFF

SEQ ID NO: 377793 - protein, 11 aa, Homo sapiens
  CDR3 for alpha chain variable domain of TCR clone 188897 (TRAV21, TRAJ11)
CAVNGYSTLTF

SEQ ID NO: 377794 - protein, 14 aa, Homo sapiens
  CDR3 for beta chain variable domain of TCR clone 188897 (TRBV11-3, TRBJ2-5)
CASSPRTGQETQYF

SEQ ID NO: 377795 - protein, 14 aa, Homo sapiens
  CDR3 for alpha chain variable domain of TCR clone 188898 (TRAV12-3, TRAJ10)
SHLPLTGGGNKLTF

SEQ ID NO: 377796 - protein, 16 aa, Homo sapiens
  CDR3 for beta chain variable domain of TCR clone 188898 (TRBV12-5, TRBJ2-5)
CASGPRTSGKQETQYF

SEQ ID NO: 377797 - protein, 13 aa, Homo sapiens
  CDR3 for alpha chain variable domain of TCR clone 188899 (TRAV17, TRAJ5)
CAPMDTGRRALTF

SEQ ID NO: 377798 - protein, 14 aa, Homo sapiens
  CDR3 for beta chain variable domain of TCR clone 188899 (TRBV7-9, TRBJ1-5)
CQQPRSPAQSAQHF

SEQ ID NO: 377799 - protein, 12 aa, Homo sapiens
  CDR3 for alpha chain variable domain of TCR clone 188900 (TRAV13-1, TRAJ42)
VNYGGSQGNLIF

SEQ ID NO: 377800 - protein, 17 aa, Homo sapiens
  CDR3 for beta chain variable domain of TCR clone 188900 (TRBV20-1, TRBJ2-1)
CSASSSGLAGSYNEQFF

SEQ ID NO: 377801 - protein, 14 aa, Homo sapiens
  CDR3 for alpha chain variable domain of TCR clone 188901 (TRAV12-3, TRAJ10)
SHLPLTGGGNKLTF

SEQ ID NO: 377802 - protein, 14 aa, Homo sapiens
  CDR3 for beta chain variable domain of TCR clone 188901 (TRBV6-1, TRBJ1-3)
CASVQGGGGNTMYF

SEQ ID NO: 377803 - protein, 12 aa, Homo sapiens
  CDR3 for alpha chain variable domain of TCR clone 188902 (TRAV23/DV6, TRAJ30)
CAASKGDDKIIF

SEQ ID NO: 377804 - protein, 14 aa, Homo sapiens
  CDR3 for beta chain variable domain of TCR clone 188902 (TRBV7-2, TRBJ2-7)
CASSPKTSFYEQYF

SEQ ID NO: 377805 - protein, 14 aa, Homo sapiens
  CDR3 for alpha chain variable domain of TCR clone 188903 (TRAV13-1, TRAJ9)
CAASAPTGGFKTIF

SEQ ID NO: 377806 - protein, 13 aa, Homo sapiens
  CDR3 for beta chain variable domain of TCR clone 188903 (TRBV20-1, TRBJ1-1)
CSAGTVGNTEAFF

SEQ ID NO: 377807 - protein, 13 aa, Homo sapiens
  CDR3 for alpha chain variable domain of TCR clone 188904 (TRAV8-3, TRAJ6)
CAARRGGSYIPTF

SEQ ID NO: 377808 - protein, 15 aa, Homo sapiens
  CDR3 for beta chain variable domain of TCR clone 188904 (TRBV4-1, TRBJ2-3)
CASSNLAGGRNTQYF

SEQ ID NO: 377809 - protein, 12 aa, Homo sapiens
  CDR3 for alpha chain variable domain of TCR clone 188905 (TRAV27, TRAJ35)
CAGADFGNVLHC

SEQ ID NO: 377810 - protein, 16 aa, Homo sapiens
  CDR3 for beta chain variable domain of TCR clone 188905 (TRBV4-2, TRBJ2-1)
CASSQGEGRTVNEQFF

SEQ ID NO: 377811 - protein, 13 aa, Homo sapiens
  CDR3 for alpha chain variable domain of TCR clone 188906 (TRAV12-3, TRAJ33)
FAMSVNSNYQLIW

SEQ ID NO: 377812 - protein, 17 aa, Homo sapiens
  CDR3 for beta chain variable domain of TCR clone 188906 (TRBV20-1, TRBJ2-7)
CSARDPEGDHREYEQYF

SEQ ID NO: 377813 - protein, 16 aa, Homo sapiens
  CDR3 for alpha chain variable domain of TCR clone 188907 (TRAV27, TRAJ13)
CAGAKSDSGGYQKVTF

SEQ ID NO: 377814 - protein, 15 aa, Homo sapiens
  CDR3 for beta chain variable domain of TCR clone 188907 (TRBV29-1, TRBJ2-1)
CSVGRHALFYNERFF

SEQ ID NO: 377815 - protein, 14 aa, Homo sapiens
  CDR3 for alpha chain variable domain of TCR clone 188908 (TRAV2, TRAJ9)
CAVEDRSGGFKTIF

SEQ ID NO: 377816 - protein, 16 aa, Homo sapiens
  CDR3 for beta chain variable domain of TCR clone 188908 (TRBV5-1, TRBJ2-7)
CASSWGTGGRAWEQYF

SEQ ID NO: 377817 - protein, 14 aa, Homo sapiens
  CDR3 for alpha chain variable domain of TCR clone 188909 (TRAV12-3, TRAJ10)
SHLPLTGGGNKLTF

SEQ ID NO: 377818 - protein, 15 aa, Homo sapiens
  CDR3 for beta chain variable domain of TCR clone 188909 (TRBV9, TRBJ1-6)
CASSVAGTGDSPLHC

SEQ ID NO: 377819 - protein, 13 aa, Homo sapiens
  CDR3 for alpha chain variable domain of TCR clone 188910 (TRAV16, TRAJ58)
CALRWASGSRLTF

SEQ ID NO: 377820 - protein, 16 aa, Homo sapiens
  CDR3 for beta chain variable domain of TCR clone 188910 (TRBV18, TRBJ2-2)
CASSPPRTAKTGELFF

SEQ ID NO: 377821 - protein, 13 aa, Homo sapiens
  CDR3 for alpha chain variable domain of TCR clone 188911 (TRAV39, TRAJ58)
CAGEETSRSRSTF

SEQ ID NO: 377822 - protein, 13 aa, Homo sapiens
  CDR3 for beta chain variable domain of TCR clone 188911 (TRBV15, TRBJ2-7)
CATSTTGHYEQYF

SEQ ID NO: 377823 - protein, 14 aa, Homo sapiens
  CDR3 for alpha chain variable domain of TCR clone 188912 (TRAV12-3, TRAJ13)
CAMPNSGGYQKVTF

SEQ ID NO: 377824 - protein, 14 aa, Homo sapiens
  CDR3 for beta chain variable domain of TCR clone 188912 (TRBV4-1, TRBJ1-6)
CASSPGSDSSPLHF

SEQ ID NO: 377825 - protein, 16 aa, Homo sapiens
  CDR3 for alpha chain variable domain of TCR clone 188913 (TRAV8-2, TRAJ7)
YVVSEGPYYGNNRLAF

SEQ ID NO: 377826 - protein, 14 aa, Homo sapiens
  CDR3 for beta chain variable domain of TCR clone 188913 (TRBV7-6, TRBJ2-6)
CASSLSGGANVLTF

SEQ ID NO: 377827 - protein, 17 aa, Homo sapiens
  CDR3 for alpha chain variable domain of TCR clone 188914 (TRAV3, TRAJ38)
CAVRDCLNAGNNRKLIW

SEQ ID NO: 377828 - protein, 12 aa, Homo sapiens
  CDR3 for beta chain variable domain of TCR clone 188914 (TRBV7-2, TRBJ2-1)
CASSPQDIEQFF

SEQ ID NO: 377829 - protein, 14 aa, Homo sapiens
  CDR3 for alpha chain variable domain of TCR clone 188915 (TRAV14/DV4, TRAJ27)
CVPKEGTNAGKSTF

SEQ ID NO: 377830 - protein, 15 aa, Homo sapiens
  CDR3 for beta chain variable domain of TCR clone 188915 (TRBV7-3, TRBJ2-1)
CASSLDGNSYNEQFF

SEQ ID NO: 377831 - protein, 14 aa, Homo sapiens
  CDR3 for alpha chain variable domain of TCR clone 188916 (TRAV13-1, TRAJ9)
CAASALTGGFKTIF

SEQ ID NO: 377832 - protein, 15 aa, Homo sapiens
  CDR3 for beta chain variable domain of TCR clone 188916 (TRBV7-9, TRBJ1-6)
CASSSPGRGNSPLHF

SEQ ID NO: 377833 - protein, 12 aa, Homo sapiens
  CDR3 for alpha chain variable domain of TCR clone 188917 (TRAV27, TRAJ13)
CAGVRGYQKVTF

SEQ ID NO: 377834 - protein, 14 aa, Homo sapiens
  CDR3 for beta chain variable domain of TCR clone 188917 (TRBV2, TRBJ2-1)
CASSDRAYYNEQFF

SEQ ID NO: 377835 - protein, 15 aa, Homo sapiens
  CDR3 for alpha chain variable domain of TCR clone 188918 (TRAV3, TRAJ22)
CAVRDLGGSARQLTF

SEQ ID NO: 377836 - protein, 12 aa, Homo sapiens
  CDR3 for beta chain variable domain of TCR clone 188918 (TRBV12-4, TRBJ1-2)
CASSFIWLHLRF

SEQ ID NO: 377837 - protein, 16 aa, Homo sapiens
  CDR3 for alpha chain variable domain of TCR clone 188919 (TRAV3, TRAJ37)
CAVRGKGSGNTGKLIF

SEQ ID NO: 377838 - protein, 20 aa, Homo sapiens
  CDR3 for beta chain variable domain of TCR clone 188919 (TRBV7-8, TRBJ2-2)
CASSHLFPGPTIHISGELFF

SEQ ID NO: 377839 - protein, 16 aa, Homo sapiens
  CDR3 for alpha chain variable domain of TCR clone 188920 (TRAV12-1, TRAJ22)
CVVNTISSGSARQLTF

SEQ ID NO: 377840 - protein, 15 aa, Homo sapiens
  CDR3 for beta chain variable domain of TCR clone 188920 (TRBV20-1, TRBJ2-7)
CSARDRVSGMDEQYF

SEQ ID NO: 377841 - protein, 14 aa, Homo sapiens
  CDR3 for alpha chain variable domain of TCR clone 188921 (TRAV8-4, TRAJ40)
CAVIPNSGTYKYIF

SEQ ID NO: 377842 - protein, 15 aa, Homo sapiens
  CDR3 for beta chain variable domain of TCR clone 188921 (TRBV7-2, TRBJ2-1)
CASTSASGDYNEQFF

SEQ ID NO: 377843 - protein, 13 aa, Homo sapiens
  CDR3 for alpha chain variable domain of TCR clone 188922 (TRAV8-2, TRAJ5)
CVVLYTGRRALTF

SEQ ID NO: 377844 - protein, 15 aa, Homo sapiens
  CDR3 for beta chain variable domain of TCR clone 188922 (TRBV12-4, TRBJ2-2)
CATRFGRGETGELFF

SEQ ID NO: 377845 - protein, 14 aa, Homo sapiens
  CDR3 for alpha chain variable domain of TCR clone 188923 (TRAV12-1, TRAJ15)
CLPPANQAGTALIF

SEQ ID NO: 377846 - protein, 13 aa, Homo sapiens
  CDR3 for beta chain variable domain of TCR clone 188923 (TRBV7-2, TRBJ2-4)
WASSREHANIQYF

SEQ ID NO: 377847 - protein, 11 aa, Homo sapiens
  CDR3 for alpha chain variable domain of TCR clone 188924 (TRAV12-1, TRAJ43)
CVEYDNNEMRF

SEQ ID NO: 377848 - protein, 15 aa, Homo sapiens
  CDR3 for beta chain variable domain of TCR clone 188924 (TRBV18, TRBJ2-5)
CASSPRASEAETQYF

SEQ ID NO: 377849 - protein, 14 aa, Homo sapiens
  CDR3 for alpha chain variable domain of TCR clone 188925 (TRAV26-1, TRAJ34)
CIDRVAYNTDKLIF

SEQ ID NO: 377850 - protein, 15 aa, Homo sapiens
  CDR3 for beta chain variable domain of TCR clone 188925 (TRBV20-1, TRBJ2-7)
CSARVPAAYFYEQYF

SEQ ID NO: 377851 - protein, 12 aa, Homo sapiens
  CDR3 for alpha chain variable domain of TCR clone 188926 (TRAV12-3, TRAJ17)
CPMTLTGTKLTF

SEQ ID NO: 377852 - protein, 15 aa, Homo sapiens
  CDR3 for beta chain variable domain of TCR clone 188926 (TRBV20-1, TRBJ2-7)
CSARDRVSGMDEQYF

SEQ ID NO: 377853 - protein, 15 aa, Homo sapiens
  CDR3 for alpha chain variable domain of TCR clone 188927 (TRAV21, TRAJ56)
CSVTKYTGANSKLTF

SEQ ID NO: 377854 - protein, 14 aa, Homo sapiens
  CDR3 for beta chain variable domain of TCR clone 188927 (TRBV20-1, TRBJ2-3)
CSARVRGSTDTQYF

SEQ ID NO: 377855 - protein, 17 aa, Homo sapiens
  CDR3 for alpha chain variable domain of TCR clone 188928 (TRAV8-6, TRAJ58)
CAVSSWVGETSVSRLTF

SEQ ID NO: 377856 - protein, 17 aa, Homo sapiens
  CDR3 for beta chain variable domain of TCR clone 188928 (TRBV11-2, TRBJ2-1)
CASSLYPPGVEYNEQFF

SEQ ID NO: 377857 - protein, 12 aa, Homo sapiens
  CDR3 for alpha chain variable domain of TCR clone 188929 (TRAV17, TRAJ12)
CATLRSSNKLIF

SEQ ID NO: 377858 - protein, 16 aa, Homo sapiens
  CDR3 for beta chain variable domain of TCR clone 188929 (TRBV28, TRBJ2-7)
CASSLFFETGGPEQYF

SEQ ID NO: 377859 - protein, 15 aa, Homo sapiens
  CDR3 for alpha chain variable domain of TCR clone 188930 (TRAV26-2, TRAJ53)
CILRDVGGSNYKLTF

SEQ ID NO: 377860 - protein, 14 aa, Homo sapiens
  CDR3 for beta chain variable domain of TCR clone 188930 (TRBV7-2, TRBJ2-7)
CASRSQGAAYEQYF

SEQ ID NO: 377861 - protein, 14 aa, Homo sapiens
  CDR3 for alpha chain variable domain of TCR clone 188931 (TRAV17, TRAJ57)
CATDPQGGSEKLVF

SEQ ID NO: 377862 - protein, 15 aa, Homo sapiens
  CDR3 for beta chain variable domain of TCR clone 188931 (TRBV7-2, TRBJ1-6)
CASSLGPDRGMPLHF

SEQ ID NO: 377863 - protein, 14 aa, Homo sapiens
  CDR3 for alpha chain variable domain of TCR clone 188932 (TRAV17, TRAJ35)
CATDRPGFGNVLHC

SEQ ID NO: 377864 - protein, 21 aa, Homo sapiens
  CDR3 for beta chain variable domain of TCR clone 188932 (TRBV11-3, TRBJ2-2)
CISVPAAPVRAKTTNTGELFF

SEQ ID NO: 377865 - protein, 14 aa, Homo sapiens
  CDR3 for alpha chain variable domain of TCR clone 188933 (TRAV12-1, TRAJ9)
CVVSGYTGGFKTIF

SEQ ID NO: 377866 - protein, 13 aa, Homo sapiens
  CDR3 for beta chain variable domain of TCR clone 188933 (TRBV20-1, TRBJ1-1)
CSARAGGNTEAFF

SEQ ID NO: 377867 - protein, 15 aa, Homo sapiens
  CDR3 for alpha chain variable domain of TCR clone 188934 (TRAV35, TRAJ33)
CAGQPPRYSNYQLIW

SEQ ID NO: 377868 - protein, 14 aa, Homo sapiens
  CDR3 for beta chain variable domain of TCR clone 188934 (TRBV7-6, TRBJ2-3)
CASSLGTVTGTQYF

SEQ ID NO: 377869 - protein, 13 aa, Homo sapiens
  CDR3 for alpha chain variable domain of TCR clone 188935 (TRAV13-2, TRAJ53)
CAENMGSNSKLTF

SEQ ID NO: 377870 - protein, 13 aa, Homo sapiens
  CDR3 for beta chain variable domain of TCR clone 188935 (TRBV4-1, TRBJ2-2)
CASSQENTGELFF

SEQ ID NO: 377871 - protein, 14 aa, Homo sapiens
  CDR3 for alpha chain variable domain of TCR clone 188936 (TRAV16, TRAJ32)
CSKRYGGATTKLIF

SEQ ID NO: 377872 - protein, 12 aa, Homo sapiens
  CDR3 for beta chain variable domain of TCR clone 188936 (TRBV7-9, TRBJ2-7)
CATRTDAYEQYF

SEQ ID NO: 377873 - protein, 14 aa, Homo sapiens
  CDR3 for alpha chain variable domain of TCR clone 188937 (TRAV12-2, TRAJ53)
CDVKGGGSNYKLTF

SEQ ID NO: 377874 - protein, 15 aa, Homo sapiens
  CDR3 for beta chain variable domain of TCR clone 188937 (TRBV11-3, TRBJ2-3)
CASLKDGREGDTQYF

SEQ ID NO: 377875 - protein, 13 aa, Homo sapiens
  CDR3 for alpha chain variable domain of TCR clone 188938 (TRAV26-1, TRAJ33)
CIVSVDSNYQLIW

SEQ ID NO: 377876 - protein, 15 aa, Homo sapiens
  CDR3 for beta chain variable domain of TCR clone 188938 (TRBV7-2, TRBJ1-5)
CASSFSAGINQPQHF

SEQ ID NO: 377877 - protein, 16 aa, Homo sapiens
  CDR3 for alpha chain variable domain of TCR clone 188939 (TRAV3, TRAJ4)
CAVRAFFSGGYNKLIF

SEQ ID NO: 377878 - protein, 16 aa, Homo sapiens
  CDR3 for beta chain variable domain of TCR clone 188939 (TRBV6-1, TRBJ1-6)
CASSERGCAGNSPLLF

SEQ ID NO: 377879 - protein, 13 aa, Homo sapiens
  CDR3 for alpha chain variable domain of TCR clone 188940 (TRAV22, TRAJ12)
CTGRLDSSYKLIF

SEQ ID NO: 377880 - protein, 13 aa, Homo sapiens
  CDR3 for beta chain variable domain of TCR clone 188940 (TRBV2, TRBJ2-7)
CASSVGGSGEQYF

SEQ ID NO: 377881 - protein, 17 aa, Homo sapiens
  CDR3 for alpha chain variable domain of TCR clone 188941 (TRAV13-1, TRAJ31)
CAPRDRLMFGDGTQLVV

SEQ ID NO: 377882 - protein, 14 aa, Homo sapiens
  CDR3 for beta chain variable domain of TCR clone 188941 (TRBV5-1, TRBJ2-7)
CASSRGESLYEQYF

SEQ ID NO: 377883 - protein, 11 aa, Homo sapiens
  CDR3 for alpha chain variable domain of TCR clone 188942 (TRAV8-4, TRAJ34)
CAVSWTAKLIF

SEQ ID NO: 377884 - protein, 14 aa, Homo sapiens
  CDR3 for beta chain variable domain of TCR clone 188942 (TRBV7-9, TRBJ2-3)
CASSLEDGTDTQYF

SEQ ID NO: 377885 - protein, 16 aa, Homo sapiens
  CDR3 for alpha chain variable domain of TCR clone 188943 (TRAV30, TRAJ24)
CGTEIVDADSWGKFQF

SEQ ID NO: 377886 - protein, 13 aa, Homo sapiens
  CDR3 for beta chain variable domain of TCR clone 188943 (TRBV5-1, TRBJ2-7)
CASSLTQGGEQYF

SEQ ID NO: 377887 - protein, 18 aa, Homo sapiens
  CDR3 for alpha chain variable domain of TCR clone 188944 (TRAV21, TRAJ52)
CAVRPSPAGGTSYGHLTF

SEQ ID NO: 377888 - protein, 12 aa, Homo sapiens
  CDR3 for beta chain variable domain of TCR clone 188944 (TRBV11-2, TRBJ2-2)
CASSLGGGELFF

SEQ ID NO: 377889 - protein, 15 aa, Homo sapiens
  CDR3 for alpha chain variable domain of TCR clone 188945 (TRAV8-4, TRAJ3)
CAVTGENLVQHFFQD

SEQ ID NO: 377890 - protein, 16 aa, Homo sapiens
  CDR3 for beta chain variable domain of TCR clone 188945 (TRBV4-2, TRBJ1-1)
CASSQAGFGMNTEAFF

SEQ ID NO: 377891 - protein, 15 aa, Homo sapiens
  CDR3 for alpha chain variable domain of TCR clone 188946 (TRAV12-2, TRAJ53)
CAVNGGGGSKYKLTF

SEQ ID NO: 377892 - protein, 12 aa, Homo sapiens
  CDR3 for beta chain variable domain of TCR clone 188946 (TRBV11-2, TRBJ2-1)
CASSPGNNEQFF

SEQ ID NO: 377893 - protein, 14 aa, Homo sapiens
  CDR3 for alpha chain variable domain of TCR clone 188947 (TRAV38-1, TRAJ40)
CALRPTSGTYKYIF

SEQ ID NO: 377894 - protein, 14 aa, Homo sapiens
  CDR3 for beta chain variable domain of TCR clone 188947 (TRBV14, TRBJ2-3)
CASSRKLAADTQYF

SEQ ID NO: 377895 - protein, 14 aa, Homo sapiens
  CDR3 for alpha chain variable domain of TCR clone 188948 (TRAV26-1, TRAJ34)
CIVRVAYNTDKLIF

SEQ ID NO: 377896 - protein, 13 aa, Homo sapiens
  CDR3 for beta chain variable domain of TCR clone 188948 (TRBV15, TRBJ1-6)
CATSGGLNSPLHF

SEQ ID NO: 377897 - protein, 14 aa, Homo sapiens
  CDR3 for alpha chain variable domain of TCR clone 188949 (TRAV1-2, TRAJ16)
CAVNRFSDCQKLLF

SEQ ID NO: 377898 - protein, 13 aa, Homo sapiens
  CDR3 for beta chain variable domain of TCR clone 188949 (TRBV20-1, TRBJ2-7)
CSATHTSGYEQYF

SEQ ID NO: 377899 - protein, 15 aa, Homo sapiens
  CDR3 for alpha chain variable domain of TCR clone 188950 (TRAV21, TRAJ38)
CAVKQDAGNNRKLIW

SEQ ID NO: 377900 - protein, 16 aa, Homo sapiens
  CDR3 for beta chain variable domain of TCR clone 188950 (TRBV4-2, TRBJ1-1)
CASRPLDGGGDTEAFF

SEQ ID NO: 377901 - protein, 11 aa, Homo sapiens
  CDR3 for alpha chain variable domain of TCR clone 188951 (TRAV26-1, TRAJ37)
CIVRVGRKLIF

SEQ ID NO: 377902 - protein, 14 aa, Homo sapiens
  CDR3 for beta chain variable domain of TCR clone 188951 (TRBV28, TRBJ2-7)
CASKPGPDLYEQYF

SEQ ID NO: 377903 - protein, 10 aa, Homo sapiens
  CDR3 for alpha chain variable domain of TCR clone 188952 (TRAV17, TRAJ36)
CATVAGNRFF

SEQ ID NO: 377904 - protein, 12 aa, Homo sapiens
  CDR3 for beta chain variable domain of TCR clone 188952 (TRBV11-2, TRBJ2-4)
CASSSASGSEYF

SEQ ID NO: 377905 - protein, 14 aa, Homo sapiens
  CDR3 for alpha chain variable domain of TCR clone 188953 (TRAV16, TRAJ33)
CALSAMDSNYQLIW

SEQ ID NO: 377906 - protein, 15 aa, Homo sapiens
  CDR3 for beta chain variable domain of TCR clone 188953 (TRBV11-2, TRBJ2-2)
CASSSDRVNAGELFF

SEQ ID NO: 377907 - protein, 18 aa, Homo sapiens
  CDR3 for alpha chain variable domain of TCR clone 188954 (TRAV12-3, TRAJ52)
CAMSVGGAGGTSYVKLTS

SEQ ID NO: 377908 - protein, 15 aa, Homo sapiens
  CDR3 for beta chain variable domain of TCR clone 188954 (TRBV27, TRBJ1-6)
CASSFDRGLGSPLHF

SEQ ID NO: 377909 - protein, 12 aa, Homo sapiens
  CDR3 for alpha chain variable domain of TCR clone 188955 (TRAV35, TRAJ30)
CAGQLADDKITF

SEQ ID NO: 377910 - protein, 17 aa, Homo sapiens
  CDR3 for beta chain variable domain of TCR clone 188955 (TRBV4-2, TRBJ2-5)
CASSPGRWRSFQETQYF

SEQ ID NO: 377911 - protein, 15 aa, Homo sapiens
  CDR3 for alpha chain variable domain of TCR clone 188956 (TRAV8-3, TRAJ44)
CAVGAGAGTASKLTF

SEQ ID NO: 377912 - protein, 12 aa, Homo sapiens
  CDR3 for beta chain variable domain of TCR clone 188956 (TRBV7-8, TRBJ2-4)
CSSSLGGNIQYF

SEQ ID NO: 377913 - protein, 20 aa, Homo sapiens
  CDR3 for alpha chain variable domain of TCR clone 188957 (TRAV12-1, TRAJ42)
SSVIQPPTSVKGGSQGNTIF

SEQ ID NO: 377914 - protein, 18 aa, Homo sapiens
  CDR3 for beta chain variable domain of TCR clone 188957 (TRBV11-2, TRBJ2-3)
CASSLGGASRGAPNTQYF

SEQ ID NO: 377915 - protein, 16 aa, Homo sapiens
  CDR3 for alpha chain variable domain of TCR clone 188958 (TRAV20, TRAJ38)
CAVQASNAGNNRKQIW

SEQ ID NO: 377916 - protein, 16 aa, Homo sapiens
  CDR3 for beta chain variable domain of TCR clone 188958 (TRBV7-8, TRBJ2-6)
CASRVGDSSGANVLTF

SEQ ID NO: 377917 - protein, 13 aa, Homo sapiens
  CDR3 for alpha chain variable domain of TCR clone 188959 (TRAV8-6, TRAJ33)
CAVSEGSNYQLMW

SEQ ID NO: 377918 - protein, 13 aa, Homo sapiens
  CDR3 for beta chain variable domain of TCR clone 188959 (TRBV5-7, TRBJ2-3)
CASSLGRTDTQYF

SEQ ID NO: 377919 - protein, 16 aa, Homo sapiens
  CDR3 for alpha chain variable domain of TCR clone 188960 (TRAV3, TRAJ10)
CAVRDMRAGGGNKLTF

SEQ ID NO: 377920 - protein, 17 aa, Homo sapiens
  CDR3 for beta chain variable domain of TCR clone 188960 (TRBV20-1, TRBJ2-2)
CSASGSGHGGLTGELFF

SEQ ID NO: 377921 - protein, 14 aa, Homo sapiens
  CDR3 for alpha chain variable domain of TCR clone 188961 (TRAV23/DV6, TRAJ22)
CAASVSGSARQLTF

SEQ ID NO: 377922 - protein, 18 aa, Homo sapiens
  CDR3 for beta chain variable domain of TCR clone 188961 (TRBV19, TRBJ2-2)
SISVPVVSREGLAGELFF

SEQ ID NO: 377923 - protein, 14 aa, Homo sapiens
  CDR3 for alpha chain variable domain of TCR clone 188962 (TRAV27, TRAJ22)
CAGVVPGSARQLTF

SEQ ID NO: 377924 - protein, 16 aa, Homo sapiens
  CDR3 for beta chain variable domain of TCR clone 188962 (TRBV12-4, TRBJ2-5)
CASSFFVRGRQETQYF

SEQ ID NO: 377925 - protein, 13 aa, Homo sapiens
  CDR3 for alpha chain variable domain of TCR clone 188963 (TRAV13-2, TRAJ40)
CAECTSGTYKYIF

SEQ ID NO: 377926 - protein, 14 aa, Homo sapiens
  CDR3 for beta chain variable domain of TCR clone 188963 (TRBV10-2, TRBJ1-5)
CASSSTGRNQPQHF

SEQ ID NO: 377927 - protein, 15 aa, Homo sapiens
  CDR3 for alpha chain variable domain of TCR clone 188964 (TRAV12-2, TRAJ53)
CAVNGGGDRNYKLTF

SEQ ID NO: 377928 - protein, 13 aa, Homo sapiens
  CDR3 for beta chain variable domain of TCR clone 188964 (TRBV7-9, TRBJ1-2)
CASSLKQNYGYTF

SEQ ID NO: 377929 - protein, 16 aa, Homo sapiens
  CDR3 for alpha chain variable domain of TCR clone 188965 (TRAV3, TRAJ37)
CAVRVRGSGNTGILIF

SEQ ID NO: 377930 - protein, 16 aa, Homo sapiens
  CDR3 for beta chain variable domain of TCR clone 188965 (TRBV11-2, TRBJ2-7)
CASSPTTGGVSYEQYF

SEQ ID NO: 377931 - protein, 13 aa, Homo sapiens
  CDR3 for alpha chain variable domain of TCR clone 188966 (TRAV8-6, TRAJ40)
CAVSVTGTYKYIF

SEQ ID NO: 377932 - protein, 15 aa, Homo sapiens
  CDR3 for beta chain variable domain of TCR clone 188966 (TRBV4-1, TRBJ2-3)
CASSRGQGITDTQYF

SEQ ID NO: 377933 - protein, 13 aa, Homo sapiens
  CDR3 for alpha chain variable domain of TCR clone 188967 (TRAV13-1, TRAJ21)
CAAIIYNFNKFYF

SEQ ID NO: 377934 - protein, 12 aa, Homo sapiens
  CDR3 for beta chain variable domain of TCR clone 188967 (TRBV11-2, TRBJ2-1)
CASSPGNNEQFF

SEQ ID NO: 377935 - protein, 15 aa, Homo sapiens
  CDR3 for alpha chain variable domain of TCR clone 188968 (TRAV26-1, TRAJ44)
CIARVPFGTASKLTF

SEQ ID NO: 377936 - protein, 17 aa, Homo sapiens
  CDR3 for beta chain variable domain of TCR clone 188968 (TRBV24-1, TRBJ2-4)
SATSDAEARGVRNIQYF

SEQ ID NO: 377937 - protein, 11 aa, Homo sapiens
  CDR3 for alpha chain variable domain of TCR clone 188969 (TRAV12-3, TRAJ43)
CAMSVSNDMLF

SEQ ID NO: 377938 - protein, 15 aa, Homo sapiens
  CDR3 for beta chain variable domain of TCR clone 188969 (TRBV11-3, TRBJ2-3)
CASSLSGQGPNTQYF

SEQ ID NO: 377939 - protein, 13 aa, Homo sapiens
  CDR3 for alpha chain variable domain of TCR clone 188970 (TRAV21, TRAJ57)
CAVPQGGSDKLVF

SEQ ID NO: 377940 - protein, 16 aa, Homo sapiens
  CDR3 for beta chain variable domain of TCR clone 188970 (TRBV29-1, TRBJ2-7)
CSVEDAEDGTAYEQYF

SEQ ID NO: 377941 - protein, 12 aa, Homo sapiens
  CDR3 for alpha chain variable domain of TCR clone 188971 (TRAV10, TRAJ34)
CVVSGKHRQAHL

SEQ ID NO: 377942 - protein, 14 aa, Homo sapiens
  CDR3 for beta chain variable domain of TCR clone 188971 (TRBV19, TRBJ2-1)
CAGPTFAVSGEQFF

SEQ ID NO: 377943 - protein, 14 aa, Homo sapiens
  CDR3 for alpha chain variable domain of TCR clone 188972 (TRAV8-6, TRAJ9)
CAVSSYTGGFKTIF

SEQ ID NO: 377944 - protein, 14 aa, Homo sapiens
  CDR3 for beta chain variable domain of TCR clone 188972 (TRBV19, TRBJ2-1)
CASPTFVLSGEQFF

SEQ ID NO: 377945 - protein, 14 aa, Homo sapiens
  CDR3 for alpha chain variable domain of TCR clone 188973 (TRAV1-2, TRAJ16)
CAVNRFSDGQKLLF

SEQ ID NO: 377946 - protein, 17 aa, Homo sapiens
  CDR3 for beta chain variable domain of TCR clone 188973 (TRBV11-3, TRBJ1-5)
CASSPLTGLRGNQPQHF

SEQ ID NO: 377947 - protein, 16 aa, Homo sapiens
  CDR3 for alpha chain variable domain of TCR clone 188974 (TRAV38-2/DV8, TRAJ47)
CAYRSAIMEYGNKLVF

SEQ ID NO: 377948 - protein, 14 aa, Homo sapiens
  CDR3 for beta chain variable domain of TCR clone 188974 (TRBV19, TRBJ2-7)
CASNIFAGTYEQYF

SEQ ID NO: 377949 - protein, 12 aa, Homo sapiens
  CDR3 for alpha chain variable domain of TCR clone 188975 (TRAV27, TRAJ35)
CTGADFGNVLHC

SEQ ID NO: 377950 - protein, 15 aa, Homo sapiens
  CDR3 for beta chain variable domain of TCR clone 188975 (TRBV4-1, TRBJ1-2)
CASSLNTGQGYGYTF

SEQ ID NO: 377951 - protein, 12 aa, Homo sapiens
  CDR3 for alpha chain variable domain of TCR clone 188976 (TRAV16, TRAJ21)
CALLGNFNKFYF

SEQ ID NO: 377952 - protein, 15 aa, Homo sapiens
  CDR3 for beta chain variable domain of TCR clone 188976 (TRBV3-1, TRBJ2-2)
CASSQAVRGTGELFF

SEQ ID NO: 377953 - protein, 13 aa, Homo sapiens
  CDR3 for alpha chain variable domain of TCR clone 188977 (TRAV36/DV7, TRAJ54)
CAVLIQGAQKLVF

SEQ ID NO: 377954 - protein, 13 aa, Homo sapiens
  CDR3 for beta chain variable domain of TCR clone 188977 (TRBV29-1, TRBJ2-4)
CSVGEGTKNRQYF

SEQ ID NO: 377955 - protein, 14 aa, Homo sapiens
  CDR3 for alpha chain variable domain of TCR clone 188978 (TRAV12-1, TRAJ17)
CVVNYKAAGNKLTF

SEQ ID NO: 377956 - protein, 13 aa, Homo sapiens
  CDR3 for beta chain variable domain of TCR clone 188978 (TRBV2, TRBJ1-1)
CASSVSGYTEAFF

SEQ ID NO: 377957 - protein, 11 aa, Homo sapiens
  CDR3 for alpha chain variable domain of TCR clone 188979 (TRAV1-1, TRAJ23)
CAVRQGGKLIF

SEQ ID NO: 377958 - protein, 20 aa, Homo sapiens
  CDR3 for beta chain variable domain of TCR clone 188979 (TRBV7-8, TRBJ2-2)
CASSHLFPRPTIHTTGELFF

SEQ ID NO: 377959 - protein, 13 aa, Homo sapiens
  CDR3 for alpha chain variable domain of TCR clone 188980 (TRAV36/DV7, TRAJ44)
CAVQAGTASKLTF

SEQ ID NO: 377960 - protein, 12 aa, Homo sapiens
  CDR3 for beta chain variable domain of TCR clone 188980 (TRBV10-3, TRBJ1-1)
CATMDRPPEAFF

SEQ ID NO: 377961 - protein, 17 aa, Homo sapiens
  CDR3 for alpha chain variable domain of TCR clone 188981 (TRAV3, TRAJ6)
CAVRDGPRAGGSYIPTF

SEQ ID NO: 377962 - protein, 18 aa, Homo sapiens
  CDR3 for beta chain variable domain of TCR clone 188981 (TRBV7-9, TRBJ2-7)
CASSLTTSGSRTWYGQYF

SEQ ID NO: 377963 - protein, 13 aa, Homo sapiens
  CDR3 for alpha chain variable domain of TCR clone 188982 (TRAV27, TRAJ6)
CAGGTRGSYIHTF

SEQ ID NO: 377964 - protein, 15 aa, Homo sapiens
  CDR3 for beta chain variable domain of TCR clone 188982 (TRBV11-2, TRBJ1-3)
CASSLSPLVRDTKYF

SEQ ID NO: 377965 - protein, 14 aa, Homo sapiens
  CDR3 for alpha chain variable domain of TCR clone 188983 (TRAV12-2, TRAJ24)
CAVTPADSWGKLQF

SEQ ID NO: 377966 - protein, 13 aa, Homo sapiens
  CDR3 for beta chain variable domain of TCR clone 188983 (TRBV12-4, TRBJ2-5)
CASSLGGSRTQYF

SEQ ID NO: 377967 - protein, 14 aa, Homo sapiens
  CDR3 for alpha chain variable domain of TCR clone 188984 (TRAV8-4, TRAJ17)
CAVSEQAAGNKLTF

SEQ ID NO: 377968 - protein, 16 aa, Homo sapiens
  CDR3 for beta chain variable domain of TCR clone 188984 (TRBV28, TRBJ1-5)
CASSFRGGYSNQPQHF

SEQ ID NO: 377969 - protein, 17 aa, Homo sapiens
  CDR3 for alpha chain variable domain of TCR clone 188985 (TRAV17, TRAJ28)
CATDPRRGGAGSYQLTF

SEQ ID NO: 377970 - protein, 15 aa, Homo sapiens
  CDR3 for beta chain variable domain of TCR clone 188985 (TRBV11-3, TRBJ2-3)
CASLKDGREGDTQYF

SEQ ID NO: 377971 - protein, 15 aa, Homo sapiens
  CDR3 for alpha chain variable domain of TCR clone 188986 (TRAV13-1, TRAJ22)
CSKGGSVWFSRQLTF

SEQ ID NO: 377972 - protein, 15 aa, Homo sapiens
  CDR3 for beta chain variable domain of TCR clone 188986 (TRBV9, TRBJ1-6)
CASSVAGTGDSPLHF

SEQ ID NO: 377973 - protein, 12 aa, Homo sapiens
  CDR3 for alpha chain variable domain of TCR clone 188987 (TRAV2, TRAJ31)
CAVEDNNARLMF

SEQ ID NO: 377974 - protein, 15 aa, Homo sapiens
  CDR3 for beta chain variable domain of TCR clone 188987 (TRBV5-1, TRBJ2-7)
CASSLYPDGGYEQYF

SEQ ID NO: 377975 - protein, 10 aa, Homo sapiens
  CDR3 for alpha chain variable domain of TCR clone 188988 (TRAV16, TRAJ22)
SAMYLRQLTF

SEQ ID NO: 377976 - protein, 15 aa, Homo sapiens
  CDR3 for beta chain variable domain of TCR clone 188988 (TRBV7-9, TRBJ1-6)
CASSSPGRGNPHLHF

SEQ ID NO: 377977 - protein, 14 aa, Homo sapiens
  CDR3 for alpha chain variable domain of TCR clone 188989 (TRAV23/DV6, TRAJ8)
CAASKATGFQKLVF

SEQ ID NO: 377978 - protein, 15 aa, Homo sapiens
  CDR3 for beta chain variable domain of TCR clone 188989 (TRBV28, TRBJ2-3)
CASSPDRQGAITQYF

SEQ ID NO: 377979 - protein, 10 aa, Homo sapiens
  CDR3 for alpha chain variable domain of TCR clone 188990 (TRAV38-2/DV8, TRAJ40)
CASGTYKYIF

SEQ ID NO: 377980 - protein, 17 aa, Homo sapiens
  CDR3 for beta chain variable domain of TCR clone 188990 (TRBV7-9, TRBJ1-4)
RASSSGQLGGRSEKLFF

SEQ ID NO: 377981 - protein, 15 aa, Homo sapiens
  CDR3 for alpha chain variable domain of TCR clone 188991 (TRAV1-2, TRAJ30)
CAVRPHGNRDDKIIF

SEQ ID NO: 377982 - protein, 16 aa, Homo sapiens
  CDR3 for beta chain variable domain of TCR clone 188991 (TRBV4-2, TRBJ2-7)
CASSQEGLTNSYEQYF

SEQ ID NO: 377983 - protein, 12 aa, Homo sapiens
  CDR3 for alpha chain variable domain of TCR clone 188992 (TRAV13-1, TRAJ49)
CAASPMGNQFYF

SEQ ID NO: 377984 - protein, 16 aa, Homo sapiens
  CDR3 for beta chain variable domain of TCR clone 188992 (TRBV20-1, TRBJ1-4)
CSAPGQGLLTNEKLFF

SEQ ID NO: 377985 - protein, 13 aa, Homo sapiens
  CDR3 for alpha chain variable domain of TCR clone 188993 (TRAV29/DV5, TRAJ21)
CAASVYNFNKFYF

SEQ ID NO: 377986 - protein, 14 aa, Homo sapiens
  CDR3 for beta chain variable domain of TCR clone 188993 (TRBV2, TRBJ1-2)
CASNEGTGPYVYTF

SEQ ID NO: 377987 - protein, 14 aa, Homo sapiens
  CDR3 for alpha chain variable domain of TCR clone 188994 (TRAV4, TRAJ10)
CTTASCKGGNKLTF

SEQ ID NO: 377988 - protein, 16 aa, Homo sapiens
  CDR3 for beta chain variable domain of TCR clone 188994 (TRBV7-9, TRBJ1-3)
CASSQTSGLRMGTIYF

SEQ ID NO: 377989 - protein, 12 aa, Homo sapiens
  CDR3 for alpha chain variable domain of TCR clone 188995 (TRAV36/DV7, TRAJ54)
CAVVRGAQKLVF

SEQ ID NO: 377990 - protein, 14 aa, Homo sapiens
  CDR3 for beta chain variable domain of TCR clone 188995 (TRBV7-3, TRBJ1-1)
CASSLKGGNTKAFF

SEQ ID NO: 377991 - protein, 15 aa, Homo sapiens
  CDR3 for alpha chain variable domain of TCR clone 188996 (TRAV4, TRAJ36)
CLVGDRQTGANNLFF

SEQ ID NO: 377992 - protein, 15 aa, Homo sapiens
  CDR3 for beta chain variable domain of TCR clone 188996 (TRBV5-1, TRBJ2-2)
CASSWTSPNTGELFF

SEQ ID NO: 377993 - protein, 15 aa, Homo sapiens
  CDR3 for alpha chain variable domain of TCR clone 188997 (TRAV9-2, TRAJ6)
CALRIGPGGSYIPTF

SEQ ID NO: 377994 - protein, 15 aa, Homo sapiens
  CDR3 for beta chain variable domain of TCR clone 188997 (TRBV18, TRBJ2-3)
CASSPPMAGRDTQYF

SEQ ID NO: 377995 - protein, 13 aa, Homo sapiens
  CDR3 for alpha chain variable domain of TCR clone 188998 (TRAV3, TRAJ21)
CAVREPDFNKFYF

SEQ ID NO: 377996 - protein, 15 aa, Homo sapiens
  CDR3 for beta chain variable domain of TCR clone 188998 (TRBV9, TRBJ1-6)
CASSVAGTGDSPLHV

SEQ ID NO: 377997 - protein, 16 aa, Homo sapiens
  CDR3 for alpha chain variable domain of TCR clone 188999 (TRAV26-2, TRAJ57)
CILRDVESGGSEKLVF

SEQ ID NO: 377998 - protein, 13 aa, Homo sapiens
  CDR3 for beta chain variable domain of TCR clone 188999 (TRBV18, TRBJ2-3)
CASSPGVTDTQYF

SEQ ID NO: 377999 - protein, 14 aa, Homo sapiens
  CDR3 for alpha chain variable domain of TCR clone 189000 (TRAV13-1, TRAJ10)
CAAKEPGGGNKLTF

SEQ ID NO: 378000 - protein, 14 aa, Homo sapiens
  CDR3 for beta chain variable domain of TCR clone 189000 (TRBV6-6, TRBJ2-7)
GASSDSGAGYEQYF

SEQ ID NO: 378001 - protein, 17 aa, Homo sapiens
  CDR3 for alpha chain variable domain of TCR clone 189001 (TRAV12-3, TRAJ52)
RASPPFAGGTSYGKLTF

SEQ ID NO: 378002 - protein, 16 aa, Homo sapiens
  CDR3 for beta chain variable domain of TCR clone 189001 (TRBV6-5, TRBJ2-5)
CASSSVGRWGRETQYF

SEQ ID NO: 378003 - protein, 13 aa, Homo sapiens
  CDR3 for alpha chain variable domain of TCR clone 189002 (TRAV1-2, TRAJ9)
CAALNTGGFKTIF

SEQ ID NO: 378004 - protein, 13 aa, Homo sapiens
  CDR3 for beta chain variable domain of TCR clone 189002 (TRBV4-1, TRBJ2-1)
CASRQAGGDEQFF

SEQ ID NO: 378005 - protein, 13 aa, Homo sapiens
  CDR3 for alpha chain variable domain of TCR clone 189003 (TRAV2, TRAJ15)
CAVASQAGTALIF

SEQ ID NO: 378006 - protein, 14 aa, Homo sapiens
  CDR3 for beta chain variable domain of TCR clone 189003 (TRBV12-5, TRBJ2-5)
CASGSRTHQETQYS

SEQ ID NO: 378007 - protein, 14 aa, Homo sapiens
  CDR3 for alpha chain variable domain of TCR clone 189004 (TRAV1-2, TRAJ16)
CAVNRFSDGQKLLF

SEQ ID NO: 378008 - protein, 13 aa, Homo sapiens
  CDR3 for beta chain variable domain of TCR clone 189004 (TRBV7-3, TRBJ2-2)
CASSLAVTGELFF

SEQ ID NO: 378009 - protein, 14 aa, Homo sapiens
  CDR3 for alpha chain variable domain of TCR clone 189005 (TRAV8-4, TRAJ54)
CAVSEVLGAQKLVF

SEQ ID NO: 378010 - protein, 17 aa, Homo sapiens
  CDR3 for beta chain variable domain of TCR clone 189005 (TRBV4-1, TRBJ1-4)
CASSQEGPRGVEETLFF

SEQ ID NO: 378011 - protein, 13 aa, Homo sapiens
  CDR3 for alpha chain variable domain of TCR clone 189006 (TRAV25, TRAJ26)
CAGMDNYGQNFVF

SEQ ID NO: 378012 - protein, 14 aa, Homo sapiens
  CDR3 for beta chain variable domain of TCR clone 189006 (TRBV15, TRBJ2-7)
CATSRVARGYEQYF

SEQ ID NO: 378013 - protein, 13 aa, Homo sapiens
  CDR3 for alpha chain variable domain of TCR clone 189007 (TRAV12-2, TRAJ35)
CAVSAGFGNVLHC

SEQ ID NO: 378014 - protein, 14 aa, Homo sapiens
  CDR3 for beta chain variable domain of TCR clone 189007 (TRBV27, TRBJ1-1)
CASSLLSGLSEAFF

SEQ ID NO: 378015 - protein, 14 aa, Homo sapiens
  CDR3 for alpha chain variable domain of TCR clone 189008 (TRAV26-1, TRAJ38)
CIAANAGDDRKLIW

SEQ ID NO: 378016 - protein, 13 aa, Homo sapiens
  CDR3 for beta chain variable domain of TCR clone 189008 (TRBV20-1, TRBJ1-1)
CSARGGGNTEAFF

SEQ ID NO: 378017 - protein, 16 aa, Homo sapiens
  CDR3 for alpha chain variable domain of TCR clone 189009 (TRAV30, TRAJ24)
CGTEIVDADSWGKFQF

SEQ ID NO: 378018 - protein, 16 aa, Homo sapiens
  CDR3 for beta chain variable domain of TCR clone 189009 (TRBV19, TRBJ1-1)
CASRPRSEALNTEAFF

SEQ ID NO: 378019 - protein, 12 aa, Homo sapiens
  CDR3 for alpha chain variable domain of TCR clone 189010 (TRAV27, TRAJ34)
CAGAKNTEKLIF

SEQ ID NO: 378020 - protein, 13 aa, Homo sapiens
  CDR3 for beta chain variable domain of TCR clone 189010 (TRBV4-1, TRBJ2-1)
CASSQEVQYEQFF

SEQ ID NO: 378021 - protein, 14 aa, Homo sapiens
  CDR3 for alpha chain variable domain of TCR clone 189011 (TRAV13-1, TRAJ52)
CAANGGTSYGKLTF

SEQ ID NO: 378022 - protein, 14 aa, Homo sapiens
  CDR3 for beta chain variable domain of TCR clone 189011 (TRBV7-2, TRBJ2-7)
CASSPKTSFYEQYF

SEQ ID NO: 378023 - protein, 13 aa, Homo sapiens
  CDR3 for alpha chain variable domain of TCR clone 189012 (TRAV27, TRAJ17)
CAGAATAGNKLTF

SEQ ID NO: 378024 - protein, 15 aa, Homo sapiens
  CDR3 for beta chain variable domain of TCR clone 189012 (TRBV5-1, TRBJ2-3)
CGSRNQAGSTDTQYF

SEQ ID NO: 378025 - protein, 11 aa, Homo sapiens
  CDR3 for alpha chain variable domain of TCR clone 189013 (TRAV1-1, TRAJ30)
CAQNRDDKIIF

SEQ ID NO: 378026 - protein, 15 aa, Homo sapiens
  CDR3 for beta chain variable domain of TCR clone 189013 (TRBV11-3, TRBJ2-3)
CASLKYGREGDTQYF

SEQ ID NO: 378027 - protein, 18 aa, Homo sapiens
  CDR3 for alpha chain variable domain of TCR clone 189014 (TRAV12-3, TRAJ52)
CAMSRTNAGGTSYGKRTF

SEQ ID NO: 378028 - protein, 17 aa, Homo sapiens
  CDR3 for beta chain variable domain of TCR clone 189014 (TRBV7-3, TRBJ2-3)
CASSLMKWMRGADTRYF

SEQ ID NO: 378029 - protein, 13 aa, Homo sapiens
  CDR3 for alpha chain variable domain of TCR clone 189015 (TRAV27, TRAJ6)
CAGGTRGSYIPTF

SEQ ID NO: 378030 - protein, 13 aa, Homo sapiens
  CDR3 for beta chain variable domain of TCR clone 189015 (TRBV7-2, TRBJ2-7)
CASSSPSGSEQYF

SEQ ID NO: 378031 - protein, 16 aa, Homo sapiens
  CDR3 for alpha chain variable domain of TCR clone 189016 (TRAV12-3, TRAJ53)
CAMSPGSGGSNSKLTF

SEQ ID NO: 378032 - protein, 13 aa, Homo sapiens
  CDR3 for beta chain variable domain of TCR clone 189016 (TRBV19, TRBJ1-2)
CASSVPGQDGYTF

SEQ ID NO: 378033 - protein, 11 aa, Homo sapiens
  CDR3 for alpha chain variable domain of TCR clone 189017 (TRAV12-3, TRAJ41)
CAMNAREALNF

SEQ ID NO: 378034 - protein, 14 aa, Homo sapiens
  CDR3 for beta chain variable domain of TCR clone 189017 (TRBV19, TRBJ2-1)
CASPTFVLSGEQFF

SEQ ID NO: 378035 - protein, 12 aa, Homo sapiens
  CDR3 for alpha chain variable domain of TCR clone 189018 (TRAV20, TRAJ39)
CAVGNAGNMLTF

SEQ ID NO: 378036 - protein, 14 aa, Homo sapiens
  CDR3 for beta chain variable domain of TCR clone 189018 (TRBV15, TRBJ2-5)
CATSIGGLGETQYF

SEQ ID NO: 378037 - protein, 16 aa, Homo sapiens
  CDR3 for alpha chain variable domain of TCR clone 189019 (TRAV30, TRAJ24)
CGPEIVDADSWGKFQF

SEQ ID NO: 378038 - protein, 15 aa, Homo sapiens
  CDR3 for beta chain variable domain of TCR clone 189019 (TRBV27, TRBJ2-1)
CASSNGGGSSNEQFF

SEQ ID NO: 378039 - protein, 14 aa, Homo sapiens
  CDR3 for alpha chain variable domain of TCR clone 189020 (TRAV3, TRAJ9)
CAVRLNTGGFKTIF

SEQ ID NO: 378040 - protein, 13 aa, Homo sapiens
  CDR3 for beta chain variable domain of TCR clone 189020 (TRBV7-7, TRBJ2-5)
CASSRSGQETQYF

SEQ ID NO: 378041 - protein, 17 aa, Homo sapiens
  CDR3 for alpha chain variable domain of TCR clone 189021 (TRAV13-1, TRAJ28)
CAASPPYSGAGSYQLTF

SEQ ID NO: 378042 - protein, 15 aa, Homo sapiens
  CDR3 for beta chain variable domain of TCR clone 189021 (TRBV6-3, TRBJ2-2)
CASSFLATLTGELFL

SEQ ID NO: 378043 - protein, 11 aa, Homo sapiens
  CDR3 for alpha chain variable domain of TCR clone 189022 (TRAV8-3, TRAJ49)
CAVNTGNHFYF

SEQ ID NO: 378044 - protein, 12 aa, Homo sapiens
  CDR3 for beta chain variable domain of TCR clone 189022 (TRBV11-2, TRBJ2-7)
CASSPPADEQYF

SEQ ID NO: 378045 - protein, 16 aa, Homo sapiens
  CDR3 for alpha chain variable domain of TCR clone 189023 (TRAV8-1, TRAJ39)
CAVNVPSYNVGNMLTF

SEQ ID NO: 378046 - protein, 15 aa, Homo sapiens
  CDR3 for beta chain variable domain of TCR clone 189023 (TRBV4-1, TRBJ2-3)
CASRSTRAGTDTQYF

SEQ ID NO: 378047 - protein, 11 aa, Homo sapiens
  CDR3 for alpha chain variable domain of TCR clone 189024 (TRAV12-2, TRAJ43)
CAAYNNNAMRF

SEQ ID NO: 378048 - protein, 14 aa, Homo sapiens
  CDR3 for beta chain variable domain of TCR clone 189024 (TRBV7-8, TRBJ1-2)
CASSAGTAIYGYTF

SEQ ID NO: 378049 - protein, 14 aa, Homo sapiens
  CDR3 for alpha chain variable domain of TCR clone 189025 (TRAV4, TRAJ43)
CLGGPMYNNNDMRF

SEQ ID NO: 378050 - protein, 21 aa, Homo sapiens
  CDR3 for beta chain variable domain of TCR clone 189025 (TRBV11-1, TRBJ2-1)
CASSARERLRPEGPSYNEQFF

SEQ ID NO: 378051 - protein, 15 aa, Homo sapiens
  CDR3 for alpha chain variable domain of TCR clone 189026 (TRAV2, TRAJ15)
CAVDDRGQAGTALIF

SEQ ID NO: 378052 - protein, 15 aa, Homo sapiens
  CDR3 for beta chain variable domain of TCR clone 189026 (TRBV7-2, TRBJ2-3)
CASSLVVRGPDTQYF

SEQ ID NO: 378053 - protein, 20 aa, Homo sapiens
  CDR3 for alpha chain variable domain of TCR clone 189027 (TRAV25, TRAJ21)
TATQTTDVGTYPLSFNKFYF

SEQ ID NO: 378054 - protein, 14 aa, Homo sapiens
  CDR3 for beta chain variable domain of TCR clone 189027 (TRBV6-1, TRBJ2-1)
CASAKDEFYNEQFF

SEQ ID NO: 378055 - protein, 18 aa, Homo sapiens
  CDR3 for alpha chain variable domain of TCR clone 189028 (TRAV13-1, TRAJ52)
CAASKRSAGGTSYGKLTF

SEQ ID NO: 378056 - protein, 14 aa, Homo sapiens
  CDR3 for beta chain variable domain of TCR clone 189028 (TRBV18, TRBJ2-7)
CASSPRGGAYEQYF

SEQ ID NO: 378057 - protein, 16 aa, Homo sapiens
  CDR3 for alpha chain variable domain of TCR clone 189029 (TRAV20, TRAJ6)
CVVQAGGTGGSYIPTF

SEQ ID NO: 378058 - protein, 13 aa, Homo sapiens
  CDR3 for beta chain variable domain of TCR clone 189029 (TRBV7-9, TRBJ1-2)
CASSLKQNYGYTF

SEQ ID NO: 378059 - protein, 13 aa, Homo sapiens
  CDR3 for alpha chain variable domain of TCR clone 189030 (TRAV8-6, TRAJ50)
CAVIKTSYDKVIF

SEQ ID NO: 378060 - protein, 15 aa, Homo sapiens
  CDR3 for beta chain variable domain of TCR clone 189030 (TRBV13, TRBJ2-1)
CASSLLSGLNNEQFF

SEQ ID NO: 378061 - protein, 14 aa, Homo sapiens
  CDR3 for alpha chain variable domain of TCR clone 189031 (TRAV27, TRAJ45)
CAGAQEEVMTDSPL

SEQ ID NO: 378062 - protein, 17 aa, Homo sapiens
  CDR3 for beta chain variable domain of TCR clone 189031 (TRBV11-2, TRBJ2-1)
CASSLYPPGVEYNEQFF

SEQ ID NO: 378063 - protein, 11 aa, Homo sapiens
  CDR3 for alpha chain variable domain of TCR clone 189032 (TRAV13-1, TRAJ15)
CAATPGTTLTF

SEQ ID NO: 378064 - protein, 13 aa, Homo sapiens
  CDR3 for beta chain variable domain of TCR clone 189032 (TRBV7-2, TRBJ2-1)
CASSLGVYNEQFF

SEQ ID NO: 378065 - protein, 14 aa, Homo sapiens
  CDR3 for alpha chain variable domain of TCR clone 189033 (TRAV1-2, TRAJ16)
CAVNRFSDGQKLLF

SEQ ID NO: 378066 - protein, 13 aa, Homo sapiens
  CDR3 for beta chain variable domain of TCR clone 189033 (TRBV18, TRBJ1-2)
CASSASATEGYTF

SEQ ID NO: 378067 - protein, 22 aa, Homo sapiens
  CDR3 for alpha chain variable domain of TCR clone 189034 (TRAV1-1, TRAJ30)
CAVRDQTEMTRSSLEKGHDFIF

SEQ ID NO: 378068 - protein, 13 aa, Homo sapiens
  CDR3 for beta chain variable domain of TCR clone 189034 (TRBV3-1, TRBJ2-3)
CASSQGSTDTQYF

SEQ ID NO: 378069 - protein, 13 aa, Homo sapiens
  CDR3 for alpha chain variable domain of TCR clone 189035 (TRAV27, TRAJ11)
CAGGGSGYSTLTF

SEQ ID NO: 378070 - protein, 15 aa, Homo sapiens
  CDR3 for beta chain variable domain of TCR clone 189035 (TRBV2, TRBJ2-5)
CASTRDGGPQETQYF

SEQ ID NO: 378071 - protein, 14 aa, Homo sapiens
  CDR3 for alpha chain variable domain of TCR clone 189036 (TRAV13-2, TRAJ32)
CAESLGGATNKLIF

SEQ ID NO: 378072 - protein, 17 aa, Homo sapiens
  CDR3 for beta chain variable domain of TCR clone 189036 (TRBV28, TRBJ2-3)
CASSPTPAGGRVDTQYF

SEQ ID NO: 378073 - protein, 13 aa, Homo sapiens
  CDR3 for alpha chain variable domain of TCR clone 189037 (TRAV8-3, TRAJ44)
CAVVPGTASKLTF

SEQ ID NO: 378074 - protein, 14 aa, Homo sapiens
  CDR3 for beta chain variable domain of TCR clone 189037 (TRBV11-2, TRBJ2-7)
CASSLGAGAYEQYF

SEQ ID NO: 378075 - protein, 18 aa, Homo sapiens
  CDR3 for alpha chain variable domain of TCR clone 189038 (TRAV21, TRAJ52)
CAVWPSPAGGTSYGKLTF

SEQ ID NO: 378076 - protein, 16 aa, Homo sapiens
  CDR3 for beta chain variable domain of TCR clone 189038 (TRBV29-1, TRBJ2-7)
CSVEVVGTSGSYEQYF

SEQ ID NO: 378077 - protein, 12 aa, Homo sapiens
  CDR3 for alpha chain variable domain of TCR clone 189039 (TRAV13-1, TRAJ49)
CAASPMGNQFYF

SEQ ID NO: 378078 - protein, 14 aa, Homo sapiens
  CDR3 for beta chain variable domain of TCR clone 189039 (TRBV20-1, TRBJ2-2)
SAVLVPRAPGGCFF

SEQ ID NO: 378079 - protein, 14 aa, Homo sapiens
  CDR3 for alpha chain variable domain of TCR clone 189040 (TRAV12-2, TRAJ17)
CAVLFKAAGNKLTF

SEQ ID NO: 378080 - protein, 11 aa, Homo sapiens
  CDR3 for beta chain variable domain of TCR clone 189040 (TRBV29-1, TRBJ2-5)
CSEDRAGTQYF

SEQ ID NO: 378081 - protein, 15 aa, Homo sapiens
  CDR3 for alpha chain variable domain of TCR clone 189041 (TRAV3, TRAJ5)
CAVRDRKTGRRALTF

SEQ ID NO: 378082 - protein, 15 aa, Homo sapiens
  CDR3 for beta chain variable domain of TCR clone 189041 (TRBV7-8, TRBJ2-1)
CASILADSLYNEQFF

SEQ ID NO: 378083 - protein, 14 aa, Homo sapiens
  CDR3 for alpha chain variable domain of TCR clone 189042 (TRAV16, TRAJ57)
CALSGQGGSEKLVF

SEQ ID NO: 378084 - protein, 19 aa, Homo sapiens
  CDR3 for beta chain variable domain of TCR clone 189042 (TRBV4-3, TRBJ2-7)
CISAPAAKQPSGTPYEQYF

SEQ ID NO: 378085 - protein, 11 aa, Homo sapiens
  CDR3 for alpha chain variable domain of TCR clone 189043 (TRAV2, TRAJ13)
CASGGYQKVTF

SEQ ID NO: 378086 - protein, 15 aa, Homo sapiens
  CDR3 for beta chain variable domain of TCR clone 189043 (TRBV29-1, TRBJ2-1)
CSGRDRKISYNEQFF

SEQ ID NO: 378087 - protein, 12 aa, Homo sapiens
  CDR3 for alpha chain variable domain of TCR clone 189044 (TRAV13-1, TRAJ21)
CAAFFNFNKFYF

SEQ ID NO: 378088 - protein, 14 aa, Homo sapiens
  CDR3 for beta chain variable domain of TCR clone 189044 (TRBV7-2, TRBJ1-2)
CASSQTGSTYGDTF

SEQ ID NO: 378089 - protein, 13 aa, Homo sapiens
  CDR3 for alpha chain variable domain of TCR clone 189045 (TRAV21, TRAJ27)
CAARPGNAGKSTF

SEQ ID NO: 378090 - protein, 15 aa, Homo sapiens
  CDR3 for beta chain variable domain of TCR clone 189045 (TRBV6-3, TRBJ2-7)
CASSSPGTVFYEHYF

SEQ ID NO: 378091 - protein, 15 aa, Homo sapiens
  CDR3 for alpha chain variable domain of TCR clone 189046 (TRAV12-1, TRAJ48)
CVVNPLGFGNEKLSF

SEQ ID NO: 378092 - protein, 15 aa, Homo sapiens
  CDR3 for beta chain variable domain of TCR clone 189046 (TRBV20-1, TRBJ2-1)
CSATSSGTSGGEQFF

SEQ ID NO: 378093 - protein, 11 aa, Homo sapiens
  CDR3 for alpha chain variable domain of TCR clone 189047 (TRAV12-1, TRAJ41)
CVALSGYALNF

SEQ ID NO: 378094 - protein, 17 aa, Homo sapiens
  CDR3 for beta chain variable domain of TCR clone 189047 (TRBV7-8, TRBJ2-6)
CASSAGTGGAGANVLTF

SEQ ID NO: 378095 - protein, 15 aa, Homo sapiens
  CDR3 for alpha chain variable domain of TCR clone 189048 (TRAV17, TRAJ57)
CATGPSQGGSEKLVF

SEQ ID NO: 378096 - protein, 14 aa, Homo sapiens
  CDR3 for beta chain variable domain of TCR clone 189048 (TRBV19, TRBJ2-5)
CASSMTGQQETQYF

SEQ ID NO: 378097 - protein, 14 aa, Homo sapiens
  CDR3 for alpha chain variable domain of TCR clone 189049 (TRAV16, TRAJ57)
CALSGQGGSEKLVF

SEQ ID NO: 378098 - protein, 17 aa, Homo sapiens
  CDR3 for beta chain variable domain of TCR clone 189049 (TRBV7-3, TRBJ2-3)
CASSLMKRMRGADTKYF

SEQ ID NO: 378099 - protein, 14 aa, Homo sapiens
  CDR3 for alpha chain variable domain of TCR clone 189050 (TRAV8-2, TRAJ37)
CVVSISGNTGKLIF

SEQ ID NO: 378100 - protein, 17 aa, Homo sapiens
  CDR3 for beta chain variable domain of TCR clone 189050 (TRBV24-1, TRBJ2-4)
CATSDAEARGVRNIQYF

SEQ ID NO: 378101 - protein, 14 aa, Homo sapiens
  CDR3 for alpha chain variable domain of TCR clone 189051 (TRAV12-3, TRAJ12)
CAMSEVDSSYKLIF

SEQ ID NO: 378102 - protein, 15 aa, Homo sapiens
  CDR3 for beta chain variable domain of TCR clone 189051 (TRBV28, TRBJ2-3)
CAPTFRDWSTDTQYF

SEQ ID NO: 378103 - protein, 12 aa, Homo sapiens
  CDR3 for alpha chain variable domain of TCR clone 189052 (TRAV12-3, TRAJ17)
CAMTLTGNKLTF

SEQ ID NO: 378104 - protein, 15 aa, Homo sapiens
  CDR3 for beta chain variable domain of TCR clone 189052 (TRBV5-7, TRBJ2-5)
CASSLGLAAQETQYF

SEQ ID NO: 378105 - protein, 16 aa, Homo sapiens
  CDR3 for alpha chain variable domain of TCR clone 189053 (TRAV4, TRAJ5)
CLVGPDHGHGQESTYF

SEQ ID NO: 378106 - protein, 17 aa, Homo sapiens
  CDR3 for beta chain variable domain of TCR clone 189053 (TRBV4-1, TRBJ1-4)
CASSQEGPRGVEEKLFF

SEQ ID NO: 378107 - protein, 15 aa, Homo sapiens
  CDR3 for alpha chain variable domain of TCR clone 189054 (TRAV14/DV4, TRAJ33)
CAMREGRDSNYQLIW

SEQ ID NO: 378108 - protein, 16 aa, Homo sapiens
  CDR3 for beta chain variable domain of TCR clone 189054 (TRBV12-5, TRBJ2-5)
CASGPRNSGNQETQYF

SEQ ID NO: 378109 - protein, 11 aa, Homo sapiens
  CDR3 for alpha chain variable domain of TCR clone 189055 (TRAV4, TRAJ31)
CLVGDNARLMF

SEQ ID NO: 378110 - protein, 11 aa, Homo sapiens
  CDR3 for beta chain variable domain of TCR clone 189055 (TRBV25-1, TRBJ2-4)
CQSRDQNIQYF

SEQ ID NO: 378111 - protein, 15 aa, Homo sapiens
  CDR3 for alpha chain variable domain of TCR clone 189056 (TRAV1-1, TRAJ36)
CAGHLNWGKQPLLWD

SEQ ID NO: 378112 - protein, 14 aa, Homo sapiens
  CDR3 for beta chain variable domain of TCR clone 189056 (TRBV5-1, TRBJ2-7)
CASSRGESLYEQYF

SEQ ID NO: 378113 - protein, 13 aa, Homo sapiens
  CDR3 for alpha chain variable domain of TCR clone 189057 (TRAV35, TRAJ22)
CAGLSGSARQLTF

SEQ ID NO: 378114 - protein, 16 aa, Homo sapiens
  CDR3 for beta chain variable domain of TCR clone 189057 (TRBV7-9, TRBJ2-1)
CASSLVLTVQGNEQFF

SEQ ID NO: 378115 - protein, 13 aa, Homo sapiens
  CDR3 for alpha chain variable domain of TCR clone 189058 (TRAV36/DV7, TRAJ49)
CAVEANTGNQFYF

SEQ ID NO: 378116 - protein, 15 aa, Homo sapiens
  CDR3 for beta chain variable domain of TCR clone 189058 (TRBV19, TRBJ1-5)
CASSDSGPRNQPQHF

SEQ ID NO: 378117 - protein, 16 aa, Homo sapiens
  CDR3 for alpha chain variable domain of TCR clone 189059 (TRAV21, TRAJ33)
CAVSPASMDSNYQLIC

SEQ ID NO: 378118 - protein, 15 aa, Homo sapiens
  CDR3 for beta chain variable domain of TCR clone 189059 (TRBV7-9, TRBJ1-5)
CASSQGHQPNQPQHF

SEQ ID NO: 378119 - protein, 13 aa, Homo sapiens
  CDR3 for alpha chain variable domain of TCR clone 189060 (TRAV27, TRAJ57)
CAGFQGGSEKPVF

SEQ ID NO: 378120 - protein, 14 aa, Homo sapiens
  CDR3 for beta chain variable domain of TCR clone 189060 (TRBV20-1, TRBJ1-2)
CSGRKDGRAYGYTF

SEQ ID NO: 378121 - protein, 14 aa, Homo sapiens
  CDR3 for alpha chain variable domain of TCR clone 189061 (TRAV38-2/DV8, TRAJ30)
CAYMDGLGGDKIIF

SEQ ID NO: 378122 - protein, 15 aa, Homo sapiens
  CDR3 for beta chain variable domain of TCR clone 189061 (TRBV7-9, TRBJ2-2)
CDSRPADRDTGELFF

SEQ ID NO: 378123 - protein, 15 aa, Homo sapiens
  CDR3 for alpha chain variable domain of TCR clone 189062 (TRAV27, TRAJ38)
CAARRNAGNNRKLIW

SEQ ID NO: 378124 - protein, 17 aa, Homo sapiens
  CDR3 for beta chain variable domain of TCR clone 189062 (TRBV20-1, TRBJ2-2)
CSASGSGQGGLTGVLFF

SEQ ID NO: 378125 - protein, 14 aa, Homo sapiens
  CDR3 for alpha chain variable domain of TCR clone 189063 (TRAV26-1, TRAJ39)
CIARGSRAGNMLTF

SEQ ID NO: 378126 - protein, 15 aa, Homo sapiens
  CDR3 for beta chain variable domain of TCR clone 189063 (TRBV7-9, TRBJ1-5)
CASSQGHQHNQPQHF

SEQ ID NO: 378127 - protein, 13 aa, Homo sapiens
  CDR3 for alpha chain variable domain of TCR clone 189064 (TRAV3, TRAJ21)
CAVREPDFNKFYF

SEQ ID NO: 378128 - protein, 13 aa, Homo sapiens
  CDR3 for beta chain variable domain of TCR clone 189064 (TRBV9, TRBJ2-1)
CASSPSGGNAQFF

SEQ ID NO: 378129 - protein, 15 aa, Homo sapiens
  CDR3 for alpha chain variable domain of TCR clone 189065 (TRAV3, TRAJ7)
CAVRVKDNGNNRLAF

SEQ ID NO: 378130 - protein, 12 aa, Homo sapiens
  CDR3 for beta chain variable domain of TCR clone 189065 (TRBV19, TRBJ1-5)
CASSIAQQPQHF

SEQ ID NO: 378131 - protein, 14 aa, Homo sapiens
  CDR3 for alpha chain variable domain of TCR clone 189066 (TRAV26-1, TRAJ21)
CIVRVVYNFNKFYF

SEQ ID NO: 378132 - protein, 17 aa, Homo sapiens
  CDR3 for beta chain variable domain of TCR clone 189066 (TRBV11-2, TRBJ2-1)
CASSLYPPGVENNEQFF

SEQ ID NO: 378133 - protein, 13 aa, Homo sapiens
  CDR3 for alpha chain variable domain of TCR clone 189067 (TRAV1-1, TRAJ9)
CASKNTGGFKTIF

SEQ ID NO: 378134 - protein, 16 aa, Homo sapiens
  CDR3 for beta chain variable domain of TCR clone 189067 (TRBV12-5, TRBJ2-5)
CASGPRTSGNQETQYF

SEQ ID NO: 378135 - protein, 14 aa, Homo sapiens
  CDR3 for alpha chain variable domain of TCR clone 189068 (TRAV3, TRAJ9)
CTVTLNTGGFKTIF

SEQ ID NO: 378136 - protein, 14 aa, Homo sapiens
  CDR3 for beta chain variable domain of TCR clone 189068 (TRBV7-2, TRBJ2-7)
CASSLYPWRYEQYF

SEQ ID NO: 378137 - protein, 17 aa, Homo sapiens
  CDR3 for alpha chain variable domain of TCR clone 189069 (TRAV8-6, TRAJ8)
CAVKEGIENTGFQKLVF

SEQ ID NO: 378138 - protein, 14 aa, Homo sapiens
  CDR3 for beta chain variable domain of TCR clone 189069 (TRBV12-5, TRBJ2-5)
CASGSRTHQETQYF

SEQ ID NO: 378139 - protein, 11 aa, Homo sapiens
  CDR3 for alpha chain variable domain of TCR clone 189070 (TRAV12-1, TRAJ37)
CVVNTPGKLIF

SEQ ID NO: 378140 - protein, 13 aa, Homo sapiens
  CDR3 for beta chain variable domain of TCR clone 189070 (TRBV12-4, TRBJ1-5)
CASSPDRAQTQDF

SEQ ID NO: 378141 - protein, 16 aa, Homo sapiens
  CDR3 for alpha chain variable domain of TCR clone 189071 (TRAV12-3, TRAJ45)
CAMGWGSGGGADGLTF

SEQ ID NO: 378142 - protein, 12 aa, Homo sapiens
  CDR3 for beta chain variable domain of TCR clone 189071 (TRBV11-2, TRBJ2-2)
CASSLGGGELFF

SEQ ID NO: 378143 - protein, 11 aa, Homo sapiens
  CDR3 for alpha chain variable domain of TCR clone 189072 (TRAV35, TRAJ30)
CAGERDDKIIF

SEQ ID NO: 378144 - protein, 12 aa, Homo sapiens
  CDR3 for beta chain variable domain of TCR clone 189072 (TRBV11-2, TRBJ2-2)
CASSLPTGELFF

SEQ ID NO: 378145 - protein, 18 aa, Homo sapiens
  CDR3 for alpha chain variable domain of TCR clone 189073 (TRAV21, TRAJ52)
CAVRPSPAGGTSYGKLTF

SEQ ID NO: 378146 - protein, 15 aa, Homo sapiens
  CDR3 for beta chain variable domain of TCR clone 189073 (TRBV27, TRBJ2-1)
CASSNGGGPSNEQFF

SEQ ID NO: 378147 - protein, 18 aa, Homo sapiens
  CDR3 for alpha chain variable domain of TCR clone 189074 (TRAV21, TRAJ52)
CAVRPSPAGGTSYGKLTV

SEQ ID NO: 378148 - protein, 17 aa, Homo sapiens
  CDR3 for beta chain variable domain of TCR clone 189074 (TRBV25-1, TRBJ2-1)
CASSAYGQGRGVYEQFF

SEQ ID NO: 378149 - protein, 15 aa, Homo sapiens
  CDR3 for alpha chain variable domain of TCR clone 189075 (TRAV3, TRAJ20)
CAVRDIKLSDYKLSF

SEQ ID NO: 378150 - protein, 15 aa, Homo sapiens
  CDR3 for beta chain variable domain of TCR clone 189075 (TRBV2, TRBJ2-1)
CASSEARSAYNEQFF

SEQ ID NO: 378151 - protein, 14 aa, Homo sapiens
  CDR3 for alpha chain variable domain of TCR clone 189076 (TRAV1-2, TRAJ16)
CAVNRFSDGQKLLF

SEQ ID NO: 378152 - protein, 17 aa, Homo sapiens
  CDR3 for beta chain variable domain of TCR clone 189076 (TRBV20-1, TRBJ2-1)
CSASSSGLAVSYNEQFF

SEQ ID NO: 378153 - protein, 16 aa, Homo sapiens
  CDR3 for alpha chain variable domain of TCR clone 189077 (TRAV30, TRAJ24)
CGTEIVDADSWGKFQF

SEQ ID NO: 378154 - protein, 14 aa, Homo sapiens
  CDR3 for beta chain variable domain of TCR clone 189077 (TRBV12-5, TRBJ2-5)
CASGSRKHQETQYY

SEQ ID NO: 378155 - protein, 12 aa, Homo sapiens
  CDR3 for alpha chain variable domain of TCR clone 189078 (TRAV17, TRAJ4)
CATDGGYNMLIF

SEQ ID NO: 378156 - protein, 13 aa, Homo sapiens
  CDR3 for beta chain variable domain of TCR clone 189078 (TRBV29-1, TRBJ2-2)
CSTTGVNTGELFF

SEQ ID NO: 378157 - protein, 14 aa, Homo sapiens
  CDR3 for alpha chain variable domain of TCR clone 189079 (TRAV16, TRAJ44)
CALSTTGTASKLTF

SEQ ID NO: 378158 - protein, 17 aa, Homo sapiens
  CDR3 for beta chain variable domain of TCR clone 189079 (TRBV7-2, TRBJ2-3)
CASSLEARGTSTDTQYF

SEQ ID NO: 378159 - protein, 15 aa, Homo sapiens
  CDR3 for alpha chain variable domain of TCR clone 189080 (TRAV8-3, TRAJ29)
CAVGVGDSGNTPLVF

SEQ ID NO: 378160 - protein, 15 aa, Homo sapiens
  CDR3 for beta chain variable domain of TCR clone 189080 (TRBV19, TRBJ1-1)
CASTSGQIQNTEAFF

SEQ ID NO: 378161 - protein, 16 aa, Homo sapiens
  CDR3 for alpha chain variable domain of TCR clone 189081 (TRAV30, TRAJ24)
CGTEIVDADSGGKFQF

SEQ ID NO: 378162 - protein, 15 aa, Homo sapiens
  CDR3 for beta chain variable domain of TCR clone 189081 (TRBV12-4, TRBJ2-1)
CASSLLGRTYNEQFF

SEQ ID NO: 378163 - protein, 15 aa, Homo sapiens
  CDR3 for alpha chain variable domain of TCR clone 189082 (TRAV26-1, TRAJ29)
CIVRVEGSGNTPLVF

SEQ ID NO: 378164 - protein, 14 aa, Homo sapiens
  CDR3 for beta chain variable domain of TCR clone 189082 (TRBV18, TRBJ2-5)
CASSPGGAQETQYF

SEQ ID NO: 378165 - protein, 13 aa, Homo sapiens
  CDR3 for alpha chain variable domain of TCR clone 189083 (TRAV25, TRAJ26)
CAGMDNFGQNFVF

SEQ ID NO: 378166 - protein, 15 aa, Homo sapiens
  CDR3 for beta chain variable domain of TCR clone 189083 (TRBV10-3, TRBJ2-1)
CAIRNGTSGHNEQFF

SEQ ID NO: 378167 - protein, 16 aa, Homo sapiens
  CDR3 for alpha chain variable domain of TCR clone 189084 (TRAV30, TRAJ24)
CGTEIVDADSWGKFQF

SEQ ID NO: 378168 - protein, 13 aa, Homo sapiens
  CDR3 for beta chain variable domain of TCR clone 189084 (TRBV11-2, TRBJ2-5)
FASSSTGEETQYF

SEQ ID NO: 378169 - protein, 17 aa, Homo sapiens
  CDR3 for alpha chain variable domain of TCR clone 189085 (TRAV3, TRAJ42)
CAVRGRDYGGSQGNIIF

SEQ ID NO: 378170 - protein, 14 aa, Homo sapiens
  CDR3 for beta chain variable domain of TCR clone 189085 (TRBV19, TRBJ2-5)
CASSMTGQQETQYF

SEQ ID NO: 378171 - protein, 14 aa, Homo sapiens
  CDR3 for alpha chain variable domain of TCR clone 189086 (TRAV3, TRAJ9)
CAVRLNTGGSKTIF

SEQ ID NO: 378172 - protein, 11 aa, Homo sapiens
  CDR3 for beta chain variable domain of TCR clone 189086 (TRBV6-1, TRBJ2-1)
CHPEGGGHLFF

SEQ ID NO: 378173 - protein, 15 aa, Homo sapiens
  CDR3 for alpha chain variable domain of TCR clone 189087 (TRAV16, TRAJ10)
CALRELTGGGNKLTF

SEQ ID NO: 378174 - protein, 14 aa, Homo sapiens
  CDR3 for beta chain variable domain of TCR clone 189087 (TRBV5-5, TRBJ2-7)
CASGLGQGTYEQYF

SEQ ID NO: 378175 - protein, 14 aa, Homo sapiens
  CDR3 for alpha chain variable domain of TCR clone 189088 (TRAV34, TRAJ22)
CGADTSGSAWQLTF

SEQ ID NO: 378176 - protein, 16 aa, Homo sapiens
  CDR3 for beta chain variable domain of TCR clone 189088 (TRBV2, TRBJ2-3)
CQHRGAPRRWTDTQYF

SEQ ID NO: 378177 - protein, 15 aa, Homo sapiens
  CDR3 for alpha chain variable domain of TCR clone 189089 (TRAV17, TRAJ57)
CATGPSQGGSEKLDV

SEQ ID NO: 378178 - protein, 13 aa, Homo sapiens
  CDR3 for beta chain variable domain of TCR clone 189089 (TRBV27, TRBJ1-4)
CASSLMGDEKLFF

SEQ ID NO: 378179 - protein, 15 aa, Homo sapiens
  CDR3 for alpha chain variable domain of TCR clone 189090 (TRAV13-2, TRAJ24)
CAEILTTDSWGKLKF

SEQ ID NO: 378180 - protein, 20 aa, Homo sapiens
  CDR3 for beta chain variable domain of TCR clone 189090 (TRBV6-6, TRBJ1-3)
CASSWDRGRNLLNAGNTIYF

SEQ ID NO: 378181 - protein, 15 aa, Homo sapiens
  CDR3 for alpha chain variable domain of TCR clone 189091 (TRAV17, TRAJ28)
CATVDSGAGSDQLTF

SEQ ID NO: 378182 - protein, 13 aa, Homo sapiens
  CDR3 for beta chain variable domain of TCR clone 189091 (TRBV5-4, TRBJ2-5)
CASSRQEGETQYF

SEQ ID NO: 378183 - protein, 13 aa, Homo sapiens
  CDR3 for alpha chain variable domain of TCR clone 189092 (TRAV35, TRAJ29)
CAGQLGGNTPLVF

SEQ ID NO: 378184 - protein, 11 aa, Homo sapiens
  CDR3 for beta chain variable domain of TCR clone 189092 (TRBV7-3, TRBJ2-5)
CASSLSETQYF

SEQ ID NO: 378185 - protein, 14 aa, Homo sapiens
  CDR3 for alpha chain variable domain of TCR clone 189093 (TRAV12-2, TRAJ24)
CAVTPADSWGKLQF

SEQ ID NO: 378186 - protein, 15 aa, Homo sapiens
  CDR3 for beta chain variable domain of TCR clone 189093 (TRBV19, TRBJ2-4)
CASRGPRRGENIQYF

SEQ ID NO: 378187 - protein, 18 aa, Homo sapiens
  CDR3 for alpha chain variable domain of TCR clone 189094 (TRAV26-1, TRAJ23)
CIVRVGLEVWNQGGKLIF

SEQ ID NO: 378188 - protein, 15 aa, Homo sapiens
  CDR3 for beta chain variable domain of TCR clone 189094 (TRBV7-9, TRBJ1-6)
CASSSPGRGNSPLHF

SEQ ID NO: 378189 - protein, 14 aa, Homo sapiens
  CDR3 for alpha chain variable domain of TCR clone 189095 (TRAV12-3, TRAJ10)
SHLPLTGVGNKLTF

SEQ ID NO: 378190 - protein, 15 aa, Homo sapiens
  CDR3 for beta chain variable domain of TCR clone 189095 (TRBV11-2, TRBJ1-3)
CASSLDGTVGNTIYF

SEQ ID NO: 378191 - protein, 15 aa, Homo sapiens
  CDR3 for alpha chain variable domain of TCR clone 189096 (TRAV2, TRAJ44)
CAVEAYTGTASKLTF

SEQ ID NO: 378192 - protein, 14 aa, Homo sapiens
  CDR3 for beta chain variable domain of TCR clone 189096 (TRBV7-2, TRBJ1-2)
CASSQTGSTYGYTF

SEQ ID NO: 378193 - protein, 13 aa, Homo sapiens
  CDR3 for alpha chain variable domain of TCR clone 189097 (TRAV2, TRAJ40)
CAVVTSGTYKYIF

SEQ ID NO: 378194 - protein, 15 aa, Homo sapiens
  CDR3 for beta chain variable domain of TCR clone 189097 (TRBV5-1, TRBJ2-3)
CASSYTSGSTDTQYF

SEQ ID NO: 378195 - protein, 13 aa, Homo sapiens
  CDR3 for alpha chain variable domain of TCR clone 189098 (TRAV27, TRAJ49)
CAPRPYTGNQFYF

SEQ ID NO: 378196 - protein, 16 aa, Homo sapiens
  CDR3 for beta chain variable domain of TCR clone 189098 (TRBV4-1, TRBJ1-2)
CASGQDAGHVLYGYTF

SEQ ID NO: 378197 - protein, 14 aa, Homo sapiens
  CDR3 for alpha chain variable domain of TCR clone 189099 (TRAV8-1, TRAJ5)
CAVRTDTGRRALTF

SEQ ID NO: 378198 - protein, 14 aa, Homo sapiens
  CDR3 for beta chain variable domain of TCR clone 189099 (TRBV7-8, TRBJ2-3)
CDSSFPDGQDTQYF

SEQ ID NO: 378199 - protein, 11 aa, Homo sapiens
  CDR3 for alpha chain variable domain of TCR clone 189100 (TRAV2, TRAJ33)
CAVESNYQLIW

SEQ ID NO: 378200 - protein, 17 aa, Homo sapiens
  CDR3 for beta chain variable domain of TCR clone 189100 (TRBV4-2, TRBJ1-1)
CASSQVATGGMNTEAFF

SEQ ID NO: 378201 - protein, 15 aa, Homo sapiens
  CDR3 for alpha chain variable domain of TCR clone 189101 (TRAV25, TRAJ53)
CPTSNSGGSNYKLTF

SEQ ID NO: 378202 - protein, 15 aa, Homo sapiens
  CDR3 for beta chain variable domain of TCR clone 189101 (TRBV20-1, TRBJ2-7)
CSASVPAAYFYEQYF

SEQ ID NO: 378203 - protein, 14 aa, Homo sapiens
  CDR3 for alpha chain variable domain of TCR clone 189102 (TRAV4, TRAJ26)
CLVGPHNYGQNFVF

SEQ ID NO: 378204 - protein, 13 aa, Homo sapiens
  CDR3 for beta chain variable domain of TCR clone 189102 (TRBV19, TRBJ1-2)
CASSRGQVYGYTF

SEQ ID NO: 378205 - protein, 18 aa, Homo sapiens
  CDR3 for alpha chain variable domain of TCR clone 189103 (TRAV12-3, TRAJ52)
CAMSRPNAGGTSYGKLTF

SEQ ID NO: 378206 - protein, 17 aa, Homo sapiens
  CDR3 for beta chain variable domain of TCR clone 189103 (TRBV7-3, TRBJ2-3)
CASSLMKWMRGADTQYF

SEQ ID NO: 378207 - protein, 15 aa, Homo sapiens
  CDR3 for alpha chain variable domain of TCR clone 189104 (TRAV34, TRAJ36)
CGAPSWLGGANNLFF

SEQ ID NO: 378208 - protein, 16 aa, Homo sapiens
  CDR3 for beta chain variable domain of TCR clone 189104 (TRBV4-3, TRBJ2-1)
CASSYRRLGSWDEQFF

SEQ ID NO: 378209 - protein, 13 aa, Homo sapiens
  CDR3 for alpha chain variable domain of TCR clone 189105 (TRAV8-3, TRAJ6)
CAARRGGSYIPTF

SEQ ID NO: 378210 - protein, 15 aa, Homo sapiens
  CDR3 for beta chain variable domain of TCR clone 189105 (TRBV4-1, TRBJ2-3)
CASSKLAGGRDTQYF

SEQ ID NO: 378211 - protein, 14 aa, Homo sapiens
  CDR3 for alpha chain variable domain of TCR clone 189106 (TRAV38-1, TRAJ29)
CAFITHSGNTPLVF

SEQ ID NO: 378212 - protein, 14 aa, Homo sapiens
  CDR3 for beta chain variable domain of TCR clone 189106 (TRBV18, TRBJ2-7)
CASSPRGGAYEQYF

SEQ ID NO: 378213 - protein, 14 aa, Homo sapiens
  CDR3 for alpha chain variable domain of TCR clone 189107 (TRAV4, TRAJ17)
CLVGDIAAGNKLTF

SEQ ID NO: 378214 - protein, 14 aa, Homo sapiens
  CDR3 for beta chain variable domain of TCR clone 189107 (TRBV4-1, TRBJ2-7)
CASSPVAGGDEQYF

SEQ ID NO: 378215 - protein, 13 aa, Homo sapiens
  CDR3 for alpha chain variable domain of TCR clone 189108 (TRAV1-2, TRAJ9)
CAALNTGGFKTIF

SEQ ID NO: 378216 - protein, 19 aa, Homo sapiens
  CDR3 for beta chain variable domain of TCR clone 189108 (TRBV28, TRBJ2-4)
CASSFQPGGPAHSKNMQYF

SEQ ID NO: 378217 - protein, 15 aa, Homo sapiens
  CDR3 for alpha chain variable domain of TCR clone 189109 (TRAV13-2, TRAJ8)
CAPGGRNTGFQKLVF

SEQ ID NO: 378218 - protein, 13 aa, Homo sapiens
  CDR3 for beta chain variable domain of TCR clone 189109 (TRBV27, TRBJ1-1)
CASSLSIGAEAFF

SEQ ID NO: 378219 - protein, 12 aa, Homo sapiens
  CDR3 for alpha chain variable domain of TCR clone 189110 (TRAV12-3, TRAJ5)
CAMDTGRRALTF

SEQ ID NO: 378220 - protein, 13 aa, Homo sapiens
  CDR3 for beta chain variable domain of TCR clone 189110 (TRBV3-1, TRBJ2-2)
CASLARGSGELFF

SEQ ID NO: 378221 - protein, 14 aa, Homo sapiens
  CDR3 for alpha chain variable domain of TCR clone 189111 (TRAV12-2, TRAJ36)
CAVKISTGANNLFF

SEQ ID NO: 378222 - protein, 14 aa, Homo sapiens
  CDR3 for beta chain variable domain of TCR clone 189111 (TRBV20-1, TRBJ2-3)
CSARGETSTDTQYF

SEQ ID NO: 378223 - protein, 15 aa, Homo sapiens
  CDR3 for alpha chain variable domain of TCR clone 189112 (TRAV23/DV6, TRAJ13)
CVAWPGGGGYQKVTF

SEQ ID NO: 378224 - protein, 17 aa, Homo sapiens
  CDR3 for beta chain variable domain of TCR clone 189112 (TRBV19, TRBJ2-7)
CASSISFYDSYPYEQYF

SEQ ID NO: 378225 - protein, 16 aa, Homo sapiens
  CDR3 for alpha chain variable domain of TCR clone 189113 (TRAV14/DV4, TRAJ54)
CAMREGRIQGAQKLVF

SEQ ID NO: 378226 - protein, 17 aa, Homo sapiens
  CDR3 for beta chain variable domain of TCR clone 189113 (TRBV20-1, TRBJ2-1)
CSAPPRLAGTRYNEQFF

SEQ ID NO: 378227 - protein, 14 aa, Homo sapiens
  CDR3 for alpha chain variable domain of TCR clone 189114 (TRAV35, TRAJ22)
CAGLRPGSARQLTF

SEQ ID NO: 378228 - protein, 15 aa, Homo sapiens
  CDR3 for beta chain variable domain of TCR clone 189114 (TRBV29-1, TRBJ2-7)
CSVEFFDRGSYEQYF

SEQ ID NO: 378229 - protein, 16 aa, Homo sapiens
  CDR3 for alpha chain variable domain of TCR clone 189115 (TRAV16, TRAJ4)
CSLRRMFSGGYNKLIF

SEQ ID NO: 378230 - protein, 16 aa, Homo sapiens
  CDR3 for beta chain variable domain of TCR clone 189115 (TRBV24-1, TRBJ2-3)
CATSDPGTGATDTQYF

SEQ ID NO: 378231 - protein, 15 aa, Homo sapiens
  CDR3 for alpha chain variable domain of TCR clone 189116 (TRAV26-1, TRAJ29)
CIVRVEGSGNTPLVF

SEQ ID NO: 378232 - protein, 17 aa, Homo sapiens
  CDR3 for beta chain variable domain of TCR clone 189116 (TRBV7-9, TRBJ2-3)
CASSLMKRMRGADTQYF

SEQ ID NO: 378233 - protein, 18 aa, Homo sapiens
  CDR3 for alpha chain variable domain of TCR clone 189117 (TRAV13-1, TRAJ52)
CAASKRSAGGTSYGKLTF

SEQ ID NO: 378234 - protein, 15 aa, Homo sapiens
  CDR3 for beta chain variable domain of TCR clone 189117 (TRBV19, TRBJ2-4)
CASRGPRRGENSQYF

SEQ ID NO: 378235 - protein, 14 aa, Homo sapiens
  CDR3 for alpha chain variable domain of TCR clone 189118 (TRAV8-1, TRAJ5)
CAVRTDTGRRALTF

SEQ ID NO: 378236 - protein, 15 aa, Homo sapiens
  CDR3 for beta chain variable domain of TCR clone 189118 (TRBV19, TRBJ2-4)
CASSDGGGAKNIQYF

SEQ ID NO: 378237 - protein, 13 aa, Homo sapiens
  CDR3 for alpha chain variable domain of TCR clone 189119 (TRAV2, TRAJ40)
CAVVTSGTYKYIF

SEQ ID NO: 378238 - protein, 11 aa, Homo sapiens
  CDR3 for beta chain variable domain of TCR clone 189119 (TRBV29-1, TRBJ1-3)
CSVAIGNTIYF

SEQ ID NO: 378239 - protein, 14 aa, Homo sapiens
  CDR3 for alpha chain variable domain of TCR clone 189120 (TRAV21, TRAJ47)
CAVEKLEYGNKLVF

SEQ ID NO: 378240 - protein, 14 aa, Homo sapiens
  CDR3 for beta chain variable domain of TCR clone 189120 (TRBV5-1, TRBJ2-7)
CASSRGESLYEQYF

SEQ ID NO: 378241 - protein, 12 aa, Homo sapiens
  CDR3 for alpha chain variable domain of TCR clone 189121 (TRAV12-1, TRAJ34)
CLVAGATDKLIF

SEQ ID NO: 378242 - protein, 12 aa, Homo sapiens
  CDR3 for beta chain variable domain of TCR clone 189121 (TRBV7-9, TRBJ1-1)
CASSVVRGEAFF

SEQ ID NO: 378243 - protein, 12 aa, Homo sapiens
  CDR3 for alpha chain variable domain of TCR clone 189122 (TRAV16, TRAJ26)
CALSGSEFCLWF

SEQ ID NO: 378244 - protein, 12 aa, Homo sapiens
  CDR3 for beta chain variable domain of TCR clone 189122 (TRBV11-2, TRBJ2-1)
CASSPGNNEQFF

SEQ ID NO: 378245 - protein, 15 aa, Homo sapiens
  CDR3 for alpha chain variable domain of TCR clone 189123 (TRAV2, TRAJ9)
CAVEELGTGGFKTIF

SEQ ID NO: 378246 - protein, 16 aa, Homo sapiens
  CDR3 for beta chain variable domain of TCR clone 189123 (TRBV24-1, TRBJ2-3)
CATSDPGTGATDTQYF

SEQ ID NO: 378247 - protein, 15 aa, Homo sapiens
  CDR3 for alpha chain variable domain of TCR clone 189124 (TRAV29/DV5, TRAJ29)
CAASERSSGNTPLVF

SEQ ID NO: 378248 - protein, 12 aa, Homo sapiens
  CDR3 for beta chain variable domain of TCR clone 189124 (TRBV11-2, TRBJ2-1)
CASSVQREGQFF

SEQ ID NO: 378249 - protein, 14 aa, Homo sapiens
  CDR3 for alpha chain variable domain of TCR clone 189125 (TRAV12-2, TRAJ17)
CAVNIKAAGNKLTF

SEQ ID NO: 378250 - protein, 15 aa, Homo sapiens
  CDR3 for beta chain variable domain of TCR clone 189125 (TRBV7-3, TRBJ2-1)
CASSLGQGPFGEQFF

SEQ ID NO: 378251 - protein, 15 aa, Homo sapiens
  CDR3 for alpha chain variable domain of TCR clone 189126 (TRAV23/DV6, TRAJ18)
CAASFRGSTLGRLYF

SEQ ID NO: 378252 - protein, 13 aa, Homo sapiens
  CDR3 for beta chain variable domain of TCR clone 189126 (TRBV28, TRBJ2-7)
CAVLDRAGGEQYF

SEQ ID NO: 378253 - protein, 16 aa, Homo sapiens
  CDR3 for alpha chain variable domain of TCR clone 189127 (TRAV30, TRAJ24)
GGTEIVDADSWGKFQF

SEQ ID NO: 378254 - protein, 15 aa, Homo sapiens
  CDR3 for beta chain variable domain of TCR clone 189127 (TRBV7-9, TRBJ1-5)
CASSQGHQPNQPQHF

SEQ ID NO: 378255 - protein, 14 aa, Homo sapiens
  CDR3 for alpha chain variable domain of TCR clone 189128 (TRAV29/DV5, TRAJ45)
CAASARGGADGLTF

SEQ ID NO: 378256 - protein, 14 aa, Homo sapiens
  CDR3 for beta chain variable domain of TCR clone 189128 (TRBV7-7, TRBJ2-2)
CATRQDSDTGELFF

SEQ ID NO: 378257 - protein, 14 aa, Homo sapiens
  CDR3 for alpha chain variable domain of TCR clone 189129 (TRAV12-3, TRAJ10)
GHLPLTGGGNKLTF

SEQ ID NO: 378258 - protein, 14 aa, Homo sapiens
  CDR3 for beta chain variable domain of TCR clone 189129 (TRBV12-5, TRBJ2-5)
CASGSRTHQETQYF

SEQ ID NO: 378259 - protein, 13 aa, Homo sapiens
  CDR3 for alpha chain variable domain of TCR clone 189130 (TRAV17, TRAJ26)
CATVDNYGQNFVF

SEQ ID NO: 378260 - protein, 14 aa, Homo sapiens
  CDR3 for beta chain variable domain of TCR clone 189130 (TRBV19, TRBJ2-7)
CASTVQGRPYEQYF

SEQ ID NO: 378261 - protein, 16 aa, Homo sapiens
  CDR3 for alpha chain variable domain of TCR clone 189131 (TRAV30, TRAJ24)
CGTEIVDADSWGKFQF

SEQ ID NO: 378262 - protein, 14 aa, Homo sapiens
  CDR3 for beta chain variable domain of TCR clone 189131 (TRBV19, TRBJ1-1)
CASSPNRGDTEAFF

SEQ ID NO: 378263 - protein, 12 aa, Homo sapiens
  CDR3 for alpha chain variable domain of TCR clone 189132 (TRAV17, TRAJ57)
CATDGGSEKLVP

SEQ ID NO: 378264 - protein, 16 aa, Homo sapiens
  CDR3 for beta chain variable domain of TCR clone 189132 (TRBV5-5, TRBJ2-7)
CASSVRTSGRPYEQYF

SEQ ID NO: 378265 - protein, 15 aa, Homo sapiens
  CDR3 for alpha chain variable domain of TCR clone 189133 (TRAV16, TRAJ4)
CALEDPSGGYNKLIF

SEQ ID NO: 378266 - protein, 13 aa, Homo sapiens
  CDR3 for beta chain variable domain of TCR clone 189133 (TRBV7-3, TRBJ2-7)
CASSQAGGYEQYV

SEQ ID NO: 378267 - protein, 15 aa, Homo sapiens
  CDR3 for alpha chain variable domain of TCR clone 189134 (TRAV34, TRAJ38)
CGADFTPGNNRKLIW

SEQ ID NO: 378268 - protein, 14 aa, Homo sapiens
  CDR3 for beta chain variable domain of TCR clone 189134 (TRBV20-1, TRBJ1-1)
CSAQTRIGGTEALF

SEQ ID NO: 378269 - protein, 17 aa, Homo sapiens
  CDR3 for alpha chain variable domain of TCR clone 189135 (TRAV3, TRAJ12)
CAVRDGGRMDSSYKLIF

SEQ ID NO: 378270 - protein, 14 aa, Homo sapiens
  CDR3 for beta chain variable domain of TCR clone 189135 (TRBV7-9, TRBJ1-2)
CASNRQGANYCYTF

SEQ ID NO: 378271 - protein, 14 aa, Homo sapiens
  CDR3 for alpha chain variable domain of TCR clone 189136 (TRAV26-1, TRAJ16)
CIAVPFSDGQKLLF

SEQ ID NO: 378272 - protein, 16 aa, Homo sapiens
  CDR3 for beta chain variable domain of TCR clone 189136 (TRBV7-3, TRBJ2-2)
CASSLKRGTLSGELFF

SEQ ID NO: 378273 - protein, 14 aa, Homo sapiens
  CDR3 for alpha chain variable domain of TCR clone 189137 (TRAV12-1, TRAJ43)
CVVNGRSNNNEMRF

SEQ ID NO: 378274 - protein, 12 aa, Homo sapiens
  CDR3 for beta chain variable domain of TCR clone 189137 (TRBV29-1, TRBJ2-3)
CSVTGGADTQYF

SEQ ID NO: 378275 - protein, 13 aa, Homo sapiens
  CDR3 for alpha chain variable domain of TCR clone 189138 (TRAV29/DV5, TRAJ58)
CAGEETSGSRLTF

SEQ ID NO: 378276 - protein, 15 aa, Homo sapiens
  CDR3 for beta chain variable domain of TCR clone 189138 (TRBV11-2, TRBJ1-6)
CASTGCGTAVSPLHF

SEQ ID NO: 378277 - protein, 14 aa, Homo sapiens
  CDR3 for alpha chain variable domain of TCR clone 189139 (TRAV34, TRAJ44)
CGADGTGTASKLTF

SEQ ID NO: 378278 - protein, 15 aa, Homo sapiens
  CDR3 for beta chain variable domain of TCR clone 189139 (TRBV12-4, TRBJ2-7)
CASSPPTGLQETQYF

SEQ ID NO: 378279 - protein, 14 aa, Homo sapiens
  CDR3 for alpha chain variable domain of TCR clone 189140 (TRAV26-1, TRAJ53)
CIADRGGSNYKLTF

SEQ ID NO: 378280 - protein, 16 aa, Homo sapiens
  CDR3 for beta chain variable domain of TCR clone 189140 (TRBV12-4, TRBJ1-5)
CASSRPVGGSNQPQHF

SEQ ID NO: 378281 - protein, 11 aa, Homo sapiens
  CDR3 for alpha chain variable domain of TCR clone 189141 (TRAV35, TRAJ30)
CAGKRDDKIIF

SEQ ID NO: 378282 - protein, 14 aa, Homo sapiens
  CDR3 for beta chain variable domain of TCR clone 189141 (TRBV15, TRBJ2-5)
CATSGDRVQETQYF

SEQ ID NO: 378283 - protein, 11 aa, Homo sapiens
  CDR3 for alpha chain variable domain of TCR clone 189142 (TRAV2, TRAJ13)
CASGGYQKVTF

SEQ ID NO: 378284 - protein, 15 aa, Homo sapiens
  CDR3 for beta chain variable domain of TCR clone 189142 (TRBV12-4, TRBJ2-2)
CASSRQGANTGELFF

SEQ ID NO: 378285 - protein, 12 aa, Homo sapiens
  CDR3 for alpha chain variable domain of TCR clone 189143 (TRAV12-3, TRAJ17)
CAMTLTGTKLTF

SEQ ID NO: 378286 - protein, 15 aa, Homo sapiens
  CDR3 for beta chain variable domain of TCR clone 189143 (TRBV20-1, TRBJ2-7)
CSARVPAAYFYEQYL

SEQ ID NO: 378287 - protein, 13 aa, Homo sapiens
  CDR3 for alpha chain variable domain of TCR clone 189144 (TRAV13-1, TRAJ5)
CAARVTGRRALTF

SEQ ID NO: 378288 - protein, 15 aa, Homo sapiens
  CDR3 for beta chain variable domain of TCR clone 189144 (TRBV7-9, TRBJ2-7)
CASSPGDGLTYEQYF

SEQ ID NO: 378289 - protein, 18 aa, Homo sapiens
  CDR3 for alpha chain variable domain of TCR clone 189145 (TRAV13-1, TRAJ52)
CAAKNPNAGGTSYGKLTF

SEQ ID NO: 378290 - protein, 15 aa, Homo sapiens
  CDR3 for beta chain variable domain of TCR clone 189145 (TRBV5-5, TRBJ1-5)
CASSLEGASNQPQHF

SEQ ID NO: 378291 - protein, 14 aa, Homo sapiens
  CDR3 for alpha chain variable domain of TCR clone 189146 (TRAV20, TRAJ17)
CAVQARAAGNKLTF

SEQ ID NO: 378292 - protein, 13 aa, Homo sapiens
  CDR3 for beta chain variable domain of TCR clone 189146 (TRBV19, TRBJ1-2)
CASSPTLNYGYSF

SEQ ID NO: 378293 - protein, 12 aa, Homo sapiens
  CDR3 for alpha chain variable domain of TCR clone 189147 (TRAV21, TRAJ33)
CAKMDSNYQLIW

SEQ ID NO: 378294 - protein, 14 aa, Homo sapiens
  CDR3 for beta chain variable domain of TCR clone 189147 (TRBV2, TRBJ2-7)
CASSLTSVGYEQYF

SEQ ID NO: 378295 - protein, 14 aa, Homo sapiens
  CDR3 for alpha chain variable domain of TCR clone 189148 (TRAV8-1, TRAJ24)
CAVNAADSWGKLQF

SEQ ID NO: 378296 - protein, 16 aa, Homo sapiens
  CDR3 for beta chain variable domain of TCR clone 189148 (TRBV4-3, TRBJ2-1)
CASSPALDRGVNEHLF

SEQ ID NO: 378297 - protein, 11 aa, Homo sapiens
  CDR3 for alpha chain variable domain of TCR clone 189149 (TRAV17, TRAJ9)
CATTGGLETIF

SEQ ID NO: 378298 - protein, 14 aa, Homo sapiens
  CDR3 for beta chain variable domain of TCR clone 189149 (TRBV7-9, TRBJ2-2)
CASSGLADTGELFF

SEQ ID NO: 378299 - protein, 14 aa, Homo sapiens
  CDR3 for alpha chain variable domain of TCR clone 189150 (TRAV12-1, TRAJ17)
CVVNFKAEGNKLTF

SEQ ID NO: 378300 - protein, 17 aa, Homo sapiens
  CDR3 for beta chain variable domain of TCR clone 189150 (TRBV20-1, TRBJ2-1)
CSASASGLAGSYNEQFF

SEQ ID NO: 378301 - protein, 15 aa, Homo sapiens
  CDR3 for alpha chain variable domain of TCR clone 189151 (TRAV12-3, TRAJ9)
CAMSALLTGGFKTIF

SEQ ID NO: 378302 - protein, 12 aa, Homo sapiens
  CDR3 for beta chain variable domain of TCR clone 189151 (TRBV28, TRBJ2-1)
CASSLTVIEQFF

SEQ ID NO: 378303 - protein, 14 aa, Homo sapiens
  CDR3 for alpha chain variable domain of TCR clone 189152 (TRAV26-1, )
CIADNDGNNHIQNP

SEQ ID NO: 378304 - protein, 13 aa, Homo sapiens
  CDR3 for beta chain variable domain of TCR clone 189152 (TRBV20-1, TRBJ1-1)
CSARGGGNTEAFF

SEQ ID NO: 378305 - protein, 13 aa, Homo sapiens
  CDR3 for alpha chain variable domain of TCR clone 189153 (TRAV2, TRAJ15)
CAVAFQAGTALIF

SEQ ID NO: 378306 - protein, 14 aa, Homo sapiens
  CDR3 for beta chain variable domain of TCR clone 189153 (TRBV20-1, TRBJ1-1)
CSAQTRIGGTEAFF

SEQ ID NO: 378307 - protein, 16 aa, Homo sapiens
  CDR3 for alpha chain variable domain of TCR clone 189154 (TRAV17, TRAJ53)
CATDALSGGSNYQLTF

SEQ ID NO: 378308 - protein, 12 aa, Homo sapiens
  CDR3 for beta chain variable domain of TCR clone 189154 (TRBV5-1, TRBJ2-7)
CASSFRGYEQYF

SEQ ID NO: 378309 - protein, 16 aa, Homo sapiens
  CDR3 for alpha chain variable domain of TCR clone 189155 (TRAV12-3, TRAJ53)
CAMSPGSGGSNYKLTF

SEQ ID NO: 378310 - protein, 16 aa, Homo sapiens
  CDR3 for beta chain variable domain of TCR clone 189155 (TRBV15, TRBJ2-1)
CATSRERLAGAYEQFF

SEQ ID NO: 378311 - protein, 10 aa, Homo sapiens
  CDR3 for alpha chain variable domain of TCR clone 189156 (TRAV21, TRAJ49)
CAVTGNQFYF

SEQ ID NO: 378312 - protein, 15 aa, Homo sapiens
  CDR3 for beta chain variable domain of TCR clone 189156 (TRBV6-1, TRBJ2-3)
CTSTTLAGHTDTQYF

SEQ ID NO: 378313 - protein, 11 aa, Homo sapiens
  CDR3 for alpha chain variable domain of TCR clone 189157 (TRAV3, TRAJ21)
CAVGNFNKFYF

SEQ ID NO: 378314 - protein, 14 aa, Homo sapiens
  CDR3 for beta chain variable domain of TCR clone 189157 (TRBV7-9, TRBJ1-1)
CASSSTKGNTEAFF

SEQ ID NO: 378315 - protein, 13 aa, Homo sapiens
  CDR3 for alpha chain variable domain of TCR clone 189158 (TRAV13-1, TRAJ9)
CAARGTGGFKTIF

SEQ ID NO: 378316 - protein, 12 aa, Homo sapiens
  CDR3 for beta chain variable domain of TCR clone 189158 (TRBV2, TRBJ2-1)
CAYGPPGNEQFY

SEQ ID NO: 378317 - protein, 17 aa, Homo sapiens
  CDR3 for alpha chain variable domain of TCR clone 189159 (TRAV3, TRAJ6)
CAVRDGPRAGGSYIPTF

SEQ ID NO: 378318 - protein, 14 aa, Homo sapiens
  CDR3 for beta chain variable domain of TCR clone 189159 (TRBV7-2, TRBJ2-7)
CASSPKISLYEQYF

SEQ ID NO: 378319 - protein, 15 aa, Homo sapiens
  CDR3 for alpha chain variable domain of TCR clone 189160 (TRAV12-2, TRAJ50)
CAVNGLETSYDKVIF

SEQ ID NO: 378320 - protein, 15 aa, Homo sapiens
  CDR3 for beta chain variable domain of TCR clone 189160 (TRBV2, TRBJ2-7)
CASSEGLARSYEQYF

SEQ ID NO: 378321 - protein, 15 aa, Homo sapiens
  CDR3 for alpha chain variable domain of TCR clone 189161 (TRAV8-6, TRAJ38)
CAVSSNAGNNRKLIW

SEQ ID NO: 378322 - protein, 12 aa, Homo sapiens
  CDR3 for beta chain variable domain of TCR clone 189161 (TRBV14, TRBJ2-5)
CASSQLKETQYF

SEQ ID NO: 378323 - protein, 14 aa, Homo sapiens
  CDR3 for alpha chain variable domain of TCR clone 189162 (TRAV26-1, TRAJ45)
CIEVTGGGSDGLTF

SEQ ID NO: 378324 - protein, 19 aa, Homo sapiens
  CDR3 for beta chain variable domain of TCR clone 189162 (TRBV19, TRBJ2-2)
CASTRPGLAGGRVTGELFF

SEQ ID NO: 378325 - protein, 13 aa, Homo sapiens
  CDR3 for alpha chain variable domain of TCR clone 189163 (TRAV8-6, TRAJ49)
CAVITNTGNRFYF

SEQ ID NO: 378326 - protein, 15 aa, Homo sapiens
  CDR3 for beta chain variable domain of TCR clone 189163 (TRBV9, TRBJ1-6)
FASSVAGTGDSPLHF

SEQ ID NO: 378327 - protein, 13 aa, Homo sapiens
  CDR3 for alpha chain variable domain of TCR clone 189164 (TRAV36/DV7, TRAJ37)
CAVFSSNTGKLIF

SEQ ID NO: 378328 - protein, 16 aa, Homo sapiens
  CDR3 for beta chain variable domain of TCR clone 189164 (TRBV3-1, TRBJ2-5)
CASSSGQFNGFGTQYF

SEQ ID NO: 378329 - protein, 11 aa, Homo sapiens
  CDR3 for alpha chain variable domain of TCR clone 189165 (TRAV13-2, TRAJ23)
CAESPRGKLIF

SEQ ID NO: 378330 - protein, 15 aa, Homo sapiens
  CDR3 for beta chain variable domain of TCR clone 189165 (TRBV28, TRBJ2-1)
CASSGLAEVDNEQFV

SEQ ID NO: 378331 - protein, 11 aa, Homo sapiens
  CDR3 for alpha chain variable domain of TCR clone 189166 (TRAV2, TRAJ13)
CASGGYQKVTF

SEQ ID NO: 378332 - protein, 15 aa, Homo sapiens
  CDR3 for beta chain variable domain of TCR clone 189166 (TRBV19, TRBJ2-7)
CASSIGLAVSYEQYF

SEQ ID NO: 378333 - protein, 15 aa, Homo sapiens
  CDR3 for alpha chain variable domain of TCR clone 189167 (TRAV35, TRAJ30)
CAGQPEMNRDDKIIF

SEQ ID NO: 378334 - protein, 15 aa, Homo sapiens
  CDR3 for beta chain variable domain of TCR clone 189167 (TRBV20-1, TRBJ2-7)
CSARDRVSGMDEQYF

SEQ ID NO: 378335 - protein, 14 aa, Homo sapiens
  CDR3 for alpha chain variable domain of TCR clone 189168 (TRAV1-2, TRAJ16)
CAVNRFSDVQKLLF

SEQ ID NO: 378336 - protein, 15 aa, Homo sapiens
  CDR3 for beta chain variable domain of TCR clone 189168 (TRBV9, TRBJ1-6)
CASSVAGTGDSPLLF

SEQ ID NO: 378337 - protein, 12 aa, Homo sapiens
  CDR3 for alpha chain variable domain of TCR clone 189169 (TRAV10, TRAJ43)
CVVVRVGNDMRF

SEQ ID NO: 378338 - protein, 15 aa, Homo sapiens
  CDR3 for beta chain variable domain of TCR clone 189169 (TRBV2, TRBJ2-3)
CASSLAGAFIDTQYF

SEQ ID NO: 378339 - protein, 15 aa, Homo sapiens
  CDR3 for alpha chain variable domain of TCR clone 189170 (TRAV8-4, TRAJ53)
CAVSEGGGSNYKLTF

SEQ ID NO: 378340 - protein, 17 aa, Homo sapiens
  CDR3 for beta chain variable domain of TCR clone 189170 (TRBV20-1, TRBJ2-2)
CSASGSGQGGLTGELFF

SEQ ID NO: 378341 - protein, 14 aa, Homo sapiens
  CDR3 for alpha chain variable domain of TCR clone 189171 (TRAV17, TRAJ57)
CATDPQGGSEKLVF

SEQ ID NO: 378342 - protein, 13 aa, Homo sapiens
  CDR3 for beta chain variable domain of TCR clone 189171 (TRBV7-9, TRBJ1-2)
CACSLKQNYGYTF

SEQ ID NO: 378343 - protein, 14 aa, Homo sapiens
  CDR3 for alpha chain variable domain of TCR clone 189172 (TRAV26-1, TRAJ34)
CIVRVAYNTDKLIF

SEQ ID NO: 378344 - protein, 15 aa, Homo sapiens
  CDR3 for beta chain variable domain of TCR clone 189172 (TRBV19, TRBJ1-6)
CASSTQGAVGSPLHF

SEQ ID NO: 378345 - protein, 12 aa, Homo sapiens
  CDR3 for alpha chain variable domain of TCR clone 189173 (TRAV13-1, TRAJ21)
CAAKEGFNKFYF

SEQ ID NO: 378346 - protein, 13 aa, Homo sapiens
  CDR3 for beta chain variable domain of TCR clone 189173 (TRBV7-3, TRBJ1-1)
CASSQDCGAEAFF

SEQ ID NO: 378347 - protein, 14 aa, Homo sapiens
  CDR3 for alpha chain variable domain of TCR clone 189174 (TRAV12-2, TRAJ13)
CAVVKTGGYQKVTF

SEQ ID NO: 378348 - protein, 15 aa, Homo sapiens
  CDR3 for beta chain variable domain of TCR clone 189174 (TRBV27, TRBJ2-1)
CASSNGGGSSNEQFF

SEQ ID NO: 378349 - protein, 17 aa, Homo sapiens
  CDR3 for alpha chain variable domain of TCR clone 189175 (TRAV8-6, TRAJ58)
CAVSSWVGETSGSRLTF

SEQ ID NO: 378350 - protein, 14 aa, Homo sapiens
  CDR3 for beta chain variable domain of TCR clone 189175 (TRBV7-9, TRBJ2-3)
CASSLEDGTDTQYF

SEQ ID NO: 378351 - protein, 12 aa, Homo sapiens
  CDR3 for alpha chain variable domain of TCR clone 189176 (TRAV2, TRAJ31)
CAGEDNNARLMC

SEQ ID NO: 378352 - protein, 12 aa, Homo sapiens
  CDR3 for beta chain variable domain of TCR clone 189176 (TRBV28, TRBJ2-3)
CASSLYRDTQYF

SEQ ID NO: 378353 - protein, 13 aa, Homo sapiens
  CDR3 for alpha chain variable domain of TCR clone 189177 (TRAV21, TRAJ45)
CASPGGGADGLTI

SEQ ID NO: 378354 - protein, 14 aa, Homo sapiens
  CDR3 for beta chain variable domain of TCR clone 189177 (TRBV11-2, TRBJ2-3)
CASSRLARTDTQYF

SEQ ID NO: 378355 - protein, 17 aa, Homo sapiens
  CDR3 for alpha chain variable domain of TCR clone 189178 (TRAV12-2, TRAJ48)
CASNEKLTFGTGTRLTI

SEQ ID NO: 378356 - protein, 13 aa, Homo sapiens
  CDR3 for beta chain variable domain of TCR clone 189178 (TRBV2, TRBJ1-1)
CASRWTVNTEAFF

SEQ ID NO: 378357 - protein, 15 aa, Homo sapiens
  CDR3 for alpha chain variable domain of TCR clone 189179 (TRAV3, TRAJ4)
CAVIDGTGGYNKLIF

SEQ ID NO: 378358 - protein, 16 aa, Homo sapiens
  CDR3 for beta chain variable domain of TCR clone 189179 (TRBV27, TRBJ2-2)
CASSSSGVSNTGELFF

SEQ ID NO: 378359 - protein, 15 aa, Homo sapiens
  CDR3 for alpha chain variable domain of TCR clone 189180 (TRAV12-1, TRAJ10)
CVANKLTGGGNKLTF

SEQ ID NO: 378360 - protein, 17 aa, Homo sapiens
  CDR3 for beta chain variable domain of TCR clone 189180 (TRBV5-1, TRBJ1-6)
CASSPSLQGSDNSPLHF

SEQ ID NO: 378361 - protein, 15 aa, Homo sapiens
  CDR3 for alpha chain variable domain of TCR clone 189181 (TRAV13-1, TRAJ40)
CAVWNLQIHLWNRHQ

SEQ ID NO: 378362 - protein, 13 aa, Homo sapiens
  CDR3 for beta chain variable domain of TCR clone 189181 (TRBV19, TRBJ1-5)
CASSIGGNQPQHF

SEQ ID NO: 378363 - protein, 15 aa, Homo sapiens
  CDR3 for alpha chain variable domain of TCR clone 189182 (TRAV21, TRAJ32)
CAVNSYGGATNKLIF

SEQ ID NO: 378364 - protein, 18 aa, Homo sapiens
  CDR3 for beta chain variable domain of TCR clone 189182 (TRBV7-9, TRBJ2-1)
CASSTGLAEGPSYNEQFF

SEQ ID NO: 378365 - protein, 14 aa, Homo sapiens
  CDR3 for alpha chain variable domain of TCR clone 189183 (TRAV1-2, TRAJ29)
CAVRELTTATPLVF

SEQ ID NO: 378366 - protein, 14 aa, Homo sapiens
  CDR3 for beta chain variable domain of TCR clone 189183 (TRBV3-1, TRBJ2-5)
CASSQGPDQETQYF

SEQ ID NO: 378367 - protein, 13 aa, Homo sapiens
  CDR3 for alpha chain variable domain of TCR clone 189184 (TRAV13-2, TRAJ13)
CAERPGGYQKVTF

SEQ ID NO: 378368 - protein, 16 aa, Homo sapiens
  CDR3 for beta chain variable domain of TCR clone 189184 (TRBV18, TRBJ2-5)
CASSPPSSEGAKTQYF

SEQ ID NO: 378369 - protein, 13 aa, Homo sapiens
  CDR3 for alpha chain variable domain of TCR clone 189185 (TRAV1-2, TRAJ9)
CAALNTGGFKPIF

SEQ ID NO: 378370 - protein, 14 aa, Homo sapiens
  CDR3 for beta chain variable domain of TCR clone 189185 (TRBV9, TRBJ2-7)
CASSVGVGSYEQYF

SEQ ID NO: 378371 - protein, 15 aa, Homo sapiens
  CDR3 for alpha chain variable domain of TCR clone 189186 (TRAV26-1, TRAJ29)
CIVRVEGSGTTPLVF

SEQ ID NO: 378372 - protein, 15 aa, Homo sapiens
  CDR3 for beta chain variable domain of TCR clone 189186 (TRBV7-9, TRBJ1-5)
CASSQGRQPNQPQHF

SEQ ID NO: 378373 - protein, 17 aa, Homo sapiens
  CDR3 for alpha chain variable domain of TCR clone 189187 (TRAV12-2, TRAJ6)
CAPQGPPRAGGSYIPTS

SEQ ID NO: 378374 - protein, 16 aa, Homo sapiens
  CDR3 for beta chain variable domain of TCR clone 189187 (TRBV19, TRBJ2-2)
CASSTAQASNTGELFF

SEQ ID NO: 378375 - protein, 15 aa, Homo sapiens
  CDR3 for alpha chain variable domain of TCR clone 189188 (TRAV8-3, TRAJ11)
CAVGLLNLGYSTLTF

SEQ ID NO: 378376 - protein, 16 aa, Homo sapiens
  CDR3 for beta chain variable domain of TCR clone 189188 (TRBV7-9, TRBJ1-2)
CASSLGFSSGEHGYTF

SEQ ID NO: 378377 - protein, 14 aa, Homo sapiens
  CDR3 for alpha chain variable domain of TCR clone 189189 (TRAV8-6, TRAJ9)
CAVSSYTGGFKTIF

SEQ ID NO: 378378 - protein, 18 aa, Homo sapiens
  CDR3 for beta chain variable domain of TCR clone 189189 (TRBV7-2, TRBJ2-3)
CASSLKREGSGITDTQYF

SEQ ID NO: 378379 - protein, 14 aa, Homo sapiens
  CDR3 for alpha chain variable domain of TCR clone 189190 (TRAV1-1, TRAJ28)
CAAPSGAGSYQLTF

SEQ ID NO: 378380 - protein, 15 aa, Homo sapiens
  CDR3 for beta chain variable domain of TCR clone 189190 (TRBV7-2, TRBJ1-2)
CASSLVSGGVYGYTF

SEQ ID NO: 378381 - protein, 16 aa, Homo sapiens
  CDR3 for alpha chain variable domain of TCR clone 189191 (TRAV26-1, TRAJ36)
CIVRVSYQPGANNLFF

SEQ ID NO: 378382 - protein, 13 aa, Homo sapiens
  CDR3 for beta chain variable domain of TCR clone 189191 (TRBV5-5, TRBJ1-5)
CASSLGIGGDQHF

SEQ ID NO: 378383 - protein, 14 aa, Homo sapiens
  CDR3 for alpha chain variable domain of TCR clone 189192 (TRAV13-1, TRAJ35)
CAASKGGFGNVLHC

SEQ ID NO: 378384 - protein, 15 aa, Homo sapiens
  CDR3 for beta chain variable domain of TCR clone 189192 (TRBV28, TRBJ2-3)
CAPTFRDWSTDTQYF

SEQ ID NO: 378385 - protein, 13 aa, Homo sapiens
  CDR3 for alpha chain variable domain of TCR clone 189193 (TRAV17, TRAJ26)
CATVDNYGQNFVF

SEQ ID NO: 378386 - protein, 16 aa, Homo sapiens
  CDR3 for beta chain variable domain of TCR clone 189193 (TRBV2, TRBJ2-1)
CASSVGWSLSYNEQFF

SEQ ID NO: 378387 - protein, 14 aa, Homo sapiens
  CDR3 for alpha chain variable domain of TCR clone 189194 (TRAV12-2, TRAJ40)
CAVKIPSGNYKYIF

SEQ ID NO: 378388 - protein, 15 aa, Homo sapiens
  CDR3 for beta chain variable domain of TCR clone 189194 (TRBV11-3, TRBJ2-3)
CASLKDGREGDTQYF

SEQ ID NO: 378389 - protein, 17 aa, Homo sapiens
  CDR3 for alpha chain variable domain of TCR clone 189195 (TRAV3, TRAJ6)
CAVRDGPRAGGSYIPTF

SEQ ID NO: 378390 - protein, 19 aa, Homo sapiens
  CDR3 for beta chain variable domain of TCR clone 189195 (TRBV25-1, TRBJ2-2)
CAILVYRVDRGRETGELFF

SEQ ID NO: 378391 - protein, 15 aa, Homo sapiens
  CDR3 for alpha chain variable domain of TCR clone 189196 (TRAV12-3, TRAJ6)
CAMSATTGGSYIPTC

SEQ ID NO: 378392 - protein, 15 aa, Homo sapiens
  CDR3 for beta chain variable domain of TCR clone 189196 (TRBV28, TRBJ2-1)
CASSIIAGGRSEQFF

SEQ ID NO: 378393 - protein, 14 aa, Homo sapiens
  CDR3 for alpha chain variable domain of TCR clone 189197 (TRAV23/DV6, TRAJ11)
CAARLESGYRTLTF

SEQ ID NO: 378394 - protein, 15 aa, Homo sapiens
  CDR3 for beta chain variable domain of TCR clone 189197 (TRBV28, TRBJ2-7)
CASSSPGTEPFEQYF

SEQ ID NO: 378395 - protein, 19 aa, Homo sapiens
  CDR3 for alpha chain variable domain of TCR clone 189198 (TRAV26-1, TRAJ42)
CVLLRRQTYYGGSQGNLIF

SEQ ID NO: 378396 - protein, 15 aa, Homo sapiens
  CDR3 for beta chain variable domain of TCR clone 189198 (TRBV7-3, TRBJ2-2)
CQQLKAGDLVRGAVF

SEQ ID NO: 378397 - protein, 15 aa, Homo sapiens
  CDR3 for alpha chain variable domain of TCR clone 189199 (TRAV26-1, TRAJ28)
CIVRVAGAGSYQLPF

SEQ ID NO: 378398 - protein, 19 aa, Homo sapiens
  CDR3 for beta chain variable domain of TCR clone 189199 (TRBV7-3, TRBJ2-7)
CASSLTGVAGGWPSYEQYF

SEQ ID NO: 378399 - protein, 14 aa, Homo sapiens
  CDR3 for alpha chain variable domain of TCR clone 189200 (TRAV23/DV6, TRAJ13)
CAASETGGYQKVTF

SEQ ID NO: 378400 - protein, 13 aa, Homo sapiens
  CDR3 for beta chain variable domain of TCR clone 189200 (TRBV29-1, TRBJ2-1)
CIVEGGRVNEQFF

SEQ ID NO: 378401 - protein, 13 aa, Homo sapiens
  CDR3 for alpha chain variable domain of TCR clone 189201 (TRAV8-6, TRAJ9)
CAVWDTVGFKTIF

SEQ ID NO: 378402 - protein, 14 aa, Homo sapiens
  CDR3 for beta chain variable domain of TCR clone 189201 (TRBV2, TRBJ2-1)
CASSEALMYNEQFF

SEQ ID NO: 378403 - protein, 15 aa, Homo sapiens
  CDR3 for alpha chain variable domain of TCR clone 189202 (TRAV21, TRAJ52)
CAVRGGGTSYGKQTF

SEQ ID NO: 378404 - protein, 15 aa, Homo sapiens
  CDR3 for beta chain variable domain of TCR clone 189202 (TRBV18, TRBJ1-5)
CASSPSDRSNQPQHF

SEQ ID NO: 378405 - protein, 14 aa, Homo sapiens
  CDR3 for alpha chain variable domain of TCR clone 189203 (TRAV1-2, TRAJ8)
CAVREDTGFQELVF

SEQ ID NO: 378406 - protein, 15 aa, Homo sapiens
  CDR3 for beta chain variable domain of TCR clone 189203 (TRBV2, TRBJ2-3)
CASSDFEKATDTQYF

SEQ ID NO: 378407 - protein, 13 aa, Homo sapiens
  CDR3 for alpha chain variable domain of TCR clone 189204 (TRAV12-1, TRAJ6)
CVVFPGGSYIPTF

SEQ ID NO: 378408 - protein, 13 aa, Homo sapiens
  CDR3 for beta chain variable domain of TCR clone 189204 (TRBV15, TRBJ1-6)
CATSGGLNSPLHF

SEQ ID NO: 378409 - protein, 16 aa, Homo sapiens
  CDR3 for alpha chain variable domain of TCR clone 189205 (TRAV3, TRAJ37)
CAVRDSGSGNTGKPIF

SEQ ID NO: 378410 - protein, 12 aa, Homo sapiens
  CDR3 for beta chain variable domain of TCR clone 189205 (TRBV7-2, TRBJ2-5)
CASSLYRETQYF

SEQ ID NO: 378411 - protein, 13 aa, Homo sapiens
  CDR3 for alpha chain variable domain of TCR clone 189206 (TRAV13-2, TRAJ48)
CAEMDFGNEKLTF

SEQ ID NO: 378412 - protein, 13 aa, Homo sapiens
  CDR3 for beta chain variable domain of TCR clone 189206 (TRBV19, TRBJ2-7)
CASSPRQSYEQYF

SEQ ID NO: 378413 - protein, 17 aa, Homo sapiens
  CDR3 for alpha chain variable domain of TCR clone 189207 (TRAV36/DV7, TRAJ52)
CAVAQRAGGTSYGKLTF

SEQ ID NO: 378414 - protein, 14 aa, Homo sapiens
  CDR3 for beta chain variable domain of TCR clone 189207 (TRBV5-1, TRBJ1-1)
CASSLTRRSTEAFF

SEQ ID NO: 378415 - protein, 16 aa, Homo sapiens
  CDR3 for alpha chain variable domain of TCR clone 189208 (TRAV1-2, TRAJ10)
CAVRGVLTGGGNKLTF

SEQ ID NO: 378416 - protein, 15 aa, Homo sapiens
  CDR3 for beta chain variable domain of TCR clone 189208 (TRBV7-2, TRBJ2-1)
CASAHGTGIYNEQFF

SEQ ID NO: 378417 - protein, 16 aa, Homo sapiens
  CDR3 for alpha chain variable domain of TCR clone 189209 (TRAV3, TRAJ21)
CAVRDIERGNFNKFFF

SEQ ID NO: 378418 - protein, 19 aa, Homo sapiens
  CDR3 for beta chain variable domain of TCR clone 189209 (TRBV7-2, TRBJ2-3)
WAGSFLSRNWGGGTDTQYF

SEQ ID NO: 378419 - protein, 14 aa, Homo sapiens
  CDR3 for alpha chain variable domain of TCR clone 189210 (TRAV12-2, TRAJ45)
CAVYSGGGADGLTF

SEQ ID NO: 378420 - protein, 18 aa, Homo sapiens
  CDR3 for beta chain variable domain of TCR clone 189210 (TRBV20-1, TRBJ2-6)
CSAETTPTHGSGANDLTF

SEQ ID NO: 378421 - protein, 15 aa, Homo sapiens
  CDR3 for alpha chain variable domain of TCR clone 189211 (TRAV29/DV5, TRAJ48)
CAASASNFGNENLTF

SEQ ID NO: 378422 - protein, 16 aa, Homo sapiens
  CDR3 for beta chain variable domain of TCR clone 189211 (TRBV11-2, TRBJ2-1)
CASARGSYSHHNEQFF

SEQ ID NO: 378423 - protein, 11 aa, Homo sapiens
  CDR3 for alpha chain variable domain of TCR clone 189212 (TRAV12-2, TRAJ33)
CAVTSNYQLIW

SEQ ID NO: 378424 - protein, 14 aa, Homo sapiens
  CDR3 for beta chain variable domain of TCR clone 189212 (TRBV28, TRBJ2-2)
CASIIRSGTGELFF

SEQ ID NO: 378425 - protein, 13 aa, Homo sapiens
  CDR3 for alpha chain variable domain of TCR clone 189213 (TRAV2, TRAJ40)
CAVVTSGTYKYIF

SEQ ID NO: 378426 - protein, 15 aa, Homo sapiens
  CDR3 for beta chain variable domain of TCR clone 189213 (TRBV11-2, TRBJ2-1)
CASSLGTSGLNEQFF

SEQ ID NO: 378427 - protein, 16 aa, Homo sapiens
  CDR3 for alpha chain variable domain of TCR clone 189214 (TRAV12-1, TRAJ22)
CVVNTISSGSARQLTF

SEQ ID NO: 378428 - protein, 13 aa, Homo sapiens
  CDR3 for beta chain variable domain of TCR clone 189214 (TRBV19, TRBJ2-1)
CASNGGVFSEQLF

SEQ ID NO: 378429 - protein, 15 aa, Homo sapiens
  CDR3 for alpha chain variable domain of TCR clone 189215 (TRAV2, TRAJ15)
CAVEDRNQAGTALIF

SEQ ID NO: 378430 - protein, 13 aa, Homo sapiens
  CDR3 for beta chain variable domain of TCR clone 189215 (TRBV10-2, TRBJ2-7)
WASSESGVYEQYF

SEQ ID NO: 378431 - protein, 16 aa, Homo sapiens
  CDR3 for alpha chain variable domain of TCR clone 189216 (TRAV9-2, TRAJ42)
CALNLNYGVSQGNLIF

SEQ ID NO: 378432 - protein, 15 aa, Homo sapiens
  CDR3 for beta chain variable domain of TCR clone 189216 (TRBV6-5, TRBJ1-5)
CASSLTALGNQPQHF

SEQ ID NO: 378433 - protein, 13 aa, Homo sapiens
  CDR3 for alpha chain variable domain of TCR clone 189217 (TRAV12-2, TRAJ24)
CAVSTDSWGKLQF

SEQ ID NO: 378434 - protein, 12 aa, Homo sapiens
  CDR3 for beta chain variable domain of TCR clone 189217 (TRBV7-6, TRBJ2-7)
CASSLEDSEQYF

SEQ ID NO: 378435 - protein, 14 aa, Homo sapiens
  CDR3 for alpha chain variable domain of TCR clone 189218 (TRAV12-1, TRAJ23)
CVVMIYNQGGKLIF

SEQ ID NO: 378436 - protein, 23 aa, Homo sapiens
  CDR3 for beta chain variable domain of TCR clone 189218 (TRBV7-3, TRBJ1-6)
CASSLTSRDDASDPSSYNSPLHF

SEQ ID NO: 378437 - protein, 11 aa, Homo sapiens
  CDR3 for alpha chain variable domain of TCR clone 189219 (TRAV23/DV6, TRAJ17)
CKLAAGNKLTF

SEQ ID NO: 378438 - protein, 14 aa, Homo sapiens
  CDR3 for beta chain variable domain of TCR clone 189219 (TRBV6-1, TRBJ2-7)
CASSGGSYLYEQYF

SEQ ID NO: 378439 - protein, 13 aa, Homo sapiens
  CDR3 for alpha chain variable domain of TCR clone 189220 (TRAV23/DV6, TRAJ22)
CAPYSGSARQLTF

SEQ ID NO: 378440 - protein, 15 aa, Homo sapiens
  CDR3 for beta chain variable domain of TCR clone 189220 (TRBV11-2, TRBJ1-6)
CASSLAPWAVSPLHF

SEQ ID NO: 378441 - protein, 12 aa, Homo sapiens
  CDR3 for alpha chain variable domain of TCR clone 189221 (TRAV8-3, TRAJ26)
CAGDNYVQNFVF

SEQ ID NO: 378442 - protein, 11 aa, Homo sapiens
  CDR3 for beta chain variable domain of TCR clone 189221 (TRBV29-1, TRBJ2-5)
CSEDRTGTQYF

SEQ ID NO: 378443 - protein, 14 aa, Homo sapiens
  CDR3 for alpha chain variable domain of TCR clone 189222 (TRAV13-1, TRAJ35)
CAASKGGFGDVLHC

SEQ ID NO: 378444 - protein, 13 aa, Homo sapiens
  CDR3 for beta chain variable domain of TCR clone 189222 (TRBV7-3, TRBJ1-1)
CASSQGWGAEASF

SEQ ID NO: 378445 - protein, 15 aa, Homo sapiens
  CDR3 for alpha chain variable domain of TCR clone 189223 (TRAV16, TRAJ26)
CITLLQRNYGQNFFF

SEQ ID NO: 378446 - protein, 15 aa, Homo sapiens
  CDR3 for beta chain variable domain of TCR clone 189223 (TRBV7-2, TRBJ2-3)
CASSLTGTSTDTQYF

SEQ ID NO: 378447 - protein, 15 aa, Homo sapiens
  CDR3 for alpha chain variable domain of TCR clone 189224 (TRAV6, TRAJ32)
CALDMGGGATNKLIF

SEQ ID NO: 378448 - protein, 18 aa, Homo sapiens
  CDR3 for beta chain variable domain of TCR clone 189224 (TRBV12-4, TRBJ2-2)
CASSLVAGTRGRTGELFF

SEQ ID NO: 378449 - protein, 14 aa, Homo sapiens
  CDR3 for alpha chain variable domain of TCR clone 189225 (TRAV26-1, TRAJ45)
CIEVTGGGADGLTF

SEQ ID NO: 378450 - protein, 13 aa, Homo sapiens
  CDR3 for beta chain variable domain of TCR clone 189225 (TRBV7-6, TRBJ1-2)
CSSSLVADYGYTF

SEQ ID NO: 378451 - protein, 13 aa, Homo sapiens
  CDR3 for alpha chain variable domain of TCR clone 189226 (TRAV8-3, TRAJ43)
CAVGPDNNNDMRF

SEQ ID NO: 378452 - protein, 16 aa, Homo sapiens
  CDR3 for beta chain variable domain of TCR clone 189226 (TRBV7-3, TRBJ2-1)
CASSLEGYRSYNEQFF

SEQ ID NO: 378453 - protein, 11 aa, Homo sapiens
  CDR3 for alpha chain variable domain of TCR clone 189227 (TRAV21, TRAJ11)
YAVNGYSTLTF

SEQ ID NO: 378454 - protein, 20 aa, Homo sapiens
  CDR3 for beta chain variable domain of TCR clone 189227 (TRBV28, TRBJ2-1)
CASTPIGRSPGLAGGNEQFF

SEQ ID NO: 378455 - protein, 14 aa, Homo sapiens
  CDR3 for alpha chain variable domain of TCR clone 189228 (TRAV17, TRAJ56)
CATVPAGANSKLTF

SEQ ID NO: 378456 - protein, 14 aa, Homo sapiens
  CDR3 for beta chain variable domain of TCR clone 189228 (TRBV12-4, TRBJ1-1)
CASSLGTGGTEAFF

SEQ ID NO: 378457 - protein, 13 aa, Homo sapiens
  CDR3 for alpha chain variable domain of TCR clone 189229 (TRAV26-2, TRAJ43)
CIMRAVNNNDMRF

SEQ ID NO: 378458 - protein, 15 aa, Homo sapiens
  CDR3 for beta chain variable domain of TCR clone 189229 (TRBV7-2, TRBJ2-1)
CASTHGTGIYNEQFF

SEQ ID NO: 378459 - protein, 14 aa, Homo sapiens
  CDR3 for alpha chain variable domain of TCR clone 189230 (TRAV12-1, TRAJ54)
CVVNIYQEAQKLVF

SEQ ID NO: 378460 - protein, 16 aa, Homo sapiens
  CDR3 for beta chain variable domain of TCR clone 189230 (TRBV7-9, TRBJ2-1)
CASSDVAGGSYNEQFF

SEQ ID NO: 378461 - protein, 14 aa, Homo sapiens
  CDR3 for alpha chain variable domain of TCR clone 189231 (TRAV27, TRAJ58)
CAGDGETSGSRLTF

SEQ ID NO: 378462 - protein, 16 aa, Homo sapiens
  CDR3 for beta chain variable domain of TCR clone 189231 (TRBV7-3, TRBJ2-3)
CASSLGLAGVADTQYF

SEQ ID NO: 378463 - protein, 10 aa, Homo sapiens
  CDR3 for alpha chain variable domain of TCR clone 189232 (TRAV2, TRAJ34)
CAVVNDKLIF

SEQ ID NO: 378464 - protein, 15 aa, Homo sapiens
  CDR3 for beta chain variable domain of TCR clone 189232 (TRBV3-1, TRBJ2-2)
CASSQDWTSAGELFF

SEQ ID NO: 378465 - protein, 12 aa, Homo sapiens
  CDR3 for alpha chain variable domain of TCR clone 189233 (TRAV12-1, TRAJ23)
CVVNIPGGKLIF

SEQ ID NO: 378466 - protein, 15 aa, Homo sapiens
  CDR3 for beta chain variable domain of TCR clone 189233 (TRBV7-2, TRBJ2-7)
CASSLVSSVSYEQYF

SEQ ID NO: 378467 - protein, 17 aa, Homo sapiens
  CDR3 for alpha chain variable domain of TCR clone 189234 (TRAV29/DV5, TRAJ45)
CAADGPFSGGGADGLTF

SEQ ID NO: 378468 - protein, 14 aa, Homo sapiens
  CDR3 for beta chain variable domain of TCR clone 189234 (TRBV7-6, TRBJ2-3)
CASSLGTVTDTQYF

SEQ ID NO: 378469 - protein, 14 aa, Homo sapiens
  CDR3 for alpha chain variable domain of TCR clone 189235 (TRAV1-2, TRAJ16)
CAVNRFSDGQKLLF

SEQ ID NO: 378470 - protein, 15 aa, Homo sapiens
  CDR3 for beta chain variable domain of TCR clone 189235 (TRBV7-9, TRBJ1-6)
CASSSPGRGNSPLDV

SEQ ID NO: 378471 - protein, 15 aa, Homo sapiens
  CDR3 for alpha chain variable domain of TCR clone 189236 (TRAV17, TRAJ57)
CATGPSQGGSEKLVF

SEQ ID NO: 378472 - protein, 15 aa, Homo sapiens
  CDR3 for beta chain variable domain of TCR clone 189236 (TRBV13, TRBJ2-1)
CASSLLSGLNNEQFF

SEQ ID NO: 378473 - protein, 16 aa, Homo sapiens
  CDR3 for alpha chain variable domain of TCR clone 189237 (TRAV30, TRAJ24)
CVTEIVDADSWVKFQF

SEQ ID NO: 378474 - protein, 15 aa, Homo sapiens
  CDR3 for beta chain variable domain of TCR clone 189237 (TRBV20-1, TRBJ2-7)
CSARDRVSGMDEQYF

SEQ ID NO: 378475 - protein, 15 aa, Homo sapiens
  CDR3 for alpha chain variable domain of TCR clone 189238 (TRAV21, TRAJ52)
CAVRGGGTSYGKLTC

SEQ ID NO: 378476 - protein, 15 aa, Homo sapiens
  CDR3 for beta chain variable domain of TCR clone 189238 (TRBV18, TRBJ1-5)
CASSPSDRSNQPQHF

SEQ ID NO: 378477 - protein, 12 aa, Homo sapiens
  CDR3 for alpha chain variable domain of TCR clone 189239 (TRAV12-3, TRAJ17)
CAMTLTGNKLTF

SEQ ID NO: 378478 - protein, 20 aa, Homo sapiens
  CDR3 for beta chain variable domain of TCR clone 189239 (TRBV7-8, TRBJ2-2)
CASSHLFPGPTIHVTGELFF

SEQ ID NO: 378479 - protein, 13 aa, Homo sapiens
  CDR3 for alpha chain variable domain of TCR clone 189240 (TRAV12-2, TRAJ9)
CAVKWAGGFKTIF

SEQ ID NO: 378480 - protein, 15 aa, Homo sapiens
  CDR3 for beta chain variable domain of TCR clone 189240 (TRBV5-1, TRBJ1-4)
CASSLTADSDEKLSF

SEQ ID NO: 378481 - protein, 12 aa, Homo sapiens
  CDR3 for alpha chain variable domain of TCR clone 189241 (TRAV13-2, TRAJ23)
CAERNRGGKLIF

SEQ ID NO: 378482 - protein, 15 aa, Homo sapiens
  CDR3 for beta chain variable domain of TCR clone 189241 (TRBV28, TRBJ2-1)
CASSIIAGGRSEQFF

SEQ ID NO: 378483 - protein, 13 aa, Homo sapiens
  CDR3 for alpha chain variable domain of TCR clone 189242 (TRAV12-1, TRAJ34)
CVVTGYNTDKLIF

SEQ ID NO: 378484 - protein, 10 aa, Homo sapiens
  CDR3 for beta chain variable domain of TCR clone 189242 (TRBV28, TRBJ2-7)
CASKAGGYTS

SEQ ID NO: 378485 - protein, 12 aa, Homo sapiens
  CDR3 for alpha chain variable domain of TCR clone 189243 (TRAV16, TRAJ10)
CSRTGGGNKLTF

SEQ ID NO: 378486 - protein, 19 aa, Homo sapiens
  CDR3 for beta chain variable domain of TCR clone 189243 (TRBV25-1, TRBJ2-2)
CAILVYRVDRWRKTGELFV

SEQ ID NO: 378487 - protein, 13 aa, Homo sapiens
  CDR3 for alpha chain variable domain of TCR clone 189244 (TRAV30, TRAJ6)
CGFIEGGSYIPTF

SEQ ID NO: 378488 - protein, 14 aa, Homo sapiens
  CDR3 for beta chain variable domain of TCR clone 189244 (TRBV2, TRBJ2-3)
CASSEGQNTDTQYF

SEQ ID NO: 378489 - protein, 14 aa, Homo sapiens
  CDR3 for alpha chain variable domain of TCR clone 189245 (TRAV1-2, TRAJ16)
CAVNRISDGQKLLF

SEQ ID NO: 378490 - protein, 16 aa, Homo sapiens
  CDR3 for beta chain variable domain of TCR clone 189245 (TRBV19, TRBJ2-1)
CASSKAGPSSYNEQFF

SEQ ID NO: 378491 - protein, 14 aa, Homo sapiens
  CDR3 for alpha chain variable domain of TCR clone 189246 (TRAV8-4, TRAJ13)
CAVTLSGGYQKVTF

SEQ ID NO: 378492 - protein, 16 aa, Homo sapiens
  CDR3 for beta chain variable domain of TCR clone 189246 (TRBV12-4, TRBJ2-3)
CASSFISGSGTETQYF

SEQ ID NO: 378493 - protein, 12 aa, Homo sapiens
  CDR3 for alpha chain variable domain of TCR clone 189247 (TRAV3, TRAJ21)
CAVGNFNKFYWI

SEQ ID NO: 378494 - protein, 14 aa, Homo sapiens
  CDR3 for beta chain variable domain of TCR clone 189247 (TRBV29-1, TRBJ2-2)
CSGRGSGNTGELFF

SEQ ID NO: 378495 - protein, 14 aa, Homo sapiens
  CDR3 for alpha chain variable domain of TCR clone 189248 (TRAV12-1, TRAJ43)
CVVNGRSNNNDMRF

SEQ ID NO: 378496 - protein, 16 aa, Homo sapiens
  CDR3 for beta chain variable domain of TCR clone 189248 (TRBV28, TRBJ2-3)
CASSLFTGVSTDTQYF

SEQ ID NO: 378497 - protein, 15 aa, Homo sapiens
  CDR3 for alpha chain variable domain of TCR clone 189249 (TRAV17, TRAJ28)
CATVDSGAGSYQLTF

SEQ ID NO: 378498 - protein, 13 aa, Homo sapiens
  CDR3 for beta chain variable domain of TCR clone 189249 (TRBV5-4, TRBJ2-5)
CGGWGRGGEERYL

SEQ ID NO: 378499 - protein, 14 aa, Homo sapiens
  CDR3 for alpha chain variable domain of TCR clone 189250 (TRAV13-2, TRAJ44)
CAEWGGGTASKLTF

SEQ ID NO: 378500 - protein, 13 aa, Homo sapiens
  CDR3 for beta chain variable domain of TCR clone 189250 (TRBV29-1, TRBJ2-1)
CSVDGGASDEQFF

SEQ ID NO: 378501 - protein, 15 aa, Homo sapiens
  CDR3 for alpha chain variable domain of TCR clone 189251 (TRAV17, TRAJ57)
CATGPSQGGSEQLVF

SEQ ID NO: 378502 - protein, 17 aa, Homo sapiens
  CDR3 for beta chain variable domain of TCR clone 189251 (TRBV20-1, TRBJ2-1)
CSASSSGLAGSYNEQFF

SEQ ID NO: 378503 - protein, 12 aa, Homo sapiens
  CDR3 for alpha chain variable domain of TCR clone 189252 (TRAV13-2, TRAJ37)
LAVPGNTGKLIF

SEQ ID NO: 378504 - protein, 14 aa, Homo sapiens
  CDR3 for beta chain variable domain of TCR clone 189252 (TRBV18, TRBJ2-7)
CASSPRGGAYEQYF

SEQ ID NO: 378505 - protein, 15 aa, Homo sapiens
  CDR3 for alpha chain variable domain of TCR clone 189253 (TRAV29/DV5, TRAJ42)
CAAKTDGGSQGNLIF

SEQ ID NO: 378506 - protein, 13 aa, Homo sapiens
  CDR3 for beta chain variable domain of TCR clone 189253 (TRBV7-2, TRBJ2-2)
CASSLAVTGELFF

SEQ ID NO: 378507 - protein, 14 aa, Homo sapiens
  CDR3 for alpha chain variable domain of TCR clone 189254 (TRAV13-2, TRAJ17)
CAENSKAAGNKLTF

SEQ ID NO: 378508 - protein, 17 aa, Homo sapiens
  CDR3 for beta chain variable domain of TCR clone 189254 (TRBV20-1, TRBJ2-2)
CSASGSGQGGLTGELFF

SEQ ID NO: 378509 - protein, 14 aa, Homo sapiens
  CDR3 for alpha chain variable domain of TCR clone 189255 (TRAV30, TRAJ26)
CCTEIVSYGQNFVF

SEQ ID NO: 378510 - protein, 13 aa, Homo sapiens
  CDR3 for beta chain variable domain of TCR clone 189255 (TRBV7-3, TRBJ1-1)
CASSQDWGAEAFF

SEQ ID NO: 378511 - protein, 11 aa, Homo sapiens
  CDR3 for alpha chain variable domain of TCR clone 189256 (TRAV2, TRAJ13)
CASGGYQKVTF

SEQ ID NO: 378512 - protein, 14 aa, Homo sapiens
  CDR3 for beta chain variable domain of TCR clone 189256 (TRBV7-2, TRBJ2-7)
CASSPRTSFYEQYF

SEQ ID NO: 378513 - protein, 17 aa, Homo sapiens
  CDR3 for alpha chain variable domain of TCR clone 189257 (TRAV3, TRAJ6)
CAVRDGPRAGGSNIPTS

SEQ ID NO: 378514 - protein, 14 aa, Homo sapiens
  CDR3 for beta chain variable domain of TCR clone 189257 (TRBV7-2, TRBJ2-7)
CASSPKTSFYEQYF

SEQ ID NO: 378515 - protein, 12 aa, Homo sapiens
  CDR3 for alpha chain variable domain of TCR clone 189258 (TRAV12-2, TRAJ10)
WGVTGGGNKRTF

SEQ ID NO: 378516 - protein, 14 aa, Homo sapiens
  CDR3 for beta chain variable domain of TCR clone 189258 (TRBV27, TRBJ2-7)
CASATGTERREQYF

SEQ ID NO: 378517 - protein, 13 aa, Homo sapiens
  CDR3 for alpha chain variable domain of TCR clone 189259 (TRAV14/DV4, TRAJ4)
CAMKAGGYNNLIF

SEQ ID NO: 378518 - protein, 15 aa, Homo sapiens
  CDR3 for beta chain variable domain of TCR clone 189259 (TRBV11-3, TRBJ1-1)
CASSLGGPGDTEAFF

SEQ ID NO: 378519 - protein, 11 aa, Homo sapiens
  CDR3 for alpha chain variable domain of TCR clone 189260 (TRAV29/DV5, TRAJ49)
CAAVPGNHFYF

SEQ ID NO: 378520 - protein, 17 aa, Homo sapiens
  CDR3 for beta chain variable domain of TCR clone 189260 (TRBV4-2, TRBJ1-1)
CASTQFGGGSVNTEAFF

SEQ ID NO: 378521 - protein, 13 aa, Homo sapiens
  CDR3 for alpha chain variable domain of TCR clone 189261 (TRAV8-3, TRAJ28)
CAVGSVWSYQLTF

SEQ ID NO: 378522 - protein, 13 aa, Homo sapiens
  CDR3 for beta chain variable domain of TCR clone 189261 (TRBV19, TRBJ1-2)
CASSVPGQDGYTF

SEQ ID NO: 378523 - protein, 14 aa, Homo sapiens
  CDR3 for alpha chain variable domain of TCR clone 189262 (TRAV1-2, TRAJ8)
CAVREDTGFQKLGF

SEQ ID NO: 378524 - protein, 14 aa, Homo sapiens
  CDR3 for beta chain variable domain of TCR clone 189262 (TRBV7-9, TRBJ1-1)
CASTPLQSYTEAFF

SEQ ID NO: 378525 - protein, 15 aa, Homo sapiens
  CDR3 for alpha chain variable domain of TCR clone 189263 (TRAV17, TRAJ35)
CATAFVIGFGNVLRC

SEQ ID NO: 378526 - protein, 11 aa, Homo sapiens
  CDR3 for beta chain variable domain of TCR clone 189263 (TRBV19, TRBJ1-1)
CASSIGSEAFF

SEQ ID NO: 378527 - protein, 17 aa, Homo sapiens
  CDR3 for alpha chain variable domain of TCR clone 189264 (TRAV27, TRAJ18)
SAGLHRGRGSTLGRLYF

SEQ ID NO: 378528 - protein, 14 aa, Homo sapiens
  CDR3 for beta chain variable domain of TCR clone 189264 (TRBV20-1, TRBJ1-5)
CSARGRGSNQPQHF

SEQ ID NO: 378529 - protein, 11 aa, Homo sapiens
  CDR3 for alpha chain variable domain of TCR clone 189265 (TRAV25, TRAJ47)
WAGLYGNKLVF

SEQ ID NO: 378530 - protein, 14 aa, Homo sapiens
  CDR3 for beta chain variable domain of TCR clone 189265 (TRBV19, TRBJ2-1)
CASKEGVQVNEQFF

SEQ ID NO: 378531 - protein, 13 aa, Homo sapiens
  CDR3 for alpha chain variable domain of TCR clone 189266 (TRAV12-1, TRAJ39)
CVVPQRAGNMLTF

SEQ ID NO: 378532 - protein, 16 aa, Homo sapiens
  CDR3 for beta chain variable domain of TCR clone 189266 (TRBV7-2, TRBJ2-6)
CAILSGVSSGANVLTF

SEQ ID NO: 378533 - protein, 15 aa, Homo sapiens
  CDR3 for alpha chain variable domain of TCR clone 189267 (TRAV12-3, TRAJ6)
CAMSATAGGSYIPTF

SEQ ID NO: 378534 - protein, 16 aa, Homo sapiens
  CDR3 for beta chain variable domain of TCR clone 189267 (TRBV20-1, TRBJ1-2)
CSASMGQGVANYGDTF

SEQ ID NO: 378535 - protein, 13 aa, Homo sapiens
  CDR3 for alpha chain variable domain of TCR clone 189268 (TRAV8-6, TRAJ40)
CAVSVTGTYKYNF

SEQ ID NO: 378536 - protein, 15 aa, Homo sapiens
  CDR3 for beta chain variable domain of TCR clone 189268 (TRBV4-1, TRBJ2-3)
CASSRGQGIPDTQYF

SEQ ID NO: 378537 - protein, 14 aa, Homo sapiens
  CDR3 for alpha chain variable domain of TCR clone 189269 (TRAV8-3, TRAJ4)
CAGGAAGGYNKLIF

SEQ ID NO: 378538 - protein, 13 aa, Homo sapiens
  CDR3 for beta chain variable domain of TCR clone 189269 (TRBV3-1, TRBJ1-1)
CASSPGVITEAFF

SEQ ID NO: 378539 - protein, 15 aa, Homo sapiens
  CDR3 for alpha chain variable domain of TCR clone 189270 (TRAV3, TRAJ45)
CAVSTPWGGADGLTF

SEQ ID NO: 378540 - protein, 16 aa, Homo sapiens
  CDR3 for beta chain variable domain of TCR clone 189270 (TRBV6-1, TRBJ2-2)
CASSFGQGANTGELFF

SEQ ID NO: 378541 - protein, 14 aa, Homo sapiens
  CDR3 for alpha chain variable domain of TCR clone 189271 (TRAV8-1, TRAJ5)
CAVRTGTGRRALTV

SEQ ID NO: 378542 - protein, 14 aa, Homo sapiens
  CDR3 for beta chain variable domain of TCR clone 189271 (TRBV7-8, TRBJ2-3)
CASSFPDGQDTQYF

SEQ ID NO: 378543 - protein, 13 aa, Homo sapiens
  CDR3 for alpha chain variable domain of TCR clone 189272 (TRAV27, TRAJ16)
CAGACSDGQKLLF

SEQ ID NO: 378544 - protein, 16 aa, Homo sapiens
  CDR3 for beta chain variable domain of TCR clone 189272 (TRBV12-4, TRBJ1-5)
CASSRPVGGSNQPQHF

SEQ ID NO: 378545 - protein, 14 aa, Homo sapiens
  CDR3 for alpha chain variable domain of TCR clone 189273 (TRAV26-1, TRAJ6)
CIVSPVGGSYIPTF

SEQ ID NO: 378546 - protein, 16 aa, Homo sapiens
  CDR3 for beta chain variable domain of TCR clone 189273 (TRBV4-1, TRBJ2-5)
CASSSGLAGVLGNQYF

SEQ ID NO: 378547 - protein, 10 aa, Homo sapiens
  CDR3 for alpha chain variable domain of TCR clone 189274 (TRAV1-2, TRAJ18)
CAVRGETQPW

SEQ ID NO: 378548 - protein, 13 aa, Homo sapiens
  CDR3 for beta chain variable domain of TCR clone 189274 (TRBV20-1, TRBJ1-1)
CSARVGGNTEAFF

SEQ ID NO: 378549 - protein, 15 aa, Homo sapiens
  CDR3 for alpha chain variable domain of TCR clone 189275 (TRAV12-2, TRAJ53)
CAVNGGGGSNYKLTF

SEQ ID NO: 378550 - protein, 13 aa, Homo sapiens
  CDR3 for beta chain variable domain of TCR clone 189275 (TRBV10-3, TRBJ2-7)
CAAKLAVNYEQYF

SEQ ID NO: 378551 - protein, 12 aa, Homo sapiens
  CDR3 for alpha chain variable domain of TCR clone 189276 (TRAV12-1, TRAJ40)
CVVYSGTYKYIF

SEQ ID NO: 378552 - protein, 18 aa, Homo sapiens
  CDR3 for beta chain variable domain of TCR clone 189276 (TRBV11-2, TRBJ2-3)
CSSSLGGASRWAPNTQYF

SEQ ID NO: 378553 - protein, 10 aa, Homo sapiens
  CDR3 for alpha chain variable domain of TCR clone 189277 (TRAV30, TRAJ48)
CGIGHEKLTF

SEQ ID NO: 378554 - protein, 16 aa, Homo sapiens
  CDR3 for beta chain variable domain of TCR clone 189277 (TRBV20-1, TRBJ1-4)
CSAPGQGLLTNEKLFF

SEQ ID NO: 378555 - protein, 15 aa, Homo sapiens
  CDR3 for alpha chain variable domain of TCR clone 189278 (TRAV26-1, TRAJ44)
CIVRANTGTASKLTF

SEQ ID NO: 378556 - protein, 15 aa, Homo sapiens
  CDR3 for beta chain variable domain of TCR clone 189278 (TRBV5-1, TRBJ2-3)
CASSVTSGSTDTQYF

SEQ ID NO: 378557 - protein, 13 aa, Homo sapiens
  CDR3 for alpha chain variable domain of TCR clone 189279 (TRAV17, TRAJ6)
CATGFGGSYIPTF

SEQ ID NO: 378558 - protein, 14 aa, Homo sapiens
  CDR3 for beta chain variable domain of TCR clone 189279 (TRBV5-1, TRBJ2-5)
SASSFGGSQETQYF

SEQ ID NO: 378559 - protein, 14 aa, Homo sapiens
  CDR3 for alpha chain variable domain of TCR clone 189280 (TRAV17, TRAJ57)
CATDPQGGSEKLVF

SEQ ID NO: 378560 - protein, 14 aa, Homo sapiens
  CDR3 for beta chain variable domain of TCR clone 189280 (TRBV9, TRBJ2-4)
CASSPSGTSGFQYF

SEQ ID NO: 378561 - protein, 15 aa, Homo sapiens
  CDR3 for alpha chain variable domain of TCR clone 189281 (TRAV12-3, TRAJ6)
CAMSATTGGSYIPTF

SEQ ID NO: 378562 - protein, 13 aa, Homo sapiens
  CDR3 for beta chain variable domain of TCR clone 189281 (TRBV12-4, TRBJ1-2)
CASSSGPNYGYTF

SEQ ID NO: 378563 - protein, 16 aa, Homo sapiens
  CDR3 for alpha chain variable domain of TCR clone 189282 (TRAV35, TRAJ28)
CAGQRYSGAGSYQLTF

SEQ ID NO: 378564 - protein, 13 aa, Homo sapiens
  CDR3 for beta chain variable domain of TCR clone 189282 (TRBV19, TRBJ1-2)
CASSQGQVYCYTF

SEQ ID NO: 378565 - protein, 13 aa, Homo sapiens
  CDR3 for alpha chain variable domain of TCR clone 189283 (TRAV36/DV7, TRAJ37)
CAVFSSNTGKLIF

SEQ ID NO: 378566 - protein, 13 aa, Homo sapiens
  CDR3 for beta chain variable domain of TCR clone 189283 (TRBV19, TRBJ1-2)
CASSVPGQDGYTF

SEQ ID NO: 378567 - protein, 14 aa, Homo sapiens
  CDR3 for alpha chain variable domain of TCR clone 189284 (TRAV16, TRAJ42)
CALLAGGSQGNLIF

SEQ ID NO: 378568 - protein, 15 aa, Homo sapiens
  CDR3 for beta chain variable domain of TCR clone 189284 (TRBV2, TRBJ2-7)
CASSEGLARFYEQYF

SEQ ID NO: 378569 - protein, 13 aa, Homo sapiens
  CDR3 for alpha chain variable domain of TCR clone 189285 (TRAV8-3, TRAJ48)
CAVVRFGNENLTF

SEQ ID NO: 378570 - protein, 16 aa, Homo sapiens
  CDR3 for beta chain variable domain of TCR clone 189285 (TRBV20-1, TRBJ2-5)
CSARDFASGIQETQYF

SEQ ID NO: 378571 - protein, 16 aa, Homo sapiens
  CDR3 for alpha chain variable domain of TCR clone 189286 (TRAV30, TRAJ24)
CGAEIVDADSWGKFQF

SEQ ID NO: 378572 - protein, 17 aa, Homo sapiens
  CDR3 for beta chain variable domain of TCR clone 189286 (TRBV20-1, TRBJ2-2)
CSASGSGQCGLTGELFF

SEQ ID NO: 378573 - protein, 12 aa, Homo sapiens
  CDR3 for alpha chain variable domain of TCR clone 189287 (TRAV12-3, TRAJ29)
CAAREGYTPLVF

SEQ ID NO: 378574 - protein, 17 aa, Homo sapiens
  CDR3 for beta chain variable domain of TCR clone 189287 (TRBV18, TRBJ2-1)
CASSPLAAGAGDNEQFF

SEQ ID NO: 378575 - protein, 12 aa, Homo sapiens
  CDR3 for alpha chain variable domain of TCR clone 189288 (TRAV21, TRAJ37)
CAVRGNTGKLIF

SEQ ID NO: 378576 - protein, 13 aa, Homo sapiens
  CDR3 for beta chain variable domain of TCR clone 189288 (TRBV20-1, TRBJ2-5)
CSAREAFQETQYF

SEQ ID NO: 378577 - protein, 16 aa, Homo sapiens
  CDR3 for alpha chain variable domain of TCR clone 189289 (TRAV4, TRAJ6)
CLVGVYATGGSYIPTF

SEQ ID NO: 378578 - protein, 15 aa, Homo sapiens
  CDR3 for beta chain variable domain of TCR clone 189289 (TRBV14, TRBJ2-5)
CASSQGDRDQETKYF

SEQ ID NO: 378579 - protein, 12 aa, Homo sapiens
  CDR3 for alpha chain variable domain of TCR clone 189290 (TRAV38-1, TRAJ47)
CAFETYGNKLVF

SEQ ID NO: 378580 - protein, 15 aa, Homo sapiens
  CDR3 for beta chain variable domain of TCR clone 189290 (TRBV5-7, TRBJ2-7)
GASSGGRPVPYEQYF

SEQ ID NO: 378581 - protein, 12 aa, Homo sapiens
  CDR3 for alpha chain variable domain of TCR clone 189291 (TRAV13-1, TRAJ49)
CAASPMGNQFYF

SEQ ID NO: 378582 - protein, 13 aa, Homo sapiens
  CDR3 for beta chain variable domain of TCR clone 189291 (TRBV24-1, TRBJ2-2)
CATSEWSTGELFF

SEQ ID NO: 378583 - protein, 16 aa, Homo sapiens
  CDR3 for alpha chain variable domain of TCR clone 189292 (TRAV26-1, TRAJ53)
CIVRVAMGGSNYKLTF

SEQ ID NO: 378584 - protein, 13 aa, Homo sapiens
  CDR3 for beta chain variable domain of TCR clone 189292 (TRBV27, TRBJ2-2)
CQQTRSKHRGAVF

SEQ ID NO: 378585 - protein, 15 aa, Homo sapiens
  CDR3 for alpha chain variable domain of TCR clone 189293 (TRAV3, TRAJ22)
CAVRDRGGSARQLTF

SEQ ID NO: 378586 - protein, 13 aa, Homo sapiens
  CDR3 for beta chain variable domain of TCR clone 189293 (TRBV4-1, TRBJ2-1)
CASSQEVQYEQFF

SEQ ID NO: 378587 - protein, 11 aa, Homo sapiens
  CDR3 for alpha chain variable domain of TCR clone 189294 (TRAV1-2, TRAJ31)
CAVKNNTRLMF

SEQ ID NO: 378588 - protein, 12 aa, Homo sapiens
  CDR3 for beta chain variable domain of TCR clone 189294 (TRBV20-1, TRBJ2-5)
CSAPRSQETQYF

SEQ ID NO: 378589 - protein, 16 aa, Homo sapiens
  CDR3 for alpha chain variable domain of TCR clone 189295 (TRAV12-2, TRAJ6)
CAAPLAGSGGSYIPTF

SEQ ID NO: 378590 - protein, 13 aa, Homo sapiens
  CDR3 for beta chain variable domain of TCR clone 189295 (TRBV12-4, TRBJ1-2)
CASRTDGNYGYAF

SEQ ID NO: 378591 - protein, 19 aa, Homo sapiens
  CDR3 for alpha chain variable domain of TCR clone 189296 (TRAV2, TRAJ20)
ILQVREADAAVYRDCKLSF

SEQ ID NO: 378592 - protein, 15 aa, Homo sapiens
  CDR3 for beta chain variable domain of TCR clone 189296 (TRBV7-2, TRBJ2-3)
CASSLAGAFIDTQYF

SEQ ID NO: 378593 - protein, 12 aa, Homo sapiens
  CDR3 for alpha chain variable domain of TCR clone 189297 (TRAV13-1, TRAJ34)
CAASKGTDKLIF

SEQ ID NO: 378594 - protein, 13 aa, Homo sapiens
  CDR3 for beta chain variable domain of TCR clone 189297 (TRBV7-3, TRBJ1-1)
CASSQDWGAEAFF

SEQ ID NO: 378595 - protein, 18 aa, Homo sapiens
  CDR3 for alpha chain variable domain of TCR clone 189298 (TRAV9-2, TRAJ52)
CSLSRHNAGGTSYGTLTF

SEQ ID NO: 378596 - protein, 14 aa, Homo sapiens
  CDR3 for beta chain variable domain of TCR clone 189298 (TRBV7-2, TRBJ1-1)
CASSFLTGTTEAFF

SEQ ID NO: 378597 - protein, 14 aa, Homo sapiens
  CDR3 for alpha chain variable domain of TCR clone 189299 (TRAV8-6, TRAJ52)
SAVIGGTSYGKLTF

SEQ ID NO: 378598 - protein, 15 aa, Homo sapiens
  CDR3 for beta chain variable domain of TCR clone 189299 (TRBV7-6, TRBJ2-7)
CASSLVPLLDGVQYF

SEQ ID NO: 378599 - protein, 14 aa, Homo sapiens
  CDR3 for alpha chain variable domain of TCR clone 189300 (TRAV1-1, TRAJ27)
CAVIYNTTARKSTF

SEQ ID NO: 378600 - protein, 15 aa, Homo sapiens
  CDR3 for beta chain variable domain of TCR clone 189300 (TRBV7-2, TRBJ2-1)
CASSSGLAGGNEQFF

SEQ ID NO: 378601 - protein, 15 aa, Homo sapiens
  CDR3 for alpha chain variable domain of TCR clone 189301 (TRAV16, TRAJ12)
CSKWPLRDSSYKLIF

SEQ ID NO: 378602 - protein, 14 aa, Homo sapiens
  CDR3 for beta chain variable domain of TCR clone 189301 (TRBV25-1, TRBJ1-2)
CASSEATGPYGYAF

SEQ ID NO: 378603 - protein, 18 aa, Homo sapiens
  CDR3 for alpha chain variable domain of TCR clone 189302 (TRAV21, TRAJ52)
RAVMPSPAGGTSYGKLTF

SEQ ID NO: 378604 - protein, 15 aa, Homo sapiens
  CDR3 for beta chain variable domain of TCR clone 189302 (TRBV19, TRBJ1-1)
CASTSGQIQNTEAFF

SEQ ID NO: 378605 - protein, 15 aa, Homo sapiens
  CDR3 for alpha chain variable domain of TCR clone 189303 (TRAV21, TRAJ38)
CAVRQDAGNNRKLIW

SEQ ID NO: 378606 - protein, 14 aa, Homo sapiens
  CDR3 for beta chain variable domain of TCR clone 189303 (TRBV18, TRBJ2-7)
CASSPRGGAYEQYF

SEQ ID NO: 378607 - protein, 14 aa, Homo sapiens
  CDR3 for alpha chain variable domain of TCR clone 189304 (TRAV27, TRAJ44)
CAASFTGTTSKLTF

SEQ ID NO: 378608 - protein, 13 aa, Homo sapiens
  CDR3 for beta chain variable domain of TCR clone 189304 (TRBV27, TRBJ2-3)
CATSRGGLYTQYF

SEQ ID NO: 378609 - protein, 14 aa, Homo sapiens
  CDR3 for alpha chain variable domain of TCR clone 189305 (TRAV12-1, TRAJ12)
CVVTRMDSSYKLIF

SEQ ID NO: 378610 - protein, 15 aa, Homo sapiens
  CDR3 for beta chain variable domain of TCR clone 189305 (TRBV2, TRBJ2-5)
CASSGTVAAGETQYF

SEQ ID NO: 378611 - protein, 15 aa, Homo sapiens
  CDR3 for alpha chain variable domain of TCR clone 189306 (TRAV34, TRAJ38)
CGADFTPGNNRKLIW

SEQ ID NO: 378612 - protein, 17 aa, Homo sapiens
  CDR3 for beta chain variable domain of TCR clone 189306 (TRBV28, TRBJ2-5)
CASSRQGGLAGAETQYF

SEQ ID NO: 378613 - protein, 14 aa, Homo sapiens
  CDR3 for alpha chain variable domain of TCR clone 189307 (TRAV4, TRAJ5)
CLVVPDTGRRALTF

SEQ ID NO: 378614 - protein, 15 aa, Homo sapiens
  CDR3 for beta chain variable domain of TCR clone 189307 (TRBV20-1, TRBJ2-7)
CSARDRVSGMDEQYF

SEQ ID NO: 378615 - protein, 14 aa, Homo sapiens
  CDR3 for alpha chain variable domain of TCR clone 189308 (TRAV8-6, TRAJ5)
CAVSVDTGRRALTF

SEQ ID NO: 378616 - protein, 15 aa, Homo sapiens
  CDR3 for beta chain variable domain of TCR clone 189308 (TRBV3-1, TRBJ1-2)
CASSHPGTPGYGYSF

SEQ ID NO: 378617 - protein, 11 aa, Homo sapiens
  CDR3 for alpha chain variable domain of TCR clone 189309 (TRAV16, TRAJ33)
CALHSNYQLIW

SEQ ID NO: 378618 - protein, 14 aa, Homo sapiens
  CDR3 for beta chain variable domain of TCR clone 189309 (TRBV7-9, TRBJ1-2)
CASSRQGANYGYTF

SEQ ID NO: 378619 - protein, 16 aa, Homo sapiens
  CDR3 for alpha chain variable domain of TCR clone 189310 (TRAV12-3, TRAJ53)
CAMSPGSGGSNYKLTF

SEQ ID NO: 378620 - protein, 17 aa, Homo sapiens
  CDR3 for beta chain variable domain of TCR clone 189310 (TRBV7-6, TRBJ2-1)
CASSLSLLRGSYNEQFF

SEQ ID NO: 378621 - protein, 16 aa, Homo sapiens
  CDR3 for alpha chain variable domain of TCR clone 189311 (TRAV30, TRAJ24)
CGTAIVDADSWGKFQF

SEQ ID NO: 378622 - protein, 16 aa, Homo sapiens
  CDR3 for beta chain variable domain of TCR clone 189311 (TRBV19, TRBJ2-1)
CASSKAGPSSYNEQFF

SEQ ID NO: 378623 - protein, 14 aa, Homo sapiens
  CDR3 for alpha chain variable domain of TCR clone 189312 (TRAV26-1, TRAJ39)
CIVFTNNAGNMLTF

SEQ ID NO: 378624 - protein, 15 aa, Homo sapiens
  CDR3 for beta chain variable domain of TCR clone 189312 (TRBV19, TRBJ2-4)
CASSLTGLTKNIHYF

SEQ ID NO: 378625 - protein, 14 aa, Homo sapiens
  CDR3 for alpha chain variable domain of TCR clone 189313 (TRAV38-1, TRAJ45)
CAYYSGGGADGLTF

SEQ ID NO: 378626 - protein, 18 aa, Homo sapiens
  CDR3 for beta chain variable domain of TCR clone 189313 (TRBV6-9, TRBJ1-1)
CQQLLRGGTGGRNTEAFF

SEQ ID NO: 378627 - protein, 17 aa, Homo sapiens
  CDR3 for alpha chain variable domain of TCR clone 189314 (TRAV3, TRAJ42)
CAVRDRDYGGSQGNLIF

SEQ ID NO: 378628 - protein, 16 aa, Homo sapiens
  CDR3 for beta chain variable domain of TCR clone 189314 (TRBV7-6, TRBJ1-6)
CASSLSSRIGDSPLHF

SEQ ID NO: 378629 - protein, 13 aa, Homo sapiens
  CDR3 for alpha chain variable domain of TCR clone 189315 (TRAV2, TRAJ40)
CAVVTSGTYKYIF

SEQ ID NO: 378630 - protein, 15 aa, Homo sapiens
  CDR3 for beta chain variable domain of TCR clone 189315 (TRBV7-9, TRBJ2-7)
CASSSSGLAVYEQYF

SEQ ID NO: 378631 - protein, 17 aa, Homo sapiens
  CDR3 for alpha chain variable domain of TCR clone 189316 (TRAV4, TRAJ18)
CLVGERSVGSTPGRLSF

SEQ ID NO: 378632 - protein, 14 aa, Homo sapiens
  CDR3 for beta chain variable domain of TCR clone 189316 (TRBV6-5, TRBJ1-2)
CASSYDGTGGGYTF

SEQ ID NO: 378633 - protein, 13 aa, Homo sapiens
  CDR3 for alpha chain variable domain of TCR clone 189317 (TRAV13-1, TRAJ39)
CSTYSNAGNMLTF

SEQ ID NO: 378634 - protein, 15 aa, Homo sapiens
  CDR3 for beta chain variable domain of TCR clone 189317 (TRBV20-1, TRBJ1-1)
CSARSAATSNTEALF

SEQ ID NO: 378635 - protein, 15 aa, Homo sapiens
  CDR3 for alpha chain variable domain of TCR clone 189318 (TRAV26-1, TRAJ29)
CIVRVEGSGNTPLVF

SEQ ID NO: 378636 - protein, 14 aa, Homo sapiens
  CDR3 for beta chain variable domain of TCR clone 189318 (TRBV18, TRBJ2-5)
CASSPGVSQVTQYF

SEQ ID NO: 378637 - protein, 15 aa, Homo sapiens
  CDR3 for alpha chain variable domain of TCR clone 189319 (TRAV12-2, TRAJ57)
CAVSRGQGGSEKLVF

SEQ ID NO: 378638 - protein, 11 aa, Homo sapiens
  CDR3 for beta chain variable domain of TCR clone 189319 (TRBV29-1, TRBJ2-5)
CSEDRTGTQYF

SEQ ID NO: 378639 - protein, 12 aa, Homo sapiens
  CDR3 for alpha chain variable domain of TCR clone 189320 (TRAV26-2, TRAJ21)
CILKGNFNKFYF

SEQ ID NO: 378640 - protein, 14 aa, Homo sapiens
  CDR3 for beta chain variable domain of TCR clone 189320 (TRBV7-9, TRBJ1-1)
CASIPLQSYTEAFF

SEQ ID NO: 378641 - protein, 13 aa, Homo sapiens
  CDR3 for alpha chain variable domain of TCR clone 189321 (TRAV20, TRAJ29)
CAVQAVGNTTLVF

SEQ ID NO: 378642 - protein, 15 aa, Homo sapiens
  CDR3 for beta chain variable domain of TCR clone 189321 (TRBV10-2, TRBJ2-5)
CASRGSGGPQETQYF

SEQ ID NO: 378643 - protein, 16 aa, Homo sapiens
  CDR3 for alpha chain variable domain of TCR clone 189322 (TRAV8-3, TRAJ44)
CAVGASNTGTASKLTF

SEQ ID NO: 378644 - protein, 15 aa, Homo sapiens
  CDR3 for beta chain variable domain of TCR clone 189322 (TRBV27, TRBJ1-5)
CASTFNRGSNQPQHF

SEQ ID NO: 378645 - protein, 11 aa, Homo sapiens
  CDR3 for alpha chain variable domain of TCR clone 189323 (TRAV2, TRAJ13)
CAAGGYQKVTF

SEQ ID NO: 378646 - protein, 16 aa, Homo sapiens
  CDR3 for beta chain variable domain of TCR clone 189323 (TRBV6-1, TRBJ2-5)
CASSETLDRGAETQYF

SEQ ID NO: 378647 - protein, 13 aa, Homo sapiens
  CDR3 for alpha chain variable domain of TCR clone 189324 (TRAV21, TRAJ27)
CAARPGNAGKSTF

SEQ ID NO: 378648 - protein, 15 aa, Homo sapiens
  CDR3 for beta chain variable domain of TCR clone 189324 (TRBV5-1, TRBJ2-7)
CASSLYPDGGYERYF

SEQ ID NO: 378649 - protein, 14 aa, Homo sapiens
  CDR3 for alpha chain variable domain of TCR clone 189325 (TRAV16, TRAJ29)
CALTRNSGNTHLVF

SEQ ID NO: 378650 - protein, 12 aa, Homo sapiens
  CDR3 for beta chain variable domain of TCR clone 189325 (TRBV2, TRBJ2-1)
CAKREGYNEQFF

SEQ ID NO: 378651 - protein, 11 aa, Homo sapiens
  CDR3 for alpha chain variable domain of TCR clone 189326 (TRAV3, TRAJ21)
CSVGNFNKFYF

SEQ ID NO: 378652 - protein, 16 aa, Homo sapiens
  CDR3 for beta chain variable domain of TCR clone 189326 (TRBV19, TRBJ2-1)
CASSKAGPSSYNERFF

SEQ ID NO: 378653 - protein, 16 aa, Homo sapiens
  CDR3 for alpha chain variable domain of TCR clone 189327 (TRAV12-3, TRAJ53)
CAMIVGSGGSNYKLTF

SEQ ID NO: 378654 - protein, 11 aa, Homo sapiens
  CDR3 for beta chain variable domain of TCR clone 189327 (TRBV29-1, TRBJ2-5)
CSVASGETQYF

SEQ ID NO: 378655 - protein, 14 aa, Homo sapiens
  CDR3 for alpha chain variable domain of TCR clone 189328 (TRAV13-1, TRAJ44)
CAAKATGTTSKLTF

SEQ ID NO: 378656 - protein, 15 aa, Homo sapiens
  CDR3 for beta chain variable domain of TCR clone 189328 (TRBV9, TRBJ2-1)
CASSLAGSSYNEQFF

SEQ ID NO: 378657 - protein, 14 aa, Homo sapiens
  CDR3 for alpha chain variable domain of TCR clone 189329 (TRAV9-2, TRAJ39)
CALYIYNAGNMLTF

SEQ ID NO: 378658 - protein, 16 aa, Homo sapiens
  CDR3 for beta chain variable domain of TCR clone 189329 (TRBV12-4, TRBJ2-3)
CASSFISGSGTDTQYF

SEQ ID NO: 378659 - protein, 15 aa, Homo sapiens
  CDR3 for alpha chain variable domain of TCR clone 189330 (TRAV16, TRAJ16)
CALQGGGSDGQKLLF

SEQ ID NO: 378660 - protein, 16 aa, Homo sapiens
  CDR3 for beta chain variable domain of TCR clone 189330 (TRBV4-1, TRBJ1-1)
CASSQDAGMGNTEAFF

SEQ ID NO: 378661 - protein, 10 aa, Homo sapiens
  CDR3 for alpha chain variable domain of TCR clone 189331 (TRAV8-4, TRAJ43)
CAVSADDMRF

SEQ ID NO: 378662 - protein, 11 aa, Homo sapiens
  CDR3 for beta chain variable domain of TCR clone 189331 (TRBV12-4, TRBJ2-3)
CASTATETQYF

SEQ ID NO: 378663 - protein, 16 aa, Homo sapiens
  CDR3 for alpha chain variable domain of TCR clone 189332 (TRAV23/DV6, TRAJ48)
CAASGVVNFGNEKLTF

SEQ ID NO: 378664 - protein, 14 aa, Homo sapiens
  CDR3 for beta chain variable domain of TCR clone 189332 (TRBV20-1, TRBJ2-5)
QCWTSGVSQETQYF

SEQ ID NO: 378665 - protein, 12 aa, Homo sapiens
  CDR3 for alpha chain variable domain of TCR clone 189333 (TRAV20, TRAJ37)
CAVQMHTGKLIF

SEQ ID NO: 378666 - protein, 12 aa, Homo sapiens
  CDR3 for beta chain variable domain of TCR clone 189333 (TRBV6-1, TRBJ1-2)
CASSELRHGYTF

SEQ ID NO: 378667 - protein, 16 aa, Homo sapiens
  CDR3 for alpha chain variable domain of TCR clone 189334 (TRAV13-1, TRAJ48)
CAASIFGNFGNEKLTF

SEQ ID NO: 378668 - protein, 16 aa, Homo sapiens
  CDR3 for beta chain variable domain of TCR clone 189334 (TRBV18, TRBJ1-5)
CARSPYRVEGNQPQHF

SEQ ID NO: 378669 - protein, 14 aa, Homo sapiens
  CDR3 for alpha chain variable domain of TCR clone 189335 (TRAV36/DV7, TRAJ40)
CGVETTSGTYKYIF

SEQ ID NO: 378670 - protein, 16 aa, Homo sapiens
  CDR3 for beta chain variable domain of TCR clone 189335 (TRBV7-2, TRBJ2-5)
CASSSKWLSGQETQYF

SEQ ID NO: 378671 - protein, 14 aa, Homo sapiens
  CDR3 for alpha chain variable domain of TCR clone 189336 (TRAV12-1, TRAJ4)
CVGDFSGGYNKLIF

SEQ ID NO: 378672 - protein, 13 aa, Homo sapiens
  CDR3 for beta chain variable domain of TCR clone 189336 (TRBV7-9, TRBJ1-2)
CASSLKQNYGYTF

SEQ ID NO: 378673 - protein, 14 aa, Homo sapiens
  CDR3 for alpha chain variable domain of TCR clone 189337 (TRAV38-2/DV8, TRAJ23)
CAFRSQNQGGKLIF

SEQ ID NO: 378674 - protein, 13 aa, Homo sapiens
  CDR3 for beta chain variable domain of TCR clone 189337 (TRBV24-1, TRBJ2-1)
CATSAGPYNEQFF

SEQ ID NO: 378675 - protein, 15 aa, Homo sapiens
  CDR3 for alpha chain variable domain of TCR clone 189338 (TRAV25, TRAJ10)
CAGPLLTGRGNKLTF

SEQ ID NO: 378676 - protein, 15 aa, Homo sapiens
  CDR3 for beta chain variable domain of TCR clone 189338 (TRBV12-5, TRBJ2-2)
CASGRLGGNTGELFF

SEQ ID NO: 378677 - protein, 14 aa, Homo sapiens
  CDR3 for alpha chain variable domain of TCR clone 189339 (TRAV13-1, TRAJ44)
CAAKATGTASKLTF

SEQ ID NO: 378678 - protein, 15 aa, Homo sapiens
  CDR3 for beta chain variable domain of TCR clone 189339 (TRBV20-1, TRBJ1-4)
CSARREWGVNEKLFF

SEQ ID NO: 378679 - protein, 11 aa, Homo sapiens
  CDR3 for alpha chain variable domain of TCR clone 189340 (TRAV2, TRAJ20)
CAVADDYKLSF

SEQ ID NO: 378680 - protein, 15 aa, Homo sapiens
  CDR3 for beta chain variable domain of TCR clone 189340 (TRBV27, TRBJ1-5)
CASSLGTGFDQPQHF

SEQ ID NO: 378681 - protein, 18 aa, Homo sapiens
  CDR3 for alpha chain variable domain of TCR clone 189341 (TRAV21, TRAJ52)
CAVSPSPAGGTSYGKLTF

SEQ ID NO: 378682 - protein, 13 aa, Homo sapiens
  CDR3 for beta chain variable domain of TCR clone 189341 (TRBV20-1, TRBJ1-1)
CSARVGGNTEAFF

SEQ ID NO: 378683 - protein, 14 aa, Homo sapiens
  CDR3 for alpha chain variable domain of TCR clone 189342 (TRAV3, TRAJ9)
CAVRGNTGGFKTIF

SEQ ID NO: 378684 - protein, 15 aa, Homo sapiens
  CDR3 for beta chain variable domain of TCR clone 189342 (TRBV7-2, TRBJ2-7)
CQQLGLAGGAYEQYF

SEQ ID NO: 378685 - protein, 15 aa, Homo sapiens
  CDR3 for alpha chain variable domain of TCR clone 189343 (TRAV36/DV7, TRAJ22)
CAVTFSSGSARQLTF

SEQ ID NO: 378686 - protein, 12 aa, Homo sapiens
  CDR3 for beta chain variable domain of TCR clone 189343 (TRBV7-3, TRBJ2-1)
CASSFINNEQFF

SEQ ID NO: 378687 - protein, 15 aa, Homo sapiens
  CDR3 for alpha chain variable domain of TCR clone 189344 (TRAV26-1, TRAJ29)
CIVRVEGSGNTPLVF

SEQ ID NO: 378688 - protein, 12 aa, Homo sapiens
  CDR3 for beta chain variable domain of TCR clone 189344 (TRBV5-7, TRBJ2-7)
RASSVQGGEQYF

SEQ ID NO: 378689 - protein, 11 aa, Homo sapiens
  CDR3 for alpha chain variable domain of TCR clone 189345 (TRAV36/DV7, TRAJ20)
CAANNDYKLSF

SEQ ID NO: 378690 - protein, 18 aa, Homo sapiens
  CDR3 for beta chain variable domain of TCR clone 189345 (TRBV11-2, TRBJ2-3)
CASSLGGASRGAPNTQYF

SEQ ID NO: 378691 - protein, 14 aa, Homo sapiens
  CDR3 for alpha chain variable domain of TCR clone 189346 (TRAV38-1, TRAJ40)
CALRPTSGTYKYIF

SEQ ID NO: 378692 - protein, 11 aa, Homo sapiens
  CDR3 for beta chain variable domain of TCR clone 189346 (TRBV7-8, TRBJ2-7)
CASSLSLEQYF

SEQ ID NO: 378693 - protein, 17 aa, Homo sapiens
  CDR3 for alpha chain variable domain of TCR clone 189347 (TRAV3, TRAJ6)
CAVRDGPRAGGSYIPTF

SEQ ID NO: 378694 - protein, 15 aa, Homo sapiens
  CDR3 for beta chain variable domain of TCR clone 189347 (TRBV15, TRBJ1-4)
CATSRDMGSYEKLFF

SEQ ID NO: 378695 - protein, 16 aa, Homo sapiens
  CDR3 for alpha chain variable domain of TCR clone 189348 (TRAV13-1, TRAJ48)
CAASIFGNFGNEKLTF

SEQ ID NO: 378696 - protein, 13 aa, Homo sapiens
  CDR3 for beta chain variable domain of TCR clone 189348 (TRBV7-3, TRBJ1-1)
CASSLSGETEAFF

SEQ ID NO: 378697 - protein, 15 aa, Homo sapiens
  CDR3 for alpha chain variable domain of TCR clone 189349 (TRAV16, TRAJ16)
CALQGAGSDGQKLLF

SEQ ID NO: 378698 - protein, 15 aa, Homo sapiens
  CDR3 for beta chain variable domain of TCR clone 189349 (TRBV20-1, TRBJ2-7)
CSARDRVSGMDEQYF

SEQ ID NO: 378699 - protein, 16 aa, Homo sapiens
  CDR3 for alpha chain variable domain of TCR clone 189350 (TRAV30, TRAJ24)
CGKEIVDADSWGKFQF

SEQ ID NO: 378700 - protein, 14 aa, Homo sapiens
  CDR3 for beta chain variable domain of TCR clone 189350 (TRBV19, TRBJ2-1)
CASPTFVLSGEQFF

SEQ ID NO: 378701 - protein, 14 aa, Homo sapiens
  CDR3 for alpha chain variable domain of TCR clone 189351 (TRAV26-1, TRAJ38)
CIADNAGYNRKLIL

SEQ ID NO: 378702 - protein, 13 aa, Homo sapiens
  CDR3 for beta chain variable domain of TCR clone 189351 (TRBV20-1, TRBJ1-1)
CSARGGGNTEAFF

SEQ ID NO: 378703 - protein, 14 aa, Homo sapiens
  CDR3 for alpha chain variable domain of TCR clone 189352 (TRAV20, TRAJ4)
CAVRLGGGYNKLIF

SEQ ID NO: 378704 - protein, 21 aa, Homo sapiens
  CDR3 for beta chain variable domain of TCR clone 189352 (TRBV15, TRBJ2-1)
AWGTQPCTCVPPAGVDTARFF

SEQ ID NO: 378705 - protein, 16 aa, Homo sapiens
  CDR3 for alpha chain variable domain of TCR clone 189353 (TRAV3, TRAJ37)
CAGRGKGSGNTGKLSF

SEQ ID NO: 378706 - protein, 13 aa, Homo sapiens
  CDR3 for beta chain variable domain of TCR clone 189353 (TRBV14, TRBJ2-7)
CASSQDRRYEQYF

SEQ ID NO: 378707 - protein, 17 aa, Homo sapiens
  CDR3 for alpha chain variable domain of TCR clone 189354 (TRAV23/DV6, TRAJ28)
CAALLAYSGAGSYQLTF

SEQ ID NO: 378708 - protein, 16 aa, Homo sapiens
  CDR3 for beta chain variable domain of TCR clone 189354 (TRBV7-3, TRBJ2-2)
CASSLKRGTLSGELFF

SEQ ID NO: 378709 - protein, 17 aa, Homo sapiens
  CDR3 for alpha chain variable domain of TCR clone 189355 (TRAV38-2/DV8, TRAJ38)
CAYRSARGAGNNRKLIW

SEQ ID NO: 378710 - protein, 13 aa, Homo sapiens
  CDR3 for beta chain variable domain of TCR clone 189355 (TRBV6-5, TRBJ2-1)
RASRGRVGNEQFF

SEQ ID NO: 378711 - protein, 12 aa, Homo sapiens
  CDR3 for alpha chain variable domain of TCR clone 189356 (TRAV13-2, TRAJ23)
CAERHRGGKLIF

SEQ ID NO: 378712 - protein, 15 aa, Homo sapiens
  CDR3 for beta chain variable domain of TCR clone 189356 (TRBV11-2, TRBJ2-1)
CASSSPSTRYNEQFF

SEQ ID NO: 378713 - protein, 13 aa, Homo sapiens
  CDR3 for alpha chain variable domain of TCR clone 189357 (TRAV29/DV5, TRAJ31)
CAASRDNNARLMF

SEQ ID NO: 378714 - protein, 12 aa, Homo sapiens
  CDR3 for beta chain variable domain of TCR clone 189357 (TRBV14, TRBJ2-7)
CASSLYKDEQYF

SEQ ID NO: 378715 - protein, 18 aa, Homo sapiens
  CDR3 for alpha chain variable domain of TCR clone 189358 (TRAV12-3, TRAJ52)
CAMSVGGAGGTSYGKLTF

SEQ ID NO: 378716 - protein, 13 aa, Homo sapiens
  CDR3 for beta chain variable domain of TCR clone 189358 (TRBV24-1, TRBJ2-2)
CATTATRTGELFF

SEQ ID NO: 378717 - protein, 19 aa, Homo sapiens
  CDR3 for alpha chain variable domain of TCR clone 189359 (TRAV40, )
CLPIPDIQNPDPAVYQLRD

SEQ ID NO: 378718 - protein, 15 aa, Homo sapiens
  CDR3 for beta chain variable domain of TCR clone 189359 (TRBV2, TRBJ1-2)
CASSEIGGANYGYSF

SEQ ID NO: 378719 - protein, 13 aa, Homo sapiens
  CDR3 for alpha chain variable domain of TCR clone 189360 (TRAV2, TRAJ15)
CAVASQAGTALIF

SEQ ID NO: 378720 - protein, 16 aa, Homo sapiens
  CDR3 for beta chain variable domain of TCR clone 189360 (TRBV7-2, TRBJ2-7)
CASSLEAGGPWYEQYF

SEQ ID NO: 378721 - protein, 15 aa, Homo sapiens
  CDR3 for alpha chain variable domain of TCR clone 189361 (TRAV12-2, TRAJ53)
CAVNGGGGSTYKLTF

SEQ ID NO: 378722 - protein, 12 aa, Homo sapiens
  CDR3 for beta chain variable domain of TCR clone 189361 (TRBV7-6, TRBJ2-5)
CASSLSQETQYF

SEQ ID NO: 378723 - protein, 16 aa, Homo sapiens
  CDR3 for alpha chain variable domain of TCR clone 189362 (TRAV12-3, TRAJ53)
CAMSPGSGGSNYKLTF

SEQ ID NO: 378724 - protein, 14 aa, Homo sapiens
  CDR3 for beta chain variable domain of TCR clone 189362 (TRBV20-1, TRBJ2-7)
CSAKRGRSSYEQCF

SEQ ID NO: 378725 - protein, 16 aa, Homo sapiens
  CDR3 for alpha chain variable domain of TCR clone 189363 (TRAV3, TRAJ10)
CVVRDMRAGGGNKLTF

SEQ ID NO: 378726 - protein, 16 aa, Homo sapiens
  CDR3 for beta chain variable domain of TCR clone 189363 (TRBV19, TRBJ2-2)
CASSFPGQGLAGELFF

SEQ ID NO: 378727 - protein, 16 aa, Homo sapiens
  CDR3 for alpha chain variable domain of TCR clone 189364 (TRAV17, TRAJ52)
CATGIIGGTSYGKPTF

SEQ ID NO: 378728 - protein, 12 aa, Homo sapiens
  CDR3 for beta chain variable domain of TCR clone 189364 (TRBV7-3, TRBJ2-1)
CASSFINNEQFF

SEQ ID NO: 378729 - protein, 12 aa, Homo sapiens
  CDR3 for alpha chain variable domain of TCR clone 189365 (TRAV16, TRAJ26)
CALRSYGQNFVF

SEQ ID NO: 378730 - protein, 16 aa, Homo sapiens
  CDR3 for beta chain variable domain of TCR clone 189365 (TRBV7-2, TRBJ1-4)
CASSLAPGRRDEKLFF

SEQ ID NO: 378731 - protein, 12 aa, Homo sapiens
  CDR3 for alpha chain variable domain of TCR clone 189366 (TRAV12-1, TRAJ40)
CVVISGTYKYIF

SEQ ID NO: 378732 - protein, 14 aa, Homo sapiens
  CDR3 for beta chain variable domain of TCR clone 189366 (TRBV20-1, TRBJ2-2)
CSAPDTANTGELFF

SEQ ID NO: 378733 - protein, 14 aa, Homo sapiens
  CDR3 for alpha chain variable domain of TCR clone 189367 (TRAV1-2, TRAJ8)
CGVREDTGFQKIVF

SEQ ID NO: 378734 - protein, 15 aa, Homo sapiens
  CDR3 for beta chain variable domain of TCR clone 189367 (TRBV6-3, TRBJ2-7)
CASSSPGTVFYEQYF

SEQ ID NO: 378735 - protein, 12 aa, Homo sapiens
  CDR3 for alpha chain variable domain of TCR clone 189368 (TRAV1-2, TRAJ33)
CAALDSNYQLIW

SEQ ID NO: 378736 - protein, 14 aa, Homo sapiens
  CDR3 for beta chain variable domain of TCR clone 189368 (TRBV20-1, TRBJ2-7)
CSANRGRSYYEQYF

SEQ ID NO: 378737 - protein, 15 aa, Homo sapiens
  CDR3 for alpha chain variable domain of TCR clone 189369 (TRAV2, TRAJ28)
CAVPYSGAGSYQLTF

SEQ ID NO: 378738 - protein, 14 aa, Homo sapiens
  CDR3 for beta chain variable domain of TCR clone 189369 (TRBV7-9, TRBJ1-2)
CASSRQGANYGYTF

SEQ ID NO: 378739 - protein, 13 aa, Homo sapiens
  CDR3 for alpha chain variable domain of TCR clone 189370 (TRAV2, TRAJ40)
CAVVTSGTCKYIF

SEQ ID NO: 378740 - protein, 13 aa, Homo sapiens
  CDR3 for beta chain variable domain of TCR clone 189370 (TRBV7-6, TRBJ2-1)
CASSPLTYNEQFF

SEQ ID NO: 378741 - protein, 14 aa, Homo sapiens
  CDR3 for alpha chain variable domain of TCR clone 189371 (TRAV12-3, TRAJ10)
SHLPLTGGGNKLTF

SEQ ID NO: 378742 - protein, 15 aa, Homo sapiens
  CDR3 for beta chain variable domain of TCR clone 189371 (TRBV7-3, TRBJ2-1)
CASSPTGGSRNEQFF

SEQ ID NO: 378743 - protein, 13 aa, Homo sapiens
  CDR3 for alpha chain variable domain of TCR clone 189372 (TRAV13-2, TRAJ8)
CAFTNTGFQKLVF

SEQ ID NO: 378744 - protein, 15 aa, Homo sapiens
  CDR3 for beta chain variable domain of TCR clone 189372 (TRBV19, TRBJ2-3)
CAAGDTNAPNDTQYF

SEQ ID NO: 378745 - protein, 11 aa, Homo sapiens
  CDR3 for alpha chain variable domain of TCR clone 189373 (TRAV29/DV5, TRAJ37)
CATSNTGKLIS

SEQ ID NO: 378746 - protein, 18 aa, Homo sapiens
  CDR3 for beta chain variable domain of TCR clone 189373 (TRBV20-1, TRBJ2-6)
CSARTLAGGPSGANVLTF

SEQ ID NO: 378747 - protein, 16 aa, Homo sapiens
  CDR3 for alpha chain variable domain of TCR clone 189374 (TRAV1-2, TRAJ10)
CAVRGVLTGGGNKLTF

SEQ ID NO: 378748 - protein, 15 aa, Homo sapiens
  CDR3 for beta chain variable domain of TCR clone 189374 (TRBV7-6, TRBJ1-5)
CASSQSSGINQPQHF

SEQ ID NO: 378749 - protein, 15 aa, Homo sapiens
  CDR3 for alpha chain variable domain of TCR clone 189375 (TRAV12-3, TRAJ6)
CAMSATSGGSYVPTF

SEQ ID NO: 378750 - protein, 11 aa, Homo sapiens
  CDR3 for beta chain variable domain of TCR clone 189375 (TRBV20-1, TRBJ1-5)
CSAQGDQTQHF

SEQ ID NO: 378751 - protein, 13 aa, Homo sapiens
  CDR3 for alpha chain variable domain of TCR clone 189376 (TRAV12-2, TRAJ6)
CAVNVSRKLHTYI

SEQ ID NO: 378752 - protein, 17 aa, Homo sapiens
  CDR3 for beta chain variable domain of TCR clone 189376 (TRBV7-6, TRBJ2-5)
CASSPGLADPWGETQYF

SEQ ID NO: 378753 - protein, 15 aa, Homo sapiens
  CDR3 for alpha chain variable domain of TCR clone 189377 (TRAV14/DV4, TRAJ33)
CAMREGRDSNYQLIW

SEQ ID NO: 378754 - protein, 16 aa, Homo sapiens
  CDR3 for beta chain variable domain of TCR clone 189377 (TRBV12-5, TRBJ2-5)
CASGPRTSGNQETQYL

SEQ ID NO: 378755 - protein, 13 aa, Homo sapiens
  CDR3 for alpha chain variable domain of TCR clone 189378 (TRAV3, TRAJ21)
CAVREPAFNKFYF

SEQ ID NO: 378756 - protein, 13 aa, Homo sapiens
  CDR3 for beta chain variable domain of TCR clone 189378 (TRBV20-1, TRBJ1-1)
CSARGGGNTEAFF

SEQ ID NO: 378757 - protein, 15 aa, Homo sapiens
  CDR3 for alpha chain variable domain of TCR clone 189379 (TRAV26-1, TRAJ22)
CIVRVSFWFCKATDL

SEQ ID NO: 378758 - protein, 13 aa, Homo sapiens
  CDR3 for beta chain variable domain of TCR clone 189379 (TRBV7-9, TRBJ1-2)
CASSLKQNNGYTF

SEQ ID NO: 378759 - protein, 12 aa, Homo sapiens
  CDR3 for alpha chain variable domain of TCR clone 189380 (TRAV13-1, TRAJ21)
CAAKEGFNKFYF

SEQ ID NO: 378760 - protein, 19 aa, Homo sapiens
  CDR3 for beta chain variable domain of TCR clone 189380 (TRBV4-2, TRBJ2-5)
CASSQEEIRLAGLQETQYF

SEQ ID NO: 378761 - protein, 16 aa, Homo sapiens
  CDR3 for alpha chain variable domain of TCR clone 189381 (TRAV13-1, TRAJ48)
CAASIFGNLGNEKLTF

SEQ ID NO: 378762 - protein, 15 aa, Homo sapiens
  CDR3 for beta chain variable domain of TCR clone 189381 (TRBV20-1, TRBJ2-7)
CSARDRVSGMDEQYF

SEQ ID NO: 378763 - protein, 17 aa, Homo sapiens
  CDR3 for alpha chain variable domain of TCR clone 189382 (TRAV16, TRAJ58)
CITVLSYGETSGSRLTF

SEQ ID NO: 378764 - protein, 17 aa, Homo sapiens
  CDR3 for beta chain variable domain of TCR clone 189382 (TRBV18, TRBJ2-1)
CASSKGLSGGADNEQFF

SEQ ID NO: 378765 - protein, 15 aa, Homo sapiens
  CDR3 for alpha chain variable domain of TCR clone 189383 (TRAV21, TRAJ56)
CAVTKYTGANSKLKF

SEQ ID NO: 378766 - protein, 14 aa, Homo sapiens
  CDR3 for beta chain variable domain of TCR clone 189383 (TRBV20-1, TRBJ2-3)
CSARVRGSTDTQYF

SEQ ID NO: 378767 - protein, 15 aa, Homo sapiens
  CDR3 for alpha chain variable domain of TCR clone 189384 (TRAV23/DV6, TRAJ18)
CAASFRGSTLGRLYF

SEQ ID NO: 378768 - protein, 13 aa, Homo sapiens
  CDR3 for beta chain variable domain of TCR clone 189384 (TRBV28, TRBJ2-7)
CSILDRAGGEQYF

SEQ ID NO: 378769 - protein, 17 aa, Homo sapiens
  CDR3 for alpha chain variable domain of TCR clone 189385 (TRAV3, TRAJ6)
CAVRDGPRAGGSYIPTF

SEQ ID NO: 378770 - protein, 16 aa, Homo sapiens
  CDR3 for beta chain variable domain of TCR clone 189385 (TRBV5-1, TRBJ1-3)
SASSPWAPSSGNTIYF

SEQ ID NO: 378771 - protein, 14 aa, Homo sapiens
  CDR3 for alpha chain variable domain of TCR clone 189386 (TRAV16, TRAJ42)
CALLAGGSQGNLIF

SEQ ID NO: 378772 - protein, 13 aa, Homo sapiens
  CDR3 for beta chain variable domain of TCR clone 189386 (TRBV7-9, TRBJ1-2)
CASSLKQNYDYAF

SEQ ID NO: 378773 - protein, 14 aa, Homo sapiens
  CDR3 for alpha chain variable domain of TCR clone 189387 (TRAV23/DV6, TRAJ27)
CAASRDTNAGKSNF

SEQ ID NO: 378774 - protein, 16 aa, Homo sapiens
  CDR3 for beta chain variable domain of TCR clone 189387 (TRBV5-1, TRBJ2-5)
CASSLALLRAGETQYF

SEQ ID NO: 378775 - protein, 14 aa, Homo sapiens
  CDR3 for alpha chain variable domain of TCR clone 189388 (TRAV26-1, TRAJ48)
CIVRVGFGNVKLTF

SEQ ID NO: 378776 - protein, 13 aa, Homo sapiens
  CDR3 for beta chain variable domain of TCR clone 189388 (TRBV11-3, TRBJ2-3)
CASSHDTKDTQYF

SEQ ID NO: 378777 - protein, 15 aa, Homo sapiens
  CDR3 for alpha chain variable domain of TCR clone 189389 (TRAV8-3, TRAJ45)
CDSSYSGGGADGLTF

SEQ ID NO: 378778 - protein, 17 aa, Homo sapiens
  CDR3 for beta chain variable domain of TCR clone 189389 (TRBV7-8, TRBJ1-2)
CASSLRPLQGHSYGYTF

SEQ ID NO: 378779 - protein, 17 aa, Homo sapiens
  CDR3 for alpha chain variable domain of TCR clone 189390 (TRAV4, TRAJ18)
CLVGERSVGSTLGRLYF

SEQ ID NO: 378780 - protein, 16 aa, Homo sapiens
  CDR3 for beta chain variable domain of TCR clone 189390 (TRBV19, TRBJ2-1)
SASSKAGPSSYNEQFF

SEQ ID NO: 378781 - protein, 18 aa, Homo sapiens
  CDR3 for alpha chain variable domain of TCR clone 189391 (TRAV29/DV5, TRAJ53)
CSVLMCSKRGGSNYKLTF

SEQ ID NO: 378782 - protein, 17 aa, Homo sapiens
  CDR3 for beta chain variable domain of TCR clone 189391 (TRBV7-8, TRBJ2-6)
CASSAGTGGAGANVLTF

SEQ ID NO: 378783 - protein, 14 aa, Homo sapiens
  CDR3 for alpha chain variable domain of TCR clone 189392 (TRAV1-2, TRAJ16)
CAVNRSSDGQKLLF

SEQ ID NO: 378784 - protein, 15 aa, Homo sapiens
  CDR3 for beta chain variable domain of TCR clone 189392 (TRBV9, TRBJ1-6)
CAISVAGTGDSPLHF

SEQ ID NO: 378785 - protein, 15 aa, Homo sapiens
  CDR3 for alpha chain variable domain of TCR clone 189393 (TRAV8-3, TRAJ32)
CAVEVVLQTSSSLQL

SEQ ID NO: 378786 - protein, 12 aa, Homo sapiens
  CDR3 for beta chain variable domain of TCR clone 189393 (TRBV7-8, TRBJ2-7)
CASSLGDREQYF

SEQ ID NO: 378787 - protein, 16 aa, Homo sapiens
  CDR3 for alpha chain variable domain of TCR clone 189394 (TRAV3, TRAJ10)
CAVRDMRAGGGNKLTF

SEQ ID NO: 378788 - protein, 16 aa, Homo sapiens
  CDR3 for beta chain variable domain of TCR clone 189394 (TRBV12-4, TRBJ1-2)
CASSPTATGKTRGYTF

SEQ ID NO: 378789 - protein, 13 aa, Homo sapiens
  CDR3 for alpha chain variable domain of TCR clone 189395 (TRAV13-1, TRAJ6)
CARGSGGSYIPTF

SEQ ID NO: 378790 - protein, 13 aa, Homo sapiens
  CDR3 for beta chain variable domain of TCR clone 189395 (TRBV12-5, TRBJ2-3)
CASGDRQSDTQYF

SEQ ID NO: 378791 - protein, 14 aa, Homo sapiens
  CDR3 for alpha chain variable domain of TCR clone 189396 (TRAV8-1, TRAJ24)
CAVNAADSWGKLQF

SEQ ID NO: 378792 - protein, 15 aa, Homo sapiens
  CDR3 for beta chain variable domain of TCR clone 189396 (TRBV20-1, TRBJ2-7)
CSVRVPAAYFYEQYF

SEQ ID NO: 378793 - protein, 13 aa, Homo sapiens
  CDR3 for alpha chain variable domain of TCR clone 189397 (TRAV21, TRAJ34)
CAHYNTTSSSLGL

SEQ ID NO: 378794 - protein, 11 aa, Homo sapiens
  CDR3 for beta chain variable domain of TCR clone 189397 (TRBV29-1, TRBJ2-5)
CSEDRTGTQYF

SEQ ID NO: 378795 - protein, 14 aa, Homo sapiens
  CDR3 for alpha chain variable domain of TCR clone 189398 (TRAV27, TRAJ23)
CSGLSYNQGGKLIF

SEQ ID NO: 378796 - protein, 15 aa, Homo sapiens
  CDR3 for beta chain variable domain of TCR clone 189398 (TRBV19, TRBJ2-2)
CASSLNRGVTGELFF

SEQ ID NO: 378797 - protein, 14 aa, Homo sapiens
  CDR3 for alpha chain variable domain of TCR clone 189399 (TRAV12-2, TRAJ13)
CAVKKTGGYQKVTF

SEQ ID NO: 378798 - protein, 15 aa, Homo sapiens
  CDR3 for beta chain variable domain of TCR clone 189399 (TRBV4-1, TRBJ1-2)
CASSQGQGAAYGYTF

SEQ ID NO: 378799 - protein, 12 aa, Homo sapiens
  CDR3 for alpha chain variable domain of TCR clone 189400 (TRAV12-1, TRAJ34)
CVVAGATDKLIF

SEQ ID NO: 378800 - protein, 14 aa, Homo sapiens
  CDR3 for beta chain variable domain of TCR clone 189400 (TRBV12-4, TRBJ1-1)
CASSLGTGGTEAFF

SEQ ID NO: 378801 - protein, 11 aa, Homo sapiens
  CDR3 for alpha chain variable domain of TCR clone 189401 (TRAV13-2, TRAJ39)
CAENAGNMLTF

SEQ ID NO: 378802 - protein, 16 aa, Homo sapiens
  CDR3 for beta chain variable domain of TCR clone 189401 (TRBV5-1, TRBJ2-3)
CASSLGLAVYTDTQYF

SEQ ID NO: 378803 - protein, 14 aa, Homo sapiens
  CDR3 for alpha chain variable domain of TCR clone 189402 (TRAV12-2, TRAJ24)
CAVTPADSWRKLQF

SEQ ID NO: 378804 - protein, 13 aa, Homo sapiens
  CDR3 for beta chain variable domain of TCR clone 189402 (TRBV7-2, TRBJ2-7)
CASSSPSGSEQYF

SEQ ID NO: 378805 - protein, 19 aa, Homo sapiens
  CDR3 for alpha chain variable domain of TCR clone 189403 (TRAV13-1, TRAJ52)
CAASPYQNAGGTSYGKLTF

SEQ ID NO: 378806 - protein, 15 aa, Homo sapiens
  CDR3 for beta chain variable domain of TCR clone 189403 (TRBV11-2, TRBJ2-2)
CASSSDRVNAGELFF

SEQ ID NO: 378807 - protein, 16 aa, Homo sapiens
  CDR3 for alpha chain variable domain of TCR clone 189404 (TRAV12-1, TRAJ48)
CVVNMVSNFGNEKLTF

SEQ ID NO: 378808 - protein, 18 aa, Homo sapiens
  CDR3 for beta chain variable domain of TCR clone 189404 (TRBV11-2, TRBJ2-6)
CASSLKPFLGTGANVLTF

SEQ ID NO: 378809 - protein, 12 aa, Homo sapiens
  CDR3 for alpha chain variable domain of TCR clone 189405 (TRAV13-1, TRAJ15)
CAANQAGTALIF

SEQ ID NO: 378810 - protein, 14 aa, Homo sapiens
  CDR3 for beta chain variable domain of TCR clone 189405 (TRBV19, TRBJ2-2)
CASSGQGIAGELFF

SEQ ID NO: 378811 - protein, 14 aa, Homo sapiens
  CDR3 for alpha chain variable domain of TCR clone 189406 (TRAV9-2, TRAJ6)
CALSDPGGSYIPTF

SEQ ID NO: 378812 - protein, 16 aa, Homo sapiens
  CDR3 for beta chain variable domain of TCR clone 189406 (TRBV19, TRBJ2-2)
CASRSPGTRATGELFF

SEQ ID NO: 378813 - protein, 14 aa, Homo sapiens
  CDR3 for alpha chain variable domain of TCR clone 189407 (TRAV1-2, TRAJ16)
CAVNRFSDDQKLLF

SEQ ID NO: 378814 - protein, 14 aa, Homo sapiens
  CDR3 for beta chain variable domain of TCR clone 189407 (TRBV12-4, TRBJ1-1)
CASSLGTGGTEAFF

SEQ ID NO: 378815 - protein, 13 aa, Homo sapiens
  CDR3 for alpha chain variable domain of TCR clone 189408 (TRAV17, TRAJ39)
CATVSNSVNMLTF

SEQ ID NO: 378816 - protein, 14 aa, Homo sapiens
  CDR3 for beta chain variable domain of TCR clone 189408 (TRBV7-3, TRBJ1-1)
CASSLKGGNTEAFF

SEQ ID NO: 378817 - protein, 14 aa, Homo sapiens
  CDR3 for alpha chain variable domain of TCR clone 189409 (TRAV16, TRAJ32)
CALKSGGATNKLIL

SEQ ID NO: 378818 - protein, 13 aa, Homo sapiens
  CDR3 for beta chain variable domain of TCR clone 189409 (TRBV7-2, TRBJ2-2)
CASSSVRAGELFF

SEQ ID NO: 378819 - protein, 15 aa, Homo sapiens
  CDR3 for alpha chain variable domain of TCR clone 189410 (TRAV8-3, TRAJ11)
CAVGLLNSGYSTPTF

SEQ ID NO: 378820 - protein, 14 aa, Homo sapiens
  CDR3 for beta chain variable domain of TCR clone 189410 (TRBV4-1, TRBJ2-5)
CASSRSGSGETQYF

SEQ ID NO: 378821 - protein, 13 aa, Homo sapiens
  CDR3 for alpha chain variable domain of TCR clone 189411 (TRAV8-6, TRAJ8)
CAVSNKGFQKLLF

SEQ ID NO: 378822 - protein, 15 aa, Homo sapiens
  CDR3 for beta chain variable domain of TCR clone 189411 (TRBV28, TRBJ2-5)
CASSSGRTIQETQYF

SEQ ID NO: 378823 - protein, 15 aa, Homo sapiens
  CDR3 for alpha chain variable domain of TCR clone 189412 (TRAV8-3, TRAJ27)
CAVGPSKTNAGKSTF

SEQ ID NO: 378824 - protein, 13 aa, Homo sapiens
  CDR3 for beta chain variable domain of TCR clone 189412 (TRBV11-2, TRBJ2-7)
CASSGTRPYEQYF

SEQ ID NO: 378825 - protein, 16 aa, Homo sapiens
  CDR3 for alpha chain variable domain of TCR clone 189413 (TRAV20, TRAJ10)
CAVLRGLTGGGNKPTF

SEQ ID NO: 378826 - protein, 14 aa, Homo sapiens
  CDR3 for beta chain variable domain of TCR clone 189413 (TRBV19, TRBJ1-5)
CASRAPDSFLAQHF

SEQ ID NO: 378827 - protein, 14 aa, Homo sapiens
  CDR3 for alpha chain variable domain of TCR clone 189414 (TRAV12-1, TRAJ26)
CVVKGSNYGQNFVF

SEQ ID NO: 378828 - protein, 15 aa, Homo sapiens
  CDR3 for beta chain variable domain of TCR clone 189414 (TRBV20-1, TRBJ2-7)
CSDRDRVSGMDEQYF

SEQ ID NO: 378829 - protein, 14 aa, Homo sapiens
  CDR3 for alpha chain variable domain of TCR clone 189415 (TRAV26-1, TRAJ34)
CLVRVAYNTDKLIF

SEQ ID NO: 378830 - protein, 15 aa, Homo sapiens
  CDR3 for beta chain variable domain of TCR clone 189415 (TRBV20-1, TRBJ2-7)
CSARVPAAYFYEKYF

SEQ ID NO: 378831 - protein, 16 aa, Homo sapiens
  CDR3 for alpha chain variable domain of TCR clone 189416 (TRAV4, TRAJ18)
CCVLLIGGSTLGRLYF

SEQ ID NO: 378832 - protein, 14 aa, Homo sapiens
  CDR3 for beta chain variable domain of TCR clone 189416 (TRBV7-9, TRBJ1-2)
CASSLGPPQWPATF

SEQ ID NO: 378833 - protein, 12 aa, Homo sapiens
  CDR3 for alpha chain variable domain of TCR clone 189417 (TRAV12-3, TRAJ20)
CAMVRGDYKLSF

SEQ ID NO: 378834 - protein, 14 aa, Homo sapiens
  CDR3 for beta chain variable domain of TCR clone 189417 (TRBV5-5, TRBJ1-5)
CASSGQGADQTQHF

SEQ ID NO: 378835 - protein, 15 aa, Homo sapiens
  CDR3 for alpha chain variable domain of TCR clone 189418 (TRAV20, TRAJ16)
CAVQIRFSDGQKLLF

SEQ ID NO: 378836 - protein, 15 aa, Homo sapiens
  CDR3 for beta chain variable domain of TCR clone 189418 (TRBV11-3, TRBJ2-2)
CASSLGGRPTGELFF

SEQ ID NO: 378837 - protein, 12 aa, Homo sapiens
  CDR3 for alpha chain variable domain of TCR clone 189419 (TRAV12-3, TRAJ17)
CAMTLTGNKLTF

SEQ ID NO: 378838 - protein, 15 aa, Homo sapiens
  CDR3 for beta chain variable domain of TCR clone 189419 (TRBV6-5, TRBJ1-1)
CASTLRLRSGTEAFF

SEQ ID NO: 378839 - protein, 13 aa, Homo sapiens
  CDR3 for alpha chain variable domain of TCR clone 189420 (TRAV17, TRAJ34)
CATDLYNTDKLIF

SEQ ID NO: 378840 - protein, 15 aa, Homo sapiens
  CDR3 for beta chain variable domain of TCR clone 189420 (TRBV20-1, TRBJ2-3)
GSATGTSGFTDTQYF

SEQ ID NO: 378841 - protein, 12 aa, Homo sapiens
  CDR3 for alpha chain variable domain of TCR clone 189421 (TRAV12-3, TRAJ17)
CAMTLTGNRLTF

SEQ ID NO: 378842 - protein, 15 aa, Homo sapiens
  CDR3 for beta chain variable domain of TCR clone 189421 (TRBV20-1, TRBJ2-7)
GSARDRVSGMDEQYF

SEQ ID NO: 378843 - protein, 13 aa, Homo sapiens
  CDR3 for alpha chain variable domain of TCR clone 189422 (TRAV2, TRAJ40)
CALVTSGTYKYIF

SEQ ID NO: 378844 - protein, 14 aa, Homo sapiens
  CDR3 for beta chain variable domain of TCR clone 189422 (TRBV28, TRBJ2-1)
CASSYYTAYNEQFF

SEQ ID NO: 378845 - protein, 14 aa, Homo sapiens
  CDR3 for alpha chain variable domain of TCR clone 189423 (TRAV12-2, TRAJ13)
CAAMNSGGYQKVTF

SEQ ID NO: 378846 - protein, 13 aa, Homo sapiens
  CDR3 for beta chain variable domain of TCR clone 189423 (TRBV12-4, TRBJ2-5)
CASSPGTEETQYF

SEQ ID NO: 378847 - protein, 15 aa, Homo sapiens
  CDR3 for alpha chain variable domain of TCR clone 189424 (TRAV8-3, TRAJ7)
CAVGSISYGNNRLAF

SEQ ID NO: 378848 - protein, 15 aa, Homo sapiens
  CDR3 for beta chain variable domain of TCR clone 189424 (TRBV4-2, TRBJ1-1)
CTSSQEDLPRTEAFF

SEQ ID NO: 378849 - protein, 11 aa, Homo sapiens
  CDR3 for alpha chain variable domain of TCR clone 189425 (TRAV2, TRAJ13)
CPSGGYQKVTF

SEQ ID NO: 378850 - protein, 16 aa, Homo sapiens
  CDR3 for beta chain variable domain of TCR clone 189425 (TRBV6-1, TRBJ2-5)
CASSETLDRGAETQYF

SEQ ID NO: 378851 - protein, 12 aa, Homo sapiens
  CDR3 for alpha chain variable domain of TCR clone 189426 (TRAV12-1, TRAJ40)
CVFYSGTYKYIF

SEQ ID NO: 378852 - protein, 13 aa, Homo sapiens
  CDR3 for beta chain variable domain of TCR clone 189426 (TRBV7-2, TRBJ2-4)
CASSREHANIQYF

SEQ ID NO: 378853 - protein, 16 aa, Homo sapiens
  CDR3 for alpha chain variable domain of TCR clone 189427 (TRAV26-1, TRAJ23)
CIVRVERYNQGGKLSF

SEQ ID NO: 378854 - protein, 16 aa, Homo sapiens
  CDR3 for beta chain variable domain of TCR clone 189427 (TRBV9, TRBJ1-2)
CASSVDKGGGNYGYTF

SEQ ID NO: 378855 - protein, 12 aa, Homo sapiens
  CDR3 for alpha chain variable domain of TCR clone 189428 (TRAV2, TRAJ31)
CSVEEGNARLMF

SEQ ID NO: 378856 - protein, 18 aa, Homo sapiens
  CDR3 for beta chain variable domain of TCR clone 189428 (TRBV7-9, TRBJ2-3)
CASSLDLAGLATPDTQYF

SEQ ID NO: 378857 - protein, 16 aa, Homo sapiens
  CDR3 for alpha chain variable domain of TCR clone 189429 (TRAV17, TRAJ52)
CATVIIGGTSYGKLTF

SEQ ID NO: 378858 - protein, 12 aa, Homo sapiens
  CDR3 for beta chain variable domain of TCR clone 189429 (TRBV7-3, TRBJ2-1)
CASSFINNEQFF

SEQ ID NO: 378859 - protein, 21 aa, Homo sapiens
  CDR3 for alpha chain variable domain of TCR clone 189430 (TRAV1-1, TRAJ6)
CFLLLRCERLERTGGSYIPTF

SEQ ID NO: 378860 - protein, 13 aa, Homo sapiens
  CDR3 for beta chain variable domain of TCR clone 189430 (TRBV10-2, TRBJ2-7)
CASGASGGYEQYF

SEQ ID NO: 378861 - protein, 14 aa, Homo sapiens
  CDR3 for alpha chain variable domain of TCR clone 189431 (TRAV12-3, TRAJ41)
CAMSAGNSGYAPNF

SEQ ID NO: 378862 - protein, 11 aa, Homo sapiens
  CDR3 for beta chain variable domain of TCR clone 189431 (TRBV7-2, TRBJ2-3)
CASSSSDTQYF

SEQ ID NO: 378863 - protein, 11 aa, Homo sapiens
  CDR3 for alpha chain variable domain of TCR clone 189432 (TRAV12-3, TRAJ41)
CAMNAREALSF

SEQ ID NO: 378864 - protein, 16 aa, Homo sapiens
  CDR3 for beta chain variable domain of TCR clone 189432 (TRBV7-8, TRBJ2-3)
CASSTQGQRETDTQYF

SEQ ID NO: 378865 - protein, 15 aa, Homo sapiens
  CDR3 for alpha chain variable domain of TCR clone 189433 (TRAV12-3, TRAJ49)
CAMAVTPNTGNQCYF

SEQ ID NO: 378866 - protein, 18 aa, Homo sapiens
  CDR3 for beta chain variable domain of TCR clone 189433 (TRBV4-1, TRBJ1-5)
CASSQDPRGQGLHQPQHF

SEQ ID NO: 378867 - protein, 12 aa, Homo sapiens
  CDR3 for alpha chain variable domain of TCR clone 189434 (TRAV12-1, TRAJ23)
CVVNIPGGKLIF

SEQ ID NO: 378868 - protein, 15 aa, Homo sapiens
  CDR3 for beta chain variable domain of TCR clone 189434 (TRBV7-2, TRBJ2-7)
CASSLVSSGSYEQYF

SEQ ID NO: 378869 - protein, 14 aa, Homo sapiens
  CDR3 for alpha chain variable domain of TCR clone 189435 (TRAV1-2, TRAJ16)
CAVNRFSDGQKLLF

SEQ ID NO: 378870 - protein, 16 aa, Homo sapiens
  CDR3 for beta chain variable domain of TCR clone 189435 (TRBV20-1, TRBJ1-4)
CSASPYGGELNEKLFF

SEQ ID NO: 378871 - protein, 15 aa, Homo sapiens
  CDR3 for alpha chain variable domain of TCR clone 189436 (TRAV3, TRAJ3)
CAVRDRRSSASKIIF

SEQ ID NO: 378872 - protein, 14 aa, Homo sapiens
  CDR3 for beta chain variable domain of TCR clone 189436 (TRBV4-3, TRBJ1-6)
CASSPGTDNSPLHF

SEQ ID NO: 378873 - protein, 14 aa, Homo sapiens
  CDR3 for alpha chain variable domain of TCR clone 189437 (TRAV12-2, TRAJ29)
CAVNWETGNTPLVF

SEQ ID NO: 378874 - protein, 14 aa, Homo sapiens
  CDR3 for beta chain variable domain of TCR clone 189437 (TRBV12-5, TRBJ2-5)
CDSGSRTHQETQYF

SEQ ID NO: 378875 - protein, 20 aa, Homo sapiens
  CDR3 for alpha chain variable domain of TCR clone 189438 (TRAV26-1, TRAJ29)
CCVLLHRQGLEGSGNTPLVF

SEQ ID NO: 378876 - protein, 14 aa, Homo sapiens
  CDR3 for beta chain variable domain of TCR clone 189438 (TRBV25-1, TRBJ1-1)
CASTHLGGNTEAFF

SEQ ID NO: 378877 - protein, 11 aa, Homo sapiens
  CDR3 for alpha chain variable domain of TCR clone 189439 (TRAV2, TRAJ13)
CAYGGYQKVTF

SEQ ID NO: 378878 - protein, 13 aa, Homo sapiens
  CDR3 for beta chain variable domain of TCR clone 189439 (TRBV24-1, TRBJ2-3)
CATSAGGTDTQYF

SEQ ID NO: 378879 - protein, 17 aa, Homo sapiens
  CDR3 for alpha chain variable domain of TCR clone 189440 (TRAV26-2, TRAJ42)
CILRDESYGGSQGNLSF

SEQ ID NO: 378880 - protein, 15 aa, Homo sapiens
  CDR3 for beta chain variable domain of TCR clone 189440 (TRBV6-6, TRBJ2-7)
CASSYSYGGSYEQYF

SEQ ID NO: 378881 - protein, 18 aa, Homo sapiens
  CDR3 for alpha chain variable domain of TCR clone 189441 (TRAV13-2, TRAJ52)
CAETPLNAGGTSYGKLTF

SEQ ID NO: 378882 - protein, 14 aa, Homo sapiens
  CDR3 for beta chain variable domain of TCR clone 189441 (TRBV5-1, TRBJ2-7)
CASSRGESLYEQYF

SEQ ID NO: 378883 - protein, 14 aa, Homo sapiens
  CDR3 for alpha chain variable domain of TCR clone 189442 (TRAV23/DV6, TRAJ27)
CAASGDGNAGKSTF

SEQ ID NO: 378884 - protein, 14 aa, Homo sapiens
  CDR3 for beta chain variable domain of TCR clone 189442 (TRBV25-1, TRBJ1-1)
CASSHLGGNTEAFF

SEQ ID NO: 378885 - protein, 14 aa, Homo sapiens
  CDR3 for alpha chain variable domain of TCR clone 189443 (TRAV4, TRAJ30)
CLVGDMNRDDKIIF

SEQ ID NO: 378886 - protein, 13 aa, Homo sapiens
  CDR3 for beta chain variable domain of TCR clone 189443 (TRBV7-3, TRBJ1-1)
CASSQDWGAEAFF

SEQ ID NO: 378887 - protein, 14 aa, Homo sapiens
  CDR3 for alpha chain variable domain of TCR clone 189444 (TRAV12-3, TRAJ10)
SHLPLTGGGNKLTF

SEQ ID NO: 378888 - protein, 13 aa, Homo sapiens
  CDR3 for beta chain variable domain of TCR clone 189444 (TRBV19, TRBJ1-5)
CASSIGGNQPQHF

SEQ ID NO: 378889 - protein, 14 aa, Homo sapiens
  CDR3 for alpha chain variable domain of TCR clone 189445 (TRAV1-2, TRAJ8)
CAVREDTGFQKLVF

SEQ ID NO: 378890 - protein, 15 aa, Homo sapiens
  CDR3 for beta chain variable domain of TCR clone 189445 (TRBV6-5, TRBJ1-1)
CASNYRTGQGTEAFF

SEQ ID NO: 378891 - protein, 12 aa, Homo sapiens
  CDR3 for alpha chain variable domain of TCR clone 189446 (TRAV13-2, TRAJ23)
CAERHRGGKLIF

SEQ ID NO: 378892 - protein, 15 aa, Homo sapiens
  CDR3 for beta chain variable domain of TCR clone 189446 (TRBV7-9, TRBJ1-4)
CASSARTGGSEKLFF

SEQ ID NO: 378893 - protein, 13 aa, Homo sapiens
  CDR3 for alpha chain variable domain of TCR clone 189447 (TRAV27, TRAJ8)
CAGGPTGFQKLVF

SEQ ID NO: 378894 - protein, 12 aa, Homo sapiens
  CDR3 for beta chain variable domain of TCR clone 189447 (TRBV11-2, TRBJ2-7)
CASSPPADEQYF

SEQ ID NO: 378895 - protein, 11 aa, Homo sapiens
  CDR3 for alpha chain variable domain of TCR clone 189448 (TRAV4, TRAJ31)
CLVGDNARPMF

SEQ ID NO: 378896 - protein, 16 aa, Homo sapiens
  CDR3 for beta chain variable domain of TCR clone 189448 (TRBV7-2, TRBJ2-5)
CASSSKWLSGQETQYF

SEQ ID NO: 378897 - protein, 18 aa, Homo sapiens
  CDR3 for alpha chain variable domain of TCR clone 189449 (TRAV9-2, TRAJ52)
CALSRHNAGGTSYGKLTF

SEQ ID NO: 378898 - protein, 15 aa, Homo sapiens
  CDR3 for beta chain variable domain of TCR clone 189449 (TRBV12-4, TRBJ2-5)
CASTLNSGRGETQYF

SEQ ID NO: 378899 - protein, 14 aa, Homo sapiens
  CDR3 for alpha chain variable domain of TCR clone 189450 (TRAV12-3, TRAJ10)
SHLPMTGGGNKLTF

SEQ ID NO: 378900 - protein, 16 aa, Homo sapiens
  CDR3 for beta chain variable domain of TCR clone 189450 (TRBV4-1, TRBJ1-4)
CASSQDLRRGGEKLFF

SEQ ID NO: 378901 - protein, 14 aa, Homo sapiens
  CDR3 for alpha chain variable domain of TCR clone 189451 (TRAV2, TRAJ42)
CAVVGGGSQGNLIF

SEQ ID NO: 378902 - protein, 16 aa, Homo sapiens
  CDR3 for beta chain variable domain of TCR clone 189451 (TRBV3-1, TRBJ2-5)
CASSSQRGYAPETQYF

SEQ ID NO: 378903 - protein, 12 aa, Homo sapiens
  CDR3 for alpha chain variable domain of TCR clone 189452 (TRAV21, TRAJ31)
CAVWGNNARLMF

SEQ ID NO: 378904 - protein, 14 aa, Homo sapiens
  CDR3 for beta chain variable domain of TCR clone 189452 (TRBV20-1, TRBJ2-5)
CSALGEGGQETQYF

SEQ ID NO: 378905 - protein, 14 aa, Homo sapiens
  CDR3 for alpha chain variable domain of TCR clone 189453 (TRAV17, TRAJ35)
CATDRPGFGNVLQC

SEQ ID NO: 378906 - protein, 19 aa, Homo sapiens
  CDR3 for beta chain variable domain of TCR clone 189453 (TRBV11-3, TRBJ2-2)
CASSTRPGAKTTNTGELFF

SEQ ID NO: 378907 - protein, 13 aa, Homo sapiens
  CDR3 for alpha chain variable domain of TCR clone 189454 (TRAV8-3, TRAJ47)
CAVGALGGNKLVL

SEQ ID NO: 378908 - protein, 16 aa, Homo sapiens
  CDR3 for beta chain variable domain of TCR clone 189454 (TRBV2, TRBJ2-1)
CASSVGGSLSYNEQFF

SEQ ID NO: 378909 - protein, 12 aa, Homo sapiens
  CDR3 for alpha chain variable domain of TCR clone 189455 (TRAV35, TRAJ39)
LAPNTAGNMLTF

SEQ ID NO: 378910 - protein, 16 aa, Homo sapiens
  CDR3 for beta chain variable domain of TCR clone 189455 (TRBV2, TRBJ2-3)
CTSSTSVEGVTDTQYF

SEQ ID NO: 378911 - protein, 11 aa, Homo sapiens
  CDR3 for alpha chain variable domain of TCR clone 189456 (TRAV38-1, TRAJ35)
CAFMSLDRLWE

SEQ ID NO: 378912 - protein, 15 aa, Homo sapiens
  CDR3 for beta chain variable domain of TCR clone 189456 (TRBV12-4, TRBJ2-5)
CASSPPTGLQETQYF

SEQ ID NO: 378913 - protein, 17 aa, Homo sapiens
  CDR3 for alpha chain variable domain of TCR clone 189457 (TRAV17, TRAJ52)
CATERPSGGTSYGKLTF

SEQ ID NO: 378914 - protein, 18 aa, Homo sapiens
  CDR3 for beta chain variable domain of TCR clone 189457 (TRBV6-6, TRBJ1-3)
CASSYSKWDSISGNTIYF

SEQ ID NO: 378915 - protein, 11 aa, Homo sapiens
  CDR3 for alpha chain variable domain of TCR clone 189458 (TRAV12-3, TRAJ49)
CAANTGNLFYF

SEQ ID NO: 378916 - protein, 16 aa, Homo sapiens
  CDR3 for beta chain variable domain of TCR clone 189458 (TRBV7-9, TRBJ2-3)
CASSPWREVGTDTQYF

SEQ ID NO: 378917 - protein, 15 aa, Homo sapiens
  CDR3 for alpha chain variable domain of TCR clone 189459 (TRAV26-1, TRAJ40)
CIDRYATSGTYQYIF

SEQ ID NO: 378918 - protein, 11 aa, Homo sapiens
  CDR3 for beta chain variable domain of TCR clone 189459 (TRBV7-9, TRBJ2-1)
CASSSQNEQFF

SEQ ID NO: 378919 - protein, 14 aa, Homo sapiens
  CDR3 for alpha chain variable domain of TCR clone 189460 (TRAV12-2, TRAJ17)
CAVLFKAAGNKLTF

SEQ ID NO: 378920 - protein, 13 aa, Homo sapiens
  CDR3 for beta chain variable domain of TCR clone 189460 (TRBV18, TRBJ1-1)
CASSGGRNTEAFF

SEQ ID NO: 378921 - protein, 19 aa, Homo sapiens
  CDR3 for alpha chain variable domain of TCR clone 189461 (TRAV3, TRAJ6)
CAVRYRNPSRSGGSYLPTF

SEQ ID NO: 378922 - protein, 15 aa, Homo sapiens
  CDR3 for beta chain variable domain of TCR clone 189461 (TRBV18, TRBJ2-7)
CASSPTVMDSYEQYF

SEQ ID NO: 378923 - protein, 18 aa, Homo sapiens
  CDR3 for alpha chain variable domain of TCR clone 189462 (TRAV13-1, TRAJ52)
CAAKNPNAGGTSYGKLTF

SEQ ID NO: 378924 - protein, 15 aa, Homo sapiens
  CDR3 for beta chain variable domain of TCR clone 189462 (TRBV9, TRBJ1-6)
CASSVSGTGDSPLHF

SEQ ID NO: 378925 - protein, 14 aa, Homo sapiens
  CDR3 for alpha chain variable domain of TCR clone 189463 (TRAV12-1, TRAJ30)
CVVRGMNRDDKFIF

SEQ ID NO: 378926 - protein, 14 aa, Homo sapiens
  CDR3 for beta chain variable domain of TCR clone 189463 (TRBV7-2, TRBJ2-1)
CASSLTSGNRRQFF

SEQ ID NO: 378927 - protein, 14 aa, Homo sapiens
  CDR3 for alpha chain variable domain of TCR clone 189464 (TRAV16, TRAJ33)
CALSAMDSNYQLIW

SEQ ID NO: 378928 - protein, 15 aa, Homo sapiens
  CDR3 for beta chain variable domain of TCR clone 189464 (TRBV7-9, TRBJ1-4)
CASSRTGGFNEKLFF

SEQ ID NO: 378929 - protein, 17 aa, Homo sapiens
  CDR3 for alpha chain variable domain of TCR clone 189465 (TRAV8-3, TRAJ34)
CAIPGKLIFGTGTRLQV

SEQ ID NO: 378930 - protein, 16 aa, Homo sapiens
  CDR3 for beta chain variable domain of TCR clone 189465 (TRBV7-9, TRBJ1-2)
CASSLGFSSGEDGYTF

SEQ ID NO: 378931 - protein, 14 aa, Homo sapiens
  CDR3 for alpha chain variable domain of TCR clone 189466 (TRAV29/DV5, TRAJ36)
CAARRQTGANNLFF

SEQ ID NO: 378932 - protein, 13 aa, Homo sapiens
  CDR3 for beta chain variable domain of TCR clone 189466 (TRBV11-2, TRBJ2-5)
CASSPTGEETQYF

SEQ ID NO: 378933 - protein, 16 aa, Homo sapiens
  CDR3 for alpha chain variable domain of TCR clone 189467 (TRAV1-2, TRAJ10)
CAVRGVLTGGGNKLTV

SEQ ID NO: 378934 - protein, 14 aa, Homo sapiens
  CDR3 for beta chain variable domain of TCR clone 189467 (TRBV25-1, TRBJ1-1)
CASTHLGGNTEAFF

SEQ ID NO: 378935 - protein, 14 aa, Homo sapiens
  CDR3 for alpha chain variable domain of TCR clone 189468 (TRAV13-1, TRAJ6)
CAASITGGSYIPTF

SEQ ID NO: 378936 - protein, 15 aa, Homo sapiens
  CDR3 for beta chain variable domain of TCR clone 189468 (TRBV6-3, TRBJ2-7)
CASSSPGTVFYEQYF

SEQ ID NO: 378937 - protein, 16 aa, Homo sapiens
  CDR3 for alpha chain variable domain of TCR clone 189469 (TRAV13-1, TRAJ18)
CAASRMRGSTLGRLYF

SEQ ID NO: 378938 - protein, 13 aa, Homo sapiens
  CDR3 for beta chain variable domain of TCR clone 189469 (TRBV7-9, TRBJ2-5)
CASLPSGRETQYF

SEQ ID NO: 378939 - protein, 14 aa, Homo sapiens
  CDR3 for alpha chain variable domain of TCR clone 189470 (TRAV12-3, TRAJ10)
SHLPLTGGGNKLTF

SEQ ID NO: 378940 - protein, 16 aa, Homo sapiens
  CDR3 for beta chain variable domain of TCR clone 189470 (TRBV27, TRBJ2-2)
CASSSSRVSNTGELFF

SEQ ID NO: 378941 - protein, 11 aa, Homo sapiens
  CDR3 for alpha chain variable domain of TCR clone 189471 (TRAV26-1, TRAJ37)
CIVRVGRKLIF

SEQ ID NO: 378942 - protein, 15 aa, Homo sapiens
  CDR3 for beta chain variable domain of TCR clone 189471 (TRBV4-1, TRBJ2-5)
CASSQWDLYQETQYF

SEQ ID NO: 378943 - protein, 13 aa, Homo sapiens
  CDR3 for alpha chain variable domain of TCR clone 189472 (TRAV38-1, TRAJ42)
CARWGGSKGNLSF

SEQ ID NO: 378944 - protein, 17 aa, Homo sapiens
  CDR3 for beta chain variable domain of TCR clone 189472 (TRBV20-1, TRBJ2-1)
CSARDPLAGVWDNEQFF

SEQ ID NO: 378945 - protein, 14 aa, Homo sapiens
  CDR3 for alpha chain variable domain of TCR clone 189473 (TRAV17, TRAJ57)
CATDPQGGSEKLVF

SEQ ID NO: 378946 - protein, 16 aa, Homo sapiens
  CDR3 for beta chain variable domain of TCR clone 189473 (TRBV7-8, TRBJ2-7)
CASSSSPTSTDYEQYF

SEQ ID NO: 378947 - protein, 16 aa, Homo sapiens
  CDR3 for alpha chain variable domain of TCR clone 189474 (TRAV12-3, TRAJ53)
CAMSPGCGGSNYKLTF

SEQ ID NO: 378948 - protein, 14 aa, Homo sapiens
  CDR3 for beta chain variable domain of TCR clone 189474 (TRBV7-2, TRBJ2-1)
CASSLGVGYNEQFF

SEQ ID NO: 378949 - protein, 18 aa, Homo sapiens
  CDR3 for alpha chain variable domain of TCR clone 189475 (TRAV12-2, )
CAVEDIQNPDPAAYQLRD

SEQ ID NO: 378950 - protein, 15 aa, Homo sapiens
  CDR3 for beta chain variable domain of TCR clone 189475 (TRBV11-1, TRBJ2-7)
CASSLNYGASYEQYF

SEQ ID NO: 378951 - protein, 19 aa, Homo sapiens
  CDR3 for alpha chain variable domain of TCR clone 189476 (TRAV21, TRAJ35)
CADADRLWECAALRVRHSS

SEQ ID NO: 378952 - protein, 12 aa, Homo sapiens
  CDR3 for beta chain variable domain of TCR clone 189476 (TRBV7-9, TRBJ2-7)
CASSIKREEQYF

SEQ ID NO: 378953 - protein, 12 aa, Homo sapiens
  CDR3 for alpha chain variable domain of TCR clone 189477 (TRAV12-1, TRAJ50)
CVGRPSYDKVIF

SEQ ID NO: 378954 - protein, 12 aa, Homo sapiens
  CDR3 for beta chain variable domain of TCR clone 189477 (TRBV5-7, TRBJ1-1)
CASSLVGTEAFF

SEQ ID NO: 378955 - protein, 22 aa, Homo sapiens
  CDR3 for alpha chain variable domain of TCR clone 189478 (TRAV2, TRAJ10)
ILQVREADAAVYYTGGGNKLTF

SEQ ID NO: 378956 - protein, 15 aa, Homo sapiens
  CDR3 for beta chain variable domain of TCR clone 189478 (TRBV6-1, TRBJ2-4)
CASSEAVWPINIQYF

SEQ ID NO: 378957 - protein, 17 aa, Homo sapiens
  CDR3 for alpha chain variable domain of TCR clone 189479 (TRAV3, TRAJ28)
CAVREAYSGAGSYQLTF

SEQ ID NO: 378958 - protein, 14 aa, Homo sapiens
  CDR3 for beta chain variable domain of TCR clone 189479 (TRBV19, TRBJ1-1)
CASSKVTGVTEAFF

SEQ ID NO: 378959 - protein, 12 aa, Homo sapiens
  CDR3 for alpha chain variable domain of TCR clone 189480 (TRAV38-1, TRAJ32)
YAPLGATNKLIF

SEQ ID NO: 378960 - protein, 14 aa, Homo sapiens
  CDR3 for beta chain variable domain of TCR clone 189480 (TRBV29-1, TRBJ2-5)
CSVETSGSGETQYF

SEQ ID NO: 378961 - protein, 14 aa, Homo sapiens
  CDR3 for alpha chain variable domain of TCR clone 189481 (TRAV12-2, TRAJ40)
CAVKIPSGTYKYIF

SEQ ID NO: 378962 - protein, 17 aa, Homo sapiens
  CDR3 for beta chain variable domain of TCR clone 189481 (TRBV7-3, TRBJ2-5)
CASSLGSGRSGSETQYF

SEQ ID NO: 378963 - protein, 12 aa, Homo sapiens
  CDR3 for alpha chain variable domain of TCR clone 189482 (TRAV21, TRAJ33)
CAVQDSDYQLIW

SEQ ID NO: 378964 - protein, 14 aa, Homo sapiens
  CDR3 for beta chain variable domain of TCR clone 189482 (TRBV28, TRBJ2-1)
CASSPGEGGNEQCF

SEQ ID NO: 378965 - protein, 12 aa, Homo sapiens
  CDR3 for alpha chain variable domain of TCR clone 189483 (TRAV13-1, TRAJ49)
CAASPMGNQFYF

SEQ ID NO: 378966 - protein, 14 aa, Homo sapiens
  CDR3 for beta chain variable domain of TCR clone 189483 (TRBV11-2, TRBJ2-3)
CASSLYAGRDTQYF

SEQ ID NO: 378967 - protein, 17 aa, Homo sapiens
  CDR3 for alpha chain variable domain of TCR clone 189484 (TRAV8-6, TRAJ58)
CAVSSWVGETSVSRLTF

SEQ ID NO: 378968 - protein, 17 aa, Homo sapiens
  CDR3 for beta chain variable domain of TCR clone 189484 (TRBV4-3, TRBJ1-2)
CASSSRLQAGGSVGYTF

SEQ ID NO: 378969 - protein, 14 aa, Homo sapiens
  CDR3 for alpha chain variable domain of TCR clone 189485 (TRAV3, TRAJ36)
CAVRDGTGSNNLFF

SEQ ID NO: 378970 - protein, 16 aa, Homo sapiens
  CDR3 for beta chain variable domain of TCR clone 189485 (TRBV20-1, TRBJ2-6)
CSAREGPGVGANVLTF

SEQ ID NO: 378971 - protein, 13 aa, Homo sapiens
  CDR3 for alpha chain variable domain of TCR clone 189486 (TRAV8-4, TRAJ48)
CAVSLFGNEKLTV

SEQ ID NO: 378972 - protein, 15 aa, Homo sapiens
  CDR3 for beta chain variable domain of TCR clone 189486 (TRBV20-1, TRBJ2-7)
CSARKGLAESYEQYF

SEQ ID NO: 378973 - protein, 11 aa, Homo sapiens
  CDR3 for alpha chain variable domain of TCR clone 189487 (TRAV2, TRAJ33)
CAVDSNYQLIW

SEQ ID NO: 378974 - protein, 15 aa, Homo sapiens
  CDR3 for beta chain variable domain of TCR clone 189487 (TRBV4-1, TRBJ1-1)
CASSQEWGHYTEAFF

SEQ ID NO: 378975 - protein, 14 aa, Homo sapiens
  CDR3 for alpha chain variable domain of TCR clone 189488 (TRAV4, TRAJ17)
CLVGDMAAGNKLTF

SEQ ID NO: 378976 - protein, 13 aa, Homo sapiens
  CDR3 for beta chain variable domain of TCR clone 189488 (TRBV4-1, TRBJ2-5)
CASSLTRGETQYF

SEQ ID NO: 378977 - protein, 16 aa, Homo sapiens
  CDR3 for alpha chain variable domain of TCR clone 189489 (TRAV12-1, TRAJ8)
CVVNGRGNTGFQKLVF

SEQ ID NO: 378978 - protein, 14 aa, Homo sapiens
  CDR3 for beta chain variable domain of TCR clone 189489 (TRBV7-6, TRBJ2-3)
CASSLGTVTDTQYF

SEQ ID NO: 378979 - protein, 14 aa, Homo sapiens
  CDR3 for alpha chain variable domain of TCR clone 189490 (TRAV9-2, TRAJ39)
CALYIYNAGNMLTF

SEQ ID NO: 378980 - protein, 11 aa, Homo sapiens
  CDR3 for beta chain variable domain of TCR clone 189490 (TRBV28, TRBJ2-5)
CATGNQETQYF

SEQ ID NO: 378981 - protein, 14 aa, Homo sapiens
  CDR3 for alpha chain variable domain of TCR clone 189491 (TRAV4, TRAJ17)
CLVGDMAAGNKLTF

SEQ ID NO: 378982 - protein, 14 aa, Homo sapiens
  CDR3 for beta chain variable domain of TCR clone 189491 (TRBV12-4, TRBJ1-1)
CASSLGTGGTEAFF

SEQ ID NO: 378983 - protein, 12 aa, Homo sapiens
  CDR3 for alpha chain variable domain of TCR clone 189492 (TRAV12-1, TRAJ40)
CVVYSGTYKYLF

SEQ ID NO: 378984 - protein, 14 aa, Homo sapiens
  CDR3 for beta chain variable domain of TCR clone 189492 (TRBV20-1, TRBJ2-3)
CSARGGTSTDTQYF

SEQ ID NO: 378985 - protein, 15 aa, Homo sapiens
  CDR3 for alpha chain variable domain of TCR clone 189493 (TRAV12-2, TRAJ53)
CAVNGGGGSNYKLTL

SEQ ID NO: 378986 - protein, 18 aa, Homo sapiens
  CDR3 for beta chain variable domain of TCR clone 189493 (TRBV23-1, TRBJ2-3)
CISAPAVNRPASTDTQYF

SEQ ID NO: 378987 - protein, 15 aa, Homo sapiens
  CDR3 for alpha chain variable domain of TCR clone 189494 (TRAV3, TRAJ15)
CAVRPANQAGTALIF

SEQ ID NO: 378988 - protein, 14 aa, Homo sapiens
  CDR3 for beta chain variable domain of TCR clone 189494 (TRBV4-1, TRBJ2-2)
CASSQAVNTGEMFF

SEQ ID NO: 378989 - protein, 12 aa, Homo sapiens
  CDR3 for alpha chain variable domain of TCR clone 189495 (TRAV8-3, TRAJ26)
CAGDNYGQNFVF

SEQ ID NO: 378990 - protein, 15 aa, Homo sapiens
  CDR3 for beta chain variable domain of TCR clone 189495 (TRBV10-2, TRBJ2-6)
CASSTQSPGANVLTF

SEQ ID NO: 378991 - protein, 16 aa, Homo sapiens
  CDR3 for alpha chain variable domain of TCR clone 189496 (TRAV3, TRAJ37)
CAGRGKGSGNTGKLIF

SEQ ID NO: 378992 - protein, 15 aa, Homo sapiens
  CDR3 for beta chain variable domain of TCR clone 189496 (TRBV18, TRBJ2-1)
CASSPPSASYNEQFF

SEQ ID NO: 378993 - protein, 13 aa, Homo sapiens
  CDR3 for alpha chain variable domain of TCR clone 189497 (TRAV20, TRAJ48)
CAVQGVGNEKLTF

SEQ ID NO: 378994 - protein, 14 aa, Homo sapiens
  CDR3 for beta chain variable domain of TCR clone 189497 (TRBV12-4, TRBJ1-2)
CASSSAGHIYGYTF

SEQ ID NO: 378995 - protein, 12 aa, Homo sapiens
  CDR3 for alpha chain variable domain of TCR clone 189498 (TRAV3, TRAJ39)
CAVIEWSNMLTF

SEQ ID NO: 378996 - protein, 15 aa, Homo sapiens
  CDR3 for beta chain variable domain of TCR clone 189498 (TRBV29-1, TRBJ2-7)
CSVEFFDRGSYEQYF

SEQ ID NO: 378997 - protein, 11 aa, Homo sapiens
  CDR3 for alpha chain variable domain of TCR clone 189499 (TRAV21, TRAJ34)
CAVTNTDKLIF

SEQ ID NO: 378998 - protein, 17 aa, Homo sapiens
  CDR3 for beta chain variable domain of TCR clone 189499 (TRBV28, TRBJ2-7)
CASSPLRGRRWKGGQYF

SEQ ID NO: 378999 - protein, 14 aa, Homo sapiens
  CDR3 for alpha chain variable domain of TCR clone 189500 (TRAV23/DV6, TRAJ57)
CAASNQGGSEKLLF

SEQ ID NO: 379000 - protein, 13 aa, Homo sapiens
  CDR3 for beta chain variable domain of TCR clone 189500 (TRBV11-2, TRBJ2-7)
CASSSYPSYEQYF

SEQ ID NO: 379001 - protein, 15 aa, Homo sapiens
  CDR3 for alpha chain variable domain of TCR clone 189501 (TRAV13-1, TRAJ52)
CAATSPRTSYGKLTF

SEQ ID NO: 379002 - protein, 13 aa, Homo sapiens
  CDR3 for beta chain variable domain of TCR clone 189501 (TRBV27, TRBJ1-4)
CASSLMGDEKLFF

SEQ ID NO: 379003 - protein, 12 aa, Homo sapiens
  CDR3 for alpha chain variable domain of TCR clone 189502 (TRAV29/DV5, TRAJ49)
CAATDTGNQFYF

SEQ ID NO: 379004 - protein, 19 aa, Homo sapiens
  CDR3 for beta chain variable domain of TCR clone 189502 (TRBV25-1, TRBJ2-2)
CAIRVYRVGRGRKTGELFF

SEQ ID NO: 379005 - protein, 12 aa, Homo sapiens
  CDR3 for alpha chain variable domain of TCR clone 189503 (TRAV12-1, TRAJ40)
CVVYSGTYKYIF

SEQ ID NO: 379006 - protein, 13 aa, Homo sapiens
  CDR3 for beta chain variable domain of TCR clone 189503 (TRBV7-7, TRBJ2-1)
CQQLGGGADEQFF

SEQ ID NO: 379007 - protein, 12 aa, Homo sapiens
  CDR3 for alpha chain variable domain of TCR clone 189504 (TRAV13-1, TRAJ5)
CAAKAGRRALTF

SEQ ID NO: 379008 - protein, 13 aa, Homo sapiens
  CDR3 for beta chain variable domain of TCR clone 189504 (TRBV7-9, TRBJ1-2)
CGSSLKQNYGYTF

SEQ ID NO: 379009 - protein, 18 aa, Homo sapiens
  CDR3 for alpha chain variable domain of TCR clone 189505 (TRAV12-3, TRAJ52)
CGMSVGGAGGTSYGKLTF

SEQ ID NO: 379010 - protein, 17 aa, Homo sapiens
  CDR3 for beta chain variable domain of TCR clone 189505 (TRBV13, TRBJ2-3)
CASSLSRVAGGRNTQYF

SEQ ID NO: 379011 - protein, 15 aa, Homo sapiens
  CDR3 for alpha chain variable domain of TCR clone 189506 (TRAV35, TRAJ40)
CAGQLGTSGTYKYTF

SEQ ID NO: 379012 - protein, 11 aa, Homo sapiens
  CDR3 for beta chain variable domain of TCR clone 189506 (TRBV23-1, TRBJ2-7)
SSSGTGLEQYF

SEQ ID NO: 379013 - protein, 19 aa, Homo sapiens
  CDR3 for alpha chain variable domain of TCR clone 189507 (TRAV1-2, TRAJ26)
CLLPLCCERPDNYGQNFVF

SEQ ID NO: 379014 - protein, 14 aa, Homo sapiens
  CDR3 for beta chain variable domain of TCR clone 189507 (TRBV7-9, TRBJ2-2)
CASSGLADTGELFF

SEQ ID NO: 379015 - protein, 14 aa, Homo sapiens
  CDR3 for alpha chain variable domain of TCR clone 189508 (TRAV13-1, TRAJ44)
CAAKATGTASKLTF

SEQ ID NO: 379016 - protein, 16 aa, Homo sapiens
  CDR3 for beta chain variable domain of TCR clone 189508 (TRBV19, TRBJ2-1)
CAGSKAGPSSYNEQFF

SEQ ID NO: 379017 - protein, 15 aa, Homo sapiens
  CDR3 for alpha chain variable domain of TCR clone 189509 (TRAV4, TRAJ26)
CLVGDMNSYGQNFVF

SEQ ID NO: 379018 - protein, 16 aa, Homo sapiens
  CDR3 for beta chain variable domain of TCR clone 189509 (TRBV28, TRBJ1-4)
CASSSRTGAANEKLFF

SEQ ID NO: 379019 - protein, 14 aa, Homo sapiens
  CDR3 for alpha chain variable domain of TCR clone 189510 (TRAV12-2, TRAJ17)
CAVLFKAAGNKLTF

SEQ ID NO: 379020 - protein, 15 aa, Homo sapiens
  CDR3 for beta chain variable domain of TCR clone 189510 (TRBV5-1, TRBJ1-1)
CASSLSDLGGTEAFF

SEQ ID NO: 379021 - protein, 13 aa, Homo sapiens
  CDR3 for alpha chain variable domain of TCR clone 189511 (TRAV13-1, TRAJ20)
CAARVSNDYKLSF

SEQ ID NO: 379022 - protein, 14 aa, Homo sapiens
  CDR3 for beta chain variable domain of TCR clone 189511 (TRBV19, TRBJ2-1)
CASPTFVLSGEQFF

SEQ ID NO: 379023 - protein, 11 aa, Homo sapiens
  CDR3 for alpha chain variable domain of TCR clone 189512 (TRAV21, TRAJ33)
CAVLSNYQLIW

SEQ ID NO: 379024 - protein, 11 aa, Homo sapiens
  CDR3 for beta chain variable domain of TCR clone 189512 (TRBV12-4, TRBJ2-3)
CASTATDTQYF

SEQ ID NO: 379025 - protein, 14 aa, Homo sapiens
  CDR3 for alpha chain variable domain of TCR clone 189513 (TRAV12-1, TRAJ30)
CVVNIGGRDDKIIF

SEQ ID NO: 379026 - protein, 12 aa, Homo sapiens
  CDR3 for beta chain variable domain of TCR clone 189513 (TRBV14, TRBJ1-1)
CASRPYETEAFF

SEQ ID NO: 379027 - protein, 14 aa, Homo sapiens
  CDR3 for alpha chain variable domain of TCR clone 189514 (TRAV38-1, TRAJ40)
CALRPTSGTYKYIF

SEQ ID NO: 379028 - protein, 14 aa, Homo sapiens
  CDR3 for beta chain variable domain of TCR clone 189514 (TRBV10-3, TRBJ2-7)
CASSGTGALNEQYF

SEQ ID NO: 379029 - protein, 14 aa, Homo sapiens
  CDR3 for alpha chain variable domain of TCR clone 189515 (TRAV36/DV7, TRAJ40)
CAVEGASGTYKYIF

SEQ ID NO: 379030 - protein, 15 aa, Homo sapiens
  CDR3 for beta chain variable domain of TCR clone 189515 (TRBV6-6, TRBJ2-7)
CASSYSYGGSYEQYF

SEQ ID NO: 379031 - protein, 14 aa, Homo sapiens
  CDR3 for alpha chain variable domain of TCR clone 189516 (TRAV9-2, TRAJ13)
CALSDSGGYQKVTF

SEQ ID NO: 379032 - protein, 14 aa, Homo sapiens
  CDR3 for beta chain variable domain of TCR clone 189516 (TRBV12-4, TRBJ1-2)
CASSNLRGNYGYTF

SEQ ID NO: 379033 - protein, 13 aa, Homo sapiens
  CDR3 for alpha chain variable domain of TCR clone 189517 (TRAV27, TRAJ45)
CRSSGGGADGLTF

SEQ ID NO: 379034 - protein, 14 aa, Homo sapiens
  CDR3 for beta chain variable domain of TCR clone 189517 (TRBV4-1, TRBJ2-2)
CASSQAVNTGGLFF

SEQ ID NO: 379035 - protein, 14 aa, Homo sapiens
  CDR3 for alpha chain variable domain of TCR clone 189518 (TRAV8-3, TRAJ33)
CAVGAVDSNYQLIW

SEQ ID NO: 379036 - protein, 12 aa, Homo sapiens
  CDR3 for beta chain variable domain of TCR clone 189518 (TRBV7-3, TRBJ2-1)
CASSFINNEQFF

SEQ ID NO: 379037 - protein, 15 aa, Homo sapiens
  CDR3 for alpha chain variable domain of TCR clone 189519 (TRAV39, TRAJ32)
CAVDMAGGATNKLIF

SEQ ID NO: 379038 - protein, 13 aa, Homo sapiens
  CDR3 for beta chain variable domain of TCR clone 189519 (TRBV7-2, TRBJ2-7)
CASSSPSGSEQYF

SEQ ID NO: 379039 - protein, 18 aa, Homo sapiens
  CDR3 for alpha chain variable domain of TCR clone 189520 (TRAV26-2, TRAJ45)
CILRVDKDSGGGADGLTC

SEQ ID NO: 379040 - protein, 16 aa, Homo sapiens
  CDR3 for beta chain variable domain of TCR clone 189520 (TRBV2, TRBJ1-4)
CASNLLQGATNEKLFF

SEQ ID NO: 379041 - protein, 15 aa, Homo sapiens
  CDR3 for alpha chain variable domain of TCR clone 189521 (TRAV8-3, TRAJ27)
CAVGPSKTNSGKSTF

SEQ ID NO: 379042 - protein, 14 aa, Homo sapiens
  CDR3 for beta chain variable domain of TCR clone 189521 (TRBV11-2, TRBJ2-3)
CASSRLARTDTQYF

SEQ ID NO: 379043 - protein, 13 aa, Homo sapiens
  CDR3 for alpha chain variable domain of TCR clone 189522 (TRAV38-2/DV8, TRAJ34)
CAYSTWNTDKLIF

SEQ ID NO: 379044 - protein, 15 aa, Homo sapiens
  CDR3 for beta chain variable domain of TCR clone 189522 (TRBV4-1, TRBJ2-5)
CASSQWDLYQETQYF

SEQ ID NO: 379045 - protein, 14 aa, Homo sapiens
  CDR3 for alpha chain variable domain of TCR clone 189523 (TRAV12-1, TRAJ9)
CVVTGYTGGFKTIF

SEQ ID NO: 379046 - protein, 12 aa, Homo sapiens
  CDR3 for beta chain variable domain of TCR clone 189523 (TRBV12-4, TRBJ1-1)
CASSLAGLEAFF

SEQ ID NO: 379047 - protein, 14 aa, Homo sapiens
  CDR3 for alpha chain variable domain of TCR clone 189524 (TRAV17, TRAJ39)
CATDPVRAGNMLTF

SEQ ID NO: 379048 - protein, 15 aa, Homo sapiens
  CDR3 for beta chain variable domain of TCR clone 189524 (TRBV5-4, TRBJ2-7)
CASSLEWGPSYEQYF

SEQ ID NO: 379049 - protein, 12 aa, Homo sapiens
  CDR3 for alpha chain variable domain of TCR clone 189525 (TRAV13-2, TRAJ23)
CAGRHRGGKLIF

SEQ ID NO: 379050 - protein, 16 aa, Homo sapiens
  CDR3 for beta chain variable domain of TCR clone 189525 (TRBV20-1, TRBJ1-4)
CSAAGQGLLTNERLFF

SEQ ID NO: 379051 - protein, 13 aa, Homo sapiens
  CDR3 for alpha chain variable domain of TCR clone 189526 (TRAV8-3, TRAJ48)
CAVVPFGNEKLTF

SEQ ID NO: 379052 - protein, 19 aa, Homo sapiens
  CDR3 for beta chain variable domain of TCR clone 189526 (TRBV25-1, TRBJ2-2)
CAVLVYRVERGRKTGELFF

SEQ ID NO: 379053 - protein, 16 aa, Homo sapiens
  CDR3 for alpha chain variable domain of TCR clone 189527 (TRAV3, TRAJ10)
CAVRDMRAGGGNKLTF

SEQ ID NO: 379054 - protein, 16 aa, Homo sapiens
  CDR3 for beta chain variable domain of TCR clone 189527 (TRBV6-1, TRBJ2-1)
CASSDLPGQLNNEQFF

SEQ ID NO: 379055 - protein, 11 aa, Homo sapiens
  CDR3 for alpha chain variable domain of TCR clone 189528 (TRAV12-2, TRAJ3)
CAVKRSSKIIF

SEQ ID NO: 379056 - protein, 14 aa, Homo sapiens
  CDR3 for beta chain variable domain of TCR clone 189528 (TRBV4-1, TRBJ2-2)
CASSQAVNTGELFF

SEQ ID NO: 379057 - protein, 18 aa, Homo sapiens
  CDR3 for alpha chain variable domain of TCR clone 189529 (TRAV12-3, TRAJ52)
CAMSRTNAGGTSYGKLTF

SEQ ID NO: 379058 - protein, 15 aa, Homo sapiens
  CDR3 for beta chain variable domain of TCR clone 189529 (TRBV6-3, TRBJ2-7)
CASSSPGTVFYEQYF

SEQ ID NO: 379059 - protein, 13 aa, Homo sapiens
  CDR3 for alpha chain variable domain of TCR clone 189530 (TRAV12-2, TRAJ18)
CAVRGSTLGRLYF

SEQ ID NO: 379060 - protein, 11 aa, Homo sapiens
  CDR3 for beta chain variable domain of TCR clone 189530 (TRBV27, TRBJ2-3)
TSGRGTDTQYF

SEQ ID NO: 379061 - protein, 12 aa, Homo sapiens
  CDR3 for alpha chain variable domain of TCR clone 189531 (TRAV16, TRAJ10)
CSRTGGGNKLTF

SEQ ID NO: 379062 - protein, 12 aa, Homo sapiens
  CDR3 for beta chain variable domain of TCR clone 189531 (TRBV11-3, TRBJ1-1)
CASSHLQGEAFF

SEQ ID NO: 379063 - protein, 14 aa, Homo sapiens
  CDR3 for alpha chain variable domain of TCR clone 189532 (TRAV1-2, TRAJ8)
CAVREDTGFQTLVF

SEQ ID NO: 379064 - protein, 14 aa, Homo sapiens
  CDR3 for beta chain variable domain of TCR clone 189532 (TRBV7-2, TRBJ1-1)
CASSFLTGTTEAFF

SEQ ID NO: 379065 - protein, 12 aa, Homo sapiens
  CDR3 for alpha chain variable domain of TCR clone 189533 (TRAV1-2, TRAJ33)
CAALDSNYQLIW

SEQ ID NO: 379066 - protein, 15 aa, Homo sapiens
  CDR3 for beta chain variable domain of TCR clone 189533 (TRBV5-1, TRBJ2-7)
CASSLNGEPAREQYF

SEQ ID NO: 379067 - protein, 13 aa, Homo sapiens
  CDR3 for alpha chain variable domain of TCR clone 189534 (TRAV13-1, TRAJ21)
CAASIYNFNKFYF

SEQ ID NO: 379068 - protein, 14 aa, Homo sapiens
  CDR3 for beta chain variable domain of TCR clone 189534 (TRBV20-1, TRBJ2-1)
CSARDRGTYNEQFF

SEQ ID NO: 379069 - protein, 15 aa, Homo sapiens
  CDR3 for alpha chain variable domain of TCR clone 189535 (TRAV12-1, TRAJ44)
CVADLPTGTASKLTF

SEQ ID NO: 379070 - protein, 13 aa, Homo sapiens
  CDR3 for beta chain variable domain of TCR clone 189535 (TRBV20-1, TRBJ2-5)
CSARGDYQETLYF

SEQ ID NO: 379071 - protein, 11 aa, Homo sapiens
  CDR3 for alpha chain variable domain of TCR clone 189536 (TRAV23/DV6, TRAJ47)
CAAGYGNKLVF

SEQ ID NO: 379072 - protein, 15 aa, Homo sapiens
  CDR3 for beta chain variable domain of TCR clone 189536 (TRBV4-1, TRBJ1-4)
CASSDTGGTNEKLFF

SEQ ID NO: 379073 - protein, 12 aa, Homo sapiens
  CDR3 for alpha chain variable domain of TCR clone 189537 (TRAV8-3, TRAJ27)
CAVGAEAGKSTF

SEQ ID NO: 379074 - protein, 14 aa, Homo sapiens
  CDR3 for beta chain variable domain of TCR clone 189537 (TRBV2, TRBJ2-1)
CASRLIVGYDEQFF

SEQ ID NO: 379075 - protein, 16 aa, Homo sapiens
  CDR3 for alpha chain variable domain of TCR clone 189538 (TRAV22, TRAJ45)
CAVERGKRGGADGLTF

SEQ ID NO: 379076 - protein, 13 aa, Homo sapiens
  CDR3 for beta chain variable domain of TCR clone 189538 (TRBV27, TRBJ1-1)
CASSLSIGAESFF

SEQ ID NO: 379077 - protein, 14 aa, Homo sapiens
  CDR3 for alpha chain variable domain of TCR clone 189539 (TRAV12-2, TRAJ40)
CAVKIPSGTYKYIF

SEQ ID NO: 379078 - protein, 14 aa, Homo sapiens
  CDR3 for beta chain variable domain of TCR clone 189539 (TRBV20-1, TRBJ1-1)
CSAQTWSGGTEAFF

SEQ ID NO: 379079 - protein, 13 aa, Homo sapiens
  CDR3 for alpha chain variable domain of TCR clone 189540 (TRAV23/DV6, TRAJ16)
CPASISDGQKLLF

SEQ ID NO: 379080 - protein, 15 aa, Homo sapiens
  CDR3 for beta chain variable domain of TCR clone 189540 (TRBV2, TRBJ2-2)
CASSRETVGTGELFF

SEQ ID NO: 379081 - protein, 12 aa, Homo sapiens
  CDR3 for alpha chain variable domain of TCR clone 189541 (TRAV13-1, TRAJ21)
CAAKEGFNKFYF

SEQ ID NO: 379082 - protein, 13 aa, Homo sapiens
  CDR3 for beta chain variable domain of TCR clone 189541 (TRBV7-3, TRBJ1-1)
CASSQDWGAEAFC

SEQ ID NO: 379083 - protein, 12 aa, Homo sapiens
  CDR3 for alpha chain variable domain of TCR clone 189542 (TRAV21, TRAJ12)
CAVMGSSYKLIF

SEQ ID NO: 379084 - protein, 16 aa, Homo sapiens
  CDR3 for beta chain variable domain of TCR clone 189542 (TRBV7-9, TRBJ2-5)
CASRLEIGTRKETQYF

SEQ ID NO: 379085 - protein, 11 aa, Homo sapiens
  CDR3 for alpha chain variable domain of TCR clone 189543 (TRAV2, TRAJ13)
CASGGYQKVTF

SEQ ID NO: 379086 - protein, 17 aa, Homo sapiens
  CDR3 for beta chain variable domain of TCR clone 189543 (TRBV11-2, TRBJ2-1)
CASSLYHPGVEYNEQFF

SEQ ID NO: 379087 - protein, 16 aa, Homo sapiens
  CDR3 for alpha chain variable domain of TCR clone 189544 (TRAV38-2/DV8, TRAJ10)
CAYTNILTGGGNKLTF

SEQ ID NO: 379088 - protein, 13 aa, Homo sapiens
  CDR3 for beta chain variable domain of TCR clone 189544 (TRBV9, TRBJ2-1)
CASSPSGGSEQFF

SEQ ID NO: 379089 - protein, 15 aa, Homo sapiens
  CDR3 for alpha chain variable domain of TCR clone 189545 (TRAV26-1, TRAJ22)
CIVRVSFWFCKATDL

SEQ ID NO: 379090 - protein, 12 aa, Homo sapiens
  CDR3 for beta chain variable domain of TCR clone 189545 (TRBV11-2, TRBJ2-2)
CASSLGGGEPFF

SEQ ID NO: 379091 - protein, 14 aa, Homo sapiens
  CDR3 for alpha chain variable domain of TCR clone 189546 (TRAV26-1, TRAJ15)
CIEAGNQAGNALTF

SEQ ID NO: 379092 - protein, 16 aa, Homo sapiens
  CDR3 for beta chain variable domain of TCR clone 189546 (TRBV27, TRBJ2-7)
CASSWLGGRGSYEQYF

SEQ ID NO: 379093 - protein, 16 aa, Homo sapiens
  CDR3 for alpha chain variable domain of TCR clone 189547 (TRAV38-2/DV8, TRAJ54)
GAAAMYQIQGAQKLVF

SEQ ID NO: 379094 - protein, 17 aa, Homo sapiens
  CDR3 for beta chain variable domain of TCR clone 189547 (TRBV6-1, TRBJ2-3)
CASSEALRLISTDTQYF

SEQ ID NO: 379095 - protein, 12 aa, Homo sapiens
  CDR3 for alpha chain variable domain of TCR clone 189548 (TRAV23/DV6, TRAJ43)
SHLLLCSRRCSF

SEQ ID NO: 379096 - protein, 13 aa, Homo sapiens
  CDR3 for beta chain variable domain of TCR clone 189548 (TRBV12-4, TRBJ1-2)
CASSLRQGKGYTF

SEQ ID NO: 379097 - protein, 12 aa, Homo sapiens
  CDR3 for alpha chain variable domain of TCR clone 189549 (TRAV12-2, TRAJ3)
CAVWSSASKIIF

SEQ ID NO: 379098 - protein, 12 aa, Homo sapiens
  CDR3 for beta chain variable domain of TCR clone 189549 (TRBV11-3, TRBJ2-1)
CASSPGNNVQFF

SEQ ID NO: 379099 - protein, 16 aa, Homo sapiens
  CDR3 for alpha chain variable domain of TCR clone 189550 (TRAV17, TRAJ28)
CACGSYSGAGSYQLTF

SEQ ID NO: 379100 - protein, 14 aa, Homo sapiens
  CDR3 for beta chain variable domain of TCR clone 189550 (TRBV4-1, TRBJ2-2)
CASSQAVNTGELFF

SEQ ID NO: 379101 - protein, 13 aa, Homo sapiens
  CDR3 for alpha chain variable domain of TCR clone 189551 (TRAV13-1, TRAJ5)
CAAEHTGRRAITF

SEQ ID NO: 379102 - protein, 15 aa, Homo sapiens
  CDR3 for beta chain variable domain of TCR clone 189551 (TRBV6-1, TRBJ2-1)
CASSELRGQYNEQFF

SEQ ID NO: 379103 - protein, 17 aa, Homo sapiens
  CDR3 for alpha chain variable domain of TCR clone 189552 (TRAV3, TRAJ28)
CAVREAYSGAGSYQLTF

SEQ ID NO: 379104 - protein, 14 aa, Homo sapiens
  CDR3 for beta chain variable domain of TCR clone 189552 (TRBV11-2, TRBJ1-2)
CASSLGTANYGYTF

SEQ ID NO: 379105 - protein, 16 aa, Homo sapiens
  CDR3 for alpha chain variable domain of TCR clone 189553 (TRAV27, TRAJ13)
CAGAKSDSGGYQKVTF

SEQ ID NO: 379106 - protein, 15 aa, Homo sapiens
  CDR3 for beta chain variable domain of TCR clone 189553 (TRBV19, TRBJ2-7)
CASSFNSGGVWEQYF

SEQ ID NO: 379107 - protein, 18 aa, Homo sapiens
  CDR3 for alpha chain variable domain of TCR clone 189554 (TRAV21, TRAJ52)
CAVRPSPAGGTSYGNLTF

SEQ ID NO: 379108 - protein, 14 aa, Homo sapiens
  CDR3 for beta chain variable domain of TCR clone 189554 (TRBV25-1, TRBJ1-1)
CASTHLGGNTEAFF

SEQ ID NO: 379109 - protein, 12 aa, Homo sapiens
  CDR3 for alpha chain variable domain of TCR clone 189555 (TRAV25, TRAJ11)
CAGASGYSTLTF

SEQ ID NO: 379110 - protein, 14 aa, Homo sapiens
  CDR3 for beta chain variable domain of TCR clone 189555 (TRBV5-8, TRBJ2-3)
CASSLGQGTDTQYC

SEQ ID NO: 379111 - protein, 14 aa, Homo sapiens
  CDR3 for alpha chain variable domain of TCR clone 189556 (TRAV26-1, TRAJ33)
CIVRNMDSNYQLIW

SEQ ID NO: 379112 - protein, 16 aa, Homo sapiens
  CDR3 for beta chain variable domain of TCR clone 189556 (TRBV7-3, TRBJ2-1)
CASSLEGYRSYNEQFF

SEQ ID NO: 379113 - protein, 17 aa, Homo sapiens
  CDR3 for alpha chain variable domain of TCR clone 189557 (TRAV3, TRAJ6)
CAVRDGPRAGGSCIPTF

SEQ ID NO: 379114 - protein, 15 aa, Homo sapiens
  CDR3 for beta chain variable domain of TCR clone 189557 (TRBV4-1, TRBJ2-3)
CASSRGQGIPDTQYF

SEQ ID NO: 379115 - protein, 16 aa, Homo sapiens
  CDR3 for alpha chain variable domain of TCR clone 189558 (TRAV30, TRAJ24)
CGTEIVYADSWGKFQF

SEQ ID NO: 379116 - protein, 15 aa, Homo sapiens
  CDR3 for beta chain variable domain of TCR clone 189558 (TRBV28, TRBJ2-1)
CASSIIAGGRSEQFF

SEQ ID NO: 379117 - protein, 15 aa, Homo sapiens
  CDR3 for alpha chain variable domain of TCR clone 189559 (TRAV17, TRAJ57)
CATGPSQGGSEKLVF

SEQ ID NO: 379118 - protein, 18 aa, Homo sapiens
  CDR3 for beta chain variable domain of TCR clone 189559 (TRBV7-9, TRBJ2-7)
CASSLTTSGSRTWYEQYS

SEQ ID NO: 379119 - protein, 13 aa, Homo sapiens
  CDR3 for alpha chain variable domain of TCR clone 189560 (TRAV35, TRAJ42)
CAGFPGSQGNLIF

SEQ ID NO: 379120 - protein, 15 aa, Homo sapiens
  CDR3 for beta chain variable domain of TCR clone 189560 (TRBV7-2, TRBJ2-2)
CASSLVAGSAGELFF

SEQ ID NO: 379121 - protein, 14 aa, Homo sapiens
  CDR3 for alpha chain variable domain of TCR clone 189561 (TRAV12-1, TRAJ17)
CVVNYKAAGNKLTF

SEQ ID NO: 379122 - protein, 17 aa, Homo sapiens
  CDR3 for beta chain variable domain of TCR clone 189561 (TRBV20-1, TRBJ2-1)
CSASSPGLAGSYNEQSF

SEQ ID NO: 379123 - protein, 17 aa, Homo sapiens
  CDR3 for alpha chain variable domain of TCR clone 189562 (TRAV8-4, TRAJ53)
CAVSGPGSEGSNYKLTF

SEQ ID NO: 379124 - protein, 14 aa, Homo sapiens
  CDR3 for beta chain variable domain of TCR clone 189562 (TRBV7-3, TRBJ2-1)
CASSALAGGPEQFF

SEQ ID NO: 379125 - protein, 16 aa, Homo sapiens
  CDR3 for alpha chain variable domain of TCR clone 189563 (TRAV12-3, TRAJ53)
CAMRPGSGGSNYKLTF

SEQ ID NO: 379126 - protein, 13 aa, Homo sapiens
  CDR3 for beta chain variable domain of TCR clone 189563 (TRBV7-2, TRBJ2-5)
CASSQTSVETQYF

SEQ ID NO: 379127 - protein, 15 aa, Homo sapiens
  CDR3 for alpha chain variable domain of TCR clone 189564 (TRAV27, TRAJ38)
CAARRNAGNNRKLIW

SEQ ID NO: 379128 - protein, 18 aa, Homo sapiens
  CDR3 for beta chain variable domain of TCR clone 189564 (TRBV20-1, TRBJ2-3)
CSASGLAGGPGTTDTQYF

SEQ ID NO: 379129 - protein, 13 aa, Homo sapiens
  CDR3 for alpha chain variable domain of TCR clone 189565 (TRAV3, TRAJ27)
CAVRPLGAGQSTF

SEQ ID NO: 379130 - protein, 13 aa, Homo sapiens
  CDR3 for beta chain variable domain of TCR clone 189565 (TRBV29-1, TRBJ2-1)
CSVEGGRVNEQFF

SEQ ID NO: 379131 - protein, 19 aa, Homo sapiens
  CDR3 for alpha chain variable domain of TCR clone 189566 (TRAV3, TRAJ32)
VLLSCERRNYGGATNKLIF

SEQ ID NO: 379132 - protein, 13 aa, Homo sapiens
  CDR3 for beta chain variable domain of TCR clone 189566 (TRBV2, TRBJ1-1)
CASSEGGNTEAFF

SEQ ID NO: 379133 - protein, 14 aa, Homo sapiens
  CDR3 for alpha chain variable domain of TCR clone 189567 (TRAV16, TRAJ17)
CALSGRAAGNKLTF

SEQ ID NO: 379134 - protein, 16 aa, Homo sapiens
  CDR3 for beta chain variable domain of TCR clone 189567 (TRBV6-1, TRBJ2-2)
CASSFGQGANTGELFF

SEQ ID NO: 379135 - protein, 17 aa, Homo sapiens
  CDR3 for alpha chain variable domain of TCR clone 189568 (TRAV14/DV4, TRAJ28)
CAMRGTSSGAGSNQLTF

SEQ ID NO: 379136 - protein, 13 aa, Homo sapiens
  CDR3 for beta chain variable domain of TCR clone 189568 (TRBV28, TRBJ2-5)
CASSFAGGETQYF

SEQ ID NO: 379137 - protein, 16 aa, Homo sapiens
  CDR3 for alpha chain variable domain of TCR clone 189569 (TRAV30, TRAJ24)
CGTEIVDAESWGKFQF

SEQ ID NO: 379138 - protein, 15 aa, Homo sapiens
  CDR3 for beta chain variable domain of TCR clone 189569 (TRBV20-1, TRBJ2-4)
CSARDLTGGPNSQYF

SEQ ID NO: 379139 - protein, 13 aa, Homo sapiens
  CDR3 for alpha chain variable domain of TCR clone 189570 (TRAV3, TRAJ8)
CDVRFTGFQKLVF

SEQ ID NO: 379140 - protein, 15 aa, Homo sapiens
  CDR3 for beta chain variable domain of TCR clone 189570 (TRBV20-1, TRBJ2-7)
CSARDRVSGMDEQYF

SEQ ID NO: 379141 - protein, 16 aa, Homo sapiens
  CDR3 for alpha chain variable domain of TCR clone 189571 (TRAV30, TRAJ24)
CGTEIVHADSWGKFQF

SEQ ID NO: 379142 - protein, 15 aa, Homo sapiens
  CDR3 for beta chain variable domain of TCR clone 189571 (TRBV12-4, TRBJ2-2)
SASSPNDSGTGELFF

SEQ ID NO: 379143 - protein, 14 aa, Homo sapiens
  CDR3 for alpha chain variable domain of TCR clone 189572 (TRAV20, TRAJ10)
CAVRVEGGGNKLTF

SEQ ID NO: 379144 - protein, 15 aa, Homo sapiens
  CDR3 for beta chain variable domain of TCR clone 189572 (TRBV4-1, TRBJ2-1)
CASSQDLMGGNEQFF

SEQ ID NO: 379145 - protein, 13 aa, Homo sapiens
  CDR3 for alpha chain variable domain of TCR clone 189573 (TRAV13-2, TRAJ13)
CAERPGGYQKVTF

SEQ ID NO: 379146 - protein, 13 aa, Homo sapiens
  CDR3 for beta chain variable domain of TCR clone 189573 (TRBV9, TRBJ2-1)
CASSVGQGGEQFF

SEQ ID NO: 379147 - protein, 15 aa, Homo sapiens
  CDR3 for alpha chain variable domain of TCR clone 189574 (TRAV17, TRAJ57)
CATGPSQAGSEKLVF

SEQ ID NO: 379148 - protein, 18 aa, Homo sapiens
  CDR3 for beta chain variable domain of TCR clone 189574 (TRBV7-9, TRBJ2-7)
CASSLTTSGSRTWYEQYF

SEQ ID NO: 379149 - protein, 13 aa, Homo sapiens
  CDR3 for alpha chain variable domain of TCR clone 189575 (TRAV8-6, TRAJ50)
CAVIKTSYDKVIV

SEQ ID NO: 379150 - protein, 15 aa, Homo sapiens
  CDR3 for beta chain variable domain of TCR clone 189575 (TRBV7-2, TRBJ2-2)
CASRRPGQNTGELFF

SEQ ID NO: 379151 - protein, 12 aa, Homo sapiens
  CDR3 for alpha chain variable domain of TCR clone 189576 (TRAV12-3, TRAJ40)
CAMSSGTYKYIF

SEQ ID NO: 379152 - protein, 13 aa, Homo sapiens
  CDR3 for beta chain variable domain of TCR clone 189576 (TRBV15, TRBJ1-6)
CATSGGLNSPLHF

SEQ ID NO: 379153 - protein, 14 aa, Homo sapiens
  CDR3 for alpha chain variable domain of TCR clone 189577 (TRAV34, TRAJ44)
CGADGTGTASKLTF

SEQ ID NO: 379154 - protein, 13 aa, Homo sapiens
  CDR3 for beta chain variable domain of TCR clone 189577 (TRBV29-1, TRBJ2-2)
CSTTGVNTGELVF

SEQ ID NO: 379155 - protein, 15 aa, Homo sapiens
  CDR3 for alpha chain variable domain of TCR clone 189578 (TRAV25, TRAJ53)
CPTSNSGGSNYKLTF

SEQ ID NO: 379156 - protein, 15 aa, Homo sapiens
  CDR3 for beta chain variable domain of TCR clone 189578 (TRBV11-2, TRBJ2-1)
CASSLGTSGLNEQFF

SEQ ID NO: 379157 - protein, 15 aa, Homo sapiens
  CDR3 for alpha chain variable domain of TCR clone 189579 (TRAV25, TRAJ53)
CAATGCGGSNYKLTF

SEQ ID NO: 379158 - protein, 19 aa, Homo sapiens
  CDR3 for beta chain variable domain of TCR clone 189579 (TRBV7-2, TRBJ2-3)
CASSFLSRNWGGGTDTQYF

SEQ ID NO: 379159 - protein, 12 aa, Homo sapiens
  CDR3 for alpha chain variable domain of TCR clone 189580 (TRAV12-3, TRAJ17)
CAMTLTGNKLTF

SEQ ID NO: 379160 - protein, 15 aa, Homo sapiens
  CDR3 for beta chain variable domain of TCR clone 189580 (TRBV20-1, TRBJ2-7)
GSARDRISGMDEQYF

SEQ ID NO: 379161 - protein, 14 aa, Homo sapiens
  CDR3 for alpha chain variable domain of TCR clone 189581 (TRAV1-2, TRAJ8)
CAVREDTGFHKLLF

SEQ ID NO: 379162 - protein, 13 aa, Homo sapiens
  CDR3 for beta chain variable domain of TCR clone 189581 (TRBV7-3, TRBJ2-1)
CASSVGSYNEQFF

SEQ ID NO: 379163 - protein, 14 aa, Homo sapiens
  CDR3 for alpha chain variable domain of TCR clone 189582 (TRAV12-2, TRAJ17)
CAVLFKAAGNKLTF

SEQ ID NO: 379164 - protein, 15 aa, Homo sapiens
  CDR3 for beta chain variable domain of TCR clone 189582 (TRBV3-1, TRBJ2-7)
CASSQVRQGAYEQYF

SEQ ID NO: 379165 - protein, 12 aa, Homo sapiens
  CDR3 for alpha chain variable domain of TCR clone 189583 (TRAV17, TRAJ30)
CVPERRDDKIIF

SEQ ID NO: 379166 - protein, 14 aa, Homo sapiens
  CDR3 for beta chain variable domain of TCR clone 189583 (TRBV7-7, TRBJ2-2)
CASSRDRSTGKLFF

SEQ ID NO: 379167 - protein, 13 aa, Homo sapiens
  CDR3 for alpha chain variable domain of TCR clone 189584 (TRAV12-3, TRAJ33)
CAMSVNSNYQLIR

SEQ ID NO: 379168 - protein, 13 aa, Homo sapiens
  CDR3 for beta chain variable domain of TCR clone 189584 (TRBV7-2, TRBJ2-2)
CASGLAVTGELFF

SEQ ID NO: 379169 - protein, 12 aa, Homo sapiens
  CDR3 for alpha chain variable domain of TCR clone 189585 (TRAV3, TRAJ31)
CAVRDGNARLMF

SEQ ID NO: 379170 - protein, 18 aa, Homo sapiens
  CDR3 for beta chain variable domain of TCR clone 189585 (TRBV7-2, TRBJ2-3)
CASSLTSEGSGITDTHYF

SEQ ID NO: 379171 - protein, 15 aa, Homo sapiens
  CDR3 for alpha chain variable domain of TCR clone 189586 (TRAV13-1, TRAJ32)
CAASNGWWCYNQAHL

SEQ ID NO: 379172 - protein, 17 aa, Homo sapiens
  CDR3 for beta chain variable domain of TCR clone 189586 (TRBV15, TRBJ1-2)
CATSGREIDVVNYGYTF

SEQ ID NO: 379173 - protein, 15 aa, Homo sapiens
  CDR3 for alpha chain variable domain of TCR clone 189587 (TRAV8-1, TRAJ34)
CAVRPYTPTSSSLGL

SEQ ID NO: 379174 - protein, 15 aa, Homo sapiens
  CDR3 for beta chain variable domain of TCR clone 189587 (TRBV7-9, TRBJ1-3)
CASSLRSGSGNTIYF

SEQ ID NO: 379175 - protein, 15 aa, Homo sapiens
  CDR3 for alpha chain variable domain of TCR clone 189588 (TRAV12-3, TRAJ11)
CAMSEENSGYSTLPL

SEQ ID NO: 379176 - protein, 16 aa, Homo sapiens
  CDR3 for beta chain variable domain of TCR clone 189588 (TRBV5-1, TRBJ2-7)
CASSLEGLAGLYEQYF

SEQ ID NO: 379177 - protein, 13 aa, Homo sapiens
  CDR3 for alpha chain variable domain of TCR clone 189589 (TRAV30, TRAJ24)
CGTVTDSWGKLQF

SEQ ID NO: 379178 - protein, 14 aa, Homo sapiens
  CDR3 for beta chain variable domain of TCR clone 189589 (TRBV4-2, TRBJ2-3)
CASRETRAPGMQYF

SEQ ID NO: 379179 - protein, 14 aa, Homo sapiens
  CDR3 for alpha chain variable domain of TCR clone 189590 (TRAV8-4, TRAJ22)
CAVSPQGSARQLTF

SEQ ID NO: 379180 - protein, 13 aa, Homo sapiens
  CDR3 for beta chain variable domain of TCR clone 189590 (TRBV11-2, TRBJ2-5)
CASSFSSQETQYF

SEQ ID NO: 379181 - protein, 12 aa, Homo sapiens
  CDR3 for alpha chain variable domain of TCR clone 189591 (TRAV12-1, TRAJ20)
CLVNPDDYKLSF

SEQ ID NO: 379182 - protein, 12 aa, Homo sapiens
  CDR3 for beta chain variable domain of TCR clone 189591 (TRBV11-2, TRBJ2-2)
CASSLGGGELFF

SEQ ID NO: 379183 - protein, 14 aa, Homo sapiens
  CDR3 for alpha chain variable domain of TCR clone 189592 (TRAV12-2, TRAJ13)
CAVKKTGGYQKVTF

SEQ ID NO: 379184 - protein, 17 aa, Homo sapiens
  CDR3 for beta chain variable domain of TCR clone 189592 (TRBV24-1, TRBJ2-1)
CATSDVWTSGTYNEQFF

SEQ ID NO: 379185 - protein, 11 aa, Homo sapiens
  CDR3 for alpha chain variable domain of TCR clone 189593 (TRAV2, TRAJ33)
CAVDSNYQLIW

SEQ ID NO: 379186 - protein, 13 aa, Homo sapiens
  CDR3 for beta chain variable domain of TCR clone 189593 (TRBV7-2, TRBJ2-4)
RASSREHANIQYF

SEQ ID NO: 379187 - protein, 13 aa, Homo sapiens
  CDR3 for alpha chain variable domain of TCR clone 189594 (TRAV1-2, TRAJ9)
CAALNTGGFKTIF

SEQ ID NO: 379188 - protein, 20 aa, Homo sapiens
  CDR3 for beta chain variable domain of TCR clone 189594 (TRBV28, TRBJ2-1)
CASTPIGRSPGLAGGNEQFL

SEQ ID NO: 379189 - protein, 15 aa, Homo sapiens
  CDR3 for alpha chain variable domain of TCR clone 189595 (TRAV29/DV5, TRAJ53)
CAVSSSGGSNYKLTF

SEQ ID NO: 379190 - protein, 17 aa, Homo sapiens
  CDR3 for beta chain variable domain of TCR clone 189595 (TRBV4-1, TRBJ1-6)
CASSQDRNSDYNSPLHF

SEQ ID NO: 379191 - protein, 15 aa, Homo sapiens
  CDR3 for alpha chain variable domain of TCR clone 189596 (TRAV17, TRAJ54)
CATTRSEQGAQKLVF

SEQ ID NO: 379192 - protein, 14 aa, Homo sapiens
  CDR3 for beta chain variable domain of TCR clone 189596 (TRBV19, TRBJ2-3)
CASSAPRGTDTQYF

SEQ ID NO: 379193 - protein, 14 aa, Homo sapiens
  CDR3 for alpha chain variable domain of TCR clone 189597 (TRAV38-1, TRAJ11)
CAFMKHEGYSTLTF

SEQ ID NO: 379194 - protein, 17 aa, Homo sapiens
  CDR3 for beta chain variable domain of TCR clone 189597 (TRBV20-1, TRBJ2-1)
CSARDPLAGVWDNEQFF

SEQ ID NO: 379195 - protein, 17 aa, Homo sapiens
  CDR3 for alpha chain variable domain of TCR clone 189598 (TRAV26-2, TRAJ42)
CILRDVGYGGSQGNLIF

SEQ ID NO: 379196 - protein, 16 aa, Homo sapiens
  CDR3 for beta chain variable domain of TCR clone 189598 (TRBV12-4, TRBJ2-7)
CASSLIGGTGTDGQYF

SEQ ID NO: 379197 - protein, 12 aa, Homo sapiens
  CDR3 for alpha chain variable domain of TCR clone 189599 (TRAV12-3, TRAJ17)
CAMTLTGNKLTV

SEQ ID NO: 379198 - protein, 15 aa, Homo sapiens
  CDR3 for beta chain variable domain of TCR clone 189599 (TRBV11-3, TRBJ2-3)
YASLKDGREGDTQYF

SEQ ID NO: 379199 - protein, 12 aa, Homo sapiens
  CDR3 for alpha chain variable domain of TCR clone 189600 (TRAV21, TRAJ3)
CCFYSSASKIIF

SEQ ID NO: 379200 - protein, 15 aa, Homo sapiens
  CDR3 for beta chain variable domain of TCR clone 189600 (TRBV20-1, TRBJ2-7)
CSPRDRVSGMDEQYF

SEQ ID NO: 379201 - protein, 11 aa, Homo sapiens
  CDR3 for alpha chain variable domain of TCR clone 189601 (TRAV17, TRAJ31)
CATSNDARLMF

SEQ ID NO: 379202 - protein, 16 aa, Homo sapiens
  CDR3 for beta chain variable domain of TCR clone 189601 (TRBV7-8, TRBJ2-4)
CASSAERTLAKNIQYF

SEQ ID NO: 379203 - protein, 13 aa, Homo sapiens
  CDR3 for alpha chain variable domain of TCR clone 189602 (TRAV3, TRAJ8)
CAVRHTGFQKLVF

SEQ ID NO: 379204 - protein, 16 aa, Homo sapiens
  CDR3 for beta chain variable domain of TCR clone 189602 (TRBV5-1, TRBJ1-1)
CASSSGGNSLNTEAFF

SEQ ID NO: 379205 - protein, 11 aa, Homo sapiens
  CDR3 for alpha chain variable domain of TCR clone 189603 (TRAV3, TRAJ32)
CAVSPKGMVVI

SEQ ID NO: 379206 - protein, 13 aa, Homo sapiens
  CDR3 for beta chain variable domain of TCR clone 189603 (TRBV4-2, TRBJ1-1)
CASSQAGNTEAFF

SEQ ID NO: 379207 - protein, 13 aa, Homo sapiens
  CDR3 for alpha chain variable domain of TCR clone 189604 (TRAV21, TRAJ20)
CAVGLRVDYKLSF

SEQ ID NO: 379208 - protein, 15 aa, Homo sapiens
  CDR3 for beta chain variable domain of TCR clone 189604 (TRBV20-1, TRBJ2-1)
CSARSPGGPGNEQFF

SEQ ID NO: 379209 - protein, 14 aa, Homo sapiens
  CDR3 for alpha chain variable domain of TCR clone 189605 (TRAV1-2, TRAJ15)
CAVRDRQAGTALIF

SEQ ID NO: 379210 - protein, 15 aa, Homo sapiens
  CDR3 for beta chain variable domain of TCR clone 189605 (TRBV4-2, TRBJ2-5)
CASSQRESRGETQYF

SEQ ID NO: 379211 - protein, 14 aa, Homo sapiens
  CDR3 for alpha chain variable domain of TCR clone 189606 (TRAV1-2, TRAJ16)
CAVNRVSDGQKLLF

SEQ ID NO: 379212 - protein, 11 aa, Homo sapiens
  CDR3 for beta chain variable domain of TCR clone 189606 (TRBV7-9, TRBJ2-3)
CASSPTDTQYF

SEQ ID NO: 379213 - protein, 15 aa, Homo sapiens
  CDR3 for alpha chain variable domain of TCR clone 189607 (TRAV8-4, TRAJ7)
CAVSGVNYGNNRLAF

SEQ ID NO: 379214 - protein, 11 aa, Homo sapiens
  CDR3 for beta chain variable domain of TCR clone 189607 (TRBV20-1, TRBJ2-1)
CSLSSGSEQFF

SEQ ID NO: 379215 - protein, 13 aa, Homo sapiens
  CDR3 for alpha chain variable domain of TCR clone 189608 (TRAV23/DV6, TRAJ47)
CAASMTRGNKLVF

SEQ ID NO: 379216 - protein, 14 aa, Homo sapiens
  CDR3 for beta chain variable domain of TCR clone 189608 (TRBV25-1, TRBJ1-1)
CASTHLGGNTEAFF

SEQ ID NO: 379217 - protein, 13 aa, Homo sapiens
  CDR3 for alpha chain variable domain of TCR clone 189609 (TRAV3, TRAJ15)
CAVRDQAGTALIF

SEQ ID NO: 379218 - protein, 16 aa, Homo sapiens
  CDR3 for beta chain variable domain of TCR clone 189609 (TRBV12-4, TRBJ2-5)
CASSFFVRGRQETQYF

SEQ ID NO: 379219 - protein, 14 aa, Homo sapiens
  CDR3 for alpha chain variable domain of TCR clone 189610 (TRAV1-2, TRAJ16)
CAVYRFSDGQKLLF

SEQ ID NO: 379220 - protein, 13 aa, Homo sapiens
  CDR3 for beta chain variable domain of TCR clone 189610 (TRBV4-1, TRBJ2-1)
CASSQAGGDEQFF

SEQ ID NO: 379221 - protein, 13 aa, Homo sapiens
  CDR3 for alpha chain variable domain of TCR clone 189611 (TRAV21, TRAJ57)
CAVTQGGSEKLVF

SEQ ID NO: 379222 - protein, 15 aa, Homo sapiens
  CDR3 for beta chain variable domain of TCR clone 189611 (TRBV5-1, TRBJ1-1)
CASSSTTWTNTEAFF

SEQ ID NO: 379223 - protein, 15 aa, Homo sapiens
  CDR3 for alpha chain variable domain of TCR clone 189612 (TRAV2, TRAJ15)
CAVEDRGQAGTALIF

SEQ ID NO: 379224 - protein, 13 aa, Homo sapiens
  CDR3 for beta chain variable domain of TCR clone 189612 (TRBV10-2, TRBJ2-7)
CDSGASGGYEQYF

SEQ ID NO: 379225 - protein, 14 aa, Homo sapiens
  CDR3 for alpha chain variable domain of TCR clone 189613 (TRAV26-1, TRAJ48)
CIVKSNFGNEKLTF

SEQ ID NO: 379226 - protein, 13 aa, Homo sapiens
  CDR3 for beta chain variable domain of TCR clone 189613 (TRBV5-1, TRBJ2-5)
FAPAASPAETQYF

SEQ ID NO: 379227 - protein, 17 aa, Homo sapiens
  CDR3 for alpha chain variable domain of TCR clone 189614 (TRAV8-1, TRAJ42)
CAVKWGNYGGSQGNLIL

SEQ ID NO: 379228 - protein, 15 aa, Homo sapiens
  CDR3 for beta chain variable domain of TCR clone 189614 (TRBV9, TRBJ1-6)
CASSVAGTGDSPLHF

SEQ ID NO: 379229 - protein, 13 aa, Homo sapiens
  CDR3 for alpha chain variable domain of TCR clone 189615 (TRAV8-4, TRAJ49)
CAVSDPGGNQYYF

SEQ ID NO: 379230 - protein, 15 aa, Homo sapiens
  CDR3 for beta chain variable domain of TCR clone 189615 (TRBV12-4, TRBJ1-3)
CASSLGLQKGNTIYF

SEQ ID NO: 379231 - protein, 13 aa, Homo sapiens
  CDR3 for alpha chain variable domain of TCR clone 189616 (TRAV2, TRAJ47)
CAVDREYGNKPVF

SEQ ID NO: 379232 - protein, 17 aa, Homo sapiens
  CDR3 for beta chain variable domain of TCR clone 189616 (TRBV15, TRBJ1-5)
CATSRVKGIYSNQPQHF

SEQ ID NO: 379233 - protein, 13 aa, Homo sapiens
  CDR3 for alpha chain variable domain of TCR clone 189617 (TRAV8-6, TRAJ43)
CAVSDLGNNDMRF

SEQ ID NO: 379234 - protein, 16 aa, Homo sapiens
  CDR3 for beta chain variable domain of TCR clone 189617 (TRBV5-1, TRBJ2-2)
CASSSRTGGRTGELFF

SEQ ID NO: 379235 - protein, 15 aa, Homo sapiens
  CDR3 for alpha chain variable domain of TCR clone 189618 (TRAV8-3, TRAJ45)
CASSYSGGGADGLTF

SEQ ID NO: 379236 - protein, 15 aa, Homo sapiens
  CDR3 for beta chain variable domain of TCR clone 189618 (TRBV11-2, TRBJ2-1)
CASSKNRGPIYEQFF

SEQ ID NO: 379237 - protein, 14 aa, Homo sapiens
  CDR3 for alpha chain variable domain of TCR clone 189619 (TRAV1-2, TRAJ16)
CAVNRFSDGQKLLF

SEQ ID NO: 379238 - protein, 14 aa, Homo sapiens
  CDR3 for beta chain variable domain of TCR clone 189619 (TRBV18, TRBJ2-5)
CVSSPGVSQETQYF

SEQ ID NO: 379239 - protein, 18 aa, Homo sapiens
  CDR3 for alpha chain variable domain of TCR clone 189620 (TRAV21, TRAJ52)
RAVRPSPAGGTSCGKLTF

SEQ ID NO: 379240 - protein, 15 aa, Homo sapiens
  CDR3 for beta chain variable domain of TCR clone 189620 (TRBV7-9, TRBJ2-7)
CASSSSGLAVYEQYF

SEQ ID NO: 379241 - protein, 15 aa, Homo sapiens
  CDR3 for alpha chain variable domain of TCR clone 189621 (TRAV27, TRAJ38)
CAARRNAGNNRKLIW

SEQ ID NO: 379242 - protein, 17 aa, Homo sapiens
  CDR3 for beta chain variable domain of TCR clone 189621 (TRBV20-1, TRBJ2-3)
CSASLLGRGGSADTQYF

SEQ ID NO: 379243 - protein, 11 aa, Homo sapiens
  CDR3 for alpha chain variable domain of TCR clone 189622 (TRAV3, TRAJ21)
CAVGNFNKFYF

SEQ ID NO: 379244 - protein, 14 aa, Homo sapiens
  CDR3 for beta chain variable domain of TCR clone 189622 (TRBV13, TRBJ2-3)
CASSSGSPTDTQYF

SEQ ID NO: 379245 - protein, 11 aa, Homo sapiens
  CDR3 for alpha chain variable domain of TCR clone 189623 (TRAV12-3, TRAJ43)
CAMSVSNDMRF

SEQ ID NO: 379246 - protein, 15 aa, Homo sapiens
  CDR3 for beta chain variable domain of TCR clone 189623 (TRBV5-1, TRBJ2-2)
CASSSQGGNTGELFF

SEQ ID NO: 379247 - protein, 11 aa, Homo sapiens
  CDR3 for alpha chain variable domain of TCR clone 189624 (TRAV3, TRAJ21)
CALGNFNKFYF

SEQ ID NO: 379248 - protein, 16 aa, Homo sapiens
  CDR3 for beta chain variable domain of TCR clone 189624 (TRBV19, TRBJ2-1)
CASSKAGTSSYNEQFF

SEQ ID NO: 379249 - protein, 12 aa, Homo sapiens
  CDR3 for alpha chain variable domain of TCR clone 189625 (TRAV12-3, TRAJ34)
CAMGYNPDKLIF

SEQ ID NO: 379250 - protein, 15 aa, Homo sapiens
  CDR3 for beta chain variable domain of TCR clone 189625 (TRBV28, TRBJ2-1)
CASSIIAGGRSEQFF

SEQ ID NO: 379251 - protein, 16 aa, Homo sapiens
  CDR3 for alpha chain variable domain of TCR clone 189626 (TRAV8-3, TRAJ42)
CAVGEGNGGSQENLIF

SEQ ID NO: 379252 - protein, 14 aa, Homo sapiens
  CDR3 for beta chain variable domain of TCR clone 189626 (TRBV7-2, TRBJ2-1)
CASSRGGARNEQFF

SEQ ID NO: 379253 - protein, 15 aa, Homo sapiens
  CDR3 for alpha chain variable domain of TCR clone 189627 (TRAV12-3, TRAJ27)
CAMRAYNTNAGKSTF

SEQ ID NO: 379254 - protein, 13 aa, Homo sapiens
  CDR3 for beta chain variable domain of TCR clone 189627 (TRBV11-2, TRBJ2-5)
CASSRGRSETQYF

SEQ ID NO: 379255 - protein, 16 aa, Homo sapiens
  CDR3 for alpha chain variable domain of TCR clone 189628 (TRAV12-2, TRAJ56)
CAVRRVDTAANSKLTF

SEQ ID NO: 379256 - protein, 11 aa, Homo sapiens
  CDR3 for beta chain variable domain of TCR clone 189628 (TRBV3-1, TRBJ2-7)
CASSQVSEQYF

SEQ ID NO: 379257 - protein, 14 aa, Homo sapiens
  CDR3 for alpha chain variable domain of TCR clone 189629 (TRAV26-1, TRAJ38)
CIADNAGNNRKLIW

SEQ ID NO: 379258 - protein, 13 aa, Homo sapiens
  CDR3 for beta chain variable domain of TCR clone 189629 (TRBV15, TRBJ1-6)
CATSGGHNSPLHF

SEQ ID NO: 379259 - protein, 13 aa, Homo sapiens
  CDR3 for alpha chain variable domain of TCR clone 189630 (TRAV27, TRAJ33)
CAGVGDSNYQLIW

SEQ ID NO: 379260 - protein, 14 aa, Homo sapiens
  CDR3 for beta chain variable domain of TCR clone 189630 (TRBV12-5, TRBJ2-5)
CASGSRTHQETQYF

SEQ ID NO: 379261 - protein, 13 aa, Homo sapiens
  CDR3 for alpha chain variable domain of TCR clone 189631 (TRAV12-1, TRAJ21)
CVVTLYNFNKSYF

SEQ ID NO: 379262 - protein, 20 aa, Homo sapiens
  CDR3 for beta chain variable domain of TCR clone 189631 (TRBV7-8, TRBJ2-1)
CASSFAHRLAGVRSYNEQFF

SEQ ID NO: 379263 - protein, 13 aa, Homo sapiens
  CDR3 for alpha chain variable domain of TCR clone 189632 (TRAV2, TRAJ40)
CAVVTSGTYKYIF

SEQ ID NO: 379264 - protein, 15 aa, Homo sapiens
  CDR3 for beta chain variable domain of TCR clone 189632 (TRBV9, TRBJ1-6)
CASSVAGTGDSPLHC

SEQ ID NO: 379265 - protein, 14 aa, Homo sapiens
  CDR3 for alpha chain variable domain of TCR clone 189633 (TRAV8-3, TRAJ4)
CAVGAAGGDNKLIF

SEQ ID NO: 379266 - protein, 16 aa, Homo sapiens
  CDR3 for beta chain variable domain of TCR clone 189633 (TRBV19, TRBJ2-2)
CASRSPGTGATGELFF

SEQ ID NO: 379267 - protein, 15 aa, Homo sapiens
  CDR3 for alpha chain variable domain of TCR clone 189634 (TRAV38-1, TRAJ37)
CAFIHGSGNTGKLIF

SEQ ID NO: 379268 - protein, 16 aa, Homo sapiens
  CDR3 for beta chain variable domain of TCR clone 189634 (TRBV13, TRBJ2-2)
CASSPRTGEHTGELFF

SEQ ID NO: 379269 - protein, 14 aa, Homo sapiens
  CDR3 for alpha chain variable domain of TCR clone 189635 (TRAV17, TRAJ6)
CATDASGGSYITTF

SEQ ID NO: 379270 - protein, 13 aa, Homo sapiens
  CDR3 for beta chain variable domain of TCR clone 189635 (TRBV20-1, TRBJ2-5)
CSAREAFQETQYF

SEQ ID NO: 379271 - protein, 15 aa, Homo sapiens
  CDR3 for alpha chain variable domain of TCR clone 189636 (TRAV13-1, TRAJ43)
CAASGGFGAGTRLTV

SEQ ID NO: 379272 - protein, 13 aa, Homo sapiens
  CDR3 for beta chain variable domain of TCR clone 189636 (TRBV10-3, TRBJ2-7)
CASKLAVNYEQYF

SEQ ID NO: 379273 - protein, 16 aa, Homo sapiens
  CDR3 for alpha chain variable domain of TCR clone 189637 (TRAV30, TRAJ24)
CGTEIVDADSWGKFQF

SEQ ID NO: 379274 - protein, 18 aa, Homo sapiens
  CDR3 for beta chain variable domain of TCR clone 189637 (TRBV11-2, TRBJ2-3)
CTSSLGGASRGAPNTQYF

SEQ ID NO: 379275 - protein, 14 aa, Homo sapiens
  CDR3 for alpha chain variable domain of TCR clone 189638 (TRAV1-2, TRAJ16)
CAVNRFSDGQKLLF

SEQ ID NO: 379276 - protein, 18 aa, Homo sapiens
  CDR3 for beta chain variable domain of TCR clone 189638 (TRBV4-2, TRBJ1-2)
CASSQDKVGHTVNYGYTF

SEQ ID NO: 379277 - protein, 12 aa, Homo sapiens
  CDR3 for alpha chain variable domain of TCR clone 189639 (TRAV21, TRAJ33)
CAKMDSNYQLIW

SEQ ID NO: 379278 - protein, 15 aa, Homo sapiens
  CDR3 for beta chain variable domain of TCR clone 189639 (TRBV5-1, TRBJ2-1)
CASSPPRAPYNEQFF

SEQ ID NO: 379279 - protein, 16 aa, Homo sapiens
  CDR3 for alpha chain variable domain of TCR clone 189640 (TRAV4, TRAJ22)
CLVGDLYSGSARQLTF

SEQ ID NO: 379280 - protein, 15 aa, Homo sapiens
  CDR3 for beta chain variable domain of TCR clone 189640 (TRBV7-9, TRBJ1-5)
CASSQGHQPNQPQHF

SEQ ID NO: 379281 - protein, 11 aa, Homo sapiens
  CDR3 for alpha chain variable domain of TCR clone 189641 (TRAV21, TRAJ34)
CAHYNTDKLIF

SEQ ID NO: 379282 - protein, 13 aa, Homo sapiens
  CDR3 for beta chain variable domain of TCR clone 189641 (TRBV19, TRBJ2-7)
CASSPRQSYEQYF

SEQ ID NO: 379283 - protein, 15 aa, Homo sapiens
  CDR3 for alpha chain variable domain of TCR clone 189642 (TRAV41, TRAJ45)
CAASYSGGGADGITF

SEQ ID NO: 379284 - protein, 14 aa, Homo sapiens
  CDR3 for beta chain variable domain of TCR clone 189642 (TRBV12-5, TRBJ2-5)
CASGSRTDQETQYF

SEQ ID NO: 379285 - protein, 15 aa, Homo sapiens
  CDR3 for alpha chain variable domain of TCR clone 189643 (TRAV26-1, TRAJ39)
CIVRVARNAGNMLTF

SEQ ID NO: 379286 - protein, 16 aa, Homo sapiens
  CDR3 for beta chain variable domain of TCR clone 189643 (TRBV5-1, TRBJ2-1)
CASSLTLAGGRNEQFL

SEQ ID NO: 379287 - protein, 15 aa, Homo sapiens
  CDR3 for alpha chain variable domain of TCR clone 189644 (TRAV3, TRAJ4)
CAVRDGIGGYNKLIF

SEQ ID NO: 379288 - protein, 19 aa, Homo sapiens
  CDR3 for beta chain variable domain of TCR clone 189644 (TRBV27, TRBJ2-2)
CTSAPAVLAGYRTPGSCFF

SEQ ID NO: 379289 - protein, 10 aa, Homo sapiens
  CDR3 for alpha chain variable domain of TCR clone 189645 (TRAV13-1, TRAJ43)
CAASKNDMRF

SEQ ID NO: 379290 - protein, 13 aa, Homo sapiens
  CDR3 for beta chain variable domain of TCR clone 189645 (TRBV20-1, TRBJ1-5)
CSARTGVNRPQHF

SEQ ID NO: 379291 - protein, 13 aa, Homo sapiens
  CDR3 for alpha chain variable domain of TCR clone 189646 (TRAV1-2, TRAJ13)
CAVNSGGYQKVTF

SEQ ID NO: 379292 - protein, 14 aa, Homo sapiens
  CDR3 for beta chain variable domain of TCR clone 189646 (TRBV4-1, TRBJ1-5)
CASSPKGDNQPQHC

SEQ ID NO: 379293 - protein, 12 aa, Homo sapiens
  CDR3 for alpha chain variable domain of TCR clone 189647 (TRAV17, TRAJ12)
CATLRSSYKLIF

SEQ ID NO: 379294 - protein, 13 aa, Homo sapiens
  CDR3 for beta chain variable domain of TCR clone 189647 (TRBV7-7, TRBJ2-2)
CASGLTSAGELFF

SEQ ID NO: 379295 - protein, 16 aa, Homo sapiens
  CDR3 for alpha chain variable domain of TCR clone 189648 (TRAV12-3, TRAJ58)
CATTDTEETSGSRLTF

SEQ ID NO: 379296 - protein, 22 aa, Homo sapiens
  CDR3 for beta chain variable domain of TCR clone 189648 (TRBV23-1, TRBJ2-7)
CASSRRLDSGQGYVGGGYEQYF

SEQ ID NO: 379297 - protein, 13 aa, Homo sapiens
  CDR3 for alpha chain variable domain of TCR clone 189649 (TRAV6, TRAJ20)
CALAVSNDYKLSF

SEQ ID NO: 379298 - protein, 16 aa, Homo sapiens
  CDR3 for beta chain variable domain of TCR clone 189649 (TRBV5-5, TRBJ1-2)
CASSPTWGRGLYGYTF

SEQ ID NO: 379299 - protein, 15 aa, Homo sapiens
  CDR3 for alpha chain variable domain of TCR clone 189650 (TRAV25, TRAJ52)
CAGRPGGTSYGKLTF

SEQ ID NO: 379300 - protein, 12 aa, Homo sapiens
  CDR3 for beta chain variable domain of TCR clone 189650 (TRBV5-1, TRBJ1-2)
CASSQDTYGYTF

SEQ ID NO: 379301 - protein, 12 aa, Homo sapiens
  CDR3 for alpha chain variable domain of TCR clone 189651 (TRAV12-1, TRAJ40)
CVVYSGTYNYIF

SEQ ID NO: 379302 - protein, 13 aa, Homo sapiens
  CDR3 for beta chain variable domain of TCR clone 189651 (TRBV7-6, TRBJ2-1)
CQQLGGGADEQFF

SEQ ID NO: 379303 - protein, 12 aa, Homo sapiens
  CDR3 for alpha chain variable domain of TCR clone 189652 (TRAV16, TRAJ10)
CSRTGGGNKLTF

SEQ ID NO: 379304 - protein, 15 aa, Homo sapiens
  CDR3 for beta chain variable domain of TCR clone 189652 (TRBV6-3, TRBJ2-7)
CASSSPGTDFYEQYF

SEQ ID NO: 379305 - protein, 19 aa, Homo sapiens
  CDR3 for alpha chain variable domain of TCR clone 189653 (TRAV10, TRAJ32)
SLLHLGGEPRGGATNKLIF

SEQ ID NO: 379306 - protein, 14 aa, Homo sapiens
  CDR3 for beta chain variable domain of TCR clone 189653 (TRBV5-4, TRBJ2-2)
CASRLDGGTGELFF

SEQ ID NO: 379307 - protein, 14 aa, Homo sapiens
  CDR3 for alpha chain variable domain of TCR clone 189654 (TRAV36/DV7, TRAJ44)
CCGANTGTASKLTF

SEQ ID NO: 379308 - protein, 13 aa, Homo sapiens
  CDR3 for beta chain variable domain of TCR clone 189654 (TRBV10-1, TRBJ2-1)
CASSAGPDNEQFF

SEQ ID NO: 379309 - protein, 13 aa, Homo sapiens
  CDR3 for alpha chain variable domain of TCR clone 189655 (TRAV2, TRAJ40)
CAVVTSGTYKYIF

SEQ ID NO: 379310 - protein, 14 aa, Homo sapiens
  CDR3 for beta chain variable domain of TCR clone 189655 (TRBV7-3, TRBJ2-3)
CASSSTGVADTQYF

SEQ ID NO: 379311 - protein, 14 aa, Homo sapiens
  CDR3 for alpha chain variable domain of TCR clone 189656 (TRAV8-4, TRAJ37)
CAVRESSNTGKLIF

SEQ ID NO: 379312 - protein, 16 aa, Homo sapiens
  CDR3 for beta chain variable domain of TCR clone 189656 (TRBV19, TRBJ1-5)
CASSTWTGGGNQPQHF

SEQ ID NO: 379313 - protein, 13 aa, Homo sapiens
  CDR3 for alpha chain variable domain of TCR clone 189657 (TRAV1-2, TRAJ9)
CAALNTGGFKTIF

SEQ ID NO: 379314 - protein, 14 aa, Homo sapiens
  CDR3 for beta chain variable domain of TCR clone 189657 (TRBV13, TRBJ2-3)
WASSSGSPTDTQYF

SEQ ID NO: 379315 - protein, 15 aa, Homo sapiens
  CDR3 for alpha chain variable domain of TCR clone 189658 (TRAV12-1, TRAJ45)
CVVLSGGGGPDGLTF

SEQ ID NO: 379316 - protein, 19 aa, Homo sapiens
  CDR3 for beta chain variable domain of TCR clone 189658 (TRBV28, TRBJ2-4)
CASSFQPGGPAHSKNIQYF

SEQ ID NO: 379317 - protein, 12 aa, Homo sapiens
  CDR3 for alpha chain variable domain of TCR clone 189659 (TRAV13-2, TRAJ8)
CAPWLGFQRLVF

SEQ ID NO: 379318 - protein, 13 aa, Homo sapiens
  CDR3 for beta chain variable domain of TCR clone 189659 (TRBV12-4, TRBJ1-5)
CASSPDRAQPQHF

SEQ ID NO: 379319 - protein, 13 aa, Homo sapiens
  CDR3 for alpha chain variable domain of TCR clone 189660 (TRAV2, TRAJ12)
CAVGAGSSYKLIF

SEQ ID NO: 379320 - protein, 18 aa, Homo sapiens
  CDR3 for beta chain variable domain of TCR clone 189660 (TRBV11-2, TRBJ2-3)
CASSLGGASRGAPNTQYF

SEQ ID NO: 379321 - protein, 16 aa, Homo sapiens
  CDR3 for alpha chain variable domain of TCR clone 189661 (TRAV12-3, TRAJ53)
CAMSPGSGGSNYKLPF

SEQ ID NO: 379322 - protein, 14 aa, Homo sapiens
  CDR3 for beta chain variable domain of TCR clone 189661 (TRBV19, TRBJ2-7)
CASSIVAGPTEQYF

SEQ ID NO: 379323 - protein, 16 aa, Homo sapiens
  CDR3 for alpha chain variable domain of TCR clone 189662 (TRAV20, TRAJ53)
CAVQAESGGSNYKLTF

SEQ ID NO: 379324 - protein, 14 aa, Homo sapiens
  CDR3 for beta chain variable domain of TCR clone 189662 (TRBV27, TRBJ2-5)
CASSRTFLVDTQFF

SEQ ID NO: 379325 - protein, 15 aa, Homo sapiens
  CDR3 for alpha chain variable domain of TCR clone 189663 (TRAV26-1, TRAJ29)
CIVRVEGSGNTPLVL

SEQ ID NO: 379326 - protein, 15 aa, Homo sapiens
  CDR3 for beta chain variable domain of TCR clone 189663 (TRBV28, TRBJ2-5)
CASSPGQGSIETQYF

SEQ ID NO: 379327 - protein, 12 aa, Homo sapiens
  CDR3 for alpha chain variable domain of TCR clone 189664 (TRAV16, TRAJ26)
CAIRSYGQNFVF

SEQ ID NO: 379328 - protein, 14 aa, Homo sapiens
  CDR3 for beta chain variable domain of TCR clone 189664 (TRBV10-3, TRBJ2-1)
CAISSDLAYNEQFF

SEQ ID NO: 379329 - protein, 12 aa, Homo sapiens
  CDR3 for alpha chain variable domain of TCR clone 189665 (TRAV17, TRAJ49)
CATVTTGNQFYF

SEQ ID NO: 379330 - protein, 14 aa, Homo sapiens
  CDR3 for beta chain variable domain of TCR clone 189665 (TRBV7-9, TRBJ2-2)
CASSLVQDTGELFF

SEQ ID NO: 379331 - protein, 12 aa, Homo sapiens
  CDR3 for alpha chain variable domain of TCR clone 189666 (TRAV12-2, TRAJ10)
WGVTGGGNKLTF

SEQ ID NO: 379332 - protein, 15 aa, Homo sapiens
  CDR3 for beta chain variable domain of TCR clone 189666 (TRBV20-1, TRBJ2-2)
CSARGGQGNTGELFF

SEQ ID NO: 379333 - protein, 12 aa, Homo sapiens
  CDR3 for alpha chain variable domain of TCR clone 189667 (TRAV2, TRAJ10)
CASTGGGNTLTF

SEQ ID NO: 379334 - protein, 20 aa, Homo sapiens
  CDR3 for beta chain variable domain of TCR clone 189667 (TRBV7-8, TRBJ2-2)
CASSHLFPGPTIHITGELFF

SEQ ID NO: 379335 - protein, 15 aa, Homo sapiens
  CDR3 for alpha chain variable domain of TCR clone 189668 (TRAV17, TRAJ3)
CATDGPHSSASKIVF

SEQ ID NO: 379336 - protein, 14 aa, Homo sapiens
  CDR3 for beta chain variable domain of TCR clone 189668 (TRBV4-3, TRBJ1-4)
CASSQQPVGEKLFC

SEQ ID NO: 379337 - protein, 15 aa, Homo sapiens
  CDR3 for alpha chain variable domain of TCR clone 189669 (TRAV13-1, TRAJ38)
CSRVLNAGNNRKLIW

SEQ ID NO: 379338 - protein, 14 aa, Homo sapiens
  CDR3 for beta chain variable domain of TCR clone 189669 (TRBV28, TRBJ2-2)
CASTRRSGDGELFF

SEQ ID NO: 379339 - protein, 14 aa, Homo sapiens
  CDR3 for alpha chain variable domain of TCR clone 189670 (TRAV2, TRAJ9)
CAVEVRSGGFKTIF

SEQ ID NO: 379340 - protein, 17 aa, Homo sapiens
  CDR3 for beta chain variable domain of TCR clone 189670 (TRBV7-8, TRBJ2-6)
CASSAGTGGAGANVLTF

SEQ ID NO: 379341 - protein, 20 aa, Homo sapiens
  CDR3 for alpha chain variable domain of TCR clone 189671 (TRAV12-1, TRAJ42)
SSVIQPPTSVKGGSQGNLIF

SEQ ID NO: 379342 - protein, 18 aa, Homo sapiens
  CDR3 for beta chain variable domain of TCR clone 189671 (TRBV11-2, TRBJ2-3)
CASSLAGASRGAPNTQYF

SEQ ID NO: 379343 - protein, 16 aa, Homo sapiens
  CDR3 for alpha chain variable domain of TCR clone 189672 (TRAV30, TRAJ24)
CGTEIVDADSRGKFQF

SEQ ID NO: 379344 - protein, 14 aa, Homo sapiens
  CDR3 for beta chain variable domain of TCR clone 189672 (TRBV13, TRBJ2-1)
CASSPRPRYNEQFF

SEQ ID NO: 379345 - protein, 12 aa, Homo sapiens
  CDR3 for alpha chain variable domain of TCR clone 189673 (TRAV23/DV6, TRAJ30)
CAASKGDGKIIF

SEQ ID NO: 379346 - protein, 15 aa, Homo sapiens
  CDR3 for beta chain variable domain of TCR clone 189673 (TRBV20-1, TRBJ2-7)
CSARDRVSGMDEQYF

SEQ ID NO: 379347 - protein, 14 aa, Homo sapiens
  CDR3 for alpha chain variable domain of TCR clone 189674 (TRAV1-2, TRAJ16)
CAVNRFSDGKKLLF

SEQ ID NO: 379348 - protein, 13 aa, Homo sapiens
  CDR3 for beta chain variable domain of TCR clone 189674 (TRBV19, TRBJ2-7)
CASRKAGGSEQYF

SEQ ID NO: 379349 - protein, 12 aa, Homo sapiens
  CDR3 for alpha chain variable domain of TCR clone 189675 (TRAV21, TRAJ23)
LAVMLQGGKLIF

SEQ ID NO: 379350 - protein, 14 aa, Homo sapiens
  CDR3 for beta chain variable domain of TCR clone 189675 (TRBV7-9, TRBJ1-4)
CAITEGEANEKLFF

SEQ ID NO: 379351 - protein, 11 aa, Homo sapiens
  CDR3 for alpha chain variable domain of TCR clone 189676 (TRAV29/DV5, TRAJ31)
CAAMNNARLMF

SEQ ID NO: 379352 - protein, 15 aa, Homo sapiens
  CDR3 for beta chain variable domain of TCR clone 189676 (TRBV20-1, TRBJ2-7)
CSARGPLAGGREQYC

SEQ ID NO: 379353 - protein, 22 aa, Homo sapiens
  CDR3 for alpha chain variable domain of TCR clone 189677 (TRAV21, TRAJ39)
AASQPGDSATPHGAKAGNMLTF

SEQ ID NO: 379354 - protein, 14 aa, Homo sapiens
  CDR3 for beta chain variable domain of TCR clone 189677 (TRBV11-2, TRBJ2-7)
CASSLGAGAYEQYF

SEQ ID NO: 379355 - protein, 13 aa, Homo sapiens
  CDR3 for alpha chain variable domain of TCR clone 189678 (TRAV20, TRAJ37)
CAGCSSNTGKLIF

SEQ ID NO: 379356 - protein, 16 aa, Homo sapiens
  CDR3 for beta chain variable domain of TCR clone 189678 (TRBV4-2, TRBJ2-3)
CASSQELAGDTDTQYF

SEQ ID NO: 379357 - protein, 18 aa, Homo sapiens
  CDR3 for alpha chain variable domain of TCR clone 189679 (TRAV21, TRAJ52)
CAVRPSPAGGTSYGKLTF

SEQ ID NO: 379358 - protein, 16 aa, Homo sapiens
  CDR3 for beta chain variable domain of TCR clone 189679 (TRBV7-3, TRBJ2-2)
CASSLKRGTLSGELFF

SEQ ID NO: 379359 - protein, 17 aa, Homo sapiens
  CDR3 for alpha chain variable domain of TCR clone 189680 (TRAV3, TRAJ42)
CSVRDRDYGGSQGNLIF

SEQ ID NO: 379360 - protein, 12 aa, Homo sapiens
  CDR3 for beta chain variable domain of TCR clone 189680 (TRBV7-8, TRBJ2-7)
CASSLGDREQYF

SEQ ID NO: 379361 - protein, 13 aa, Homo sapiens
  CDR3 for alpha chain variable domain of TCR clone 189681 (TRAV12-3, TRAJ13)
CAMSSGCYQKVTF

SEQ ID NO: 379362 - protein, 16 aa, Homo sapiens
  CDR3 for beta chain variable domain of TCR clone 189681 (TRBV4-1, TRBJ2-7)
CAGSRGDILNSYEQYF

SEQ ID NO: 379363 - protein, 18 aa, Homo sapiens
  CDR3 for alpha chain variable domain of TCR clone 189682 (TRAV21, TRAJ52)
CAVRPSPAGGTSYGKLTF

SEQ ID NO: 379364 - protein, 15 aa, Homo sapiens
  CDR3 for beta chain variable domain of TCR clone 189682 (TRBV7-9, TRBJ2-7)
CASSSPGLAVYEQYF

SEQ ID NO: 379365 - protein, 14 aa, Homo sapiens
  CDR3 for alpha chain variable domain of TCR clone 189683 (TRAV1-2, TRAJ8)
CAVREDTGFQKLVF

SEQ ID NO: 379366 - protein, 14 aa, Homo sapiens
  CDR3 for beta chain variable domain of TCR clone 189683 (TRBV7-3, TRBJ2-2)
CASSSGGYAGELFF

SEQ ID NO: 379367 - protein, 10 aa, Homo sapiens
  CDR3 for alpha chain variable domain of TCR clone 189684 (TRAV8-3, TRAJ43)
CAVALADMRF

SEQ ID NO: 379368 - protein, 13 aa, Homo sapiens
  CDR3 for beta chain variable domain of TCR clone 189684 (TRBV5-1, TRBJ1-2)
CASSIDRPEGYTF

SEQ ID NO: 379369 - protein, 15 aa, Homo sapiens
  CDR3 for alpha chain variable domain of TCR clone 189685 (TRAV26-1, TRAJ29)
CTVRVEGSGKTPLVF

SEQ ID NO: 379370 - protein, 15 aa, Homo sapiens
  CDR3 for beta chain variable domain of TCR clone 189685 (TRBV7-9, TRBJ1-5)
CASSQGHQPNQPQHF

SEQ ID NO: 379371 - protein, 14 aa, Homo sapiens
  CDR3 for alpha chain variable domain of TCR clone 189686 (TRAV12-2, TRAJ40)
CAVKIPSGTYKYIF

SEQ ID NO: 379372 - protein, 14 aa, Homo sapiens
  CDR3 for beta chain variable domain of TCR clone 189686 (TRBV11-2, TRBJ1-4)
CASSPEVKNEKLFF

SEQ ID NO: 379373 - protein, 14 aa, Homo sapiens
  CDR3 for alpha chain variable domain of TCR clone 189687 (TRAV13-1, TRAJ40)
CAAADLPGTYKYIF

SEQ ID NO: 379374 - protein, 15 aa, Homo sapiens
  CDR3 for beta chain variable domain of TCR clone 189687 (TRBV7-2, TRBJ2-5)
CASSGILAGAETQYF

SEQ ID NO: 379375 - protein, 12 aa, Homo sapiens
  CDR3 for alpha chain variable domain of TCR clone 189688 (TRAV2, TRAJ9)
CAVGAGGFKTIF

SEQ ID NO: 379376 - protein, 11 aa, Homo sapiens
  CDR3 for beta chain variable domain of TCR clone 189688 (TRBV7-9, TRBJ2-1)
CASSLSYEQFF

SEQ ID NO: 379377 - protein, 13 aa, Homo sapiens
  CDR3 for alpha chain variable domain of TCR clone 189689 (TRAV20, TRAJ37)
RAGCSGNTGKLIF

SEQ ID NO: 379378 - protein, 11 aa, Homo sapiens
  CDR3 for beta chain variable domain of TCR clone 189689 (TRBV12-4, TRBJ2-3)
CASTATDTQYF

SEQ ID NO: 379379 - protein, 14 aa, Homo sapiens
  CDR3 for alpha chain variable domain of TCR clone 189690 (TRAV14/DV4, TRAJ34)
CAMREGRPHRQAHL

SEQ ID NO: 379380 - protein, 14 aa, Homo sapiens
  CDR3 for beta chain variable domain of TCR clone 189690 (TRBV19, TRBJ2-1)
CASPTFVLSCEQFF

SEQ ID NO: 379381 - protein, 15 aa, Homo sapiens
  CDR3 for alpha chain variable domain of TCR clone 189691 (TRAV26-1, TRAJ12)
IASSELMDISYKLIF

SEQ ID NO: 379382 - protein, 11 aa, Homo sapiens
  CDR3 for beta chain variable domain of TCR clone 189691 (TRBV7-9, TRBJ2-3)
CASSPPDTQYF

SEQ ID NO: 379383 - protein, 14 aa, Homo sapiens
  CDR3 for alpha chain variable domain of TCR clone 189692 (TRAV12-3, TRAJ10)
SHLPLTGGGNKLTF

SEQ ID NO: 379384 - protein, 14 aa, Homo sapiens
  CDR3 for beta chain variable domain of TCR clone 189692 (TRBV19, TRBJ2-7)
CASTVQGRHYEQYF

SEQ ID NO: 379385 - protein, 16 aa, Homo sapiens
  CDR3 for alpha chain variable domain of TCR clone 189693 (TRAV3, TRAJ18)
CSVRDGRGSTLGRLYF

SEQ ID NO: 379386 - protein, 17 aa, Homo sapiens
  CDR3 for beta chain variable domain of TCR clone 189693 (TRBV5-1, TRBJ2-3)
CASSKIGLADRTDTQYF

SEQ ID NO: 379387 - protein, 15 aa, Homo sapiens
  CDR3 for alpha chain variable domain of TCR clone 189694 (TRAV8-6, TRAJ26)
CAVSDQSPGGQNFVF

SEQ ID NO: 379388 - protein, 13 aa, Homo sapiens
  CDR3 for beta chain variable domain of TCR clone 189694 (TRBV27, TRBJ2-7)
CASSLRHRYEQYS

SEQ ID NO: 379389 - protein, 15 aa, Homo sapiens
  CDR3 for alpha chain variable domain of TCR clone 189695 (TRAV34, TRAJ38)
CGADFTPGNNRKLIW

SEQ ID NO: 379390 - protein, 14 aa, Homo sapiens
  CDR3 for beta chain variable domain of TCR clone 189695 (TRBV2, TRBJ1-6)
CASSESRNNSPLHF

SEQ ID NO: 379391 - protein, 15 aa, Homo sapiens
  CDR3 for alpha chain variable domain of TCR clone 189696 (TRAV27, TRAJ38)
CAARRNAGNNRKLIW

SEQ ID NO: 379392 - protein, 13 aa, Homo sapiens
  CDR3 for beta chain variable domain of TCR clone 189696 (TRBV12-5, TRBJ2-3)
WASGDRQSDTQYL

SEQ ID NO: 379393 - protein, 13 aa, Homo sapiens
  CDR3 for alpha chain variable domain of TCR clone 189697 (TRAV8-6, TRAJ49)
CAVITNTGNQFYF

SEQ ID NO: 379394 - protein, 14 aa, Homo sapiens
  CDR3 for beta chain variable domain of TCR clone 189697 (TRBV5-1, TRBJ2-7)
CASRRGESLYEQYF

SEQ ID NO: 379395 - protein, 11 aa, Homo sapiens
  CDR3 for alpha chain variable domain of TCR clone 189698 (TRAV8-4, TRAJ20)
CAVTNVLTTTS

SEQ ID NO: 379396 - protein, 16 aa, Homo sapiens
  CDR3 for beta chain variable domain of TCR clone 189698 (TRBV6-1, TRBJ1-2)
CASSGAWQGRSHGYSF

SEQ ID NO: 379397 - protein, 10 aa, Homo sapiens
  CDR3 for alpha chain variable domain of TCR clone 189699 (TRAV23/DV6, TRAJ22)
CAASRRGSRF

SEQ ID NO: 379398 - protein, 15 aa, Homo sapiens
  CDR3 for beta chain variable domain of TCR clone 189699 (TRBV10-3, TRBJ2-3)
CAIDTSGRRTDTQYF

SEQ ID NO: 379399 - protein, 14 aa, Homo sapiens
  CDR3 for alpha chain variable domain of TCR clone 189700 (TRAV8-1, TRAJ34)
CAVITTYNTDKLIF

SEQ ID NO: 379400 - protein, 14 aa, Homo sapiens
  CDR3 for beta chain variable domain of TCR clone 189700 (TRBV11-3, TRBJ1-3)
CASSHNGQGNAIYF

SEQ ID NO: 379401 - protein, 14 aa, Homo sapiens
  CDR3 for alpha chain variable domain of TCR clone 189701 (TRAV1-2, TRAJ16)
CAVNRFSDGQKLLF

SEQ ID NO: 379402 - protein, 15 aa, Homo sapiens
  CDR3 for beta chain variable domain of TCR clone 189701 (TRBV28, TRBJ2-3)
CASSPPTGSTDTQYF

SEQ ID NO: 379403 - protein, 18 aa, Homo sapiens
  CDR3 for alpha chain variable domain of TCR clone 189702 (TRAV26-1, TRAJ37)
CIVRVDMHGSSNTGKLIF

SEQ ID NO: 379404 - protein, 10 aa, Homo sapiens
  CDR3 for beta chain variable domain of TCR clone 189702 (TRBV20-1, TRBJ2-7)
LASPLYEQYF

SEQ ID NO: 379405 - protein, 14 aa, Homo sapiens
  CDR3 for alpha chain variable domain of TCR clone 189703 (TRAV12-3, TRAJ42)
CAMNYGGSQGNLIF

SEQ ID NO: 379406 - protein, 15 aa, Homo sapiens
  CDR3 for beta chain variable domain of TCR clone 189703 (TRBV5-6, TRBJ1-5)
CASSYGKLWDQAQQF

SEQ ID NO: 379407 - protein, 12 aa, Homo sapiens
  CDR3 for alpha chain variable domain of TCR clone 189704 (TRAV12-3, TRAJ17)
CAMTLTGNKLTF

SEQ ID NO: 379408 - protein, 12 aa, Homo sapiens
  CDR3 for beta chain variable domain of TCR clone 189704 (TRBV11-3, TRBJ1-6)
CASRQGISPLHF

SEQ ID NO: 379409 - protein, 18 aa, Homo sapiens
  CDR3 for alpha chain variable domain of TCR clone 189705 (TRAV21, TRAJ52)
CSVRPSPAGGTSYGKLTF

SEQ ID NO: 379410 - protein, 15 aa, Homo sapiens
  CDR3 for beta chain variable domain of TCR clone 189705 (TRBV20-1, TRBJ2-7)
CSARKGLAESYEQYF

SEQ ID NO: 379411 - protein, 13 aa, Homo sapiens
  CDR3 for alpha chain variable domain of TCR clone 189706 (TRAV27, TRAJ29)
CAGAHAGNTPLVF

SEQ ID NO: 379412 - protein, 14 aa, Homo sapiens
  CDR3 for beta chain variable domain of TCR clone 189706 (TRBV7-9, TRBJ2-7)
CASSIGQGAGEKYF

SEQ ID NO: 379413 - protein, 16 aa, Homo sapiens
  CDR3 for alpha chain variable domain of TCR clone 189707 (TRAV8-3, TRAJ52)
CAVQPAGGTSYGKLTF

SEQ ID NO: 379414 - protein, 15 aa, Homo sapiens
  CDR3 for beta chain variable domain of TCR clone 189707 (TRBV11-2, TRBJ2-7)
CASSLAGGVANEQYF

SEQ ID NO: 379415 - protein, 14 aa, Homo sapiens
  CDR3 for alpha chain variable domain of TCR clone 189708 (TRAV12-1, TRAJ37)
CVVTGSSNTGKLIF

SEQ ID NO: 379416 - protein, 19 aa, Homo sapiens
  CDR3 for beta chain variable domain of TCR clone 189708 (TRBV25-1, TRBJ2-2)
CAILVYRVDRGRKTGELFF

SEQ ID NO: 379417 - protein, 15 aa, Homo sapiens
  CDR3 for alpha chain variable domain of TCR clone 189709 (TRAV26-1, TRAJ24)
CIVREDTDSWGKLQF

SEQ ID NO: 379418 - protein, 15 aa, Homo sapiens
  CDR3 for beta chain variable domain of TCR clone 189709 (TRBV7-9, TRBJ1-6)
CASSSPGRGNSPLHF

SEQ ID NO: 379419 - protein, 17 aa, Homo sapiens
  CDR3 for alpha chain variable domain of TCR clone 189710 (TRAV3, TRAJ6)
CAVREGPRAGGSSIPTF

SEQ ID NO: 379420 - protein, 14 aa, Homo sapiens
  CDR3 for beta chain variable domain of TCR clone 189710 (TRBV7-2, TRBJ2-7)
CASSPKTSFYEQYF

SEQ ID NO: 379421 - protein, 16 aa, Homo sapiens
  CDR3 for alpha chain variable domain of TCR clone 189711 (TRAV17, TRAJ53)
CATDALSGGSNYKLTF

SEQ ID NO: 379422 - protein, 12 aa, Homo sapiens
  CDR3 for beta chain variable domain of TCR clone 189711 (TRBV5-1, TRBJ2-7)
CASSLRGYEQYS

SEQ ID NO: 379423 - protein, 14 aa, Homo sapiens
  CDR3 for alpha chain variable domain of TCR clone 189712 (TRAV26-1, TRAJ21)
CIVRVVYNFDKFYF

SEQ ID NO: 379424 - protein, 17 aa, Homo sapiens
  CDR3 for beta chain variable domain of TCR clone 189712 (TRBV11-2, TRBJ2-1)
CASSLYPPGVEYNEQFF

SEQ ID NO: 379425 - protein, 13 aa, Homo sapiens
  CDR3 for alpha chain variable domain of TCR clone 189713 (TRAV27, TRAJ45)
CRSSGGGADGLTF

SEQ ID NO: 379426 - protein, 17 aa, Homo sapiens
  CDR3 for beta chain variable domain of TCR clone 189713 (TRBV10-3, TRBJ2-4)
CTSVPSVDKGSKNIQYF

SEQ ID NO: 379427 - protein, 14 aa, Homo sapiens
  CDR3 for alpha chain variable domain of TCR clone 189714 (TRAV35, TRAJ42)
CAGRYGGSQGNLIF

SEQ ID NO: 379428 - protein, 15 aa, Homo sapiens
  CDR3 for beta chain variable domain of TCR clone 189714 (TRBV7-9, TRBJ2-1)
CASSLCWGRANEQFF

SEQ ID NO: 379429 - protein, 12 aa, Homo sapiens
  CDR3 for alpha chain variable domain of TCR clone 189715 (TRAV12-3, TRAJ20)
CAMARGDYKLSF

SEQ ID NO: 379430 - protein, 14 aa, Homo sapiens
  CDR3 for beta chain variable domain of TCR clone 189715 (TRBV5-5, TRBJ1-5)
CASSGQGVDQPQHF

SEQ ID NO: 379431 - protein, 15 aa, Homo sapiens
  CDR3 for alpha chain variable domain of TCR clone 189716 (TRAV38-2/DV8, TRAJ45)
CAYWDSGGGADGLTF

SEQ ID NO: 379432 - protein, 13 aa, Homo sapiens
  CDR3 for beta chain variable domain of TCR clone 189716 (TRBV13, TRBJ2-5)
CASSPEVGETQYF

SEQ ID NO: 379433 - protein, 13 aa, Homo sapiens
  CDR3 for alpha chain variable domain of TCR clone 189717 (TRAV12-2, TRAJ50)
CAVIVTSYDKVIF

SEQ ID NO: 379434 - protein, 12 aa, Homo sapiens
  CDR3 for beta chain variable domain of TCR clone 189717 (TRBV28, TRBJ2-6)
CAIQAGANVLTF

SEQ ID NO: 379435 - protein, 14 aa, Homo sapiens
  CDR3 for alpha chain variable domain of TCR clone 189718 (TRAV12-3, TRAJ56)
CAMSVTGANSKLTF

SEQ ID NO: 379436 - protein, 15 aa, Homo sapiens
  CDR3 for beta chain variable domain of TCR clone 189718 (TRBV20-1, TRBJ2-3)
CSAEPLAGHGDTQYF

SEQ ID NO: 379437 - protein, 15 aa, Homo sapiens
  CDR3 for alpha chain variable domain of TCR clone 189719 (TRAV14/DV4, TRAJ47)
CAMREAMEYGNKLVF

SEQ ID NO: 379438 - protein, 15 aa, Homo sapiens
  CDR3 for beta chain variable domain of TCR clone 189719 (TRBV7-3, TRBJ2-1)
CASSLGQGAFGEQFF

SEQ ID NO: 379439 - protein, 14 aa, Homo sapiens
  CDR3 for alpha chain variable domain of TCR clone 189720 (TRAV2, TRAJ39)
CAVEGDNAGNMFTF

SEQ ID NO: 379440 - protein, 14 aa, Homo sapiens
  CDR3 for beta chain variable domain of TCR clone 189720 (TRBV28, TRBJ2-7)
CASSLRARGNEQYF

SEQ ID NO: 379441 - protein, 15 aa, Homo sapiens
  CDR3 for alpha chain variable domain of TCR clone 189721 (TRAV26-1, TRAJ42)
CIVRVKGGSQGNLIF

SEQ ID NO: 379442 - protein, 14 aa, Homo sapiens
  CDR3 for beta chain variable domain of TCR clone 189721 (TRBV6-6, TRBJ1-5)
CASVDSGFNQPQHL

SEQ ID NO: 379443 - protein, 14 aa, Homo sapiens
  CDR3 for alpha chain variable domain of TCR clone 189722 (TRAV12-3, TRAJ10)
SHLPLTGGGNKLTF

SEQ ID NO: 379444 - protein, 15 aa, Homo sapiens
  CDR3 for beta chain variable domain of TCR clone 189722 (TRBV4-2, TRBJ1-1)
CASSQVGSMNTEAFF

SEQ ID NO: 379445 - protein, 16 aa, Homo sapiens
  CDR3 for alpha chain variable domain of TCR clone 189723 (TRAV30, TRAJ24)
CGTEIVDADRWGKFQF

SEQ ID NO: 379446 - protein, 20 aa, Homo sapiens
  CDR3 for beta chain variable domain of TCR clone 189723 (TRBV19, TRBJ2-1)
CASSISRTVTSTRLNNEQFF

SEQ ID NO: 379447 - protein, 16 aa, Homo sapiens
  CDR3 for alpha chain variable domain of TCR clone 189724 (TRAV3, TRAJ37)
CAVRPHRSGNTGKLIF

SEQ ID NO: 379448 - protein, 16 aa, Homo sapiens
  CDR3 for beta chain variable domain of TCR clone 189724 (TRBV9, TRBJ1-2)
CASSVEEKVSPYGYTF

SEQ ID NO: 379449 - protein, 14 aa, Homo sapiens
  CDR3 for alpha chain variable domain of TCR clone 189725 (TRAV29/DV5, TRAJ36)
CAARRKTGANNLFF

SEQ ID NO: 379450 - protein, 15 aa, Homo sapiens
  CDR3 for beta chain variable domain of TCR clone 189725 (TRBV19, TRBJ2-3)
CASSMSTTSTDTQYF

SEQ ID NO: 379451 - protein, 13 aa, Homo sapiens
  CDR3 for alpha chain variable domain of TCR clone 189726 (TRAV12-3, TRAJ47)
CAMKKEYGNKLVF

SEQ ID NO: 379452 - protein, 16 aa, Homo sapiens
  CDR3 for beta chain variable domain of TCR clone 189726 (TRBV3-1, TRBJ2-6)
CASSLTWVSGANVPTF

SEQ ID NO: 379453 - protein, 11 aa, Homo sapiens
  CDR3 for alpha chain variable domain of TCR clone 189727 (TRAV3, TRAJ13)
CAVTSYQKVTF

SEQ ID NO: 379454 - protein, 15 aa, Homo sapiens
  CDR3 for beta chain variable domain of TCR clone 189727 (TRBV7-9, TRBJ2-7)
RASSSSGLAVYEQYF

SEQ ID NO: 379455 - protein, 14 aa, Homo sapiens
  CDR3 for alpha chain variable domain of TCR clone 189728 (TRAV26-1, TRAJ39)
CIAFTNNAGNMLTF

SEQ ID NO: 379456 - protein, 15 aa, Homo sapiens
  CDR3 for beta chain variable domain of TCR clone 189728 (TRBV19, TRBJ2-4)
CASSLTGLTKNNQYF

SEQ ID NO: 379457 - protein, 16 aa, Homo sapiens
  CDR3 for alpha chain variable domain of TCR clone 189729 (TRAV12-3, TRAJ53)
CAMSPGSGGSKYKLTF

SEQ ID NO: 379458 - protein, 16 aa, Homo sapiens
  CDR3 for beta chain variable domain of TCR clone 189729 (TRBV4-2, TRBJ1-1)
CASSQAGCGMNTEAFF

SEQ ID NO: 379459 - protein, 16 aa, Homo sapiens
  CDR3 for alpha chain variable domain of TCR clone 189730 (TRAV26-1, TRAJ58)
IASSESGETSGSRLTF

SEQ ID NO: 379460 - protein, 15 aa, Homo sapiens
  CDR3 for beta chain variable domain of TCR clone 189730 (TRBV12-4, TRBJ2-1)
CASSLLATGNNEQFF

SEQ ID NO: 379461 - protein, 16 aa, Homo sapiens
  CDR3 for alpha chain variable domain of TCR clone 189731 (TRAV30, TRAJ24)
CGTEIVDADSWGKFKF

SEQ ID NO: 379462 - protein, 14 aa, Homo sapiens
  CDR3 for beta chain variable domain of TCR clone 189731 (TRBV19, TRBJ2-2)
CASSGQGIAGELFF

SEQ ID NO: 379463 - protein, 13 aa, Homo sapiens
  CDR3 for alpha chain variable domain of TCR clone 189732 (TRAV8-3, TRAJ28)
CAVGAVGSYQLTF

SEQ ID NO: 379464 - protein, 15 aa, Homo sapiens
  CDR3 for beta chain variable domain of TCR clone 189732 (TRBV7-9, TRBJ1-5)
CASRQGHQPNQAQHF

SEQ ID NO: 379465 - protein, 16 aa, Homo sapiens
  CDR3 for alpha chain variable domain of TCR clone 189733 (TRAV30, TRAJ24)
CGTEIVDADSWGKFQF

SEQ ID NO: 379466 - protein, 13 aa, Homo sapiens
  CDR3 for beta chain variable domain of TCR clone 189733 (TRBV18, TRBJ1-2)
CVSSASATEGYTF

SEQ ID NO: 379467 - protein, 14 aa, Homo sapiens
  CDR3 for alpha chain variable domain of TCR clone 189734 (TRAV16, TRAJ31)
CSLRGRNNNARLMF

SEQ ID NO: 379468 - protein, 12 aa, Homo sapiens
  CDR3 for beta chain variable domain of TCR clone 189734 (TRBV11-2, TRBJ1-2)
CASSREGDGYTF

SEQ ID NO: 379469 - protein, 11 aa, Homo sapiens
  CDR3 for alpha chain variable domain of TCR clone 189735 (TRAV13-2, TRAJ20)
CAENMSYKLSF

SEQ ID NO: 379470 - protein, 15 aa, Homo sapiens
  CDR3 for beta chain variable domain of TCR clone 189735 (TRBV28, TRBJ2-3)
CAPTFRDCSTDTQYF

SEQ ID NO: 379471 - protein, 14 aa, Homo sapiens
  CDR3 for alpha chain variable domain of TCR clone 189736 (TRAV17, TRAJ16)
CATADFSDGQKLLF

SEQ ID NO: 379472 - protein, 12 aa, Homo sapiens
  CDR3 for beta chain variable domain of TCR clone 189736 (TRBV24-1, TRBJ1-1)
CATLYPDTDAFF

SEQ ID NO: 379473 - protein, 13 aa, Homo sapiens
  CDR3 for alpha chain variable domain of TCR clone 189737 (TRAV3, TRAJ27)
CAVRPLGAGKSTF

SEQ ID NO: 379474 - protein, 13 aa, Homo sapiens
  CDR3 for beta chain variable domain of TCR clone 189737 (TRBV10-2, TRBJ2-3)
RASSESGDHTQYF

SEQ ID NO: 379475 - protein, 14 aa, Homo sapiens
  CDR3 for alpha chain variable domain of TCR clone 189738 (TRAV26-1, TRAJ45)
CIVRVVGGADGLTF

SEQ ID NO: 379476 - protein, 12 aa, Homo sapiens
  CDR3 for beta chain variable domain of TCR clone 189738 (TRBV12-4, TRBJ2-7)
CASSLGGYAQYF

SEQ ID NO: 379477 - protein, 14 aa, Homo sapiens
  CDR3 for alpha chain variable domain of TCR clone 189739 (TRAV1-2, TRAJ8)
CAVREGTGFQKLVF

SEQ ID NO: 379478 - protein, 16 aa, Homo sapiens
  CDR3 for beta chain variable domain of TCR clone 189739 (TRBV7-9, TRBJ2-1)
CASSDVAGGSYNEQFF

SEQ ID NO: 379479 - protein, 13 aa, Homo sapiens
  CDR3 for alpha chain variable domain of TCR clone 189740 (TRAV3, TRAJ21)
CAVREPDFNKFYF

SEQ ID NO: 379480 - protein, 14 aa, Homo sapiens
  CDR3 for beta chain variable domain of TCR clone 189740 (TRBV2, TRBJ2-3)
CASNRGTSTDTQYF

SEQ ID NO: 379481 - protein, 13 aa, Homo sapiens
  CDR3 for alpha chain variable domain of TCR clone 189741 (TRAV2, TRAJ24)
CAVTTDSWGKLQY

SEQ ID NO: 379482 - protein, 14 aa, Homo sapiens
  CDR3 for beta chain variable domain of TCR clone 189741 (TRBV13, TRBJ2-5)
CASSLGRGQETQYF

SEQ ID NO: 379483 - protein, 13 aa, Homo sapiens
  CDR3 for alpha chain variable domain of TCR clone 189742 (TRAV30, TRAJ16)
CGTFGGDGQKLLF

SEQ ID NO: 379484 - protein, 15 aa, Homo sapiens
  CDR3 for beta chain variable domain of TCR clone 189742 (TRBV11-2, TRBJ2-1)
CASSRNRGLMYEQFF

SEQ ID NO: 379485 - protein, 14 aa, Homo sapiens
  CDR3 for alpha chain variable domain of TCR clone 189743 (TRAV12-3, TRAJ56)
RAMSVTGANSKLTF

SEQ ID NO: 379486 - protein, 15 aa, Homo sapiens
  CDR3 for beta chain variable domain of TCR clone 189743 (TRBV20-1, TRBJ1-1)
CSASRGVTGNTEAFF

SEQ ID NO: 379487 - protein, 14 aa, Homo sapiens
  CDR3 for alpha chain variable domain of TCR clone 189744 (TRAV27, TRAJ23)
CAGAFDIQGGKLIF

SEQ ID NO: 379488 - protein, 15 aa, Homo sapiens
  CDR3 for beta chain variable domain of TCR clone 189744 (TRBV7-3, TRBJ2-7)
CASSLTGQGKYEQYF

SEQ ID NO: 379489 - protein, 14 aa, Homo sapiens
  CDR3 for alpha chain variable domain of TCR clone 189745 (TRAV13-1, TRAJ5)
CAAHPDTGRRALTF

SEQ ID NO: 379490 - protein, 14 aa, Homo sapiens
  CDR3 for beta chain variable domain of TCR clone 189745 (TRBV7-2, TRBJ2-7)
CASSPKTSFYEQYF

SEQ ID NO: 379491 - protein, 16 aa, Homo sapiens
  CDR3 for alpha chain variable domain of TCR clone 189746 (TRAV26-2, TRAJ45)
CTTASPIGGGADGLTF

SEQ ID NO: 379492 - protein, 18 aa, Homo sapiens
  CDR3 for beta chain variable domain of TCR clone 189746 (TRBV11-2, TRBJ2-3)
CASSLGGAPRGAPNTQYF

SEQ ID NO: 379493 - protein, 18 aa, Homo sapiens
  CDR3 for alpha chain variable domain of TCR clone 189747 (TRAV21, TRAJ52)
CAVRPSPPGGTSYGKLTF

SEQ ID NO: 379494 - protein, 16 aa, Homo sapiens
  CDR3 for beta chain variable domain of TCR clone 189747 (TRBV7-3, TRBJ2-1)
CASSLEGYRSYNEQFF

SEQ ID NO: 379495 - protein, 15 aa, Homo sapiens
  CDR3 for alpha chain variable domain of TCR clone 189748 (TRAV8-3, TRAJ45)
CASSYSGGGADGLTF

SEQ ID NO: 379496 - protein, 14 aa, Homo sapiens
  CDR3 for beta chain variable domain of TCR clone 189748 (TRBV7-2, TRBJ2-3)
CASSLGGGERYAVF

SEQ ID NO: 379497 - protein, 14 aa, Homo sapiens
  CDR3 for alpha chain variable domain of TCR clone 189749 (TRAV26-1, TRAJ45)
CIEVTGGGAYGLTF

SEQ ID NO: 379498 - protein, 19 aa, Homo sapiens
  CDR3 for beta chain variable domain of TCR clone 189749 (TRBV19, TRBJ2-2)
CASTRPGLAGGRVTGELFF

SEQ ID NO: 379499 - protein, 14 aa, Homo sapiens
  CDR3 for alpha chain variable domain of TCR clone 189750 (TRAV17, TRAJ31)
CAKVLRNNNARLMF

SEQ ID NO: 379500 - protein, 14 aa, Homo sapiens
  CDR3 for beta chain variable domain of TCR clone 189750 (TRBV12-4, TRBJ2-5)
CASSLWQKQETQYF

SEQ ID NO: 379501 - protein, 16 aa, Homo sapiens
  CDR3 for alpha chain variable domain of TCR clone 189751 (TRAV20, TRAJ52)
CAVLRAGGTSYGKLTF

SEQ ID NO: 379502 - protein, 16 aa, Homo sapiens
  CDR3 for beta chain variable domain of TCR clone 189751 (TRBV7-9, TRBJ1-2)
CASSLGFSSGEDGYTF

SEQ ID NO: 379503 - protein, 15 aa, Homo sapiens
  CDR3 for alpha chain variable domain of TCR clone 189752 (TRAV27, TRAJ38)
CAARRTAGNNRKLIW

SEQ ID NO: 379504 - protein, 13 aa, Homo sapiens
  CDR3 for beta chain variable domain of TCR clone 189752 (TRBV20-1, TRBJ1-1)
CSARAGGNTEAFF

SEQ ID NO: 379505 - protein, 14 aa, Homo sapiens
  CDR3 for alpha chain variable domain of TCR clone 189753 (TRAV1-2, TRAJ16)
FAVNRFSDGQKLLF

SEQ ID NO: 379506 - protein, 13 aa, Homo sapiens
  CDR3 for beta chain variable domain of TCR clone 189753 (TRBV18, TRBJ1-1)
CASSGGRNTEAFF

SEQ ID NO: 379507 - protein, 13 aa, Homo sapiens
  CDR3 for alpha chain variable domain of TCR clone 189754 (TRAV12-2, TRAJ11)
CAVPNSGYSTLTF

SEQ ID NO: 379508 - protein, 13 aa, Homo sapiens
  CDR3 for beta chain variable domain of TCR clone 189754 (TRBV18, TRBJ2-5)
CASSLQGQETQYF

SEQ ID NO: 379509 - protein, 12 aa, Homo sapiens
  CDR3 for alpha chain variable domain of TCR clone 189755 (TRAV27, TRAJ9)
YAGESGGFKTIF

SEQ ID NO: 379510 - protein, 18 aa, Homo sapiens
  CDR3 for beta chain variable domain of TCR clone 189755 (TRBV10-2, TRBJ2-2)
CISAPAVHRQADAGELFF

SEQ ID NO: 379511 - protein, 13 aa, Homo sapiens
  CDR3 for alpha chain variable domain of TCR clone 189756 (TRAV27, TRAJ6)
CAGGTRGSSIPTF

SEQ ID NO: 379512 - protein, 15 aa, Homo sapiens
  CDR3 for beta chain variable domain of TCR clone 189756 (TRBV11-2, TRBJ1-3)
CASSLSPLVRDTIYF

SEQ ID NO: 379513 - protein, 15 aa, Homo sapiens
  CDR3 for alpha chain variable domain of TCR clone 189757 (TRAV35, TRAJ50)
CAGQLRKTSYDKVIF

SEQ ID NO: 379514 - protein, 12 aa, Homo sapiens
  CDR3 for beta chain variable domain of TCR clone 189757 (TRBV12-4, TRBJ2-7)
CASSSGGYEQYF

SEQ ID NO: 379515 - protein, 13 aa, Homo sapiens
  CDR3 for alpha chain variable domain of TCR clone 189758 (TRAV8-3, TRAJ36)
CAVGATGANNLFF

SEQ ID NO: 379516 - protein, 15 aa, Homo sapiens
  CDR3 for beta chain variable domain of TCR clone 189758 (TRBV4-1, TRBJ2-5)
CASSQWDLYQETQYF

SEQ ID NO: 379517 - protein, 14 aa, Homo sapiens
  CDR3 for alpha chain variable domain of TCR clone 189759 (TRAV27, TRAJ41)
CAVRPQIPGMHSTS

SEQ ID NO: 379518 - protein, 16 aa, Homo sapiens
  CDR3 for beta chain variable domain of TCR clone 189759 (TRBV5-1, TRBJ2-3)
CASSLGLAVYTDTQYF

SEQ ID NO: 379519 - protein, 17 aa, Homo sapiens
  CDR3 for alpha chain variable domain of TCR clone 189760 (TRAV3, TRAJ42)
CAVRDRDYGGSQGNLIF

SEQ ID NO: 379520 - protein, 17 aa, Homo sapiens
  CDR3 for beta chain variable domain of TCR clone 189760 (TRBV19, TRBJ2-6)
CASSSGTVFSGANVLTF

SEQ ID NO: 379521 - protein, 16 aa, Homo sapiens
  CDR3 for alpha chain variable domain of TCR clone 189761 (TRAV30, TRAJ24)
CGREIVDADSWGKFQF

SEQ ID NO: 379522 - protein, 12 aa, Homo sapiens
  CDR3 for beta chain variable domain of TCR clone 189761 (TRBV11-2, TRBJ2-2)
CASSLPTGELFF

SEQ ID NO: 379523 - protein, 14 aa, Homo sapiens
  CDR3 for alpha chain variable domain of TCR clone 189762 (TRAV13-1, TRAJ26)
CAAPKGPDGQNFFF

SEQ ID NO: 379524 - protein, 15 aa, Homo sapiens
  CDR3 for beta chain variable domain of TCR clone 189762 (TRBV28, TRBJ2-5)
CASSFRQGALETQYF

SEQ ID NO: 379525 - protein, 14 aa, Homo sapiens
  CDR3 for alpha chain variable domain of TCR clone 189763 (TRAV38-1, TRAJ29)
CAFITPSGNTPLVF

SEQ ID NO: 379526 - protein, 13 aa, Homo sapiens
  CDR3 for beta chain variable domain of TCR clone 189763 (TRBV2, TRBJ2-7)
CASSVGGSGEQYF

SEQ ID NO: 379527 - protein, 13 aa, Homo sapiens
  CDR3 for alpha chain variable domain of TCR clone 189764 (TRAV12-1, TRAJ39)
CVARSGAGNMLTF

SEQ ID NO: 379528 - protein, 13 aa, Homo sapiens
  CDR3 for beta chain variable domain of TCR clone 189764 (TRBV19, TRBJ1-2)
CASSVPGQDGYTF

SEQ ID NO: 379529 - protein, 16 aa, Homo sapiens
  CDR3 for alpha chain variable domain of TCR clone 189765 (TRAV14/DV4, TRAJ54)
CAMREGRIQGAQKLVF

SEQ ID NO: 379530 - protein, 17 aa, Homo sapiens
  CDR3 for beta chain variable domain of TCR clone 189765 (TRBV5-3, TRBJ2-2)
CARSLETGQGDTGELFF

SEQ ID NO: 379531 - protein, 13 aa, Homo sapiens
  CDR3 for alpha chain variable domain of TCR clone 189766 (TRAV23/DV6, TRAJ22)
CAPYSGSARQLTF

SEQ ID NO: 379532 - protein, 11 aa, Homo sapiens
  CDR3 for beta chain variable domain of TCR clone 189766 (TRBV11-2, TRBJ2-2)
CASSLPGELFF

SEQ ID NO: 379533 - protein, 17 aa, Homo sapiens
  CDR3 for alpha chain variable domain of TCR clone 189767 (TRAV17, TRAJ28)
CATDPRRGGAGSYQLTF

SEQ ID NO: 379534 - protein, 16 aa, Homo sapiens
  CDR3 for beta chain variable domain of TCR clone 189767 (TRBV25-1, TRBJ1-1)
RASSGDRDRGCIEAFF

SEQ ID NO: 379535 - protein, 16 aa, Homo sapiens
  CDR3 for alpha chain variable domain of TCR clone 189768 (TRAV30, TRAJ24)
CGTEIVDADSWGKFQF

SEQ ID NO: 379536 - protein, 13 aa, Homo sapiens
  CDR3 for beta chain variable domain of TCR clone 189768 (TRBV18, TRBJ2-2)
CASSPTRGGELFF

SEQ ID NO: 379537 - protein, 14 aa, Homo sapiens
  CDR3 for alpha chain variable domain of TCR clone 189769 (TRAV38-1, TRAJ40)
CALRPTSGTYKYIF

SEQ ID NO: 379538 - protein, 14 aa, Homo sapiens
  CDR3 for beta chain variable domain of TCR clone 189769 (TRBV25-1, TRBJ1-1)
CASTHVGGNTEAFF

SEQ ID NO: 379539 - protein, 15 aa, Homo sapiens
  CDR3 for alpha chain variable domain of TCR clone 189770 (TRAV25, TRAJ53)
CPTSNSGGSNYKLTF

SEQ ID NO: 379540 - protein, 14 aa, Homo sapiens
  CDR3 for beta chain variable domain of TCR clone 189770 (TRBV28, TRBJ1-2)
CASRIQGANYGYTF

SEQ ID NO: 379541 - protein, 15 aa, Homo sapiens
  CDR3 for alpha chain variable domain of TCR clone 189771 (TRAV12-3, TRAJ6)
FAISATTGGSYIPTF

SEQ ID NO: 379542 - protein, 16 aa, Homo sapiens
  CDR3 for beta chain variable domain of TCR clone 189771 (TRBV20-1, TRBJ1-2)
CSASMGQGVANYGYTF

SEQ ID NO: 379543 - protein, 14 aa, Homo sapiens
  CDR3 for alpha chain variable domain of TCR clone 189772 (TRAV13-1, TRAJ10)
CAAKEPGGGNKLTI

SEQ ID NO: 379544 - protein, 16 aa, Homo sapiens
  CDR3 for beta chain variable domain of TCR clone 189772 (TRBV5-1, TRBJ2-1)
CASSPWTSGEYNEQFF

SEQ ID NO: 379545 - protein, 16 aa, Homo sapiens
  CDR3 for alpha chain variable domain of TCR clone 189773 (TRAV3, TRAJ10)
CAVRDMRAGGGNKLTF

SEQ ID NO: 379546 - protein, 13 aa, Homo sapiens
  CDR3 for beta chain variable domain of TCR clone 189773 (TRBV12-4, TRBJ2-7)
CASSPTETYEQYV

SEQ ID NO: 379547 - protein, 22 aa, Homo sapiens
  CDR3 for alpha chain variable domain of TCR clone 189774 (TRAV12-3, TRAJ41)
CISLFIRDSQPSDSATPEALNF

SEQ ID NO: 379548 - protein, 15 aa, Homo sapiens
  CDR3 for beta chain variable domain of TCR clone 189774 (TRBV5-1, TRBJ2-7)
CASSLDLTSSYEQYF

SEQ ID NO: 379549 - protein, 13 aa, Homo sapiens
  CDR3 for alpha chain variable domain of TCR clone 189775 (TRAV21, TRAJ27)
CAARPGNAGKSTF

SEQ ID NO: 379550 - protein, 15 aa, Homo sapiens
  CDR3 for beta chain variable domain of TCR clone 189775 (TRBV4-1, TRBJ2-1)
CASSQVLAGGDEQFF

SEQ ID NO: 379551 - protein, 16 aa, Homo sapiens
  CDR3 for alpha chain variable domain of TCR clone 189776 (TRAV3, TRAJ22)
CAVRDMGSGSARQLTF

SEQ ID NO: 379552 - protein, 13 aa, Homo sapiens
  CDR3 for beta chain variable domain of TCR clone 189776 (TRBV20-1, TRBJ1-1)
CSAGTVGNTEAFF

SEQ ID NO: 379553 - protein, 17 aa, Homo sapiens
  CDR3 for alpha chain variable domain of TCR clone 189777 (TRAV8-6, TRAJ52)
CAVSLQFGGTSYGKLTF

SEQ ID NO: 379554 - protein, 18 aa, Homo sapiens
  CDR3 for beta chain variable domain of TCR clone 189777 (TRBV4-1, TRBJ1-4)
CASSPRTGGAWTNDKLFF

SEQ ID NO: 379555 - protein, 14 aa, Homo sapiens
  CDR3 for alpha chain variable domain of TCR clone 189778 (TRAV1-2, TRAJ16)
CAVNRFSDGPKLLF

SEQ ID NO: 379556 - protein, 14 aa, Homo sapiens
  CDR3 for beta chain variable domain of TCR clone 189778 (TRBV6-1, TRBJ1-3)
CASVQGGGGNTIYF

SEQ ID NO: 379557 - protein, 17 aa, Homo sapiens
  CDR3 for alpha chain variable domain of TCR clone 189779 (TRAV38-2/DV8, TRAJ28)
CAFLTLYSGVGSYQLTF

SEQ ID NO: 379558 - protein, 14 aa, Homo sapiens
  CDR3 for beta chain variable domain of TCR clone 189779 (TRBV7-2, TRBJ2-5)
CASSLSGGGETQYF

SEQ ID NO: 379559 - protein, 12 aa, Homo sapiens
  CDR3 for alpha chain variable domain of TCR clone 189780 (TRAV12-2, TRAJ20)
CAVDWNDYKLSF

SEQ ID NO: 379560 - protein, 14 aa, Homo sapiens
  CDR3 for beta chain variable domain of TCR clone 189780 (TRBV6-1, TRBJ1-3)
CASVQGGGGNTIYF

SEQ ID NO: 379561 - protein, 12 aa, Homo sapiens
  CDR3 for alpha chain variable domain of TCR clone 189781 (TRAV2, TRAJ31)
CAVEDNSARLMS

SEQ ID NO: 379562 - protein, 16 aa, Homo sapiens
  CDR3 for beta chain variable domain of TCR clone 189781 (TRBV10-3, TRBJ2-1)
CAISGVGDGGGGEQFF

SEQ ID NO: 379563 - protein, 12 aa, Homo sapiens
  CDR3 for alpha chain variable domain of TCR clone 189782 (TRAV17, TRAJ20)
CATDGDDYKLSF

SEQ ID NO: 379564 - protein, 16 aa, Homo sapiens
  CDR3 for beta chain variable domain of TCR clone 189782 (TRBV13, TRBJ2-2)
CASSPRTGEHTGELFF

SEQ ID NO: 379565 - protein, 20 aa, Homo sapiens
  CDR3 for alpha chain variable domain of TCR clone 189783 (TRAV14/DV4, TRAJ52)
CAMRESSANAGGTSYGKLTF

SEQ ID NO: 379566 - protein, 13 aa, Homo sapiens
  CDR3 for beta chain variable domain of TCR clone 189783 (TRBV6-5, TRBJ2-2)
CASRTVNTGELFF

SEQ ID NO: 379567 - protein, 14 aa, Homo sapiens
  CDR3 for alpha chain variable domain of TCR clone 189784 (TRAV14/DV4, TRAJ49)
CAFNRYLTGNQFYF

SEQ ID NO: 379568 - protein, 13 aa, Homo sapiens
  CDR3 for beta chain variable domain of TCR clone 189784 (TRBV7-6, TRBJ2-3)
CASSLRSDNTQYF

SEQ ID NO: 379569 - protein, 13 aa, Homo sapiens
  CDR3 for alpha chain variable domain of TCR clone 189785 (TRAV30, TRAJ49)
CGTEPNTGNQFYF

SEQ ID NO: 379570 - protein, 14 aa, Homo sapiens
  CDR3 for beta chain variable domain of TCR clone 189785 (TRBV29-1, TRBJ2-1)
CSVEFRGIPFEQFF

SEQ ID NO: 379571 - protein, 15 aa, Homo sapiens
  CDR3 for alpha chain variable domain of TCR clone 189786 (TRAV17, TRAJ56)
CATEPFTGANSKLTF

SEQ ID NO: 379572 - protein, 16 aa, Homo sapiens
  CDR3 for beta chain variable domain of TCR clone 189786 (TRBV7-9, TRBJ2-7)
CASSVGLAGPSYEQYF

SEQ ID NO: 379573 - protein, 13 aa, Homo sapiens
  CDR3 for alpha chain variable domain of TCR clone 189787 (TRAV20, TRAJ37)
CYGGSSKTGKLIF

SEQ ID NO: 379574 - protein, 11 aa, Homo sapiens
  CDR3 for beta chain variable domain of TCR clone 189787 (TRBV12-4, TRBJ2-3)
WASTATDTQYF

SEQ ID NO: 379575 - protein, 14 aa, Homo sapiens
  CDR3 for alpha chain variable domain of TCR clone 189788 (TRAV1-2, TRAJ8)
CAVREDTGFQKLVF

SEQ ID NO: 379576 - protein, 16 aa, Homo sapiens
  CDR3 for beta chain variable domain of TCR clone 189788 (TRBV19, TRBJ2-7)
CASSINSGGSPYEQYF

SEQ ID NO: 379577 - protein, 14 aa, Homo sapiens
  CDR3 for alpha chain variable domain of TCR clone 189789 (TRAV8-1, TRAJ47)
CAVNAVGYGNKLVF

SEQ ID NO: 379578 - protein, 17 aa, Homo sapiens
  CDR3 for beta chain variable domain of TCR clone 189789 (TRBV7-3, TRBJ2-3)
CASSPRGQGYGTDTQYF

SEQ ID NO: 379579 - protein, 14 aa, Homo sapiens
  CDR3 for alpha chain variable domain of TCR clone 189790 (TRAV1-1, TRAJ27)
CAVIYNTNEGKSTF

SEQ ID NO: 379580 - protein, 18 aa, Homo sapiens
  CDR3 for beta chain variable domain of TCR clone 189790 (TRBV7-3, TRBJ2-1)
CASSLTLASGRAMVSSSS

SEQ ID NO: 379581 - protein, 13 aa, Homo sapiens
  CDR3 for alpha chain variable domain of TCR clone 189791 (TRAV13-1, TRAJ6)
CAARRGGSYIPTF

SEQ ID NO: 379582 - protein, 16 aa, Homo sapiens
  CDR3 for beta chain variable domain of TCR clone 189791 (TRBV4-1, TRBJ2-5)
CASSSGLAGVLGTQYF

SEQ ID NO: 379583 - protein, 14 aa, Homo sapiens
  CDR3 for alpha chain variable domain of TCR clone 189792 (TRAV12-2, TRAJ45)
CAVYSGGGADGLTF

SEQ ID NO: 379584 - protein, 15 aa, Homo sapiens
  CDR3 for beta chain variable domain of TCR clone 189792 (TRBV4-1, TRBJ1-4)
CPSSDTGGTNEILFF

SEQ ID NO: 379585 - protein, 17 aa, Homo sapiens
  CDR3 for alpha chain variable domain of TCR clone 189793 (TRAV3, TRAJ38)
CAVRDCLNAGNNRKLIW

SEQ ID NO: 379586 - protein, 14 aa, Homo sapiens
  CDR3 for beta chain variable domain of TCR clone 189793 (TRBV5-5, TRBJ1-5)
CASSGQGVDQPQHV

SEQ ID NO: 379587 - protein, 15 aa, Homo sapiens
  CDR3 for alpha chain variable domain of TCR clone 189794 (TRAV2, TRAJ9)
CAVAALNTGGFKTIF

SEQ ID NO: 379588 - protein, 15 aa, Homo sapiens
  CDR3 for beta chain variable domain of TCR clone 189794 (TRBV6-6, TRBJ2-7)
RASSYSYGGSYEQYF

SEQ ID NO: 379589 - protein, 11 aa, Homo sapiens
  CDR3 for alpha chain variable domain of TCR clone 189795 (TRAV3, TRAJ21)
CAVGNFNKFYF

SEQ ID NO: 379590 - protein, 12 aa, Homo sapiens
  CDR3 for beta chain variable domain of TCR clone 189795 (TRBV29-1, TRBJ2-3)
CSVTGGADTQYF

SEQ ID NO: 379591 - protein, 16 aa, Homo sapiens
  CDR3 for alpha chain variable domain of TCR clone 189796 (TRAV14/DV4, TRAJ20)
CAMREGRSRDDYKLSF

SEQ ID NO: 379592 - protein, 15 aa, Homo sapiens
  CDR3 for beta chain variable domain of TCR clone 189796 (TRBV11-2, TRBJ2-2)
CASSSDRVNAGELFF

SEQ ID NO: 379593 - protein, 12 aa, Homo sapiens
  CDR3 for alpha chain variable domain of TCR clone 189797 (TRAV13-1, TRAJ49)
CAASIWGNQFYF

SEQ ID NO: 379594 - protein, 11 aa, Homo sapiens
  CDR3 for beta chain variable domain of TCR clone 189797 (TRBV7-2, TRBJ2-3)
CASSSSDTQYF

SEQ ID NO: 379595 - protein, 13 aa, Homo sapiens
  CDR3 for alpha chain variable domain of TCR clone 189798 (TRAV13-2, TRAJ11)
CAEKYSRYSTLTF

SEQ ID NO: 379596 - protein, 13 aa, Homo sapiens
  CDR3 for beta chain variable domain of TCR clone 189798 (TRBV12-4, TRBJ1-4)
CASAMGHNEKLFF

SEQ ID NO: 379597 - protein, 13 aa, Homo sapiens
  CDR3 for alpha chain variable domain of TCR clone 189799 (TRAV2, TRAJ24)
CAVPTDSWGKWQF

SEQ ID NO: 379598 - protein, 16 aa, Homo sapiens
  CDR3 for beta chain variable domain of TCR clone 189799 (TRBV6-3, TRBJ1-2)
CASSRELSGTPYGYTF

SEQ ID NO: 379599 - protein, 14 aa, Homo sapiens
  CDR3 for alpha chain variable domain of TCR clone 189800 (TRAV30, TRAJ26)
CGTEIVSYGQNFVF

SEQ ID NO: 379600 - protein, 13 aa, Homo sapiens
  CDR3 for beta chain variable domain of TCR clone 189800 (TRBV7-3, TRBJ1-1)
CASSQDGGAEAFF

SEQ ID NO: 379601 - protein, 15 aa, Homo sapiens
  CDR3 for alpha chain variable domain of TCR clone 189801 (TRAV35, TRAJ23)
CAGQRGYNQGGKLIF

SEQ ID NO: 379602 - protein, 16 aa, Homo sapiens
  CDR3 for beta chain variable domain of TCR clone 189801 (TRBV27, TRBJ2-1)
CASRSRLAGNYNEQFF

SEQ ID NO: 379603 - protein, 14 aa, Homo sapiens
  CDR3 for alpha chain variable domain of TCR clone 189802 (TRAV8-2, TRAJ44)
CVVSLTGTASKLTF

SEQ ID NO: 379604 - protein, 15 aa, Homo sapiens
  CDR3 for beta chain variable domain of TCR clone 189802 (TRBV7-2, TRBJ2-1)
CASSFSGGICNEQFF

SEQ ID NO: 379605 - protein, 11 aa, Homo sapiens
  CDR3 for alpha chain variable domain of TCR clone 189803 (TRAV21, TRAJ34)
CAVTNTDKLIF

SEQ ID NO: 379606 - protein, 14 aa, Homo sapiens
  CDR3 for beta chain variable domain of TCR clone 189803 (TRBV19, TRBJ2-2)
CASSTLHRSGELFF

SEQ ID NO: 379607 - protein, 12 aa, Homo sapiens
  CDR3 for alpha chain variable domain of TCR clone 189804 (TRAV29/DV5, TRAJ49)
CVATDTGNQFYF

SEQ ID NO: 379608 - protein, 15 aa, Homo sapiens
  CDR3 for beta chain variable domain of TCR clone 189804 (TRBV19, TRBJ2-2)
CASRQTGADTGELFF

SEQ ID NO: 379609 - protein, 13 aa, Homo sapiens
  CDR3 for alpha chain variable domain of TCR clone 189805 (TRAV27, TRAJ16)
CAGACSDGQKLVF

SEQ ID NO: 379610 - protein, 14 aa, Homo sapiens
  CDR3 for beta chain variable domain of TCR clone 189805 (TRBV11-2, TRBJ1-3)
CASSLAVPGNTIYF

SEQ ID NO: 379611 - protein, 13 aa, Homo sapiens
  CDR3 for alpha chain variable domain of TCR clone 189806 (TRAV3, TRAJ27)
CAVRPLGAGKSTF

SEQ ID NO: 379612 - protein, 12 aa, Homo sapiens
  CDR3 for beta chain variable domain of TCR clone 189806 (TRBV7-9, TRBJ1-4)
CASSTDREKLFF

SEQ ID NO: 379613 - protein, 16 aa, Homo sapiens
  CDR3 for alpha chain variable domain of TCR clone 189807 (TRAV8-2, TRAJ50)
CVVSDHMKTSYDKVIF

SEQ ID NO: 379614 - protein, 15 aa, Homo sapiens
  CDR3 for beta chain variable domain of TCR clone 189807 (TRBV7-2, TRBJ2-1)
CASSLQADEYNEQFF

SEQ ID NO: 379615 - protein, 14 aa, Homo sapiens
  CDR3 for alpha chain variable domain of TCR clone 189808 (TRAV12-2, TRAJ40)
CAVKIPSGTYKYIF

SEQ ID NO: 379616 - protein, 14 aa, Homo sapiens
  CDR3 for beta chain variable domain of TCR clone 189808 (TRBV27, TRBJ1-2)
CASRNSRGGYGYTF

SEQ ID NO: 379617 - protein, 14 aa, Homo sapiens
  CDR3 for alpha chain variable domain of TCR clone 189809 (TRAV8-6, TRAJ29)
CAVSGWAGNTPLVF

SEQ ID NO: 379618 - protein, 15 aa, Homo sapiens
  CDR3 for beta chain variable domain of TCR clone 189809 (TRBV12-4, TRBJ2-5)
CASSGTGQAQETQYF

SEQ ID NO: 379619 - protein, 11 aa, Homo sapiens
  CDR3 for alpha chain variable domain of TCR clone 189810 (TRAV12-3, TRAJ43)
CAMSVSNDMRF

SEQ ID NO: 379620 - protein, 15 aa, Homo sapiens
  CDR3 for beta chain variable domain of TCR clone 189810 (TRBV7-2, TRBJ2-1)
CASSSRTSREDEQFF

SEQ ID NO: 379621 - protein, 11 aa, Homo sapiens
  CDR3 for alpha chain variable domain of TCR clone 189811 (TRAV4, TRAJ23)
CLVAPGGKLIF

SEQ ID NO: 379622 - protein, 15 aa, Homo sapiens
  CDR3 for beta chain variable domain of TCR clone 189811 (TRBV7-2, TRBJ2-1)
CASTFQADEYNEQFF

SEQ ID NO: 379623 - protein, 12 aa, Homo sapiens
  CDR3 for alpha chain variable domain of TCR clone 189812 (TRAV12-1, TRAJ39)
CVGREAGNMLTF

SEQ ID NO: 379624 - protein, 15 aa, Homo sapiens
  CDR3 for beta chain variable domain of TCR clone 189812 (TRBV5-1, TRBJ2-2)
CASSLRQGDTGELFF

SEQ ID NO: 379625 - protein, 14 aa, Homo sapiens
  CDR3 for alpha chain variable domain of TCR clone 189813 (TRAV17, TRAJ57)
CATDPQGGSEKLVF

SEQ ID NO: 379626 - protein, 22 aa, Homo sapiens
  CDR3 for beta chain variable domain of TCR clone 189813 (TRBV6-1, TRBJ1-3)
CASVQGGGWKHHIFWRGKLAHC

SEQ ID NO: 379627 - protein, 17 aa, Homo sapiens
  CDR3 for alpha chain variable domain of TCR clone 189814 (TRAV3, TRAJ6)
CAVRDGPRAGGSYISTF

SEQ ID NO: 379628 - protein, 14 aa, Homo sapiens
  CDR3 for beta chain variable domain of TCR clone 189814 (TRBV7-2, TRBJ2-7)
CASSPKASFYEQYF

SEQ ID NO: 379629 - protein, 12 aa, Homo sapiens
  CDR3 for alpha chain variable domain of TCR clone 189815 (TRAV17, TRAJ49)
CATVTTGNQFNF

SEQ ID NO: 379630 - protein, 18 aa, Homo sapiens
  CDR3 for beta chain variable domain of TCR clone 189815 (TRBV11-2, TRBJ2-6)
CASSLNPFLGTGANVLTF

SEQ ID NO: 379631 - protein, 10 aa, Homo sapiens
  CDR3 for alpha chain variable domain of TCR clone 189816 (TRAV39, TRAJ49)
CAVAGNQFYF

SEQ ID NO: 379632 - protein, 14 aa, Homo sapiens
  CDR3 for beta chain variable domain of TCR clone 189816 (TRBV7-2, TRBJ2-7)
CASSPKTSVYEQYF

SEQ ID NO: 379633 - protein, 11 aa, Homo sapiens
  CDR3 for alpha chain variable domain of TCR clone 189817 (TRAV23/DV6, TRAJ58)
CAARLLRWETS

SEQ ID NO: 379634 - protein, 13 aa, Homo sapiens
  CDR3 for beta chain variable domain of TCR clone 189817 (TRBV6-4, TRBJ1-5)
CASSADLNQPQHF

SEQ ID NO: 379635 - protein, 15 aa, Homo sapiens
  CDR3 for alpha chain variable domain of TCR clone 189818 (TRAV12-3, TRAJ49)
CATAVTPNTGNQFYF

SEQ ID NO: 379636 - protein, 18 aa, Homo sapiens
  CDR3 for beta chain variable domain of TCR clone 189818 (TRBV4-1, TRBJ1-5)
CASSQDPRAQGLNQPQHF

SEQ ID NO: 379637 - protein, 12 aa, Homo sapiens
  CDR3 for alpha chain variable domain of TCR clone 189819 (TRAV13-1, TRAJ49)
CAAPNTGNQFYF

SEQ ID NO: 379638 - protein, 17 aa, Homo sapiens
  CDR3 for beta chain variable domain of TCR clone 189819 (TRBV25-1, TRBJ2-7)
CSSSDARVVFSAYEQYF

SEQ ID NO: 379639 - protein, 16 aa, Homo sapiens
  CDR3 for alpha chain variable domain of TCR clone 189820 (TRAV13-1, TRAJ48)
CAASIFGNFGNEKLTF

SEQ ID NO: 379640 - protein, 14 aa, Homo sapiens
  CDR3 for beta chain variable domain of TCR clone 189820 (TRBV7-3, TRBJ1-1)
CASSLKGGNTEAYF

SEQ ID NO: 379641 - protein, 11 aa, Homo sapiens
  CDR3 for alpha chain variable domain of TCR clone 189821 (TRAV2, TRAJ13)
CASGGYQKVTF

SEQ ID NO: 379642 - protein, 15 aa, Homo sapiens
  CDR3 for beta chain variable domain of TCR clone 189821 (TRBV6-1, TRBJ2-2)
CVSSRLRGDTGELFF

SEQ ID NO: 379643 - protein, 15 aa, Homo sapiens
  CDR3 for alpha chain variable domain of TCR clone 189822 (TRAV8-1, TRAJ6)
CAVNTPPGGSYIPTF

SEQ ID NO: 379644 - protein, 14 aa, Homo sapiens
  CDR3 for beta chain variable domain of TCR clone 189822 (TRBV12-4, TRBJ2-1)
CDSSLGQGASEQFF

SEQ ID NO: 379645 - protein, 16 aa, Homo sapiens
  CDR3 for alpha chain variable domain of TCR clone 189823 (TRAV3, TRAJ37)
CAVRGKGSGNTGKLIF

SEQ ID NO: 379646 - protein, 16 aa, Homo sapiens
  CDR3 for beta chain variable domain of TCR clone 189823 (TRBV12-5, TRBJ2-5)
CAGGPRTRGSQETQYF

SEQ ID NO: 379647 - protein, 13 aa, Homo sapiens
  CDR3 for alpha chain variable domain of TCR clone 189824 (TRAV8-3, TRAJ21)
CAVGAYNFNKFYL

SEQ ID NO: 379648 - protein, 16 aa, Homo sapiens
  CDR3 for beta chain variable domain of TCR clone 189824 (TRBV10-2, TRBJ1-1)
CASSEVGEGASTEAFF

SEQ ID NO: 379649 - protein, 19 aa, Homo sapiens
  CDR3 for alpha chain variable domain of TCR clone 189825 (TRAV8-3, TRAJ34)
LSTSVLWVWGLRNTDKLIF

SEQ ID NO: 379650 - protein, 13 aa, Homo sapiens
  CDR3 for beta chain variable domain of TCR clone 189825 (TRBV12-4, TRBJ2-7)
CASSLSGVYEQYI

SEQ ID NO: 379651 - protein, 12 aa, Homo sapiens
  CDR3 for alpha chain variable domain of TCR clone 189826 (TRAV16, TRAJ36)
CALKTGANNLFF

SEQ ID NO: 379652 - protein, 12 aa, Homo sapiens
  CDR3 for beta chain variable domain of TCR clone 189826 (TRBV5-1, TRBJ2-7)
CASSLDSYEQYF

SEQ ID NO: 379653 - protein, 13 aa, Homo sapiens
  CDR3 for alpha chain variable domain of TCR clone 189827 (TRAV8-6, TRAJ9)
CAVWDTGGFKTIF

SEQ ID NO: 379654 - protein, 12 aa, Homo sapiens
  CDR3 for beta chain variable domain of TCR clone 189827 (TRBV14, TRBJ1-1)
CASSQLKGLAFF

SEQ ID NO: 379655 - protein, 12 aa, Homo sapiens
  CDR3 for alpha chain variable domain of TCR clone 189828 (TRAV12-3, TRAJ17)
CAMTLTGNKLTF

SEQ ID NO: 379656 - protein, 14 aa, Homo sapiens
  CDR3 for beta chain variable domain of TCR clone 189828 (TRBV13, TRBJ2-5)
CASYRRLAEETQYF

SEQ ID NO: 379657 - protein, 14 aa, Homo sapiens
  CDR3 for alpha chain variable domain of TCR clone 189829 (TRAV12-2, TRAJ45)
CAVYSGGGADGLTF

SEQ ID NO: 379658 - protein, 15 aa, Homo sapiens
  CDR3 for beta chain variable domain of TCR clone 189829 (TRBV4-1, TRBJ1-4)
CASSDTGGTNEKLLF

SEQ ID NO: 379659 - protein, 15 aa, Homo sapiens
  CDR3 for alpha chain variable domain of TCR clone 189830 (TRAV26-2, TRAJ54)
CILRDVGQGAQKLVF

SEQ ID NO: 379660 - protein, 15 aa, Homo sapiens
  CDR3 for beta chain variable domain of TCR clone 189830 (TRBV11-2, TRBJ2-1)
CASSLGTSGLNEQFF

SEQ ID NO: 379661 - protein, 18 aa, Homo sapiens
  CDR3 for alpha chain variable domain of TCR clone 189831 (TRAV21, TRAJ52)
CAVRPSPADGTSYGKLTF

SEQ ID NO: 379662 - protein, 14 aa, Homo sapiens
  CDR3 for beta chain variable domain of TCR clone 189831 (TRBV6-1, TRBJ1-3)
CASVQGGGGNTIYF

SEQ ID NO: 379663 - protein, 15 aa, Homo sapiens
  CDR3 for alpha chain variable domain of TCR clone 189832 (TRAV26-1, TRAJ29)
CIVSVEVSGNTPLVF

SEQ ID NO: 379664 - protein, 15 aa, Homo sapiens
  CDR3 for beta chain variable domain of TCR clone 189832 (TRBV7-9, TRBJ1-5)
CASSQGHQPNQPQHF

SEQ ID NO: 379665 - protein, 14 aa, Homo sapiens
  CDR3 for alpha chain variable domain of TCR clone 189833 (TRAV17, TRAJ34)
CATYSLEGPDKLIF

SEQ ID NO: 379666 - protein, 15 aa, Homo sapiens
  CDR3 for beta chain variable domain of TCR clone 189833 (TRBV9, TRBJ1-6)
CASSVAGTGDSPLHF

SEQ ID NO: 379667 - protein, 15 aa, Homo sapiens
  CDR3 for alpha chain variable domain of TCR clone 189834 (TRAV23/DV6, TRAJ4)
CAASPLRGGYNKLIF

SEQ ID NO: 379668 - protein, 15 aa, Homo sapiens
  CDR3 for beta chain variable domain of TCR clone 189834 (TRBV7-9, TRBJ1-6)
CGSSSPGRGNSPLHF

SEQ ID NO: 379669 - protein, 13 aa, Homo sapiens
  CDR3 for alpha chain variable domain of TCR clone 189835 (TRAV27, TRAJ49)
CAPRPYNGNQFYF

SEQ ID NO: 379670 - protein, 18 aa, Homo sapiens
  CDR3 for beta chain variable domain of TCR clone 189835 (TRBV7-3, TRBJ2-5)
CASSLGGAAQGRWETQYF

SEQ ID NO: 379671 - protein, 13 aa, Homo sapiens
  CDR3 for alpha chain variable domain of TCR clone 189836 (TRAV20, TRAJ34)
CAVQNERARQAHL

SEQ ID NO: 379672 - protein, 18 aa, Homo sapiens
  CDR3 for beta chain variable domain of TCR clone 189836 (TRBV18, TRBJ1-3)
CASSPRGGAGPSGNTIYF

SEQ ID NO: 379673 - protein, 12 aa, Homo sapiens
  CDR3 for alpha chain variable domain of TCR clone 189837 (TRAV4, TRAJ31)
CLVGDMRARLMF

SEQ ID NO: 379674 - protein, 12 aa, Homo sapiens
  CDR3 for beta chain variable domain of TCR clone 189837 (TRBV7-9, TRBJ1-5)
CASSPQGQPQHF

SEQ ID NO: 379675 - protein, 18 aa, Homo sapiens
  CDR3 for alpha chain variable domain of TCR clone 189838 (TRAV12-1, TRAJ52)
CVVKLINAGGNSYGKLTF

SEQ ID NO: 379676 - protein, 16 aa, Homo sapiens
  CDR3 for beta chain variable domain of TCR clone 189838 (TRBV7-6, TRBJ2-7)
CASSGGTGALSYEQYF

SEQ ID NO: 379677 - protein, 10 aa, Homo sapiens
  CDR3 for alpha chain variable domain of TCR clone 189839 (TRAV12-3, TRAJ18)
CAMSAEAQPW

SEQ ID NO: 379678 - protein, 14 aa, Homo sapiens
  CDR3 for beta chain variable domain of TCR clone 189839 (TRBV20-1, TRBJ1-1)
CSAQTRIGGTEAFF

SEQ ID NO: 379679 - protein, 13 aa, Homo sapiens
  CDR3 for alpha chain variable domain of TCR clone 189840 (TRAV20, TRAJ42)
CAVQGGSQGNLIF

SEQ ID NO: 379680 - protein, 14 aa, Homo sapiens
  CDR3 for beta chain variable domain of TCR clone 189840 (TRBV6-1, TRBJ1-3)
CASVQGGGGNTIYF

SEQ ID NO: 379681 - protein, 12 aa, Homo sapiens
  CDR3 for alpha chain variable domain of TCR clone 189841 (TRAV12-1, TRAJ31)
CVSWNNNARLMF

SEQ ID NO: 379682 - protein, 15 aa, Homo sapiens
  CDR3 for beta chain variable domain of TCR clone 189841 (TRBV7-2, TRBJ1-5)
CASSLDRGQVQPQHF

SEQ ID NO: 379683 - protein, 14 aa, Homo sapiens
  CDR3 for alpha chain variable domain of TCR clone 189842 (TRAV26-1, TRAJ38)
CIADNAGNNRKLIW

SEQ ID NO: 379684 - protein, 15 aa, Homo sapiens
  CDR3 for beta chain variable domain of TCR clone 189842 (TRBV19, TRBJ1-6)
CASSTQGAVGSPLHF

SEQ ID NO: 379685 - protein, 18 aa, Homo sapiens
  CDR3 for alpha chain variable domain of TCR clone 189843 (TRAV16, TRAJ45)
CAQASYPSSGGGADGLTF

SEQ ID NO: 379686 - protein, 16 aa, Homo sapiens
  CDR3 for beta chain variable domain of TCR clone 189843 (TRBV7-9, TRBJ1-2)
CASSLGFSSGEDGYTF

SEQ ID NO: 379687 - protein, 16 aa, Homo sapiens
  CDR3 for alpha chain variable domain of TCR clone 189844 (TRAV30, TRAJ24)
CGTGIVDADSWGKFQF

SEQ ID NO: 379688 - protein, 16 aa, Homo sapiens
  CDR3 for beta chain variable domain of TCR clone 189844 (TRBV7-9, TRBJ1-2)
CASSLGFSSGEDGYTF

SEQ ID NO: 379689 - protein, 15 aa, Homo sapiens
  CDR3 for alpha chain variable domain of TCR clone 189845 (TRAV3, TRAJ5)
CAVRDLDTGRIALTF

SEQ ID NO: 379690 - protein, 14 aa, Homo sapiens
  CDR3 for beta chain variable domain of TCR clone 189845 (TRBV25-1, TRBJ1-1)
CASTHLGGNTEAFF

SEQ ID NO: 379691 - protein, 14 aa, Homo sapiens
  CDR3 for alpha chain variable domain of TCR clone 189846 (TRAV26-2, TRAJ32)
CILFRGGATNKLIF

SEQ ID NO: 379692 - protein, 15 aa, Homo sapiens
  CDR3 for beta chain variable domain of TCR clone 189846 (TRBV5-1, TRBJ1-1)
CASSLSDLGGTEAFF

SEQ ID NO: 379693 - protein, 12 aa, Homo sapiens
  CDR3 for alpha chain variable domain of TCR clone 189847 (TRAV8-3, TRAJ27)
CAVGTIQANQPL

SEQ ID NO: 379694 - protein, 13 aa, Homo sapiens
  CDR3 for beta chain variable domain of TCR clone 189847 (TRBV24-1, TRBJ2-2)
CATSETNTGELFF

SEQ ID NO: 379695 - protein, 13 aa, Homo sapiens
  CDR3 for alpha chain variable domain of TCR clone 189848 (TRAV12-3, TRAJ33)
CAMSVNNNYQLIW

SEQ ID NO: 379696 - protein, 13 aa, Homo sapiens
  CDR3 for beta chain variable domain of TCR clone 189848 (TRBV4-2, TRBJ1-1)
CASSQAGNTEAFF

SEQ ID NO: 379697 - protein, 14 aa, Homo sapiens
  CDR3 for alpha chain variable domain of TCR clone 189849 (TRAV3, TRAJ9)
CAVRLNTGGFKTIF

SEQ ID NO: 379698 - protein, 14 aa, Homo sapiens
  CDR3 for beta chain variable domain of TCR clone 189849 (TRBV7-9, TRBJ1-1)
CASTPLQSYTGAFF

SEQ ID NO: 379699 - protein, 11 aa, Homo sapiens
  CDR3 for alpha chain variable domain of TCR clone 189850 (TRAV16, TRAJ49)
CALGTGNQFYF

SEQ ID NO: 379700 - protein, 13 aa, Homo sapiens
  CDR3 for beta chain variable domain of TCR clone 189850 (TRBV7-3, TRBJ1-1)
CASSQDWGAEAFF

SEQ ID NO: 379701 - protein, 15 aa, Homo sapiens
  CDR3 for alpha chain variable domain of TCR clone 189851 (TRAV12-3, TRAJ6)
CAMSATTGGSYIPTF

SEQ ID NO: 379702 - protein, 15 aa, Homo sapiens
  CDR3 for beta chain variable domain of TCR clone 189851 (TRBV5-1, TRBJ2-7)
CASSLTGGPAREQYF

SEQ ID NO: 379703 - protein, 16 aa, Homo sapiens
  CDR3 for alpha chain variable domain of TCR clone 189852 (TRAV4, TRAJ37)
CLVGWFGSSNTGTLIF

SEQ ID NO: 379704 - protein, 15 aa, Homo sapiens
  CDR3 for beta chain variable domain of TCR clone 189852 (TRBV12-4, TRBJ2-3)
CASSLAERPTDTQYF

SEQ ID NO: 379705 - protein, 14 aa, Homo sapiens
  CDR3 for alpha chain variable domain of TCR clone 189853 (TRAV34, TRAJ44)
CGADGTGTASKLTF

SEQ ID NO: 379706 - protein, 12 aa, Homo sapiens
  CDR3 for beta chain variable domain of TCR clone 189853 (TRBV14, TRBJ1-1)
CASSQLKGLAFF

SEQ ID NO: 379707 - protein, 14 aa, Homo sapiens
  CDR3 for alpha chain variable domain of TCR clone 189854 (TRAV1-2, TRAJ16)
CSVNRFSDGQKLLF

SEQ ID NO: 379708 - protein, 13 aa, Homo sapiens
  CDR3 for beta chain variable domain of TCR clone 189854 (TRBV7-3, TRBJ1-1)
CASSQDWGAEAFF

SEQ ID NO: 379709 - protein, 15 aa, Homo sapiens
  CDR3 for alpha chain variable domain of TCR clone 189855 (TRAV26-1, TRAJ9)
CIVRESNTGGFKTNF

SEQ ID NO: 379710 - protein, 11 aa, Homo sapiens
  CDR3 for beta chain variable domain of TCR clone 189855 (TRBV7-6, TRBJ2-5)
CASSFQETQYF

SEQ ID NO: 379711 - protein, 22 aa, Homo sapiens
  CDR3 for alpha chain variable domain of TCR clone 189856 (TRAV8-3, TRAJ32)
CAVEVGLQTSSSLEMALCLLSS

SEQ ID NO: 379712 - protein, 12 aa, Homo sapiens
  CDR3 for beta chain variable domain of TCR clone 189856 (TRBV7-8, TRBJ2-7)
CASSLGDREQYF

SEQ ID NO: 379713 - protein, 12 aa, Homo sapiens
  CDR3 for alpha chain variable domain of TCR clone 189857 (TRAV12-2, TRAJ20)
CAVNRNDYKLSF

SEQ ID NO: 379714 - protein, 14 aa, Homo sapiens
  CDR3 for beta chain variable domain of TCR clone 189857 (TRBV7-3, TRBJ2-1)
CASSLAGGTNEQFV

SEQ ID NO: 379715 - protein, 14 aa, Homo sapiens
  CDR3 for alpha chain variable domain of TCR clone 189858 (TRAV38-1, TRAJ45)
CASHSGGGADGLTF

SEQ ID NO: 379716 - protein, 15 aa, Homo sapiens
  CDR3 for beta chain variable domain of TCR clone 189858 (TRBV7-2, TRBJ1-1)
CASSFAGDRDTEAFF

SEQ ID NO: 379717 - protein, 22 aa, Homo sapiens
  CDR3 for alpha chain variable domain of TCR clone 189859 (TRAV27, TRAJ38)
CAARRNAGNNHIQNPDPAVYQL

SEQ ID NO: 379718 - protein, 13 aa, Homo sapiens
  CDR3 for beta chain variable domain of TCR clone 189859 (TRBV20-1, TRBJ2-7)
CSARPSTNYEQYF

SEQ ID NO: 379719 - protein, 19 aa, Homo sapiens
  CDR3 for alpha chain variable domain of TCR clone 189860 (TRAV1-1, TRAJ13)
CLLLMRCEGESGGYQKVTF

SEQ ID NO: 379720 - protein, 19 aa, Homo sapiens
  CDR3 for beta chain variable domain of TCR clone 189860 (TRBV14, TRBJ2-1)
CASSQDQLWEAPEYNEQFF

SEQ ID NO: 379721 - protein, 14 aa, Homo sapiens
  CDR3 for alpha chain variable domain of TCR clone 189861 (TRAV8-3, TRAJ6)
CAVGASGGSYIPTF

SEQ ID NO: 379722 - protein, 14 aa, Homo sapiens
  CDR3 for beta chain variable domain of TCR clone 189861 (TRBV7-8, TRBJ2-3)
CASSLEAGTDTQYF

SEQ ID NO: 379723 - protein, 11 aa, Homo sapiens
  CDR3 for alpha chain variable domain of TCR clone 189862 (TRAV20, TRAJ39)
CAVKCRQHAHL

SEQ ID NO: 379724 - protein, 15 aa, Homo sapiens
  CDR3 for beta chain variable domain of TCR clone 189862 (TRBV20-1, TRBJ2-7)
CSARDRVSGMDEQYF

SEQ ID NO: 379725 - protein, 17 aa, Homo sapiens
  CDR3 for alpha chain variable domain of TCR clone 189863 (TRAV3, TRAJ12)
CAVRDGGRMDSSYKLIF

SEQ ID NO: 379726 - protein, 14 aa, Homo sapiens
  CDR3 for beta chain variable domain of TCR clone 189863 (TRBV7-9, TRBJ2-1)
CASSPRDSLYEQLF

SEQ ID NO: 379727 - protein, 14 aa, Homo sapiens
  CDR3 for alpha chain variable domain of TCR clone 189864 (TRAV13-1, TRAJ10)
CAASLTGGGNKLTF

SEQ ID NO: 379728 - protein, 18 aa, Homo sapiens
  CDR3 for beta chain variable domain of TCR clone 189864 (TRBV20-1, TRBJ1-6)
CSASPAQTASSYNSPLHF

SEQ ID NO: 379729 - protein, 14 aa, Homo sapiens
  CDR3 for alpha chain variable domain of TCR clone 189865 (TRAV29/DV5, TRAJ48)
CAAMALFGNEKLTF

SEQ ID NO: 379730 - protein, 15 aa, Homo sapiens
  CDR3 for beta chain variable domain of TCR clone 189865 (TRBV7-2, TRBJ2-1)
CASTHGTGIYNKQFF

SEQ ID NO: 379731 - protein, 14 aa, Homo sapiens
  CDR3 for alpha chain variable domain of TCR clone 189866 (TRAV23/DV6, TRAJ8)
CAASKATGFQKLVF

SEQ ID NO: 379732 - protein, 15 aa, Homo sapiens
  CDR3 for beta chain variable domain of TCR clone 189866 (TRBV28, TRBJ2-3)
CASSPDRQGAKTQYF

SEQ ID NO: 379733 - protein, 14 aa, Homo sapiens
  CDR3 for alpha chain variable domain of TCR clone 189867 (TRAV1-2, TRAJ8)
CAVRGDTGFQKLVF

SEQ ID NO: 379734 - protein, 14 aa, Homo sapiens
  CDR3 for beta chain variable domain of TCR clone 189867 (TRBV7-2, TRBJ2-7)
CASSLYPGRYEQYF

SEQ ID NO: 379735 - protein, 15 aa, Homo sapiens
  CDR3 for alpha chain variable domain of TCR clone 189868 (TRAV3, TRAJ17)
CAVRDTGAAGNKLTF

SEQ ID NO: 379736 - protein, 14 aa, Homo sapiens
  CDR3 for beta chain variable domain of TCR clone 189868 (TRBV6-3, TRBJ1-1)
CASSNLLPGAEACF

SEQ ID NO: 379737 - protein, 15 aa, Homo sapiens
  CDR3 for alpha chain variable domain of TCR clone 189869 (TRAV2, TRAJ24)
CAVVRMKNSWGKWQF

SEQ ID NO: 379738 - protein, 16 aa, Homo sapiens
  CDR3 for beta chain variable domain of TCR clone 189869 (TRBV7-7, TRBJ2-3)
CASSPGTSGSTDTQYF

SEQ ID NO: 379739 - protein, 13 aa, Homo sapiens
  CDR3 for alpha chain variable domain of TCR clone 189870 (TRAV13-1, TRAJ21)
CAASIYNFNKFYF

SEQ ID NO: 379740 - protein, 15 aa, Homo sapiens
  CDR3 for beta chain variable domain of TCR clone 189870 (TRBV5-1, TRBJ2-6)
CASSLDPSGANVLTF

SEQ ID NO: 379741 - protein, 13 aa, Homo sapiens
  CDR3 for alpha chain variable domain of TCR clone 189871 (TRAV8-4, TRAJ30)
CAVSVNRDDKIIF

SEQ ID NO: 379742 - protein, 12 aa, Homo sapiens
  CDR3 for beta chain variable domain of TCR clone 189871 (TRBV3-1, TRBJ2-2)
CQPARGSGELFF

SEQ ID NO: 379743 - protein, 12 aa, Homo sapiens
  CDR3 for alpha chain variable domain of TCR clone 189872 (TRAV13-1, TRAJ26)
CAASLYGQNFVF

SEQ ID NO: 379744 - protein, 12 aa, Homo sapiens
  CDR3 for beta chain variable domain of TCR clone 189872 (TRBV11-2, TRBJ2-1)
CASSPGNNEQFF

SEQ ID NO: 379745 - protein, 12 aa, Homo sapiens
  CDR3 for alpha chain variable domain of TCR clone 189873 (TRAV13-1, TRAJ21)
CAAKEGFNKFYF

SEQ ID NO: 379746 - protein, 16 aa, Homo sapiens
  CDR3 for beta chain variable domain of TCR clone 189873 (TRBV11-2, TRBJ1-2)
CASSLDTGGADYGYAF

SEQ ID NO: 379747 - protein, 14 aa, Homo sapiens
  CDR3 for alpha chain variable domain of TCR clone 189874 (TRAV4, TRAJ26)
CLVGPNNYGQNFVF

SEQ ID NO: 379748 - protein, 17 aa, Homo sapiens
  CDR3 for beta chain variable domain of TCR clone 189874 (TRBV24-1, TRBJ2-1)
CASSDVSTSGTYNEQFF

SEQ ID NO: 379749 - protein, 14 aa, Homo sapiens
  CDR3 for alpha chain variable domain of TCR clone 189875 (TRAV1-2, TRAJ16)
CAVNRFSDGQKLLF

SEQ ID NO: 379750 - protein, 19 aa, Homo sapiens
  CDR3 for beta chain variable domain of TCR clone 189875 (TRBV7-2, TRBJ2-3)
CASSLRPGTGRIVVGEQCF

SEQ ID NO: 379751 - protein, 14 aa, Homo sapiens
  CDR3 for alpha chain variable domain of TCR clone 189876 (TRAV17, TRAJ4)
CATAPLGGYNKLIF

SEQ ID NO: 379752 - protein, 13 aa, Homo sapiens
  CDR3 for beta chain variable domain of TCR clone 189876 (TRBV7-3, TRBJ1-1)
CASSQDWGAEAFF

SEQ ID NO: 379753 - protein, 12 aa, Homo sapiens
  CDR3 for alpha chain variable domain of TCR clone 189877 (TRAV27, TRAJ41)
CAGRNSGYALDF

SEQ ID NO: 379754 - protein, 13 aa, Homo sapiens
  CDR3 for beta chain variable domain of TCR clone 189877 (TRBV12-4, TRBJ1-1)
CASSPGTGFEAFF

SEQ ID NO: 379755 - protein, 11 aa, Homo sapiens
  CDR3 for alpha chain variable domain of TCR clone 189878 (TRAV35, TRAJ30)
CAGPGDDKYIF

SEQ ID NO: 379756 - protein, 14 aa, Homo sapiens
  CDR3 for beta chain variable domain of TCR clone 189878 (TRBV7-6, TRBJ1-6)
CASSQAGGGSPLHF

SEQ ID NO: 379757 - protein, 19 aa, Homo sapiens
  CDR3 for alpha chain variable domain of TCR clone 189879 (TRAV26-1, TRAJ22)
CCVLLHRWVFSGSAWQLTF

SEQ ID NO: 379758 - protein, 19 aa, Homo sapiens
  CDR3 for beta chain variable domain of TCR clone 189879 (TRBV19, TRBJ2-5)
CASSIGQVTDFFLGETQYF

SEQ ID NO: 379759 - protein, 12 aa, Homo sapiens
  CDR3 for alpha chain variable domain of TCR clone 189880 (TRAV2, TRAJ10)
CASTGGGNKLTF

SEQ ID NO: 379760 - protein, 16 aa, Homo sapiens
  CDR3 for beta chain variable domain of TCR clone 189880 (TRBV2, TRBJ2-3)
CASSTSVEGVTDTQYF

SEQ ID NO: 379761 - protein, 11 aa, Homo sapiens
  CDR3 for alpha chain variable domain of TCR clone 189881 (TRAV2, TRAJ40)
CAVEDPGNLQI

SEQ ID NO: 379762 - protein, 14 aa, Homo sapiens
  CDR3 for beta chain variable domain of TCR clone 189881 (TRBV19, TRBJ2-2)
CASNTLHRSGELFF

SEQ ID NO: 379763 - protein, 14 aa, Homo sapiens
  CDR3 for alpha chain variable domain of TCR clone 189882 (TRAV13-1, TRAJ35)
CAASKGGFGNVLHC

SEQ ID NO: 379764 - protein, 15 aa, Homo sapiens
  CDR3 for beta chain variable domain of TCR clone 189882 (TRBV4-3, TRBJ2-7)
CASSQGGRGIYEQYF

SEQ ID NO: 379765 - protein, 12 aa, Homo sapiens
  CDR3 for alpha chain variable domain of TCR clone 189883 (TRAV3, TRAJ27)
CAVRDKAGKSTF

SEQ ID NO: 379766 - protein, 16 aa, Homo sapiens
  CDR3 for beta chain variable domain of TCR clone 189883 (TRBV28, TRBJ2-1)
CASRRSGRVVGNEQFF

SEQ ID NO: 379767 - protein, 14 aa, Homo sapiens
  CDR3 for alpha chain variable domain of TCR clone 189884 (TRAV12-3, TRAJ9)
CAMSGETGGFKTIF

SEQ ID NO: 379768 - protein, 14 aa, Homo sapiens
  CDR3 for beta chain variable domain of TCR clone 189884 (TRBV7-2, TRBJ2-7)
CASRSQGAAYEQYF

SEQ ID NO: 379769 - protein, 15 aa, Homo sapiens
  CDR3 for alpha chain variable domain of TCR clone 189885 (TRAV3, TRAJ4)
CAVRDGTVGYNKLIF

SEQ ID NO: 379770 - protein, 15 aa, Homo sapiens
  CDR3 for beta chain variable domain of TCR clone 189885 (TRBV27, TRBJ2-7)
CASSPDQGRLYEQYF

SEQ ID NO: 379771 - protein, 15 aa, Homo sapiens
  CDR3 for alpha chain variable domain of TCR clone 189886 (TRAV12-3, TRAJ49)
CAMAVTPNTGNQFYF

SEQ ID NO: 379772 - protein, 18 aa, Homo sapiens
  CDR3 for beta chain variable domain of TCR clone 189886 (TRBV4-1, TRBJ1-5)
SASSQDPRGQGLNQPQHF

SEQ ID NO: 379773 - protein, 16 aa, Homo sapiens
  CDR3 for alpha chain variable domain of TCR clone 189887 (TRAV12-1, TRAJ48)
CVVNMVSNFGNEKLTF

SEQ ID NO: 379774 - protein, 18 aa, Homo sapiens
  CDR3 for beta chain variable domain of TCR clone 189887 (TRBV11-2, TRBJ2-6)
CASSFNPFLGTGANVLTF

SEQ ID NO: 379775 - protein, 17 aa, Homo sapiens
  CDR3 for alpha chain variable domain of TCR clone 189888 (TRAV29/DV5, TRAJ53)
CAASRGNSGGSNYKLTF

SEQ ID NO: 379776 - protein, 16 aa, Homo sapiens
  CDR3 for beta chain variable domain of TCR clone 189888 (TRBV2, TRBJ2-3)
CASSTSVEGVTDTQYF

SEQ ID NO: 379777 - protein, 12 aa, Homo sapiens
  CDR3 for alpha chain variable domain of TCR clone 189889 (TRAV12-3, TRAJ20)
CAMVRGDYKLSF

SEQ ID NO: 379778 - protein, 13 aa, Homo sapiens
  CDR3 for beta chain variable domain of TCR clone 189889 (TRBV23-1, TRBJ1-4)
CASRGKFNGKLFF

SEQ ID NO: 379779 - protein, 13 aa, Homo sapiens
  CDR3 for alpha chain variable domain of TCR clone 189890 (TRAV8-6, TRAJ41)
CAVSENSGYALNF

SEQ ID NO: 379780 - protein, 15 aa, Homo sapiens
  CDR3 for beta chain variable domain of TCR clone 189890 (TRBV7-3, TRBJ2-1)
CASSPTGGGEVEQFF

SEQ ID NO: 379781 - protein, 15 aa, Homo sapiens
  CDR3 for alpha chain variable domain of TCR clone 189891 (TRAV17, TRAJ57)
CATGPSHGGSEKLVF

SEQ ID NO: 379782 - protein, 16 aa, Homo sapiens
  CDR3 for beta chain variable domain of TCR clone 189891 (TRBV12-4, TRBJ1-5)
CASSRPVGWSNQPQHF

SEQ ID NO: 379783 - protein, 15 aa, Homo sapiens
  CDR3 for alpha chain variable domain of TCR clone 189892 (TRAV26-2, TRAJ39)
CSLRGNNNAGNMLTF

SEQ ID NO: 379784 - protein, 15 aa, Homo sapiens
  CDR3 for beta chain variable domain of TCR clone 189892 (TRBV5-4, TRBJ1-1)
CASSSLGWANTEDFF

SEQ ID NO: 379785 - protein, 22 aa, Homo sapiens
  CDR3 for alpha chain variable domain of TCR clone 189893 (TRAV1-1, TRAJ30)
CAVSDQTEMTRSSLEKGHDFIF

SEQ ID NO: 379786 - protein, 12 aa, Homo sapiens
  CDR3 for beta chain variable domain of TCR clone 189893 (TRBV28, TRBJ2-6)
CAIQAGANDLTF

SEQ ID NO: 379787 - protein, 12 aa, Homo sapiens
  CDR3 for alpha chain variable domain of TCR clone 189894 (TRAV12-3, TRAJ39)
CAMTQAGNMLTF

SEQ ID NO: 379788 - protein, 13 aa, Homo sapiens
  CDR3 for beta chain variable domain of TCR clone 189894 (TRBV20-1, TRBJ1-1)
CRAPEGGNTEAFF

SEQ ID NO: 379789 - protein, 14 aa, Homo sapiens
  CDR3 for alpha chain variable domain of TCR clone 189895 (TRAV12-3, TRAJ13)
CSTLDAGGYQKVTF

SEQ ID NO: 379790 - protein, 13 aa, Homo sapiens
  CDR3 for beta chain variable domain of TCR clone 189895 (TRBV2, TRBJ2-7)
CASRINTGWEQYF

SEQ ID NO: 379791 - protein, 13 aa, Homo sapiens
  CDR3 for alpha chain variable domain of TCR clone 189896 (TRAV38-2/DV8, TRAJ34)
CAYRTWNTDKLIF

SEQ ID NO: 379792 - protein, 14 aa, Homo sapiens
  CDR3 for beta chain variable domain of TCR clone 189896 (TRBV7-2, TRBJ2-7)
CASRSHGAAYEQYF

SEQ ID NO: 379793 - protein, 15 aa, Homo sapiens
  CDR3 for alpha chain variable domain of TCR clone 189897 (TRAV12-3, TRAJ45)
CAMSWGGGGADGLTF

SEQ ID NO: 379794 - protein, 18 aa, Homo sapiens
  CDR3 for beta chain variable domain of TCR clone 189897 (TRBV25-1, TRBJ1-2)
CASSGLQNGQGLIFGYTF

SEQ ID NO: 379795 - protein, 13 aa, Homo sapiens
  CDR3 for alpha chain variable domain of TCR clone 189898 (TRAV3, TRAJ21)
CAVREPDFNKFYF

SEQ ID NO: 379796 - protein, 16 aa, Homo sapiens
  CDR3 for beta chain variable domain of TCR clone 189898 (TRBV7-2, TRBJ2-6)
CASSLAGRSAANVLTF

SEQ ID NO: 379797 - protein, 16 aa, Homo sapiens
  CDR3 for alpha chain variable domain of TCR clone 189899 (TRAV12-1, TRAJ53)
CVVTSVAGGSNYKLTF

SEQ ID NO: 379798 - protein, 16 aa, Homo sapiens
  CDR3 for beta chain variable domain of TCR clone 189899 (TRBV2, TRBJ2-3)
CASRRRTRESTDTQYF

SEQ ID NO: 379799 - protein, 15 aa, Homo sapiens
  CDR3 for alpha chain variable domain of TCR clone 189900 (TRAV17, TRAJ56)
CATDADTGANSKLTF

SEQ ID NO: 379800 - protein, 12 aa, Homo sapiens
  CDR3 for beta chain variable domain of TCR clone 189900 (TRBV7-8, TRBJ2-7)
CASSLGDREQYF

SEQ ID NO: 379801 - protein, 15 aa, Homo sapiens
  CDR3 for alpha chain variable domain of TCR clone 189901 (TRAV26-1, TRAJ29)
CIVRVEGSGNTPLVF

SEQ ID NO: 379802 - protein, 16 aa, Homo sapiens
  CDR3 for beta chain variable domain of TCR clone 189901 (TRBV7-3, TRBJ2-2)
CASSSRGGTSTGELFF

SEQ ID NO: 379803 - protein, 13 aa, Homo sapiens
  CDR3 for alpha chain variable domain of TCR clone 189902 (TRAV8-1, TRAJ3)
CAVTYSSASKIIF

SEQ ID NO: 379804 - protein, 14 aa, Homo sapiens
  CDR3 for beta chain variable domain of TCR clone 189902 (TRBV19, TRBJ1-5)
CASSKMTGPQPQHF

SEQ ID NO: 379805 - protein, 13 aa, Homo sapiens
  CDR3 for alpha chain variable domain of TCR clone 189903 (TRAV21, TRAJ33)
CAEAGDSNYQLIW

SEQ ID NO: 379806 - protein, 13 aa, Homo sapiens
  CDR3 for beta chain variable domain of TCR clone 189903 (TRBV10-3, TRBJ2-7)
CASKLAVNYEQYF

SEQ ID NO: 379807 - protein, 11 aa, Homo sapiens
  CDR3 for alpha chain variable domain of TCR clone 189904 (TRAV1-1, TRAJ20)
CAVFNDYKLSF

SEQ ID NO: 379808 - protein, 14 aa, Homo sapiens
  CDR3 for beta chain variable domain of TCR clone 189904 (TRBV19, TRBJ2-1)
CASSKDRGKDEQFF

SEQ ID NO: 379809 - protein, 15 aa, Homo sapiens
  CDR3 for alpha chain variable domain of TCR clone 189905 (TRAV12-2, TRAJ53)
CAVNGGGGSNYKLTF

SEQ ID NO: 379810 - protein, 17 aa, Homo sapiens
  CDR3 for beta chain variable domain of TCR clone 189905 (TRBV7-3, TRBJ2-3)
RASSLMKRMRGAATQYF

SEQ ID NO: 379811 - protein, 14 aa, Homo sapiens
  CDR3 for alpha chain variable domain of TCR clone 189906 (TRAV1-2, TRAJ16)
CAVNRFSDGQKLLF

SEQ ID NO: 379812 - protein, 15 aa, Homo sapiens
  CDR3 for beta chain variable domain of TCR clone 189906 (TRBV11-3, TRBJ2-1)
CASSGGTSSLDEQFF

SEQ ID NO: 379813 - protein, 15 aa, Homo sapiens
  CDR3 for alpha chain variable domain of TCR clone 189907 (TRAV17, TRAJ57)
CATGPPQGGSEKLVL

SEQ ID NO: 379814 - protein, 16 aa, Homo sapiens
  CDR3 for beta chain variable domain of TCR clone 189907 (TRBV12-4, TRBJ1-5)
CASSRPVGGSNQAQHF

SEQ ID NO: 379815 - protein, 15 aa, Homo sapiens
  CDR3 for alpha chain variable domain of TCR clone 189908 (TRAV10, TRAJ3)
CVVSARYSSASKIIF

SEQ ID NO: 379816 - protein, 11 aa, Homo sapiens
  CDR3 for beta chain variable domain of TCR clone 189908 (TRBV19, TRBJ1-2)
CASSISSGYTF

SEQ ID NO: 379817 - protein, 11 aa, Homo sapiens
  CDR3 for alpha chain variable domain of TCR clone 189909 (TRAV3, TRAJ21)
CAVVNFNKFYF

SEQ ID NO: 379818 - protein, 16 aa, Homo sapiens
  CDR3 for beta chain variable domain of TCR clone 189909 (TRBV19, TRBJ2-1)
CASSKAVPSSYNEQFF

SEQ ID NO: 379819 - protein, 14 aa, Homo sapiens
  CDR3 for alpha chain variable domain of TCR clone 189910 (TRAV12-3, TRAJ10)
SHLPLTGGGNKLTF

SEQ ID NO: 379820 - protein, 19 aa, Homo sapiens
  CDR3 for beta chain variable domain of TCR clone 189910 (TRBV7-2, TRBJ2-3)
CASSFLSRNCGGGTDTQYF

SEQ ID NO: 379821 - protein, 16 aa, Homo sapiens
  CDR3 for alpha chain variable domain of TCR clone 189911 (TRAV26-1, TRAJ37)
CIVRGDVSCNTGKLIF

SEQ ID NO: 379822 - protein, 17 aa, Homo sapiens
  CDR3 for beta chain variable domain of TCR clone 189911 (TRBV4-1, TRBJ2-7)
CASSRDPLGVRGGEQYF

SEQ ID NO: 379823 - protein, 12 aa, Homo sapiens
  CDR3 for alpha chain variable domain of TCR clone 189912 (TRAV8-2, TRAJ5)
CVVSDIGRALTF

SEQ ID NO: 379824 - protein, 14 aa, Homo sapiens
  CDR3 for beta chain variable domain of TCR clone 189912 (TRBV19, TRBJ2-7)
CASNFRDTVTGMYF

SEQ ID NO: 379825 - protein, 12 aa, Homo sapiens
  CDR3 for alpha chain variable domain of TCR clone 189913 (TRAV12-3, TRAJ17)
CAMTLTGNKLTF

SEQ ID NO: 379826 - protein, 16 aa, Homo sapiens
  CDR3 for beta chain variable domain of TCR clone 189913 (TRBV11-1, TRBJ2-2)
CGSSAEGLKNTGELFF

SEQ ID NO: 379827 - protein, 14 aa, Homo sapiens
  CDR3 for alpha chain variable domain of TCR clone 189914 (TRAV9-2, TRAJ39)
CALYIYNAGNMLTF

SEQ ID NO: 379828 - protein, 13 aa, Homo sapiens
  CDR3 for beta chain variable domain of TCR clone 189914 (TRBV20-1, TRBJ2-1)
CSASTGTSNEQFF

SEQ ID NO: 379829 - protein, 13 aa, Homo sapiens
  CDR3 for alpha chain variable domain of TCR clone 189915 (TRAV35, TRAJ44)
CAGLSGTASKLTF

SEQ ID NO: 379830 - protein, 14 aa, Homo sapiens
  CDR3 for beta chain variable domain of TCR clone 189915 (TRBV4-1, TRBJ2-2)
CASSQAVNTGELFF

SEQ ID NO: 379831 - protein, 11 aa, Homo sapiens
  CDR3 for alpha chain variable domain of TCR clone 189916 (TRAV12-3, TRAJ43)
CAMSVYNDMRF

SEQ ID NO: 379832 - protein, 14 aa, Homo sapiens
  CDR3 for beta chain variable domain of TCR clone 189916 (TRBV20-1, TRBJ1-1)
SAVLHLGGGTEAFF

SEQ ID NO: 379833 - protein, 21 aa, Homo sapiens
  CDR3 for alpha chain variable domain of TCR clone 189917 (TRAV29/DV5, TRAJ52)
CSVLLCSKRQAGGTSYGKLTF

SEQ ID NO: 379834 - protein, 13 aa, Homo sapiens
  CDR3 for beta chain variable domain of TCR clone 189917 (TRBV27, TRBJ1-4)
CASSLMGDEKLFF

SEQ ID NO: 379835 - protein, 16 aa, Homo sapiens
  CDR3 for alpha chain variable domain of TCR clone 189918 (TRAV12-3, TRAJ53)
CAMSPGSGGSNYRLTF

SEQ ID NO: 379836 - protein, 11 aa, Homo sapiens
  CDR3 for beta chain variable domain of TCR clone 189918 (TRBV29-1, TRBJ2-5)
CSEDRTGTQYC

SEQ ID NO: 379837 - protein, 16 aa, Homo sapiens
  CDR3 for alpha chain variable domain of TCR clone 189919 (TRAV3, TRAJ10)
CAVRDRRAGGGNKLTF

SEQ ID NO: 379838 - protein, 13 aa, Homo sapiens
  CDR3 for beta chain variable domain of TCR clone 189919 (TRBV12-4, TRBJ2-7)
CASSPTETYEQYF

SEQ ID NO: 379839 - protein, 14 aa, Homo sapiens
  CDR3 for alpha chain variable domain of TCR clone 189920 (TRAV38-1, TRAJ43)
CAFMKHTNNNDMRF

SEQ ID NO: 379840 - protein, 17 aa, Homo sapiens
  CDR3 for beta chain variable domain of TCR clone 189920 (TRBV7-7, TRBJ1-4)
CASSLVGQGASNEKLFF

SEQ ID NO: 379841 - protein, 18 aa, Homo sapiens
  CDR3 for alpha chain variable domain of TCR clone 189921 (TRAV21, TRAJ52)
CAVSPSPAGGTSYGKLTF

SEQ ID NO: 379842 - protein, 15 aa, Homo sapiens
  CDR3 for beta chain variable domain of TCR clone 189921 (TRBV20-1, TRBJ2-7)
CSARDRVSGMDEQYF

SEQ ID NO: 379843 - protein, 13 aa, Homo sapiens
  CDR3 for alpha chain variable domain of TCR clone 189922 (TRAV26-1, TRAJ48)
CIVRVVGDEKLTF

SEQ ID NO: 379844 - protein, 17 aa, Homo sapiens
  CDR3 for beta chain variable domain of TCR clone 189922 (TRBV7-9, TRBJ2-5)
CASSPGLAGGGREPQYF

SEQ ID NO: 379845 - protein, 13 aa, Homo sapiens
  CDR3 for alpha chain variable domain of TCR clone 189923 (TRAV12-1, TRAJ40)
CVVPTSGTYEYIF

SEQ ID NO: 379846 - protein, 16 aa, Homo sapiens
  CDR3 for beta chain variable domain of TCR clone 189923 (TRBV7-9, TRBJ1-2)
CASSLGFSSGEDGYTF

SEQ ID NO: 379847 - protein, 14 aa, Homo sapiens
  CDR3 for alpha chain variable domain of TCR clone 189924 (TRAV1-2, TRAJ8)
CAVREDKGFQKLVF

SEQ ID NO: 379848 - protein, 14 aa, Homo sapiens
  CDR3 for beta chain variable domain of TCR clone 189924 (TRBV7-9, TRBJ1-1)
CASTPLQSYTEAFF

SEQ ID NO: 379849 - protein, 14 aa, Homo sapiens
  CDR3 for alpha chain variable domain of TCR clone 189925 (TRAV14/DV4, TRAJ27)
CVPKEGTNAGKSTF

SEQ ID NO: 379850 - protein, 13 aa, Homo sapiens
  CDR3 for beta chain variable domain of TCR clone 189925 (TRBV18, TRBJ2-5)
CASSLQGQETQYF

SEQ ID NO: 379851 - protein, 11 aa, Homo sapiens
  CDR3 for alpha chain variable domain of TCR clone 189926 (TRAV2, TRAJ13)
CTSGGYQKVTF

SEQ ID NO: 379852 - protein, 14 aa, Homo sapiens
  CDR3 for beta chain variable domain of TCR clone 189926 (TRBV18, TRBJ1-2)
CASSPDRVVYGYTF

SEQ ID NO: 379853 - protein, 14 aa, Homo sapiens
  CDR3 for alpha chain variable domain of TCR clone 189927 (TRAV35, TRAJ40)
CAGSTTSGTYKYIF

SEQ ID NO: 379854 - protein, 13 aa, Homo sapiens
  CDR3 for beta chain variable domain of TCR clone 189927 (TRBV20-1, TRBJ1-6)
CSAALGVGSPLHF

SEQ ID NO: 379855 - protein, 10 aa, Homo sapiens
  CDR3 for alpha chain variable domain of TCR clone 189928 (TRAV29/DV5, TRAJ48)
CAAGGEKLTF

SEQ ID NO: 379856 - protein, 13 aa, Homo sapiens
  CDR3 for beta chain variable domain of TCR clone 189928 (TRBV7-9, TRBJ2-5)
CQQLGPDQETQYF

SEQ ID NO: 379857 - protein, 13 aa, Homo sapiens
  CDR3 for alpha chain variable domain of TCR clone 189929 (TRAV21, TRAJ20)
CAVGLRVDYKPSF

SEQ ID NO: 379858 - protein, 15 aa, Homo sapiens
  CDR3 for beta chain variable domain of TCR clone 189929 (TRBV18, TRBJ2-1)
CASSPPSASYNEQFF

SEQ ID NO: 379859 - protein, 16 aa, Homo sapiens
  CDR3 for alpha chain variable domain of TCR clone 189930 (TRAV12-2, TRAJ28)
CAVITDSGAGRYQLTF

SEQ ID NO: 379860 - protein, 13 aa, Homo sapiens
  CDR3 for beta chain variable domain of TCR clone 189930 (TRBV7-9, TRBJ1-2)
CASSLKQNYGYTF

SEQ ID NO: 379861 - protein, 11 aa, Homo sapiens
  CDR3 for alpha chain variable domain of TCR clone 189931 (TRAV17, TRAJ21)
CATGNFNKFYF

SEQ ID NO: 379862 - protein, 16 aa, Homo sapiens
  CDR3 for beta chain variable domain of TCR clone 189931 (TRBV2, TRBJ2-1)
CASSANPRDRQAEQFF

SEQ ID NO: 379863 - protein, 15 aa, Homo sapiens
  CDR3 for alpha chain variable domain of TCR clone 189932 (TRAV8-4, TRAJ7)
CAVSGGNYGNNRLAF

SEQ ID NO: 379864 - protein, 13 aa, Homo sapiens
  CDR3 for beta chain variable domain of TCR clone 189932 (TRBV24-1, TRBJ2-2)
CATSDWSTGELFF

SEQ ID NO: 379865 - protein, 15 aa, Homo sapiens
  CDR3 for alpha chain variable domain of TCR clone 189933 (TRAV13-1, TRAJ17)
CAASIERAAGNKLTF

SEQ ID NO: 379866 - protein, 14 aa, Homo sapiens
  CDR3 for beta chain variable domain of TCR clone 189933 (TRBV18, TRBJ2-5)
CASSPGVSQETQYF

SEQ ID NO: 379867 - protein, 14 aa, Homo sapiens
  CDR3 for alpha chain variable domain of TCR clone 189934 (TRAV2, TRAJ9)
CAVEDRSGGFNTIF

SEQ ID NO: 379868 - protein, 15 aa, Homo sapiens
  CDR3 for beta chain variable domain of TCR clone 189934 (TRBV11-3, TRBJ2-3)
CASSAGTVVTNTQYF

SEQ ID NO: 379869 - protein, 14 aa, Homo sapiens
  CDR3 for alpha chain variable domain of TCR clone 189935 (TRAV13-1, TRAJ13)
CAASRVGGYQKVTF

SEQ ID NO: 379870 - protein, 17 aa, Homo sapiens
  CDR3 for beta chain variable domain of TCR clone 189935 (TRBV28, TRBJ2-5)
CASSTPEGDALQETQYF

SEQ ID NO: 379871 - protein, 14 aa, Homo sapiens
  CDR3 for alpha chain variable domain of TCR clone 189936 (TRAV8-2, TRAJ45)
CVVSAGGGADGLTF

SEQ ID NO: 379872 - protein, 12 aa, Homo sapiens
  CDR3 for beta chain variable domain of TCR clone 189936 (TRBV12-4, TRBJ2-1)
CASSLVRDEQFF

SEQ ID NO: 379873 - protein, 14 aa, Homo sapiens
  CDR3 for alpha chain variable domain of TCR clone 189937 (TRAV1-2, TRAJ16)
CAVNRFSDGQKLLF

SEQ ID NO: 379874 - protein, 16 aa, Homo sapiens
  CDR3 for beta chain variable domain of TCR clone 189937 (TRBV13, TRBJ2-7)
CASSSRESGRTYEQYF

SEQ ID NO: 379875 - protein, 12 aa, Homo sapiens
  CDR3 for alpha chain variable domain of TCR clone 189938 (TRAV13-2, TRAJ23)
CAERHRGGKLIF

SEQ ID NO: 379876 - protein, 16 aa, Homo sapiens
  CDR3 for beta chain variable domain of TCR clone 189938 (TRBV7-6, TRBJ2-7)
CASSGGTGALSYEQYF

SEQ ID NO: 379877 - protein, 20 aa, Homo sapiens
  CDR3 for alpha chain variable domain of TCR clone 189939 (TRAV12-3, TRAJ41)
SLFIRDSQPSDSATPEALNF

SEQ ID NO: 379878 - protein, 14 aa, Homo sapiens
  CDR3 for beta chain variable domain of TCR clone 189939 (TRBV5-1, TRBJ2-5)
CASSFGGSQETQYF

SEQ ID NO: 379879 - protein, 16 aa, Homo sapiens
  CDR3 for alpha chain variable domain of TCR clone 189940 (TRAV3, TRAJ37)
CAVRGKWSGNTGKLIF

SEQ ID NO: 379880 - protein, 20 aa, Homo sapiens
  CDR3 for beta chain variable domain of TCR clone 189940 (TRBV7-8, TRBJ2-2)
CASSHLFPGPTIHITGELFF

SEQ ID NO: 379881 - protein, 13 aa, Homo sapiens
  CDR3 for alpha chain variable domain of TCR clone 189941 (TRAV12-3, TRAJ7)
CAMTPYGNNILAF

SEQ ID NO: 379882 - protein, 16 aa, Homo sapiens
  CDR3 for beta chain variable domain of TCR clone 189941 (TRBV20-1, TRBJ1-4)
CSARPYGGELNEKLFF

SEQ ID NO: 379883 - protein, 18 aa, Homo sapiens
  CDR3 for alpha chain variable domain of TCR clone 189942 (TRAV12-3, TRAJ52)
CAMSVGGAGGTSYGKLTF

SEQ ID NO: 379884 - protein, 13 aa, Homo sapiens
  CDR3 for beta chain variable domain of TCR clone 189942 (TRBV10-3, TRBJ1-2)
CAISERDSYGYTF

SEQ ID NO: 379885 - protein, 16 aa, Homo sapiens
  CDR3 for alpha chain variable domain of TCR clone 189943 (TRAV30, TRAJ24)
RGTEIVDADSWGKFQF

SEQ ID NO: 379886 - protein, 16 aa, Homo sapiens
  CDR3 for beta chain variable domain of TCR clone 189943 (TRBV7-3, TRBJ2-2)
CASSLKRGTLSGELFF

SEQ ID NO: 379887 - protein, 10 aa, Homo sapiens
  CDR3 for alpha chain variable domain of TCR clone 189944 (TRAV12-1, TRAJ37)
ARGNTGKLIF

SEQ ID NO: 379888 - protein, 15 aa, Homo sapiens
  CDR3 for beta chain variable domain of TCR clone 189944 (TRBV7-2, TRBJ2-3)
CASTLEQGGTDTQYF

SEQ ID NO: 379889 - protein, 15 aa, Homo sapiens
  CDR3 for alpha chain variable domain of TCR clone 189945 (TRAV21, TRAJ24)
CAARYSTDSWGKLQF

SEQ ID NO: 379890 - protein, 13 aa, Homo sapiens
  CDR3 for beta chain variable domain of TCR clone 189945 (TRBV10-3, TRBJ2-7)
CASKLAVNYEQYF

SEQ ID NO: 379891 - protein, 15 aa, Homo sapiens
  CDR3 for alpha chain variable domain of TCR clone 189946 (TRAV8-4, TRAJ10)
CAVSDGTGGGNKLPF

SEQ ID NO: 379892 - protein, 13 aa, Homo sapiens
  CDR3 for beta chain variable domain of TCR clone 189946 (TRBV28, TRBJ1-3)
CASSFLGSGTIYF

SEQ ID NO: 379893 - protein, 14 aa, Homo sapiens
  CDR3 for alpha chain variable domain of TCR clone 189947 (TRAV26-1, TRAJ38)
CIADNAGNNRKLIW

SEQ ID NO: 379894 - protein, 19 aa, Homo sapiens
  CDR3 for beta chain variable domain of TCR clone 189947 (TRBV7-2, TRBJ2-3)
CASSFLSRNWGGGTDTQYF

SEQ ID NO: 379895 - protein, 12 aa, Homo sapiens
  CDR3 for alpha chain variable domain of TCR clone 189948 (TRAV27, TRAJ35)
CAGADFGNVLHC

SEQ ID NO: 379896 - protein, 15 aa, Homo sapiens
  CDR3 for beta chain variable domain of TCR clone 189948 (TRBV28, TRBJ1-5)
CASSLPQQGEQPQHF

SEQ ID NO: 379897 - protein, 15 aa, Homo sapiens
  CDR3 for alpha chain variable domain of TCR clone 189949 (TRAV23/DV6, TRAJ37)
CAAGEGSSNTGKLIF

SEQ ID NO: 379898 - protein, 17 aa, Homo sapiens
  CDR3 for beta chain variable domain of TCR clone 189949 (TRBV20-1, TRBJ2-7)
YGATRAGGVAGVEEQYF

SEQ ID NO: 379899 - protein, 15 aa, Homo sapiens
  CDR3 for alpha chain variable domain of TCR clone 189950 (TRAV8-3, TRAJ11)
CAVGLLNSGYSTLTL

SEQ ID NO: 379900 - protein, 16 aa, Homo sapiens
  CDR3 for beta chain variable domain of TCR clone 189950 (TRBV7-9, TRBJ1-2)
CASSLGFSSGEDGDTF

SEQ ID NO: 379901 - protein, 11 aa, Homo sapiens
  CDR3 for alpha chain variable domain of TCR clone 189951 (TRAV8-3, TRAJ18)
CAVGGRQRLNP

SEQ ID NO: 379902 - protein, 12 aa, Homo sapiens
  CDR3 for beta chain variable domain of TCR clone 189951 (TRBV28, TRBJ2-6)
CAIQAGANDLTF

SEQ ID NO: 379903 - protein, 16 aa, Homo sapiens
  CDR3 for alpha chain variable domain of TCR clone 189952 (TRAV12-2, TRAJ10)
CAVNRVLTGGGNKLTF

SEQ ID NO: 379904 - protein, 14 aa, Homo sapiens
  CDR3 for beta chain variable domain of TCR clone 189952 (TRBV9, TRBJ2-1)
CASSVALAVNEEFF

SEQ ID NO: 379905 - protein, 14 aa, Homo sapiens
  CDR3 for alpha chain variable domain of TCR clone 189953 (TRAV12-2, TRAJ13)
CAVKKTGGYQKVTF

SEQ ID NO: 379906 - protein, 13 aa, Homo sapiens
  CDR3 for beta chain variable domain of TCR clone 189953 (TRBV20-1, TRBJ1-1)
GSARLGQGTEAFF

SEQ ID NO: 379907 - protein, 14 aa, Homo sapiens
  CDR3 for alpha chain variable domain of TCR clone 189954 (TRAV23/DV6, TRAJ4)
CAAPSSGGYNKLLF

SEQ ID NO: 379908 - protein, 14 aa, Homo sapiens
  CDR3 for beta chain variable domain of TCR clone 189954 (TRBV20-1, TRBJ2-7)
CSAKTGTGGYEQYF

SEQ ID NO: 379909 - protein, 13 aa, Homo sapiens
  CDR3 for alpha chain variable domain of TCR clone 189955 (TRAV25, TRAJ21)
CAGRQYDFNKFYF

SEQ ID NO: 379910 - protein, 16 aa, Homo sapiens
  CDR3 for beta chain variable domain of TCR clone 189955 (TRBV20-1, TRBJ1-4)
CSAPGQGLLTNEKLFF

SEQ ID NO: 379911 - protein, 13 aa, Homo sapiens
  CDR3 for alpha chain variable domain of TCR clone 189956 (TRAV17, TRAJ40)
CAGALGGTYKYIF

SEQ ID NO: 379912 - protein, 16 aa, Homo sapiens
  CDR3 for beta chain variable domain of TCR clone 189956 (TRBV7-2, TRBJ1-4)
CASSLAPGRRDENLFF

SEQ ID NO: 379913 - protein, 12 aa, Homo sapiens
  CDR3 for alpha chain variable domain of TCR clone 189957 (TRAV1-1, TRAJ43)
CAPRVSSNDMRF

SEQ ID NO: 379914 - protein, 15 aa, Homo sapiens
  CDR3 for beta chain variable domain of TCR clone 189957 (TRBV20-1, TRBJ2-7)
CSARDRVSGMDEQYF

SEQ ID NO: 379915 - protein, 14 aa, Homo sapiens
  CDR3 for alpha chain variable domain of TCR clone 189958 (TRAV12-2, TRAJ17)
CAVLFKAAGNNLTF

SEQ ID NO: 379916 - protein, 12 aa, Homo sapiens
  CDR3 for beta chain variable domain of TCR clone 189958 (TRBV11-2, TRBJ2-2)
CASSLGGGELFF

SEQ ID NO: 379917 - protein, 14 aa, Homo sapiens
  CDR3 for alpha chain variable domain of TCR clone 189959 (TRAV1-2, TRAJ16)
CAVNRFPDGQKLLF

SEQ ID NO: 379918 - protein, 13 aa, Homo sapiens
  CDR3 for beta chain variable domain of TCR clone 189959 (TRBV7-2, TRBJ2-2)
CASSLAVSGELFF

SEQ ID NO: 379919 - protein, 13 aa, Homo sapiens
  CDR3 for alpha chain variable domain of TCR clone 189960 (TRAV21, TRAJ27)
CAARPGNAGKSTF

SEQ ID NO: 379920 - protein, 15 aa, Homo sapiens
  CDR3 for beta chain variable domain of TCR clone 189960 (TRBV5-1, TRBJ2-7)
CASSLMTSGSNEQYF

SEQ ID NO: 379921 - protein, 14 aa, Homo sapiens
  CDR3 for alpha chain variable domain of TCR clone 189961 (TRAV38-1, TRAJ40)
CALRPTSGTYKYIF

SEQ ID NO: 379922 - protein, 14 aa, Homo sapiens
  CDR3 for beta chain variable domain of TCR clone 189961 (TRBV25-1, TRBJ1-1)
CASTHQGGNTEAFF

SEQ ID NO: 379923 - protein, 13 aa, Homo sapiens
  CDR3 for alpha chain variable domain of TCR clone 189962 (TRAV1-1, TRAJ23)
CAVVANQGGKLIF

SEQ ID NO: 379924 - protein, 13 aa, Homo sapiens
  CDR3 for beta chain variable domain of TCR clone 189962 (TRBV7-3, TRBJ1-2)
CASSLKRGYGYTF

SEQ ID NO: 379925 - protein, 13 aa, Homo sapiens
  CDR3 for alpha chain variable domain of TCR clone 189963 (TRAV13-1, TRAJ39)
CAASIWAGNMLTF

SEQ ID NO: 379926 - protein, 14 aa, Homo sapiens
  CDR3 for beta chain variable domain of TCR clone 189963 (TRBV18, TRBJ2-5)
CASSPGVSQETQYF

SEQ ID NO: 379927 - protein, 13 aa, Homo sapiens
  CDR3 for alpha chain variable domain of TCR clone 189964 (TRAV1-2, TRAJ33)
CAVSEDSNYQLIW

SEQ ID NO: 379928 - protein, 15 aa, Homo sapiens
  CDR3 for beta chain variable domain of TCR clone 189964 (TRBV28, TRBJ2-7)
CASKKPSGRAYEQYF

SEQ ID NO: 379929 - protein, 18 aa, Homo sapiens
  CDR3 for alpha chain variable domain of TCR clone 189965 (TRAV21, TRAJ52)
CAVRPSPADGTSYGKLTF

SEQ ID NO: 379930 - protein, 17 aa, Homo sapiens
  CDR3 for beta chain variable domain of TCR clone 189965 (TRBV13, TRBJ2-3)
WASSLSRVAGGRNTQYF

SEQ ID NO: 379931 - protein, 13 aa, Homo sapiens
  CDR3 for alpha chain variable domain of TCR clone 189966 (TRAV8-4, TRAJ30)
CAGSVNRDDKIIF

SEQ ID NO: 379932 - protein, 16 aa, Homo sapiens
  CDR3 for beta chain variable domain of TCR clone 189966 (TRBV11-2, TRBJ1-2)
CASSPSGREANYGYTF

SEQ ID NO: 379933 - protein, 12 aa, Homo sapiens
  CDR3 for alpha chain variable domain of TCR clone 189967 (TRAV9-2, TRAJ36)
CALKKGANNPFF

SEQ ID NO: 379934 - protein, 17 aa, Homo sapiens
  CDR3 for beta chain variable domain of TCR clone 189967 (TRBV20-1, TRBJ1-5)
CSAREIPQGVGNQPQHF

SEQ ID NO: 379935 - protein, 15 aa, Homo sapiens
  CDR3 for alpha chain variable domain of TCR clone 189968 (TRAV8-3, TRAJ15)
CAVGAPNQAGTALIF

SEQ ID NO: 379936 - protein, 14 aa, Homo sapiens
  CDR3 for beta chain variable domain of TCR clone 189968 (TRBV20-1, TRBJ2-1)
CSPNDEAFYNEQFF

SEQ ID NO: 379937 - protein, 13 aa, Homo sapiens
  CDR3 for alpha chain variable domain of TCR clone 189969 (TRAV17, TRAJ5)
CALRGTGRRALTF

SEQ ID NO: 379938 - protein, 17 aa, Homo sapiens
  CDR3 for beta chain variable domain of TCR clone 189969 (TRBV28, TRBJ2-5)
CASSTPEGDALQETQYF

SEQ ID NO: 379939 - protein, 17 aa, Homo sapiens
  CDR3 for alpha chain variable domain of TCR clone 189970 (TRAV3, TRAJ6)
CAVRDGPRAGGSYIPTF

SEQ ID NO: 379940 - protein, 12 aa, Homo sapiens
  CDR3 for beta chain variable domain of TCR clone 189970 (TRBV7-2, TRBJ2-5)
CASSLRAETQYF

SEQ ID NO: 379941 - protein, 18 aa, Homo sapiens
  CDR3 for alpha chain variable domain of TCR clone 189971 (TRAV26-1, TRAJ52)
CIVDPVGAGGTSYGKLTF

SEQ ID NO: 379942 - protein, 15 aa, Homo sapiens
  CDR3 for beta chain variable domain of TCR clone 189971 (TRBV29-1, TRBJ2-7)
CIVEFFDRGSYEQYF

SEQ ID NO: 379943 - protein, 13 aa, Homo sapiens
  CDR3 for alpha chain variable domain of TCR clone 189972 (TRAV27, TRAJ29)
CAGAHSGNTPLVF

SEQ ID NO: 379944 - protein, 15 aa, Homo sapiens
  CDR3 for beta chain variable domain of TCR clone 189972 (TRBV7-2, TRBJ2-2)
CASRRPGQNTGELFF

SEQ ID NO: 379945 - protein, 12 aa, Homo sapiens
  CDR3 for alpha chain variable domain of TCR clone 189973 (TRAV2, TRAJ9)
CAVGAGGFKTIF

SEQ ID NO: 379946 - protein, 16 aa, Homo sapiens
  CDR3 for beta chain variable domain of TCR clone 189973 (TRBV7-9, TRBJ2-6)
CASSLKGPLRANVLTF

SEQ ID NO: 379947 - protein, 14 aa, Homo sapiens
  CDR3 for alpha chain variable domain of TCR clone 189974 (TRAV12-3, TRAJ41)
CAMSAGNSGYALNF

SEQ ID NO: 379948 - protein, 11 aa, Homo sapiens
  CDR3 for beta chain variable domain of TCR clone 189974 (TRBV7-2, TRBJ2-3)
WASSSSDTQYF

SEQ ID NO: 379949 - protein, 14 aa, Homo sapiens
  CDR3 for alpha chain variable domain of TCR clone 189975 (TRAV12-3, TRAJ10)
SHLPLTGGGNKLTF

SEQ ID NO: 379950 - protein, 18 aa, Homo sapiens
  CDR3 for beta chain variable domain of TCR clone 189975 (TRBV11-2, TRBJ2-7)
CASSPTTGGYPTSSTSGR

SEQ ID NO: 379951 - protein, 14 aa, Homo sapiens
  CDR3 for alpha chain variable domain of TCR clone 189976 (TRAV8-3, TRAJ34)
CAVGPPHNTDKLIF

SEQ ID NO: 379952 - protein, 15 aa, Homo sapiens
  CDR3 for beta chain variable domain of TCR clone 189976 (TRBV3-1, TRBJ2-7)
CASSQVRQGAYEQYF

SEQ ID NO: 379953 - protein, 14 aa, Homo sapiens
  CDR3 for alpha chain variable domain of TCR clone 189977 (TRAV9-2, TRAJ9)
CALSDPTGGFKTIF

SEQ ID NO: 379954 - protein, 14 aa, Homo sapiens
  CDR3 for beta chain variable domain of TCR clone 189977 (TRBV20-1, TRBJ2-4)
CSSRDRGQGGIQYF

SEQ ID NO: 379955 - protein, 17 aa, Homo sapiens
  CDR3 for alpha chain variable domain of TCR clone 189978 (TRAV3, TRAJ6)
CAVRDGPRAGGSYIPTF

SEQ ID NO: 379956 - protein, 18 aa, Homo sapiens
  CDR3 for beta chain variable domain of TCR clone 189978 (TRBV27, TRBJ2-1)
CASGNRAVGVGSKNEQFF

SEQ ID NO: 379957 - protein, 14 aa, Homo sapiens
  CDR3 for alpha chain variable domain of TCR clone 189979 (TRAV12-2, TRAJ17)
CAVLFKAAGNKLTF

SEQ ID NO: 379958 - protein, 14 aa, Homo sapiens
  CDR3 for beta chain variable domain of TCR clone 189979 (TRBV6-6, TRBJ2-7)
CASSYSGESYEQYF

SEQ ID NO: 379959 - protein, 21 aa, Homo sapiens
  CDR3 for alpha chain variable domain of TCR clone 189980 (TRAV34, TRAJ44)
PAMQASTSVEQTTGTASKLTF

SEQ ID NO: 379960 - protein, 15 aa, Homo sapiens
  CDR3 for beta chain variable domain of TCR clone 189980 (TRBV5-7, TRBJ2-1)
CASSPPRAPYNEQFF

SEQ ID NO: 379961 - protein, 14 aa, Homo sapiens
  CDR3 for alpha chain variable domain of TCR clone 189981 (TRAV1-1, TRAJ27)
CAVIYNTNAGKSTF

SEQ ID NO: 379962 - protein, 12 aa, Homo sapiens
  CDR3 for beta chain variable domain of TCR clone 189981 (TRBV14, TRBJ2-5)
CASSHLKETQYF

SEQ ID NO: 379963 - protein, 11 aa, Homo sapiens
  CDR3 for alpha chain variable domain of TCR clone 189982 (TRAV17, TRAJ31)
CATDRTARLMF

SEQ ID NO: 379964 - protein, 14 aa, Homo sapiens
  CDR3 for beta chain variable domain of TCR clone 189982 (TRBV7-9, TRBJ2-1)
CASSLVIGADEQFF

SEQ ID NO: 379965 - protein, 15 aa, Homo sapiens
  CDR3 for alpha chain variable domain of TCR clone 189983 (TRAV12-3, TRAJ6)
CAMSPASGGSYIPTF

SEQ ID NO: 379966 - protein, 20 aa, Homo sapiens
  CDR3 for beta chain variable domain of TCR clone 189983 (TRBV7-8, TRBJ2-2)
CASSHLFPGPTIHITGELFF

SEQ ID NO: 379967 - protein, 12 aa, Homo sapiens
  CDR3 for alpha chain variable domain of TCR clone 189984 (TRAV27, TRAJ42)
CAGGGSQGNLIF

SEQ ID NO: 379968 - protein, 13 aa, Homo sapiens
  CDR3 for beta chain variable domain of TCR clone 189984 (TRBV19, TRBJ2-7)
CASSLRSSYEQYF

SEQ ID NO: 379969 - protein, 14 aa, Homo sapiens
  CDR3 for alpha chain variable domain of TCR clone 189985 (TRAV1-2, TRAJ16)
CAVNRFSDGQKLLF

SEQ ID NO: 379970 - protein, 17 aa, Homo sapiens
  CDR3 for beta chain variable domain of TCR clone 189985 (TRBV7-3, TRBJ2-3)
CASSLMKRMRGADTQCF

SEQ ID NO: 379971 - protein, 12 aa, Homo sapiens
  CDR3 for alpha chain variable domain of TCR clone 189986 (TRAV13-2, TRAJ23)
CAERHRGGKLIF

SEQ ID NO: 379972 - protein, 16 aa, Homo sapiens
  CDR3 for beta chain variable domain of TCR clone 189986 (TRBV20-1, TRBJ2-7)
CSASASGRLSSYEQYF

SEQ ID NO: 379973 - protein, 14 aa, Homo sapiens
  CDR3 for alpha chain variable domain of TCR clone 189987 (TRAV2, TRAJ9)
CAVEDRSGGFKTIF

SEQ ID NO: 379974 - protein, 15 aa, Homo sapiens
  CDR3 for beta chain variable domain of TCR clone 189987 (TRBV13, TRBJ1-5)
CASTFNRGSNQPQHF

SEQ ID NO: 379975 - protein, 15 aa, Homo sapiens
  CDR3 for alpha chain variable domain of TCR clone 189988 (TRAV26-1, TRAJ22)
CIVRVSFWFCKATDL

SEQ ID NO: 379976 - protein, 14 aa, Homo sapiens
  CDR3 for beta chain variable domain of TCR clone 189988 (TRBV5-1, TRBJ1-1)
CASSLQGASTEAFF

SEQ ID NO: 379977 - protein, 13 aa, Homo sapiens
  CDR3 for alpha chain variable domain of TCR clone 189989 (TRAV20, TRAJ44)
CAVDTGTASKLTF

SEQ ID NO: 379978 - protein, 14 aa, Homo sapiens
  CDR3 for beta chain variable domain of TCR clone 189989 (TRBV19, TRBJ2-1)
CASPTFVLSGEQFF

SEQ ID NO: 379979 - protein, 14 aa, Homo sapiens
  CDR3 for alpha chain variable domain of TCR clone 189990 (TRAV1-2, TRAJ8)
CAVREDTGFQKLVF

SEQ ID NO: 379980 - protein, 15 aa, Homo sapiens
  CDR3 for beta chain variable domain of TCR clone 189990 (TRBV28, TRBJ2-6)
FASSLAGSGANVLTF

SEQ ID NO: 379981 - protein, 14 aa, Homo sapiens
  CDR3 for alpha chain variable domain of TCR clone 189991 (TRAV8-1, TRAJ23)
CAMGTYNQGGKLIF

SEQ ID NO: 379982 - protein, 16 aa, Homo sapiens
  CDR3 for beta chain variable domain of TCR clone 189991 (TRBV18, TRBJ1-5)
CASSPSTGNSNQPQHS

SEQ ID NO: 379983 - protein, 13 aa, Homo sapiens
  CDR3 for alpha chain variable domain of TCR clone 189992 (TRAV12-1, TRAJ11)
CVVTRGGYSTLTF

SEQ ID NO: 379984 - protein, 13 aa, Homo sapiens
  CDR3 for beta chain variable domain of TCR clone 189992 (TRBV7-3, TRBJ1-1)
CASSQDWGAEAFF

SEQ ID NO: 379985 - protein, 23 aa, Homo sapiens
  CDR3 for alpha chain variable domain of TCR clone 189993 (TRAV26-1, )
CIVRPLNAGHNHIQNPDPAVYQL

SEQ ID NO: 379986 - protein, 13 aa, Homo sapiens
  CDR3 for beta chain variable domain of TCR clone 189993 (TRBV18, TRBJ1-1)
CASSPNGDTEAFF

SEQ ID NO: 379987 - protein, 11 aa, Homo sapiens
  CDR3 for alpha chain variable domain of TCR clone 189994 (TRAV35, TRAJ30)
CAPGGDDKIIF

SEQ ID NO: 379988 - protein, 13 aa, Homo sapiens
  CDR3 for beta chain variable domain of TCR clone 189994 (TRBV7-6, TRBJ2-1)
CQQPGGGADEQFF

SEQ ID NO: 379989 - protein, 14 aa, Homo sapiens
  CDR3 for alpha chain variable domain of TCR clone 189995 (TRAV12-2, TRAJ13)
CAVKKTGGYQKVTF

SEQ ID NO: 379990 - protein, 15 aa, Homo sapiens
  CDR3 for beta chain variable domain of TCR clone 189995 (TRBV27, TRBJ2-1)
CASSNGGWPSNEQFF

SEQ ID NO: 379991 - protein, 18 aa, Homo sapiens
  CDR3 for alpha chain variable domain of TCR clone 189996 (TRAV21, TRAJ52)
CAVRPSPPGGPSYGTLTF

SEQ ID NO: 379992 - protein, 17 aa, Homo sapiens
  CDR3 for beta chain variable domain of TCR clone 189996 (TRBV13, TRBJ2-3)
CASSLSRVAGGRNTQYF

SEQ ID NO: 379993 - protein, 12 aa, Homo sapiens
  CDR3 for alpha chain variable domain of TCR clone 189997 (TRAV9-2, TRAJ26)
CALRGYGHNFVF

SEQ ID NO: 379994 - protein, 12 aa, Homo sapiens
  CDR3 for beta chain variable domain of TCR clone 189997 (TRBV29-1, TRBJ2-3)
CSVTRGADTQYF

SEQ ID NO: 379995 - protein, 16 aa, Homo sapiens
  CDR3 for alpha chain variable domain of TCR clone 189998 (TRAV35, TRAJ42)
GRMERYYGGSQGNLIF

SEQ ID NO: 379996 - protein, 15 aa, Homo sapiens
  CDR3 for beta chain variable domain of TCR clone 189998 (TRBV6-1, TRBJ2-7)
YASSDWDKPNYEQYF

SEQ ID NO: 379997 - protein, 14 aa, Homo sapiens
  CDR3 for alpha chain variable domain of TCR clone 189999 (TRAV8-3, TRAJ15)
CAVGLNQAGTSLIF

SEQ ID NO: 379998 - protein, 15 aa, Homo sapiens
  CDR3 for beta chain variable domain of TCR clone 189999 (TRBV18, TRBJ2-6)
CASSPSYAGANVLTF

SEQ ID NO: 379999 - protein, 22 aa, Homo sapiens
  CDR3 for alpha chain variable domain of TCR clone 190000 (TRAV24, )
CASDTGNNHIQNPDPAVYQLRD

SEQ ID NO: 380000 - protein, 20 aa, Homo sapiens
  CDR3 for beta chain variable domain of TCR clone 190000 (TRBV7-8, TRBJ2-2)
CASSHLFPGPTIHITGELFF

SEQ ID NO: 380001 - protein, 15 aa, Homo sapiens
  CDR3 for alpha chain variable domain of TCR clone 190001 (TRAV17, TRAJ54)
CATTRSEQGAQKLVF

SEQ ID NO: 380002 - protein, 16 aa, Homo sapiens
  CDR3 for beta chain variable domain of TCR clone 190001 (TRBV12-4, TRBJ2-3)
CASSLRLADTTDTQYF

SEQ ID NO: 380003 - protein, 16 aa, Homo sapiens
  CDR3 for alpha chain variable domain of TCR clone 190002 (TRAV14/DV4, TRAJ54)
CAMREGRIQGAQKLVF

SEQ ID NO: 380004 - protein, 20 aa, Homo sapiens
  CDR3 for beta chain variable domain of TCR clone 190002 (TRBV7-8, TRBJ2-2)
CASSHLFPGPTIHITGELFF

SEQ ID NO: 380005 - protein, 14 aa, Homo sapiens
  CDR3 for alpha chain variable domain of TCR clone 190003 (TRAV26-1, TRAJ34)
CIVRVAYNTDKLIF

SEQ ID NO: 380006 - protein, 15 aa, Homo sapiens
  CDR3 for beta chain variable domain of TCR clone 190003 (TRBV20-1, TRBJ2-7)
CSARVPAAYFHVQYF

SEQ ID NO: 380007 - protein, 14 aa, Homo sapiens
  CDR3 for alpha chain variable domain of TCR clone 190004 (TRAV8-6, TRAJ13)
CAVSDRGGYKKVTF

SEQ ID NO: 380008 - protein, 14 aa, Homo sapiens
  CDR3 for beta chain variable domain of TCR clone 190004 (TRBV7-2, TRBJ1-1)
CASSFLTGTTEAFF

SEQ ID NO: 380009 - protein, 12 aa, Homo sapiens
  CDR3 for alpha chain variable domain of TCR clone 190005 (TRAV35, TRAJ49)
CAGWITSNQFYF

SEQ ID NO: 380010 - protein, 16 aa, Homo sapiens
  CDR3 for beta chain variable domain of TCR clone 190005 (TRBV5-1, TRBJ2-2)
CASSLWDTTNTGELFF

SEQ ID NO: 380011 - protein, 17 aa, Homo sapiens
  CDR3 for alpha chain variable domain of TCR clone 190006 (TRAV13-1, TRAJ52)
CAASSGAGGTSYGKLPF

SEQ ID NO: 380012 - protein, 15 aa, Homo sapiens
  CDR3 for beta chain variable domain of TCR clone 190006 (TRBV12-4, TRBJ1-5)
CATTRGSGFGQPQHF

SEQ ID NO: 380013 - protein, 14 aa, Homo sapiens
  CDR3 for alpha chain variable domain of TCR clone 190007 (TRAV26-1, TRAJ38)
CIADNAGNNRKLIW

SEQ ID NO: 380014 - protein, 16 aa, Homo sapiens
  CDR3 for beta chain variable domain of TCR clone 190007 (TRBV2, TRBJ2-3)
CQHRGAPRRWTDTQYF

SEQ ID NO: 380015 - protein, 10 aa, Homo sapiens
  CDR3 for alpha chain variable domain of TCR clone 190008 (TRAV21, TRAJ31)
CAVDNARLMF

SEQ ID NO: 380016 - protein, 13 aa, Homo sapiens
  CDR3 for beta chain variable domain of TCR clone 190008 (TRBV4-1, TRBJ1-1)
CASGRKMNTEAFF

SEQ ID NO: 380017 - protein, 10 aa, Homo sapiens
  CDR3 for alpha chain variable domain of TCR clone 190009 (TRAV13-1, TRAJ26)
CAPYGQNFVF

SEQ ID NO: 380018 - protein, 13 aa, Homo sapiens
  CDR3 for beta chain variable domain of TCR clone 190009 (TRBV2, TRBJ2-7)
CASSVGGSGEQYF

SEQ ID NO: 380019 - protein, 12 aa, Homo sapiens
  CDR3 for alpha chain variable domain of TCR clone 190010 (TRAV21, TRAJ3)
CCFYSSASKIIF

SEQ ID NO: 380020 - protein, 16 aa, Homo sapiens
  CDR3 for beta chain variable domain of TCR clone 190010 (TRBV19, TRBJ2-1)
CASSKAGPGSYNEQFF

SEQ ID NO: 380021 - protein, 14 aa, Homo sapiens
  CDR3 for alpha chain variable domain of TCR clone 190011 (TRAV17, TRAJ16)
CATADFSDGQKLLF

SEQ ID NO: 380022 - protein, 12 aa, Homo sapiens
  CDR3 for beta chain variable domain of TCR clone 190011 (TRBV14, TRBJ2-7)
CASSLYKDEQYF

SEQ ID NO: 380023 - protein, 11 aa, Homo sapiens
  CDR3 for alpha chain variable domain of TCR clone 190012 (TRAV3, TRAJ21)
CAVGNFNKFYF

SEQ ID NO: 380024 - protein, 15 aa, Homo sapiens
  CDR3 for beta chain variable domain of TCR clone 190012 (TRBV29-1, TRBJ2-1)
CSVGGGPASYNEQIF

SEQ ID NO: 380025 - protein, 15 aa, Homo sapiens
  CDR3 for alpha chain variable domain of TCR clone 190013 (TRAV3, TRAJ22)
CAVRDRGGSARQLTL

SEQ ID NO: 380026 - protein, 16 aa, Homo sapiens
  CDR3 for beta chain variable domain of TCR clone 190013 (TRBV5-4, TRBJ2-3)
CASQQPGAGGADTPYF

SEQ ID NO: 380027 - protein, 13 aa, Homo sapiens
  CDR3 for alpha chain variable domain of TCR clone 190014 (TRAV16, TRAJ52)
CALRGTSYGKLTF

SEQ ID NO: 380028 - protein, 15 aa, Homo sapiens
  CDR3 for beta chain variable domain of TCR clone 190014 (TRBV7-2, TRBJ1-2)
CASSLVSGGDYGYTF

SEQ ID NO: 380029 - protein, 12 aa, Homo sapiens
  CDR3 for alpha chain variable domain of TCR clone 190015 (TRAV1-1, TRAJ8)
CAGGTGFQKLVF

SEQ ID NO: 380030 - protein, 18 aa, Homo sapiens
  CDR3 for beta chain variable domain of TCR clone 190015 (TRBV7-9, TRBJ2-1)
CASSLAVSGTSGRNEQFF

SEQ ID NO: 380031 - protein, 13 aa, Homo sapiens
  CDR3 for alpha chain variable domain of TCR clone 190016 (TRAV8-4, TRAJ10)
CAAFTGGVNKLTF

SEQ ID NO: 380032 - protein, 15 aa, Homo sapiens
  CDR3 for beta chain variable domain of TCR clone 190016 (TRBV2, TRBJ2-3)
CASSDFEKATDTQYF

SEQ ID NO: 380033 - protein, 11 aa, Homo sapiens
  CDR3 for alpha chain variable domain of TCR clone 190017 (TRAV3, TRAJ21)
CAVGNFNKFYF

SEQ ID NO: 380034 - protein, 14 aa, Homo sapiens
  CDR3 for beta chain variable domain of TCR clone 190017 (TRBV28, TRBJ1-2)
CASRIQRANYGYTF

SEQ ID NO: 380035 - protein, 16 aa, Homo sapiens
  CDR3 for alpha chain variable domain of TCR clone 190018 (TRAV26-1, TRAJ52)
CIVSNAGGTSYGKLTF

SEQ ID NO: 380036 - protein, 15 aa, Homo sapiens
  CDR3 for beta chain variable domain of TCR clone 190018 (TRBV7-3, TRBJ2-1)
CASSATGGGEGEQFF

SEQ ID NO: 380037 - protein, 11 aa, Homo sapiens
  CDR3 for alpha chain variable domain of TCR clone 190019 (TRAV3, TRAJ21)
CAVGNFNKFYF

SEQ ID NO: 380038 - protein, 15 aa, Homo sapiens
  CDR3 for beta chain variable domain of TCR clone 190019 (TRBV7-9, TRBJ1-5)
CASSLAQGLEGSQHF

SEQ ID NO: 380039 - protein, 14 aa, Homo sapiens
  CDR3 for alpha chain variable domain of TCR clone 190020 (TRAV12-3, TRAJ21)
CAATDLYNFNKFYF

SEQ ID NO: 380040 - protein, 14 aa, Homo sapiens
  CDR3 for beta chain variable domain of TCR clone 190020 (TRBV19, TRBJ2-1)
CASGKSTQYNEQFF

SEQ ID NO: 380041 - protein, 14 aa, Homo sapiens
  CDR3 for alpha chain variable domain of TCR clone 190021 (TRAV17, TRAJ15)
CATDAPQAGTALIF

SEQ ID NO: 380042 - protein, 14 aa, Homo sapiens
  CDR3 for beta chain variable domain of TCR clone 190021 (TRBV7-2, TRBJ2-2)
CASSFLTLSGELFF

SEQ ID NO: 380043 - protein, 13 aa, Homo sapiens
  CDR3 for alpha chain variable domain of TCR clone 190022 (TRAV3, TRAJ41)
CAVSSNTGYALNF

SEQ ID NO: 380044 - protein, 14 aa, Homo sapiens
  CDR3 for beta chain variable domain of TCR clone 190022 (TRBV7-2, TRBJ2-7)
CASSPKTSFYEQYF

SEQ ID NO: 380045 - protein, 15 aa, Homo sapiens
  CDR3 for alpha chain variable domain of TCR clone 190023 (TRAV8-3, TRAJ11)
CAVGLLNSGYSTLTF

SEQ ID NO: 380046 - protein, 15 aa, Homo sapiens
  CDR3 for beta chain variable domain of TCR clone 190023 (TRBV7-9, TRBJ2-2)
CASGPLDTFPGELFF

SEQ ID NO: 380047 - protein, 15 aa, Homo sapiens
  CDR3 for alpha chain variable domain of TCR clone 190024 (TRAV2, TRAJ15)
CAVEDRGQAGTALIL

SEQ ID NO: 380048 - protein, 15 aa, Homo sapiens
  CDR3 for beta chain variable domain of TCR clone 190024 (TRBV7-2, TRBJ2-1)
CASSSGLAGGNEQFF

SEQ ID NO: 380049 - protein, 16 aa, Homo sapiens
  CDR3 for alpha chain variable domain of TCR clone 190025 (TRAV12-3, TRAJ28)
CAMRANSGAGSYQLTF

SEQ ID NO: 380050 - protein, 15 aa, Homo sapiens
  CDR3 for beta chain variable domain of TCR clone 190025 (TRBV7-2, TRBJ2-1)
CASSSGLAGGNEQFF

SEQ ID NO: 380051 - protein, 16 aa, Homo sapiens
  CDR3 for alpha chain variable domain of TCR clone 190026 (TRAV8-3, TRAJ13)
CAVGAYPSGGYQKVTF

SEQ ID NO: 380052 - protein, 16 aa, Homo sapiens
  CDR3 for beta chain variable domain of TCR clone 190026 (TRBV19, TRBJ1-5)
CASSIDRGGPRQPQHF

SEQ ID NO: 380053 - protein, 14 aa, Homo sapiens
  CDR3 for alpha chain variable domain of TCR clone 190027 (TRAV1-2, TRAJ8)
CAVREDTGFQKLVF

SEQ ID NO: 380054 - protein, 15 aa, Homo sapiens
  CDR3 for beta chain variable domain of TCR clone 190027 (TRBV19, TRBJ2-1)
CASSTGSSSYNEQFF

SEQ ID NO: 380055 - protein, 12 aa, Homo sapiens
  CDR3 for alpha chain variable domain of TCR clone 190028 (TRAV12-3, TRAJ17)
CAMTLTGNKLTF

SEQ ID NO: 380056 - protein, 16 aa, Homo sapiens
  CDR3 for beta chain variable domain of TCR clone 190028 (TRBV7-6, TRBJ2-5)
CASSETSGRAVETQYF

SEQ ID NO: 380057 - protein, 16 aa, Homo sapiens
  CDR3 for alpha chain variable domain of TCR clone 190029 (TRAV3, TRAJ37)
CAVRGKGSGNTGKLIF

SEQ ID NO: 380058 - protein, 12 aa, Homo sapiens
  CDR3 for beta chain variable domain of TCR clone 190029 (TRBV14, TRBJ2-7)
CQQPRPRYEQYF

SEQ ID NO: 380059 - protein, 18 aa, Homo sapiens
  CDR3 for alpha chain variable domain of TCR clone 190030 (TRAV29/DV5, TRAJ37)
CSVLLCSERSGNTGKLIF

SEQ ID NO: 380060 - protein, 14 aa, Homo sapiens
  CDR3 for beta chain variable domain of TCR clone 190030 (TRBV5-1, TRBJ1-1)
CASSLAVGSGEAFF

SEQ ID NO: 380061 - protein, 17 aa, Homo sapiens
  CDR3 for alpha chain variable domain of TCR clone 190031 (TRAV3, TRAJ12)
CAVRDGGGMDRSYKLIF

SEQ ID NO: 380062 - protein, 13 aa, Homo sapiens
  CDR3 for beta chain variable domain of TCR clone 190031 (TRBV7-3, TRBJ1-1)
CASSQDWGAEAFF

SEQ ID NO: 380063 - protein, 17 aa, Homo sapiens
  CDR3 for alpha chain variable domain of TCR clone 190032 (TRAV8-6, TRAJ8)
CAVKEGIENTGFQKLVF

SEQ ID NO: 380064 - protein, 13 aa, Homo sapiens
  CDR3 for beta chain variable domain of TCR clone 190032 (TRBV4-2, TRBJ1-1)
CASSQAGNTEAFF

SEQ ID NO: 380065 - protein, 14 aa, Homo sapiens
  CDR3 for alpha chain variable domain of TCR clone 190033 (TRAV12-2, TRAJ40)
CAVKIPSGTYKYIF

SEQ ID NO: 380066 - protein, 12 aa, Homo sapiens
  CDR3 for beta chain variable domain of TCR clone 190033 (TRBV11-2, TRBJ2-1)
CASSPGNNEQLF

SEQ ID NO: 380067 - protein, 18 aa, Homo sapiens
  CDR3 for alpha chain variable domain of TCR clone 190034 (TRAV21, TRAJ52)
CAVRPSPAGGTSYGKLTF

SEQ ID NO: 380068 - protein, 17 aa, Homo sapiens
  CDR3 for beta chain variable domain of TCR clone 190034 (TRBV15, TRBJ1-1)
CATSRVGGADGDTEAFF

SEQ ID NO: 380069 - protein, 16 aa, Homo sapiens
  CDR3 for alpha chain variable domain of TCR clone 190035 (TRAV26-1, TRAJ37)
CIYARHGSSNTGKLIF

SEQ ID NO: 380070 - protein, 14 aa, Homo sapiens
  CDR3 for beta chain variable domain of TCR clone 190035 (TRBV7-2, TRBJ2-7)
CASSPKTSFYEQYF

SEQ ID NO: 380071 - protein, 16 aa, Homo sapiens
  CDR3 for alpha chain variable domain of TCR clone 190036 (TRAV19, TRAJ42)
CALSVNYGGSQGNLIF

SEQ ID NO: 380072 - protein, 14 aa, Homo sapiens
  CDR3 for beta chain variable domain of TCR clone 190036 (TRBV4-1, TRBJ2-2)
CASRRGRASGELFF

SEQ ID NO: 380073 - protein, 16 aa, Homo sapiens
  CDR3 for alpha chain variable domain of TCR clone 190037 (TRAV30, TRAJ24)
CGTEIVDADSWGKFKF

SEQ ID NO: 380074 - protein, 14 aa, Homo sapiens
  CDR3 for beta chain variable domain of TCR clone 190037 (TRBV4-1, TRBJ2-2)
CASSQAVNTGELFF

SEQ ID NO: 380075 - protein, 14 aa, Homo sapiens
  CDR3 for alpha chain variable domain of TCR clone 190038 (TRAV8-4, TRAJ13)
CAVTLSGGYQKVTF

SEQ ID NO: 380076 - protein, 16 aa, Homo sapiens
  CDR3 for beta chain variable domain of TCR clone 190038 (TRBV2, TRBJ2-3)
CASSTSVEGVTDTQYF

SEQ ID NO: 380077 - protein, 12 aa, Homo sapiens
  CDR3 for alpha chain variable domain of TCR clone 190039 (TRAV25, TRAJ15)
CAGSYGNNRLAF

SEQ ID NO: 380078 - protein, 14 aa, Homo sapiens
  CDR3 for beta chain variable domain of TCR clone 190039 (TRBV19, TRBJ2-2)
CASSTLHRSGELFF

SEQ ID NO: 380079 - protein, 13 aa, Homo sapiens
  CDR3 for alpha chain variable domain of TCR clone 190040 (TRAV17, TRAJ54)
CAAGIQGAQKLVF

SEQ ID NO: 380080 - protein, 14 aa, Homo sapiens
  CDR3 for beta chain variable domain of TCR clone 190040 (TRBV18, TRBJ2-3)
CASSLGGGSDTQYF

SEQ ID NO: 380081 - protein, 13 aa, Homo sapiens
  CDR3 for alpha chain variable domain of TCR clone 190041 (TRAV17, TRAJ9)
CATDYTGGFKTIF

SEQ ID NO: 380082 - protein, 16 aa, Homo sapiens
  CDR3 for beta chain variable domain of TCR clone 190041 (TRBV12-5, TRBJ2-5)
CASGPRASGNQETQYF

SEQ ID NO: 380083 - protein, 14 aa, Homo sapiens
  CDR3 for alpha chain variable domain of TCR clone 190042 (TRAV9-2, TRAJ39)
CALYIYNAGNMLAF

SEQ ID NO: 380084 - protein, 18 aa, Homo sapiens
  CDR3 for beta chain variable domain of TCR clone 190042 (TRBV20-1, TRBJ2-6)
CSAETTPTHGSGANVLTF

SEQ ID NO: 380085 - protein, 12 aa, Homo sapiens
  CDR3 for alpha chain variable domain of TCR clone 190043 (TRAV16, TRAJ56)
CAPTGANSKLTF

SEQ ID NO: 380086 - protein, 16 aa, Homo sapiens
  CDR3 for beta chain variable domain of TCR clone 190043 (TRBV2, TRBJ2-1)
CASSDSPGQPYNEQFF

SEQ ID NO: 380087 - protein, 16 aa, Homo sapiens
  CDR3 for alpha chain variable domain of TCR clone 190044 (TRAV20, TRAJ10)
CAVLRGLTGGGNKLTF

SEQ ID NO: 380088 - protein, 12 aa, Homo sapiens
  CDR3 for beta chain variable domain of TCR clone 190044 (TRBV11-2, TRBJ2-2)
CASSLGGGELFF

SEQ ID NO: 380089 - protein, 17 aa, Homo sapiens
  CDR3 for alpha chain variable domain of TCR clone 190045 (TRAV3, TRAJ42)
CAVRDRDYGGSQGNLIF

SEQ ID NO: 380090 - protein, 16 aa, Homo sapiens
  CDR3 for beta chain variable domain of TCR clone 190045 (TRBV4-3, TRBJ2-1)
CASSPALDRGVNEQFF

SEQ ID NO: 380091 - protein, 11 aa, Homo sapiens
  CDR3 for alpha chain variable domain of TCR clone 190046 (TRAV12-2, TRAJ29)
CAVTLRSPLVF

SEQ ID NO: 380092 - protein, 15 aa, Homo sapiens
  CDR3 for beta chain variable domain of TCR clone 190046 (TRBV7-3, TRBJ2-1)
CASSPTGGGEVEQFF

SEQ ID NO: 380093 - protein, 14 aa, Homo sapiens
  CDR3 for alpha chain variable domain of TCR clone 190047 (TRAV12-2, TRAJ40)
CAVKIPSGTYKYIF

SEQ ID NO: 380094 - protein, 14 aa, Homo sapiens
  CDR3 for beta chain variable domain of TCR clone 190047 (TRBV20-1, TRBJ1-1)
CTAQTRIGGTEDFF

SEQ ID NO: 380095 - protein, 14 aa, Homo sapiens
  CDR3 for alpha chain variable domain of TCR clone 190048 (TRAV35, TRAJ50)
CAGHRKTSYDKVIF

SEQ ID NO: 380096 - protein, 13 aa, Homo sapiens
  CDR3 for beta chain variable domain of TCR clone 190048 (TRBV14, TRBJ1-2)
CAGSEDRRYGYTF

SEQ ID NO: 380097 - protein, 14 aa, Homo sapiens
  CDR3 for alpha chain variable domain of TCR clone 190049 (TRAV4, TRAJ17)
CLVGDIAAGNKLTF

SEQ ID NO: 380098 - protein, 13 aa, Homo sapiens
  CDR3 for beta chain variable domain of TCR clone 190049 (TRBV18, TRBJ2-7)
CASQSGGGYEQYF

SEQ ID NO: 380099 - protein, 16 aa, Homo sapiens
  CDR3 for alpha chain variable domain of TCR clone 190050 (TRAV20, TRAJ38)
CAVQASNAGNNRKLIW

SEQ ID NO: 380100 - protein, 17 aa, Homo sapiens
  CDR3 for beta chain variable domain of TCR clone 190050 (TRBV13, TRBJ2-3)
CASSLSRVAGGRNTQYF

SEQ ID NO: 380101 - protein, 14 aa, Homo sapiens
  CDR3 for alpha chain variable domain of TCR clone 190051 (TRAV12-1, TRAJ43)
CVVNGRSNNNDLRF

SEQ ID NO: 380102 - protein, 13 aa, Homo sapiens
  CDR3 for beta chain variable domain of TCR clone 190051 (TRBV2, TRBJ1-4)
CASSELGVEKLFF

SEQ ID NO: 380103 - protein, 15 aa, Homo sapiens
  CDR3 for alpha chain variable domain of TCR clone 190052 (TRAV27, TRAJ38)
CAARRNAGNNRKLIW

SEQ ID NO: 380104 - protein, 18 aa, Homo sapiens
  CDR3 for beta chain variable domain of TCR clone 190052 (TRBV4-1, TRBJ1-5)
CASSQDPRGQGLNQPQHF

SEQ ID NO: 380105 - protein, 14 aa, Homo sapiens
  CDR3 for alpha chain variable domain of TCR clone 190053 (TRAV34, TRAJ22)
CGADTSGSARQLTF

SEQ ID NO: 380106 - protein, 15 aa, Homo sapiens
  CDR3 for beta chain variable domain of TCR clone 190053 (TRBV19, TRBJ2-1)
CASSIQATSYNEQFF

SEQ ID NO: 380107 - protein, 11 aa, Homo sapiens
  CDR3 for alpha chain variable domain of TCR clone 190054 (TRAV3, TRAJ21)
CAVGNFNKFYS

SEQ ID NO: 380108 - protein, 16 aa, Homo sapiens
  CDR3 for beta chain variable domain of TCR clone 190054 (TRBV19, TRBJ2-1)
CASSKAGPRSYNEQFF

SEQ ID NO: 380109 - protein, 10 aa, Homo sapiens
  CDR3 for alpha chain variable domain of TCR clone 190055 (TRAV2, TRAJ34)
CAVVNDKLIF

SEQ ID NO: 380110 - protein, 15 aa, Homo sapiens
  CDR3 for beta chain variable domain of TCR clone 190055 (TRBV3-1, TRBJ2-2)
CASSQDWTRAGGLFF

SEQ ID NO: 380111 - protein, 16 aa, Homo sapiens
  CDR3 for alpha chain variable domain of TCR clone 190056 (TRAV30, TRAJ24)
CGTEIVDADSWEKFQF

SEQ ID NO: 380112 - protein, 14 aa, Homo sapiens
  CDR3 for beta chain variable domain of TCR clone 190056 (TRBV6-1, TRBJ1-1)
CASSGTGLNTEAFF

SEQ ID NO: 380113 - protein, 11 aa, Homo sapiens
  CDR3 for alpha chain variable domain of TCR clone 190057 (TRAV17, TRAJ21)
CATGNFNKFYF

SEQ ID NO: 380114 - protein, 13 aa, Homo sapiens
  CDR3 for beta chain variable domain of TCR clone 190057 (TRBV7-2, TRBJ2-5)
CASSQTSVETQYF

SEQ ID NO: 380115 - protein, 14 aa, Homo sapiens
  CDR3 for alpha chain variable domain of TCR clone 190058 (TRAV36/DV7, TRAJ44)
CCEANTGTASKLTF

SEQ ID NO: 380116 - protein, 14 aa, Homo sapiens
  CDR3 for beta chain variable domain of TCR clone 190058 (TRBV20-1, TRBJ1-3)
CSASPTGAGNTIYF

SEQ ID NO: 380117 - protein, 14 aa, Homo sapiens
  CDR3 for alpha chain variable domain of TCR clone 190059 (TRAV1-2, TRAJ40)
CAVREDTGFQKLVF

SEQ ID NO: 380118 - protein, 12 aa, Homo sapiens
  CDR3 for beta chain variable domain of TCR clone 190059 (TRBV11-2, TRBJ2-1)
CASSPGNNEQFF

SEQ ID NO: 380119 - protein, 15 aa, Homo sapiens
  CDR3 for alpha chain variable domain of TCR clone 190060 (TRAV27, TRAJ50)
CAGVGRGTSYDKVIF

SEQ ID NO: 380120 - protein, 14 aa, Homo sapiens
  CDR3 for beta chain variable domain of TCR clone 190060 (TRBV7-2, TRBJ1-1)
CASSFYDLNTVAFF

SEQ ID NO: 380121 - protein, 12 aa, Homo sapiens
  CDR3 for alpha chain variable domain of TCR clone 190061 (TRAV1-2, TRAJ29)
CAVPSGNTPLVF

SEQ ID NO: 380122 - protein, 14 aa, Homo sapiens
  CDR3 for beta chain variable domain of TCR clone 190061 (TRBV5-1, TRBJ2-7)
CASSRGESLYEQYF

SEQ ID NO: 380123 - protein, 15 aa, Homo sapiens
  CDR3 for alpha chain variable domain of TCR clone 190062 (TRAV26-1, TRAJ37)
CIVRVADGTTGKLIF

SEQ ID NO: 380124 - protein, 14 aa, Homo sapiens
  CDR3 for beta chain variable domain of TCR clone 190062 (TRBV10-3, TRBJ2-2)
CATFGQLNTGELFF

SEQ ID NO: 380125 - protein, 15 aa, Homo sapiens
  CDR3 for alpha chain variable domain of TCR clone 190063 (TRAV26-2, TRAJ45)
CILRDRVDQEEVLTD

SEQ ID NO: 380126 - protein, 15 aa, Homo sapiens
  CDR3 for beta chain variable domain of TCR clone 190063 (TRBV7-9, TRBJ2-7)
CASSPGGGLTYEQYF

SEQ ID NO: 380127 - protein, 13 aa, Homo sapiens
  CDR3 for alpha chain variable domain of TCR clone 190064 (TRAV8-3, TRAJ43)
CAVGPDNNNDMRF

SEQ ID NO: 380128 - protein, 14 aa, Homo sapiens
  CDR3 for beta chain variable domain of TCR clone 190064 (TRBV19, TRBJ2-1)
CASPTIVLSGEQFF

SEQ ID NO: 380129 - protein, 13 aa, Homo sapiens
  CDR3 for alpha chain variable domain of TCR clone 190065 (TRAV3, TRAJ21)
CAVREPDFNKFYF

SEQ ID NO: 380130 - protein, 13 aa, Homo sapiens
  CDR3 for beta chain variable domain of TCR clone 190065 (TRBV9, TRBJ2-1)
CASSVGQGGEQFF

SEQ ID NO: 380131 - protein, 17 aa, Homo sapiens
  CDR3 for alpha chain variable domain of TCR clone 190066 (TRAV3, TRAJ42)
CAVRDRDYGGSQGTLIF

SEQ ID NO: 380132 - protein, 12 aa, Homo sapiens
  CDR3 for beta chain variable domain of TCR clone 190066 (TRBV14, TRBJ2-7)
CASSLYKDEQYF

SEQ ID NO: 380133 - protein, 17 aa, Homo sapiens
  CDR3 for alpha chain variable domain of TCR clone 190067 (TRAV26-1, TRAJ46)
IASSESEKKSTGDKLTF

SEQ ID NO: 380134 - protein, 16 aa, Homo sapiens
  CDR3 for beta chain variable domain of TCR clone 190067 (TRBV27, TRBJ2-2)
CASSFRGLVRTGELFF

SEQ ID NO: 380135 - protein, 14 aa, Homo sapiens
  CDR3 for alpha chain variable domain of TCR clone 190068 (TRAV13-1, TRAJ13)
CAASRVGGYQKVSF

SEQ ID NO: 380136 - protein, 17 aa, Homo sapiens
  CDR3 for beta chain variable domain of TCR clone 190068 (TRBV15, TRBJ1-5)
CATSSAPPGTRNQPQHF

SEQ ID NO: 380137 - protein, 11 aa, Homo sapiens
  CDR3 for alpha chain variable domain of TCR clone 190069 (TRAV3, TRAJ21)
CAVGNFNKFYF

SEQ ID NO: 380138 - protein, 12 aa, Homo sapiens
  CDR3 for beta chain variable domain of TCR clone 190069 (TRBV12-4, TRBJ1-2)
CASSFIWLNLRF

SEQ ID NO: 380139 - protein, 16 aa, Homo sapiens
  CDR3 for alpha chain variable domain of TCR clone 190070 (TRAV3, TRAJ32)
CAVREMGGGATNKLIF

SEQ ID NO: 380140 - protein, 11 aa, Homo sapiens
  CDR3 for beta chain variable domain of TCR clone 190070 (TRBV12-4, TRBJ2-1)
CASSRLNEQFF

SEQ ID NO: 380141 - protein, 13 aa, Homo sapiens
  CDR3 for alpha chain variable domain of TCR clone 190071 (TRAV1-2, TRAJ24)
CAVRADSWGKFQF

SEQ ID NO: 380142 - protein, 14 aa, Homo sapiens
  CDR3 for beta chain variable domain of TCR clone 190071 (TRBV5-1, TRBJ2-5)
CASSFGGSQETQYF

SEQ ID NO: 380143 - protein, 15 aa, Homo sapiens
  CDR3 for alpha chain variable domain of TCR clone 190072 (TRAV12-2, TRAJ53)
CAVNGGGGGNYKLTF

SEQ ID NO: 380144 - protein, 17 aa, Homo sapiens
  CDR3 for beta chain variable domain of TCR clone 190072 (TRBV7-3, TRBJ2-3)
CASSLMKRMGGADTQYF

SEQ ID NO: 380145 - protein, 18 aa, Homo sapiens
  CDR3 for alpha chain variable domain of TCR clone 190073 (TRAV13-1, TRAJ52)
CAASKRSAGGTSSGKLTF

SEQ ID NO: 380146 - protein, 16 aa, Homo sapiens
  CDR3 for beta chain variable domain of TCR clone 190073 (TRBV12-5, TRBJ2-5)
CASGPRTSGNQETQYF

SEQ ID NO: 380147 - protein, 13 aa, Homo sapiens
  CDR3 for alpha chain variable domain of TCR clone 190074 (TRAV13-1, TRAJ21)
CAASIYNFNKFYF

SEQ ID NO: 380148 - protein, 15 aa, Homo sapiens
  CDR3 for beta chain variable domain of TCR clone 190074 (TRBV6-1, TRBJ2-4)
CASSEAVWTINIQYF

SEQ ID NO: 380149 - protein, 17 aa, Homo sapiens
  CDR3 for alpha chain variable domain of TCR clone 190075 (TRAV26-1, TRAJ37)
CIVRVITVSSNTGKLIF

SEQ ID NO: 380150 - protein, 13 aa, Homo sapiens
  CDR3 for beta chain variable domain of TCR clone 190075 (TRBV2, TRBJ2-1)
CASSGSSSGEQFF

SEQ ID NO: 380151 - protein, 12 aa, Homo sapiens
  CDR3 for alpha chain variable domain of TCR clone 190076 (TRAV12-1, TRAJ40)
CVFYSGTYKYIF

SEQ ID NO: 380152 - protein, 12 aa, Homo sapiens
  CDR3 for beta chain variable domain of TCR clone 190076 (TRBV7-3, TRBJ2-1)
CASSFINNEQFF

SEQ ID NO: 380153 - protein, 14 aa, Homo sapiens
  CDR3 for alpha chain variable domain of TCR clone 190077 (TRAV12-1, TRAJ27)
CGEHISTNAGKSTF

SEQ ID NO: 380154 - protein, 15 aa, Homo sapiens
  CDR3 for beta chain variable domain of TCR clone 190077 (TRBV19, TRBJ1-1)
CASTSGQIQNTEAFF

SEQ ID NO: 380155 - protein, 15 aa, Homo sapiens
  CDR3 for alpha chain variable domain of TCR clone 190078 (TRAV34, TRAJ38)
CGADFTPGNNRKLIW

SEQ ID NO: 380156 - protein, 15 aa, Homo sapiens
  CDR3 for beta chain variable domain of TCR clone 190078 (TRBV7-9, TRBJ2-7)
CASSLALAEAYEQYF

SEQ ID NO: 380157 - protein, 14 aa, Homo sapiens
  CDR3 for alpha chain variable domain of TCR clone 190079 (TRAV8-6, TRAJ30)
CAVRPVNRDDRIIF

SEQ ID NO: 380158 - protein, 17 aa, Homo sapiens
  CDR3 for beta chain variable domain of TCR clone 190079 (TRBV7-8, TRBJ2-6)
CASSAGTGGAGANVLSF

SEQ ID NO: 380159 - protein, 17 aa, Homo sapiens
  CDR3 for alpha chain variable domain of TCR clone 190080 (TRAV3, TRAJ13)
CAVRDMRRAGGYQKVTF

SEQ ID NO: 380160 - protein, 14 aa, Homo sapiens
  CDR3 for beta chain variable domain of TCR clone 190080 (TRBV5-1, TRBJ2-7)
CASSLTGSGYEQYF

SEQ ID NO: 380161 - protein, 11 aa, Homo sapiens
  CDR3 for alpha chain variable domain of TCR clone 190081 (TRAV2, TRAJ33)
CALDSNYQLIW

SEQ ID NO: 380162 - protein, 12 aa, Homo sapiens
  CDR3 for beta chain variable domain of TCR clone 190081 (TRBV11-2, TRBJ2-2)
CASSLGGGELFF

SEQ ID NO: 380163 - protein, 13 aa, Homo sapiens
  CDR3 for alpha chain variable domain of TCR clone 190082 (TRAV21, TRAJ27)
CAARPGNAGKSTF

SEQ ID NO: 380164 - protein, 15 aa, Homo sapiens
  CDR3 for beta chain variable domain of TCR clone 190082 (TRBV27, TRBJ1-6)
CASSFDRGLGSPLHF

SEQ ID NO: 380165 - protein, 15 aa, Homo sapiens
  CDR3 for alpha chain variable domain of TCR clone 190083 (TRAV3, TRAJ22)
CAVRGRGGSARQLTF

SEQ ID NO: 380166 - protein, 15 aa, Homo sapiens
  CDR3 for beta chain variable domain of TCR clone 190083 (TRBV10-3, TRBJ2-3)
CAISLTSGGTDTQYF

SEQ ID NO: 380167 - protein, 16 aa, Homo sapiens
  CDR3 for alpha chain variable domain of TCR clone 190084 (TRAV3, TRAJ3)
CAVRDRAKSSASKIIF

SEQ ID NO: 380168 - protein, 16 aa, Homo sapiens
  CDR3 for beta chain variable domain of TCR clone 190084 (TRBV20-1, TRBJ2-4)
CSATSLAELAKNFQYF

SEQ ID NO: 380169 - protein, 13 aa, Homo sapiens
  CDR3 for alpha chain variable domain of TCR clone 190085 (TRAV12-2, TRAJ49)
CAVNMRTGNQFSF

SEQ ID NO: 380170 - protein, 11 aa, Homo sapiens
  CDR3 for beta chain variable domain of TCR clone 190085 (TRBV5-5, TRBJ1-1)
CASSLGVEAFF

SEQ ID NO: 380171 - protein, 13 aa, Homo sapiens
  CDR3 for alpha chain variable domain of TCR clone 190086 (TRAV35, TRAJ33)
CAGQLYGAYKLIW

SEQ ID NO: 380172 - protein, 14 aa, Homo sapiens
  CDR3 for beta chain variable domain of TCR clone 190086 (TRBV7-2, TRBJ1-1)
CASSLGGAGTEAFF

SEQ ID NO: 380173 - protein, 15 aa, Homo sapiens
  CDR3 for alpha chain variable domain of TCR clone 190087 (TRAV23/DV6, TRAJ18)
CAASFRGSTLGRLYS

SEQ ID NO: 380174 - protein, 13 aa, Homo sapiens
  CDR3 for beta chain variable domain of TCR clone 190087 (TRBV28, TRBJ2-7)
CAILDRAGGEQYF

SEQ ID NO: 380175 - protein, 13 aa, Homo sapiens
  CDR3 for alpha chain variable domain of TCR clone 190088 (TRAV35, TRAJ42)
CAGFPGSLGNLIF

SEQ ID NO: 380176 - protein, 14 aa, Homo sapiens
  CDR3 for beta chain variable domain of TCR clone 190088 (TRBV4-1, TRBJ2-2)
CASSQAVNTGELFF

SEQ ID NO: 380177 - protein, 16 aa, Homo sapiens
  CDR3 for alpha chain variable domain of TCR clone 190089 (TRAV3, TRAJ37)
CAVRGKGSGNTGKLIF

SEQ ID NO: 380178 - protein, 13 aa, Homo sapiens
  CDR3 for beta chain variable domain of TCR clone 190089 (TRBV12-4, TRBJ1-1)
CASSPGTGFEAFF

SEQ ID NO: 380179 - protein, 10 aa, Homo sapiens
  CDR3 for alpha chain variable domain of TCR clone 190090 (TRAV23/DV6, TRAJ57)
CAASSTLSQG

SEQ ID NO: 380180 - protein, 16 aa, Homo sapiens
  CDR3 for beta chain variable domain of TCR clone 190090 (TRBV28, TRBJ2-2)
CASSLEGGSNTGELFF

SEQ ID NO: 380181 - protein, 14 aa, Homo sapiens
  CDR3 for alpha chain variable domain of TCR clone 190091 (TRAV1-2, TRAJ8)
CAVREDTGFQKLVF

SEQ ID NO: 380182 - protein, 14 aa, Homo sapiens
  CDR3 for beta chain variable domain of TCR clone 190091 (TRBV20-1, TRBJ2-3)
CSARSGVSTDTQYF

SEQ ID NO: 380183 - protein, 21 aa, Homo sapiens
  CDR3 for alpha chain variable domain of TCR clone 190092 (TRAV1-1, TRAJ22)
CLLLLRCERSGSSGSARQLTF

SEQ ID NO: 380184 - protein, 13 aa, Homo sapiens
  CDR3 for beta chain variable domain of TCR clone 190092 (TRBV7-8, TRBJ2-7)
RRVRLTEMGEQYF

SEQ ID NO: 380185 - protein, 12 aa, Homo sapiens
  CDR3 for alpha chain variable domain of TCR clone 190093 (TRAV12-1, TRAJ40)
CVVYSGTYKYIF

SEQ ID NO: 380186 - protein, 15 aa, Homo sapiens
  CDR3 for beta chain variable domain of TCR clone 190093 (TRBV7-2, TRBJ2-3)
CASSLAGAFIDTQYF

SEQ ID NO: 380187 - protein, 13 aa, Homo sapiens
  CDR3 for alpha chain variable domain of TCR clone 190094 (TRAV2, TRAJ40)
CAVVTSGTCKYIV

SEQ ID NO: 380188 - protein, 15 aa, Homo sapiens
  CDR3 for beta chain variable domain of TCR clone 190094 (TRBV11-3, TRBJ2-3)
CASLKDGREGDTQYF

SEQ ID NO: 380189 - protein, 17 aa, Homo sapiens
  CDR3 for alpha chain variable domain of TCR clone 190095 (TRAV3, TRAJ6)
CAVRDGPRAGGSYIPTF

SEQ ID NO: 380190 - protein, 12 aa, Homo sapiens
  CDR3 for beta chain variable domain of TCR clone 190095 (TRBV11-3, TRBJ2-4)
CASSTWTGIQYF

SEQ ID NO: 380191 - protein, 14 aa, Homo sapiens
  CDR3 for alpha chain variable domain of TCR clone 190096 (TRAV2, TRAJ9)
CAVEDRSGGFKTIF

SEQ ID NO: 380192 - protein, 15 aa, Homo sapiens
  CDR3 for beta chain variable domain of TCR clone 190096 (TRBV28, TRBJ2-4)
CAAGSGTLLMGIQYF

SEQ ID NO: 380193 - protein, 14 aa, Homo sapiens
  CDR3 for alpha chain variable domain of TCR clone 190097 (TRAV23/DV6, TRAJ58)
CAGMRGTSGSRLTF

SEQ ID NO: 380194 - protein, 13 aa, Homo sapiens
  CDR3 for beta chain variable domain of TCR clone 190097 (TRBV28, TRBJ2-7)
CASRSSGVYELYF

SEQ ID NO: 380195 - protein, 14 aa, Homo sapiens
  CDR3 for alpha chain variable domain of TCR clone 190098 (TRAV12-1, TRAJ38)
CVVNNAGNNRKLIW

SEQ ID NO: 380196 - protein, 14 aa, Homo sapiens
  CDR3 for beta chain variable domain of TCR clone 190098 (TRBV7-3, TRBJ2-2)
CASSSGGYTGELFF

SEQ ID NO: 380197 - protein, 13 aa, Homo sapiens
  CDR3 for alpha chain variable domain of TCR clone 190099 (TRAV4, TRAJ42)
CLVGGGSQGNLIF

SEQ ID NO: 380198 - protein, 16 aa, Homo sapiens
  CDR3 for beta chain variable domain of TCR clone 190099 (TRBV5-1, TRBJ2-3)
CASSLQGRVGADTQYC

SEQ ID NO: 380199 - protein, 14 aa, Homo sapiens
  CDR3 for alpha chain variable domain of TCR clone 190100 (TRAV12-3, TRAJ10)
SHLPLTGGGNKLTF

SEQ ID NO: 380200 - protein, 14 aa, Homo sapiens
  CDR3 for beta chain variable domain of TCR clone 190100 (TRBV19, TRBJ2-1)
CANPTFVLSGEKFF

SEQ ID NO: 380201 - protein, 17 aa, Homo sapiens
  CDR3 for alpha chain variable domain of TCR clone 190101 (TRAV3, TRAJ42)
CAVRDRDYGGSQGNLIF

SEQ ID NO: 380202 - protein, 18 aa, Homo sapiens
  CDR3 for beta chain variable domain of TCR clone 190101 (TRBV6-6, TRBJ2-7)
CTSVPAVTRMGGSYEQYF

SEQ ID NO: 380203 - protein, 13 aa, Homo sapiens
  CDR3 for alpha chain variable domain of TCR clone 190102 (TRAV8-4, TRAJ48)
CAVSLFGNEKLTF

SEQ ID NO: 380204 - protein, 13 aa, Homo sapiens
  CDR3 for beta chain variable domain of TCR clone 190102 (TRBV14, TRBJ1-1)
CASSREFGTEAFF

SEQ ID NO: 380205 - protein, 16 aa, Homo sapiens
  CDR3 for alpha chain variable domain of TCR clone 190103 (TRAV35, TRAJ37)
CWAFLRGSSNTGKLIF

SEQ ID NO: 380206 - protein, 13 aa, Homo sapiens
  CDR3 for beta chain variable domain of TCR clone 190103 (TRBV2, TRBJ1-2)
CASAVRGNYGYTF

SEQ ID NO: 380207 - protein, 14 aa, Homo sapiens
  CDR3 for alpha chain variable domain of TCR clone 190104 (TRAV2, TRAJ9)
CAVEDRSGGFKTIF

SEQ ID NO: 380208 - protein, 15 aa, Homo sapiens
  CDR3 for beta chain variable domain of TCR clone 190104 (TRBV7-2, TRBJ2-1)
CASSSGLSGGNEQFF

SEQ ID NO: 380209 - protein, 17 aa, Homo sapiens
  CDR3 for alpha chain variable domain of TCR clone 190105 (TRAV1-1, TRAJ32)
CAVRVDELWWCYKQAHL

SEQ ID NO: 380210 - protein, 14 aa, Homo sapiens
  CDR3 for beta chain variable domain of TCR clone 190105 (TRBV11-2, TRBJ2-5)
CASSRTGGIETQYF

SEQ ID NO: 380211 - protein, 15 aa, Homo sapiens
  CDR3 for alpha chain variable domain of TCR clone 190106 (TRAV13-1, TRAJ45)
CAASVSGGGADGLTF

SEQ ID NO: 380212 - protein, 14 aa, Homo sapiens
  CDR3 for beta chain variable domain of TCR clone 190106 (TRBV12-4, TRBJ1-2)
CASSFVGTAYGYTF

SEQ ID NO: 380213 - protein, 15 aa, Homo sapiens
  CDR3 for alpha chain variable domain of TCR clone 190107 (TRAV21, TRAJ52)
CAVRGGGTSYGKLTF

SEQ ID NO: 380214 - protein, 14 aa, Homo sapiens
  CDR3 for beta chain variable domain of TCR clone 190107 (TRBV5-4, TRBJ2-5)
CASSLVRGQETQYF

SEQ ID NO: 380215 - protein, 13 aa, Homo sapiens
  CDR3 for alpha chain variable domain of TCR clone 190108 (TRAV12-1, TRAJ7)
CVVNMRGNNRLAF

SEQ ID NO: 380216 - protein, 14 aa, Homo sapiens
  CDR3 for beta chain variable domain of TCR clone 190108 (TRBV10-3, TRBJ2-7)
CHQCGTSETYEQYF

SEQ ID NO: 380217 - protein, 16 aa, Homo sapiens
  CDR3 for alpha chain variable domain of TCR clone 190109 (TRAV12-2, TRAJ50)
CAVGTATKTSYNKVIL

SEQ ID NO: 380218 - protein, 12 aa, Homo sapiens
  CDR3 for beta chain variable domain of TCR clone 190109 (TRBV12-4, TRBJ1-5)
CASSLGRQPQHF

SEQ ID NO: 380219 - protein, 14 aa, Homo sapiens
  CDR3 for alpha chain variable domain of TCR clone 190110 (TRAV34, TRAJ44)
CGADGTGTASKLTF

SEQ ID NO: 380220 - protein, 14 aa, Homo sapiens
  CDR3 for beta chain variable domain of TCR clone 190110 (TRBV7-2, TRBJ2-5)
CASSPRGSSETQYF

SEQ ID NO: 380221 - protein, 15 aa, Homo sapiens
  CDR3 for alpha chain variable domain of TCR clone 190111 (TRAV8-3, TRAJ15)
CAVGAPNQAGTALIF

SEQ ID NO: 380222 - protein, 14 aa, Homo sapiens
  CDR3 for beta chain variable domain of TCR clone 190111 (TRBV20-1, TRBJ2-1)
CSPNDEASYNEQFF

SEQ ID NO: 380223 - protein, 12 aa, Homo sapiens
  CDR3 for alpha chain variable domain of TCR clone 190112 (TRAV13-2, TRAJ23)
FAERHRGGKLIF

SEQ ID NO: 380224 - protein, 16 aa, Homo sapiens
  CDR3 for beta chain variable domain of TCR clone 190112 (TRBV4-1, TRBJ2-5)
CASSHADRAGGETQYF

SEQ ID NO: 380225 - protein, 13 aa, Homo sapiens
  CDR3 for alpha chain variable domain of TCR clone 190113 (TRAV38-1, TRAJ7)
CAFMMDVNNRLAF

SEQ ID NO: 380226 - protein, 12 aa, Homo sapiens
  CDR3 for beta chain variable domain of TCR clone 190113 (TRBV11-2, TRBJ2-2)
CASSLGGWELFF

SEQ ID NO: 380227 - protein, 11 aa, Homo sapiens
  CDR3 for alpha chain variable domain of TCR clone 190114 (TRAV3, TRAJ17)
CAEAAGNKLTF

SEQ ID NO: 380228 - protein, 15 aa, Homo sapiens
  CDR3 for beta chain variable domain of TCR clone 190114 (TRBV12-4, TRBJ2-7)
CARSLGSGGPYEQYF

SEQ ID NO: 380229 - protein, 15 aa, Homo sapiens
  CDR3 for alpha chain variable domain of TCR clone 190115 (TRAV17, TRAJ52)
CATEAGGTSYGKLTF

SEQ ID NO: 380230 - protein, 15 aa, Homo sapiens
  CDR3 for beta chain variable domain of TCR clone 190115 (TRBV20-1, TRBJ2-1)
QCWKARGGPYNEQFF

SEQ ID NO: 380231 - protein, 10 aa, Homo sapiens
  CDR3 for alpha chain variable domain of TCR clone 190116 (TRAV3, )
CAVRDCLNAG

SEQ ID NO: 380232 - protein, 19 aa, Homo sapiens
  CDR3 for beta chain variable domain of TCR clone 190116 (TRBV7-2, TRBJ2-3)
CASSFLSRNWGGGTDTQYF

SEQ ID NO: 380233 - protein, 15 aa, Homo sapiens
  CDR3 for alpha chain variable domain of TCR clone 190117 (TRAV12-2, TRAJ42)
CAVGDYGGSQGNLIF

SEQ ID NO: 380234 - protein, 14 aa, Homo sapiens
  CDR3 for beta chain variable domain of TCR clone 190117 (TRBV20-1, TRBJ2-7)
CSARDRAGDYEQYF

SEQ ID NO: 380235 - protein, 14 aa, Homo sapiens
  CDR3 for alpha chain variable domain of TCR clone 190118 (TRAV1-2, TRAJ16)
CAVNRFSDGQKLLF

SEQ ID NO: 380236 - protein, 15 aa, Homo sapiens
  CDR3 for beta chain variable domain of TCR clone 190118 (TRBV5-7, TRBJ2-1)
CASSLASGEGNEQFF

SEQ ID NO: 380237 - protein, 22 aa, Homo sapiens
  CDR3 for alpha chain variable domain of TCR clone 190119 (TRAV8-2, TRAJ45)
HLTKPSAHMSDAAEYSADGLTF

SEQ ID NO: 380238 - protein, 15 aa, Homo sapiens
  CDR3 for beta chain variable domain of TCR clone 190119 (TRBV7-2, TRBJ1-2)
CASSLVSGGDYGYTF

SEQ ID NO: 380239 - protein, 12 aa, Homo sapiens
  CDR3 for alpha chain variable domain of TCR clone 190120 (TRAV17, TRAJ30)
CVQERRDDKIIF

SEQ ID NO: 380240 - protein, 14 aa, Homo sapiens
  CDR3 for beta chain variable domain of TCR clone 190120 (TRBV7-7, TRBJ2-2)
CASSRDRSTGELFF

SEQ ID NO: 380241 - protein, 14 aa, Homo sapiens
  CDR3 for alpha chain variable domain of TCR clone 190121 (TRAV35, TRAJ33)
CAGSSQDSYYQLIW

SEQ ID NO: 380242 - protein, 15 aa, Homo sapiens
  CDR3 for beta chain variable domain of TCR clone 190121 (TRBV28, TRBJ2-5)
CASSPGQGSIETQYF

SEQ ID NO: 380243 - protein, 16 aa, Homo sapiens
  CDR3 for alpha chain variable domain of TCR clone 190122 (TRAV12-2, TRAJ45)
CAVIFLSGGCADGLTS

SEQ ID NO: 380244 - protein, 19 aa, Homo sapiens
  CDR3 for beta chain variable domain of TCR clone 190122 (TRBV28, TRBJ2-4)
CASSFQPGGPAHSKNIQYF

SEQ ID NO: 380245 - protein, 13 aa, Homo sapiens
  CDR3 for alpha chain variable domain of TCR clone 190123 (TRAV1-2, TRAJ9)
CAALNTGGFKTIF

SEQ ID NO: 380246 - protein, 13 aa, Homo sapiens
  CDR3 for beta chain variable domain of TCR clone 190123 (TRBV6-5, TRBJ2-5)
CASSPQGGETQYF

SEQ ID NO: 380247 - protein, 13 aa, Homo sapiens
  CDR3 for alpha chain variable domain of TCR clone 190124 (TRAV12-2, TRAJ42)
CAVKRGSQGNLIF

SEQ ID NO: 380248 - protein, 13 aa, Homo sapiens
  CDR3 for beta chain variable domain of TCR clone 190124 (TRBV7-9, TRBJ2-3)
CASSPGSTETQYF

SEQ ID NO: 380249 - protein, 14 aa, Homo sapiens
  CDR3 for alpha chain variable domain of TCR clone 190125 (TRAV13-2, TRAJ17)
CAENGKAAGNKLTF

SEQ ID NO: 380250 - protein, 12 aa, Homo sapiens
  CDR3 for beta chain variable domain of TCR clone 190125 (TRBV11-2, TRBJ2-2)
CASSLGGGELFF

SEQ ID NO: 380251 - protein, 13 aa, Homo sapiens
  CDR3 for alpha chain variable domain of TCR clone 190126 (TRAV8-6, TRAJ49)
CAVITNTGNQFYF

SEQ ID NO: 380252 - protein, 15 aa, Homo sapiens
  CDR3 for beta chain variable domain of TCR clone 190126 (TRBV6-5, TRBJ2-3)
CASSYSGSSTDTQYF

SEQ ID NO: 380253 - protein, 13 aa, Homo sapiens
  CDR3 for alpha chain variable domain of TCR clone 190127 (TRAV8-1, TRAJ15)
CAVKNQAGPALIF

SEQ ID NO: 380254 - protein, 15 aa, Homo sapiens
  CDR3 for beta chain variable domain of TCR clone 190127 (TRBV7-3, TRBJ2-7)
CASSLTPTGYDEQYF

SEQ ID NO: 380255 - protein, 23 aa, Homo sapiens
  CDR3 for alpha chain variable domain of TCR clone 190128 (TRAV26-1, TRAJ38)
CIADNAGNNHIQNPDPAVYQLRD

SEQ ID NO: 380256 - protein, 15 aa, Homo sapiens
  CDR3 for beta chain variable domain of TCR clone 190128 (TRBV20-1, TRBJ1-1)
CSARGGGNTEAFLDK

SEQ ID NO: 380257 - protein, 13 aa, Homo sapiens
  CDR3 for alpha chain variable domain of TCR clone 190129 (TRAV23/DV6, TRAJ47)
CAASMTRGNKLVF

SEQ ID NO: 380258 - protein, 14 aa, Homo sapiens
  CDR3 for beta chain variable domain of TCR clone 190129 (TRBV7-3, TRBJ1-1)
CASSIKGGNTEAFF

SEQ ID NO: 380259 - protein, 18 aa, Homo sapiens
  CDR3 for alpha chain variable domain of TCR clone 190130 (TRAV21, TRAJ52)
CAVRPSPAGGTSYGKLTF

SEQ ID NO: 380260 - protein, 14 aa, Homo sapiens
  CDR3 for beta chain variable domain of TCR clone 190130 (TRBV4-1, TRBJ2-5)
CASSRSGSGETQYF

SEQ ID NO: 380261 - protein, 15 aa, Homo sapiens
  CDR3 for alpha chain variable domain of TCR clone 190131 (TRAV13-2, TRAJ40)
CAENRSRQGTYKYIF

SEQ ID NO: 380262 - protein, 15 aa, Homo sapiens
  CDR3 for beta chain variable domain of TCR clone 190131 (TRBV19, TRBJ2-1)
CASGMGWNSNNEQFF

SEQ ID NO: 380263 - protein, 16 aa, Homo sapiens
  CDR3 for alpha chain variable domain of TCR clone 190132 (TRAV3, TRAJ37)
CAVRPHGSGNTGKLIF

SEQ ID NO: 380264 - protein, 12 aa, Homo sapiens
  CDR3 for beta chain variable domain of TCR clone 190132 (TRBV5-1, TRBJ2-7)
CASSFRGYEQYL

SEQ ID NO: 380265 - protein, 15 aa, Homo sapiens
  CDR3 for alpha chain variable domain of TCR clone 190133 (TRAV21, TRAJ24)
CAARSSTDSCGTLQF

SEQ ID NO: 380266 - protein, 13 aa, Homo sapiens
  CDR3 for beta chain variable domain of TCR clone 190133 (TRBV11-2, TRBJ2-5)
CASSSTGEETQYF

SEQ ID NO: 380267 - protein, 16 aa, Homo sapiens
  CDR3 for alpha chain variable domain of TCR clone 190134 (TRAV12-1, TRAJ43)
SVVNPHRFGAGTRLTV

SEQ ID NO: 380268 - protein, 13 aa, Homo sapiens
  CDR3 for beta chain variable domain of TCR clone 190134 (TRBV20-1, TRBJ1-1)
CSARGGGNTEAFF

SEQ ID NO: 380269 - protein, 14 aa, Homo sapiens
  CDR3 for alpha chain variable domain of TCR clone 190135 (TRAV1-2, TRAJ8)
CAVREDTCFQKLVF

SEQ ID NO: 380270 - protein, 14 aa, Homo sapiens
  CDR3 for beta chain variable domain of TCR clone 190135 (TRBV7-6, TRBJ2-3)
CASSLGTVTDTQYF

SEQ ID NO: 380271 - protein, 13 aa, Homo sapiens
  CDR3 for alpha chain variable domain of TCR clone 190136 (TRAV17, TRAJ26)
CATVDNYGQNFVF

SEQ ID NO: 380272 - protein, 17 aa, Homo sapiens
  CDR3 for beta chain variable domain of TCR clone 190136 (TRBV24-1, TRBJ2-1)
CATSDVSTSGTYNEQFF

SEQ ID NO: 380273 - protein, 14 aa, Homo sapiens
  CDR3 for alpha chain variable domain of TCR clone 190137 (TRAV38-1, TRAJ45)
CASHSAGGADGLTF

SEQ ID NO: 380274 - protein, 13 aa, Homo sapiens
  CDR3 for beta chain variable domain of TCR clone 190137 (TRBV7-9, TRBJ2-3)
CASSPGSTDTQYF

SEQ ID NO: 380275 - protein, 14 aa, Homo sapiens
  CDR3 for alpha chain variable domain of TCR clone 190138 (TRAV1-2, TRAJ16)
CAVNRFSDGQTLLF

SEQ ID NO: 380276 - protein, 13 aa, Homo sapiens
  CDR3 for beta chain variable domain of TCR clone 190138 (TRBV20-1, TRBJ1-1)
CSARLGQGTEAFF

SEQ ID NO: 380277 - protein, 14 aa, Homo sapiens
  CDR3 for alpha chain variable domain of TCR clone 190139 (TRAV8-3, TRAJ4)
CAVGAAVGYNKLIF

SEQ ID NO: 380278 - protein, 15 aa, Homo sapiens
  CDR3 for beta chain variable domain of TCR clone 190139 (TRBV6-5, TRBJ2-1)
CASSYDAGAGNEPFF

SEQ ID NO: 380279 - protein, 14 aa, Homo sapiens
  CDR3 for alpha chain variable domain of TCR clone 190140 (TRAV12-3, TRAJ10)
SHLPLTGGGNKLTF

SEQ ID NO: 380280 - protein, 14 aa, Homo sapiens
  CDR3 for beta chain variable domain of TCR clone 190140 (TRBV7-9, TRBJ2-5)
CASSLAPDQETQYF

SEQ ID NO: 380281 - protein, 14 aa, Homo sapiens
  CDR3 for alpha chain variable domain of TCR clone 190141 (TRAV25, TRAJ35)
CARRMEGFGNVLHC

SEQ ID NO: 380282 - protein, 13 aa, Homo sapiens
  CDR3 for beta chain variable domain of TCR clone 190141 (TRBV7-2, IGHJ2)
CASSLAGLEKLFF

SEQ ID NO: 380283 - protein, 15 aa, Homo sapiens
  CDR3 for alpha chain variable domain of TCR clone 190142 (TRAV38-2/DV8, TRAJ57)
CAYKSGLGGSAKLVF

SEQ ID NO: 380284 - protein, 16 aa, Homo sapiens
  CDR3 for beta chain variable domain of TCR clone 190142 (TRBV28, TRBJ1-5)
CASSFRGGYSNQPQHF

SEQ ID NO: 380285 - protein, 12 aa, Homo sapiens
  CDR3 for alpha chain variable domain of TCR clone 190143 (TRAV13-2, TRAJ23)
CAEHHRGGKLIF

SEQ ID NO: 380286 - protein, 13 aa, Homo sapiens
  CDR3 for beta chain variable domain of TCR clone 190143 (TRBV7-9, TRBJ2-3)
CASSPVSTDTQYF

SEQ ID NO: 380287 - protein, 15 aa, Homo sapiens
  CDR3 for alpha chain variable domain of TCR clone 190144 (TRAV26-1, TRAJ29)
CIVRVEGSGNTPLAF

SEQ ID NO: 380288 - protein, 15 aa, Homo sapiens
  CDR3 for beta chain variable domain of TCR clone 190144 (TRBV7-9, TRBJ1-5)
CASSQGHQPNHPQHC

SEQ ID NO: 380289 - protein, 14 aa, Homo sapiens
  CDR3 for alpha chain variable domain of TCR clone 190145 (TRAV3, TRAJ37)
CAVKESGNTGKLIF

SEQ ID NO: 380290 - protein, 14 aa, Homo sapiens
  CDR3 for beta chain variable domain of TCR clone 190145 (TRBV2, TRBJ1-5)
CASSENRGGQHQHF

SEQ ID NO: 380291 - protein, 10 aa, Homo sapiens
  CDR3 for alpha chain variable domain of TCR clone 190146 (TRAV26-1, TRAJ40)
CIAGTYKYIF

SEQ ID NO: 380292 - protein, 15 aa, Homo sapiens
  CDR3 for beta chain variable domain of TCR clone 190146 (TRBV5-1, TRBJ2-5)
CASSLGTGVMATQYF

SEQ ID NO: 380293 - protein, 16 aa, Homo sapiens
  CDR3 for alpha chain variable domain of TCR clone 190147 (TRAV16, TRAJ18)
CAPLGPRGSTLGRLYF

SEQ ID NO: 380294 - protein, 15 aa, Homo sapiens
  CDR3 for beta chain variable domain of TCR clone 190147 (TRBV27, TRBJ2-1)
CASSKGGGSPNEQFF

SEQ ID NO: 380295 - protein, 15 aa, Homo sapiens
  CDR3 for alpha chain variable domain of TCR clone 190148 (TRAV3, TRAJ17)
CAVRDTGAAGNKLTF

SEQ ID NO: 380296 - protein, 11 aa, Homo sapiens
  CDR3 for beta chain variable domain of TCR clone 190148 (TRBV7-2, TRBJ2-3)
CASSSSDTQYF

SEQ ID NO: 380297 - protein, 20 aa, Homo sapiens
  CDR3 for alpha chain variable domain of TCR clone 190149 (TRAV12-3, TRAJ53)
PPTSVQRNVNSGGSNYKLTF

SEQ ID NO: 380298 - protein, 14 aa, Homo sapiens
  CDR3 for beta chain variable domain of TCR clone 190149 (TRBV4-1, TRBJ1-2)
CASSQEDLLRGYTF

SEQ ID NO: 380299 - protein, 15 aa, Homo sapiens
  CDR3 for alpha chain variable domain of TCR clone 190150 (TRAV17, TRAJ22)
CATVAPSGSARQLTF

SEQ ID NO: 380300 - protein, 17 aa, Homo sapiens
  CDR3 for beta chain variable domain of TCR clone 190150 (TRBV20-1, TRBJ2-1)
CSARDPLAGVWDNEQFF

SEQ ID NO: 380301 - protein, 12 aa, Homo sapiens
  CDR3 for alpha chain variable domain of TCR clone 190151 (TRAV12-1, TRAJ40)
CVVYSGTYKYIF

SEQ ID NO: 380302 - protein, 18 aa, Homo sapiens
  CDR3 for beta chain variable domain of TCR clone 190151 (TRBV11-3, TRBJ2-3)
GASSLGGASRGAPNTQYF

SEQ ID NO: 380303 - protein, 14 aa, Homo sapiens
  CDR3 for alpha chain variable domain of TCR clone 190152 (TRAV8-1, TRAJ5)
CAVRTDTGRRALTF

SEQ ID NO: 380304 - protein, 15 aa, Homo sapiens
  CDR3 for beta chain variable domain of TCR clone 190152 (TRBV28, TRBJ2-5)
CASSSGRTIQETQYF

SEQ ID NO: 380305 - protein, 15 aa, Homo sapiens
  CDR3 for alpha chain variable domain of TCR clone 190153 (TRAV12-2, TRAJ53)
CAVNGGGGSNYKLTF

SEQ ID NO: 380306 - protein, 14 aa, Homo sapiens
  CDR3 for beta chain variable domain of TCR clone 190153 (TRBV11-2, TRBJ2-3)
CASSLYAGRDTQYF

SEQ ID NO: 380307 - protein, 13 aa, Homo sapiens
  CDR3 for alpha chain variable domain of TCR clone 190154 (TRAV21, TRAJ27)
CAARPGNAGKPTC

SEQ ID NO: 380308 - protein, 14 aa, Homo sapiens
  CDR3 for beta chain variable domain of TCR clone 190154 (TRBV7-6, TRBJ2-3)
CASSLGTVTDTQYF

SEQ ID NO: 380309 - protein, 12 aa, Homo sapiens
  CDR3 for alpha chain variable domain of TCR clone 190155 (TRAV3, TRAJ43)
CAVRDPNNDMRL

SEQ ID NO: 380310 - protein, 15 aa, Homo sapiens
  CDR3 for beta chain variable domain of TCR clone 190155 (TRBV27, TRBJ1-5)
CASSLGTGFYQPQHF

SEQ ID NO: 380311 - protein, 13 aa, Homo sapiens
  CDR3 for alpha chain variable domain of TCR clone 190156 (TRAV1-1, TRAJ23)
CAVVANQGGKLIF

SEQ ID NO: 380312 - protein, 16 aa, Homo sapiens
  CDR3 for beta chain variable domain of TCR clone 190156 (TRBV5-7, TRBJ1-2)
CASSPTWGRGLYGYTF

SEQ ID NO: 380313 - protein, 12 aa, Homo sapiens
  CDR3 for alpha chain variable domain of TCR clone 190157 (TRAV13-2, TRAJ23)
CAERHRGGKLIF

SEQ ID NO: 380314 - protein, 15 aa, Homo sapiens
  CDR3 for beta chain variable domain of TCR clone 190157 (TRBV25-1, TRBJ1-4)
CASGKRIATNEKLFF

SEQ ID NO: 380315 - protein, 14 aa, Homo sapiens
  CDR3 for alpha chain variable domain of TCR clone 190158 (TRAV26-1, TRAJ38)
CITDNAGNNRKTIW

SEQ ID NO: 380316 - protein, 13 aa, Homo sapiens
  CDR3 for beta chain variable domain of TCR clone 190158 (TRBV20-1, TRBJ1-1)
CSARGGGNTEAFF

SEQ ID NO: 380317 - protein, 14 aa, Homo sapiens
  CDR3 for alpha chain variable domain of TCR clone 190159 (TRAV12-3, TRAJ58)
CAMSTETSGSRLTF

SEQ ID NO: 380318 - protein, 13 aa, Homo sapiens
  CDR3 for beta chain variable domain of TCR clone 190159 (TRBV27, TRBJ2-3)
CASSWGRIDTQYF

SEQ ID NO: 380319 - protein, 16 aa, Homo sapiens
  CDR3 for alpha chain variable domain of TCR clone 190160 (TRAV16, TRAJ37)
CSKWPDGSSSTGKLIF

SEQ ID NO: 380320 - protein, 13 aa, Homo sapiens
  CDR3 for beta chain variable domain of TCR clone 190160 (TRBV7-2, TRBJ2-2)
CASSLAVTGELFF

SEQ ID NO: 380321 - protein, 23 aa, Homo sapiens
  CDR3 for alpha chain variable domain of TCR clone 190161 (TRAV21, )
CAVMGAGNNHIQNPDPAVYQLRY

SEQ ID NO: 380322 - protein, 13 aa, Homo sapiens
  CDR3 for beta chain variable domain of TCR clone 190161 (TRBV7-3, TRBJ2-5)
CASSIGFFETQYF

SEQ ID NO: 380323 - protein, 14 aa, Homo sapiens
  CDR3 for alpha chain variable domain of TCR clone 190162 (TRAV1-2, TRAJ33)
CAVRAPDSNYQLIW

SEQ ID NO: 380324 - protein, 13 aa, Homo sapiens
  CDR3 for beta chain variable domain of TCR clone 190162 (TRBV29-1, TRBJ1-1)
CSFGDSRNTEAFF

SEQ ID NO: 380325 - protein, 23 aa, Homo sapiens
  CDR3 for alpha chain variable domain of TCR clone 190163 (TRAV3, TRAJ38)
CAVRDCLNAGNNHIQNPDPAVYQ

SEQ ID NO: 380326 - protein, 14 aa, Homo sapiens
  CDR3 for beta chain variable domain of TCR clone 190163 (TRBV19, TRBJ2-1)
CASPTFVLSGEQFF

SEQ ID NO: 380327 - protein, 13 aa, Homo sapiens
  CDR3 for alpha chain variable domain of TCR clone 190164 (TRAV27, TRAJ54)
CAGAGQGAQKLVF

SEQ ID NO: 380328 - protein, 13 aa, Homo sapiens
  CDR3 for beta chain variable domain of TCR clone 190164 (TRBV20-1, TRBJ1-1)
CSAPLGGGTEAFF

SEQ ID NO: 380329 - protein, 12 aa, Homo sapiens
  CDR3 for alpha chain variable domain of TCR clone 190165 (TRAV22, TRAJ29)
CAPPSGNTPLVF

SEQ ID NO: 380330 - protein, 14 aa, Homo sapiens
  CDR3 for beta chain variable domain of TCR clone 190165 (TRBV11-2, TRBJ2-7)
CASSLGAGGYEQYF

SEQ ID NO: 380331 - protein, 14 aa, Homo sapiens
  CDR3 for alpha chain variable domain of TCR clone 190166 (TRAV35, TRAJ33)
CAGSSQDSNYQLIW

SEQ ID NO: 380332 - protein, 19 aa, Homo sapiens
  CDR3 for beta chain variable domain of TCR clone 190166 (TRBV19, TRBJ2-2)
CASTRPGLAGGRVTGELFF

SEQ ID NO: 380333 - protein, 17 aa, Homo sapiens
  CDR3 for alpha chain variable domain of TCR clone 190167 (TRAV3, TRAJ6)
CAVRDGPRAGGSYIPKF

SEQ ID NO: 380334 - protein, 13 aa, Homo sapiens
  CDR3 for beta chain variable domain of TCR clone 190167 (TRBV19, TRBJ1-1)
CASSITGESEAFF

SEQ ID NO: 380335 - protein, 18 aa, Homo sapiens
  CDR3 for alpha chain variable domain of TCR clone 190168 (TRAV21, TRAJ52)
CAVRPSPAGGTSYGKLAF

SEQ ID NO: 380336 - protein, 17 aa, Homo sapiens
  CDR3 for beta chain variable domain of TCR clone 190168 (TRBV13, TRBJ2-3)
CASTLSRVAGGRNTQYF

SEQ ID NO: 380337 - protein, 14 aa, Homo sapiens
  CDR3 for alpha chain variable domain of TCR clone 190169 (TRAV35, TRAJ22)
CAGLRPGSARHLTS

SEQ ID NO: 380338 - protein, 15 aa, Homo sapiens
  CDR3 for beta chain variable domain of TCR clone 190169 (TRBV12-4, TRBJ2-5)
CASSPPTGLQETQYF

SEQ ID NO: 380339 - protein, 12 aa, Homo sapiens
  CDR3 for alpha chain variable domain of TCR clone 190170 (TRAV12-3, TRAJ29)
FAAAKGNTPLVF

SEQ ID NO: 380340 - protein, 14 aa, Homo sapiens
  CDR3 for beta chain variable domain of TCR clone 190170 (TRBV19, TRBJ2-1)
CASPTFVLSGEQFF

SEQ ID NO: 380341 - protein, 12 aa, Homo sapiens
  CDR3 for alpha chain variable domain of TCR clone 190171 (TRAV8-3, TRAJ41)
CAVGALGYAINF

SEQ ID NO: 380342 - protein, 16 aa, Homo sapiens
  CDR3 for beta chain variable domain of TCR clone 190171 (TRBV7-6, TRBJ2-3)
CASSDSRGEGTDTQYF

SEQ ID NO: 380343 - protein, 15 aa, Homo sapiens
  CDR3 for alpha chain variable domain of TCR clone 190172 (TRAV12-3, TRAJ6)
CAMSATSGGSYIRTF

SEQ ID NO: 380344 - protein, 13 aa, Homo sapiens
  CDR3 for beta chain variable domain of TCR clone 190172 (TRBV7-9, TRBJ1-2)
CASSLKQNYGYTF

SEQ ID NO: 380345 - protein, 14 aa, Homo sapiens
  CDR3 for alpha chain variable domain of TCR clone 190173 (TRAV1-1, TRAJ35)
CAVRSIGFGNVLHC

SEQ ID NO: 380346 - protein, 14 aa, Homo sapiens
  CDR3 for beta chain variable domain of TCR clone 190173 (TRBV5-7, TRBJ2-7)
CARSGGLSSYEQYF

SEQ ID NO: 380347 - protein, 13 aa, Homo sapiens
  CDR3 for alpha chain variable domain of TCR clone 190174 (TRAV8-3, TRAJ28)
CAVGAVGSYQLPF

SEQ ID NO: 380348 - protein, 13 aa, Homo sapiens
  CDR3 for beta chain variable domain of TCR clone 190174 (TRBV19, TRBJ1-2)
CASSVPGQDGYTF

SEQ ID NO: 380349 - protein, 12 aa, Homo sapiens
  CDR3 for alpha chain variable domain of TCR clone 190175 (TRAV12-3, TRAJ17)
CAMTLTGNKLTF

SEQ ID NO: 380350 - protein, 12 aa, Homo sapiens
  CDR3 for beta chain variable domain of TCR clone 190175 (TRBV12-4, TRBJ2-7)
CASSLGGYAQYF

SEQ ID NO: 380351 - protein, 12 aa, Homo sapiens
  CDR3 for alpha chain variable domain of TCR clone 190176 (TRAV2, TRAJ9)
CAVGAGGVKTIF

SEQ ID NO: 380352 - protein, 19 aa, Homo sapiens
  CDR3 for beta chain variable domain of TCR clone 190176 (TRBV7-9, TRBJ2-6)
CASSLESATVLPGANVLTF

SEQ ID NO: 380353 - protein, 14 aa, Homo sapiens
  CDR3 for alpha chain variable domain of TCR clone 190177 (TRAV12-2, TRAJ40)
CAVKIPSGTYKYTF

SEQ ID NO: 380354 - protein, 14 aa, Homo sapiens
  CDR3 for beta chain variable domain of TCR clone 190177 (TRBV6-1, TRBJ1-3)
CASVQGGGGNTIYF

SEQ ID NO: 380355 - protein, 18 aa, Homo sapiens
  CDR3 for alpha chain variable domain of TCR clone 190178 (TRAV12-3, TRAJ52)
CAMSVGGAGGTSYGKVTF

SEQ ID NO: 380356 - protein, 17 aa, Homo sapiens
  CDR3 for beta chain variable domain of TCR clone 190178 (TRBV7-8, TRBJ2-6)
CASSAGTGGAGANVLTF

SEQ ID NO: 380357 - protein, 16 aa, Homo sapiens
  CDR3 for alpha chain variable domain of TCR clone 190179 (TRAV26-1, TRAJ32)
CTVRTNYGGATNKLIF

SEQ ID NO: 380358 - protein, 20 aa, Homo sapiens
  CDR3 for beta chain variable domain of TCR clone 190179 (TRBV7-8, TRBJ2-2)
CASSHLFPGPTIHITGELFF

SEQ ID NO: 380359 - protein, 16 aa, Homo sapiens
  CDR3 for alpha chain variable domain of TCR clone 190180 (TRAV9-2, TRAJ10)
CALSEGGTGGGNKLTF

SEQ ID NO: 380360 - protein, 16 aa, Homo sapiens
  CDR3 for beta chain variable domain of TCR clone 190180 (TRBV7-2, TRBJ1-4)
CASSPVGRFDRDKLFF

SEQ ID NO: 380361 - protein, 14 aa, Homo sapiens
  CDR3 for alpha chain variable domain of TCR clone 190181 (TRAV13-1, TRAJ35)
CAASKGGFGNVLHC

SEQ ID NO: 380362 - protein, 12 aa, Homo sapiens
  CDR3 for beta chain variable domain of TCR clone 190181 (TRBV6-3, TRBJ2-7)
CASSRQGYEQYF

SEQ ID NO: 380363 - protein, 13 aa, Homo sapiens
  CDR3 for alpha chain variable domain of TCR clone 190182 (TRAV13-1, TRAJ26)
CAIVFGPGTGLSV

SEQ ID NO: 380364 - protein, 15 aa, Homo sapiens
  CDR3 for beta chain variable domain of TCR clone 190182 (TRBV12-4, TRBJ2-1)
CASSLLGRTYNEQFF

SEQ ID NO: 380365 - protein, 18 aa, Homo sapiens
  CDR3 for alpha chain variable domain of TCR clone 190183 (TRAV21, TRAJ52)
CAVRPSPAGGTSYGKLTF

SEQ ID NO: 380366 - protein, 16 aa, Homo sapiens
  CDR3 for beta chain variable domain of TCR clone 190183 (TRBV19, TRBJ2-1)
CASSKAGPSSYNEQSF

SEQ ID NO: 380367 - protein, 14 aa, Homo sapiens
  CDR3 for alpha chain variable domain of TCR clone 190184 (TRAV13-1, TRAJ9)
CAAIALTGGFKTIF

SEQ ID NO: 380368 - protein, 13 aa, Homo sapiens
  CDR3 for beta chain variable domain of TCR clone 190184 (TRBV20-1, TRBJ1-1)
CSAGTVGNTEAFF

SEQ ID NO: 380369 - protein, 13 aa, Homo sapiens
  CDR3 for alpha chain variable domain of TCR clone 190185 (TRAV12-3, TRAJ13)
CTMGTGGYQKVTF

SEQ ID NO: 380370 - protein, 14 aa, Homo sapiens
  CDR3 for beta chain variable domain of TCR clone 190185 (TRBV7-2, TRBJ2-5)
CASSTGGELKTQYF

SEQ ID NO: 380371 - protein, 18 aa, Homo sapiens
  CDR3 for alpha chain variable domain of TCR clone 190186 (TRAV3, TRAJ17)
CAVRARRGGRSCRQQANF

SEQ ID NO: 380372 - protein, 14 aa, Homo sapiens
  CDR3 for beta chain variable domain of TCR clone 190186 (TRBV4-1, TRBJ2-2)
CASSLAVNTGELFF

SEQ ID NO: 380373 - protein, 15 aa, Homo sapiens
  CDR3 for alpha chain variable domain of TCR clone 190187 (TRAV25, TRAJ52)
CAGTSGGTSYGKLTF

SEQ ID NO: 380374 - protein, 17 aa, Homo sapiens
  CDR3 for beta chain variable domain of TCR clone 190187 (TRBV15, TRBJ1-2)
CATSGREIDVVNYGYTF

SEQ ID NO: 380375 - protein, 17 aa, Homo sapiens
  CDR3 for alpha chain variable domain of TCR clone 190188 (TRAV3, TRAJ6)
CAVRDGPRAGGSYIPTF

SEQ ID NO: 380376 - protein, 11 aa, Homo sapiens
  CDR3 for beta chain variable domain of TCR clone 190188 (TRBV7-2, TRBJ2-3)
CASSASDTQYF

SEQ ID NO: 380377 - protein, 13 aa, Homo sapiens
  CDR3 for alpha chain variable domain of TCR clone 190189 (TRAV17, TRAJ5)
GATGDTGRRALTF

SEQ ID NO: 380378 - protein, 13 aa, Homo sapiens
  CDR3 for beta chain variable domain of TCR clone 190189 (TRBV19, TRBJ1-5)
CASSIEPVQPQHF

SEQ ID NO: 380379 - protein, 15 aa, Homo sapiens
  CDR3 for alpha chain variable domain of TCR clone 190190 (TRAV38-1, TRAJ37)
CSFIFGSGNTGKLIF

SEQ ID NO: 380380 - protein, 15 aa, Homo sapiens
  CDR3 for beta chain variable domain of TCR clone 190190 (TRBV7-9, TRBJ1-4)
CASSATGGNNEKLFF

SEQ ID NO: 380381 - protein, 18 aa, Homo sapiens
  CDR3 for alpha chain variable domain of TCR clone 190191 (TRAV2, TRAJ20)
LQVREADAAVYRDCKLSF

SEQ ID NO: 380382 - protein, 12 aa, Homo sapiens
  CDR3 for beta chain variable domain of TCR clone 190191 (TRBV11-2, TRBJ2-1)
CASSPGNNEQFF

SEQ ID NO: 380383 - protein, 18 aa, Homo sapiens
  CDR3 for alpha chain variable domain of TCR clone 190192 (TRAV12-3, TRAJ52)
CAMSRTNAGGTSYGQLTF

SEQ ID NO: 380384 - protein, 15 aa, Homo sapiens
  CDR3 for beta chain variable domain of TCR clone 190192 (TRBV19, TRBJ1-2)
CASSVGQVLNYGYTF

SEQ ID NO: 380385 - protein, 14 aa, Homo sapiens
  CDR3 for alpha chain variable domain of TCR clone 190193 (TRAV21, TRAJ10)
CAVALTGGGNELTF

SEQ ID NO: 380386 - protein, 13 aa, Homo sapiens
  CDR3 for beta chain variable domain of TCR clone 190193 (TRBV7-2, TRBJ1-6)
CASSLGSNSPLHF

SEQ ID NO: 380387 - protein, 14 aa, Homo sapiens
  CDR3 for alpha chain variable domain of TCR clone 190194 (TRAV29/DV5, TRAJ45)
CAARFRGGADGLTF

SEQ ID NO: 380388 - protein, 11 aa, Homo sapiens
  CDR3 for beta chain variable domain of TCR clone 190194 (TRBV11-2, TRBJ2-2)
CASSLPGELFL

SEQ ID NO: 380389 - protein, 14 aa, Homo sapiens
  CDR3 for alpha chain variable domain of TCR clone 190195 (TRAV12-2, TRAJ40)
CAVKIPSGPYKYNF

SEQ ID NO: 380390 - protein, 20 aa, Homo sapiens
  CDR3 for beta chain variable domain of TCR clone 190195 (TRBV28, TRBJ2-1)
CASTPIGRSPGLAGGNEQFF

SEQ ID NO: 380391 - protein, 12 aa, Homo sapiens
  CDR3 for alpha chain variable domain of TCR clone 190196 (TRAV12-2, TRAJ10)
WGVTGGGNKLTF

SEQ ID NO: 380392 - protein, 15 aa, Homo sapiens
  CDR3 for beta chain variable domain of TCR clone 190196 (TRBV20-1, TRBJ2-7)
CSSRDRVSGMDEQYF

SEQ ID NO: 380393 - protein, 13 aa, Homo sapiens
  CDR3 for alpha chain variable domain of TCR clone 190197 (TRAV21, TRAJ27)
FAALPGNAGKSTF

SEQ ID NO: 380394 - protein, 13 aa, Homo sapiens
  CDR3 for beta chain variable domain of TCR clone 190197 (TRBV7-6, TRBJ2-3)
CQQLGTVTDTQYF

SEQ ID NO: 380395 - protein, 14 aa, Homo sapiens
  CDR3 for alpha chain variable domain of TCR clone 190198 (TRAV1-2, TRAJ16)
CVVNRFSDGQKLLF

SEQ ID NO: 380396 - protein, 15 aa, Homo sapiens
  CDR3 for beta chain variable domain of TCR clone 190198 (TRBV28, TRBJ2-7)
CASSLEAYPIYEQYF

SEQ ID NO: 380397 - protein, 16 aa, Homo sapiens
  CDR3 for alpha chain variable domain of TCR clone 190199 (TRAV13-1, TRAJ48)
CAVSIFGNFGNEKLTF

SEQ ID NO: 380398 - protein, 14 aa, Homo sapiens
  CDR3 for beta chain variable domain of TCR clone 190199 (TRBV24-1, TRBJ1-1)
CATSIPRGDTEAFF

SEQ ID NO: 380399 - protein, 13 aa, Homo sapiens
  CDR3 for alpha chain variable domain of TCR clone 190200 (TRAV2, TRAJ15)
CAVASQAGTALIF

SEQ ID NO: 380400 - protein, 13 aa, Homo sapiens
  CDR3 for beta chain variable domain of TCR clone 190200 (TRBV7-3, TRBJ2-5)
CASSFRGGETQYF

SEQ ID NO: 380401 - protein, 12 aa, Homo sapiens
  CDR3 for alpha chain variable domain of TCR clone 190201 (TRAV13-2, TRAJ39)
CAENNAGNMLTF

SEQ ID NO: 380402 - protein, 13 aa, Homo sapiens
  CDR3 for beta chain variable domain of TCR clone 190201 (TRBV28, TRBJ2-7)
CASTPGLAGEQYF

SEQ ID NO: 380403 - protein, 13 aa, Homo sapiens
  CDR3 for alpha chain variable domain of TCR clone 190202 (TRAV20, TRAJ37)
CAGCSSNTGKLIF

SEQ ID NO: 380404 - protein, 14 aa, Homo sapiens
  CDR3 for beta chain variable domain of TCR clone 190202 (TRBV20-1, TRBJ2-5)
CSASDGRAGETQYF

SEQ ID NO: 380405 - protein, 14 aa, Homo sapiens
  CDR3 for alpha chain variable domain of TCR clone 190203 (TRAV4, TRAJ17)
CPVGDMAAGNKLTF

SEQ ID NO: 380406 - protein, 14 aa, Homo sapiens
  CDR3 for beta chain variable domain of TCR clone 190203 (TRBV7-6, TRBJ2-3)
CASSLGTVTDTQYF

SEQ ID NO: 380407 - protein, 15 aa, Homo sapiens
  CDR3 for alpha chain variable domain of TCR clone 190204 (TRAV27, TRAJ50)
CAGVGRGTSYYKVIF

SEQ ID NO: 380408 - protein, 14 aa, Homo sapiens
  CDR3 for beta chain variable domain of TCR clone 190204 (TRBV7-2, TRBJ1-1)
CASSFYDLNTEAFF

SEQ ID NO: 380409 - protein, 10 aa, Homo sapiens
  CDR3 for alpha chain variable domain of TCR clone 190205 (TRAV23/DV6, TRAJ57)
CAASSTLSQG

SEQ ID NO: 380410 - protein, 15 aa, Homo sapiens
  CDR3 for beta chain variable domain of TCR clone 190205 (TRBV20-1, TRBJ2-3)
CSARVEGTYTDTQYF

SEQ ID NO: 380411 - protein, 13 aa, Homo sapiens
  CDR3 for alpha chain variable domain of TCR clone 190206 (TRAV35, TRAJ42)
CAGFPGSQGNLIF

SEQ ID NO: 380412 - protein, 19 aa, Homo sapiens
  CDR3 for beta chain variable domain of TCR clone 190206 (TRBV19, TRBJ2-5)
CASSIGQVTDFFLGETQYF

SEQ ID NO: 380413 - protein, 14 aa, Homo sapiens
  CDR3 for alpha chain variable domain of TCR clone 190207 (TRAV2, TRAJ9)
CAVEDRSGGFKTIF

SEQ ID NO: 380414 - protein, 15 aa, Homo sapiens
  CDR3 for beta chain variable domain of TCR clone 190207 (TRBV5-1, TRBJ2-7)
CASSLMTSGSNEQYF

SEQ ID NO: 380415 - protein, 12 aa, Homo sapiens
  CDR3 for alpha chain variable domain of TCR clone 190208 (TRAV3, TRAJ20)
CAVRDGDYKLSF

SEQ ID NO: 380416 - protein, 15 aa, Homo sapiens
  CDR3 for beta chain variable domain of TCR clone 190208 (TRBV20-1, TRBJ1-1)
CSARKAETSNTEAFF

SEQ ID NO: 380417 - protein, 14 aa, Homo sapiens
  CDR3 for alpha chain variable domain of TCR clone 190209 (TRAV35, TRAJ13)
CAGSPSGGYQKVTF

SEQ ID NO: 380418 - protein, 13 aa, Homo sapiens
  CDR3 for beta chain variable domain of TCR clone 190209 (TRBV29-1, TRBJ1-1)
CSVGDSRYTEAFF

SEQ ID NO: 380419 - protein, 12 aa, Homo sapiens
  CDR3 for alpha chain variable domain of TCR clone 190210 (TRAV38-2/DV8, TRAJ43)
CAPTPGGNDMRF

SEQ ID NO: 380420 - protein, 16 aa, Homo sapiens
  CDR3 for beta chain variable domain of TCR clone 190210 (TRBV7-7, TRBJ2-1)
CASSLASGTSYNEQFF

SEQ ID NO: 380421 - protein, 14 aa, Homo sapiens
  CDR3 for alpha chain variable domain of TCR clone 190211 (TRAV34, TRAJ22)
CGADTSGSARQLTF

SEQ ID NO: 380422 - protein, 13 aa, Homo sapiens
  CDR3 for beta chain variable domain of TCR clone 190211 (TRBV7-9, TRBJ1-2)
CASSLKQNYGYTF

SEQ ID NO: 380423 - protein, 13 aa, Homo sapiens
  CDR3 for alpha chain variable domain of TCR clone 190212 (TRAV2, TRAJ40)
CAVVTSGTYKYIF

SEQ ID NO: 380424 - protein, 11 aa, Homo sapiens
  CDR3 for beta chain variable domain of TCR clone 190212 (TRBV7-2, TRBJ2-3)
CASSLGDTQYF

SEQ ID NO: 380425 - protein, 14 aa, Homo sapiens
  CDR3 for alpha chain variable domain of TCR clone 190213 (TRAV12-2, TRAJ13)
CAGKETGGYQKVTF

SEQ ID NO: 380426 - protein, 13 aa, Homo sapiens
  CDR3 for beta chain variable domain of TCR clone 190213 (TRBV28, TRBJ2-7)
CASKAGGVYEQYF

SEQ ID NO: 380427 - protein, 15 aa, Homo sapiens
  CDR3 for alpha chain variable domain of TCR clone 190214 (TRAV13-1, TRAJ50)
CAAKGSETSYDKVII

SEQ ID NO: 380428 - protein, 18 aa, Homo sapiens
  CDR3 for beta chain variable domain of TCR clone 190214 (TRBV10-3, TRBJ2-1)
CTSVPSVSLRGGVDEQFF

SEQ ID NO: 380429 - protein, 14 aa, Homo sapiens
  CDR3 for alpha chain variable domain of TCR clone 190215 (TRAV39, TRAJ47)
CSVDFVQSGNKLVF

SEQ ID NO: 380430 - protein, 13 aa, Homo sapiens
  CDR3 for beta chain variable domain of TCR clone 190215 (TRBV7-3, TRBJ1-1)
CASSQDWGAEAFF

SEQ ID NO: 380431 - protein, 12 aa, Homo sapiens
  CDR3 for alpha chain variable domain of TCR clone 190216 (TRAV8-2, TRAJ45)
CVQGGCADGLTF

SEQ ID NO: 380432 - protein, 15 aa, Homo sapiens
  CDR3 for beta chain variable domain of TCR clone 190216 (TRBV19, TRBJ1-1)
CASSIRRQMNTEAFF

SEQ ID NO: 380433 - protein, 14 aa, Homo sapiens
  CDR3 for alpha chain variable domain of TCR clone 190217 (TRAV1-2, TRAJ27)
CAVRSGTNAGKSPF

SEQ ID NO: 380434 - protein, 15 aa, Homo sapiens
  CDR3 for beta chain variable domain of TCR clone 190217 (TRBV18, TRBJ2-7)
CASSPLQGRAYEQYF

SEQ ID NO: 380435 - protein, 15 aa, Homo sapiens
  CDR3 for alpha chain variable domain of TCR clone 190218 (TRAV27, TRAJ38)
CAARRNAGNNRKLIW

SEQ ID NO: 380436 - protein, 16 aa, Homo sapiens
  CDR3 for beta chain variable domain of TCR clone 190218 (TRBV5-1, TRBJ2-2)
CASSSRTGGRTGELFF

SEQ ID NO: 380437 - protein, 13 aa, Homo sapiens
  CDR3 for alpha chain variable domain of TCR clone 190219 (TRAV12-1, TRAJ17)
CVVSKAAGNKLTF

SEQ ID NO: 380438 - protein, 17 aa, Homo sapiens
  CDR3 for beta chain variable domain of TCR clone 190219 (TRBV4-1, TRBJ2-5)
CASSHDPSGGPQETQYF

SEQ ID NO: 380439 - protein, 17 aa, Homo sapiens
  CDR3 for alpha chain variable domain of TCR clone 190220 (TRAV12-2, TRAJ48)
CASNEKLTFGTGTRLTI

SEQ ID NO: 380440 - protein, 15 aa, Homo sapiens
  CDR3 for beta chain variable domain of TCR clone 190220 (TRBV5-1, TRBJ2-1)
CASSPPRAPYNEQFF

SEQ ID NO: 380441 - protein, 14 aa, Homo sapiens
  CDR3 for alpha chain variable domain of TCR clone 190221 (TRAV8-2, TRAJ26)
CVVSDWTYGQNFVF

SEQ ID NO: 380442 - protein, 12 aa, Homo sapiens
  CDR3 for beta chain variable domain of TCR clone 190221 (TRBV5-4, TRBJ2-5)
CASNRAGETQYF

SEQ ID NO: 380443 - protein, 10 aa, Homo sapiens
  CDR3 for alpha chain variable domain of TCR clone 190222 (TRAV1-2, TRAJ20)
SACNDYKLSF

SEQ ID NO: 380444 - protein, 14 aa, Homo sapiens
  CDR3 for beta chain variable domain of TCR clone 190222 (TRBV20-1, TRBJ1-1)
CSAQTRIGGTEAFF

SEQ ID NO: 380445 - protein, 13 aa, Homo sapiens
  CDR3 for alpha chain variable domain of TCR clone 190223 (TRAV12-3, TRAJ6)
CANQSGGSYIPTF

SEQ ID NO: 380446 - protein, 14 aa, Homo sapiens
  CDR3 for beta chain variable domain of TCR clone 190223 (TRBV19, TRBJ1-1)
CASSRDRDATEAFF

SEQ ID NO: 380447 - protein, 10 aa, Homo sapiens
  CDR3 for alpha chain variable domain of TCR clone 190224 (TRAV12-2, TRAJ20)
CAVYLYKLRF

SEQ ID NO: 380448 - protein, 16 aa, Homo sapiens
  CDR3 for beta chain variable domain of TCR clone 190224 (TRBV4-3, TRBJ1-6)
CASSAQPGGEGSPLHF

SEQ ID NO: 380449 - protein, 13 aa, Homo sapiens
  CDR3 for alpha chain variable domain of TCR clone 190225 (TRAV27, TRAJ42)
CAGARGSQGNLIF

SEQ ID NO: 380450 - protein, 15 aa, Homo sapiens
  CDR3 for beta chain variable domain of TCR clone 190225 (TRBV10-3, TRBJ2-2)
CAIRTDREDTGELFC

SEQ ID NO: 380451 - protein, 12 aa, Homo sapiens
  CDR3 for alpha chain variable domain of TCR clone 190226 (TRAV12-1, TRAJ26)
CVGSPYGQNFVF

SEQ ID NO: 380452 - protein, 15 aa, Homo sapiens
  CDR3 for beta chain variable domain of TCR clone 190226 (TRBV3-1, TRBJ2-2)
CASSQDWTRAGELFF

SEQ ID NO: 380453 - protein, 13 aa, Homo sapiens
  CDR3 for alpha chain variable domain of TCR clone 190227 (TRAV12-1, TRAJ31)
CVVNDNNNARLML

SEQ ID NO: 380454 - protein, 14 aa, Homo sapiens
  CDR3 for beta chain variable domain of TCR clone 190227 (TRBV7-2, TRBJ2-1)
CASSCGTSDGEQFF

SEQ ID NO: 380455 - protein, 12 aa, Homo sapiens
  CDR3 for alpha chain variable domain of TCR clone 190228 (TRAV12-1, TRAJ40)
CVVYSGTYKYIF

SEQ ID NO: 380456 - protein, 15 aa, Homo sapiens
  CDR3 for beta chain variable domain of TCR clone 190228 (TRBV7-9, TRBJ1-6)
CDSSSPGRGNSPLHF

SEQ ID NO: 380457 - protein, 13 aa, Homo sapiens
  CDR3 for alpha chain variable domain of TCR clone 190229 (TRAV36/DV7, TRAJ49)
CAGDSTTGNQFYF

SEQ ID NO: 380458 - protein, 12 aa, Homo sapiens
  CDR3 for beta chain variable domain of TCR clone 190229 (TRBV11-2, TRBJ2-2)
CASSLGGGELFF

SEQ ID NO: 380459 - protein, 16 aa, Homo sapiens
  CDR3 for alpha chain variable domain of TCR clone 190230 (TRAV4, TRAJ9)
CLVGDPNRPGGFEPIF

SEQ ID NO: 380460 - protein, 13 aa, Homo sapiens
  CDR3 for beta chain variable domain of TCR clone 190230 (TRBV5-5, TRBJ1-2)
CASSFWRGEDYTF

SEQ ID NO: 380461 - protein, 13 aa, Homo sapiens
  CDR3 for alpha chain variable domain of TCR clone 190231 (TRAV13-1, TRAJ21)
CAASIYNFNKFYF

SEQ ID NO: 380462 - protein, 11 aa, Homo sapiens
  CDR3 for beta chain variable domain of TCR clone 190231 (TRBV6-4, TRBJ2-1)
CASSDSYAQFF

SEQ ID NO: 380463 - protein, 13 aa, Homo sapiens
  CDR3 for alpha chain variable domain of TCR clone 190232 (TRAV12-3, TRAJ16)
CAVQLSDGQKLLF

SEQ ID NO: 380464 - protein, 14 aa, Homo sapiens
  CDR3 for beta chain variable domain of TCR clone 190232 (TRBV5-1, TRBJ2-1)
CASSLGGDWNEQFF

SEQ ID NO: 380465 - protein, 14 aa, Homo sapiens
  CDR3 for alpha chain variable domain of TCR clone 190233 (TRAV22, TRAJ6)
CAGVGPGGSYIPTF

SEQ ID NO: 380466 - protein, 13 aa, Homo sapiens
  CDR3 for beta chain variable domain of TCR clone 190233 (TRBV19, TRBJ1-1)
CASSPSNGGEAFF

SEQ ID NO: 380467 - protein, 12 aa, Homo sapiens
  CDR3 for alpha chain variable domain of TCR clone 190234 (TRAV9-2, TRAJ26)
CALRGYGQNFVF

SEQ ID NO: 380468 - protein, 18 aa, Homo sapiens
  CDR3 for beta chain variable domain of TCR clone 190234 (TRBV11-2, TRBJ2-3)
CASSLGGASRGAPNTQYF

SEQ ID NO: 380469 - protein, 14 aa, Homo sapiens
  CDR3 for alpha chain variable domain of TCR clone 190235 (TRAV14/DV4, TRAJ26)
CAMREGTYGQNFVF

SEQ ID NO: 380470 - protein, 13 aa, Homo sapiens
  CDR3 for beta chain variable domain of TCR clone 190235 (TRBV11-3, TRBJ2-5)
CASSSGLQETQYF

SEQ ID NO: 380471 - protein, 15 aa, Homo sapiens
  CDR3 for alpha chain variable domain of TCR clone 190236 (TRAV17, TRAJ57)
CAAGPSQGGSEKLVF

SEQ ID NO: 380472 - protein, 13 aa, Homo sapiens
  CDR3 for beta chain variable domain of TCR clone 190236 (TRBV27, TRBJ1-4)
CASSLMGDEKLFF

SEQ ID NO: 380473 - protein, 12 aa, Homo sapiens
  CDR3 for alpha chain variable domain of TCR clone 190237 (TRAV8-3, TRAJ20)
CAVDFNDYKLSF

SEQ ID NO: 380474 - protein, 13 aa, Homo sapiens
  CDR3 for beta chain variable domain of TCR clone 190237 (TRBV4-1, TRBJ2-2)
CASSQENTGELFF

SEQ ID NO: 380475 - protein, 11 aa, Homo sapiens
  CDR3 for alpha chain variable domain of TCR clone 190238 (TRAV21, TRAJ34)
CAHYNTDKLIF

SEQ ID NO: 380476 - protein, 15 aa, Homo sapiens
  CDR3 for beta chain variable domain of TCR clone 190238 (TRBV11-2, TRBJ2-2)
CASSPSGGGTGELFF

SEQ ID NO: 380477 - protein, 14 aa, Homo sapiens
  CDR3 for alpha chain variable domain of TCR clone 190239 (TRAV1-2, TRAJ17)
CALRRGAAGNKLTF

SEQ ID NO: 380478 - protein, 14 aa, Homo sapiens
  CDR3 for beta chain variable domain of TCR clone 190239 (TRBV7-2, TRBJ1-2)
CASSQTGSTYGYTF

SEQ ID NO: 380479 - protein, 14 aa, Homo sapiens
  CDR3 for alpha chain variable domain of TCR clone 190240 (TRAV26-1, TRAJ38)
CIAANAGNNRKLIW

SEQ ID NO: 380480 - protein, 17 aa, Homo sapiens
  CDR3 for beta chain variable domain of TCR clone 190240 (TRBV7-9, TRBJ2-3)
CASSPTVAGDLTDTQYF

SEQ ID NO: 380481 - protein, 15 aa, Homo sapiens
  CDR3 for alpha chain variable domain of TCR clone 190241 (TRAV3, TRAJ13)
CAVRVYSGGYQKVTF

SEQ ID NO: 380482 - protein, 17 aa, Homo sapiens
  CDR3 for beta chain variable domain of TCR clone 190241 (TRBV3-1, TRBJ2-3)
CASSQLLDRGHTDTQYF

SEQ ID NO: 380483 - protein, 14 aa, Homo sapiens
  CDR3 for alpha chain variable domain of TCR clone 190242 (TRAV12-3, TRAJ56)
CAMSVTGANSKLTF

SEQ ID NO: 380484 - protein, 14 aa, Homo sapiens
  CDR3 for beta chain variable domain of TCR clone 190242 (TRBV6-6, TRBJ1-5)
CASVDSGFNQPQHF

SEQ ID NO: 380485 - protein, 14 aa, Homo sapiens
  CDR3 for alpha chain variable domain of TCR clone 190243 (TRAV38-1, TRAJ43)
CAFMKHNNNNDMRF

SEQ ID NO: 380486 - protein, 17 aa, Homo sapiens
  CDR3 for beta chain variable domain of TCR clone 190243 (TRBV7-7, TRBJ1-4)
CASSLVGPGASNEKLFF

SEQ ID NO: 380487 - protein, 17 aa, Homo sapiens
  CDR3 for alpha chain variable domain of TCR clone 190244 (TRAV38-2/DV8, TRAJ23)
CALSRTLIFGQGTELSV

SEQ ID NO: 380488 - protein, 15 aa, Homo sapiens
  CDR3 for beta chain variable domain of TCR clone 190244 (TRBV20-1, TRBJ2-7)
CSARDRVTGMDEHYF

SEQ ID NO: 380489 - protein, 13 aa, Homo sapiens
  CDR3 for alpha chain variable domain of TCR clone 190245 (TRAV27, TRAJ41)
CAGEGNSGYALNF

SEQ ID NO: 380490 - protein, 11 aa, Homo sapiens
  CDR3 for beta chain variable domain of TCR clone 190245 (TRBV25-1, TRBJ1-1)
CASTHLGGNTE

SEQ ID NO: 380491 - protein, 11 aa, Homo sapiens
  CDR3 for alpha chain variable domain of TCR clone 190246 (TRAV21, TRAJ11)
CAVNGYSTLTF

SEQ ID NO: 380492 - protein, 14 aa, Homo sapiens
  CDR3 for beta chain variable domain of TCR clone 190246 (TRBV5-1, TRBJ1-2)
CASSLEPVNYGYTF

SEQ ID NO: 380493 - protein, 15 aa, Homo sapiens
  CDR3 for alpha chain variable domain of TCR clone 190247 (TRAV23/DV6, TRAJ4)
CSASPLRGGYNKLIF

SEQ ID NO: 380494 - protein, 15 aa, Homo sapiens
  CDR3 for beta chain variable domain of TCR clone 190247 (TRBV7-9, TRBJ1-6)
CASSSPGRGNSPLHF

SEQ ID NO: 380495 - protein, 16 aa, Homo sapiens
  CDR3 for alpha chain variable domain of TCR clone 190248 (TRAV17, TRAJ22)
CATGPISSGSARQLTF

SEQ ID NO: 380496 - protein, 16 aa, Homo sapiens
  CDR3 for beta chain variable domain of TCR clone 190248 (TRBV11-2, TRBJ2-3)
CASSSRTSGGAGTQYF

SEQ ID NO: 380497 - protein, 13 aa, Homo sapiens
  CDR3 for alpha chain variable domain of TCR clone 190249 (TRAV3, TRAJ20)
CCEAFCNDYKLSF

SEQ ID NO: 380498 - protein, 14 aa, Homo sapiens
  CDR3 for beta chain variable domain of TCR clone 190249 (TRBV7-6, TRBJ2-3)
CASSLGTVTDTQYF

SEQ ID NO: 380499 - protein, 14 aa, Homo sapiens
  CDR3 for alpha chain variable domain of TCR clone 190250 (TRAV21, TRAJ28)
CAVGSGAGSYQLTF

SEQ ID NO: 380500 - protein, 16 aa, Homo sapiens
  CDR3 for beta chain variable domain of TCR clone 190250 (TRBV18, TRBJ1-4)
CASSPGPNGEKLFLAM

SEQ ID NO: 380501 - protein, 15 aa, Homo sapiens
  CDR3 for alpha chain variable domain of TCR clone 190251 (TRAV17, TRAJ13)
TSVLRTRGGYQKVTF

SEQ ID NO: 380502 - protein, 13 aa, Homo sapiens
  CDR3 for beta chain variable domain of TCR clone 190251 (TRBV7-3, TRBJ1-1)
CASSQDWGAEAFF

SEQ ID NO: 380503 - protein, 16 aa, Homo sapiens
  CDR3 for alpha chain variable domain of TCR clone 190252 (TRAV27, TRAJ52)
CAGAPAGGTIYGKLTF

SEQ ID NO: 380504 - protein, 12 aa, Homo sapiens
  CDR3 for beta chain variable domain of TCR clone 190252 (TRBV27, TRBJ2-1)
CASRGFYNEQFF

SEQ ID NO: 380505 - protein, 17 aa, Homo sapiens
  CDR3 for alpha chain variable domain of TCR clone 190253 (TRAV3, TRAJ6)
CAVRDVPRAGGNYIPTF

SEQ ID NO: 380506 - protein, 14 aa, Homo sapiens
  CDR3 for beta chain variable domain of TCR clone 190253 (TRBV7-2, TRBJ2-7)
CASSPKTSFYEQYF

SEQ ID NO: 380507 - protein, 14 aa, Homo sapiens
  CDR3 for alpha chain variable domain of TCR clone 190254 (TRAV34, TRAJ44)
CGADGTGTASKLTF

SEQ ID NO: 380508 - protein, 13 aa, Homo sapiens
  CDR3 for beta chain variable domain of TCR clone 190254 (TRBV20-1, TRBJ2-5)
CSARYTGEETQYF

SEQ ID NO: 380509 - protein, 20 aa, Homo sapiens
  CDR3 for alpha chain variable domain of TCR clone 190255 (TRAV30, TRAJ54)
SAAQSRSETQVVQVAQKLVF

SEQ ID NO: 380510 - protein, 11 aa, Homo sapiens
  CDR3 for beta chain variable domain of TCR clone 190255 (TRBV25-1, TRBJ2-4)
CQSRDQNIQYF

SEQ ID NO: 380511 - protein, 23 aa, Homo sapiens
  CDR3 for alpha chain variable domain of TCR clone 190256 (TRAV26-1, TRAJ38)
CIVRPLNAGNNHIQNPDPAVYQL

SEQ ID NO: 380512 - protein, 13 aa, Homo sapiens
  CDR3 for beta chain variable domain of TCR clone 190256 (TRBV18, TRBJ1-1)
SASSPNGDTEAFF

SEQ ID NO: 380513 - protein, 16 aa, Homo sapiens
  CDR3 for alpha chain variable domain of TCR clone 190257 (TRAV30, TRAJ24)
CGTEIVDADSWGKFQL

SEQ ID NO: 380514 - protein, 14 aa, Homo sapiens
  CDR3 for beta chain variable domain of TCR clone 190257 (TRBV11-2, TRBJ2-5)
CASRPLAGRETQYF

SEQ ID NO: 380515 - protein, 14 aa, Homo sapiens
  CDR3 for alpha chain variable domain of TCR clone 190258 (TRAV23/DV6, TRAJ57)
CAASNQAGSEKLVF

SEQ ID NO: 380516 - protein, 13 aa, Homo sapiens
  CDR3 for beta chain variable domain of TCR clone 190258 (TRBV11-2, TRBJ2-7)
CASSSYPSYEQYF

SEQ ID NO: 380517 - protein, 18 aa, Homo sapiens
  CDR3 for alpha chain variable domain of TCR clone 190259 (TRAV12-3, TRAJ52)
CAMSVGGAGGTSYGKLTF

SEQ ID NO: 380518 - protein, 15 aa, Homo sapiens
  CDR3 for beta chain variable domain of TCR clone 190259 (TRBV27, TRBJ1-6)
CASSFDRALGSPLHF

SEQ ID NO: 380519 - protein, 14 aa, Homo sapiens
  CDR3 for alpha chain variable domain of TCR clone 190260 (TRAV3, TRAJ34)
CALRDINNTDKLIF

SEQ ID NO: 380520 - protein, 15 aa, Homo sapiens
  CDR3 for beta chain variable domain of TCR clone 190260 (TRBV20-1, TRBJ2-7)
CSARYRVSGMDEQYF

SEQ ID NO: 380521 - protein, 14 aa, Homo sapiens
  CDR3 for alpha chain variable domain of TCR clone 190261 (TRAV13-2, TRAJ17)
CAENSKAAGNKLTF

SEQ ID NO: 380522 - protein, 13 aa, Homo sapiens
  CDR3 for beta chain variable domain of TCR clone 190261 (TRBV7-9, TRBJ1-2)
CASSLKQNYGYTF

SEQ ID NO: 380523 - protein, 13 aa, Homo sapiens
  CDR3 for alpha chain variable domain of TCR clone 190262 (TRAV26-1, TRAJ48)
CIVKVVGDEKLTF

SEQ ID NO: 380524 - protein, 16 aa, Homo sapiens
  CDR3 for beta chain variable domain of TCR clone 190262 (TRBV12-5, TRBJ2-5)
CASGPRTSGNQETQYF

SEQ ID NO: 380525 - protein, 14 aa, Homo sapiens
  CDR3 for alpha chain variable domain of TCR clone 190263 (TRAV26-1, TRAJ6)
CIASPVGGSYIPTF

SEQ ID NO: 380526 - protein, 16 aa, Homo sapiens
  CDR3 for beta chain variable domain of TCR clone 190263 (TRBV4-1, TRBJ2-5)
CASSSGLAGVLGTQYF

SEQ ID NO: 380527 - protein, 14 aa, Homo sapiens
  CDR3 for alpha chain variable domain of TCR clone 190264 (TRAV12-3, TRAJ10)
SHLPLTGGGHKLTF

SEQ ID NO: 380528 - protein, 16 aa, Homo sapiens
  CDR3 for beta chain variable domain of TCR clone 190264 (TRBV13, TRBJ2-2)
CASSPRTGEHTGELFF

SEQ ID NO: 380529 - protein, 16 aa, Homo sapiens
  CDR3 for alpha chain variable domain of TCR clone 190265 (TRAV16, TRAJ4)
CALSRMFSGSYNKLIF

SEQ ID NO: 380530 - protein, 14 aa, Homo sapiens
  CDR3 for beta chain variable domain of TCR clone 190265 (TRBV25-1, TRBJ1-1)
CASTHLGGNTEAFF

SEQ ID NO: 380531 - protein, 15 aa, Homo sapiens
  CDR3 for alpha chain variable domain of TCR clone 190266 (TRAV8-4, TRAJ37)
CAVTYGSSNTGKLIS

SEQ ID NO: 380532 - protein, 13 aa, Homo sapiens
  CDR3 for beta chain variable domain of TCR clone 190266 (TRBV12-4, TRBJ2-5)
CASSLGGSRTQYF

SEQ ID NO: 380533 - protein, 12 aa, Homo sapiens
  CDR3 for alpha chain variable domain of TCR clone 190267 (TRAV12-3, TRAJ17)
CAMTLTGNKLTV

SEQ ID NO: 380534 - protein, 11 aa, Homo sapiens
  CDR3 for beta chain variable domain of TCR clone 190267 (TRBV28, TRBJ2-1)
CASRRVNEQFF

SEQ ID NO: 380535 - protein, 15 aa, Homo sapiens
  CDR3 for alpha chain variable domain of TCR clone 190268 (TRAV8-3, TRAJ45)
CASSYSGGGADGLTF

SEQ ID NO: 380536 - protein, 13 aa, Homo sapiens
  CDR3 for beta chain variable domain of TCR clone 190268 (TRBV10-3, TRBJ2-7)
CASKQAVNYEQYY

SEQ ID NO: 380537 - protein, 12 aa, Homo sapiens
  CDR3 for alpha chain variable domain of TCR clone 190269 (TRAV13-1, TRAJ21)
CAAKEGFNKIYF

SEQ ID NO: 380538 - protein, 14 aa, Homo sapiens
  CDR3 for beta chain variable domain of TCR clone 190269 (TRBV7-9, TRBJ2-5)
CASSLDTAQETQYF

SEQ ID NO: 380539 - protein, 12 aa, Homo sapiens
  CDR3 for alpha chain variable domain of TCR clone 190270 (TRAV21, TRAJ33)
CAKMDSNYQLIW

SEQ ID NO: 380540 - protein, 16 aa, Homo sapiens
  CDR3 for beta chain variable domain of TCR clone 190270 (TRBV12-5, TRBJ2-5)
CASGPRNSGNQETQYF

SEQ ID NO: 380541 - protein, 18 aa, Homo sapiens
  CDR3 for alpha chain variable domain of TCR clone 190271 (TRAV21, TRAJ52)
CAVRPSPAGGTIYGKLPF

SEQ ID NO: 380542 - protein, 17 aa, Homo sapiens
  CDR3 for beta chain variable domain of TCR clone 190271 (TRBV13, TRBJ2-3)
CASSLSRVAGGRNTQYF

SEQ ID NO: 380543 - protein, 14 aa, Homo sapiens
  CDR3 for alpha chain variable domain of TCR clone 190272 (TRAV1-2, TRAJ16)
CAVNRFSDGQKLLF

SEQ ID NO: 380544 - protein, 15 aa, Homo sapiens
  CDR3 for beta chain variable domain of TCR clone 190272 (TRBV10-2, TRBJ2-5)
CASKPEDGRQETQYF

SEQ ID NO: 380545 - protein, 14 aa, Homo sapiens
  CDR3 for alpha chain variable domain of TCR clone 190273 (TRAV13-1, TRAJ22)
CAASYSGSARQLTF

SEQ ID NO: 380546 - protein, 15 aa, Homo sapiens
  CDR3 for beta chain variable domain of TCR clone 190273 (TRBV6-5, TRBJ2-7)
CASSRTSGFSYEQYF

SEQ ID NO: 380547 - protein, 15 aa, Homo sapiens
  CDR3 for alpha chain variable domain of TCR clone 190274 (TRAV27, TRAJ38)
CAARRNAGNNRKLIW

SEQ ID NO: 380548 - protein, 13 aa, Homo sapiens
  CDR3 for beta chain variable domain of TCR clone 190274 (TRBV11-2, TRBJ2-1)
CASSSRPNNEQFF

SEQ ID NO: 380549 - protein, 18 aa, Homo sapiens
  CDR3 for alpha chain variable domain of TCR clone 190275 (TRAV21, TRAJ52)
CSVRPSPAGGTSYGKLTF

SEQ ID NO: 380550 - protein, 12 aa, Homo sapiens
  CDR3 for beta chain variable domain of TCR clone 190275 (TRBV2, TRBJ2-1)
CAYGPPGNEQFF

SEQ ID NO: 380551 - protein, 13 aa, Homo sapiens
  CDR3 for alpha chain variable domain of TCR clone 190276 (TRAV13-1, TRAJ20)
CAARVSNDYKLSF

SEQ ID NO: 380552 - protein, 14 aa, Homo sapiens
  CDR3 for beta chain variable domain of TCR clone 190276 (TRBV11-2, TRBJ2-7)
CASSLGAGAYEQYF

SEQ ID NO: 380553 - protein, 12 aa, Homo sapiens
  CDR3 for alpha chain variable domain of TCR clone 190277 (TRAV3, TRAJ43)
CAVRDPNNDKRF

SEQ ID NO: 380554 - protein, 15 aa, Homo sapiens
  CDR3 for beta chain variable domain of TCR clone 190277 (TRBV27, TRBJ1-5)
CASSLGTGFDQPQHF

SEQ ID NO: 380555 - protein, 14 aa, Homo sapiens
  CDR3 for alpha chain variable domain of TCR clone 190278 (TRAV12-3, TRAJ10)
SHLPLTGGGNKLTF

SEQ ID NO: 380556 - protein, 13 aa, Homo sapiens
  CDR3 for beta chain variable domain of TCR clone 190278 (TRBV12-4, TRBJ1-1)
CVSSPGTGFEAFF

SEQ ID NO: 380557 - protein, 16 aa, Homo sapiens
  CDR3 for alpha chain variable domain of TCR clone 190279 (TRAV3, TRAJ23)
CAVTIGIYNQGGKLIF

SEQ ID NO: 380558 - protein, 17 aa, Homo sapiens
  CDR3 for beta chain variable domain of TCR clone 190279 (TRBV10-3, TRBJ2-6)
CAISESTAPSGANDLTF

SEQ ID NO: 380559 - protein, 14 aa, Homo sapiens
  CDR3 for alpha chain variable domain of TCR clone 190280 (TRAV12-2, TRAJ40)
RAVKIPSGTYKYIF

SEQ ID NO: 380560 - protein, 14 aa, Homo sapiens
  CDR3 for beta chain variable domain of TCR clone 190280 (TRBV18, TRBJ2-5)
CASSPLRVQETQYF

SEQ ID NO: 380561 - protein, 16 aa, Homo sapiens
  CDR3 for alpha chain variable domain of TCR clone 190281 (TRAV38-1, TRAJ56)
CAFMKRQTGANSKLTF

SEQ ID NO: 380562 - protein, 15 aa, Homo sapiens
  CDR3 for beta chain variable domain of TCR clone 190281 (TRBV20-1, TRBJ1-1)
CSASRGVTGNTEAFF

SEQ ID NO: 380563 - protein, 14 aa, Homo sapiens
  CDR3 for alpha chain variable domain of TCR clone 190282 (TRAV12-2, TRAJ40)
CAGKIPSGAYKYIF

SEQ ID NO: 380564 - protein, 13 aa, Homo sapiens
  CDR3 for beta chain variable domain of TCR clone 190282 (TRBV7-9, TRBJ1-2)
CASSLKQNYGYTF

SEQ ID NO: 380565 - protein, 11 aa, Homo sapiens
  CDR3 for alpha chain variable domain of TCR clone 190283 (TRAV2, TRAJ33)
CAVESNYQLIW

SEQ ID NO: 380566 - protein, 14 aa, Homo sapiens
  CDR3 for beta chain variable domain of TCR clone 190283 (TRBV7-3, TRBJ1-1)
CASSLKGGNTGAFF

SEQ ID NO: 380567 - protein, 14 aa, Homo sapiens
  CDR3 for alpha chain variable domain of TCR clone 190284 (TRAV20, TRAJ56)
CAVQFGGANLKLTF

SEQ ID NO: 380568 - protein, 14 aa, Homo sapiens
  CDR3 for beta chain variable domain of TCR clone 190284 (TRBV20-1, TRBJ2-7)
CSAKRGRSSYEQYF

SEQ ID NO: 380569 - protein, 16 aa, Homo sapiens
  CDR3 for alpha chain variable domain of TCR clone 190285 (TRAV12-3, TRAJ53)
CAMSPGSGGSNYKLTF

SEQ ID NO: 380570 - protein, 11 aa, Homo sapiens
  CDR3 for beta chain variable domain of TCR clone 190285 (TRBV29-1, TRBJ2-5)
CTEDRTGTQYF

SEQ ID NO: 380571 - protein, 15 aa, Homo sapiens
  CDR3 for alpha chain variable domain of TCR clone 190286 (TRAV3, TRAJ40)
CAVRDVTSGTSKYIF

SEQ ID NO: 380572 - protein, 13 aa, Homo sapiens
  CDR3 for beta chain variable domain of TCR clone 190286 (TRBV7-9, TRBJ1-2)
CASSLKQNYGYTF

SEQ ID NO: 380573 - protein, 15 aa, Homo sapiens
  CDR3 for alpha chain variable domain of TCR clone 190287 (TRAV27, TRAJ38)
CAARRNAGNNRKLIW

SEQ ID NO: 380574 - protein, 16 aa, Homo sapiens
  CDR3 for beta chain variable domain of TCR clone 190287 (TRBV5-1, TRBJ2-3)
CASSLGLAVYTDTQYF

SEQ ID NO: 380575 - protein, 13 aa, Homo sapiens
  CDR3 for alpha chain variable domain of TCR clone 190288 (TRAV13-2, TRAJ5)
CAVMDTGRRAITF

SEQ ID NO: 380576 - protein, 15 aa, Homo sapiens
  CDR3 for beta chain variable domain of TCR clone 190288 (TRBV9, TRBJ1-6)
CASSVAGTGDSPLHF

SEQ ID NO: 380577 - protein, 15 aa, Homo sapiens
  CDR3 for alpha chain variable domain of TCR clone 190289 (TRAV4, TRAJ15)
CLVGDIRRAGTALIF

SEQ ID NO: 380578 - protein, 16 aa, Homo sapiens
  CDR3 for beta chain variable domain of TCR clone 190289 (TRBV12-5, TRBJ2-5)
CGSGPRTSGNQETQYF

SEQ ID NO: 380579 - protein, 15 aa, Homo sapiens
  CDR3 for alpha chain variable domain of TCR clone 190290 (TRAV12-1, TRAJ8)
CVVNVENTGFQKLVF

SEQ ID NO: 380580 - protein, 16 aa, Homo sapiens
  CDR3 for beta chain variable domain of TCR clone 190290 (TRBV7-2, TRBJ2-7)
CASSLEAGGAWYEQYF

SEQ ID NO: 380581 - protein, 16 aa, Homo sapiens
  CDR3 for alpha chain variable domain of TCR clone 190291 (TRAV30, TRAJ24)
CGTEIVDADSWGKFQF

SEQ ID NO: 380582 - protein, 12 aa, Homo sapiens
  CDR3 for beta chain variable domain of TCR clone 190291 (TRBV28, TRBJ2-3)
CASSLYRGTQYF

SEQ ID NO: 380583 - protein, 13 aa, Homo sapiens
  CDR3 for alpha chain variable domain of TCR clone 190292 (TRAV20, TRAJ37)
CAGCSSNTGKLIF

SEQ ID NO: 380584 - protein, 11 aa, Homo sapiens
  CDR3 for beta chain variable domain of TCR clone 190292 (TRBV12-4, TRBJ2-3)
WPGTATDTQYF

SEQ ID NO: 380585 - protein, 16 aa, Homo sapiens
  CDR3 for alpha chain variable domain of TCR clone 190293 (TRAV3, TRAJ37)
CAVRGKGSGNTGKLIF

SEQ ID NO: 380586 - protein, 14 aa, Homo sapiens
  CDR3 for beta chain variable domain of TCR clone 190293 (TRBV7-2, TRBJ2-7)
CAGSPKTSFYEQYF

SEQ ID NO: 380587 - protein, 13 aa, Homo sapiens
  CDR3 for alpha chain variable domain of TCR clone 190294 (TRAV2, TRAJ39)
TTVHNNEGNMLTF

SEQ ID NO: 380588 - protein, 16 aa, Homo sapiens
  CDR3 for beta chain variable domain of TCR clone 190294 (TRBV24-1, TRBJ2-3)
CATSGYRDRDTDTQYF

SEQ ID NO: 380589 - protein, 15 aa, Homo sapiens
  CDR3 for alpha chain variable domain of TCR clone 190295 (TRAV25, TRAJ53)
CAATGGGGSNYKLTF

SEQ ID NO: 380590 - protein, 17 aa, Homo sapiens
  CDR3 for beta chain variable domain of TCR clone 190295 (TRBV10-3, TRBJ2-6)
CAISESTAPSGANVMTF

SEQ ID NO: 380591 - protein, 15 aa, Homo sapiens
  CDR3 for alpha chain variable domain of TCR clone 190296 (TRAV17, TRAJ13)
CATVPNSGGYQKVTF

SEQ ID NO: 380592 - protein, 15 aa, Homo sapiens
  CDR3 for beta chain variable domain of TCR clone 190296 (TRBV2, TRBJ2-1)
CASSELAGSYNEQFF

SEQ ID NO: 380593 - protein, 12 aa, Homo sapiens
  CDR3 for alpha chain variable domain of TCR clone 190297 (TRAV12-1, TRAJ34)
CVVTFNTDKLIF

SEQ ID NO: 380594 - protein, 16 aa, Homo sapiens
  CDR3 for beta chain variable domain of TCR clone 190297 (TRBV19, TRBJ2-2)
CASRSPGTGATGELFF

SEQ ID NO: 380595 - protein, 13 aa, Homo sapiens
  CDR3 for alpha chain variable domain of TCR clone 190298 (TRAV13-1, TRAJ21)
CAASIYNFNKFYF

SEQ ID NO: 380596 - protein, 15 aa, Homo sapiens
  CDR3 for beta chain variable domain of TCR clone 190298 (TRBV5-5, TRBJ1-5)
CDSSLKGGGEQPQHF

SEQ ID NO: 380597 - protein, 11 aa, Homo sapiens
  CDR3 for alpha chain variable domain of TCR clone 190299 (TRAV17, TRAJ9)
CATTGGFKTIF

SEQ ID NO: 380598 - protein, 15 aa, Homo sapiens
  CDR3 for beta chain variable domain of TCR clone 190299 (TRBV7-9, TRBJ1-6)
CASSSPGRGNSPLHF

SEQ ID NO: 380599 - protein, 16 aa, Homo sapiens
  CDR3 for alpha chain variable domain of TCR clone 190300 (TRAV3, TRAJ23)
CAVKIGIYNQGGKLIF

SEQ ID NO: 380600 - protein, 17 aa, Homo sapiens
  CDR3 for beta chain variable domain of TCR clone 190300 (TRBV10-3, TRBJ2-6)
CAISESTAPSGANILTF

SEQ ID NO: 380601 - protein, 14 aa, Homo sapiens
  CDR3 for alpha chain variable domain of TCR clone 190301 (TRAV4, TRAJ9)
CLVGSGTGGFKTLF

SEQ ID NO: 380602 - protein, 15 aa, Homo sapiens
  CDR3 for beta chain variable domain of TCR clone 190301 (TRBV7-2, TRBJ2-1)
CASSLASGRVNEQFF

SEQ ID NO: 380603 - protein, 16 aa, Homo sapiens
  CDR3 for alpha chain variable domain of TCR clone 190302 (TRAV20, TRAJ53)
CAVQDQPRGSNYKLTF

SEQ ID NO: 380604 - protein, 19 aa, Homo sapiens
  CDR3 for beta chain variable domain of TCR clone 190302 (TRBV5-1, TRBJ2-3)
CASSLWTSGGITTPDTQYF

SEQ ID NO: 380605 - protein, 14 aa, Homo sapiens
  CDR3 for alpha chain variable domain of TCR clone 190303 (TRAV8-3, TRAJ22)
CAVARRGSARQLTF

SEQ ID NO: 380606 - protein, 17 aa, Homo sapiens
  CDR3 for beta chain variable domain of TCR clone 190303 (TRBV7-2, TRBJ2-3)
CASSSYSGTRRADTQYF

SEQ ID NO: 380607 - protein, 12 aa, Homo sapiens
  CDR3 for alpha chain variable domain of TCR clone 190304 (TRAV12-3, TRAJ17)
CAMTLTGNKLTF

SEQ ID NO: 380608 - protein, 14 aa, Homo sapiens
  CDR3 for beta chain variable domain of TCR clone 190304 (TRBV27, TRBJ2-2)
CASRPGVNTGELFF

SEQ ID NO: 380609 - protein, 14 aa, Homo sapiens
  CDR3 for alpha chain variable domain of TCR clone 190305 (TRAV12-2, TRAJ11)
CAVNWESGYSTLTF

SEQ ID NO: 380610 - protein, 10 aa, Homo sapiens
  CDR3 for beta chain variable domain of TCR clone 190305 (TRBV20-1, TRBJ2-5)
CSARFETQYF

SEQ ID NO: 380611 - protein, 11 aa, Homo sapiens
  CDR3 for alpha chain variable domain of TCR clone 190306 (TRAV2, TRAJ33)
CAVDSNYQLIW

SEQ ID NO: 380612 - protein, 12 aa, Homo sapiens
  CDR3 for beta chain variable domain of TCR clone 190306 (TRBV3-1, TRBJ2-1)
CASSQGSSGQFF

SEQ ID NO: 380613 - protein, 15 aa, Homo sapiens
  CDR3 for alpha chain variable domain of TCR clone 190307 (TRAV13-2, TRAJ45)
CAEHHSGGGADGLTF

SEQ ID NO: 380614 - protein, 15 aa, Homo sapiens
  CDR3 for beta chain variable domain of TCR clone 190307 (TRBV7-2, TRBJ2-3)
CASSLAGAFIDTQYF

SEQ ID NO: 380615 - protein, 11 aa, Homo sapiens
  CDR3 for alpha chain variable domain of TCR clone 190308 (TRAV1-2, TRAJ40)
CAVPGTYKYIF

SEQ ID NO: 380616 - protein, 12 aa, Homo sapiens
  CDR3 for beta chain variable domain of TCR clone 190308 (TRBV12-4, TRBJ2-1)
CASSLQGSEQFF

SEQ ID NO: 380617 - protein, 12 aa, Homo sapiens
  CDR3 for alpha chain variable domain of TCR clone 190309 (TRAV16, TRAJ10)
CSRTGGGNKLTF

SEQ ID NO: 380618 - protein, 14 aa, Homo sapiens
  CDR3 for beta chain variable domain of TCR clone 190309 (TRBV7-9, TRBJ2-1)
CASRPTGLRNEQFF

SEQ ID NO: 380619 - protein, 11 aa, Homo sapiens
  CDR3 for alpha chain variable domain of TCR clone 190310 (TRAV13-1, TRAJ34)
CAAVNTDKLIF

SEQ ID NO: 380620 - protein, 14 aa, Homo sapiens
  CDR3 for beta chain variable domain of TCR clone 190310 (TRBV7-3, TRBJ1-1)
CASSLKGGNTEAFF

SEQ ID NO: 380621 - protein, 17 aa, Homo sapiens
  CDR3 for alpha chain variable domain of TCR clone 190311 (TRAV3, TRAJ6)
CAVRDGPRAGGSDIPTF

SEQ ID NO: 380622 - protein, 17 aa, Homo sapiens
  CDR3 for beta chain variable domain of TCR clone 190311 (TRBV28, TRBJ2-5)
CASSTPEGDALQETQYF

SEQ ID NO: 380623 - protein, 13 aa, Homo sapiens
  CDR3 for alpha chain variable domain of TCR clone 190312 (TRAV13-2, TRAJ13)
CADLSGGYQRVTF

SEQ ID NO: 380624 - protein, 15 aa, Homo sapiens
  CDR3 for beta chain variable domain of TCR clone 190312 (TRBV19, TRBJ1-1)
CASSIGGGRNTEAFF

SEQ ID NO: 380625 - protein, 23 aa, Homo sapiens
  CDR3 for alpha chain variable domain of TCR clone 190313 (TRAV26-1, TRAJ38)
CIADNAGNNHIQNPDPAVYQLRD

SEQ ID NO: 380626 - protein, 16 aa, Homo sapiens
  CDR3 for beta chain variable domain of TCR clone 190313 (TRBV7-3, TRBJ2-1)
CASSLEGYRSYNEQFF

SEQ ID NO: 380627 - protein, 10 aa, Homo sapiens
  CDR3 for alpha chain variable domain of TCR clone 190314 (TRAV26-2, TRAJ22)
LQGSARQLTF

SEQ ID NO: 380628 - protein, 13 aa, Homo sapiens
  CDR3 for beta chain variable domain of TCR clone 190314 (TRBV5-1, TRBJ2-1)
CASSLGPYNEQFF

SEQ ID NO: 380629 - protein, 13 aa, Homo sapiens
  CDR3 for alpha chain variable domain of TCR clone 190315 (TRAV12-1, TRAJ11)
RVVNRAGYSTLTF

SEQ ID NO: 380630 - protein, 15 aa, Homo sapiens
  CDR3 for beta chain variable domain of TCR clone 190315 (TRBV7-3, TRBJ2-2)
CASSETGQGTGELFF

SEQ ID NO: 380631 - protein, 14 aa, Homo sapiens
  CDR3 for alpha chain variable domain of TCR clone 190316 (TRAV35, TRAJ33)
CAGSSQYSNYQLIW

SEQ ID NO: 380632 - protein, 15 aa, Homo sapiens
  CDR3 for beta chain variable domain of TCR clone 190316 (TRBV28, TRBJ2-5)
CASSPGQGSIETQYF

SEQ ID NO: 380633 - protein, 22 aa, Homo sapiens
  CDR3 for alpha chain variable domain of TCR clone 190317 (TRAV2, TRAJ9)
CAVEDRSGGLKLSLEQEQDYLL

SEQ ID NO: 380634 - protein, 12 aa, Homo sapiens
  CDR3 for beta chain variable domain of TCR clone 190317 (TRBV11-2, TRBJ2-2)
CASSLGGGELFF

SEQ ID NO: 380635 - protein, 12 aa, Homo sapiens
  CDR3 for alpha chain variable domain of TCR clone 190318 (TRAV3, TRAJ31)
GAVRDGNARLMF

SEQ ID NO: 380636 - protein, 18 aa, Homo sapiens
  CDR3 for beta chain variable domain of TCR clone 190318 (TRBV7-2, TRBJ2-3)
CASSLKREGSGITDTQYF

SEQ ID NO: 380637 - protein, 13 aa, Homo sapiens
  CDR3 for alpha chain variable domain of TCR clone 190319 (TRAV21, TRAJ27)
CAARPGNAGKPTF

SEQ ID NO: 380638 - protein, 15 aa, Homo sapiens
  CDR3 for beta chain variable domain of TCR clone 190319 (TRBV20-1, TRBJ2-7)
CSARDRVSGMDEQYF

SEQ ID NO: 380639 - protein, 16 aa, Homo sapiens
  CDR3 for alpha chain variable domain of TCR clone 190320 (TRAV35, TRAJ28)
CAGQKYSGAGSYQLTF

SEQ ID NO: 380640 - protein, 16 aa, Homo sapiens
  CDR3 for beta chain variable domain of TCR clone 190320 (TRBV5-1, TRBJ1-1)
CASSSGGNSLNTEAFF

SEQ ID NO: 380641 - protein, 11 aa, Homo sapiens
  CDR3 for alpha chain variable domain of TCR clone 190321 (TRAV21, TRAJ31)
CAVRNNARLMF

SEQ ID NO: 380642 - protein, 12 aa, Homo sapiens
  CDR3 for beta chain variable domain of TCR clone 190321 (TRBV19, TRBJ1-5)
CASSIAQQPQHF

SEQ ID NO: 380643 - protein, 16 aa, Homo sapiens
  CDR3 for alpha chain variable domain of TCR clone 190322 (TRAV30, TRAJ24)
CGTEIVDADSWGKFQF

SEQ ID NO: 380644 - protein, 15 aa, Homo sapiens
  CDR3 for beta chain variable domain of TCR clone 190322 (TRBV9, TRBJ2-1)
CASSRAGSSYNEQFF

SEQ ID NO: 380645 - protein, 12 aa, Homo sapiens
  CDR3 for alpha chain variable domain of TCR clone 190323 (TRAV12-3, TRAJ17)
CAMTFTGNKLTF

SEQ ID NO: 380646 - protein, 15 aa, Homo sapiens
  CDR3 for beta chain variable domain of TCR clone 190323 (TRBV10-2, TRBJ2-6)
CASSEQGTGANVLTF

SEQ ID NO: 380647 - protein, 13 aa, Homo sapiens
  CDR3 for alpha chain variable domain of TCR clone 190324 (TRAV25, TRAJ26)
CAGMDNYGQNFVF

SEQ ID NO: 380648 - protein, 14 aa, Homo sapiens
  CDR3 for beta chain variable domain of TCR clone 190324 (TRBV7-6, TRBJ2-3)
CASSLGTVTDTQYF

SEQ ID NO: 380649 - protein, 15 aa, Homo sapiens
  CDR3 for alpha chain variable domain of TCR clone 190325 (TRAV25, TRAJ10)
CAGPLLTGGGNKLTF

SEQ ID NO: 380650 - protein, 15 aa, Homo sapiens
  CDR3 for beta chain variable domain of TCR clone 190325 (TRBV27, TRBJ1-5)
CASSLGTWFDQPQHF

SEQ ID NO: 380651 - protein, 15 aa, Homo sapiens
  CDR3 for alpha chain variable domain of TCR clone 190326 (TRAV4, TRAJ15)
CLVGDGNQAGTALIF

SEQ ID NO: 380652 - protein, 13 aa, Homo sapiens
  CDR3 for beta chain variable domain of TCR clone 190326 (TRBV10-3, TRBJ2-7)
CASKLAVNYEQYF

SEQ ID NO: 380653 - protein, 17 aa, Homo sapiens
  CDR3 for alpha chain variable domain of TCR clone 190327 (TRAV17, TRAJ52)
CATDANAGGTSYGKLTF

SEQ ID NO: 380654 - protein, 12 aa, Homo sapiens
  CDR3 for beta chain variable domain of TCR clone 190327 (TRBV11-2, TRBJ2-2)
CASSLGGGELFF

SEQ ID NO: 380655 - protein, 12 aa, Homo sapiens
  CDR3 for alpha chain variable domain of TCR clone 190328 (TRAV17, TRAJ30)
CATDARDDKIIF

SEQ ID NO: 380656 - protein, 15 aa, Homo sapiens
  CDR3 for beta chain variable domain of TCR clone 190328 (TRBV4-1, TRBJ2-1)
CARSQGGELYNEQFF

SEQ ID NO: 380657 - protein, 15 aa, Homo sapiens
  CDR3 for alpha chain variable domain of TCR clone 190329 (TRAV17, TRAJ57)
CATGPSQGGSEKLVF

SEQ ID NO: 380658 - protein, 15 aa, Homo sapiens
  CDR3 for beta chain variable domain of TCR clone 190329 (TRBV28, TRBJ2-3)
CAPTFRDWSTDTQYV

SEQ ID NO: 380659 - protein, 23 aa, Homo sapiens
  CDR3 for alpha chain variable domain of TCR clone 190330 (TRAV8-4, )
CARLNAGNSHIQNPDPAVYQLRD

SEQ ID NO: 380660 - protein, 14 aa, Homo sapiens
  CDR3 for beta chain variable domain of TCR clone 190330 (TRBV7-8, TRBJ2-3)
CASSLEAGTDTQYF

SEQ ID NO: 380661 - protein, 15 aa, Homo sapiens
  CDR3 for alpha chain variable domain of TCR clone 190331 (TRAV8-3, TRAJ45)
CASSYSGGVAEGLTF

SEQ ID NO: 380662 - protein, 13 aa, Homo sapiens
  CDR3 for beta chain variable domain of TCR clone 190331 (TRBV10-3, TRBJ2-7)
CASKLAVNYEQYF

SEQ ID NO: 380663 - protein, 18 aa, Homo sapiens
  CDR3 for alpha chain variable domain of TCR clone 190332 (TRAV12-3, TRAJ52)
CAMSRTNAGGTSYGKLKF

SEQ ID NO: 380664 - protein, 17 aa, Homo sapiens
  CDR3 for beta chain variable domain of TCR clone 190332 (TRBV7-3, TRBJ2-3)
CASSLMKRMRGADTQYF

SEQ ID NO: 380665 - protein, 14 aa, Homo sapiens
  CDR3 for alpha chain variable domain of TCR clone 190333 (TRAV13-2, TRAJ17)
GAENSKAEGNKLTF

SEQ ID NO: 380666 - protein, 15 aa, Homo sapiens
  CDR3 for beta chain variable domain of TCR clone 190333 (TRBV27, TRBJ2-1)
CASSNGGGSSNEQFF

SEQ ID NO: 380667 - protein, 14 aa, Homo sapiens
  CDR3 for alpha chain variable domain of TCR clone 190334 (TRAV8-3, TRAJ4)
CAVVLTGGYNKLIF

SEQ ID NO: 380668 - protein, 16 aa, Homo sapiens
  CDR3 for beta chain variable domain of TCR clone 190334 (TRBV2, TRBJ2-7)
CASSTHPWTGDYEQYF

SEQ ID NO: 380669 - protein, 16 aa, Homo sapiens
  CDR3 for alpha chain variable domain of TCR clone 190335 (TRAV3, TRAJ3)
CAVRDTAKSSASKIIF

SEQ ID NO: 380670 - protein, 16 aa, Homo sapiens
  CDR3 for beta chain variable domain of TCR clone 190335 (TRBV20-1, TRBJ2-4)
CSATSLAELAKNIQYF

SEQ ID NO: 380671 - protein, 19 aa, Homo sapiens
  CDR3 for alpha chain variable domain of TCR clone 190336 (TRAV2, TRAJ20)
ILQVREADAAVYRACKLSF

SEQ ID NO: 380672 - protein, 16 aa, Homo sapiens
  CDR3 for beta chain variable domain of TCR clone 190336 (TRBV5-1, TRBJ2-5)
CASSLALLRAGETQYF

SEQ ID NO: 380673 - protein, 16 aa, Homo sapiens
  CDR3 for alpha chain variable domain of TCR clone 190337 (TRAV3, TRAJ5)
CAVTNLMDTGRRALTF

SEQ ID NO: 380674 - protein, 16 aa, Homo sapiens
  CDR3 for beta chain variable domain of TCR clone 190337 (TRBV4-2, TRBJ2-7)
CASSQEGLANSYEQYF

SEQ ID NO: 380675 - protein, 13 aa, Homo sapiens
  CDR3 for alpha chain variable domain of TCR clone 190338 (TRAV12-3, TRAJ7)
FAMSASGNNRLAF

SEQ ID NO: 380676 - protein, 14 aa, Homo sapiens
  CDR3 for beta chain variable domain of TCR clone 190338 (TRBV13, TRBJ2-5)
CASSLGPRGETHYF

SEQ ID NO: 380677 - protein, 20 aa, Homo sapiens
  CDR3 for alpha chain variable domain of TCR clone 190339 (TRAV4, TRAJ29)
CCVLLPRGCVPFSVNTPLVF

SEQ ID NO: 380678 - protein, 17 aa, Homo sapiens
  CDR3 for beta chain variable domain of TCR clone 190339 (TRBV25-1, TRBJ2-7)
CASSDARVVFSSYEQYF

SEQ ID NO: 380679 - protein, 12 aa, Homo sapiens
  CDR3 for alpha chain variable domain of TCR clone 190340 (TRAV2, TRAJ9)
CAVGAGGFKTIF

SEQ ID NO: 380680 - protein, 16 aa, Homo sapiens
  CDR3 for beta chain variable domain of TCR clone 190340 (TRBV4-1, TRBJ2-3)
CAGSQSTSGAEDTQYF

SEQ ID NO: 380681 - protein, 12 aa, Homo sapiens
  CDR3 for alpha chain variable domain of TCR clone 190341 (TRAV3, TRAJ20)
CAVRDGDYKLSF

SEQ ID NO: 380682 - protein, 15 aa, Homo sapiens
  CDR3 for beta chain variable domain of TCR clone 190341 (TRBV15, TRBJ2-3)
CATSGAGFGTDTQYF

SEQ ID NO: 380683 - protein, 13 aa, Homo sapiens
  CDR3 for alpha chain variable domain of TCR clone 190342 (TRAV3, TRAJ20)
CAVRSFNDYKLSF

SEQ ID NO: 380684 - protein, 13 aa, Homo sapiens
  CDR3 for beta chain variable domain of TCR clone 190342 (TRBV6-1, TRBJ2-1)
CAGMDPTNNEQFF

SEQ ID NO: 380685 - protein, 12 aa, Homo sapiens
  CDR3 for alpha chain variable domain of TCR clone 190343 (TRAV12-3, TRAJ29)
CAAREGNTPLVV

SEQ ID NO: 380686 - protein, 17 aa, Homo sapiens
  CDR3 for beta chain variable domain of TCR clone 190343 (TRBV18, TRBJ2-1)
CASSPLAAGAGDNEQFF

SEQ ID NO: 380687 - protein, 14 aa, Homo sapiens
  CDR3 for alpha chain variable domain of TCR clone 190344 (TRAV2, TRAJ37)
CAVDFTSNTGKLIF

SEQ ID NO: 380688 - protein, 12 aa, Homo sapiens
  CDR3 for beta chain variable domain of TCR clone 190344 (TRBV14, TRBJ2-4)
CASSNLKSIQYF

SEQ ID NO: 380689 - protein, 13 aa, Homo sapiens
  CDR3 for alpha chain variable domain of TCR clone 190345 (TRAV27, TRAJ45)
CRSSGGGADGLTF

SEQ ID NO: 380690 - protein, 11 aa, Homo sapiens
  CDR3 for beta chain variable domain of TCR clone 190345 (TRBV19, TRBJ1-1)
CDSSIGSEAFF

SEQ ID NO: 380691 - protein, 18 aa, Homo sapiens
  CDR3 for alpha chain variable domain of TCR clone 190346 (TRAV21, TRAJ52)
CAVRPSPAGGPSYGKLTF

SEQ ID NO: 380692 - protein, 16 aa, Homo sapiens
  CDR3 for beta chain variable domain of TCR clone 190346 (TRBV7-3, TRBJ2-1)
CASSLEGYRSYNEQFF

SEQ ID NO: 380693 - protein, 14 aa, Homo sapiens
  CDR3 for alpha chain variable domain of TCR clone 190347 (TRAV23/DV6, TRAJ22)
CAASVSGSARQLTF

SEQ ID NO: 380694 - protein, 16 aa, Homo sapiens
  CDR3 for beta chain variable domain of TCR clone 190347 (TRBV2, TRBJ1-3)
CASSGQGPSSGNTIYF

SEQ ID NO: 380695 - protein, 18 aa, Homo sapiens
  CDR3 for alpha chain variable domain of TCR clone 190348 (TRAV26-2, TRAJ54)
CILRDVEVGIKGAQKLVF

SEQ ID NO: 380696 - protein, 16 aa, Homo sapiens
  CDR3 for beta chain variable domain of TCR clone 190348 (TRBV6-1, TRBJ2-5)
CASSETLDRGAETQYF

SEQ ID NO: 380697 - protein, 14 aa, Homo sapiens
  CDR3 for alpha chain variable domain of TCR clone 190349 (TRAV12-2, TRAJ40)
CAVKIPSGTYKYIF

SEQ ID NO: 380698 - protein, 15 aa, Homo sapiens
  CDR3 for beta chain variable domain of TCR clone 190349 (TRBV7-6, TRBJ2-1)
CASSPGQGPYNEQFF

SEQ ID NO: 380699 - protein, 13 aa, Homo sapiens
  CDR3 for alpha chain variable domain of TCR clone 190350 (TRAV3, TRAJ29)
CAVRDIIDTPLVF

SEQ ID NO: 380700 - protein, 14 aa, Homo sapiens
  CDR3 for beta chain variable domain of TCR clone 190350 (TRBV19, TRBJ2-7)
CASNFRDTFTGMYF

SEQ ID NO: 380701 - protein, 16 aa, Homo sapiens
  CDR3 for alpha chain variable domain of TCR clone 190351 (TRAV3, TRAJ37)
CSVRPHGSGNTGKLIF

SEQ ID NO: 380702 - protein, 13 aa, Homo sapiens
  CDR3 for beta chain variable domain of TCR clone 190351 (TRBV2, TRBJ1-5)
CASGTGGYQPQHF

SEQ ID NO: 380703 - protein, 16 aa, Homo sapiens
  CDR3 for alpha chain variable domain of TCR clone 190352 (TRAV8-3, TRAJ13)
CAVVRMNSGGYQKVTF

SEQ ID NO: 380704 - protein, 15 aa, Homo sapiens
  CDR3 for beta chain variable domain of TCR clone 190352 (TRBV5-4, TRBJ2-5)
CASSLAGGAKETQYF

SEQ ID NO: 380705 - protein, 13 aa, Homo sapiens
  CDR3 for alpha chain variable domain of TCR clone 190353 (TRAV20, TRAJ54)
CAVQAGGAQKLVF

SEQ ID NO: 380706 - protein, 12 aa, Homo sapiens
  CDR3 for beta chain variable domain of TCR clone 190353 (TRBV12-5, TRBJ2-5)
CASGQGVETQYF

SEQ ID NO: 380707 - protein, 14 aa, Homo sapiens
  CDR3 for alpha chain variable domain of TCR clone 190354 (TRAV21, TRAJ35)
FAVMPIGFGNVLHC

SEQ ID NO: 380708 - protein, 12 aa, Homo sapiens
  CDR3 for beta chain variable domain of TCR clone 190354 (TRBV7-9, TRBJ2-7)
CASSIKREEQYF

SEQ ID NO: 380709 - protein, 11 aa, Homo sapiens
  CDR3 for alpha chain variable domain of TCR clone 190355 (TRAV17, TRAJ31)
CATDRTARLMF

SEQ ID NO: 380710 - protein, 14 aa, Homo sapiens
  CDR3 for beta chain variable domain of TCR clone 190355 (TRBV6-1, TRBJ1-3)
CASVQGGGGNTIYF

SEQ ID NO: 380711 - protein, 14 aa, Homo sapiens
  CDR3 for alpha chain variable domain of TCR clone 190356 (TRAV17, TRAJ11)
CATDTSRGYSTLTF

SEQ ID NO: 380712 - protein, 15 aa, Homo sapiens
  CDR3 for beta chain variable domain of TCR clone 190356 (TRBV6-3, TRBJ2-7)
CASSSPGTVFYEQYF

SEQ ID NO: 380713 - protein, 15 aa, Homo sapiens
  CDR3 for alpha chain variable domain of TCR clone 190357 (TRAV8-3, TRAJ32)
CAVGPYGGAKNKLIF

SEQ ID NO: 380714 - protein, 14 aa, Homo sapiens
  CDR3 for beta chain variable domain of TCR clone 190357 (TRBV29-1, TRBJ2-2)
CSVLAETNTGELFF

SEQ ID NO: 380715 - protein, 12 aa, Homo sapiens
  CDR3 for alpha chain variable domain of TCR clone 190358 (TRAV27, TRAJ13)
CAGAGGYQKVTF

SEQ ID NO: 380716 - protein, 15 aa, Homo sapiens
  CDR3 for beta chain variable domain of TCR clone 190358 (TRBV20-1, TRBJ2-6)
CSARDRGPGANVLTF

SEQ ID NO: 380717 - protein, 12 aa, Homo sapiens
  CDR3 for alpha chain variable domain of TCR clone 190359 (TRAV16, TRAJ10)
CSRTGGGNKLTF

SEQ ID NO: 380718 - protein, 15 aa, Homo sapiens
  CDR3 for beta chain variable domain of TCR clone 190359 (TRBV11-2, TRBJ2-1)
CASSKNRGLIYEQFF

SEQ ID NO: 380719 - protein, 13 aa, Homo sapiens
  CDR3 for alpha chain variable domain of TCR clone 190360 (TRAV3, TRAJ21)
CAVREPDFDKFYF

SEQ ID NO: 380720 - protein, 17 aa, Homo sapiens
  CDR3 for beta chain variable domain of TCR clone 190360 (TRBV7-8, TRBJ2-6)
CASSAGTGGAGANVLTF

SEQ ID NO: 380721 - protein, 15 aa, Homo sapiens
  CDR3 for alpha chain variable domain of TCR clone 190361 (TRAV26-1, TRAJ29)
CIVRVEGSGNTPPVF

SEQ ID NO: 380722 - protein, 14 aa, Homo sapiens
  CDR3 for beta chain variable domain of TCR clone 190361 (TRBV18, TRBJ2-5)
CASSPGVSKGTQYF

SEQ ID NO: 380723 - protein, 11 aa, Homo sapiens
  CDR3 for alpha chain variable domain of TCR clone 190362 (TRAV12-1, TRAJ30)
CVVNGQDKIIF

SEQ ID NO: 380724 - protein, 12 aa, Homo sapiens
  CDR3 for beta chain variable domain of TCR clone 190362 (TRBV5-1, TRBJ1-2)
CASSQDTYGYTF

SEQ ID NO: 380725 - protein, 10 aa, Homo sapiens
  CDR3 for alpha chain variable domain of TCR clone 190363 (TRAV38-2/DV8, TRAJ21)
CAYGSNKFYF

SEQ ID NO: 380726 - protein, 12 aa, Homo sapiens
  CDR3 for beta chain variable domain of TCR clone 190363 (TRBV11-3, TRBJ2-3)
CASSLWEDTQYF

SEQ ID NO: 380727 - protein, 14 aa, Homo sapiens
  CDR3 for alpha chain variable domain of TCR clone 190364 (TRAV1-2, TRAJ16)
CAVNRFSDSQKLLF

SEQ ID NO: 380728 - protein, 16 aa, Homo sapiens
  CDR3 for beta chain variable domain of TCR clone 190364 (TRBV12-4, TRBJ1-5)
CASRQPVEGSNQPQHF

SEQ ID NO: 380729 - protein, 13 aa, Homo sapiens
  CDR3 for alpha chain variable domain of TCR clone 190365 (TRAV36/DV7, TRAJ38)
CVANAGNNRKLIW

SEQ ID NO: 380730 - protein, 17 aa, Homo sapiens
  CDR3 for beta chain variable domain of TCR clone 190365 (TRBV13, TRBJ2-3)
CASSLSRVAGGRNTQYF

SEQ ID NO: 380731 - protein, 17 aa, Homo sapiens
  CDR3 for alpha chain variable domain of TCR clone 190366 (TRAV13-1, TRAJ52)
CAAGRNAGGTSYGKLTF

SEQ ID NO: 380732 - protein, 14 aa, Homo sapiens
  CDR3 for beta chain variable domain of TCR clone 190366 (TRBV12-5, TRBJ2-5)
CASGTRTHQETQYF

SEQ ID NO: 380733 - protein, 15 aa, Homo sapiens
  CDR3 for alpha chain variable domain of TCR clone 190367 (TRAV27, TRAJ53)
CRAINSGGSNYKLTF

SEQ ID NO: 380734 - protein, 16 aa, Homo sapiens
  CDR3 for beta chain variable domain of TCR clone 190367 (TRBV9, TRBJ2-2)
CASSAMGKGNTGELFF

SEQ ID NO: 380735 - protein, 18 aa, Homo sapiens
  CDR3 for alpha chain variable domain of TCR clone 190368 (TRAV21, TRAJ52)
CAVRPSSAGGTSYGKPTF

SEQ ID NO: 380736 - protein, 17 aa, Homo sapiens
  CDR3 for beta chain variable domain of TCR clone 190368 (TRBV13, TRBJ2-3)
CASSLSRVAGGRNTQYF

SEQ ID NO: 380737 - protein, 13 aa, Homo sapiens
  CDR3 for alpha chain variable domain of TCR clone 190369 (TRAV13-2, TRAJ5)
CAVMDTGRRALTF

SEQ ID NO: 380738 - protein, 12 aa, Homo sapiens
  CDR3 for beta chain variable domain of TCR clone 190369 (TRBV28, TRBJ2-7)
CASSFSSYEQSF

SEQ ID NO: 380739 - protein, 12 aa, Homo sapiens
  CDR3 for alpha chain variable domain of TCR clone 190370 (TRAV12-2, TRAJ8)
CAVNTGFQKLVF

SEQ ID NO: 380740 - protein, 14 aa, Homo sapiens
  CDR3 for beta chain variable domain of TCR clone 190370 (TRBV27, TRBJ1-1)
CASSLLSGLSEAFF

SEQ ID NO: 380741 - protein, 18 aa, Homo sapiens
  CDR3 for alpha chain variable domain of TCR clone 190371 (TRAV26-2, TRAJ54)
CILRDVEVGIQGAQKLVF

SEQ ID NO: 380742 - protein, 17 aa, Homo sapiens
  CDR3 for beta chain variable domain of TCR clone 190371 (TRBV20-1, TRBJ1-5)
CSASLSLGQGGNQPQHF

SEQ ID NO: 380743 - protein, 15 aa, Homo sapiens
  CDR3 for alpha chain variable domain of TCR clone 190372 (TRAV26-1, TRAJ3)
CIVRSGYSSASKIIF

SEQ ID NO: 380744 - protein, 14 aa, Homo sapiens
  CDR3 for beta chain variable domain of TCR clone 190372 (TRBV13, TRBJ2-5)
CASYRRLAEETQFF

SEQ ID NO: 380745 - protein, 13 aa, Homo sapiens
  CDR3 for alpha chain variable domain of TCR clone 190373 (TRAV12-3, TRAJ13)
CAMGTGGSQKVTF

SEQ ID NO: 380746 - protein, 14 aa, Homo sapiens
  CDR3 for beta chain variable domain of TCR clone 190373 (TRBV7-2, TRBJ2-5)
CASSTGGELKTQYF

SEQ ID NO: 380747 - protein, 15 aa, Homo sapiens
  CDR3 for alpha chain variable domain of TCR clone 190374 (TRAV13-2, TRAJ45)
CAEHHSGGGADGLTF

SEQ ID NO: 380748 - protein, 12 aa, Homo sapiens
  CDR3 for beta chain variable domain of TCR clone 190374 (TRBV10-2, TRBJ2-5)
CASSGGGKTQYF

SEQ ID NO: 380749 - protein, 14 aa, Homo sapiens
  CDR3 for alpha chain variable domain of TCR clone 190375 (TRAV8-2, TRAJ4)
CVVSPSSGYTKLIF

SEQ ID NO: 380750 - protein, 15 aa, Homo sapiens
  CDR3 for beta chain variable domain of TCR clone 190375 (TRBV4-1, TRBJ1-4)
CASSDTGGTNEKLFF

SEQ ID NO: 380751 - protein, 16 aa, Homo sapiens
  CDR3 for alpha chain variable domain of TCR clone 190376 (TRAV3, TRAJ13)
CAVREPNSGGYQKVTF

SEQ ID NO: 380752 - protein, 13 aa, Homo sapiens
  CDR3 for beta chain variable domain of TCR clone 190376 (TRBV7-9, TRBJ2-7)
CASSLQGSYEQYF

SEQ ID NO: 380753 - protein, 22 aa, Homo sapiens
  CDR3 for alpha chain variable domain of TCR clone 190377 (TRAV21, )
CAVRQDAGNNHIQNTDPAVYQL

SEQ ID NO: 380754 - protein, 16 aa, Homo sapiens
  CDR3 for beta chain variable domain of TCR clone 190377 (TRBV4-2, TRBJ1-1)
CASRPLDGGGDTEAFF

SEQ ID NO: 380755 - protein, 12 aa, Homo sapiens
  CDR3 for alpha chain variable domain of TCR clone 190378 (TRAV13-1, TRAJ48)
CAANFGNEKLTF

SEQ ID NO: 380756 - protein, 13 aa, Homo sapiens
  CDR3 for beta chain variable domain of TCR clone 190378 (TRBV7-3, TRBJ1-1)
CASSQDWGAEAFC

SEQ ID NO: 380757 - protein, 14 aa, Homo sapiens
  CDR3 for alpha chain variable domain of TCR clone 190379 (TRAV38-1, TRAJ45)
CASHSGGGADGLTF

SEQ ID NO: 380758 - protein, 13 aa, Homo sapiens
  CDR3 for beta chain variable domain of TCR clone 190379 (TRBV10-3, TRBJ1-2)
CAISERDTYGYTF

SEQ ID NO: 380759 - protein, 18 aa, Homo sapiens
  CDR3 for alpha chain variable domain of TCR clone 190380 (TRAV13-1, TRAJ52)
CAANKSSAGGTSYGKLTF

SEQ ID NO: 380760 - protein, 13 aa, Homo sapiens
  CDR3 for beta chain variable domain of TCR clone 190380 (TRBV12-4, TRBJ1-2)
CASSLRQGKGYTF

SEQ ID NO: 380761 - protein, 11 aa, Homo sapiens
  CDR3 for alpha chain variable domain of TCR clone 190381 (TRAV13-1, TRAJ39)
CASHAGNMLTF

SEQ ID NO: 380762 - protein, 15 aa, Homo sapiens
  CDR3 for beta chain variable domain of TCR clone 190381 (TRBV7-3, TRBJ2-1)
CQQLAPSGSYNEQFF

SEQ ID NO: 380763 - protein, 14 aa, Homo sapiens
  CDR3 for alpha chain variable domain of TCR clone 190382 (TRAV17, TRAJ57)
CATDPQGGDEKLVF

SEQ ID NO: 380764 - protein, 16 aa, Homo sapiens
  CDR3 for beta chain variable domain of TCR clone 190382 (TRBV20-1, TRBJ1-4)
CSAPGQGLLTNEKLFF

SEQ ID NO: 380765 - protein, 15 aa, Homo sapiens
  CDR3 for alpha chain variable domain of TCR clone 190383 (TRAV38-2/DV8, TRAJ48)
CAYRSGGFGIEKLTF

SEQ ID NO: 380766 - protein, 16 aa, Homo sapiens
  CDR3 for beta chain variable domain of TCR clone 190383 (TRBV28, TRBJ2-7)
CASSPWVATGDLAQYF

SEQ ID NO: 380767 - protein, 15 aa, Homo sapiens
  CDR3 for alpha chain variable domain of TCR clone 190384 (TRAV35, TRAJ20)
CAGELVGSNDYKLSF

SEQ ID NO: 380768 - protein, 13 aa, Homo sapiens
  CDR3 for beta chain variable domain of TCR clone 190384 (TRBV19, TRBJ2-7)
CVSSKTGTHEQYF

SEQ ID NO: 380769 - protein, 13 aa, Homo sapiens
  CDR3 for alpha chain variable domain of TCR clone 190385 (TRAV17, TRAJ31)
CATDENNNARLMF

SEQ ID NO: 380770 - protein, 13 aa, Homo sapiens
  CDR3 for beta chain variable domain of TCR clone 190385 (TRBV7-9, TRBJ1-2)
CASSLKQNYGYTF

SEQ ID NO: 380771 - protein, 14 aa, Homo sapiens
  CDR3 for alpha chain variable domain of TCR clone 190386 (TRAV12-2, TRAJ40)
CAVKVPPGTYKYIF

SEQ ID NO: 380772 - protein, 15 aa, Homo sapiens
  CDR3 for beta chain variable domain of TCR clone 190386 (TRBV7-9, TRBJ2-1)
CASSLGWGRANEQFF

SEQ ID NO: 380773 - protein, 14 aa, Homo sapiens
  CDR3 for alpha chain variable domain of TCR clone 190387 (TRAV12-2, TRAJ24)
CAVTPADSWGKLHF

SEQ ID NO: 380774 - protein, 15 aa, Homo sapiens
  CDR3 for beta chain variable domain of TCR clone 190387 (TRBV5-1, TRBJ1-1)
CASSSTTGTNTEAFF

SEQ ID NO: 380775 - protein, 14 aa, Homo sapiens
  CDR3 for alpha chain variable domain of TCR clone 190388 (TRAV16, TRAJ33)
CALSAMDSNYQLIW

SEQ ID NO: 380776 - protein, 15 aa, Homo sapiens
  CDR3 for beta chain variable domain of TCR clone 190388 (TRBV10-3, TRBJ2-3)
CAISLTSGGTDTQYF

SEQ ID NO: 380777 - protein, 17 aa, Homo sapiens
  CDR3 for alpha chain variable domain of TCR clone 190389 (TRAV23/DV6, TRAJ57)
CAASSTLPQGGPEKLVF

SEQ ID NO: 380778 - protein, 14 aa, Homo sapiens
  CDR3 for beta chain variable domain of TCR clone 190389 (TRBV25-1, TRBJ1-1)
CASTHLGGNTEAFF

SEQ ID NO: 380779 - protein, 13 aa, Homo sapiens
  CDR3 for alpha chain variable domain of TCR clone 190390 (TRAV12-2, TRAJ9)
CAVRNTGGFKTIF

SEQ ID NO: 380780 - protein, 12 aa, Homo sapiens
  CDR3 for beta chain variable domain of TCR clone 190390 (TRBV11-2, TRBJ2-2)
CASSLGGGELFF

SEQ ID NO: 380781 - protein, 11 aa, Homo sapiens
  CDR3 for alpha chain variable domain of TCR clone 190391 (TRAV29/DV5, TRAJ49)
CAAVPGNQFYF

SEQ ID NO: 380782 - protein, 15 aa, Homo sapiens
  CDR3 for beta chain variable domain of TCR clone 190391 (TRBV7-3, TRBJ2-2)
CASSETGQGTGELFF

SEQ ID NO: 380783 - protein, 17 aa, Homo sapiens
  CDR3 for alpha chain variable domain of TCR clone 190392 (TRAV27, TRAJ26)
CAGARAPLNNYSQNFVF

SEQ ID NO: 380784 - protein, 15 aa, Homo sapiens
  CDR3 for beta chain variable domain of TCR clone 190392 (TRBV11-2, TRBJ2-5)
CASSPRSGGLETQYF

SEQ ID NO: 380785 - protein, 14 aa, Homo sapiens
  CDR3 for alpha chain variable domain of TCR clone 190393 (TRAV6, TRAJ6)
CALPTSGGSYIPTF

SEQ ID NO: 380786 - protein, 19 aa, Homo sapiens
  CDR3 for beta chain variable domain of TCR clone 190393 (TRBV25-1, TRBJ2-2)
CAILVYRVDRGRKTGELFF

SEQ ID NO: 380787 - protein, 13 aa, Homo sapiens
  CDR3 for alpha chain variable domain of TCR clone 190394 (TRAV8-4, TRAJ10)
CAAFTGEGNKLTF

SEQ ID NO: 380788 - protein, 15 aa, Homo sapiens
  CDR3 for beta chain variable domain of TCR clone 190394 (TRBV2, TRBJ2-3)
CASSDFDKATDTQYF

SEQ ID NO: 380789 - protein, 17 aa, Homo sapiens
  CDR3 for alpha chain variable domain of TCR clone 190395 (TRAV3, TRAJ38)
CAVRDCLNASNNRKLIW

SEQ ID NO: 380790 - protein, 15 aa, Homo sapiens
  CDR3 for beta chain variable domain of TCR clone 190395 (TRBV27, TRBJ2-1)
CASSNGGGSSNEQFF

SEQ ID NO: 380791 - protein, 12 aa, Homo sapiens
  CDR3 for alpha chain variable domain of TCR clone 190396 (TRAV13-2, TRAJ23)
CAERHRGGKLIF

SEQ ID NO: 380792 - protein, 13 aa, Homo sapiens
  CDR3 for beta chain variable domain of TCR clone 190396 (TRBV7-9, TRBJ1-2)
CASSLEQNYGYTF

SEQ ID NO: 380793 - protein, 15 aa, Homo sapiens
  CDR3 for alpha chain variable domain of TCR clone 190397 (TRAV12-3, TRAJ6)
CAMSATSGGCYIPTF

SEQ ID NO: 380794 - protein, 11 aa, Homo sapiens
  CDR3 for beta chain variable domain of TCR clone 190397 (TRBV20-1, TRBJ1-5)
CSAQGDQPQHF

SEQ ID NO: 380795 - protein, 12 aa, Homo sapiens
  CDR3 for alpha chain variable domain of TCR clone 190398 (TRAV13-1, TRAJ53)
AASGGSNYKLTF

SEQ ID NO: 380796 - protein, 15 aa, Homo sapiens
  CDR3 for beta chain variable domain of TCR clone 190398 (TRBV5-1, TRBJ2-1)
CTSGPPRAPYNEQFF

SEQ ID NO: 380797 - protein, 13 aa, Homo sapiens
  CDR3 for alpha chain variable domain of TCR clone 190399 (TRAV2, TRAJ40)
CAVVTSGTYKYIF

SEQ ID NO: 380798 - protein, 13 aa, Homo sapiens
  CDR3 for beta chain variable domain of TCR clone 190399 (TRBV12-4, TRBJ2-2)
CASSITGSGELFF

SEQ ID NO: 380799 - protein, 13 aa, Homo sapiens
  CDR3 for alpha chain variable domain of TCR clone 190400 (TRAV8-3, TRAJ48)
CAVVPFGNEKLTF

SEQ ID NO: 380800 - protein, 15 aa, Homo sapiens
  CDR3 for beta chain variable domain of TCR clone 190400 (TRBV11-2, TRBJ2-1)
CASSSHSTRYNEQFF

SEQ ID NO: 380801 - protein, 13 aa, Homo sapiens
  CDR3 for alpha chain variable domain of TCR clone 190401 (TRAV30, TRAJ24)
CGTVTDNWGKWQF

SEQ ID NO: 380802 - protein, 15 aa, Homo sapiens
  CDR3 for beta chain variable domain of TCR clone 190401 (TRBV25-1, TRBJ1-4)
CASSPGDSTNEKLFF

SEQ ID NO: 380803 - protein, 18 aa, Homo sapiens
  CDR3 for alpha chain variable domain of TCR clone 190402 (TRAV21, TRAJ52)
CAVRPSPAVGTSYGKLTF

SEQ ID NO: 380804 - protein, 15 aa, Homo sapiens
  CDR3 for beta chain variable domain of TCR clone 190402 (TRBV20-1, TRBJ2-5)
CSATPLTGDQETQYF

SEQ ID NO: 380805 - protein, 15 aa, Homo sapiens
  CDR3 for alpha chain variable domain of TCR clone 190403 (TRAV13-1, TRAJ50)
CAAKGSETSYDKVTF

SEQ ID NO: 380806 - protein, 18 aa, Homo sapiens
  CDR3 for beta chain variable domain of TCR clone 190403 (TRBV10-3, TRBJ2-1)
CTSVPSVSLRGGVDEQFF

SEQ ID NO: 380807 - protein, 11 aa, Homo sapiens
  CDR3 for alpha chain variable domain of TCR clone 190404 (TRAV23/DV6, TRAJ58)
CAARLLRGETS

SEQ ID NO: 380808 - protein, 16 aa, Homo sapiens
  CDR3 for beta chain variable domain of TCR clone 190404 (TRBV7-6, TRBJ2-3)
CASSPLAGGSTDTQYF

SEQ ID NO: 380809 - protein, 15 aa, Homo sapiens
  CDR3 for alpha chain variable domain of TCR clone 190405 (TRAV8-3, TRAJ7)
CAVGSISYGNNRLAF

SEQ ID NO: 380810 - protein, 13 aa, Homo sapiens
  CDR3 for beta chain variable domain of TCR clone 190405 (TRBV19, TRBJ2-1)
CATSRGVYNEQFF

SEQ ID NO: 380811 - protein, 14 aa, Homo sapiens
  CDR3 for alpha chain variable domain of TCR clone 190406 (TRAV26-1, TRAJ21)
CIVRVGHNFNKFYF

SEQ ID NO: 380812 - protein, 15 aa, Homo sapiens
  CDR3 for beta chain variable domain of TCR clone 190406 (TRBV4-3, TRBJ2-1)
CAGSQGLAGSNEQFF

SEQ ID NO: 380813 - protein, 15 aa, Homo sapiens
  CDR3 for alpha chain variable domain of TCR clone 190407 (TRAV24, TRAJ10)
KGFRPVTGGGNKLTF

SEQ ID NO: 380814 - protein, 21 aa, Homo sapiens
  CDR3 for beta chain variable domain of TCR clone 190407 (TRBV15, TRBJ2-1)
AWGTQPRTCVPPAEVDTARFF

SEQ ID NO: 380815 - protein, 15 aa, Homo sapiens
  CDR3 for alpha chain variable domain of TCR clone 190408 (TRAV13-1, TRAJ3)
CAASKLASSASKIIF

SEQ ID NO: 380816 - protein, 16 aa, Homo sapiens
  CDR3 for beta chain variable domain of TCR clone 190408 (TRBV25-1, TRBJ1-5)
RASGAPTVNSNQPQHF

SEQ ID NO: 380817 - protein, 14 aa, Homo sapiens
  CDR3 for alpha chain variable domain of TCR clone 190409 (TRAV16, TRAJ33)
CALSAMDSNYQLIW

SEQ ID NO: 380818 - protein, 16 aa, Homo sapiens
  CDR3 for beta chain variable domain of TCR clone 190409 (TRBV9, TRBJ1-2)
CASSVEEKVSPYGYTF

SEQ ID NO: 380819 - protein, 18 aa, Homo sapiens
  CDR3 for alpha chain variable domain of TCR clone 190410 (TRAV13-1, TRAJ52)
CAASKRSAGGTSYGKLTF

SEQ ID NO: 380820 - protein, 13 aa, Homo sapiens
  CDR3 for beta chain variable domain of TCR clone 190410 (TRBV12-4, TRBJ1-2)
CASSLRQGKGEIF

SEQ ID NO: 380821 - protein, 14 aa, Homo sapiens
  CDR3 for alpha chain variable domain of TCR clone 190411 (TRAV2, TRAJ9)
CAVEDRSGGFKTIF

SEQ ID NO: 380822 - protein, 16 aa, Homo sapiens
  CDR3 for beta chain variable domain of TCR clone 190411 (TRBV7-9, TRBJ2-2)
CASSGFGGANTGELFF

SEQ ID NO: 380823 - protein, 16 aa, Homo sapiens
  CDR3 for alpha chain variable domain of TCR clone 190412 (TRAV30, TRAJ49)
SAAQRVGPNNGNQFYF

SEQ ID NO: 380824 - protein, 15 aa, Homo sapiens
  CDR3 for beta chain variable domain of TCR clone 190412 (TRBV2, TRBJ2-1)
CASSELAGSYNEQFF

SEQ ID NO: 380825 - protein, 14 aa, Homo sapiens
  CDR3 for alpha chain variable domain of TCR clone 190413 (TRAV12-2, TRAJ17)
CAVLFKAAGNKLTF

SEQ ID NO: 380826 - protein, 14 aa, Homo sapiens
  CDR3 for beta chain variable domain of TCR clone 190413 (TRBV12-5, TRBJ2-5)
CASGSRTHQETQFF

SEQ ID NO: 380827 - protein, 15 aa, Homo sapiens
  CDR3 for alpha chain variable domain of TCR clone 190414 (TRAV21, TRAJ53)
CATLNSGGSNYKLTF

SEQ ID NO: 380828 - protein, 15 aa, Homo sapiens
  CDR3 for beta chain variable domain of TCR clone 190414 (TRBV7-6, TRBJ2-7)
CASSLGGAEPYEQYF

SEQ ID NO: 380829 - protein, 11 aa, Homo sapiens
  CDR3 for alpha chain variable domain of TCR clone 190415 (TRAV17, TRAJ36)
CAPTGANNLFF

SEQ ID NO: 380830 - protein, 13 aa, Homo sapiens
  CDR3 for beta chain variable domain of TCR clone 190415 (TRBV20-1, TRBJ1-1)
CSAPAGGHTEAFF

SEQ ID NO: 380831 - protein, 15 aa, Homo sapiens
  CDR3 for alpha chain variable domain of TCR clone 190416 (TRAV12-2, TRAJ43)
CAFDMRFGAGTSLPV

SEQ ID NO: 380832 - protein, 18 aa, Homo sapiens
  CDR3 for beta chain variable domain of TCR clone 190416 (TRBV20-1, TRBJ2-3)
CSASGLAGGPGTTDTQYF

SEQ ID NO: 380833 - protein, 14 aa, Homo sapiens
  CDR3 for alpha chain variable domain of TCR clone 190417 (TRAV1-2, TRAJ8)
CAVRDDTGFQKLVF

SEQ ID NO: 380834 - protein, 15 aa, Homo sapiens
  CDR3 for beta chain variable domain of TCR clone 190417 (TRBV6-3, TRBJ2-7)
CDSSSPGTVFYEQYF

SEQ ID NO: 380835 - protein, 16 aa, Homo sapiens
  CDR3 for alpha chain variable domain of TCR clone 190418 (TRAV1-1, TRAJ29)
CSVRSTRNSGNTPLVF

SEQ ID NO: 380836 - protein, 15 aa, Homo sapiens
  CDR3 for beta chain variable domain of TCR clone 190418 (TRBV29-1, TRBJ2-1)
CSVGRHALFYNEQFF

SEQ ID NO: 380837 - protein, 14 aa, Homo sapiens
  CDR3 for alpha chain variable domain of TCR clone 190419 (TRAV35, TRAJ22)
CAGLRPGSARELTF

SEQ ID NO: 380838 - protein, 15 aa, Homo sapiens
  CDR3 for beta chain variable domain of TCR clone 190419 (TRBV12-4, TRBJ2-5)
CASSPPTGLQETQYF

SEQ ID NO: 380839 - protein, 20 aa, Homo sapiens
  CDR3 for alpha chain variable domain of TCR clone 190420 (TRAV12-1, TRAJ42)
SSVIQPPTSVKGGSQGNLIF

SEQ ID NO: 380840 - protein, 18 aa, Homo sapiens
  CDR3 for beta chain variable domain of TCR clone 190420 (TRBV7-2, TRBJ2-3)
CASSLRRADPPCTDTQYF

SEQ ID NO: 380841 - protein, 13 aa, Homo sapiens
  CDR3 for alpha chain variable domain of TCR clone 190421 (TRAV21, TRAJ20)
CAVGLRVDYKLSF

SEQ ID NO: 380842 - protein, 12 aa, Homo sapiens
  CDR3 for beta chain variable domain of TCR clone 190421 (TRBV5-1, TRBJ2-4)
LAGEWTKNIQYF

SEQ ID NO: 380843 - protein, 13 aa, Homo sapiens
  CDR3 for alpha chain variable domain of TCR clone 190422 (TRAV12-1, TRAJ35)
CVLDGGFGNVLHC

SEQ ID NO: 380844 - protein, 13 aa, Homo sapiens
  CDR3 for beta chain variable domain of TCR clone 190422 (TRBV7-9, TRBJ1-2)
CASSLKQNYGYTF

SEQ ID NO: 380845 - protein, 14 aa, Homo sapiens
  CDR3 for alpha chain variable domain of TCR clone 190423 (TRAV12-3, TRAJ10)
RHLPLTGGGNKLTF

SEQ ID NO: 380846 - protein, 12 aa, Homo sapiens
  CDR3 for beta chain variable domain of TCR clone 190423 (TRBV11-2, TRBJ2-2)
CASSLGGGELFF

SEQ ID NO: 380847 - protein, 15 aa, Homo sapiens
  CDR3 for alpha chain variable domain of TCR clone 190424 (TRAV35, TRAJ40)
CAGQLGTSGTYKYIF

SEQ ID NO: 380848 - protein, 14 aa, Homo sapiens
  CDR3 for beta chain variable domain of TCR clone 190424 (TRBV7-3, TRBJ2-1)
CASGLAVGTNEQFF

SEQ ID NO: 380849 - protein, 18 aa, Homo sapiens
  CDR3 for alpha chain variable domain of TCR clone 190425 (TRAV26-1, TRAJ22)
CIVRVALLSSGSARQLTF

SEQ ID NO: 380850 - protein, 13 aa, Homo sapiens
  CDR3 for beta chain variable domain of TCR clone 190425 (TRBV13, TRBJ2-5)
CASSPEVGETQYC

SEQ ID NO: 380851 - protein, 15 aa, Homo sapiens
  CDR3 for alpha chain variable domain of TCR clone 190426 (TRAV3, TRAJ3)
CAVRNMSSSASKIIF

SEQ ID NO: 380852 - protein, 14 aa, Homo sapiens
  CDR3 for beta chain variable domain of TCR clone 190426 (TRBV6-6, TRBJ2-7)
CASSIAGGVDEQYF

SEQ ID NO: 380853 - protein, 14 aa, Homo sapiens
  CDR3 for alpha chain variable domain of TCR clone 190427 (TRAV16, TRAJ39)
CALSKNNAGNMLTF

SEQ ID NO: 380854 - protein, 17 aa, Homo sapiens
  CDR3 for beta chain variable domain of TCR clone 190427 (TRBV6-6, TRBJ2-1)
CASSYEQVFGPGTRLTV

SEQ ID NO: 380855 - protein, 13 aa, Homo sapiens
  CDR3 for alpha chain variable domain of TCR clone 190428 (TRAV13-2, TRAJ13)
CAERPGGYQKVTF

SEQ ID NO: 380856 - protein, 12 aa, Homo sapiens
  CDR3 for beta chain variable domain of TCR clone 190428 (TRBV28, TRBJ2-3)
CASSLYRDTQYF

SEQ ID NO: 380857 - protein, 14 aa, Homo sapiens
  CDR3 for alpha chain variable domain of TCR clone 190429 (TRAV13-1, TRAJ44)
CAAKATGTASKLTF

SEQ ID NO: 380858 - protein, 15 aa, Homo sapiens
  CDR3 for beta chain variable domain of TCR clone 190429 (TRBV24-1, TRBJ2-5)
CATSETTGAVGAQYF

SEQ ID NO: 380859 - protein, 13 aa, Homo sapiens
  CDR3 for alpha chain variable domain of TCR clone 190430 (TRAV12-1, TRAJ34)
CVVNERNTDKLIF

SEQ ID NO: 380860 - protein, 13 aa, Homo sapiens
  CDR3 for beta chain variable domain of TCR clone 190430 (TRBV19, TRBJ1-2)
CASSVPGQDGYTF

SEQ ID NO: 380861 - protein, 13 aa, Homo sapiens
  CDR3 for alpha chain variable domain of TCR clone 190431 (TRAV12-1, TRAJ40)
CVVPTLGTYKYIF

SEQ ID NO: 380862 - protein, 15 aa, Homo sapiens
  CDR3 for beta chain variable domain of TCR clone 190431 (TRBV7-9, TRBJ2-7)
CASSLDLDRGYEQYF

SEQ ID NO: 380863 - protein, 14 aa, Homo sapiens
  CDR3 for alpha chain variable domain of TCR clone 190432 (TRAV1-1, TRAJ30)
CAVRSLNRDDKIIF

SEQ ID NO: 380864 - protein, 15 aa, Homo sapiens
  CDR3 for beta chain variable domain of TCR clone 190432 (TRBV27, TRBJ1-4)
CASNAQQDLNEKLFF

SEQ ID NO: 380865 - protein, 15 aa, Homo sapiens
  CDR3 for alpha chain variable domain of TCR clone 190433 (TRAV27, TRAJ45)
CRSPQSGGGADGLTF

SEQ ID NO: 380866 - protein, 15 aa, Homo sapiens
  CDR3 for beta chain variable domain of TCR clone 190433 (TRBV6-3, TRBJ2-7)
CASSSPGTVFYEQYF

SEQ ID NO: 380867 - protein, 14 aa, Homo sapiens
  CDR3 for alpha chain variable domain of TCR clone 190434 (TRAV12-2, TRAJ53)
CRERGGGSNYKLTS

SEQ ID NO: 380868 - protein, 17 aa, Homo sapiens
  CDR3 for beta chain variable domain of TCR clone 190434 (TRBV7-3, TRBJ2-3)
CASSLMKRMRGADTQYF

SEQ ID NO: 380869 - protein, 14 aa, Homo sapiens
  CDR3 for alpha chain variable domain of TCR clone 190435 (TRAV35, TRAJ13)
CACSPSGGYQKVTF

SEQ ID NO: 380870 - protein, 14 aa, Homo sapiens
  CDR3 for beta chain variable domain of TCR clone 190435 (TRBV12-5, TRBJ2-5)
CASGSRTHQETQYF

SEQ ID NO: 380871 - protein, 15 aa, Homo sapiens
  CDR3 for alpha chain variable domain of TCR clone 190436 (TRAV35, TRAJ50)
CAGRLRKTSYDKLIF

SEQ ID NO: 380872 - protein, 12 aa, Homo sapiens
  CDR3 for beta chain variable domain of TCR clone 190436 (TRBV5-1, TRBJ2-5)
CASSLGLETQYF

SEQ ID NO: 380873 - protein, 12 aa, Homo sapiens
  CDR3 for alpha chain variable domain of TCR clone 190437 (TRAV17, TRAJ53)
CATEGSNYKLTF

SEQ ID NO: 380874 - protein, 17 aa, Homo sapiens
  CDR3 for beta chain variable domain of TCR clone 190437 (TRBV24-1, TRBJ2-1)
CATSDVSTSGTYNEQFF

SEQ ID NO: 380875 - protein, 16 aa, Homo sapiens
  CDR3 for alpha chain variable domain of TCR clone 190438 (TRAV22, TRAJ45)
CAVERGKRGGAEGLTF

SEQ ID NO: 380876 - protein, 13 aa, Homo sapiens
  CDR3 for beta chain variable domain of TCR clone 190438 (TRBV27, TRBJ1-1)
CASSLSIGAEAFF

SEQ ID NO: 380877 - protein, 12 aa, Homo sapiens
  CDR3 for alpha chain variable domain of TCR clone 190439 (TRAV12-1, TRAJ6)
CVGSERSYIPTF

SEQ ID NO: 380878 - protein, 21 aa, Homo sapiens
  CDR3 for beta chain variable domain of TCR clone 190439 (TRBV7-3, TRBJ2-1)
GGTQPCISVPAAYGLAGAQFF

SEQ ID NO: 380879 - protein, 16 aa, Homo sapiens
  CDR3 for alpha chain variable domain of TCR clone 190440 (TRAV13-1, TRAJ22)
CAAKGGRSGSARQLTF

SEQ ID NO: 380880 - protein, 15 aa, Homo sapiens
  CDR3 for beta chain variable domain of TCR clone 190440 (TRBV9, TRBJ1-6)
CASSVAGTGDSPLHL

SEQ ID NO: 380881 - protein, 11 aa, Homo sapiens
  CDR3 for alpha chain variable domain of TCR clone 190441 (TRAV35, TRAJ30)
CAPGGDDKLIF

SEQ ID NO: 380882 - protein, 15 aa, Homo sapiens
  CDR3 for beta chain variable domain of TCR clone 190441 (TRBV9, TRBJ1-6)
CASSVAGTGDSPLHF

SEQ ID NO: 380883 - protein, 12 aa, Homo sapiens
  CDR3 for alpha chain variable domain of TCR clone 190442 (TRAV21, TRAJ33)
CAKMDSNYQLIW

SEQ ID NO: 380884 - protein, 13 aa, Homo sapiens
  CDR3 for beta chain variable domain of TCR clone 190442 (TRBV12-4, TRBJ2-5)
CASSPGTEETQYL

SEQ ID NO: 380885 - protein, 23 aa, Homo sapiens
  CDR3 for alpha chain variable domain of TCR clone 190443 (TRAV12-2, TRAJ22)
CSSETPSPVIQPPGRSSARQLTF

SEQ ID NO: 380886 - protein, 14 aa, Homo sapiens
  CDR3 for beta chain variable domain of TCR clone 190443 (TRBV4-1, TRBJ2-2)
CASSQAVNTGELFF

SEQ ID NO: 380887 - protein, 12 aa, Homo sapiens
  CDR3 for alpha chain variable domain of TCR clone 190444 (TRAV12-2, TRAJ36)
CAAPRGANNLFF

SEQ ID NO: 380888 - protein, 13 aa, Homo sapiens
  CDR3 for beta chain variable domain of TCR clone 190444 (TRBV12-5, TRBJ2-3)
CASGDRQSDTQYF

SEQ ID NO: 380889 - protein, 16 aa, Homo sapiens
  CDR3 for alpha chain variable domain of TCR clone 190445 (TRAV30, TRAJ24)
CGAEMVDADSWGKFQF

SEQ ID NO: 380890 - protein, 13 aa, Homo sapiens
  CDR3 for beta chain variable domain of TCR clone 190445 (TRBV10-3, TRBJ2-7)
CASKLAVNYEQYF

SEQ ID NO: 380891 - protein, 13 aa, Homo sapiens
  CDR3 for alpha chain variable domain of TCR clone 190446 (TRAV23/DV6, TRAJ17)
CSAAKAAGNKLTF

SEQ ID NO: 380892 - protein, 16 aa, Homo sapiens
  CDR3 for beta chain variable domain of TCR clone 190446 (TRBV5-1, TRBJ2-2)
CASSSRTGGRTGELFF

SEQ ID NO: 380893 - protein, 17 aa, Homo sapiens
  CDR3 for alpha chain variable domain of TCR clone 190447 (TRAV16, TRAJ42)
CALSPKLYGGSKGNLIF

SEQ ID NO: 380894 - protein, 13 aa, Homo sapiens
  CDR3 for beta chain variable domain of TCR clone 190447 (TRBV19, TRBJ1-5)
CASSTRRDQPQHF

SEQ ID NO: 380895 - protein, 13 aa, Homo sapiens
  CDR3 for alpha chain variable domain of TCR clone 190448 (TRAV8-6, TRAJ32)
CAVSDRATNKLIF

SEQ ID NO: 380896 - protein, 11 aa, Homo sapiens
  CDR3 for beta chain variable domain of TCR clone 190448 (TRBV19, TRBJ1-1)
CASSIGSEAFF

SEQ ID NO: 380897 - protein, 15 aa, Homo sapiens
  CDR3 for alpha chain variable domain of TCR clone 190449 (TRAV35, TRAJ23)
CAGPLGNNQGGKLIF

SEQ ID NO: 380898 - protein, 14 aa, Homo sapiens
  CDR3 for beta chain variable domain of TCR clone 190449 (TRBV6-1, TRBJ1-3)
CASVQGGGGNTIYF

SEQ ID NO: 380899 - protein, 13 aa, Homo sapiens
  CDR3 for alpha chain variable domain of TCR clone 190450 (TRAV35, TRAJ42)
CAGFPGSQGNLIF

SEQ ID NO: 380900 - protein, 14 aa, Homo sapiens
  CDR3 for beta chain variable domain of TCR clone 190450 (TRBV28, TRBJ2-7)
CASSLLRISYEQYF

SEQ ID NO: 380901 - protein, 11 aa, Homo sapiens
  CDR3 for alpha chain variable domain of TCR clone 190451 (TRAV3, TRAJ21)
CAVGNFNKFYF

SEQ ID NO: 380902 - protein, 14 aa, Homo sapiens
  CDR3 for beta chain variable domain of TCR clone 190451 (TRBV4-2, TRBJ1-2)
CASSPGGSNYGYTF

SEQ ID NO: 380903 - protein, 14 aa, Homo sapiens
  CDR3 for alpha chain variable domain of TCR clone 190452 (TRAV29/DV5, TRAJ36)
CAARRKTGANNPFF

SEQ ID NO: 380904 - protein, 14 aa, Homo sapiens
  CDR3 for beta chain variable domain of TCR clone 190452 (TRBV12-5, TRBJ2-5)
CASSSRTHQETQYF

SEQ ID NO: 380905 - protein, 10 aa, Homo sapiens
  CDR3 for alpha chain variable domain of TCR clone 190453 (TRAV36/DV7, TRAJ37)
SSSNTGKLIF

SEQ ID NO: 380906 - protein, 12 aa, Homo sapiens
  CDR3 for beta chain variable domain of TCR clone 190453 (TRBV11-2, TRBJ2-2)
CASSLGGGELFF

SEQ ID NO: 380907 - protein, 11 aa, Homo sapiens
  CDR3 for alpha chain variable domain of TCR clone 190454 (TRAV13-2, TRAJ54)
RAVQGAHKLVF

SEQ ID NO: 380908 - protein, 15 aa, Homo sapiens
  CDR3 for beta chain variable domain of TCR clone 190454 (TRBV20-1, TRBJ2-7)
CSAESGTSGAYEQYF

SEQ ID NO: 380909 - protein, 15 aa, Homo sapiens
  CDR3 for alpha chain variable domain of TCR clone 190455 (TRAV21, TRAJ24)
CAARSSTDSWGKLQF

SEQ ID NO: 380910 - protein, 13 aa, Homo sapiens
  CDR3 for beta chain variable domain of TCR clone 190455 (TRBV11-2, TRBJ2-5)
CASSSTGEDTQYF

SEQ ID NO: 380911 - protein, 15 aa, Homo sapiens
  CDR3 for alpha chain variable domain of TCR clone 190456 (TRAV13-1, TRAJ16)
CAARDQMARSCSLQG

SEQ ID NO: 380912 - protein, 13 aa, Homo sapiens
  CDR3 for beta chain variable domain of TCR clone 190456 (TRBV4-1, TRBJ2-1)
CASSQAGGDEQFF

SEQ ID NO: 380913 - protein, 11 aa, Homo sapiens
  CDR3 for alpha chain variable domain of TCR clone 190457 (TRAV21, TRAJ20)
CCRGNDYKLSF

SEQ ID NO: 380914 - protein, 15 aa, Homo sapiens
  CDR3 for beta chain variable domain of TCR clone 190457 (TRBV2, TRBJ2-2)
CASSRQGPNTGELFF

SEQ ID NO: 380915 - protein, 14 aa, Homo sapiens
  CDR3 for alpha chain variable domain of TCR clone 190458 (TRAV3, TRAJ36)
CAVRDGTGANNLLF

SEQ ID NO: 380916 - protein, 16 aa, Homo sapiens
  CDR3 for beta chain variable domain of TCR clone 190458 (TRBV7-3, TRBJ2-5)
CASIQPGGSVQETQYF

SEQ ID NO: 380917 - protein, 16 aa, Homo sapiens
  CDR3 for alpha chain variable domain of TCR clone 190459 (TRAV23/DV6, TRAJ9)
CAASIGGNTGGFKTIF

SEQ ID NO: 380918 - protein, 13 aa, Homo sapiens
  CDR3 for beta chain variable domain of TCR clone 190459 (TRBV7-9, TRBJ1-2)
YASSLKQNYGYTF

SEQ ID NO: 380919 - protein, 14 aa, Homo sapiens
  CDR3 for alpha chain variable domain of TCR clone 190460 (TRAV23/DV6, TRAJ4)
CAAPSSGGYNKLIF

SEQ ID NO: 380920 - protein, 14 aa, Homo sapiens
  CDR3 for beta chain variable domain of TCR clone 190460 (TRBV7-8, TRBJ2-3)
CASSLEAGTDTQYF

SEQ ID NO: 380921 - protein, 14 aa, Homo sapiens
  CDR3 for alpha chain variable domain of TCR clone 190461 (TRAV23/DV6, TRAJ24)
CAASLSDSWGKLQF

SEQ ID NO: 380922 - protein, 16 aa, Homo sapiens
  CDR3 for beta chain variable domain of TCR clone 190461 (TRBV7-9, TRBJ2-6)
CASSLKGPVRANVLTF

SEQ ID NO: 380923 - protein, 14 aa, Homo sapiens
  CDR3 for alpha chain variable domain of TCR clone 190462 (TRAV12-1, TRAJ9)
CVVTGYTGGFKSIF

SEQ ID NO: 380924 - protein, 13 aa, Homo sapiens
  CDR3 for beta chain variable domain of TCR clone 190462 (TRBV20-1, TRBJ1-1)
CSARAGGNTEAFF

SEQ ID NO: 380925 - protein, 12 aa, Homo sapiens
  CDR3 for alpha chain variable domain of TCR clone 190463 (TRAV4, TRAJ26)
CRVGDYGQNFVF

SEQ ID NO: 380926 - protein, 16 aa, Homo sapiens
  CDR3 for beta chain variable domain of TCR clone 190463 (TRBV7-2, TRBJ1-2)
CASSSNQDRRGHGYTF

SEQ ID NO: 380927 - protein, 16 aa, Homo sapiens
  CDR3 for alpha chain variable domain of TCR clone 190464 (TRAV35, TRAJ28)
CAVYLYSGAGSYQLTF

SEQ ID NO: 380928 - protein, 16 aa, Homo sapiens
  CDR3 for beta chain variable domain of TCR clone 190464 (TRBV5-1, TRBJ2-1)
CASSHGLAGPQNEQFF

SEQ ID NO: 380929 - protein, 14 aa, Homo sapiens
  CDR3 for alpha chain variable domain of TCR clone 190465 (TRAV27, TRAJ39)
CAGRPTGAGNMLTF

SEQ ID NO: 380930 - protein, 15 aa, Homo sapiens
  CDR3 for beta chain variable domain of TCR clone 190465 (TRBV28, TRBJ2-1)
CASSIIAGGRSEQFF

SEQ ID NO: 380931 - protein, 17 aa, Homo sapiens
  CDR3 for alpha chain variable domain of TCR clone 190466 (TRAV16, TRAJ58)
CITVLSNGETSGSRLTF

SEQ ID NO: 380932 - protein, 20 aa, Homo sapiens
  CDR3 for beta chain variable domain of TCR clone 190466 (TRBV7-9, TRBJ1-5)
CISVSEAGQGAPYSNQPQHF

SEQ ID NO: 380933 - protein, 12 aa, Homo sapiens
  CDR3 for alpha chain variable domain of TCR clone 190467 (TRAV35, TRAJ40)
CAGRAGTYKYIF

SEQ ID NO: 380934 - protein, 14 aa, Homo sapiens
  CDR3 for beta chain variable domain of TCR clone 190467 (TRBV7-2, TRBJ1-3)
CASSRGGTGNAIYF

SEQ ID NO: 380935 - protein, 15 aa, Homo sapiens
  CDR3 for alpha chain variable domain of TCR clone 190468 (TRAV8-1, TRAJ23)
CAVNSHYNQGGTLIF

SEQ ID NO: 380936 - protein, 15 aa, Homo sapiens
  CDR3 for beta chain variable domain of TCR clone 190468 (TRBV11-2, TRBJ1-6)
CASTLRGTGNSPLHF

SEQ ID NO: 380937 - protein, 16 aa, Homo sapiens
  CDR3 for alpha chain variable domain of TCR clone 190469 (TRAV3, TRAJ37)
CAVRVRGSGNTGTLIF

SEQ ID NO: 380938 - protein, 16 aa, Homo sapiens
  CDR3 for beta chain variable domain of TCR clone 190469 (TRBV11-2, TRBJ2-7)
CASSPTTGGGSYEQYF

SEQ ID NO: 380939 - protein, 12 aa, Homo sapiens
  CDR3 for alpha chain variable domain of TCR clone 190470 (TRAV21, TRAJ31)
CAVSPARGKLMF

SEQ ID NO: 380940 - protein, 14 aa, Homo sapiens
  CDR3 for beta chain variable domain of TCR clone 190470 (TRBV28, TRBJ2-7)
CASSLLRISYEQYF

SEQ ID NO: 380941 - protein, 12 aa, Homo sapiens
  CDR3 for alpha chain variable domain of TCR clone 190471 (TRAV8-6, TRAJ36)
CAVSDWLGQTTS

SEQ ID NO: 380942 - protein, 15 aa, Homo sapiens
  CDR3 for beta chain variable domain of TCR clone 190471 (TRBV9, TRBJ1-6)
CASSVAGTGDSTLHF

SEQ ID NO: 380943 - protein, 17 aa, Homo sapiens
  CDR3 for alpha chain variable domain of TCR clone 190472 (TRAV4, TRAJ13)
CLVGVQGSSGGYQKFTF

SEQ ID NO: 380944 - protein, 13 aa, Homo sapiens
  CDR3 for beta chain variable domain of TCR clone 190472 (TRBV10-3, TRBJ2-7)
CASKLAVNYEQYF

SEQ ID NO: 380945 - protein, 13 aa, Homo sapiens
  CDR3 for alpha chain variable domain of TCR clone 190473 (TRAV26-1, TRAJ29)
CIVRRSGNTPLVF

SEQ ID NO: 380946 - protein, 14 aa, Homo sapiens
  CDR3 for beta chain variable domain of TCR clone 190473 (TRBV11-2, TRBJ2-3)
CASSRLARTDTQYF

SEQ ID NO: 380947 - protein, 12 aa, Homo sapiens
  CDR3 for alpha chain variable domain of TCR clone 190474 (TRAV29/DV5, TRAJ49)
CAATDTGNRFYF

SEQ ID NO: 380948 - protein, 19 aa, Homo sapiens
  CDR3 for beta chain variable domain of TCR clone 190474 (TRBV25-1, TRBJ2-2)
CAILVYRVDRGRKTGELFF

SEQ ID NO: 380949 - protein, 14 aa, Homo sapiens
  CDR3 for alpha chain variable domain of TCR clone 190475 (TRAV12-2, TRAJ4)
CAEDLSGGYNKLIF

SEQ ID NO: 380950 - protein, 13 aa, Homo sapiens
  CDR3 for beta chain variable domain of TCR clone 190475 (TRBV7-9, TRBJ1-2)
CASSLEQNYGYTF

SEQ ID NO: 380951 - protein, 14 aa, Homo sapiens
  CDR3 for alpha chain variable domain of TCR clone 190476 (TRAV9-2, TRAJ39)
CALYIYNAVNMLTF

SEQ ID NO: 380952 - protein, 14 aa, Homo sapiens
  CDR3 for beta chain variable domain of TCR clone 190476 (TRBV9, TRBJ2-7)
CASSPLRAVGEQYF

SEQ ID NO: 380953 - protein, 13 aa, Homo sapiens
  CDR3 for alpha chain variable domain of TCR clone 190477 (TRAV17, TRAJ9)
CATDYTGGFKTIF

SEQ ID NO: 380954 - protein, 15 aa, Homo sapiens
  CDR3 for beta chain variable domain of TCR clone 190477 (TRBV12-4, TRBJ1-5)
CQQPTGRGSNQPQHF

SEQ ID NO: 380955 - protein, 15 aa, Homo sapiens
  CDR3 for alpha chain variable domain of TCR clone 190478 (TRAV13-1, TRAJ52)
CAATSPRTSYGKLTF

SEQ ID NO: 380956 - protein, 15 aa, Homo sapiens
  CDR3 for beta chain variable domain of TCR clone 190478 (TRBV27, TRBJ1-6)
CASSFDRGLGSPLHF

SEQ ID NO: 380957 - protein, 11 aa, Homo sapiens
  CDR3 for alpha chain variable domain of TCR clone 190479 (TRAV35, TRAJ30)
CAEERDDKIIF

SEQ ID NO: 380958 - protein, 14 aa, Homo sapiens
  CDR3 for beta chain variable domain of TCR clone 190479 (TRBV15, TRBJ2-5)
CATSGDRGQETQYF

SEQ ID NO: 380959 - protein, 14 aa, Homo sapiens
  CDR3 for alpha chain variable domain of TCR clone 190480 (TRAV2, TRAJ37)
CAVDFTSNTGKLIF

SEQ ID NO: 380960 - protein, 14 aa, Homo sapiens
  CDR3 for beta chain variable domain of TCR clone 190480 (TRBV5-1, TRBJ2-5)
CASSFGGSQETQYV

SEQ ID NO: 380961 - protein, 14 aa, Homo sapiens
  CDR3 for alpha chain variable domain of TCR clone 190481 (TRAV4, TRAJ32)
CLVNYGGATNKLIF

SEQ ID NO: 380962 - protein, 14 aa, Homo sapiens
  CDR3 for beta chain variable domain of TCR clone 190481 (TRBV15, TRBJ2-5)
CATSGGTRTQTQYF

SEQ ID NO: 380963 - protein, 14 aa, Homo sapiens
  CDR3 for alpha chain variable domain of TCR clone 190482 (TRAV27, TRAJ23)
CAGLSYNQGGKLIF

SEQ ID NO: 380964 - protein, 14 aa, Homo sapiens
  CDR3 for beta chain variable domain of TCR clone 190482 (TRBV19, TRBJ2-1)
CASPTFVLSGEQFF

SEQ ID NO: 380965 - protein, 10 aa, Homo sapiens
  CDR3 for alpha chain variable domain of TCR clone 190483 (TRAV8-3, TRAJ20)
CAVGYYKLSF

SEQ ID NO: 380966 - protein, 14 aa, Homo sapiens
  CDR3 for beta chain variable domain of TCR clone 190483 (TRBV12-5, TRBJ2-5)
CASGSRTHQETQYF

SEQ ID NO: 380967 - protein, 15 aa, Homo sapiens
  CDR3 for alpha chain variable domain of TCR clone 190484 (TRAV3, TRAJ22)
CAVRDRGGSARQLNF

SEQ ID NO: 380968 - protein, 15 aa, Homo sapiens
  CDR3 for beta chain variable domain of TCR clone 190484 (TRBV7-3, TRBJ2-1)
CASSPTGGGEVEQFF

SEQ ID NO: 380969 - protein, 15 aa, Homo sapiens
  CDR3 for alpha chain variable domain of TCR clone 190485 (TRAV17, TRAJ28)
CATVDSGAGSYQLTF

SEQ ID NO: 380970 - protein, 13 aa, Homo sapiens
  CDR3 for beta chain variable domain of TCR clone 190485 (TRBV4-3, TRBJ2-5)
CASSQGGGETQYF

SEQ ID NO: 380971 - protein, 14 aa, Homo sapiens
  CDR3 for alpha chain variable domain of TCR clone 190486 (TRAV1-1, TRAJ28)
CAAPSGAGSYQLTF

SEQ ID NO: 380972 - protein, 16 aa, Homo sapiens
  CDR3 for beta chain variable domain of TCR clone 190486 (TRBV19, TRBJ2-2)
CASRSPGTGATGELFF

SEQ ID NO: 380973 - protein, 15 aa, Homo sapiens
  CDR3 for alpha chain variable domain of TCR clone 190487 (TRAV2, TRAJ9)
CAVEDRGTGGFKTVF

SEQ ID NO: 380974 - protein, 15 aa, Homo sapiens
  CDR3 for beta chain variable domain of TCR clone 190487 (TRBV7-3, TRBJ2-2)
CASSETGQGTGELFF

SEQ ID NO: 380975 - protein, 14 aa, Homo sapiens
  CDR3 for alpha chain variable domain of TCR clone 190488 (TRAV23/DV6, TRAJ17)
CAASIGAAGNKLTF

SEQ ID NO: 380976 - protein, 20 aa, Homo sapiens
  CDR3 for beta chain variable domain of TCR clone 190488 (TRBV28, TRBJ2-1)
CASTPIGRSPGLAGGNEQFF

SEQ ID NO: 380977 - protein, 14 aa, Homo sapiens
  CDR3 for alpha chain variable domain of TCR clone 190489 (TRAV1-2, TRAJ15)
CAVRDRQAGTALIF

SEQ ID NO: 380978 - protein, 14 aa, Homo sapiens
  CDR3 for beta chain variable domain of TCR clone 190489 (TRBV19, TRBJ1-5)
CASSLGLIGQPQHF

SEQ ID NO: 380979 - protein, 17 aa, Homo sapiens
  CDR3 for alpha chain variable domain of TCR clone 190490 (TRAV41, TRAJ32)
CAVRIMVVLQTSSSLER

SEQ ID NO: 380980 - protein, 15 aa, Homo sapiens
  CDR3 for beta chain variable domain of TCR clone 190490 (TRBV11-2, TRBJ2-1)
CASSKNRGLIYEQFF

SEQ ID NO: 380981 - protein, 17 aa, Homo sapiens
  CDR3 for alpha chain variable domain of TCR clone 190491 (TRAV23/DV6, TRAJ57)
CAASSTLSQGGSEKRVF

SEQ ID NO: 380982 - protein, 14 aa, Homo sapiens
  CDR3 for beta chain variable domain of TCR clone 190491 (TRBV25-1, TRBJ1-1)
CASTHLGGNTEAVF

SEQ ID NO: 380983 - protein, 13 aa, Homo sapiens
  CDR3 for alpha chain variable domain of TCR clone 190492 (TRAV40, TRAJ43)
SAVYYRPNNDMRF

SEQ ID NO: 380984 - protein, 15 aa, Homo sapiens
  CDR3 for beta chain variable domain of TCR clone 190492 (TRBV4-1, TRBJ2-7)
CASSQNTGRLYEQYF

SEQ ID NO: 380985 - protein, 12 aa, Homo sapiens
  CDR3 for alpha chain variable domain of TCR clone 190493 (TRAV8-6, TRAJ4)
CAVSDHPNKLIF

SEQ ID NO: 380986 - protein, 12 aa, Homo sapiens
  CDR3 for beta chain variable domain of TCR clone 190493 (TRBV7-9, TRBJ1-5)
CASSSDNQPQHF

SEQ ID NO: 380987 - protein, 15 aa, Homo sapiens
  CDR3 for alpha chain variable domain of TCR clone 190494 (TRAV2, TRAJ9)
RAVEDRGTGGFKTTF

SEQ ID NO: 380988 - protein, 16 aa, Homo sapiens
  CDR3 for beta chain variable domain of TCR clone 190494 (TRBV24-1, TRBJ2-3)
CATSDPGTGATDTQYF

SEQ ID NO: 380989 - protein, 14 aa, Homo sapiens
  CDR3 for alpha chain variable domain of TCR clone 190495 (TRAV38-1, TRAJ40)
RALRPTSGTYKYIF

SEQ ID NO: 380990 - protein, 15 aa, Homo sapiens
  CDR3 for beta chain variable domain of TCR clone 190495 (TRBV20-1, TRBJ2-7)
CSARDRVSGMDEQYF

SEQ ID NO: 380991 - protein, 11 aa, Homo sapiens
  CDR3 for alpha chain variable domain of TCR clone 190496 (TRAV21, TRAJ34)
CAVTNTDKLIF

SEQ ID NO: 380992 - protein, 14 aa, Homo sapiens
  CDR3 for beta chain variable domain of TCR clone 190496 (TRBV20-1, TRBJ2-1)
CSAQIGGSANEQFF

SEQ ID NO: 380993 - protein, 15 aa, Homo sapiens
  CDR3 for alpha chain variable domain of TCR clone 190497 (TRAV8-3, TRAJ6)
CAVDPGSGGSYIPTF

SEQ ID NO: 380994 - protein, 16 aa, Homo sapiens
  CDR3 for beta chain variable domain of TCR clone 190497 (TRBV7-3, TRBJ2-2)
CASSLKRGTLSGELFF

SEQ ID NO: 380995 - protein, 16 aa, Homo sapiens
  CDR3 for alpha chain variable domain of TCR clone 190498 (TRAV12-1, TRAJ48)
CVVNMRDNFGNEKSTF

SEQ ID NO: 380996 - protein, 16 aa, Homo sapiens
  CDR3 for beta chain variable domain of TCR clone 190498 (TRBV7-6, TRBJ2-1)
CASSSVVAGTYNEQFF

SEQ ID NO: 380997 - protein, 11 aa, Homo sapiens
  CDR3 for alpha chain variable domain of TCR clone 190499 (TRAV8-3, TRAJ8)
CAVRRDGNTGF

SEQ ID NO: 380998 - protein, 14 aa, Homo sapiens
  CDR3 for beta chain variable domain of TCR clone 190499 (TRBV28, TRBJ1-1)
CASSESGRGTEAFF

SEQ ID NO: 380999 - protein, 15 aa, Homo sapiens
  CDR3 for alpha chain variable domain of TCR clone 190500 (TRAV2, TRAJ3)
CAVPPGYSSASKIIF

SEQ ID NO: 381000 - protein, 14 aa, Homo sapiens
  CDR3 for beta chain variable domain of TCR clone 190500 (TRBV11-2, TRBJ1-2)
CASSLGTANYGYTF

SEQ ID NO: 381001 - protein, 14 aa, Homo sapiens
  CDR3 for alpha chain variable domain of TCR clone 190501 (TRAV8-3, TRAJ4)
CAVGAAGGYNKLIF

SEQ ID NO: 381002 - protein, 15 aa, Homo sapiens
  CDR3 for beta chain variable domain of TCR clone 190501 (TRBV6-5, TRBJ2-1)
CASSYDPGAGNEQFF

SEQ ID NO: 381003 - protein, 16 aa, Homo sapiens
  CDR3 for alpha chain variable domain of TCR clone 190502 (TRAV30, TRAJ24)
CGTEIVDADSWGKFQF

SEQ ID NO: 381004 - protein, 16 aa, Homo sapiens
  CDR3 for beta chain variable domain of TCR clone 190502 (TRBV7-6, TRBJ1-6)
CASSLSSRIGDSPLRF

SEQ ID NO: 381005 - protein, 17 aa, Homo sapiens
  CDR3 for alpha chain variable domain of TCR clone 190503 (TRAV4, TRAJ28)
CLVGDRALGLGVTNSLS

SEQ ID NO: 381006 - protein, 13 aa, Homo sapiens
  CDR3 for beta chain variable domain of TCR clone 190503 (TRBV7-9, TRBJ1-2)
CASSLKQNYGYTF

SEQ ID NO: 381007 - protein, 15 aa, Homo sapiens
  CDR3 for alpha chain variable domain of TCR clone 190504 (TRAV25, TRAJ53)
CAATGGGGSNYKLTF

SEQ ID NO: 381008 - protein, 14 aa, Homo sapiens
  CDR3 for beta chain variable domain of TCR clone 190504 (TRBV12-4, TRBJ1-1)
CASSLGTGGTEAFF

SEQ ID NO: 381009 - protein, 19 aa, Homo sapiens
  CDR3 for alpha chain variable domain of TCR clone 190505 (TRAV1-2, TRAJ26)
CLLPLCCERPANYGQNLVF

SEQ ID NO: 381010 - protein, 15 aa, Homo sapiens
  CDR3 for beta chain variable domain of TCR clone 190505 (TRBV27, TRBJ2-1)
CASSNGGGSSNEQFF

SEQ ID NO: 381011 - protein, 14 aa, Homo sapiens
  CDR3 for alpha chain variable domain of TCR clone 190506 (TRAV17, TRAJ6)
YATDASGGSYIPTF

SEQ ID NO: 381012 - protein, 19 aa, Homo sapiens
  CDR3 for beta chain variable domain of TCR clone 190506 (TRBV4-3, TRBJ2-7)
CASSREFIGWQVTPYEQYF

SEQ ID NO: 381013 - protein, 15 aa, Homo sapiens
  CDR3 for alpha chain variable domain of TCR clone 190507 (TRAV8-3, TRAJ11)
CAVGLLNSGYSTLTF

SEQ ID NO: 381014 - protein, 17 aa, Homo sapiens
  CDR3 for beta chain variable domain of TCR clone 190507 (TRBV11-3, TRBJ2-6)
CASKWGQGLSGANVLTF

SEQ ID NO: 381015 - protein, 10 aa, Homo sapiens
  CDR3 for alpha chain variable domain of TCR clone 190508 (TRAV12-2, TRAJ41)
CAVTRYALNF

SEQ ID NO: 381016 - protein, 15 aa, Homo sapiens
  CDR3 for beta chain variable domain of TCR clone 190508 (TRBV4-2, TRBJ2-1)
CASSQDVGLAGEQFF

SEQ ID NO: 381017 - protein, 13 aa, Homo sapiens
  CDR3 for alpha chain variable domain of TCR clone 190509 (TRAV20, TRAJ20)
CAVRWVRDYKISF

SEQ ID NO: 381018 - protein, 14 aa, Homo sapiens
  CDR3 for beta chain variable domain of TCR clone 190509 (TRBV19, TRBJ2-2)
CASTVTANTGELFF

SEQ ID NO: 381019 - protein, 10 aa, Homo sapiens
  CDR3 for alpha chain variable domain of TCR clone 190510 (TRAV25, TRAJ17)
CQAAGNKLTF

SEQ ID NO: 381020 - protein, 13 aa, Homo sapiens
  CDR3 for beta chain variable domain of TCR clone 190510 (TRBV6-5, TRBJ2-2)
CASSLPGVGDLFF

SEQ ID NO: 381021 - protein, 17 aa, Homo sapiens
  CDR3 for alpha chain variable domain of TCR clone 190511 (TRAV8-3, TRAJ42)
CAVGNPEERRSQGNLIF

SEQ ID NO: 381022 - protein, 12 aa, Homo sapiens
  CDR3 for beta chain variable domain of TCR clone 190511 (TRBV7-9, TRBJ1-1)
CASSPSSTEAFF

SEQ ID NO: 381023 - protein, 11 aa, Homo sapiens
  CDR3 for alpha chain variable domain of TCR clone 190512 (TRAV36/DV7, TRAJ36)
CAVIARRQTTS

SEQ ID NO: 381024 - protein, 13 aa, Homo sapiens
  CDR3 for beta chain variable domain of TCR clone 190512 (TRBV4-1, TRBJ2-1)
CASSQEVQYEQFF

SEQ ID NO: 381025 - protein, 13 aa, Homo sapiens
  CDR3 for alpha chain variable domain of TCR clone 190513 (TRAV12-2, TRAJ42)
CAVKRGSQGNLIF

SEQ ID NO: 381026 - protein, 12 aa, Homo sapiens
  CDR3 for beta chain variable domain of TCR clone 190513 (TRBV7-9, TRBJ2-7)
CASSIKREEQYS

SEQ ID NO: 381027 - protein, 17 aa, Homo sapiens
  CDR3 for alpha chain variable domain of TCR clone 190514 (TRAV8-6, TRAJ58)
FAVSSWVGETSGSRLTF

SEQ ID NO: 381028 - protein, 17 aa, Homo sapiens
  CDR3 for beta chain variable domain of TCR clone 190514 (TRBV11-2, TRBJ2-1)
CASSLYPPGVEYNEQFF

SEQ ID NO: 381029 - protein, 16 aa, Homo sapiens
  CDR3 for alpha chain variable domain of TCR clone 190515 (TRAV1-2, TRAJ10)
CAVRGVLTGGGNKLTI

SEQ ID NO: 381030 - protein, 13 aa, Homo sapiens
  CDR3 for beta chain variable domain of TCR clone 190515 (TRBV20-1, TRBJ1-6)
CSAPLGVGSPLHF

SEQ ID NO: 381031 - protein, 14 aa, Homo sapiens
  CDR3 for alpha chain variable domain of TCR clone 190516 (TRAV26-1, TRAJ45)
CIVRVVGGADGLTF

SEQ ID NO: 381032 - protein, 16 aa, Homo sapiens
  CDR3 for beta chain variable domain of TCR clone 190516 (TRBV7-9, TRBJ1-1)
CASSLTQVRSNTEAFS

SEQ ID NO: 381033 - protein, 16 aa, Homo sapiens
  CDR3 for alpha chain variable domain of TCR clone 190517 (TRAV17, TRAJ35)
CATAEGGIGFGNVLHC

SEQ ID NO: 381034 - protein, 12 aa, Homo sapiens
  CDR3 for beta chain variable domain of TCR clone 190517 (TRBV29-1, TRBJ2-3)
CSVTGGADTQYF

SEQ ID NO: 381035 - protein, 15 aa, Homo sapiens
  CDR3 for alpha chain variable domain of TCR clone 190518 (TRAV2, TRAJ39)
CAVEDRRNAGNMLTF

SEQ ID NO: 381036 - protein, 16 aa, Homo sapiens
  CDR3 for beta chain variable domain of TCR clone 190518 (TRBV19, TRBJ2-1)
CASSKAGPSSYNEQFF

SEQ ID NO: 381037 - protein, 18 aa, Homo sapiens
  CDR3 for alpha chain variable domain of TCR clone 190519 (TRAV25, TRAJ37)
CRNLLLSPRGSNTGKLIF

SEQ ID NO: 381038 - protein, 12 aa, Homo sapiens
  CDR3 for beta chain variable domain of TCR clone 190519 (TRBV11-2, TRBJ2-2)
CASSLPTGELFF

SEQ ID NO: 381039 - protein, 12 aa, Homo sapiens
  CDR3 for alpha chain variable domain of TCR clone 190520 (TRAV30, TRAJ43)
CGTEERGNDMRF

SEQ ID NO: 381040 - protein, 13 aa, Homo sapiens
  CDR3 for beta chain variable domain of TCR clone 190520 (TRBV27, TRBJ2-7)
CASSFSQGNEQYF

SEQ ID NO: 381041 - protein, 10 aa, Homo sapiens
  CDR3 for alpha chain variable domain of TCR clone 190521 (TRAV8-6, TRAJ34)
CAGRADKLIF

SEQ ID NO: 381042 - protein, 14 aa, Homo sapiens
  CDR3 for beta chain variable domain of TCR clone 190521 (TRBV11-1, TRBJ1-1)
CASSLEHPNTEAFF

SEQ ID NO: 381043 - protein, 16 aa, Homo sapiens
  CDR3 for alpha chain variable domain of TCR clone 190522 (TRAV20, TRAJ26)
CAVQHRRDNYGQNFVF

SEQ ID NO: 381044 - protein, 13 aa, Homo sapiens
  CDR3 for beta chain variable domain of TCR clone 190522 (TRBV20-1, TRBJ2-5)
CSVTQGNEETQYF

SEQ ID NO: 381045 - protein, 16 aa, Homo sapiens
  CDR3 for alpha chain variable domain of TCR clone 190523 (TRAV12-3, TRAJ53)
CAMSPGSGGSHYKLTF

SEQ ID NO: 381046 - protein, 15 aa, Homo sapiens
  CDR3 for beta chain variable domain of TCR clone 190523 (TRBV25-1, TRBJ1-4)
CASSKRIATNEKLFF

SEQ ID NO: 381047 - protein, 14 aa, Homo sapiens
  CDR3 for alpha chain variable domain of TCR clone 190524 (TRAV16, TRAJ33)
CALSAMDSNYQLIW

SEQ ID NO: 381048 - protein, 16 aa, Homo sapiens
  CDR3 for beta chain variable domain of TCR clone 190524 (TRBV12-4, TRBJ2-3)
CASSFPSNTNTDTEYF

SEQ ID NO: 381049 - protein, 14 aa, Homo sapiens
  CDR3 for alpha chain variable domain of TCR clone 190525 (TRAV17, TRAJ6)
CATNPAGGSYIPTF

SEQ ID NO: 381050 - protein, 17 aa, Homo sapiens
  CDR3 for beta chain variable domain of TCR clone 190525 (TRBV11-2, TRBJ2-1)
CASSLYPPGVEYNEQFF

SEQ ID NO: 381051 - protein, 14 aa, Homo sapiens
  CDR3 for alpha chain variable domain of TCR clone 190526 (TRAV1-2, TRAJ20)
CLLPLCLYDYKLSF

SEQ ID NO: 381052 - protein, 16 aa, Homo sapiens
  CDR3 for beta chain variable domain of TCR clone 190526 (TRBV20-1, TRBJ2-1)
CSARDLKQGMNNEQFF

SEQ ID NO: 381053 - protein, 13 aa, Homo sapiens
  CDR3 for alpha chain variable domain of TCR clone 190527 (TRAV27, TRAJ37)
CAGGPSNTGKLIF

SEQ ID NO: 381054 - protein, 17 aa, Homo sapiens
  CDR3 for beta chain variable domain of TCR clone 190527 (TRBV13, TRBJ2-3)
CASSLSRVAGGRNTQYF

SEQ ID NO: 381055 - protein, 15 aa, Homo sapiens
  CDR3 for alpha chain variable domain of TCR clone 190528 (TRAV34, TRAJ38)
CGADFTPGNNRKLIW

SEQ ID NO: 381056 - protein, 15 aa, Homo sapiens
  CDR3 for beta chain variable domain of TCR clone 190528 (TRBV20-1, TRBJ2-7)
CSARDRVCGMDEQYF

SEQ ID NO: 381057 - protein, 15 aa, Homo sapiens
  CDR3 for alpha chain variable domain of TCR clone 190529 (TRAV12-1, TRAJ44)
CVVDEYTGTASKLTF

SEQ ID NO: 381058 - protein, 14 aa, Homo sapiens
  CDR3 for beta chain variable domain of TCR clone 190529 (TRBV7-2, TRBJ2-7)
CASSPKTSFYEQYF

SEQ ID NO: 381059 - protein, 14 aa, Homo sapiens
  CDR3 for alpha chain variable domain of TCR clone 190530 (TRAV12-2, TRAJ17)
CSVLFEAAGNKLTF

SEQ ID NO: 381060 - protein, 14 aa, Homo sapiens
  CDR3 for beta chain variable domain of TCR clone 190530 (TRBV7-3, TRBJ1-1)
CASSLKGGNTEAFF

SEQ ID NO: 381061 - protein, 14 aa, Homo sapiens
  CDR3 for alpha chain variable domain of TCR clone 190531 (TRAV21, TRAJ10)
CAVALTGGGNKLTF

SEQ ID NO: 381062 - protein, 13 aa, Homo sapiens
  CDR3 for beta chain variable domain of TCR clone 190531 (TRBV7-2, TRBJ1-6)
CASSLGSNSPLNF

SEQ ID NO: 381063 - protein, 12 aa, Homo sapiens
  CDR3 for alpha chain variable domain of TCR clone 190532 (TRAV30, TRAJ43)
CGTEERGNDMRF

SEQ ID NO: 381064 - protein, 15 aa, Homo sapiens
  CDR3 for beta chain variable domain of TCR clone 190532 (TRBV10-2, TRBJ2-6)
CASSEQVTGANVLTF

SEQ ID NO: 381065 - protein, 12 aa, Homo sapiens
  CDR3 for alpha chain variable domain of TCR clone 190533 (TRAV12-1, TRAJ34)
CVVTFNTNKLIF

SEQ ID NO: 381066 - protein, 14 aa, Homo sapiens
  CDR3 for beta chain variable domain of TCR clone 190533 (TRBV19, TRBJ1-1)
CASLRTGLNTEAFF

SEQ ID NO: 381067 - protein, 14 aa, Homo sapiens
  CDR3 for alpha chain variable domain of TCR clone 190534 (TRAV8-3, TRAJ39)
CAVGANNAGNMLTF

SEQ ID NO: 381068 - protein, 15 aa, Homo sapiens
  CDR3 for beta chain variable domain of TCR clone 190534 (TRBV3-1, TRBJ2-5)
CASSANLGGPETQYF

SEQ ID NO: 381069 - protein, 13 aa, Homo sapiens
  CDR3 for alpha chain variable domain of TCR clone 190535 (TRAV13-2, TRAJ48)
CAEMDFGNEKLTF

SEQ ID NO: 381070 - protein, 13 aa, Homo sapiens
  CDR3 for beta chain variable domain of TCR clone 190535 (TRBV13, TRBJ2-5)
CASSPEVAETQYF

SEQ ID NO: 381071 - protein, 12 aa, Homo sapiens
  CDR3 for alpha chain variable domain of TCR clone 190536 (TRAV3, TRAJ31)
CAVRPRGPRLMF

SEQ ID NO: 381072 - protein, 17 aa, Homo sapiens
  CDR3 for beta chain variable domain of TCR clone 190536 (TRBV7-9, TRBJ1-5)
CASSAAQGGYSNQPQHF

SEQ ID NO: 381073 - protein, 14 aa, Homo sapiens
  CDR3 for alpha chain variable domain of TCR clone 190537 (TRAV1-2, TRAJ16)
CAVNRFSDGQKLRF

SEQ ID NO: 381074 - protein, 14 aa, Homo sapiens
  CDR3 for beta chain variable domain of TCR clone 190537 (TRBV11-1, TRBJ2-7)
CASSFRQGSYEQYF

SEQ ID NO: 381075 - protein, 14 aa, Homo sapiens
  CDR3 for alpha chain variable domain of TCR clone 190538 (TRAV1-1, TRAJ27)
CAVIYNTNAGKSTF

SEQ ID NO: 381076 - protein, 16 aa, Homo sapiens
  CDR3 for beta chain variable domain of TCR clone 190538 (TRBV7-3, TRBJ2-2)
CASSLKRGTLSGELLF

SEQ ID NO: 381077 - protein, 14 aa, Homo sapiens
  CDR3 for alpha chain variable domain of TCR clone 190539 (TRAV13-1, TRAJ44)
CAAKATGTASKLTF

SEQ ID NO: 381078 - protein, 17 aa, Homo sapiens
  CDR3 for beta chain variable domain of TCR clone 190539 (TRBV7-3, TRBJ2-1)
CASSLVASYPSYNEQFF

SEQ ID NO: 381079 - protein, 16 aa, Homo sapiens
  CDR3 for alpha chain variable domain of TCR clone 190540 (TRAV26-1, TRAJ6)
CIVRVPRTGGSYIPTF

SEQ ID NO: 381080 - protein, 15 aa, Homo sapiens
  CDR3 for beta chain variable domain of TCR clone 190540 (TRBV7-9, TRBJ2-7)
CASSLRTSGSYEQYF

SEQ ID NO: 381081 - protein, 18 aa, Homo sapiens
  CDR3 for alpha chain variable domain of TCR clone 190541 (TRAV8-4, TRAJ52)
CAVTRANAGGTSYGKLTF

SEQ ID NO: 381082 - protein, 20 aa, Homo sapiens
  CDR3 for beta chain variable domain of TCR clone 190541 (TRBV19, TRBJ2-1)
CASSISRTVTSTRINNEQFF

SEQ ID NO: 381083 - protein, 14 aa, Homo sapiens
  CDR3 for alpha chain variable domain of TCR clone 190542 (TRAV13-1, TRAJ40)
CAASMTSGTYKYIF

SEQ ID NO: 381084 - protein, 12 aa, Homo sapiens
  CDR3 for beta chain variable domain of TCR clone 190542 (TRBV7-3, TRBJ2-2)
CASSLGGGELFF

SEQ ID NO: 381085 - protein, 13 aa, Homo sapiens
  CDR3 for alpha chain variable domain of TCR clone 190543 (TRAV20, TRAJ20)
CAVQNPHDYKLTF

SEQ ID NO: 381086 - protein, 12 aa, Homo sapiens
  CDR3 for beta chain variable domain of TCR clone 190543 (TRBV18, TRBJ2-7)
CASSPNNNEQYF

SEQ ID NO: 381087 - protein, 17 aa, Homo sapiens
  CDR3 for alpha chain variable domain of TCR clone 190544 (TRAV3, TRAJ6)
CAVRDGPRAGGSYIPTF

SEQ ID NO: 381088 - protein, 13 aa, Homo sapiens
  CDR3 for beta chain variable domain of TCR clone 190544 (TRBV19, TRBJ2-7)
CASSIDGTYEQYF

SEQ ID NO: 381089 - protein, 14 aa, Homo sapiens
  CDR3 for alpha chain variable domain of TCR clone 190545 (TRAV14/DV4, TRAJ49)
CAMRECVNGNQFYF

SEQ ID NO: 381090 - protein, 14 aa, Homo sapiens
  CDR3 for beta chain variable domain of TCR clone 190545 (TRBV5-1, TRBJ1-5)
CASSLESGSRPQHF

SEQ ID NO: 381091 - protein, 11 aa, Homo sapiens
  CDR3 for alpha chain variable domain of TCR clone 190546 (TRAV21, TRAJ39)
LLVNAGNMLTF

SEQ ID NO: 381092 - protein, 13 aa, Homo sapiens
  CDR3 for beta chain variable domain of TCR clone 190546 (TRBV12-4, TRBJ2-7)
CASSPTETYEQYF

SEQ ID NO: 381093 - protein, 14 aa, Homo sapiens
  CDR3 for alpha chain variable domain of TCR clone 190547 (TRAV26-1, TRAJ38)
CIADNAGNNRKLLW

SEQ ID NO: 381094 - protein, 15 aa, Homo sapiens
  CDR3 for beta chain variable domain of TCR clone 190547 (TRBV7-6, TRBJ1-4)
CASSLGAWAGEKLFF

SEQ ID NO: 381095 - protein, 14 aa, Homo sapiens
  CDR3 for alpha chain variable domain of TCR clone 190548 (TRAV1-2, TRAJ6)
CAVSLSGGSYIPTF

SEQ ID NO: 381096 - protein, 15 aa, Homo sapiens
  CDR3 for beta chain variable domain of TCR clone 190548 (TRBV28, TRBJ2-7)
CASSNGGRGFYEQYF

SEQ ID NO: 381097 - protein, 16 aa, Homo sapiens
  CDR3 for alpha chain variable domain of TCR clone 190549 (TRAV12-3, TRAJ53)
CAMSQGSGGSNYKLTF

SEQ ID NO: 381098 - protein, 13 aa, Homo sapiens
  CDR3 for beta chain variable domain of TCR clone 190549 (TRBV19, TRBJ1-2)
CASSVPGQDGYTF

SEQ ID NO: 381099 - protein, 14 aa, Homo sapiens
  CDR3 for alpha chain variable domain of TCR clone 190550 (TRAV26-1, TRAJ38)
CIADNAGNIRKLIW

SEQ ID NO: 381100 - protein, 13 aa, Homo sapiens
  CDR3 for beta chain variable domain of TCR clone 190550 (TRBV19, TRBJ1-2)
CASSVPGQDGYTF

SEQ ID NO: 381101 - protein, 10 aa, Homo sapiens
  CDR3 for alpha chain variable domain of TCR clone 190551 (TRAV12-3, TRAJ49)
CAMNDDQFYF

SEQ ID NO: 381102 - protein, 15 aa, Homo sapiens
  CDR3 for beta chain variable domain of TCR clone 190551 (TRBV11-2, TRBJ2-1)
CASSLGTSGLNEQFF

SEQ ID NO: 381103 - protein, 17 aa, Homo sapiens
  CDR3 for alpha chain variable domain of TCR clone 190552 (TRAV38-1, TRAJ45)
CAFMKHYMGGGADGLTF

SEQ ID NO: 381104 - protein, 13 aa, Homo sapiens
  CDR3 for beta chain variable domain of TCR clone 190552 (TRBV29-1, TRBJ2-5)
CSVGGTSAETQYF

SEQ ID NO: 381105 - protein, 16 aa, Homo sapiens
  CDR3 for alpha chain variable domain of TCR clone 190553 (TRAV30, TRAJ24)
CGTEIVDVDSWGKFRF

SEQ ID NO: 381106 - protein, 16 aa, Homo sapiens
  CDR3 for beta chain variable domain of TCR clone 190553 (TRBV11-3, TRBJ2-3)
CASSSGSGGGTDTQYF

SEQ ID NO: 381107 - protein, 14 aa, Homo sapiens
  CDR3 for alpha chain variable domain of TCR clone 190554 (TRAV8-3, TRAJ4)
CAVGAAGGYNKLIF

SEQ ID NO: 381108 - protein, 15 aa, Homo sapiens
  CDR3 for beta chain variable domain of TCR clone 190554 (TRBV7-8, TRBJ1-5)
CASSRGGGADQPQHF

SEQ ID NO: 381109 - protein, 13 aa, Homo sapiens
  CDR3 for alpha chain variable domain of TCR clone 190555 (TRAV13-1, TRAJ39)
CSKYSNADNMLTF

SEQ ID NO: 381110 - protein, 16 aa, Homo sapiens
  CDR3 for beta chain variable domain of TCR clone 190555 (TRBV7-2, TRBJ2-3)
CASSLVALYSTDTQYF

SEQ ID NO: 381111 - protein, 16 aa, Homo sapiens
  CDR3 for alpha chain variable domain of TCR clone 190556 (TRAV26-1, TRAJ45)
CIVEKYSGGGADGLTF

SEQ ID NO: 381112 - protein, 13 aa, Homo sapiens
  CDR3 for beta chain variable domain of TCR clone 190556 (TRBV28, TRBJ2-5)
CAGVSRGEETQYF

SEQ ID NO: 381113 - protein, 14 aa, Homo sapiens
  CDR3 for alpha chain variable domain of TCR clone 190557 (TRAV34, TRAJ44)
CGADGTGTASKLTF

SEQ ID NO: 381114 - protein, 16 aa, Homo sapiens
  CDR3 for beta chain variable domain of TCR clone 190557 (TRBV12-5, TRBJ2-5)
CASGPRTSGNQETQYF

SEQ ID NO: 381115 - protein, 15 aa, Homo sapiens
  CDR3 for alpha chain variable domain of TCR clone 190558 (TRAV12-3, TRAJ6)
CAMSATSGGSYIPTF

SEQ ID NO: 381116 - protein, 15 aa, Homo sapiens
  CDR3 for beta chain variable domain of TCR clone 190558 (TRBV7-8, TRBJ2-1)
CATSLHGGPYNEQFF

SEQ ID NO: 381117 - protein, 15 aa, Homo sapiens
  CDR3 for alpha chain variable domain of TCR clone 190559 (TRAV23/DV6, TRAJ45)
CAASARGGGADGRTF

SEQ ID NO: 381118 - protein, 15 aa, Homo sapiens
  CDR3 for beta chain variable domain of TCR clone 190559 (TRBV3-1, TRBJ2-5)
CASSRGQASWKTQYF

SEQ ID NO: 381119 - protein, 13 aa, Homo sapiens
  CDR3 for alpha chain variable domain of TCR clone 190560 (TRAV35, TRAJ44)
YAGLSGTASKLTF

SEQ ID NO: 381120 - protein, 17 aa, Homo sapiens
  CDR3 for beta chain variable domain of TCR clone 190560 (TRBV7-8, TRBJ1-2)
CASSLRPLQGHLYGYTF

SEQ ID NO: 381121 - protein, 15 aa, Homo sapiens
  CDR3 for alpha chain variable domain of TCR clone 190561 (TRAV3, TRAJ22)
CAVRDRGGSARQLTF

SEQ ID NO: 381122 - protein, 14 aa, Homo sapiens
  CDR3 for beta chain variable domain of TCR clone 190561 (TRBV5-5, TRBJ1-5)
CASSGQGVDQPQHF

SEQ ID NO: 381123 - protein, 15 aa, Homo sapiens
  CDR3 for alpha chain variable domain of TCR clone 190562 (TRAV17, TRAJ16)
CATALRFSDGQKLLF

SEQ ID NO: 381124 - protein, 12 aa, Homo sapiens
  CDR3 for beta chain variable domain of TCR clone 190562 (TRBV2, TRBJ2-7)
CASSDPDYEQDF

SEQ ID NO: 381125 - protein, 13 aa, Homo sapiens
  CDR3 for alpha chain variable domain of TCR clone 190563 (TRAV26-1, TRAJ29)
CIVRRSGNTPLVF

SEQ ID NO: 381126 - protein, 16 aa, Homo sapiens
  CDR3 for beta chain variable domain of TCR clone 190563 (TRBV11-2, TRBJ2-7)
CASSLAPTGVNYEQYC

SEQ ID NO: 381127 - protein, 12 aa, Homo sapiens
  CDR3 for alpha chain variable domain of TCR clone 190564 (TRAV12-2, TRAJ10)
WGVTGGGNKLTF

SEQ ID NO: 381128 - protein, 15 aa, Homo sapiens
  CDR3 for beta chain variable domain of TCR clone 190564 (TRBV6-1, TRBJ2-4)
CASSEAVWTINIQYF

SEQ ID NO: 381129 - protein, 14 aa, Homo sapiens
  CDR3 for alpha chain variable domain of TCR clone 190565 (TRAV1-2, TRAJ16)
CAVNRFSDDHKLPF

SEQ ID NO: 381130 - protein, 14 aa, Homo sapiens
  CDR3 for beta chain variable domain of TCR clone 190565 (TRBV4-1, TRBJ2-2)
CASSQAVNTGELFF

SEQ ID NO: 381131 - protein, 14 aa, Homo sapiens
  CDR3 for alpha chain variable domain of TCR clone 190566 (TRAV38-1, TRAJ45)
CAYYSGGGADGRTF

SEQ ID NO: 381132 - protein, 14 aa, Homo sapiens
  CDR3 for beta chain variable domain of TCR clone 190566 (TRBV25-1, TRBJ1-1)
CASTHLGGNTEAFF

SEQ ID NO: 381133 - protein, 15 aa, Homo sapiens
  CDR3 for alpha chain variable domain of TCR clone 190567 (TRAV12-3, TRAJ6)
CAMSATTGGSYIPTF

SEQ ID NO: 381134 - protein, 14 aa, Homo sapiens
  CDR3 for beta chain variable domain of TCR clone 190567 (TRBV7-6, TRBJ2-3)
CASSVAGGTDTQYF

SEQ ID NO: 381135 - protein, 13 aa, Homo sapiens
  CDR3 for alpha chain variable domain of TCR clone 190568 (TRAV13-1, TRAJ6)
CAARRGGIYIPTF

SEQ ID NO: 381136 - protein, 16 aa, Homo sapiens
  CDR3 for beta chain variable domain of TCR clone 190568 (TRBV7-9, TRBJ2-2)
CASSLATGVGTGELFF

SEQ ID NO: 381137 - protein, 14 aa, Homo sapiens
  CDR3 for alpha chain variable domain of TCR clone 190569 (TRAV8-2, TRAJ11)
CVVSEKSGYSTLTF

SEQ ID NO: 381138 - protein, 13 aa, Homo sapiens
  CDR3 for beta chain variable domain of TCR clone 190569 (TRBV10-3, TRBJ2-7)
CASKLAVNYEQYF

SEQ ID NO: 381139 - protein, 14 aa, Homo sapiens
  CDR3 for alpha chain variable domain of TCR clone 190570 (TRAV2, TRAJ26)
CAGSPGRLWSEFCL

SEQ ID NO: 381140 - protein, 16 aa, Homo sapiens
  CDR3 for beta chain variable domain of TCR clone 190570 (TRBV7-2, TRBJ2-5)
CASSSRWLSGQETQYF

SEQ ID NO: 381141 - protein, 12 aa, Homo sapiens
  CDR3 for alpha chain variable domain of TCR clone 190571 (TRAV35, TRAJ28)
GVEGAGSYQLTF

SEQ ID NO: 381142 - protein, 14 aa, Homo sapiens
  CDR3 for beta chain variable domain of TCR clone 190571 (TRBV7-2, TRBJ2-7)
CASSPKTSFYEQYF

SEQ ID NO: 381143 - protein, 23 aa, Homo sapiens
  CDR3 for alpha chain variable domain of TCR clone 190572 (TRAV3, TRAJ38)
CAVRDCLNAGNNHIQHPDPAVYQ

SEQ ID NO: 381144 - protein, 19 aa, Homo sapiens
  CDR3 for beta chain variable domain of TCR clone 190572 (TRBV7-2, TRBJ2-3)
CASSFLSRNWGGGTDTQYF

SEQ ID NO: 381145 - protein, 15 aa, Homo sapiens
  CDR3 for alpha chain variable domain of TCR clone 190573 (TRAV17, TRAJ57)
CATGPSQGGSEKLVF

SEQ ID NO: 381146 - protein, 12 aa, Homo sapiens
  CDR3 for beta chain variable domain of TCR clone 190573 (TRBV12-4, TRBJ2-1)
CASSLQGSEQFF

SEQ ID NO: 381147 - protein, 17 aa, Homo sapiens
  CDR3 for alpha chain variable domain of TCR clone 190574 (TRAV3, TRAJ6)
CAVRDGPRAGGSYIPTF

SEQ ID NO: 381148 - protein, 12 aa, Homo sapiens
  CDR3 for beta chain variable domain of TCR clone 190574 (TRBV5-7, TRBJ1-1)
CASSLGRGKAFF

SEQ ID NO: 381149 - protein, 14 aa, Homo sapiens
  CDR3 for alpha chain variable domain of TCR clone 190575 (TRAV12-2, TRAJ13)
CAVKKTGGYQKGTF

SEQ ID NO: 381150 - protein, 15 aa, Homo sapiens
  CDR3 for beta chain variable domain of TCR clone 190575 (TRBV27, TRBJ2-1)
CASSNRGGSSNEQFF

SEQ ID NO: 381151 - protein, 13 aa, Homo sapiens
  CDR3 for alpha chain variable domain of TCR clone 190576 (TRAV2, TRAJ21)
CAVEDLNFDKFYF

SEQ ID NO: 381152 - protein, 15 aa, Homo sapiens
  CDR3 for beta chain variable domain of TCR clone 190576 (TRBV28, TRBJ2-5)
CANSPGQGSIETQYF

SEQ ID NO: 381153 - protein, 14 aa, Homo sapiens
  CDR3 for alpha chain variable domain of TCR clone 190577 (TRAV35, TRAJ57)
CAGQRQGGSEKLVF

SEQ ID NO: 381154 - protein, 12 aa, Homo sapiens
  CDR3 for beta chain variable domain of TCR clone 190577 (TRBV11-2, TRBJ1-1)
CASSARGREAFF

SEQ ID NO: 381155 - protein, 14 aa, Homo sapiens
  CDR3 for alpha chain variable domain of TCR clone 190578 (TRAV38-1, TRAJ40)
CALRPTSGTYKYIF

SEQ ID NO: 381156 - protein, 14 aa, Homo sapiens
  CDR3 for beta chain variable domain of TCR clone 190578 (TRBV7-2, TRBJ1-1)
CASSFLTGTTEAFF

SEQ ID NO: 381157 - protein, 14 aa, Homo sapiens
  CDR3 for alpha chain variable domain of TCR clone 190579 (TRAV17, TRAJ49)
CATDARDTGNQFYF

SEQ ID NO: 381158 - protein, 14 aa, Homo sapiens
  CDR3 for beta chain variable domain of TCR clone 190579 (TRBV5-5, TRBJ1-2)
CASSFGQINYSYTF

SEQ ID NO: 381159 - protein, 12 aa, Homo sapiens
  CDR3 for alpha chain variable domain of TCR clone 190580 (TRAV3, TRAJ26)
CAVRDYGQNFVF

SEQ ID NO: 381160 - protein, 15 aa, Homo sapiens
  CDR3 for beta chain variable domain of TCR clone 190580 (TRBV7-6, TRBJ2-2)
CASSFEGGRPGELFF

SEQ ID NO: 381161 - protein, 10 aa, Homo sapiens
  CDR3 for alpha chain variable domain of TCR clone 190581 (TRAV23/DV6, TRAJ31)
CARGGARLMF

SEQ ID NO: 381162 - protein, 13 aa, Homo sapiens
  CDR3 for beta chain variable domain of TCR clone 190581 (TRBV7-9, TRBJ1-2)
CASSLKQNYGYTF

SEQ ID NO: 381163 - protein, 13 aa, Homo sapiens
  CDR3 for alpha chain variable domain of TCR clone 190582 (TRAV1-2, TRAJ9)
CAVLNTGGFKTIL

SEQ ID NO: 381164 - protein, 17 aa, Homo sapiens
  CDR3 for beta chain variable domain of TCR clone 190582 (TRBV7-2, TRBJ2-3)
CASSLAGGLAGTAGQYF

SEQ ID NO: 381165 - protein, 11 aa, Homo sapiens
  CDR3 for alpha chain variable domain of TCR clone 190583 (TRAV3, TRAJ21)
CAVGNFNKLYF

SEQ ID NO: 381166 - protein, 17 aa, Homo sapiens
  CDR3 for beta chain variable domain of TCR clone 190583 (TRBV24-1, TRBJ2-1)
CATSDVLTSGTYNEQFF

SEQ ID NO: 381167 - protein, 12 aa, Homo sapiens
  CDR3 for alpha chain variable domain of TCR clone 190584 (TRAV2, TRAJ33)
CAVPDSNYQLIW

SEQ ID NO: 381168 - protein, 12 aa, Homo sapiens
  CDR3 for beta chain variable domain of TCR clone 190584 (TRBV11-2, TRBJ2-5)
CASSLVGETQYF

SEQ ID NO: 381169 - protein, 13 aa, Homo sapiens
  CDR3 for alpha chain variable domain of TCR clone 190585 (TRAV1-2, TRAJ9)
CAVLNTGGFKTFF

SEQ ID NO: 381170 - protein, 14 aa, Homo sapiens
  CDR3 for beta chain variable domain of TCR clone 190585 (TRBV20-1, TRBJ2-3)
CSARGGTSTDTQYF

SEQ ID NO: 381171 - protein, 14 aa, Homo sapiens
  CDR3 for alpha chain variable domain of TCR clone 190586 (TRAV3, TRAJ34)
CAVRDINNTDKLIF

SEQ ID NO: 381172 - protein, 15 aa, Homo sapiens
  CDR3 for beta chain variable domain of TCR clone 190586 (TRBV20-1, TRBJ2-7)
CSARDRVPGMDEQYF

SEQ ID NO: 381173 - protein, 15 aa, Homo sapiens
  CDR3 for alpha chain variable domain of TCR clone 190587 (TRAV13-1, TRAJ11)
CAASNRNSGYSTLTF

SEQ ID NO: 381174 - protein, 14 aa, Homo sapiens
  CDR3 for beta chain variable domain of TCR clone 190587 (TRBV7-2, TRBJ1-2)
CASSQTGSTYGYTF

SEQ ID NO: 381175 - protein, 11 aa, Homo sapiens
  CDR3 for alpha chain variable domain of TCR clone 190588 (TRAV12-3, TRAJ43)
CAMSVSNDMRF

SEQ ID NO: 381176 - protein, 15 aa, Homo sapiens
  CDR3 for beta chain variable domain of TCR clone 190588 (TRBV5-1, TRBJ2-7)
CASSLNGGPAREQYF

SEQ ID NO: 381177 - protein, 14 aa, Homo sapiens
  CDR3 for alpha chain variable domain of TCR clone 190589 (TRAV12-3, TRAJ29)
CAMSPYSGNTPLIF

SEQ ID NO: 381178 - protein, 15 aa, Homo sapiens
  CDR3 for beta chain variable domain of TCR clone 190589 (TRBV27, TRBJ2-1)
CASSNGGGSSNEQFF

SEQ ID NO: 381179 - protein, 14 aa, Homo sapiens
  CDR3 for alpha chain variable domain of TCR clone 190590 (TRAV1-2, TRAJ15)
CAVRDRQAGTALIF

SEQ ID NO: 381180 - protein, 16 aa, Homo sapiens
  CDR3 for beta chain variable domain of TCR clone 190590 (TRBV19, TRBJ2-2)
CASRSPGTGATGELFF

SEQ ID NO: 381181 - protein, 17 aa, Homo sapiens
  CDR3 for alpha chain variable domain of TCR clone 190591 (TRAV26-1, TRAJ28)
CIVRALYSGAGSYQLTF

SEQ ID NO: 381182 - protein, 12 aa, Homo sapiens
  CDR3 for beta chain variable domain of TCR clone 190591 (TRBV12-4, TRBJ2-1)
CASRQTENEQSF

SEQ ID NO: 381183 - protein, 16 aa, Homo sapiens
  CDR3 for alpha chain variable domain of TCR clone 190592 (TRAV1-2, TRAJ10)
CAVRGVLTGGGNNLTF

SEQ ID NO: 381184 - protein, 15 aa, Homo sapiens
  CDR3 for beta chain variable domain of TCR clone 190592 (TRBV7-3, TRBJ2-1)
CASSPTGGGEVEQFF

SEQ ID NO: 381185 - protein, 12 aa, Homo sapiens
  CDR3 for alpha chain variable domain of TCR clone 190593 (TRAV21, TRAJ4)
GWPEGGYNKLIF

SEQ ID NO: 381186 - protein, 15 aa, Homo sapiens
  CDR3 for beta chain variable domain of TCR clone 190593 (TRBV9, TRBJ1-6)
CASSVAGTGDSPLHF

SEQ ID NO: 381187 - protein, 12 aa, Homo sapiens
  CDR3 for alpha chain variable domain of TCR clone 190594 (TRAV21, TRAJ31)
CAVWGNNARLMF

SEQ ID NO: 381188 - protein, 16 aa, Homo sapiens
  CDR3 for beta chain variable domain of TCR clone 190594 (TRBV27, TRBJ2-5)
CASSYGPGRQKETQYF

SEQ ID NO: 381189 - protein, 15 aa, Homo sapiens
  CDR3 for alpha chain variable domain of TCR clone 190595 (TRAV25, TRAJ52)
CAGRPGGTSYGKLTF

SEQ ID NO: 381190 - protein, 15 aa, Homo sapiens
  CDR3 for beta chain variable domain of TCR clone 190595 (TRBV4-1, TRBJ2-3)
CASRSTRAGTDTQYF

SEQ ID NO: 381191 - protein, 13 aa, Homo sapiens
  CDR3 for alpha chain variable domain of TCR clone 190596 (TRAV13-2, TRAJ13)
CAERPGGYQKVTF

SEQ ID NO: 381192 - protein, 15 aa, Homo sapiens
  CDR3 for beta chain variable domain of TCR clone 190596 (TRBV11-3, TRBJ2-7)
CASSPGPARSYEQYF

SEQ ID NO: 381193 - protein, 12 aa, Homo sapiens
  CDR3 for alpha chain variable domain of TCR clone 190597 (TRAV20, TRAJ20)
CAVRFNDYKLSF

SEQ ID NO: 381194 - protein, 14 aa, Homo sapiens
  CDR3 for beta chain variable domain of TCR clone 190597 (TRBV20-1, TRBJ2-4)
CSASGRVGENIQYF

SEQ ID NO: 381195 - protein, 13 aa, Homo sapiens
  CDR3 for alpha chain variable domain of TCR clone 190598 (TRAV3, TRAJ27)
CAVRPLGAGKSTF

SEQ ID NO: 381196 - protein, 15 aa, Homo sapiens
  CDR3 for beta chain variable domain of TCR clone 190598 (TRBV2, TRBJ2-7)
CASSEGLARSYEQYF

SEQ ID NO: 381197 - protein, 14 aa, Homo sapiens
  CDR3 for alpha chain variable domain of TCR clone 190599 (TRAV12-1, TRAJ17)
CVVNYKAAGNKLTF

SEQ ID NO: 381198 - protein, 16 aa, Homo sapiens
  CDR3 for beta chain variable domain of TCR clone 190599 (TRBV15, TRBJ2-1)
CATSRERLAGAYEQFF

SEQ ID NO: 381199 - protein, 14 aa, Homo sapiens
  CDR3 for alpha chain variable domain of TCR clone 190600 (TRAV8-6, TRAJ5)
CAVSVDTGRRALTF

SEQ ID NO: 381200 - protein, 14 aa, Homo sapiens
  CDR3 for beta chain variable domain of TCR clone 190600 (TRBV19, TRBJ2-7)
CASTVQGRPYEQYF

SEQ ID NO: 381201 - protein, 15 aa, Homo sapiens
  CDR3 for alpha chain variable domain of TCR clone 190601 (TRAV12-2, TRAJ8)
CAVMEENTGFQKLVF

SEQ ID NO: 381202 - protein, 15 aa, Homo sapiens
  CDR3 for beta chain variable domain of TCR clone 190601 (TRBV28, TRBJ2-4)
CAAGSGTLLMGIQYF

SEQ ID NO: 381203 - protein, 12 aa, Homo sapiens
  CDR3 for alpha chain variable domain of TCR clone 190602 (TRAV21, TRAJ39)
CAADNAGNMLTF

SEQ ID NO: 381204 - protein, 13 aa, Homo sapiens
  CDR3 for beta chain variable domain of TCR clone 190602 (TRBV12-4, TRBJ1-1)
YASSPGTGFEAFF

SEQ ID NO: 381205 - protein, 12 aa, Homo sapiens
  CDR3 for alpha chain variable domain of TCR clone 190603 (TRAV13-1, TRAJ9)
CASHTGGIKTIF

SEQ ID NO: 381206 - protein, 18 aa, Homo sapiens
  CDR3 for beta chain variable domain of TCR clone 190603 (TRBV11-2, TRBJ2-3)
CASSLGGASRGAPNTQYF

SEQ ID NO: 381207 - protein, 11 aa, Homo sapiens
  CDR3 for alpha chain variable domain of TCR clone 190604 (TRAV2, TRAJ13)
CASGGYQKVTF

SEQ ID NO: 381208 - protein, 12 aa, Homo sapiens
  CDR3 for beta chain variable domain of TCR clone 190604 (TRBV7-3, TRBJ2-2)
CASSLGGGELFF

SEQ ID NO: 381209 - protein, 17 aa, Homo sapiens
  CDR3 for alpha chain variable domain of TCR clone 190605 (TRAV3, TRAJ6)
CAVRDVPRAGGSYIPTF

SEQ ID NO: 381210 - protein, 14 aa, Homo sapiens
  CDR3 for beta chain variable domain of TCR clone 190605 (TRBV7-2, TRBJ2-7)
CASSPKTSSYEQYF

SEQ ID NO: 381211 - protein, 14 aa, Homo sapiens
  CDR3 for alpha chain variable domain of TCR clone 190606 (TRAV13-1, TRAJ16)
CAAAYFFRWPEAAL

SEQ ID NO: 381212 - protein, 16 aa, Homo sapiens
  CDR3 for beta chain variable domain of TCR clone 190606 (TRBV7-9, TRBJ1-2)
CASSISLDRGGYGYTF

SEQ ID NO: 381213 - protein, 13 aa, Homo sapiens
  CDR3 for alpha chain variable domain of TCR clone 190607 (TRAV12-1, TRAJ39)
CVVPQRAGNLLTF

SEQ ID NO: 381214 - protein, 17 aa, Homo sapiens
  CDR3 for beta chain variable domain of TCR clone 190607 (TRBV4-1, TRBJ2-5)
CASSQDLTGGPIETQYF

SEQ ID NO: 381215 - protein, 12 aa, Homo sapiens
  CDR3 for alpha chain variable domain of TCR clone 190608 (TRAV13-2, TRAJ23)
GAERHRGGKLIF

SEQ ID NO: 381216 - protein, 12 aa, Homo sapiens
  CDR3 for beta chain variable domain of TCR clone 190608 (TRBV12-4, TRBJ1-3)
CASSFSGNTIYF

SEQ ID NO: 381217 - protein, 11 aa, Homo sapiens
  CDR3 for alpha chain variable domain of TCR clone 190609 (TRAV2, TRAJ33)
CAVASNYHLIW

SEQ ID NO: 381218 - protein, 15 aa, Homo sapiens
  CDR3 for beta chain variable domain of TCR clone 190609 (TRBV19, TRBJ1-1)
CASTSGQIQNTEAFF

SEQ ID NO: 381219 - protein, 13 aa, Homo sapiens
  CDR3 for alpha chain variable domain of TCR clone 190610 (TRAV2, TRAJ40)
CAVVTSGTYKYIF

SEQ ID NO: 381220 - protein, 12 aa, Homo sapiens
  CDR3 for beta chain variable domain of TCR clone 190610 (TRBV10-3, TRBJ2-2)
CAIRENTGELFF

SEQ ID NO: 381221 - protein, 13 aa, Homo sapiens
  CDR3 for alpha chain variable domain of TCR clone 190611 (TRAV8-3, TRAJ6)
CAVGSGGSYIPTF

SEQ ID NO: 381222 - protein, 14 aa, Homo sapiens
  CDR3 for beta chain variable domain of TCR clone 190611 (TRBV11-2, TRBJ1-1)
GASSTQRGRTEAFF

SEQ ID NO: 381223 - protein, 18 aa, Homo sapiens
  CDR3 for alpha chain variable domain of TCR clone 190612 (TRAV12-3, TRAJ52)
CAMSRTNAGGTSYGKLTF

SEQ ID NO: 381224 - protein, 16 aa, Homo sapiens
  CDR3 for beta chain variable domain of TCR clone 190612 (TRBV18, TRBJ1-5)
CASSPYRVEGNQPQHF

SEQ ID NO: 381225 - protein, 13 aa, Homo sapiens
  CDR3 for alpha chain variable domain of TCR clone 190613 (TRAV13-1, TRAJ5)
CAASDTGRRALTF

SEQ ID NO: 381226 - protein, 18 aa, Homo sapiens
  CDR3 for beta chain variable domain of TCR clone 190613 (TRBV2, TRBJ2-1)
CTSGPAGRGLPSYNEQFF

SEQ ID NO: 381227 - protein, 14 aa, Homo sapiens
  CDR3 for alpha chain variable domain of TCR clone 190614 (TRAV12-3, TRAJ56)
CAMSVTGANSKLTL

SEQ ID NO: 381228 - protein, 13 aa, Homo sapiens
  CDR3 for beta chain variable domain of TCR clone 190614 (TRBV4-2, TRBJ1-1)
CASSQAGNTEAFF

SEQ ID NO: 381229 - protein, 10 aa, Homo sapiens
  CDR3 for alpha chain variable domain of TCR clone 190615 (TRAV26-1, TRAJ22)
CIVSLNFFWF

SEQ ID NO: 381230 - protein, 15 aa, Homo sapiens
  CDR3 for beta chain variable domain of TCR clone 190615 (TRBV12-4, TRBJ2-3)
CASSLVAGAADTQYF

SEQ ID NO: 381231 - protein, 15 aa, Homo sapiens
  CDR3 for alpha chain variable domain of TCR clone 190616 (TRAV4, TRAJ26)
CLVGDMNNYGQNFVF

SEQ ID NO: 381232 - protein, 12 aa, Homo sapiens
  CDR3 for beta chain variable domain of TCR clone 190616 (TRBV11-2, TRBJ2-2)
CASSLPTGELFF

SEQ ID NO: 381233 - protein, 14 aa, Homo sapiens
  CDR3 for alpha chain variable domain of TCR clone 190617 (TRAV8-3, TRAJ9)
CAVVYNTGGFKTIF

SEQ ID NO: 381234 - protein, 14 aa, Homo sapiens
  CDR3 for beta chain variable domain of TCR clone 190617 (TRBV7-3, TRBJ2-2)
CASSSGGCTGELFF

SEQ ID NO: 381235 - protein, 12 aa, Homo sapiens
  CDR3 for alpha chain variable domain of TCR clone 190618 (TRAV8-3, TRAJ20)
CAADFNDYKLSF

SEQ ID NO: 381236 - protein, 16 aa, Homo sapiens
  CDR3 for beta chain variable domain of TCR clone 190618 (TRBV7-7, TRBJ2-1)
CASSLASGTSYNEQFF

SEQ ID NO: 381237 - protein, 15 aa, Homo sapiens
  CDR3 for alpha chain variable domain of TCR clone 190619 (TRAV27, TRAJ38)
CSARRNAGNNRKLIW

SEQ ID NO: 381238 - protein, 13 aa, Homo sapiens
  CDR3 for beta chain variable domain of TCR clone 190619 (TRBV12-5, TRBJ2-3)
CASGDGQSDTQYF

SEQ ID NO: 381239 - protein, 14 aa, Homo sapiens
  CDR3 for alpha chain variable domain of TCR clone 190620 (TRAV12-2, TRAJ17)
CAVLFKAAGNKLTF

SEQ ID NO: 381240 - protein, 13 aa, Homo sapiens
  CDR3 for beta chain variable domain of TCR clone 190620 (TRBV4-2, TRBJ1-1)
CASSQAGNTEAYF

SEQ ID NO: 381241 - protein, 14 aa, Homo sapiens
  CDR3 for alpha chain variable domain of TCR clone 190621 (TRAV1-2, TRAJ33)
CAVRAPDSNYQIIW

SEQ ID NO: 381242 - protein, 14 aa, Homo sapiens
  CDR3 for beta chain variable domain of TCR clone 190621 (TRBV11-3, TRBJ1-6)
CASSFSGGDSPLHF

SEQ ID NO: 381243 - protein, 12 aa, Homo sapiens
  CDR3 for alpha chain variable domain of TCR clone 190622 (TRAV16, TRAJ27)
YALNHQCRQINL

SEQ ID NO: 381244 - protein, 14 aa, Homo sapiens
  CDR3 for beta chain variable domain of TCR clone 190622 (TRBV11-2, TRBJ1-5)
CASSLDRGRQPQHF

SEQ ID NO: 381245 - protein, 13 aa, Homo sapiens
  CDR3 for alpha chain variable domain of TCR clone 190623 (TRAV13-1, TRAJ43)
CVASLSNNNDMRF

SEQ ID NO: 381246 - protein, 14 aa, Homo sapiens
  CDR3 for beta chain variable domain of TCR clone 190623 (TRBV5-1, TRBJ2-5)
CASSLAGKQETQYF

SEQ ID NO: 381247 - protein, 13 aa, Homo sapiens
  CDR3 for alpha chain variable domain of TCR clone 190624 (TRAV8-2, TRAJ49)
CVVTPNTGNQFYF

SEQ ID NO: 381248 - protein, 16 aa, Homo sapiens
  CDR3 for beta chain variable domain of TCR clone 190624 (TRBV27, TRBJ2-2)
CASSFRGLVRTGELFF

SEQ ID NO: 381249 - protein, 12 aa, Homo sapiens
  CDR3 for alpha chain variable domain of TCR clone 190625 (TRAV12-2, TRAJ7)
CAVMRGNNRRAF

SEQ ID NO: 381250 - protein, 17 aa, Homo sapiens
  CDR3 for beta chain variable domain of TCR clone 190625 (TRBV7-9, TRBJ2-3)
CASSPTVAGDLTATQYF

SEQ ID NO: 381251 - protein, 15 aa, Homo sapiens
  CDR3 for alpha chain variable domain of TCR clone 190626 (TRAV8-4, TRAJ6)
CAVSAPSGGSYIPTF

SEQ ID NO: 381252 - protein, 15 aa, Homo sapiens
  CDR3 for beta chain variable domain of TCR clone 190626 (TRBV2, TRBJ2-1)
CASSEARSSYNEQFS

SEQ ID NO: 381253 - protein, 13 aa, Homo sapiens
  CDR3 for alpha chain variable domain of TCR clone 190627 (TRAV3, TRAJ27)
CAVRPLGAGKSTF

SEQ ID NO: 381254 - protein, 17 aa, Homo sapiens
  CDR3 for beta chain variable domain of TCR clone 190627 (TRBV27, TRBJ2-6)
CASSLTGFASGANGLTF

SEQ ID NO: 381255 - protein, 17 aa, Homo sapiens
  CDR3 for alpha chain variable domain of TCR clone 190628 (TRAV13-1, TRAJ52)
CAASSGAGGTSYGKLTF

SEQ ID NO: 381256 - protein, 15 aa, Homo sapiens
  CDR3 for beta chain variable domain of TCR clone 190628 (TRBV2, TRBJ2-1)
CASSELAGSYNEHFF

SEQ ID NO: 381257 - protein, 13 aa, Homo sapiens
  CDR3 for alpha chain variable domain of TCR clone 190629 (TRAV30, TRAJ39)
CGTEKNAGNMPTF

SEQ ID NO: 381258 - protein, 12 aa, Homo sapiens
  CDR3 for beta chain variable domain of TCR clone 190629 (TRBV12-4, TRBJ2-5)
CASSSAQETQYF

SEQ ID NO: 381259 - protein, 12 aa, Homo sapiens
  CDR3 for alpha chain variable domain of TCR clone 190630 (TRAV21, TRAJ31)
CAVSPARGRLMF

SEQ ID NO: 381260 - protein, 14 aa, Homo sapiens
  CDR3 for beta chain variable domain of TCR clone 190630 (TRBV28, TRBJ2-7)
CASSLPRVSYEQYF

SEQ ID NO: 381261 - protein, 13 aa, Homo sapiens
  CDR3 for alpha chain variable domain of TCR clone 190631 (TRAV17, TRAJ5)
CAPMDTGRRALTF

SEQ ID NO: 381262 - protein, 13 aa, Homo sapiens
  CDR3 for beta chain variable domain of TCR clone 190631 (TRBV7-6, TRBJ1-2)
CQQQVDRDYGYTF

SEQ ID NO: 381263 - protein, 11 aa, Homo sapiens
  CDR3 for alpha chain variable domain of TCR clone 190632 (TRAV12-1, TRAJ3)
CVVNRQQCFQD

SEQ ID NO: 381264 - protein, 18 aa, Homo sapiens
  CDR3 for beta chain variable domain of TCR clone 190632 (TRBV4-1, TRBJ1-5)
CASSQDPRGQGLNQPQHF

SEQ ID NO: 381265 - protein, 14 aa, Homo sapiens
  CDR3 for alpha chain variable domain of TCR clone 190633 (TRAV1-2, TRAJ16)
CAVNRFSDGQKLLF

SEQ ID NO: 381266 - protein, 14 aa, Homo sapiens
  CDR3 for beta chain variable domain of TCR clone 190633 (TRBV6-3, TRBJ1-2)
CASSEGGGSYGYTF

SEQ ID NO: 381267 - protein, 15 aa, Homo sapiens
  CDR3 for alpha chain variable domain of TCR clone 190634 (TRAV12-1, TRAJ23)
CGERSRCNQGGKLIF

SEQ ID NO: 381268 - protein, 12 aa, Homo sapiens
  CDR3 for beta chain variable domain of TCR clone 190634 (TRBV14, TRBJ2-7)
CASSLYKDEQYF

SEQ ID NO: 381269 - protein, 15 aa, Homo sapiens
  CDR3 for alpha chain variable domain of TCR clone 190635 (TRAV20, TRAJ53)
CAVQASGGSNYKLTF

SEQ ID NO: 381270 - protein, 14 aa, Homo sapiens
  CDR3 for beta chain variable domain of TCR clone 190635 (TRBV2, TRBJ2-1)
CASRTGSSYNEQFF

SEQ ID NO: 381271 - protein, 15 aa, Homo sapiens
  CDR3 for alpha chain variable domain of TCR clone 190636 (TRAV21, TRAJ53)
CATLNSGGSNYKLTF

SEQ ID NO: 381272 - protein, 14 aa, Homo sapiens
  CDR3 for beta chain variable domain of TCR clone 190636 (TRBV15, TRBJ2-5)
CATGIGGLGETQYF

SEQ ID NO: 381273 - protein, 16 aa, Homo sapiens
  CDR3 for alpha chain variable domain of TCR clone 190637 (TRAV3, TRAJ37)
CAVRPHGSGKPGKLIF

SEQ ID NO: 381274 - protein, 17 aa, Homo sapiens
  CDR3 for beta chain variable domain of TCR clone 190637 (TRBV5-1, TRBJ2-5)
CASSPVALGQNQETQYF

SEQ ID NO: 381275 - protein, 18 aa, Homo sapiens
  CDR3 for alpha chain variable domain of TCR clone 190638 (TRAV21, TRAJ52)
CAVRPSPAGGTSFGKLTF

SEQ ID NO: 381276 - protein, 19 aa, Homo sapiens
  CDR3 for beta chain variable domain of TCR clone 190638 (TRBV7-2, TRBJ2-3)
CASSFLSRNWGGGTDTQYF

SEQ ID NO: 381277 - protein, 12 aa, Homo sapiens
  CDR3 for alpha chain variable domain of TCR clone 190639 (TRAV1-2, TRAJ17)
CAVRAAGNKLTF

SEQ ID NO: 381278 - protein, 16 aa, Homo sapiens
  CDR3 for beta chain variable domain of TCR clone 190639 (TRBV20-1, TRBJ2-1)
CSATGLAGSYSDEQFF

SEQ ID NO: 381279 - protein, 14 aa, Homo sapiens
  CDR3 for alpha chain variable domain of TCR clone 190640 (TRAV12-3, TRAJ15)
CAMIPPQAGNALIF

SEQ ID NO: 381280 - protein, 14 aa, Homo sapiens
  CDR3 for beta chain variable domain of TCR clone 190640 (TRBV20-1, TRBJ2-2)
CSARRRLATGELFF

SEQ ID NO: 381281 - protein, 14 aa, Homo sapiens
  CDR3 for alpha chain variable domain of TCR clone 190641 (TRAV26-1, TRAJ45)
CIEVTGGGADGLTF

SEQ ID NO: 381282 - protein, 16 aa, Homo sapiens
  CDR3 for beta chain variable domain of TCR clone 190641 (TRBV7-6, TRBJ1-3)
CASSSGRVLSGNTIYF

SEQ ID NO: 381283 - protein, 14 aa, Homo sapiens
  CDR3 for alpha chain variable domain of TCR clone 190642 (TRAV12-2, TRAJ17)
CAVLFKAAGNKLTF

SEQ ID NO: 381284 - protein, 15 aa, Homo sapiens
  CDR3 for beta chain variable domain of TCR clone 190642 (TRBV19, TRBJ2-7)
CASSPAGSGEALRYF

SEQ ID NO: 381285 - protein, 13 aa, Homo sapiens
  CDR3 for alpha chain variable domain of TCR clone 190643 (TRAV27, TRAJ42)
CAGARGSQGNLIF

SEQ ID NO: 381286 - protein, 14 aa, Homo sapiens
  CDR3 for beta chain variable domain of TCR clone 190643 (TRBV6-1, TRBJ1-3)
CASVQGGGGNTIYF

SEQ ID NO: 381287 - protein, 12 aa, Homo sapiens
  CDR3 for alpha chain variable domain of TCR clone 190644 (TRAV23/DV6, TRAJ32)
CSMPGATNKLIF

SEQ ID NO: 381288 - protein, 16 aa, Homo sapiens
  CDR3 for beta chain variable domain of TCR clone 190644 (TRBV2, TRBJ1-4)
CASNLLQGATNEKLFF

SEQ ID NO: 381289 - protein, 12 aa, Homo sapiens
  CDR3 for alpha chain variable domain of TCR clone 190645 (TRAV17, TRAJ20)
CATDSNDYKLSF

SEQ ID NO: 381290 - protein, 16 aa, Homo sapiens
  CDR3 for beta chain variable domain of TCR clone 190645 (TRBV7-2, TRBJ1-2)
CASSSSQDRRGHGYTF

SEQ ID NO: 381291 - protein, 15 aa, Homo sapiens
  CDR3 for alpha chain variable domain of TCR clone 190646 (TRAV27, TRAJ38)
CAARRNAGNNRKLIW

SEQ ID NO: 381292 - protein, 14 aa, Homo sapiens
  CDR3 for beta chain variable domain of TCR clone 190646 (TRBV5-7, TRBJ1-5)
CASSRTGGGQPQHF

SEQ ID NO: 381293 - protein, 12 aa, Homo sapiens
  CDR3 for alpha chain variable domain of TCR clone 190647 (TRAV26-2, TRAJ47)
CVLVEYGNKLVF

SEQ ID NO: 381294 - protein, 16 aa, Homo sapiens
  CDR3 for beta chain variable domain of TCR clone 190647 (TRBV18, TRBJ1-4)
CASSPLVGDRAENLFF

SEQ ID NO: 381295 - protein, 12 aa, Homo sapiens
  CDR3 for alpha chain variable domain of TCR clone 190648 (TRAV13-1, TRAJ21)
CAAKEGFNKFYF

SEQ ID NO: 381296 - protein, 16 aa, Homo sapiens
  CDR3 for beta chain variable domain of TCR clone 190648 (TRBV24-1, TRBJ2-3)
CATSDRRQDLTDTQYF

SEQ ID NO: 381297 - protein, 13 aa, Homo sapiens
  CDR3 for alpha chain variable domain of TCR clone 190649 (TRAV12-1, TRAJ39)
CVVNYNAGHMLTF

SEQ ID NO: 381298 - protein, 12 aa, Homo sapiens
  CDR3 for beta chain variable domain of TCR clone 190649 (TRBV5-7, TRBJ1-1)
CASSLGRGKAFF

SEQ ID NO: 381299 - protein, 14 aa, Homo sapiens
  CDR3 for alpha chain variable domain of TCR clone 190650 (TRAV8-1, TRAJ5)
CAVRTDTGRRALTF

SEQ ID NO: 381300 - protein, 14 aa, Homo sapiens
  CDR3 for beta chain variable domain of TCR clone 190650 (TRBV7-8, TRBJ2-3)
CASNFPDGQDTQYF

SEQ ID NO: 381301 - protein, 15 aa, Homo sapiens
  CDR3 for alpha chain variable domain of TCR clone 190651 (TRAV19, TRAJ9)
CALSLPDTGGFKTIF

SEQ ID NO: 381302 - protein, 16 aa, Homo sapiens
  CDR3 for beta chain variable domain of TCR clone 190651 (TRBV6-6, TRBJ1-5)
CASSYSTLVGNQPQHF

SEQ ID NO: 381303 - protein, 14 aa, Homo sapiens
  CDR3 for alpha chain variable domain of TCR clone 190652 (TRAV1-2, TRAJ8)
CAVREVTGFQKLVF

SEQ ID NO: 381304 - protein, 15 aa, Homo sapiens
  CDR3 for beta chain variable domain of TCR clone 190652 (TRBV28, TRBJ2-6)
CASSLAGSGANVLTF

SEQ ID NO: 381305 - protein, 13 aa, Homo sapiens
  CDR3 for alpha chain variable domain of TCR clone 190653 (TRAV12-1, TRAJ33)
RGYAPDSNYQLIW

SEQ ID NO: 381306 - protein, 15 aa, Homo sapiens
  CDR3 for beta chain variable domain of TCR clone 190653 (TRBV27, TRBJ2-1)
CASSNGGGSSNEQFF

SEQ ID NO: 381307 - protein, 19 aa, Homo sapiens
  CDR3 for alpha chain variable domain of TCR clone 190654 (TRAV25, TRAJ20)
TATQTTDVGILPHDYKNRF

SEQ ID NO: 381308 - protein, 15 aa, Homo sapiens
  CDR3 for beta chain variable domain of TCR clone 190654 (TRBV6-6, TRBJ1-5)
CASSSIQGTNQPQHF

SEQ ID NO: 381309 - protein, 13 aa, Homo sapiens
  CDR3 for alpha chain variable domain of TCR clone 190655 (TRAV8-6, TRAJ8)
CDVSNTGFQKLVF

SEQ ID NO: 381310 - protein, 15 aa, Homo sapiens
  CDR3 for beta chain variable domain of TCR clone 190655 (TRBV28, TRBJ2-5)
CASSSGRTIQETQYF

SEQ ID NO: 381311 - protein, 20 aa, Homo sapiens
  CDR3 for alpha chain variable domain of TCR clone 190656 (TRAV8-3, TRAJ45)
LSTSVMWGSYSGGGADGLTF

SEQ ID NO: 381312 - protein, 11 aa, Homo sapiens
  CDR3 for beta chain variable domain of TCR clone 190656 (TRBV20-1, TRBJ2-5)
CSADRAETQYF

SEQ ID NO: 381313 - protein, 15 aa, Homo sapiens
  CDR3 for alpha chain variable domain of TCR clone 190657 (TRAV1-2, TRAJ15)
CAVDVIGSAGTALIF

SEQ ID NO: 381314 - protein, 13 aa, Homo sapiens
  CDR3 for beta chain variable domain of TCR clone 190657 (TRBV20-1, TRBJ1-1)
CSAFDRENTEAFF

SEQ ID NO: 381315 - protein, 14 aa, Homo sapiens
  CDR3 for alpha chain variable domain of TCR clone 190658 (TRAV12-2, TRAJ23)
GAVNTYNQGGKLIF

SEQ ID NO: 381316 - protein, 13 aa, Homo sapiens
  CDR3 for beta chain variable domain of TCR clone 190658 (TRBV15, TRBJ1-3)
CATSGGLRNTIYF

SEQ ID NO: 381317 - protein, 14 aa, Homo sapiens
  CDR3 for alpha chain variable domain of TCR clone 190659 (TRAV12-2, TRAJ45)
CAVNIGGGADGLTF

SEQ ID NO: 381318 - protein, 17 aa, Homo sapiens
  CDR3 for beta chain variable domain of TCR clone 190659 (TRBV11-2, TRBJ2-1)
CASSLYPPGVEYNEQFF

SEQ ID NO: 381319 - protein, 11 aa, Homo sapiens
  CDR3 for alpha chain variable domain of TCR clone 190660 (TRAV17, TRAJ31)
YATSNNARLMF

SEQ ID NO: 381320 - protein, 14 aa, Homo sapiens
  CDR3 for beta chain variable domain of TCR clone 190660 (TRBV18, TRBJ2-7)
CASSPRGGAYEQYF

SEQ ID NO: 381321 - protein, 13 aa, Homo sapiens
  CDR3 for alpha chain variable domain of TCR clone 190661 (TRAV3, TRAJ36)
CALRDTGANNLFF

SEQ ID NO: 381322 - protein, 15 aa, Homo sapiens
  CDR3 for beta chain variable domain of TCR clone 190661 (TRBV24-1, TRBJ2-1)
CATSGSGGFYNEQFF

SEQ ID NO: 381323 - protein, 12 aa, Homo sapiens
  CDR3 for alpha chain variable domain of TCR clone 190662 (TRAV8-3, TRAJ41)
CAVALSGYALNF

SEQ ID NO: 381324 - protein, 16 aa, Homo sapiens
  CDR3 for beta chain variable domain of TCR clone 190662 (TRBV27, TRBJ2-7)
CASSAERRDSAYEQYF

SEQ ID NO: 381325 - protein, 15 aa, Homo sapiens
  CDR3 for alpha chain variable domain of TCR clone 190663 (TRAV21, TRAJ53)
CATLNSGGSNYKLTF

SEQ ID NO: 381326 - protein, 14 aa, Homo sapiens
  CDR3 for beta chain variable domain of TCR clone 190663 (TRBV27, TRBJ2-2)
CASSLGAATGELFF

SEQ ID NO: 381327 - protein, 14 aa, Homo sapiens
  CDR3 for alpha chain variable domain of TCR clone 190664 (TRAV29/DV5, TRAJ32)
CAAAYGVGTNNLIF

SEQ ID NO: 381328 - protein, 15 aa, Homo sapiens
  CDR3 for beta chain variable domain of TCR clone 190664 (TRBV27, TRBJ2-7)
CASSTAGTGSYEQYF

SEQ ID NO: 381329 - protein, 15 aa, Homo sapiens
  CDR3 for alpha chain variable domain of TCR clone 190665 (TRAV8-2, TRAJ16)
CVVSDGFSDGQKLLF

SEQ ID NO: 381330 - protein, 15 aa, Homo sapiens
  CDR3 for beta chain variable domain of TCR clone 190665 (TRBV28, TRBJ2-7)
CASSRWDRGSYEQYF

SEQ ID NO: 381331 - protein, 16 aa, Homo sapiens
  CDR3 for alpha chain variable domain of TCR clone 190666 (TRAV12-3, TRAJ53)
CAMSPGSGGSNYKLTF

SEQ ID NO: 381332 - protein, 14 aa, Homo sapiens
  CDR3 for beta chain variable domain of TCR clone 190666 (TRBV7-7, TRBJ2-2)
CATRQDSDTGELFF

SEQ ID NO: 381333 - protein, 11 aa, Homo sapiens
  CDR3 for alpha chain variable domain of TCR clone 190667 (TRAV1-1, TRAJ23)
CAVRQGGKLIF

SEQ ID NO: 381334 - protein, 14 aa, Homo sapiens
  CDR3 for beta chain variable domain of TCR clone 190667 (TRBV20-1, TRBJ2-1)
CSAQIGGSANEQFF

SEQ ID NO: 381335 - protein, 14 aa, Homo sapiens
  CDR3 for alpha chain variable domain of TCR clone 190668 (TRAV12-2, TRAJ42)
CAMNYGGSQGNLIF

SEQ ID NO: 381336 - protein, 15 aa, Homo sapiens
  CDR3 for beta chain variable domain of TCR clone 190668 (TRBV5-7, TRBJ1-5)
CASSYGKLWDQPQHF

SEQ ID NO: 381337 - protein, 14 aa, Homo sapiens
  CDR3 for alpha chain variable domain of TCR clone 190669 (TRAV12-3, TRAJ10)
SHLPLTGGGNKLTF

SEQ ID NO: 381338 - protein, 11 aa, Homo sapiens
  CDR3 for beta chain variable domain of TCR clone 190669 (TRBV20-1, TRBJ2-5)
CSADRAETQSF

SEQ ID NO: 381339 - protein, 13 aa, Homo sapiens
  CDR3 for alpha chain variable domain of TCR clone 190670 (TRAV27, TRAJ3)
ASLRGSSASKIIF

SEQ ID NO: 381340 - protein, 15 aa, Homo sapiens
  CDR3 for beta chain variable domain of TCR clone 190670 (TRBV28, TRBJ1-3)
CASSMGWASGNTIDF

SEQ ID NO: 381341 - protein, 12 aa, Homo sapiens
  CDR3 for alpha chain variable domain of TCR clone 190671 (TRAV20, TRAJ23)
CAVHNQGGKLIF

SEQ ID NO: 381342 - protein, 12 aa, Homo sapiens
  CDR3 for beta chain variable domain of TCR clone 190671 (TRBV7-8, TRBJ2-7)
CASRLGDREQYF

SEQ ID NO: 381343 - protein, 11 aa, Homo sapiens
  CDR3 for alpha chain variable domain of TCR clone 190672 (TRAV1-2, TRAJ20)
CAVSNDYKLSF

SEQ ID NO: 381344 - protein, 16 aa, Homo sapiens
  CDR3 for beta chain variable domain of TCR clone 190672 (TRBV29-1, TRBJ2-7)
CSVEDAEDGTAYEQYF

SEQ ID NO: 381345 - protein, 12 aa, Homo sapiens
  CDR3 for alpha chain variable domain of TCR clone 190673 (TRAV21, TRAJ39)
CAADNAANMLTF

SEQ ID NO: 381346 - protein, 13 aa, Homo sapiens
  CDR3 for beta chain variable domain of TCR clone 190673 (TRBV12-4, TRBJ1-1)
CASSPGTGFEAFF

SEQ ID NO: 381347 - protein, 15 aa, Homo sapiens
  CDR3 for alpha chain variable domain of TCR clone 190674 (TRAV12-1, TRAJ15)
CVVTRANQAGTALIF

SEQ ID NO: 381348 - protein, 14 aa, Homo sapiens
  CDR3 for beta chain variable domain of TCR clone 190674 (TRBV5-1, TRBJ1-1)
CASSLVYINTEAFF

SEQ ID NO: 381349 - protein, 14 aa, Homo sapiens
  CDR3 for alpha chain variable domain of TCR clone 190675 (TRAV1-2, TRAJ8)
CAVREDTGFQKLVF

SEQ ID NO: 381350 - protein, 17 aa, Homo sapiens
  CDR3 for beta chain variable domain of TCR clone 190675 (TRBV5-1, TRBJ1-1)
CASRPIRTGGVNTEAFF

SEQ ID NO: 381351 - protein, 14 aa, Homo sapiens
  CDR3 for alpha chain variable domain of TCR clone 190676 (TRAV16, TRAJ44)
CSKRRTGTASKLTF

SEQ ID NO: 381352 - protein, 14 aa, Homo sapiens
  CDR3 for beta chain variable domain of TCR clone 190676 (TRBV25-1, TRBJ1-1)
CASTHLGGNTEAFF

SEQ ID NO: 381353 - protein, 13 aa, Homo sapiens
  CDR3 for alpha chain variable domain of TCR clone 190677 (TRAV13-2, TRAJ48)
CAEMDFGNAQLTF

SEQ ID NO: 381354 - protein, 15 aa, Homo sapiens
  CDR3 for beta chain variable domain of TCR clone 190677 (TRBV7-9, TRBJ1-6)
CASSSPGRGNSPLHF

SEQ ID NO: 381355 - protein, 14 aa, Homo sapiens
  CDR3 for alpha chain variable domain of TCR clone 190678 (TRAV17, TRAJ37)
CATDGSSNAGKLSL

SEQ ID NO: 381356 - protein, 13 aa, Homo sapiens
  CDR3 for beta chain variable domain of TCR clone 190678 (TRBV11-2, TRBJ2-1)
CASSLDLVNEQFF

SEQ ID NO: 381357 - protein, 16 aa, Homo sapiens
  CDR3 for alpha chain variable domain of TCR clone 190679 (TRAV27, TRAJ48)
TAAQPADTGLYLPLTF

SEQ ID NO: 381358 - protein, 13 aa, Homo sapiens
  CDR3 for beta chain variable domain of TCR clone 190679 (TRBV7-2, TRBJ2-5)
CASSQTSVETQYF

SEQ ID NO: 381359 - protein, 11 aa, Homo sapiens
  CDR3 for alpha chain variable domain of TCR clone 190680 (TRAV12-2, TRAJ31)
CAVTRWARLMF

SEQ ID NO: 381360 - protein, 18 aa, Homo sapiens
  CDR3 for beta chain variable domain of TCR clone 190680 (TRBV11-2, TRBJ2-3)
CASSLGGASRGAPNTQYF

SEQ ID NO: 381361 - protein, 16 aa, Homo sapiens
  CDR3 for alpha chain variable domain of TCR clone 190681 (TRAV17, TRAJ22)
CATGPISSGSARQLTF

SEQ ID NO: 381362 - protein, 13 aa, Homo sapiens
  CDR3 for beta chain variable domain of TCR clone 190681 (TRBV11-2, TRBJ2-1)
CASSLGLAEGRFF

SEQ ID NO: 381363 - protein, 13 aa, Homo sapiens
  CDR3 for alpha chain variable domain of TCR clone 190682 (TRAV26-2, TRAJ43)
CILRAVNNNDMRF

SEQ ID NO: 381364 - protein, 16 aa, Homo sapiens
  CDR3 for beta chain variable domain of TCR clone 190682 (TRBV7-6, TRBJ1-6)
CASSLSARIGDSPLLF

SEQ ID NO: 381365 - protein, 14 aa, Homo sapiens
  CDR3 for alpha chain variable domain of TCR clone 190683 (TRAV9-2, TRAJ39)
CALYIYNAGNMLTF

SEQ ID NO: 381366 - protein, 17 aa, Homo sapiens
  CDR3 for beta chain variable domain of TCR clone 190683 (TRBV19, TRBJ1-1)
CASSIAGRGLMNTEAFF

SEQ ID NO: 381367 - protein, 16 aa, Homo sapiens
  CDR3 for alpha chain variable domain of TCR clone 190684 (TRAV3, TRAJ37)
CAVRGKGSGTTGKLIF

SEQ ID NO: 381368 - protein, 15 aa, Homo sapiens
  CDR3 for beta chain variable domain of TCR clone 190684 (TRBV10-3, TRBJ2-3)
CAISLTSGGTDTQYF

SEQ ID NO: 381369 - protein, 13 aa, Homo sapiens
  CDR3 for alpha chain variable domain of TCR clone 190685 (TRAV8-6, TRAJ8)
CAVSNTGFQKLVF

SEQ ID NO: 381370 - protein, 15 aa, Homo sapiens
  CDR3 for beta chain variable domain of TCR clone 190685 (TRBV28, TRBJ2-5)
CASSSGRTIQETQCF

SEQ ID NO: 381371 - protein, 14 aa, Homo sapiens
  CDR3 for alpha chain variable domain of TCR clone 190686 (TRAV9-2, TRAJ39)
CALYIYNAGNMLTL

SEQ ID NO: 381372 - protein, 17 aa, Homo sapiens
  CDR3 for beta chain variable domain of TCR clone 190686 (TRBV11-2, TRBJ2-1)
CASSLSPPGVEYNEQFF

SEQ ID NO: 381373 - protein, 15 aa, Homo sapiens
  CDR3 for alpha chain variable domain of TCR clone 190687 (TRAV8-2, TRAJ40)
CVVLGTTSGTYKYIF

SEQ ID NO: 381374 - protein, 15 aa, Homo sapiens
  CDR3 for beta chain variable domain of TCR clone 190687 (TRBV19, TRBJ1-6)
CASSTQGAVGSPLHF

SEQ ID NO: 381375 - protein, 12 aa, Homo sapiens
  CDR3 for alpha chain variable domain of TCR clone 190688 (TRAV21, TRAJ27)
CAANTNAGQSTF

SEQ ID NO: 381376 - protein, 15 aa, Homo sapiens
  CDR3 for beta chain variable domain of TCR clone 190688 (TRBV12-4, TRBJ2-5)
CASSPPTGLQETQYF

SEQ ID NO: 381377 - protein, 13 aa, Homo sapiens
  CDR3 for alpha chain variable domain of TCR clone 190689 (TRAV8-3, TRAJ48)
CAVVLFGNEKLTF

SEQ ID NO: 381378 - protein, 16 aa, Homo sapiens
  CDR3 for beta chain variable domain of TCR clone 190689 (TRBV20-1, TRBJ2-5)
CSARDFASGIQETQYF

SEQ ID NO: 381379 - protein, 14 aa, Homo sapiens
  CDR3 for alpha chain variable domain of TCR clone 190690 (TRAV1-2, TRAJ16)
CAVNLFSDGQKLLF

SEQ ID NO: 381380 - protein, 16 aa, Homo sapiens
  CDR3 for beta chain variable domain of TCR clone 190690 (TRBV27, TRBJ2-2)
CASSFRGLVRTGELFF

SEQ ID NO: 381381 - protein, 16 aa, Homo sapiens
  CDR3 for alpha chain variable domain of TCR clone 190691 (TRAV1-2, TRAJ24)
CLLPLCCGGSWGKFQF

SEQ ID NO: 381382 - protein, 15 aa, Homo sapiens
  CDR3 for beta chain variable domain of TCR clone 190691 (TRBV6-1, TRBJ2-7)
CASSEGVGNPYEQYF

SEQ ID NO: 381383 - protein, 14 aa, Homo sapiens
  CDR3 for alpha chain variable domain of TCR clone 190692 (TRAV12-3, TRAJ22)
CAMSLFGSARQLTF

SEQ ID NO: 381384 - protein, 12 aa, Homo sapiens
  CDR3 for beta chain variable domain of TCR clone 190692 (TRBV11-2, TRBJ2-2)
CASSLPTGELFF

SEQ ID NO: 381385 - protein, 13 aa, Homo sapiens
  CDR3 for alpha chain variable domain of TCR clone 190693 (TRAV8-1, TRAJ30)
CAVIRNRDDKIIF

SEQ ID NO: 381386 - protein, 14 aa, Homo sapiens
  CDR3 for beta chain variable domain of TCR clone 190693 (TRBV7-2, TRBJ1-6)
CASSLQGANSPLHF

SEQ ID NO: 381387 - protein, 16 aa, Homo sapiens
  CDR3 for alpha chain variable domain of TCR clone 190694 (TRAV3, TRAJ37)
CAVRPHGSGNTGKLIF

SEQ ID NO: 381388 - protein, 17 aa, Homo sapiens
  CDR3 for beta chain variable domain of TCR clone 190694 (TRBV5-1, TRBJ2-5)
CASSAVALGQNQETQYF

SEQ ID NO: 381389 - protein, 14 aa, Homo sapiens
  CDR3 for alpha chain variable domain of TCR clone 190695 (TRAV2, TRAJ9)
CAVEDRSGGFKTIF

SEQ ID NO: 381390 - protein, 16 aa, Homo sapiens
  CDR3 for beta chain variable domain of TCR clone 190695 (TRBV7-3, TRBJ2-2)
CASSLKRGTLSGELFF

SEQ ID NO: 381391 - protein, 12 aa, Homo sapiens
  CDR3 for alpha chain variable domain of TCR clone 190696 (TRAV16, TRAJ57)
CALEGGPEKLVF

SEQ ID NO: 381392 - protein, 12 aa, Homo sapiens
  CDR3 for beta chain variable domain of TCR clone 190696 (TRBV28, TRBJ2-7)
CASSGRPYEQYF

SEQ ID NO: 381393 - protein, 15 aa, Homo sapiens
  CDR3 for alpha chain variable domain of TCR clone 190697 (TRAV12-2, TRAJ53)
CAVNGGGGSNYKLTF

SEQ ID NO: 381394 - protein, 16 aa, Homo sapiens
  CDR3 for beta chain variable domain of TCR clone 190697 (TRBV5-4, TRBJ2-3)
CASSWGTSGGTDTQYF

SEQ ID NO: 381395 - protein, 13 aa, Homo sapiens
  CDR3 for alpha chain variable domain of TCR clone 190698 (TRAV27, TRAJ17)
CAGAATAGNKLTF

SEQ ID NO: 381396 - protein, 15 aa, Homo sapiens
  CDR3 for beta chain variable domain of TCR clone 190698 (TRBV5-1, TRBJ2-3)
CASRNQAGSTDTPYF

SEQ ID NO: 381397 - protein, 15 aa, Homo sapiens
  CDR3 for alpha chain variable domain of TCR clone 190699 (TRAV8-4, TRAJ53)
CAVSDGGGSNYKLTF

SEQ ID NO: 381398 - protein, 17 aa, Homo sapiens
  CDR3 for beta chain variable domain of TCR clone 190699 (TRBV7-8, TRBJ2-6)
CASSAGTGGVGANVLTF

SEQ ID NO: 381399 - protein, 16 aa, Homo sapiens
  CDR3 for alpha chain variable domain of TCR clone 190700 (TRAV35, TRAJ37)
CWAFLRSSSNTGKLIF

SEQ ID NO: 381400 - protein, 13 aa, Homo sapiens
  CDR3 for beta chain variable domain of TCR clone 190700 (TRBV2, TRBJ1-2)
CASSVRGNYGYTF

SEQ ID NO: 381401 - protein, 17 aa, Homo sapiens
  CDR3 for alpha chain variable domain of TCR clone 190701 (TRAV4, TRAJ18)
CLVVAAGRGSTLGRLSF

SEQ ID NO: 381402 - protein, 17 aa, Homo sapiens
  CDR3 for beta chain variable domain of TCR clone 190701 (TRBV28, TRBJ2-2)
CASSLATGMGDAGELFF

SEQ ID NO: 381403 - protein, 12 aa, Homo sapiens
  CDR3 for alpha chain variable domain of TCR clone 190702 (TRAV27, TRAJ41)
CAGRNSGYALNC

SEQ ID NO: 381404 - protein, 15 aa, Homo sapiens
  CDR3 for beta chain variable domain of TCR clone 190702 (TRBV6-3, TRBJ2-7)
CASSSPGTVFYEQYF

SEQ ID NO: 381405 - protein, 15 aa, Homo sapiens
  CDR3 for alpha chain variable domain of TCR clone 190703 (TRAV3, TRAJ5)
CAVRDRKTGRRALTF

SEQ ID NO: 381406 - protein, 16 aa, Homo sapiens
  CDR3 for beta chain variable domain of TCR clone 190703 (TRBV2, TRBJ2-3)
CANSTSVEGVTDTQYF

SEQ ID NO: 381407 - protein, 11 aa, Homo sapiens
  CDR3 for alpha chain variable domain of TCR clone 190704 (TRAV12-3, TRAJ16)
LTGGDGQKLLF

SEQ ID NO: 381408 - protein, 13 aa, Homo sapiens
  CDR3 for beta chain variable domain of TCR clone 190704 (TRBV12-4, TRBJ1-4)
CASAVGHNEKLFF

SEQ ID NO: 381409 - protein, 14 aa, Homo sapiens
  CDR3 for alpha chain variable domain of TCR clone 190705 (TRAV35, TRAJ22)
CVGLRPGSARQLTF

SEQ ID NO: 381410 - protein, 19 aa, Homo sapiens
  CDR3 for beta chain variable domain of TCR clone 190705 (TRBV6-1, TRBJ2-5)
CASSEQGLAGGLYQETQYF

SEQ ID NO: 381411 - protein, 13 aa, Homo sapiens
  CDR3 for alpha chain variable domain of TCR clone 190706 (TRAV10, TRAJ15)
CVVSGQAGTALIF

SEQ ID NO: 381412 - protein, 15 aa, Homo sapiens
  CDR3 for beta chain variable domain of TCR clone 190706 (TRBV6-1, TRBJ1-2)
CTSSDTIDRGYGYTF

SEQ ID NO: 381413 - protein, 14 aa, Homo sapiens
  CDR3 for alpha chain variable domain of TCR clone 190707 (TRAV1-2, TRAJ8)
CAVREDPGFQKLVF

SEQ ID NO: 381414 - protein, 15 aa, Homo sapiens
  CDR3 for beta chain variable domain of TCR clone 190707 (TRBV7-9, TRBJ1-6)
CASSSPGRGNSPLHF

SEQ ID NO: 381415 - protein, 11 aa, Homo sapiens
  CDR3 for alpha chain variable domain of TCR clone 190708 (TRAV17, TRAJ31)
CATSNNARVMF

SEQ ID NO: 381416 - protein, 16 aa, Homo sapiens
  CDR3 for beta chain variable domain of TCR clone 190708 (TRBV7-8, TRBJ2-4)
CASSAERTLAKNIQYF

SEQ ID NO: 381417 - protein, 14 aa, Homo sapiens
  CDR3 for alpha chain variable domain of TCR clone 190709 (TRAV8-3, TRAJ4)
CAVGAAGGYNKLIF

SEQ ID NO: 381418 - protein, 14 aa, Homo sapiens
  CDR3 for beta chain variable domain of TCR clone 190709 (TRBV19, TRBJ2-7)
CASNFRDTFTGMYF

SEQ ID NO: 381419 - protein, 14 aa, Homo sapiens
  CDR3 for alpha chain variable domain of TCR clone 190710 (TRAV35, TRAJ34)
CAGQSPRNTDKLIF

SEQ ID NO: 381420 - protein, 15 aa, Homo sapiens
  CDR3 for beta chain variable domain of TCR clone 190710 (TRBV18, TRBJ1-1)
CASSPRQGENTEAFF

SEQ ID NO: 381421 - protein, 15 aa, Homo sapiens
  CDR3 for alpha chain variable domain of TCR clone 190711 (TRAV26-1, TRAJ23)
CIVRVLNNQGGKLIF

SEQ ID NO: 381422 - protein, 15 aa, Homo sapiens
  CDR3 for beta chain variable domain of TCR clone 190711 (TRBV7-3, TRBJ2-1)
CASSFGQSTYNEQFF

SEQ ID NO: 381423 - protein, 17 aa, Homo sapiens
  CDR3 for alpha chain variable domain of TCR clone 190712 (TRAV23/DV6, TRAJ57)
CAASSTLSQGVSENLVF

SEQ ID NO: 381424 - protein, 14 aa, Homo sapiens
  CDR3 for beta chain variable domain of TCR clone 190712 (TRBV25-1, TRBJ1-1)
CASTHLGGNTEAFF

SEQ ID NO: 381425 - protein, 11 aa, Homo sapiens
  CDR3 for alpha chain variable domain of TCR clone 190713 (TRAV17, TRAJ43)
CATPRSNDMRF

SEQ ID NO: 381426 - protein, 15 aa, Homo sapiens
  CDR3 for beta chain variable domain of TCR clone 190713 (TRBV11-2, TRBJ2-1)
CASSLGTSGLNEQFS

SEQ ID NO: 381427 - protein, 13 aa, Homo sapiens
  CDR3 for alpha chain variable domain of TCR clone 190714 (TRAV36/DV7, TRAJ50)
CAVTKTSYDKVIF

SEQ ID NO: 381428 - protein, 15 aa, Homo sapiens
  CDR3 for beta chain variable domain of TCR clone 190714 (TRBV28, TRBJ2-7)
CASSPGGRGFYEQYF

SEQ ID NO: 381429 - protein, 14 aa, Homo sapiens
  CDR3 for alpha chain variable domain of TCR clone 190715 (TRAV12-1, TRAJ30)
CVVNIGNRDDKIIF

SEQ ID NO: 381430 - protein, 15 aa, Homo sapiens
  CDR3 for beta chain variable domain of TCR clone 190715 (TRBV5-1, TRBJ2-1)
CASSPPRAPYNEQFF

SEQ ID NO: 381431 - protein, 11 aa, Homo sapiens
  CDR3 for alpha chain variable domain of TCR clone 190716 (TRAV17, TRAJ9)
CGFTGGFKTIF

SEQ ID NO: 381432 - protein, 14 aa, Homo sapiens
  CDR3 for beta chain variable domain of TCR clone 190716 (TRBV7-9, TRBJ2-2)
CASSLVQDTWELFF

SEQ ID NO: 381433 - protein, 13 aa, Homo sapiens
  CDR3 for alpha chain variable domain of TCR clone 190717 (TRAV29/DV5, TRAJ31)
CAASRNNNPRLMF

SEQ ID NO: 381434 - protein, 14 aa, Homo sapiens
  CDR3 for beta chain variable domain of TCR clone 190717 (TRBV7-9, TRBJ2-2)
CASSLVQDTGELFF

SEQ ID NO: 381435 - protein, 14 aa, Homo sapiens
  CDR3 for alpha chain variable domain of TCR clone 190718 (TRAV35, TRAJ33)
CWPRGRDSNYQLIW

SEQ ID NO: 381436 - protein, 12 aa, Homo sapiens
  CDR3 for beta chain variable domain of TCR clone 190718 (TRBV11-2, TRBJ2-2)
CASSLGGGELFF

SEQ ID NO: 381437 - protein, 16 aa, Homo sapiens
  CDR3 for alpha chain variable domain of TCR clone 190719 (TRAV12-3, TRAJ58)
CAMTDTEETSGSRLTF

SEQ ID NO: 381438 - protein, 15 aa, Homo sapiens
  CDR3 for beta chain variable domain of TCR clone 190719 (TRBV19, TRBJ1-1)
CASTSGQIQNTEAFF

SEQ ID NO: 381439 - protein, 14 aa, Homo sapiens
  CDR3 for alpha chain variable domain of TCR clone 190720 (TRAV12-2, TRAJ11)
CAVKRESGYSTLTF

SEQ ID NO: 381440 - protein, 10 aa, Homo sapiens
  CDR3 for beta chain variable domain of TCR clone 190720 (TRBV20-1, TRBJ2-5)
CSARFETQYF

SEQ ID NO: 381441 - protein, 13 aa, Homo sapiens
  CDR3 for alpha chain variable domain of TCR clone 190721 (TRAV21, TRAJ8)
CAAPNTGFQKLVF

SEQ ID NO: 381442 - protein, 11 aa, Homo sapiens
  CDR3 for beta chain variable domain of TCR clone 190721 (TRBV29-1, TRBJ2-5)
CSEDRTGTQYF

SEQ ID NO: 381443 - protein, 18 aa, Homo sapiens
  CDR3 for alpha chain variable domain of TCR clone 190722 (TRAV21, TRAJ52)
CAVRPSPAGGTSYGKLTF

SEQ ID NO: 381444 - protein, 15 aa, Homo sapiens
  CDR3 for beta chain variable domain of TCR clone 190722 (TRBV27, TRBJ2-1)
CDSSNGGGSSNEQFF

SEQ ID NO: 381445 - protein, 15 aa, Homo sapiens
  CDR3 for alpha chain variable domain of TCR clone 190723 (TRAV8-3, TRAJ27)
CAVGPSKTNAGKSTF

SEQ ID NO: 381446 - protein, 15 aa, Homo sapiens
  CDR3 for beta chain variable domain of TCR clone 190723 (TRBV7-8, TRBJ2-7)
CASSLERAGSYEQYF

SEQ ID NO: 381447 - protein, 14 aa, Homo sapiens
  CDR3 for alpha chain variable domain of TCR clone 190724 (TRAV8-3, TRAJ44)
CAVGSTGTASKLTF

SEQ ID NO: 381448 - protein, 15 aa, Homo sapiens
  CDR3 for beta chain variable domain of TCR clone 190724 (TRBV28, TRBJ2-7)
CASSFRGQGRYEQYF

SEQ ID NO: 381449 - protein, 13 aa, Homo sapiens
  CDR3 for alpha chain variable domain of TCR clone 190725 (TRAV38-2/DV8, TRAJ34)
CAYRTRNTDKLIF

SEQ ID NO: 381450 - protein, 13 aa, Homo sapiens
  CDR3 for beta chain variable domain of TCR clone 190725 (TRBV7-2, TRBJ2-2)
CASSLAVTGELFF

SEQ ID NO: 381451 - protein, 14 aa, Homo sapiens
  CDR3 for alpha chain variable domain of TCR clone 190726 (TRAV12-3, TRAJ10)
SHLPLTRGGNKLTF

SEQ ID NO: 381452 - protein, 14 aa, Homo sapiens
  CDR3 for beta chain variable domain of TCR clone 190726 (TRBV19, TRBJ2-1)
CASPTVVLSGEQFF

SEQ ID NO: 381453 - protein, 14 aa, Homo sapiens
  CDR3 for alpha chain variable domain of TCR clone 190727 (TRAV17, TRAJ35)
CATWTIGFGNVLHC

SEQ ID NO: 381454 - protein, 13 aa, Homo sapiens
  CDR3 for beta chain variable domain of TCR clone 190727 (TRBV20-1, TRBJ1-1)
CSARGGGNTEAFF

SEQ ID NO: 381455 - protein, 11 aa, Homo sapiens
  CDR3 for alpha chain variable domain of TCR clone 190728 (TRAV3, TRAJ21)
CAVGNFSKFYF

SEQ ID NO: 381456 - protein, 16 aa, Homo sapiens
  CDR3 for beta chain variable domain of TCR clone 190728 (TRBV19, TRBJ2-1)
CASSKAGPSSYNERFF

SEQ ID NO: 381457 - protein, 13 aa, Homo sapiens
  CDR3 for alpha chain variable domain of TCR clone 190729 (TRAV13-1, TRAJ12)
CAASPDSSYKLIF

SEQ ID NO: 381458 - protein, 13 aa, Homo sapiens
  CDR3 for beta chain variable domain of TCR clone 190729 (TRBV19, TRBJ1-2)
CASSVPGQDGYTF

SEQ ID NO: 381459 - protein, 13 aa, Homo sapiens
  CDR3 for alpha chain variable domain of TCR clone 190730 (TRAV12-2, TRAJ7)
CAVSLYGNNRLAF

SEQ ID NO: 381460 - protein, 15 aa, Homo sapiens
  CDR3 for beta chain variable domain of TCR clone 190730 (TRBV25-1, TRBJ1-4)
CASSPGDSTNEKLFF

SEQ ID NO: 381461 - protein, 14 aa, Homo sapiens
  CDR3 for alpha chain variable domain of TCR clone 190731 (TRAV9-2, TRAJ39)
CVLYIYNAGNMLTF

SEQ ID NO: 381462 - protein, 19 aa, Homo sapiens
  CDR3 for beta chain variable domain of TCR clone 190731 (TRBV25-1, TRBJ2-2)
CAILVYRVDRGRKTGELFF

SEQ ID NO: 381463 - protein, 14 aa, Homo sapiens
  CDR3 for alpha chain variable domain of TCR clone 190732 (TRAV25, TRAJ23)
CAGQGDNQGGKLIF

SEQ ID NO: 381464 - protein, 12 aa, Homo sapiens
  CDR3 for beta chain variable domain of TCR clone 190732 (TRBV7-9, TRBJ1-1)
CASSLVRGEAFY

SEQ ID NO: 381465 - protein, 14 aa, Homo sapiens
  CDR3 for alpha chain variable domain of TCR clone 190733 (TRAV12-3, TRAJ10)
SHLPLAGGGNKLTF

SEQ ID NO: 381466 - protein, 13 aa, Homo sapiens
  CDR3 for beta chain variable domain of TCR clone 190733 (TRBV27, TRBJ1-1)
CASSLSIGAEAFF

SEQ ID NO: 381467 - protein, 15 aa, Homo sapiens
  CDR3 for alpha chain variable domain of TCR clone 190734 (TRAV4, TRAJ10)
SLVGDEEGGGNKLTF

SEQ ID NO: 381468 - protein, 15 aa, Homo sapiens
  CDR3 for beta chain variable domain of TCR clone 190734 (TRBV7-2, TRBJ2-7)
CASSLTGQGTYEQYF

SEQ ID NO: 381469 - protein, 14 aa, Homo sapiens
  CDR3 for alpha chain variable domain of TCR clone 190735 (TRAV20, TRAJ56)
CAVQFGGDNSKPTF

SEQ ID NO: 381470 - protein, 14 aa, Homo sapiens
  CDR3 for beta chain variable domain of TCR clone 190735 (TRBV20-1, TRBJ2-7)
CSAKRGRSSYEQYF

SEQ ID NO: 381471 - protein, 15 aa, Homo sapiens
  CDR3 for alpha chain variable domain of TCR clone 190736 (TRAV12-2, TRAJ53)
CAVNGGGGSNDKLTF

SEQ ID NO: 381472 - protein, 14 aa, Homo sapiens
  CDR3 for beta chain variable domain of TCR clone 190736 (TRBV11-2, TRBJ2-5)
CASSRTGGIETQYF

SEQ ID NO: 381473 - protein, 13 aa, Homo sapiens
  CDR3 for alpha chain variable domain of TCR clone 190737 (TRAV26-1, TRAJ20)
CIVRVDSDYKLSF

SEQ ID NO: 381474 - protein, 11 aa, Homo sapiens
  CDR3 for beta chain variable domain of TCR clone 190737 (TRBV7-3, TRBJ2-2)
CASSLNSGGLV

SEQ ID NO: 381475 - protein, 14 aa, Homo sapiens
  CDR3 for alpha chain variable domain of TCR clone 190738 (TRAV25, TRAJ39)
CGRSNNNAGNMLTF

SEQ ID NO: 381476 - protein, 14 aa, Homo sapiens
  CDR3 for beta chain variable domain of TCR clone 190738 (TRBV7-8, TRBJ2-3)
CASSFKSSTDTQYF

SEQ ID NO: 381477 - protein, 18 aa, Homo sapiens
  CDR3 for alpha chain variable domain of TCR clone 190739 (TRAV14/DV4, TRAJ15)
CAMREFPPTGQAGTALIF

SEQ ID NO: 381478 - protein, 14 aa, Homo sapiens
  CDR3 for beta chain variable domain of TCR clone 190739 (TRBV7-9, TRBJ1-4)
CASSLEGQSEKLFF

SEQ ID NO: 381479 - protein, 13 aa, Homo sapiens
  CDR3 for alpha chain variable domain of TCR clone 190740 (TRAV35, TRAJ48)
CAGHEFGNENLTF

SEQ ID NO: 381480 - protein, 16 aa, Homo sapiens
  CDR3 for beta chain variable domain of TCR clone 190740 (TRBV12-5, TRBJ2-5)
CASGPRTSGNQETQYF

SEQ ID NO: 381481 - protein, 11 aa, Homo sapiens
  CDR3 for alpha chain variable domain of TCR clone 190741 (TRAV27, TRAJ47)
SIVDSGNKLVF

SEQ ID NO: 381482 - protein, 18 aa, Homo sapiens
  CDR3 for beta chain variable domain of TCR clone 190741 (TRBV2, TRBJ2-1)
CASRGLAGGPRTYNEQFF

SEQ ID NO: 381483 - protein, 18 aa, Homo sapiens
  CDR3 for alpha chain variable domain of TCR clone 190742 (TRAV13-1, TRAJ52)
CAAKNPNAGGTSYGKLTF

SEQ ID NO: 381484 - protein, 17 aa, Homo sapiens
  CDR3 for beta chain variable domain of TCR clone 190742 (TRBV4-1, TRBJ2-7)
CASSPCLTSGGVVEQYF

SEQ ID NO: 381485 - protein, 14 aa, Homo sapiens
  CDR3 for alpha chain variable domain of TCR clone 190743 (TRAV29/DV5, TRAJ45)
CAPYSGGGADGLTF

SEQ ID NO: 381486 - protein, 13 aa, Homo sapiens
  CDR3 for beta chain variable domain of TCR clone 190743 (TRBV29-1, TRBJ2-3)
CSATRGGRDTQYC

SEQ ID NO: 381487 - protein, 12 aa, Homo sapiens
  CDR3 for alpha chain variable domain of TCR clone 190744 (TRAV12-3, TRAJ17)
CAMTLTDNKLTF

SEQ ID NO: 381488 - protein, 15 aa, Homo sapiens
  CDR3 for beta chain variable domain of TCR clone 190744 (TRBV20-1, TRBJ2-7)
FSARDRVSGMDEQYF

SEQ ID NO: 381489 - protein, 16 aa, Homo sapiens
  CDR3 for alpha chain variable domain of TCR clone 190745 (TRAV12-2, TRAJ32)
CAVNLGQGCATNKLIF

SEQ ID NO: 381490 - protein, 13 aa, Homo sapiens
  CDR3 for beta chain variable domain of TCR clone 190745 (TRBV9, TRBJ2-2)
CASSPRPAGELFF

SEQ ID NO: 381491 - protein, 14 aa, Homo sapiens
  CDR3 for alpha chain variable domain of TCR clone 190746 (TRAV1-2, TRAJ8)
CAVREDTGFQKLVF

SEQ ID NO: 381492 - protein, 19 aa, Homo sapiens
  CDR3 for beta chain variable domain of TCR clone 190746 (TRBV14, TRBJ2-1)
CASSQDQLWEAPEHNEQFF

SEQ ID NO: 381493 - protein, 16 aa, Homo sapiens
  CDR3 for alpha chain variable domain of TCR clone 190747 (TRAV30, TRAJ24)
CGTEIVDADSWGKFQF

SEQ ID NO: 381494 - protein, 14 aa, Homo sapiens
  CDR3 for beta chain variable domain of TCR clone 190747 (TRBV2, TRBJ2-7)
CASSRDRSSYEQYF

SEQ ID NO: 381495 - protein, 17 aa, Homo sapiens
  CDR3 for alpha chain variable domain of TCR clone 190748 (TRAV12-2, TRAJ6)
CAPQGPPRAGGSYIPTF

SEQ ID NO: 381496 - protein, 15 aa, Homo sapiens
  CDR3 for beta chain variable domain of TCR clone 190748 (TRBV27, TRBJ1-6)
CASSFDRGLGSPLHF

SEQ ID NO: 381497 - protein, 12 aa, Homo sapiens
  CDR3 for alpha chain variable domain of TCR clone 190749 (TRAV12-2, TRAJ36)
CAAPRGANNLFF

SEQ ID NO: 381498 - protein, 15 aa, Homo sapiens
  CDR3 for beta chain variable domain of TCR clone 190749 (TRBV11-2, TRBJ1-3)
CASSLDGTVGNAIYF

SEQ ID NO: 381499 - protein, 16 aa, Homo sapiens
  CDR3 for alpha chain variable domain of TCR clone 190750 (TRAV30, TRAJ24)
CGTEIVDSDSWGKFQF

SEQ ID NO: 381500 - protein, 14 aa, Homo sapiens
  CDR3 for beta chain variable domain of TCR clone 190750 (TRBV7-2, TRBJ1-2)
CASSQTGSTYGYTF

SEQ ID NO: 381501 - protein, 15 aa, Homo sapiens
  CDR3 for alpha chain variable domain of TCR clone 190751 (TRAV21, TRAJ53)
CATLNSGGSNYKLTF

SEQ ID NO: 381502 - protein, 16 aa, Homo sapiens
  CDR3 for beta chain variable domain of TCR clone 190751 (TRBV20-1, TRBJ1-2)
WSASMGQGVANYGYTF

SEQ ID NO: 381503 - protein, 11 aa, Homo sapiens
  CDR3 for alpha chain variable domain of TCR clone 190752 (TRAV2, TRAJ13)
CASGGYQKVTF

SEQ ID NO: 381504 - protein, 12 aa, Homo sapiens
  CDR3 for beta chain variable domain of TCR clone 190752 (TRBV11-2, TRBJ2-2)
CASSLGGGELFF

SEQ ID NO: 381505 - protein, 15 aa, Homo sapiens
  CDR3 for alpha chain variable domain of TCR clone 190753 (TRAV8-3, TRAJ45)
CASSYAGGGADGLTF

SEQ ID NO: 381506 - protein, 14 aa, Homo sapiens
  CDR3 for beta chain variable domain of TCR clone 190753 (TRBV25-1, TRBJ1-1)
CASTHLGGNTEAFF

SEQ ID NO: 381507 - protein, 14 aa, Homo sapiens
  CDR3 for alpha chain variable domain of TCR clone 190754 (TRAV12-2, TRAJ45)
CAVNTGGGADGLTF

SEQ ID NO: 381508 - protein, 14 aa, Homo sapiens
  CDR3 for beta chain variable domain of TCR clone 190754 (TRBV20-1, TRBJ1-1)
CSAMGGTANTEAFF

SEQ ID NO: 381509 - protein, 11 aa, Homo sapiens
  CDR3 for alpha chain variable domain of TCR clone 190755 (TRAV20, TRAJ36)
CCLNWANNLFF

SEQ ID NO: 381510 - protein, 16 aa, Homo sapiens
  CDR3 for beta chain variable domain of TCR clone 190755 (TRBV5-5, TRBJ1-6)
CASSYLSTGFNSPLHF

SEQ ID NO: 381511 - protein, 13 aa, Homo sapiens
  CDR3 for alpha chain variable domain of TCR clone 190756 (TRAV2, TRAJ40)
CAVVTSGTYKYIF

SEQ ID NO: 381512 - protein, 15 aa, Homo sapiens
  CDR3 for beta chain variable domain of TCR clone 190756 (TRBV2, TRBJ1-4)
CASSERRGTNEKLFF

SEQ ID NO: 381513 - protein, 23 aa, Homo sapiens
  CDR3 for alpha chain variable domain of TCR clone 190757 (TRAV26-1, TRAJ38)
CIADNAGNNHIQNPDPAVYQLRD

SEQ ID NO: 381514 - protein, 12 aa, Homo sapiens
  CDR3 for beta chain variable domain of TCR clone 190757 (TRBV11-2, TRBJ2-2)
CASSLGGGELFL

SEQ ID NO: 381515 - protein, 13 aa, Homo sapiens
  CDR3 for alpha chain variable domain of TCR clone 190758 (TRAV3, TRAJ17)
CAVPRAAGNKLTF

SEQ ID NO: 381516 - protein, 19 aa, Homo sapiens
  CDR3 for beta chain variable domain of TCR clone 190758 (TRBV7-2, TRBJ2-3)
CASSFLSRNWGGGTDTQYF

SEQ ID NO: 381517 - protein, 17 aa, Homo sapiens
  CDR3 for alpha chain variable domain of TCR clone 190759 (TRAV26-1, TRAJ22)
CIVRLPSHSGSARQLTF

SEQ ID NO: 381518 - protein, 16 aa, Homo sapiens
  CDR3 for beta chain variable domain of TCR clone 190759 (TRBV28, TRBJ2-1)
CASRRSGRVVGNEQFF

SEQ ID NO: 381519 - protein, 17 aa, Homo sapiens
  CDR3 for alpha chain variable domain of TCR clone 190760 (TRAV26-1, TRAJ21)
CIAKCKFYFGSGTKLNV

SEQ ID NO: 381520 - protein, 15 aa, Homo sapiens
  CDR3 for beta chain variable domain of TCR clone 190760 (TRBV7-2, TRBJ2-1)
CASSSGLAGGNEQFF

SEQ ID NO: 381521 - protein, 15 aa, Homo sapiens
  CDR3 for alpha chain variable domain of TCR clone 190761 (TRAV26-1, TRAJ40)
CIVRVTTSGTYKYIF

SEQ ID NO: 381522 - protein, 12 aa, Homo sapiens
  CDR3 for beta chain variable domain of TCR clone 190761 (TRBV7-9, TRBJ1-4)
FASSTDREKLFF

SEQ ID NO: 381523 - protein, 14 aa, Homo sapiens
  CDR3 for alpha chain variable domain of TCR clone 190762 (TRAV8-4, TRAJ9)
CAVRINTGGFKTIF

SEQ ID NO: 381524 - protein, 15 aa, Homo sapiens
  CDR3 for beta chain variable domain of TCR clone 190762 (TRBV10-2, TRBJ2-6)
CASSEKGIGDKVLNF

SEQ ID NO: 381525 - protein, 11 aa, Homo sapiens
  CDR3 for alpha chain variable domain of TCR clone 190763 (TRAV2, TRAJ13)
CASGGYQKVTF

SEQ ID NO: 381526 - protein, 15 aa, Homo sapiens
  CDR3 for beta chain variable domain of TCR clone 190763 (TRBV6-1, TRBJ2-2)
CASSRLGGDTGELFF

SEQ ID NO: 381527 - protein, 16 aa, Homo sapiens
  CDR3 for alpha chain variable domain of TCR clone 190764 (TRAV8-3, TRAJ48)
CAVGLISNFGNETLTF

SEQ ID NO: 381528 - protein, 13 aa, Homo sapiens
  CDR3 for beta chain variable domain of TCR clone 190764 (TRBV20-1, TRBJ1-5)
CSASWGRSQPQHF

SEQ ID NO: 381529 - protein, 16 aa, Homo sapiens
  CDR3 for alpha chain variable domain of TCR clone 190765 (TRAV30, TRAJ24)
CGTEIVDADSWGKFQF

SEQ ID NO: 381530 - protein, 15 aa, Homo sapiens
  CDR3 for beta chain variable domain of TCR clone 190765 (TRBV7-9, TRBJ1-5)
CASSFGTGNKQPQHF

SEQ ID NO: 381531 - protein, 13 aa, Homo sapiens
  CDR3 for alpha chain variable domain of TCR clone 190766 (TRAV2, TRAJ40)
CAVVTSGTYKYIF

SEQ ID NO: 381532 - protein, 17 aa, Homo sapiens
  CDR3 for beta chain variable domain of TCR clone 190766 (TRBV7-3, TRBJ2-3)
CASSLMKRMRGADTQYY

SEQ ID NO: 381533 - protein, 13 aa, Homo sapiens
  CDR3 for alpha chain variable domain of TCR clone 190767 (TRAV1-2, TRAJ9)
CAALNTGGFKTIF

SEQ ID NO: 381534 - protein, 14 aa, Homo sapiens
  CDR3 for beta chain variable domain of TCR clone 190767 (TRBV4-1, TRBJ1-6)
CASSPGSDSSPLHF

SEQ ID NO: 381535 - protein, 12 aa, Homo sapiens
  CDR3 for alpha chain variable domain of TCR clone 190768 (TRAV8-3, TRAJ26)
CAGDNYGQNFVF

SEQ ID NO: 381536 - protein, 17 aa, Homo sapiens
  CDR3 for beta chain variable domain of TCR clone 190768 (TRBV12-4, TRBJ2-2)
CQQFGSGHPRTDRGAVF

SEQ ID NO: 381537 - protein, 15 aa, Homo sapiens
  CDR3 for alpha chain variable domain of TCR clone 190769 (TRAV35, TRAJ50)
CAGQLRKTSYEKVIF

SEQ ID NO: 381538 - protein, 12 aa, Homo sapiens
  CDR3 for beta chain variable domain of TCR clone 190769 (TRBV5-1, TRBJ2-5)
CASSLGLETQYF

SEQ ID NO: 381539 - protein, 11 aa, Homo sapiens
  CDR3 for alpha chain variable domain of TCR clone 190770 (TRAV3, TRAJ21)
LAVGNFKKFYF

SEQ ID NO: 381540 - protein, 16 aa, Homo sapiens
  CDR3 for beta chain variable domain of TCR clone 190770 (TRBV19, TRBJ2-1)
CASSKAGPSSYNEQFF

SEQ ID NO: 381541 - protein, 15 aa, Homo sapiens
  CDR3 for alpha chain variable domain of TCR clone 190771 (TRAV12-1, TRAJ44)
CVGFVNTGTASKLTF

SEQ ID NO: 381542 - protein, 14 aa, Homo sapiens
  CDR3 for beta chain variable domain of TCR clone 190771 (TRBV7-9, TRBJ2-2)
CASSGLADTGELFF

SEQ ID NO: 381543 - protein, 14 aa, Homo sapiens
  CDR3 for alpha chain variable domain of TCR clone 190772 (TRAV1-2, TRAJ16)
CAVNRFSDGQKLLF

SEQ ID NO: 381544 - protein, 15 aa, Homo sapiens
  CDR3 for beta chain variable domain of TCR clone 190772 (TRBV7-9, TRBJ1-6)
CASSSPGRGNSTLYF

SEQ ID NO: 381545 - protein, 14 aa, Homo sapiens
  CDR3 for alpha chain variable domain of TCR clone 190773 (TRAV1-2, TRAJ8)
CAVREDTGFQKLVF

SEQ ID NO: 381546 - protein, 14 aa, Homo sapiens
  CDR3 for beta chain variable domain of TCR clone 190773 (TRBV12-4, TRBJ2-5)
CQQSPTGLQETQYF

SEQ ID NO: 381547 - protein, 14 aa, Homo sapiens
  CDR3 for alpha chain variable domain of TCR clone 190774 (TRAV38-2/DV8, TRAJ29)
CAYRSRSGNTPLVF

SEQ ID NO: 381548 - protein, 17 aa, Homo sapiens
  CDR3 for beta chain variable domain of TCR clone 190774 (TRBV6-1, TRBJ1-2)
CASSGTHSQRGNYGDTF

SEQ ID NO: 381549 - protein, 12 aa, Homo sapiens
  CDR3 for alpha chain variable domain of TCR clone 190775 (TRAV12-1, TRAJ40)
CVVKVRTYKYIF

SEQ ID NO: 381550 - protein, 16 aa, Homo sapiens
  CDR3 for beta chain variable domain of TCR clone 190775 (TRBV7-3, TRBJ2-2)
CASSLKRGTLSGELFF

SEQ ID NO: 381551 - protein, 10 aa, Homo sapiens
  CDR3 for alpha chain variable domain of TCR clone 190776 (TRAV26-1, TRAJ40)
CIAGTYKNIF

SEQ ID NO: 381552 - protein, 15 aa, Homo sapiens
  CDR3 for beta chain variable domain of TCR clone 190776 (TRBV6-3, TRBJ2-7)
CASSSPGTVFYEQYF

SEQ ID NO: 381553 - protein, 12 aa, Homo sapiens
  CDR3 for alpha chain variable domain of TCR clone 190777 (TRAV13-1, TRAJ20)
YAASMGDYKLSF

SEQ ID NO: 381554 - protein, 15 aa, Homo sapiens
  CDR3 for beta chain variable domain of TCR clone 190777 (TRBV11-3, TRBJ2-3)
CASNGGLDSTDTQYF

SEQ ID NO: 381555 - protein, 18 aa, Homo sapiens
  CDR3 for alpha chain variable domain of TCR clone 190778 (TRAV13-1, TRAJ52)
CAAIKRSAGGTSYGKLTF

SEQ ID NO: 381556 - protein, 13 aa, Homo sapiens
  CDR3 for beta chain variable domain of TCR clone 190778 (TRBV12-4, TRBJ1-2)
CASSLRQGKGYTV

SEQ ID NO: 381557 - protein, 15 aa, Homo sapiens
  CDR3 for alpha chain variable domain of TCR clone 190779 (TRAV39, TRAJ42)
CAVGNYGGSQGNLIF

SEQ ID NO: 381558 - protein, 15 aa, Homo sapiens
  CDR3 for beta chain variable domain of TCR clone 190779 (TRBV10-3, TRBJ1-1)
CAISDLGRANTEAFF

SEQ ID NO: 381559 - protein, 13 aa, Homo sapiens
  CDR3 for alpha chain variable domain of TCR clone 190780 (TRAV35, TRAJ33)
CAGLMDSNYQLIW

SEQ ID NO: 381560 - protein, 13 aa, Homo sapiens
  CDR3 for beta chain variable domain of TCR clone 190780 (TRBV10-3, TRBJ2-1)
CTISEFSGREQFF

SEQ ID NO: 381561 - protein, 14 aa, Homo sapiens
  CDR3 for alpha chain variable domain of TCR clone 190781 (TRAV12-2, TRAJ13)
CAVKKTGGYQKVTF

SEQ ID NO: 381562 - protein, 14 aa, Homo sapiens
  CDR3 for beta chain variable domain of TCR clone 190781 (TRBV7-2, TRBJ2-7)
CASNPKASFYEQYF

SEQ ID NO: 381563 - protein, 13 aa, Homo sapiens
  CDR3 for alpha chain variable domain of TCR clone 190782 (TRAV12-2, TRAJ17)
SATSGAAGNKLTF

SEQ ID NO: 381564 - protein, 14 aa, Homo sapiens
  CDR3 for beta chain variable domain of TCR clone 190782 (TRBV7-2, TRBJ2-5)
CASSLSGGGETQYF

SEQ ID NO: 381565 - protein, 16 aa, Homo sapiens
  CDR3 for alpha chain variable domain of TCR clone 190783 (TRAV3, TRAJ28)
CAVLPRSGAGSYQLTF

SEQ ID NO: 381566 - protein, 13 aa, Homo sapiens
  CDR3 for beta chain variable domain of TCR clone 190783 (TRBV12-4, TRBJ2-5)
CASRLAVQETRYF

SEQ ID NO: 381567 - protein, 13 aa, Homo sapiens
  CDR3 for alpha chain variable domain of TCR clone 190784 (TRAV1-2, TRAJ9)
CAALNTGGFKTIF

SEQ ID NO: 381568 - protein, 13 aa, Homo sapiens
  CDR3 for beta chain variable domain of TCR clone 190784 (TRBV19, TRBJ2-6)
CASSVPGQDGYTF

SEQ ID NO: 381569 - protein, 17 aa, Homo sapiens
  CDR3 for alpha chain variable domain of TCR clone 190785 (TRAV3, TRAJ38)
CAVRDCLNAGNNRKLIW

SEQ ID NO: 381570 - protein, 15 aa, Homo sapiens
  CDR3 for beta chain variable domain of TCR clone 190785 (TRBV27, TRBJ2-1)
CASSNGGGSTNEQFF

SEQ ID NO: 381571 - protein, 10 aa, Homo sapiens
  CDR3 for alpha chain variable domain of TCR clone 190786 (TRAV23/DV6, TRAJ31)
CARGGARLMF

SEQ ID NO: 381572 - protein, 16 aa, Homo sapiens
  CDR3 for beta chain variable domain of TCR clone 190786 (TRBV2, TRBJ2-1)
CASSVGGSLSYNEQFF

SEQ ID NO: 381573 - protein, 14 aa, Homo sapiens
  CDR3 for alpha chain variable domain of TCR clone 190787 (TRAV8-3, TRAJ9)
CAVGYNTGGFKTIF

SEQ ID NO: 381574 - protein, 14 aa, Homo sapiens
  CDR3 for beta chain variable domain of TCR clone 190787 (TRBV7-3, TRBJ2-2)
CASSAGGYTGELFF

SEQ ID NO: 381575 - protein, 13 aa, Homo sapiens
  CDR3 for alpha chain variable domain of TCR clone 190788 (TRAV27, TRAJ56)
CAGKPGANSKLTF

SEQ ID NO: 381576 - protein, 16 aa, Homo sapiens
  CDR3 for beta chain variable domain of TCR clone 190788 (TRBV7-2, TRBJ1-4)
CASSLAPGRRDEKLFF

SEQ ID NO: 381577 - protein, 18 aa, Homo sapiens
  CDR3 for alpha chain variable domain of TCR clone 190789 (TRAV12-3, TRAJ52)
CAMSVGWAGGTSYGKLTF

SEQ ID NO: 381578 - protein, 17 aa, Homo sapiens
  CDR3 for beta chain variable domain of TCR clone 190789 (TRBV13, TRBJ2-3)
CASSLSRVAGGRNTQYF

SEQ ID NO: 381579 - protein, 12 aa, Homo sapiens
  CDR3 for alpha chain variable domain of TCR clone 190790 (TRAV26-1, TRAJ35)
CIGLSFGNVLHC

SEQ ID NO: 381580 - protein, 14 aa, Homo sapiens
  CDR3 for beta chain variable domain of TCR clone 190790 (TRBV19, TRBJ2-1)
CASPTFVLSGEQFL

SEQ ID NO: 381581 - protein, 11 aa, Homo sapiens
  CDR3 for alpha chain variable domain of TCR clone 190791 (TRAV17, TRAJ31)
CATSNNARLMF

SEQ ID NO: 381582 - protein, 16 aa, Homo sapiens
  CDR3 for beta chain variable domain of TCR clone 190791 (TRBV7-6, TRBJ2-1)
CASSAPGPSSYNEQFF

SEQ ID NO: 381583 - protein, 19 aa, Homo sapiens
  CDR3 for alpha chain variable domain of TCR clone 190792 (TRAV29/DV5, TRAJ49)
CSVPLCSKLTVDTCNPFYF

SEQ ID NO: 381584 - protein, 15 aa, Homo sapiens
  CDR3 for beta chain variable domain of TCR clone 190792 (TRBV11-3, TRBJ2-3)
CASLKDGREGDTQYF

SEQ ID NO: 381585 - protein, 12 aa, Homo sapiens
  CDR3 for alpha chain variable domain of TCR clone 190793 (TRAV8-3, TRAJ26)
CAGDNSGQNFVF

SEQ ID NO: 381586 - protein, 16 aa, Homo sapiens
  CDR3 for beta chain variable domain of TCR clone 190793 (TRBV7-8, TRBJ2-6)
CASRVGDSSGANVLTF

SEQ ID NO: 381587 - protein, 16 aa, Homo sapiens
  CDR3 for alpha chain variable domain of TCR clone 190794 (TRAV3, TRAJ15)
CAVRDRTNQAGTALIF

SEQ ID NO: 381588 - protein, 14 aa, Homo sapiens
  CDR3 for beta chain variable domain of TCR clone 190794 (TRBV5-1, TRBJ2-7)
CASSRGESLYEQYF

SEQ ID NO: 381589 - protein, 15 aa, Homo sapiens
  CDR3 for alpha chain variable domain of TCR clone 190795 (TRAV8-3, TRAJ32)
CAVGSYGGATNKLIF

SEQ ID NO: 381590 - protein, 14 aa, Homo sapiens
  CDR3 for beta chain variable domain of TCR clone 190795 (TRBV29-1, TRBJ2-2)
CSVLAETNTGELFF

SEQ ID NO: 381591 - protein, 16 aa, Homo sapiens
  CDR3 for alpha chain variable domain of TCR clone 190796 (TRAV27, TRAJ53)
CAAPEGSGGSNYKLTF

SEQ ID NO: 381592 - protein, 13 aa, Homo sapiens
  CDR3 for beta chain variable domain of TCR clone 190796 (TRBV27, TRBJ2-1)
CASRTLGVGEQFF

SEQ ID NO: 381593 - protein, 17 aa, Homo sapiens
  CDR3 for alpha chain variable domain of TCR clone 190797 (TRAV13-1, TRAJ31)
CAPRDRLMFGDGTQLVV

SEQ ID NO: 381594 - protein, 14 aa, Homo sapiens
  CDR3 for beta chain variable domain of TCR clone 190797 (TRBV12-4, TRBJ2-7)
CASQPGLANYEQYF

SEQ ID NO: 381595 - protein, 16 aa, Homo sapiens
  CDR3 for alpha chain variable domain of TCR clone 190798 (TRAV12-3, TRAJ53)
CAMSPGSGGSNFKLTF

SEQ ID NO: 381596 - protein, 15 aa, Homo sapiens
  CDR3 for beta chain variable domain of TCR clone 190798 (TRBV18, TRBJ2-7)
CASSPSSTGNYEQYF

SEQ ID NO: 381597 - protein, 16 aa, Homo sapiens
  CDR3 for alpha chain variable domain of TCR clone 190799 (TRAV3, TRAJ37)
CAVRGKGSGNTGKLIF

SEQ ID NO: 381598 - protein, 17 aa, Homo sapiens
  CDR3 for beta chain variable domain of TCR clone 190799 (TRBV27, TRBJ2-3)
CASSLNLLQGRPDTQYF

SEQ ID NO: 381599 - protein, 15 aa, Homo sapiens
  CDR3 for alpha chain variable domain of TCR clone 190800 (TRAV26-1, TRAJ56)
CIVRVATGANSKLTF

SEQ ID NO: 381600 - protein, 15 aa, Homo sapiens
  CDR3 for beta chain variable domain of TCR clone 190800 (TRBV27, TRBJ2-7)
CARSPQREGQRGQYF

SEQ ID NO: 381601 - protein, 16 aa, Homo sapiens
  CDR3 for alpha chain variable domain of TCR clone 190801 (TRAV12-3, TRAJ53)
CAMSPGSGGSNYKLTF

SEQ ID NO: 381602 - protein, 16 aa, Homo sapiens
  CDR3 for beta chain variable domain of TCR clone 190801 (TRBV4-2, TRBJ1-1)
CANSQAGFGMNTEAFF

SEQ ID NO: 381603 - protein, 12 aa, Homo sapiens
  CDR3 for alpha chain variable domain of TCR clone 190802 (TRAV3, TRAJ43)
CAVRDPNNDMRF

SEQ ID NO: 381604 - protein, 12 aa, Homo sapiens
  CDR3 for beta chain variable domain of TCR clone 190802 (TRBV24-1, TRBJ1-1)
CATSDADRGAFF

SEQ ID NO: 381605 - protein, 12 aa, Homo sapiens
  CDR3 for alpha chain variable domain of TCR clone 190803 (TRAV13-1, TRAJ21)
CAAKEGLNKFYF

SEQ ID NO: 381606 - protein, 14 aa, Homo sapiens
  CDR3 for beta chain variable domain of TCR clone 190803 (TRBV5-4, TRBJ1-1)
CSSSLDSRRDEAFF

SEQ ID NO: 381607 - protein, 15 aa, Homo sapiens
  CDR3 for alpha chain variable domain of TCR clone 190804 (TRAV29/DV5, TRAJ28)
CAAGYSGAGSDQLTF

SEQ ID NO: 381608 - protein, 18 aa, Homo sapiens
  CDR3 for beta chain variable domain of TCR clone 190804 (TRBV3-1, TRBJ1-2)
CASSQDVIGWNGDYGYTF

SEQ ID NO: 381609 - protein, 17 aa, Homo sapiens
  CDR3 for alpha chain variable domain of TCR clone 190805 (TRAV13-1, TRAJ52)
CAASSGAGGTIYGKLTF

SEQ ID NO: 381610 - protein, 16 aa, Homo sapiens
  CDR3 for beta chain variable domain of TCR clone 190805 (TRBV20-1, TRBJ1-2)
CSASMGQGVANYGYTF

SEQ ID NO: 381611 - protein, 14 aa, Homo sapiens
  CDR3 for alpha chain variable domain of TCR clone 190806 (TRAV12-3, TRAJ9)
CEMSPNTGGFKTIF

SEQ ID NO: 381612 - protein, 12 aa, Homo sapiens
  CDR3 for beta chain variable domain of TCR clone 190806 (TRBV11-2, TRBJ2-2)
CASSLGGGELFF

SEQ ID NO: 381613 - protein, 13 aa, Homo sapiens
  CDR3 for alpha chain variable domain of TCR clone 190807 (TRAV12-1, TRAJ21)
CVVTLYNFNKFYF

SEQ ID NO: 381614 - protein, 11 aa, Homo sapiens
  CDR3 for beta chain variable domain of TCR clone 190807 (TRBV6-3, TRBJ2-3)
CATGQADTQYF

SEQ ID NO: 381615 - protein, 11 aa, Homo sapiens
  CDR3 for alpha chain variable domain of TCR clone 190808 (TRAV12-1, TRAJ33)
CVVNMNYQLIW

SEQ ID NO: 381616 - protein, 11 aa, Homo sapiens
  CDR3 for beta chain variable domain of TCR clone 190808 (TRBV11-2, TRBJ1-1)
CASSINTEAFF

SEQ ID NO: 381617 - protein, 16 aa, Homo sapiens
  CDR3 for alpha chain variable domain of TCR clone 190809 (TRAV13-2, TRAJ37)
CADNIRGSSNTGKLIF

SEQ ID NO: 381618 - protein, 15 aa, Homo sapiens
  CDR3 for beta chain variable domain of TCR clone 190809 (TRBV5-1, TRBJ2-7)
CASSPQGRPLDEQYF

SEQ ID NO: 381619 - protein, 16 aa, Homo sapiens
  CDR3 for alpha chain variable domain of TCR clone 190810 (TRAV2, TRAJ4)
CAVEDRFSGGYNKLIF

SEQ ID NO: 381620 - protein, 13 aa, Homo sapiens
  CDR3 for beta chain variable domain of TCR clone 190810 (TRBV2, TRBJ2-5)
CASSTVRGETQYF

SEQ ID NO: 381621 - protein, 12 aa, Homo sapiens
  CDR3 for alpha chain variable domain of TCR clone 190811 (TRAV1-1, TRAJ8)
CAGGTGFQKLVF

SEQ ID NO: 381622 - protein, 13 aa, Homo sapiens
  CDR3 for beta chain variable domain of TCR clone 190811 (TRBV11-2, TRBJ2-5)
CASSFSSQETQYF

SEQ ID NO: 381623 - protein, 16 aa, Homo sapiens
  CDR3 for alpha chain variable domain of TCR clone 190812 (TRAV23/DV6, TRAJ9)
CAASIGGNTGGFKTIF

SEQ ID NO: 381624 - protein, 14 aa, Homo sapiens
  CDR3 for beta chain variable domain of TCR clone 190812 (TRBV9, TRBJ2-7)
CAISVGVGSYEQYF

SEQ ID NO: 381625 - protein, 14 aa, Homo sapiens
  CDR3 for alpha chain variable domain of TCR clone 190813 (TRAV12-1, TRAJ17)
CVVNYKAAGNKLTF

SEQ ID NO: 381626 - protein, 13 aa, Homo sapiens
  CDR3 for beta chain variable domain of TCR clone 190813 (TRBV2, TRBJ2-7)
CASSVGGSCEQYF

SEQ ID NO: 381627 - protein, 14 aa, Homo sapiens
  CDR3 for alpha chain variable domain of TCR clone 190814 (TRAV21, TRAJ32)
CAVWDGGATNKLIF

SEQ ID NO: 381628 - protein, 15 aa, Homo sapiens
  CDR3 for beta chain variable domain of TCR clone 190814 (TRBV28, TRBJ2-5)
CASSPPWSYQETQYF

SEQ ID NO: 381629 - protein, 11 aa, Homo sapiens
  CDR3 for alpha chain variable domain of TCR clone 190815 (TRAV27, TRAJ45)
CVKGGADGLTF

SEQ ID NO: 381630 - protein, 20 aa, Homo sapiens
  CDR3 for beta chain variable domain of TCR clone 190815 (TRBV7-8, TRBJ2-2)
CASSHLFPGPTIHITGELFF

SEQ ID NO: 381631 - protein, 17 aa, Homo sapiens
  CDR3 for alpha chain variable domain of TCR clone 190816 (TRAV13-1, TRAJ28)
CAASPPYSGAGSYQLTF

SEQ ID NO: 381632 - protein, 15 aa, Homo sapiens
  CDR3 for beta chain variable domain of TCR clone 190816 (TRBV6-5, TRBJ2-1)
CASSYDAGAGNEQFF

SEQ ID NO: 381633 - protein, 15 aa, Homo sapiens
  CDR3 for alpha chain variable domain of TCR clone 190817 (TRAV17, TRAJ57)
CATGPSQGGPEKLVF

SEQ ID NO: 381634 - protein, 15 aa, Homo sapiens
  CDR3 for beta chain variable domain of TCR clone 190817 (TRBV6-3, TRBJ2-7)
CASSSPGTVFYEQYF

SEQ ID NO: 381635 - protein, 14 aa, Homo sapiens
  CDR3 for alpha chain variable domain of TCR clone 190818 (TRAV23/DV6, TRAJ4)
CAANLSGGYNKLIF

SEQ ID NO: 381636 - protein, 11 aa, Homo sapiens
  CDR3 for beta chain variable domain of TCR clone 190818 (TRBV7-9, TRBJ2-3)
CASSPTDKQYC

SEQ ID NO: 381637 - protein, 11 aa, Homo sapiens
  CDR3 for alpha chain variable domain of TCR clone 190819 (TRAV2, TRAJ13)
CASVGYQKVTF

SEQ ID NO: 381638 - protein, 16 aa, Homo sapiens
  CDR3 for beta chain variable domain of TCR clone 190819 (TRBV27, TRBJ2-2)
CASSLSGFWVTGEPFF

SEQ ID NO: 381639 - protein, 15 aa, Homo sapiens
  CDR3 for alpha chain variable domain of TCR clone 190820 (TRAV8-2, TRAJ44)
CVVSPNTGTASKLTF

SEQ ID NO: 381640 - protein, 13 aa, Homo sapiens
  CDR3 for beta chain variable domain of TCR clone 190820 (TRBV7-3, TRBJ2-5)
CASSFRGGETQYF

SEQ ID NO: 381641 - protein, 11 aa, Homo sapiens
  CDR3 for alpha chain variable domain of TCR clone 190821 (TRAV3, TRAJ21)
CAVGNFNKFYF

SEQ ID NO: 381642 - protein, 13 aa, Homo sapiens
  CDR3 for beta chain variable domain of TCR clone 190821 (TRBV20-1, TRBJ1-1)
CSARLGQGTEAFF

SEQ ID NO: 381643 - protein, 14 aa, Homo sapiens
  CDR3 for alpha chain variable domain of TCR clone 190822 (TRAV8-6, TRAJ17)
CAVLPKAAGNKLTF

SEQ ID NO: 381644 - protein, 13 aa, Homo sapiens
  CDR3 for beta chain variable domain of TCR clone 190822 (TRBV20-1, TRBJ1-1)
CSAPPGGHTEAFF

SEQ ID NO: 381645 - protein, 16 aa, Homo sapiens
  CDR3 for alpha chain variable domain of TCR clone 190823 (TRAV38-1, TRAJ39)
CAFMKHYLGAGNMLTF

SEQ ID NO: 381646 - protein, 16 aa, Homo sapiens
  CDR3 for beta chain variable domain of TCR clone 190823 (TRBV6-4, TRBJ1-4)
CASSETGQDPNEKLFF

SEQ ID NO: 381647 - protein, 12 aa, Homo sapiens
  CDR3 for alpha chain variable domain of TCR clone 190824 (TRAV10, TRAJ6)
CVVSEGSYIPTF

SEQ ID NO: 381648 - protein, 15 aa, Homo sapiens
  CDR3 for beta chain variable domain of TCR clone 190824 (TRBV4-3, TRBJ2-7)
CACSQGGRGIYEQYF

SEQ ID NO: 381649 - protein, 12 aa, Homo sapiens
  CDR3 for alpha chain variable domain of TCR clone 190825 (TRAV2, TRAJ9)
CAVGAGGFKTIF

SEQ ID NO: 381650 - protein, 21 aa, Homo sapiens
  CDR3 for beta chain variable domain of TCR clone 190825 (TRBV5-1, TRBJ1-6)
CASSPRGGADSTGGVRSPLHF

SEQ ID NO: 381651 - protein, 15 aa, Homo sapiens
  CDR3 for alpha chain variable domain of TCR clone 190826 (TRAV26-1, TRAJ29)
CIVRVEGPGNTPLLF

SEQ ID NO: 381652 - protein, 14 aa, Homo sapiens
  CDR3 for beta chain variable domain of TCR clone 190826 (TRBV18, TRBJ2-5)
CASSPGVSQETQYF

SEQ ID NO: 381653 - protein, 15 aa, Homo sapiens
  CDR3 for alpha chain variable domain of TCR clone 190827 (TRAV12-1, TRAJ44)
WVVFVNTGTASKLTF

SEQ ID NO: 381654 - protein, 16 aa, Homo sapiens
  CDR3 for beta chain variable domain of TCR clone 190827 (TRBV20-1, TRBJ2-5)
CSPGGTSGGYMETQYF

SEQ ID NO: 381655 - protein, 21 aa, Homo sapiens
  CDR3 for alpha chain variable domain of TCR clone 190828 (TRAV1-1, TRAJ6)
CAVRREEATYLHLEEEPALLF

SEQ ID NO: 381656 - protein, 15 aa, Homo sapiens
  CDR3 for beta chain variable domain of TCR clone 190828 (TRBV6-6, TRBJ2-1)
CATRQGVSSHNEQFF

SEQ ID NO: 381657 - protein, 14 aa, Homo sapiens
  CDR3 for alpha chain variable domain of TCR clone 190829 (TRAV13-1, TRAJ40)
CAASMTSGTYKYIF

SEQ ID NO: 381658 - protein, 15 aa, Homo sapiens
  CDR3 for beta chain variable domain of TCR clone 190829 (TRBV7-3, TRBJ2-1)
CASSPTGGGEVEQYF

SEQ ID NO: 381659 - protein, 16 aa, Homo sapiens
  CDR3 for alpha chain variable domain of TCR clone 190830 (TRAV26-1, TRAJ23)
CIVRVASYNQGGKLIF

SEQ ID NO: 381660 - protein, 15 aa, Homo sapiens
  CDR3 for beta chain variable domain of TCR clone 190830 (TRBV9, TRBJ1-6)
CASSVAGTGDSPLHF

SEQ ID NO: 381661 - protein, 14 aa, Homo sapiens
  CDR3 for alpha chain variable domain of TCR clone 190831 (TRAV13-1, TRAJ40)
CAASMTSGTYKYIF

SEQ ID NO: 381662 - protein, 15 aa, Homo sapiens
  CDR3 for beta chain variable domain of TCR clone 190831 (TRBV7-3, TRBJ2-5)
CASSPTGGGEVEQYF

SEQ ID NO: 381663 - protein, 14 aa, Homo sapiens
  CDR3 for alpha chain variable domain of TCR clone 190832 (TRAV12-1, TRAJ23)
CVVNIPNQGGKLIF

SEQ ID NO: 381664 - protein, 15 aa, Homo sapiens
  CDR3 for beta chain variable domain of TCR clone 190832 (TRBV9, TRBJ1-6)
CASSVAGTGDSPLHF

SEQ ID NO: 381665 - protein, 15 aa, Homo sapiens
  CDR3 for alpha chain variable domain of TCR clone 190833 (TRAV12-2, TRAJ43)
CAFDMRFGSGTRLTV

SEQ ID NO: 381666 - protein, 17 aa, Homo sapiens
  CDR3 for beta chain variable domain of TCR clone 190833 (TRBV13, TRBJ2-3)
CASSLSRVAGGRNTQYF

SEQ ID NO: 381667 - protein, 13 aa, Homo sapiens
  CDR3 for alpha chain variable domain of TCR clone 190834 (TRAV2, TRAJ40)
CAVVTSGTYKYIF

SEQ ID NO: 381668 - protein, 15 aa, Homo sapiens
  CDR3 for beta chain variable domain of TCR clone 190834 (TRBV10-3, TRBJ2-1)
CATNGGPGQGDEQFF

SEQ ID NO: 381669 - protein, 11 aa, Homo sapiens
  CDR3 for alpha chain variable domain of TCR clone 190835 (TRAV2, TRAJ13)
CASGGYQKDTF

SEQ ID NO: 381670 - protein, 14 aa, Homo sapiens
  CDR3 for beta chain variable domain of TCR clone 190835 (TRBV7-3, TRBJ2-1)
CASSLAGGTNEQFF

SEQ ID NO: 381671 - protein, 14 aa, Homo sapiens
  CDR3 for alpha chain variable domain of TCR clone 190836 (TRAV3, TRAJ4)
CVVSPSGGYNKLIF

SEQ ID NO: 381672 - protein, 15 aa, Homo sapiens
  CDR3 for beta chain variable domain of TCR clone 190836 (TRBV2, TRBJ2-1)
CASSELAGSYNEQFF

SEQ ID NO: 381673 - protein, 17 aa, Homo sapiens
  CDR3 for alpha chain variable domain of TCR clone 190837 (TRAV3, TRAJ42)
CAVRDRDYGGSQGNLIL

SEQ ID NO: 381674 - protein, 13 aa, Homo sapiens
  CDR3 for beta chain variable domain of TCR clone 190837 (TRBV20-1, TRBJ2-5)
CSARRGTGATQYF

SEQ ID NO: 381675 - protein, 17 aa, Homo sapiens
  CDR3 for alpha chain variable domain of TCR clone 190838 (TRAV8-6, TRAJ58)
CAVSSWVGETSGSRLTF

SEQ ID NO: 381676 - protein, 15 aa, Homo sapiens
  CDR3 for beta chain variable domain of TCR clone 190838 (TRBV5-1, TRBJ2-3)
CASSVTSGSTDTQYF

SEQ ID NO: 381677 - protein, 15 aa, Homo sapiens
  CDR3 for alpha chain variable domain of TCR clone 190839 (TRAV21, TRAJ45)
CAVSYSGGGADRLTF

SEQ ID NO: 381678 - protein, 13 aa, Homo sapiens
  CDR3 for beta chain variable domain of TCR clone 190839 (TRBV20-1, TRBJ2-5)
CSAATGLQETQYF

SEQ ID NO: 381679 - protein, 14 aa, Homo sapiens
  CDR3 for alpha chain variable domain of TCR clone 190840 (TRAV8-4, TRAJ13)
CAVTLSGGYQKVTF

SEQ ID NO: 381680 - protein, 16 aa, Homo sapiens
  CDR3 for beta chain variable domain of TCR clone 190840 (TRBV19, TRBJ2-2)
CARRSPGTGATGELFF

SEQ ID NO: 381681 - protein, 16 aa, Homo sapiens
  CDR3 for alpha chain variable domain of TCR clone 190841 (TRAV14/DV4, TRAJ54)
CAMREGRIQGAQKLVF

SEQ ID NO: 381682 - protein, 15 aa, Homo sapiens
  CDR3 for beta chain variable domain of TCR clone 190841 (TRBV5-1, TRBJ2-3)
CASSVTSGSTDTQYF

SEQ ID NO: 381683 - protein, 13 aa, Homo sapiens
  CDR3 for alpha chain variable domain of TCR clone 190842 (TRAV12-3, TRAJ6)
CANPSGGSYIPKF

SEQ ID NO: 381684 - protein, 14 aa, Homo sapiens
  CDR3 for beta chain variable domain of TCR clone 190842 (TRBV19, TRBJ1-1)
CASSRDRDATEAFF

SEQ ID NO: 381685 - protein, 15 aa, Homo sapiens
  CDR3 for alpha chain variable domain of TCR clone 190843 (TRAV2, TRAJ13)
CAVEPEFWGLPESYL

SEQ ID NO: 381686 - protein, 13 aa, Homo sapiens
  CDR3 for beta chain variable domain of TCR clone 190843 (TRBV20-1, TRBJ2-2)
CSASAAGTGELFF

SEQ ID NO: 381687 - protein, 14 aa, Homo sapiens
  CDR3 for alpha chain variable domain of TCR clone 190844 (TRAV21, TRAJ56)
CAVRLHWSNSKLTC

SEQ ID NO: 381688 - protein, 14 aa, Homo sapiens
  CDR3 for beta chain variable domain of TCR clone 190844 (TRBV19, TRBJ2-1)
CASEVTGARNEQFF

SEQ ID NO: 381689 - protein, 15 aa, Homo sapiens
  CDR3 for alpha chain variable domain of TCR clone 190845 (TRAV17, TRAJ57)
CATGPSQGGSEKLVF

SEQ ID NO: 381690 - protein, 16 aa, Homo sapiens
  CDR3 for beta chain variable domain of TCR clone 190845 (TRBV4-1, TRBJ1-4)
CASSQDLRRGGEKLFF

SEQ ID NO: 381691 - protein, 14 aa, Homo sapiens
  CDR3 for alpha chain variable domain of TCR clone 190846 (TRAV17, TRAJ57)
CATDTQGGSEKLVF

SEQ ID NO: 381692 - protein, 15 aa, Homo sapiens
  CDR3 for beta chain variable domain of TCR clone 190846 (TRBV12-4, TRBJ1-2)
CASRLGVAGNYGYTF

SEQ ID NO: 381693 - protein, 12 aa, Homo sapiens
  CDR3 for alpha chain variable domain of TCR clone 190847 (TRAV1-2, TRAJ42)
CVAGGSQGNLIL

SEQ ID NO: 381694 - protein, 12 aa, Homo sapiens
  CDR3 for beta chain variable domain of TCR clone 190847 (TRBV24-1, TRBJ1-1)
CATSDSDRGAFF

SEQ ID NO: 381695 - protein, 19 aa, Homo sapiens
  CDR3 for alpha chain variable domain of TCR clone 190848 (TRAV16, TRAJ26)
CAPEELWSEFCLWSRSQIF

SEQ ID NO: 381696 - protein, 15 aa, Homo sapiens
  CDR3 for beta chain variable domain of TCR clone 190848 (TRBV7-2, TRBJ2-3)
CASSLTGTSTDTQYF

SEQ ID NO: 381697 - protein, 11 aa, Homo sapiens
  CDR3 for alpha chain variable domain of TCR clone 190849 (TRAV2, TRAJ13)
CASGGYQKVTF

SEQ ID NO: 381698 - protein, 14 aa, Homo sapiens
  CDR3 for beta chain variable domain of TCR clone 190849 (TRBV7-2, TRBJ2-3)
CASSFVMPTDTQYF

SEQ ID NO: 381699 - protein, 11 aa, Homo sapiens
  CDR3 for alpha chain variable domain of TCR clone 190850 (TRAV13-2, TRAJ49)
CAVPTGNQFYF

SEQ ID NO: 381700 - protein, 16 aa, Homo sapiens
  CDR3 for beta chain variable domain of TCR clone 190850 (TRBV2, TRBJ2-1)
CASSVGGSLSYNEQFF

SEQ ID NO: 381701 - protein, 14 aa, Homo sapiens
  CDR3 for alpha chain variable domain of TCR clone 190851 (TRAV12-3, TRAJ13)
CAMRNSGGYQKVTF

SEQ ID NO: 381702 - protein, 14 aa, Homo sapiens
  CDR3 for beta chain variable domain of TCR clone 190851 (TRBV4-1, TRBJ1-6)
CASSLGSDSSPLHF

SEQ ID NO: 381703 - protein, 12 aa, Homo sapiens
  CDR3 for alpha chain variable domain of TCR clone 190852 (TRAV12-3, TRAJ17)
CAMTLTGNKLTF

SEQ ID NO: 381704 - protein, 15 aa, Homo sapiens
  CDR3 for beta chain variable domain of TCR clone 190852 (TRBV7-3, TRBJ2-2)
CASSLTGQGTGELFF

SEQ ID NO: 381705 - protein, 12 aa, Homo sapiens
  CDR3 for alpha chain variable domain of TCR clone 190853 (TRAV35, TRAJ49)
CAGCNTGNQFYF

SEQ ID NO: 381706 - protein, 14 aa, Homo sapiens
  CDR3 for beta chain variable domain of TCR clone 190853 (TRBV6-1, TRBJ1-3)
CASVQGGGGNTIYF

SEQ ID NO: 381707 - protein, 13 aa, Homo sapiens
  CDR3 for alpha chain variable domain of TCR clone 190854 (TRAV21, TRAJ57)
FAVTQGGSEKLVF

SEQ ID NO: 381708 - protein, 11 aa, Homo sapiens
  CDR3 for beta chain variable domain of TCR clone 190854 (TRBV11-2, TRBJ2-2)
CASSLPGELFF

SEQ ID NO: 381709 - protein, 16 aa, Homo sapiens
  CDR3 for alpha chain variable domain of TCR clone 190855 (TRAV16, TRAJ42)
CARKMNNGGSQGNLIF

SEQ ID NO: 381710 - protein, 13 aa, Homo sapiens
  CDR3 for beta chain variable domain of TCR clone 190855 (TRBV20-1, TRBJ2-7)
CSASPPSSYEQYF

SEQ ID NO: 381711 - protein, 11 aa, Homo sapiens
  CDR3 for alpha chain variable domain of TCR clone 190856 (TRAV2, TRAJ33)
CAVDSNYQLIW

SEQ ID NO: 381712 - protein, 12 aa, Homo sapiens
  CDR3 for beta chain variable domain of TCR clone 190856 (TRBV25-1, TRBJ1-1)
CASRHMNTEAFF

SEQ ID NO: 381713 - protein, 13 aa, Homo sapiens
  CDR3 for alpha chain variable domain of TCR clone 190857 (TRAV8-6, TRAJ49)
CAVITKTGNQFYF

SEQ ID NO: 381714 - protein, 14 aa, Homo sapiens
  CDR3 for beta chain variable domain of TCR clone 190857 (TRBV7-2, TRBJ2-7)
CASRSQGAAYEQYF

SEQ ID NO: 381715 - protein, 13 aa, Homo sapiens
  CDR3 for alpha chain variable domain of TCR clone 190858 (TRAV25, TRAJ16)
CAGRTASSCSLQG

SEQ ID NO: 381716 - protein, 18 aa, Homo sapiens
  CDR3 for beta chain variable domain of TCR clone 190858 (TRBV6-5, TRBJ1-1)
CTSVPALFDGLLNTEAFF

SEQ ID NO: 381717 - protein, 14 aa, Homo sapiens
  CDR3 for alpha chain variable domain of TCR clone 190859 (TRAV12-3, TRAJ6)
CAMSATGGSYIPTF

SEQ ID NO: 381718 - protein, 16 aa, Homo sapiens
  CDR3 for beta chain variable domain of TCR clone 190859 (TRBV4-2, TRBJ2-1)
CASSPRAGRGANEQFF

SEQ ID NO: 381719 - protein, 11 aa, Homo sapiens
  CDR3 for alpha chain variable domain of TCR clone 190860 (TRAV13-1, TRAJ44)
PQTGTASKLTF

SEQ ID NO: 381720 - protein, 16 aa, Homo sapiens
  CDR3 for beta chain variable domain of TCR clone 190860 (TRBV19, TRBJ2-1)
CASSKAGPSSYNEQFF

SEQ ID NO: 381721 - protein, 15 aa, Homo sapiens
  CDR3 for alpha chain variable domain of TCR clone 190861 (TRAV4, TRAJ26)
CLVGDMDNYGQNFVF

SEQ ID NO: 381722 - protein, 16 aa, Homo sapiens
  CDR3 for beta chain variable domain of TCR clone 190861 (TRBV28, TRBJ1-4)
CASSSRTGAANEKLFF

SEQ ID NO: 381723 - protein, 18 aa, Homo sapiens
  CDR3 for alpha chain variable domain of TCR clone 190862 (TRAV12-3, TRAJ52)
CAMSVGGAGGTSYGKLTF

SEQ ID NO: 381724 - protein, 14 aa, Homo sapiens
  CDR3 for beta chain variable domain of TCR clone 190862 (TRBV19, TRBJ2-2)
CATTGHANTGELFF

SEQ ID NO: 381725 - protein, 12 aa, Homo sapiens
  CDR3 for alpha chain variable domain of TCR clone 190863 (TRAV20, TRAJ33)
CAVRGSNYQLIW

SEQ ID NO: 381726 - protein, 14 aa, Homo sapiens
  CDR3 for beta chain variable domain of TCR clone 190863 (TRBV19, TRBJ2-3)
CASSAPRGTDTQYF

SEQ ID NO: 381727 - protein, 13 aa, Homo sapiens
  CDR3 for alpha chain variable domain of TCR clone 190864 (TRAV27, TRAJ23)
CRSFLYQGGKLIF

SEQ ID NO: 381728 - protein, 15 aa, Homo sapiens
  CDR3 for beta chain variable domain of TCR clone 190864 (TRBV20-1, TRBJ2-7)
CSARDRVSGMDEQYF

SEQ ID NO: 381729 - protein, 16 aa, Homo sapiens
  CDR3 for alpha chain variable domain of TCR clone 190865 (TRAV8-3, TRAJ44)
CAVGASNTGTASKLTF

SEQ ID NO: 381730 - protein, 12 aa, Homo sapiens
  CDR3 for beta chain variable domain of TCR clone 190865 (TRBV11-2, TRBJ2-2)
CASSLGGGELFF

SEQ ID NO: 381731 - protein, 15 aa, Homo sapiens
  CDR3 for alpha chain variable domain of TCR clone 190866 (TRAV21, TRAJ53)
WATLNSGGSNYKLTF

SEQ ID NO: 381732 - protein, 16 aa, Homo sapiens
  CDR3 for beta chain variable domain of TCR clone 190866 (TRBV9, TRBJ2-1)
CASSVGGGGNYNEQFF

SEQ ID NO: 381733 - protein, 14 aa, Homo sapiens
  CDR3 for alpha chain variable domain of TCR clone 190867 (TRAV12-2, TRAJ53)
CAVKGGGSNYKLTF

SEQ ID NO: 381734 - protein, 16 aa, Homo sapiens
  CDR3 for beta chain variable domain of TCR clone 190867 (TRBV7-9, TRBJ1-2)
CASSLGFSSGEDGYTF

SEQ ID NO: 381735 - protein, 13 aa, Homo sapiens
  CDR3 for alpha chain variable domain of TCR clone 190868 (TRAV8-6, TRAJ49)
CAVITNTGNQFYF

SEQ ID NO: 381736 - protein, 10 aa, Homo sapiens
  CDR3 for beta chain variable domain of TCR clone 190868 (TRBV20-1, TRBJ2-7)
CSEGYYEQYF

SEQ ID NO: 381737 - protein, 13 aa, Homo sapiens
  CDR3 for alpha chain variable domain of TCR clone 190869 (TRAV16, TRAJ28)
CALTGAGSYQLTF

SEQ ID NO: 381738 - protein, 16 aa, Homo sapiens
  CDR3 for beta chain variable domain of TCR clone 190869 (TRBV28, TRBJ1-5)
CASSLTGQSWNQPQHF

SEQ ID NO: 381739 - protein, 16 aa, Homo sapiens
  CDR3 for alpha chain variable domain of TCR clone 190870 (TRAV12-2, TRAJ18)
CAVPASGGSTLGRLYF

SEQ ID NO: 381740 - protein, 11 aa, Homo sapiens
  CDR3 for beta chain variable domain of TCR clone 190870 (TRBV10-2, TRBJ2-7)
CASGGGDEQYF

SEQ ID NO: 381741 - protein, 15 aa, Homo sapiens
  CDR3 for alpha chain variable domain of TCR clone 190871 (TRAV12-3, TRAJ6)
CAMSATSGGSYIPTF

SEQ ID NO: 381742 - protein, 11 aa, Homo sapiens
  CDR3 for beta chain variable domain of TCR clone 190871 (TRBV6-4, TRBJ2-1)
CASSDSYAEFF

SEQ ID NO: 381743 - protein, 15 aa, Homo sapiens
  CDR3 for alpha chain variable domain of TCR clone 190872 (TRAV8-1, TRAJ6)
CAVNAGAGGSYIPTF

SEQ ID NO: 381744 - protein, 15 aa, Homo sapiens
  CDR3 for beta chain variable domain of TCR clone 190872 (TRBV28, TRBJ2-1)
CASSGLAEVDNEQFF

SEQ ID NO: 381745 - protein, 13 aa, Homo sapiens
  CDR3 for alpha chain variable domain of TCR clone 190873 (TRAV8-3, TRAJ31)
CAVGGRNNARLMF

SEQ ID NO: 381746 - protein, 14 aa, Homo sapiens
  CDR3 for beta chain variable domain of TCR clone 190873 (TRBV12-5, TRBJ2-5)
CASGSRTHQETQYY

SEQ ID NO: 381747 - protein, 14 aa, Homo sapiens
  CDR3 for alpha chain variable domain of TCR clone 190874 (TRAV29/DV5, TRAJ36)
CAARRKTGANNLFF

SEQ ID NO: 381748 - protein, 15 aa, Homo sapiens
  CDR3 for beta chain variable domain of TCR clone 190874 (TRBV11-2, TRBJ2-1)
CASSLTSGGYNEQFF

SEQ ID NO: 381749 - protein, 15 aa, Homo sapiens
  CDR3 for alpha chain variable domain of TCR clone 190875 (TRAV30, TRAJ13)
CGTQGVTGGYQKVTF

SEQ ID NO: 381750 - protein, 12 aa, Homo sapiens
  CDR3 for beta chain variable domain of TCR clone 190875 (TRBV11-2, TRBJ2-1)
CASSPGNNEQFF

SEQ ID NO: 381751 - protein, 13 aa, Homo sapiens
  CDR3 for alpha chain variable domain of TCR clone 190876 (TRAV8-4, TRAJ21)
CSVSDPGFNKFYF

SEQ ID NO: 381752 - protein, 12 aa, Homo sapiens
  CDR3 for beta chain variable domain of TCR clone 190876 (TRBV11-2, TRBJ2-1)
CASSPGNNEQFF

SEQ ID NO: 381753 - protein, 14 aa, Homo sapiens
  CDR3 for alpha chain variable domain of TCR clone 190877 (TRAV12-2, TRAJ45)
CAAYSGGGADGLTF

SEQ ID NO: 381754 - protein, 15 aa, Homo sapiens
  CDR3 for beta chain variable domain of TCR clone 190877 (TRBV12-4, TRBJ1-1)
CASSSSGTGNTEAFF

SEQ ID NO: 381755 - protein, 14 aa, Homo sapiens
  CDR3 for alpha chain variable domain of TCR clone 190878 (TRAV12-1, TRAJ43)
CVVNGRSNNNDMRF

SEQ ID NO: 381756 - protein, 14 aa, Homo sapiens
  CDR3 for beta chain variable domain of TCR clone 190878 (TRBV5-1, TRBJ2-2)
CASSLGLAVGELFF

SEQ ID NO: 381757 - protein, 18 aa, Homo sapiens
  CDR3 for alpha chain variable domain of TCR clone 190879 (TRAV26-1, TRAJ22)
CTVRVALISSGSASQLTF

SEQ ID NO: 381758 - protein, 13 aa, Homo sapiens
  CDR3 for beta chain variable domain of TCR clone 190879 (TRBV13, TRBJ2-5)
CASSPEVGETQYF

SEQ ID NO: 381759 - protein, 17 aa, Homo sapiens
  CDR3 for alpha chain variable domain of TCR clone 190880 (TRAV3, TRAJ6)
CAVRDGPRAGVSYIPTF

SEQ ID NO: 381760 - protein, 16 aa, Homo sapiens
  CDR3 for beta chain variable domain of TCR clone 190880 (TRBV7-9, TRBJ1-3)
CASSQTSGLRMGTIYF

SEQ ID NO: 381761 - protein, 16 aa, Homo sapiens
  CDR3 for alpha chain variable domain of TCR clone 190881 (TRAV16, TRAJ4)
CALSRMFSGGYNKLIF

SEQ ID NO: 381762 - protein, 16 aa, Homo sapiens
  CDR3 for beta chain variable domain of TCR clone 190881 (TRBV19, TRBJ2-1)
CASSMGGGSSYNEQFF

SEQ ID NO: 381763 - protein, 19 aa, Homo sapiens
  CDR3 for alpha chain variable domain of TCR clone 190882 (TRAV17, TRAJ42)
CFLLLCYGPGGGSQGNLIF

SEQ ID NO: 381764 - protein, 13 aa, Homo sapiens
  CDR3 for beta chain variable domain of TCR clone 190882 (TRBV7-9, TRBJ2-3)
CTSSPGSTDTQYF

SEQ ID NO: 381765 - protein, 14 aa, Homo sapiens
  CDR3 for alpha chain variable domain of TCR clone 190883 (TRAV13-1, TRAJ9)
CAASALTGGFKTIF

SEQ ID NO: 381766 - protein, 13 aa, Homo sapiens
  CDR3 for beta chain variable domain of TCR clone 190883 (TRBV20-1, TRBJ1-1)
CSAGTVGNAEAFL

SEQ ID NO: 381767 - protein, 12 aa, Homo sapiens
  CDR3 for alpha chain variable domain of TCR clone 190884 (TRAV13-1, TRAJ11)
CAGPSGYSSLTF

SEQ ID NO: 381768 - protein, 13 aa, Homo sapiens
  CDR3 for beta chain variable domain of TCR clone 190884 (TRBV12-4, TRBJ1-5)
CASSPDRAQPQHF

SEQ ID NO: 381769 - protein, 15 aa, Homo sapiens
  CDR3 for alpha chain variable domain of TCR clone 190885 (TRAV8-6, TRAJ40)
CAVSEAPSGTYKYTF

SEQ ID NO: 381770 - protein, 14 aa, Homo sapiens
  CDR3 for beta chain variable domain of TCR clone 190885 (TRBV6-5, TRBJ2-7)
CASSTSGGNYEQYF

SEQ ID NO: 381771 - protein, 17 aa, Homo sapiens
  CDR3 for alpha chain variable domain of TCR clone 190886 (TRAV3, TRAJ6)
CAVRDGPRAGGSYIPTF

SEQ ID NO: 381772 - protein, 14 aa, Homo sapiens
  CDR3 for beta chain variable domain of TCR clone 190886 (TRBV7-2, TRBJ2-7)
CASSPETSFCEQYF

SEQ ID NO: 381773 - protein, 14 aa, Homo sapiens
  CDR3 for alpha chain variable domain of TCR clone 190887 (TRAV12-3, TRAJ10)
SHLPLTGGGNKLTF

SEQ ID NO: 381774 - protein, 13 aa, Homo sapiens
  CDR3 for beta chain variable domain of TCR clone 190887 (TRBV12-4, TRBJ2-5)
CASSPGTEETQYF

SEQ ID NO: 381775 - protein, 11 aa, Homo sapiens
  CDR3 for alpha chain variable domain of TCR clone 190888 (TRAV35, TRAJ34)
CWARNTDKLIL

SEQ ID NO: 381776 - protein, 13 aa, Homo sapiens
  CDR3 for beta chain variable domain of TCR clone 190888 (TRBV19, TRBJ2-7)
CASSIDRTYEQYF

SEQ ID NO: 381777 - protein, 15 aa, Homo sapiens
  CDR3 for alpha chain variable domain of TCR clone 190889 (TRAV38-1, TRAJ37)
CAFIFGSGNTGNLIF

SEQ ID NO: 381778 - protein, 15 aa, Homo sapiens
  CDR3 for beta chain variable domain of TCR clone 190889 (TRBV28, TRBJ2-7)
CASSPGGRGFYEQYF

SEQ ID NO: 381779 - protein, 13 aa, Homo sapiens
  CDR3 for alpha chain variable domain of TCR clone 190890 (TRAV27, TRAJ45)
CRSSGGGADGLTF

SEQ ID NO: 381780 - protein, 13 aa, Homo sapiens
  CDR3 for beta chain variable domain of TCR clone 190890 (TRBV2, TRBJ2-2)
CASRAWRTGELFF

SEQ ID NO: 381781 - protein, 13 aa, Homo sapiens
  CDR3 for alpha chain variable domain of TCR clone 190891 (TRAV21, TRAJ27)
CAARPGNEGKSTF

SEQ ID NO: 381782 - protein, 16 aa, Homo sapiens
  CDR3 for beta chain variable domain of TCR clone 190891 (TRBV20-1, TRBJ1-2)
CSASMGQGVANYGYTF

SEQ ID NO: 381783 - protein, 13 aa, Homo sapiens
  CDR3 for alpha chain variable domain of TCR clone 190892 (TRAV1-2, TRAJ12)
CAVSMDSRYKLIF

SEQ ID NO: 381784 - protein, 15 aa, Homo sapiens
  CDR3 for beta chain variable domain of TCR clone 190892 (TRBV27, TRBJ2-5)
CASSLIPSGGETQYF

SEQ ID NO: 381785 - protein, 17 aa, Homo sapiens
  CDR3 for alpha chain variable domain of TCR clone 190893 (TRAV3, TRAJ6)
CAVGDGPRAGGSYIPTF

SEQ ID NO: 381786 - protein, 14 aa, Homo sapiens
  CDR3 for beta chain variable domain of TCR clone 190893 (TRBV7-2, TRBJ2-7)
CASSPKTSFYEQHF

SEQ ID NO: 381787 - protein, 14 aa, Homo sapiens
  CDR3 for alpha chain variable domain of TCR clone 190894 (TRAV1-2, TRAJ12)
CAMSGTDSSYKLIF

SEQ ID NO: 381788 - protein, 15 aa, Homo sapiens
  CDR3 for beta chain variable domain of TCR clone 190894 (TRBV2, TRBJ2-4)
CASSGTNLAKNIQYF

SEQ ID NO: 381789 - protein, 12 aa, Homo sapiens
  CDR3 for alpha chain variable domain of TCR clone 190895 (TRAV12-1, TRAJ50)
CVGRTSYDKVIF

SEQ ID NO: 381790 - protein, 12 aa, Homo sapiens
  CDR3 for beta chain variable domain of TCR clone 190895 (TRBV11-2, TRBJ2-2)
CASSLGGGELFF

SEQ ID NO: 381791 - protein, 12 aa, Homo sapiens
  CDR3 for alpha chain variable domain of TCR clone 190896 (TRAV29/DV5, TRAJ22)
CAASGSARQLTF

SEQ ID NO: 381792 - protein, 13 aa, Homo sapiens
  CDR3 for beta chain variable domain of TCR clone 190896 (TRBV2, TRBJ1-5)
CATAGPGNQPQHF

SEQ ID NO: 381793 - protein, 13 aa, Homo sapiens
  CDR3 for alpha chain variable domain of TCR clone 190897 (TRAV3, TRAJ21)
CAVGEPDFNKFYF

SEQ ID NO: 381794 - protein, 18 aa, Homo sapiens
  CDR3 for beta chain variable domain of TCR clone 190897 (TRBV20-1, TRBJ2-6)
CSAETTPTHGAGANVLTF

SEQ ID NO: 381795 - protein, 15 aa, Homo sapiens
  CDR3 for alpha chain variable domain of TCR clone 190898 (TRAV27, TRAJ38)
CAGRFNAGNNRKLIW

SEQ ID NO: 381796 - protein, 15 aa, Homo sapiens
  CDR3 for beta chain variable domain of TCR clone 190898 (TRBV20-1, TRBJ2-7)
CSARVPAAYFYEQYF

SEQ ID NO: 381797 - protein, 17 aa, Homo sapiens
  CDR3 for alpha chain variable domain of TCR clone 190899 (TRAV26-1, TRAJ11)
CIVRVGQSNSGYSTLTF

SEQ ID NO: 381798 - protein, 15 aa, Homo sapiens
  CDR3 for beta chain variable domain of TCR clone 190899 (TRBV27, TRBJ2-5)
CASSLIPFGGETQYF

SEQ ID NO: 381799 - protein, 13 aa, Homo sapiens
  CDR3 for alpha chain variable domain of TCR clone 190900 (TRAV20, TRAJ21)
CAVEGYNFNKFYF

SEQ ID NO: 381800 - protein, 14 aa, Homo sapiens
  CDR3 for beta chain variable domain of TCR clone 190900 (TRBV7-8, TRBJ2-3)
CASSFADGKDTQYF

SEQ ID NO: 381801 - protein, 16 aa, Homo sapiens
  CDR3 for alpha chain variable domain of TCR clone 190901 (TRAV21, TRAJ52)
CAVSDAGGTSYGKLTF

SEQ ID NO: 381802 - protein, 15 aa, Homo sapiens
  CDR3 for beta chain variable domain of TCR clone 190901 (TRBV20-1, TRBJ2-7)
CSARDRVSGMDEQYF

SEQ ID NO: 381803 - protein, 14 aa, Homo sapiens
  CDR3 for alpha chain variable domain of TCR clone 190902 (TRAV1-2, TRAJ16)
CAVNRFSDGQKLLF

SEQ ID NO: 381804 - protein, 13 aa, Homo sapiens
  CDR3 for beta chain variable domain of TCR clone 190902 (TRBV7-6, TRBJ1-2)
CASSLVADYSYTC

SEQ ID NO: 381805 - protein, 12 aa, Homo sapiens
  CDR3 for alpha chain variable domain of TCR clone 190903 (TRAV13-1, TRAJ43)
CAAGRFNNDMRF

SEQ ID NO: 381806 - protein, 15 aa, Homo sapiens
  CDR3 for beta chain variable domain of TCR clone 190903 (TRBV20-1, TRBJ2-7)
CSARDRVSGMDEQYF

SEQ ID NO: 381807 - protein, 14 aa, Homo sapiens
  CDR3 for alpha chain variable domain of TCR clone 190904 (TRAV13-1, TRAJ35)
CAASKGGFGNVLHC

SEQ ID NO: 381808 - protein, 14 aa, Homo sapiens
  CDR3 for beta chain variable domain of TCR clone 190904 (TRBV4-1, TRBJ2-2)
CASSQAVNTGELFL

SEQ ID NO: 381809 - protein, 15 aa, Homo sapiens
  CDR3 for alpha chain variable domain of TCR clone 190905 (TRAV13-1, TRAJ49)
CAASTEGNTGNQFYF

SEQ ID NO: 381810 - protein, 12 aa, Homo sapiens
  CDR3 for beta chain variable domain of TCR clone 190905 (TRBV11-2, TRBJ2-2)
CASSRGGGELFF

SEQ ID NO: 381811 - protein, 13 aa, Homo sapiens
  CDR3 for alpha chain variable domain of TCR clone 190906 (TRAV22, TRAJ29)
CAVGGSGNTPLVF

SEQ ID NO: 381812 - protein, 13 aa, Homo sapiens
  CDR3 for beta chain variable domain of TCR clone 190906 (TRBV4-2, TRBJ1-1)
CASSKAVNTEAFF

SEQ ID NO: 381813 - protein, 14 aa, Homo sapiens
  CDR3 for alpha chain variable domain of TCR clone 190907 (TRAV12-3, TRAJ10)
SHLPLTGRGNKLTF

SEQ ID NO: 381814 - protein, 17 aa, Homo sapiens
  CDR3 for beta chain variable domain of TCR clone 190907 (TRBV13, TRBJ2-3)
CASSLSRVAGGRNTQYF

SEQ ID NO: 381815 - protein, 15 aa, Homo sapiens
  CDR3 for alpha chain variable domain of TCR clone 190908 (TRAV12-2, TRAJ53)
CAANGGGGSNYKLTF

SEQ ID NO: 381816 - protein, 17 aa, Homo sapiens
  CDR3 for beta chain variable domain of TCR clone 190908 (TRBV7-3, TRBJ2-3)
SASSLMKRMRGADTQYF

SEQ ID NO: 381817 - protein, 15 aa, Homo sapiens
  CDR3 for alpha chain variable domain of TCR clone 190909 (TRAV38-1, TRAJ57)
CAFMDSQGGSEKLVF

SEQ ID NO: 381818 - protein, 14 aa, Homo sapiens
  CDR3 for beta chain variable domain of TCR clone 190909 (TRBV28, TRBJ2-3)
CASSFVSGTDTQYF

SEQ ID NO: 381819 - protein, 18 aa, Homo sapiens
  CDR3 for alpha chain variable domain of TCR clone 190910 (TRAV1-2, TRAJ18)
CAVRDMGDRGSTLGRLYF

SEQ ID NO: 381820 - protein, 14 aa, Homo sapiens
  CDR3 for beta chain variable domain of TCR clone 190910 (TRBV7-9, TRBJ2-1)
CASSDNSGYNEQFF

SEQ ID NO: 381821 - protein, 15 aa, Homo sapiens
  CDR3 for alpha chain variable domain of TCR clone 190911 (TRAV35, TRAJ50)
CAGQLRKTSYDKVIF

SEQ ID NO: 381822 - protein, 12 aa, Homo sapiens
  CDR3 for beta chain variable domain of TCR clone 190911 (TRBV5-1, TRBJ2-1)
CASSLGLETQYF

SEQ ID NO: 381823 - protein, 15 aa, Homo sapiens
  CDR3 for alpha chain variable domain of TCR clone 190912 (TRAV3, TRAJ5)
CAVRDRKRAGEHFLL

SEQ ID NO: 381824 - protein, 15 aa, Homo sapiens
  CDR3 for beta chain variable domain of TCR clone 190912 (TRBV7-8, TRBJ2-1)
CASSLADSLYNEQFF

SEQ ID NO: 381825 - protein, 12 aa, Homo sapiens
  CDR3 for alpha chain variable domain of TCR clone 190913 (TRAV8-3, TRAJ40)
CAVTSGTYKSIF

SEQ ID NO: 381826 - protein, 14 aa, Homo sapiens
  CDR3 for beta chain variable domain of TCR clone 190913 (TRBV12-4, TRBJ2-3)
CASSGQGSTDTQYF

SEQ ID NO: 381827 - protein, 15 aa, Homo sapiens
  CDR3 for alpha chain variable domain of TCR clone 190914 (TRAV2, TRAJ9)
CAVEDRGTGGFKTIF

SEQ ID NO: 381828 - protein, 16 aa, Homo sapiens
  CDR3 for beta chain variable domain of TCR clone 190914 (TRBV24-1, TRBJ2-3)
CATSDPGRGATDTQYF

SEQ ID NO: 381829 - protein, 13 aa, Homo sapiens
  CDR3 for alpha chain variable domain of TCR clone 190915 (TRAV17, TRAJ26)
CATIDNYGQNFVF

SEQ ID NO: 381830 - protein, 14 aa, Homo sapiens
  CDR3 for beta chain variable domain of TCR clone 190915 (TRBV6-1, TRBJ1-3)
CASVQGGGGNTIYF

SEQ ID NO: 381831 - protein, 11 aa, Homo sapiens
  CDR3 for alpha chain variable domain of TCR clone 190916 (TRAV1-2, TRAJ40)
CAVPGTYKYIF

SEQ ID NO: 381832 - protein, 13 aa, Homo sapiens
  CDR3 for beta chain variable domain of TCR clone 190916 (TRBV7-7, TRBJ2-3)
CASSLSRADTQYF

SEQ ID NO: 381833 - protein, 14 aa, Homo sapiens
  CDR3 for alpha chain variable domain of TCR clone 190917 (TRAV12-1, TRAJ9)
CVVTGYTGGFKAIF

SEQ ID NO: 381834 - protein, 13 aa, Homo sapiens
  CDR3 for beta chain variable domain of TCR clone 190917 (TRBV20-1, TRBJ1-1)
RSARAGGNTEAFF

SEQ ID NO: 381835 - protein, 18 aa, Homo sapiens
  CDR3 for alpha chain variable domain of TCR clone 190918 (TRAV13-1, TRAJ52)
CAAKNPNAGGTSYGNLTF

SEQ ID NO: 381836 - protein, 12 aa, Homo sapiens
  CDR3 for beta chain variable domain of TCR clone 190918 (TRBV7-8, TRBJ2-7)
CASSLGDREQYF

SEQ ID NO: 381837 - protein, 13 aa, Homo sapiens
  CDR3 for alpha chain variable domain of TCR clone 190919 (TRAV16, TRAJ48)
CSPLNFGNEKLTF

SEQ ID NO: 381838 - protein, 11 aa, Homo sapiens
  CDR3 for beta chain variable domain of TCR clone 190919 (TRBV7-9, TRBJ2-3)
CASSHTDTQYF

SEQ ID NO: 381839 - protein, 17 aa, Homo sapiens
  CDR3 for alpha chain variable domain of TCR clone 190920 (TRAV3, TRAJ42)
CAVRDRDYGGSQGNLIF

SEQ ID NO: 381840 - protein, 15 aa, Homo sapiens
  CDR3 for beta chain variable domain of TCR clone 190920 (TRBV27, TRBJ1-6)
CGSSFDRGLGSPLHF

SEQ ID NO: 381841 - protein, 14 aa, Homo sapiens
  CDR3 for alpha chain variable domain of TCR clone 190921 (TRAV3, TRAJ21)
CAVGSQANFNKFYF

SEQ ID NO: 381842 - protein, 14 aa, Homo sapiens
  CDR3 for beta chain variable domain of TCR clone 190921 (TRBV11-2, TRBJ2-1)
CASSLGGSFNEQFF

SEQ ID NO: 381843 - protein, 10 aa, Homo sapiens
  CDR3 for alpha chain variable domain of TCR clone 190922 (TRAV38-2/DV8, TRAJ40)
CASGTYKYIF

SEQ ID NO: 381844 - protein, 16 aa, Homo sapiens
  CDR3 for beta chain variable domain of TCR clone 190922 (TRBV4-3, TRBJ2-2)
CASSHLQGSGTGELFF

SEQ ID NO: 381845 - protein, 13 aa, Homo sapiens
  CDR3 for alpha chain variable domain of TCR clone 190923 (TRAV12-2, TRAJ18)
CAVRGSTLGRLYF

SEQ ID NO: 381846 - protein, 17 aa, Homo sapiens
  CDR3 for beta chain variable domain of TCR clone 190923 (TRBV13, TRBJ2-3)
CASSLSRVAGGRNTQYF

SEQ ID NO: 381847 - protein, 14 aa, Homo sapiens
  CDR3 for alpha chain variable domain of TCR clone 190924 (TRAV1-2, TRAJ16)
YAVNRFSDGQKLLF

SEQ ID NO: 381848 - protein, 14 aa, Homo sapiens
  CDR3 for beta chain variable domain of TCR clone 190924 (TRBV7-2, TRBJ1-1)
CASSFLTGTTEAFF

SEQ ID NO: 381849 - protein, 14 aa, Homo sapiens
  CDR3 for alpha chain variable domain of TCR clone 190925 (TRAV1-2, TRAJ16)
CAVNRFSDGQKRLF

SEQ ID NO: 381850 - protein, 14 aa, Homo sapiens
  CDR3 for beta chain variable domain of TCR clone 190925 (TRBV19, TRBJ2-7)
CASSMGQGAIEQYF

SEQ ID NO: 381851 - protein, 13 aa, Homo sapiens
  CDR3 for alpha chain variable domain of TCR clone 190926 (TRAV8-1, TRAJ39)
CAGLNNAGNMLTF

SEQ ID NO: 381852 - protein, 17 aa, Homo sapiens
  CDR3 for beta chain variable domain of TCR clone 190926 (TRBV19, TRBJ2-3)
CASSIDPAGGGTDTQYL

SEQ ID NO: 381853 - protein, 12 aa, Homo sapiens
  CDR3 for alpha chain variable domain of TCR clone 190927 (TRAV29/DV5, TRAJ34)
CAARHNTDKLIF

SEQ ID NO: 381854 - protein, 15 aa, Homo sapiens
  CDR3 for beta chain variable domain of TCR clone 190927 (TRBV19, TRBJ2-7)
CASSPASSGEALRYF

SEQ ID NO: 381855 - protein, 13 aa, Homo sapiens
  CDR3 for alpha chain variable domain of TCR clone 190928 (TRAV13-2, TRAJ5)
CADSDTGRRALTF

SEQ ID NO: 381856 - protein, 14 aa, Homo sapiens
  CDR3 for beta chain variable domain of TCR clone 190928 (TRBV2, TRBJ1-1)
CASTQVGENTEDFF

SEQ ID NO: 381857 - protein, 16 aa, Homo sapiens
  CDR3 for alpha chain variable domain of TCR clone 190929 (TRAV8-6, TRAJ32)
CAVSDPYGGATNKLIF

SEQ ID NO: 381858 - protein, 13 aa, Homo sapiens
  CDR3 for beta chain variable domain of TCR clone 190929 (TRBV6-4, TRBJ1-5)
CASSGDLNQPQHF

SEQ ID NO: 381859 - protein, 11 aa, Homo sapiens
  CDR3 for alpha chain variable domain of TCR clone 190930 (TRAV12-3, TRAJ41)
CAMNAREAPNF

SEQ ID NO: 381860 - protein, 14 aa, Homo sapiens
  CDR3 for beta chain variable domain of TCR clone 190930 (TRBV4-3, TRBJ1-1)
CASSQGWTPARAFF

SEQ ID NO: 381861 - protein, 16 aa, Homo sapiens
  CDR3 for alpha chain variable domain of TCR clone 190931 (TRAV12-3, TRAJ53)
CAMSVGSGGSNYKLTF

SEQ ID NO: 381862 - protein, 13 aa, Homo sapiens
  CDR3 for beta chain variable domain of TCR clone 190931 (TRBV7-6, TRBJ1-2)
CASSLVTDYGYTF

SEQ ID NO: 381863 - protein, 11 aa, Homo sapiens
  CDR3 for alpha chain variable domain of TCR clone 190932 (TRAV2, TRAJ33)
CAVESNYQLIW

SEQ ID NO: 381864 - protein, 15 aa, Homo sapiens
  CDR3 for beta chain variable domain of TCR clone 190932 (TRBV6-4, TRBJ1-5)
CASSASSRINQPQHF

SEQ ID NO: 381865 - protein, 18 aa, Homo sapiens
  CDR3 for alpha chain variable domain of TCR clone 190933 (TRAV26-1, TRAJ23)
CIVRVGLEVWNQGGKLIF

SEQ ID NO: 381866 - protein, 12 aa, Homo sapiens
  CDR3 for beta chain variable domain of TCR clone 190933 (TRBV12-4, TRBJ1-2)
CASSSIWLHLRF

SEQ ID NO: 381867 - protein, 18 aa, Homo sapiens
  CDR3 for alpha chain variable domain of TCR clone 190934 (TRAV12-1, TRAJ52)
CVVKLINAGGTSYGKLTF

SEQ ID NO: 381868 - protein, 16 aa, Homo sapiens
  CDR3 for beta chain variable domain of TCR clone 190934 (TRBV7-6, TRBJ2-7)
CASCGGTGALSYEQYF

SEQ ID NO: 381869 - protein, 13 aa, Homo sapiens
  CDR3 for alpha chain variable domain of TCR clone 190935 (TRAV27, TRAJ41)
CAGEGNSGYALNF

SEQ ID NO: 381870 - protein, 14 aa, Homo sapiens
  CDR3 for beta chain variable domain of TCR clone 190935 (TRBV25-1, TRBJ1-1)
CASTHLGGNTDAFF

SEQ ID NO: 381871 - protein, 15 aa, Homo sapiens
  CDR3 for alpha chain variable domain of TCR clone 190936 (TRAV26-1, TRAJ29)
CIVRVEGAGDTPLVF

SEQ ID NO: 381872 - protein, 14 aa, Homo sapiens
  CDR3 for beta chain variable domain of TCR clone 190936 (TRBV18, TRBJ2-5)
CASSPGVSQETQYF

SEQ ID NO: 381873 - protein, 17 aa, Homo sapiens
  CDR3 for alpha chain variable domain of TCR clone 190937 (TRAV3, TRAJ6)
CAVRDGPRAGGSDIPTF

SEQ ID NO: 381874 - protein, 14 aa, Homo sapiens
  CDR3 for beta chain variable domain of TCR clone 190937 (TRBV4-2, TRBJ2-1)
CASGLDRAYNEQFF

SEQ ID NO: 381875 - protein, 12 aa, Homo sapiens
  CDR3 for alpha chain variable domain of TCR clone 190938 (TRAV12-1, TRAJ49)
CVVNKPGNQFYF

SEQ ID NO: 381876 - protein, 16 aa, Homo sapiens
  CDR3 for beta chain variable domain of TCR clone 190938 (TRBV4-1, TRBJ2-6)
CASSQDGGPGANVLTF

SEQ ID NO: 381877 - protein, 14 aa, Homo sapiens
  CDR3 for alpha chain variable domain of TCR clone 190939 (TRAV1-2, TRAJ8)
CAGREDTGFQKLVF

SEQ ID NO: 381878 - protein, 14 aa, Homo sapiens
  CDR3 for beta chain variable domain of TCR clone 190939 (TRBV9, TRBJ2-1)
CASSVDPRGKEQFF

SEQ ID NO: 381879 - protein, 14 aa, Homo sapiens
  CDR3 for alpha chain variable domain of TCR clone 190940 (TRAV35, TRAJ33)
CDGSSQDSNYQLIR

SEQ ID NO: 381880 - protein, 15 aa, Homo sapiens
  CDR3 for beta chain variable domain of TCR clone 190940 (TRBV20-1, TRBJ2-7)
CSAESGTSGAYEQYF

SEQ ID NO: 381881 - protein, 19 aa, Homo sapiens
  CDR3 for alpha chain variable domain of TCR clone 190941 (TRAV3, TRAJ6)
CAVRDRNPSRSGGSYIPTF

SEQ ID NO: 381882 - protein, 15 aa, Homo sapiens
  CDR3 for beta chain variable domain of TCR clone 190941 (TRBV18, TRBJ2-7)
CASSPSFMDSYEQYF

SEQ ID NO: 381883 - protein, 13 aa, Homo sapiens
  CDR3 for alpha chain variable domain of TCR clone 190942 (TRAV8-1, TRAJ15)
CAVENQAGTALIF

SEQ ID NO: 381884 - protein, 13 aa, Homo sapiens
  CDR3 for beta chain variable domain of TCR clone 190942 (TRBV7-3, TRBJ2-1)
CASSWESYNEQFF

SEQ ID NO: 381885 - protein, 11 aa, Homo sapiens
  CDR3 for alpha chain variable domain of TCR clone 190943 (TRAV12-2, TRAJ3)
CAVKRASKIIF

SEQ ID NO: 381886 - protein, 16 aa, Homo sapiens
  CDR3 for beta chain variable domain of TCR clone 190943 (TRBV7-9, TRBJ1-2)
CASSLGFSSGEDGYTF

SEQ ID NO: 381887 - protein, 15 aa, Homo sapiens
  CDR3 for alpha chain variable domain of TCR clone 190944 (TRAV12-2, TRAJ53)
CAVNGGGGSNYKLTF

SEQ ID NO: 381888 - protein, 17 aa, Homo sapiens
  CDR3 for beta chain variable domain of TCR clone 190944 (TRBV7-3, TRBJ2-3)
CASSLMKRLRGADTQYF

SEQ ID NO: 381889 - protein, 15 aa, Homo sapiens
  CDR3 for alpha chain variable domain of TCR clone 190945 (TRAV26-1, TRAJ56)
CIVRVATGANSKLPF

SEQ ID NO: 381890 - protein, 15 aa, Homo sapiens
  CDR3 for beta chain variable domain of TCR clone 190945 (TRBV27, TRBJ2-7)
CASSPQREGQREQYF

SEQ ID NO: 381891 - protein, 13 aa, Homo sapiens
  CDR3 for alpha chain variable domain of TCR clone 190946 (TRAV16, TRAJ54)
CALMVQGAQKLGF

SEQ ID NO: 381892 - protein, 12 aa, Homo sapiens
  CDR3 for beta chain variable domain of TCR clone 190946 (TRBV18, TRBJ2-7)
CASSTAMGEQYF

SEQ ID NO: 381893 - protein, 14 aa, Homo sapiens
  CDR3 for alpha chain variable domain of TCR clone 190947 (TRAV38-1, TRAJ45)
CAYYSGGGADGLTF

SEQ ID NO: 381894 - protein, 14 aa, Homo sapiens
  CDR3 for beta chain variable domain of TCR clone 190947 (TRBV19, TRBJ2-1)
CASPTFILSGEQFF

SEQ ID NO: 381895 - protein, 12 aa, Homo sapiens
  CDR3 for alpha chain variable domain of TCR clone 190948 (TRAV12-3, TRAJ20)
CAMVRGDYKLSF

SEQ ID NO: 381896 - protein, 14 aa, Homo sapiens
  CDR3 for beta chain variable domain of TCR clone 190948 (TRBV5-5, TRBJ1-5)
CASSGQGVDQPQHL

SEQ ID NO: 381897 - protein, 18 aa, Homo sapiens
  CDR3 for alpha chain variable domain of TCR clone 190949 (TRAV21, TRAJ52)
CSVRPSPAGGTSYGKLTF

SEQ ID NO: 381898 - protein, 13 aa, Homo sapiens
  CDR3 for beta chain variable domain of TCR clone 190949 (TRBV7-9, TRBJ1-2)
CASSLKQNYGYTF

SEQ ID NO: 381899 - protein, 13 aa, Homo sapiens
  CDR3 for alpha chain variable domain of TCR clone 190950 (TRAV1-2, TRAJ9)
CAALNTGGFETIF

SEQ ID NO: 381900 - protein, 13 aa, Homo sapiens
  CDR3 for beta chain variable domain of TCR clone 190950 (TRBV19, TRBJ1-2)
CASSVPGQDGYAF

SEQ ID NO: 381901 - protein, 12 aa, Homo sapiens
  CDR3 for alpha chain variable domain of TCR clone 190951 (TRAV1-1, TRAJ39)
CAVPVVGNMLTF

SEQ ID NO: 381902 - protein, 13 aa, Homo sapiens
  CDR3 for beta chain variable domain of TCR clone 190951 (TRBV6-4, TRBJ2-3)
CASSVSWADTQYF

SEQ ID NO: 381903 - protein, 14 aa, Homo sapiens
  CDR3 for alpha chain variable domain of TCR clone 190952 (TRAV16, TRAJ15)
CALSFNQAGTALIF

SEQ ID NO: 381904 - protein, 11 aa, Homo sapiens
  CDR3 for beta chain variable domain of TCR clone 190952 (TRBV28, TRBJ2-3)
CASSSDPPQYF

SEQ ID NO: 381905 - protein, 15 aa, Homo sapiens
  CDR3 for alpha chain variable domain of TCR clone 190953 (TRAV9-2, TRAJ45)
CALSARRGGADGLTC

SEQ ID NO: 381906 - protein, 13 aa, Homo sapiens
  CDR3 for beta chain variable domain of TCR clone 190953 (TRBV18, TRBJ2-5)
CASSLQGQETQYF

SEQ ID NO: 381907 - protein, 23 aa, Homo sapiens
  CDR3 for alpha chain variable domain of TCR clone 190954 (TRAV3, TRAJ38)
CAVRDCPNAGNNHIQNPDPAVYQ

SEQ ID NO: 381908 - protein, 15 aa, Homo sapiens
  CDR3 for beta chain variable domain of TCR clone 190954 (TRBV6-5, TRBJ2-1)
CASSYDAGAGNEQFF

SEQ ID NO: 381909 - protein, 12 aa, Homo sapiens
  CDR3 for alpha chain variable domain of TCR clone 190955 (TRAV13-2, TRAJ23)
CAERHRGGKLIF

SEQ ID NO: 381910 - protein, 14 aa, Homo sapiens
  CDR3 for beta chain variable domain of TCR clone 190955 (TRBV11-2, TRBJ2-1)
CASTTGQGNNEQFF

SEQ ID NO: 381911 - protein, 14 aa, Homo sapiens
  CDR3 for alpha chain variable domain of TCR clone 190956 (TRAV12-3, TRAJ10)
SHLPLTVGGNKLTF

SEQ ID NO: 381912 - protein, 15 aa, Homo sapiens
  CDR3 for beta chain variable domain of TCR clone 190956 (TRBV29-1, TRBJ2-7)
CSVEFFDRGSYEQYF

SEQ ID NO: 381913 - protein, 13 aa, Homo sapiens
  CDR3 for alpha chain variable domain of TCR clone 190957 (TRAV8-3, TRAJ15)
CAVGIQAGTALIF

SEQ ID NO: 381914 - protein, 17 aa, Homo sapiens
  CDR3 for beta chain variable domain of TCR clone 190957 (TRBV20-1, TRBJ2-1)
RSARDPLAGVSYNEQFF

SEQ ID NO: 381915 - protein, 18 aa, Homo sapiens
  CDR3 for alpha chain variable domain of TCR clone 190958 (TRAV26-1, TRAJ23)
CIVRVGLEVWNQGGKLIF

SEQ ID NO: 381916 - protein, 16 aa, Homo sapiens
  CDR3 for beta chain variable domain of TCR clone 190958 (TRBV12-4, TRBJ2-5)
CASSCFVRGRKETQYF

SEQ ID NO: 381917 - protein, 14 aa, Homo sapiens
  CDR3 for alpha chain variable domain of TCR clone 190959 (TRAV8-1, TRAJ31)
CAVTSWNNNARLMF

SEQ ID NO: 381918 - protein, 14 aa, Homo sapiens
  CDR3 for beta chain variable domain of TCR clone 190959 (TRBV4-1, TRBJ2-2)
CASSQAVNTGELFF

SEQ ID NO: 381919 - protein, 13 aa, Homo sapiens
  CDR3 for alpha chain variable domain of TCR clone 190960 (TRAV13-2, TRAJ40)
CAELISGTYKYIF

SEQ ID NO: 381920 - protein, 14 aa, Homo sapiens
  CDR3 for beta chain variable domain of TCR clone 190960 (TRBV19, TRBJ1-5)
CSSGTEVYNQPQHF

SEQ ID NO: 381921 - protein, 12 aa, Homo sapiens
  CDR3 for alpha chain variable domain of TCR clone 190961 (TRAV35, TRAJ30)
CAVQLADDKIIF

SEQ ID NO: 381922 - protein, 17 aa, Homo sapiens
  CDR3 for beta chain variable domain of TCR clone 190961 (TRBV4-2, TRBJ2-5)
CASSPGRWRNFQETQYF

SEQ ID NO: 381923 - protein, 16 aa, Homo sapiens
  CDR3 for alpha chain variable domain of TCR clone 190962 (TRAV26-2, TRAJ45)
CTTASPIGGGADGLTF

SEQ ID NO: 381924 - protein, 20 aa, Homo sapiens
  CDR3 for beta chain variable domain of TCR clone 190962 (TRBV28, TRBJ2-1)
CASPPIGRLPGLAGGNEQFF

SEQ ID NO: 381925 - protein, 10 aa, Homo sapiens
  CDR3 for alpha chain variable domain of TCR clone 190963 (TRAV12-1, TRAJ43)
CVVHNNDMRF

SEQ ID NO: 381926 - protein, 16 aa, Homo sapiens
  CDR3 for beta chain variable domain of TCR clone 190963 (TRBV7-9, TRBJ1-2)
CASSLGFSSGEDGYTF

SEQ ID NO: 381927 - protein, 12 aa, Homo sapiens
  CDR3 for alpha chain variable domain of TCR clone 190964 (TRAV12-3, TRAJ17)
CAMTLTGNKLTF

SEQ ID NO: 381928 - protein, 12 aa, Homo sapiens
  CDR3 for beta chain variable domain of TCR clone 190964 (TRBV20-1, TRBJ2-1)
CSAYRGAGEQFF

SEQ ID NO: 381929 - protein, 14 aa, Homo sapiens
  CDR3 for alpha chain variable domain of TCR clone 190965 (TRAV8-4, TRAJ8)
CAVSEDTGFQKLVF

SEQ ID NO: 381930 - protein, 14 aa, Homo sapiens
  CDR3 for beta chain variable domain of TCR clone 190965 (TRBV7-8, TRBJ1-2)
CASSSSEANYGYTF

SEQ ID NO: 381931 - protein, 14 aa, Homo sapiens
  CDR3 for alpha chain variable domain of TCR clone 190966 (TRAV38-1, TRAJ45)
CPYYSGGGADGLTF

SEQ ID NO: 381932 - protein, 20 aa, Homo sapiens
  CDR3 for beta chain variable domain of TCR clone 190966 (TRBV28, TRBJ2-1)
CASTPIGRSPGLAGGNEQFF

SEQ ID NO: 381933 - protein, 14 aa, Homo sapiens
  CDR3 for alpha chain variable domain of TCR clone 190967 (TRAV38-1, TRAJ40)
CVVRPTSGTYKYIF

SEQ ID NO: 381934 - protein, 14 aa, Homo sapiens
  CDR3 for beta chain variable domain of TCR clone 190967 (TRBV25-1, TRBJ1-1)
RASTHLGGNTEAFF

SEQ ID NO: 381935 - protein, 13 aa, Homo sapiens
  CDR3 for alpha chain variable domain of TCR clone 190968 (TRAV3, TRAJ3)
CAVADSSASKIIF

SEQ ID NO: 381936 - protein, 16 aa, Homo sapiens
  CDR3 for beta chain variable domain of TCR clone 190968 (TRBV7-7, TRBJ2-1)
CASSLASGTSYNEQFF

SEQ ID NO: 381937 - protein, 14 aa, Homo sapiens
  CDR3 for alpha chain variable domain of TCR clone 190969 (TRAV38-1, TRAJ45)
CAYYSGGGADGLTL

SEQ ID NO: 381938 - protein, 20 aa, Homo sapiens
  CDR3 for beta chain variable domain of TCR clone 190969 (TRBV28, TRBJ2-1)
WASTPIGRSPGLAGGNEQFF

SEQ ID NO: 381939 - protein, 12 aa, Homo sapiens
  CDR3 for alpha chain variable domain of TCR clone 190970 (TRAV12-2, TRAJ10)
WGFTGGGNKLTF

SEQ ID NO: 381940 - protein, 15 aa, Homo sapiens
  CDR3 for beta chain variable domain of TCR clone 190970 (TRBV6-3, TRBJ2-7)
CASSSPGTVFYEQYF

SEQ ID NO: 381941 - protein, 16 aa, Homo sapiens
  CDR3 for alpha chain variable domain of TCR clone 190971 (TRAV12-3, TRAJ53)
CAMSPGSGGSNYKLTL

SEQ ID NO: 381942 - protein, 15 aa, Homo sapiens
  CDR3 for beta chain variable domain of TCR clone 190971 (TRBV20-1, TRBJ2-7)
CSARDRVSGMDEQYF

SEQ ID NO: 381943 - protein, 12 aa, Homo sapiens
  CDR3 for alpha chain variable domain of TCR clone 190972 (TRAV12-3, TRAJ17)
CAMTLTGNKLTF

SEQ ID NO: 381944 - protein, 13 aa, Homo sapiens
  CDR3 for beta chain variable domain of TCR clone 190972 (TRBV5-1, TRBJ1-2)
CASSSTGVYGYAF

SEQ ID NO: 381945 - protein, 13 aa, Homo sapiens
  CDR3 for alpha chain variable domain of TCR clone 190973 (TRAV8-3, TRAJ36)
CAVGATGANNHFF

SEQ ID NO: 381946 - protein, 15 aa, Homo sapiens
  CDR3 for beta chain variable domain of TCR clone 190973 (TRBV7-2, TRBJ1-2)
CASSPRAGWNYGYTF

SEQ ID NO: 381947 - protein, 13 aa, Homo sapiens
  CDR3 for alpha chain variable domain of TCR clone 190974 (TRAV12-1, TRAJ5)
CGFTDTGRRALTF

SEQ ID NO: 381948 - protein, 15 aa, Homo sapiens
  CDR3 for beta chain variable domain of TCR clone 190974 (TRBV19, TRBJ2-5)
CAIRGRGSYQETQYF

SEQ ID NO: 381949 - protein, 14 aa, Homo sapiens
  CDR3 for alpha chain variable domain of TCR clone 190975 (TRAV1-2, TRAJ16)
CAVNRFSDGQKLLF

SEQ ID NO: 381950 - protein, 19 aa, Homo sapiens
  CDR3 for beta chain variable domain of TCR clone 190975 (TRBV25-1, TRBJ2-2)
CAILVYRVDRGPKTGELFF

SEQ ID NO: 381951 - protein, 15 aa, Homo sapiens
  CDR3 for alpha chain variable domain of TCR clone 190976 (TRAV2, TRAJ28)
CAVPYSGAGSYQLTF

SEQ ID NO: 381952 - protein, 16 aa, Homo sapiens
  CDR3 for beta chain variable domain of TCR clone 190976 (TRBV11-1, TRBJ1-1)
CASSPRGAHMNSEAFF

SEQ ID NO: 381953 - protein, 15 aa, Homo sapiens
  CDR3 for alpha chain variable domain of TCR clone 190977 (TRAV27, TRAJ38)
CAARRNAGNNRKLIC

SEQ ID NO: 381954 - protein, 13 aa, Homo sapiens
  CDR3 for beta chain variable domain of TCR clone 190977 (TRBV4-2, TRBJ1-1)
CASSQAGNTEAFF

SEQ ID NO: 381955 - protein, 23 aa, Homo sapiens
  CDR3 for alpha chain variable domain of TCR clone 190978 (TRAV21, TRAJ39)
AASQPGDSDTYPLLVNAGNMLTF

SEQ ID NO: 381956 - protein, 16 aa, Homo sapiens
  CDR3 for beta chain variable domain of TCR clone 190978 (TRBV11-2, TRBJ2-7)
CASSPTTGGVSYEQYF

SEQ ID NO: 381957 - protein, 14 aa, Homo sapiens
  CDR3 for alpha chain variable domain of TCR clone 190979 (TRAV1-2, TRAJ16)
CAVNRFSDVQKLLF

SEQ ID NO: 381958 - protein, 13 aa, Homo sapiens
  CDR3 for beta chain variable domain of TCR clone 190979 (TRBV10-3, TRBJ1-2)
CAISERDSYGYTF

SEQ ID NO: 381959 - protein, 18 aa, Homo sapiens
  CDR3 for alpha chain variable domain of TCR clone 190980 (TRAV17, TRAJ45)
CATSLDLYSGGGADGLTF

SEQ ID NO: 381960 - protein, 14 aa, Homo sapiens
  CDR3 for beta chain variable domain of TCR clone 190980 (TRBV2, TRBJ2-3)
CASSEGQNTDTQYF

SEQ ID NO: 381961 - protein, 15 aa, Homo sapiens
  CDR3 for alpha chain variable domain of TCR clone 190981 (TRAV35, TRAJ40)
CAGQPGTSRTYKYIF

SEQ ID NO: 381962 - protein, 14 aa, Homo sapiens
  CDR3 for beta chain variable domain of TCR clone 190981 (TRBV7-3, TRBJ2-1)
CASSLAGGTNEQFF

SEQ ID NO: 381963 - protein, 14 aa, Homo sapiens
  CDR3 for alpha chain variable domain of TCR clone 190982 (TRAV20, TRAJ22)
CAVQVSGSARQLTF

SEQ ID NO: 381964 - protein, 13 aa, Homo sapiens
  CDR3 for beta chain variable domain of TCR clone 190982 (TRBV20-1, TRBJ2-5)
CSAREGGKETQFF

SEQ ID NO: 381965 - protein, 14 aa, Homo sapiens
  CDR3 for alpha chain variable domain of TCR clone 190983 (TRAV12-1, TRAJ4)
CVVPLKSGYNKMIF

SEQ ID NO: 381966 - protein, 13 aa, Homo sapiens
  CDR3 for beta chain variable domain of TCR clone 190983 (TRBV27, TRBJ2-7)
CASGRGGAYEQYF

SEQ ID NO: 381967 - protein, 14 aa, Homo sapiens
  CDR3 for alpha chain variable domain of TCR clone 190984 (TRAV23/DV6, TRAJ4)
CAAPRSGGYNKLIF

SEQ ID NO: 381968 - protein, 16 aa, Homo sapiens
  CDR3 for beta chain variable domain of TCR clone 190984 (TRBV19, TRBJ1-1)
CAIRFGGPVTGTEAFF

SEQ ID NO: 381969 - protein, 14 aa, Homo sapiens
  CDR3 for alpha chain variable domain of TCR clone 190985 (TRAV12-3, TRAJ21)
CAMEGHQGLNKFYF

SEQ ID NO: 381970 - protein, 16 aa, Homo sapiens
  CDR3 for beta chain variable domain of TCR clone 190985 (TRBV19, TRBJ2-1)
CASSKAGPSSYNEQFF

SEQ ID NO: 381971 - protein, 14 aa, Homo sapiens
  CDR3 for alpha chain variable domain of TCR clone 190986 (TRAV12-2, TRAJ17)
CAVLFKAAGNKLTF

SEQ ID NO: 381972 - protein, 16 aa, Homo sapiens
  CDR3 for beta chain variable domain of TCR clone 190986 (TRBV20-1, TRBJ1-1)
CSARALTQGMNTEAFF

SEQ ID NO: 381973 - protein, 16 aa, Homo sapiens
  CDR3 for alpha chain variable domain of TCR clone 190987 (TRAV16, TRAJ42)
CARKMNYGGNQGNLIF

SEQ ID NO: 381974 - protein, 13 aa, Homo sapiens
  CDR3 for beta chain variable domain of TCR clone 190987 (TRBV20-1, TRBJ2-7)
CSASPPSSYEQYF

SEQ ID NO: 381975 - protein, 16 aa, Homo sapiens
  CDR3 for alpha chain variable domain of TCR clone 190988 (TRAV23/DV6, TRAJ9)
CAASIGGNTGGFKTIF

SEQ ID NO: 381976 - protein, 13 aa, Homo sapiens
  CDR3 for beta chain variable domain of TCR clone 190988 (TRBV7-2, TRBJ2-2)
CASSSVRAGELFF

SEQ ID NO: 381977 - protein, 14 aa, Homo sapiens
  CDR3 for alpha chain variable domain of TCR clone 190989 (TRAV2, TRAJ9)
CAVEDRSGGFKTIF

SEQ ID NO: 381978 - protein, 14 aa, Homo sapiens
  CDR3 for beta chain variable domain of TCR clone 190989 (TRBV7-3, TRBJ2-1)
CASSLAGGTNEQLF

SEQ ID NO: 381979 - protein, 18 aa, Homo sapiens
  CDR3 for alpha chain variable domain of TCR clone 190990 (TRAV26-2, TRAJ54)
CILRDVEVGIQGAQKLVF

SEQ ID NO: 381980 - protein, 15 aa, Homo sapiens
  CDR3 for beta chain variable domain of TCR clone 190990 (TRBV6-5, TRBJ2-1)
CASSYDAGAGNEQFF

SEQ ID NO: 381981 - protein, 12 aa, Homo sapiens
  CDR3 for alpha chain variable domain of TCR clone 190991 (TRAV12-2, TRAJ43)
CAVNVNNNDMRF

SEQ ID NO: 381982 - protein, 13 aa, Homo sapiens
  CDR3 for beta chain variable domain of TCR clone 190991 (TRBV7-3, TRBJ2-7)
CASSKRRGGEQYF

SEQ ID NO: 381983 - protein, 14 aa, Homo sapiens
  CDR3 for alpha chain variable domain of TCR clone 190992 (TRAV8-3, TRAJ4)
CAVGAAGGYNKLIF

SEQ ID NO: 381984 - protein, 13 aa, Homo sapiens
  CDR3 for beta chain variable domain of TCR clone 190992 (TRBV7-3, TRBJ1-1)
CASSHDWGAEAFF

SEQ ID NO: 381985 - protein, 12 aa, Homo sapiens
  CDR3 for alpha chain variable domain of TCR clone 190993 (TRAV12-1, TRAJ40)
CVVYSGTYKYIF

SEQ ID NO: 381986 - protein, 13 aa, Homo sapiens
  CDR3 for beta chain variable domain of TCR clone 190993 (TRBV29-1, TRBJ2-1)
CSVEGGRVNEQFF

SEQ ID NO: 381987 - protein, 15 aa, Homo sapiens
  CDR3 for alpha chain variable domain of TCR clone 190994 (TRAV29/DV5, TRAJ57)
FAASLLRGGSEKLVF

SEQ ID NO: 381988 - protein, 15 aa, Homo sapiens
  CDR3 for beta chain variable domain of TCR clone 190994 (TRBV5-1, TRBJ1-3)
CASSLEGGSGNTIYF

SEQ ID NO: 381989 - protein, 14 aa, Homo sapiens
  CDR3 for alpha chain variable domain of TCR clone 190995 (TRAV3, TRAJ6)
CAVRDWGRSYIPTF

SEQ ID NO: 381990 - protein, 17 aa, Homo sapiens
  CDR3 for beta chain variable domain of TCR clone 190995 (TRBV6-5, TRBJ2-1)
CASRLSGRFESYNEQFF

SEQ ID NO: 381991 - protein, 11 aa, Homo sapiens
  CDR3 for alpha chain variable domain of TCR clone 190996 (TRAV16, TRAJ49)
CSLNTGNQFYF

SEQ ID NO: 381992 - protein, 12 aa, Homo sapiens
  CDR3 for beta chain variable domain of TCR clone 190996 (TRBV7-9, TRBJ1-4)
CASSTDRETLFF

SEQ ID NO: 381993 - protein, 11 aa, Homo sapiens
  CDR3 for alpha chain variable domain of TCR clone 190997 (TRAV1-2, TRAJ40)
CAVPGTYKYIF

SEQ ID NO: 381994 - protein, 16 aa, Homo sapiens
  CDR3 for beta chain variable domain of TCR clone 190997 (TRBV29-1, TRBJ2-7)
CSVEVVGTSGSYEQYV

SEQ ID NO: 381995 - protein, 14 aa, Homo sapiens
  CDR3 for alpha chain variable domain of TCR clone 190998 (TRAV13-1, TRAJ35)
CAASKGGFGNVLHC

SEQ ID NO: 381996 - protein, 17 aa, Homo sapiens
  CDR3 for beta chain variable domain of TCR clone 190998 (TRBV28, TRBJ1-2)
CASSPGQSAVLLYGYTF

SEQ ID NO: 381997 - protein, 16 aa, Homo sapiens
  CDR3 for alpha chain variable domain of TCR clone 190999 (TRAV21, TRAJ37)
CAVRPRGSSNTGKLIF

SEQ ID NO: 381998 - protein, 13 aa, Homo sapiens
  CDR3 for beta chain variable domain of TCR clone 190999 (TRBV20-1, TRBJ2-2)
CSALRGGAGELFF

SEQ ID NO: 381999 - protein, 14 aa, Homo sapiens
  CDR3 for alpha chain variable domain of TCR clone 191000 (TRAV12-2, TRAJ4)
CAVLIGRGYNELIF

SEQ ID NO: 382000 - protein, 14 aa, Homo sapiens
  CDR3 for beta chain variable domain of TCR clone 191000 (TRBV7-6, TRBJ2-3)
CASSLGTVTDTQYF

SEQ ID NO: 382001 - protein, 17 aa, Homo sapiens
  CDR3 for alpha chain variable domain of TCR clone 191001 (TRAV20, TRAJ42)
CAVQAWGYGGSQGNLIF

SEQ ID NO: 382002 - protein, 15 aa, Homo sapiens
  CDR3 for beta chain variable domain of TCR clone 191001 (TRBV10-3, TRBJ2-1)
CAIRNGTSGHNEQFF

SEQ ID NO: 382003 - protein, 14 aa, Homo sapiens
  CDR3 for alpha chain variable domain of TCR clone 191002 (TRAV8-3, TRAJ4)
CAVGAAGGYNNLIF

SEQ ID NO: 382004 - protein, 15 aa, Homo sapiens
  CDR3 for beta chain variable domain of TCR clone 191002 (TRBV9, TRBJ1-6)
CASSVAGTGDSPLHF

SEQ ID NO: 382005 - protein, 12 aa, Homo sapiens
  CDR3 for alpha chain variable domain of TCR clone 191003 (TRAV4, TRAJ9)
CLVPTGGFKTIF

SEQ ID NO: 382006 - protein, 17 aa, Homo sapiens
  CDR3 for beta chain variable domain of TCR clone 191003 (TRBV28, TRBJ2-5)
CASSRQGGLAGAETQYF

SEQ ID NO: 382007 - protein, 11 aa, Homo sapiens
  CDR3 for alpha chain variable domain of TCR clone 191004 (TRAV16, TRAJ31)
CALFNNARLMF

SEQ ID NO: 382008 - protein, 12 aa, Homo sapiens
  CDR3 for beta chain variable domain of TCR clone 191004 (TRBV2, TRBJ2-1)
CAYGPPGNEQFF

SEQ ID NO: 382009 - protein, 12 aa, Homo sapiens
  CDR3 for alpha chain variable domain of TCR clone 191005 (TRAV3, TRAJ43)
CAVRDPNNDMRF

SEQ ID NO: 382010 - protein, 18 aa, Homo sapiens
  CDR3 for beta chain variable domain of TCR clone 191005 (TRBV7-8, TRBJ2-1)
CASSTAEGLAGGLNEQFF

SEQ ID NO: 382011 - protein, 14 aa, Homo sapiens
  CDR3 for alpha chain variable domain of TCR clone 191006 (TRAV12-3, TRAJ10)
SHLPLTGGGNKLTF

SEQ ID NO: 382012 - protein, 15 aa, Homo sapiens
  CDR3 for beta chain variable domain of TCR clone 191006 (TRBV27, TRBJ2-1)
CASSNGGGFSNEQFF

SEQ ID NO: 382013 - protein, 15 aa, Homo sapiens
  CDR3 for alpha chain variable domain of TCR clone 191007 (TRAV8-4, TRAJ3)
CAVTGENLVQQFFQD

SEQ ID NO: 382014 - protein, 16 aa, Homo sapiens
  CDR3 for beta chain variable domain of TCR clone 191007 (TRBV4-2, TRBJ1-1)
CASSKAGFGMNTEAFF

SEQ ID NO: 382015 - protein, 17 aa, Homo sapiens
  CDR3 for alpha chain variable domain of TCR clone 191008 (TRAV12-1, TRAJ42)
CLVMRMNYGGSQGNLIF

SEQ ID NO: 382016 - protein, 13 aa, Homo sapiens
  CDR3 for beta chain variable domain of TCR clone 191008 (TRBV7-2, TRBJ1-1)
CASSLARPAEAFF

SEQ ID NO: 382017 - protein, 15 aa, Homo sapiens
  CDR3 for alpha chain variable domain of TCR clone 191009 (TRAV8-4, TRAJ15)
CAVGDPVQAGTALIF

SEQ ID NO: 382018 - protein, 14 aa, Homo sapiens
  CDR3 for beta chain variable domain of TCR clone 191009 (TRBV7-2, TRBJ2-7)
CASSPKTSFYEQYF

SEQ ID NO: 382019 - protein, 15 aa, Homo sapiens
  CDR3 for alpha chain variable domain of TCR clone 191010 (TRAV3, TRAJ47)
CAVRGIGEYGNKLVF

SEQ ID NO: 382020 - protein, 14 aa, Homo sapiens
  CDR3 for beta chain variable domain of TCR clone 191010 (TRBV13, TRBJ2-5)
CASSLERVGETQYS

SEQ ID NO: 382021 - protein, 13 aa, Homo sapiens
  CDR3 for alpha chain variable domain of TCR clone 191011 (TRAV12-2, TRAJ4)
CAVFSGGYNKLIF

SEQ ID NO: 382022 - protein, 13 aa, Homo sapiens
  CDR3 for beta chain variable domain of TCR clone 191011 (TRBV19, TRBJ1-5)
CASSIDGDQPQHF

SEQ ID NO: 382023 - protein, 15 aa, Homo sapiens
  CDR3 for alpha chain variable domain of TCR clone 191012 (TRAV1-2, TRAJ6)
CAVRGGKGGSYIPTF

SEQ ID NO: 382024 - protein, 16 aa, Homo sapiens
  CDR3 for beta chain variable domain of TCR clone 191012 (TRBV7-2, TRBJ2-3)
CASSESGPAGTDTQYF

SEQ ID NO: 382025 - protein, 14 aa, Homo sapiens
  CDR3 for alpha chain variable domain of TCR clone 191013 (TRAV13-1, TRAJ44)
CAAKATGTASKLTF

SEQ ID NO: 382026 - protein, 14 aa, Homo sapiens
  CDR3 for beta chain variable domain of TCR clone 191013 (TRBV19, TRBJ2-2)
CVSSTLHRSGELFF

SEQ ID NO: 382027 - protein, 11 aa, Homo sapiens
  CDR3 for alpha chain variable domain of TCR clone 191014 (TRAV23/DV6, TRAJ48)
CAPRWGEKLPF

SEQ ID NO: 382028 - protein, 14 aa, Homo sapiens
  CDR3 for beta chain variable domain of TCR clone 191014 (TRBV29-1, TRBJ1-3)
CSVADRVVGNTIYF

SEQ ID NO: 382029 - protein, 14 aa, Homo sapiens
  CDR3 for alpha chain variable domain of TCR clone 191015 (TRAV34, TRAJ22)
CGADTSGSARQLTF

SEQ ID NO: 382030 - protein, 15 aa, Homo sapiens
  CDR3 for beta chain variable domain of TCR clone 191015 (TRBV7-3, TRBJ2-3)
CASSLGLTLGDTQYF

SEQ ID NO: 382031 - protein, 13 aa, Homo sapiens
  CDR3 for alpha chain variable domain of TCR clone 191016 (TRAV13-1, TRAJ11)
CAASIRGYSTLTF

SEQ ID NO: 382032 - protein, 14 aa, Homo sapiens
  CDR3 for beta chain variable domain of TCR clone 191016 (TRBV4-2, TRBJ2-1)
CASGLDRAYNEKFF

SEQ ID NO: 382033 - protein, 20 aa, Homo sapiens
  CDR3 for alpha chain variable domain of TCR clone 191017 (TRAV4, TRAJ29)
CCVLLPRGCVPFSGNTPLVF

SEQ ID NO: 382034 - protein, 17 aa, Homo sapiens
  CDR3 for beta chain variable domain of TCR clone 191017 (TRBV25-1, TRBJ2-7)
CASSDARVVFSSYEQYV

SEQ ID NO: 382035 - protein, 14 aa, Homo sapiens
  CDR3 for alpha chain variable domain of TCR clone 191018 (TRAV8-1, TRAJ22)
CAAPSSGSARQLTF

SEQ ID NO: 382036 - protein, 13 aa, Homo sapiens
  CDR3 for beta chain variable domain of TCR clone 191018 (TRBV6-1, TRBJ1-2)
CASSEGTHYGYAF

SEQ ID NO: 382037 - protein, 14 aa, Homo sapiens
  CDR3 for alpha chain variable domain of TCR clone 191019 (TRAV21, TRAJ37)
CAVKGSSNTGKLIF

SEQ ID NO: 382038 - protein, 14 aa, Homo sapiens
  CDR3 for beta chain variable domain of TCR clone 191019 (TRBV7-2, TRBJ2-1)
CASSIGGARNEQFF

SEQ ID NO: 382039 - protein, 13 aa, Homo sapiens
  CDR3 for alpha chain variable domain of TCR clone 191020 (TRAV27, TRAJ54)
CAGAGQGAQKLVF

SEQ ID NO: 382040 - protein, 14 aa, Homo sapiens
  CDR3 for beta chain variable domain of TCR clone 191020 (TRBV20-1, TRBJ2-7)
CSAKTGTGGYEQYF

SEQ ID NO: 382041 - protein, 13 aa, Homo sapiens
  CDR3 for alpha chain variable domain of TCR clone 191021 (TRAV21, TRAJ27)
CAARPGNAGKSTF

SEQ ID NO: 382042 - protein, 15 aa, Homo sapiens
  CDR3 for beta chain variable domain of TCR clone 191021 (TRBV28, TRBJ1-2)
CASIPQGSDDYGYTF

SEQ ID NO: 382043 - protein, 17 aa, Homo sapiens
  CDR3 for alpha chain variable domain of TCR clone 191022 (TRAV8-6, TRAJ8)
CAVKEGIESTGFQKLVF

SEQ ID NO: 382044 - protein, 13 aa, Homo sapiens
  CDR3 for beta chain variable domain of TCR clone 191022 (TRBV19, TRBJ1-2)
CASSVPGQDGYTF

SEQ ID NO: 382045 - protein, 12 aa, Homo sapiens
  CDR3 for alpha chain variable domain of TCR clone 191023 (TRAV38-1, TRAJ47)
CAFETYGNTLVF

SEQ ID NO: 382046 - protein, 14 aa, Homo sapiens
  CDR3 for beta chain variable domain of TCR clone 191023 (TRBV12-5, TRBJ2-5)
CASGSRTHQETQYF

SEQ ID NO: 382047 - protein, 13 aa, Homo sapiens
  CDR3 for alpha chain variable domain of TCR clone 191024 (TRAV21, TRAJ13)
CAVNSGGYHKVTF

SEQ ID NO: 382048 - protein, 17 aa, Homo sapiens
  CDR3 for beta chain variable domain of TCR clone 191024 (TRBV9, TRBJ2-5)
CASSVAGQGPSIETQYF

SEQ ID NO: 382049 - protein, 13 aa, Homo sapiens
  CDR3 for alpha chain variable domain of TCR clone 191025 (TRAV12-2, TRAJ42)
CAVKRGSKGNLIF

SEQ ID NO: 382050 - protein, 12 aa, Homo sapiens
  CDR3 for beta chain variable domain of TCR clone 191025 (TRBV5-7, TRBJ1-2)
CASSLVQNGYTF

SEQ ID NO: 382051 - protein, 16 aa, Homo sapiens
  CDR3 for alpha chain variable domain of TCR clone 191026 (TRAV26-1, TRAJ32)
CIVRTSYGGATNKLIF

SEQ ID NO: 382052 - protein, 14 aa, Homo sapiens
  CDR3 for beta chain variable domain of TCR clone 191026 (TRBV27, TRBJ1-1)
CASSLLSGLSEAFF

SEQ ID NO: 382053 - protein, 13 aa, Homo sapiens
  CDR3 for alpha chain variable domain of TCR clone 191027 (TRAV13-1, TRAJ12)
CAASSDSSYKLIF

SEQ ID NO: 382054 - protein, 16 aa, Homo sapiens
  CDR3 for beta chain variable domain of TCR clone 191027 (TRBV15, TRBJ2-1)
CATSRERLAGAYEQFF

SEQ ID NO: 382055 - protein, 17 aa, Homo sapiens
  CDR3 for alpha chain variable domain of TCR clone 191028 (TRAV26-1, TRAJ53)
CIVRVDDSGGSNYKLTF

SEQ ID NO: 382056 - protein, 15 aa, Homo sapiens
  CDR3 for beta chain variable domain of TCR clone 191028 (TRBV15, TRBJ1-4)
CATSRDMGSYEKLFF

SEQ ID NO: 382057 - protein, 20 aa, Homo sapiens
  CDR3 for alpha chain variable domain of TCR clone 191029 (TRAV12-3, TRAJ41)
SLFIRDSQPSDSATPEALNF

SEQ ID NO: 382058 - protein, 15 aa, Homo sapiens
  CDR3 for beta chain variable domain of TCR clone 191029 (TRBV5-1, TRBJ2-7)
CASSLGDFTTYEQYF

SEQ ID NO: 382059 - protein, 13 aa, Homo sapiens
  CDR3 for alpha chain variable domain of TCR clone 191030 (TRAV17, TRAJ9)
CATDYTGGFKTIF

SEQ ID NO: 382060 - protein, 17 aa, Homo sapiens
  CDR3 for beta chain variable domain of TCR clone 191030 (TRBV5-1, TRBJ2-3)
CASSLAGWGSVVDTQYF

SEQ ID NO: 382061 - protein, 13 aa, Homo sapiens
  CDR3 for alpha chain variable domain of TCR clone 191031 (TRAV12-2, TRAJ24)
CAVATDSWGKLQF

SEQ ID NO: 382062 - protein, 12 aa, Homo sapiens
  CDR3 for beta chain variable domain of TCR clone 191031 (TRBV7-6, TRBJ2-7)
CASSLADSEQYF

SEQ ID NO: 382063 - protein, 15 aa, Homo sapiens
  CDR3 for alpha chain variable domain of TCR clone 191032 (TRAV35, TRAJ58)
FAGRRQETSGSMLTF

SEQ ID NO: 382064 - protein, 11 aa, Homo sapiens
  CDR3 for beta chain variable domain of TCR clone 191032 (TRBV11-2, TRBJ1-1)
CASSINTEAFF

SEQ ID NO: 382065 - protein, 13 aa, Homo sapiens
  CDR3 for alpha chain variable domain of TCR clone 191033 (TRAV1-2, TRAJ9)
CAALNTGGFKTIF

SEQ ID NO: 382066 - protein, 12 aa, Homo sapiens
  CDR3 for beta chain variable domain of TCR clone 191033 (TRBV11-3, TRBJ1-1)
CASGHRQGEAFF

SEQ ID NO: 382067 - protein, 15 aa, Homo sapiens
  CDR3 for alpha chain variable domain of TCR clone 191034 (TRAV21, TRAJ52)
CAVRGGGTSYGKLTF

SEQ ID NO: 382068 - protein, 13 aa, Homo sapiens
  CDR3 for beta chain variable domain of TCR clone 191034 (TRBV7-2, TRBJ1-5)
CASSFARNQPQHF

SEQ ID NO: 382069 - protein, 10 aa, Homo sapiens
  CDR3 for alpha chain variable domain of TCR clone 191035 (TRAV36/DV7, TRAJ49)
CALTGNQFYF

SEQ ID NO: 382070 - protein, 16 aa, Homo sapiens
  CDR3 for beta chain variable domain of TCR clone 191035 (TRBV28, TRBJ2-5)
CASSFSPAGGWETQYF

SEQ ID NO: 382071 - protein, 14 aa, Homo sapiens
  CDR3 for alpha chain variable domain of TCR clone 191036 (TRAV17, TRAJ57)
CATDPQGGSEKLVF

SEQ ID NO: 382072 - protein, 16 aa, Homo sapiens
  CDR3 for beta chain variable domain of TCR clone 191036 (TRBV20-1, TRBJ1-4)
CSAPGQGLLSNEKLFF

SEQ ID NO: 382073 - protein, 13 aa, Homo sapiens
  CDR3 for alpha chain variable domain of TCR clone 191037 (TRAV12-2, TRAJ43)
CAMIRPNKNDMRF

SEQ ID NO: 382074 - protein, 12 aa, Homo sapiens
  CDR3 for beta chain variable domain of TCR clone 191037 (TRBV11-2, TRBJ2-5)
CASSLGQETQYF

SEQ ID NO: 382075 - protein, 14 aa, Homo sapiens
  CDR3 for alpha chain variable domain of TCR clone 191038 (TRAV2, TRAJ9)
CAVEDRRGGFKTIF

SEQ ID NO: 382076 - protein, 15 aa, Homo sapiens
  CDR3 for beta chain variable domain of TCR clone 191038 (TRBV19, TRBJ2-1)
CASSHRDRGPNEQFF

SEQ ID NO: 382077 - protein, 12 aa, Homo sapiens
  CDR3 for alpha chain variable domain of TCR clone 191039 (TRAV8-2, TRAJ5)
CVVSDIGRALTF

SEQ ID NO: 382078 - protein, 14 aa, Homo sapiens
  CDR3 for beta chain variable domain of TCR clone 191039 (TRBV19, TRBJ2-7)
CASNSRDTFTGMYF

SEQ ID NO: 382079 - protein, 15 aa, Homo sapiens
  CDR3 for alpha chain variable domain of TCR clone 191040 (TRAV26-2, TRAJ39)
CSLRGNNNAGNMLTF

SEQ ID NO: 382080 - protein, 13 aa, Homo sapiens
  CDR3 for beta chain variable domain of TCR clone 191040 (TRBV10-3, TRBJ1-2)
CAISERDSYGYTF

SEQ ID NO: 382081 - protein, 14 aa, Homo sapiens
  CDR3 for alpha chain variable domain of TCR clone 191041 (TRAV12-2, TRAJ13)
CAVKKTGGYQKVTF

SEQ ID NO: 382082 - protein, 17 aa, Homo sapiens
  CDR3 for beta chain variable domain of TCR clone 191041 (TRBV7-9, TRBJ2-1)
CASSLVASYPSYNEQFF

SEQ ID NO: 382083 - protein, 17 aa, Homo sapiens
  CDR3 for alpha chain variable domain of TCR clone 191042 (TRAV4, TRAJ13)
CLVGVQGSSGGYQKVTF

SEQ ID NO: 382084 - protein, 14 aa, Homo sapiens
  CDR3 for beta chain variable domain of TCR clone 191042 (TRBV7-6, TRBJ2-3)
CASSLGTVTDTQYF

SEQ ID NO: 382085 - protein, 13 aa, Homo sapiens
  CDR3 for alpha chain variable domain of TCR clone 191043 (TRAV6, TRAJ33)
CALPMDSNYQLIL

SEQ ID NO: 382086 - protein, 15 aa, Homo sapiens
  CDR3 for beta chain variable domain of TCR clone 191043 (TRBV11-2, TRBJ2-2)
CASRGLAANTGELFF

SEQ ID NO: 382087 - protein, 13 aa, Homo sapiens
  CDR3 for alpha chain variable domain of TCR clone 191044 (TRAV3, TRAJ20)
CCEAFCNDYKLSF

SEQ ID NO: 382088 - protein, 15 aa, Homo sapiens
  CDR3 for beta chain variable domain of TCR clone 191044 (TRBV19, TRBJ2-6)
CASVRRDSGANFLTF

SEQ ID NO: 382089 - protein, 18 aa, Homo sapiens
  CDR3 for alpha chain variable domain of TCR clone 191045 (TRAV21, TRAJ52)
CAVRPSPAGGTSYGKLTF

SEQ ID NO: 382090 - protein, 11 aa, Homo sapiens
  CDR3 for beta chain variable domain of TCR clone 191045 (TRBV12-3, TRBJ2-3)
CASPATDTQYF

SEQ ID NO: 382091 - protein, 16 aa, Homo sapiens
  CDR3 for alpha chain variable domain of TCR clone 191046 (TRAV30, TRAJ24)
CGTEIVDADSWGKFRF

SEQ ID NO: 382092 - protein, 16 aa, Homo sapiens
  CDR3 for beta chain variable domain of TCR clone 191046 (TRBV12-5, TRBJ2-5)
CASGPRTSGNQETQYF

SEQ ID NO: 382093 - protein, 12 aa, Homo sapiens
  CDR3 for alpha chain variable domain of TCR clone 191047 (TRAV12-2, TRAJ52)
IGGGTSYGKLTF

SEQ ID NO: 382094 - protein, 14 aa, Homo sapiens
  CDR3 for beta chain variable domain of TCR clone 191047 (TRBV7-9, TRBJ2-7)
CASSLVAGPYEQYF

SEQ ID NO: 382095 - protein, 12 aa, Homo sapiens
  CDR3 for alpha chain variable domain of TCR clone 191048 (TRAV30, TRAJ43)
CGTEERGNDMRF

SEQ ID NO: 382096 - protein, 14 aa, Homo sapiens
  CDR3 for beta chain variable domain of TCR clone 191048 (TRBV20-1, TRBJ2-7)
CSAWTALSSYEQYF

SEQ ID NO: 382097 - protein, 12 aa, Homo sapiens
  CDR3 for alpha chain variable domain of TCR clone 191049 (TRAV21, TRAJ33)
CAKMDSNYQLIW

SEQ ID NO: 382098 - protein, 17 aa, Homo sapiens
  CDR3 for beta chain variable domain of TCR clone 191049 (TRBV19, TRBJ2-3)
CASSIDPAGGGTDTQYF

SEQ ID NO: 382099 - protein, 14 aa, Homo sapiens
  CDR3 for alpha chain variable domain of TCR clone 191050 (TRAV17, TRAJ35)
CATDRPGFGNVLHC

SEQ ID NO: 382100 - protein, 14 aa, Homo sapiens
  CDR3 for beta chain variable domain of TCR clone 191050 (TRBV7-8, TRBJ2-3)
CVSSLEAGTDTQYF

SEQ ID NO: 382101 - protein, 14 aa, Homo sapiens
  CDR3 for alpha chain variable domain of TCR clone 191051 (TRAV2, TRAJ8)
CAGRGNTGFQKLVF

SEQ ID NO: 382102 - protein, 13 aa, Homo sapiens
  CDR3 for beta chain variable domain of TCR clone 191051 (TRBV6-5, TRBJ2-7)
CASRTSVIHEQYF

SEQ ID NO: 382103 - protein, 18 aa, Homo sapiens
  CDR3 for alpha chain variable domain of TCR clone 191052 (TRAV21, TRAJ52)
CAVRPSPAGGTSYGELTF

SEQ ID NO: 382104 - protein, 17 aa, Homo sapiens
  CDR3 for beta chain variable domain of TCR clone 191052 (TRBV13, TRBJ2-3)
CASRLSRVAGGRNTQYF

SEQ ID NO: 382105 - protein, 14 aa, Homo sapiens
  CDR3 for alpha chain variable domain of TCR clone 191053 (TRAV1-2, TRAJ16)
CAVNRFSDVQKLLF

SEQ ID NO: 382106 - protein, 15 aa, Homo sapiens
  CDR3 for beta chain variable domain of TCR clone 191053 (TRBV11-2, TRBJ1-2)
CASSLEGVQRNGYTF

SEQ ID NO: 382107 - protein, 21 aa, Homo sapiens
  CDR3 for alpha chain variable domain of TCR clone 191054 (TRAV1-1, TRAJ6)
CLLLLRCERLVRTGGSYIPTF

SEQ ID NO: 382108 - protein, 13 aa, Homo sapiens
  CDR3 for beta chain variable domain of TCR clone 191054 (TRBV10-2, TRBJ2-7)
CASGASGGYEQYF

SEQ ID NO: 382109 - protein, 17 aa, Homo sapiens
  CDR3 for alpha chain variable domain of TCR clone 191055 (TRAV26-1, TRAJ17)
CIVRGIMIKAAGNKLTF

SEQ ID NO: 382110 - protein, 13 aa, Homo sapiens
  CDR3 for beta chain variable domain of TCR clone 191055 (TRBV19, TRBJ2-7)
CASSIDRTYEQYF

SEQ ID NO: 382111 - protein, 17 aa, Homo sapiens
  CDR3 for alpha chain variable domain of TCR clone 191056 (TRAV12-2, TRAJ36)
CAVKDNLFFGTGTRLTV

SEQ ID NO: 382112 - protein, 18 aa, Homo sapiens
  CDR3 for beta chain variable domain of TCR clone 191056 (TRBV20-1, TRBJ2-6)
CSAETTPTHGSGANVLTF

SEQ ID NO: 382113 - protein, 21 aa, Homo sapiens
  CDR3 for alpha chain variable domain of TCR clone 191057 (TRAV1-1, TRAJ6)
CLLLLRCERLERTGGSYIPTF

SEQ ID NO: 382114 - protein, 13 aa, Homo sapiens
  CDR3 for beta chain variable domain of TCR clone 191057 (TRBV10-2, TRBJ2-7)
CASGASGGYEHYF

SEQ ID NO: 382115 - protein, 14 aa, Homo sapiens
  CDR3 for alpha chain variable domain of TCR clone 191058 (TRAV1-2, TRAJ16)
CAVNRFSDGQKLLF

SEQ ID NO: 382116 - protein, 14 aa, Homo sapiens
  CDR3 for beta chain variable domain of TCR clone 191058 (TRBV20-1, TRBJ2-7)
CSAKRGRSAYEQYF

SEQ ID NO: 382117 - protein, 12 aa, Homo sapiens
  CDR3 for alpha chain variable domain of TCR clone 191059 (TRAV12-3, TRAJ17)
CAMTLTGNKLTF

SEQ ID NO: 382118 - protein, 12 aa, Homo sapiens
  CDR3 for beta chain variable domain of TCR clone 191059 (TRBV4-1, TRBJ2-1)
CASSAGGIEQFF

SEQ ID NO: 382119 - protein, 15 aa, Homo sapiens
  CDR3 for alpha chain variable domain of TCR clone 191060 (TRAV12-3, TRAJ6)
CAMSATTGGSYIPTF

SEQ ID NO: 382120 - protein, 16 aa, Homo sapiens
  CDR3 for beta chain variable domain of TCR clone 191060 (TRBV20-1, TRBJ1-2)
CCASMGQGVANYGYTF

SEQ ID NO: 382121 - protein, 12 aa, Homo sapiens
  CDR3 for alpha chain variable domain of TCR clone 191061 (TRAV1-1, TRAJ39)
CAVPVVGNILTF

SEQ ID NO: 382122 - protein, 18 aa, Homo sapiens
  CDR3 for beta chain variable domain of TCR clone 191061 (TRBV7-9, TRBJ2-7)
CASSLTTGGSRTWYEQYF

SEQ ID NO: 382123 - protein, 14 aa, Homo sapiens
  CDR3 for alpha chain variable domain of TCR clone 191062 (TRAV23/DV6, TRAJ37)
CAASTSSNTGKLIL

SEQ ID NO: 382124 - protein, 14 aa, Homo sapiens
  CDR3 for beta chain variable domain of TCR clone 191062 (TRBV15, TRBJ2-3)
CATRSGTSTDTQYF

SEQ ID NO: 382125 - protein, 16 aa, Homo sapiens
  CDR3 for alpha chain variable domain of TCR clone 191063 (TRAV30, TRAJ24)
CGTEIVDADSRGKFQF

SEQ ID NO: 382126 - protein, 15 aa, Homo sapiens
  CDR3 for beta chain variable domain of TCR clone 191063 (TRBV28, TRBJ2-1)
CASSIIAGGRSEQFF

SEQ ID NO: 382127 - protein, 13 aa, Homo sapiens
  CDR3 for alpha chain variable domain of TCR clone 191064 (TRAV2, TRAJ15)
CAVASQAGTALTF

SEQ ID NO: 382128 - protein, 13 aa, Homo sapiens
  CDR3 for beta chain variable domain of TCR clone 191064 (TRBV7-3, TRBJ2-5)
CASSSDREETQYF

SEQ ID NO: 382129 - protein, 14 aa, Homo sapiens
  CDR3 for alpha chain variable domain of TCR clone 191065 (TRAV12-1, TRAJ30)
CVVNIGGRDDKIIF

SEQ ID NO: 382130 - protein, 12 aa, Homo sapiens
  CDR3 for beta chain variable domain of TCR clone 191065 (TRBV28, TRBJ2-6)
CAIQAGANVLTF

SEQ ID NO: 382131 - protein, 15 aa, Homo sapiens
  CDR3 for alpha chain variable domain of TCR clone 191066 (TRAV13-1, TRAJ52)
CAASSPSTSYGKLTF

SEQ ID NO: 382132 - protein, 15 aa, Homo sapiens
  CDR3 for beta chain variable domain of TCR clone 191066 (TRBV25-1, TRBJ1-4)
CASSPGDSTNEKLFF

SEQ ID NO: 382133 - protein, 16 aa, Homo sapiens
  CDR3 for alpha chain variable domain of TCR clone 191067 (TRAV39, TRAJ43)
CADDDMRFGAGTRLTV

SEQ ID NO: 382134 - protein, 17 aa, Homo sapiens
  CDR3 for beta chain variable domain of TCR clone 191067 (TRBV5-1, TRBJ2-2)
CASSLAGLSGGTGELFF

SEQ ID NO: 382135 - protein, 13 aa, Homo sapiens
  CDR3 for alpha chain variable domain of TCR clone 191068 (TRAV1-1, TRAJ31)
CASYLNNNARLMF

SEQ ID NO: 382136 - protein, 17 aa, Homo sapiens
  CDR3 for beta chain variable domain of TCR clone 191068 (TRBV11-2, TRBJ2-6)
CASSQRDIFSGANVLTF

SEQ ID NO: 382137 - protein, 14 aa, Homo sapiens
  CDR3 for alpha chain variable domain of TCR clone 191069 (TRAV1-2, TRAJ16)
CAVNRFSDGQKLLF

SEQ ID NO: 382138 - protein, 15 aa, Homo sapiens
  CDR3 for beta chain variable domain of TCR clone 191069 (TRBV19, TRBJ1-5)
CASSIVWADNQPRHF

SEQ ID NO: 382139 - protein, 14 aa, Homo sapiens
  CDR3 for alpha chain variable domain of TCR clone 191070 (TRAV8-1, TRAJ5)
CAVRTDTGRRALTF

SEQ ID NO: 382140 - protein, 14 aa, Homo sapiens
  CDR3 for beta chain variable domain of TCR clone 191070 (TRBV5-5, TRBJ1-2)
CASSLDAYNYGYTF

SEQ ID NO: 382141 - protein, 14 aa, Homo sapiens
  CDR3 for alpha chain variable domain of TCR clone 191071 (TRAV8-1, TRAJ9)
CAGNAWTGGFKTIF

SEQ ID NO: 382142 - protein, 16 aa, Homo sapiens
  CDR3 for beta chain variable domain of TCR clone 191071 (TRBV28, TRBJ2-2)
CASSLEGGSNTGELFF

SEQ ID NO: 382143 - protein, 14 aa, Homo sapiens
  CDR3 for alpha chain variable domain of TCR clone 191072 (TRAV38-1, TRAJ40)
CALRPTSGTYKYIF

SEQ ID NO: 382144 - protein, 14 aa, Homo sapiens
  CDR3 for beta chain variable domain of TCR clone 191072 (TRBV12-5, TRBJ2-5)
GASGSRTHQETQYF

SEQ ID NO: 382145 - protein, 14 aa, Homo sapiens
  CDR3 for alpha chain variable domain of TCR clone 191073 (TRAV12-3, TRAJ20)
CAMSARRGDYKLSF

SEQ ID NO: 382146 - protein, 14 aa, Homo sapiens
  CDR3 for beta chain variable domain of TCR clone 191073 (TRBV7-3, TRBJ2-3)
CASRPSARTDTQYF

SEQ ID NO: 382147 - protein, 10 aa, Homo sapiens
  CDR3 for alpha chain variable domain of TCR clone 191074 (TRAV27, TRAJ37)
CAGGVGKLIF

SEQ ID NO: 382148 - protein, 13 aa, Homo sapiens
  CDR3 for beta chain variable domain of TCR clone 191074 (TRBV27, TRBJ1-2)
CASSRGLVYGDTF

SEQ ID NO: 382149 - protein, 16 aa, Homo sapiens
  CDR3 for alpha chain variable domain of TCR clone 191075 (TRAV30, TRAJ24)
CGTEFVDADSWGKFQF

SEQ ID NO: 382150 - protein, 13 aa, Homo sapiens
  CDR3 for beta chain variable domain of TCR clone 191075 (TRBV18, TRBJ1-2)
CASSASATEGYTF

SEQ ID NO: 382151 - protein, 12 aa, Homo sapiens
  CDR3 for alpha chain variable domain of TCR clone 191076 (TRAV8-1, TRAJ6)
FASSGGSYIPTF

SEQ ID NO: 382152 - protein, 12 aa, Homo sapiens
  CDR3 for beta chain variable domain of TCR clone 191076 (TRBV19, TRBJ1-1)
CASMNRYTEAFF

SEQ ID NO: 382153 - protein, 15 aa, Homo sapiens
  CDR3 for alpha chain variable domain of TCR clone 191077 (TRAV17, TRAJ57)
CATAPSQGGSEKLVF

SEQ ID NO: 382154 - protein, 15 aa, Homo sapiens
  CDR3 for beta chain variable domain of TCR clone 191077 (TRBV6-3, TRBJ2-7)
CASSSPGTVFYEQYF

SEQ ID NO: 382155 - protein, 13 aa, Homo sapiens
  CDR3 for alpha chain variable domain of TCR clone 191078 (TRAV12-1, TRAJ20)
CVVNRETDYKLSF

SEQ ID NO: 382156 - protein, 14 aa, Homo sapiens
  CDR3 for beta chain variable domain of TCR clone 191078 (TRBV19, TRBJ2-1)
CASPTFVLSGEQFF

SEQ ID NO: 382157 - protein, 13 aa, Homo sapiens
  CDR3 for alpha chain variable domain of TCR clone 191079 (TRAV21, TRAJ27)
CAARPGNTGKSTF

SEQ ID NO: 382158 - protein, 14 aa, Homo sapiens
  CDR3 for beta chain variable domain of TCR clone 191079 (TRBV11-2, TRBJ2-1)
CASTTGQGNNEQFF

SEQ ID NO: 382159 - protein, 23 aa, Homo sapiens
  CDR3 for alpha chain variable domain of TCR clone 191080 (TRAV21, )
CAVRQDAGNNHIQNPDPAVYPLR

SEQ ID NO: 382160 - protein, 16 aa, Homo sapiens
  CDR3 for beta chain variable domain of TCR clone 191080 (TRBV4-2, TRBJ1-1)
CASRPLDGGGDTEAFF

SEQ ID NO: 382161 - protein, 11 aa, Homo sapiens
  CDR3 for alpha chain variable domain of TCR clone 191081 (TRAV8-4, TRAJ26)
CAGGEGQNFVF

SEQ ID NO: 382162 - protein, 17 aa, Homo sapiens
  CDR3 for beta chain variable domain of TCR clone 191081 (TRBV7-9, TRBJ2-3)
CASSTTVAGDLTDTQYF

SEQ ID NO: 382163 - protein, 12 aa, Homo sapiens
  CDR3 for alpha chain variable domain of TCR clone 191082 (TRAV21, TRAJ11)
CAATSGYSTPTF

SEQ ID NO: 382164 - protein, 13 aa, Homo sapiens
  CDR3 for beta chain variable domain of TCR clone 191082 (TRBV20-1, TRBJ2-7)
QCPELAGVGEQYF

SEQ ID NO: 382165 - protein, 13 aa, Homo sapiens
  CDR3 for alpha chain variable domain of TCR clone 191083 (TRAV8-1, TRAJ34)
CAVNAGNTDKLIF

SEQ ID NO: 382166 - protein, 15 aa, Homo sapiens
  CDR3 for beta chain variable domain of TCR clone 191083 (TRBV7-2, TRBJ2-1)
CASSSGLAGGNEQFF

SEQ ID NO: 382167 - protein, 15 aa, Homo sapiens
  CDR3 for alpha chain variable domain of TCR clone 191084 (TRAV3, TRAJ20)
CAVRDIRLSDYKLGF

SEQ ID NO: 382168 - protein, 15 aa, Homo sapiens
  CDR3 for beta chain variable domain of TCR clone 191084 (TRBV7-9, TRBJ1-6)
CASSSPGRGNSPLHF

SEQ ID NO: 382169 - protein, 15 aa, Homo sapiens
  CDR3 for alpha chain variable domain of TCR clone 191085 (TRAV12-1, TRAJ9)
CVVSFGDTGGFKTIV

SEQ ID NO: 382170 - protein, 13 aa, Homo sapiens
  CDR3 for beta chain variable domain of TCR clone 191085 (TRBV2, TRBJ1-4)
CASSERAGEKLFF

SEQ ID NO: 382171 - protein, 15 aa, Homo sapiens
  CDR3 for alpha chain variable domain of TCR clone 191086 (TRAV12-2, TRAJ53)
CAVNGGGGRNHKLTF

SEQ ID NO: 382172 - protein, 17 aa, Homo sapiens
  CDR3 for beta chain variable domain of TCR clone 191086 (TRBV7-3, TRBJ2-3)
CASSLMKRMRGADTQYF

SEQ ID NO: 382173 - protein, 14 aa, Homo sapiens
  CDR3 for alpha chain variable domain of TCR clone 191087 (TRAV12-2, TRAJ45)
CALPERGGADGLTF

SEQ ID NO: 382174 - protein, 14 aa, Homo sapiens
  CDR3 for beta chain variable domain of TCR clone 191087 (TRBV18, TRBJ1-5)
CASSPGNSNLPQHF

SEQ ID NO: 382175 - protein, 16 aa, Homo sapiens
  CDR3 for alpha chain variable domain of TCR clone 191088 (TRAV3, TRAJ37)
CAVRGKGSGNTDKLIF

SEQ ID NO: 382176 - protein, 12 aa, Homo sapiens
  CDR3 for beta chain variable domain of TCR clone 191088 (TRBV11-2, TRBJ2-2)
CASSLGGGELFF

SEQ ID NO: 382177 - protein, 13 aa, Homo sapiens
  CDR3 for alpha chain variable domain of TCR clone 191089 (TRAV8-1, TRAJ47)
CAVGMEYGNKLGF

SEQ ID NO: 382178 - protein, 13 aa, Homo sapiens
  CDR3 for beta chain variable domain of TCR clone 191089 (TRBV20-1, TRBJ2-2)
CSARVANTGELFF

SEQ ID NO: 382179 - protein, 17 aa, Homo sapiens
  CDR3 for alpha chain variable domain of TCR clone 191090 (TRAV13-1, )
CAADIQNPDPAVYQLRD

SEQ ID NO: 382180 - protein, 12 aa, Homo sapiens
  CDR3 for beta chain variable domain of TCR clone 191090 (TRBV11-2, TRBJ2-2)
CASSLGGGELFF

SEQ ID NO: 382181 - protein, 13 aa, Homo sapiens
  CDR3 for alpha chain variable domain of TCR clone 191091 (TRAV12-2, TRAJ52)
CAVSGTSYGKLTF

SEQ ID NO: 382182 - protein, 13 aa, Homo sapiens
  CDR3 for beta chain variable domain of TCR clone 191091 (TRBV19, TRBJ2-1)
CATSRGVYNEQFF

SEQ ID NO: 382183 - protein, 14 aa, Homo sapiens
  CDR3 for alpha chain variable domain of TCR clone 191092 (TRAV12-2, TRAJ40)
CAVKIPSGTYKYIF

SEQ ID NO: 382184 - protein, 17 aa, Homo sapiens
  CDR3 for beta chain variable domain of TCR clone 191092 (TRBV11-2, TRBJ2-4)
CASSSVGPGGHRNIQYF

SEQ ID NO: 382185 - protein, 17 aa, Homo sapiens
  CDR3 for alpha chain variable domain of TCR clone 191093 (TRAV38-1, TRAJ28)
CAFMKPTSGAWIYQLTF

SEQ ID NO: 382186 - protein, 15 aa, Homo sapiens
  CDR3 for beta chain variable domain of TCR clone 191093 (TRBV5-1, TRBJ2-4)
CASSLGGGGSYIQYF

SEQ ID NO: 382187 - protein, 19 aa, Homo sapiens
  CDR3 for alpha chain variable domain of TCR clone 191094 (TRAV38-1, TRAJ53)
CAFMKHGLERGGSNYQLTF

SEQ ID NO: 382188 - protein, 13 aa, Homo sapiens
  CDR3 for beta chain variable domain of TCR clone 191094 (TRBV19, TRBJ2-7)
CASSPRQSYEQYF

SEQ ID NO: 382189 - protein, 16 aa, Homo sapiens
  CDR3 for alpha chain variable domain of TCR clone 191095 (TRAV12-3, TRAJ53)
CAMSPGSGGSNYELTF

SEQ ID NO: 382190 - protein, 13 aa, Homo sapiens
  CDR3 for beta chain variable domain of TCR clone 191095 (TRBV7-3, TRBJ1-1)
CASSQDWGAEAFF

SEQ ID NO: 382191 - protein, 15 aa, Homo sapiens
  CDR3 for alpha chain variable domain of TCR clone 191096 (TRAV4, TRAJ10)
CPVGDEEGGGNKLTF

SEQ ID NO: 382192 - protein, 15 aa, Homo sapiens
  CDR3 for beta chain variable domain of TCR clone 191096 (TRBV7-2, TRBJ2-7)
CASSLTGQGTYEQYF

SEQ ID NO: 382193 - protein, 14 aa, Homo sapiens
  CDR3 for alpha chain variable domain of TCR clone 191097 (TRAV13-1, TRAJ44)
CAAKATGTASKLTF

SEQ ID NO: 382194 - protein, 14 aa, Homo sapiens
  CDR3 for beta chain variable domain of TCR clone 191097 (TRBV25-1, TRBJ1-1)
RASTHLGGNTEAFF

SEQ ID NO: 382195 - protein, 12 aa, Homo sapiens
  CDR3 for alpha chain variable domain of TCR clone 191098 (TRAV21, TRAJ33)
CAKMDSNYQLIW

SEQ ID NO: 382196 - protein, 13 aa, Homo sapiens
  CDR3 for beta chain variable domain of TCR clone 191098 (TRBV19, TRBJ2-7)
CASRKAGGSEQYF

SEQ ID NO: 382197 - protein, 14 aa, Homo sapiens
  CDR3 for alpha chain variable domain of TCR clone 191099 (TRAV8-4, TRAJ38)
CARLNAGNNRKLLW

SEQ ID NO: 382198 - protein, 12 aa, Homo sapiens
  CDR3 for beta chain variable domain of TCR clone 191099 (TRBV6-1, TRBJ2-7)
CASSEPLYEQYF

SEQ ID NO: 382199 - protein, 14 aa, Homo sapiens
  CDR3 for alpha chain variable domain of TCR clone 191100 (TRAV1-2, TRAJ8)
CAVREDTGFQKLIF

SEQ ID NO: 382200 - protein, 12 aa, Homo sapiens
  CDR3 for beta chain variable domain of TCR clone 191100 (TRBV11-2, TRBJ2-1)
CASSPGNNEQFF

SEQ ID NO: 382201 - protein, 12 aa, Homo sapiens
  CDR3 for alpha chain variable domain of TCR clone 191101 (TRAV16, TRAJ10)
CSRTGGGNKLTF

SEQ ID NO: 382202 - protein, 21 aa, Homo sapiens
  CDR3 for beta chain variable domain of TCR clone 191101 (TRBV4-2, TRBJ2-3)
PCSQKTRPCISVPAAPDTQYF

SEQ ID NO: 382203 - protein, 14 aa, Homo sapiens
  CDR3 for alpha chain variable domain of TCR clone 191102 (TRAV35, TRAJ33)
CAGSSQDSNYQLIW

SEQ ID NO: 382204 - protein, 11 aa, Homo sapiens
  CDR3 for beta chain variable domain of TCR clone 191102 (TRBV29-1, TRBJ2-5)
CSEDRTGTQYF

SEQ ID NO: 382205 - protein, 16 aa, Homo sapiens
  CDR3 for alpha chain variable domain of TCR clone 191103 (TRAV3, TRAJ37)
CAVGPHGSGNTGKLIF

SEQ ID NO: 382206 - protein, 12 aa, Homo sapiens
  CDR3 for beta chain variable domain of TCR clone 191103 (TRBV28, TRBJ2-7)
CASSRSGYEQYF

SEQ ID NO: 382207 - protein, 16 aa, Homo sapiens
  CDR3 for alpha chain variable domain of TCR clone 191104 (TRAV3, TRAJ37)
CAVRGKGSGNTGKLSF

SEQ ID NO: 382208 - protein, 16 aa, Homo sapiens
  CDR3 for beta chain variable domain of TCR clone 191104 (TRBV28, TRBJ1-5)
CASSFRGGYSNQPRHF

SEQ ID NO: 382209 - protein, 15 aa, Homo sapiens
  CDR3 for alpha chain variable domain of TCR clone 191105 (TRAV3, TRAJ21)
CAVREPTSTNFTLDL

SEQ ID NO: 382210 - protein, 13 aa, Homo sapiens
  CDR3 for beta chain variable domain of TCR clone 191105 (TRBV9, TRBJ2-1)
CASSPSGGNEQFF

SEQ ID NO: 382211 - protein, 13 aa, Homo sapiens
  CDR3 for alpha chain variable domain of TCR clone 191106 (TRAV30, TRAJ24)
CGTVTDSWGTLQF

SEQ ID NO: 382212 - protein, 14 aa, Homo sapiens
  CDR3 for beta chain variable domain of TCR clone 191106 (TRBV6-3, TRBJ2-2)
CASTYTPDTGELFF

SEQ ID NO: 382213 - protein, 16 aa, Homo sapiens
  CDR3 for alpha chain variable domain of TCR clone 191107 (TRAV8-3, TRAJ42)
CAVAGDYGGSQGNLIF

SEQ ID NO: 382214 - protein, 14 aa, Homo sapiens
  CDR3 for beta chain variable domain of TCR clone 191107 (TRBV4-1, TRBJ2-2)
CASSQAVNTGELFF

SEQ ID NO: 382215 - protein, 14 aa, Homo sapiens
  CDR3 for alpha chain variable domain of TCR clone 191108 (TRAV12-1, TRAJ26)
CVVKGSNYGQNFVF

SEQ ID NO: 382216 - protein, 15 aa, Homo sapiens
  CDR3 for beta chain variable domain of TCR clone 191108 (TRBV28, TRBJ2-1)
CASSIIAGGRSEQFF

SEQ ID NO: 382217 - protein, 11 aa, Homo sapiens
  CDR3 for alpha chain variable domain of TCR clone 191109 (TRAV12-2, TRAJ31)
CAVTRWARLMF

SEQ ID NO: 382218 - protein, 15 aa, Homo sapiens
  CDR3 for beta chain variable domain of TCR clone 191109 (TRBV29-1, TRBJ2-1)
CSGRDRKSSYNEQFF

SEQ ID NO: 382219 - protein, 12 aa, Homo sapiens
  CDR3 for alpha chain variable domain of TCR clone 191110 (TRAV21, TRAJ49)
CAVNDGGNQFYF

SEQ ID NO: 382220 - protein, 14 aa, Homo sapiens
  CDR3 for beta chain variable domain of TCR clone 191110 (TRBV12-5, TRBJ2-5)
CASCSRTHQETQYF

SEQ ID NO: 382221 - protein, 13 aa, Homo sapiens
  CDR3 for alpha chain variable domain of TCR clone 191111 (TRAV30, TRAJ30)
SVAQSRRDDKIIF

SEQ ID NO: 382222 - protein, 14 aa, Homo sapiens
  CDR3 for beta chain variable domain of TCR clone 191111 (TRBV7-2, TRBJ2-7)
CASSLYPGRYEQYF

SEQ ID NO: 382223 - protein, 12 aa, Homo sapiens
  CDR3 for alpha chain variable domain of TCR clone 191112 (TRAV12-1, TRAJ34)
CVVAGATDKIIF

SEQ ID NO: 382224 - protein, 16 aa, Homo sapiens
  CDR3 for beta chain variable domain of TCR clone 191112 (TRBV7-2, TRBJ1-2)
CASSSNQDRRGHGYTF

SEQ ID NO: 382225 - protein, 14 aa, Homo sapiens
  CDR3 for alpha chain variable domain of TCR clone 191113 (TRAV12-1, TRAJ17)
CVVNYKAAGNKLTL

SEQ ID NO: 382226 - protein, 14 aa, Homo sapiens
  CDR3 for beta chain variable domain of TCR clone 191113 (TRBV7-2, TRBJ2-7)
CASRSQGAAYEQYF

SEQ ID NO: 382227 - protein, 18 aa, Homo sapiens
  CDR3 for alpha chain variable domain of TCR clone 191114 (TRAV21, TRAJ52)
RAVRPSPAGGTSYGQLTF

SEQ ID NO: 382228 - protein, 15 aa, Homo sapiens
  CDR3 for beta chain variable domain of TCR clone 191114 (TRBV6-6, TRBJ2-7)
CASSCSYGGSYEQYF

SEQ ID NO: 382229 - protein, 14 aa, Homo sapiens
  CDR3 for alpha chain variable domain of TCR clone 191115 (TRAV1-2, TRAJ16)
CAVNRFSDGQKLLF

SEQ ID NO: 382230 - protein, 17 aa, Homo sapiens
  CDR3 for beta chain variable domain of TCR clone 191115 (TRBV13, TRBJ2-3)
CASSSLGTSGLTDTQYF

SEQ ID NO: 382231 - protein, 16 aa, Homo sapiens
  CDR3 for alpha chain variable domain of TCR clone 191116 (TRAV30, TRAJ24)
CGTEIVDADSWGKFRF

SEQ ID NO: 382232 - protein, 12 aa, Homo sapiens
  CDR3 for beta chain variable domain of TCR clone 191116 (TRBV11-2, TRBJ2-1)
CASSPGNNEQFF

SEQ ID NO: 382233 - protein, 13 aa, Homo sapiens
  CDR3 for alpha chain variable domain of TCR clone 191117 (TRAV3, TRAJ21)
CAVREPDLNKFYF

SEQ ID NO: 382234 - protein, 15 aa, Homo sapiens
  CDR3 for beta chain variable domain of TCR clone 191117 (TRBV2, TRBJ2-1)
CASSELAGGYNEQFF

SEQ ID NO: 382235 - protein, 14 aa, Homo sapiens
  CDR3 for alpha chain variable domain of TCR clone 191118 (TRAV1-2, TRAJ8)
CAVREDTGFPKLVF

SEQ ID NO: 382236 - protein, 12 aa, Homo sapiens
  CDR3 for beta chain variable domain of TCR clone 191118 (TRBV7-8, TRBJ2-7)
CASSLGDREHYF

SEQ ID NO: 382237 - protein, 14 aa, Homo sapiens
  CDR3 for alpha chain variable domain of TCR clone 191119 (TRAV20, TRAJ36)
CAVQARTGANNLFF

SEQ ID NO: 382238 - protein, 13 aa, Homo sapiens
  CDR3 for beta chain variable domain of TCR clone 191119 (TRBV7-3, TRBJ1-1)
CASSQDWGAEAFF

SEQ ID NO: 382239 - protein, 16 aa, Homo sapiens
  CDR3 for alpha chain variable domain of TCR clone 191120 (TRAV38-1, TRAJ32)
CAFMKGGGGARKKLIF

SEQ ID NO: 382240 - protein, 13 aa, Homo sapiens
  CDR3 for beta chain variable domain of TCR clone 191120 (TRBV20-1, TRBJ2-5)
CSAREAFQETQYF

SEQ ID NO: 382241 - protein, 20 aa, Homo sapiens
  CDR3 for alpha chain variable domain of TCR clone 191121 (TRAV1-2, TRAJ34)
LLKELQMKDSASPNTDKLIF

SEQ ID NO: 382242 - protein, 14 aa, Homo sapiens
  CDR3 for beta chain variable domain of TCR clone 191121 (TRBV2, TRBJ2-1)
CASRTGSSNNEQFF

SEQ ID NO: 382243 - protein, 16 aa, Homo sapiens
  CDR3 for alpha chain variable domain of TCR clone 191122 (TRAV23/DV6, TRAJ7)
CAASRVASMGTTDSLL

SEQ ID NO: 382244 - protein, 17 aa, Homo sapiens
  CDR3 for beta chain variable domain of TCR clone 191122 (TRBV7-8, TRBJ2-6)
CASSAGTGGAGANVLTF

SEQ ID NO: 382245 - protein, 16 aa, Homo sapiens
  CDR3 for alpha chain variable domain of TCR clone 191123 (TRAV8-4, TRAJ5)
CAVSPLTDTGRRALTF

SEQ ID NO: 382246 - protein, 15 aa, Homo sapiens
  CDR3 for beta chain variable domain of TCR clone 191123 (TRBV20-1, TRBJ1-1)
CSASRGVTGNSEAFF

SEQ ID NO: 382247 - protein, 11 aa, Homo sapiens
  CDR3 for alpha chain variable domain of TCR clone 191124 (TRAV2, TRAJ33)
CAVVSNYQLIW

SEQ ID NO: 382248 - protein, 14 aa, Homo sapiens
  CDR3 for beta chain variable domain of TCR clone 191124 (TRBV11-2, TRBJ2-3)
CASSRLARTDTQYF

SEQ ID NO: 382249 - protein, 16 aa, Homo sapiens
  CDR3 for alpha chain variable domain of TCR clone 191125 (TRAV8-6, TRAJ28)
CAVTSKPGAGSYQLTF

SEQ ID NO: 382250 - protein, 14 aa, Homo sapiens
  CDR3 for beta chain variable domain of TCR clone 191125 (TRBV25-1, TRBJ1-1)
CASTHLGGNTEAFF

SEQ ID NO: 382251 - protein, 18 aa, Homo sapiens
  CDR3 for alpha chain variable domain of TCR clone 191126 (TRAV26-1, TRAJ23)
CIVRVGLEVWNQEGKLIF

SEQ ID NO: 382252 - protein, 16 aa, Homo sapiens
  CDR3 for beta chain variable domain of TCR clone 191126 (TRBV12-4, TRBJ2-5)
CASSFFVRGRQETQYF

SEQ ID NO: 382253 - protein, 11 aa, Homo sapiens
  CDR3 for alpha chain variable domain of TCR clone 191127 (TRAV1-1, TRAJ23)
CAVRQGGKLIF

SEQ ID NO: 382254 - protein, 14 aa, Homo sapiens
  CDR3 for beta chain variable domain of TCR clone 191127 (TRBV19, TRBJ2-1)
CASPTFVLSGEQCF

SEQ ID NO: 382255 - protein, 15 aa, Homo sapiens
  CDR3 for alpha chain variable domain of TCR clone 191128 (TRAV6, TRAJ4)
CALGGFSGGYYKLIF

SEQ ID NO: 382256 - protein, 13 aa, Homo sapiens
  CDR3 for beta chain variable domain of TCR clone 191128 (TRBV19, TRBJ1-2)
CASSVPGQDGYTF

SEQ ID NO: 382257 - protein, 14 aa, Homo sapiens
  CDR3 for alpha chain variable domain of TCR clone 191129 (TRAV16, TRAJ33)
CALTAMDSNYQLIW

SEQ ID NO: 382258 - protein, 12 aa, Homo sapiens
  CDR3 for beta chain variable domain of TCR clone 191129 (TRBV5-1, TRBJ1-2)
CASSQDTYGYTF

SEQ ID NO: 382259 - protein, 11 aa, Homo sapiens
  CDR3 for alpha chain variable domain of TCR clone 191130 (TRAV2, TRAJ33)
CAVESNYQLIW

SEQ ID NO: 382260 - protein, 16 aa, Homo sapiens
  CDR3 for beta chain variable domain of TCR clone 191130 (TRBV27, TRBJ2-5)
CASSFGPGGTKETQYF

SEQ ID NO: 382261 - protein, 17 aa, Homo sapiens
  CDR3 for alpha chain variable domain of TCR clone 191131 (TRAV38-1, TRAJ41)
CAFMNPHYSNSGYALNF

SEQ ID NO: 382262 - protein, 13 aa, Homo sapiens
  CDR3 for beta chain variable domain of TCR clone 191131 (TRBV19, TRBJ1-2)
CASSVPGQDGYTF

SEQ ID NO: 382263 - protein, 14 aa, Homo sapiens
  CDR3 for alpha chain variable domain of TCR clone 191132 (TRAV16, TRAJ33)
CALSAMDSNYQLIW

SEQ ID NO: 382264 - protein, 12 aa, Homo sapiens
  CDR3 for beta chain variable domain of TCR clone 191132 (TRBV28, TRBJ2-6)
CAIQAGANVLIF

SEQ ID NO: 382265 - protein, 15 aa, Homo sapiens
  CDR3 for alpha chain variable domain of TCR clone 191133 (TRAV8-4, TRAJ36)
CAVKKSWTGANNLFF

SEQ ID NO: 382266 - protein, 17 aa, Homo sapiens
  CDR3 for beta chain variable domain of TCR clone 191133 (TRBV3-1, TRBJ2-2)
CASSQDSQGPNTGELFF

SEQ ID NO: 382267 - protein, 13 aa, Homo sapiens
  CDR3 for alpha chain variable domain of TCR clone 191134 (TRAV1-1, TRAJ9)
CAAKITGGFKTIF

SEQ ID NO: 382268 - protein, 14 aa, Homo sapiens
  CDR3 for beta chain variable domain of TCR clone 191134 (TRBV20-1, TRBJ2-1)
CSAQIGGSANEQFF

SEQ ID NO: 382269 - protein, 12 aa, Homo sapiens
  CDR3 for alpha chain variable domain of TCR clone 191135 (TRAV3, TRAJ31)
CAVRDGNARLMF

SEQ ID NO: 382270 - protein, 14 aa, Homo sapiens
  CDR3 for beta chain variable domain of TCR clone 191135 (TRBV6-1, TRBJ1-3)
CASVQGGGGNTIYF

SEQ ID NO: 382271 - protein, 17 aa, Homo sapiens
  CDR3 for alpha chain variable domain of TCR clone 191136 (TRAV3, TRAJ6)
CAVRDGPRAGGSYIPTF

SEQ ID NO: 382272 - protein, 18 aa, Homo sapiens
  CDR3 for beta chain variable domain of TCR clone 191136 (TRBV7-9, TRBJ2-7)
CASSLTSSGSRTWYEQYF

SEQ ID NO: 382273 - protein, 10 aa, Homo sapiens
  CDR3 for alpha chain variable domain of TCR clone 191137 (TRAV23/DV6, TRAJ43)
CAAAVAALEQ

SEQ ID NO: 382274 - protein, 15 aa, Homo sapiens
  CDR3 for beta chain variable domain of TCR clone 191137 (TRBV20-1, TRBJ2-7)
CSARDRVSGMDEQYF

SEQ ID NO: 382275 - protein, 13 aa, Homo sapiens
  CDR3 for alpha chain variable domain of TCR clone 191138 (TRAV27, TRAJ39)
CAGDTPAGNMLTF

SEQ ID NO: 382276 - protein, 13 aa, Homo sapiens
  CDR3 for beta chain variable domain of TCR clone 191138 (TRBV4-1, TRBJ2-4)
CASRQVGIDIQYF

SEQ ID NO: 382277 - protein, 12 aa, Homo sapiens
  CDR3 for alpha chain variable domain of TCR clone 191139 (TRAV13-1, TRAJ21)
CAAKECFNKFYF

SEQ ID NO: 382278 - protein, 18 aa, Homo sapiens
  CDR3 for beta chain variable domain of TCR clone 191139 (TRBV20-1, TRBJ2-6)
CSAETTPTHGSGANVLTF

SEQ ID NO: 382279 - protein, 14 aa, Homo sapiens
  CDR3 for alpha chain variable domain of TCR clone 191140 (TRAV1-2, TRAJ16)
CAVNRFSDGQKLLL

SEQ ID NO: 382280 - protein, 13 aa, Homo sapiens
  CDR3 for beta chain variable domain of TCR clone 191140 (TRBV19, TRBJ2-7)
CASSTSGSYEQYF

SEQ ID NO: 382281 - protein, 15 aa, Homo sapiens
  CDR3 for alpha chain variable domain of TCR clone 191141 (TRAV12-3, TRAJ23)
CAMILIYNQGGKPIF

SEQ ID NO: 382282 - protein, 14 aa, Homo sapiens
  CDR3 for beta chain variable domain of TCR clone 191141 (TRBV27, TRBJ1-5)
CASSLDPRNQPQHF

SEQ ID NO: 382283 - protein, 15 aa, Homo sapiens
  CDR3 for alpha chain variable domain of TCR clone 191142 (TRAV26-1, TRAJ48)
CIVRVGDFGHEKLTF

SEQ ID NO: 382284 - protein, 16 aa, Homo sapiens
  CDR3 for beta chain variable domain of TCR clone 191142 (TRBV4-1, TRBJ2-3)
CASSQRAGGLTDTQYF

SEQ ID NO: 382285 - protein, 19 aa, Homo sapiens
  CDR3 for alpha chain variable domain of TCR clone 191143 (TRAV26-1, TRAJ52)
CIVRAHRNAGGTSYGKLTS

SEQ ID NO: 382286 - protein, 14 aa, Homo sapiens
  CDR3 for beta chain variable domain of TCR clone 191143 (TRBV12-4, TRBJ2-3)
CASTIAGWGDTQYF

SEQ ID NO: 382287 - protein, 12 aa, Homo sapiens
  CDR3 for alpha chain variable domain of TCR clone 191144 (TRAV13-2, TRAJ23)
CAERHRGVKLIF

SEQ ID NO: 382288 - protein, 14 aa, Homo sapiens
  CDR3 for beta chain variable domain of TCR clone 191144 (TRBV20-1, TRBJ1-1)
CSAQTRIGGTEAFF

SEQ ID NO: 382289 - protein, 15 aa, Homo sapiens
  CDR3 for alpha chain variable domain of TCR clone 191145 (TRAV17, TRAJ56)
FATEPFTGANSKLTF

SEQ ID NO: 382290 - protein, 15 aa, Homo sapiens
  CDR3 for beta chain variable domain of TCR clone 191145 (TRBV28, TRBJ1-5)
CASSRTGGYVQPQHF

SEQ ID NO: 382291 - protein, 13 aa, Homo sapiens
  CDR3 for alpha chain variable domain of TCR clone 191146 (TRAV3, TRAJ36)
CAVSLGGANNLFF

SEQ ID NO: 382292 - protein, 15 aa, Homo sapiens
  CDR3 for beta chain variable domain of TCR clone 191146 (TRBV6-1, TRBJ2-3)
CASSERGGITDTQYF

SEQ ID NO: 382293 - protein, 14 aa, Homo sapiens
  CDR3 for alpha chain variable domain of TCR clone 191147 (TRAV12-1, TRAJ24)
CVVRSTDSWGKFQF

SEQ ID NO: 382294 - protein, 14 aa, Homo sapiens
  CDR3 for beta chain variable domain of TCR clone 191147 (TRBV5-7, TRBJ2-7)
CASSFKGATGEQYF

SEQ ID NO: 382295 - protein, 13 aa, Homo sapiens
  CDR3 for alpha chain variable domain of TCR clone 191148 (TRAV8-1, TRAJ39)
CAGLNNAGNMLTF

SEQ ID NO: 382296 - protein, 18 aa, Homo sapiens
  CDR3 for beta chain variable domain of TCR clone 191148 (TRBV28, TRBJ2-1)
CASSSPSGLAGAIYEQFF

SEQ ID NO: 382297 - protein, 16 aa, Homo sapiens
  CDR3 for alpha chain variable domain of TCR clone 191149 (TRAV3, TRAJ3)
CAVRDRAKSSASKIIF

SEQ ID NO: 382298 - protein, 16 aa, Homo sapiens
  CDR3 for beta chain variable domain of TCR clone 191149 (TRBV20-1, TRBJ2-4)
CSATSLAELAKNIQFF

SEQ ID NO: 382299 - protein, 16 aa, Homo sapiens
  CDR3 for alpha chain variable domain of TCR clone 191150 (TRAV29/DV5, TRAJ30)
QCTSVQQANRDDKIIF

SEQ ID NO: 382300 - protein, 13 aa, Homo sapiens
  CDR3 for beta chain variable domain of TCR clone 191150 (TRBV2, TRBJ1-4)
CASSERAGEKLFF

SEQ ID NO: 382301 - protein, 14 aa, Homo sapiens
  CDR3 for alpha chain variable domain of TCR clone 191151 (TRAV1-2, TRAJ16)
CAVNRFSVGQKLLF

SEQ ID NO: 382302 - protein, 13 aa, Homo sapiens
  CDR3 for beta chain variable domain of TCR clone 191151 (TRBV20-1, TRBJ1-1)
CSARVGGNTEAFF

SEQ ID NO: 382303 - protein, 17 aa, Homo sapiens
  CDR3 for alpha chain variable domain of TCR clone 191152 (TRAV3, TRAJ6)
CAVSDGPRAGGSYIPTF

SEQ ID NO: 382304 - protein, 15 aa, Homo sapiens
  CDR3 for beta chain variable domain of TCR clone 191152 (TRBV7-2, TRBJ2-1)
CASTHGTGIYNEQFF

SEQ ID NO: 382305 - protein, 14 aa, Homo sapiens
  CDR3 for alpha chain variable domain of TCR clone 191153 (TRAV12-3, TRAJ10)
SHLPLTGGGNKLTF

SEQ ID NO: 382306 - protein, 15 aa, Homo sapiens
  CDR3 for beta chain variable domain of TCR clone 191153 (TRBV11-3, TRBJ2-3)
CASLKDGREGDTLYF

SEQ ID NO: 382307 - protein, 13 aa, Homo sapiens
  CDR3 for alpha chain variable domain of TCR clone 191154 (TRAV2, TRAJ40)
CAVVTSGTYKYIF

SEQ ID NO: 382308 - protein, 15 aa, Homo sapiens
  CDR3 for beta chain variable domain of TCR clone 191154 (TRBV4-1, TRBJ1-2)
CASSQGQGAAYGYTF

SEQ ID NO: 382309 - protein, 13 aa, Homo sapiens
  CDR3 for alpha chain variable domain of TCR clone 191155 (TRAV8-1, TRAJ3)
CAVTYSSASKIIF

SEQ ID NO: 382310 - protein, 17 aa, Homo sapiens
  CDR3 for beta chain variable domain of TCR clone 191155 (TRBV7-8, TRBJ2-6)
CASSAGTGGAGANVLTF

SEQ ID NO: 382311 - protein, 11 aa, Homo sapiens
  CDR3 for alpha chain variable domain of TCR clone 191156 (TRAV21, TRAJ11)
CVVNGYSTLTF

SEQ ID NO: 382312 - protein, 11 aa, Homo sapiens
  CDR3 for beta chain variable domain of TCR clone 191156 (TRBV19, TRBJ1-1)
CASSIGSEAFF

SEQ ID NO: 382313 - protein, 14 aa, Homo sapiens
  CDR3 for alpha chain variable domain of TCR clone 191157 (TRAV39, TRAJ42)
CAGDIARSQGNLIF

SEQ ID NO: 382314 - protein, 15 aa, Homo sapiens
  CDR3 for beta chain variable domain of TCR clone 191157 (TRBV27, TRBJ2-7)
CASSLFGTGLDEQYF

SEQ ID NO: 382315 - protein, 11 aa, Homo sapiens
  CDR3 for alpha chain variable domain of TCR clone 191158 (TRAV26-1, TRAJ37)
CIVRVGRKLIF

SEQ ID NO: 382316 - protein, 14 aa, Homo sapiens
  CDR3 for beta chain variable domain of TCR clone 191158 (TRBV18, TRBJ2-7)
CASSPRGGAYEQHF

SEQ ID NO: 382317 - protein, 14 aa, Homo sapiens
  CDR3 for alpha chain variable domain of TCR clone 191159 (TRAV8-4, TRAJ13)
CAVTLSGGYQKVTF

SEQ ID NO: 382318 - protein, 13 aa, Homo sapiens
  CDR3 for beta chain variable domain of TCR clone 191159 (TRBV2, TRBJ1-1)
CASSEGGNTEAFF

SEQ ID NO: 382319 - protein, 14 aa, Homo sapiens
  CDR3 for alpha chain variable domain of TCR clone 191160 (TRAV1-2, TRAJ16)
CAVNRFSDGQKLLF

SEQ ID NO: 382320 - protein, 14 aa, Homo sapiens
  CDR3 for beta chain variable domain of TCR clone 191160 (TRBV7-2, TRBJ2-7)
CASSTKTSFYEQYF

SEQ ID NO: 382321 - protein, 21 aa, Homo sapiens
  CDR3 for alpha chain variable domain of TCR clone 191161 (TRAV26-1, TRAJ17)
CCVLLHRQSSGSKAAGNKLTF

SEQ ID NO: 382322 - protein, 14 aa, Homo sapiens
  CDR3 for beta chain variable domain of TCR clone 191161 (TRBV28, TRBJ1-2)
CASRIQGANYGYSF

SEQ ID NO: 382323 - protein, 15 aa, Homo sapiens
  CDR3 for alpha chain variable domain of TCR clone 191162 (TRAV17, TRAJ22)
CATVAPSGSAGQLTF

SEQ ID NO: 382324 - protein, 16 aa, Homo sapiens
  CDR3 for beta chain variable domain of TCR clone 191162 (TRBV7-2, TRBJ2-5)
CASSPGGARRGETQYF

SEQ ID NO: 382325 - protein, 16 aa, Homo sapiens
  CDR3 for alpha chain variable domain of TCR clone 191163 (TRAV3, TRAJ42)
CAVRRNYGGSQGNLIF

SEQ ID NO: 382326 - protein, 15 aa, Homo sapiens
  CDR3 for beta chain variable domain of TCR clone 191163 (TRBV11-3, TRBJ2-3)
CASLKDGREGDTQYF

SEQ ID NO: 382327 - protein, 14 aa, Homo sapiens
  CDR3 for alpha chain variable domain of TCR clone 191164 (TRAV35, TRAJ33)
CAGSSQDGNYQLIW

SEQ ID NO: 382328 - protein, 15 aa, Homo sapiens
  CDR3 for beta chain variable domain of TCR clone 191164 (TRBV28, TRBJ2-5)
CASSPGQGSIETQYF

SEQ ID NO: 382329 - protein, 12 aa, Homo sapiens
  CDR3 for alpha chain variable domain of TCR clone 191165 (TRAV8-3, TRAJ20)
CAVGGGDYKLSF

SEQ ID NO: 382330 - protein, 14 aa, Homo sapiens
  CDR3 for beta chain variable domain of TCR clone 191165 (TRBV28, TRBJ2-1)
CASSSVPSYNEQFF

SEQ ID NO: 382331 - protein, 11 aa, Homo sapiens
  CDR3 for alpha chain variable domain of TCR clone 191166 (TRAV12-2, TRAJ31)
CSILNNARLMF

SEQ ID NO: 382332 - protein, 13 aa, Homo sapiens
  CDR3 for beta chain variable domain of TCR clone 191166 (TRBV20-1, TRBJ1-1)
CSARLGQGTEAFF

SEQ ID NO: 382333 - protein, 16 aa, Homo sapiens
  CDR3 for alpha chain variable domain of TCR clone 191167 (TRAV30, TRAJ24)
CGTEIVDADSWGKFQF

SEQ ID NO: 382334 - protein, 15 aa, Homo sapiens
  CDR3 for beta chain variable domain of TCR clone 191167 (TRBV7-9, TRBJ2-2)
CASGPLGTFPGELFF

SEQ ID NO: 382335 - protein, 14 aa, Homo sapiens
  CDR3 for alpha chain variable domain of TCR clone 191168 (TRAV35, TRAJ22)
CAGLRPGSARQLTF

SEQ ID NO: 382336 - protein, 13 aa, Homo sapiens
  CDR3 for beta chain variable domain of TCR clone 191168 (TRBV20-1, TRBJ2-7)
CSATHTSGYEQCF

SEQ ID NO: 382337 - protein, 18 aa, Homo sapiens
  CDR3 for alpha chain variable domain of TCR clone 191169 (TRAV12-3, TRAJ52)
CAMSRTNAGGTSYGKLTF

SEQ ID NO: 382338 - protein, 17 aa, Homo sapiens
  CDR3 for beta chain variable domain of TCR clone 191169 (TRBV13, TRBJ2-3)
CASSRSRVAGGRNTQYF

SEQ ID NO: 382339 - protein, 13 aa, Homo sapiens
  CDR3 for alpha chain variable domain of TCR clone 191170 (TRAV12-3, TRAJ13)
CAMSSGGYQKVTF

SEQ ID NO: 382340 - protein, 16 aa, Homo sapiens
  CDR3 for beta chain variable domain of TCR clone 191170 (TRBV20-1, TRBJ1-4)
CSAPGQGLLTNEKLFF

SEQ ID NO: 382341 - protein, 14 aa, Homo sapiens
  CDR3 for alpha chain variable domain of TCR clone 191171 (TRAV21, TRAJ35)
CAVMPIAFGNVLHC

SEQ ID NO: 382342 - protein, 12 aa, Homo sapiens
  CDR3 for beta chain variable domain of TCR clone 191171 (TRBV7-9, TRBJ2-7)
CASSIKREEQYF

SEQ ID NO: 382343 - protein, 19 aa, Homo sapiens
  CDR3 for alpha chain variable domain of TCR clone 191172 (TRAV21, TRAJ41)
CAVREFRVCTQLLQRHLAV

SEQ ID NO: 382344 - protein, 15 aa, Homo sapiens
  CDR3 for beta chain variable domain of TCR clone 191172 (TRBV18, TRBJ1-5)
CASSPQARSNQPQHF

SEQ ID NO: 382345 - protein, 14 aa, Homo sapiens
  CDR3 for alpha chain variable domain of TCR clone 191173 (TRAV30, TRAJ33)
CGTERRFSNYQLIW

SEQ ID NO: 382346 - protein, 16 aa, Homo sapiens
  CDR3 for beta chain variable domain of TCR clone 191173 (TRBV7-3, TRBJ2-2)
CASSLKRGTLSGALFF

SEQ ID NO: 382347 - protein, 12 aa, Homo sapiens
  CDR3 for alpha chain variable domain of TCR clone 191174 (TRAV8-3, TRAJ26)
CAGDNYGQNFFS

SEQ ID NO: 382348 - protein, 13 aa, Homo sapiens
  CDR3 for beta chain variable domain of TCR clone 191174 (TRBV20-1, TRBJ1-1)
CSAPLGGGTEAFF

SEQ ID NO: 382349 - protein, 14 aa, Homo sapiens
  CDR3 for alpha chain variable domain of TCR clone 191175 (TRAV2, TRAJ37)
CAVDFTCNTGKLIF

SEQ ID NO: 382350 - protein, 17 aa, Homo sapiens
  CDR3 for beta chain variable domain of TCR clone 191175 (TRBV7-8, TRBJ2-6)
CASSAGTGGAGANVLTF

SEQ ID NO: 382351 - protein, 15 aa, Homo sapiens
  CDR3 for alpha chain variable domain of TCR clone 191176 (TRAV21, TRAJ24)
CAARSSTASWGNLQF

SEQ ID NO: 382352 - protein, 13 aa, Homo sapiens
  CDR3 for beta chain variable domain of TCR clone 191176 (TRBV11-2, TRBJ2-5)
CASSATGEETQYF

SEQ ID NO: 382353 - protein, 18 aa, Homo sapiens
  CDR3 for alpha chain variable domain of TCR clone 191177 (TRAV12-3, TRAJ52)
CAMSRTNAGGTSYGKLTF

SEQ ID NO: 382354 - protein, 17 aa, Homo sapiens
  CDR3 for beta chain variable domain of TCR clone 191177 (TRBV7-3, TRBJ2-3)
CDSSLMKRMRGADTQDF

SEQ ID NO: 382355 - protein, 17 aa, Homo sapiens
  CDR3 for alpha chain variable domain of TCR clone 191178 (TRAV8-6, TRAJ22)
CAVSLHPSSGSARQLTF

SEQ ID NO: 382356 - protein, 16 aa, Homo sapiens
  CDR3 for beta chain variable domain of TCR clone 191178 (TRBV19, TRBJ2-7)
CASSPAGSGSLNEQYF

SEQ ID NO: 382357 - protein, 14 aa, Homo sapiens
  CDR3 for alpha chain variable domain of TCR clone 191179 (TRAV12-3, TRAJ10)
SHLPLTGGGNKLTF

SEQ ID NO: 382358 - protein, 15 aa, Homo sapiens
  CDR3 for beta chain variable domain of TCR clone 191179 (TRBV11-2, TRBJ1-3)
CASSLDVTVGNTIYF

SEQ ID NO: 382359 - protein, 12 aa, Homo sapiens
  CDR3 for alpha chain variable domain of TCR clone 191180 (TRAV26-1, TRAJ35)
CIGLSFGNVLHC

SEQ ID NO: 382360 - protein, 12 aa, Homo sapiens
  CDR3 for beta chain variable domain of TCR clone 191180 (TRBV12-5, TRBJ2-3)
CASGGAADTQYF

SEQ ID NO: 382361 - protein, 13 aa, Homo sapiens
  CDR3 for alpha chain variable domain of TCR clone 191181 (TRAV12-3, TRAJ5)
CAMRPTGRRALTF

SEQ ID NO: 382362 - protein, 15 aa, Homo sapiens
  CDR3 for beta chain variable domain of TCR clone 191181 (TRBV4-1, TRBJ2-1)
CASSQDPGNYNEQFF

SEQ ID NO: 382363 - protein, 13 aa, Homo sapiens
  CDR3 for alpha chain variable domain of TCR clone 191182 (TRAV26-1, TRAJ48)
CIVRVVGDEKFTF

SEQ ID NO: 382364 - protein, 19 aa, Homo sapiens
  CDR3 for beta chain variable domain of TCR clone 191182 (TRBV11-3, TRBJ2-2)
CASSTRPGAKTTNTGELFF

SEQ ID NO: 382365 - protein, 13 aa, Homo sapiens
  CDR3 for alpha chain variable domain of TCR clone 191183 (TRAV8-6, TRAJ9)
CAVWDTGGFKTIF

SEQ ID NO: 382366 - protein, 15 aa, Homo sapiens
  CDR3 for beta chain variable domain of TCR clone 191183 (TRBV2, TRBJ2-1)
CASSELAGSYNEQFF

SEQ ID NO: 382367 - protein, 15 aa, Homo sapiens
  CDR3 for alpha chain variable domain of TCR clone 191184 (TRAV26-1, TRAJ28)
CIARVAGAGSYQLTF

SEQ ID NO: 382368 - protein, 19 aa, Homo sapiens
  CDR3 for beta chain variable domain of TCR clone 191184 (TRBV7-3, TRBJ2-7)
CASSLTGVAGGWPSYEQYF

SEQ ID NO: 382369 - protein, 11 aa, Homo sapiens
  CDR3 for alpha chain variable domain of TCR clone 191185 (TRAV12-1, TRAJ39)
CVVSAGNMLTF

SEQ ID NO: 382370 - protein, 14 aa, Homo sapiens
  CDR3 for beta chain variable domain of TCR clone 191185 (TRBV7-2, TRBJ2-5)
CASSTRGSSETQYF

SEQ ID NO: 382371 - protein, 12 aa, Homo sapiens
  CDR3 for alpha chain variable domain of TCR clone 191186 (TRAV1-1, TRAJ30)
CAVRGRDDKIIF

SEQ ID NO: 382372 - protein, 14 aa, Homo sapiens
  CDR3 for beta chain variable domain of TCR clone 191186 (TRBV4-1, TRBJ2-2)
CASSQAVNTGELFF

SEQ ID NO: 382373 - protein, 13 aa, Homo sapiens
  CDR3 for alpha chain variable domain of TCR clone 191187 (TRAV8-3, TRAJ44)
CAVVPGTASTLTF

SEQ ID NO: 382374 - protein, 12 aa, Homo sapiens
  CDR3 for beta chain variable domain of TCR clone 191187 (TRBV7-8, TRBJ2-7)
CASSLGDREQYF

SEQ ID NO: 382375 - protein, 10 aa, Homo sapiens
  CDR3 for alpha chain variable domain of TCR clone 191188 (TRAV38-1, TRAJ34)
CAFMDDKLIF

SEQ ID NO: 382376 - protein, 14 aa, Homo sapiens
  CDR3 for beta chain variable domain of TCR clone 191188 (TRBV7-2, TRBJ2-2)
CASSLNRNTGELFF

SEQ ID NO: 382377 - protein, 13 aa, Homo sapiens
  CDR3 for alpha chain variable domain of TCR clone 191189 (TRAV25, TRAJ30)
CAGRVDRDDKIIF

SEQ ID NO: 382378 - protein, 17 aa, Homo sapiens
  CDR3 for beta chain variable domain of TCR clone 191189 (TRBV7-9, TRBJ2-6)
CAGSCGAGYSGANVLTF

SEQ ID NO: 382379 - protein, 15 aa, Homo sapiens
  CDR3 for alpha chain variable domain of TCR clone 191190 (TRAV12-1, TRAJ38)
CVVNLHAGNNRKLIW

SEQ ID NO: 382380 - protein, 13 aa, Homo sapiens
  CDR3 for beta chain variable domain of TCR clone 191190 (TRBV7-6, TRBJ1-5)
CASSLTDNQPQHF

SEQ ID NO: 382381 - protein, 23 aa, Homo sapiens
  CDR3 for alpha chain variable domain of TCR clone 191191 (TRAV26-1, TRAJ38)
CIADNAGNNHIQNPDPAVYQLSD

SEQ ID NO: 382382 - protein, 17 aa, Homo sapiens
  CDR3 for beta chain variable domain of TCR clone 191191 (TRBV11-2, TRBJ2-6)
CASSQRDIFSGANVLIF

SEQ ID NO: 382383 - protein, 14 aa, Homo sapiens
  CDR3 for alpha chain variable domain of TCR clone 191192 (TRAV2, TRAJ9)
CAVEDRSGGFTTIF

SEQ ID NO: 382384 - protein, 15 aa, Homo sapiens
  CDR3 for beta chain variable domain of TCR clone 191192 (TRBV7-8, TRBJ2-5)
CASSYAGGEQETQYF

SEQ ID NO: 382385 - protein, 13 aa, Homo sapiens
  CDR3 for alpha chain variable domain of TCR clone 191193 (TRAV12-1, TRAJ34)
CGEPLRNTDKLIF

SEQ ID NO: 382386 - protein, 20 aa, Homo sapiens
  CDR3 for beta chain variable domain of TCR clone 191193 (TRBV19, TRBJ2-1)
CASCISRTVTSTRLNNEQFF

SEQ ID NO: 382387 - protein, 15 aa, Homo sapiens
  CDR3 for alpha chain variable domain of TCR clone 191194 (TRAV12-2, TRAJ23)
CAVKPIYNQGGKLIF

SEQ ID NO: 382388 - protein, 15 aa, Homo sapiens
  CDR3 for beta chain variable domain of TCR clone 191194 (TRBV5-1, TRBJ1-2)
CASSFVGGQSQGYTF

SEQ ID NO: 382389 - protein, 13 aa, Homo sapiens
  CDR3 for alpha chain variable domain of TCR clone 191195 (TRAV29/DV5, TRAJ31)
CAASRNNNARLMF

SEQ ID NO: 382390 - protein, 14 aa, Homo sapiens
  CDR3 for beta chain variable domain of TCR clone 191195 (TRBV7-3, TRBJ2-1)
CASSLTGGANEQFF

SEQ ID NO: 382391 - protein, 14 aa, Homo sapiens
  CDR3 for alpha chain variable domain of TCR clone 191196 (TRAV12-2, TRAJ13)
CAVKKTGGYQKGTF

SEQ ID NO: 382392 - protein, 16 aa, Homo sapiens
  CDR3 for beta chain variable domain of TCR clone 191196 (TRBV4-2, TRBJ2-4)
CASSQELRRAKNMQYF

SEQ ID NO: 382393 - protein, 16 aa, Homo sapiens
  CDR3 for alpha chain variable domain of TCR clone 191197 (TRAV30, TRAJ24)
CGTEIVDADSWGKFQF

SEQ ID NO: 382394 - protein, 15 aa, Homo sapiens
  CDR3 for beta chain variable domain of TCR clone 191197 (TRBV4-1, TRBJ2-3)
CASGRGQGIPDTQYF

SEQ ID NO: 382395 - protein, 14 aa, Homo sapiens
  CDR3 for alpha chain variable domain of TCR clone 191198 (TRAV12-3, TRAJ43)
CAMSLGGAGTRLTG

SEQ ID NO: 382396 - protein, 16 aa, Homo sapiens
  CDR3 for beta chain variable domain of TCR clone 191198 (TRBV24-1, TRBJ2-1)
CATSGVTGANYNEQFF

SEQ ID NO: 382397 - protein, 12 aa, Homo sapiens
  CDR3 for alpha chain variable domain of TCR clone 191199 (TRAV3, TRAJ43)
CAVRDPNNDMRF

SEQ ID NO: 382398 - protein, 15 aa, Homo sapiens
  CDR3 for beta chain variable domain of TCR clone 191199 (TRBV5-1, TRBJ2-1)
CASRPPRAPYNEQFF

SEQ ID NO: 382399 - protein, 14 aa, Homo sapiens
  CDR3 for alpha chain variable domain of TCR clone 191200 (TRAV16, TRAJ26)
CALSSANYGKNFDF

SEQ ID NO: 382400 - protein, 16 aa, Homo sapiens
  CDR3 for beta chain variable domain of TCR clone 191200 (TRBV20-1, TRBJ1-4)
CSAPGQGLLTNEKLFF

SEQ ID NO: 382401 - protein, 12 aa, Homo sapiens
  CDR3 for alpha chain variable domain of TCR clone 191201 (TRAV21, TRAJ33)
CAKLDSNYQLIW

SEQ ID NO: 382402 - protein, 17 aa, Homo sapiens
  CDR3 for beta chain variable domain of TCR clone 191201 (TRBV20-1, TRBJ2-2)
CSASGSGQGGLTGELFF

SEQ ID NO: 382403 - protein, 15 aa, Homo sapiens
  CDR3 for alpha chain variable domain of TCR clone 191202 (TRAV27, TRAJ38)
CAARRNAGNNRKLIW

SEQ ID NO: 382404 - protein, 15 aa, Homo sapiens
  CDR3 for beta chain variable domain of TCR clone 191202 (TRBV4-1, TRBJ1-4)
CARSDTGGTNEKLFF

SEQ ID NO: 382405 - protein, 14 aa, Homo sapiens
  CDR3 for alpha chain variable domain of TCR clone 191203 (TRAV12-2, TRAJ4)
CAEDLSGGYNKLFF

SEQ ID NO: 382406 - protein, 13 aa, Homo sapiens
  CDR3 for beta chain variable domain of TCR clone 191203 (TRBV7-9, TRBJ1-2)
RASSLKQNYGYTF

SEQ ID NO: 382407 - protein, 14 aa, Homo sapiens
  CDR3 for alpha chain variable domain of TCR clone 191204 (TRAV12-2, TRAJ13)
CAVKKTGGYQKVTF

SEQ ID NO: 382408 - protein, 18 aa, Homo sapiens
  CDR3 for beta chain variable domain of TCR clone 191204 (TRBV6-6, TRBJ1-3)
CASSYSKWDSISGNTIYF

SEQ ID NO: 382409 - protein, 12 aa, Homo sapiens
  CDR3 for alpha chain variable domain of TCR clone 191205 (TRAV3, TRAJ27)
CAVRDAAGNSTF

SEQ ID NO: 382410 - protein, 13 aa, Homo sapiens
  CDR3 for beta chain variable domain of TCR clone 191205 (TRBV10-3, TRBJ1-2)
CAINADLNYGYTF

SEQ ID NO: 382411 - protein, 14 aa, Homo sapiens
  CDR3 for alpha chain variable domain of TCR clone 191206 (TRAV12-3, TRAJ9)
CAMSVETGGFKTIF

SEQ ID NO: 382412 - protein, 15 aa, Homo sapiens
  CDR3 for beta chain variable domain of TCR clone 191206 (TRBV20-1, TRBJ2-7)
CSARDRVSGMDEQYF

SEQ ID NO: 382413 - protein, 14 aa, Homo sapiens
  CDR3 for alpha chain variable domain of TCR clone 191207 (TRAV1-2, TRAJ16)
CAVNRFSDGQKLLF

SEQ ID NO: 382414 - protein, 16 aa, Homo sapiens
  CDR3 for beta chain variable domain of TCR clone 191207 (TRBV7-9, TRBJ1-3)
CASSQTSGLRMGTIYF

SEQ ID NO: 382415 - protein, 15 aa, Homo sapiens
  CDR3 for alpha chain variable domain of TCR clone 191208 (TRAV3, TRAJ20)
CAVRDIKLSDYKLCF

SEQ ID NO: 382416 - protein, 15 aa, Homo sapiens
  CDR3 for beta chain variable domain of TCR clone 191208 (TRBV7-9, TRBJ1-6)
CASSSPGRGNSPLHF

SEQ ID NO: 382417 - protein, 12 aa, Homo sapiens
  CDR3 for alpha chain variable domain of TCR clone 191209 (TRAV17, TRAJ12)
CAKLRSSYKLIF

SEQ ID NO: 382418 - protein, 18 aa, Homo sapiens
  CDR3 for beta chain variable domain of TCR clone 191209 (TRBV20-1, TRBJ2-3)
CSASGLAGGPGTTDTQYF

SEQ ID NO: 382419 - protein, 11 aa, Homo sapiens
  CDR3 for alpha chain variable domain of TCR clone 191210 (TRAV13-1, TRAJ39)
CASHAGNILTF

SEQ ID NO: 382420 - protein, 13 aa, Homo sapiens
  CDR3 for beta chain variable domain of TCR clone 191210 (TRBV11-2, TRBJ1-5)
CQQLRHGRQPQHF

SEQ ID NO: 382421 - protein, 17 aa, Homo sapiens
  CDR3 for alpha chain variable domain of TCR clone 191211 (TRAV4, TRAJ20)
CTTASWVKGNNDYKLSF

SEQ ID NO: 382422 - protein, 17 aa, Homo sapiens
  CDR3 for beta chain variable domain of TCR clone 191211 (TRBV11-2, TRBJ2-1)
CASSLYPPWVEYNEQFF

SEQ ID NO: 382423 - protein, 17 aa, Homo sapiens
  CDR3 for alpha chain variable domain of TCR clone 191212 (TRAV38-2/DV8, TRAJ28)
CAFLTLYSGAGRYPLTF

SEQ ID NO: 382424 - protein, 14 aa, Homo sapiens
  CDR3 for beta chain variable domain of TCR clone 191212 (TRBV7-2, TRBJ2-5)
CASSLSGGGVTQYF

SEQ ID NO: 382425 - protein, 14 aa, Homo sapiens
  CDR3 for alpha chain variable domain of TCR clone 191213 (TRAV38-1, TRAJ40)
CALRPTSGTYQYIF

SEQ ID NO: 382426 - protein, 15 aa, Homo sapiens
  CDR3 for beta chain variable domain of TCR clone 191213 (TRBV4-1, TRBJ1-4)
CASSDTGGTNEKLFF

SEQ ID NO: 382427 - protein, 16 aa, Homo sapiens
  CDR3 for alpha chain variable domain of TCR clone 191214 (TRAV27, TRAJ53)
CAAPEGSGGSNYNLTF

SEQ ID NO: 382428 - protein, 14 aa, Homo sapiens
  CDR3 for beta chain variable domain of TCR clone 191214 (TRBV4-3, TRBJ1-5)
CASSQGGQGWPQHF

SEQ ID NO: 382429 - protein, 19 aa, Homo sapiens
  CDR3 for alpha chain variable domain of TCR clone 191215 (TRAV26-1, TRAJ52)
CIVRVANNAGGTSYGKLTF

SEQ ID NO: 382430 - protein, 15 aa, Homo sapiens
  CDR3 for beta chain variable domain of TCR clone 191215 (TRBV7-3, TRBJ2-1)
CASSLGQGPFGEQFF

SEQ ID NO: 382431 - protein, 11 aa, Homo sapiens
  CDR3 for alpha chain variable domain of TCR clone 191216 (TRAV13-1, TRAJ30)
CAASRDDKIIF

SEQ ID NO: 382432 - protein, 17 aa, Homo sapiens
  CDR3 for beta chain variable domain of TCR clone 191216 (TRBV18, TRBJ2-3)
CASSPFGDGGFTDTQYF

SEQ ID NO: 382433 - protein, 14 aa, Homo sapiens
  CDR3 for alpha chain variable domain of TCR clone 191217 (TRAV9-2, TRAJ39)
CALYIYNAGNMLTF

SEQ ID NO: 382434 - protein, 12 aa, Homo sapiens
  CDR3 for beta chain variable domain of TCR clone 191217 (TRBV11-3, TRBJ2-2)
CASSLGGGELFF

SEQ ID NO: 382435 - protein, 15 aa, Homo sapiens
  CDR3 for alpha chain variable domain of TCR clone 191218 (TRAV17, TRAJ16)
CATALRVSDGQKLPF

SEQ ID NO: 382436 - protein, 15 aa, Homo sapiens
  CDR3 for beta chain variable domain of TCR clone 191218 (TRBV20-1, TRBJ1-1)
CSASRGVTGHTEAFF

SEQ ID NO: 382437 - protein, 16 aa, Homo sapiens
  CDR3 for alpha chain variable domain of TCR clone 191219 (TRAV13-1, TRAJ17)
CAASKGVKAAGNKQTF

SEQ ID NO: 382438 - protein, 15 aa, Homo sapiens
  CDR3 for beta chain variable domain of TCR clone 191219 (TRBV20-1, TRBJ1-5)
CSAREGGYSNQPQHF

SEQ ID NO: 382439 - protein, 14 aa, Homo sapiens
  CDR3 for alpha chain variable domain of TCR clone 191220 (TRAV12-1, TRAJ12)
CVVFWMDSSYKLIF

SEQ ID NO: 382440 - protein, 14 aa, Homo sapiens
  CDR3 for beta chain variable domain of TCR clone 191220 (TRBV7-9, TRBJ2-2)
CASSLVQDTGELFF

SEQ ID NO: 382441 - protein, 14 aa, Homo sapiens
  CDR3 for alpha chain variable domain of TCR clone 191221 (TRAV1-2, TRAJ15)
CAVRDRQAGTALIF

SEQ ID NO: 382442 - protein, 15 aa, Homo sapiens
  CDR3 for beta chain variable domain of TCR clone 191221 (TRBV7-2, TRBJ2-1)
CASSLASGRVNEQCF

SEQ ID NO: 382443 - protein, 16 aa, Homo sapiens
  CDR3 for alpha chain variable domain of TCR clone 191222 (TRAV23/DV6, TRAJ34)
CAASGALSYNTDKLIF

SEQ ID NO: 382444 - protein, 15 aa, Homo sapiens
  CDR3 for beta chain variable domain of TCR clone 191222 (TRBV19, TRBJ2-1)
CASSSPGVPLDEQFF

SEQ ID NO: 382445 - protein, 11 aa, Homo sapiens
  CDR3 for alpha chain variable domain of TCR clone 191223 (TRAV12-2, TRAJ39)
CAVNNILTFGG

SEQ ID NO: 382446 - protein, 16 aa, Homo sapiens
  CDR3 for beta chain variable domain of TCR clone 191223 (TRBV9, TRBJ2-7)
CASSAGPDRSPYEQYF

SEQ ID NO: 382447 - protein, 11 aa, Homo sapiens
  CDR3 for alpha chain variable domain of TCR clone 191224 (TRAV4, TRAJ23)
CLVAPGGKLIF

SEQ ID NO: 382448 - protein, 14 aa, Homo sapiens
  CDR3 for beta chain variable domain of TCR clone 191224 (TRBV4-1, TRBJ2-2)
CASSQAVNTGELFF

SEQ ID NO: 382449 - protein, 13 aa, Homo sapiens
  CDR3 for alpha chain variable domain of TCR clone 191225 (TRAV39, TRAJ48)
CAAVNFGNEKLNF

SEQ ID NO: 382450 - protein, 12 aa, Homo sapiens
  CDR3 for beta chain variable domain of TCR clone 191225 (TRBV5-5, TRBJ2-5)
CASSYFGETQYF

SEQ ID NO: 382451 - protein, 12 aa, Homo sapiens
  CDR3 for alpha chain variable domain of TCR clone 191226 (TRAV36/DV7, TRAJ54)
CAVVRGAQKLVF

SEQ ID NO: 382452 - protein, 14 aa, Homo sapiens
  CDR3 for beta chain variable domain of TCR clone 191226 (TRBV7-3, TRBJ1-1)
CASSLKGENTEAFF

SEQ ID NO: 382453 - protein, 12 aa, Homo sapiens
  CDR3 for alpha chain variable domain of TCR clone 191227 (TRAV12-3, TRAJ17)
CAMTLTSNKLTF

SEQ ID NO: 382454 - protein, 15 aa, Homo sapiens
  CDR3 for beta chain variable domain of TCR clone 191227 (TRBV11-2, TRBJ2-2)
CASSSDRVNAGELFF

SEQ ID NO: 382455 - protein, 15 aa, Homo sapiens
  CDR3 for alpha chain variable domain of TCR clone 191228 (TRAV26-1, TRAJ29)
CIVRVEGSGNTPLVF

SEQ ID NO: 382456 - protein, 14 aa, Homo sapiens
  CDR3 for beta chain variable domain of TCR clone 191228 (TRBV18, TRBJ2-5)
CASSPAVSQETQYF

SEQ ID NO: 382457 - protein, 14 aa, Homo sapiens
  CDR3 for alpha chain variable domain of TCR clone 191229 (TRAV1-2, TRAJ16)
CAVNRFSDGKKLLF

SEQ ID NO: 382458 - protein, 12 aa, Homo sapiens
  CDR3 for beta chain variable domain of TCR clone 191229 (TRBV29-1, TRBJ2-3)
CSVTGGADTQYF

SEQ ID NO: 382459 - protein, 14 aa, Homo sapiens
  CDR3 for alpha chain variable domain of TCR clone 191230 (TRAV27, TRAJ41)
CAVRTQIPGMHSTS

SEQ ID NO: 382460 - protein, 15 aa, Homo sapiens
  CDR3 for beta chain variable domain of TCR clone 191230 (TRBV6-6, TRBJ1-1)
CASSPRGDVETEAFF

SEQ ID NO: 382461 - protein, 14 aa, Homo sapiens
  CDR3 for alpha chain variable domain of TCR clone 191231 (TRAV27, TRAJ22)
CAGLPSGSARQLTF

SEQ ID NO: 382462 - protein, 14 aa, Homo sapiens
  CDR3 for beta chain variable domain of TCR clone 191231 (TRBV12-4, TRBJ2-7)
CASSPAGLKYEQYF

SEQ ID NO: 382463 - protein, 15 aa, Homo sapiens
  CDR3 for alpha chain variable domain of TCR clone 191232 (TRAV3, TRAJ32)
CAVSSYGGSTNKLIF

SEQ ID NO: 382464 - protein, 16 aa, Homo sapiens
  CDR3 for beta chain variable domain of TCR clone 191232 (TRBV5-1, TRBJ2-5)
CASSLSLAGAQETQYF

SEQ ID NO: 382465 - protein, 15 aa, Homo sapiens
  CDR3 for alpha chain variable domain of TCR clone 191233 (TRAV2, TRAJ9)
CAVAALNTGGFKTVF

SEQ ID NO: 382466 - protein, 14 aa, Homo sapiens
  CDR3 for beta chain variable domain of TCR clone 191233 (TRBV7-8, TRBJ2-5)
CASSATGGQETQYF

SEQ ID NO: 382467 - protein, 13 aa, Homo sapiens
  CDR3 for alpha chain variable domain of TCR clone 191234 (TRAV12-3, TRAJ13)
CAMGTGGYQKVTF

SEQ ID NO: 382468 - protein, 19 aa, Homo sapiens
  CDR3 for beta chain variable domain of TCR clone 191234 (TRBV7-2, TRBJ2-5)
CASSTGGGVKDPVLRARHA

SEQ ID NO: 382469 - protein, 17 aa, Homo sapiens
  CDR3 for alpha chain variable domain of TCR clone 191235 (TRAV13-1, TRAJ52)
CAAGRNAGGTSYGKLTF

SEQ ID NO: 382470 - protein, 14 aa, Homo sapiens
  CDR3 for beta chain variable domain of TCR clone 191235 (TRBV2, TRBJ1-5)
CASSESRGGQPQHF

SEQ ID NO: 382471 - protein, 14 aa, Homo sapiens
  CDR3 for alpha chain variable domain of TCR clone 191236 (TRAV1-2, TRAJ16)
CAVNRFSDGQKLLF

SEQ ID NO: 382472 - protein, 15 aa, Homo sapiens
  CDR3 for beta chain variable domain of TCR clone 191236 (TRBV6-3, TRBJ2-7)
CASSSPGTVVYEQYF

SEQ ID NO: 382473 - protein, 15 aa, Homo sapiens
  CDR3 for alpha chain variable domain of TCR clone 191237 (TRAV17, TRAJ13)
CATVPNSGGYQKVTF

SEQ ID NO: 382474 - protein, 15 aa, Homo sapiens
  CDR3 for beta chain variable domain of TCR clone 191237 (TRBV19, TRBJ1-1)
CASTSGQIQNTEAFF

SEQ ID NO: 382475 - protein, 12 aa, Homo sapiens
  CDR3 for alpha chain variable domain of TCR clone 191238 (TRAV12-2, TRAJ10)
WGVTGGGNKLTF

SEQ ID NO: 382476 - protein, 14 aa, Homo sapiens
  CDR3 for beta chain variable domain of TCR clone 191238 (TRBV27, TRBJ2-7)
CASATGTERRKQYF

SEQ ID NO: 382477 - protein, 15 aa, Homo sapiens
  CDR3 for alpha chain variable domain of TCR clone 191239 (TRAV8-4, TRAJ47)
CAVSDPEEYVNKLVF

SEQ ID NO: 382478 - protein, 15 aa, Homo sapiens
  CDR3 for beta chain variable domain of TCR clone 191239 (TRBV11-2, TRBJ2-1)
CASSLGPDSYNEQFF

SEQ ID NO: 382479 - protein, 17 aa, Homo sapiens
  CDR3 for alpha chain variable domain of TCR clone 191240 (TRAV8-1, TRAJ43)
CAVTNDMRFGAGTRLTG

SEQ ID NO: 382480 - protein, 15 aa, Homo sapiens
  CDR3 for beta chain variable domain of TCR clone 191240 (TRBV19, TRBJ1-2)
CASSVGQVLNYGYTF

SEQ ID NO: 382481 - protein, 15 aa, Homo sapiens
  CDR3 for alpha chain variable domain of TCR clone 191241 (TRAV3, TRAJ5)
CAVRDLDTGRRALTF

SEQ ID NO: 382482 - protein, 14 aa, Homo sapiens
  CDR3 for beta chain variable domain of TCR clone 191241 (TRBV27, TRBJ2-2)
CASRPGVNTGELFF

SEQ ID NO: 382483 - protein, 14 aa, Homo sapiens
  CDR3 for alpha chain variable domain of TCR clone 191242 (TRAV12-1, TRAJ24)
CVVRSTDSWGKFRF

SEQ ID NO: 382484 - protein, 13 aa, Homo sapiens
  CDR3 for beta chain variable domain of TCR clone 191242 (TRBV2, TRBJ2-3)
CASILAGGQGQYF

SEQ ID NO: 382485 - protein, 14 aa, Homo sapiens
  CDR3 for alpha chain variable domain of TCR clone 191243 (TRAV36/DV7, TRAJ44)
CCGANTGTASKLTF

SEQ ID NO: 382486 - protein, 16 aa, Homo sapiens
  CDR3 for beta chain variable domain of TCR clone 191243 (TRBV7-9, TRBJ1-2)
CASSLGFSSGEDGYTL

SEQ ID NO: 382487 - protein, 12 aa, Homo sapiens
  CDR3 for alpha chain variable domain of TCR clone 191244 (TRAV27, TRAJ37)
CADSGNTGKIIF

SEQ ID NO: 382488 - protein, 18 aa, Homo sapiens
  CDR3 for beta chain variable domain of TCR clone 191244 (TRBV7-9, TRBJ1-1)
CASSKPWDTMGMNTEAFF

SEQ ID NO: 382489 - protein, 12 aa, Homo sapiens
  CDR3 for alpha chain variable domain of TCR clone 191245 (TRAV12-3, TRAJ40)
CAMSSGTYKYIF

SEQ ID NO: 382490 - protein, 16 aa, Homo sapiens
  CDR3 for beta chain variable domain of TCR clone 191245 (TRBV7-2, TRBJ2-3)
CASSLARASGISTQYF

SEQ ID NO: 382491 - protein, 13 aa, Homo sapiens
  CDR3 for alpha chain variable domain of TCR clone 191246 (TRAV2, TRAJ26)
CAVVGNYGQNFVF

SEQ ID NO: 382492 - protein, 16 aa, Homo sapiens
  CDR3 for beta chain variable domain of TCR clone 191246 (TRBV19, TRBJ2-1)
CASSMGGGSSYNEQFF

SEQ ID NO: 382493 - protein, 13 aa, Homo sapiens
  CDR3 for alpha chain variable domain of TCR clone 191247 (TRAV17, TRAJ5)
CALRGTGRRALTF

SEQ ID NO: 382494 - protein, 15 aa, Homo sapiens
  CDR3 for beta chain variable domain of TCR clone 191247 (TRBV4-1, TRBJ1-2)
CASSQGQGAAYGYTF

SEQ ID NO: 382495 - protein, 14 aa, Homo sapiens
  CDR3 for alpha chain variable domain of TCR clone 191248 (TRAV26-1, TRAJ21)
FIVRPPYNFNKFYF

SEQ ID NO: 382496 - protein, 14 aa, Homo sapiens
  CDR3 for beta chain variable domain of TCR clone 191248 (TRBV19, TRBJ2-1)
CASPTFVLSGEQFL

SEQ ID NO: 382497 - protein, 15 aa, Homo sapiens
  CDR3 for alpha chain variable domain of TCR clone 191249 (TRAV12-1, TRAJ5)
CVVNLRNTGRRALTF

SEQ ID NO: 382498 - protein, 12 aa, Homo sapiens
  CDR3 for beta chain variable domain of TCR clone 191249 (TRBV11-2, TRBJ2-2)
CASSLGGGELFF

SEQ ID NO: 382499 - protein, 11 aa, Homo sapiens
  CDR3 for alpha chain variable domain of TCR clone 191250 (TRAV21, TRAJ34)
CAHYNTDKLIF

SEQ ID NO: 382500 - protein, 15 aa, Homo sapiens
  CDR3 for beta chain variable domain of TCR clone 191250 (TRBV19, TRBJ1-2)
CASSVGQVLNYGYTF

SEQ ID NO: 382501 - protein, 12 aa, Homo sapiens
  CDR3 for alpha chain variable domain of TCR clone 191251 (TRAV13-2, TRAJ23)
CAERHRGGRLIF

SEQ ID NO: 382502 - protein, 16 aa, Homo sapiens
  CDR3 for beta chain variable domain of TCR clone 191251 (TRBV27, TRBJ2-2)
CASSLSGFWVTGELFF

SEQ ID NO: 382503 - protein, 15 aa, Homo sapiens
  CDR3 for alpha chain variable domain of TCR clone 191252 (TRAV21, TRAJ45)
CAVSYSGGGADGLTF

SEQ ID NO: 382504 - protein, 19 aa, Homo sapiens
  CDR3 for beta chain variable domain of TCR clone 191252 (TRBV4-3, TRBJ2-7)
CISAPAAKQPSGTPYEQYF

SEQ ID NO: 382505 - protein, 12 aa, Homo sapiens
  CDR3 for alpha chain variable domain of TCR clone 191253 (TRAV3, TRAJ20)
CAVRDPDYKLSF

SEQ ID NO: 382506 - protein, 14 aa, Homo sapiens
  CDR3 for beta chain variable domain of TCR clone 191253 (TRBV5-5, TRBJ1-1)
CASSLTPVNTEAFF

SEQ ID NO: 382507 - protein, 10 aa, Homo sapiens
  CDR3 for alpha chain variable domain of TCR clone 191254 (TRAV8-4, TRAJ43)
CAVSADDMRF

SEQ ID NO: 382508 - protein, 14 aa, Homo sapiens
  CDR3 for beta chain variable domain of TCR clone 191254 (TRBV7-9, TRBJ2-5)
CASSLDTAQETQYF

SEQ ID NO: 382509 - protein, 12 aa, Homo sapiens
  CDR3 for alpha chain variable domain of TCR clone 191255 (TRAV12-3, TRAJ17)
CAMTLTGNKLTF

SEQ ID NO: 382510 - protein, 13 aa, Homo sapiens
  CDR3 for beta chain variable domain of TCR clone 191255 (TRBV7-9, TRBJ1-2)
CASSLKQNYGYNF

SEQ ID NO: 382511 - protein, 12 aa, Homo sapiens
  CDR3 for alpha chain variable domain of TCR clone 191256 (TRAV13-1, TRAJ21)
CAAKEGFNKFYF

SEQ ID NO: 382512 - protein, 16 aa, Homo sapiens
  CDR3 for beta chain variable domain of TCR clone 191256 (TRBV20-1, TRBJ2-1)
CSARDFSGRIGDEQFF

SEQ ID NO: 382513 - protein, 12 aa, Homo sapiens
  CDR3 for alpha chain variable domain of TCR clone 191257 (TRAV12-3, TRAJ17)
CAMTLTCNKLTF

SEQ ID NO: 382514 - protein, 15 aa, Homo sapiens
  CDR3 for beta chain variable domain of TCR clone 191257 (TRBV20-1, TRBJ2-7)
FSARDRVSGMDEQYF

SEQ ID NO: 382515 - protein, 14 aa, Homo sapiens
  CDR3 for alpha chain variable domain of TCR clone 191258 (TRAV8-4, TRAJ13)
CAVTLSGGYQKVTF

SEQ ID NO: 382516 - protein, 18 aa, Homo sapiens
  CDR3 for beta chain variable domain of TCR clone 191258 (TRBV11-2, TRBJ2-3)
CASSLGGASRGAPNTQYF

SEQ ID NO: 382517 - protein, 13 aa, Homo sapiens
  CDR3 for alpha chain variable domain of TCR clone 191259 (TRAV8-3, TRAJ28)
CAVGAVGSYQLTF

SEQ ID NO: 382518 - protein, 14 aa, Homo sapiens
  CDR3 for beta chain variable domain of TCR clone 191259 (TRBV27, TRBJ2-2)
CASRPGVNTGELFF

SEQ ID NO: 382519 - protein, 16 aa, Homo sapiens
  CDR3 for alpha chain variable domain of TCR clone 191260 (TRAV3, TRAJ18)
CAVRDGRGSTLGRLYF

SEQ ID NO: 382520 - protein, 15 aa, Homo sapiens
  CDR3 for beta chain variable domain of TCR clone 191260 (TRBV7-9, TRBJ1-6)
YASSSPGRGNSPLHF

SEQ ID NO: 382521 - protein, 14 aa, Homo sapiens
  CDR3 for alpha chain variable domain of TCR clone 191261 (TRAV1-2, TRAJ16)
FAVNRFSGGQKLLF

SEQ ID NO: 382522 - protein, 16 aa, Homo sapiens
  CDR3 for beta chain variable domain of TCR clone 191261 (TRBV7-3, TRBJ2-2)
CASSLKRGTLSGELFF

SEQ ID NO: 382523 - protein, 13 aa, Homo sapiens
  CDR3 for alpha chain variable domain of TCR clone 191262 (TRAV20, TRAJ21)
CAVEGYNFNKFYF

SEQ ID NO: 382524 - protein, 15 aa, Homo sapiens
  CDR3 for beta chain variable domain of TCR clone 191262 (TRBV28, TRBJ2-1)
CASSIIAGGRSEQFF

SEQ ID NO: 382525 - protein, 16 aa, Homo sapiens
  CDR3 for alpha chain variable domain of TCR clone 191263 (TRAV3, TRAJ23)
CAVRIGIYNQGGKLIF

SEQ ID NO: 382526 - protein, 17 aa, Homo sapiens
  CDR3 for beta chain variable domain of TCR clone 191263 (TRBV10-3, TRBJ2-6)
CAISESTAPSGANDLTF

SEQ ID NO: 382527 - protein, 15 aa, Homo sapiens
  CDR3 for alpha chain variable domain of TCR clone 191264 (TRAV34, TRAJ38)
CGADFTPGNNRKLIW

SEQ ID NO: 382528 - protein, 15 aa, Homo sapiens
  CDR3 for beta chain variable domain of TCR clone 191264 (TRBV12-4, TRBJ2-5)
CASSPGSSRQGTQYF

SEQ ID NO: 382529 - protein, 14 aa, Homo sapiens
  CDR3 for alpha chain variable domain of TCR clone 191265 (TRAV35, TRAJ34)
CAGQSPRNTDKLIF

SEQ ID NO: 382530 - protein, 13 aa, Homo sapiens
  CDR3 for beta chain variable domain of TCR clone 191265 (TRBV28, TRBJ2-5)
CASSFAGGETQYF

SEQ ID NO: 382531 - protein, 14 aa, Homo sapiens
  CDR3 for alpha chain variable domain of TCR clone 191266 (TRAV25, TRAJ22)
CAVRSSGSARQLTF

SEQ ID NO: 382532 - protein, 15 aa, Homo sapiens
  CDR3 for beta chain variable domain of TCR clone 191266 (TRBV6-6, TRBJ1-5)
CASSDRDRGFQPQHF

SEQ ID NO: 382533 - protein, 12 aa, Homo sapiens
  CDR3 for alpha chain variable domain of TCR clone 191267 (TRAV22, TRAJ43)
CAVELTNNDMRF

SEQ ID NO: 382534 - protein, 15 aa, Homo sapiens
  CDR3 for beta chain variable domain of TCR clone 191267 (TRBV7-2, TRBJ2-1)
CASSFSGGIYNEQFL

SEQ ID NO: 382535 - protein, 14 aa, Homo sapiens
  CDR3 for alpha chain variable domain of TCR clone 191268 (TRAV1-2, TRAJ16)
CAVNRFSDGQKLLF

SEQ ID NO: 382536 - protein, 14 aa, Homo sapiens
  CDR3 for beta chain variable domain of TCR clone 191268 (TRBV7-2, TRBJ1-1)
CASSFLTGTTEAVF

SEQ ID NO: 382537 - protein, 12 aa, Homo sapiens
  CDR3 for alpha chain variable domain of TCR clone 191269 (TRAV35, TRAJ39)
LAPNNAGNMLTF

SEQ ID NO: 382538 - protein, 11 aa, Homo sapiens
  CDR3 for beta chain variable domain of TCR clone 191269 (TRBV12-4, TRBJ2-3)
CASTATDTQYF

SEQ ID NO: 382539 - protein, 15 aa, Homo sapiens
  CDR3 for alpha chain variable domain of TCR clone 191270 (TRAV2, TRAJ9)
CAVEDRGTGGFKTIF

SEQ ID NO: 382540 - protein, 14 aa, Homo sapiens
  CDR3 for beta chain variable domain of TCR clone 191270 (TRBV7-9, TRBJ2-3)
CASSPSGRAGTQYF

SEQ ID NO: 382541 - protein, 13 aa, Homo sapiens
  CDR3 for alpha chain variable domain of TCR clone 191271 (TRAV17, TRAJ7)
CATDNYGNNRLAF

SEQ ID NO: 382542 - protein, 16 aa, Homo sapiens
  CDR3 for beta chain variable domain of TCR clone 191271 (TRBV4-1, TRBJ2-5)
CASSQAIADSSATQYF

SEQ ID NO: 382543 - protein, 13 aa, Homo sapiens
  CDR3 for alpha chain variable domain of TCR clone 191272 (TRAV29/DV5, TRAJ31)
CEASRNNNARLMF

SEQ ID NO: 382544 - protein, 13 aa, Homo sapiens
  CDR3 for beta chain variable domain of TCR clone 191272 (TRBV24-1, TRBJ1-2)
CATSGTALGGYTF

SEQ ID NO: 382545 - protein, 16 aa, Homo sapiens
  CDR3 for alpha chain variable domain of TCR clone 191273 (TRAV30, TRAJ24)
CGTEIVDADSWGKFPF

SEQ ID NO: 382546 - protein, 13 aa, Homo sapiens
  CDR3 for beta chain variable domain of TCR clone 191273 (TRBV7-2, TRBJ1-3)
CASSLAPGNTIYF

SEQ ID NO: 382547 - protein, 13 aa, Homo sapiens
  CDR3 for alpha chain variable domain of TCR clone 191274 (TRAV8-3, TRAJ43)
CAVVPYNNNDMRF

SEQ ID NO: 382548 - protein, 14 aa, Homo sapiens
  CDR3 for beta chain variable domain of TCR clone 191274 (TRBV12-5, TRBJ2-5)
CASGSRTHQETQYF

SEQ ID NO: 382549 - protein, 17 aa, Homo sapiens
  CDR3 for alpha chain variable domain of TCR clone 191275 (TRAV23/DV6, TRAJ3)
CSNHFCFGWSSASKIIF

SEQ ID NO: 382550 - protein, 15 aa, Homo sapiens
  CDR3 for beta chain variable domain of TCR clone 191275 (TRBV19, TRBJ1-6)
CASSTQGAVGSTLHF

SEQ ID NO: 382551 - protein, 11 aa, Homo sapiens
  CDR3 for alpha chain variable domain of TCR clone 191276 (TRAV26-1, TRAJ37)
CIVRVGRKLIF

SEQ ID NO: 382552 - protein, 13 aa, Homo sapiens
  CDR3 for beta chain variable domain of TCR clone 191276 (TRBV14, TRBJ1-2)
CASSEERRYGYTF

SEQ ID NO: 382553 - protein, 13 aa, Homo sapiens
  CDR3 for alpha chain variable domain of TCR clone 191277 (TRAV8-6, TRAJ8)
CAVSNTCFQKLVF

SEQ ID NO: 382554 - protein, 15 aa, Homo sapiens
  CDR3 for beta chain variable domain of TCR clone 191277 (TRBV28, TRBJ2-5)
CASSSGRTIQETQDF

SEQ ID NO: 382555 - protein, 13 aa, Homo sapiens
  CDR3 for alpha chain variable domain of TCR clone 191278 (TRAV2, TRAJ15)
CAVASQAGTALIF

SEQ ID NO: 382556 - protein, 16 aa, Homo sapiens
  CDR3 for beta chain variable domain of TCR clone 191278 (TRBV4-2, TRBJ1-1)
CASSQAGLGMNTEAFF

SEQ ID NO: 382557 - protein, 15 aa, Homo sapiens
  CDR3 for alpha chain variable domain of TCR clone 191279 (TRAV25, TRAJ52)
CAGRPGGTSYGKLTF

SEQ ID NO: 382558 - protein, 17 aa, Homo sapiens
  CDR3 for beta chain variable domain of TCR clone 191279 (TRBV7-8, TRBJ2-6)
CASSAGTGGAGAKVLTF

SEQ ID NO: 382559 - protein, 12 aa, Homo sapiens
  CDR3 for alpha chain variable domain of TCR clone 191280 (TRAV27, TRAJ9)
CAGESGGFKTIF

SEQ ID NO: 382560 - protein, 15 aa, Homo sapiens
  CDR3 for beta chain variable domain of TCR clone 191280 (TRBV18, TRBJ2-7)
CASSPSSTGNYGQYF

SEQ ID NO: 382561 - protein, 13 aa, Homo sapiens
  CDR3 for alpha chain variable domain of TCR clone 191281 (TRAV13-1, TRAJ15)
CSKYPQAGTALIF

SEQ ID NO: 382562 - protein, 14 aa, Homo sapiens
  CDR3 for beta chain variable domain of TCR clone 191281 (TRBV12-4, TRBJ2-3)
CASSFGAGRDTQYF

SEQ ID NO: 382563 - protein, 15 aa, Homo sapiens
  CDR3 for alpha chain variable domain of TCR clone 191282 (TRAV3, TRAJ17)
CAVRDTGAAGNNLTL

SEQ ID NO: 382564 - protein, 15 aa, Homo sapiens
  CDR3 for beta chain variable domain of TCR clone 191282 (TRBV20-1, TRBJ2-7)
CSARDRVSGMDEQYF

SEQ ID NO: 382565 - protein, 13 aa, Homo sapiens
  CDR3 for alpha chain variable domain of TCR clone 191283 (TRAV26-1, TRAJ30)
CIARVESNDKIIF

SEQ ID NO: 382566 - protein, 15 aa, Homo sapiens
  CDR3 for beta chain variable domain of TCR clone 191283 (TRBV6-1, TRBJ2-3)
CASSERGGITDTQYF

SEQ ID NO: 382567 - protein, 14 aa, Homo sapiens
  CDR3 for alpha chain variable domain of TCR clone 191284 (TRAV17, TRAJ54)
CATDANQGAQKLVF

SEQ ID NO: 382568 - protein, 15 aa, Homo sapiens
  CDR3 for beta chain variable domain of TCR clone 191284 (TRBV18, TRBJ2-1)
CASSPRGSSYNEQFF

SEQ ID NO: 382569 - protein, 18 aa, Homo sapiens
  CDR3 for alpha chain variable domain of TCR clone 191285 (TRAV17, TRAJ45)
CATSLDLYSGGGADGLTV

SEQ ID NO: 382570 - protein, 13 aa, Homo sapiens
  CDR3 for beta chain variable domain of TCR clone 191285 (TRBV10-3, TRBJ2-7)
CASKLAVNYEQYF

SEQ ID NO: 382571 - protein, 14 aa, Homo sapiens
  CDR3 for alpha chain variable domain of TCR clone 191286 (TRAV1-2, TRAJ16)
CAVNRFSDGQKLLF

SEQ ID NO: 382572 - protein, 13 aa, Homo sapiens
  CDR3 for beta chain variable domain of TCR clone 191286 (TRBV19, TRBJ1-5)
CASSEGSNQTQHF

SEQ ID NO: 382573 - protein, 17 aa, Homo sapiens
  CDR3 for alpha chain variable domain of TCR clone 191287 (TRAV8-6, TRAJ58)
CAVSSWVGETRGSRLTF

SEQ ID NO: 382574 - protein, 14 aa, Homo sapiens
  CDR3 for beta chain variable domain of TCR clone 191287 (TRBV11-2, TRBJ2-7)
CASSLGAGAYEQYF

SEQ ID NO: 382575 - protein, 14 aa, Homo sapiens
  CDR3 for alpha chain variable domain of TCR clone 191288 (TRAV2, TRAJ9)
YAVEDRSGGFKTIF

SEQ ID NO: 382576 - protein, 17 aa, Homo sapiens
  CDR3 for beta chain variable domain of TCR clone 191288 (TRBV11-2, TRBJ2-1)
CASSLYPPGVEYNEQFF

SEQ ID NO: 382577 - protein, 14 aa, Homo sapiens
  CDR3 for alpha chain variable domain of TCR clone 191289 (TRAV27, TRAJ22)
CAGLPSGSARQLAF

SEQ ID NO: 382578 - protein, 13 aa, Homo sapiens
  CDR3 for beta chain variable domain of TCR clone 191289 (TRBV7-2, TRBJ2-7)
CASSSPSGSEQYF

SEQ ID NO: 382579 - protein, 14 aa, Homo sapiens
  CDR3 for alpha chain variable domain of TCR clone 191290 (TRAV12-2, TRAJ5)
CAVNRSTGRRALTF

SEQ ID NO: 382580 - protein, 15 aa, Homo sapiens
  CDR3 for beta chain variable domain of TCR clone 191290 (TRBV19, TRBJ2-4)
CASRGPRRGENIQYF

SEQ ID NO: 382581 - protein, 13 aa, Homo sapiens
  CDR3 for alpha chain variable domain of TCR clone 191291 (TRAV12-2, TRAJ17)
CREHQAAGNKLTF

SEQ ID NO: 382582 - protein, 16 aa, Homo sapiens
  CDR3 for beta chain variable domain of TCR clone 191291 (TRBV20-1, TRBJ2-6)
CSASSQGYDGANVLTF

SEQ ID NO: 382583 - protein, 14 aa, Homo sapiens
  CDR3 for alpha chain variable domain of TCR clone 191292 (TRAV14/DV4, TRAJ41)
CARGGPDSRYALNF

SEQ ID NO: 382584 - protein, 15 aa, Homo sapiens
  CDR3 for beta chain variable domain of TCR clone 191292 (TRBV19, TRBJ2-1)
CASSIQATSYNEQFF

SEQ ID NO: 382585 - protein, 21 aa, Homo sapiens
  CDR3 for alpha chain variable domain of TCR clone 191293 (TRAV35, TRAJ54)
SAPIPSDVGIYPLQGAQKLVF

SEQ ID NO: 382586 - protein, 17 aa, Homo sapiens
  CDR3 for beta chain variable domain of TCR clone 191293 (TRBV25-1, TRBJ2-1)
CASSAYGQGRGVYEQFF

SEQ ID NO: 382587 - protein, 14 aa, Homo sapiens
  CDR3 for alpha chain variable domain of TCR clone 191294 (TRAV1-2, TRAJ16)
CAVNRFSDGQQLLF

SEQ ID NO: 382588 - protein, 10 aa, Homo sapiens
  CDR3 for beta chain variable domain of TCR clone 191294 (TRBV20-1, TRBJ1-4)
PQGANEKLFF

SEQ ID NO: 382589 - protein, 14 aa, Homo sapiens
  CDR3 for alpha chain variable domain of TCR clone 191295 (TRAV38-2/DV8, TRAJ32)
CAYRSGRATNKLIF

SEQ ID NO: 382590 - protein, 15 aa, Homo sapiens
  CDR3 for beta chain variable domain of TCR clone 191295 (TRBV27, TRBJ2-1)
CASSNGGGSSNEQFF

SEQ ID NO: 382591 - protein, 14 aa, Homo sapiens
  CDR3 for alpha chain variable domain of TCR clone 191296 (TRAV38-1, TRAJ40)
CALRPTSGTYKYIF

SEQ ID NO: 382592 - protein, 16 aa, Homo sapiens
  CDR3 for beta chain variable domain of TCR clone 191296 (TRBV15, TRBJ2-3)
CATSRDLGIVTDTQYF

SEQ ID NO: 382593 - protein, 18 aa, Homo sapiens
  CDR3 for alpha chain variable domain of TCR clone 191297 (TRAV21, TRAJ52)
CALRPSPAGGTSYVKLTF

SEQ ID NO: 382594 - protein, 17 aa, Homo sapiens
  CDR3 for beta chain variable domain of TCR clone 191297 (TRBV13, TRBJ2-3)
CASSLSRVAGGRNTQYF

SEQ ID NO: 382595 - protein, 14 aa, Homo sapiens
  CDR3 for alpha chain variable domain of TCR clone 191298 (TRAV1-2, TRAJ8)
CAVREDTGFQKLVF

SEQ ID NO: 382596 - protein, 15 aa, Homo sapiens
  CDR3 for beta chain variable domain of TCR clone 191298 (TRBV6-3, TRBJ2-7)
RASSSPRTVFYEQYF

SEQ ID NO: 382597 - protein, 15 aa, Homo sapiens
  CDR3 for alpha chain variable domain of TCR clone 191299 (TRAV17, TRAJ56)
CATDANTGANSKLTF

SEQ ID NO: 382598 - protein, 13 aa, Homo sapiens
  CDR3 for beta chain variable domain of TCR clone 191299 (TRBV23-1, TRBJ1-4)
CASRGKFNEKLFF

SEQ ID NO: 382599 - protein, 12 aa, Homo sapiens
  CDR3 for alpha chain variable domain of TCR clone 191300 (TRAV26-1, TRAJ17)
CIVRSAGNKLTF

SEQ ID NO: 382600 - protein, 20 aa, Homo sapiens
  CDR3 for beta chain variable domain of TCR clone 191300 (TRBV19, TRBJ2-1)
CASSISRTVTSARLNNEQFF

SEQ ID NO: 382601 - protein, 14 aa, Homo sapiens
  CDR3 for alpha chain variable domain of TCR clone 191301 (TRAV1-2, TRAJ8)
CAVREDTGFQKLVF

SEQ ID NO: 382602 - protein, 18 aa, Homo sapiens
  CDR3 for beta chain variable domain of TCR clone 191301 (TRBV2, TRBJ2-6)
CASSDSSYGLGGANVLTF

SEQ ID NO: 382603 - protein, 12 aa, Homo sapiens
  CDR3 for alpha chain variable domain of TCR clone 191302 (TRAV12-3, TRAJ17)
CAMTPTGNKLTF

SEQ ID NO: 382604 - protein, 15 aa, Homo sapiens
  CDR3 for beta chain variable domain of TCR clone 191302 (TRBV20-1, TRBJ2-7)
CSARDRVAGMDEQYF

SEQ ID NO: 382605 - protein, 12 aa, Homo sapiens
  CDR3 for alpha chain variable domain of TCR clone 191303 (TRAV38-1, TRAJ20)
CAFIWSDYKPSF

SEQ ID NO: 382606 - protein, 14 aa, Homo sapiens
  CDR3 for beta chain variable domain of TCR clone 191303 (TRBV19, TRBJ2-1)
CASSMGSGATEQFF

SEQ ID NO: 382607 - protein, 13 aa, Homo sapiens
  CDR3 for alpha chain variable domain of TCR clone 191304 (TRAV35, TRAJ37)
CAGSSGNTGKLIF

SEQ ID NO: 382608 - protein, 16 aa, Homo sapiens
  CDR3 for beta chain variable domain of TCR clone 191304 (TRBV10-3, TRBJ2-1)
CAISLTSGNSYNEQFC

SEQ ID NO: 382609 - protein, 13 aa, Homo sapiens
  CDR3 for alpha chain variable domain of TCR clone 191305 (TRAV26-2, TRAJ43)
CILRAVNNNDMRF

SEQ ID NO: 382610 - protein, 15 aa, Homo sapiens
  CDR3 for beta chain variable domain of TCR clone 191305 (TRBV7-2, TRBJ2-7)
CASSLKGALTYEQYF

SEQ ID NO: 382611 - protein, 13 aa, Homo sapiens
  CDR3 for alpha chain variable domain of TCR clone 191306 (TRAV3, TRAJ4)
CAVRDGGYNKLIF

SEQ ID NO: 382612 - protein, 14 aa, Homo sapiens
  CDR3 for beta chain variable domain of TCR clone 191306 (TRBV12-4, TRBJ1-2)
CASISSAAGSSYTF

SEQ ID NO: 382613 - protein, 14 aa, Homo sapiens
  CDR3 for alpha chain variable domain of TCR clone 191307 (TRAV20, TRAJ18)
CAVGRGSTLGRLYF

SEQ ID NO: 382614 - protein, 14 aa, Homo sapiens
  CDR3 for beta chain variable domain of TCR clone 191307 (TRBV11-3, TRBJ2-7)
CASSPDRNTYEQYF

SEQ ID NO: 382615 - protein, 12 aa, Homo sapiens
  CDR3 for alpha chain variable domain of TCR clone 191308 (TRAV13-1, TRAJ21)
CAAKEGFNKFYF

SEQ ID NO: 382616 - protein, 18 aa, Homo sapiens
  CDR3 for beta chain variable domain of TCR clone 191308 (TRBV20-1, TRBJ2-6)
CSAETAPTHGSGANVLTV

SEQ ID NO: 382617 - protein, 15 aa, Homo sapiens
  CDR3 for alpha chain variable domain of TCR clone 191309 (TRAV30, TRAJ32)
CGTEILGGATNKPIF

SEQ ID NO: 382618 - protein, 17 aa, Homo sapiens
  CDR3 for beta chain variable domain of TCR clone 191309 (TRBV20-1, TRBJ2-1)
CSARDISGGAPLGEQFF

SEQ ID NO: 382619 - protein, 10 aa, Homo sapiens
  CDR3 for alpha chain variable domain of TCR clone 191310 (TRAV13-1, TRAJ52)
CAEKTPMLVV

SEQ ID NO: 382620 - protein, 15 aa, Homo sapiens
  CDR3 for beta chain variable domain of TCR clone 191310 (TRBV6-1, TRBJ2-3)
CASSERGGITDTQYF

SEQ ID NO: 382621 - protein, 12 aa, Homo sapiens
  CDR3 for alpha chain variable domain of TCR clone 191311 (TRAV12-2, TRAJ8)
CAVNTGFQKLVF

SEQ ID NO: 382622 - protein, 17 aa, Homo sapiens
  CDR3 for beta chain variable domain of TCR clone 191311 (TRBV25-1, TRBJ2-1)
CASSAYGQGRGVYEQFF

SEQ ID NO: 382623 - protein, 12 aa, Homo sapiens
  CDR3 for alpha chain variable domain of TCR clone 191312 (TRAV12-1, TRAJ40)
CVFYSGTYKYIF

SEQ ID NO: 382624 - protein, 18 aa, Homo sapiens
  CDR3 for beta chain variable domain of TCR clone 191312 (TRBV12-4, TRBJ2-2)
CVSSLVAGTRGRTGELFF

SEQ ID NO: 382625 - protein, 13 aa, Homo sapiens
  CDR3 for alpha chain variable domain of TCR clone 191313 (TRAV12-1, TRAJ6)
CVVFPGGSYIPTF

SEQ ID NO: 382626 - protein, 14 aa, Homo sapiens
  CDR3 for beta chain variable domain of TCR clone 191313 (TRBV20-1, TRBJ1-3)
CNASPTGAGNTIYF

SEQ ID NO: 382627 - protein, 14 aa, Homo sapiens
  CDR3 for alpha chain variable domain of TCR clone 191314 (TRAV26-1, TRAJ54)
CIVRRTQGAQKLVF

SEQ ID NO: 382628 - protein, 15 aa, Homo sapiens
  CDR3 for beta chain variable domain of TCR clone 191314 (TRBV7-3, TRBJ2-2)
CASSETGQGTGELFF

SEQ ID NO: 382629 - protein, 14 aa, Homo sapiens
  CDR3 for alpha chain variable domain of TCR clone 191315 (TRAV1-2, TRAJ8)
CAVREDTGFQKLVF

SEQ ID NO: 382630 - protein, 16 aa, Homo sapiens
  CDR3 for beta chain variable domain of TCR clone 191315 (TRBV7-3, TRBJ2-2)
CASSLKRGTLSGELFF

SEQ ID NO: 382631 - protein, 13 aa, Homo sapiens
  CDR3 for alpha chain variable domain of TCR clone 191316 (TRAV27, TRAJ39)
CAGDTPAGNMLNF

SEQ ID NO: 382632 - protein, 13 aa, Homo sapiens
  CDR3 for beta chain variable domain of TCR clone 191316 (TRBV4-1, TRBJ2-4)
CASSQVGIDIQYF

SEQ ID NO: 382633 - protein, 14 aa, Homo sapiens
  CDR3 for alpha chain variable domain of TCR clone 191317 (TRAV35, TRAJ33)
CAGSSQDSNYQLIW

SEQ ID NO: 382634 - protein, 15 aa, Homo sapiens
  CDR3 for beta chain variable domain of TCR clone 191317 (TRBV5-1, TRBJ1-4)
FAPAAWKDGNENLFF

SEQ ID NO: 382635 - protein, 14 aa, Homo sapiens
  CDR3 for alpha chain variable domain of TCR clone 191318 (TRAV29/DV5, TRAJ36)
CAARRKTGANNLFF

SEQ ID NO: 382636 - protein, 16 aa, Homo sapiens
  CDR3 for beta chain variable domain of TCR clone 191318 (TRBV6-1, TRBJ2-1)
RASILRQGSSYNEQFF

SEQ ID NO: 382637 - protein, 17 aa, Homo sapiens
  CDR3 for alpha chain variable domain of TCR clone 191319 (TRAV14/DV4, TRAJ4)
CAMREASGRGGYNKLIF

SEQ ID NO: 382638 - protein, 15 aa, Homo sapiens
  CDR3 for beta chain variable domain of TCR clone 191319 (TRBV12-4, TRBJ2-5)
CASSLGGQGRETQYF

SEQ ID NO: 382639 - protein, 12 aa, Homo sapiens
  CDR3 for alpha chain variable domain of TCR clone 191320 (TRAV12-3, TRAJ17)
CAMTLTGNKLTF

SEQ ID NO: 382640 - protein, 15 aa, Homo sapiens
  CDR3 for beta chain variable domain of TCR clone 191320 (TRBV12-4, TRBJ2-5)
CASSPPTGLQETQYV

SEQ ID NO: 382641 - protein, 12 aa, Homo sapiens
  CDR3 for alpha chain variable domain of TCR clone 191321 (TRAV17, TRAJ20)
CATDSNDYKLSF

SEQ ID NO: 382642 - protein, 15 aa, Homo sapiens
  CDR3 for beta chain variable domain of TCR clone 191321 (TRBV13, TRBJ2-1)
CASSLLSGLNNEQFF

SEQ ID NO: 382643 - protein, 16 aa, Homo sapiens
  CDR3 for alpha chain variable domain of TCR clone 191322 (TRAV26-1, )
CIDIQNPDPAVYQLRD

SEQ ID NO: 382644 - protein, 13 aa, Homo sapiens
  CDR3 for beta chain variable domain of TCR clone 191322 (TRBV7-9, TRBJ1-2)
CASSLKQNYGYTF

SEQ ID NO: 382645 - protein, 16 aa, Homo sapiens
  CDR3 for alpha chain variable domain of TCR clone 191323 (TRAV23/DV6, TRAJ9)
CAASIGGNTGGFKTIF

SEQ ID NO: 382646 - protein, 13 aa, Homo sapiens
  CDR3 for beta chain variable domain of TCR clone 191323 (TRBV7-6, TRBJ1-2)
CASSLVADYGYTF

SEQ ID NO: 382647 - protein, 16 aa, Homo sapiens
  CDR3 for alpha chain variable domain of TCR clone 191324 (TRAV35, TRAJ28)
CVGYLYSGAGSYQLTF

SEQ ID NO: 382648 - protein, 16 aa, Homo sapiens
  CDR3 for beta chain variable domain of TCR clone 191324 (TRBV5-1, TRBJ2-1)
CASSHGLAGPQNEQFF

SEQ ID NO: 382649 - protein, 15 aa, Homo sapiens
  CDR3 for alpha chain variable domain of TCR clone 191325 (TRAV8-3, TRAJ45)
CASSYSRGGADGLTF

SEQ ID NO: 382650 - protein, 13 aa, Homo sapiens
  CDR3 for beta chain variable domain of TCR clone 191325 (TRBV10-3, TRBJ2-7)
CVSKLAVNYEQYF

SEQ ID NO: 382651 - protein, 15 aa, Homo sapiens
  CDR3 for alpha chain variable domain of TCR clone 191326 (TRAV26-1, TRAJ29)
CIVRVEGSGNTPLVF

SEQ ID NO: 382652 - protein, 15 aa, Homo sapiens
  CDR3 for beta chain variable domain of TCR clone 191326 (TRBV28, TRBJ1-3)
CASSMGWASGNTMYF

SEQ ID NO: 382653 - protein, 14 aa, Homo sapiens
  CDR3 for alpha chain variable domain of TCR clone 191327 (TRAV12-1, TRAJ38)
CGELKAGNNRKLIW

SEQ ID NO: 382654 - protein, 16 aa, Homo sapiens
  CDR3 for beta chain variable domain of TCR clone 191327 (TRBV13, TRBJ2-2)
CASSPRTGEHTGELFF

SEQ ID NO: 382655 - protein, 15 aa, Homo sapiens
  CDR3 for alpha chain variable domain of TCR clone 191328 (TRAV13-1, TRAJ5)
CAASPRGHGQESTYF

SEQ ID NO: 382656 - protein, 15 aa, Homo sapiens
  CDR3 for beta chain variable domain of TCR clone 191328 (TRBV10-2, TRBJ2-6)
CASSEQGTGANVLTF

SEQ ID NO: 382657 - protein, 14 aa, Homo sapiens
  CDR3 for alpha chain variable domain of TCR clone 191329 (TRAV21, TRAJ11)
CAVRRNSGYSTLTF

SEQ ID NO: 382658 - protein, 12 aa, Homo sapiens
  CDR3 for beta chain variable domain of TCR clone 191329 (TRBV11-2, TRBJ2-2)
CASSLGGGELFF

SEQ ID NO: 382659 - protein, 11 aa, Homo sapiens
  CDR3 for alpha chain variable domain of TCR clone 191330 (TRAV12-3, TRAJ27)
CAMANAGKSTF

SEQ ID NO: 382660 - protein, 17 aa, Homo sapiens
  CDR3 for beta chain variable domain of TCR clone 191330 (TRBV7-8, TRBJ2-6)
CASSAGTGGAGANDLTF

SEQ ID NO: 382661 - protein, 15 aa, Homo sapiens
  CDR3 for alpha chain variable domain of TCR clone 191331 (TRAV8-3, TRAJ45)
CASSYSGGGADGLTF

SEQ ID NO: 382662 - protein, 16 aa, Homo sapiens
  CDR3 for beta chain variable domain of TCR clone 191331 (TRBV7-9, TRBJ2-2)
CASSGFGGANIGELFF

SEQ ID NO: 382663 - protein, 11 aa, Homo sapiens
  CDR3 for alpha chain variable domain of TCR clone 191332 (TRAV29/DV5, TRAJ49)
CAAVPGNQFYF

SEQ ID NO: 382664 - protein, 15 aa, Homo sapiens
  CDR3 for beta chain variable domain of TCR clone 191332 (TRBV19, TRBJ1-5)
CASSDSGPRNQPQHF

SEQ ID NO: 382665 - protein, 11 aa, Homo sapiens
  CDR3 for alpha chain variable domain of TCR clone 191333 (TRAV3, TRAJ21)
CAVGNFSKFYF

SEQ ID NO: 382666 - protein, 16 aa, Homo sapiens
  CDR3 for beta chain variable domain of TCR clone 191333 (TRBV19, TRBJ2-1)
CASSKAGPSAYNEQFF

SEQ ID NO: 382667 - protein, 14 aa, Homo sapiens
  CDR3 for alpha chain variable domain of TCR clone 191334 (TRAV14/DV4, TRAJ11)
CAMSSNSGYSTLTC

SEQ ID NO: 382668 - protein, 11 aa, Homo sapiens
  CDR3 for beta chain variable domain of TCR clone 191334 (TRBV7-9, TRBJ2-3)
CASSGPDTQYF

SEQ ID NO: 382669 - protein, 16 aa, Homo sapiens
  CDR3 for alpha chain variable domain of TCR clone 191335 (TRAV8-2, TRAJ7)
CVVSEGPYYGNNRLAF

SEQ ID NO: 382670 - protein, 14 aa, Homo sapiens
  CDR3 for beta chain variable domain of TCR clone 191335 (TRBV5-1, TRBJ2-7)
CASSRGESLYEQYF

SEQ ID NO: 382671 - protein, 16 aa, Homo sapiens
  CDR3 for alpha chain variable domain of TCR clone 191336 (TRAV38-1, TRAJ32)
CAFMKGGGGATIKLIF

SEQ ID NO: 382672 - protein, 13 aa, Homo sapiens
  CDR3 for beta chain variable domain of TCR clone 191336 (TRBV20-1, TRBJ2-5)
CSAREAFQETQYF

SEQ ID NO: 382673 - protein, 13 aa, Homo sapiens
  CDR3 for alpha chain variable domain of TCR clone 191337 (TRAV3, TRAJ20)
CAVRDTGDYRLSF

SEQ ID NO: 382674 - protein, 12 aa, Homo sapiens
  CDR3 for beta chain variable domain of TCR clone 191337 (TRBV29-1, TRBJ2-3)
CSVTGGADTQYF

SEQ ID NO: 382675 - protein, 15 aa, Homo sapiens
  CDR3 for alpha chain variable domain of TCR clone 191338 (TRAV3, TRAJ3)
CAVRDGHSSASNIIF

SEQ ID NO: 382676 - protein, 17 aa, Homo sapiens
  CDR3 for beta chain variable domain of TCR clone 191338 (TRBV25-1, TRBJ2-7)
CASSDARVVFSSYEQYF

SEQ ID NO: 382677 - protein, 12 aa, Homo sapiens
  CDR3 for alpha chain variable domain of TCR clone 191339 (TRAV12-2, TRAJ33)
CAVGDSNYQLIW

SEQ ID NO: 382678 - protein, 13 aa, Homo sapiens
  CDR3 for beta chain variable domain of TCR clone 191339 (TRBV6-1, TRBJ1-2)
CASSAREGYGYAF

SEQ ID NO: 382679 - protein, 14 aa, Homo sapiens
  CDR3 for alpha chain variable domain of TCR clone 191340 (TRAV4, TRAJ9)
CLVGSGTGGFKTIF

SEQ ID NO: 382680 - protein, 12 aa, Homo sapiens
  CDR3 for beta chain variable domain of TCR clone 191340 (TRBV19, TRBJ1-5)
CASSIAQQPQHF

SEQ ID NO: 382681 - protein, 12 aa, Homo sapiens
  CDR3 for alpha chain variable domain of TCR clone 191341 (TRAV12-2, TRAJ9)
CAVTGGGFKTIF

SEQ ID NO: 382682 - protein, 15 aa, Homo sapiens
  CDR3 for beta chain variable domain of TCR clone 191341 (TRBV18, TRBJ2-7)
CASSPTFMDSYEQYF

SEQ ID NO: 382683 - protein, 14 aa, Homo sapiens
  CDR3 for alpha chain variable domain of TCR clone 191342 (TRAV1-1, TRAJ27)
CAVIYNTNAGKSTF

SEQ ID NO: 382684 - protein, 15 aa, Homo sapiens
  CDR3 for beta chain variable domain of TCR clone 191342 (TRBV7-2, TRBJ2-1)
CPSSSGLAGGNEQFF

SEQ ID NO: 382685 - protein, 13 aa, Homo sapiens
  CDR3 for alpha chain variable domain of TCR clone 191343 (TRAV13-1, TRAJ6)
CAASRGGSYIPTF

SEQ ID NO: 382686 - protein, 13 aa, Homo sapiens
  CDR3 for beta chain variable domain of TCR clone 191343 (TRBV7-2, TRBJ2-2)
CASSLAVTGELFF

SEQ ID NO: 382687 - protein, 13 aa, Homo sapiens
  CDR3 for alpha chain variable domain of TCR clone 191344 (TRAV12-1, TRAJ22)
CVVPSGSARQLTF

SEQ ID NO: 382688 - protein, 15 aa, Homo sapiens
  CDR3 for beta chain variable domain of TCR clone 191344 (TRBV11-3, TRBJ2-7)
CASSPGPASSYAQYF

SEQ ID NO: 382689 - protein, 12 aa, Homo sapiens
  CDR3 for alpha chain variable domain of TCR clone 191345 (TRAV1-1, TRAJ43)
CAPRVSSNDMRF

SEQ ID NO: 382690 - protein, 17 aa, Homo sapiens
  CDR3 for beta chain variable domain of TCR clone 191345 (TRBV20-1, TRBJ2-2)
CSASGSGQGGLTGELFF

SEQ ID NO: 382691 - protein, 12 aa, Homo sapiens
  CDR3 for alpha chain variable domain of TCR clone 191346 (TRAV12-2, TRAJ16)
CAVNLDGQKLLF

SEQ ID NO: 382692 - protein, 16 aa, Homo sapiens
  CDR3 for beta chain variable domain of TCR clone 191346 (TRBV2, TRBJ2-3)
CASSTSVEGVTDTQYF

SEQ ID NO: 382693 - protein, 12 aa, Homo sapiens
  CDR3 for alpha chain variable domain of TCR clone 191347 (TRAV20, TRAJ54)
CAVQEGAQKLGF

SEQ ID NO: 382694 - protein, 17 aa, Homo sapiens
  CDR3 for beta chain variable domain of TCR clone 191347 (TRBV13, TRBJ2-3)
CASSLSRVAGGRNTQDF

SEQ ID NO: 382695 - protein, 13 aa, Homo sapiens
  CDR3 for alpha chain variable domain of TCR clone 191348 (TRAV2, TRAJ12)
CAVGAGSSYKLIF

SEQ ID NO: 382696 - protein, 16 aa, Homo sapiens
  CDR3 for beta chain variable domain of TCR clone 191348 (TRBV11-2, TRBJ2-1)
CASSPRLAGVYNEQFF

SEQ ID NO: 382697 - protein, 12 aa, Homo sapiens
  CDR3 for alpha chain variable domain of TCR clone 191349 (TRAV3, TRAJ26)
CAVRDYGQNFVF

SEQ ID NO: 382698 - protein, 12 aa, Homo sapiens
  CDR3 for beta chain variable domain of TCR clone 191349 (TRBV5-7, TRBJ1-1)
CASSLGRGKAFF

SEQ ID NO: 382699 - protein, 13 aa, Homo sapiens
  CDR3 for alpha chain variable domain of TCR clone 191350 (TRAV3, TRAJ36)
CAVKRTGANNLFF

SEQ ID NO: 382700 - protein, 16 aa, Homo sapiens
  CDR3 for beta chain variable domain of TCR clone 191350 (TRBV12-5, TRBJ2-5)
CASGPRTSGNQETQYF

SEQ ID NO: 382701 - protein, 13 aa, Homo sapiens
  CDR3 for alpha chain variable domain of TCR clone 191351 (TRAV13-1, TRAJ21)
CAASIYNFNKLYF

SEQ ID NO: 382702 - protein, 13 aa, Homo sapiens
  CDR3 for beta chain variable domain of TCR clone 191351 (TRBV27, TRBJ1-4)
CARSLMGDEKLFF

SEQ ID NO: 382703 - protein, 16 aa, Homo sapiens
  CDR3 for alpha chain variable domain of TCR clone 191352 (TRAV14/DV4, TRAJ53)
CAMREGGGGSNYKLTF

SEQ ID NO: 382704 - protein, 19 aa, Homo sapiens
  CDR3 for beta chain variable domain of TCR clone 191352 (TRBV28, TRBJ2-4)
CASSFQPGGPAHSKNSQYF

SEQ ID NO: 382705 - protein, 14 aa, Homo sapiens
  CDR3 for alpha chain variable domain of TCR clone 191353 (TRAV1-2, TRAJ8)
CAVREDTGFQKLVF

SEQ ID NO: 382706 - protein, 14 aa, Homo sapiens
  CDR3 for beta chain variable domain of TCR clone 191353 (TRBV7-9, TRBJ1-1)
CASSLGGATTEAFF

SEQ ID NO: 382707 - protein, 13 aa, Homo sapiens
  CDR3 for alpha chain variable domain of TCR clone 191354 (TRAV12-2, TRAJ40)
CAVKRTGTYKYIF

SEQ ID NO: 382708 - protein, 16 aa, Homo sapiens
  CDR3 for beta chain variable domain of TCR clone 191354 (TRBV2, TRBJ2-3)
CASSTSVEGVTDTQYF

SEQ ID NO: 382709 - protein, 15 aa, Homo sapiens
  CDR3 for alpha chain variable domain of TCR clone 191355 (TRAV12-3, TRAJ23)
CAMILIYNQGGKLIF

SEQ ID NO: 382710 - protein, 17 aa, Homo sapiens
  CDR3 for beta chain variable domain of TCR clone 191355 (TRBV24-1, TRBJ2-1)
CATSDVSTGGTYNEQFF

SEQ ID NO: 382711 - protein, 17 aa, Homo sapiens
  CDR3 for alpha chain variable domain of TCR clone 191356 (TRAV36/DV7, TRAJ52)
CAVAHRAGGTIYGKLTF

SEQ ID NO: 382712 - protein, 14 aa, Homo sapiens
  CDR3 for beta chain variable domain of TCR clone 191356 (TRBV6-1, TRBJ1-3)
CASVQGGGGNTIYF

SEQ ID NO: 382713 - protein, 12 aa, Homo sapiens
  CDR3 for alpha chain variable domain of TCR clone 191357 (TRAV21, TRAJ29)
CAVTSGNTPLVF

SEQ ID NO: 382714 - protein, 15 aa, Homo sapiens
  CDR3 for beta chain variable domain of TCR clone 191357 (TRBV12-4, TRBJ1-2)
CASRLGVSGNYGYTF

SEQ ID NO: 382715 - protein, 13 aa, Homo sapiens
  CDR3 for alpha chain variable domain of TCR clone 191358 (TRAV26-2, TRAJ43)
CTLRAVNNNEMRF

SEQ ID NO: 382716 - protein, 13 aa, Homo sapiens
  CDR3 for beta chain variable domain of TCR clone 191358 (TRBV7-9, TRBJ1-2)
CASSLKQNYGYTF

SEQ ID NO: 382717 - protein, 12 aa, Homo sapiens
  CDR3 for alpha chain variable domain of TCR clone 191359 (TRAV27, TRAJ35)
CAGADFVNVLHC

SEQ ID NO: 382718 - protein, 16 aa, Homo sapiens
  CDR3 for beta chain variable domain of TCR clone 191359 (TRBV6-1, TRBJ2-1)
CASISRQGSSYNEQFF

SEQ ID NO: 382719 - protein, 13 aa, Homo sapiens
  CDR3 for alpha chain variable domain of TCR clone 191360 (TRAV21, TRAJ34)
CAVSEGDTGKLIF

SEQ ID NO: 382720 - protein, 17 aa, Homo sapiens
  CDR3 for beta chain variable domain of TCR clone 191360 (TRBV20-1, TRBJ1-5)
CSARDPSAQGFNQPQHF

SEQ ID NO: 382721 - protein, 14 aa, Homo sapiens
  CDR3 for alpha chain variable domain of TCR clone 191361 (TRAV12-3, TRAJ12)
CASARMDSSYKLIF

SEQ ID NO: 382722 - protein, 15 aa, Homo sapiens
  CDR3 for beta chain variable domain of TCR clone 191361 (TRBV27, TRBJ2-7)
CASSPPGQGTYEQYF

SEQ ID NO: 382723 - protein, 22 aa, Homo sapiens
  CDR3 for alpha chain variable domain of TCR clone 191362 (TRAV27, TRAJ41)
CAVRTQIPDIQNPDPAVYQLRD

SEQ ID NO: 382724 - protein, 16 aa, Homo sapiens
  CDR3 for beta chain variable domain of TCR clone 191362 (TRBV5-1, TRBJ2-3)
CASSLGLTVYTDTQYF

SEQ ID NO: 382725 - protein, 14 aa, Homo sapiens
  CDR3 for alpha chain variable domain of TCR clone 191363 (TRAV20, TRAJ56)
CAVQFGGANSKPTF

SEQ ID NO: 382726 - protein, 14 aa, Homo sapiens
  CDR3 for beta chain variable domain of TCR clone 191363 (TRBV7-2, TRBJ2-7)
CASSPKTSFYEQYF

SEQ ID NO: 382727 - protein, 11 aa, Homo sapiens
  CDR3 for alpha chain variable domain of TCR clone 191364 (TRAV12-1, TRAJ8)
CVVTGFQKLVF

SEQ ID NO: 382728 - protein, 14 aa, Homo sapiens
  CDR3 for beta chain variable domain of TCR clone 191364 (TRBV19, TRBJ2-1)
CASEKSTQYNEQFF

SEQ ID NO: 382729 - protein, 12 aa, Homo sapiens
  CDR3 for alpha chain variable domain of TCR clone 191365 (TRAV21, TRAJ3)
CCFYSSASKIIF

SEQ ID NO: 382730 - protein, 18 aa, Homo sapiens
  CDR3 for beta chain variable domain of TCR clone 191365 (TRBV11-2, TRBJ2-3)
CASSLGGASRGAPNTQYF

SEQ ID NO: 382731 - protein, 10 aa, Homo sapiens
  CDR3 for alpha chain variable domain of TCR clone 191366 (TRAV12-3, TRAJ49)
CAMNDDQFYF

SEQ ID NO: 382732 - protein, 15 aa, Homo sapiens
  CDR3 for beta chain variable domain of TCR clone 191366 (TRBV5-1, TRBJ2-7)
CARSLNGGPAREQYF

SEQ ID NO: 382733 - protein, 12 aa, Homo sapiens
  CDR3 for alpha chain variable domain of TCR clone 191367 (TRAV12-2, TRAJ10)
WGVTGGGNKLTF

SEQ ID NO: 382734 - protein, 14 aa, Homo sapiens
  CDR3 for beta chain variable domain of TCR clone 191367 (TRBV7-3, TRBJ1-1)
CASSLKGGNTEAFF

SEQ ID NO: 382735 - protein, 14 aa, Homo sapiens
  CDR3 for alpha chain variable domain of TCR clone 191368 (TRAV29/DV5, TRAJ36)
CAARRKTGANNLFF

SEQ ID NO: 382736 - protein, 16 aa, Homo sapiens
  CDR3 for beta chain variable domain of TCR clone 191368 (TRBV12-4, TRBJ1-2)
CASSPTATGKTRGYTF

SEQ ID NO: 382737 - protein, 15 aa, Homo sapiens
  CDR3 for alpha chain variable domain of TCR clone 191369 (TRAV21, TRAJ53)
CATLNSGGSNYKLTF

SEQ ID NO: 382738 - protein, 16 aa, Homo sapiens
  CDR3 for beta chain variable domain of TCR clone 191369 (TRBV19, TRBJ2-2)
CASSAAGTGGTGELFF

SEQ ID NO: 382739 - protein, 14 aa, Homo sapiens
  CDR3 for alpha chain variable domain of TCR clone 191370 (TRAV8-4, TRAJ9)
CAVTFNTGGFKTIF

SEQ ID NO: 382740 - protein, 14 aa, Homo sapiens
  CDR3 for beta chain variable domain of TCR clone 191370 (TRBV11-2, TRBJ2-3)
CASSRLARTDTQYF

SEQ ID NO: 382741 - protein, 15 aa, Homo sapiens
  CDR3 for alpha chain variable domain of TCR clone 191371 (TRAV3, TRAJ36)
CAVRASQTGANNLFF

SEQ ID NO: 382742 - protein, 13 aa, Homo sapiens
  CDR3 for beta chain variable domain of TCR clone 191371 (TRBV3-1, TRBJ2-1)
CASSQAGGDEQFF

SEQ ID NO: 382743 - protein, 11 aa, Homo sapiens
  CDR3 for alpha chain variable domain of TCR clone 191372 (TRAV12-2, TRAJ29)
CAVTLRSPLVF

SEQ ID NO: 382744 - protein, 16 aa, Homo sapiens
  CDR3 for beta chain variable domain of TCR clone 191372 (TRBV9, TRBJ2-2)
CASSPTSGGGTGELFF

SEQ ID NO: 382745 - protein, 16 aa, Homo sapiens
  CDR3 for alpha chain variable domain of TCR clone 191373 (TRAV1-2, TRAJ6)
CAVRNIASGGSYITTF

SEQ ID NO: 382746 - protein, 18 aa, Homo sapiens
  CDR3 for beta chain variable domain of TCR clone 191373 (TRBV20-1, TRBJ2-3)
CSASGLAGGPGTTDTQYF

SEQ ID NO: 382747 - protein, 15 aa, Homo sapiens
  CDR3 for alpha chain variable domain of TCR clone 191374 (TRAV27, TRAJ38)
CAARRNAGNNSTLIW

SEQ ID NO: 382748 - protein, 11 aa, Homo sapiens
  CDR3 for beta chain variable domain of TCR clone 191374 (TRBV12-4, TRBJ2-2)
CASSSAGELFF

SEQ ID NO: 382749 - protein, 13 aa, Homo sapiens
  CDR3 for alpha chain variable domain of TCR clone 191375 (TRAV8-4, TRAJ10)
RAAFTGGGNKLTF

SEQ ID NO: 382750 - protein, 12 aa, Homo sapiens
  CDR3 for beta chain variable domain of TCR clone 191375 (TRBV3-1, TRBJ2-1)
CASSQGSSGQFF

SEQ ID NO: 382751 - protein, 10 aa, Homo sapiens
  CDR3 for alpha chain variable domain of TCR clone 191376 (TRAV12-3, TRAJ49)
CAMNDDQFYF

SEQ ID NO: 382752 - protein, 13 aa, Homo sapiens
  CDR3 for beta chain variable domain of TCR clone 191376 (TRBV5-5, TRBJ1-2)
CASSFWRGEDYTF

SEQ ID NO: 382753 - protein, 13 aa, Homo sapiens
  CDR3 for alpha chain variable domain of TCR clone 191377 (TRAV12-1, TRAJ39)
CVALNNAGNMLTF

SEQ ID NO: 382754 - protein, 13 aa, Homo sapiens
  CDR3 for beta chain variable domain of TCR clone 191377 (TRBV14, TRBJ2-7)
CASSQDRRYEQYF

SEQ ID NO: 382755 - protein, 14 aa, Homo sapiens
  CDR3 for alpha chain variable domain of TCR clone 191378 (TRAV1-2, TRAJ8)
CAVREDTGVQKLVF

SEQ ID NO: 382756 - protein, 15 aa, Homo sapiens
  CDR3 for beta chain variable domain of TCR clone 191378 (TRBV4-1, TRBJ2-7)
CASSQNTGRLYEQYF

SEQ ID NO: 382757 - protein, 12 aa, Homo sapiens
  CDR3 for alpha chain variable domain of TCR clone 191379 (TRAV21, TRAJ49)
CAVRNTGNQFYF

SEQ ID NO: 382758 - protein, 15 aa, Homo sapiens
  CDR3 for beta chain variable domain of TCR clone 191379 (TRBV7-3, TRBJ2-1)
CASSPTGGGEVEQFF

SEQ ID NO: 382759 - protein, 14 aa, Homo sapiens
  CDR3 for alpha chain variable domain of TCR clone 191380 (TRAV23/DV6, TRAJ11)
CAALIGGGYSTLTF

SEQ ID NO: 382760 - protein, 13 aa, Homo sapiens
  CDR3 for beta chain variable domain of TCR clone 191380 (TRBV11-3, TRBJ1-1)
CASSMGGNTEAFF

SEQ ID NO: 382761 - protein, 20 aa, Homo sapiens
  CDR3 for alpha chain variable domain of TCR clone 191381 (TRAV21, TRAJ37)
CAEADVKQHRQTNLWARDNF

SEQ ID NO: 382762 - protein, 16 aa, Homo sapiens
  CDR3 for beta chain variable domain of TCR clone 191381 (TRBV24-1, TRBJ2-3)
CATSDRRQDLTDTQYF

SEQ ID NO: 382763 - protein, 16 aa, Homo sapiens
  CDR3 for alpha chain variable domain of TCR clone 191382 (TRAV25, TRAJ24)
CAQRRGTTDSWGKVQF

SEQ ID NO: 382764 - protein, 14 aa, Homo sapiens
  CDR3 for beta chain variable domain of TCR clone 191382 (TRBV6-6, TRBJ1-5)
CASSYGPANQHQHF

SEQ ID NO: 382765 - protein, 13 aa, Homo sapiens
  CDR3 for alpha chain variable domain of TCR clone 191383 (TRAV3, TRAJ27)
CAVRPLGAGKSTF

SEQ ID NO: 382766 - protein, 14 aa, Homo sapiens
  CDR3 for beta chain variable domain of TCR clone 191383 (TRBV19, TRBJ2-7)
CASSIFAGTYEQYF

SEQ ID NO: 382767 - protein, 15 aa, Homo sapiens
  CDR3 for alpha chain variable domain of TCR clone 191384 (TRAV8-3, TRAJ21)
CAVGALPPRGYKFYF

SEQ ID NO: 382768 - protein, 13 aa, Homo sapiens
  CDR3 for beta chain variable domain of TCR clone 191384 (TRBV20-1, TRBJ1-5)
CSASWGRSQPQHF

SEQ ID NO: 382769 - protein, 13 aa, Homo sapiens
  CDR3 for alpha chain variable domain of TCR clone 191385 (TRAV26-1, TRAJ29)
CIVRRSGNTPLGF

SEQ ID NO: 382770 - protein, 15 aa, Homo sapiens
  CDR3 for beta chain variable domain of TCR clone 191385 (TRBV7-2, TRBJ1-2)
CASSLVSGGDYGYTF

SEQ ID NO: 382771 - protein, 11 aa, Homo sapiens
  CDR3 for alpha chain variable domain of TCR clone 191386 (TRAV12-3, TRAJ43)
CAMSVSNDMRF

SEQ ID NO: 382772 - protein, 16 aa, Homo sapiens
  CDR3 for beta chain variable domain of TCR clone 191386 (TRBV12-4, TRBJ2-1)
CASSPQERPSYNEQFF

SEQ ID NO: 382773 - protein, 15 aa, Homo sapiens
  CDR3 for alpha chain variable domain of TCR clone 191387 (TRAV26-1, TRAJ29)
CVVRVEGSGNTTLVF

SEQ ID NO: 382774 - protein, 14 aa, Homo sapiens
  CDR3 for beta chain variable domain of TCR clone 191387 (TRBV18, TRBJ2-5)
CASSPGVSQETQYF

SEQ ID NO: 382775 - protein, 13 aa, Homo sapiens
  CDR3 for alpha chain variable domain of TCR clone 191388 (TRAV38-2/DV8, TRAJ34)
CAYRNYNTDKLIF

SEQ ID NO: 382776 - protein, 15 aa, Homo sapiens
  CDR3 for beta chain variable domain of TCR clone 191388 (TRBV27, TRBJ2-1)
CASSLRAGIPGEQFF

SEQ ID NO: 382777 - protein, 15 aa, Homo sapiens
  CDR3 for alpha chain variable domain of TCR clone 191389 (TRAV17, TRAJ57)
CATGHSQGGSEKLVF

SEQ ID NO: 382778 - protein, 13 aa, Homo sapiens
  CDR3 for beta chain variable domain of TCR clone 191389 (TRBV27, TRBJ1-4)
CASSLMGDEKLFF

SEQ ID NO: 382779 - protein, 16 aa, Homo sapiens
  CDR3 for alpha chain variable domain of TCR clone 191390 (TRAV12-3, TRAJ53)
CAMSPGSGGRNYKLTF

SEQ ID NO: 382780 - protein, 14 aa, Homo sapiens
  CDR3 for beta chain variable domain of TCR clone 191390 (TRBV12-5, TRBJ2-5)
CASGSRTHQETQYF

SEQ ID NO: 382781 - protein, 18 aa, Homo sapiens
  CDR3 for alpha chain variable domain of TCR clone 191391 (TRAV26-2, TRAJ33)
CCVLLHPEEPASNYQLIW

SEQ ID NO: 382782 - protein, 17 aa, Homo sapiens
  CDR3 for beta chain variable domain of TCR clone 191391 (TRBV13, TRBJ2-3)
CASSLSRVAGGRNTQYF

SEQ ID NO: 382783 - protein, 15 aa, Homo sapiens
  CDR3 for alpha chain variable domain of TCR clone 191392 (TRAV12-2, TRAJ26)
CAVNSHSNYGQNFVF

SEQ ID NO: 382784 - protein, 14 aa, Homo sapiens
  CDR3 for beta chain variable domain of TCR clone 191392 (TRBV7-2, TRBJ2-7)
CASSPKTSFYEQYF

SEQ ID NO: 382785 - protein, 17 aa, Homo sapiens
  CDR3 for alpha chain variable domain of TCR clone 191393 (TRAV13-1, TRAJ28)
CAASPPYSGAGSYQLTF

SEQ ID NO: 382786 - protein, 17 aa, Homo sapiens
  CDR3 for beta chain variable domain of TCR clone 191393 (TRBV6-3, TRBJ2-2)
CASSYAGQGINTGELFF

SEQ ID NO: 382787 - protein, 15 aa, Homo sapiens
  CDR3 for alpha chain variable domain of TCR clone 191394 (TRAV17, TRAJ56)
CATEPFTGANRKLTF

SEQ ID NO: 382788 - protein, 14 aa, Homo sapiens
  CDR3 for beta chain variable domain of TCR clone 191394 (TRBV19, TRBJ2-1)
CASPTFVLSGEQFF

SEQ ID NO: 382789 - protein, 15 aa, Homo sapiens
  CDR3 for alpha chain variable domain of TCR clone 191395 (TRAV35, TRAJ40)
CAGQLGTSGTYEYIF

SEQ ID NO: 382790 - protein, 11 aa, Homo sapiens
  CDR3 for beta chain variable domain of TCR clone 191395 (TRBV23-1, TRBJ2-7)
SSSGTGLEQYF

SEQ ID NO: 382791 - protein, 17 aa, Homo sapiens
  CDR3 for alpha chain variable domain of TCR clone 191396 (TRAV8-6, TRAJ58)
CAVSSWVGETSGSRLTF

SEQ ID NO: 382792 - protein, 14 aa, Homo sapiens
  CDR3 for beta chain variable domain of TCR clone 191396 (TRBV19, TRBJ2-1)
CASPTFVLSGEHFF

SEQ ID NO: 382793 - protein, 14 aa, Homo sapiens
  CDR3 for alpha chain variable domain of TCR clone 191397 (TRAV26-1, TRAJ40)
CIVRVARGTCKYIF

SEQ ID NO: 382794 - protein, 14 aa, Homo sapiens
  CDR3 for beta chain variable domain of TCR clone 191397 (TRBV7-3, TRBJ2-7)
CASSLKADSYEQYF

SEQ ID NO: 382795 - protein, 14 aa, Homo sapiens
  CDR3 for alpha chain variable domain of TCR clone 191398 (TRAV23/DV6, TRAJ36)
CAASRRTGANNLFF

SEQ ID NO: 382796 - protein, 11 aa, Homo sapiens
  CDR3 for beta chain variable domain of TCR clone 191398 (TRBV6-1, TRBJ1-2)
CASSDTGRAMA

SEQ ID NO: 382797 - protein, 14 aa, Homo sapiens
  CDR3 for alpha chain variable domain of TCR clone 191399 (TRAV29/DV5, TRAJ28)
CAARAGAGSYQLTF

SEQ ID NO: 382798 - protein, 13 aa, Homo sapiens
  CDR3 for beta chain variable domain of TCR clone 191399 (TRBV7-2, TRBJ1-5)
CARSFARNQPQHF

SEQ ID NO: 382799 - protein, 15 aa, Homo sapiens
  CDR3 for alpha chain variable domain of TCR clone 191400 (TRAV9-2, TRAJ10)
CALKVLTGGGNKLTF

SEQ ID NO: 382800 - protein, 20 aa, Homo sapiens
  CDR3 for beta chain variable domain of TCR clone 191400 (TRBV20-1, TRBJ2-5)
AASTSAVLVGLAGGGETQYF

SEQ ID NO: 382801 - protein, 14 aa, Homo sapiens
  CDR3 for alpha chain variable domain of TCR clone 191401 (TRAV12-2, TRAJ33)
CAVKRASSNYQLIW

SEQ ID NO: 382802 - protein, 15 aa, Homo sapiens
  CDR3 for beta chain variable domain of TCR clone 191401 (TRBV20-1, TRBJ2-7)
CSARDRVSGMDEQYF

SEQ ID NO: 382803 - protein, 16 aa, Homo sapiens
  CDR3 for alpha chain variable domain of TCR clone 191402 (TRAV27, TRAJ52)
CAGAPAGGTSYGKLTF

SEQ ID NO: 382804 - protein, 11 aa, Homo sapiens
  CDR3 for beta chain variable domain of TCR clone 191402 (TRBV27, TRBJ2-1)
CQQGFYNEQFF

SEQ ID NO: 382805 - protein, 14 aa, Homo sapiens
  CDR3 for alpha chain variable domain of TCR clone 191403 (TRAV1-2, TRAJ16)
CAVNRFSDGQKLLL

SEQ ID NO: 382806 - protein, 16 aa, Homo sapiens
  CDR3 for beta chain variable domain of TCR clone 191403 (TRBV18, TRBJ1-4)
CASSLQTVATNEKLFF

SEQ ID NO: 382807 - protein, 13 aa, Homo sapiens
  CDR3 for alpha chain variable domain of TCR clone 191404 (TRAV4, TRAJ21)
CLVGAYNFNKFYF

SEQ ID NO: 382808 - protein, 14 aa, Homo sapiens
  CDR3 for beta chain variable domain of TCR clone 191404 (TRBV20-1, TRBJ2-4)
CSAVAGGPGNIQYF

SEQ ID NO: 382809 - protein, 15 aa, Homo sapiens
  CDR3 for alpha chain variable domain of TCR clone 191405 (TRAV35, TRAJ40)
CAGQLGTSGTHKYIL

SEQ ID NO: 382810 - protein, 14 aa, Homo sapiens
  CDR3 for beta chain variable domain of TCR clone 191405 (TRBV7-3, TRBJ2-1)
CASSLAGGTNEQFF

SEQ ID NO: 382811 - protein, 12 aa, Homo sapiens
  CDR3 for alpha chain variable domain of TCR clone 191406 (TRAV26-1, TRAJ40)
CSTTSGTYKYIF

SEQ ID NO: 382812 - protein, 15 aa, Homo sapiens
  CDR3 for beta chain variable domain of TCR clone 191406 (TRBV20-1, TRBJ2-7)
CSAESGTSGAYEQYF

SEQ ID NO: 382813 - protein, 11 aa, Homo sapiens
  CDR3 for alpha chain variable domain of TCR clone 191407 (TRAV2, TRAJ13)
CASGGYQKVPF

SEQ ID NO: 382814 - protein, 15 aa, Homo sapiens
  CDR3 for beta chain variable domain of TCR clone 191407 (TRBV28, TRBJ1-3)
CASSMGWASGNTIYF

SEQ ID NO: 382815 - protein, 12 aa, Homo sapiens
  CDR3 for alpha chain variable domain of TCR clone 191408 (TRAV12-3, TRAJ40)
CATSSGTYKYIF

SEQ ID NO: 382816 - protein, 15 aa, Homo sapiens
  CDR3 for beta chain variable domain of TCR clone 191408 (TRBV7-3, TRBJ2-2)
CASSETGQGTGELFF

SEQ ID NO: 382817 - protein, 15 aa, Homo sapiens
  CDR3 for alpha chain variable domain of TCR clone 191409 (TRAV17, TRAJ4)
CATGTWSGGYNMLIF

SEQ ID NO: 382818 - protein, 16 aa, Homo sapiens
  CDR3 for beta chain variable domain of TCR clone 191409 (TRBV20-1, TRBJ1-4)
CSAPGQGLLTNEKLFF

SEQ ID NO: 382819 - protein, 14 aa, Homo sapiens
  CDR3 for alpha chain variable domain of TCR clone 191410 (TRAV12-2, TRAJ13)
CAVKKTVGYQKVTF

SEQ ID NO: 382820 - protein, 14 aa, Homo sapiens
  CDR3 for beta chain variable domain of TCR clone 191410 (TRBV12-5, TRBJ2-5)
CASGSRTHQETQYF

SEQ ID NO: 382821 - protein, 12 aa, Homo sapiens
  CDR3 for alpha chain variable domain of TCR clone 191411 (TRAV22, TRAJ22)
CAPGSSARQLTF

SEQ ID NO: 382822 - protein, 14 aa, Homo sapiens
  CDR3 for beta chain variable domain of TCR clone 191411 (TRBV7-9, TRBJ2-1)
CASSPRDSLYEQFF

SEQ ID NO: 382823 - protein, 14 aa, Homo sapiens
  CDR3 for alpha chain variable domain of TCR clone 191412 (TRAV8-4, TRAJ23)
CAVSAPGPGGKLIF

SEQ ID NO: 382824 - protein, 17 aa, Homo sapiens
  CDR3 for beta chain variable domain of TCR clone 191412 (TRBV4-3, TRBJ2-3)
CASSQDPLAGAADTQYF

SEQ ID NO: 382825 - protein, 14 aa, Homo sapiens
  CDR3 for alpha chain variable domain of TCR clone 191413 (TRAV12-2, TRAJ13)
CAVKKTGGYQKVTF

SEQ ID NO: 382826 - protein, 12 aa, Homo sapiens
  CDR3 for beta chain variable domain of TCR clone 191413 (TRBV12-4, TRBJ1-2)
CASSFIWLHIRF

SEQ ID NO: 382827 - protein, 13 aa, Homo sapiens
  CDR3 for alpha chain variable domain of TCR clone 191414 (TRAV26-1, TRAJ33)
CIVRVDSNYQLIW

SEQ ID NO: 382828 - protein, 15 aa, Homo sapiens
  CDR3 for beta chain variable domain of TCR clone 191414 (TRBV7-2, TRBJ1-1)
CASSFAGDRDTEAFF

SEQ ID NO: 382829 - protein, 11 aa, Homo sapiens
  CDR3 for alpha chain variable domain of TCR clone 191415 (TRAV12-2, TRAJ31)
CAVTRWARLMF

SEQ ID NO: 382830 - protein, 15 aa, Homo sapiens
  CDR3 for beta chain variable domain of TCR clone 191415 (TRBV19, TRBJ2-7)
YASSIGGGLVNEQYF

SEQ ID NO: 382831 - protein, 13 aa, Homo sapiens
  CDR3 for alpha chain variable domain of TCR clone 191416 (TRAV12-1, TRAJ26)
CVVRRNYGQNFVF

SEQ ID NO: 382832 - protein, 12 aa, Homo sapiens
  CDR3 for beta chain variable domain of TCR clone 191416 (TRBV11-2, TRBJ2-2)
CASSLPTGELFF

SEQ ID NO: 382833 - protein, 15 aa, Homo sapiens
  CDR3 for alpha chain variable domain of TCR clone 191417 (TRAV12-3, TRAJ6)
CAMSATTGGSYIHTF

SEQ ID NO: 382834 - protein, 16 aa, Homo sapiens
  CDR3 for beta chain variable domain of TCR clone 191417 (TRBV20-1, TRBJ1-2)
CSASMGQGVANYGYNF

SEQ ID NO: 382835 - protein, 13 aa, Homo sapiens
  CDR3 for alpha chain variable domain of TCR clone 191418 (TRAV1-2, TRAJ20)
CAVRDGNDYKLSF

SEQ ID NO: 382836 - protein, 13 aa, Homo sapiens
  CDR3 for beta chain variable domain of TCR clone 191418 (TRBV6-6, TRBJ2-7)
CASSPKHLAEQYF

SEQ ID NO: 382837 - protein, 13 aa, Homo sapiens
  CDR3 for alpha chain variable domain of TCR clone 191419 (TRAV30, TRAJ39)
CGTEKNAGNMLTF

SEQ ID NO: 382838 - protein, 15 aa, Homo sapiens
  CDR3 for beta chain variable domain of TCR clone 191419 (TRBV7-9, TRBJ1-6)
CASSSPGRGNSPLHF

SEQ ID NO: 382839 - protein, 12 aa, Homo sapiens
  CDR3 for alpha chain variable domain of TCR clone 191420 (TRAV34, TRAJ27)
CGADTNVGKSTF

SEQ ID NO: 382840 - protein, 17 aa, Homo sapiens
  CDR3 for beta chain variable domain of TCR clone 191420 (TRBV7-8, TRBJ2-6)
CASSAGTGGAGANVLTF

SEQ ID NO: 382841 - protein, 15 aa, Homo sapiens
  CDR3 for alpha chain variable domain of TCR clone 191421 (TRAV13-1, TRAJ43)
CASTPELGGNNDMRF

SEQ ID NO: 382842 - protein, 15 aa, Homo sapiens
  CDR3 for beta chain variable domain of TCR clone 191421 (TRBV10-2, TRBJ2-6)
CASSEQGTGANVLTF

SEQ ID NO: 382843 - protein, 13 aa, Homo sapiens
  CDR3 for alpha chain variable domain of TCR clone 191422 (TRAV21, TRAJ20)
CAVGLRVDYKLSF

SEQ ID NO: 382844 - protein, 17 aa, Homo sapiens
  CDR3 for beta chain variable domain of TCR clone 191422 (TRBV7-9, TRBJ1-1)
CASSLGIAGAENTEAFF

SEQ ID NO: 382845 - protein, 14 aa, Homo sapiens
  CDR3 for alpha chain variable domain of TCR clone 191423 (TRAV13-1, TRAJ35)
CAASKGGFGNVLHC

SEQ ID NO: 382846 - protein, 13 aa, Homo sapiens
  CDR3 for beta chain variable domain of TCR clone 191423 (TRBV3-1, TRBJ2-2)
CASLARGSGELFF

SEQ ID NO: 382847 - protein, 17 aa, Homo sapiens
  CDR3 for alpha chain variable domain of TCR clone 191424 (TRAV14/DV4, TRAJ26)
CISAMREGQNYGQNFVF

SEQ ID NO: 382848 - protein, 13 aa, Homo sapiens
  CDR3 for beta chain variable domain of TCR clone 191424 (TRBV24-1, TRBJ2-2)
CATSDWSTGELFF

SEQ ID NO: 382849 - protein, 13 aa, Homo sapiens
  CDR3 for alpha chain variable domain of TCR clone 191425 (TRAV12-1, TRAJ12)
CVVNIESSYKFIL

SEQ ID NO: 382850 - protein, 15 aa, Homo sapiens
  CDR3 for beta chain variable domain of TCR clone 191425 (TRBV19, TRBJ2-1)
CASSTGTSSYNEQFF

SEQ ID NO: 382851 - protein, 15 aa, Homo sapiens
  CDR3 for alpha chain variable domain of TCR clone 191426 (TRAV13-1, TRAJ57)
QVPPLSQGGSEKLVF

SEQ ID NO: 382852 - protein, 17 aa, Homo sapiens
  CDR3 for beta chain variable domain of TCR clone 191426 (TRBV7-3, TRBJ2-3)
CASSLTKRMRGADTQYF

SEQ ID NO: 382853 - protein, 15 aa, Homo sapiens
  CDR3 for alpha chain variable domain of TCR clone 191427 (TRAV26-2, TRAJ39)
CSLRENNNAGNMLTF

SEQ ID NO: 382854 - protein, 15 aa, Homo sapiens
  CDR3 for beta chain variable domain of TCR clone 191427 (TRBV5-4, TRBJ1-1)
CASSSLGWANTQPFF

SEQ ID NO: 382855 - protein, 14 aa, Homo sapiens
  CDR3 for alpha chain variable domain of TCR clone 191428 (TRAV3, TRAJ8)
CAVSLNTGFQKLVF

SEQ ID NO: 382856 - protein, 15 aa, Homo sapiens
  CDR3 for beta chain variable domain of TCR clone 191428 (TRBV5-1, TRBJ1-2)
CASSSPGTGSSGYTF

SEQ ID NO: 382857 - protein, 20 aa, Homo sapiens
  CDR3 for alpha chain variable domain of TCR clone 191429 (TRAV12-1, TRAJ32)
SVIQPPTSMNYGGATNNLIF

SEQ ID NO: 382858 - protein, 15 aa, Homo sapiens
  CDR3 for beta chain variable domain of TCR clone 191429 (TRBV7-9, TRBJ2-2)
CASGPLDTFPGELFF

SEQ ID NO: 382859 - protein, 11 aa, Homo sapiens
  CDR3 for alpha chain variable domain of TCR clone 191430 (TRAV12-1, TRAJ43)
CVEYDNNDMRV

SEQ ID NO: 382860 - protein, 14 aa, Homo sapiens
  CDR3 for beta chain variable domain of TCR clone 191430 (TRBV10-2, TRBJ2-1)
CASSEGTSEDEQFF

SEQ ID NO: 382861 - protein, 12 aa, Homo sapiens
  CDR3 for alpha chain variable domain of TCR clone 191431 (TRAV25, TRAJ30)
CSGKNRDDKIIF

SEQ ID NO: 382862 - protein, 11 aa, Homo sapiens
  CDR3 for beta chain variable domain of TCR clone 191431 (TRBV12-4, TRBJ2-7)
CATPEKGEQYF

SEQ ID NO: 382863 - protein, 11 aa, Homo sapiens
  CDR3 for alpha chain variable domain of TCR clone 191432 (TRAV26-1, TRAJ37)
CIVRVGRKLIF

SEQ ID NO: 382864 - protein, 15 aa, Homo sapiens
  CDR3 for beta chain variable domain of TCR clone 191432 (TRBV18, TRBJ1-1)
CASADRGTGDTEAFF

SEQ ID NO: 382865 - protein, 14 aa, Homo sapiens
  CDR3 for alpha chain variable domain of TCR clone 191433 (TRAV3, TRAJ40)
CSVRDRRGTYKYIF

SEQ ID NO: 382866 - protein, 15 aa, Homo sapiens
  CDR3 for beta chain variable domain of TCR clone 191433 (TRBV28, TRBJ2-1)
CASSIIAGGRSEQFF

SEQ ID NO: 382867 - protein, 13 aa, Homo sapiens
  CDR3 for alpha chain variable domain of TCR clone 191434 (TRAV8-3, TRAJ44)
CAVVPGTASKLTF

SEQ ID NO: 382868 - protein, 13 aa, Homo sapiens
  CDR3 for beta chain variable domain of TCR clone 191434 (TRBV3-1, TRBJ2-2)
CASLARGSGELFF

SEQ ID NO: 382869 - protein, 13 aa, Homo sapiens
  CDR3 for alpha chain variable domain of TCR clone 191435 (TRAV17, TRAJ26)
CATVDNYGQNFVF

SEQ ID NO: 382870 - protein, 15 aa, Homo sapiens
  CDR3 for beta chain variable domain of TCR clone 191435 (TRBV7-2, TRBJ1-5)
CASSSTGVDNQPQHF

SEQ ID NO: 382871 - protein, 14 aa, Homo sapiens
  CDR3 for alpha chain variable domain of TCR clone 191436 (TRAV12-3, TRAJ23)
CAMSAYNQGGKLIF

SEQ ID NO: 382872 - protein, 13 aa, Homo sapiens
  CDR3 for beta chain variable domain of TCR clone 191436 (TRBV24-1, TRBJ1-5)
CATSDRGDQPQHF

SEQ ID NO: 382873 - protein, 13 aa, Homo sapiens
  CDR3 for alpha chain variable domain of TCR clone 191437 (TRAV16, TRAJ37)
CALRGSNTGKLIV

SEQ ID NO: 382874 - protein, 15 aa, Homo sapiens
  CDR3 for beta chain variable domain of TCR clone 191437 (TRBV20-1, TRBJ2-1)
CSARGRGLSYNEQFF

SEQ ID NO: 382875 - protein, 13 aa, Homo sapiens
  CDR3 for alpha chain variable domain of TCR clone 191438 (TRAV35, TRAJ33)
CAGLMDSNYQLIW

SEQ ID NO: 382876 - protein, 13 aa, Homo sapiens
  CDR3 for beta chain variable domain of TCR clone 191438 (TRBV10-3, TRBJ2-1)
CAISEFSGREQYF

SEQ ID NO: 382877 - protein, 13 aa, Homo sapiens
  CDR3 for alpha chain variable domain of TCR clone 191439 (TRAV13-2, TRAJ53)
CAENMGSNYKLTF

SEQ ID NO: 382878 - protein, 13 aa, Homo sapiens
  CDR3 for beta chain variable domain of TCR clone 191439 (TRBV4-1, TRBJ2-2)
CARSQENTGELLF

SEQ ID NO: 382879 - protein, 17 aa, Homo sapiens
  CDR3 for alpha chain variable domain of TCR clone 191440 (TRAV13-1, TRAJ28)
CAASPPYSGAGSYQLTF

SEQ ID NO: 382880 - protein, 13 aa, Homo sapiens
  CDR3 for beta chain variable domain of TCR clone 191440 (TRBV12-5, TRBJ2-3)
CSSGDRQSDTQYF

SEQ ID NO: 382881 - protein, 14 aa, Homo sapiens
  CDR3 for alpha chain variable domain of TCR clone 191441 (TRAV3, TRAJ17)
CAVRDAAAGNKLTF

SEQ ID NO: 382882 - protein, 15 aa, Homo sapiens
  CDR3 for beta chain variable domain of TCR clone 191441 (TRBV3-1, TRBJ2-7)
CASSQVRQGAYEQYL

SEQ ID NO: 382883 - protein, 12 aa, Homo sapiens
  CDR3 for alpha chain variable domain of TCR clone 191442 (TRAV23/DV6, TRAJ30)
CAASKGDDKIIF

SEQ ID NO: 382884 - protein, 14 aa, Homo sapiens
  CDR3 for beta chain variable domain of TCR clone 191442 (TRBV7-9, TRBJ2-5)
CASSLAFGQETQYF

SEQ ID NO: 382885 - protein, 14 aa, Homo sapiens
  CDR3 for alpha chain variable domain of TCR clone 191443 (TRAV12-2, TRAJ38)
CAVANAGNYRKLIW

SEQ ID NO: 382886 - protein, 16 aa, Homo sapiens
  CDR3 for beta chain variable domain of TCR clone 191443 (TRBV12-4, TRBJ1-5)
CASRQGSGLGNQPQHF

SEQ ID NO: 382887 - protein, 14 aa, Homo sapiens
  CDR3 for alpha chain variable domain of TCR clone 191444 (TRAV1-2, TRAJ8)
CAEREDTGFQKLVF

SEQ ID NO: 382888 - protein, 15 aa, Homo sapiens
  CDR3 for beta chain variable domain of TCR clone 191444 (TRBV20-1, TRBJ2-7)
CSARDRVSGMDEQYF

SEQ ID NO: 382889 - protein, 10 aa, Homo sapiens
  CDR3 for alpha chain variable domain of TCR clone 191445 (TRAV1-2, TRAJ31)
CVSEDARLMF

SEQ ID NO: 382890 - protein, 15 aa, Homo sapiens
  CDR3 for beta chain variable domain of TCR clone 191445 (TRBV7-8, TRBJ1-5)
CASSLERRGLEPQHF

SEQ ID NO: 382891 - protein, 12 aa, Homo sapiens
  CDR3 for alpha chain variable domain of TCR clone 191446 (TRAV16, TRAJ49)
CALNEGGNQFHF

SEQ ID NO: 382892 - protein, 14 aa, Homo sapiens
  CDR3 for beta chain variable domain of TCR clone 191446 (TRBV7-9, TRBJ2-1)
CASRPTGLRNEQFF

SEQ ID NO: 382893 - protein, 18 aa, Homo sapiens
  CDR3 for alpha chain variable domain of TCR clone 191447 (TRAV13-1, TRAJ52)
CAAKNPNAGGTSYGRLTF

SEQ ID NO: 382894 - protein, 14 aa, Homo sapiens
  CDR3 for beta chain variable domain of TCR clone 191447 (TRBV12-4, TRBJ1-2)
CASSNLRGNYGYTF

SEQ ID NO: 382895 - protein, 14 aa, Homo sapiens
  CDR3 for alpha chain variable domain of TCR clone 191448 (TRAV12-3, TRAJ12)
CAMSALDNSYKLIF

SEQ ID NO: 382896 - protein, 16 aa, Homo sapiens
  CDR3 for beta chain variable domain of TCR clone 191448 (TRBV7-9, TRBJ2-3)
CASSLQGNPGTDTQYF

SEQ ID NO: 382897 - protein, 13 aa, Homo sapiens
  CDR3 for alpha chain variable domain of TCR clone 191449 (TRAV1-2, TRAJ9)
CAVLNTGGFKTIF

SEQ ID NO: 382898 - protein, 12 aa, Homo sapiens
  CDR3 for beta chain variable domain of TCR clone 191449 (TRBV7-9, TRBJ2-7)
CATRTDAYEQYF

SEQ ID NO: 382899 - protein, 14 aa, Homo sapiens
  CDR3 for alpha chain variable domain of TCR clone 191450 (TRAV26-1, TRAJ21)
CIVRPPYNFNKFYF

SEQ ID NO: 382900 - protein, 14 aa, Homo sapiens
  CDR3 for beta chain variable domain of TCR clone 191450 (TRBV11-3, TRBJ2-1)
CASSATTSGSIQYF

SEQ ID NO: 382901 - protein, 14 aa, Homo sapiens
  CDR3 for alpha chain variable domain of TCR clone 191451 (TRAV3, TRAJ22)
CAVRDYGSARQLTF

SEQ ID NO: 382902 - protein, 13 aa, Homo sapiens
  CDR3 for beta chain variable domain of TCR clone 191451 (TRBV11-2, TRBJ2-5)
CASSRGPSETQYF

SEQ ID NO: 382903 - protein, 15 aa, Homo sapiens
  CDR3 for alpha chain variable domain of TCR clone 191452 (TRAV20, TRAJ43)
CAVQAGKSSNDDMRF

SEQ ID NO: 382904 - protein, 14 aa, Homo sapiens
  CDR3 for beta chain variable domain of TCR clone 191452 (TRBV27, TRBJ2-1)
CASRHLGGGKEQFF

SEQ ID NO: 382905 - protein, 16 aa, Homo sapiens
  CDR3 for alpha chain variable domain of TCR clone 191453 (TRAV30, TRAJ24)
CGTEIVDADSWGKFQF

SEQ ID NO: 382906 - protein, 17 aa, Homo sapiens
  CDR3 for beta chain variable domain of TCR clone 191453 (TRBV20-1, TRBJ2-1)
CSASSSRLAGSYNEQFF

SEQ ID NO: 382907 - protein, 16 aa, Homo sapiens
  CDR3 for alpha chain variable domain of TCR clone 191454 (TRAV8-2, TRAJ7)
CVVGEGPYYGNNRLAF

SEQ ID NO: 382908 - protein, 15 aa, Homo sapiens
  CDR3 for beta chain variable domain of TCR clone 191454 (TRBV27, TRBJ2-3)
CASSLGLAATDTQYF

SEQ ID NO: 382909 - protein, 12 aa, Homo sapiens
  CDR3 for alpha chain variable domain of TCR clone 191455 (TRAV22, TRAJ22)
CAPGGSARQLTF

SEQ ID NO: 382910 - protein, 14 aa, Homo sapiens
  CDR3 for beta chain variable domain of TCR clone 191455 (TRBV4-1, TRBJ2-2)
CASSQAVNTGELFF

SEQ ID NO: 382911 - protein, 11 aa, Homo sapiens
  CDR3 for alpha chain variable domain of TCR clone 191456 (TRAV13-2, TRAJ23)
CAESPRGKLIF

SEQ ID NO: 382912 - protein, 16 aa, Homo sapiens
  CDR3 for beta chain variable domain of TCR clone 191456 (TRBV6-6, TRBJ2-1)
CASSWGGQGPYNEQFF

SEQ ID NO: 382913 - protein, 13 aa, Homo sapiens
  CDR3 for alpha chain variable domain of TCR clone 191457 (TRAV13-1, TRAJ39)
CSKYSNAGNMLTF

SEQ ID NO: 382914 - protein, 15 aa, Homo sapiens
  CDR3 for beta chain variable domain of TCR clone 191457 (TRBV20-1, TRBJ1-4)
QCSGTGLLTNEKLFF

SEQ ID NO: 382915 - protein, 14 aa, Homo sapiens
  CDR3 for alpha chain variable domain of TCR clone 191458 (TRAV17, TRAJ15)
CATDRGQAGTALIF

SEQ ID NO: 382916 - protein, 22 aa, Homo sapiens
  CDR3 for beta chain variable domain of TCR clone 191458 (TRBV6-1, TRBJ1-3)
CASVQGGGWKHHIFWRGKLAHC

SEQ ID NO: 382917 - protein, 13 aa, Homo sapiens
  CDR3 for alpha chain variable domain of TCR clone 191459 (TRAV21, TRAJ27)
CAARPGNAGKSTF

SEQ ID NO: 382918 - protein, 13 aa, Homo sapiens
  CDR3 for beta chain variable domain of TCR clone 191459 (TRBV27, TRBJ1-4)
CASSLMGDEKLFL

SEQ ID NO: 382919 - protein, 14 aa, Homo sapiens
  CDR3 for alpha chain variable domain of TCR clone 191460 (TRAV13-1, TRAJ35)
CAASKGGFGNVLHC

SEQ ID NO: 382920 - protein, 13 aa, Homo sapiens
  CDR3 for beta chain variable domain of TCR clone 191460 (TRBV27, TRBJ2-1)
CASRTLGVGEQFF

SEQ ID NO: 382921 - protein, 14 aa, Homo sapiens
  CDR3 for alpha chain variable domain of TCR clone 191461 (TRAV8-3, TRAJ13)
CAVGAQEGYKKVTF

SEQ ID NO: 382922 - protein, 15 aa, Homo sapiens
  CDR3 for beta chain variable domain of TCR clone 191461 (TRBV15, TRBJ2-2)
CATSGTGGRVGELFF

SEQ ID NO: 382923 - protein, 15 aa, Homo sapiens
  CDR3 for alpha chain variable domain of TCR clone 191462 (TRAV26-1, TRAJ40)
CIVRVTTSGTYKYIF

SEQ ID NO: 382924 - protein, 13 aa, Homo sapiens
  CDR3 for beta chain variable domain of TCR clone 191462 (TRBV29-1, TRBJ2-1)
CSVEGGRVNEQFF

SEQ ID NO: 382925 - protein, 14 aa, Homo sapiens
  CDR3 for alpha chain variable domain of TCR clone 191463 (TRAV8-6, TRAJ30)
CAVRPVNRDDKIIF

SEQ ID NO: 382926 - protein, 17 aa, Homo sapiens
  CDR3 for beta chain variable domain of TCR clone 191463 (TRBV7-8, TRBJ2-6)
CASSAETGGAGANVLTF

SEQ ID NO: 382927 - protein, 13 aa, Homo sapiens
  CDR3 for alpha chain variable domain of TCR clone 191464 (TRAV1-2, TRAJ20)
CAVRDGNDYKLSF

SEQ ID NO: 382928 - protein, 15 aa, Homo sapiens
  CDR3 for beta chain variable domain of TCR clone 191464 (TRBV7-2, TRBJ2-3)
CASSLGGRGRDTQYF

SEQ ID NO: 382929 - protein, 14 aa, Homo sapiens
  CDR3 for alpha chain variable domain of TCR clone 191465 (TRAV23/DV6, TRAJ8)
CAASKNTGSQKLVF

SEQ ID NO: 382930 - protein, 16 aa, Homo sapiens
  CDR3 for beta chain variable domain of TCR clone 191465 (TRBV4-1, TRBJ2-6)
CASSQVGDPGANVLTF

SEQ ID NO: 382931 - protein, 13 aa, Homo sapiens
  CDR3 for alpha chain variable domain of TCR clone 191466 (TRAV21, TRAJ20)
CAVGLSVDYKLSF

SEQ ID NO: 382932 - protein, 13 aa, Homo sapiens
  CDR3 for beta chain variable domain of TCR clone 191466 (TRBV29-1, TRBJ2-1)
CSVEGGRVNEQFF

SEQ ID NO: 382933 - protein, 14 aa, Homo sapiens
  CDR3 for alpha chain variable domain of TCR clone 191467 (TRAV13-2, TRAJ26)
CAENLGNYGQNFVF

SEQ ID NO: 382934 - protein, 14 aa, Homo sapiens
  CDR3 for beta chain variable domain of TCR clone 191467 (TRBV19, TRBJ1-3)
CASNRGSSGNTIYF

SEQ ID NO: 382935 - protein, 15 aa, Homo sapiens
  CDR3 for alpha chain variable domain of TCR clone 191468 (TRAV21, TRAJ40)
CAVRPQTSGTYKYVL

SEQ ID NO: 382936 - protein, 13 aa, Homo sapiens
  CDR3 for beta chain variable domain of TCR clone 191468 (TRBV7-2, TRBJ2-2)
CASSSVRAGELFF

SEQ ID NO: 382937 - protein, 22 aa, Homo sapiens
  CDR3 for alpha chain variable domain of TCR clone 191469 (TRAV1-1, TRAJ38)
CASNAGNNHIQNPDPAVYQLSD

SEQ ID NO: 382938 - protein, 14 aa, Homo sapiens
  CDR3 for beta chain variable domain of TCR clone 191469 (TRBV15, TRBJ2-1)
CATSGVEDYNEQFF

SEQ ID NO: 382939 - protein, 12 aa, Homo sapiens
  CDR3 for alpha chain variable domain of TCR clone 191470 (TRAV17, TRAJ57)
CATDGGSEKLVF

SEQ ID NO: 382940 - protein, 15 aa, Homo sapiens
  CDR3 for beta chain variable domain of TCR clone 191470 (TRBV3-1, TRBJ2-1)
CASSQQPSGGNEQFF

SEQ ID NO: 382941 - protein, 16 aa, Homo sapiens
  CDR3 for alpha chain variable domain of TCR clone 191471 (TRAV3, TRAJ10)
CAVRDMWSGGGNKLTF

SEQ ID NO: 382942 - protein, 12 aa, Homo sapiens
  CDR3 for beta chain variable domain of TCR clone 191471 (TRBV20-1, TRBJ2-7)
CSAGLKMGEQYF

SEQ ID NO: 382943 - protein, 15 aa, Homo sapiens
  CDR3 for alpha chain variable domain of TCR clone 191472 (TRAV1-2, TRAJ30)
CAVRPHGNRDDKIIF

SEQ ID NO: 382944 - protein, 16 aa, Homo sapiens
  CDR3 for beta chain variable domain of TCR clone 191472 (TRBV19, TRBJ1-1)
CASRFGGPVTGTEAFF

SEQ ID NO: 382945 - protein, 16 aa, Homo sapiens
  CDR3 for alpha chain variable domain of TCR clone 191473 (TRAV16, TRAJ4)
CALSRMFSGGYNKLIF

SEQ ID NO: 382946 - protein, 14 aa, Homo sapiens
  CDR3 for beta chain variable domain of TCR clone 191473 (TRBV7-9, TRBJ2-7)
CASSLSQGSYEQYF

SEQ ID NO: 382947 - protein, 12 aa, Homo sapiens
  CDR3 for alpha chain variable domain of TCR clone 191474 (TRAV8-2, TRAJ13)
CVVCGGYQKVTF

SEQ ID NO: 382948 - protein, 16 aa, Homo sapiens
  CDR3 for beta chain variable domain of TCR clone 191474 (TRBV19, TRBJ2-1)
CASSIQLAGTYNEQFF

SEQ ID NO: 382949 - protein, 11 aa, Homo sapiens
  CDR3 for alpha chain variable domain of TCR clone 191475 (TRAV12-1, TRAJ34)
CVVNKGRELIF

SEQ ID NO: 382950 - protein, 17 aa, Homo sapiens
  CDR3 for beta chain variable domain of TCR clone 191475 (TRBV20-1, TRBJ2-2)
CSASGSGQGGLTGELFF

SEQ ID NO: 382951 - protein, 16 aa, Homo sapiens
  CDR3 for alpha chain variable domain of TCR clone 191476 (TRAV35, TRAJ42)
CAGQQNYGGSQGNLIF

SEQ ID NO: 382952 - protein, 17 aa, Homo sapiens
  CDR3 for beta chain variable domain of TCR clone 191476 (TRBV4-1, TRBJ2-1)
CASSPKLSGSSYNEQFF

SEQ ID NO: 382953 - protein, 16 aa, Homo sapiens
  CDR3 for alpha chain variable domain of TCR clone 191477 (TRAV12-1, TRAJ45)
CVVIRYSGGGADGLTF

SEQ ID NO: 382954 - protein, 16 aa, Homo sapiens
  CDR3 for beta chain variable domain of TCR clone 191477 (TRBV7-9, TRBJ1-2)
CASSLGFSSGEDGYTF

SEQ ID NO: 382955 - protein, 18 aa, Homo sapiens
  CDR3 for alpha chain variable domain of TCR clone 191478 (TRAV8-4, TRAJ52)
CAVTRANAGGTSYGKLKF

SEQ ID NO: 382956 - protein, 12 aa, Homo sapiens
  CDR3 for beta chain variable domain of TCR clone 191478 (TRBV14, TRBJ2-5)
CASSQLKETQYF

SEQ ID NO: 382957 - protein, 16 aa, Homo sapiens
  CDR3 for alpha chain variable domain of TCR clone 191479 (TRAV30, TRAJ24)
CGTEIVDADSWGKFQF

SEQ ID NO: 382958 - protein, 15 aa, Homo sapiens
  CDR3 for beta chain variable domain of TCR clone 191479 (TRBV20-1, TRBJ2-5)
CSAEGTGGLQEAQYF

SEQ ID NO: 382959 - protein, 15 aa, Homo sapiens
  CDR3 for alpha chain variable domain of TCR clone 191480 (TRAV13-1, TRAJ32)
CAVSIYGGATNKLIF

SEQ ID NO: 382960 - protein, 12 aa, Homo sapiens
  CDR3 for beta chain variable domain of TCR clone 191480 (TRBV7-6, TRBJ2-3)
CASSTGTDTQYF

SEQ ID NO: 382961 - protein, 14 aa, Homo sapiens
  CDR3 for alpha chain variable domain of TCR clone 191481 (TRAV29/DV5, TRAJ32)
CAAAYGGATNKLIF

SEQ ID NO: 382962 - protein, 15 aa, Homo sapiens
  CDR3 for beta chain variable domain of TCR clone 191481 (TRBV27, TRBJ2-7)
CASRTAGTGSYEQYF

SEQ ID NO: 382963 - protein, 16 aa, Homo sapiens
  CDR3 for alpha chain variable domain of TCR clone 191482 (TRAV8-2, TRAJ45)
CVVSEGTGGGADGLTF

SEQ ID NO: 382964 - protein, 12 aa, Homo sapiens
  CDR3 for beta chain variable domain of TCR clone 191482 (TRBV12-4, TRBJ2-7)
CASSLGGYEQYF

SEQ ID NO: 382965 - protein, 20 aa, Homo sapiens
  CDR3 for alpha chain variable domain of TCR clone 191483 (TRAV8-3, TRAJ45)
LSTSVLWGSYSGGGADGLTF

SEQ ID NO: 382966 - protein, 11 aa, Homo sapiens
  CDR3 for beta chain variable domain of TCR clone 191483 (TRBV20-1, TRBJ2-5)
CSANREETQYF

SEQ ID NO: 382967 - protein, 11 aa, Homo sapiens
  CDR3 for alpha chain variable domain of TCR clone 191484 (TRAV35, TRAJ34)
CWARNTDKLIF

SEQ ID NO: 382968 - protein, 14 aa, Homo sapiens
  CDR3 for beta chain variable domain of TCR clone 191484 (TRBV12-4, TRBJ2-1)
CASSLGQGASEQFF

SEQ ID NO: 382969 - protein, 18 aa, Homo sapiens
  CDR3 for alpha chain variable domain of TCR clone 191485 (TRAV21, TRAJ52)
CAVRPSPAGGTSYGKLTF

SEQ ID NO: 382970 - protein, 17 aa, Homo sapiens
  CDR3 for beta chain variable domain of TCR clone 191485 (TRBV7-9, TRBJ2-3)
CASSLEEAGAYPDTQYF

SEQ ID NO: 382971 - protein, 15 aa, Homo sapiens
  CDR3 for alpha chain variable domain of TCR clone 191486 (TRAV21, TRAJ53)
CATLNSGGSNYKLTF

SEQ ID NO: 382972 - protein, 15 aa, Homo sapiens
  CDR3 for beta chain variable domain of TCR clone 191486 (TRBV11-2, TRBJ1-6)
CASTGFGTAVSPLHF

SEQ ID NO: 382973 - protein, 13 aa, Homo sapiens
  CDR3 for alpha chain variable domain of TCR clone 191487 (TRAV8-6, TRAJ54)
CAVCDQGAQKLVF

SEQ ID NO: 382974 - protein, 17 aa, Homo sapiens
  CDR3 for beta chain variable domain of TCR clone 191487 (TRBV19, TRBJ1-1)
CASSIAGRGLMNTEAFF

SEQ ID NO: 382975 - protein, 15 aa, Homo sapiens
  CDR3 for alpha chain variable domain of TCR clone 191488 (TRAV26-1, TRAJ29)
CIVRVQGSGNTPLVF

SEQ ID NO: 382976 - protein, 14 aa, Homo sapiens
  CDR3 for beta chain variable domain of TCR clone 191488 (TRBV18, TRBJ1-1)
CASSQGQGNTEAFF

SEQ ID NO: 382977 - protein, 10 aa, Homo sapiens
  CDR3 for alpha chain variable domain of TCR clone 191489 (TRAV23/DV6, TRAJ49)
CAASGNQFYF

SEQ ID NO: 382978 - protein, 17 aa, Homo sapiens
  CDR3 for beta chain variable domain of TCR clone 191489 (TRBV7-8, TRBJ2-6)
CASSAGTGGAGANVLTF

SEQ ID NO: 382979 - protein, 13 aa, Homo sapiens
  CDR3 for alpha chain variable domain of TCR clone 191490 (TRAV3, TRAJ27)
CPVRPLGAGKSTF

SEQ ID NO: 382980 - protein, 13 aa, Homo sapiens
  CDR3 for beta chain variable domain of TCR clone 191490 (TRBV7-9, TRBJ2-3)
CASSPGSTDTQYF

SEQ ID NO: 382981 - protein, 14 aa, Homo sapiens
  CDR3 for alpha chain variable domain of TCR clone 191491 (TRAV13-2, TRAJ43)
CAEIPTYNNIDMRF

SEQ ID NO: 382982 - protein, 15 aa, Homo sapiens
  CDR3 for beta chain variable domain of TCR clone 191491 (TRBV7-9, TRBJ2-2)
CASGPLDTFPGELFF

SEQ ID NO: 382983 - protein, 15 aa, Homo sapiens
  CDR3 for alpha chain variable domain of TCR clone 191492 (TRAV2, TRAJ22)
CAVPSRGGSARQLTF

SEQ ID NO: 382984 - protein, 14 aa, Homo sapiens
  CDR3 for beta chain variable domain of TCR clone 191492 (TRBV19, TRBJ1-5)
CASSFTGSNQPQHF

SEQ ID NO: 382985 - protein, 14 aa, Homo sapiens
  CDR3 for alpha chain variable domain of TCR clone 191493 (TRAV13-2, TRAJ15)
CAENPNQAGTALIF

SEQ ID NO: 382986 - protein, 18 aa, Homo sapiens
  CDR3 for beta chain variable domain of TCR clone 191493 (TRBV13, TRBJ2-6)
CASSPMTSGGSGANVLTF

SEQ ID NO: 382987 - protein, 11 aa, Homo sapiens
  CDR3 for alpha chain variable domain of TCR clone 191494 (TRAV26-1, TRAJ37)
CLVSVGRKLIF

SEQ ID NO: 382988 - protein, 13 aa, Homo sapiens
  CDR3 for beta chain variable domain of TCR clone 191494 (TRBV7-3, TRBJ1-1)
CASSQDWGAEAFF

SEQ ID NO: 382989 - protein, 14 aa, Homo sapiens
  CDR3 for alpha chain variable domain of TCR clone 191495 (TRAV1-2, TRAJ16)
CAVNRFLDGQKLLF

SEQ ID NO: 382990 - protein, 12 aa, Homo sapiens
  CDR3 for beta chain variable domain of TCR clone 191495 (TRBV7-6, TRBJ2-7)
CASSLADSEQYF

SEQ ID NO: 382991 - protein, 10 aa, Homo sapiens
  CDR3 for alpha chain variable domain of TCR clone 191496 (TRAV13-1, TRAJ7)
LIGRNNRLAF

SEQ ID NO: 382992 - protein, 16 aa, Homo sapiens
  CDR3 for beta chain variable domain of TCR clone 191496 (TRBV7-8, TRBJ2-6)
CHSEGTGESGANVLTF

SEQ ID NO: 382993 - protein, 11 aa, Homo sapiens
  CDR3 for alpha chain variable domain of TCR clone 191497 (TRAV13-1, TRAJ27)
CAAYNAGKSTF

SEQ ID NO: 382994 - protein, 20 aa, Homo sapiens
  CDR3 for beta chain variable domain of TCR clone 191497 (TRBV28, TRBJ2-1)
CASTPIGRSPGLAGGNEQFF

SEQ ID NO: 382995 - protein, 15 aa, Homo sapiens
  CDR3 for alpha chain variable domain of TCR clone 191498 (TRAV3, TRAJ5)
CAVRDLDTGRRALTF

SEQ ID NO: 382996 - protein, 13 aa, Homo sapiens
  CDR3 for beta chain variable domain of TCR clone 191498 (TRBV12-4, TRBJ2-7)
CASSPTEAYEQYL

SEQ ID NO: 382997 - protein, 10 aa, Homo sapiens
  CDR3 for alpha chain variable domain of TCR clone 191499 (TRAV23/DV6, TRAJ57)
CAASSTLAQG

SEQ ID NO: 382998 - protein, 14 aa, Homo sapiens
  CDR3 for beta chain variable domain of TCR clone 191499 (TRBV25-1, TRBJ1-1)
CASTHLGGNTEAFF

SEQ ID NO: 382999 - protein, 13 aa, Homo sapiens
  CDR3 for alpha chain variable domain of TCR clone 191500 (TRAV1-2, TRAJ12)
CAVSMDSSYKLIF

SEQ ID NO: 383000 - protein, 13 aa, Homo sapiens
  CDR3 for beta chain variable domain of TCR clone 191500 (TRBV12-4, TRBJ1-2)
CASSSGPNYGYTF

SEQ ID NO: 383001 - protein, 13 aa, Homo sapiens
  CDR3 for alpha chain variable domain of TCR clone 191501 (TRAV2, TRAJ34)
CAVEEDNTDKLIF

SEQ ID NO: 383002 - protein, 16 aa, Homo sapiens
  CDR3 for beta chain variable domain of TCR clone 191501 (TRBV7-3, TRBJ2-2)
CASSLKRGTLSGELFF

SEQ ID NO: 383003 - protein, 15 aa, Homo sapiens
  CDR3 for alpha chain variable domain of TCR clone 191502 (TRAV3, TRAJ22)
CAVRDRGGSARQLTF

SEQ ID NO: 383004 - protein, 12 aa, Homo sapiens
  CDR3 for beta chain variable domain of TCR clone 191502 (TRBV7-2, TRBJ2-1)
CASSPQDVEQFF

SEQ ID NO: 383005 - protein, 17 aa, Homo sapiens
  CDR3 for alpha chain variable domain of TCR clone 191503 (TRAV3, TRAJ42)
CAVRDRDYGGSQVNLIF

SEQ ID NO: 383006 - protein, 14 aa, Homo sapiens
  CDR3 for beta chain variable domain of TCR clone 191503 (TRBV25-1, TRBJ1-1)
CASTHLGGNTEAFF

SEQ ID NO: 383007 - protein, 12 aa, Homo sapiens
  CDR3 for alpha chain variable domain of TCR clone 191504 (TRAV13-1, TRAJ21)
CAAKEGFNKFYF

SEQ ID NO: 383008 - protein, 14 aa, Homo sapiens
  CDR3 for beta chain variable domain of TCR clone 191504 (TRBV18, TRBJ2-7)
CASSPRGGAYEQYL

SEQ ID NO: 383009 - protein, 14 aa, Homo sapiens
  CDR3 for alpha chain variable domain of TCR clone 191505 (TRAV8-4, TRAJ15)
CAVILNQAGTALIF

SEQ ID NO: 383010 - protein, 12 aa, Homo sapiens
  CDR3 for beta chain variable domain of TCR clone 191505 (TRBV7-9, TRBJ1-6)
CDSSASESPLHF

SEQ ID NO: 383011 - protein, 11 aa, Homo sapiens
  CDR3 for alpha chain variable domain of TCR clone 191506 (TRAV13-1, TRAJ30)
CAASRDDKIIF

SEQ ID NO: 383012 - protein, 15 aa, Homo sapiens
  CDR3 for beta chain variable domain of TCR clone 191506 (TRBV18, TRBJ1-1)
CASSPSSWVNTEAFV

SEQ ID NO: 383013 - protein, 16 aa, Homo sapiens
  CDR3 for alpha chain variable domain of TCR clone 191507 (TRAV38-1, TRAJ32)
CAFILTYGGATNKLIF

SEQ ID NO: 383014 - protein, 13 aa, Homo sapiens
  CDR3 for beta chain variable domain of TCR clone 191507 (TRBV12-4, TRBJ2-2)
CASSITGSGELFF

SEQ ID NO: 383015 - protein, 11 aa, Homo sapiens
  CDR3 for alpha chain variable domain of TCR clone 191508 (TRAV12-3, TRAJ43)
CAMSVTNDMRF

SEQ ID NO: 383016 - protein, 13 aa, Homo sapiens
  CDR3 for beta chain variable domain of TCR clone 191508 (TRBV20-1, TRBJ1-1)
CSAPLGGGTEAFF

SEQ ID NO: 383017 - protein, 14 aa, Homo sapiens
  CDR3 for alpha chain variable domain of TCR clone 191509 (TRAV1-2, TRAJ16)
CAVNRFSDGQKLLF

SEQ ID NO: 383018 - protein, 16 aa, Homo sapiens
  CDR3 for beta chain variable domain of TCR clone 191509 (TRBV12-4, TRBJ2-5)
CASSFFVRGRQETQYF

SEQ ID NO: 383019 - protein, 13 aa, Homo sapiens
  CDR3 for alpha chain variable domain of TCR clone 191510 (TRAV9-2, TRAJ53)
CALSGGSNYKLTF

SEQ ID NO: 383020 - protein, 15 aa, Homo sapiens
  CDR3 for beta chain variable domain of TCR clone 191510 (TRBV19, TRBJ1-1)
CASSIGGGRNTEAFF

SEQ ID NO: 383021 - protein, 12 aa, Homo sapiens
  CDR3 for alpha chain variable domain of TCR clone 191511 (TRAV16, TRAJ10)
CSRTGGGNKLTF

SEQ ID NO: 383022 - protein, 19 aa, Homo sapiens
  CDR3 for beta chain variable domain of TCR clone 191511 (TRBV25-1, TRBJ2-2)
CAILVYRVDRGRKTGEVFF

SEQ ID NO: 383023 - protein, 15 aa, Homo sapiens
  CDR3 for alpha chain variable domain of TCR clone 191512 (TRAV8-2, TRAJ23)
CVVSPLITREESLSS

SEQ ID NO: 383024 - protein, 12 aa, Homo sapiens
  CDR3 for beta chain variable domain of TCR clone 191512 (TRBV7-9, TRBJ1-4)
CASSTDREKLFF

SEQ ID NO: 383025 - protein, 13 aa, Homo sapiens
  CDR3 for alpha chain variable domain of TCR clone 191513 (TRAV12-3, TRAJ54)
CAMFAQGAQKLVF

SEQ ID NO: 383026 - protein, 16 aa, Homo sapiens
  CDR3 for beta chain variable domain of TCR clone 191513 (TRBV7-6, TRBJ2-3)
CASIPRRGGLGDTQYF

SEQ ID NO: 383027 - protein, 15 aa, Homo sapiens
  CDR3 for alpha chain variable domain of TCR clone 191514 (TRAV1-2, TRAJ35)
CAVRDREGFGDVLHC

SEQ ID NO: 383028 - protein, 14 aa, Homo sapiens
  CDR3 for beta chain variable domain of TCR clone 191514 (TRBV28, TRBJ1-4)
CASSRTVGNEKLFF

SEQ ID NO: 383029 - protein, 14 aa, Homo sapiens
  CDR3 for alpha chain variable domain of TCR clone 191515 (TRAV9-2, TRAJ22)
CALTGASSARQLTF

SEQ ID NO: 383030 - protein, 13 aa, Homo sapiens
  CDR3 for beta chain variable domain of TCR clone 191515 (TRBV10-3, TRBJ2-7)
CASKLAVNYEQYF

SEQ ID NO: 383031 - protein, 14 aa, Homo sapiens
  CDR3 for alpha chain variable domain of TCR clone 191516 (TRAV2, TRAJ9)
CAVEDRSGGFKTIL

SEQ ID NO: 383032 - protein, 14 aa, Homo sapiens
  CDR3 for beta chain variable domain of TCR clone 191516 (TRBV6-1, TRBJ1-3)
CASVQGGGGNTIYF

SEQ ID NO: 383033 - protein, 13 aa, Homo sapiens
  CDR3 for alpha chain variable domain of TCR clone 191517 (TRAV13-1, TRAJ5)
CAARVTGRRALTF

SEQ ID NO: 383034 - protein, 14 aa, Homo sapiens
  CDR3 for beta chain variable domain of TCR clone 191517 (TRBV6-3, TRBJ1-1)
CASSYQRRDTEAFF

SEQ ID NO: 383035 - protein, 14 aa, Homo sapiens
  CDR3 for alpha chain variable domain of TCR clone 191518 (TRAV16, TRAJ58)
CALNGETSGSRLTF

SEQ ID NO: 383036 - protein, 13 aa, Homo sapiens
  CDR3 for beta chain variable domain of TCR clone 191518 (TRBV20-1, TRBJ2-2)
CSASAAGTGELFF

SEQ ID NO: 383037 - protein, 18 aa, Homo sapiens
  CDR3 for alpha chain variable domain of TCR clone 191519 (TRAV12-3, TRAJ52)
GAMSVGGAGGTSYGKLTF

SEQ ID NO: 383038 - protein, 16 aa, Homo sapiens
  CDR3 for beta chain variable domain of TCR clone 191519 (TRBV7-9, TRBJ1-2)
CASSISLDRGGYGYTF

SEQ ID NO: 383039 - protein, 14 aa, Homo sapiens
  CDR3 for alpha chain variable domain of TCR clone 191520 (TRAV13-1, TRAJ44)
CAAKATGTASKLTF

SEQ ID NO: 383040 - protein, 16 aa, Homo sapiens
  CDR3 for beta chain variable domain of TCR clone 191520 (TRBV2, TRBJ2-2)
CASSAFGDANTGELFF

SEQ ID NO: 383041 - protein, 12 aa, Homo sapiens
  CDR3 for alpha chain variable domain of TCR clone 191521 (TRAV27, TRAJ35)
CAGADFGNVRHC

SEQ ID NO: 383042 - protein, 16 aa, Homo sapiens
  CDR3 for beta chain variable domain of TCR clone 191521 (TRBV6-1, TRBJ2-1)
CASISRQGSSYNEQFL

SEQ ID NO: 383043 - protein, 13 aa, Homo sapiens
  CDR3 for alpha chain variable domain of TCR clone 191522 (TRAV1-2, TRAJ9)
CAALNTGGFKTIF

SEQ ID NO: 383044 - protein, 14 aa, Homo sapiens
  CDR3 for beta chain variable domain of TCR clone 191522 (TRBV10-2, TRBJ1-5)
CASSSTGRNQPQHF

SEQ ID NO: 383045 - protein, 13 aa, Homo sapiens
  CDR3 for alpha chain variable domain of TCR clone 191523 (TRAV13-1, TRAJ39)
CAASIWAGNMLTF

SEQ ID NO: 383046 - protein, 15 aa, Homo sapiens
  CDR3 for beta chain variable domain of TCR clone 191523 (TRBV7-9, TRBJ1-1)
CASSLLEHGGTEAFF

SEQ ID NO: 383047 - protein, 12 aa, Homo sapiens
  CDR3 for alpha chain variable domain of TCR clone 191524 (TRAV20, TRAJ45)
CAVRGGADGITF

SEQ ID NO: 383048 - protein, 14 aa, Homo sapiens
  CDR3 for beta chain variable domain of TCR clone 191524 (TRBV20-1, TRBJ2-7)
CSAKRGRSSYEQYF

SEQ ID NO: 383049 - protein, 14 aa, Homo sapiens
  CDR3 for alpha chain variable domain of TCR clone 191525 (TRAV13-1, TRAJ40)
CAARSTSGTYKYIF

SEQ ID NO: 383050 - protein, 15 aa, Homo sapiens
  CDR3 for beta chain variable domain of TCR clone 191525 (TRBV18, TRBJ1-5)
CASSETRGNNQPQHF

SEQ ID NO: 383051 - protein, 12 aa, Homo sapiens
  CDR3 for alpha chain variable domain of TCR clone 191526 (TRAV8-6, TRAJ11)
CAVSSGYSTLTF

SEQ ID NO: 383052 - protein, 11 aa, Homo sapiens
  CDR3 for beta chain variable domain of TCR clone 191526 (TRBV20-1, TRBJ1-5)
CSAQGDRPQHF

SEQ ID NO: 383053 - protein, 15 aa, Homo sapiens
  CDR3 for alpha chain variable domain of TCR clone 191527 (TRAV13-1, TRAJ44)
CAASRGGGTASKLTF

SEQ ID NO: 383054 - protein, 16 aa, Homo sapiens
  CDR3 for beta chain variable domain of TCR clone 191527 (TRBV6-3, TRBJ2-1)
CASSYRRGDSYNEQFF

SEQ ID NO: 383055 - protein, 12 aa, Homo sapiens
  CDR3 for alpha chain variable domain of TCR clone 191528 (TRAV29/DV5, TRAJ49)
CAATDTCNQFYF

SEQ ID NO: 383056 - protein, 12 aa, Homo sapiens
  CDR3 for beta chain variable domain of TCR clone 191528 (TRBV12-4, TRBJ2-7)
CVSSLGGYEQYF

SEQ ID NO: 383057 - protein, 12 aa, Homo sapiens
  CDR3 for alpha chain variable domain of TCR clone 191529 (TRAV12-1, TRAJ40)
CVVYSGTYKYIL

SEQ ID NO: 383058 - protein, 15 aa, Homo sapiens
  CDR3 for beta chain variable domain of TCR clone 191529 (TRBV7-9, TRBJ1-6)
CASSSPGRGNSPLHF

SEQ ID NO: 383059 - protein, 15 aa, Homo sapiens
  CDR3 for alpha chain variable domain of TCR clone 191530 (TRAV17, TRAJ56)
CATDANTGANSKLTF

SEQ ID NO: 383060 - protein, 11 aa, Homo sapiens
  CDR3 for beta chain variable domain of TCR clone 191530 (TRBV12-4, TRBJ2-3)
CASTATDTQYF

SEQ ID NO: 383061 - protein, 13 aa, Homo sapiens
  CDR3 for alpha chain variable domain of TCR clone 191531 (TRAV27, TRAJ53)
CAGQGGSNYKLTF

SEQ ID NO: 383062 - protein, 13 aa, Homo sapiens
  CDR3 for beta chain variable domain of TCR clone 191531 (TRBV29-1, TRBJ1-1)
CSVESGFGTEAFS

SEQ ID NO: 383063 - protein, 18 aa, Homo sapiens
  CDR3 for alpha chain variable domain of TCR clone 191532 (TRAV21, TRAJ53)
CAVKGGENSGGSNYKLTF

SEQ ID NO: 383064 - protein, 15 aa, Homo sapiens
  CDR3 for beta chain variable domain of TCR clone 191532 (TRBV4-1, TRBJ2-7)
CASSQQGQGFDEQYF

SEQ ID NO: 383065 - protein, 14 aa, Homo sapiens
  CDR3 for alpha chain variable domain of TCR clone 191533 (TRAV8-3, TRAJ35)
CAVVPQGFGNVLHC

SEQ ID NO: 383066 - protein, 15 aa, Homo sapiens
  CDR3 for beta chain variable domain of TCR clone 191533 (TRBV6-1, TRBJ2-2)
CASSAGQGHTGELFF

SEQ ID NO: 383067 - protein, 15 aa, Homo sapiens
  CDR3 for alpha chain variable domain of TCR clone 191534 (TRAV12-2, TRAJ53)
CAVNGGGGSNYKLTF

SEQ ID NO: 383068 - protein, 15 aa, Homo sapiens
  CDR3 for beta chain variable domain of TCR clone 191534 (TRBV9, TRBJ1-6)
CASSVAGTRDSPLHF

SEQ ID NO: 383069 - protein, 14 aa, Homo sapiens
  CDR3 for alpha chain variable domain of TCR clone 191535 (TRAV13-1, TRAJ26)
CAASRGNYGQNFVF

SEQ ID NO: 383070 - protein, 18 aa, Homo sapiens
  CDR3 for beta chain variable domain of TCR clone 191535 (TRBV11-2, TRBJ2-7)
CASSTVTAPRPTSSTSGR

SEQ ID NO: 383071 - protein, 12 aa, Homo sapiens
  CDR3 for alpha chain variable domain of TCR clone 191536 (TRAV21, TRAJ3)
CCFYSSASKIIF

SEQ ID NO: 383072 - protein, 14 aa, Homo sapiens
  CDR3 for beta chain variable domain of TCR clone 191536 (TRBV7-9, TRBJ2-7)
CASSPRTGTYEQYF

SEQ ID NO: 383073 - protein, 11 aa, Homo sapiens
  CDR3 for alpha chain variable domain of TCR clone 191537 (TRAV12-1, TRAJ8)
CVVTGFQKLVS

SEQ ID NO: 383074 - protein, 14 aa, Homo sapiens
  CDR3 for beta chain variable domain of TCR clone 191537 (TRBV19, TRBJ2-1)
CASGKSTQYNEQFF

SEQ ID NO: 383075 - protein, 11 aa, Homo sapiens
  CDR3 for alpha chain variable domain of TCR clone 191538 (TRAV17, TRAJ9)
CGFTGGFKTVF

SEQ ID NO: 383076 - protein, 14 aa, Homo sapiens
  CDR3 for beta chain variable domain of TCR clone 191538 (TRBV7-9, TRBJ2-2)
CASSLVQDTGELFF

SEQ ID NO: 383077 - protein, 14 aa, Homo sapiens
  CDR3 for alpha chain variable domain of TCR clone 191539 (TRAV12-1, TRAJ30)
CVPTGTNRDDKIIF

SEQ ID NO: 383078 - protein, 11 aa, Homo sapiens
  CDR3 for beta chain variable domain of TCR clone 191539 (TRBV4-1, TRBJ2-2)
CASEHIGGLFF

SEQ ID NO: 383079 - protein, 10 aa, Homo sapiens
  CDR3 for alpha chain variable domain of TCR clone 191540 (TRAV36/DV7, TRAJ48)
CAVGNEKLTF

SEQ ID NO: 383080 - protein, 12 aa, Homo sapiens
  CDR3 for beta chain variable domain of TCR clone 191540 (TRBV5-5, TRBJ2-5)
CASSYFGETQYF

SEQ ID NO: 383081 - protein, 14 aa, Homo sapiens
  CDR3 for alpha chain variable domain of TCR clone 191541 (TRAV17, TRAJ35)
CATERPGFGNVLHC

SEQ ID NO: 383082 - protein, 19 aa, Homo sapiens
  CDR3 for beta chain variable domain of TCR clone 191541 (TRBV11-3, TRBJ2-2)
CASSTRPGAKTTNTGELFF

SEQ ID NO: 383083 - protein, 16 aa, Homo sapiens
  CDR3 for alpha chain variable domain of TCR clone 191542 (TRAV27, TRAJ53)
CAAPEGSGGSNYKLTF

SEQ ID NO: 383084 - protein, 12 aa, Homo sapiens
  CDR3 for beta chain variable domain of TCR clone 191542 (TRBV3-1, TRBJ2-1)
CASSQGSSGQFF

SEQ ID NO: 383085 - protein, 18 aa, Homo sapiens
  CDR3 for alpha chain variable domain of TCR clone 191543 (TRAV12-3, TRAJ52)
CAMSVGGAGGTSYGKLTF

SEQ ID NO: 383086 - protein, 14 aa, Homo sapiens
  CDR3 for beta chain variable domain of TCR clone 191543 (TRBV11-3, TRBJ1-6)
CASSFSGGDSPLHF

SEQ ID NO: 383087 - protein, 12 aa, Homo sapiens
  CDR3 for alpha chain variable domain of TCR clone 191544 (TRAV16, TRAJ56)
CAPTGANSKLTF

SEQ ID NO: 383088 - protein, 17 aa, Homo sapiens
  CDR3 for beta chain variable domain of TCR clone 191544 (TRBV27, TRBJ2-6)
CASSMTGFASGANVLTF

SEQ ID NO: 383089 - protein, 17 aa, Homo sapiens
  CDR3 for alpha chain variable domain of TCR clone 191545 (TRAV4, TRAJ18)
CLVGERYVGSTLGRLYF

SEQ ID NO: 383090 - protein, 16 aa, Homo sapiens
  CDR3 for beta chain variable domain of TCR clone 191545 (TRBV15, TRBJ1-4)
CATSRDSPPGREKLFF

SEQ ID NO: 383091 - protein, 23 aa, Homo sapiens
  CDR3 for alpha chain variable domain of TCR clone 191546 (TRAV1-1, TRAJ29)
LLQELQMKDSASYFLGGNKPLVF

SEQ ID NO: 383092 - protein, 13 aa, Homo sapiens
  CDR3 for beta chain variable domain of TCR clone 191546 (TRBV25-1, TRBJ2-7)
CASSEDGDYEQYF

SEQ ID NO: 383093 - protein, 16 aa, Homo sapiens
  CDR3 for alpha chain variable domain of TCR clone 191547 (TRAV30, TRAJ24)
CGPEIVDADSWGTFQF

SEQ ID NO: 383094 - protein, 14 aa, Homo sapiens
  CDR3 for beta chain variable domain of TCR clone 191547 (TRBV12-5, TRBJ2-5)
CASGSRTHQETQYF

SEQ ID NO: 383095 - protein, 13 aa, Homo sapiens
  CDR3 for alpha chain variable domain of TCR clone 191548 (TRAV26-1, TRAJ48)
CIVRVVGDEKLTF

SEQ ID NO: 383096 - protein, 12 aa, Homo sapiens
  CDR3 for beta chain variable domain of TCR clone 191548 (TRBV11-2, TRBJ2-5)
CASSLGQETQYF

SEQ ID NO: 383097 - protein, 13 aa, Homo sapiens
  CDR3 for alpha chain variable domain of TCR clone 191549 (TRAV17, TRAJ39)
CATDYGAGNMLTF

SEQ ID NO: 383098 - protein, 15 aa, Homo sapiens
  CDR3 for beta chain variable domain of TCR clone 191549 (TRBV3-1, TRBJ2-5)
CASSRGQASWKTQYF

SEQ ID NO: 383099 - protein, 13 aa, Homo sapiens
  CDR3 for alpha chain variable domain of TCR clone 191550 (TRAV3, TRAJ20)
FAVRDTGDHKLSF

SEQ ID NO: 383100 - protein, 15 aa, Homo sapiens
  CDR3 for beta chain variable domain of TCR clone 191550 (TRBV6-1, TRBJ2-7)
CASSEGGGVSYEQYF

SEQ ID NO: 383101 - protein, 14 aa, Homo sapiens
  CDR3 for alpha chain variable domain of TCR clone 191551 (TRAV12-2, TRAJ9)
CAVNMEGGGFKTIF

SEQ ID NO: 383102 - protein, 14 aa, Homo sapiens
  CDR3 for beta chain variable domain of TCR clone 191551 (TRBV2, TRBJ2-5)
CASSAVLAQETQYF

SEQ ID NO: 383103 - protein, 12 aa, Homo sapiens
  CDR3 for alpha chain variable domain of TCR clone 191552 (TRAV13-1, TRAJ11)
CAASKGYRTLTF

SEQ ID NO: 383104 - protein, 16 aa, Homo sapiens
  CDR3 for beta chain variable domain of TCR clone 191552 (TRBV6-1, TRBJ2-5)
CASSETLDRGAETQYF

SEQ ID NO: 383105 - protein, 14 aa, Homo sapiens
  CDR3 for alpha chain variable domain of TCR clone 191553 (TRAV21, TRAJ35)
CAVMPIGFGNVLHC

SEQ ID NO: 383106 - protein, 13 aa, Homo sapiens
  CDR3 for beta chain variable domain of TCR clone 191553 (TRBV15, TRBJ1-6)
CATSGGLNSPLHF

SEQ ID NO: 383107 - protein, 14 aa, Homo sapiens
  CDR3 for alpha chain variable domain of TCR clone 191554 (TRAV13-1, TRAJ32)
CAARGSGATNKLIL

SEQ ID NO: 383108 - protein, 15 aa, Homo sapiens
  CDR3 for beta chain variable domain of TCR clone 191554 (TRBV5-5, TRBJ1-1)
CASSLVGKDNTEAFF

SEQ ID NO: 383109 - protein, 14 aa, Homo sapiens
  CDR3 for alpha chain variable domain of TCR clone 191555 (TRAV4, TRAJ23)
CLVGSYNKGGKLIF

SEQ ID NO: 383110 - protein, 18 aa, Homo sapiens
  CDR3 for beta chain variable domain of TCR clone 191555 (TRBV6-5, TRBJ2-6)
CASRTPGQGKTGANVLTF

SEQ ID NO: 383111 - protein, 12 aa, Homo sapiens
  CDR3 for alpha chain variable domain of TCR clone 191556 (TRAV2, TRAJ15)
CAVAQAGTALIF

SEQ ID NO: 383112 - protein, 15 aa, Homo sapiens
  CDR3 for beta chain variable domain of TCR clone 191556 (TRBV28, TRBJ1-2)
CASIPQGSDDYGYTF

SEQ ID NO: 383113 - protein, 12 aa, Homo sapiens
  CDR3 for alpha chain variable domain of TCR clone 191557 (TRAV12-3, TRAJ17)
CAMTLTGNKLTF

SEQ ID NO: 383114 - protein, 16 aa, Homo sapiens
  CDR3 for beta chain variable domain of TCR clone 191557 (TRBV19, TRBJ2-1)
CASSIETGSPYNEQFF

SEQ ID NO: 383115 - protein, 18 aa, Homo sapiens
  CDR3 for alpha chain variable domain of TCR clone 191558 (TRAV26-2, TRAJ18)
CILRDVNHRGSTLGRLYF

SEQ ID NO: 383116 - protein, 14 aa, Homo sapiens
  CDR3 for beta chain variable domain of TCR clone 191558 (TRBV15, TRBJ2-2)
CATSRDRGIGELFF

SEQ ID NO: 383117 - protein, 13 aa, Homo sapiens
  CDR3 for alpha chain variable domain of TCR clone 191559 (TRAV26-1, TRAJ29)
CIVRRSGNTPLVF

SEQ ID NO: 383118 - protein, 14 aa, Homo sapiens
  CDR3 for beta chain variable domain of TCR clone 191559 (TRBV7-7, TRBJ2-2)
CATRQDSDTGELFF

SEQ ID NO: 383119 - protein, 13 aa, Homo sapiens
  CDR3 for alpha chain variable domain of TCR clone 191560 (TRAV27, TRAJ6)
CEGGTRGSYIPTF

SEQ ID NO: 383120 - protein, 14 aa, Homo sapiens
  CDR3 for beta chain variable domain of TCR clone 191560 (TRBV6-3, TRBJ1-1)
CASSYHRRDTEAFF

SEQ ID NO: 383121 - protein, 15 aa, Homo sapiens
  CDR3 for alpha chain variable domain of TCR clone 191561 (TRAV12-1, TRAJ9)
CVVSFGDTGGFKTIF

SEQ ID NO: 383122 - protein, 16 aa, Homo sapiens
  CDR3 for beta chain variable domain of TCR clone 191561 (TRBV13, TRBJ2-2)
CASSPRTGEHTGELFF

SEQ ID NO: 383123 - protein, 15 aa, Homo sapiens
  CDR3 for alpha chain variable domain of TCR clone 191562 (TRAV26-1, TRAJ17)
FIVRVVKAAGNELTF

SEQ ID NO: 383124 - protein, 16 aa, Homo sapiens
  CDR3 for beta chain variable domain of TCR clone 191562 (TRBV7-9, TRBJ2-1)
CASSLVSGPSYNEQFF

SEQ ID NO: 383125 - protein, 10 aa, Homo sapiens
  CDR3 for alpha chain variable domain of TCR clone 191563 (TRAV5, TRAJ34)
CAEDTDKLIF

SEQ ID NO: 383126 - protein, 15 aa, Homo sapiens
  CDR3 for beta chain variable domain of TCR clone 191563 (TRBV7-3, TRBJ2-1)
CASSPTGGGEVEQFF

SEQ ID NO: 383127 - protein, 16 aa, Homo sapiens
  CDR3 for alpha chain variable domain of TCR clone 191564 (TRAV8-3, TRAJ13)
CAVGAYPSGGSQNVTF

SEQ ID NO: 383128 - protein, 15 aa, Homo sapiens
  CDR3 for beta chain variable domain of TCR clone 191564 (TRBV19, TRBJ1-5)
CASSIVWADNQPQHF

SEQ ID NO: 383129 - protein, 11 aa, Homo sapiens
  CDR3 for alpha chain variable domain of TCR clone 191565 (TRAV1-2, TRAJ20)
CAVSNDYKHSF

SEQ ID NO: 383130 - protein, 16 aa, Homo sapiens
  CDR3 for beta chain variable domain of TCR clone 191565 (TRBV29-1, TRBJ2-6)
CSVEDITYAGANVLTF

SEQ ID NO: 383131 - protein, 17 aa, Homo sapiens
  CDR3 for alpha chain variable domain of TCR clone 191566 (TRAV17, TRAJ28)
CATDPRQGGAGSYQLTF

SEQ ID NO: 383132 - protein, 16 aa, Homo sapiens
  CDR3 for beta chain variable domain of TCR clone 191566 (TRBV25-1, TRBJ1-1)
CASSGDRDRGRIEAFF

SEQ ID NO: 383133 - protein, 20 aa, Homo sapiens
  CDR3 for alpha chain variable domain of TCR clone 191567 (TRAV1-1, TRAJ37)
CLLLLRCEREGSGNTGKLIF

SEQ ID NO: 383134 - protein, 14 aa, Homo sapiens
  CDR3 for beta chain variable domain of TCR clone 191567 (TRBV7-2, TRBJ2-7)
CASSPKTSFYEQYF

SEQ ID NO: 383135 - protein, 14 aa, Homo sapiens
  CDR3 for alpha chain variable domain of TCR clone 191568 (TRAV12-3, TRAJ5)
CAMTWDTGWRALTF

SEQ ID NO: 383136 - protein, 14 aa, Homo sapiens
  CDR3 for beta chain variable domain of TCR clone 191568 (TRBV10-2, TRBJ1-5)
CASSSTGRNQPQHF

SEQ ID NO: 383137 - protein, 12 aa, Homo sapiens
  CDR3 for alpha chain variable domain of TCR clone 191569 (TRAV12-1, TRAJ40)
CVVYSGTYKYVF

SEQ ID NO: 383138 - protein, 20 aa, Homo sapiens
  CDR3 for beta chain variable domain of TCR clone 191569 (TRBV28, TRBJ2-1)
CASTPIGRSPGLAGGNEQFF

SEQ ID NO: 383139 - protein, 14 aa, Homo sapiens
  CDR3 for alpha chain variable domain of TCR clone 191570 (TRAV13-1, TRAJ3)
CAASKSSSASKIIF

SEQ ID NO: 383140 - protein, 16 aa, Homo sapiens
  CDR3 for beta chain variable domain of TCR clone 191570 (TRBV15, TRBJ2-3)
CATSRDLGIVTDTHYF

SEQ ID NO: 383141 - protein, 12 aa, Homo sapiens
  CDR3 for alpha chain variable domain of TCR clone 191571 (TRAV13-1, TRAJ49)
CAASSTGNQLYF

SEQ ID NO: 383142 - protein, 14 aa, Homo sapiens
  CDR3 for beta chain variable domain of TCR clone 191571 (TRBV7-2, TRBJ2-5)
CASSPAGNQETQYF

SEQ ID NO: 383143 - protein, 14 aa, Homo sapiens
  CDR3 for alpha chain variable domain of TCR clone 191572 (TRAV1-2, TRAJ16)
CVVNRFSDGQKLLF

SEQ ID NO: 383144 - protein, 15 aa, Homo sapiens
  CDR3 for beta chain variable domain of TCR clone 191572 (TRBV7-9, TRBJ1-6)
CASSSPGRGNSPLLF

SEQ ID NO: 383145 - protein, 13 aa, Homo sapiens
  CDR3 for alpha chain variable domain of TCR clone 191573 (TRAV2, TRAJ40)
CAAVTSGTYKYIF

SEQ ID NO: 383146 - protein, 13 aa, Homo sapiens
  CDR3 for beta chain variable domain of TCR clone 191573 (TRBV7-9, TRBJ2-5)
CASLPSGRETQYF

SEQ ID NO: 383147 - protein, 12 aa, Homo sapiens
  CDR3 for alpha chain variable domain of TCR clone 191574 (TRAV12-1, TRAJ9)
CVVPWAGFKTIF

SEQ ID NO: 383148 - protein, 15 aa, Homo sapiens
  CDR3 for beta chain variable domain of TCR clone 191574 (TRBV7-9, TRBJ1-6)
CASSSPGRGNSPLHF

SEQ ID NO: 383149 - protein, 14 aa, Homo sapiens
  CDR3 for alpha chain variable domain of TCR clone 191575 (TRAV30, TRAJ50)
CGTALKTSYDKVIF

SEQ ID NO: 383150 - protein, 17 aa, Homo sapiens
  CDR3 for beta chain variable domain of TCR clone 191575 (TRBV15, TRBJ2-3)
CATSGTTSDEGTDTQYF

SEQ ID NO: 383151 - protein, 15 aa, Homo sapiens
  CDR3 for alpha chain variable domain of TCR clone 191576 (TRAV27, TRAJ38)
CAARRNAGDNRKLIW

SEQ ID NO: 383152 - protein, 14 aa, Homo sapiens
  CDR3 for beta chain variable domain of TCR clone 191576 (TRBV7-8, TRBJ2-3)
CASSLEAGTDTQYF

SEQ ID NO: 383153 - protein, 15 aa, Homo sapiens
  CDR3 for alpha chain variable domain of TCR clone 191577 (TRAV26-1, TRAJ44)
CIIRANTGTASKLTF

SEQ ID NO: 383154 - protein, 16 aa, Homo sapiens
  CDR3 for beta chain variable domain of TCR clone 191577 (TRBV7-7, TRBJ2-1)
CASSLASGNSYNEQFF

SEQ ID NO: 383155 - protein, 11 aa, Homo sapiens
  CDR3 for alpha chain variable domain of TCR clone 191578 (TRAV17, TRAJ9)
CGFTGGFKTIF

SEQ ID NO: 383156 - protein, 16 aa, Homo sapiens
  CDR3 for beta chain variable domain of TCR clone 191578 (TRBV5-7, TRBJ2-3)
CASSLAGGRTADTQYF

SEQ ID NO: 383157 - protein, 14 aa, Homo sapiens
  CDR3 for alpha chain variable domain of TCR clone 191579 (TRAV8-3, TRAJ44)
CAVGLTGTASKLTF

SEQ ID NO: 383158 - protein, 15 aa, Homo sapiens
  CDR3 for beta chain variable domain of TCR clone 191579 (TRBV7-2, TRBJ2-1)
CASSSGLAGGNEQFF

SEQ ID NO: 383159 - protein, 15 aa, Homo sapiens
  CDR3 for alpha chain variable domain of TCR clone 191580 (TRAV38-1, TRAJ37)
CAFIHGSVNTGKLIF

SEQ ID NO: 383160 - protein, 12 aa, Homo sapiens
  CDR3 for beta chain variable domain of TCR clone 191580 (TRBV7-9, TRBJ2-7)
CASSFGRYEQYF

SEQ ID NO: 383161 - protein, 14 aa, Homo sapiens
  CDR3 for alpha chain variable domain of TCR clone 191581 (TRAV17, TRAJ57)
CATDASGGSEKLVF

SEQ ID NO: 383162 - protein, 14 aa, Homo sapiens
  CDR3 for beta chain variable domain of TCR clone 191581 (TRBV19, TRBJ2-1)
CASPTFVLSGEQFF

SEQ ID NO: 383163 - protein, 11 aa, Homo sapiens
  CDR3 for alpha chain variable domain of TCR clone 191582 (TRAV26-1, TRAJ37)
CIVRVGRKLIF

SEQ ID NO: 383164 - protein, 15 aa, Homo sapiens
  CDR3 for beta chain variable domain of TCR clone 191582 (TRBV19, TRBJ2-7)
CASSSGLAVSDEQYF

SEQ ID NO: 383165 - protein, 16 aa, Homo sapiens
  CDR3 for alpha chain variable domain of TCR clone 191583 (TRAV30, TRAJ24)
CGTETVDADSWGKFQF

SEQ ID NO: 383166 - protein, 15 aa, Homo sapiens
  CDR3 for beta chain variable domain of TCR clone 191583 (TRBV7-3, TRBJ2-1)
CASSPTGGGEVEQFF

SEQ ID NO: 383167 - protein, 13 aa, Homo sapiens
  CDR3 for alpha chain variable domain of TCR clone 191584 (TRAV26-1, TRAJ33)
CIVPMDSNYQLIW

SEQ ID NO: 383168 - protein, 14 aa, Homo sapiens
  CDR3 for beta chain variable domain of TCR clone 191584 (TRBV18, TRBJ2-5)
CASSPGVSQETQYF

SEQ ID NO: 383169 - protein, 11 aa, Homo sapiens
  CDR3 for alpha chain variable domain of TCR clone 191585 (TRAV13-2, TRAJ20)
CADFNDYKLSF

SEQ ID NO: 383170 - protein, 12 aa, Homo sapiens
  CDR3 for beta chain variable domain of TCR clone 191585 (TRBV5-1, TRBJ2-3)
CASSLAADTQYF

SEQ ID NO: 383171 - protein, 12 aa, Homo sapiens
  CDR3 for alpha chain variable domain of TCR clone 191586 (TRAV12-3, TRAJ20)
CAMVRGYYKLSF

SEQ ID NO: 383172 - protein, 12 aa, Homo sapiens
  CDR3 for beta chain variable domain of TCR clone 191586 (TRBV6-1, TRBJ2-7)
CASSDYSYEQYF

SEQ ID NO: 383173 - protein, 16 aa, Homo sapiens
  CDR3 for alpha chain variable domain of TCR clone 191587 (TRAV12-2, TRAJ52)
CAVNNRGGTSYGKLTF

SEQ ID NO: 383174 - protein, 14 aa, Homo sapiens
  CDR3 for beta chain variable domain of TCR clone 191587 (TRBV28, TRBJ2-7)
CASSFGGTSYEQYF

SEQ ID NO: 383175 - protein, 18 aa, Homo sapiens
  CDR3 for alpha chain variable domain of TCR clone 191588 (TRAV13-1, TRAJ52)
CAASKRSAGGTSYGKLTF

SEQ ID NO: 383176 - protein, 15 aa, Homo sapiens
  CDR3 for beta chain variable domain of TCR clone 191588 (TRBV11-2, TRBJ1-3)
CASSLDGTVGNTIYF

SEQ ID NO: 383177 - protein, 13 aa, Homo sapiens
  CDR3 for alpha chain variable domain of TCR clone 191589 (TRAV29/DV5, TRAJ34)
CAARVDNTDKLIF

SEQ ID NO: 383178 - protein, 15 aa, Homo sapiens
  CDR3 for beta chain variable domain of TCR clone 191589 (TRBV28, TRBJ2-1)
CASSIIAGGRSEQFF

SEQ ID NO: 383179 - protein, 10 aa, Homo sapiens
  CDR3 for alpha chain variable domain of TCR clone 191590 (TRAV1-2, TRAJ31)
CAFFDARLMF

SEQ ID NO: 383180 - protein, 15 aa, Homo sapiens
  CDR3 for beta chain variable domain of TCR clone 191590 (TRBV2, TRBJ2-5)
CASTRDGGPQETQYF

SEQ ID NO: 383181 - protein, 14 aa, Homo sapiens
  CDR3 for alpha chain variable domain of TCR clone 191591 (TRAV26-1, TRAJ52)
CIVKGGTSYGKLTF

SEQ ID NO: 383182 - protein, 14 aa, Homo sapiens
  CDR3 for beta chain variable domain of TCR clone 191591 (TRBV11-2, TRBJ2-7)
CASSSTGEGYEQYF

SEQ ID NO: 383183 - protein, 12 aa, Homo sapiens
  CDR3 for alpha chain variable domain of TCR clone 191592 (TRAV1-1, TRAJ9)
CAVDTGGFKTIF

SEQ ID NO: 383184 - protein, 14 aa, Homo sapiens
  CDR3 for beta chain variable domain of TCR clone 191592 (TRBV6-1, TRBJ1-3)
CASVQGGGGNTIYF

SEQ ID NO: 383185 - protein, 11 aa, Homo sapiens
  CDR3 for alpha chain variable domain of TCR clone 191593 (TRAV1-2, TRAJ20)
CAVANDYKLSF

SEQ ID NO: 383186 - protein, 12 aa, Homo sapiens
  CDR3 for beta chain variable domain of TCR clone 191593 (TRBV19, TRBJ2-1)
CASSQISNEQFF

SEQ ID NO: 383187 - protein, 14 aa, Homo sapiens
  CDR3 for alpha chain variable domain of TCR clone 191594 (TRAV17, TRAJ6)
CATDASGGSYIPTF

SEQ ID NO: 383188 - protein, 21 aa, Homo sapiens
  CDR3 for beta chain variable domain of TCR clone 191594 (TRBV4-3, TRBJ2-7)
CASSQEFIGWQVTPTSSTSGR

SEQ ID NO: 383189 - protein, 15 aa, Homo sapiens
  CDR3 for alpha chain variable domain of TCR clone 191595 (TRAV8-4, TRAJ3)
CAVTGENLVQQCFQD

SEQ ID NO: 383190 - protein, 14 aa, Homo sapiens
  CDR3 for beta chain variable domain of TCR clone 191595 (TRBV20-1, TRBJ2-1)
CSAQTGGSANEQFF

SEQ ID NO: 383191 - protein, 15 aa, Homo sapiens
  CDR3 for alpha chain variable domain of TCR clone 191596 (TRAV14/DV4, TRAJ12)
WAMREERDSSYKLIF

SEQ ID NO: 383192 - protein, 17 aa, Homo sapiens
  CDR3 for beta chain variable domain of TCR clone 191596 (TRBV2, TRBJ2-1)
CASSRPGQGVMVNEQFF

SEQ ID NO: 383193 - protein, 14 aa, Homo sapiens
  CDR3 for alpha chain variable domain of TCR clone 191597 (TRAV2, TRAJ9)
RAVEDRSGGFKTIF

SEQ ID NO: 383194 - protein, 13 aa, Homo sapiens
  CDR3 for beta chain variable domain of TCR clone 191597 (TRBV12-4, TRBJ1-5)
CASSPDRAQPQHF

SEQ ID NO: 383195 - protein, 14 aa, Homo sapiens
  CDR3 for alpha chain variable domain of TCR clone 191598 (TRAV1-1, TRAJ30)
CAVRSLNRDDKIIF

SEQ ID NO: 383196 - protein, 15 aa, Homo sapiens
  CDR3 for beta chain variable domain of TCR clone 191598 (TRBV27, TRBJ1-4)
CDSSAQQDLNEKLFF

SEQ ID NO: 383197 - protein, 14 aa, Homo sapiens
  CDR3 for alpha chain variable domain of TCR clone 191599 (TRAV12-2, TRAJ13)
CAVKKTGGYQKVTF

SEQ ID NO: 383198 - protein, 15 aa, Homo sapiens
  CDR3 for beta chain variable domain of TCR clone 191599 (TRBV27, TRBJ2-1)
CASGNGRGSSNEQFF

SEQ ID NO: 383199 - protein, 23 aa, Homo sapiens
  CDR3 for alpha chain variable domain of TCR clone 191600 (TRAV26-1, TRAJ38)
CIADNAGNNHIQNPDPAVYQLRD

SEQ ID NO: 383200 - protein, 15 aa, Homo sapiens
  CDR3 for beta chain variable domain of TCR clone 191600 (TRBV5-1, TRBJ1-1)
CASSSTTGTNTEAFF

SEQ ID NO: 383201 - protein, 16 aa, Homo sapiens
  CDR3 for alpha chain variable domain of TCR clone 191601 (TRAV3, TRAJ10)
CTVRDMRAGGGNKLTF

SEQ ID NO: 383202 - protein, 14 aa, Homo sapiens
  CDR3 for beta chain variable domain of TCR clone 191601 (TRBV25-1, TRBJ1-1)
CASTHLGGNTEAFF

SEQ ID NO: 383203 - protein, 14 aa, Homo sapiens
  CDR3 for alpha chain variable domain of TCR clone 191602 (TRAV14/DV4, TRAJ15)
CAMRREQAGTALIF

SEQ ID NO: 383204 - protein, 11 aa, Homo sapiens
  CDR3 for beta chain variable domain of TCR clone 191602 (TRBV7-2, TRBJ2-7)
CASSSGLWQYF

SEQ ID NO: 383205 - protein, 11 aa, Homo sapiens
  CDR3 for alpha chain variable domain of TCR clone 191603 (TRAV12-3, TRAJ43)
CAMSVSNDMRF

SEQ ID NO: 383206 - protein, 15 aa, Homo sapiens
  CDR3 for beta chain variable domain of TCR clone 191603 (TRBV20-1, TRBJ2-1)
CSASSAGSSYNEQFL

SEQ ID NO: 383207 - protein, 16 aa, Homo sapiens
  CDR3 for alpha chain variable domain of TCR clone 191604 (TRAV12-3, TRAJ53)
CAMSVGSGGSNYKLTF

SEQ ID NO: 383208 - protein, 12 aa, Homo sapiens
  CDR3 for beta chain variable domain of TCR clone 191604 (TRBV7-6, TRBJ1-2)
CQQLVADYGYTF

SEQ ID NO: 383209 - protein, 12 aa, Homo sapiens
  CDR3 for alpha chain variable domain of TCR clone 191605 (TRAV8-3, TRAJ20)
CAVGANDYKLSF

SEQ ID NO: 383210 - protein, 12 aa, Homo sapiens
  CDR3 for beta chain variable domain of TCR clone 191605 (TRBV5-1, TRBJ2-7)
CTSSFRGYEQYF

SEQ ID NO: 383211 - protein, 21 aa, Homo sapiens
  CDR3 for alpha chain variable domain of TCR clone 191606 (TRAV26-1, TRAJ38)
CIADNAGNNHIQNPHPAVYQL

SEQ ID NO: 383212 - protein, 13 aa, Homo sapiens
  CDR3 for beta chain variable domain of TCR clone 191606 (TRBV20-1, TRBJ1-1)
CSARGGGNTEAFF

SEQ ID NO: 383213 - protein, 10 aa, Homo sapiens
  CDR3 for alpha chain variable domain of TCR clone 191607 (TRAV12-1, TRAJ43)
CVVHNNDMRF

SEQ ID NO: 383214 - protein, 13 aa, Homo sapiens
  CDR3 for beta chain variable domain of TCR clone 191607 (TRBV12-4, TRBJ1-2)
CASSSGLTVISTI

SEQ ID NO: 383215 - protein, 12 aa, Homo sapiens
  CDR3 for alpha chain variable domain of TCR clone 191608 (TRAV12-2, TRAJ42)
CAVGGSQRNLIF

SEQ ID NO: 383216 - protein, 16 aa, Homo sapiens
  CDR3 for beta chain variable domain of TCR clone 191608 (TRBV7-3, TRBJ2-2)
YASSLKRGTLSGELFF

SEQ ID NO: 383217 - protein, 13 aa, Homo sapiens
  CDR3 for alpha chain variable domain of TCR clone 191609 (TRAV12-1, TRAJ6)
CVVYPGGSYIPTF

SEQ ID NO: 383218 - protein, 13 aa, Homo sapiens
  CDR3 for beta chain variable domain of TCR clone 191609 (TRBV7-9, TRBJ1-2)
CASSLKQNYGYTF

SEQ ID NO: 383219 - protein, 12 aa, Homo sapiens
  CDR3 for alpha chain variable domain of TCR clone 191610 (TRAV13-1, TRAJ21)
CAAKVGFNKFYF

SEQ ID NO: 383220 - protein, 15 aa, Homo sapiens
  CDR3 for beta chain variable domain of TCR clone 191610 (TRBV2, TRBJ2-1)
CASSELAGSYNEQFF

SEQ ID NO: 383221 - protein, 18 aa, Homo sapiens
  CDR3 for alpha chain variable domain of TCR clone 191611 (TRAV13-1, TRAJ52)
CAASKRSAGGTSCGKLTF

SEQ ID NO: 383222 - protein, 12 aa, Homo sapiens
  CDR3 for beta chain variable domain of TCR clone 191611 (TRBV20-1, TRBJ2-3)
CSARVGTDTQYF

SEQ ID NO: 383223 - protein, 17 aa, Homo sapiens
  CDR3 for alpha chain variable domain of TCR clone 191612 (TRAV12-3, TRAJ6)
CAMSARGGAGGSYIPTF

SEQ ID NO: 383224 - protein, 12 aa, Homo sapiens
  CDR3 for beta chain variable domain of TCR clone 191612 (TRBV12-4, TRBJ2-3)
CASSSLPDTQYF

SEQ ID NO: 383225 - protein, 14 aa, Homo sapiens
  CDR3 for alpha chain variable domain of TCR clone 191613 (TRAV8-4, TRAJ23)
CAVSAPGSGGKLIF

SEQ ID NO: 383226 - protein, 17 aa, Homo sapiens
  CDR3 for beta chain variable domain of TCR clone 191613 (TRBV4-3, TRBJ2-3)
CASSQEPLAGAVDTQYF

SEQ ID NO: 383227 - protein, 12 aa, Homo sapiens
  CDR3 for alpha chain variable domain of TCR clone 191614 (TRAV26-2, TRAJ21)
CILKGNFNKVYF

SEQ ID NO: 383228 - protein, 14 aa, Homo sapiens
  CDR3 for beta chain variable domain of TCR clone 191614 (TRBV7-9, TRBJ1-1)
CASTPLQSYTEAFF

SEQ ID NO: 383229 - protein, 12 aa, Homo sapiens
  CDR3 for alpha chain variable domain of TCR clone 191615 (TRAV13-1, TRAJ36)
WRGGAGANNLFF

SEQ ID NO: 383230 - protein, 16 aa, Homo sapiens
  CDR3 for beta chain variable domain of TCR clone 191615 (TRBV7-9, TRBJ2-5)
CASRLEIGKRKETQYF

SEQ ID NO: 383231 - protein, 15 aa, Homo sapiens
  CDR3 for alpha chain variable domain of TCR clone 191616 (TRAV17, TRAJ35)
CATASVIGFGNVLHC

SEQ ID NO: 383232 - protein, 15 aa, Homo sapiens
  CDR3 for beta chain variable domain of TCR clone 191616 (TRBV7-9, TRBJ2-7)
CASSLALAEAYEQYF

SEQ ID NO: 383233 - protein, 10 aa, Homo sapiens
  CDR3 for alpha chain variable domain of TCR clone 191617 (TRAV17, TRAJ36)
CATVAGNLFF

SEQ ID NO: 383234 - protein, 12 aa, Homo sapiens
  CDR3 for beta chain variable domain of TCR clone 191617 (TRBV11-2, TRBJ2-4)
RASSAASGSEYF

SEQ ID NO: 383235 - protein, 10 aa, Homo sapiens
  CDR3 for alpha chain variable domain of TCR clone 191618 (TRAV5, TRAJ34)
CAEDTDKLIF

SEQ ID NO: 383236 - protein, 12 aa, Homo sapiens
  CDR3 for beta chain variable domain of TCR clone 191618 (TRBV7-2, TRBJ1-5)
CASSLWSQPQHF

SEQ ID NO: 383237 - protein, 13 aa, Homo sapiens
  CDR3 for alpha chain variable domain of TCR clone 191619 (TRAV16, TRAJ28)
CALTWAGSYQLTF

SEQ ID NO: 383238 - protein, 16 aa, Homo sapiens
  CDR3 for beta chain variable domain of TCR clone 191619 (TRBV28, TRBJ1-5)
CASSLTGQGWNQPQHF

SEQ ID NO: 383239 - protein, 13 aa, Homo sapiens
  CDR3 for alpha chain variable domain of TCR clone 191620 (TRAV27, TRAJ45)
CRSSGGGADGLTF

SEQ ID NO: 383240 - protein, 15 aa, Homo sapiens
  CDR3 for beta chain variable domain of TCR clone 191620 (TRBV4-3, TRBJ2-7)
CASSQGDWGDYEQYF

SEQ ID NO: 383241 - protein, 14 aa, Homo sapiens
  CDR3 for alpha chain variable domain of TCR clone 191621 (TRAV3, TRAJ9)
CAVRGNTGGFKTIF

SEQ ID NO: 383242 - protein, 16 aa, Homo sapiens
  CDR3 for beta chain variable domain of TCR clone 191621 (TRBV7-2, TRBJ2-7)
CASSVGLAGGAYEQYF

SEQ ID NO: 383243 - protein, 14 aa, Homo sapiens
  CDR3 for alpha chain variable domain of TCR clone 191622 (TRAV17, TRAJ15)
CATDAWQAGTALIF

SEQ ID NO: 383244 - protein, 14 aa, Homo sapiens
  CDR3 for beta chain variable domain of TCR clone 191622 (TRBV7-2, TRBJ2-7)
CASSPKTSFYEQYF

SEQ ID NO: 383245 - protein, 13 aa, Homo sapiens
  CDR3 for alpha chain variable domain of TCR clone 191623 (TRAV13-1, TRAJ6)
CAASKGGSYIPTF

SEQ ID NO: 383246 - protein, 14 aa, Homo sapiens
  CDR3 for beta chain variable domain of TCR clone 191623 (TRBV7-2, TRBJ2-1)
CASSLGVGYNEQFS

SEQ ID NO: 383247 - protein, 17 aa, Homo sapiens
  CDR3 for alpha chain variable domain of TCR clone 191624 (TRAV12-2, TRAJ48)
CASNEKLTFGTGTRLTI

SEQ ID NO: 383248 - protein, 12 aa, Homo sapiens
  CDR3 for beta chain variable domain of TCR clone 191624 (TRBV7-8, TRBJ2-7)
CASSLGDREQYF

SEQ ID NO: 383249 - protein, 14 aa, Homo sapiens
  CDR3 for alpha chain variable domain of TCR clone 191625 (TRAV12-3, TRAJ12)
CAMSALDSSYKLIF

SEQ ID NO: 383250 - protein, 12 aa, Homo sapiens
  CDR3 for beta chain variable domain of TCR clone 191625 (TRBV28, TRBJ2-3)
CASSLYRDTQYF

SEQ ID NO: 383251 - protein, 15 aa, Homo sapiens
  CDR3 for alpha chain variable domain of TCR clone 191626 (TRAV17, TRAJ52)
CATEAGGTGYGKLTF

SEQ ID NO: 383252 - protein, 14 aa, Homo sapiens
  CDR3 for beta chain variable domain of TCR clone 191626 (TRBV28, TRBJ1-5)
CASSLGVLVKPQHF

SEQ ID NO: 383253 - protein, 21 aa, Homo sapiens
  CDR3 for alpha chain variable domain of TCR clone 191627 (TRAV34, TRAJ44)
PAMQASTSVEQTTGTASKLTF

SEQ ID NO: 383254 - protein, 12 aa, Homo sapiens
  CDR3 for beta chain variable domain of TCR clone 191627 (TRBV5-1, TRBJ2-1)
CASIGGYNEQFF

SEQ ID NO: 383255 - protein, 18 aa, Homo sapiens
  CDR3 for alpha chain variable domain of TCR clone 191628 (TRAV26-1, TRAJ23)
CIVRVGLEVWNQGGKLIF

SEQ ID NO: 383256 - protein, 15 aa, Homo sapiens
  CDR3 for beta chain variable domain of TCR clone 191628 (TRBV5-7, TRBJ2-7)
CASSLGPGRGHEQSF

SEQ ID NO: 383257 - protein, 12 aa, Homo sapiens
  CDR3 for alpha chain variable domain of TCR clone 191629 (TRAV35, TRAJ30)
CAGQLTDDKIIF

SEQ ID NO: 383258 - protein, 17 aa, Homo sapiens
  CDR3 for beta chain variable domain of TCR clone 191629 (TRBV4-2, TRBJ2-5)
CASSPGRWRNFQETQYF

SEQ ID NO: 383259 - protein, 12 aa, Homo sapiens
  CDR3 for alpha chain variable domain of TCR clone 191630 (TRAV3, TRAJ20)
CAVGDHDYKLSF

SEQ ID NO: 383260 - protein, 15 aa, Homo sapiens
  CDR3 for beta chain variable domain of TCR clone 191630 (TRBV9, TRBJ1-6)
CASSVAGTGDSPLRF

SEQ ID NO: 383261 - protein, 15 aa, Homo sapiens
  CDR3 for alpha chain variable domain of TCR clone 191631 (TRAV4, TRAJ36)
CLVGDRQTGANNLFF

SEQ ID NO: 383262 - protein, 16 aa, Homo sapiens
  CDR3 for beta chain variable domain of TCR clone 191631 (TRBV4-1, TRBJ2-6)
CASSRSTGSGANVLTF

SEQ ID NO: 383263 - protein, 17 aa, Homo sapiens
  CDR3 for alpha chain variable domain of TCR clone 191632 (TRAV12-3, TRAJ6)
CAMSARGGAGGSYIPTF

SEQ ID NO: 383264 - protein, 16 aa, Homo sapiens
  CDR3 for beta chain variable domain of TCR clone 191632 (TRBV12-4, TRBJ2-3)
CATSRDLGIVTDTQYF

SEQ ID NO: 383265 - protein, 11 aa, Homo sapiens
  CDR3 for alpha chain variable domain of TCR clone 191633 (TRAV27, TRAJ45)
CAGAQEEVLTD

SEQ ID NO: 383266 - protein, 14 aa, Homo sapiens
  CDR3 for beta chain variable domain of TCR clone 191633 (TRBV19, TRBJ2-2)
CASSGQGIAGELFF

SEQ ID NO: 383267 - protein, 14 aa, Homo sapiens
  CDR3 for alpha chain variable domain of TCR clone 191634 (TRAV26-1, TRAJ38)
CIADNAGNNRKLIS

SEQ ID NO: 383268 - protein, 14 aa, Homo sapiens
  CDR3 for beta chain variable domain of TCR clone 191634 (TRBV20-1, TRBJ1-3)
CSASPTGAGNTIYF

SEQ ID NO: 383269 - protein, 15 aa, Homo sapiens
  CDR3 for alpha chain variable domain of TCR clone 191635 (TRAV36/DV7, TRAJ54)
CAVGKPVQGAQKLVF

SEQ ID NO: 383270 - protein, 17 aa, Homo sapiens
  CDR3 for beta chain variable domain of TCR clone 191635 (TRBV6-5, TRBJ1-2)
CASSSPWEGAFDYGYTF

SEQ ID NO: 383271 - protein, 13 aa, Homo sapiens
  CDR3 for alpha chain variable domain of TCR clone 191636 (TRAV21, TRAJ27)
CAERPGNAGKSTF

SEQ ID NO: 383272 - protein, 15 aa, Homo sapiens
  CDR3 for beta chain variable domain of TCR clone 191636 (TRBV11-3, TRBJ2-7)
CASSPGPASSYEQYF

SEQ ID NO: 383273 - protein, 17 aa, Homo sapiens
  CDR3 for alpha chain variable domain of TCR clone 191637 (TRAV3, TRAJ7)
CAVRDMSPLEGTTDSLL

SEQ ID NO: 383274 - protein, 11 aa, Homo sapiens
  CDR3 for beta chain variable domain of TCR clone 191637 (TRBV2, TRBJ1-1)
CASREGTEAFF

SEQ ID NO: 383275 - protein, 16 aa, Homo sapiens
  CDR3 for alpha chain variable domain of TCR clone 191638 (TRAV30, TRAJ24)
CGTEIVDADSWGKFQF

SEQ ID NO: 383276 - protein, 13 aa, Homo sapiens
  CDR3 for beta chain variable domain of TCR clone 191638 (TRBV4-2, TRBJ2-3)
CASSLTSTDTQYF

SEQ ID NO: 383277 - protein, 11 aa, Homo sapiens
  CDR3 for alpha chain variable domain of TCR clone 191639 (TRAV1-1, TRAJ23)
CAVRQGGKLIF

SEQ ID NO: 383278 - protein, 14 aa, Homo sapiens
  CDR3 for beta chain variable domain of TCR clone 191639 (TRBV7-7, TRBJ2-2)
CASSRDRSTGELFF

SEQ ID NO: 383279 - protein, 11 aa, Homo sapiens
  CDR3 for alpha chain variable domain of TCR clone 191640 (TRAV2, TRAJ13)
CASGCYQKVTF

SEQ ID NO: 383280 - protein, 14 aa, Homo sapiens
  CDR3 for beta chain variable domain of TCR clone 191640 (TRBV19, TRBJ2-1)
CASSKDRGQDEQFF

SEQ ID NO: 383281 - protein, 11 aa, Homo sapiens
  CDR3 for alpha chain variable domain of TCR clone 191641 (TRAV17, TRAJ43)
CATPRSNDMRF

SEQ ID NO: 383282 - protein, 20 aa, Homo sapiens
  CDR3 for beta chain variable domain of TCR clone 191641 (TRBV19, TRBJ2-1)
CASSILRTVTSTRLNNEQFF

SEQ ID NO: 383283 - protein, 11 aa, Homo sapiens
  CDR3 for alpha chain variable domain of TCR clone 191642 (TRAV16, TRAJ33)
CALHSNYQLIW

SEQ ID NO: 383284 - protein, 14 aa, Homo sapiens
  CDR3 for beta chain variable domain of TCR clone 191642 (TRBV7-2, TRBJ2-2)
CASRGQGAAGELFF

SEQ ID NO: 383285 - protein, 13 aa, Homo sapiens
  CDR3 for alpha chain variable domain of TCR clone 191643 (TRAV8-2, TRAJ29)
CALPGEGNTPLVF

SEQ ID NO: 383286 - protein, 16 aa, Homo sapiens
  CDR3 for beta chain variable domain of TCR clone 191643 (TRBV5-1, TRBJ2-5)
CASSSSGLGGAETQYF

SEQ ID NO: 383287 - protein, 12 aa, Homo sapiens
  CDR3 for alpha chain variable domain of TCR clone 191644 (TRAV17, TRAJ57)
CATDGGSEKMVF

SEQ ID NO: 383288 - protein, 12 aa, Homo sapiens
  CDR3 for beta chain variable domain of TCR clone 191644 (TRBV29-1, TRBJ2-2)
CSVDKYTGELFF

SEQ ID NO: 383289 - protein, 16 aa, Homo sapiens
  CDR3 for alpha chain variable domain of TCR clone 191645 (TRAV8-3, TRAJ18)
CAVALDRGSTLGRLHF

SEQ ID NO: 383290 - protein, 11 aa, Homo sapiens
  CDR3 for beta chain variable domain of TCR clone 191645 (TRBV29-1, TRBJ1-1)
CSVEILTEAFF

SEQ ID NO: 383291 - protein, 13 aa, Homo sapiens
  CDR3 for alpha chain variable domain of TCR clone 191646 (TRAV23/DV6, TRAJ27)
CSASKPIQANQPL

SEQ ID NO: 383292 - protein, 12 aa, Homo sapiens
  CDR3 for beta chain variable domain of TCR clone 191646 (TRBV12-4, TRBJ2-1)
CASSKDRRWQFF

SEQ ID NO: 383293 - protein, 12 aa, Homo sapiens
  CDR3 for alpha chain variable domain of TCR clone 191647 (TRAV27, TRAJ13)
CAGAGGYQKVTF

SEQ ID NO: 383294 - protein, 15 aa, Homo sapiens
  CDR3 for beta chain variable domain of TCR clone 191647 (TRBV7-9, TRBJ2-7)
CASSSSGLAVYEQYF

SEQ ID NO: 383295 - protein, 15 aa, Homo sapiens
  CDR3 for alpha chain variable domain of TCR clone 191648 (TRAV17, TRAJ35)
CGTAFVIGFGNVLHC

SEQ ID NO: 383296 - protein, 16 aa, Homo sapiens
  CDR3 for beta chain variable domain of TCR clone 191648 (TRBV11-2, TRBJ2-7)
CASSPLAGGPRYEQYF

SEQ ID NO: 383297 - protein, 13 aa, Homo sapiens
  CDR3 for alpha chain variable domain of TCR clone 191649 (TRAV3, TRAJ26)
CAVSRGYGQNFVF

SEQ ID NO: 383298 - protein, 15 aa, Homo sapiens
  CDR3 for beta chain variable domain of TCR clone 191649 (TRBV12-4, TRBJ2-1)
CASSLARGAYNEQFF

SEQ ID NO: 383299 - protein, 16 aa, Homo sapiens
  CDR3 for alpha chain variable domain of TCR clone 191650 (TRAV12-3, TRAJ53)
CAMSPGSGGSNYKLPF

SEQ ID NO: 383300 - protein, 16 aa, Homo sapiens
  CDR3 for beta chain variable domain of TCR clone 191650 (TRBV19, TRBJ2-1)
CASSKAGPSSYNEQFF

SEQ ID NO: 383301 - protein, 14 aa, Homo sapiens
  CDR3 for alpha chain variable domain of TCR clone 191651 (TRAV27, TRAJ12)
CAGARMDSSYKLFF

SEQ ID NO: 383302 - protein, 18 aa, Homo sapiens
  CDR3 for beta chain variable domain of TCR clone 191651 (TRBV10-3, TRBJ2-7)
CAISESGRPSGGRVEQYF

SEQ ID NO: 383303 - protein, 12 aa, Homo sapiens
  CDR3 for alpha chain variable domain of TCR clone 191652 (TRAV17, TRAJ57)
CATDGGSEKLVF

SEQ ID NO: 383304 - protein, 12 aa, Homo sapiens
  CDR3 for beta chain variable domain of TCR clone 191652 (TRBV11-2, TRBJ2-2)
CASSLGGGELFF

SEQ ID NO: 383305 - protein, 13 aa, Homo sapiens
  CDR3 for alpha chain variable domain of TCR clone 191653 (TRAV21, TRAJ57)
CAVIEGGAEKLVF

SEQ ID NO: 383306 - protein, 14 aa, Homo sapiens
  CDR3 for beta chain variable domain of TCR clone 191653 (TRBV12-5, TRBJ2-5)
CASGSRTHQETQYF

SEQ ID NO: 383307 - protein, 13 aa, Homo sapiens
  CDR3 for alpha chain variable domain of TCR clone 191654 (TRAV27, TRAJ41)
CAGEGNSGYVLNF

SEQ ID NO: 383308 - protein, 14 aa, Homo sapiens
  CDR3 for beta chain variable domain of TCR clone 191654 (TRBV25-1, TRBJ1-1)
CASTHLGGNTEAFF

SEQ ID NO: 383309 - protein, 11 aa, Homo sapiens
  CDR3 for alpha chain variable domain of TCR clone 191655 (TRAV21, TRAJ34)
CAHYNTEQLIF

SEQ ID NO: 383310 - protein, 13 aa, Homo sapiens
  CDR3 for beta chain variable domain of TCR clone 191655 (TRBV7-6, TRBJ1-2)
CASSLVADYGYTF

SEQ ID NO: 383311 - protein, 21 aa, Homo sapiens
  CDR3 for alpha chain variable domain of TCR clone 191656 (TRAV13-1, TRAJ37)
CAATPKEIKHWQTNLWARDNF

SEQ ID NO: 383312 - protein, 13 aa, Homo sapiens
  CDR3 for beta chain variable domain of TCR clone 191656 (TRBV20-1, TRBJ2-7)
CSATSEDSYEQYF

SEQ ID NO: 383313 - protein, 17 aa, Homo sapiens
  CDR3 for alpha chain variable domain of TCR clone 191657 (TRAV23/DV6, TRAJ57)
CAASSTLSQGGSEKLVF

SEQ ID NO: 383314 - protein, 17 aa, Homo sapiens
  CDR3 for beta chain variable domain of TCR clone 191657 (TRBV7-3, TRBJ2-3)
CASSLMKRMRGADTQYF

SEQ ID NO: 383315 - protein, 14 aa, Homo sapiens
  CDR3 for alpha chain variable domain of TCR clone 191658 (TRAV12-1, TRAJ45)
CVVNSGGGADGLTF

SEQ ID NO: 383316 - protein, 15 aa, Homo sapiens
  CDR3 for beta chain variable domain of TCR clone 191658 (TRBV11-3, TRBJ2-7)
CASSPGPASSYEQYF

SEQ ID NO: 383317 - protein, 14 aa, Homo sapiens
  CDR3 for alpha chain variable domain of TCR clone 191659 (TRAV16, TRAJ33)
CALSAMDSNYQLIW

SEQ ID NO: 383318 - protein, 14 aa, Homo sapiens
  CDR3 for beta chain variable domain of TCR clone 191659 (TRBV5-1, TRBJ1-2)
CASSLAADSNGYTF

SEQ ID NO: 383319 - protein, 16 aa, Homo sapiens
  CDR3 for alpha chain variable domain of TCR clone 191660 (TRAV27, TRAJ13)
CAGAKSDSGGYQKVTF

SEQ ID NO: 383320 - protein, 11 aa, Homo sapiens
  CDR3 for beta chain variable domain of TCR clone 191660 (TRBV7-9, TRBJ2-3)
CASSGPDTQYF

SEQ ID NO: 383321 - protein, 13 aa, Homo sapiens
  CDR3 for alpha chain variable domain of TCR clone 191661 (TRAV27, TRAJ6)
CAGGTRGSYIPTF

SEQ ID NO: 383322 - protein, 14 aa, Homo sapiens
  CDR3 for beta chain variable domain of TCR clone 191661 (TRBV12-4, TRBJ1-1)
CASSLGTGGTEDFF

SEQ ID NO: 383323 - protein, 12 aa, Homo sapiens
  CDR3 for alpha chain variable domain of TCR clone 191662 (TRAV1-2, TRAJ33)
CAALDSNYQLIW

SEQ ID NO: 383324 - protein, 14 aa, Homo sapiens
  CDR3 for beta chain variable domain of TCR clone 191662 (TRBV11-2, TRBJ2-3)
CASSRLARTDTQYF

SEQ ID NO: 383325 - protein, 13 aa, Homo sapiens
  CDR3 for alpha chain variable domain of TCR clone 191663 (TRAV3, TRAJ15)
CAVRDQAGTALIF

SEQ ID NO: 383326 - protein, 15 aa, Homo sapiens
  CDR3 for beta chain variable domain of TCR clone 191663 (TRBV11-1, TRBJ2-7)
WASSLNYGASYEQYF

SEQ ID NO: 383327 - protein, 16 aa, Homo sapiens
  CDR3 for alpha chain variable domain of TCR clone 191664 (TRAV12-2, TRAJ6)
RAAPLAGSGGSYIPTF

SEQ ID NO: 383328 - protein, 10 aa, Homo sapiens
  CDR3 for beta chain variable domain of TCR clone 191664 (TRBV28, TRBJ1-2)
CASSSDRAVF

SEQ ID NO: 383329 - protein, 12 aa, Homo sapiens
  CDR3 for alpha chain variable domain of TCR clone 191665 (TRAV23/DV6, TRAJ58)
CAARLLRGETSG

SEQ ID NO: 383330 - protein, 13 aa, Homo sapiens
  CDR3 for beta chain variable domain of TCR clone 191665 (TRBV11-2, TRBJ2-5)
CASSRGPSETQYF

SEQ ID NO: 383331 - protein, 11 aa, Homo sapiens
  CDR3 for alpha chain variable domain of TCR clone 191666 (TRAV13-1, TRAJ15)
GAATPGTALIF

SEQ ID NO: 383332 - protein, 17 aa, Homo sapiens
  CDR3 for beta chain variable domain of TCR clone 191666 (TRBV13, TRBJ2-3)
CASSLSRVAGGRNTQYF

SEQ ID NO: 383333 - protein, 13 aa, Homo sapiens
  CDR3 for alpha chain variable domain of TCR clone 191667 (TRAV12-3, TRAJ33)
CAMSVNSNYQLIW

SEQ ID NO: 383334 - protein, 15 aa, Homo sapiens
  CDR3 for beta chain variable domain of TCR clone 191667 (TRBV15, TRBJ2-1)
CATSRPGQGLHEQFF

SEQ ID NO: 383335 - protein, 13 aa, Homo sapiens
  CDR3 for alpha chain variable domain of TCR clone 191668 (TRAV35, TRAJ36)
CAGPRIGANNLFF

SEQ ID NO: 383336 - protein, 15 aa, Homo sapiens
  CDR3 for beta chain variable domain of TCR clone 191668 (TRBV28, TRBJ2-5)
CASSPPWSYQEPQYF

SEQ ID NO: 383337 - protein, 17 aa, Homo sapiens
  CDR3 for alpha chain variable domain of TCR clone 191669 (TRAV3, TRAJ6)
CAVRDGPRAGGSYIPTF

SEQ ID NO: 383338 - protein, 11 aa, Homo sapiens
  CDR3 for beta chain variable domain of TCR clone 191669 (TRBV7-9, TRBJ2-5)
CASSLSATQYF

SEQ ID NO: 383339 - protein, 13 aa, Homo sapiens
  CDR3 for alpha chain variable domain of TCR clone 191670 (TRAV16, TRAJ26)
CITVLCLGQNFVF

SEQ ID NO: 383340 - protein, 12 aa, Homo sapiens
  CDR3 for beta chain variable domain of TCR clone 191670 (TRBV11-2, TRBJ2-1)
CASSPRNNEQFF

SEQ ID NO: 383341 - protein, 13 aa, Homo sapiens
  CDR3 for alpha chain variable domain of TCR clone 191671 (TRAV17, TRAJ9)
CATFLTGGFKTIF

SEQ ID NO: 383342 - protein, 15 aa, Homo sapiens
  CDR3 for beta chain variable domain of TCR clone 191671 (TRBV7-2, TRBJ2-3)
CASSLSLRDTDTQYF

SEQ ID NO: 383343 - protein, 14 aa, Homo sapiens
  CDR3 for alpha chain variable domain of TCR clone 191672 (TRAV30, TRAJ33)
CGTVAPRSNYQLIW

SEQ ID NO: 383344 - protein, 13 aa, Homo sapiens
  CDR3 for beta chain variable domain of TCR clone 191672 (TRBV4-1, TRBJ2-2)
CASSQENTGELFF

SEQ ID NO: 383345 - protein, 16 aa, Homo sapiens
  CDR3 for alpha chain variable domain of TCR clone 191673 (TRAV30, TRAJ24)
CGTESVDADSWGKFQF

SEQ ID NO: 383346 - protein, 17 aa, Homo sapiens
  CDR3 for beta chain variable domain of TCR clone 191673 (TRBV20-1, TRBJ2-2)
CSASGSGQGGLTGELFF

SEQ ID NO: 383347 - protein, 15 aa, Homo sapiens
  CDR3 for alpha chain variable domain of TCR clone 191674 (TRAV21, TRAJ53)
CAVRQSGGSNYKLTF

SEQ ID NO: 383348 - protein, 16 aa, Homo sapiens
  CDR3 for beta chain variable domain of TCR clone 191674 (TRBV27, TRBJ1-5)
CASSLSGGASNQPQHF

SEQ ID NO: 383349 - protein, 13 aa, Homo sapiens
  CDR3 for alpha chain variable domain of TCR clone 191675 (TRAV27, TRAJ45)
CRSSGGGADVLTF

SEQ ID NO: 383350 - protein, 15 aa, Homo sapiens
  CDR3 for beta chain variable domain of TCR clone 191675 (TRBV9, TRBJ2-2)
CASSDFAGASGELFF

SEQ ID NO: 383351 - protein, 14 aa, Homo sapiens
  CDR3 for alpha chain variable domain of TCR clone 191676 (TRAV3, TRAJ40)
CAGRDRRGTYKYIF

SEQ ID NO: 383352 - protein, 15 aa, Homo sapiens
  CDR3 for beta chain variable domain of TCR clone 191676 (TRBV11-1, TRBJ1-3)
CASTDPRAFGNTIYF

SEQ ID NO: 383353 - protein, 12 aa, Homo sapiens
  CDR3 for alpha chain variable domain of TCR clone 191677 (TRAV27, TRAJ35)
CAGADFGNVLHC

SEQ ID NO: 383354 - protein, 13 aa, Homo sapiens
  CDR3 for beta chain variable domain of TCR clone 191677 (TRBV12-4, TRBJ2-5)
CASSPGTEETQYF

SEQ ID NO: 383355 - protein, 14 aa, Homo sapiens
  CDR3 for alpha chain variable domain of TCR clone 191678 (TRAV1-2, TRAJ16)
CAVNRFSDGQKLLF

SEQ ID NO: 383356 - protein, 15 aa, Homo sapiens
  CDR3 for beta chain variable domain of TCR clone 191678 (TRBV5-1, TRBJ2-3)
CASSLETASTDTQYF

SEQ ID NO: 383357 - protein, 14 aa, Homo sapiens
  CDR3 for alpha chain variable domain of TCR clone 191679 (TRAV26-1, TRAJ34)
CIVRVAYNTDKLIC

SEQ ID NO: 383358 - protein, 15 aa, Homo sapiens
  CDR3 for beta chain variable domain of TCR clone 191679 (TRBV20-1, TRBJ2-7)
CSARVPAAYLYEQYF

SEQ ID NO: 383359 - protein, 23 aa, Homo sapiens
  CDR3 for alpha chain variable domain of TCR clone 191680 (TRAV26-1, TRAJ38)
CIADNAGNNHIQNPDRAVYQLRD

SEQ ID NO: 383360 - protein, 12 aa, Homo sapiens
  CDR3 for beta chain variable domain of TCR clone 191680 (TRBV11-2, TRBJ2-2)
CASSLGGGELFF

SEQ ID NO: 383361 - protein, 14 aa, Homo sapiens
  CDR3 for alpha chain variable domain of TCR clone 191681 (TRAV38-1, TRAJ45)
CASHSGGGADGLTF

SEQ ID NO: 383362 - protein, 14 aa, Homo sapiens
  CDR3 for beta chain variable domain of TCR clone 191681 (TRBV12-4, TRBJ1-1)
CASSLGTGGTEAFF

SEQ ID NO: 383363 - protein, 13 aa, Homo sapiens
  CDR3 for alpha chain variable domain of TCR clone 191682 (TRAV17, TRAJ34)
CATDLYNTDKLIF

SEQ ID NO: 383364 - protein, 14 aa, Homo sapiens
  CDR3 for beta chain variable domain of TCR clone 191682 (TRBV12-5, TRBJ2-5)
CASGSRTHQETQYF

SEQ ID NO: 383365 - protein, 11 aa, Homo sapiens
  CDR3 for alpha chain variable domain of TCR clone 191683 (TRAV27, TRAJ45)
CAGAQDEVLTD

SEQ ID NO: 383366 - protein, 17 aa, Homo sapiens
  CDR3 for beta chain variable domain of TCR clone 191683 (TRBV11-2, TRBJ2-1)
CASSLSPPGVEYNEQFF

SEQ ID NO: 383367 - protein, 14 aa, Homo sapiens
  CDR3 for alpha chain variable domain of TCR clone 191684 (TRAV17, TRAJ15)
CATGPNQAGTALIF

SEQ ID NO: 383368 - protein, 15 aa, Homo sapiens
  CDR3 for beta chain variable domain of TCR clone 191684 (TRBV11-2, TRBJ2-2)
CASSSDRVNAEELFF

SEQ ID NO: 383369 - protein, 14 aa, Homo sapiens
  CDR3 for alpha chain variable domain of TCR clone 191685 (TRAV26-1, TRAJ48)
CIVRVPFGNEKLTF

SEQ ID NO: 383370 - protein, 16 aa, Homo sapiens
  CDR3 for beta chain variable domain of TCR clone 191685 (TRBV18, TRBJ2-1)
YASSPYLSIRGDEQFF

SEQ ID NO: 383371 - protein, 14 aa, Homo sapiens
  CDR3 for alpha chain variable domain of TCR clone 191686 (TRAV17, TRAJ56)
CATDYTGANSKLTF

SEQ ID NO: 383372 - protein, 13 aa, Homo sapiens
  CDR3 for beta chain variable domain of TCR clone 191686 (TRBV18, TRBJ2-1)
CQLTCAGDNEQFF

SEQ ID NO: 383373 - protein, 14 aa, Homo sapiens
  CDR3 for alpha chain variable domain of TCR clone 191687 (TRAV29/DV5, TRAJ36)
CAARRKTGANNLFF

SEQ ID NO: 383374 - protein, 13 aa, Homo sapiens
  CDR3 for beta chain variable domain of TCR clone 191687 (TRBV20-1, TRBJ2-5)
CSARGDYQETQYF

SEQ ID NO: 383375 - protein, 13 aa, Homo sapiens
  CDR3 for alpha chain variable domain of TCR clone 191688 (TRAV8-3, TRAJ48)
CAVVPFGNAKLTF

SEQ ID NO: 383376 - protein, 14 aa, Homo sapiens
  CDR3 for beta chain variable domain of TCR clone 191688 (TRBV18, TRBJ2-7)
CASSPRGGAYEQYF

SEQ ID NO: 383377 - protein, 13 aa, Homo sapiens
  CDR3 for alpha chain variable domain of TCR clone 191689 (TRAV3, TRAJ20)
CAVRDTPRYKLSF

SEQ ID NO: 383378 - protein, 14 aa, Homo sapiens
  CDR3 for beta chain variable domain of TCR clone 191689 (TRBV5-5, TRBJ1-5)
CASSGQGVDQPQHF

SEQ ID NO: 383379 - protein, 15 aa, Homo sapiens
  CDR3 for alpha chain variable domain of TCR clone 191690 (TRAV8-4, TRAJ9)
CAVRDRETGGFKTIF

SEQ ID NO: 383380 - protein, 13 aa, Homo sapiens
  CDR3 for beta chain variable domain of TCR clone 191690 (TRBV9, TRBJ2-1)
CASSPSGGSEQFL

SEQ ID NO: 383381 - protein, 12 aa, Homo sapiens
  CDR3 for alpha chain variable domain of TCR clone 191691 (TRAV8-3, TRAJ41)
CAVALSGYALNF

SEQ ID NO: 383382 - protein, 18 aa, Homo sapiens
  CDR3 for beta chain variable domain of TCR clone 191691 (TRBV20-1, TRBJ2-6)
CSAETTATHGSGANVLTF

SEQ ID NO: 383383 - protein, 14 aa, Homo sapiens
  CDR3 for alpha chain variable domain of TCR clone 191692 (TRAV12-2, TRAJ13)
CAVKKTGGYQKVTF

SEQ ID NO: 383384 - protein, 15 aa, Homo sapiens
  CDR3 for beta chain variable domain of TCR clone 191692 (TRBV7-6, TRBJ1-4)
CASSLGAGAGEKLFF

SEQ ID NO: 383385 - protein, 12 aa, Homo sapiens
  CDR3 for alpha chain variable domain of TCR clone 191693 (TRAV23/DV6, TRAJ33)
CAAEDSNYQLIL

SEQ ID NO: 383386 - protein, 14 aa, Homo sapiens
  CDR3 for beta chain variable domain of TCR clone 191693 (TRBV18, TRBJ1-5)
CASSRQQRNQPQHF

SEQ ID NO: 383387 - protein, 13 aa, Homo sapiens
  CDR3 for alpha chain variable domain of TCR clone 191694 (TRAV26-2, TRAJ54)
CIPRVGGAQKLVF

SEQ ID NO: 383388 - protein, 16 aa, Homo sapiens
  CDR3 for beta chain variable domain of TCR clone 191694 (TRBV4-1, TRBJ1-1)
CASSSMSVRPNTEAFF

SEQ ID NO: 383389 - protein, 13 aa, Homo sapiens
  CDR3 for alpha chain variable domain of TCR clone 191695 (TRAV8-3, TRAJ44)
CAVVPGTASKLTF

SEQ ID NO: 383390 - protein, 11 aa, Homo sapiens
  CDR3 for beta chain variable domain of TCR clone 191695 (TRBV6-3, TRBJ2-3)
CATGQADTQYF

SEQ ID NO: 383391 - protein, 12 aa, Homo sapiens
  CDR3 for alpha chain variable domain of TCR clone 191696 (TRAV16, TRAJ13)
CITLRGYQKVTF

SEQ ID NO: 383392 - protein, 11 aa, Homo sapiens
  CDR3 for beta chain variable domain of TCR clone 191696 (TRBV7-9, TRBJ2-5)
CASSLGETQYF

SEQ ID NO: 383393 - protein, 12 aa, Homo sapiens
  CDR3 for alpha chain variable domain of TCR clone 191697 (TRAV20, TRAJ31)
CAVTDNNARLMF

SEQ ID NO: 383394 - protein, 14 aa, Homo sapiens
  CDR3 for beta chain variable domain of TCR clone 191697 (TRBV19, TRBJ2-1)
CASPTFVLSGEQFF

SEQ ID NO: 383395 - protein, 13 aa, Homo sapiens
  CDR3 for alpha chain variable domain of TCR clone 191698 (TRAV35, TRAJ32)
CAGVGGATNKLIF

SEQ ID NO: 383396 - protein, 15 aa, Homo sapiens
  CDR3 for beta chain variable domain of TCR clone 191698 (TRBV18, TRBJ2-1)
CASLPDRGRDNEQFF

SEQ ID NO: 383397 - protein, 13 aa, Homo sapiens
  CDR3 for alpha chain variable domain of TCR clone 191699 (TRAV2, TRAJ16)
CAVEDRDGQKLLF

SEQ ID NO: 383398 - protein, 16 aa, Homo sapiens
  CDR3 for beta chain variable domain of TCR clone 191699 (TRBV11-2, TRBJ2-7)
CASSPTTGGVSYEQYF

SEQ ID NO: 383399 - protein, 16 aa, Homo sapiens
  CDR3 for alpha chain variable domain of TCR clone 191700 (TRAV3, TRAJ23)
CAVKIGIYNQGGKLIF

SEQ ID NO: 383400 - protein, 17 aa, Homo sapiens
  CDR3 for beta chain variable domain of TCR clone 191700 (TRBV10-3, TRBJ2-6)
CAINESTAPSGANVLTF

SEQ ID NO: 383401 - protein, 15 aa, Homo sapiens
  CDR3 for alpha chain variable domain of TCR clone 191701 (TRAV17, TRAJ56)
CATDANTGANSKLTF

SEQ ID NO: 383402 - protein, 19 aa, Homo sapiens
  CDR3 for beta chain variable domain of TCR clone 191701 (TRBV25-1, TRBJ2-2)
CAILVYRVDRGRKTGELFF

SEQ ID NO: 383403 - protein, 13 aa, Homo sapiens
  CDR3 for alpha chain variable domain of TCR clone 191702 (TRAV13-2, TRAJ48)
CAEMDFGNEKLTF

SEQ ID NO: 383404 - protein, 13 aa, Homo sapiens
  CDR3 for beta chain variable domain of TCR clone 191702 (TRBV29-1, TRBJ2-5)
CSARDRVEETQYF

SEQ ID NO: 383405 - protein, 14 aa, Homo sapiens
  CDR3 for alpha chain variable domain of TCR clone 191703 (TRAV1-2, TRAJ29)
CAVRELTSATPLVF

SEQ ID NO: 383406 - protein, 12 aa, Homo sapiens
  CDR3 for beta chain variable domain of TCR clone 191703 (TRBV18, TRBJ2-7)
CASSLDSYEQYF

SEQ ID NO: 383407 - protein, 14 aa, Homo sapiens
  CDR3 for alpha chain variable domain of TCR clone 191704 (TRAV13-1, TRAJ6)
CAASPSGGSYLPTF

SEQ ID NO: 383408 - protein, 15 aa, Homo sapiens
  CDR3 for beta chain variable domain of TCR clone 191704 (TRBV6-3, TRBJ1-2)
CASSYSVGLNYGYTF

SEQ ID NO: 383409 - protein, 23 aa, Homo sapiens
  CDR3 for alpha chain variable domain of TCR clone 191705 (TRAV26-1, TRAJ38)
CIADNAGNNHIQNPDPAVYQLRD

SEQ ID NO: 383410 - protein, 13 aa, Homo sapiens
  CDR3 for beta chain variable domain of TCR clone 191705 (TRBV20-1, TRBJ1-1)
CSDRGGGNTEAFL

SEQ ID NO: 383411 - protein, 13 aa, Homo sapiens
  CDR3 for alpha chain variable domain of TCR clone 191706 (TRAV27, TRAJ41)
CAGEGNSGYALNF

SEQ ID NO: 383412 - protein, 15 aa, Homo sapiens
  CDR3 for beta chain variable domain of TCR clone 191706 (TRBV28, TRBJ2-5)
CASSPPWSYQETQYF

SEQ ID NO: 383413 - protein, 11 aa, Homo sapiens
  CDR3 for alpha chain variable domain of TCR clone 191707 (TRAV17, TRAJ49)
CATDASNQFYF

SEQ ID NO: 383414 - protein, 16 aa, Homo sapiens
  CDR3 for beta chain variable domain of TCR clone 191707 (TRBV7-2, TRBJ1-2)
CASSPTSGTSLGGYTF

SEQ ID NO: 383415 - protein, 13 aa, Homo sapiens
  CDR3 for alpha chain variable domain of TCR clone 191708 (TRAV8-3, TRAJ48)
CAVVPFGNEKLTL

SEQ ID NO: 383416 - protein, 19 aa, Homo sapiens
  CDR3 for beta chain variable domain of TCR clone 191708 (TRBV25-1, TRBJ2-2)
CTILVYRVDRGRKTGELFF

SEQ ID NO: 383417 - protein, 14 aa, Homo sapiens
  CDR3 for alpha chain variable domain of TCR clone 191709 (TRAV35, TRAJ24)
CAGPSRDSWGKLQF

SEQ ID NO: 383418 - protein, 12 aa, Homo sapiens
  CDR3 for beta chain variable domain of TCR clone 191709 (TRBV12-4, TRBJ2-3)
CASSLGQDTQYF

SEQ ID NO: 383419 - protein, 14 aa, Homo sapiens
  CDR3 for alpha chain variable domain of TCR clone 191710 (TRAV12-1, TRAJ45)
CVVNIGGGADGLTF

SEQ ID NO: 383420 - protein, 15 aa, Homo sapiens
  CDR3 for beta chain variable domain of TCR clone 191710 (TRBV7-2, TRBJ2-7)
CASSLKEALTYEQYF

SEQ ID NO: 383421 - protein, 12 aa, Homo sapiens
  CDR3 for alpha chain variable domain of TCR clone 191711 (TRAV12-3, TRAJ40)
CAMSSGTYRYTF

SEQ ID NO: 383422 - protein, 15 aa, Homo sapiens
  CDR3 for beta chain variable domain of TCR clone 191711 (TRBV7-3, TRBJ2-2)
CASSETGQGTGELFF

SEQ ID NO: 383423 - protein, 15 aa, Homo sapiens
  CDR3 for alpha chain variable domain of TCR clone 191712 (TRAV8-1, TRAJ42)
CAVRRYGGSQGNLIF

SEQ ID NO: 383424 - protein, 15 aa, Homo sapiens
  CDR3 for beta chain variable domain of TCR clone 191712 (TRBV27, TRBJ2-1)
CASSNGGGSSNEQFF

SEQ ID NO: 383425 - protein, 15 aa, Homo sapiens
  CDR3 for alpha chain variable domain of TCR clone 191713 (TRAV12-3, TRAJ49)
CAMAVTPNTGNQLYF

SEQ ID NO: 383426 - protein, 14 aa, Homo sapiens
  CDR3 for beta chain variable domain of TCR clone 191713 (TRBV18, TRBJ2-7)
CASSPRGGAYEQYF

SEQ ID NO: 383427 - protein, 16 aa, Homo sapiens
  CDR3 for alpha chain variable domain of TCR clone 191714 (TRAV8-1, TRAJ42)
CAVTSRYGGSQGNLIF

SEQ ID NO: 383428 - protein, 12 aa, Homo sapiens
  CDR3 for beta chain variable domain of TCR clone 191714 (TRBV6-3, TRBJ2-7)
CASSLGRRGLFF

SEQ ID NO: 383429 - protein, 20 aa, Homo sapiens
  CDR3 for alpha chain variable domain of TCR clone 191715 (TRAV13-1, TRAJ10)
CAAKGHGRRKQTHLWDRHSA

SEQ ID NO: 383430 - protein, 16 aa, Homo sapiens
  CDR3 for beta chain variable domain of TCR clone 191715 (TRBV18, TRBJ1-4)
CASSPLVGDRAEKLFF

SEQ ID NO: 383431 - protein, 16 aa, Homo sapiens
  CDR3 for alpha chain variable domain of TCR clone 191716 (TRAV12-3, TRAJ53)
CAMSPGSGGSNYKLTF

SEQ ID NO: 383432 - protein, 14 aa, Homo sapiens
  CDR3 for beta chain variable domain of TCR clone 191716 (TRBV6-5, TRBJ2-7)
CASSPHRGLREQYF

SEQ ID NO: 383433 - protein, 14 aa, Homo sapiens
  CDR3 for alpha chain variable domain of TCR clone 191717 (TRAV12-2, TRAJ5)
CAVNRSTGRRELTF

SEQ ID NO: 383434 - protein, 13 aa, Homo sapiens
  CDR3 for beta chain variable domain of TCR clone 191717 (TRBV4-2, TRBJ1-1)
CASSQAGNTEAFF

SEQ ID NO: 383435 - protein, 11 aa, Homo sapiens
  CDR3 for alpha chain variable domain of TCR clone 191718 (TRAV12-2, TRAJ31)
CAVTRWARLMF

SEQ ID NO: 383436 - protein, 15 aa, Homo sapiens
  CDR3 for beta chain variable domain of TCR clone 191718 (TRBV19, TRBJ2-7)
CASSIGGGLVNEQFF

SEQ ID NO: 383437 - protein, 13 aa, Homo sapiens
  CDR3 for alpha chain variable domain of TCR clone 191719 (TRAV1-2, TRAJ9)
CAVLNTGGFKTIF

SEQ ID NO: 383438 - protein, 23 aa, Homo sapiens
  CDR3 for beta chain variable domain of TCR clone 191719 (TRBV7-3, TRBJ2-1)
GGTQPCISVPAARRGEGEVEQFF

SEQ ID NO: 383439 - protein, 15 aa, Homo sapiens
  CDR3 for alpha chain variable domain of TCR clone 191720 (TRAV3, TRAJ29)
CAVRAPLSGNTPLVF

SEQ ID NO: 383440 - protein, 15 aa, Homo sapiens
  CDR3 for beta chain variable domain of TCR clone 191720 (TRBV28, TRBJ1-1)
CASRIKGGRNTEAFF

SEQ ID NO: 383441 - protein, 13 aa, Homo sapiens
  CDR3 for alpha chain variable domain of TCR clone 191721 (TRAV13-2, TRAJ40)
CAELISGTYKYIF

SEQ ID NO: 383442 - protein, 13 aa, Homo sapiens
  CDR3 for beta chain variable domain of TCR clone 191721 (TRBV7-3, TRBJ1-1)
CASSQDWGAEAFF

SEQ ID NO: 383443 - protein, 17 aa, Homo sapiens
  CDR3 for alpha chain variable domain of TCR clone 191722 (TRAV3, TRAJ6)
CAVRDGPRAGGSYIPTF

SEQ ID NO: 383444 - protein, 13 aa, Homo sapiens
  CDR3 for beta chain variable domain of TCR clone 191722 (TRBV19, TRBJ2-5)
CASSGRAGETQYF

SEQ ID NO: 383445 - protein, 19 aa, Homo sapiens
  CDR3 for alpha chain variable domain of TCR clone 191723 (TRAV23/DV6, )
CAATALIPDIQNPDPSVYH

SEQ ID NO: 383446 - protein, 16 aa, Homo sapiens
  CDR3 for beta chain variable domain of TCR clone 191723 (TRBV10-3, TRBJ2-7)
CAISPRGQEQTYEQYF

SEQ ID NO: 383447 - protein, 14 aa, Homo sapiens
  CDR3 for alpha chain variable domain of TCR clone 191724 (TRAV1-1, TRAJ27)
SAVIYNTNAGKSTF

SEQ ID NO: 383448 - protein, 15 aa, Homo sapiens
  CDR3 for beta chain variable domain of TCR clone 191724 (TRBV7-2, TRBJ2-1)
CASSSGLAGGNEQFF

SEQ ID NO: 383449 - protein, 14 aa, Homo sapiens
  CDR3 for alpha chain variable domain of TCR clone 191725 (TRAV21, TRAJ45)
CAVSSGGGADGLTF

SEQ ID NO: 383450 - protein, 18 aa, Homo sapiens
  CDR3 for beta chain variable domain of TCR clone 191725 (TRBV11-2, TRBJ2-3)
CASSLGGASRGAPNTQYF

SEQ ID NO: 383451 - protein, 17 aa, Homo sapiens
  CDR3 for alpha chain variable domain of TCR clone 191726 (TRAV3, TRAJ28)
CAVREAYSGAGSYQLTF

SEQ ID NO: 383452 - protein, 11 aa, Homo sapiens
  CDR3 for beta chain variable domain of TCR clone 191726 (TRBV19, TRBJ1-1)
CASSIGSEAFF

SEQ ID NO: 383453 - protein, 11 aa, Homo sapiens
  CDR3 for alpha chain variable domain of TCR clone 191727 (TRAV3, TRAJ21)
CAVGNFTKSYF

SEQ ID NO: 383454 - protein, 16 aa, Homo sapiens
  CDR3 for beta chain variable domain of TCR clone 191727 (TRBV19, TRBJ2-1)
CASSRAGPSSYNEQFF

SEQ ID NO: 383455 - protein, 17 aa, Homo sapiens
  CDR3 for alpha chain variable domain of TCR clone 191728 (TRAV16, TRAJ42)
CALSPKLYGGSQGNLIF

SEQ ID NO: 383456 - protein, 13 aa, Homo sapiens
  CDR3 for beta chain variable domain of TCR clone 191728 (TRBV19, TRBJ1-5)
CASSTRRDQPQHC

SEQ ID NO: 383457 - protein, 11 aa, Homo sapiens
  CDR3 for alpha chain variable domain of TCR clone 191729 (TRAV12-2, TRAJ49)
CAVHTGNQFYF

SEQ ID NO: 383458 - protein, 13 aa, Homo sapiens
  CDR3 for beta chain variable domain of TCR clone 191729 (TRBV4-1, TRBJ2-1)
CASSQAGGDEQFF

SEQ ID NO: 383459 - protein, 15 aa, Homo sapiens
  CDR3 for alpha chain variable domain of TCR clone 191730 (TRAV21, TRAJ45)
CAVSYSGGGADGLTF

SEQ ID NO: 383460 - protein, 13 aa, Homo sapiens
  CDR3 for beta chain variable domain of TCR clone 191730 (TRBV20-1, TRBJ2-5)
CSAATEVQETQYF

SEQ ID NO: 383461 - protein, 15 aa, Homo sapiens
  CDR3 for alpha chain variable domain of TCR clone 191731 (TRAV27, TRAJ38)
CAARRNAGNNRKLIW

SEQ ID NO: 383462 - protein, 15 aa, Homo sapiens
  CDR3 for beta chain variable domain of TCR clone 191731 (TRBV11-2, TRBJ2-2)
CASRGLAANTGELFF

SEQ ID NO: 383463 - protein, 14 aa, Homo sapiens
  CDR3 for alpha chain variable domain of TCR clone 191732 (TRAV38-1, TRAJ45)
CAYYSGGGADGLTF

SEQ ID NO: 383464 - protein, 14 aa, Homo sapiens
  CDR3 for beta chain variable domain of TCR clone 191732 (TRBV25-1, TRBJ1-1)
CASTHLGSNTEAFF

SEQ ID NO: 383465 - protein, 15 aa, Homo sapiens
  CDR3 for alpha chain variable domain of TCR clone 191733 (TRAV3, TRAJ24)
CAVRDKMTAGGNCRW

SEQ ID NO: 383466 - protein, 14 aa, Homo sapiens
  CDR3 for beta chain variable domain of TCR clone 191733 (TRBV7-2, TRBJ2-3)
CASSQTGSSYTQYF

SEQ ID NO: 383467 - protein, 14 aa, Homo sapiens
  CDR3 for alpha chain variable domain of TCR clone 191734 (TRAV8-2, TRAJ24)
CVVSPSGGYNKLIF

SEQ ID NO: 383468 - protein, 13 aa, Homo sapiens
  CDR3 for beta chain variable domain of TCR clone 191734 (TRBV11-2, TRBJ2-5)
CASSSTGEETQYF

SEQ ID NO: 383469 - protein, 11 aa, Homo sapiens
  CDR3 for alpha chain variable domain of TCR clone 191735 (TRAV2, TRAJ13)
CAPGGYQKVTF

SEQ ID NO: 383470 - protein, 17 aa, Homo sapiens
  CDR3 for beta chain variable domain of TCR clone 191735 (TRBV7-3, TRBJ2-3)
CASSLMKRMRGAYTQYF

SEQ ID NO: 383471 - protein, 13 aa, Homo sapiens
  CDR3 for alpha chain variable domain of TCR clone 191736 (TRAV1-2, TRAJ9)
CAALNTGGFETIF

SEQ ID NO: 383472 - protein, 14 aa, Homo sapiens
  CDR3 for beta chain variable domain of TCR clone 191736 (TRBV20-1, TRBJ1-1)
CSAQTRIGGTEAFF

SEQ ID NO: 383473 - protein, 17 aa, Homo sapiens
  CDR3 for alpha chain variable domain of TCR clone 191737 (TRAV38-2/DV8, TRAJ28)
CAFLTLYSGAGSYQLTL

SEQ ID NO: 383474 - protein, 14 aa, Homo sapiens
  CDR3 for beta chain variable domain of TCR clone 191737 (TRBV6-1, TRBJ1-3)
CASVQGGGWKHHIF

SEQ ID NO: 383475 - protein, 15 aa, Homo sapiens
  CDR3 for alpha chain variable domain of TCR clone 191738 (TRAV17, TRAJ40)
CATVSSNSGTYKYIF

SEQ ID NO: 383476 - protein, 14 aa, Homo sapiens
  CDR3 for beta chain variable domain of TCR clone 191738 (TRBV19, TRBJ2-1)
CASPTFVLSGEQFF

SEQ ID NO: 383477 - protein, 15 aa, Homo sapiens
  CDR3 for alpha chain variable domain of TCR clone 191739 (TRAV3, TRAJ22)
CAVRDRGGSAGQLTF

SEQ ID NO: 383478 - protein, 12 aa, Homo sapiens
  CDR3 for beta chain variable domain of TCR clone 191739 (TRBV7-8, TRBJ2-1)
CASSLGHNEQFF

SEQ ID NO: 383479 - protein, 14 aa, Homo sapiens
  CDR3 for alpha chain variable domain of TCR clone 191740 (TRAV1-2, TRAJ16)
CAVNRFSDGQKLLF

SEQ ID NO: 383480 - protein, 11 aa, Homo sapiens
  CDR3 for beta chain variable domain of TCR clone 191740 (TRBV29-1, TRBJ2-5)
CSEDRTATQYF

SEQ ID NO: 383481 - protein, 12 aa, Homo sapiens
  CDR3 for alpha chain variable domain of TCR clone 191741 (TRAV12-3, TRAJ17)
CAMTLTGNKLTF

SEQ ID NO: 383482 - protein, 14 aa, Homo sapiens
  CDR3 for beta chain variable domain of TCR clone 191741 (TRBV7-6, TRBJ2-3)
RASSLGTVTDTQYF

SEQ ID NO: 383483 - protein, 12 aa, Homo sapiens
  CDR3 for alpha chain variable domain of TCR clone 191742 (TRAV12-3, TRAJ17)
CAMTLTGNKLTF

SEQ ID NO: 383484 - protein, 17 aa, Homo sapiens
  CDR3 for beta chain variable domain of TCR clone 191742 (TRBV15, TRBJ1-4)
CATSGYGTGDPNEKLFF

SEQ ID NO: 383485 - protein, 13 aa, Homo sapiens
  CDR3 for alpha chain variable domain of TCR clone 191743 (TRAV8-3, TRAJ42)
CARYGGSQGNLIF

SEQ ID NO: 383486 - protein, 15 aa, Homo sapiens
  CDR3 for beta chain variable domain of TCR clone 191743 (TRBV11-2, TRBJ1-6)
CASTLRGTGNSPLHF

SEQ ID NO: 383487 - protein, 15 aa, Homo sapiens
  CDR3 for alpha chain variable domain of TCR clone 191744 (TRAV25, TRAJ53)
WAATGGGGSNYKLTF

SEQ ID NO: 383488 - protein, 19 aa, Homo sapiens
  CDR3 for beta chain variable domain of TCR clone 191744 (TRBV7-2, TRBJ2-3)
CASSFLSRNWGGGTDTQYF

SEQ ID NO: 383489 - protein, 13 aa, Homo sapiens
  CDR3 for alpha chain variable domain of TCR clone 191745 (TRAV21, TRAJ20)
CAVGLRVDYKLSF

SEQ ID NO: 383490 - protein, 15 aa, Homo sapiens
  CDR3 for beta chain variable domain of TCR clone 191745 (TRBV7-2, TRBJ1-2)
CASSPRAGWNYGYTF

SEQ ID NO: 383491 - protein, 13 aa, Homo sapiens
  CDR3 for alpha chain variable domain of TCR clone 191746 (TRAV13-1, TRAJ37)
CAAVSGNTGKLIF

SEQ ID NO: 383492 - protein, 13 aa, Homo sapiens
  CDR3 for beta chain variable domain of TCR clone 191746 (TRBV7-9, TRBJ1-2)
CASSLKQNYGFTF

SEQ ID NO: 383493 - protein, 12 aa, Homo sapiens
  CDR3 for alpha chain variable domain of TCR clone 191747 (TRAV8-1, TRAJ26)
CAVNNNGQNFVF

SEQ ID NO: 383494 - protein, 15 aa, Homo sapiens
  CDR3 for beta chain variable domain of TCR clone 191747 (TRBV20-1, TRBJ1-1)
CSASWDRFLNTDAFF

SEQ ID NO: 383495 - protein, 12 aa, Homo sapiens
  CDR3 for alpha chain variable domain of TCR clone 191748 (TRAV16, TRAJ56)
CAPTGANSKLTS

SEQ ID NO: 383496 - protein, 17 aa, Homo sapiens
  CDR3 for beta chain variable domain of TCR clone 191748 (TRBV27, TRBJ2-6)
CASSLTGFASGANVLTF

SEQ ID NO: 383497 - protein, 14 aa, Homo sapiens
  CDR3 for alpha chain variable domain of TCR clone 191749 (TRAV16, TRAJ39)
CALSKNNAGNMLTF

SEQ ID NO: 383498 - protein, 18 aa, Homo sapiens
  CDR3 for beta chain variable domain of TCR clone 191749 (TRBV12-4, TRBJ1-2)
CASSPNPGQAGPYYGYTF

SEQ ID NO: 383499 - protein, 12 aa, Homo sapiens
  CDR3 for alpha chain variable domain of TCR clone 191750 (TRAV25, TRAJ16)
CAGNRDGQKLLF

SEQ ID NO: 383500 - protein, 15 aa, Homo sapiens
  CDR3 for beta chain variable domain of TCR clone 191750 (TRBV25-1, TRBJ1-4)
CASSPGDSTNEKLFF

SEQ ID NO: 383501 - protein, 14 aa, Homo sapiens
  CDR3 for alpha chain variable domain of TCR clone 191751 (TRAV38-1, TRAJ40)
CALRPTSGTYKYIF

SEQ ID NO: 383502 - protein, 14 aa, Homo sapiens
  CDR3 for beta chain variable domain of TCR clone 191751 (TRBV10-2, TRBJ2-1)
CASSEGTSEDEQFF

SEQ ID NO: 383503 - protein, 10 aa, Homo sapiens
  CDR3 for alpha chain variable domain of TCR clone 191752 (TRAV12-1, TRAJ37)
ARGNTGKLIF

SEQ ID NO: 383504 - protein, 11 aa, Homo sapiens
  CDR3 for beta chain variable domain of TCR clone 191752 (TRBV4-1, TRBJ2-2)
CASEHTGELFF

SEQ ID NO: 383505 - protein, 16 aa, Homo sapiens
  CDR3 for alpha chain variable domain of TCR clone 191753 (TRAV21, TRAJ33)
CAVSPASMDSNYQLIW

SEQ ID NO: 383506 - protein, 16 aa, Homo sapiens
  CDR3 for beta chain variable domain of TCR clone 191753 (TRBV4-1, TRBJ2-7)
CASSRGDILNSYEQYF

SEQ ID NO: 383507 - protein, 11 aa, Homo sapiens
  CDR3 for alpha chain variable domain of TCR clone 191754 (TRAV12-1, TRAJ3)
CVVSSASKIIF

SEQ ID NO: 383508 - protein, 14 aa, Homo sapiens
  CDR3 for beta chain variable domain of TCR clone 191754 (TRBV20-1, TRBJ1-1)
CSAQTRIGGTEAFF

SEQ ID NO: 383509 - protein, 12 aa, Homo sapiens
  CDR3 for alpha chain variable domain of TCR clone 191755 (TRAV12-3, TRAJ17)
CAMTLTGNKLTF

SEQ ID NO: 383510 - protein, 16 aa, Homo sapiens
  CDR3 for beta chain variable domain of TCR clone 191755 (TRBV5-1, TRBJ2-1)
CASSPWTSGEYNEQFF

SEQ ID NO: 383511 - protein, 14 aa, Homo sapiens
  CDR3 for alpha chain variable domain of TCR clone 191756 (TRAV12-2, TRAJ36)
CAVERSTGANNLFF

SEQ ID NO: 383512 - protein, 14 aa, Homo sapiens
  CDR3 for beta chain variable domain of TCR clone 191756 (TRBV25-1, TRBJ1-2)
CASSDTTGVVGYTF

SEQ ID NO: 383513 - protein, 12 aa, Homo sapiens
  CDR3 for alpha chain variable domain of TCR clone 191757 (TRAV22, TRAJ36)
CAVGTGANNLFF

SEQ ID NO: 383514 - protein, 13 aa, Homo sapiens
  CDR3 for beta chain variable domain of TCR clone 191757 (TRBV11-2, TRBJ2-5)
CASSSTGEETQYF

SEQ ID NO: 383515 - protein, 14 aa, Homo sapiens
  CDR3 for alpha chain variable domain of TCR clone 191758 (TRAV1-2, TRAJ16)
CAVNRFSDGQKLLL

SEQ ID NO: 383516 - protein, 16 aa, Homo sapiens
  CDR3 for beta chain variable domain of TCR clone 191758 (TRBV7-3, TRBJ2-3)
CASSVSGYRPEDTQYF

SEQ ID NO: 383517 - protein, 18 aa, Homo sapiens
  CDR3 for alpha chain variable domain of TCR clone 191759 (TRAV21, TRAJ52)
CAMRPSPAGGTSYGKLTF

SEQ ID NO: 383518 - protein, 19 aa, Homo sapiens
  CDR3 for beta chain variable domain of TCR clone 191759 (TRBV7-2, TRBJ2-3)
CASSFLSRNWGGGTDTQYF

SEQ ID NO: 383519 - protein, 11 aa, Homo sapiens
  CDR3 for alpha chain variable domain of TCR clone 191760 (TRAV12-3, TRAJ43)
CAMSVANDMRF

SEQ ID NO: 383520 - protein, 15 aa, Homo sapiens
  CDR3 for beta chain variable domain of TCR clone 191760 (TRBV5-1, TRBJ2-1)
CASSPPRAPYNEQFF

SEQ ID NO: 383521 - protein, 15 aa, Homo sapiens
  CDR3 for alpha chain variable domain of TCR clone 191761 (TRAV38-1, TRAJ37)
CAFIHGSGNTGKLIF

SEQ ID NO: 383522 - protein, 11 aa, Homo sapiens
  CDR3 for beta chain variable domain of TCR clone 191761 (TRBV7-9, TRBJ2-7)
CQQLGSYEQYF

SEQ ID NO: 383523 - protein, 15 aa, Homo sapiens
  CDR3 for alpha chain variable domain of TCR clone 191762 (TRAV35, TRAJ42)
CAGQGYGGSQGNVIF

SEQ ID NO: 383524 - protein, 13 aa, Homo sapiens
  CDR3 for beta chain variable domain of TCR clone 191762 (TRBV7-2, TRBJ1-1)
CASSVVQGAEAFF

SEQ ID NO: 383525 - protein, 13 aa, Homo sapiens
  CDR3 for alpha chain variable domain of TCR clone 191763 (TRAV2, TRAJ40)
CAVVTSGTYKYIF

SEQ ID NO: 383526 - protein, 16 aa, Homo sapiens
  CDR3 for beta chain variable domain of TCR clone 191763 (TRBV19, TRBJ2-2)
CASRSPGTGATGKLFF

SEQ ID NO: 383527 - protein, 16 aa, Homo sapiens
  CDR3 for alpha chain variable domain of TCR clone 191764 (TRAV12-3, TRAJ53)
CAMSVGSGGSNYKLTF

SEQ ID NO: 383528 - protein, 15 aa, Homo sapiens
  CDR3 for beta chain variable domain of TCR clone 191764 (TRBV7-8, TRBJ2-2)
CASSLLTVNTGELFF

SEQ ID NO: 383529 - protein, 12 aa, Homo sapiens
  CDR3 for alpha chain variable domain of TCR clone 191765 (TRAV29/DV5, TRAJ49)
CAAPDTGNQFYF

SEQ ID NO: 383530 - protein, 19 aa, Homo sapiens
  CDR3 for beta chain variable domain of TCR clone 191765 (TRBV25-1, TRBJ2-2)
CAILVYRVHRGRKTGELFF

SEQ ID NO: 383531 - protein, 14 aa, Homo sapiens
  CDR3 for alpha chain variable domain of TCR clone 191766 (TRAV1-2, TRAJ16)
CAVNRFSDGQKLLF

SEQ ID NO: 383532 - protein, 15 aa, Homo sapiens
  CDR3 for beta chain variable domain of TCR clone 191766 (TRBV7-2, TRBJ2-5)
CASSAARSLTETQYF

SEQ ID NO: 383533 - protein, 14 aa, Homo sapiens
  CDR3 for alpha chain variable domain of TCR clone 191767 (TRAV1-2, TRAJ6)
CAVSLSGGSYIPTF

SEQ ID NO: 383534 - protein, 17 aa, Homo sapiens
  CDR3 for beta chain variable domain of TCR clone 191767 (TRBV28, TRBJ2-7)
CASSPLPAGGKSYEQYF

SEQ ID NO: 383535 - protein, 16 aa, Homo sapiens
  CDR3 for alpha chain variable domain of TCR clone 191768 (TRAV8-3, TRAJ22)
CAVDLLGPGSARQLTF

SEQ ID NO: 383536 - protein, 14 aa, Homo sapiens
  CDR3 for beta chain variable domain of TCR clone 191768 (TRBV11-2, TRBJ2-7)
CASSLGLEGCEQYF

SEQ ID NO: 383537 - protein, 13 aa, Homo sapiens
  CDR3 for alpha chain variable domain of TCR clone 191769 (TRAV8-6, TRAJ16)
CAVSSPDGQKLLF

SEQ ID NO: 383538 - protein, 14 aa, Homo sapiens
  CDR3 for beta chain variable domain of TCR clone 191769 (TRBV5-7, TRBJ2-3)
CASSLGTVTDTQYF

SEQ ID NO: 383539 - protein, 13 aa, Homo sapiens
  CDR3 for alpha chain variable domain of TCR clone 191770 (TRAV3, TRAJ21)
CAVREPDFNKFYF

SEQ ID NO: 383540 - protein, 17 aa, Homo sapiens
  CDR3 for beta chain variable domain of TCR clone 191770 (TRBV11-2, TRBJ2-3)
CKQLRGASRGAPNTQYF

SEQ ID NO: 383541 - protein, 14 aa, Homo sapiens
  CDR3 for alpha chain variable domain of TCR clone 191771 (TRAV8-2, TRAJ4)
CVVSPSGGYNKLIF

SEQ ID NO: 383542 - protein, 16 aa, Homo sapiens
  CDR3 for beta chain variable domain of TCR clone 191771 (TRBV7-9, TRBJ2-1)
CASSDVAGGSYNEQFF

SEQ ID NO: 383543 - protein, 12 aa, Homo sapiens
  CDR3 for alpha chain variable domain of TCR clone 191772 (TRAV12-1, TRAJ40)
CVVYSGTFKYIL

SEQ ID NO: 383544 - protein, 18 aa, Homo sapiens
  CDR3 for beta chain variable domain of TCR clone 191772 (TRBV11-2, TRBJ2-3)
CASSLGGASRGAPNTQYF

SEQ ID NO: 383545 - protein, 13 aa, Homo sapiens
  CDR3 for alpha chain variable domain of TCR clone 191773 (TRAV12-3, TRAJ33)
CATSVNSNYQLIW

SEQ ID NO: 383546 - protein, 13 aa, Homo sapiens
  CDR3 for beta chain variable domain of TCR clone 191773 (TRBV7-2, TRBJ2-2)
CASSVAVTGELFF

SEQ ID NO: 383547 - protein, 23 aa, Homo sapiens
  CDR3 for alpha chain variable domain of TCR clone 191774 (TRAV26-1, TRAJ38)
CIADNAGNNHIQNPDPALYQLID

SEQ ID NO: 383548 - protein, 13 aa, Homo sapiens
  CDR3 for beta chain variable domain of TCR clone 191774 (TRBV20-1, TRBJ1-1)
CSARGGGNTEAFF

SEQ ID NO: 383549 - protein, 15 aa, Homo sapiens
  CDR3 for alpha chain variable domain of TCR clone 191775 (TRAV35, TRAJ50)
CAGQLRKTSYDKVIF

SEQ ID NO: 383550 - protein, 12 aa, Homo sapiens
  CDR3 for beta chain variable domain of TCR clone 191775 (TRBV5-1, TRBJ2-5)
CASSLGLKTQYF

SEQ ID NO: 383551 - protein, 13 aa, Homo sapiens
  CDR3 for alpha chain variable domain of TCR clone 191776 (TRAV16, TRAJ10)
CALLAGGGNKLTL

SEQ ID NO: 383552 - protein, 12 aa, Homo sapiens
  CDR3 for beta chain variable domain of TCR clone 191776 (TRBV28, TRBJ2-7)
CASTGNHYEQYF

SEQ ID NO: 383553 - protein, 13 aa, Homo sapiens
  CDR3 for alpha chain variable domain of TCR clone 191777 (TRAV30, TRAJ39)
CGTEKNAGNMLTF

SEQ ID NO: 383554 - protein, 16 aa, Homo sapiens
  CDR3 for beta chain variable domain of TCR clone 191777 (TRBV7-9, TRBJ2-6)
CASSLKGSLRANVLTF

SEQ ID NO: 383555 - protein, 14 aa, Homo sapiens
  CDR3 for alpha chain variable domain of TCR clone 191778 (TRAV35, TRAJ10)
CAGILTGGGNKLTF

SEQ ID NO: 383556 - protein, 17 aa, Homo sapiens
  CDR3 for beta chain variable domain of TCR clone 191778 (TRBV7-9, TRBJ2-6)
CASSFGAGYSGANVLTF

SEQ ID NO: 383557 - protein, 18 aa, Homo sapiens
  CDR3 for alpha chain variable domain of TCR clone 191779 (TRAV21, TRAJ52)
CAVRPSPAGGTSYGKLTF

SEQ ID NO: 383558 - protein, 17 aa, Homo sapiens
  CDR3 for beta chain variable domain of TCR clone 191779 (TRBV25-1, TRBJ2-1)
CTSSAYGQGRGVYEQFL

SEQ ID NO: 383559 - protein, 15 aa, Homo sapiens
  CDR3 for alpha chain variable domain of TCR clone 191780 (TRAV8-3, TRAJ23)
CAVGDRYNQGGELIF

SEQ ID NO: 383560 - protein, 17 aa, Homo sapiens
  CDR3 for beta chain variable domain of TCR clone 191780 (TRBV4-1, TRBJ1-4)
RASSQEGPRGVEEKLFF

SEQ ID NO: 383561 - protein, 14 aa, Homo sapiens
  CDR3 for alpha chain variable domain of TCR clone 191781 (TRAV4, TRAJ26)
CLVGPHNYGQNFVF

SEQ ID NO: 383562 - protein, 12 aa, Homo sapiens
  CDR3 for beta chain variable domain of TCR clone 191781 (TRBV11-2, TRBJ2-1)
CASSPGNNEQFF

SEQ ID NO: 383563 - protein, 14 aa, Homo sapiens
  CDR3 for alpha chain variable domain of TCR clone 191782 (TRAV1-1, TRAJ30)
CAVRSLNRDDKIIF

SEQ ID NO: 383564 - protein, 13 aa, Homo sapiens
  CDR3 for beta chain variable domain of TCR clone 191782 (TRBV6-3, TRBJ2-3)
CASEGELKDTQYF

SEQ ID NO: 383565 - protein, 22 aa, Homo sapiens
  CDR3 for alpha chain variable domain of TCR clone 191783 (TRAV12-1, TRAJ9)
SSVIQPPTCVVTGYTGGFKTIF

SEQ ID NO: 383566 - protein, 13 aa, Homo sapiens
  CDR3 for beta chain variable domain of TCR clone 191783 (TRBV20-1, TRBJ1-1)
CSARAGGNTEAFF

SEQ ID NO: 383567 - protein, 11 aa, Homo sapiens
  CDR3 for alpha chain variable domain of TCR clone 191784 (TRAV2, TRAJ21)
CAVFNFNKFYF

SEQ ID NO: 383568 - protein, 13 aa, Homo sapiens
  CDR3 for beta chain variable domain of TCR clone 191784 (TRBV12-4, TRBJ1-5)
CASSSRSYQPQHF

SEQ ID NO: 383569 - protein, 15 aa, Homo sapiens
  CDR3 for alpha chain variable domain of TCR clone 191785 (TRAV9-2, TRAJ49)
CALSPPDHTGKQFYF

SEQ ID NO: 383570 - protein, 13 aa, Homo sapiens
  CDR3 for beta chain variable domain of TCR clone 191785 (TRBV29-1, TRBJ2-5)
CSVGGTSAETQYF

SEQ ID NO: 383571 - protein, 13 aa, Homo sapiens
  CDR3 for alpha chain variable domain of TCR clone 191786 (TRAV1-2, TRAJ33)
CAVSEDSNYQLIW

SEQ ID NO: 383572 - protein, 15 aa, Homo sapiens
  CDR3 for beta chain variable domain of TCR clone 191786 (TRBV19, TRBJ1-1)
CASTSGQIQNTEAVF

SEQ ID NO: 383573 - protein, 15 aa, Homo sapiens
  CDR3 for alpha chain variable domain of TCR clone 191787 (TRAV8-3, TRAJ45)
CASSYSGGGADGLTF

SEQ ID NO: 383574 - protein, 13 aa, Homo sapiens
  CDR3 for beta chain variable domain of TCR clone 191787 (TRBV19, TRBJ2-7)
CASSPRQSYEQYF

SEQ ID NO: 383575 - protein, 12 aa, Homo sapiens
  CDR3 for alpha chain variable domain of TCR clone 191788 (TRAV8-3, TRAJ26)
CAGDSYGQNFVF

SEQ ID NO: 383576 - protein, 16 aa, Homo sapiens
  CDR3 for beta chain variable domain of TCR clone 191788 (TRBV20-1, TRBJ1-4)
CSAPGQGLLTNEKLFF

SEQ ID NO: 383577 - protein, 13 aa, Homo sapiens
  CDR3 for alpha chain variable domain of TCR clone 191789 (TRAV1-2, TRAJ11)
CAVRDSGYSTPTF

SEQ ID NO: 383578 - protein, 16 aa, Homo sapiens
  CDR3 for beta chain variable domain of TCR clone 191789 (TRBV5-1, TRBJ2-7)
CASSWGTGGRAWEQYF

SEQ ID NO: 383579 - protein, 13 aa, Homo sapiens
  CDR3 for alpha chain variable domain of TCR clone 191790 (TRAV3, TRAJ20)
CCEAFCNDYTLSF

SEQ ID NO: 383580 - protein, 15 aa, Homo sapiens
  CDR3 for beta chain variable domain of TCR clone 191790 (TRBV6-5, TRBJ2-1)
CASSYDAGAGNEQFF

SEQ ID NO: 383581 - protein, 14 aa, Homo sapiens
  CDR3 for alpha chain variable domain of TCR clone 191791 (TRAV21, TRAJ37)
CAVKGSSNTVKLIF

SEQ ID NO: 383582 - protein, 14 aa, Homo sapiens
  CDR3 for beta chain variable domain of TCR clone 191791 (TRBV7-2, TRBJ2-1)
CASSRGGAKNEQFF

SEQ ID NO: 383583 - protein, 12 aa, Homo sapiens
  CDR3 for alpha chain variable domain of TCR clone 191792 (TRAV12-3, TRAJ40)
CAMSSGTYKYIF

SEQ ID NO: 383584 - protein, 18 aa, Homo sapiens
  CDR3 for beta chain variable domain of TCR clone 191792 (TRBV7-6, TRBJ2-1)
CASSPRTSGMSSYNEQFF

SEQ ID NO: 383585 - protein, 10 aa, Homo sapiens
  CDR3 for alpha chain variable domain of TCR clone 191793 (TRAV38-2/DV8, TRAJ40)
CASGTYKYIF

SEQ ID NO: 383586 - protein, 14 aa, Homo sapiens
  CDR3 for beta chain variable domain of TCR clone 191793 (TRBV7-9, TRBJ2-1)
CASSPRDSLNEQFF

SEQ ID NO: 383587 - protein, 15 aa, Homo sapiens
  CDR3 for alpha chain variable domain of TCR clone 191794 (TRAV3, TRAJ47)
CAVRDIGEYGNKLVF

SEQ ID NO: 383588 - protein, 13 aa, Homo sapiens
  CDR3 for beta chain variable domain of TCR clone 191794 (TRBV27, TRBJ1-1)
CASSLSIGAEAFF

SEQ ID NO: 383589 - protein, 16 aa, Homo sapiens
  CDR3 for alpha chain variable domain of TCR clone 191795 (TRAV30, TRAJ24)
CGTEIVDADSWGKFQI

SEQ ID NO: 383590 - protein, 14 aa, Homo sapiens
  CDR3 for beta chain variable domain of TCR clone 191795 (TRBV12-5, TRBJ2-5)
CASGSRTHHETQYF

SEQ ID NO: 383591 - protein, 13 aa, Homo sapiens
  CDR3 for alpha chain variable domain of TCR clone 191796 (TRAV12-3, TRAJ8)
CAMSAGGFQKLVF

SEQ ID NO: 383592 - protein, 14 aa, Homo sapiens
  CDR3 for beta chain variable domain of TCR clone 191796 (TRBV5-7, TRBJ1-5)
CASSRTGGGQPQHF

SEQ ID NO: 383593 - protein, 14 aa, Homo sapiens
  CDR3 for alpha chain variable domain of TCR clone 191797 (TRAV29/DV5, TRAJ22)
CAASATGSARQLTF

SEQ ID NO: 383594 - protein, 14 aa, Homo sapiens
  CDR3 for beta chain variable domain of TCR clone 191797 (TRBV19, TRBJ2-1)
CASSPGLAPNDQFF

SEQ ID NO: 383595 - protein, 18 aa, Homo sapiens
  CDR3 for alpha chain variable domain of TCR clone 191798 (TRAV12-3, TRAJ52)
CAMSVGGAGGTSYGKLTF

SEQ ID NO: 383596 - protein, 14 aa, Homo sapiens
  CDR3 for beta chain variable domain of TCR clone 191798 (TRBV7-3, TRBJ2-1)
CASSLAGGTNGQFF

SEQ ID NO: 383597 - protein, 17 aa, Homo sapiens
  CDR3 for alpha chain variable domain of TCR clone 191799 (TRAV16, TRAJ37)
CAFWPKNGSSNPGKLIF

SEQ ID NO: 383598 - protein, 14 aa, Homo sapiens
  CDR3 for beta chain variable domain of TCR clone 191799 (TRBV7-2, TRBJ2-1)
CASSLDRRGGEQFF

SEQ ID NO: 383599 - protein, 11 aa, Homo sapiens
  CDR3 for alpha chain variable domain of TCR clone 191800 (TRAV12-2, TRAJ23)
CAGGRGGKLIF

SEQ ID NO: 383600 - protein, 14 aa, Homo sapiens
  CDR3 for beta chain variable domain of TCR clone 191800 (TRBV28, TRBJ2-5)
CASSLGDRAETQYF

SEQ ID NO: 383601 - protein, 13 aa, Homo sapiens
  CDR3 for alpha chain variable domain of TCR clone 191801 (TRAV14/DV4, TRAJ20)
CAMREANDYKLSF

SEQ ID NO: 383602 - protein, 15 aa, Homo sapiens
  CDR3 for beta chain variable domain of TCR clone 191801 (TRBV7-9, TRBJ1-1)
CASSRPGTANTEAFF

SEQ ID NO: 383603 - protein, 13 aa, Homo sapiens
  CDR3 for alpha chain variable domain of TCR clone 191802 (TRAV2, TRAJ40)
WAVVTSGTYKYIF

SEQ ID NO: 383604 - protein, 14 aa, Homo sapiens
  CDR3 for beta chain variable domain of TCR clone 191802 (TRBV25-1, TRBJ1-1)
CASTHLGGNTEAFF

SEQ ID NO: 383605 - protein, 13 aa, Homo sapiens
  CDR3 for alpha chain variable domain of TCR clone 191803 (TRAV20, TRAJ37)
CAGCSSNTGKLIF

SEQ ID NO: 383606 - protein, 10 aa, Homo sapiens
  CDR3 for beta chain variable domain of TCR clone 191803 (TRBV12-4, TRBJ2-3)
CQTATDTQYF

SEQ ID NO: 383607 - protein, 14 aa, Homo sapiens
  CDR3 for alpha chain variable domain of TCR clone 191804 (TRAV10, TRAJ32)
CGEPRGGVTNKLIF

SEQ ID NO: 383608 - protein, 14 aa, Homo sapiens
  CDR3 for beta chain variable domain of TCR clone 191804 (TRBV5-4, TRBJ2-2)
CASRLDGGTGELFF

SEQ ID NO: 383609 - protein, 16 aa, Homo sapiens
  CDR3 for alpha chain variable domain of TCR clone 191805 (TRAV30, TRAJ32)
CGTESSYGGATNKLIF

SEQ ID NO: 383610 - protein, 17 aa, Homo sapiens
  CDR3 for beta chain variable domain of TCR clone 191805 (TRBV11-2, TRBJ2-1)
CASSLYPPGVEYNEQFF

SEQ ID NO: 383611 - protein, 14 aa, Homo sapiens
  CDR3 for alpha chain variable domain of TCR clone 191806 (TRAV8-3, TRAJ11)
CFVSEKSGYSTLPF

SEQ ID NO: 383612 - protein, 16 aa, Homo sapiens
  CDR3 for beta chain variable domain of TCR clone 191806 (TRBV28, TRBJ2-1)
CASSSPEYPRDNEQFF

SEQ ID NO: 383613 - protein, 11 aa, Homo sapiens
  CDR3 for alpha chain variable domain of TCR clone 191807 (TRAV35, TRAJ30)
CAPGGDDKSIF

SEQ ID NO: 383614 - protein, 14 aa, Homo sapiens
  CDR3 for beta chain variable domain of TCR clone 191807 (TRBV7-6, TRBJ2-1)
CASSLGGGADEQFF

SEQ ID NO: 383615 - protein, 14 aa, Homo sapiens
  CDR3 for alpha chain variable domain of TCR clone 191808 (TRAV8-3, TRAJ39)
CAVVANNAGNMLTF

SEQ ID NO: 383616 - protein, 12 aa, Homo sapiens
  CDR3 for beta chain variable domain of TCR clone 191808 (TRBV11-3, TRBJ1-1)
CTSSHRQGEAFF

SEQ ID NO: 383617 - protein, 19 aa, Homo sapiens
  CDR3 for alpha chain variable domain of TCR clone 191809 (TRAV38-1, TRAJ53)
CAFVKHGLESGGSNYKLTF

SEQ ID NO: 383618 - protein, 13 aa, Homo sapiens
  CDR3 for beta chain variable domain of TCR clone 191809 (TRBV19, TRBJ2-7)
CASSPRQSYEQYF

SEQ ID NO: 383619 - protein, 16 aa, Homo sapiens
  CDR3 for alpha chain variable domain of TCR clone 191810 (TRAV3, TRAJ37)
CAVRPHGSGKPGKLIF

SEQ ID NO: 383620 - protein, 15 aa, Homo sapiens
  CDR3 for beta chain variable domain of TCR clone 191810 (TRBV20-1, TRBJ2-7)
CSARDRVSGMDEQYF

SEQ ID NO: 383621 - protein, 12 aa, Homo sapiens
  CDR3 for alpha chain variable domain of TCR clone 191811 (TRAV12-1, TRAJ40)
CVVYSGTYKYIF

SEQ ID NO: 383622 - protein, 18 aa, Homo sapiens
  CDR3 for beta chain variable domain of TCR clone 191811 (TRBV11-2, TRBJ2-3)
CASSFGGASRGSPNTQYF

SEQ ID NO: 383623 - protein, 12 aa, Homo sapiens
  CDR3 for alpha chain variable domain of TCR clone 191812 (TRAV3, TRAJ43)
CAVRDPNNDMRF

SEQ ID NO: 383624 - protein, 16 aa, Homo sapiens
  CDR3 for beta chain variable domain of TCR clone 191812 (TRBV18, TRBJ1-5)
CASSPSTGNSNQPQHF

SEQ ID NO: 383625 - protein, 13 aa, Homo sapiens
  CDR3 for alpha chain variable domain of TCR clone 191813 (TRAV26-1, TRAJ34)
CIVRPWITDKLIF

SEQ ID NO: 383626 - protein, 14 aa, Homo sapiens
  CDR3 for beta chain variable domain of TCR clone 191813 (TRBV7-2, TRBJ2-7)
CANRSQGAAYEQYF

SEQ ID NO: 383627 - protein, 13 aa, Homo sapiens
  CDR3 for alpha chain variable domain of TCR clone 191814 (TRAV20, TRAJ4)
CAVLAGGYNKLIF

SEQ ID NO: 383628 - protein, 17 aa, Homo sapiens
  CDR3 for beta chain variable domain of TCR clone 191814 (TRBV20-1, TRBJ2-7)
CSARDPEGDHREYEQYF

SEQ ID NO: 383629 - protein, 17 aa, Homo sapiens
  CDR3 for alpha chain variable domain of TCR clone 191815 (TRAV8-3, TRAJ34)
CAIPGKLIFGTGTRLQV

SEQ ID NO: 383630 - protein, 15 aa, Homo sapiens
  CDR3 for beta chain variable domain of TCR clone 191815 (TRBV5-7, TRBJ2-1)
CASSRRPAGDNEQFF

SEQ ID NO: 383631 - protein, 19 aa, Homo sapiens
  CDR3 for alpha chain variable domain of TCR clone 191816 (TRAV1-2, TRAJ26)
CLLPLCCERPDNYGQNFVF

SEQ ID NO: 383632 - protein, 15 aa, Homo sapiens
  CDR3 for beta chain variable domain of TCR clone 191816 (TRBV7-8, TRBJ2-1)
CASSLADSLYNEQFF

SEQ ID NO: 383633 - protein, 12 aa, Homo sapiens
  CDR3 for alpha chain variable domain of TCR clone 191817 (TRAV2, TRAJ31)
CAAPAQNARLMF

SEQ ID NO: 383634 - protein, 14 aa, Homo sapiens
  CDR3 for beta chain variable domain of TCR clone 191817 (TRBV7-9, TRBJ2-7)
CASSLDRPTDEQYF

SEQ ID NO: 383635 - protein, 15 aa, Homo sapiens
  CDR3 for alpha chain variable domain of TCR clone 191818 (TRAV3, TRAJ38)
CAVRDCLNAGNNHIQ

SEQ ID NO: 383636 - protein, 14 aa, Homo sapiens
  CDR3 for beta chain variable domain of TCR clone 191818 (TRBV5-5, TRBJ1-5)
CASSGQGVDQPQHF

SEQ ID NO: 383637 - protein, 16 aa, Homo sapiens
  CDR3 for alpha chain variable domain of TCR clone 191819 (TRAV26-1, TRAJ52)
CIVSNAGGTSYGKLTY

SEQ ID NO: 383638 - protein, 16 aa, Homo sapiens
  CDR3 for beta chain variable domain of TCR clone 191819 (TRBV5-1, TRBJ2-1)
CASSLEGRGLYNEQFF

SEQ ID NO: 383639 - protein, 10 aa, Homo sapiens
  CDR3 for alpha chain variable domain of TCR clone 191820 (TRAV39, TRAJ49)
CAVAGNQLYF

SEQ ID NO: 383640 - protein, 14 aa, Homo sapiens
  CDR3 for beta chain variable domain of TCR clone 191820 (TRBV7-8, TRBJ2-7)
CASSPRDRVYEQYF

SEQ ID NO: 383641 - protein, 14 aa, Homo sapiens
  CDR3 for alpha chain variable domain of TCR clone 191821 (TRAV12-2, TRAJ17)
CAVLFKAAGNKLTF

SEQ ID NO: 383642 - protein, 13 aa, Homo sapiens
  CDR3 for beta chain variable domain of TCR clone 191821 (TRBV19, TRBJ1-2)
CASSQVQVYGYTF

SEQ ID NO: 383643 - protein, 14 aa, Homo sapiens
  CDR3 for alpha chain variable domain of TCR clone 191822 (TRAV23/DV6, TRAJ9)
SAASKDTGGFKPIF

SEQ ID NO: 383644 - protein, 12 aa, Homo sapiens
  CDR3 for beta chain variable domain of TCR clone 191822 (TRBV20-1, TRBJ2-1)
CSASGGANEQFF

SEQ ID NO: 383645 - protein, 16 aa, Homo sapiens
  CDR3 for alpha chain variable domain of TCR clone 191823 (TRAV30, TRAJ24)
CGTEIVDADSWGKFKF

SEQ ID NO: 383646 - protein, 14 aa, Homo sapiens
  CDR3 for beta chain variable domain of TCR clone 191823 (TRBV12-5, TRBJ2-5)
CASGSRTHQETQYF

SEQ ID NO: 383647 - protein, 17 aa, Homo sapiens
  CDR3 for alpha chain variable domain of TCR clone 191824 (TRAV3, TRAJ6)
CAVRDGPRAGGSYLPPF

SEQ ID NO: 383648 - protein, 16 aa, Homo sapiens
  CDR3 for beta chain variable domain of TCR clone 191824 (TRBV5-1, TRBJ1-3)
CASSPWAPSSGNTIYF

SEQ ID NO: 383649 - protein, 14 aa, Homo sapiens
  CDR3 for alpha chain variable domain of TCR clone 191825 (TRAV12-3, TRAJ10)
SHLPLTGGGNKLTF

SEQ ID NO: 383650 - protein, 14 aa, Homo sapiens
  CDR3 for beta chain variable domain of TCR clone 191825 (TRBV18, TRBJ2-3)
CASSLGGGSDTQYF

SEQ ID NO: 383651 - protein, 14 aa, Homo sapiens
  CDR3 for alpha chain variable domain of TCR clone 191826 (TRAV12-1, TRAJ30)
CVVNPGNRDDKIIF

SEQ ID NO: 383652 - protein, 15 aa, Homo sapiens
  CDR3 for beta chain variable domain of TCR clone 191826 (TRBV7-8, TRBJ2-1)
CASSLHGGPYNEQFL

SEQ ID NO: 383653 - protein, 14 aa, Homo sapiens
  CDR3 for alpha chain variable domain of TCR clone 191827 (TRAV12-3, TRAJ10)
SHLPLTGGGNKLTF

SEQ ID NO: 383654 - protein, 14 aa, Homo sapiens
  CDR3 for beta chain variable domain of TCR clone 191827 (TRBV25-1, TRBJ1-1)
CTSTHLGGNTEAFF

SEQ ID NO: 383655 - protein, 15 aa, Homo sapiens
  CDR3 for alpha chain variable domain of TCR clone 191828 (TRAV2, TRAJ9)
CAVEDRGTGGFKTIF

SEQ ID NO: 383656 - protein, 13 aa, Homo sapiens
  CDR3 for beta chain variable domain of TCR clone 191828 (TRBV14, TRBJ2-7)
CASSQDRRYEQYF

SEQ ID NO: 383657 - protein, 14 aa, Homo sapiens
  CDR3 for alpha chain variable domain of TCR clone 191829 (TRAV12-2, TRAJ17)
FAVNIKAAGNKLTF

SEQ ID NO: 383658 - protein, 16 aa, Homo sapiens
  CDR3 for beta chain variable domain of TCR clone 191829 (TRBV20-1, TRBJ2-6)
CSASSQGYDGANVLTF

SEQ ID NO: 383659 - protein, 16 aa, Homo sapiens
  CDR3 for alpha chain variable domain of TCR clone 191830 (TRAV3, TRAJ37)
FAVRGKGSGNTGKLIF

SEQ ID NO: 383660 - protein, 15 aa, Homo sapiens
  CDR3 for beta chain variable domain of TCR clone 191830 (TRBV7-3, TRBJ2-2)
CASSETGQGTGELFF

SEQ ID NO: 383661 - protein, 12 aa, Homo sapiens
  CDR3 for alpha chain variable domain of TCR clone 191831 (TRAV2, TRAJ31)
CAVEDNNARPMF

SEQ ID NO: 383662 - protein, 16 aa, Homo sapiens
  CDR3 for beta chain variable domain of TCR clone 191831 (TRBV10-3, TRBJ2-1)
CAISGVGDRGGGEQFF

SEQ ID NO: 383663 - protein, 11 aa, Homo sapiens
  CDR3 for alpha chain variable domain of TCR clone 191832 (TRAV13-2, TRAJ20)
CADSNDYKLSF

SEQ ID NO: 383664 - protein, 11 aa, Homo sapiens
  CDR3 for beta chain variable domain of TCR clone 191832 (TRBV11-2, TRBJ2-2)
CASSLPGELFF

SEQ ID NO: 383665 - protein, 16 aa, Homo sapiens
  CDR3 for alpha chain variable domain of TCR clone 191833 (TRAV3, TRAJ10)
CAVRDMRAGGGNKLNF

SEQ ID NO: 383666 - protein, 19 aa, Homo sapiens
  CDR3 for beta chain variable domain of TCR clone 191833 (TRBV6-3, TRBJ1-2)
CASSYSKGRTGPPNYGYTF

SEQ ID NO: 383667 - protein, 16 aa, Homo sapiens
  CDR3 for alpha chain variable domain of TCR clone 191834 (TRAV30, TRAJ24)
CGTEIVDADSWGKFQF

SEQ ID NO: 383668 - protein, 14 aa, Homo sapiens
  CDR3 for beta chain variable domain of TCR clone 191834 (TRBV7-6, TRBJ2-3)
CASSLGTVTDTQYV

SEQ ID NO: 383669 - protein, 17 aa, Homo sapiens
  CDR3 for alpha chain variable domain of TCR clone 191835 (TRAV3, TRAJ42)
CAVRDRDYGGSKGNFIF

SEQ ID NO: 383670 - protein, 15 aa, Homo sapiens
  CDR3 for beta chain variable domain of TCR clone 191835 (TRBV6-6, TRBJ2-7)
CASSYSYGGSYEQYF

SEQ ID NO: 383671 - protein, 17 aa, Homo sapiens
  CDR3 for alpha chain variable domain of TCR clone 191836 (TRAV3, TRAJ38)
CAVRDCLNAGNNRKLFW

SEQ ID NO: 383672 - protein, 13 aa, Homo sapiens
  CDR3 for beta chain variable domain of TCR clone 191836 (TRBV23-1, TRBJ1-4)
CASRGKFNEKLFF

SEQ ID NO: 383673 - protein, 14 aa, Homo sapiens
  CDR3 for alpha chain variable domain of TCR clone 191837 (TRAV1-2, TRAJ16)
CAVNRFSDGQKLLF

SEQ ID NO: 383674 - protein, 14 aa, Homo sapiens
  CDR3 for beta chain variable domain of TCR clone 191837 (TRBV7-9, TRBJ2-4)
CASSLAMGGNIQYF

SEQ ID NO: 383675 - protein, 17 aa, Homo sapiens
  CDR3 for alpha chain variable domain of TCR clone 191838 (TRAV13-1, TRAJ52)
CAAGRNAGGTSYGKLTF

SEQ ID NO: 383676 - protein, 12 aa, Homo sapiens
  CDR3 for beta chain variable domain of TCR clone 191838 (TRBV7-8, TRBJ2-1)
CASSLGHNEQFL

SEQ ID NO: 383677 - protein, 14 aa, Homo sapiens
  CDR3 for alpha chain variable domain of TCR clone 191839 (TRAV12-2, TRAJ17)
CAVNIKAAGNKLTF

SEQ ID NO: 383678 - protein, 18 aa, Homo sapiens
  CDR3 for beta chain variable domain of TCR clone 191839 (TRBV6-6, TRBJ1-3)
CASSYSKWDSISGNTIYF

SEQ ID NO: 383679 - protein, 14 aa, Homo sapiens
  CDR3 for alpha chain variable domain of TCR clone 191840 (TRAV1-1, TRAJ15)
CAVRTQPGRNCSDL

SEQ ID NO: 383680 - protein, 13 aa, Homo sapiens
  CDR3 for beta chain variable domain of TCR clone 191840 (TRBV5-7, TRBJ2-2)
CASSNIDTGELFF

SEQ ID NO: 383681 - protein, 17 aa, Homo sapiens
  CDR3 for alpha chain variable domain of TCR clone 191841 (TRAV16, TRAJ53)
CALPAMNSGGSNYKLTF

SEQ ID NO: 383682 - protein, 19 aa, Homo sapiens
  CDR3 for beta chain variable domain of TCR clone 191841 (TRBV25-1, TRBJ2-2)
CAILAYRVDRGRKTGELFF

SEQ ID NO: 383683 - protein, 10 aa, Homo sapiens
  CDR3 for alpha chain variable domain of TCR clone 191842 (TRAV12-2, TRAJ31)
CAVNNARLMF

SEQ ID NO: 383684 - protein, 14 aa, Homo sapiens
  CDR3 for beta chain variable domain of TCR clone 191842 (TRBV19, TRBJ2-5)
CASSSSGIQETQYF

SEQ ID NO: 383685 - protein, 21 aa, Homo sapiens
  CDR3 for alpha chain variable domain of TCR clone 191843 (TRAV1-2, TRAJ37)
CLLPLCCERFHGSGNTGKLIF

SEQ ID NO: 383686 - protein, 14 aa, Homo sapiens
  CDR3 for beta chain variable domain of TCR clone 191843 (TRBV2, TRBJ2-5)
SASSEVLAQETQYF

SEQ ID NO: 383687 - protein, 14 aa, Homo sapiens
  CDR3 for alpha chain variable domain of TCR clone 191844 (TRAV8-4, TRAJ9)
CAVRINTGGFKTIF

SEQ ID NO: 383688 - protein, 15 aa, Homo sapiens
  CDR3 for beta chain variable domain of TCR clone 191844 (TRBV12-4, TRBJ2-5)
CASSPPTGRQETQYF

SEQ ID NO: 383689 - protein, 16 aa, Homo sapiens
  CDR3 for alpha chain variable domain of TCR clone 191845 (TRAV30, TRAJ24)
CGTEIVDADSWGTFQF

SEQ ID NO: 383690 - protein, 15 aa, Homo sapiens
  CDR3 for beta chain variable domain of TCR clone 191845 (TRBV7-9, TRBJ1-4)
CASSARTGGNEKLFF

SEQ ID NO: 383691 - protein, 18 aa, Homo sapiens
  CDR3 for alpha chain variable domain of TCR clone 191846 (TRAV12-3, TRAJ52)
CAMSVGGAGGTSYGKLAF

SEQ ID NO: 383692 - protein, 15 aa, Homo sapiens
  CDR3 for beta chain variable domain of TCR clone 191846 (TRBV6-3, TRBJ2-7)
CASSSPGTVFYEQYF

SEQ ID NO: 383693 - protein, 13 aa, Homo sapiens
  CDR3 for alpha chain variable domain of TCR clone 191847 (TRAV35, TRAJ42)
CAGFPGSQGNLIF

SEQ ID NO: 383694 - protein, 13 aa, Homo sapiens
  CDR3 for beta chain variable domain of TCR clone 191847 (TRBV4-2, TRBJ1-1)
CASSQAGNTEAIF

SEQ ID NO: 383695 - protein, 14 aa, Homo sapiens
  CDR3 for alpha chain variable domain of TCR clone 191848 (TRAV4, TRAJ17)
CLVGDMAAGNKLTF

SEQ ID NO: 383696 - protein, 13 aa, Homo sapiens
  CDR3 for beta chain variable domain of TCR clone 191848 (TRBV18, TRBJ2-7)
SASQSGGGYEQCF

SEQ ID NO: 383697 - protein, 16 aa, Homo sapiens
  CDR3 for alpha chain variable domain of TCR clone 191849 (TRAV30, TRAJ24)
CGTEIVDADSWGKFQF

SEQ ID NO: 383698 - protein, 15 aa, Homo sapiens
  CDR3 for beta chain variable domain of TCR clone 191849 (TRBV9, TRBJ1-6)
CASSVAGTGDSALHF

SEQ ID NO: 383699 - protein, 14 aa, Homo sapiens
  CDR3 for alpha chain variable domain of TCR clone 191850 (TRAV12-3, TRAJ10)
SHLPLTGGGNKLTF

SEQ ID NO: 383700 - protein, 12 aa, Homo sapiens
  CDR3 for beta chain variable domain of TCR clone 191850 (TRBV11-2, TRBJ1-5)
CASSPQGQPQHF

SEQ ID NO: 383701 - protein, 11 aa, Homo sapiens
  CDR3 for alpha chain variable domain of TCR clone 191851 (TRAV12-3, TRAJ27)
CAVANAGKSTY

SEQ ID NO: 383702 - protein, 13 aa, Homo sapiens
  CDR3 for beta chain variable domain of TCR clone 191851 (TRBV20-1, TRBJ1-1)
CSARVGGNTEAFF

SEQ ID NO: 383703 - protein, 12 aa, Homo sapiens
  CDR3 for alpha chain variable domain of TCR clone 191852 (TRAV38-1, TRAJ57)
CAFMKLPPTLVF

SEQ ID NO: 383704 - protein, 15 aa, Homo sapiens
  CDR3 for beta chain variable domain of TCR clone 191852 (TRBV5-1, TRBJ2-2)
CASSSQGGNTGELFF

SEQ ID NO: 383705 - protein, 17 aa, Homo sapiens
  CDR3 for alpha chain variable domain of TCR clone 191853 (TRAV3, TRAJ12)
CAVRDGGRMDSSYKLIF

SEQ ID NO: 383706 - protein, 15 aa, Homo sapiens
  CDR3 for beta chain variable domain of TCR clone 191853 (TRBV15, TRBJ1-6)
CATSGGLNSPSTLGT

SEQ ID NO: 383707 - protein, 14 aa, Homo sapiens
  CDR3 for alpha chain variable domain of TCR clone 191854 (TRAV1-2, TRAJ16)
CAVNRFSDGQKLLF

SEQ ID NO: 383708 - protein, 17 aa, Homo sapiens
  CDR3 for beta chain variable domain of TCR clone 191854 (TRBV20-1, TRBJ2-1)
CSASSSALAGSYNEQFF

SEQ ID NO: 383709 - protein, 15 aa, Homo sapiens
  CDR3 for alpha chain variable domain of TCR clone 191855 (TRAV4, TRAJ39)
CLGGPNNNAGNMLTF

SEQ ID NO: 383710 - protein, 14 aa, Homo sapiens
  CDR3 for beta chain variable domain of TCR clone 191855 (TRBV19, TRBJ2-1)
CASPTVVLSGEQFF

SEQ ID NO: 383711 - protein, 11 aa, Homo sapiens
  CDR3 for alpha chain variable domain of TCR clone 191856 (TRAV2, TRAJ33)
CAVESNYQLIC

SEQ ID NO: 383712 - protein, 15 aa, Homo sapiens
  CDR3 for beta chain variable domain of TCR clone 191856 (TRBV19, TRBJ1-1)
CASTPGQIQNTEAFF

SEQ ID NO: 383713 - protein, 15 aa, Homo sapiens
  CDR3 for alpha chain variable domain of TCR clone 191857 (TRAV3, TRAJ45)
CAVRSPWGGADGLTF

SEQ ID NO: 383714 - protein, 16 aa, Homo sapiens
  CDR3 for beta chain variable domain of TCR clone 191857 (TRBV6-1, TRBJ2-2)
CASSFGQGANTGELFF

SEQ ID NO: 383715 - protein, 14 aa, Homo sapiens
  CDR3 for alpha chain variable domain of TCR clone 191858 (TRAV13-2, TRAJ6)
CAERGSGGSYITTF

SEQ ID NO: 383716 - protein, 13 aa, Homo sapiens
  CDR3 for beta chain variable domain of TCR clone 191858 (TRBV19, TRBJ1-2)
CASSQGQVYGYTF

SEQ ID NO: 383717 - protein, 10 aa, Homo sapiens
  CDR3 for alpha chain variable domain of TCR clone 191859 (TRAV36/DV7, TRAJ49)
CALTGNQFYF

SEQ ID NO: 383718 - protein, 14 aa, Homo sapiens
  CDR3 for beta chain variable domain of TCR clone 191859 (TRBV4-1, TRBJ2-2)
CASSLTENTGELFF

SEQ ID NO: 383719 - protein, 14 aa, Homo sapiens
  CDR3 for alpha chain variable domain of TCR clone 191860 (TRAV1-2, TRAJ8)
CAVREDTGFRKLVF

SEQ ID NO: 383720 - protein, 13 aa, Homo sapiens
  CDR3 for beta chain variable domain of TCR clone 191860 (TRBV7-9, TRBJ1-2)
CASSLKQNYGYTF

SEQ ID NO: 383721 - protein, 14 aa, Homo sapiens
  CDR3 for alpha chain variable domain of TCR clone 191861 (TRAV12-2, TRAJ45)
CAVNKGGGADGLPF

SEQ ID NO: 383722 - protein, 15 aa, Homo sapiens
  CDR3 for beta chain variable domain of TCR clone 191861 (TRBV9, TRBJ1-6)
CASSVAGTGDSPLHF

SEQ ID NO: 383723 - protein, 16 aa, Homo sapiens
  CDR3 for alpha chain variable domain of TCR clone 191862 (TRAV36/DV7, TRAJ33)
WRPGNKVQDSNYQLIW

SEQ ID NO: 383724 - protein, 15 aa, Homo sapiens
  CDR3 for beta chain variable domain of TCR clone 191862 (TRBV29-1, TRBJ2-1)
CSVRRRALFYNEQFF

SEQ ID NO: 383725 - protein, 11 aa, Homo sapiens
  CDR3 for alpha chain variable domain of TCR clone 191863 (TRAV2, TRAJ13)
CASVGYQKVTF

SEQ ID NO: 383726 - protein, 15 aa, Homo sapiens
  CDR3 for beta chain variable domain of TCR clone 191863 (TRBV19, TRBJ2-1)
CASSIGLAGWDEQFF

SEQ ID NO: 383727 - protein, 14 aa, Homo sapiens
  CDR3 for alpha chain variable domain of TCR clone 191864 (TRAV13-2, TRAJ17)
CAENSKAAGNKLTF

SEQ ID NO: 383728 - protein, 15 aa, Homo sapiens
  CDR3 for beta chain variable domain of TCR clone 191864 (TRBV9, TRBJ1-5)
CASSVGPETNQPQHF

SEQ ID NO: 383729 - protein, 17 aa, Homo sapiens
  CDR3 for alpha chain variable domain of TCR clone 191865 (TRAV38-2/DV8, TRAJ57)
CAYRSVLTQGGSEKLVF

SEQ ID NO: 383730 - protein, 16 aa, Homo sapiens
  CDR3 for beta chain variable domain of TCR clone 191865 (TRBV7-3, TRBJ2-2)
CASSLKRGTVSGELFF

SEQ ID NO: 383731 - protein, 21 aa, Homo sapiens
  CDR3 for alpha chain variable domain of TCR clone 191866 (TRAV8-3, TRAJ10)
CAVGHTHGRRKQPHLWDRHSA

SEQ ID NO: 383732 - protein, 10 aa, Homo sapiens
  CDR3 for beta chain variable domain of TCR clone 191866 (TRBV20-1, TRBJ2-5)
CSARFETQYF

SEQ ID NO: 383733 - protein, 12 aa, Homo sapiens
  CDR3 for alpha chain variable domain of TCR clone 191867 (TRAV13-2, TRAJ8)
CAPWLGFQKLVF

SEQ ID NO: 383734 - protein, 12 aa, Homo sapiens
  CDR3 for beta chain variable domain of TCR clone 191867 (TRBV11-2, TRBJ2-4)
CASSSASGSEYF

SEQ ID NO: 383735 - protein, 13 aa, Homo sapiens
  CDR3 for alpha chain variable domain of TCR clone 191868 (TRAV17, TRAJ26)
CATVANYGQNFVF

SEQ ID NO: 383736 - protein, 13 aa, Homo sapiens
  CDR3 for beta chain variable domain of TCR clone 191868 (TRBV14, TRBJ1-1)
CASSREFGTEAFF

SEQ ID NO: 383737 - protein, 12 aa, Homo sapiens
  CDR3 for alpha chain variable domain of TCR clone 191869 (TRAV17, TRAJ30)
CATDARDDKIIF

SEQ ID NO: 383738 - protein, 15 aa, Homo sapiens
  CDR3 for beta chain variable domain of TCR clone 191869 (TRBV4-1, TRBJ2-1)
CASSQGGELYNEQLF

SEQ ID NO: 383739 - protein, 16 aa, Homo sapiens
  CDR3 for alpha chain variable domain of TCR clone 191870 (TRAV30, TRAJ24)
CGTEIVDADSWGKFQF

SEQ ID NO: 383740 - protein, 14 aa, Homo sapiens
  CDR3 for beta chain variable domain of TCR clone 191870 (TRBV12-4, TRBJ2-3)
CASSLSGFTDTQYF

SEQ ID NO: 383741 - protein, 14 aa, Homo sapiens
  CDR3 for alpha chain variable domain of TCR clone 191871 (TRAV13-1, TRAJ35)
CSARKGGFGNVLHC

SEQ ID NO: 383742 - protein, 13 aa, Homo sapiens
  CDR3 for beta chain variable domain of TCR clone 191871 (TRBV7-3, TRBJ1-1)
CASSQDWGAEAVF

SEQ ID NO: 383743 - protein, 14 aa, Homo sapiens
  CDR3 for alpha chain variable domain of TCR clone 191872 (TRAV3, TRAJ21)
CALGRGSTNFTLAL

SEQ ID NO: 383744 - protein, 14 aa, Homo sapiens
  CDR3 for beta chain variable domain of TCR clone 191872 (TRBV7-9, TRBJ2-4)
CASSLAMGGNSQYF

SEQ ID NO: 383745 - protein, 14 aa, Homo sapiens
  CDR3 for alpha chain variable domain of TCR clone 191873 (TRAV12-2, TRAJ13)
CAVKKTGGYQKVTF

SEQ ID NO: 383746 - protein, 14 aa, Homo sapiens
  CDR3 for beta chain variable domain of TCR clone 191873 (TRBV11-2, TRBJ2-3)
CASSRLARTGTQYF

SEQ ID NO: 383747 - protein, 18 aa, Homo sapiens
  CDR3 for alpha chain variable domain of TCR clone 191874 (TRAV21, TRAJ52)
CAVRPSPAGGTSYGKLTF

SEQ ID NO: 383748 - protein, 15 aa, Homo sapiens
  CDR3 for beta chain variable domain of TCR clone 191874 (TRBV7-8, TRBJ2-5)
CASSDAAGSQETQYF

SEQ ID NO: 383749 - protein, 12 aa, Homo sapiens
  CDR3 for alpha chain variable domain of TCR clone 191875 (TRAV26-1, TRAJ43)
CIVSGNNNDMRF

SEQ ID NO: 383750 - protein, 13 aa, Homo sapiens
  CDR3 for beta chain variable domain of TCR clone 191875 (TRBV20-1, TRBJ2-3)
CSAIYPGADTQYF

SEQ ID NO: 383751 - protein, 14 aa, Homo sapiens
  CDR3 for alpha chain variable domain of TCR clone 191876 (TRAV3, TRAJ34)
CAVRYINNTDKLIF

SEQ ID NO: 383752 - protein, 14 aa, Homo sapiens
  CDR3 for beta chain variable domain of TCR clone 191876 (TRBV7-2, TRBJ2-2)
CASSLGQNTGELFF

SEQ ID NO: 383753 - protein, 14 aa, Homo sapiens
  CDR3 for alpha chain variable domain of TCR clone 191877 (TRAV12-2, TRAJ53)
CLERGGGSNYKLTF

SEQ ID NO: 383754 - protein, 17 aa, Homo sapiens
  CDR3 for beta chain variable domain of TCR clone 191877 (TRBV7-3, TRBJ2-3)
CASSLMKRMRGADTQYF

SEQ ID NO: 383755 - protein, 13 aa, Homo sapiens
  CDR3 for alpha chain variable domain of TCR clone 191878 (TRAV8-6, TRAJ9)
CAVGDTGGFKTIF

SEQ ID NO: 383756 - protein, 14 aa, Homo sapiens
  CDR3 for beta chain variable domain of TCR clone 191878 (TRBV2, TRBJ2-1)
CASSEALIYNEQFF

SEQ ID NO: 383757 - protein, 15 aa, Homo sapiens
  CDR3 for alpha chain variable domain of TCR clone 191879 (TRAV8-3, TRAJ42)
GAGRNYGGSQGNLIF

SEQ ID NO: 383758 - protein, 11 aa, Homo sapiens
  CDR3 for beta chain variable domain of TCR clone 191879 (TRBV7-2, TRBJ2-3)
CASSSSDTQYF

SEQ ID NO: 383759 - protein, 16 aa, Homo sapiens
  CDR3 for alpha chain variable domain of TCR clone 191880 (TRAV30, TRAJ24)
CGTEIVYADSWGKFQF

SEQ ID NO: 383760 - protein, 13 aa, Homo sapiens
  CDR3 for beta chain variable domain of TCR clone 191880 (TRBV11-2, TRBJ1-3)
CASSLSERNTIYF

SEQ ID NO: 383761 - protein, 14 aa, Homo sapiens
  CDR3 for alpha chain variable domain of TCR clone 191881 (TRAV12-2, TRAJ17)
CAVLFKAAGNKLTF

SEQ ID NO: 383762 - protein, 14 aa, Homo sapiens
  CDR3 for beta chain variable domain of TCR clone 191881 (TRBV4-1, TRBJ2-2)
CASSHAVNTGELFF

SEQ ID NO: 383763 - protein, 18 aa, Homo sapiens
  CDR3 for alpha chain variable domain of TCR clone 191882 (TRAV13-1, TRAJ52)
CAAKNPNAGGTSYGKLTF

SEQ ID NO: 383764 - protein, 14 aa, Homo sapiens
  CDR3 for beta chain variable domain of TCR clone 191882 (TRBV19, TRBJ2-1)
CASSAGLSGNEQFF

SEQ ID NO: 383765 - protein, 17 aa, Homo sapiens
  CDR3 for alpha chain variable domain of TCR clone 191883 (TRAV13-1, TRAJ28)
CAASPPSSGAGSYQLNF

SEQ ID NO: 383766 - protein, 12 aa, Homo sapiens
  CDR3 for beta chain variable domain of TCR clone 191883 (TRBV11-2, TRBJ2-2)
CASSLPTGELFF

SEQ ID NO: 383767 - protein, 12 aa, Homo sapiens
  CDR3 for alpha chain variable domain of TCR clone 191884 (TRAV38-1, TRAJ47)
CAFETYGNKLVF

SEQ ID NO: 383768 - protein, 14 aa, Homo sapiens
  CDR3 for beta chain variable domain of TCR clone 191884 (TRBV20-1, TRBJ2-2)
SSAPDTANTGELFF

SEQ ID NO: 383769 - protein, 13 aa, Homo sapiens
  CDR3 for alpha chain variable domain of TCR clone 191885 (TRAV36/DV7, TRAJ38)
CVANAGNNRKLIW

SEQ ID NO: 383770 - protein, 16 aa, Homo sapiens
  CDR3 for beta chain variable domain of TCR clone 191885 (TRBV3-1, TRBJ2-1)
CASSQGGRRSFDEQFF

SEQ ID NO: 383771 - protein, 14 aa, Homo sapiens
  CDR3 for alpha chain variable domain of TCR clone 191886 (TRAV26-1, TRAJ34)
CIVRESYNTDKLIF

SEQ ID NO: 383772 - protein, 14 aa, Homo sapiens
  CDR3 for beta chain variable domain of TCR clone 191886 (TRBV7-2, TRBJ2-7)
CASSLYPGRYEQYF

SEQ ID NO: 383773 - protein, 12 aa, Homo sapiens
  CDR3 for alpha chain variable domain of TCR clone 191887 (TRAV36/DV7, TRAJ54)
CAVVRGAQKLVF

SEQ ID NO: 383774 - protein, 16 aa, Homo sapiens
  CDR3 for beta chain variable domain of TCR clone 191887 (TRBV28, TRBJ2-5)
CASSFSLAGGWETQYF

SEQ ID NO: 383775 - protein, 12 aa, Homo sapiens
  CDR3 for alpha chain variable domain of TCR clone 191888 (TRAV13-1, TRAJ48)
CAANFGNEKLTF

SEQ ID NO: 383776 - protein, 14 aa, Homo sapiens
  CDR3 for beta chain variable domain of TCR clone 191888 (TRBV7-2, TRBJ2-7)
CASRSQGAAYEQYF

SEQ ID NO: 383777 - protein, 13 aa, Homo sapiens
  CDR3 for alpha chain variable domain of TCR clone 191889 (TRAV13-2, TRAJ48)
CAEMDFGNEKLTF

SEQ ID NO: 383778 - protein, 16 aa, Homo sapiens
  CDR3 for beta chain variable domain of TCR clone 191889 (TRBV7-3, TRBJ2-5)
CASSLMGGASQETQYF

SEQ ID NO: 383779 - protein, 14 aa, Homo sapiens
  CDR3 for alpha chain variable domain of TCR clone 191890 (TRAV8-6, TRAJ54)
CAVSDFQGAQKLVF

SEQ ID NO: 383780 - protein, 14 aa, Homo sapiens
  CDR3 for beta chain variable domain of TCR clone 191890 (TRBV18, TRBJ2-7)
CASSPRGGAYEQYS

SEQ ID NO: 383781 - protein, 15 aa, Homo sapiens
  CDR3 for alpha chain variable domain of TCR clone 191891 (TRAV8-1, TRAJ6)
CAVNANPGGSYIPTF

SEQ ID NO: 383782 - protein, 12 aa, Homo sapiens
  CDR3 for beta chain variable domain of TCR clone 191891 (TRBV5-7, TRBJ2-7)
CASSVRGGEQYS

SEQ ID NO: 383783 - protein, 14 aa, Homo sapiens
  CDR3 for alpha chain variable domain of TCR clone 191892 (TRAV1-2, TRAJ29)
CAVRELTSATRLVF

SEQ ID NO: 383784 - protein, 12 aa, Homo sapiens
  CDR3 for beta chain variable domain of TCR clone 191892 (TRBV29-1, TRBJ2-3)
CSVTGGADTQYF

SEQ ID NO: 383785 - protein, 16 aa, Homo sapiens
  CDR3 for alpha chain variable domain of TCR clone 191893 (TRAV30, TRAJ24)
CGTEIVDADSWGRFQF

SEQ ID NO: 383786 - protein, 13 aa, Homo sapiens
  CDR3 for beta chain variable domain of TCR clone 191893 (TRBV24-1, TRBJ2-2)
CATSDWSTGELFF

SEQ ID NO: 383787 - protein, 15 aa, Homo sapiens
  CDR3 for alpha chain variable domain of TCR clone 191894 (TRAV38-1, TRAJ37)
CAFIFGSGNTGKLIF

SEQ ID NO: 383788 - protein, 13 aa, Homo sapiens
  CDR3 for beta chain variable domain of TCR clone 191894 (TRBV20-1, TRBJ1-6)
CSAPLGVGSPLHF

SEQ ID NO: 383789 - protein, 15 aa, Homo sapiens
  CDR3 for alpha chain variable domain of TCR clone 191895 (TRAV8-3, TRAJ11)
CAVGLLNSGYSTLTF

SEQ ID NO: 383790 - protein, 18 aa, Homo sapiens
  CDR3 for beta chain variable domain of TCR clone 191895 (TRBV4-1, TRBJ2-5)
CASSQREWRDPVLRARHA

SEQ ID NO: 383791 - protein, 18 aa, Homo sapiens
  CDR3 for alpha chain variable domain of TCR clone 191896 (TRAV26-2, TRAJ45)
CILRVDKDSGGGSDGLTF

SEQ ID NO: 383792 - protein, 11 aa, Homo sapiens
  CDR3 for beta chain variable domain of TCR clone 191896 (TRBV29-1, TRBJ2-5)
CSEDRTGTQYF

SEQ ID NO: 383793 - protein, 14 aa, Homo sapiens
  CDR3 for alpha chain variable domain of TCR clone 191897 (TRAV13-1, TRAJ10)
CAAKEPGGGNKLTF

SEQ ID NO: 383794 - protein, 12 aa, Homo sapiens
  CDR3 for beta chain variable domain of TCR clone 191897 (TRBV11-2, TRBJ2-2)
CASSLGGGELFV

SEQ ID NO: 383795 - protein, 14 aa, Homo sapiens
  CDR3 for alpha chain variable domain of TCR clone 191898 (TRAV2, TRAJ37)
CAIDFTSNTGKLIF

SEQ ID NO: 383796 - protein, 13 aa, Homo sapiens
  CDR3 for beta chain variable domain of TCR clone 191898 (TRBV4-2, TRBJ1-1)
CASSQAGNTEAFF

SEQ ID NO: 383797 - protein, 13 aa, Homo sapiens
  CDR3 for alpha chain variable domain of TCR clone 191899 (TRAV12-3, TRAJ57)
CAMVGAGSEKLVF

SEQ ID NO: 383798 - protein, 14 aa, Homo sapiens
  CDR3 for beta chain variable domain of TCR clone 191899 (TRBV7-2, TRBJ2-7)
CASSPKTSFYEQYF

SEQ ID NO: 383799 - protein, 13 aa, Homo sapiens
  CDR3 for alpha chain variable domain of TCR clone 191900 (TRAV12-1, TRAJ6)
CVVFPGGSYIPTF

SEQ ID NO: 383800 - protein, 12 aa, Homo sapiens
  CDR3 for beta chain variable domain of TCR clone 191900 (TRBV11-2, TRBJ2-2)
CASSLRGGELFF

SEQ ID NO: 383801 - protein, 16 aa, Homo sapiens
  CDR3 for alpha chain variable domain of TCR clone 191901 (TRAV13-1, TRAJ48)
CAASIFGNFGNEKLTF

SEQ ID NO: 383802 - protein, 13 aa, Homo sapiens
  CDR3 for beta chain variable domain of TCR clone 191901 (TRBV7-7, TRBJ2-3)
CASSLSRADTQCF

SEQ ID NO: 383803 - protein, 11 aa, Homo sapiens
  CDR3 for alpha chain variable domain of TCR clone 191902 (TRAV3, TRAJ21)
CAVGNFNNFYF

SEQ ID NO: 383804 - protein, 16 aa, Homo sapiens
  CDR3 for beta chain variable domain of TCR clone 191902 (TRBV19, TRBJ2-1)
CASSKAGPSSYNEHFF

SEQ ID NO: 383805 - protein, 15 aa, Homo sapiens
  CDR3 for alpha chain variable domain of TCR clone 191903 (TRAV12-2, TRAJ53)
CAVNGGGGSNYKLTF

SEQ ID NO: 383806 - protein, 13 aa, Homo sapiens
  CDR3 for beta chain variable domain of TCR clone 191903 (TRBV3-1, TRBJ1-1)
CASSPGVSTEAFF

SEQ ID NO: 383807 - protein, 14 aa, Homo sapiens
  CDR3 for alpha chain variable domain of TCR clone 191904 (TRAV1-2, TRAJ8)
CAVREDTGFQKLAF

SEQ ID NO: 383808 - protein, 15 aa, Homo sapiens
  CDR3 for beta chain variable domain of TCR clone 191904 (TRBV12-4, TRBJ2-5)
CASSPPTGLQETQYF

SEQ ID NO: 383809 - protein, 15 aa, Homo sapiens
  CDR3 for alpha chain variable domain of TCR clone 191905 (TRAV2, TRAJ15)
CAVEDREQAGTALIF

SEQ ID NO: 383810 - protein, 15 aa, Homo sapiens
  CDR3 for beta chain variable domain of TCR clone 191905 (TRBV20-1, TRBJ1-1)
CSASRGVTGNTEAFF

SEQ ID NO: 383811 - protein, 13 aa, Homo sapiens
  CDR3 for alpha chain variable domain of TCR clone 191906 (TRAV12-2, TRAJ39)
CAVNNNAGNMLTF

SEQ ID NO: 383812 - protein, 13 aa, Homo sapiens
  CDR3 for beta chain variable domain of TCR clone 191906 (TRBV2, TRBJ1-5)
CAAAGPGNQTQHF

SEQ ID NO: 383813 - protein, 16 aa, Homo sapiens
  CDR3 for alpha chain variable domain of TCR clone 191907 (TRAV13-1, TRAJ48)
CAASIFGNFGNEKLTF

SEQ ID NO: 383814 - protein, 14 aa, Homo sapiens
  CDR3 for beta chain variable domain of TCR clone 191907 (TRBV7-3, TRBJ1-1)
RASSLKGGNTEAFF

SEQ ID NO: 383815 - protein, 18 aa, Homo sapiens
  CDR3 for alpha chain variable domain of TCR clone 191908 (TRAV21, TRAJ52)
CAVRPSPAGGTSSGQLTF

SEQ ID NO: 383816 - protein, 17 aa, Homo sapiens
  CDR3 for beta chain variable domain of TCR clone 191908 (TRBV25-1, TRBJ2-1)
CASSAYGQGRGVYEQFF

SEQ ID NO: 383817 - protein, 13 aa, Homo sapiens
  CDR3 for alpha chain variable domain of TCR clone 191909 (TRAV23/DV6, TRAJ27)
CAASKPMQANQPL

SEQ ID NO: 383818 - protein, 14 aa, Homo sapiens
  CDR3 for beta chain variable domain of TCR clone 191909 (TRBV12-4, TRBJ1-5)
CASSRTGIGQPQHF

SEQ ID NO: 383819 - protein, 15 aa, Homo sapiens
  CDR3 for alpha chain variable domain of TCR clone 191910 (TRAV8-6, TRAJ10)
CAVSSKGGGGNKLTF

SEQ ID NO: 383820 - protein, 15 aa, Homo sapiens
  CDR3 for beta chain variable domain of TCR clone 191910 (TRBV28, TRBJ1-2)
CASSSHSIANYGYTC

SEQ ID NO: 383821 - protein, 13 aa, Homo sapiens
  CDR3 for alpha chain variable domain of TCR clone 191911 (TRAV3, TRAJ36)
CAVRDTGANNLFF

SEQ ID NO: 383822 - protein, 15 aa, Homo sapiens
  CDR3 for beta chain variable domain of TCR clone 191911 (TRBV24-1, TRBJ2-1)
CATSGSGGFYNEQFF

SEQ ID NO: 383823 - protein, 16 aa, Homo sapiens
  CDR3 for alpha chain variable domain of TCR clone 191912 (TRAV30, TRAJ24)
CGTEIVDADSWGKFQF

SEQ ID NO: 383824 - protein, 14 aa, Homo sapiens
  CDR3 for beta chain variable domain of TCR clone 191912 (TRBV7-8, TRBJ2-3)
CASSLEAGTDMQYF

SEQ ID NO: 383825 - protein, 11 aa, Homo sapiens
  CDR3 for alpha chain variable domain of TCR clone 191913 (TRAV4, TRAJ23)
CLVAPGGKLIF

SEQ ID NO: 383826 - protein, 15 aa, Homo sapiens
  CDR3 for beta chain variable domain of TCR clone 191913 (TRBV7-2, TRBJ2-1)
CASSFKADEYNEQFF

SEQ ID NO: 383827 - protein, 13 aa, Homo sapiens
  CDR3 for alpha chain variable domain of TCR clone 191914 (TRAV2, TRAJ15)
CAVASQAGTALIF

SEQ ID NO: 383828 - protein, 18 aa, Homo sapiens
  CDR3 for beta chain variable domain of TCR clone 191914 (TRBV6-6, TRBJ1-3)
CASSYSKWDSISGNTIYF

SEQ ID NO: 383829 - protein, 16 aa, Homo sapiens
  CDR3 for alpha chain variable domain of TCR clone 191915 (TRAV1-2, TRAJ10)
CAVRGVLTGGGNKLTF

SEQ ID NO: 383830 - protein, 15 aa, Homo sapiens
  CDR3 for beta chain variable domain of TCR clone 191915 (TRBV18, TRBJ1-2)
CASSLGGLFNYGYTF

SEQ ID NO: 383831 - protein, 15 aa, Homo sapiens
  CDR3 for alpha chain variable domain of TCR clone 191916 (TRAV1-2, TRAJ36)
CAASADQTGANNLFF

SEQ ID NO: 383832 - protein, 15 aa, Homo sapiens
  CDR3 for beta chain variable domain of TCR clone 191916 (TRBV5-1, TRBJ2-7)
CASSCSTDSVYEQYF

SEQ ID NO: 383833 - protein, 13 aa, Homo sapiens
  CDR3 for alpha chain variable domain of TCR clone 191917 (TRAV2, TRAJ3)
CAVDGSSASKIIF

SEQ ID NO: 383834 - protein, 14 aa, Homo sapiens
  CDR3 for beta chain variable domain of TCR clone 191917 (TRBV27, TRBJ2-7)
CASSLAGLSYEQYF

SEQ ID NO: 383835 - protein, 12 aa, Homo sapiens
  CDR3 for alpha chain variable domain of TCR clone 191918 (TRAV13-2, TRAJ23)
CAERHRGVKLIF

SEQ ID NO: 383836 - protein, 16 aa, Homo sapiens
  CDR3 for beta chain variable domain of TCR clone 191918 (TRBV20-1, TRBJ1-4)
YSAPGQGLLTNEKLFF

SEQ ID NO: 383837 - protein, 13 aa, Homo sapiens
  CDR3 for alpha chain variable domain of TCR clone 191919 (TRAV21, TRAJ57)
CAVTQGGSEKLGF

SEQ ID NO: 383838 - protein, 15 aa, Homo sapiens
  CDR3 for beta chain variable domain of TCR clone 191919 (TRBV5-1, TRBJ1-1)
CASSSTTGTNTEAFF

SEQ ID NO: 383839 - protein, 15 aa, Homo sapiens
  CDR3 for alpha chain variable domain of TCR clone 191920 (TRAV3, TRAJ20)
CAGRDIKLSDYKLSF

SEQ ID NO: 383840 - protein, 15 aa, Homo sapiens
  CDR3 for beta chain variable domain of TCR clone 191920 (TRBV7-9, TRBJ1-6)
CASSSPGRGDSPLHF

SEQ ID NO: 383841 - protein, 15 aa, Homo sapiens
  CDR3 for alpha chain variable domain of TCR clone 191921 (TRAV2, TRAJ24)
CAVEVITDSWGKFQF

SEQ ID NO: 383842 - protein, 14 aa, Homo sapiens
  CDR3 for beta chain variable domain of TCR clone 191921 (TRBV19, TRBJ2-1)
CASSMGSGRRSSSS

SEQ ID NO: 383843 - protein, 12 aa, Homo sapiens
  CDR3 for alpha chain variable domain of TCR clone 191922 (TRAV21, TRAJ33)
CAKMDSNYQLIW

SEQ ID NO: 383844 - protein, 15 aa, Homo sapiens
  CDR3 for beta chain variable domain of TCR clone 191922 (TRBV5-5, TRBJ1-5)
CASSLEGASNQPQHF

SEQ ID NO: 383845 - protein, 12 aa, Homo sapiens
  CDR3 for alpha chain variable domain of TCR clone 191923 (TRAV8-6, TRAJ36)
CAVSDWLGQTTS

SEQ ID NO: 383846 - protein, 16 aa, Homo sapiens
  CDR3 for beta chain variable domain of TCR clone 191923 (TRBV28, TRBJ2-7)
CASSLFFETGGPEQYF

SEQ ID NO: 383847 - protein, 13 aa, Homo sapiens
  CDR3 for alpha chain variable domain of TCR clone 191924 (TRAV3, TRAJ4)
CAVRDGGYNKLFF

SEQ ID NO: 383848 - protein, 15 aa, Homo sapiens
  CDR3 for beta chain variable domain of TCR clone 191924 (TRBV5-1, TRBJ2-1)
CASSPPRAPYNEQFF

SEQ ID NO: 383849 - protein, 12 aa, Homo sapiens
  CDR3 for alpha chain variable domain of TCR clone 191925 (TRAV12-1, TRAJ20)
CVVNPDDYKLSF

SEQ ID NO: 383850 - protein, 14 aa, Homo sapiens
  CDR3 for beta chain variable domain of TCR clone 191925 (TRBV7-2, TRBJ2-3)
CASSQTGSSYTQYF

SEQ ID NO: 383851 - protein, 13 aa, Homo sapiens
  CDR3 for alpha chain variable domain of TCR clone 191926 (TRAV35, TRAJ42)
CAGFPGSQGNLIF

SEQ ID NO: 383852 - protein, 15 aa, Homo sapiens
  CDR3 for beta chain variable domain of TCR clone 191926 (TRBV27, TRBJ2-2)
CASSLSGFWVTGELF

SEQ ID NO: 383853 - protein, 13 aa, Homo sapiens
  CDR3 for alpha chain variable domain of TCR clone 191927 (TRAV20, TRAJ37)
CAGCSSNTGKLIF

SEQ ID NO: 383854 - protein, 21 aa, Homo sapiens
  CDR3 for beta chain variable domain of TCR clone 191927 (TRBV4-2, TRBJ2-3)
PCSQKTRPCIYVPAAPDTQYF

SEQ ID NO: 383855 - protein, 11 aa, Homo sapiens
  CDR3 for alpha chain variable domain of TCR clone 191928 (TRAV12-3, TRAJ43)
CAMSVSNDMRF

SEQ ID NO: 383856 - protein, 15 aa, Homo sapiens
  CDR3 for beta chain variable domain of TCR clone 191928 (TRBV10-3, TRBJ2-1)
CAISDVQDRAYEQFF

SEQ ID NO: 383857 - protein, 14 aa, Homo sapiens
  CDR3 for alpha chain variable domain of TCR clone 191929 (TRAV13-2, TRAJ10)
CAEAFTGGGNKLTF

SEQ ID NO: 383858 - protein, 16 aa, Homo sapiens
  CDR3 for beta chain variable domain of TCR clone 191929 (TRBV18, TRBJ2-7)
CASSPRSQGISYEQYF

SEQ ID NO: 383859 - protein, 11 aa, Homo sapiens
  CDR3 for alpha chain variable domain of TCR clone 191930 (TRAV21, TRAJ34)
CAHYNTDKLIF

SEQ ID NO: 383860 - protein, 16 aa, Homo sapiens
  CDR3 for beta chain variable domain of TCR clone 191930 (TRBV4-3, TRBJ2-1)
CASSPALDRGVNEQFF

SEQ ID NO: 383861 - protein, 12 aa, Homo sapiens
  CDR3 for alpha chain variable domain of TCR clone 191931 (TRAV26-1, TRAJ17)
CISQSCRQQANF

SEQ ID NO: 383862 - protein, 16 aa, Homo sapiens
  CDR3 for beta chain variable domain of TCR clone 191931 (TRBV28, TRBJ1-4)
CASSSRTGAANEKLIF

SEQ ID NO: 383863 - protein, 15 aa, Homo sapiens
  CDR3 for alpha chain variable domain of TCR clone 191932 (TRAV2, TRAJ9)
CAVSALNTGGFKTIF

SEQ ID NO: 383864 - protein, 14 aa, Homo sapiens
  CDR3 for beta chain variable domain of TCR clone 191932 (TRBV7-2, TRBJ2-7)
CASSSISGFSEQYF

SEQ ID NO: 383865 - protein, 14 aa, Homo sapiens
  CDR3 for alpha chain variable domain of TCR clone 191933 (TRAV16, TRAJ37)
CALDISGNTGKLIF

SEQ ID NO: 383866 - protein, 15 aa, Homo sapiens
  CDR3 for beta chain variable domain of TCR clone 191933 (TRBV7-9, TRBJ1-6)
CASSSATADNSPLHF

SEQ ID NO: 383867 - protein, 16 aa, Homo sapiens
  CDR3 for alpha chain variable domain of TCR clone 191934 (TRAV30, TRAJ24)
CGTEIVDADSWGNFQF

SEQ ID NO: 383868 - protein, 17 aa, Homo sapiens
  CDR3 for beta chain variable domain of TCR clone 191934 (TRBV7-3, TRBJ2-3)
CASSLMKRMRGADTQYF

SEQ ID NO: 383869 - protein, 13 aa, Homo sapiens
  CDR3 for alpha chain variable domain of TCR clone 191935 (TRAV2, TRAJ10)
CAVEAGGGNKLTF

SEQ ID NO: 383870 - protein, 14 aa, Homo sapiens
  CDR3 for beta chain variable domain of TCR clone 191935 (TRBV20-1, TRBJ2-3)
CSAGGRRGTDTQYF

SEQ ID NO: 383871 - protein, 13 aa, Homo sapiens
  CDR3 for alpha chain variable domain of TCR clone 191936 (TRAV23/DV6, TRAJ16)
CAASISDGQKLLF

SEQ ID NO: 383872 - protein, 16 aa, Homo sapiens
  CDR3 for beta chain variable domain of TCR clone 191936 (TRBV12-4, TRBJ2-3)
CASSFPSNTNTDTQYF

SEQ ID NO: 383873 - protein, 19 aa, Homo sapiens
  CDR3 for alpha chain variable domain of TCR clone 191937 (TRAV8-4, )
CAGGEDIQNPDPAVHQLRD

SEQ ID NO: 383874 - protein, 15 aa, Homo sapiens
  CDR3 for beta chain variable domain of TCR clone 191937 (TRBV7-2, TRBJ2-1)
CASRKTGSSYNEQFF

SEQ ID NO: 383875 - protein, 17 aa, Homo sapiens
  CDR3 for alpha chain variable domain of TCR clone 191938 (TRAV3, TRAJ6)
CAVSRRTDTGGSHTPTF

SEQ ID NO: 383876 - protein, 18 aa, Homo sapiens
  CDR3 for beta chain variable domain of TCR clone 191938 (TRBV7-2, TRBJ2-3)
CASSLETSRGRKADTQYF

SEQ ID NO: 383877 - protein, 15 aa, Homo sapiens
  CDR3 for alpha chain variable domain of TCR clone 191939 (TRAV20, TRAJ43)
CAVQAGKSSKKEMRF

SEQ ID NO: 383878 - protein, 14 aa, Homo sapiens
  CDR3 for beta chain variable domain of TCR clone 191939 (TRBV27, TRBJ2-1)
CASRHLGGGKEQFF

SEQ ID NO: 383879 - protein, 14 aa, Homo sapiens
  CDR3 for alpha chain variable domain of TCR clone 191940 (TRAV23/DV6, TRAJ4)
CAANLSGGYNKLIF

SEQ ID NO: 383880 - protein, 11 aa, Homo sapiens
  CDR3 for beta chain variable domain of TCR clone 191940 (TRBV7-9, TRBJ2-3)
CASSPTDTQYC

SEQ ID NO: 383881 - protein, 14 aa, Homo sapiens
  CDR3 for alpha chain variable domain of TCR clone 191941 (TRAV16, TRAJ44)
YALSTTGTASKLTF

SEQ ID NO: 383882 - protein, 14 aa, Homo sapiens
  CDR3 for beta chain variable domain of TCR clone 191941 (TRBV20-1, TRBJ2-7)
CSAISRGASYEQYF

SEQ ID NO: 383883 - protein, 11 aa, Homo sapiens
  CDR3 for alpha chain variable domain of TCR clone 191942 (TRAV3, TRAJ49)
CAPITGNQFYF

SEQ ID NO: 383884 - protein, 14 aa, Homo sapiens
  CDR3 for beta chain variable domain of TCR clone 191942 (TRBV13, TRBJ2-5)
CASSLGPRGETQYF

SEQ ID NO: 383885 - protein, 16 aa, Homo sapiens
  CDR3 for alpha chain variable domain of TCR clone 191943 (TRAV30, TRAJ24)
CGTEIVAADSWGKFQF

SEQ ID NO: 383886 - protein, 12 aa, Homo sapiens
  CDR3 for beta chain variable domain of TCR clone 191943 (TRBV11-2, TRBJ2-2)
CASSLGGGELFL

SEQ ID NO: 383887 - protein, 10 aa, Homo sapiens
  CDR3 for alpha chain variable domain of TCR clone 191944 (TRAV1-2, TRAJ31)
CAFFDARLMF

SEQ ID NO: 383888 - protein, 15 aa, Homo sapiens
  CDR3 for beta chain variable domain of TCR clone 191944 (TRBV4-1, TRBJ1-4)
CASSDTGGTNEKLFF

SEQ ID NO: 383889 - protein, 16 aa, Homo sapiens
  CDR3 for alpha chain variable domain of TCR clone 191945 (TRAV14/DV4, TRAJ53)
CAMREGGGGSNYKLTF

SEQ ID NO: 383890 - protein, 14 aa, Homo sapiens
  CDR3 for beta chain variable domain of TCR clone 191945 (TRBV7-3, TRBJ2-1)
CASSLAGGTNEQFF

SEQ ID NO: 383891 - protein, 12 aa, Homo sapiens
  CDR3 for alpha chain variable domain of TCR clone 191946 (TRAV12-2, TRAJ45)
CARGGGADGLTF

SEQ ID NO: 383892 - protein, 13 aa, Homo sapiens
  CDR3 for beta chain variable domain of TCR clone 191946 (TRBV10-3, TRBJ2-1)
CAISEFSGREQFF

SEQ ID NO: 383893 - protein, 15 aa, Homo sapiens
  CDR3 for alpha chain variable domain of TCR clone 191947 (TRAV21, TRAJ24)
CAARSSTDSWGKLQF

SEQ ID NO: 383894 - protein, 13 aa, Homo sapiens
  CDR3 for beta chain variable domain of TCR clone 191947 (TRBV11-2, TRBJ2-5)
CAISSTGEETQYF

SEQ ID NO: 383895 - protein, 15 aa, Homo sapiens
  CDR3 for alpha chain variable domain of TCR clone 191948 (TRAV13-1, TRAJ3)
CAASKLASSASKKIF

SEQ ID NO: 383896 - protein, 16 aa, Homo sapiens
  CDR3 for beta chain variable domain of TCR clone 191948 (TRBV25-1, TRBJ1-5)
CASGAPTVNSNQPQHF

SEQ ID NO: 383897 - protein, 18 aa, Homo sapiens
  CDR3 for alpha chain variable domain of TCR clone 191949 (TRAV12-3, TRAJ52)
CAMSVGGAGGASYGKLTF

SEQ ID NO: 383898 - protein, 15 aa, Homo sapiens
  CDR3 for beta chain variable domain of TCR clone 191949 (TRBV27, TRBJ1-6)
CASSFDRGLGSPLYF

SEQ ID NO: 383899 - protein, 16 aa, Homo sapiens
  CDR3 for alpha chain variable domain of TCR clone 191950 (TRAV16, TRAJ42)
CARQMNYGGSQGNLVF

SEQ ID NO: 383900 - protein, 14 aa, Homo sapiens
  CDR3 for beta chain variable domain of TCR clone 191950 (TRBV20-1, TRBJ2-7)
SAVLAPPSSYEQYF

SEQ ID NO: 383901 - protein, 15 aa, Homo sapiens
  CDR3 for alpha chain variable domain of TCR clone 191951 (TRAV8-3, TRAJ11)
CAVGVLNSGYRTLTF

SEQ ID NO: 383902 - protein, 16 aa, Homo sapiens
  CDR3 for beta chain variable domain of TCR clone 191951 (TRBV7-9, TRBJ1-2)
CASSLGFSSGEDGYTF

SEQ ID NO: 383903 - protein, 15 aa, Homo sapiens
  CDR3 for alpha chain variable domain of TCR clone 191952 (TRAV8-3, TRAJ13)
CAVAPNSGGYQKVTF

SEQ ID NO: 383904 - protein, 15 aa, Homo sapiens
  CDR3 for beta chain variable domain of TCR clone 191952 (TRBV2, TRBJ2-1)
CASSELAGSYNEQFF

SEQ ID NO: 383905 - protein, 14 aa, Homo sapiens
  CDR3 for alpha chain variable domain of TCR clone 191953 (TRAV17, TRAJ49)
SATDARDTGNQFYF

SEQ ID NO: 383906 - protein, 14 aa, Homo sapiens
  CDR3 for beta chain variable domain of TCR clone 191953 (TRBV5-5, TRBJ1-2)
CASSFGQINYGYAF

SEQ ID NO: 383907 - protein, 13 aa, Homo sapiens
  CDR3 for alpha chain variable domain of TCR clone 191954 (TRAV35, TRAJ43)
CAGYPHNNNDMRF

SEQ ID NO: 383908 - protein, 15 aa, Homo sapiens
  CDR3 for beta chain variable domain of TCR clone 191954 (TRBV25-1, TRBJ1-4)
CASSKRIATNEKLFF

SEQ ID NO: 383909 - protein, 14 aa, Homo sapiens
  CDR3 for alpha chain variable domain of TCR clone 191955 (TRAV1-2, TRAJ16)
YAVNRFSDGQRLLF

SEQ ID NO: 383910 - protein, 15 aa, Homo sapiens
  CDR3 for beta chain variable domain of TCR clone 191955 (TRBV12-4, TRBJ2-5)
CASSPPTGLQETQYF

SEQ ID NO: 383911 - protein, 13 aa, Homo sapiens
  CDR3 for alpha chain variable domain of TCR clone 191956 (TRAV26-1, )
CIVSHRVEGFWNK

SEQ ID NO: 383912 - protein, 14 aa, Homo sapiens
  CDR3 for beta chain variable domain of TCR clone 191956 (TRBV20-1, TRBJ2-7)
CSAWTALSSYEQYF

SEQ ID NO: 383913 - protein, 16 aa, Homo sapiens
  CDR3 for alpha chain variable domain of TCR clone 191957 (TRAV23/DV6, TRAJ9)
CAASIGGNTGGFKTIF

SEQ ID NO: 383914 - protein, 13 aa, Homo sapiens
  CDR3 for beta chain variable domain of TCR clone 191957 (TRBV7-9, TRBJ1-2)
CASGLKQNYGDTF

SEQ ID NO: 383915 - protein, 12 aa, Homo sapiens
  CDR3 for alpha chain variable domain of TCR clone 191958 (TRAV2, TRAJ32)
CAVGGATNKLIF

SEQ ID NO: 383916 - protein, 15 aa, Homo sapiens
  CDR3 for beta chain variable domain of TCR clone 191958 (TRBV7-2, TRBJ2-1)
CASSSRTSREDEQLV

SEQ ID NO: 383917 - protein, 14 aa, Homo sapiens
  CDR3 for alpha chain variable domain of TCR clone 191959 (TRAV12-1, TRAJ34)
CVVNLDYNTDKLIF

SEQ ID NO: 383918 - protein, 17 aa, Homo sapiens
  CDR3 for beta chain variable domain of TCR clone 191959 (TRBV7-8, TRBJ2-6)
CASSAGTGGAGANVLTF

SEQ ID NO: 383919 - protein, 14 aa, Homo sapiens
  CDR3 for alpha chain variable domain of TCR clone 191960 (TRAV13-1, TRAJ20)
CAARPGSNDYKLSF

SEQ ID NO: 383920 - protein, 11 aa, Homo sapiens
  CDR3 for beta chain variable domain of TCR clone 191960 (TRBV20-1, TRBJ1-1)
CSSRGHTEAFF

SEQ ID NO: 383921 - protein, 14 aa, Homo sapiens
  CDR3 for alpha chain variable domain of TCR clone 191961 (TRAV1-2, TRAJ29)
CAVRELNSATPLVF

SEQ ID NO: 383922 - protein, 14 aa, Homo sapiens
  CDR3 for beta chain variable domain of TCR clone 191961 (TRBV3-1, TRBJ2-5)
CASSQGPDQETQYF

SEQ ID NO: 383923 - protein, 15 aa, Homo sapiens
  CDR3 for alpha chain variable domain of TCR clone 191962 (TRAV12-1, TRAJ42)
CVVTRGGGSQGNLLL

SEQ ID NO: 383924 - protein, 14 aa, Homo sapiens
  CDR3 for beta chain variable domain of TCR clone 191962 (TRBV11-2, TRBJ2-3)
CASSLGGGANTQYF

SEQ ID NO: 383925 - protein, 14 aa, Homo sapiens
  CDR3 for alpha chain variable domain of TCR clone 191963 (TRAV4, TRAJ26)
CLVGPHNYGQNFVF

SEQ ID NO: 383926 - protein, 13 aa, Homo sapiens
  CDR3 for beta chain variable domain of TCR clone 191963 (TRBV2, TRBJ1-5)
CATAGPGNQTQHF

SEQ ID NO: 383927 - protein, 13 aa, Homo sapiens
  CDR3 for alpha chain variable domain of TCR clone 191964 (TRAV20, TRAJ54)
CAVQAGGAQKLVF

SEQ ID NO: 383928 - protein, 14 aa, Homo sapiens
  CDR3 for beta chain variable domain of TCR clone 191964 (TRBV4-1, TRBJ2-2)
CASSQAVNTGELFV

SEQ ID NO: 383929 - protein, 14 aa, Homo sapiens
  CDR3 for alpha chain variable domain of TCR clone 191965 (TRAV12-2, TRAJ45)
CAVYSGGGADGLTF

SEQ ID NO: 383930 - protein, 14 aa, Homo sapiens
  CDR3 for beta chain variable domain of TCR clone 191965 (TRBV6-5, TRBJ1-2)
CASTRGGGSDGYTL

SEQ ID NO: 383931 - protein, 12 aa, Homo sapiens
  CDR3 for alpha chain variable domain of TCR clone 191966 (TRAV21, TRAJ33)
CAKMDSNYQLIW

SEQ ID NO: 383932 - protein, 15 aa, Homo sapiens
  CDR3 for beta chain variable domain of TCR clone 191966 (TRBV19, TRBJ2-2)
CASSLNRGVTGELFF

SEQ ID NO: 383933 - protein, 13 aa, Homo sapiens
  CDR3 for alpha chain variable domain of TCR clone 191967 (TRAV12-2, TRAJ50)
CAVIVNSYDKVIS

SEQ ID NO: 383934 - protein, 12 aa, Homo sapiens
  CDR3 for beta chain variable domain of TCR clone 191967 (TRBV20-1, TRBJ1-2)
CSAPGFNYGYTF

SEQ ID NO: 383935 - protein, 15 aa, Homo sapiens
  CDR3 for alpha chain variable domain of TCR clone 191968 (TRAV3, TRAJ5)
CAVRDLDTGRRALTF

SEQ ID NO: 383936 - protein, 14 aa, Homo sapiens
  CDR3 for beta chain variable domain of TCR clone 191968 (TRBV25-1, TRBJ1-4)
CASSGGGQPEKRFF

SEQ ID NO: 383937 - protein, 14 aa, Homo sapiens
  CDR3 for alpha chain variable domain of TCR clone 191969 (TRAV1-2, TRAJ16)
CAVNRFSDGQKLLF

SEQ ID NO: 383938 - protein, 13 aa, Homo sapiens
  CDR3 for beta chain variable domain of TCR clone 191969 (TRBV18, TRBJ2-5)
CASSPAGKETQYI

SEQ ID NO: 383939 - protein, 12 aa, Homo sapiens
  CDR3 for alpha chain variable domain of TCR clone 191970 (TRAV12-1, TRAJ20)
CVAHFNDYKLSF

SEQ ID NO: 383940 - protein, 13 aa, Homo sapiens
  CDR3 for beta chain variable domain of TCR clone 191970 (TRBV20-1, TRBJ2-7)
CSATHTSGYEQYF

SEQ ID NO: 383941 - protein, 14 aa, Homo sapiens
  CDR3 for alpha chain variable domain of TCR clone 191971 (TRAV23/DV6, TRAJ22)
CAASVSGSARQLTF

SEQ ID NO: 383942 - protein, 14 aa, Homo sapiens
  CDR3 for beta chain variable domain of TCR clone 191971 (TRBV7-6, TRBJ2-3)
CASSLGTVTDTQYF

SEQ ID NO: 383943 - protein, 11 aa, Homo sapiens
  CDR3 for alpha chain variable domain of TCR clone 191972 (TRAV12-1, TRAJ37)
CVVSTPGKLIF

SEQ ID NO: 383944 - protein, 13 aa, Homo sapiens
  CDR3 for beta chain variable domain of TCR clone 191972 (TRBV12-4, TRBJ1-5)
CASSPDRAQPQHF

SEQ ID NO: 383945 - protein, 14 aa, Homo sapiens
  CDR3 for alpha chain variable domain of TCR clone 191973 (TRAV34, TRAJ22)
CGADTSGSARQLTF

SEQ ID NO: 383946 - protein, 16 aa, Homo sapiens
  CDR3 for beta chain variable domain of TCR clone 191973 (TRBV2, TRBJ2-3)
CQHRGAPRPWTDTQYF

SEQ ID NO: 383947 - protein, 12 aa, Homo sapiens
  CDR3 for alpha chain variable domain of TCR clone 191974 (TRAV21, TRAJ31)
CAVWGNNARLMF

SEQ ID NO: 383948 - protein, 16 aa, Homo sapiens
  CDR3 for beta chain variable domain of TCR clone 191974 (TRBV27, TRBJ2-5)
CANSYGPGGQKETQYF

SEQ ID NO: 383949 - protein, 17 aa, Homo sapiens
  CDR3 for alpha chain variable domain of TCR clone 191975 (TRAV1-2, TRAJ18)
CAVRDMGDRGSTLEAIL

SEQ ID NO: 383950 - protein, 16 aa, Homo sapiens
  CDR3 for beta chain variable domain of TCR clone 191975 (TRBV29-1, TRBJ1-2)
CSVEANRDIANYGYTF

SEQ ID NO: 383951 - protein, 18 aa, Homo sapiens
  CDR3 for alpha chain variable domain of TCR clone 191976 (TRAV13-1, TRAJ52)
CAAGKRSAGGTSYGKLTF

SEQ ID NO: 383952 - protein, 14 aa, Homo sapiens
  CDR3 for beta chain variable domain of TCR clone 191976 (TRBV5-8, TRBJ2-3)
CASSLGQGTDTQYF

SEQ ID NO: 383953 - protein, 14 aa, Homo sapiens
  CDR3 for alpha chain variable domain of TCR clone 191977 (TRAV8-1, TRAJ5)
CAVRTYAGRRALTF

SEQ ID NO: 383954 - protein, 12 aa, Homo sapiens
  CDR3 for beta chain variable domain of TCR clone 191977 (TRBV11-2, TRBJ2-1)
CASSPGNNEQFF

SEQ ID NO: 383955 - protein, 13 aa, Homo sapiens
  CDR3 for alpha chain variable domain of TCR clone 191978 (TRAV23/DV6, TRAJ16)
CAASISDVQKLLF

SEQ ID NO: 383956 - protein, 15 aa, Homo sapiens
  CDR3 for beta chain variable domain of TCR clone 191978 (TRBV4-1, TRBJ1-3)
CASSHPGTSGNTIYF

SEQ ID NO: 383957 - protein, 18 aa, Homo sapiens
  CDR3 for alpha chain variable domain of TCR clone 191979 (TRAV17, TRAJ45)
CATSLDLYSGGGADGLTF

SEQ ID NO: 383958 - protein, 13 aa, Homo sapiens
  CDR3 for beta chain variable domain of TCR clone 191979 (TRBV10-3, TRBJ2-7)
CASKLAVNYEQYV

SEQ ID NO: 383959 - protein, 14 aa, Homo sapiens
  CDR3 for alpha chain variable domain of TCR clone 191980 (TRAV12-1, TRAJ43)
CVVNGRSNNNDMRL

SEQ ID NO: 383960 - protein, 12 aa, Homo sapiens
  CDR3 for beta chain variable domain of TCR clone 191980 (TRBV29-1, TRBJ2-3)
CSVTGGADTQYF

SEQ ID NO: 383961 - protein, 16 aa, Homo sapiens
  CDR3 for alpha chain variable domain of TCR clone 191981 (TRAV1-2, TRAJ6)
CAVRDQGTVGSYIPTF

SEQ ID NO: 383962 - protein, 13 aa, Homo sapiens
  CDR3 for beta chain variable domain of TCR clone 191981 (TRBV28, TRBJ2-7)
CASTPGLAGDQYF

SEQ ID NO: 383963 - protein, 17 aa, Homo sapiens
  CDR3 for alpha chain variable domain of TCR clone 191982 (TRAV26-1, TRAJ37)
CIVRVITVSSNTGKLIF

SEQ ID NO: 383964 - protein, 15 aa, Homo sapiens
  CDR3 for beta chain variable domain of TCR clone 191982 (TRBV10-3, TRBJ2-1)
CAISDVQDRAYEQFF

SEQ ID NO: 383965 - protein, 14 aa, Homo sapiens
  CDR3 for alpha chain variable domain of TCR clone 191983 (TRAV1-1, TRAJ27)
FAVIYNTNAGKSTF

SEQ ID NO: 383966 - protein, 13 aa, Homo sapiens
  CDR3 for beta chain variable domain of TCR clone 191983 (TRBV11-3, TRBJ2-1)
CASSSRRVDEQFF

SEQ ID NO: 383967 - protein, 13 aa, Homo sapiens
  CDR3 for alpha chain variable domain of TCR clone 191984 (TRAV17, TRAJ9)
CATDYTGGFKTIF

SEQ ID NO: 383968 - protein, 14 aa, Homo sapiens
  CDR3 for beta chain variable domain of TCR clone 191984 (TRBV9, TRBJ2-3)
CASSAGGGPDTQYF

SEQ ID NO: 383969 - protein, 11 aa, Homo sapiens
  CDR3 for alpha chain variable domain of TCR clone 191985 (TRAV13-1, TRAJ40)
CAVSGTYKYIF

SEQ ID NO: 383970 - protein, 15 aa, Homo sapiens
  CDR3 for beta chain variable domain of TCR clone 191985 (TRBV19, TRBJ1-5)
CASSIGGNQPSILVM

SEQ ID NO: 383971 - protein, 19 aa, Homo sapiens
  CDR3 for alpha chain variable domain of TCR clone 191986 (TRAV3, TRAJ37)
CAVRDIVGGYPSNTGKLIF

SEQ ID NO: 383972 - protein, 15 aa, Homo sapiens
  CDR3 for beta chain variable domain of TCR clone 191986 (TRBV28, TRBJ2-7)
CASSQLGAGGNEQYF

SEQ ID NO: 383973 - protein, 17 aa, Homo sapiens
  CDR3 for alpha chain variable domain of TCR clone 191987 (TRAV23/DV6, TRAJ3)
CSNHFCYGWSSASKIIF

SEQ ID NO: 383974 - protein, 15 aa, Homo sapiens
  CDR3 for beta chain variable domain of TCR clone 191987 (TRBV19, TRBJ1-6)
CASSTQGAVGSPLLF

SEQ ID NO: 383975 - protein, 16 aa, Homo sapiens
  CDR3 for alpha chain variable domain of TCR clone 191988 (TRAV16, TRAJ52)
CALSAAGGTSYGKLTF

SEQ ID NO: 383976 - protein, 13 aa, Homo sapiens
  CDR3 for beta chain variable domain of TCR clone 191988 (TRBV20-1, TRBJ1-2)
CSATGIQGSGYTF

SEQ ID NO: 383977 - protein, 12 aa, Homo sapiens
  CDR3 for alpha chain variable domain of TCR clone 191989 (TRAV4, TRAJ26)
CLVGDYGQNFVF

SEQ ID NO: 383978 - protein, 14 aa, Homo sapiens
  CDR3 for beta chain variable domain of TCR clone 191989 (TRBV19, TRBJ2-7)
CASSIRLGDHEQYF

SEQ ID NO: 383979 - protein, 13 aa, Homo sapiens
  CDR3 for alpha chain variable domain of TCR clone 191990 (TRAV1-2, TRAJ20)
CAVRDGNDYKLSF

SEQ ID NO: 383980 - protein, 16 aa, Homo sapiens
  CDR3 for beta chain variable domain of TCR clone 191990 (TRBV12-5, TRBJ2-5)
CASGPRTSGNQETQSF

SEQ ID NO: 383981 - protein, 16 aa, Homo sapiens
  CDR3 for alpha chain variable domain of TCR clone 191991 (TRAV13-1, TRAJ45)
CAARGSRKGGAAGLTF

SEQ ID NO: 383982 - protein, 13 aa, Homo sapiens
  CDR3 for beta chain variable domain of TCR clone 191991 (TRBV12-4, TRBJ2-5)
CASRKRGKETQYF

SEQ ID NO: 383983 - protein, 11 aa, Homo sapiens
  CDR3 for alpha chain variable domain of TCR clone 191992 (TRAV13-2, TRAJ20)
CADPNDYKLSF

SEQ ID NO: 383984 - protein, 12 aa, Homo sapiens
  CDR3 for beta chain variable domain of TCR clone 191992 (TRBV5-1, TRBJ2-3)
CASSLAADTQYF

SEQ ID NO: 383985 - protein, 17 aa, Homo sapiens
  CDR3 for alpha chain variable domain of TCR clone 191993 (TRAV26-1, TRAJ22)
CIVRVSFWFCKATDLWI

SEQ ID NO: 383986 - protein, 16 aa, Homo sapiens
  CDR3 for beta chain variable domain of TCR clone 191993 (TRBV24-1, TRBJ2-3)
CATSDPGTGATDTQYF

SEQ ID NO: 383987 - protein, 13 aa, Homo sapiens
  CDR3 for alpha chain variable domain of TCR clone 191994 (TRAV26-2, TRAJ43)
CILRAVNNNDMRF

SEQ ID NO: 383988 - protein, 12 aa, Homo sapiens
  CDR3 for beta chain variable domain of TCR clone 191994 (TRBV20-1, TRBJ2-1)
CSAQYTYNEQFF

SEQ ID NO: 383989 - protein, 14 aa, Homo sapiens
  CDR3 for alpha chain variable domain of TCR clone 191995 (TRAV8-4, TRAJ8)
CAVSVGTGFQKLGF

SEQ ID NO: 383990 - protein, 15 aa, Homo sapiens
  CDR3 for beta chain variable domain of TCR clone 191995 (TRBV2, TRBJ2-3)
CASSGEGTGTDTQYF

SEQ ID NO: 383991 - protein, 17 aa, Homo sapiens
  CDR3 for alpha chain variable domain of TCR clone 191996 (TRAV3, TRAJ42)
CAVRDRDYGGSQGNLIF

SEQ ID NO: 383992 - protein, 14 aa, Homo sapiens
  CDR3 for beta chain variable domain of TCR clone 191996 (TRBV10-3, TRBJ1-2)
CAISAGGRVDGYTF

SEQ ID NO: 383993 - protein, 17 aa, Homo sapiens
  CDR3 for alpha chain variable domain of TCR clone 191997 (TRAV4, TRAJ13)
CLVGVQGSSGGYKKVTF

SEQ ID NO: 383994 - protein, 13 aa, Homo sapiens
  CDR3 for beta chain variable domain of TCR clone 191997 (TRBV10-3, TRBJ2-7)
CASKLAVNYEQYF

SEQ ID NO: 383995 - protein, 14 aa, Homo sapiens
  CDR3 for alpha chain variable domain of TCR clone 191998 (TRAV38-1, TRAJ54)
CAFMSPSGAQKLVF

SEQ ID NO: 383996 - protein, 16 aa, Homo sapiens
  CDR3 for beta chain variable domain of TCR clone 191998 (TRBV28, TRBJ2-1)
CASSLGGSGSYNEQLF

SEQ ID NO: 383997 - protein, 14 aa, Homo sapiens
  CDR3 for alpha chain variable domain of TCR clone 191999 (TRAV3, TRAJ7)
CAVREEEREQQTRF

SEQ ID NO: 383998 - protein, 14 aa, Homo sapiens
  CDR3 for beta chain variable domain of TCR clone 191999 (TRBV7-8, TRBJ2-3)
CASSLEAGTDTQYF

SEQ ID NO: 383999 - protein, 14 aa, Homo sapiens
  CDR3 for alpha chain variable domain of TCR clone 192000 (TRAV1-2, TRAJ16)
CAVNRFSDGQKLLF

SEQ ID NO: 384000 - protein, 13 aa, Homo sapiens
  CDR3 for beta chain variable domain of TCR clone 192000 (TRBV4-1, TRBJ2-2)
CASSQESTGELFF

SEQ ID NO: 384001 - protein, 15 aa, Homo sapiens
  CDR3 for alpha chain variable domain of TCR clone 192001 (TRAV3, TRAJ47)
CAVRDIGEYGNKLVF

SEQ ID NO: 384002 - protein, 15 aa, Homo sapiens
  CDR3 for beta chain variable domain of TCR clone 192001 (TRBV5-1, TRBJ2-1)
CASSLVANSYNEQFF

SEQ ID NO: 384003 - protein, 11 aa, Homo sapiens
  CDR3 for alpha chain variable domain of TCR clone 192002 (TRAV2, TRAJ33)
CAVESNYQLIW

SEQ ID NO: 384004 - protein, 15 aa, Homo sapiens
  CDR3 for beta chain variable domain of TCR clone 192002 (TRBV2, TRBJ1-2)
CASSESRTVNYGYTF

SEQ ID NO: 384005 - protein, 13 aa, Homo sapiens
  CDR3 for alpha chain variable domain of TCR clone 192003 (TRAV21, TRAJ27)
CAARPGNAGKSTF

SEQ ID NO: 384006 - protein, 13 aa, Homo sapiens
  CDR3 for beta chain variable domain of TCR clone 192003 (TRBV12-4, TRBJ2-2)
CASSITGSGELFF

SEQ ID NO: 384007 - protein, 11 aa, Homo sapiens
  CDR3 for alpha chain variable domain of TCR clone 192004 (TRAV3, TRAJ21)
CAVGNFNKFYF

SEQ ID NO: 384008 - protein, 12 aa, Homo sapiens
  CDR3 for beta chain variable domain of TCR clone 192004 (TRBV29-1, TRBJ2-3)
CSVTRGADTQYF

SEQ ID NO: 384009 - protein, 11 aa, Homo sapiens
  CDR3 for alpha chain variable domain of TCR clone 192005 (TRAV1-2, TRAJ20)
CAVSNDYKPSF

SEQ ID NO: 384010 - protein, 15 aa, Homo sapiens
  CDR3 for beta chain variable domain of TCR clone 192005 (TRBV6-5, TRBJ2-1)
CASRRAQLSYNEQFF

SEQ ID NO: 384011 - protein, 13 aa, Homo sapiens
  CDR3 for alpha chain variable domain of TCR clone 192006 (TRAV21, TRAJ57)
CTVIEGGSEKLVF

SEQ ID NO: 384012 - protein, 15 aa, Homo sapiens
  CDR3 for beta chain variable domain of TCR clone 192006 (TRBV10-3, TRBJ2-5)
CAISEFGRGQETQYF

SEQ ID NO: 384013 - protein, 12 aa, Homo sapiens
  CDR3 for alpha chain variable domain of TCR clone 192007 (TRAV1-1, TRAJ8)
CAGGTGFQKLVI

SEQ ID NO: 384014 - protein, 16 aa, Homo sapiens
  CDR3 for beta chain variable domain of TCR clone 192007 (TRBV12-4, TRBJ1-5)
CASSRPVGGSNQPQHF

SEQ ID NO: 384015 - protein, 16 aa, Homo sapiens
  CDR3 for alpha chain variable domain of TCR clone 192008 (TRAV30, TRAJ24)
CGTEIVDADSWGKFQF

SEQ ID NO: 384016 - protein, 18 aa, Homo sapiens
  CDR3 for beta chain variable domain of TCR clone 192008 (TRBV28, TRBJ2-7)
CASSLFFETGAPSSTSGR

SEQ ID NO: 384017 - protein, 12 aa, Homo sapiens
  CDR3 for alpha chain variable domain of TCR clone 192009 (TRAV12-2, TRAJ8)
CAVNTGFQKLVF

SEQ ID NO: 384018 - protein, 16 aa, Homo sapiens
  CDR3 for beta chain variable domain of TCR clone 192009 (TRBV4-1, TRBJ2-3)
CASSQSTSGAEDTQYF

SEQ ID NO: 384019 - protein, 15 aa, Homo sapiens
  CDR3 for alpha chain variable domain of TCR clone 192010 (TRAV3, TRAJ22)
CAVRDRGGSGRQLTF

SEQ ID NO: 384020 - protein, 16 aa, Homo sapiens
  CDR3 for beta chain variable domain of TCR clone 192010 (TRBV5-4, TRBJ2-3)
CASQQPGAGGSDTQYF

SEQ ID NO: 384021 - protein, 11 aa, Homo sapiens
  CDR3 for alpha chain variable domain of TCR clone 192011 (TRAV12-1, TRAJ8)
CVVTGFQKLVF

SEQ ID NO: 384022 - protein, 14 aa, Homo sapiens
  CDR3 for beta chain variable domain of TCR clone 192011 (TRBV19, TRBJ2-1)
CASGKSTQYNEHFF

SEQ ID NO: 384023 - protein, 12 aa, Homo sapiens
  CDR3 for alpha chain variable domain of TCR clone 192012 (TRAV3, TRAJ20)
CAVRDPDYKLSF

SEQ ID NO: 384024 - protein, 14 aa, Homo sapiens
  CDR3 for beta chain variable domain of TCR clone 192012 (TRBV5-7, TRBJ1-1)
CASSLAGDWTEAFF

SEQ ID NO: 384025 - protein, 18 aa, Homo sapiens
  CDR3 for alpha chain variable domain of TCR clone 192013 (TRAV35, TRAJ28)
CAGNNYPLSGAGSYQLTF

SEQ ID NO: 384026 - protein, 12 aa, Homo sapiens
  CDR3 for beta chain variable domain of TCR clone 192013 (TRBV7-9, TRBJ1-1)
CASSLEGTEAFF

SEQ ID NO: 384027 - protein, 13 aa, Homo sapiens
  CDR3 for alpha chain variable domain of TCR clone 192014 (TRAV8-2, TRAJ47)
CVVCEREGNKLVF

SEQ ID NO: 384028 - protein, 15 aa, Homo sapiens
  CDR3 for beta chain variable domain of TCR clone 192014 (TRBV6-3, TRBJ2-7)
CASSSPGTVFYEQYF

SEQ ID NO: 384029 - protein, 16 aa, Homo sapiens
  CDR3 for alpha chain variable domain of TCR clone 192015 (TRAV3, TRAJ6)
CAVRDGMGRRKLHTYI

SEQ ID NO: 384030 - protein, 15 aa, Homo sapiens
  CDR3 for beta chain variable domain of TCR clone 192015 (TRBV9, TRBJ2-1)
GASSLAGSSYNEQFF

SEQ ID NO: 384031 - protein, 12 aa, Homo sapiens
  CDR3 for alpha chain variable domain of TCR clone 192016 (TRAV8-6, TRAJ43)
CAVSHNNNDMRF

SEQ ID NO: 384032 - protein, 19 aa, Homo sapiens
  CDR3 for beta chain variable domain of TCR clone 192016 (TRBV14, TRBJ2-1)
CASSQDQLWEAPEYNEQFF

SEQ ID NO: 384033 - protein, 11 aa, Homo sapiens
  CDR3 for alpha chain variable domain of TCR clone 192017 (TRAV26-2, TRAJ43)
CILRQGRYTIT

SEQ ID NO: 384034 - protein, 16 aa, Homo sapiens
  CDR3 for beta chain variable domain of TCR clone 192017 (TRBV19, TRBJ2-2)
CASRSPGTGATGELFF

SEQ ID NO: 384035 - protein, 13 aa, Homo sapiens
  CDR3 for alpha chain variable domain of TCR clone 192018 (TRAV12-1, TRAJ16)
CVVNGSDGQKLLF

SEQ ID NO: 384036 - protein, 15 aa, Homo sapiens
  CDR3 for beta chain variable domain of TCR clone 192018 (TRBV6-3, TRBJ2-7)
CASSSPGTVFYEQYF

SEQ ID NO: 384037 - protein, 13 aa, Homo sapiens
  CDR3 for alpha chain variable domain of TCR clone 192019 (TRAV35, TRAJ42)
CAGFPGSQGDRIF

SEQ ID NO: 384038 - protein, 14 aa, Homo sapiens
  CDR3 for beta chain variable domain of TCR clone 192019 (TRBV4-1, TRBJ2-2)
CASSQAVNTGELFF

SEQ ID NO: 384039 - protein, 14 aa, Homo sapiens
  CDR3 for alpha chain variable domain of TCR clone 192020 (TRAV2, TRAJ9)
CAVVDRSGGFKTIF

SEQ ID NO: 384040 - protein, 15 aa, Homo sapiens
  CDR3 for beta chain variable domain of TCR clone 192020 (TRBV19, TRBJ2-1)
CASSSPGVPLDEQFF

SEQ ID NO: 384041 - protein, 16 aa, Homo sapiens
  CDR3 for alpha chain variable domain of TCR clone 192021 (TRAV12-3, TRAJ53)
CAMSPGGGGSNYKLTF

SEQ ID NO: 384042 - protein, 18 aa, Homo sapiens
  CDR3 for beta chain variable domain of TCR clone 192021 (TRBV6-5, TRBJ1-1)
CASSYSAPGGTGGTEAFF

SEQ ID NO: 384043 - protein, 13 aa, Homo sapiens
  CDR3 for alpha chain variable domain of TCR clone 192022 (TRAV12-3, TRAJ33)
CATSVNSNYQLIR

SEQ ID NO: 384044 - protein, 16 aa, Homo sapiens
  CDR3 for beta chain variable domain of TCR clone 192022 (TRBV13, TRBJ2-5)
CASSLRTGGSWETQYF

SEQ ID NO: 384045 - protein, 14 aa, Homo sapiens
  CDR3 for alpha chain variable domain of TCR clone 192023 (TRAV12-2, TRAJ13)
CAVKKTGGYQKVTF

SEQ ID NO: 384046 - protein, 15 aa, Homo sapiens
  CDR3 for beta chain variable domain of TCR clone 192023 (TRBV9, TRBJ1-6)
CASSVARTGDSPLHF

SEQ ID NO: 384047 - protein, 13 aa, Homo sapiens
  CDR3 for alpha chain variable domain of TCR clone 192024 (TRAV2, TRAJ21)
CAVEDLNFNKFYF

SEQ ID NO: 384048 - protein, 13 aa, Homo sapiens
  CDR3 for beta chain variable domain of TCR clone 192024 (TRBV11-2, TRBJ2-1)
CASSVGLAGGRFF

SEQ ID NO: 384049 - protein, 16 aa, Homo sapiens
  CDR3 for alpha chain variable domain of TCR clone 192025 (TRAV30, TRAJ24)
CGTEIVDAYSWGKFQF

SEQ ID NO: 384050 - protein, 17 aa, Homo sapiens
  CDR3 for beta chain variable domain of TCR clone 192025 (TRBV20-1, TRBJ2-1)
CSAPPRPAGTRYNEQFF

SEQ ID NO: 384051 - protein, 16 aa, Homo sapiens
  CDR3 for alpha chain variable domain of TCR clone 192026 (TRAV12-2, TRAJ10)
CAVNRVLMGGGNKLTF

SEQ ID NO: 384052 - protein, 15 aa, Homo sapiens
  CDR3 for beta chain variable domain of TCR clone 192026 (TRBV20-1, TRBJ2-7)
CSARDRVSGMDEQYF

SEQ ID NO: 384053 - protein, 16 aa, Homo sapiens
  CDR3 for alpha chain variable domain of TCR clone 192027 (TRAV12-2, TRAJ52)
CAVNNRGGTSYGKLTF

SEQ ID NO: 384054 - protein, 13 aa, Homo sapiens
  CDR3 for beta chain variable domain of TCR clone 192027 (TRBV10-3, TRBJ2-7)
CASKLAVNYEQYF

SEQ ID NO: 384055 - protein, 13 aa, Homo sapiens
  CDR3 for alpha chain variable domain of TCR clone 192028 (TRAV12-2, TRAJ9)
CAVKWAGGFKTIF

SEQ ID NO: 384056 - protein, 13 aa, Homo sapiens
  CDR3 for beta chain variable domain of TCR clone 192028 (TRBV7-2, TRBJ2-2)
CASSLAVTGELFF

SEQ ID NO: 384057 - protein, 14 aa, Homo sapiens
  CDR3 for alpha chain variable domain of TCR clone 192029 (TRAV1-2, TRAJ8)
CAVREDTGFQKLVF

SEQ ID NO: 384058 - protein, 14 aa, Homo sapiens
  CDR3 for beta chain variable domain of TCR clone 192029 (TRBV15, TRBJ1-5)
CATSREQSNQPQHF

SEQ ID NO: 384059 - protein, 14 aa, Homo sapiens
  CDR3 for alpha chain variable domain of TCR clone 192030 (TRAV12-1, TRAJ17)
CVVNYKASGNKLTF

SEQ ID NO: 384060 - protein, 14 aa, Homo sapiens
  CDR3 for beta chain variable domain of TCR clone 192030 (TRBV7-8, TRBJ2-3)
CASSLEAGTDTQYF

SEQ ID NO: 384061 - protein, 13 aa, Homo sapiens
  CDR3 for alpha chain variable domain of TCR clone 192031 (TRAV13-2, TRAJ53)
CAENMGGNYKLTL

SEQ ID NO: 384062 - protein, 13 aa, Homo sapiens
  CDR3 for beta chain variable domain of TCR clone 192031 (TRBV4-1, TRBJ2-2)
CASSQENTGELFF

SEQ ID NO: 384063 - protein, 16 aa, Homo sapiens
  CDR3 for alpha chain variable domain of TCR clone 192032 (TRAV30, TRAJ24)
CGTEVVDADSWGKFQF

SEQ ID NO: 384064 - protein, 14 aa, Homo sapiens
  CDR3 for beta chain variable domain of TCR clone 192032 (TRBV12-5, TRBJ2-5)
CASGARTHQWTQYF

SEQ ID NO: 384065 - protein, 11 aa, Homo sapiens
  CDR3 for alpha chain variable domain of TCR clone 192033 (TRAV12-2, TRAJ49)
CAVTGVNQFYF

SEQ ID NO: 384066 - protein, 14 aa, Homo sapiens
  CDR3 for beta chain variable domain of TCR clone 192033 (TRBV20-1, TRBJ1-1)
CSAQTRIGGTEAFF

SEQ ID NO: 384067 - protein, 11 aa, Homo sapiens
  CDR3 for alpha chain variable domain of TCR clone 192034 (TRAV2, TRAJ33)
FAVDSNYQLIW

SEQ ID NO: 384068 - protein, 14 aa, Homo sapiens
  CDR3 for beta chain variable domain of TCR clone 192034 (TRBV11-2, TRBJ2-3)
CSSSRLARTDTQYF

SEQ ID NO: 384069 - protein, 13 aa, Homo sapiens
  CDR3 for alpha chain variable domain of TCR clone 192035 (TRAV13-1, TRAJ6)
CAARRGGSYIPTF

SEQ ID NO: 384070 - protein, 16 aa, Homo sapiens
  CDR3 for beta chain variable domain of TCR clone 192035 (TRBV20-1, TRBJ1-4)
CSAPGQDLLTNEKLFF

SEQ ID NO: 384071 - protein, 14 aa, Homo sapiens
  CDR3 for alpha chain variable domain of TCR clone 192036 (TRAV2, TRAJ9)
CAVEDRSRGFKTIF

SEQ ID NO: 384072 - protein, 16 aa, Homo sapiens
  CDR3 for beta chain variable domain of TCR clone 192036 (TRBV20-1, TRBJ1-4)
CSAPGQGLLTNEKLFF

SEQ ID NO: 384073 - protein, 12 aa, Homo sapiens
  CDR3 for alpha chain variable domain of TCR clone 192037 (TRAV22, TRAJ22)
CAPGGSARQLTF

SEQ ID NO: 384074 - protein, 14 aa, Homo sapiens
  CDR3 for beta chain variable domain of TCR clone 192037 (TRBV20-1, TRBJ2-7)
CSAKRGRSSYEQYF

SEQ ID NO: 384075 - protein, 14 aa, Homo sapiens
  CDR3 for alpha chain variable domain of TCR clone 192038 (TRAV14/DV4, TRAJ54)
CAMREAPGAQKLVF

SEQ ID NO: 384076 - protein, 13 aa, Homo sapiens
  CDR3 for beta chain variable domain of TCR clone 192038 (TRBV19, TRBJ1-2)
CASSVPGQDGYTF

SEQ ID NO: 384077 - protein, 16 aa, Homo sapiens
  CDR3 for alpha chain variable domain of TCR clone 192039 (TRAV4, TRAJ4)
CLVVPLFSGGYNKLIF

SEQ ID NO: 384078 - protein, 14 aa, Homo sapiens
  CDR3 for beta chain variable domain of TCR clone 192039 (TRBV7-2, TRBJ2-7)
CASRSQGAAYEQYF

SEQ ID NO: 384079 - protein, 14 aa, Homo sapiens
  CDR3 for alpha chain variable domain of TCR clone 192040 (TRAV35, TRAJ50)
CSGHRKTSYDKVIF

SEQ ID NO: 384080 - protein, 13 aa, Homo sapiens
  CDR3 for beta chain variable domain of TCR clone 192040 (TRBV7-7, TRBJ2-3)
CASSLSRADTQDF

SEQ ID NO: 384081 - protein, 14 aa, Homo sapiens
  CDR3 for alpha chain variable domain of TCR clone 192041 (TRAV20, TRAJ53)
CCAGKWGSNYKLTF

SEQ ID NO: 384082 - protein, 12 aa, Homo sapiens
  CDR3 for beta chain variable domain of TCR clone 192041 (TRBV7-6, TRBJ2-5)
CASSLSQETQYF

SEQ ID NO: 384083 - protein, 15 aa, Homo sapiens
  CDR3 for alpha chain variable domain of TCR clone 192042 (TRAV27, TRAJ38)
CAARRNAGNNRKLIW

SEQ ID NO: 384084 - protein, 16 aa, Homo sapiens
  CDR3 for beta chain variable domain of TCR clone 192042 (TRBV12-5, TRBJ2-3)
CASGDRQSQIRSILAQ

SEQ ID NO: 384085 - protein, 12 aa, Homo sapiens
  CDR3 for alpha chain variable domain of TCR clone 192043 (TRAV29/DV5, TRAJ49)
CAATDTGNQFYF

SEQ ID NO: 384086 - protein, 12 aa, Homo sapiens
  CDR3 for beta chain variable domain of TCR clone 192043 (TRBV12-4, TRBJ2-7)
CPSSLGGYEQYF

SEQ ID NO: 384087 - protein, 16 aa, Homo sapiens
  CDR3 for alpha chain variable domain of TCR clone 192044 (TRAV38-1, TRAJ32)
CAFTTGGGGATNKLIF

SEQ ID NO: 384088 - protein, 13 aa, Homo sapiens
  CDR3 for beta chain variable domain of TCR clone 192044 (TRBV20-1, TRBJ2-5)
CSAREAFQETQYF

SEQ ID NO: 384089 - protein, 11 aa, Homo sapiens
  CDR3 for alpha chain variable domain of TCR clone 192045 (TRAV13-2, TRAJ23)
CAESPRGKLIF

SEQ ID NO: 384090 - protein, 11 aa, Homo sapiens
  CDR3 for beta chain variable domain of TCR clone 192045 (TRBV12-4, TRBJ2-3)
CASSSVRGRYF

SEQ ID NO: 384091 - protein, 12 aa, Homo sapiens
  CDR3 for alpha chain variable domain of TCR clone 192046 (TRAV23/DV6, TRAJ31)
CAARRIGARLMS

SEQ ID NO: 384092 - protein, 13 aa, Homo sapiens
  CDR3 for beta chain variable domain of TCR clone 192046 (TRBV28, TRBJ2-7)
CASKAGGVYEQYF

SEQ ID NO: 384093 - protein, 16 aa, Homo sapiens
  CDR3 for alpha chain variable domain of TCR clone 192047 (TRAV26-1, TRAJ23)
CIVRVHPYNQGGKLIF

SEQ ID NO: 384094 - protein, 13 aa, Homo sapiens
  CDR3 for beta chain variable domain of TCR clone 192047 (TRBV20-1, TRBJ2-5)
CSARGDYQEAQYF

SEQ ID NO: 384095 - protein, 15 aa, Homo sapiens
  CDR3 for alpha chain variable domain of TCR clone 192048 (TRAV3, TRAJ22)
CAVRDRGGSSRQLTF

SEQ ID NO: 384096 - protein, 15 aa, Homo sapiens
  CDR3 for beta chain variable domain of TCR clone 192048 (TRBV10-3, TRBJ2-3)
CAISLTSGGTDTQYF

SEQ ID NO: 384097 - protein, 15 aa, Homo sapiens
  CDR3 for alpha chain variable domain of TCR clone 192049 (TRAV21, TRAJ53)
CATWNSRGSNYKLTF

SEQ ID NO: 384098 - protein, 16 aa, Homo sapiens
  CDR3 for beta chain variable domain of TCR clone 192049 (TRBV9, TRBJ2-1)
CASSVGGGGNYNEQFF

SEQ ID NO: 384099 - protein, 13 aa, Homo sapiens
  CDR3 for alpha chain variable domain of TCR clone 192050 (TRAV17, TRAJ9)
CATDYTGGFKTIF

SEQ ID NO: 384100 - protein, 14 aa, Homo sapiens
  CDR3 for beta chain variable domain of TCR clone 192050 (TRBV19, TRBJ2-5)
CASSMKGQQETQYV

SEQ ID NO: 384101 - protein, 14 aa, Homo sapiens
  CDR3 for alpha chain variable domain of TCR clone 192051 (TRAV8-3, TRAJ4)
CAVGAAGGYNKLIF

SEQ ID NO: 384102 - protein, 12 aa, Homo sapiens
  CDR3 for beta chain variable domain of TCR clone 192051 (TRBV5-8, TRBJ2-1)
CASRPGPLAQFF

SEQ ID NO: 384103 - protein, 11 aa, Homo sapiens
  CDR3 for alpha chain variable domain of TCR clone 192052 (TRAV3, TRAJ21)
CAVGNFNKFYF

SEQ ID NO: 384104 - protein, 17 aa, Homo sapiens
  CDR3 for beta chain variable domain of TCR clone 192052 (TRBV15, TRBJ1-4)
CATSRYGTGDPNEKLFF

SEQ ID NO: 384105 - protein, 16 aa, Homo sapiens
  CDR3 for alpha chain variable domain of TCR clone 192053 (TRAV30, TRAJ24)
CGTEIVDADSWGKFQF

SEQ ID NO: 384106 - protein, 13 aa, Homo sapiens
  CDR3 for beta chain variable domain of TCR clone 192053 (TRBV7-2, TRBJ1-4)
CASSLAGLEDLFF

SEQ ID NO: 384107 - protein, 16 aa, Homo sapiens
  CDR3 for alpha chain variable domain of TCR clone 192054 (TRAV12-2, TRAJ45)
CAVIFLSGGGADGLTF

SEQ ID NO: 384108 - protein, 19 aa, Homo sapiens
  CDR3 for beta chain variable domain of TCR clone 192054 (TRBV28, TRBJ2-4)
GASSFQPGGPAHSKNIQYF

SEQ ID NO: 384109 - protein, 13 aa, Homo sapiens
  CDR3 for alpha chain variable domain of TCR clone 192055 (TRAV8-3, TRAJ33)
CAVGGDSNYQLIW

SEQ ID NO: 384110 - protein, 11 aa, Homo sapiens
  CDR3 for beta chain variable domain of TCR clone 192055 (TRBV11-2, TRBJ2-2)
CVSSLPGELFF

SEQ ID NO: 384111 - protein, 14 aa, Homo sapiens
  CDR3 for alpha chain variable domain of TCR clone 192056 (TRAV6, TRAJ6)
CALPTSGGSYIPTF

SEQ ID NO: 384112 - protein, 14 aa, Homo sapiens
  CDR3 for beta chain variable domain of TCR clone 192056 (TRBV19, TRBJ2-1)
CASPTFVLSGEQFF

SEQ ID NO: 384113 - protein, 16 aa, Homo sapiens
  CDR3 for alpha chain variable domain of TCR clone 192057 (TRAV1-1, TRAJ22)
CAVNDALSGSARQLTF

SEQ ID NO: 384114 - protein, 13 aa, Homo sapiens
  CDR3 for beta chain variable domain of TCR clone 192057 (TRBV27, TRBJ1-4)
CASSLMGDEKLFF

SEQ ID NO: 384115 - protein, 14 aa, Homo sapiens
  CDR3 for alpha chain variable domain of TCR clone 192058 (TRAV1-2, TRAJ16)
CAFNRFSDGQKLLF

SEQ ID NO: 384116 - protein, 18 aa, Homo sapiens
  CDR3 for beta chain variable domain of TCR clone 192058 (TRBV7-2, TRBJ1-5)
CASSLIALRTGSNQPQHF

SEQ ID NO: 384117 - protein, 12 aa, Homo sapiens
  CDR3 for alpha chain variable domain of TCR clone 192059 (TRAV12-3, TRAJ17)
CAMTLTGNKLTF

SEQ ID NO: 384118 - protein, 15 aa, Homo sapiens
  CDR3 for beta chain variable domain of TCR clone 192059 (TRBV20-1, TRBJ2-7)
CSARVPAAYFYEQFF

SEQ ID NO: 384119 - protein, 11 aa, Homo sapiens
  CDR3 for alpha chain variable domain of TCR clone 192060 (TRAV23/DV6, TRAJ49)
CAARAGNQFYF

SEQ ID NO: 384120 - protein, 17 aa, Homo sapiens
  CDR3 for beta chain variable domain of TCR clone 192060 (TRBV7-8, TRBJ2-6)
CASSAGTGGAGANVLTF

SEQ ID NO: 384121 - protein, 16 aa, Homo sapiens
  CDR3 for alpha chain variable domain of TCR clone 192061 (TRAV22, TRAJ45)
CAVERGKRGGADGLTF

SEQ ID NO: 384122 - protein, 13 aa, Homo sapiens
  CDR3 for beta chain variable domain of TCR clone 192061 (TRBV12-5, TRBJ2-3)
CASGDRQSDTQYF

SEQ ID NO: 384123 - protein, 16 aa, Homo sapiens
  CDR3 for alpha chain variable domain of TCR clone 192062 (TRAV12-3, TRAJ28)
CAMRANSGAGSYQLTL

SEQ ID NO: 384124 - protein, 15 aa, Homo sapiens
  CDR3 for beta chain variable domain of TCR clone 192062 (TRBV6-3, TRBJ2-7)
CASSSPGTVFYEQYF

SEQ ID NO: 384125 - protein, 14 aa, Homo sapiens
  CDR3 for alpha chain variable domain of TCR clone 192063 (TRAV12-3, TRAJ12)
CAMSRMDSSYKLIF

SEQ ID NO: 384126 - protein, 14 aa, Homo sapiens
  CDR3 for beta chain variable domain of TCR clone 192063 (TRBV20-1, TRBJ1-4)
CSARSGQSNEKLLF

SEQ ID NO: 384127 - protein, 13 aa, Homo sapiens
  CDR3 for alpha chain variable domain of TCR clone 192064 (TRAV20, TRAJ40)
CAVRTSGTYKYIF

SEQ ID NO: 384128 - protein, 15 aa, Homo sapiens
  CDR3 for beta chain variable domain of TCR clone 192064 (TRBV7-9, TRBJ1-4)
CASSARTGGNEKLFF

SEQ ID NO: 384129 - protein, 20 aa, Homo sapiens
  CDR3 for alpha chain variable domain of TCR clone 192065 (TRAV21, TRAJ13)
CAVPRSFWGLPESYLWSLNK

SEQ ID NO: 384130 - protein, 15 aa, Homo sapiens
  CDR3 for beta chain variable domain of TCR clone 192065 (TRBV7-9, TRBJ1-6)
CASSSPGRGNSPLHF

SEQ ID NO: 384131 - protein, 14 aa, Homo sapiens
  CDR3 for alpha chain variable domain of TCR clone 192066 (TRAV13-1, TRAJ44)
CAAKATGTASKLTF

SEQ ID NO: 384132 - protein, 13 aa, Homo sapiens
  CDR3 for beta chain variable domain of TCR clone 192066 (TRBV5-5, TRBJ1-2)
CASSFWRGDDYTF

SEQ ID NO: 384133 - protein, 14 aa, Homo sapiens
  CDR3 for alpha chain variable domain of TCR clone 192067 (TRAV1-2, TRAJ8)
CAVREDTGFQKLVF

SEQ ID NO: 384134 - protein, 16 aa, Homo sapiens
  CDR3 for beta chain variable domain of TCR clone 192067 (TRBV24-1, TRBJ2-3)
RATSDPGTGATDTQYF

SEQ ID NO: 384135 - protein, 14 aa, Homo sapiens
  CDR3 for alpha chain variable domain of TCR clone 192068 (TRAV27, TRAJ17)
CRSTIRAAGNKLTF

SEQ ID NO: 384136 - protein, 13 aa, Homo sapiens
  CDR3 for beta chain variable domain of TCR clone 192068 (TRBV18, TRBJ1-2)
CASSASATEGYTF

SEQ ID NO: 384137 - protein, 18 aa, Homo sapiens
  CDR3 for alpha chain variable domain of TCR clone 192069 (TRAV13-1, TRAJ52)
CAAKNPNAGGTSYGKLTF

SEQ ID NO: 384138 - protein, 13 aa, Homo sapiens
  CDR3 for beta chain variable domain of TCR clone 192069 (TRBV20-1, TRBJ2-7)
CSASPFSSYEQYF

SEQ ID NO: 384139 - protein, 22 aa, Homo sapiens
  CDR3 for alpha chain variable domain of TCR clone 192070 (TRAV26-1, TRAJ30)
CIVRVRTEMTRSSLEKGHDFIF

SEQ ID NO: 384140 - protein, 18 aa, Homo sapiens
  CDR3 for beta chain variable domain of TCR clone 192070 (TRBV4-1, TRBJ1-5)
CASSQDPRGQGLNQPQLF

SEQ ID NO: 384141 - protein, 17 aa, Homo sapiens
  CDR3 for alpha chain variable domain of TCR clone 192071 (TRAV3, TRAJ12)
CAVRDGGRMDSSYKLIF

SEQ ID NO: 384142 - protein, 16 aa, Homo sapiens
  CDR3 for beta chain variable domain of TCR clone 192071 (TRBV4-2, TRBJ2-3)
CASSQELAGDTDTQYF

SEQ ID NO: 384143 - protein, 15 aa, Homo sapiens
  CDR3 for alpha chain variable domain of TCR clone 192072 (TRAV3, TRAJ5)
CAVRDLGTGRRALTF

SEQ ID NO: 384144 - protein, 14 aa, Homo sapiens
  CDR3 for beta chain variable domain of TCR clone 192072 (TRBV7-9, TRBJ2-5)
CASSLDTAQETQYF

SEQ ID NO: 384145 - protein, 14 aa, Homo sapiens
  CDR3 for alpha chain variable domain of TCR clone 192073 (TRAV6, TRAJ37)
CALGSQGNTGKLIF

SEQ ID NO: 384146 - protein, 16 aa, Homo sapiens
  CDR3 for beta chain variable domain of TCR clone 192073 (TRBV12-4, TRBJ2-1)
CASSPQERPSYNEQFF

SEQ ID NO: 384147 - protein, 17 aa, Homo sapiens
  CDR3 for alpha chain variable domain of TCR clone 192074 (TRAV21, TRAJ52)
CCEAYPAGGTSYGKLTF

SEQ ID NO: 384148 - protein, 17 aa, Homo sapiens
  CDR3 for beta chain variable domain of TCR clone 192074 (TRBV13, TRBJ2-3)
CASSLSRVAGGRNTQYF

SEQ ID NO: 384149 - protein, 15 aa, Homo sapiens
  CDR3 for alpha chain variable domain of TCR clone 192075 (TRAV17, TRAJ22)
CATAALLGSARQLTF

SEQ ID NO: 384150 - protein, 13 aa, Homo sapiens
  CDR3 for beta chain variable domain of TCR clone 192075 (TRBV29-1, TRBJ2-3)
CSVVPQGGDSQYF

SEQ ID NO: 384151 - protein, 14 aa, Homo sapiens
  CDR3 for alpha chain variable domain of TCR clone 192076 (TRAV21, TRAJ35)
CAVMPIGFGNVLHC

SEQ ID NO: 384152 - protein, 13 aa, Homo sapiens
  CDR3 for beta chain variable domain of TCR clone 192076 (TRBV20-1, TRBJ2-7)
CSARAGSPYEQYF

SEQ ID NO: 384153 - protein, 12 aa, Homo sapiens
  CDR3 for alpha chain variable domain of TCR clone 192077 (TRAV1-2, TRAJ9)
CAGYTGGFKTNF

SEQ ID NO: 384154 - protein, 15 aa, Homo sapiens
  CDR3 for beta chain variable domain of TCR clone 192077 (TRBV11-2, TRBJ2-1)
CASSPAGQSLNEQFF

SEQ ID NO: 384155 - protein, 14 aa, Homo sapiens
  CDR3 for alpha chain variable domain of TCR clone 192078 (TRAV12-2, TRAJ17)
CVVNIKAAGNKLTF

SEQ ID NO: 384156 - protein, 16 aa, Homo sapiens
  CDR3 for beta chain variable domain of TCR clone 192078 (TRBV20-1, TRBJ2-6)
CSASSQGYDGANVLTF

SEQ ID NO: 384157 - protein, 11 aa, Homo sapiens
  CDR3 for alpha chain variable domain of TCR clone 192079 (TRAV27, TRAJ20)
CAGADDYKPSF

SEQ ID NO: 384158 - protein, 15 aa, Homo sapiens
  CDR3 for beta chain variable domain of TCR clone 192079 (TRBV28, TRBJ1-1)
CASRIKGGLNTEAFF

SEQ ID NO: 384159 - protein, 16 aa, Homo sapiens
  CDR3 for alpha chain variable domain of TCR clone 192080 (TRAV1-2, TRAJ10)
CAVRGVLTGGGNKLTF

SEQ ID NO: 384160 - protein, 12 aa, Homo sapiens
  CDR3 for beta chain variable domain of TCR clone 192080 (TRBV11-2, TRBJ2-1)
CANSPGNNEQFF

SEQ ID NO: 384161 - protein, 12 aa, Homo sapiens
  CDR3 for alpha chain variable domain of TCR clone 192081 (TRAV27, TRAJ9)
CAGESGGFKTIF

SEQ ID NO: 384162 - protein, 17 aa, Homo sapiens
  CDR3 for beta chain variable domain of TCR clone 192081 (TRBV18, TRBJ2-1)
CASSPLAAGAGDNEQFF

SEQ ID NO: 384163 - protein, 16 aa, Homo sapiens
  CDR3 for alpha chain variable domain of TCR clone 192082 (TRAV26-1, TRAJ22)
CIVRVHSSGSARQLTF

SEQ ID NO: 384164 - protein, 12 aa, Homo sapiens
  CDR3 for beta chain variable domain of TCR clone 192082 (TRBV7-2, TRBJ2-5)
CASSLYQETQYF

SEQ ID NO: 384165 - protein, 16 aa, Homo sapiens
  CDR3 for alpha chain variable domain of TCR clone 192083 (TRAV12-3, TRAJ53)
CAMSPGSGGSNYKLTF

SEQ ID NO: 384166 - protein, 16 aa, Homo sapiens
  CDR3 for beta chain variable domain of TCR clone 192083 (TRBV29-1, TRBJ2-5)
SSARTERDPVLRARHA

SEQ ID NO: 384167 - protein, 14 aa, Homo sapiens
  CDR3 for alpha chain variable domain of TCR clone 192084 (TRAV12-2, TRAJ13)
CAVKKTGGYQKVTF

SEQ ID NO: 384168 - protein, 19 aa, Homo sapiens
  CDR3 for beta chain variable domain of TCR clone 192084 (TRBV6-5, TRBJ2-1)
CASRSGGLAGESSYNEQFF

SEQ ID NO: 384169 - protein, 14 aa, Homo sapiens
  CDR3 for alpha chain variable domain of TCR clone 192085 (TRAV12-2, TRAJ53)
CAVKGGGSNYKLTF

SEQ ID NO: 384170 - protein, 14 aa, Homo sapiens
  CDR3 for beta chain variable domain of TCR clone 192085 (TRBV7-7, TRBJ2-2)
CATRQDSDTGGLFF

SEQ ID NO: 384171 - protein, 16 aa, Homo sapiens
  CDR3 for alpha chain variable domain of TCR clone 192086 (TRAV22, TRAJ45)
CAVERGKRGGADGLTF

SEQ ID NO: 384172 - protein, 13 aa, Homo sapiens
  CDR3 for beta chain variable domain of TCR clone 192086 (TRBV27, TRBJ1-1)
CASSLSIGAEAFC

SEQ ID NO: 384173 - protein, 13 aa, Homo sapiens
  CDR3 for alpha chain variable domain of TCR clone 192087 (TRAV8-6, TRAJ49)
CAVITNTGNQFYF

SEQ ID NO: 384174 - protein, 13 aa, Homo sapiens
  CDR3 for beta chain variable domain of TCR clone 192087 (TRBV7-9, TRBJ1-2)
CASSLKQNYGHTF

SEQ ID NO: 384175 - protein, 16 aa, Homo sapiens
  CDR3 for alpha chain variable domain of TCR clone 192088 (TRAV30, TRAJ24)
CGTEIVGADSWGKFQF

SEQ ID NO: 384176 - protein, 16 aa, Homo sapiens
  CDR3 for beta chain variable domain of TCR clone 192088 (TRBV20-1, TRBJ1-4)
CSAPGQGLLTNEKLFF

SEQ ID NO: 384177 - protein, 19 aa, Homo sapiens
  CDR3 for alpha chain variable domain of TCR clone 192089 (TRAV1-2, TRAJ26)
CLLPLCCERPDNYGQNFVF

SEQ ID NO: 384178 - protein, 12 aa, Homo sapiens
  CDR3 for beta chain variable domain of TCR clone 192089 (TRBV7-9, TRBJ2-7)
CATRTDGYEQYF

SEQ ID NO: 384179 - protein, 14 aa, Homo sapiens
  CDR3 for alpha chain variable domain of TCR clone 192090 (TRAV35, TRAJ50)
CPGHRKTSYDKVIF

SEQ ID NO: 384180 - protein, 13 aa, Homo sapiens
  CDR3 for beta chain variable domain of TCR clone 192090 (TRBV7-7, TRBJ2-3)
CASSLSRADTQYF

SEQ ID NO: 384181 - protein, 16 aa, Homo sapiens
  CDR3 for alpha chain variable domain of TCR clone 192091 (TRAV25, TRAJ53)
CAGPKGSGGSNYKLTF

SEQ ID NO: 384182 - protein, 17 aa, Homo sapiens
  CDR3 for beta chain variable domain of TCR clone 192091 (TRBV13, TRBJ2-3)
CASSLSRVAGGRNTQYF

SEQ ID NO: 384183 - protein, 11 aa, Homo sapiens
  CDR3 for alpha chain variable domain of TCR clone 192092 (TRAV6, TRAJ35)
CALGFGNMLHC

SEQ ID NO: 384184 - protein, 15 aa, Homo sapiens
  CDR3 for beta chain variable domain of TCR clone 192092 (TRBV20-1, TRBJ2-7)
CSARDRVSGMDEQYF

SEQ ID NO: 384185 - protein, 12 aa, Homo sapiens
  CDR3 for alpha chain variable domain of TCR clone 192093 (TRAV12-1, TRAJ40)
CVFYSGTYKYII

SEQ ID NO: 384186 - protein, 18 aa, Homo sapiens
  CDR3 for beta chain variable domain of TCR clone 192093 (TRBV12-4, TRBJ2-2)
CASSVVAGTGGRTGELFF

SEQ ID NO: 384187 - protein, 13 aa, Homo sapiens
  CDR3 for alpha chain variable domain of TCR clone 192094 (TRAV12-1, TRAJ35)
CMVRGGFGNVLHC

SEQ ID NO: 384188 - protein, 13 aa, Homo sapiens
  CDR3 for beta chain variable domain of TCR clone 192094 (TRBV19, TRBJ2-1)
CASTNSDVGEQFF

SEQ ID NO: 384189 - protein, 14 aa, Homo sapiens
  CDR3 for alpha chain variable domain of TCR clone 192095 (TRAV2, TRAJ20)
CAVVDGTNDYKLSF

SEQ ID NO: 384190 - protein, 13 aa, Homo sapiens
  CDR3 for beta chain variable domain of TCR clone 192095 (TRBV7-2, TRBJ1-1)
CASSRNTNTEAFF

SEQ ID NO: 384191 - protein, 13 aa, Homo sapiens
  CDR3 for alpha chain variable domain of TCR clone 192096 (TRAV27, TRAJ39)
CAGVNNAGNMLTF

SEQ ID NO: 384192 - protein, 15 aa, Homo sapiens
  CDR3 for beta chain variable domain of TCR clone 192096 (TRBV19, TRBJ2-1)
CASSINREPSHEQFF

SEQ ID NO: 384193 - protein, 14 aa, Homo sapiens
  CDR3 for alpha chain variable domain of TCR clone 192097 (TRAV23/DV6, TRAJ8)
CAASKATGFQKLVF

SEQ ID NO: 384194 - protein, 14 aa, Homo sapiens
  CDR3 for beta chain variable domain of TCR clone 192097 (TRBV12-4, TRBJ1-1)
CASSLGTGGTEAFF

SEQ ID NO: 384195 - protein, 16 aa, Homo sapiens
  CDR3 for alpha chain variable domain of TCR clone 192098 (TRAV16, TRAJ4)
CARSRMFSGCYNKLIF

SEQ ID NO: 384196 - protein, 16 aa, Homo sapiens
  CDR3 for beta chain variable domain of TCR clone 192098 (TRBV24-1, TRBJ2-3)
CATSDPGTGATDTQYF

SEQ ID NO: 384197 - protein, 18 aa, Homo sapiens
  CDR3 for alpha chain variable domain of TCR clone 192099 (TRAV1-1, TRAJ12)
CLLLLRCERGDSSYKLIF

SEQ ID NO: 384198 - protein, 15 aa, Homo sapiens
  CDR3 for beta chain variable domain of TCR clone 192099 (TRBV18, TRBJ2-5)
CARTDRGPRQETQYF

SEQ ID NO: 384199 - protein, 16 aa, Homo sapiens
  CDR3 for alpha chain variable domain of TCR clone 192100 (TRAV30, TRAJ24)
CGTEIVDADSWGKFQF

SEQ ID NO: 384200 - protein, 12 aa, Homo sapiens
  CDR3 for beta chain variable domain of TCR clone 192100 (TRBV11-2, TRBJ2-1)
CASSPGTNEQFF

SEQ ID NO: 384201 - protein, 17 aa, Homo sapiens
  CDR3 for alpha chain variable domain of TCR clone 192101 (TRAV8-3, TRAJ34)
CAIPGKLILGTGTRLQV

SEQ ID NO: 384202 - protein, 15 aa, Homo sapiens
  CDR3 for beta chain variable domain of TCR clone 192101 (TRBV5-7, TRBJ2-1)
CASSRRLAGDNEQFF

SEQ ID NO: 384203 - protein, 17 aa, Homo sapiens
  CDR3 for alpha chain variable domain of TCR clone 192102 (TRAV3, TRAJ12)
CAVRDGGRMDSSYKLIF

SEQ ID NO: 384204 - protein, 16 aa, Homo sapiens
  CDR3 for beta chain variable domain of TCR clone 192102 (TRBV4-3, TRBJ1-6)
CASSQDPGVYNSPLHF

SEQ ID NO: 384205 - protein, 12 aa, Homo sapiens
  CDR3 for alpha chain variable domain of TCR clone 192103 (TRAV21, TRAJ39)
CAADNAGNMLTF

SEQ ID NO: 384206 - protein, 12 aa, Homo sapiens
  CDR3 for beta chain variable domain of TCR clone 192103 (TRBV5-4, TRBJ2-7)
CASSWAGQGENV

SEQ ID NO: 384207 - protein, 14 aa, Homo sapiens
  CDR3 for alpha chain variable domain of TCR clone 192104 (TRAV16, TRAJ31)
CALSGRNNNARLMF

SEQ ID NO: 384208 - protein, 12 aa, Homo sapiens
  CDR3 for beta chain variable domain of TCR clone 192104 (TRBV11-2, TRBJ1-2)
CASSREGGGYTF

SEQ ID NO: 384209 - protein, 15 aa, Homo sapiens
  CDR3 for alpha chain variable domain of TCR clone 192105 (TRAV17, TRAJ54)
CATEKLGQGARKLVF

SEQ ID NO: 384210 - protein, 14 aa, Homo sapiens
  CDR3 for beta chain variable domain of TCR clone 192105 (TRBV7-3, TRBJ1-1)
CQQLRGQMNTEAFF

SEQ ID NO: 384211 - protein, 11 aa, Homo sapiens
  CDR3 for alpha chain variable domain of TCR clone 192106 (TRAV2, TRAJ40)
CASGGYQKVTF

SEQ ID NO: 384212 - protein, 15 aa, Homo sapiens
  CDR3 for beta chain variable domain of TCR clone 192106 (TRBV11-3, TRBJ2-3)
CASLKDGREGDTQYF

SEQ ID NO: 384213 - protein, 16 aa, Homo sapiens
  CDR3 for alpha chain variable domain of TCR clone 192107 (TRAV17, TRAJ9)
CATGEWGGSGGFKTIF

SEQ ID NO: 384214 - protein, 12 aa, Homo sapiens
  CDR3 for beta chain variable domain of TCR clone 192107 (TRBV11-2, TRBJ2-1)
CASSPGNNEQFF

SEQ ID NO: 384215 - protein, 12 aa, Homo sapiens
  CDR3 for alpha chain variable domain of TCR clone 192108 (TRAV21, TRAJ39)
CAADNACNMLTF

SEQ ID NO: 384216 - protein, 13 aa, Homo sapiens
  CDR3 for beta chain variable domain of TCR clone 192108 (TRBV12-4, TRBJ1-1)
CASSPGTGFEAFF

SEQ ID NO: 384217 - protein, 14 aa, Homo sapiens
  CDR3 for alpha chain variable domain of TCR clone 192109 (TRAV12-1, TRAJ27)
CGEHIRTNAGESTF

SEQ ID NO: 384218 - protein, 15 aa, Homo sapiens
  CDR3 for beta chain variable domain of TCR clone 192109 (TRBV19, TRBJ1-1)
CASTSGQIQNTEAFF

SEQ ID NO: 384219 - protein, 17 aa, Homo sapiens
  CDR3 for alpha chain variable domain of TCR clone 192110 (TRAV1-1, TRAJ11)
CAGYSTLTFWKGTMLLV

SEQ ID NO: 384220 - protein, 14 aa, Homo sapiens
  CDR3 for beta chain variable domain of TCR clone 192110 (TRBV12-4, TRBJ1-4)
CQRFSSATNEKLFF

SEQ ID NO: 384221 - protein, 16 aa, Homo sapiens
  CDR3 for alpha chain variable domain of TCR clone 192111 (TRAV30, TRAJ24)
CGTEIVDADSWGKFHF

SEQ ID NO: 384222 - protein, 17 aa, Homo sapiens
  CDR3 for beta chain variable domain of TCR clone 192111 (TRBV5-4, TRBJ2-1)
CASSSAGGRGPYNEQFF

SEQ ID NO: 384223 - protein, 18 aa, Homo sapiens
  CDR3 for alpha chain variable domain of TCR clone 192112 (TRAV21, TRAJ52)
CSVRPSPAGGTSYGKLTF

SEQ ID NO: 384224 - protein, 13 aa, Homo sapiens
  CDR3 for beta chain variable domain of TCR clone 192112 (TRBV29-1, TRBJ2-2)
CSVYREDTGELFF

SEQ ID NO: 384225 - protein, 15 aa, Homo sapiens
  CDR3 for alpha chain variable domain of TCR clone 192113 (TRAV8-4, TRAJ8)
CAVSDLNTGFQKLVF

SEQ ID NO: 384226 - protein, 14 aa, Homo sapiens
  CDR3 for beta chain variable domain of TCR clone 192113 (TRBV7-2, TRBJ2-7)
CASRSQGAAYEQYF

SEQ ID NO: 384227 - protein, 17 aa, Homo sapiens
  CDR3 for alpha chain variable domain of TCR clone 192114 (TRAV21, TRAJ52)
CAVGTNAGGTSYGKLTF

SEQ ID NO: 384228 - protein, 16 aa, Homo sapiens
  CDR3 for beta chain variable domain of TCR clone 192114 (TRBV19, TRBJ1-5)
CASRPGTGGRNQPQHF

SEQ ID NO: 384229 - protein, 12 aa, Homo sapiens
  CDR3 for alpha chain variable domain of TCR clone 192115 (TRAV9-2, TRAJ26)
CALRGYGQNFVF

SEQ ID NO: 384230 - protein, 13 aa, Homo sapiens
  CDR3 for beta chain variable domain of TCR clone 192115 (TRBV27, TRBJ2-1)
CASSSGSYNEQFF

SEQ ID NO: 384231 - protein, 12 aa, Homo sapiens
  CDR3 for alpha chain variable domain of TCR clone 192116 (TRAV12-3, TRAJ41)
CAMSYSGYALNF

SEQ ID NO: 384232 - protein, 14 aa, Homo sapiens
  CDR3 for beta chain variable domain of TCR clone 192116 (TRBV7-3, TRBJ2-1)
CASSLAGGTNEQFF

SEQ ID NO: 384233 - protein, 11 aa, Homo sapiens
  CDR3 for alpha chain variable domain of TCR clone 192117 (TRAV25, TRAJ49)
CAGGTGNQFYF

SEQ ID NO: 384234 - protein, 12 aa, Homo sapiens
  CDR3 for beta chain variable domain of TCR clone 192117 (TRBV6-5, TRBJ2-1)
FASRNDRGQQFF

SEQ ID NO: 384235 - protein, 11 aa, Homo sapiens
  CDR3 for alpha chain variable domain of TCR clone 192118 (TRAV17, TRAJ43)
CATPRSNDMRF

SEQ ID NO: 384236 - protein, 15 aa, Homo sapiens
  CDR3 for beta chain variable domain of TCR clone 192118 (TRBV11-2, TRBJ2-5)
CASSLGTSGLNEQFF

SEQ ID NO: 384237 - protein, 22 aa, Homo sapiens
  CDR3 for alpha chain variable domain of TCR clone 192119 (TRAV12-1, TRAJ12)
CVVTRMDSSYKLILGSGSRLLF

SEQ ID NO: 384238 - protein, 13 aa, Homo sapiens
  CDR3 for beta chain variable domain of TCR clone 192119 (TRBV20-1, TRBJ1-1)
CSARGGGNTEAFF

SEQ ID NO: 384239 - protein, 14 aa, Homo sapiens
  CDR3 for alpha chain variable domain of TCR clone 192120 (TRAV1-2, TRAJ29)
CAVRELTSATPLVF

SEQ ID NO: 384240 - protein, 14 aa, Homo sapiens
  CDR3 for beta chain variable domain of TCR clone 192120 (TRBV7-9, TRBJ2-7)
CASSIGQGAGEQYF

SEQ ID NO: 384241 - protein, 12 aa, Homo sapiens
  CDR3 for alpha chain variable domain of TCR clone 192121 (TRAV8-3, TRAJ41)
CAVGALGYALHF

SEQ ID NO: 384242 - protein, 16 aa, Homo sapiens
  CDR3 for beta chain variable domain of TCR clone 192121 (TRBV7-6, TRBJ2-3)
CASSDSRGEGTDTPYF

SEQ ID NO: 384243 - protein, 14 aa, Homo sapiens
  CDR3 for alpha chain variable domain of TCR clone 192122 (TRAV17, TRAJ15)
CATDAWQAGTALIF

SEQ ID NO: 384244 - protein, 17 aa, Homo sapiens
  CDR3 for beta chain variable domain of TCR clone 192122 (TRBV6-6, TRBJ2-6)
CASSYSMEGAGANDLTF

SEQ ID NO: 384245 - protein, 15 aa, Homo sapiens
  CDR3 for alpha chain variable domain of TCR clone 192123 (TRAV3, TRAJ5)
CAVRDRKTGRRALTF

SEQ ID NO: 384246 - protein, 12 aa, Homo sapiens
  CDR3 for beta chain variable domain of TCR clone 192123 (TRBV7-9, TRBJ2-7)
CASSLEGYEQYF

SEQ ID NO: 384247 - protein, 17 aa, Homo sapiens
  CDR3 for alpha chain variable domain of TCR clone 192124 (TRAV36/DV7, TRAJ52)
CAVAQRAGGTSYGRLTF

SEQ ID NO: 384248 - protein, 15 aa, Homo sapiens
  CDR3 for beta chain variable domain of TCR clone 192124 (TRBV20-1, TRBJ2-7)
CSAESGTSGAYEQYF

SEQ ID NO: 384249 - protein, 15 aa, Homo sapiens
  CDR3 for alpha chain variable domain of TCR clone 192125 (TRAV4, TRAJ39)
CLVGPNNNAANMLTF

SEQ ID NO: 384250 - protein, 13 aa, Homo sapiens
  CDR3 for beta chain variable domain of TCR clone 192125 (TRBV11-2, TRBJ2-5)
CASSSTGEETQYF

SEQ ID NO: 384251 - protein, 16 aa, Homo sapiens
  CDR3 for alpha chain variable domain of TCR clone 192126 (TRAV3, TRAJ37)
CAVRPHGSGNTGKRIF

SEQ ID NO: 384252 - protein, 17 aa, Homo sapiens
  CDR3 for beta chain variable domain of TCR clone 192126 (TRBV20-1, TRBJ2-1)
CSASSSGLAGSYNEQFF

SEQ ID NO: 384253 - protein, 20 aa, Homo sapiens
  CDR3 for alpha chain variable domain of TCR clone 192127 (TRAV25, TRAJ33)
TATQTTDVGTSRGSNYQLIC

SEQ ID NO: 384254 - protein, 14 aa, Homo sapiens
  CDR3 for beta chain variable domain of TCR clone 192127 (TRBV7-2, TRBJ2-5)
CASSTGGELKTQYF

SEQ ID NO: 384255 - protein, 16 aa, Homo sapiens
  CDR3 for alpha chain variable domain of TCR clone 192128 (TRAV3, TRAJ18)
CAVRDGRGSTLGRLYF

SEQ ID NO: 384256 - protein, 14 aa, Homo sapiens
  CDR3 for beta chain variable domain of TCR clone 192128 (TRBV28, TRBJ2-5)
CASRGSSFWETQYF

SEQ ID NO: 384257 - protein, 15 aa, Homo sapiens
  CDR3 for alpha chain variable domain of TCR clone 192129 (TRAV12-2, TRAJ8)
CAVREENTAFQKLVF

SEQ ID NO: 384258 - protein, 15 aa, Homo sapiens
  CDR3 for beta chain variable domain of TCR clone 192129 (TRBV28, TRBJ2-4)
CAAGSGTLLMGIQYF

SEQ ID NO: 384259 - protein, 18 aa, Homo sapiens
  CDR3 for alpha chain variable domain of TCR clone 192130 (TRAV21, TRAJ52)
CAVRPSPAGGTSYGKLTF

SEQ ID NO: 384260 - protein, 17 aa, Homo sapiens
  CDR3 for beta chain variable domain of TCR clone 192130 (TRBV25-1, TRBJ2-1)
CVSSAYGQGRGVYEQFF

SEQ ID NO: 384261 - protein, 13 aa, Homo sapiens
  CDR3 for alpha chain variable domain of TCR clone 192131 (TRAV17, TRAJ26)
CATLDNYGQNFVF

SEQ ID NO: 384262 - protein, 16 aa, Homo sapiens
  CDR3 for beta chain variable domain of TCR clone 192131 (TRBV2, TRBJ2-1)
CASSVGGSLSYNEQFF

SEQ ID NO: 384263 - protein, 17 aa, Homo sapiens
  CDR3 for alpha chain variable domain of TCR clone 192132 (TRAV26-1, TRAJ53)
CIVRVDDSGGSNYKLTF

SEQ ID NO: 384264 - protein, 17 aa, Homo sapiens
  CDR3 for beta chain variable domain of TCR clone 192132 (TRBV11-2, TRBJ2-1)
CASSLYPPGVEYNEQFF

SEQ ID NO: 384265 - protein, 16 aa, Homo sapiens
  CDR3 for alpha chain variable domain of TCR clone 192133 (TRAV8-1, TRAJ39)
CAVNVPSYNADNMLTF

SEQ ID NO: 384266 - protein, 15 aa, Homo sapiens
  CDR3 for beta chain variable domain of TCR clone 192133 (TRBV4-1, TRBJ2-3)
CASRSTRAGTDTQYF

SEQ ID NO: 384267 - protein, 15 aa, Homo sapiens
  CDR3 for alpha chain variable domain of TCR clone 192134 (TRAV17, TRAJ54)
CATEKLGQGAQKLVF

SEQ ID NO: 384268 - protein, 16 aa, Homo sapiens
  CDR3 for beta chain variable domain of TCR clone 192134 (TRBV9, TRBJ1-2)
CASSAEEKVAPYGYTF

SEQ ID NO: 384269 - protein, 11 aa, Homo sapiens
  CDR3 for alpha chain variable domain of TCR clone 192135 (TRAV35, TRAJ30)
CAPGGDGKIIF

SEQ ID NO: 384270 - protein, 13 aa, Homo sapiens
  CDR3 for beta chain variable domain of TCR clone 192135 (TRBV7-6, TRBJ2-1)
CQQLGGGADEQFF

SEQ ID NO: 384271 - protein, 13 aa, Homo sapiens
  CDR3 for alpha chain variable domain of TCR clone 192136 (TRAV12-1, TRAJ3)
CVVNPRGASKIIF

SEQ ID NO: 384272 - protein, 12 aa, Homo sapiens
  CDR3 for beta chain variable domain of TCR clone 192136 (TRBV11-2, TRBJ2-2)
CASSLGGGELFF

SEQ ID NO: 384273 - protein, 17 aa, Homo sapiens
  CDR3 for alpha chain variable domain of TCR clone 192137 (TRAV3, TRAJ6)
CAVRDGPRAGGSYIPTF

SEQ ID NO: 384274 - protein, 16 aa, Homo sapiens
  CDR3 for beta chain variable domain of TCR clone 192137 (TRBV5-1, TRBJ2-7)
CASRPSFSNNPYEQYF

SEQ ID NO: 384275 - protein, 13 aa, Homo sapiens
  CDR3 for alpha chain variable domain of TCR clone 192138 (TRAV17, TRAJ40)
CATDEGGTYKYIF

SEQ ID NO: 384276 - protein, 19 aa, Homo sapiens
  CDR3 for beta chain variable domain of TCR clone 192138 (TRBV2, TRBJ2-2)
CASSQPGLAGGGNTGELFF

SEQ ID NO: 384277 - protein, 11 aa, Homo sapiens
  CDR3 for alpha chain variable domain of TCR clone 192139 (TRAV2, TRAJ13)
CASGCYQKVTF

SEQ ID NO: 384278 - protein, 15 aa, Homo sapiens
  CDR3 for beta chain variable domain of TCR clone 192139 (TRBV20-1, TRBJ1-1)
CSASRGVTGNTEAFF

SEQ ID NO: 384279 - protein, 14 aa, Homo sapiens
  CDR3 for alpha chain variable domain of TCR clone 192140 (TRAV34, TRAJ44)
CGADGTGTASKLTF

SEQ ID NO: 384280 - protein, 15 aa, Homo sapiens
  CDR3 for beta chain variable domain of TCR clone 192140 (TRBV5-1, TRBJ2-1)
CASSPPRAPYNEQSF

SEQ ID NO: 384281 - protein, 12 aa, Homo sapiens
  CDR3 for alpha chain variable domain of TCR clone 192141 (TRAV12-2, TRAJ3)
CAVWSSASTIIF

SEQ ID NO: 384282 - protein, 12 aa, Homo sapiens
  CDR3 for beta chain variable domain of TCR clone 192141 (TRBV11-2, TRBJ2-1)
CASSPGNNEQFF

SEQ ID NO: 384283 - protein, 13 aa, Homo sapiens
  CDR3 for alpha chain variable domain of TCR clone 192142 (TRAV27, TRAJ56)
CAGKPGANSKLTF

SEQ ID NO: 384284 - protein, 14 aa, Homo sapiens
  CDR3 for beta chain variable domain of TCR clone 192142 (TRBV19, TRBJ2-1)
CASPTFVLSGEQFF

SEQ ID NO: 384285 - protein, 15 aa, Homo sapiens
  CDR3 for alpha chain variable domain of TCR clone 192143 (TRAV3, TRAJ22)
CAVRDRGGSARQLTF

SEQ ID NO: 384286 - protein, 14 aa, Homo sapiens
  CDR3 for beta chain variable domain of TCR clone 192143 (TRBV7-2, TRBJ1-5)
CASSPRGGPQPQHF

SEQ ID NO: 384287 - protein, 15 aa, Homo sapiens
  CDR3 for alpha chain variable domain of TCR clone 192144 (TRAV8-6, TRAJ10)
CAVSDQAGGGNKLTF

SEQ ID NO: 384288 - protein, 13 aa, Homo sapiens
  CDR3 for beta chain variable domain of TCR clone 192144 (TRBV10-3, TRBJ2-7)
CASKLAVNYEQYF

SEQ ID NO: 384289 - protein, 18 aa, Homo sapiens
  CDR3 for alpha chain variable domain of TCR clone 192145 (TRAV21, TRAJ52)
CAVRPSPAGGTSYGKLKF

SEQ ID NO: 384290 - protein, 17 aa, Homo sapiens
  CDR3 for beta chain variable domain of TCR clone 192145 (TRBV13, TRBJ2-3)
CASSLSRVAGGRKTQYF

SEQ ID NO: 384291 - protein, 17 aa, Homo sapiens
  CDR3 for alpha chain variable domain of TCR clone 192146 (TRAV3, TRAJ6)
CAVRDGPRAGGSYIPTF

SEQ ID NO: 384292 - protein, 13 aa, Homo sapiens
  CDR3 for beta chain variable domain of TCR clone 192146 (TRBV7-9, TRBJ2-2)
CASSLDPTGELFF

SEQ ID NO: 384293 - protein, 13 aa, Homo sapiens
  CDR3 for alpha chain variable domain of TCR clone 192147 (TRAV17, TRAJ21)
CATDGGNFKKFYF

SEQ ID NO: 384294 - protein, 13 aa, Homo sapiens
  CDR3 for beta chain variable domain of TCR clone 192147 (TRBV11-3, TRBJ1-1)
CASTGSLNTEAFF

SEQ ID NO: 384295 - protein, 14 aa, Homo sapiens
  CDR3 for alpha chain variable domain of TCR clone 192148 (TRAV9-2, TRAJ39)
CALHIYNAGNMLTF

SEQ ID NO: 384296 - protein, 15 aa, Homo sapiens
  CDR3 for beta chain variable domain of TCR clone 192148 (TRBV28, TRBJ1-3)
CASSMGWASGNTIYF

SEQ ID NO: 384297 - protein, 17 aa, Homo sapiens
  CDR3 for alpha chain variable domain of TCR clone 192149 (TRAV4, TRAJ18)
CPVGERSVGSTLGRLYF

SEQ ID NO: 384298 - protein, 16 aa, Homo sapiens
  CDR3 for beta chain variable domain of TCR clone 192149 (TRBV4-2, TRBJ1-1)
CASSPSPGRAAPEAFF

SEQ ID NO: 384299 - protein, 10 aa, Homo sapiens
  CDR3 for alpha chain variable domain of TCR clone 192150 (TRAV13-1, TRAJ7)
LIGWNNRLAF

SEQ ID NO: 384300 - protein, 14 aa, Homo sapiens
  CDR3 for beta chain variable domain of TCR clone 192150 (TRBV25-1, TRBJ1-1)
CASTHLGGNTEAFF

SEQ ID NO: 384301 - protein, 14 aa, Homo sapiens
  CDR3 for alpha chain variable domain of TCR clone 192151 (TRAV12-2, TRAJ13)
CAVKKTGGYQKGTF

SEQ ID NO: 384302 - protein, 17 aa, Homo sapiens
  CDR3 for beta chain variable domain of TCR clone 192151 (TRBV4-1, TRBJ1-4)
CASSQEGPRGVEEKLFF

SEQ ID NO: 384303 - protein, 15 aa, Homo sapiens
  CDR3 for alpha chain variable domain of TCR clone 192152 (TRAV27, TRAJ38)
CAARRNAGNNRQRIW

SEQ ID NO: 384304 - protein, 13 aa, Homo sapiens
  CDR3 for beta chain variable domain of TCR clone 192152 (TRBV12-5, TRBJ2-3)
CASGDRQSDTQYF

SEQ ID NO: 384305 - protein, 11 aa, Homo sapiens
  CDR3 for alpha chain variable domain of TCR clone 192153 (TRAV8-6, TRAJ23)
CAVISGGKLIF

SEQ ID NO: 384306 - protein, 14 aa, Homo sapiens
  CDR3 for beta chain variable domain of TCR clone 192153 (TRBV12-5, TRBJ2-5)
CASGSRTPQETQYF

SEQ ID NO: 384307 - protein, 10 aa, Homo sapiens
  CDR3 for alpha chain variable domain of TCR clone 192154 (TRAV23/DV6, TRAJ57)
CAASSTLSQD

SEQ ID NO: 384308 - protein, 14 aa, Homo sapiens
  CDR3 for beta chain variable domain of TCR clone 192154 (TRBV25-1, TRBJ1-1)
CASTHLGGNAEAFF

SEQ ID NO: 384309 - protein, 20 aa, Homo sapiens
  CDR3 for alpha chain variable domain of TCR clone 192155 (TRAV1-2, TRAJ34)
LLKELQMKDSASPNTDKLIF

SEQ ID NO: 384310 - protein, 17 aa, Homo sapiens
  CDR3 for beta chain variable domain of TCR clone 192155 (TRBV20-1, TRBJ2-2)
CSASGSGQGGLTGELFF

SEQ ID NO: 384311 - protein, 12 aa, Homo sapiens
  CDR3 for alpha chain variable domain of TCR clone 192156 (TRAV36/DV7, TRAJ54)
CAVVRGAQKLVF

SEQ ID NO: 384312 - protein, 13 aa, Homo sapiens
  CDR3 for beta chain variable domain of TCR clone 192156 (TRBV20-1, TRBJ1-1)
CSARGGGNTEVFF

SEQ ID NO: 384313 - protein, 15 aa, Homo sapiens
  CDR3 for alpha chain variable domain of TCR clone 192157 (TRAV21, TRAJ53)
CATLNSGGSIYKLTF

SEQ ID NO: 384314 - protein, 13 aa, Homo sapiens
  CDR3 for beta chain variable domain of TCR clone 192157 (TRBV7-9, TRBJ2-3)
CASSPGSTDTQYF

SEQ ID NO: 384315 - protein, 14 aa, Homo sapiens
  CDR3 for alpha chain variable domain of TCR clone 192158 (TRAV16, TRAJ57)
CALPTQGGSGKLVL

SEQ ID NO: 384316 - protein, 15 aa, Homo sapiens
  CDR3 for beta chain variable domain of TCR clone 192158 (TRBV28, TRBJ1-3)
CASWGGHLSGNTIYF

SEQ ID NO: 384317 - protein, 14 aa, Homo sapiens
  CDR3 for alpha chain variable domain of TCR clone 192159 (TRAV8-1, TRAJ32)
CAVNARSATNKLIF

SEQ ID NO: 384318 - protein, 14 aa, Homo sapiens
  CDR3 for beta chain variable domain of TCR clone 192159 (TRBV9, TRBJ2-7)
CASSVGVGSYEQYF

SEQ ID NO: 384319 - protein, 12 aa, Homo sapiens
  CDR3 for alpha chain variable domain of TCR clone 192160 (TRAV1-2, TRAJ29)
CAVPSGNTPLVF

SEQ ID NO: 384320 - protein, 13 aa, Homo sapiens
  CDR3 for beta chain variable domain of TCR clone 192160 (TRBV7-6, TRBJ2-1)
CQQLGGGEDEQFF

SEQ ID NO: 384321 - protein, 16 aa, Homo sapiens
  CDR3 for alpha chain variable domain of TCR clone 192161 (TRAV14/DV4, TRAJ54)
CAMREGRIQGAQKLVF

SEQ ID NO: 384322 - protein, 14 aa, Homo sapiens
  CDR3 for beta chain variable domain of TCR clone 192161 (TRBV12-5, TRBJ2-5)
CASGSRTHQETQYF

SEQ ID NO: 384323 - protein, 12 aa, Homo sapiens
  CDR3 for alpha chain variable domain of TCR clone 192162 (TRAV2, TRAJ17)
CCGKAAGNKLTF

SEQ ID NO: 384324 - protein, 12 aa, Homo sapiens
  CDR3 for beta chain variable domain of TCR clone 192162 (TRBV20-1, TRBJ1-1)
CSARHSGTEAFF

SEQ ID NO: 384325 - protein, 13 aa, Homo sapiens
  CDR3 for alpha chain variable domain of TCR clone 192163 (TRAV8-6, TRAJ8)
CAFMNTGFQQLVF

SEQ ID NO: 384326 - protein, 15 aa, Homo sapiens
  CDR3 for beta chain variable domain of TCR clone 192163 (TRBV28, TRBJ2-5)
CASSSGRVIQETQYF

SEQ ID NO: 384327 - protein, 13 aa, Homo sapiens
  CDR3 for alpha chain variable domain of TCR clone 192164 (TRAV13-2, TRAJ13)
CAERIWGYQKVTF

SEQ ID NO: 384328 - protein, 15 aa, Homo sapiens
  CDR3 for beta chain variable domain of TCR clone 192164 (TRBV5-1, TRBJ1-2)
CASSLAGGFNYGYTF

SEQ ID NO: 384329 - protein, 12 aa, Homo sapiens
  CDR3 for alpha chain variable domain of TCR clone 192165 (TRAV13-1, TRAJ36)
WRGGAGANNLFF

SEQ ID NO: 384330 - protein, 16 aa, Homo sapiens
  CDR3 for beta chain variable domain of TCR clone 192165 (TRBV7-9, TRBJ2-5)
CASRREIGTRKETQYF

SEQ ID NO: 384331 - protein, 18 aa, Homo sapiens
  CDR3 for alpha chain variable domain of TCR clone 192166 (TRAV21, TRAJ52)
CAVRPSPAGGTSFGKLTF

SEQ ID NO: 384332 - protein, 15 aa, Homo sapiens
  CDR3 for beta chain variable domain of TCR clone 192166 (TRBV20-1, TRBJ2-7)
CSARDRVSGMDEQYF

SEQ ID NO: 384333 - protein, 18 aa, Homo sapiens
  CDR3 for alpha chain variable domain of TCR clone 192167 (TRAV21, TRAJ52)
CAVRPSPAGGTSYGKLTF

SEQ ID NO: 384334 - protein, 16 aa, Homo sapiens
  CDR3 for beta chain variable domain of TCR clone 192167 (TRBV7-3, TRBJ2-1)
CASSLEGYRSCNEQFF

SEQ ID NO: 384335 - protein, 16 aa, Homo sapiens
  CDR3 for alpha chain variable domain of TCR clone 192168 (TRAV13-1, TRAJ37)
CAASSLGSINTGKLIF

SEQ ID NO: 384336 - protein, 12 aa, Homo sapiens
  CDR3 for beta chain variable domain of TCR clone 192168 (TRBV6-1, TRBJ2-5)
CASSEGRETQYF

SEQ ID NO: 384337 - protein, 15 aa, Homo sapiens
  CDR3 for alpha chain variable domain of TCR clone 192169 (TRAV8-3, TRAJ6)
CSVGPLGGGSYIPTF

SEQ ID NO: 384338 - protein, 14 aa, Homo sapiens
  CDR3 for beta chain variable domain of TCR clone 192169 (TRBV19, TRBJ2-2)
CASSTGQGAGELFF

SEQ ID NO: 384339 - protein, 14 aa, Homo sapiens
  CDR3 for alpha chain variable domain of TCR clone 192170 (TRAV1-2, TRAJ16)
CAVNRVSDGQKLLF

SEQ ID NO: 384340 - protein, 13 aa, Homo sapiens
  CDR3 for beta chain variable domain of TCR clone 192170 (TRBV20-1, TRBJ1-6)
CSAPTGLGSPLHF

SEQ ID NO: 384341 - protein, 11 aa, Homo sapiens
  CDR3 for alpha chain variable domain of TCR clone 192171 (TRAV13-2, TRAJ20)
CADSNDYKLSF

SEQ ID NO: 384342 - protein, 15 aa, Homo sapiens
  CDR3 for beta chain variable domain of TCR clone 192171 (TRBV7-2, TRBJ2-2)
CASSPTGANTGELFF

SEQ ID NO: 384343 - protein, 12 aa, Homo sapiens
  CDR3 for alpha chain variable domain of TCR clone 192172 (TRAV12-3, TRAJ17)
CAMTITGNKLTF

SEQ ID NO: 384344 - protein, 15 aa, Homo sapiens
  CDR3 for beta chain variable domain of TCR clone 192172 (TRBV20-1, TRBJ2-7)
CSARDRVAGMDEQYF

SEQ ID NO: 384345 - protein, 16 aa, Homo sapiens
  CDR3 for alpha chain variable domain of TCR clone 192173 (TRAV27, TRAJ13)
CAGAKSDSGGYQQVTF

SEQ ID NO: 384346 - protein, 15 aa, Homo sapiens
  CDR3 for beta chain variable domain of TCR clone 192173 (TRBV29-1, TRBJ2-1)
CSVGRHGLFYNEQFF

SEQ ID NO: 384347 - protein, 14 aa, Homo sapiens
  CDR3 for alpha chain variable domain of TCR clone 192174 (TRAV13-1, TRAJ35)
CAASKGGFGNVLHC

SEQ ID NO: 384348 - protein, 15 aa, Homo sapiens
  CDR3 for beta chain variable domain of TCR clone 192174 (TRBV3-1, TRBJ2-3)
CASSRTLDSLDTQYF

SEQ ID NO: 384349 - protein, 13 aa, Homo sapiens
  CDR3 for alpha chain variable domain of TCR clone 192175 (TRAV29/DV5, TRAJ47)
CAASAEYGNKLVF

SEQ ID NO: 384350 - protein, 13 aa, Homo sapiens
  CDR3 for beta chain variable domain of TCR clone 192175 (TRBV19, TRBJ2-1)
CATSRGVYNEQFF

SEQ ID NO: 384351 - protein, 16 aa, Homo sapiens
  CDR3 for alpha chain variable domain of TCR clone 192176 (TRAV23/DV6, TRAJ9)
CAASIGGNTGGFKTIF

SEQ ID NO: 384352 - protein, 13 aa, Homo sapiens
  CDR3 for beta chain variable domain of TCR clone 192176 (TRBV6-1, TRBJ1-1)
CASSRQGNTEAFF

SEQ ID NO: 384353 - protein, 15 aa, Homo sapiens
  CDR3 for alpha chain variable domain of TCR clone 192177 (TRAV12-3, TRAJ10)
CASYILTGGGNKRTF

SEQ ID NO: 384354 - protein, 15 aa, Homo sapiens
  CDR3 for beta chain variable domain of TCR clone 192177 (TRBV7-2, TRBJ1-6)
CASSLGPDRGMPLHF

SEQ ID NO: 384355 - protein, 15 aa, Homo sapiens
  CDR3 for alpha chain variable domain of TCR clone 192178 (TRAV12-3, TRAJ42)
CAMSGQGGSQGNLIF

SEQ ID NO: 384356 - protein, 15 aa, Homo sapiens
  CDR3 for beta chain variable domain of TCR clone 192178 (TRBV27, TRBJ2-1)
CASSNGGGSSNEQFF

SEQ ID NO: 384357 - protein, 14 aa, Homo sapiens
  CDR3 for alpha chain variable domain of TCR clone 192179 (TRAV9-2, TRAJ39)
CALYIYNAGNMLTF

SEQ ID NO: 384358 - protein, 13 aa, Homo sapiens
  CDR3 for beta chain variable domain of TCR clone 192179 (TRBV11-3, TRBJ1-1)
CASSRQPNTEAVF

SEQ ID NO: 384359 - protein, 11 aa, Homo sapiens
  CDR3 for alpha chain variable domain of TCR clone 192180 (TRAV12-3, TRAJ43)
CAMSVSNDMRF

SEQ ID NO: 384360 - protein, 15 aa, Homo sapiens
  CDR3 for beta chain variable domain of TCR clone 192180 (TRBV20-1, TRBJ2-7)
CSAVEGLAGGYEQYF

SEQ ID NO: 384361 - protein, 15 aa, Homo sapiens
  CDR3 for alpha chain variable domain of TCR clone 192181 (TRAV17, TRAJ16)
CATARRLSDGQKLLL

SEQ ID NO: 384362 - protein, 15 aa, Homo sapiens
  CDR3 for beta chain variable domain of TCR clone 192181 (TRBV20-1, TRBJ1-1)
CSASRGVTGNTEAFF

SEQ ID NO: 384363 - protein, 16 aa, Homo sapiens
  CDR3 for alpha chain variable domain of TCR clone 192182 (TRAV13-1, TRAJ22)
CAAKGGRSGSARQLTF

SEQ ID NO: 384364 - protein, 15 aa, Homo sapiens
  CDR3 for beta chain variable domain of TCR clone 192182 (TRBV9, TRBJ1-6)
CASSVAVTGDSPLHF

SEQ ID NO: 384365 - protein, 16 aa, Homo sapiens
  CDR3 for alpha chain variable domain of TCR clone 192183 (TRAV8-3, TRAJ8)
CAVPRDGNTGFQKLGF

SEQ ID NO: 384366 - protein, 14 aa, Homo sapiens
  CDR3 for beta chain variable domain of TCR clone 192183 (TRBV4-1, TRBJ2-2)
CASSQAVNTGELLF

SEQ ID NO: 384367 - protein, 12 aa, Homo sapiens
  CDR3 for alpha chain variable domain of TCR clone 192184 (TRAV12-3, TRAJ41)
CAMSYSWYALNF

SEQ ID NO: 384368 - protein, 13 aa, Homo sapiens
  CDR3 for beta chain variable domain of TCR clone 192184 (TRBV7-3, TRBJ2-1)
CASSLDSYNEQFF

SEQ ID NO: 384369 - protein, 15 aa, Homo sapiens
  CDR3 for alpha chain variable domain of TCR clone 192185 (TRAV8-2, TRAJ24)
CVVSDRTDSWGKLPF

SEQ ID NO: 384370 - protein, 11 aa, Homo sapiens
  CDR3 for beta chain variable domain of TCR clone 192185 (TRBV20-1, TRBJ1-2)
CSVQGAGGYTF

SEQ ID NO: 384371 - protein, 14 aa, Homo sapiens
  CDR3 for alpha chain variable domain of TCR clone 192186 (TRAV8-4, TRAJ13)
CAVTLSGGYQKVTF

SEQ ID NO: 384372 - protein, 19 aa, Homo sapiens
  CDR3 for beta chain variable domain of TCR clone 192186 (TRBV2, TRBJ2-2)
CASSQPGLAGGGNTGELFF

SEQ ID NO: 384373 - protein, 14 aa, Homo sapiens
  CDR3 for alpha chain variable domain of TCR clone 192187 (TRAV13-1, TRAJ44)
CAAKATGTASKLTS

SEQ ID NO: 384374 - protein, 14 aa, Homo sapiens
  CDR3 for beta chain variable domain of TCR clone 192187 (TRBV19, TRBJ1-5)
CASGTEVYNQPQHF

SEQ ID NO: 384375 - protein, 15 aa, Homo sapiens
  CDR3 for alpha chain variable domain of TCR clone 192188 (TRAV26-1, TRAJ15)
CIARMANQAGTALIF

SEQ ID NO: 384376 - protein, 15 aa, Homo sapiens
  CDR3 for beta chain variable domain of TCR clone 192188 (TRBV20-1, TRBJ1-1)
CSARKAETSNTEAFF

SEQ ID NO: 384377 - protein, 15 aa, Homo sapiens
  CDR3 for alpha chain variable domain of TCR clone 192189 (TRAV2, TRAJ11)
CAVGGRNAGYSTLTF

SEQ ID NO: 384378 - protein, 14 aa, Homo sapiens
  CDR3 for beta chain variable domain of TCR clone 192189 (TRBV20-1, TRBJ2-1)
CSAQIGGSANEQFF

SEQ ID NO: 384379 - protein, 16 aa, Homo sapiens
  CDR3 for alpha chain variable domain of TCR clone 192190 (TRAV12-3, TRAJ53)
CAMSPGSGGSNYKLTF

SEQ ID NO: 384380 - protein, 14 aa, Homo sapiens
  CDR3 for beta chain variable domain of TCR clone 192190 (TRBV24-1, TRBJ1-1)
CATSIPRGDTEAFF

SEQ ID NO: 384381 - protein, 13 aa, Homo sapiens
  CDR3 for alpha chain variable domain of TCR clone 192191 (TRAV1-2, TRAJ9)
CAALNTGGSKTIF

SEQ ID NO: 384382 - protein, 14 aa, Homo sapiens
  CDR3 for beta chain variable domain of TCR clone 192191 (TRBV4-2, TRBJ2-5)
CASSQDRGRETQYF

SEQ ID NO: 384383 - protein, 16 aa, Homo sapiens
  CDR3 for alpha chain variable domain of TCR clone 192192 (TRAV25, TRAJ24)
CAQRRGKTDSWGKLQF

SEQ ID NO: 384384 - protein, 14 aa, Homo sapiens
  CDR3 for beta chain variable domain of TCR clone 192192 (TRBV6-6, TRBJ1-5)
CASSYGPANQPQHF

SEQ ID NO: 384385 - protein, 14 aa, Homo sapiens
  CDR3 for alpha chain variable domain of TCR clone 192193 (TRAV17, TRAJ22)
CATSPSGSARQLTF

SEQ ID NO: 384386 - protein, 15 aa, Homo sapiens
  CDR3 for beta chain variable domain of TCR clone 192193 (TRBV27, TRBJ2-7)
CASSPSVQGLNEQYF

SEQ ID NO: 384387 - protein, 13 aa, Homo sapiens
  CDR3 for alpha chain variable domain of TCR clone 192194 (TRAV29/DV5, TRAJ31)
CAASRHNNARLMF

SEQ ID NO: 384388 - protein, 12 aa, Homo sapiens
  CDR3 for beta chain variable domain of TCR clone 192194 (TRBV14, TRBJ1-1)
CASSQLKGLAFF

SEQ ID NO: 384389 - protein, 11 aa, Homo sapiens
  CDR3 for alpha chain variable domain of TCR clone 192195 (TRAV3, TRAJ21)
CAVGNFNKFYF

SEQ ID NO: 384390 - protein, 16 aa, Homo sapiens
  CDR3 for beta chain variable domain of TCR clone 192195 (TRBV7-6, TRBJ2-1)
CASSAPGPISYNEQFF

SEQ ID NO: 384391 - protein, 11 aa, Homo sapiens
  CDR3 for alpha chain variable domain of TCR clone 192196 (TRAV21, TRAJ39)
LLVNAGNMLTF

SEQ ID NO: 384392 - protein, 15 aa, Homo sapiens
  CDR3 for beta chain variable domain of TCR clone 192196 (TRBV6-3, TRBJ2-7)
CASSSPGTVFYEQYF

SEQ ID NO: 384393 - protein, 14 aa, Homo sapiens
  CDR3 for alpha chain variable domain of TCR clone 192197 (TRAV13-1, TRAJ8)
CAASEDTGFQKLVF

SEQ ID NO: 384394 - protein, 13 aa, Homo sapiens
  CDR3 for beta chain variable domain of TCR clone 192197 (TRBV19, TRBJ1-5)
CASSTRRNQPQHF

SEQ ID NO: 384395 - protein, 13 aa, Homo sapiens
  CDR3 for alpha chain variable domain of TCR clone 192198 (TRAV8-3, TRAJ40)
CAVGAQYLRNLPI

SEQ ID NO: 384396 - protein, 12 aa, Homo sapiens
  CDR3 for beta chain variable domain of TCR clone 192198 (TRBV11-2, TRBJ2-1)
CASSPGNNEQFF

SEQ ID NO: 384397 - protein, 13 aa, Homo sapiens
  CDR3 for alpha chain variable domain of TCR clone 192199 (TRAV21, TRAJ20)
CAVGLRVDYKLSF

SEQ ID NO: 384398 - protein, 16 aa, Homo sapiens
  CDR3 for beta chain variable domain of TCR clone 192199 (TRBV24-1, TRBJ2-2)
CATSDTGQGGTGELFF

SEQ ID NO: 384399 - protein, 13 aa, Homo sapiens
  CDR3 for alpha chain variable domain of TCR clone 192200 (TRAV27, TRAJ45)
CMSSGGGADGLTF

SEQ ID NO: 384400 - protein, 13 aa, Homo sapiens
  CDR3 for beta chain variable domain of TCR clone 192200 (TRBV10-3, TRBJ2-7)
CASKLAVNYEQYF

SEQ ID NO: 384401 - protein, 16 aa, Homo sapiens
  CDR3 for alpha chain variable domain of TCR clone 192201 (TRAV25, TRAJ24)
CAQRRGTTDSWGKLQF

SEQ ID NO: 384402 - protein, 11 aa, Homo sapiens
  CDR3 for beta chain variable domain of TCR clone 192201 (TRBV12-4, TRBJ2-3)
CASTATDTQYF

SEQ ID NO: 384403 - protein, 14 aa, Homo sapiens
  CDR3 for alpha chain variable domain of TCR clone 192202 (TRAV16, TRAJ15)
CALSFNQAGTALIF

SEQ ID NO: 384404 - protein, 13 aa, Homo sapiens
  CDR3 for beta chain variable domain of TCR clone 192202 (TRBV12-4, TRBJ2-7)
CASSPTETYEQYF

SEQ ID NO: 384405 - protein, 14 aa, Homo sapiens
  CDR3 for alpha chain variable domain of TCR clone 192203 (TRAV23/DV6, TRAJ26)
CAPPCGNCGQNFVF

SEQ ID NO: 384406 - protein, 13 aa, Homo sapiens
  CDR3 for beta chain variable domain of TCR clone 192203 (TRBV10-3, TRBJ2-7)
CAIKKIQGHEQYF

SEQ ID NO: 384407 - protein, 12 aa, Homo sapiens
  CDR3 for alpha chain variable domain of TCR clone 192204 (TRAV8-3, TRAJ26)
CAGDNYGQNFVF

SEQ ID NO: 384408 - protein, 18 aa, Homo sapiens
  CDR3 for beta chain variable domain of TCR clone 192204 (TRBV6-6, TRBJ1-3)
CASSYSKWDSISGNTIYF

SEQ ID NO: 384409 - protein, 14 aa, Homo sapiens
  CDR3 for alpha chain variable domain of TCR clone 192205 (TRAV13-1, TRAJ20)
CAARLGSNDYKLSF

SEQ ID NO: 384410 - protein, 13 aa, Homo sapiens
  CDR3 for beta chain variable domain of TCR clone 192205 (TRBV20-1, TRBJ1-1)
CSAPPGGHTEAFF

SEQ ID NO: 384411 - protein, 16 aa, Homo sapiens
  CDR3 for alpha chain variable domain of TCR clone 192206 (TRAV22, TRAJ45)
CAVARGKRGGADGPTF

SEQ ID NO: 384412 - protein, 13 aa, Homo sapiens
  CDR3 for beta chain variable domain of TCR clone 192206 (TRBV27, TRBJ1-1)
CASSLSIGAEAFF

SEQ ID NO: 384413 - protein, 11 aa, Homo sapiens
  CDR3 for alpha chain variable domain of TCR clone 192207 (TRAV2, TRAJ13)
CASGGYQKVTF

SEQ ID NO: 384414 - protein, 12 aa, Homo sapiens
  CDR3 for beta chain variable domain of TCR clone 192207 (TRBV12-4, TRBJ2-1)
CASSPGRNEQFF

SEQ ID NO: 384415 - protein, 14 aa, Homo sapiens
  CDR3 for alpha chain variable domain of TCR clone 192208 (TRAV20, TRAJ42)
CAVQAGGSQGNVLF

SEQ ID NO: 384416 - protein, 14 aa, Homo sapiens
  CDR3 for beta chain variable domain of TCR clone 192208 (TRBV28, TRBJ1-2)
CASRIQGANYGYTF

SEQ ID NO: 384417 - protein, 14 aa, Homo sapiens
  CDR3 for alpha chain variable domain of TCR clone 192209 (TRAV12-1, TRAJ41)
WVVLNSNSGYALNF

SEQ ID NO: 384418 - protein, 14 aa, Homo sapiens
  CDR3 for beta chain variable domain of TCR clone 192209 (TRBV5-8, TRBJ1-1)
CASSPRTGFSEAFF

SEQ ID NO: 384419 - protein, 14 aa, Homo sapiens
  CDR3 for alpha chain variable domain of TCR clone 192210 (TRAV4, TRAJ9)
CLVGSGTGGFKTIF

SEQ ID NO: 384420 - protein, 14 aa, Homo sapiens
  CDR3 for beta chain variable domain of TCR clone 192210 (TRBV7-9, TRBJ2-4)
CAISLAMGGNIQYF

SEQ ID NO: 384421 - protein, 17 aa, Homo sapiens
  CDR3 for alpha chain variable domain of TCR clone 192211 (TRAV14/DV4, TRAJ4)
YAMREASGRGGYNKLIF

SEQ ID NO: 384422 - protein, 14 aa, Homo sapiens
  CDR3 for beta chain variable domain of TCR clone 192211 (TRBV19, TRBJ2-7)
CASSMGQGAIEQYF

SEQ ID NO: 384423 - protein, 17 aa, Homo sapiens
  CDR3 for alpha chain variable domain of TCR clone 192212 (TRAV1-2, TRAJ8)
CAVRDPDEHTGFQKLVF

SEQ ID NO: 384424 - protein, 16 aa, Homo sapiens
  CDR3 for beta chain variable domain of TCR clone 192212 (TRBV7-9, TRBJ2-2)
CASSGFGGANTGELFF

SEQ ID NO: 384425 - protein, 13 aa, Homo sapiens
  CDR3 for alpha chain variable domain of TCR clone 192213 (TRAV27, TRAJ6)
WSGGTRGSYIPTF

SEQ ID NO: 384426 - protein, 13 aa, Homo sapiens
  CDR3 for beta chain variable domain of TCR clone 192213 (TRBV4-1, TRBJ2-2)
CASSQENTGELFF

SEQ ID NO: 384427 - protein, 12 aa, Homo sapiens
  CDR3 for alpha chain variable domain of TCR clone 192214 (TRAV21, TRAJ33)
CAKMDSNYQLIL

SEQ ID NO: 384428 - protein, 14 aa, Homo sapiens
  CDR3 for beta chain variable domain of TCR clone 192214 (TRBV2, TRBJ2-7)
CASSLTAGGYEQYF

SEQ ID NO: 384429 - protein, 15 aa, Homo sapiens
  CDR3 for alpha chain variable domain of TCR clone 192215 (TRAV20, TRAJ16)
CAVQIRFSDGQKLLF

SEQ ID NO: 384430 - protein, 15 aa, Homo sapiens
  CDR3 for beta chain variable domain of TCR clone 192215 (TRBV24-1, TRBJ2-1)
CATSGPGTLSAEQFF

SEQ ID NO: 384431 - protein, 14 aa, Homo sapiens
  CDR3 for alpha chain variable domain of TCR clone 192216 (TRAV13-1, TRAJ44)
CAAKATGTASTLTF

SEQ ID NO: 384432 - protein, 17 aa, Homo sapiens
  CDR3 for beta chain variable domain of TCR clone 192216 (TRBV7-3, TRBJ2-3)
RASSLMKRMRGADTQYF

SEQ ID NO: 384433 - protein, 14 aa, Homo sapiens
  CDR3 for alpha chain variable domain of TCR clone 192217 (TRAV16, TRAJ33)
CALSAMDSNYQLIW

SEQ ID NO: 384434 - protein, 16 aa, Homo sapiens
  CDR3 for beta chain variable domain of TCR clone 192217 (TRBV25-1, TRBJ2-7)
CASSELTGGGIYEHYF

SEQ ID NO: 384435 - protein, 14 aa, Homo sapiens
  CDR3 for alpha chain variable domain of TCR clone 192218 (TRAV23/DV6, TRAJ39)
CAASIGNAGNMLTF

SEQ ID NO: 384436 - protein, 14 aa, Homo sapiens
  CDR3 for beta chain variable domain of TCR clone 192218 (TRBV7-3, TRBJ1-1)
CARSLKGGNTEAFF

SEQ ID NO: 384437 - protein, 14 aa, Homo sapiens
  CDR3 for alpha chain variable domain of TCR clone 192219 (TRAV17, TRAJ17)
CATDDAAAGNKLTF

SEQ ID NO: 384438 - protein, 16 aa, Homo sapiens
  CDR3 for beta chain variable domain of TCR clone 192219 (TRBV19, TRBJ2-1)
CASSIETGSTYNEQFF

SEQ ID NO: 384439 - protein, 13 aa, Homo sapiens
  CDR3 for alpha chain variable domain of TCR clone 192220 (TRAV3, TRAJ36)
CAVRDTGATNPFF

SEQ ID NO: 384440 - protein, 17 aa, Homo sapiens
  CDR3 for beta chain variable domain of TCR clone 192220 (TRBV24-1, TRBJ2-1)
TSVPPVDPGGFYNEQFF

SEQ ID NO: 384441 - protein, 14 aa, Homo sapiens
  CDR3 for alpha chain variable domain of TCR clone 192221 (TRAV1-2, TRAJ8)
CDVREDTGFQKLVF

SEQ ID NO: 384442 - protein, 12 aa, Homo sapiens
  CDR3 for beta chain variable domain of TCR clone 192221 (TRBV2, TRBJ2-1)
CAYGPPGNEQFF

SEQ ID NO: 384443 - protein, 17 aa, Homo sapiens
  CDR3 for alpha chain variable domain of TCR clone 192222 (TRAV38-1, TRAJ52)
CAFPPTAGGTSYGKLTF

SEQ ID NO: 384444 - protein, 15 aa, Homo sapiens
  CDR3 for beta chain variable domain of TCR clone 192222 (TRBV4-1, TRBJ1-4)
CASSDTGGTNEKLFF

SEQ ID NO: 384445 - protein, 15 aa, Homo sapiens
  CDR3 for alpha chain variable domain of TCR clone 192223 (TRAV21, TRAJ24)
CAARSSTVSWGKLQF

SEQ ID NO: 384446 - protein, 14 aa, Homo sapiens
  CDR3 for beta chain variable domain of TCR clone 192223 (TRBV11-2, TRBJ2-5)
CASSRTGGIETQYF

SEQ ID NO: 384447 - protein, 14 aa, Homo sapiens
  CDR3 for alpha chain variable domain of TCR clone 192224 (TRAV12-2, TRAJ13)
CAVNKTGGYQKVTF

SEQ ID NO: 384448 - protein, 14 aa, Homo sapiens
  CDR3 for beta chain variable domain of TCR clone 192224 (TRBV5-5, TRBJ2-7)
CASSLGQGTYEQYF

SEQ ID NO: 384449 - protein, 12 aa, Homo sapiens
  CDR3 for alpha chain variable domain of TCR clone 192225 (TRAV13-1, TRAJ21)
CAAKEGFNKFYF

SEQ ID NO: 384450 - protein, 18 aa, Homo sapiens
  CDR3 for beta chain variable domain of TCR clone 192225 (TRBV6-6, TRBJ1-3)
CASSYSKWDSISGNTMYF

SEQ ID NO: 384451 - protein, 10 aa, Homo sapiens
  CDR3 for alpha chain variable domain of TCR clone 192226 (TRAV1-2, TRAJ23)
CAGQGGKLIF

SEQ ID NO: 384452 - protein, 14 aa, Homo sapiens
  CDR3 for beta chain variable domain of TCR clone 192226 (TRBV6-1, TRBJ1-3)
CASVQGGGGNSIYF

SEQ ID NO: 384453 - protein, 12 aa, Homo sapiens
  CDR3 for alpha chain variable domain of TCR clone 192227 (TRAV21, TRAJ39)
CAADNAGNMLTF

SEQ ID NO: 384454 - protein, 12 aa, Homo sapiens
  CDR3 for beta chain variable domain of TCR clone 192227 (TRBV5-4, TRBJ2-7)
CASSWAGQGENF

SEQ ID NO: 384455 - protein, 16 aa, Homo sapiens
  CDR3 for alpha chain variable domain of TCR clone 192228 (TRAV30, TRAJ24)
CGTEIVDADSWGKFQF

SEQ ID NO: 384456 - protein, 15 aa, Homo sapiens
  CDR3 for beta chain variable domain of TCR clone 192228 (TRBV7-3, TRBJ2-1)
CASSYSTSAHNEQFF

SEQ ID NO: 384457 - protein, 16 aa, Homo sapiens
  CDR3 for alpha chain variable domain of TCR clone 192229 (TRAV17, TRAJ28)
CATASVSGAGSYQLPF

SEQ ID NO: 384458 - protein, 14 aa, Homo sapiens
  CDR3 for beta chain variable domain of TCR clone 192229 (TRBV19, TRBJ2-1)
CASEVTGARNEQFF

SEQ ID NO: 384459 - protein, 13 aa, Homo sapiens
  CDR3 for alpha chain variable domain of TCR clone 192230 (TRAV12-1, TRAJ39)
CVVNYNAGNMLTF

SEQ ID NO: 384460 - protein, 14 aa, Homo sapiens
  CDR3 for beta chain variable domain of TCR clone 192230 (TRBV27, TRBJ2-3)
CASSPLGTTETQYF

SEQ ID NO: 384461 - protein, 12 aa, Homo sapiens
  CDR3 for alpha chain variable domain of TCR clone 192231 (TRAV1-1, TRAJ33)
CAASDSNYHLIW

SEQ ID NO: 384462 - protein, 18 aa, Homo sapiens
  CDR3 for beta chain variable domain of TCR clone 192231 (TRBV20-1, TRBJ2-2)
CSARVQTARPSGTGELFF

SEQ ID NO: 384463 - protein, 14 aa, Homo sapiens
  CDR3 for alpha chain variable domain of TCR clone 192232 (TRAV13-1, TRAJ20)
CAARPGSNDYKLSF

SEQ ID NO: 384464 - protein, 15 aa, Homo sapiens
  CDR3 for beta chain variable domain of TCR clone 192232 (TRBV4-1, TRBJ2-7)
CASSQHGQGFDEQYF

SEQ ID NO: 384465 - protein, 16 aa, Homo sapiens
  CDR3 for alpha chain variable domain of TCR clone 192233 (TRAV4, TRAJ9)
CLVGDPNRPGGFKTIF

SEQ ID NO: 384466 - protein, 15 aa, Homo sapiens
  CDR3 for beta chain variable domain of TCR clone 192233 (TRBV4-1, TRBJ1-4)
CASSDTGGTNEKLFF

SEQ ID NO: 384467 - protein, 11 aa, Homo sapiens
  CDR3 for alpha chain variable domain of TCR clone 192234 (TRAV2, TRAJ13)
CASGGYQKVTF

SEQ ID NO: 384468 - protein, 17 aa, Homo sapiens
  CDR3 for beta chain variable domain of TCR clone 192234 (TRBV7-3, TRBJ2-3)
CASSLMERMRGADTQYF

SEQ ID NO: 384469 - protein, 17 aa, Homo sapiens
  CDR3 for alpha chain variable domain of TCR clone 192235 (TRAV17, TRAJ7)
CATLGRLAFGKGNQVVV

SEQ ID NO: 384470 - protein, 13 aa, Homo sapiens
  CDR3 for beta chain variable domain of TCR clone 192235 (TRBV12-4, TRBJ2-7)
CASSLQRVREQYF

SEQ ID NO: 384471 - protein, 16 aa, Homo sapiens
  CDR3 for alpha chain variable domain of TCR clone 192236 (TRAV26-1, TRAJ45)
CIVEKYSGGGADGLTF

SEQ ID NO: 384472 - protein, 16 aa, Homo sapiens
  CDR3 for beta chain variable domain of TCR clone 192236 (TRBV7-8, TRBJ2-4)
CASSAERTLAKNIQYF

SEQ ID NO: 384473 - protein, 15 aa, Homo sapiens
  CDR3 for alpha chain variable domain of TCR clone 192237 (TRAV8-3, TRAJ11)
CAVGLLNSGYRTLTF

SEQ ID NO: 384474 - protein, 23 aa, Homo sapiens
  CDR3 for beta chain variable domain of TCR clone 192237 (TRBV7-9, TRBJ1-2)
EAQLEKSRLLSDRFSSGEDGYTF

SEQ ID NO: 384475 - protein, 13 aa, Homo sapiens
  CDR3 for alpha chain variable domain of TCR clone 192238 (TRAV3, TRAJ21)
CAVREPDFNKFYF

SEQ ID NO: 384476 - protein, 17 aa, Homo sapiens
  CDR3 for beta chain variable domain of TCR clone 192238 (TRBV11-2, TRBJ2-3)
CQQLRGASRGAPKTQYF

SEQ ID NO: 384477 - protein, 19 aa, Homo sapiens
  CDR3 for alpha chain variable domain of TCR clone 192239 (TRAV26-1, TRAJ52)
CIVRAHRNAGGTSYGKLRF

SEQ ID NO: 384478 - protein, 15 aa, Homo sapiens
  CDR3 for beta chain variable domain of TCR clone 192239 (TRBV12-4, TRBJ2-5)
CASSPPTGLQETQYF

SEQ ID NO: 384479 - protein, 12 aa, Homo sapiens
  CDR3 for alpha chain variable domain of TCR clone 192240 (TRAV38-2/DV8, TRAJ57)
CAWKGGSEKLVF

SEQ ID NO: 384480 - protein, 13 aa, Homo sapiens
  CDR3 for beta chain variable domain of TCR clone 192240 (TRBV5-1, TRBJ1-5)
FAPAAWPRISQHF

SEQ ID NO: 384481 - protein, 13 aa, Homo sapiens
  CDR3 for alpha chain variable domain of TCR clone 192241 (TRAV29/DV5, TRAJ48)
CAASSFGNEKLTF

SEQ ID NO: 384482 - protein, 14 aa, Homo sapiens
  CDR3 for beta chain variable domain of TCR clone 192241 (TRBV3-1, TRBJ2-2)
RASSQDWVQGELFF

SEQ ID NO: 384483 - protein, 16 aa, Homo sapiens
  CDR3 for alpha chain variable domain of TCR clone 192242 (TRAV26-1, TRAJ37)
CIVRGDGSGNTGKLIF

SEQ ID NO: 384484 - protein, 17 aa, Homo sapiens
  CDR3 for beta chain variable domain of TCR clone 192242 (TRBV4-1, TRBJ2-7)
GASSRDPRGVRGGEQYF

SEQ ID NO: 384485 - protein, 16 aa, Homo sapiens
  CDR3 for alpha chain variable domain of TCR clone 192243 (TRAV30, TRAJ24)
CGTEIVDADSWGKFQF

SEQ ID NO: 384486 - protein, 13 aa, Homo sapiens
  CDR3 for beta chain variable domain of TCR clone 192243 (TRBV20-1, TRBJ2-7)
CSARIPPAYEQYF

SEQ ID NO: 384487 - protein, 16 aa, Homo sapiens
  CDR3 for alpha chain variable domain of TCR clone 192244 (TRAV30, TRAJ24)
CGTEIVDADSLVKFQF

SEQ ID NO: 384488 - protein, 14 aa, Homo sapiens
  CDR3 for beta chain variable domain of TCR clone 192244 (TRBV12-5, TRBJ2-5)
CASGSRTHQETQYF

SEQ ID NO: 384489 - protein, 16 aa, Homo sapiens
  CDR3 for alpha chain variable domain of TCR clone 192245 (TRAV12-3, TRAJ53)
CAMSPGSGGSNYKPTF

SEQ ID NO: 384490 - protein, 17 aa, Homo sapiens
  CDR3 for beta chain variable domain of TCR clone 192245 (TRBV11-2, TRBJ2-1)
CASSLYPPGVEYNGQFF

SEQ ID NO: 384491 - protein, 12 aa, Homo sapiens
  CDR3 for alpha chain variable domain of TCR clone 192246 (TRAV12-2, TRAJ16)
FAVNLDGQKLLF

SEQ ID NO: 384492 - protein, 12 aa, Homo sapiens
  CDR3 for beta chain variable domain of TCR clone 192246 (TRBV5-7, TRBJ2-7)
CASSVQGGEQYF

SEQ ID NO: 384493 - protein, 17 aa, Homo sapiens
  CDR3 for alpha chain variable domain of TCR clone 192247 (TRAV12-3, TRAJ6)
CAMSARGGAGGSYIPTF

SEQ ID NO: 384494 - protein, 12 aa, Homo sapiens
  CDR3 for beta chain variable domain of TCR clone 192247 (TRBV12-4, TRBJ2-3)
FASSTLPDTQYF

SEQ ID NO: 384495 - protein, 18 aa, Homo sapiens
  CDR3 for alpha chain variable domain of TCR clone 192248 (TRAV1-1, TRAJ12)
CLLPLRCERGDSSYKLIF

SEQ ID NO: 384496 - protein, 15 aa, Homo sapiens
  CDR3 for beta chain variable domain of TCR clone 192248 (TRBV18, TRBJ2-5)
CASTDRGPRQETQYF

SEQ ID NO: 384497 - protein, 21 aa, Homo sapiens
  CDR3 for alpha chain variable domain of TCR clone 192249 (TRAV8-3, TRAJ32)
CAVEVVLQTSSSLELALCLLF

SEQ ID NO: 384498 - protein, 15 aa, Homo sapiens
  CDR3 for beta chain variable domain of TCR clone 192249 (TRBV6-3, TRBJ2-7)
CASSSPGTVFYEQYF

SEQ ID NO: 384499 - protein, 17 aa, Homo sapiens
  CDR3 for alpha chain variable domain of TCR clone 192250 (TRAV3, TRAJ38)
CAVRDCLNAGNNRELIW

SEQ ID NO: 384500 - protein, 14 aa, Homo sapiens
  CDR3 for beta chain variable domain of TCR clone 192250 (TRBV5-5, TRBJ1-5)
CASSGQGVDQPQHF

SEQ ID NO: 384501 - protein, 14 aa, Homo sapiens
  CDR3 for alpha chain variable domain of TCR clone 192251 (TRAV3, TRAJ37)
CAVKESGNTGKLIF

SEQ ID NO: 384502 - protein, 18 aa, Homo sapiens
  CDR3 for beta chain variable domain of TCR clone 192251 (TRBV7-9, TRBJ2-3)
CASSLPINGQISTDTQYF

SEQ ID NO: 384503 - protein, 12 aa, Homo sapiens
  CDR3 for alpha chain variable domain of TCR clone 192252 (TRAV21, TRAJ56)
CAVGVNRSKLTF

SEQ ID NO: 384504 - protein, 15 aa, Homo sapiens
  CDR3 for beta chain variable domain of TCR clone 192252 (TRBV20-1, TRBJ2-3)
CSARVEGTYTDTQYF

SEQ ID NO: 384505 - protein, 11 aa, Homo sapiens
  CDR3 for alpha chain variable domain of TCR clone 192253 (TRAV2, TRAJ21)
CAIYNFNKFYF

SEQ ID NO: 384506 - protein, 13 aa, Homo sapiens
  CDR3 for beta chain variable domain of TCR clone 192253 (TRBV27, TRBJ1-1)
CASSLSIGAEAFF

SEQ ID NO: 384507 - protein, 14 aa, Homo sapiens
  CDR3 for alpha chain variable domain of TCR clone 192254 (TRAV23/DV6, TRAJ45)
CAASWGGGADGRTF

SEQ ID NO: 384508 - protein, 15 aa, Homo sapiens
  CDR3 for beta chain variable domain of TCR clone 192254 (TRBV4-2, TRBJ1-2)
CASSRNTGAGYGYTF

SEQ ID NO: 384509 - protein, 11 aa, Homo sapiens
  CDR3 for alpha chain variable domain of TCR clone 192255 (TRAV12-1, TRAJ43)
CVEYDNNDMRF

SEQ ID NO: 384510 - protein, 15 aa, Homo sapiens
  CDR3 for beta chain variable domain of TCR clone 192255 (TRBV18, TRBJ2-5)
CASSPRASEGETQYF

SEQ ID NO: 384511 - protein, 16 aa, Homo sapiens
  CDR3 for alpha chain variable domain of TCR clone 192256 (TRAV26-1, TRAJ33)
CIVPFWGEDSNCQLIW

SEQ ID NO: 384512 - protein, 14 aa, Homo sapiens
  CDR3 for beta chain variable domain of TCR clone 192256 (TRBV6-3, TRBJ1-1)
CASSYHSKNTEAFF

SEQ ID NO: 384513 - protein, 12 aa, Homo sapiens
  CDR3 for alpha chain variable domain of TCR clone 192257 (TRAV35, TRAJ39)
LAPNNAGNMLTF

SEQ ID NO: 384514 - protein, 17 aa, Homo sapiens
  CDR3 for beta chain variable domain of TCR clone 192257 (TRBV18, TRBJ2-1)
CASSKGLSGGADNEQFF

SEQ ID NO: 384515 - protein, 15 aa, Homo sapiens
  CDR3 for alpha chain variable domain of TCR clone 192258 (TRAV13-2, TRAJ58)
CVTAQKENRGSRLTF

SEQ ID NO: 384516 - protein, 14 aa, Homo sapiens
  CDR3 for beta chain variable domain of TCR clone 192258 (TRBV7-2, TRBJ2-3)
CASRRGLAADTQYF

SEQ ID NO: 384517 - protein, 13 aa, Homo sapiens
  CDR3 for alpha chain variable domain of TCR clone 192259 (TRAV27, TRAJ9)
CAGRETGGFKTIF

SEQ ID NO: 384518 - protein, 17 aa, Homo sapiens
  CDR3 for beta chain variable domain of TCR clone 192259 (TRBV20-1, TRBJ2-2)
CSASGSGQGGLTGELFF

SEQ ID NO: 384519 - protein, 11 aa, Homo sapiens
  CDR3 for alpha chain variable domain of TCR clone 192260 (TRAV3, TRAJ21)
CAGGNFNKFYF

SEQ ID NO: 384520 - protein, 13 aa, Homo sapiens
  CDR3 for beta chain variable domain of TCR clone 192260 (TRBV12-5, TRBJ2-3)
CASGDRQSDTQYF

SEQ ID NO: 384521 - protein, 12 aa, Homo sapiens
  CDR3 for alpha chain variable domain of TCR clone 192261 (TRAV2, TRAJ31)
CAVEEGNARLMF

SEQ ID NO: 384522 - protein, 14 aa, Homo sapiens
  CDR3 for beta chain variable domain of TCR clone 192261 (TRBV20-1, TRBJ2-7)
CSAWTALSSYEQYF

SEQ ID NO: 384523 - protein, 13 aa, Homo sapiens
  CDR3 for alpha chain variable domain of TCR clone 192262 (TRAV13-1, TRAJ6)
CAASKGGSYIPTF

SEQ ID NO: 384524 - protein, 14 aa, Homo sapiens
  CDR3 for beta chain variable domain of TCR clone 192262 (TRBV27, TRBJ2-2)
CASRPGVNTGELFF

SEQ ID NO: 384525 - protein, 14 aa, Homo sapiens
  CDR3 for alpha chain variable domain of TCR clone 192263 (TRAV38-2/DV8, TRAJ30)
CAYMDGLGGDKIIF

SEQ ID NO: 384526 - protein, 13 aa, Homo sapiens
  CDR3 for beta chain variable domain of TCR clone 192263 (TRBV7-9, TRBJ1-2)
CASSLKQNYGYTF

SEQ ID NO: 384527 - protein, 12 aa, Homo sapiens
  CDR3 for alpha chain variable domain of TCR clone 192264 (TRAV13-1, TRAJ53)
AASGGSNYKLTF

SEQ ID NO: 384528 - protein, 14 aa, Homo sapiens
  CDR3 for beta chain variable domain of TCR clone 192264 (TRBV6-1, TRBJ1-3)
CASVQGGGGNTIYF

SEQ ID NO: 384529 - protein, 14 aa, Homo sapiens
  CDR3 for alpha chain variable domain of TCR clone 192265 (TRAV2, TRAJ9)
CAVEDRRGGFKTIF

SEQ ID NO: 384530 - protein, 15 aa, Homo sapiens
  CDR3 for beta chain variable domain of TCR clone 192265 (TRBV6-6, TRBJ2-7)
CASSYSYGGSYEQYF

SEQ ID NO: 384531 - protein, 17 aa, Homo sapiens
  CDR3 for alpha chain variable domain of TCR clone 192266 (TRAV38-1, TRAJ45)
CAFMRCYSGGGADGLTF

SEQ ID NO: 384532 - protein, 15 aa, Homo sapiens
  CDR3 for beta chain variable domain of TCR clone 192266 (TRBV7-2, TRBJ2-3)
CASSLVVRGPDTQYF

SEQ ID NO: 384533 - protein, 16 aa, Homo sapiens
  CDR3 for alpha chain variable domain of TCR clone 192267 (TRAV16, TRAJ4)
CALSRTFSGGYNKLIF

SEQ ID NO: 384534 - protein, 15 aa, Homo sapiens
  CDR3 for beta chain variable domain of TCR clone 192267 (TRBV7-9, TRBJ1-4)
CASSRTGGFNEKLFF

SEQ ID NO: 384535 - protein, 18 aa, Homo sapiens
  CDR3 for alpha chain variable domain of TCR clone 192268 (TRAV3, TRAJ32)
CAVRDIRGSGGATNKLIF

SEQ ID NO: 384536 - protein, 15 aa, Homo sapiens
  CDR3 for beta chain variable domain of TCR clone 192268 (TRBV12-4, TRBJ2-2)
CASSLGVRHTGELFF

SEQ ID NO: 384537 - protein, 14 aa, Homo sapiens
  CDR3 for alpha chain variable domain of TCR clone 192269 (TRAV8-3, TRAJ36)
CAVGPITGANTLFF

SEQ ID NO: 384538 - protein, 15 aa, Homo sapiens
  CDR3 for beta chain variable domain of TCR clone 192269 (TRBV4-1, TRBJ2-1)
CASSQDPGNYNEQFF

SEQ ID NO: 384539 - protein, 18 aa, Homo sapiens
  CDR3 for alpha chain variable domain of TCR clone 192270 (TRAV21, TRAJ52)
CAVRPSPAGGTSYGKLTF

SEQ ID NO: 384540 - protein, 16 aa, Homo sapiens
  CDR3 for beta chain variable domain of TCR clone 192270 (TRBV13, TRBJ2-3)
CQQPLQVARGSNTQYF

SEQ ID NO: 384541 - protein, 14 aa, Homo sapiens
  CDR3 for alpha chain variable domain of TCR clone 192271 (TRAV35, TRAJ22)
CAGLRPGSARQLTF

SEQ ID NO: 384542 - protein, 13 aa, Homo sapiens
  CDR3 for beta chain variable domain of TCR clone 192271 (TRBV20-1, TRBJ1-1)
CRARGGGNTEAFF

SEQ ID NO: 384543 - protein, 14 aa, Homo sapiens
  CDR3 for alpha chain variable domain of TCR clone 192272 (TRAV34, TRAJ44)
CGADGTGTASKLTF

SEQ ID NO: 384544 - protein, 15 aa, Homo sapiens
  CDR3 for beta chain variable domain of TCR clone 192272 (TRBV20-1, TRBJ2-7)
CSARDPTEVGHEQYF

SEQ ID NO: 384545 - protein, 14 aa, Homo sapiens
  CDR3 for alpha chain variable domain of TCR clone 192273 (TRAV29/DV5, TRAJ49)
CAASLSNTGNQFYF

SEQ ID NO: 384546 - protein, 15 aa, Homo sapiens
  CDR3 for beta chain variable domain of TCR clone 192273 (TRBV28, TRBJ2-1)
CASSIIAGGRSEQFF

SEQ ID NO: 384547 - protein, 13 aa, Homo sapiens
  CDR3 for alpha chain variable domain of TCR clone 192274 (TRAV13-1, TRAJ33)
CAASRAGNYRLIW

SEQ ID NO: 384548 - protein, 12 aa, Homo sapiens
  CDR3 for beta chain variable domain of TCR clone 192274 (TRBV11-2, TRBJ1-2)
CASSREGDGYTF

SEQ ID NO: 384549 - protein, 11 aa, Homo sapiens
  CDR3 for alpha chain variable domain of TCR clone 192275 (TRAV2, TRAJ20)
CAVLNDYKLSF

SEQ ID NO: 384550 - protein, 15 aa, Homo sapiens
  CDR3 for beta chain variable domain of TCR clone 192275 (TRBV28, TRBJ2-3)
CAPTFRDWSTDTQYF

SEQ ID NO: 384551 - protein, 16 aa, Homo sapiens
  CDR3 for alpha chain variable domain of TCR clone 192276 (TRAV30, TRAJ24)
CGTEIVDADSWGKFQF

SEQ ID NO: 384552 - protein, 14 aa, Homo sapiens
  CDR3 for beta chain variable domain of TCR clone 192276 (TRBV7-3, TRBJ2-2)
CASGSGGYTGELFF

SEQ ID NO: 384553 - protein, 15 aa, Homo sapiens
  CDR3 for alpha chain variable domain of TCR clone 192277 (TRAV4, TRAJ39)
CLVGPNNNAGKMLTL

SEQ ID NO: 384554 - protein, 14 aa, Homo sapiens
  CDR3 for beta chain variable domain of TCR clone 192277 (TRBV19, TRBJ2-7)
CASNFRDTFTGMYF

SEQ ID NO: 384555 - protein, 13 aa, Homo sapiens
  CDR3 for alpha chain variable domain of TCR clone 192278 (TRAV29/DV5, TRAJ58)
CAGEETSGSRLTF

SEQ ID NO: 384556 - protein, 15 aa, Homo sapiens
  CDR3 for beta chain variable domain of TCR clone 192278 (TRBV11-2, TRBJ1-6)
CASTGFGTAVSHLHF

SEQ ID NO: 384557 - protein, 15 aa, Homo sapiens
  CDR3 for alpha chain variable domain of TCR clone 192279 (TRAV3, TRAJ3)
CAVRDRDRSASKIIF

SEQ ID NO: 384558 - protein, 12 aa, Homo sapiens
  CDR3 for beta chain variable domain of TCR clone 192279 (TRBV29-1, TRBJ2-3)
CSVTGGADTQYF

SEQ ID NO: 384559 - protein, 18 aa, Homo sapiens
  CDR3 for alpha chain variable domain of TCR clone 192280 (TRAV29/DV5, TRAJ37)
CSVLLCSEGSGNTGKLIF

SEQ ID NO: 384560 - protein, 14 aa, Homo sapiens
  CDR3 for beta chain variable domain of TCR clone 192280 (TRBV5-1, TRBJ1-1)
CASSLAVGSGDAFF

SEQ ID NO: 384561 - protein, 13 aa, Homo sapiens
  CDR3 for alpha chain variable domain of TCR clone 192281 (TRAV27, TRAJ11)
CAGGGSGYSTLTF

SEQ ID NO: 384562 - protein, 11 aa, Homo sapiens
  CDR3 for beta chain variable domain of TCR clone 192281 (TRBV19, TRBJ1-1)
CASSIGSEAFF

SEQ ID NO: 384563 - protein, 14 aa, Homo sapiens
  CDR3 for alpha chain variable domain of TCR clone 192282 (TRAV1-1, TRAJ23)
CAVSIYNQGGKLIF

SEQ ID NO: 384564 - protein, 15 aa, Homo sapiens
  CDR3 for beta chain variable domain of TCR clone 192282 (TRBV5-8, TRBJ2-2)
CASSWDRGATGELFF

SEQ ID NO: 384565 - protein, 14 aa, Homo sapiens
  CDR3 for alpha chain variable domain of TCR clone 192283 (TRAV30, TRAJ24)
CGTDSTDSWGKLQF

SEQ ID NO: 384566 - protein, 15 aa, Homo sapiens
  CDR3 for beta chain variable domain of TCR clone 192283 (TRBV6-1, TRBJ2-3)
CASSERGGITDTQYF

SEQ ID NO: 384567 - protein, 13 aa, Homo sapiens
  CDR3 for alpha chain variable domain of TCR clone 192284 (TRAV13-1, TRAJ40)
CAAGKGGTYKYIF

SEQ ID NO: 384568 - protein, 13 aa, Homo sapiens
  CDR3 for beta chain variable domain of TCR clone 192284 (TRBV7-6, TRBJ1-2)
CASSLVADYGYTF

SEQ ID NO: 384569 - protein, 15 aa, Homo sapiens
  CDR3 for alpha chain variable domain of TCR clone 192285 (TRAV16, TRAJ16)
CDLQGGGSDGQKLLF

SEQ ID NO: 384570 - protein, 17 aa, Homo sapiens
  CDR3 for beta chain variable domain of TCR clone 192285 (TRBV5-5, TRBJ1-2)
CASSLGSLDGQSEGYTF

SEQ ID NO: 384571 - protein, 18 aa, Homo sapiens
  CDR3 for alpha chain variable domain of TCR clone 192286 (TRAV13-2, TRAJ52)
CAETPLNAGCTSYGKLTF

SEQ ID NO: 384572 - protein, 15 aa, Homo sapiens
  CDR3 for beta chain variable domain of TCR clone 192286 (TRBV7-2, TRBJ2-7)
CASSLKGALTYEQYF

SEQ ID NO: 384573 - protein, 12 aa, Homo sapiens
  CDR3 for alpha chain variable domain of TCR clone 192287 (TRAV13-1, TRAJ21)
CAAKEGFNKFYF

SEQ ID NO: 384574 - protein, 15 aa, Homo sapiens
  CDR3 for beta chain variable domain of TCR clone 192287 (TRBV6-5, TRBJ2-1)
CASSYDAGAGIEQFF

SEQ ID NO: 384575 - protein, 12 aa, Homo sapiens
  CDR3 for alpha chain variable domain of TCR clone 192288 (TRAV26-2, TRAJ21)
CILKGNFNKFYF

SEQ ID NO: 384576 - protein, 13 aa, Homo sapiens
  CDR3 for beta chain variable domain of TCR clone 192288 (TRBV18, TRBJ1-1)
CASSPETKPEAFF

SEQ ID NO: 384577 - protein, 11 aa, Homo sapiens
  CDR3 for alpha chain variable domain of TCR clone 192289 (TRAV1-1, TRAJ23)
CAVRQGGKLIF

SEQ ID NO: 384578 - protein, 15 aa, Homo sapiens
  CDR3 for beta chain variable domain of TCR clone 192289 (TRBV19, TRBJ1-6)
CASSTQGAVDSPLHF

SEQ ID NO: 384579 - protein, 15 aa, Homo sapiens
  CDR3 for alpha chain variable domain of TCR clone 192290 (TRAV2, TRAJ15)
CAVEDRGQAGTALVF

SEQ ID NO: 384580 - protein, 13 aa, Homo sapiens
  CDR3 for beta chain variable domain of TCR clone 192290 (TRBV10-2, TRBJ2-7)
CASGASGGYEQFF

SEQ ID NO: 384581 - protein, 15 aa, Homo sapiens
  CDR3 for alpha chain variable domain of TCR clone 192291 (TRAV2, TRAJ11)
CAVGGRNSGYSTLTF

SEQ ID NO: 384582 - protein, 14 aa, Homo sapiens
  CDR3 for beta chain variable domain of TCR clone 192291 (TRBV4-1, TRBJ2-2)
CASSQAMNTGELFF

SEQ ID NO: 384583 - protein, 12 aa, Homo sapiens
  CDR3 for alpha chain variable domain of TCR clone 192292 (TRAV12-3, TRAJ43)
CAISSNNNDMRF

SEQ ID NO: 384584 - protein, 15 aa, Homo sapiens
  CDR3 for beta chain variable domain of TCR clone 192292 (TRBV27, TRBJ1-4)
CASSPRHGTNEKLFF

SEQ ID NO: 384585 - protein, 14 aa, Homo sapiens
  CDR3 for alpha chain variable domain of TCR clone 192293 (TRAV26-1, TRAJ34)
CIVRVAYNTDKLIF

SEQ ID NO: 384586 - protein, 13 aa, Homo sapiens
  CDR3 for beta chain variable domain of TCR clone 192293 (TRBV4-1, TRBJ2-2)
CASSQENTGELFF

SEQ ID NO: 384587 - protein, 12 aa, Homo sapiens
  CDR3 for alpha chain variable domain of TCR clone 192294 (TRAV13-1, TRAJ33)
CAASSSNYKLIW

SEQ ID NO: 384588 - protein, 13 aa, Homo sapiens
  CDR3 for beta chain variable domain of TCR clone 192294 (TRBV4-2, TRBJ1-1)
CASSQAGNTEAFF

SEQ ID NO: 384589 - protein, 14 aa, Homo sapiens
  CDR3 for alpha chain variable domain of TCR clone 192295 (TRAV12-3, TRAJ10)
SHLPLTGGGNKLTF

SEQ ID NO: 384590 - protein, 13 aa, Homo sapiens
  CDR3 for beta chain variable domain of TCR clone 192295 (TRBV29-1, TRBJ2-5)
CSVEATAQGTQYV

SEQ ID NO: 384591 - protein, 14 aa, Homo sapiens
  CDR3 for alpha chain variable domain of TCR clone 192296 (TRAV2, TRAJ9)
CAVEDRSGGFKTIF

SEQ ID NO: 384592 - protein, 13 aa, Homo sapiens
  CDR3 for beta chain variable domain of TCR clone 192296 (TRBV7-9, TRBJ1-2)
CASSLKQNYGYAF

SEQ ID NO: 384593 - protein, 15 aa, Homo sapiens
  CDR3 for alpha chain variable domain of TCR clone 192297 (TRAV38-1, TRAJ37)
CAFIHGSGNTGKLIS

SEQ ID NO: 384594 - protein, 12 aa, Homo sapiens
  CDR3 for beta chain variable domain of TCR clone 192297 (TRBV7-9, TRBJ2-7)
WASSFGSYEQYF

SEQ ID NO: 384595 - protein, 14 aa, Homo sapiens
  CDR3 for alpha chain variable domain of TCR clone 192298 (TRAV12-2, TRAJ13)
CAVKKNGGYQKVTF

SEQ ID NO: 384596 - protein, 14 aa, Homo sapiens
  CDR3 for beta chain variable domain of TCR clone 192298 (TRBV10-3, TRBJ2-1)
CAISSDLAYNEQFF

SEQ ID NO: 384597 - protein, 15 aa, Homo sapiens
  CDR3 for alpha chain variable domain of TCR clone 192299 (TRAV8-2, TRAJ40)
CVVLGTTSGTYKYIF

SEQ ID NO: 384598 - protein, 14 aa, Homo sapiens
  CDR3 for beta chain variable domain of TCR clone 192299 (TRBV19, TRBJ2-1)
CASPTFVLSGESSS

SEQ ID NO: 384599 - protein, 14 aa, Homo sapiens
  CDR3 for alpha chain variable domain of TCR clone 192300 (TRAV41, TRAJ32)
CCPNYGGATNKLIF

SEQ ID NO: 384600 - protein, 15 aa, Homo sapiens
  CDR3 for beta chain variable domain of TCR clone 192300 (TRBV11-3, TRBJ2-1)
CASSKNRGLIYEQFF

SEQ ID NO: 384601 - protein, 11 aa, Homo sapiens
  CDR3 for alpha chain variable domain of TCR clone 192301 (TRAV21, TRAJ11)
CAVNGYSTLTF

SEQ ID NO: 384602 - protein, 17 aa, Homo sapiens
  CDR3 for beta chain variable domain of TCR clone 192301 (TRBV7-2, TRBJ2-1)
CASSLGPPWGGLDEQFF

SEQ ID NO: 384603 - protein, 13 aa, Homo sapiens
  CDR3 for alpha chain variable domain of TCR clone 192302 (TRAV12-1, TRAJ11)
CVVNRAGYSTLTF

SEQ ID NO: 384604 - protein, 17 aa, Homo sapiens
  CDR3 for beta chain variable domain of TCR clone 192302 (TRBV13, TRBJ2-3)
CASSLSRVAGGRNTQYF

SEQ ID NO: 384605 - protein, 12 aa, Homo sapiens
  CDR3 for alpha chain variable domain of TCR clone 192303 (TRAV13-2, TRAJ23)
CAERHRGGKLIF

SEQ ID NO: 384606 - protein, 14 aa, Homo sapiens
  CDR3 for beta chain variable domain of TCR clone 192303 (TRBV20-1, TRBJ2-2)
CSAASGGNTGELFF

SEQ ID NO: 384607 - protein, 15 aa, Homo sapiens
  CDR3 for alpha chain variable domain of TCR clone 192304 (TRAV21, TRAJ53)
CATLNSGGSNYKLTF

SEQ ID NO: 384608 - protein, 16 aa, Homo sapiens
  CDR3 for beta chain variable domain of TCR clone 192304 (TRBV9, TRBJ2-1)
CASRVGGGGNYNEQFF

SEQ ID NO: 384609 - protein, 15 aa, Homo sapiens
  CDR3 for alpha chain variable domain of TCR clone 192305 (TRAV13-1, TRAJ44)
CAASRGGGTASKLTF

SEQ ID NO: 384610 - protein, 14 aa, Homo sapiens
  CDR3 for beta chain variable domain of TCR clone 192305 (TRBV7-2, TRBJ2-5)
RASSPRGSSETQYF

SEQ ID NO: 384611 - protein, 11 aa, Homo sapiens
  CDR3 for alpha chain variable domain of TCR clone 192306 (TRAV2, TRAJ13)
CASGGYQKVTF

SEQ ID NO: 384612 - protein, 15 aa, Homo sapiens
  CDR3 for beta chain variable domain of TCR clone 192306 (TRBV7-2, TRBJ2-3)
YASSSTGLETDTQYF

SEQ ID NO: 384613 - protein, 14 aa, Homo sapiens
  CDR3 for alpha chain variable domain of TCR clone 192307 (TRAV1-2, TRAJ16)
CAVNRFLDGQKLLF

SEQ ID NO: 384614 - protein, 14 aa, Homo sapiens
  CDR3 for beta chain variable domain of TCR clone 192307 (TRBV7-6, TRBJ2-3)
CASSLGTVTDTQYF

SEQ ID NO: 384615 - protein, 15 aa, Homo sapiens
  CDR3 for alpha chain variable domain of TCR clone 192308 (TRAV27, TRAJ42)
CAGGNYGGSQGNLIF

SEQ ID NO: 384616 - protein, 14 aa, Homo sapiens
  CDR3 for beta chain variable domain of TCR clone 192308 (TRBV19, TRBJ2-1)
CASSPGLAPNEQFF

SEQ ID NO: 384617 - protein, 12 aa, Homo sapiens
  CDR3 for alpha chain variable domain of TCR clone 192309 (TRAV13-1, TRAJ42)
VNYGGSKGNLIF

SEQ ID NO: 384618 - protein, 12 aa, Homo sapiens
  CDR3 for beta chain variable domain of TCR clone 192309 (TRBV7-9, TRBJ2-7)
CASSLEGYEQYF

SEQ ID NO: 384619 - protein, 23 aa, Homo sapiens
  CDR3 for alpha chain variable domain of TCR clone 192310 (TRAV12-2, TRAJ36)
SLLIRDSQPSDSATLERANNLFF

SEQ ID NO: 384620 - protein, 13 aa, Homo sapiens
  CDR3 for beta chain variable domain of TCR clone 192310 (TRBV20-1, TRBJ1-3)
CSAGAYSGNTIYF

SEQ ID NO: 384621 - protein, 14 aa, Homo sapiens
  CDR3 for alpha chain variable domain of TCR clone 192311 (TRAV29/DV5, TRAJ48)
CAAMALFGNEKLTF

SEQ ID NO: 384622 - protein, 15 aa, Homo sapiens
  CDR3 for beta chain variable domain of TCR clone 192311 (TRBV7-2, TRBJ2-1)
CASTHGTGIYNEQFV

SEQ ID NO: 384623 - protein, 16 aa, Homo sapiens
  CDR3 for alpha chain variable domain of TCR clone 192312 (TRAV12-3, TRAJ53)
CAMSPGSGGSNYKLTF

SEQ ID NO: 384624 - protein, 12 aa, Homo sapiens
  CDR3 for beta chain variable domain of TCR clone 192312 (TRBV7-2, TRBJ2-1)
CASSPQDIEQFF

SEQ ID NO: 384625 - protein, 14 aa, Homo sapiens
  CDR3 for alpha chain variable domain of TCR clone 192313 (TRAV12-2, TRAJ40)
CAVKIPSGTYKYIF

SEQ ID NO: 384626 - protein, 17 aa, Homo sapiens
  CDR3 for beta chain variable domain of TCR clone 192313 (TRBV7-9, TRBJ2-1)
CASSLLWGQGYNNEQFF

SEQ ID NO: 384627 - protein, 14 aa, Homo sapiens
  CDR3 for alpha chain variable domain of TCR clone 192314 (TRAV20, TRAJ29)
CAVQAWVGNTPLVF

SEQ ID NO: 384628 - protein, 15 aa, Homo sapiens
  CDR3 for beta chain variable domain of TCR clone 192314 (TRBV29-1, TRBJ2-7)
CSVEFFDRGPYEQYF

SEQ ID NO: 384629 - protein, 13 aa, Homo sapiens
  CDR3 for alpha chain variable domain of TCR clone 192315 (TRAV21, TRAJ57)
CAVIEGGSEKLVF

SEQ ID NO: 384630 - protein, 14 aa, Homo sapiens
  CDR3 for beta chain variable domain of TCR clone 192315 (TRBV12-5, TRBJ2-5)
CASGSRTQQETQYF

SEQ ID NO: 384631 - protein, 11 aa, Homo sapiens
  CDR3 for alpha chain variable domain of TCR clone 192316 (TRAV1-1, TRAJ23)
CAVRQGGKLIF

SEQ ID NO: 384632 - protein, 13 aa, Homo sapiens
  CDR3 for beta chain variable domain of TCR clone 192316 (TRBV12-5, TRBJ2-3)
CASQNRGTDTQYF

SEQ ID NO: 384633 - protein, 14 aa, Homo sapiens
  CDR3 for alpha chain variable domain of TCR clone 192317 (TRAV17, TRAJ6)
CATDASGGSYVPTF

SEQ ID NO: 384634 - protein, 19 aa, Homo sapiens
  CDR3 for beta chain variable domain of TCR clone 192317 (TRBV4-3, TRBJ2-7)
CASSQEFIGWQVTPYEQYF

SEQ ID NO: 384635 - protein, 12 aa, Homo sapiens
  CDR3 for alpha chain variable domain of TCR clone 192318 (TRAV12-1, TRAJ40)
CVFYSGTYKYIF

SEQ ID NO: 384636 - protein, 16 aa, Homo sapiens
  CDR3 for beta chain variable domain of TCR clone 192318 (TRBV10-3, TRBJ2-1)
CAIRGGGRGDYNEQFF

SEQ ID NO: 384637 - protein, 16 aa, Homo sapiens
  CDR3 for alpha chain variable domain of TCR clone 192319 (TRAV26-2, TRAJ56)
CILRDVAAGANSKLTF

SEQ ID NO: 384638 - protein, 17 aa, Homo sapiens
  CDR3 for beta chain variable domain of TCR clone 192319 (TRBV13, TRBJ2-3)
CASSLSRVAGGRNTQYF

SEQ ID NO: 384639 - protein, 12 aa, Homo sapiens
  CDR3 for alpha chain variable domain of TCR clone 192320 (TRAV12-2, TRAJ31)
CAVNTPDARLMF

SEQ ID NO: 384640 - protein, 14 aa, Homo sapiens
  CDR3 for beta chain variable domain of TCR clone 192320 (TRBV6-1, TRBJ1-3)
CASVQGGGGNTIYF

SEQ ID NO: 384641 - protein, 12 aa, Homo sapiens
  CDR3 for alpha chain variable domain of TCR clone 192321 (TRAV2, TRAJ36)
CAELTGANNLFF

SEQ ID NO: 384642 - protein, 14 aa, Homo sapiens
  CDR3 for beta chain variable domain of TCR clone 192321 (TRBV18, TRBJ2-7)
CASSPRGGDYEQYF

SEQ ID NO: 384643 - protein, 14 aa, Homo sapiens
  CDR3 for alpha chain variable domain of TCR clone 192322 (TRAV1-2, TRAJ16)
CAVSRFSDGQKLLF

SEQ ID NO: 384644 - protein, 15 aa, Homo sapiens
  CDR3 for beta chain variable domain of TCR clone 192322 (TRBV9, TRBJ1-6)
YASSVAGTGDSPLHF

SEQ ID NO: 384645 - protein, 12 aa, Homo sapiens
  CDR3 for alpha chain variable domain of TCR clone 192323 (TRAV13-2, TRAJ23)
CAERHRGGKLIF

SEQ ID NO: 384646 - protein, 12 aa, Homo sapiens
  CDR3 for beta chain variable domain of TCR clone 192323 (TRBV7-9, TRBJ1-4)
CASSTDRDKLFF

SEQ ID NO: 384647 - protein, 14 aa, Homo sapiens
  CDR3 for alpha chain variable domain of TCR clone 192324 (TRAV12-2, TRAJ13)
CAVKKTGGYQKVTF

SEQ ID NO: 384648 - protein, 15 aa, Homo sapiens
  CDR3 for beta chain variable domain of TCR clone 192324 (TRBV27, TRBJ2-1)
CASSDGGGSSNGHFF

SEQ ID NO: 384649 - protein, 15 aa, Homo sapiens
  CDR3 for alpha chain variable domain of TCR clone 192325 (TRAV21, TRAJ53)
CATLNSGGSNDKLTF

SEQ ID NO: 384650 - protein, 15 aa, Homo sapiens
  CDR3 for beta chain variable domain of TCR clone 192325 (TRBV5-1, TRBJ2-1)
CAISPPRAPYNEQFF

SEQ ID NO: 384651 - protein, 13 aa, Homo sapiens
  CDR3 for alpha chain variable domain of TCR clone 192326 (TRAV12-1, TRAJ31)
CVVNMNNNARLMF

SEQ ID NO: 384652 - protein, 15 aa, Homo sapiens
  CDR3 for beta chain variable domain of TCR clone 192326 (TRBV4-1, TRBJ1-2)
CASSQGHGAAYGYTF

SEQ ID NO: 384653 - protein, 15 aa, Homo sapiens
  CDR3 for alpha chain variable domain of TCR clone 192327 (TRAV13-1, TRAJ17)
CAESIERAAGNKLTF

SEQ ID NO: 384654 - protein, 12 aa, Homo sapiens
  CDR3 for beta chain variable domain of TCR clone 192327 (TRBV5-7, TRBJ1-1)
CASGLGRGKAFF

SEQ ID NO: 384655 - protein, 14 aa, Homo sapiens
  CDR3 for alpha chain variable domain of TCR clone 192328 (TRAV8-1, TRAJ5)
CAVRTDTGRRALTF

SEQ ID NO: 384656 - protein, 13 aa, Homo sapiens
  CDR3 for beta chain variable domain of TCR clone 192328 (TRBV7-3, TRBJ1-1)
CASSQDWGVEAFF

SEQ ID NO: 384657 - protein, 14 aa, Homo sapiens
  CDR3 for alpha chain variable domain of TCR clone 192329 (TRAV1-2, TRAJ16)
CAVNRFSDGQKLLF

SEQ ID NO: 384658 - protein, 17 aa, Homo sapiens
  CDR3 for beta chain variable domain of TCR clone 192329 (TRBV13, TRBJ2-3)
CASSLSRVAGGRNKQYF

SEQ ID NO: 384659 - protein, 16 aa, Homo sapiens
  CDR3 for alpha chain variable domain of TCR clone 192330 (TRAV27, TRAJ13)
CAGAKSDSEGYQKVTF

SEQ ID NO: 384660 - protein, 15 aa, Homo sapiens
  CDR3 for beta chain variable domain of TCR clone 192330 (TRBV29-1, TRBJ2-1)
CSVGRHALFYNEQFF

SEQ ID NO: 384661 - protein, 17 aa, Homo sapiens
  CDR3 for alpha chain variable domain of TCR clone 192331 (TRAV3, TRAJ6)
CAVRDGPRAGGGYIPTF

SEQ ID NO: 384662 - protein, 21 aa, Homo sapiens
  CDR3 for beta chain variable domain of TCR clone 192331 (TRBV5-1, TRBJ1-6)
CASSPRGGADSTGGVRSPLHF

SEQ ID NO: 384663 - protein, 14 aa, Homo sapiens
  CDR3 for alpha chain variable domain of TCR clone 192332 (TRAV26-1, TRAJ38)
CIADNAGNNRKLIW

SEQ ID NO: 384664 - protein, 14 aa, Homo sapiens
  CDR3 for beta chain variable domain of TCR clone 192332 (TRBV20-1, TRBJ1-1)
CSAQTRIVGTEAFF

SEQ ID NO: 384665 - protein, 15 aa, Homo sapiens
  CDR3 for alpha chain variable domain of TCR clone 192333 (TRAV26-1, TRAJ23)
CIVRVAGYQGGKLIF

SEQ ID NO: 384666 - protein, 18 aa, Homo sapiens
  CDR3 for beta chain variable domain of TCR clone 192333 (TRBV28, TRBJ2-1)
CASSSTSGRAHSYNEQFF

SEQ ID NO: 384667 - protein, 13 aa, Homo sapiens
  CDR3 for alpha chain variable domain of TCR clone 192334 (TRAV13-1, TRAJ26)
CAIVFGPGTRLSV

SEQ ID NO: 384668 - protein, 11 aa, Homo sapiens
  CDR3 for beta chain variable domain of TCR clone 192334 (TRBV11-2, TRBJ2-6)
CASSLNPFLGT

SEQ ID NO: 384669 - protein, 14 aa, Homo sapiens
  CDR3 for alpha chain variable domain of TCR clone 192335 (TRAV12-2, TRAJ17)
CAVLFKAAGNKLTF

SEQ ID NO: 384670 - protein, 18 aa, Homo sapiens
  CDR3 for beta chain variable domain of TCR clone 192335 (TRBV5-1, TRBJ2-7)
CASSSTGGASGYSYEQYF

SEQ ID NO: 384671 - protein, 16 aa, Homo sapiens
  CDR3 for alpha chain variable domain of TCR clone 192336 (TRAV30, TRAJ24)
CGTEIVDADSWGKFQL

SEQ ID NO: 384672 - protein, 16 aa, Homo sapiens
  CDR3 for beta chain variable domain of TCR clone 192336 (TRBV20-1, TRBJ1-1)
CSARALTQGMNTEAFF

SEQ ID NO: 384673 - protein, 17 aa, Homo sapiens
  CDR3 for alpha chain variable domain of TCR clone 192337 (TRAV12-1, TRAJ42)
CVVMRMNYGGSQGNLIF

SEQ ID NO: 384674 - protein, 15 aa, Homo sapiens
  CDR3 for beta chain variable domain of TCR clone 192337 (TRBV19, TRBJ2-4)
CASRGPRRGENIQYF

SEQ ID NO: 384675 - protein, 14 aa, Homo sapiens
  CDR3 for alpha chain variable domain of TCR clone 192338 (TRAV21, TRAJ11)
CAVRRNSGYSTLTF

SEQ ID NO: 384676 - protein, 16 aa, Homo sapiens
  CDR3 for beta chain variable domain of TCR clone 192338 (TRBV19, TRBJ2-1)
CASSKAGPSSYNEQFF

SEQ ID NO: 384677 - protein, 18 aa, Homo sapiens
  CDR3 for alpha chain variable domain of TCR clone 192339 (TRAV9-2, TRAJ52)
CALSRHNAGGTSYGQLTF

SEQ ID NO: 384678 - protein, 13 aa, Homo sapiens
  CDR3 for beta chain variable domain of TCR clone 192339 (TRBV7-9, TRBJ1-2)
CASSLMQNYGYTF

SEQ ID NO: 384679 - protein, 15 aa, Homo sapiens
  CDR3 for alpha chain variable domain of TCR clone 192340 (TRAV27, TRAJ38)
CAARRKAGNNRKLIW

SEQ ID NO: 384680 - protein, 15 aa, Homo sapiens
  CDR3 for beta chain variable domain of TCR clone 192340 (TRBV7-9, TRBJ1-6)
CASSSPGRGNSPLHF

SEQ ID NO: 384681 - protein, 12 aa, Homo sapiens
  CDR3 for alpha chain variable domain of TCR clone 192341 (TRAV12-3, TRAJ42)
CAPGGSQGNLIF

SEQ ID NO: 384682 - protein, 13 aa, Homo sapiens
  CDR3 for beta chain variable domain of TCR clone 192341 (TRBV5-1, TRBJ2-1)
CASSLGSYNEQFF

SEQ ID NO: 384683 - protein, 14 aa, Homo sapiens
  CDR3 for alpha chain variable domain of TCR clone 192342 (TRAV1-2, TRAJ16)
CAVNRFSDGQKLPF

SEQ ID NO: 384684 - protein, 15 aa, Homo sapiens
  CDR3 for beta chain variable domain of TCR clone 192342 (TRBV5-1, TRBJ2-1)
CASSPPRAPYNEQFF

SEQ ID NO: 384685 - protein, 11 aa, Homo sapiens
  CDR3 for alpha chain variable domain of TCR clone 192343 (TRAV12-3, TRAJ43)
CAMSVSKDMRF

SEQ ID NO: 384686 - protein, 13 aa, Homo sapiens
  CDR3 for beta chain variable domain of TCR clone 192343 (TRBV20-1, TRBJ1-1)
CSAPLGGGTEAFF

SEQ ID NO: 384687 - protein, 14 aa, Homo sapiens
  CDR3 for alpha chain variable domain of TCR clone 192344 (TRAV2, TRAJ37)
CAVDFTSNTGKLIF

SEQ ID NO: 384688 - protein, 17 aa, Homo sapiens
  CDR3 for beta chain variable domain of TCR clone 192344 (TRBV4-1, TRBJ1-6)
CASSQDRNRDYNSPLHF

SEQ ID NO: 384689 - protein, 15 aa, Homo sapiens
  CDR3 for alpha chain variable domain of TCR clone 192345 (TRAV9-2, TRAJ9)
CALSLTNTGGFKTIF

SEQ ID NO: 384690 - protein, 13 aa, Homo sapiens
  CDR3 for beta chain variable domain of TCR clone 192345 (TRBV7-3, TRBJ2-5)
CASSCRGGETQYF

SEQ ID NO: 384691 - protein, 16 aa, Homo sapiens
  CDR3 for alpha chain variable domain of TCR clone 192346 (TRAV16, TRAJ4)
CALSRMFSGGYNKLIF

SEQ ID NO: 384692 - protein, 17 aa, Homo sapiens
  CDR3 for beta chain variable domain of TCR clone 192346 (TRBV28, TRBJ2-5)
CASSTPEGDALQETQYF

SEQ ID NO: 384693 - protein, 13 aa, Homo sapiens
  CDR3 for alpha chain variable domain of TCR clone 192347 (TRAV12-3, TRAJ33)
CAMSVNSNYQLIW

SEQ ID NO: 384694 - protein, 15 aa, Homo sapiens
  CDR3 for beta chain variable domain of TCR clone 192347 (TRBV19, TRBJ2-5)
CASSRLAGVEETQYF

SEQ ID NO: 384695 - protein, 14 aa, Homo sapiens
  CDR3 for alpha chain variable domain of TCR clone 192348 (TRAV2, TRAJ9)
CAVEDRSGGFKTIF

SEQ ID NO: 384696 - protein, 16 aa, Homo sapiens
  CDR3 for beta chain variable domain of TCR clone 192348 (TRBV7-7, TRBJ2-1)
CASSVASGTSYNEQFF

SEQ ID NO: 384697 - protein, 21 aa, Homo sapiens
  CDR3 for alpha chain variable domain of TCR clone 192349 (TRAV12-3, TRAJ40)
SPVIQPPTSAMSDSGTYKYIF

SEQ ID NO: 384698 - protein, 14 aa, Homo sapiens
  CDR3 for beta chain variable domain of TCR clone 192349 (TRBV7-2, TRBJ1-5)
CASSTQGAGQPQHF

SEQ ID NO: 384699 - protein, 14 aa, Homo sapiens
  CDR3 for alpha chain variable domain of TCR clone 192350 (TRAV20, TRAJ9)
CAVQASTGGFKTIF

SEQ ID NO: 384700 - protein, 16 aa, Homo sapiens
  CDR3 for beta chain variable domain of TCR clone 192350 (TRBV7-3, TRBJ2-2)
CASSLKRGTLSGELFF

SEQ ID NO: 384701 - protein, 15 aa, Homo sapiens
  CDR3 for alpha chain variable domain of TCR clone 192351 (TRAV3, TRAJ4)
CAQNMFYGGYNKLIF

SEQ ID NO: 384702 - protein, 16 aa, Homo sapiens
  CDR3 for beta chain variable domain of TCR clone 192351 (TRBV3-1, TRBJ1-6)
CASSQEFQGSYSPLHF

SEQ ID NO: 384703 - protein, 18 aa, Homo sapiens
  CDR3 for alpha chain variable domain of TCR clone 192352 (TRAV13-1, TRAJ52)
CAASKRRAGGNSYGKLTF

SEQ ID NO: 384704 - protein, 13 aa, Homo sapiens
  CDR3 for beta chain variable domain of TCR clone 192352 (TRBV12-4, TRBJ1-2)
CASSLRQGKGYTF

SEQ ID NO: 384705 - protein, 15 aa, Homo sapiens
  CDR3 for alpha chain variable domain of TCR clone 192353 (TRAV3, TRAJ29)
CAVRDLDSGNTPLVF

SEQ ID NO: 384706 - protein, 17 aa, Homo sapiens
  CDR3 for beta chain variable domain of TCR clone 192353 (TRBV20-1, TRBJ2-1)
CSARDPLAGVWDDEQFF

SEQ ID NO: 384707 - protein, 13 aa, Homo sapiens
  CDR3 for alpha chain variable domain of TCR clone 192354 (TRAV8-1, TRAJ34)
CAVNGKGTDKPIF

SEQ ID NO: 384708 - protein, 13 aa, Homo sapiens
  CDR3 for beta chain variable domain of TCR clone 192354 (TRBV20-1, TRBJ2-5)
CSARLAGVETQYF

SEQ ID NO: 384709 - protein, 15 aa, Homo sapiens
  CDR3 for alpha chain variable domain of TCR clone 192355 (TRAV12-3, TRAJ6)
CAMSATSGGSYIPTF

SEQ ID NO: 384710 - protein, 15 aa, Homo sapiens
  CDR3 for beta chain variable domain of TCR clone 192355 (TRBV5-1, TRBJ2-6)
CASSLDPSGATVLTF

SEQ ID NO: 384711 - protein, 16 aa, Homo sapiens
  CDR3 for alpha chain variable domain of TCR clone 192356 (TRAV3, TRAJ10)
CAVRDMRAGGGNKLTF

SEQ ID NO: 384712 - protein, 15 aa, Homo sapiens
  CDR3 for beta chain variable domain of TCR clone 192356 (TRBV11-2, TRBJ2-1)
CASSVGPDSYNEQFF

SEQ ID NO: 384713 - protein, 11 aa, Homo sapiens
  CDR3 for alpha chain variable domain of TCR clone 192357 (TRAV20, TRAJ23)
CACNQGGKLIC

SEQ ID NO: 384714 - protein, 16 aa, Homo sapiens
  CDR3 for beta chain variable domain of TCR clone 192357 (TRBV7-8, TRBJ2-5)
CASSFGGQPAQETQYF

SEQ ID NO: 384715 - protein, 15 aa, Homo sapiens
  CDR3 for alpha chain variable domain of TCR clone 192358 (TRAV14/DV4, TRAJ26)
CAMREGQNYGQNFVF

SEQ ID NO: 384716 - protein, 14 aa, Homo sapiens
  CDR3 for beta chain variable domain of TCR clone 192358 (TRBV5-1, TRBJ2-2)
CASSLGGGSGELFF

SEQ ID NO: 384717 - protein, 15 aa, Homo sapiens
  CDR3 for alpha chain variable domain of TCR clone 192359 (TRAV2, TRAJ11)
CAVGGRNSGYSTLTF

SEQ ID NO: 384718 - protein, 13 aa, Homo sapiens
  CDR3 for beta chain variable domain of TCR clone 192359 (TRBV7-3, TRBJ1-1)
CASSQDWGAEAFF

SEQ ID NO: 384719 - protein, 10 aa, Homo sapiens
  CDR3 for alpha chain variable domain of TCR clone 192360 (TRAV30, TRAJ48)
CGIGNEKLTF

SEQ ID NO: 384720 - protein, 18 aa, Homo sapiens
  CDR3 for beta chain variable domain of TCR clone 192360 (TRBV5-5, TRBJ1-5)
CASSLRQVKGSSNQPQHF

SEQ ID NO: 384721 - protein, 11 aa, Homo sapiens
  CDR3 for alpha chain variable domain of TCR clone 192361 (TRAV21, TRAJ34)
CAVTNTDKLIF

SEQ ID NO: 384722 - protein, 17 aa, Homo sapiens
  CDR3 for beta chain variable domain of TCR clone 192361 (TRBV20-1, TRBJ2-1)
CSARSPSGGPPTISSSS

SEQ ID NO: 384723 - protein, 17 aa, Homo sapiens
  CDR3 for alpha chain variable domain of TCR clone 192362 (TRAV3, TRAJ42)
CAVRDRDYGGSQGNLIF

SEQ ID NO: 384724 - protein, 15 aa, Homo sapiens
  CDR3 for beta chain variable domain of TCR clone 192362 (TRBV6-6, TRBJ2-7)
CPSSYSYGGSYEQYF

SEQ ID NO: 384725 - protein, 12 aa, Homo sapiens
  CDR3 for alpha chain variable domain of TCR clone 192363 (TRAV16, TRAJ26)
CALRGNGQNFVF

SEQ ID NO: 384726 - protein, 14 aa, Homo sapiens
  CDR3 for beta chain variable domain of TCR clone 192363 (TRBV10-3, TRBJ2-1)
CAISSDLAYNEQFF

SEQ ID NO: 384727 - protein, 12 aa, Homo sapiens
  CDR3 for alpha chain variable domain of TCR clone 192364 (TRAV13-1, TRAJ53)
CAAGGINYKLTF

SEQ ID NO: 384728 - protein, 15 aa, Homo sapiens
  CDR3 for beta chain variable domain of TCR clone 192364 (TRBV7-2, TRBJ2-1)
CASSSGLAGGNEQFF

SEQ ID NO: 384729 - protein, 14 aa, Homo sapiens
  CDR3 for alpha chain variable domain of TCR clone 192365 (TRAV2, TRAJ29)
CAVTPPSGNTTLVF

SEQ ID NO: 384730 - protein, 13 aa, Homo sapiens
  CDR3 for beta chain variable domain of TCR clone 192365 (TRBV11-2, TRBJ2-1)
CASSLGLAGGQFF

SEQ ID NO: 384731 - protein, 14 aa, Homo sapiens
  CDR3 for alpha chain variable domain of TCR clone 192366 (TRAV21, TRAJ35)
CAVIPIGFGNVLHF

SEQ ID NO: 384732 - protein, 13 aa, Homo sapiens
  CDR3 for beta chain variable domain of TCR clone 192366 (TRBV23-1, TRBJ1-4)
CASRGKFNEKLFF

SEQ ID NO: 384733 - protein, 13 aa, Homo sapiens
  CDR3 for alpha chain variable domain of TCR clone 192367 (TRAV17, TRAJ6)
CATGFGGGYIPTF

SEQ ID NO: 384734 - protein, 14 aa, Homo sapiens
  CDR3 for beta chain variable domain of TCR clone 192367 (TRBV5-1, TRBJ2-5)
CASSFGGSQETQYF

SEQ ID NO: 384735 - protein, 12 aa, Homo sapiens
  CDR3 for alpha chain variable domain of TCR clone 192368 (TRAV12-3, TRAJ17)
CAMTLTGNKLTL

SEQ ID NO: 384736 - protein, 14 aa, Homo sapiens
  CDR3 for beta chain variable domain of TCR clone 192368 (TRBV19, TRBJ2-1)
CASPTFVLSGEQFF

SEQ ID NO: 384737 - protein, 15 aa, Homo sapiens
  CDR3 for alpha chain variable domain of TCR clone 192369 (TRAV21, TRAJ53)
CSTLNSGGSNYKLTF

SEQ ID NO: 384738 - protein, 16 aa, Homo sapiens
  CDR3 for beta chain variable domain of TCR clone 192369 (TRBV20-1, TRBJ1-2)
CSASMGQGVANYGYTF

SEQ ID NO: 384739 - protein, 16 aa, Homo sapiens
  CDR3 for alpha chain variable domain of TCR clone 192370 (TRAV26-1, TRAJ23)
CIVRVANSNQGGKLIF

SEQ ID NO: 384740 - protein, 14 aa, Homo sapiens
  CDR3 for beta chain variable domain of TCR clone 192370 (TRBV11-2, TRBJ1-2)
CASSLYRGNYGYTF

SEQ ID NO: 384741 - protein, 14 aa, Homo sapiens
  CDR3 for alpha chain variable domain of TCR clone 192371 (TRAV12-3, TRAJ9)
CSMSPNTGGFKTIF

SEQ ID NO: 384742 - protein, 16 aa, Homo sapiens
  CDR3 for beta chain variable domain of TCR clone 192371 (TRBV7-3, TRBJ2-2)
CASSLKRGTLSGELFF

SEQ ID NO: 384743 - protein, 11 aa, Homo sapiens
  CDR3 for alpha chain variable domain of TCR clone 192372 (TRAV12-2, TRAJ33)
CAVGSNYQLIW

SEQ ID NO: 384744 - protein, 12 aa, Homo sapiens
  CDR3 for beta chain variable domain of TCR clone 192372 (TRBV11-2, TRBJ2-2)
CASSLGGGELFF

SEQ ID NO: 384745 - protein, 16 aa, Homo sapiens
  CDR3 for alpha chain variable domain of TCR clone 192373 (TRAV3, TRAJ37)
CAVRGKGSGNTGKLIF

SEQ ID NO: 384746 - protein, 14 aa, Homo sapiens
  CDR3 for beta chain variable domain of TCR clone 192373 (TRBV12-5, TRBJ2-5)
CASGSRTHQGTQYF

SEQ ID NO: 384747 - protein, 15 aa, Homo sapiens
  CDR3 for alpha chain variable domain of TCR clone 192374 (TRAV2, TRAJ15)
CAVEDRGQAGTALIF

SEQ ID NO: 384748 - protein, 15 aa, Homo sapiens
  CDR3 for beta chain variable domain of TCR clone 192374 (TRBV7-2, TRBJ1-2)
CASSLVSGGDYGYTF

SEQ ID NO: 384749 - protein, 16 aa, Homo sapiens
  CDR3 for alpha chain variable domain of TCR clone 192375 (TRAV26-1, TRAJ37)
CIVRGDGSGNTGTLIS

SEQ ID NO: 384750 - protein, 13 aa, Homo sapiens
  CDR3 for beta chain variable domain of TCR clone 192375 (TRBV4-1, TRBJ2-2)
CASSQENTGELFF

SEQ ID NO: 384751 - protein, 14 aa, Homo sapiens
  CDR3 for alpha chain variable domain of TCR clone 192376 (TRAV8-4, TRAJ9)
CAVRINTGGFKTIF

SEQ ID NO: 384752 - protein, 14 aa, Homo sapiens
  CDR3 for beta chain variable domain of TCR clone 192376 (TRBV19, TRBJ2-7)
CASSIRLGDHEQYF

SEQ ID NO: 384753 - protein, 14 aa, Homo sapiens
  CDR3 for alpha chain variable domain of TCR clone 192377 (TRAV1-2, TRAJ6)
CAVSLSGVSYIPTF

SEQ ID NO: 384754 - protein, 11 aa, Homo sapiens
  CDR3 for beta chain variable domain of TCR clone 192377 (TRBV6-3, TRBJ2-3)
CATGQADTQYF

SEQ ID NO: 384755 - protein, 11 aa, Homo sapiens
  CDR3 for alpha chain variable domain of TCR clone 192378 (TRAV8-6, TRAJ34)
CAVWNTDKLIF

SEQ ID NO: 384756 - protein, 16 aa, Homo sapiens
  CDR3 for beta chain variable domain of TCR clone 192378 (TRBV5-1, TRBJ2-7)
CASSYASTSSGVEQYF

SEQ ID NO: 384757 - protein, 15 aa, Homo sapiens
  CDR3 for alpha chain variable domain of TCR clone 192379 (TRAV12-1, TRAJ10)
CVVNKLTGGGNKLTF

SEQ ID NO: 384758 - protein, 17 aa, Homo sapiens
  CDR3 for beta chain variable domain of TCR clone 192379 (TRBV5-1, TRBJ1-6)
CASSPSLQGSDNSPLYF

SEQ ID NO: 384759 - protein, 15 aa, Homo sapiens
  CDR3 for alpha chain variable domain of TCR clone 192380 (TRAV17, TRAJ57)
CATGPSQGGSKKLVL

SEQ ID NO: 384760 - protein, 16 aa, Homo sapiens
  CDR3 for beta chain variable domain of TCR clone 192380 (TRBV12-4, TRBJ1-5)
CASSRPVGGSNQPQHF

SEQ ID NO: 384761 - protein, 17 aa, Homo sapiens
  CDR3 for alpha chain variable domain of TCR clone 192381 (TRAV38-2/DV8, TRAJ23)
CALPRKLIFGQGTELSV

SEQ ID NO: 384762 - protein, 14 aa, Homo sapiens
  CDR3 for beta chain variable domain of TCR clone 192381 (TRBV7-9, TRBJ2-2)
CASSLVQDTGELFF

SEQ ID NO: 384763 - protein, 14 aa, Homo sapiens
  CDR3 for alpha chain variable domain of TCR clone 192382 (TRAV16, TRAJ54)
CALSLIQGAQKLVS

SEQ ID NO: 384764 - protein, 15 aa, Homo sapiens
  CDR3 for beta chain variable domain of TCR clone 192382 (TRBV20-1, TRBJ2-7)
CSARDRVAGMDEQYF

SEQ ID NO: 384765 - protein, 13 aa, Homo sapiens
  CDR3 for alpha chain variable domain of TCR clone 192383 (TRAV26-1, TRAJ38)
CIADNAGNNRKLL

SEQ ID NO: 384766 - protein, 13 aa, Homo sapiens
  CDR3 for beta chain variable domain of TCR clone 192383 (TRBV20-1, TRBJ1-1)
CSARGGGNTEAFF

SEQ ID NO: 384767 - protein, 14 aa, Homo sapiens
  CDR3 for alpha chain variable domain of TCR clone 192384 (TRAV13-1, TRAJ45)
VNMYSGGGADGLTF

SEQ ID NO: 384768 - protein, 15 aa, Homo sapiens
  CDR3 for beta chain variable domain of TCR clone 192384 (TRBV5-5, TRBJ2-7)
CASSLAAPLSYEQYF

SEQ ID NO: 384769 - protein, 15 aa, Homo sapiens
  CDR3 for alpha chain variable domain of TCR clone 192385 (TRAV34, TRAJ38)
CGADFTPGNNRKLSG

SEQ ID NO: 384770 - protein, 16 aa, Homo sapiens
  CDR3 for beta chain variable domain of TCR clone 192385 (TRBV12-5, TRBJ2-5)
CASGPRTSGNQETQYF

SEQ ID NO: 384771 - protein, 17 aa, Homo sapiens
  CDR3 for alpha chain variable domain of TCR clone 192386 (TRAV26-1, TRAJ46)
IASSESEKKSSGDKLTF

SEQ ID NO: 384772 - protein, 14 aa, Homo sapiens
  CDR3 for beta chain variable domain of TCR clone 192386 (TRBV4-1, TRBJ2-2)
CASSQAVNTGELFF

SEQ ID NO: 384773 - protein, 15 aa, Homo sapiens
  CDR3 for alpha chain variable domain of TCR clone 192387 (TRAV3, TRAJ3)
CAVRDRRSSASKIIF

SEQ ID NO: 384774 - protein, 13 aa, Homo sapiens
  CDR3 for beta chain variable domain of TCR clone 192387 (TRBV9, TRBJ2-5)
CASSPAGLGTRYF

SEQ ID NO: 384775 - protein, 13 aa, Homo sapiens
  CDR3 for alpha chain variable domain of TCR clone 192388 (TRAV2, TRAJ15)
CAVASQAGTALFF

SEQ ID NO: 384776 - protein, 13 aa, Homo sapiens
  CDR3 for beta chain variable domain of TCR clone 192388 (TRBV20-1, TRBJ2-5)
CSARGDYQETQYF

SEQ ID NO: 384777 - protein, 17 aa, Homo sapiens
  CDR3 for alpha chain variable domain of TCR clone 192389 (TRAV3, TRAJ6)
CAVRDGPRAGGSYIPTF

SEQ ID NO: 384778 - protein, 18 aa, Homo sapiens
  CDR3 for beta chain variable domain of TCR clone 192389 (TRBV7-3, TRBJ2-3)
CASSSTGTYPGSTETQYF

SEQ ID NO: 384779 - protein, 12 aa, Homo sapiens
  CDR3 for alpha chain variable domain of TCR clone 192390 (TRAV38-1, TRAJ32)
CAPLGATNKLFF

SEQ ID NO: 384780 - protein, 14 aa, Homo sapiens
  CDR3 for beta chain variable domain of TCR clone 192390 (TRBV29-1, TRBJ2-5)
CSVETSGSGETQYF

SEQ ID NO: 384781 - protein, 13 aa, Homo sapiens
  CDR3 for alpha chain variable domain of TCR clone 192391 (TRAV12-2, TRAJ18)
RAVRGSTLGRLYF

SEQ ID NO: 384782 - protein, 18 aa, Homo sapiens
  CDR3 for beta chain variable domain of TCR clone 192391 (TRBV27, TRBJ2-3)
CASSLSGTSGRGTDTQYF

SEQ ID NO: 384783 - protein, 17 aa, Homo sapiens
  CDR3 for alpha chain variable domain of TCR clone 192392 (TRAV3, TRAJ42)
CAVRDRDYGGSQGNLIF

SEQ ID NO: 384784 - protein, 15 aa, Homo sapiens
  CDR3 for beta chain variable domain of TCR clone 192392 (TRBV28, TRBJ2-5)
CASSPPWSYQETQYF

SEQ ID NO: 384785 - protein, 14 aa, Homo sapiens
  CDR3 for alpha chain variable domain of TCR clone 192393 (TRAV1-2, TRAJ16)
CAVNRFSDGQKLLF

SEQ ID NO: 384786 - protein, 13 aa, Homo sapiens
  CDR3 for beta chain variable domain of TCR clone 192393 (TRBV7-2, TRBJ2-7)
CASSGTRPYEQYF

SEQ ID NO: 384787 - protein, 15 aa, Homo sapiens
  CDR3 for alpha chain variable domain of TCR clone 192394 (TRAV26-1, TRAJ23)
CIVRVLNNQGGQLIF

SEQ ID NO: 384788 - protein, 15 aa, Homo sapiens
  CDR3 for beta chain variable domain of TCR clone 192394 (TRBV11-3, TRBJ2-1)
CASSLAGQTYNEQFF

SEQ ID NO: 384789 - protein, 15 aa, Homo sapiens
  CDR3 for alpha chain variable domain of TCR clone 192395 (TRAV8-3, TRAJ45)
CASSYSGGGADGLTF

SEQ ID NO: 384790 - protein, 16 aa, Homo sapiens
  CDR3 for beta chain variable domain of TCR clone 192395 (TRBV7-9, TRBJ2-2)
CASSGFGGANTRELFF

SEQ ID NO: 384791 - protein, 13 aa, Homo sapiens
  CDR3 for alpha chain variable domain of TCR clone 192396 (TRAV21, TRAJ57)
CAVTQDGSEKLVF

SEQ ID NO: 384792 - protein, 17 aa, Homo sapiens
  CDR3 for beta chain variable domain of TCR clone 192396 (TRBV20-1, TRBJ2-2)
CSASGSGQGGLTGELFF

SEQ ID NO: 384793 - protein, 16 aa, Homo sapiens
  CDR3 for alpha chain variable domain of TCR clone 192397 (TRAV22, TRAJ45)
CAVERGKRGGADGLTF

SEQ ID NO: 384794 - protein, 16 aa, Homo sapiens
  CDR3 for beta chain variable domain of TCR clone 192397 (TRBV2, TRBJ1-1)
CASSPPNRGMNTEAFF

SEQ ID NO: 384795 - protein, 13 aa, Homo sapiens
  CDR3 for alpha chain variable domain of TCR clone 192398 (TRAV8-1, TRAJ28)
CAVSGAGSYQLTF

SEQ ID NO: 384796 - protein, 14 aa, Homo sapiens
  CDR3 for beta chain variable domain of TCR clone 192398 (TRBV7-2, TRBJ2-2)
CASRGQGVAGELFF

SEQ ID NO: 384797 - protein, 15 aa, Homo sapiens
  CDR3 for alpha chain variable domain of TCR clone 192399 (TRAV12-1, TRAJ41)
CVVNSRTGSGYALNL

SEQ ID NO: 384798 - protein, 11 aa, Homo sapiens
  CDR3 for beta chain variable domain of TCR clone 192399 (TRBV6-4, TRBJ2-1)
CTSSDSYAQFF

SEQ ID NO: 384799 - protein, 15 aa, Homo sapiens
  CDR3 for alpha chain variable domain of TCR clone 192400 (TRAV12-3, TRAJ10)
CNEKRITGGGNKLTF

SEQ ID NO: 384800 - protein, 12 aa, Homo sapiens
  CDR3 for beta chain variable domain of TCR clone 192400 (TRBV20-1, TRBJ2-7)
CSAITPTKEQYF

SEQ ID NO: 384801 - protein, 14 aa, Homo sapiens
  CDR3 for alpha chain variable domain of TCR clone 192401 (TRAV12-1, TRAJ30)
CVVNMGGRDGKIIF

SEQ ID NO: 384802 - protein, 14 aa, Homo sapiens
  CDR3 for beta chain variable domain of TCR clone 192401 (TRBV7-6, TRBJ2-3)
CASSLGTVTDTQYF

SEQ ID NO: 384803 - protein, 12 aa, Homo sapiens
  CDR3 for alpha chain variable domain of TCR clone 192402 (TRAV13-1, TRAJ49)
CAASPMGNQFYF

SEQ ID NO: 384804 - protein, 16 aa, Homo sapiens
  CDR3 for beta chain variable domain of TCR clone 192402 (TRBV5-1, TRBJ1-1)
CASSSGGNSLNTEAFF

SEQ ID NO: 384805 - protein, 11 aa, Homo sapiens
  CDR3 for alpha chain variable domain of TCR clone 192403 (TRAV1-2, TRAJ20)
CAVSNDYKLSF

SEQ ID NO: 384806 - protein, 15 aa, Homo sapiens
  CDR3 for beta chain variable domain of TCR clone 192403 (TRBV28, TRBJ2-1)
CASSIIAGGRSEQFF

SEQ ID NO: 384807 - protein, 15 aa, Homo sapiens
  CDR3 for alpha chain variable domain of TCR clone 192404 (TRAV8-3, TRAJ11)
CAVGLLNSGYSTLTV

SEQ ID NO: 384808 - protein, 16 aa, Homo sapiens
  CDR3 for beta chain variable domain of TCR clone 192404 (TRBV7-9, TRBJ1-2)
CASSFGFSSGEDGYTF

SEQ ID NO: 384809 - protein, 15 aa, Homo sapiens
  CDR3 for alpha chain variable domain of TCR clone 192405 (TRAV3, TRAJ20)
CAVRYINLSDYKLSF

SEQ ID NO: 384810 - protein, 15 aa, Homo sapiens
  CDR3 for beta chain variable domain of TCR clone 192405 (TRBV7-9, TRBJ1-6)
CASSSPGRGNSPLHF

SEQ ID NO: 384811 - protein, 14 aa, Homo sapiens
  CDR3 for alpha chain variable domain of TCR clone 192406 (TRAV2, TRAJ9)
CAVEDRSGGFNTIF

SEQ ID NO: 384812 - protein, 14 aa, Homo sapiens
  CDR3 for beta chain variable domain of TCR clone 192406 (TRBV3-1, TRBJ2-5)
CASSQGPDQETQYF

SEQ ID NO: 384813 - protein, 15 aa, Homo sapiens
  CDR3 for alpha chain variable domain of TCR clone 192407 (TRAV4, TRAJ39)
CLVGPNNNSGNMLNF

SEQ ID NO: 384814 - protein, 14 aa, Homo sapiens
  CDR3 for beta chain variable domain of TCR clone 192407 (TRBV11-2, TRBJ2-5)
CASSRTGGIETQYF

SEQ ID NO: 384815 - protein, 15 aa, Homo sapiens
  CDR3 for alpha chain variable domain of TCR clone 192408 (TRAV27, TRAJ38)
CAGRFNAGKNRKLIW

SEQ ID NO: 384816 - protein, 13 aa, Homo sapiens
  CDR3 for beta chain variable domain of TCR clone 192408 (TRBV12-5, TRBJ2-3)
CASQNRGTDTQYF

SEQ ID NO: 384817 - protein, 16 aa, Homo sapiens
  CDR3 for alpha chain variable domain of TCR clone 192409 (TRAV23/DV6, TRAJ9)
CAASIGGTTGGFKTIL

SEQ ID NO: 384818 - protein, 14 aa, Homo sapiens
  CDR3 for beta chain variable domain of TCR clone 192409 (TRBV9, TRBJ2-7)
CASSVGVGSYEQYF

SEQ ID NO: 384819 - protein, 13 aa, Homo sapiens
  CDR3 for alpha chain variable domain of TCR clone 192410 (TRAV8-3, TRAJ37)
CAVPSSNTCKLIF

SEQ ID NO: 384820 - protein, 12 aa, Homo sapiens
  CDR3 for beta chain variable domain of TCR clone 192410 (TRBV11-2, TRBJ2-1)
CASSPGNNEQFF

SEQ ID NO: 384821 - protein, 14 aa, Homo sapiens
  CDR3 for alpha chain variable domain of TCR clone 192411 (TRAV12-2, TRAJ40)
CAVKIPSGTYKYIF

SEQ ID NO: 384822 - protein, 15 aa, Homo sapiens
  CDR3 for beta chain variable domain of TCR clone 192411 (TRBV7-3, TRBJ2-2)
CASSETGQGTGELFF

SEQ ID NO: 384823 - protein, 11 aa, Homo sapiens
  CDR3 for alpha chain variable domain of TCR clone 192412 (TRAV12-1, TRAJ43)
CVEYDNNDMSF

SEQ ID NO: 384824 - protein, 14 aa, Homo sapiens
  CDR3 for beta chain variable domain of TCR clone 192412 (TRBV10-2, TRBJ2-1)
CASSEGTSEDEQFF

SEQ ID NO: 384825 - protein, 15 aa, Homo sapiens
  CDR3 for alpha chain variable domain of TCR clone 192413 (TRAV12-3, TRAJ6)
CAMSATSGGSYIPAF

SEQ ID NO: 384826 - protein, 13 aa, Homo sapiens
  CDR3 for beta chain variable domain of TCR clone 192413 (TRBV7-9, TRBJ1-2)
CASSLKQNYGYTF

SEQ ID NO: 384827 - protein, 17 aa, Homo sapiens
  CDR3 for alpha chain variable domain of TCR clone 192414 (TRAV38-1, TRAJ56)
CAFMRILDTGANSKLTF

SEQ ID NO: 384828 - protein, 13 aa, Homo sapiens
  CDR3 for beta chain variable domain of TCR clone 192414 (TRBV4-1, TRBJ1-1)
CASSRKMNTEAFF

SEQ ID NO: 384829 - protein, 15 aa, Homo sapiens
  CDR3 for alpha chain variable domain of TCR clone 192415 (TRAV12-2, TRAJ53)
CAVNGGGGCNYKLTF

SEQ ID NO: 384830 - protein, 12 aa, Homo sapiens
  CDR3 for beta chain variable domain of TCR clone 192415 (TRBV11-2, TRBJ2-2)
CASSLGGGELFF

SEQ ID NO: 384831 - protein, 10 aa, Homo sapiens
  CDR3 for alpha chain variable domain of TCR clone 192416 (TRAV26-2, TRAJ20)
CIQNDYKLSF

SEQ ID NO: 384832 - protein, 14 aa, Homo sapiens
  CDR3 for beta chain variable domain of TCR clone 192416 (TRBV28, TRBJ1-6)
CATVYSRVRSPLLF

SEQ ID NO: 384833 - protein, 15 aa, Homo sapiens
  CDR3 for alpha chain variable domain of TCR clone 192417 (TRAV12-1, TRAJ5)
CVVNMLETGRRALTF

SEQ ID NO: 384834 - protein, 17 aa, Homo sapiens
  CDR3 for beta chain variable domain of TCR clone 192417 (TRBV11-2, TRBJ2-1)
CASSLYPPGVEYNEQFF

SEQ ID NO: 384835 - protein, 14 aa, Homo sapiens
  CDR3 for alpha chain variable domain of TCR clone 192418 (TRAV1-2, TRAJ16)
CAVNRFSDGQKLLF

SEQ ID NO: 384836 - protein, 15 aa, Homo sapiens
  CDR3 for beta chain variable domain of TCR clone 192418 (TRBV7-2, TRBJ2-7)
CASSLSGALTYEQYF

SEQ ID NO: 384837 - protein, 13 aa, Homo sapiens
  CDR3 for alpha chain variable domain of TCR clone 192419 (TRAV12-3, TRAJ7)
CAMTPYGNNRLAF

SEQ ID NO: 384838 - protein, 12 aa, Homo sapiens
  CDR3 for beta chain variable domain of TCR clone 192419 (TRBV29-1, TRBJ2-1)
CSVFHGVAEQFF

SEQ ID NO: 384839 - protein, 15 aa, Homo sapiens
  CDR3 for alpha chain variable domain of TCR clone 192420 (TRAV30, TRAJ57)
CGTAIPQGGSEKLVF

SEQ ID NO: 384840 - protein, 15 aa, Homo sapiens
  CDR3 for beta chain variable domain of TCR clone 192420 (TRBV28, TRBJ2-1)
CASSIIAGGRSEQFF

SEQ ID NO: 384841 - protein, 15 aa, Homo sapiens
  CDR3 for alpha chain variable domain of TCR clone 192421 (TRAV21, TRAJ57)
CAVIITQGGSEKLVF

SEQ ID NO: 384842 - protein, 13 aa, Homo sapiens
  CDR3 for beta chain variable domain of TCR clone 192421 (TRBV5-1, TRBJ2-2)
APSLIWIPGELFF

SEQ ID NO: 384843 - protein, 23 aa, Homo sapiens
  CDR3 for alpha chain variable domain of TCR clone 192422 (TRAV2, TRAJ9)
CAVEDRGTGGFKLSLEPEQDYLL

SEQ ID NO: 384844 - protein, 16 aa, Homo sapiens
  CDR3 for beta chain variable domain of TCR clone 192422 (TRBV24-1, TRBJ2-3)
CATSDPGTGATDTQYF

SEQ ID NO: 384845 - protein, 14 aa, Homo sapiens
  CDR3 for alpha chain variable domain of TCR clone 192423 (TRAV1-2, TRAJ8)
CAVREDTGFQKLVF

SEQ ID NO: 384846 - protein, 15 aa, Homo sapiens
  CDR3 for beta chain variable domain of TCR clone 192423 (TRBV6-3, TRBJ2-7)
GASSSPGTGFYEQYF

SEQ ID NO: 384847 - protein, 13 aa, Homo sapiens
  CDR3 for alpha chain variable domain of TCR clone 192424 (TRAV8-3, TRAJ43)
CAVGPDNNNDMRF

SEQ ID NO: 384848 - protein, 16 aa, Homo sapiens
  CDR3 for beta chain variable domain of TCR clone 192424 (TRBV28, TRBJ2-2)
CASSLEGGSNTGELFF

SEQ ID NO: 384849 - protein, 15 aa, Homo sapiens
  CDR3 for alpha chain variable domain of TCR clone 192425 (TRAV12-2, TRAJ53)
CAVNGGGGSNYKLTF

SEQ ID NO: 384850 - protein, 17 aa, Homo sapiens
  CDR3 for beta chain variable domain of TCR clone 192425 (TRBV7-3, TRBJ2-3)
CASSLMKRMQGADTQYF

SEQ ID NO: 384851 - protein, 14 aa, Homo sapiens
  CDR3 for alpha chain variable domain of TCR clone 192426 (TRAV1-2, TRAJ16)
CAINRFSDGQKLLF

SEQ ID NO: 384852 - protein, 15 aa, Homo sapiens
  CDR3 for beta chain variable domain of TCR clone 192426 (TRBV3-1, TRBJ2-5)
CASSANLGGPETQYF

SEQ ID NO: 384853 - protein, 15 aa, Homo sapiens
  CDR3 for alpha chain variable domain of TCR clone 192427 (TRAV27, TRAJ38)
CAARRNAGNNRKLIW

SEQ ID NO: 384854 - protein, 13 aa, Homo sapiens
  CDR3 for beta chain variable domain of TCR clone 192427 (TRBV5-1, TRBJ2-1)
CASRPFGYNEQFF

SEQ ID NO: 384855 - protein, 15 aa, Homo sapiens
  CDR3 for alpha chain variable domain of TCR clone 192428 (TRAV8-4, TRAJ29)
CAVSEDFRGNTPLVF

SEQ ID NO: 384856 - protein, 16 aa, Homo sapiens
  CDR3 for beta chain variable domain of TCR clone 192428 (TRBV11-2, TRBJ2-7)
CASSPTTGGVSYEQYF

SEQ ID NO: 384857 - protein, 17 aa, Homo sapiens
  CDR3 for alpha chain variable domain of TCR clone 192429 (TRAV3, TRAJ12)
CAVRDGGRMDSSYKLIF

SEQ ID NO: 384858 - protein, 14 aa, Homo sapiens
  CDR3 for beta chain variable domain of TCR clone 192429 (TRBV7-9, TRBJ1-2)
CASSRQGANYGYTC

SEQ ID NO: 384859 - protein, 14 aa, Homo sapiens
  CDR3 for alpha chain variable domain of TCR clone 192430 (TRAV12-2, TRAJ13)
CAVKKTGGCQKVTF

SEQ ID NO: 384860 - protein, 15 aa, Homo sapiens
  CDR3 for beta chain variable domain of TCR clone 192430 (TRBV27, TRBJ2-1)
CASSNGGGSANEQFF

SEQ ID NO: 384861 - protein, 12 aa, Homo sapiens
  CDR3 for alpha chain variable domain of TCR clone 192431 (TRAV13-1, TRAJ48)
CAARVGGEKLTF

SEQ ID NO: 384862 - protein, 14 aa, Homo sapiens
  CDR3 for beta chain variable domain of TCR clone 192431 (TRBV7-2, TRBJ1-2)
CASSQTGSTYGYTF

SEQ ID NO: 384863 - protein, 13 aa, Homo sapiens
  CDR3 for alpha chain variable domain of TCR clone 192432 (TRAV1-2, TRAJ9)
CAALNTGGFKTIF

SEQ ID NO: 384864 - protein, 11 aa, Homo sapiens
  CDR3 for beta chain variable domain of TCR clone 192432 (TRBV12-4, TRBJ2-2)
CASSSAGELFF

SEQ ID NO: 384865 - protein, 14 aa, Homo sapiens
  CDR3 for alpha chain variable domain of TCR clone 192433 (TRAV12-1, TRAJ42)
CVVIYGGSQGNLIF

SEQ ID NO: 384866 - protein, 15 aa, Homo sapiens
  CDR3 for beta chain variable domain of TCR clone 192433 (TRBV4-1, TRBJ1-4)
CASSDTGGTNEKLFF

SEQ ID NO: 384867 - protein, 14 aa, Homo sapiens
  CDR3 for alpha chain variable domain of TCR clone 192434 (TRAV12-3, TRAJ33)
CAMSAPGSNYQLTW

SEQ ID NO: 384868 - protein, 12 aa, Homo sapiens
  CDR3 for beta chain variable domain of TCR clone 192434 (TRBV7-8, TRBJ2-7)
CASSLGDREQYF

SEQ ID NO: 384869 - protein, 12 aa, Homo sapiens
  CDR3 for alpha chain variable domain of TCR clone 192435 (TRAV12-2, TRAJ10)
WGVTGGGNKLTF

SEQ ID NO: 384870 - protein, 12 aa, Homo sapiens
  CDR3 for beta chain variable domain of TCR clone 192435 (TRBV5-4, TRBJ2-2)
CASIDQGGELLF

SEQ ID NO: 384871 - protein, 14 aa, Homo sapiens
  CDR3 for alpha chain variable domain of TCR clone 192436 (TRAV21, TRAJ38)
CAVANAGNNRKPIW

SEQ ID NO: 384872 - protein, 16 aa, Homo sapiens
  CDR3 for beta chain variable domain of TCR clone 192436 (TRBV5-4, TRBJ2-1)
CASSLALAGAYNEQFF

SEQ ID NO: 384873 - protein, 16 aa, Homo sapiens
  CDR3 for alpha chain variable domain of TCR clone 192437 (TRAV30, TRAJ24)
CGTEIVDADSWGKFQF

SEQ ID NO: 384874 - protein, 14 aa, Homo sapiens
  CDR3 for beta chain variable domain of TCR clone 192437 (TRBV7-3, TRBJ2-7)
CASSLKANSYEQYF

SEQ ID NO: 384875 - protein, 15 aa, Homo sapiens
  CDR3 for alpha chain variable domain of TCR clone 192438 (TRAV3, TRAJ29)
CAVRDLYSGNTPLVF

SEQ ID NO: 384876 - protein, 14 aa, Homo sapiens
  CDR3 for beta chain variable domain of TCR clone 192438 (TRBV11-2, TRBJ2-5)
CASSRTGGIETQYF

SEQ ID NO: 384877 - protein, 13 aa, Homo sapiens
  CDR3 for alpha chain variable domain of TCR clone 192439 (TRAV21, TRAJ27)
CAARPGNAGNSTF

SEQ ID NO: 384878 - protein, 15 aa, Homo sapiens
  CDR3 for beta chain variable domain of TCR clone 192439 (TRBV11-3, TRBJ2-7)
CASSPGPASSYEQYF

SEQ ID NO: 384879 - protein, 16 aa, Homo sapiens
  CDR3 for alpha chain variable domain of TCR clone 192440 (TRAV30, TRAJ24)
CGTEIVDDDSWGKFQF

SEQ ID NO: 384880 - protein, 15 aa, Homo sapiens
  CDR3 for beta chain variable domain of TCR clone 192440 (TRBV11-3, TRBJ2-3)
CASLKDGREGDTQYF

SEQ ID NO: 384881 - protein, 14 aa, Homo sapiens
  CDR3 for alpha chain variable domain of TCR clone 192441 (TRAV1-2, TRAJ16)
CAVNRFSDGQKLLF

SEQ ID NO: 384882 - protein, 16 aa, Homo sapiens
  CDR3 for beta chain variable domain of TCR clone 192441 (TRBV19, TRBJ2-1)
CASSKAGLSSYNEQFL

SEQ ID NO: 384883 - protein, 13 aa, Homo sapiens
  CDR3 for alpha chain variable domain of TCR clone 192442 (TRAV8-3, TRAJ28)
CAVGAVGSHQLTF

SEQ ID NO: 384884 - protein, 19 aa, Homo sapiens
  CDR3 for beta chain variable domain of TCR clone 192442 (TRBV25-1, TRBJ2-2)
CAILVYRVDRGRKTGELSF

SEQ ID NO: 384885 - protein, 13 aa, Homo sapiens
  CDR3 for alpha chain variable domain of TCR clone 192443 (TRAV3, TRAJ26)
CAVRGAEGQNFVF

SEQ ID NO: 384886 - protein, 15 aa, Homo sapiens
  CDR3 for beta chain variable domain of TCR clone 192443 (TRBV5-1, TRBJ2-1)
CASSPPRAPYNEQFF

SEQ ID NO: 384887 - protein, 11 aa, Homo sapiens
  CDR3 for alpha chain variable domain of TCR clone 192444 (TRAV27, TRAJ47)
CAGAYGNKLVF

SEQ ID NO: 384888 - protein, 13 aa, Homo sapiens
  CDR3 for beta chain variable domain of TCR clone 192444 (TRBV4-1, TRBJ2-2)
CASSQENTGELFF

SEQ ID NO: 384889 - protein, 14 aa, Homo sapiens
  CDR3 for alpha chain variable domain of TCR clone 192445 (TRAV12-1, TRAJ12)
CVVTRMDSSYKLIF

SEQ ID NO: 384890 - protein, 14 aa, Homo sapiens
  CDR3 for beta chain variable domain of TCR clone 192445 (TRBV20-1, TRBJ1-1)
CSAQTRIGGTEAFF

SEQ ID NO: 384891 - protein, 14 aa, Homo sapiens
  CDR3 for alpha chain variable domain of TCR clone 192446 (TRAV9-2, TRAJ39)
CALYIYNAGNMLTF

SEQ ID NO: 384892 - protein, 11 aa, Homo sapiens
  CDR3 for beta chain variable domain of TCR clone 192446 (TRBV5-5, TRBJ2-3)
CASSLTDTQYF

SEQ ID NO: 384893 - protein, 12 aa, Homo sapiens
  CDR3 for alpha chain variable domain of TCR clone 192447 (TRAV12-3, TRAJ40)
CAVTSGTYKYIF

SEQ ID NO: 384894 - protein, 16 aa, Homo sapiens
  CDR3 for beta chain variable domain of TCR clone 192447 (TRBV19, TRBJ2-1)
CASSMGGGSSYNEQFF

SEQ ID NO: 384895 - protein, 12 aa, Homo sapiens
  CDR3 for alpha chain variable domain of TCR clone 192448 (TRAV12-2, TRAJ10)
WGVTGGGNKLTF

SEQ ID NO: 384896 - protein, 13 aa, Homo sapiens
  CDR3 for beta chain variable domain of TCR clone 192448 (TRBV2, TRBJ2-1)
CASSGSSSGEQFF

SEQ ID NO: 384897 - protein, 14 aa, Homo sapiens
  CDR3 for alpha chain variable domain of TCR clone 192449 (TRAV1-2, TRAJ16)
CAVNRFSDGQKLLF

SEQ ID NO: 384898 - protein, 16 aa, Homo sapiens
  CDR3 for beta chain variable domain of TCR clone 192449 (TRBV12-5, TRBJ2-5)
CASGPRTSGKQEAQYF

SEQ ID NO: 384899 - protein, 13 aa, Homo sapiens
  CDR3 for alpha chain variable domain of TCR clone 192450 (TRAV8-6, TRAJ21)
CAVSPSSLNKFYF

SEQ ID NO: 384900 - protein, 14 aa, Homo sapiens
  CDR3 for beta chain variable domain of TCR clone 192450 (TRBV7-2, TRBJ2-7)
CASRSQGAAYEQYF

SEQ ID NO: 384901 - protein, 15 aa, Homo sapiens
  CDR3 for alpha chain variable domain of TCR clone 192451 (TRAV26-1, TRAJ42)
CIVRVKGGSQGNLIF

SEQ ID NO: 384902 - protein, 15 aa, Homo sapiens
  CDR3 for beta chain variable domain of TCR clone 192451 (TRBV20-1, TRBJ2-7)
CSARDRVSGMDEQYF

SEQ ID NO: 384903 - protein, 17 aa, Homo sapiens
  CDR3 for alpha chain variable domain of TCR clone 192452 (TRAV1-2, TRAJ8)
CAVRDHDENTGFQKLVF

SEQ ID NO: 384904 - protein, 16 aa, Homo sapiens
  CDR3 for beta chain variable domain of TCR clone 192452 (TRBV7-9, TRBJ2-2)
CASSGFGGANTGELFS

SEQ ID NO: 384905 - protein, 11 aa, Homo sapiens
  CDR3 for alpha chain variable domain of TCR clone 192453 (TRAV2, TRAJ13)
CASGGYQKVTF

SEQ ID NO: 384906 - protein, 12 aa, Homo sapiens
  CDR3 for beta chain variable domain of TCR clone 192453 (TRBV7-9, TRBJ2-7)
CASSLEGYEQYF

SEQ ID NO: 384907 - protein, 13 aa, Homo sapiens
  CDR3 for alpha chain variable domain of TCR clone 192454 (TRAV21, TRAJ20)
CAVGLRVDYKLSF

SEQ ID NO: 384908 - protein, 15 aa, Homo sapiens
  CDR3 for beta chain variable domain of TCR clone 192454 (TRBV4-1, TRBJ2-5)
CASSQWDLYQETQYF

SEQ ID NO: 384909 - protein, 15 aa, Homo sapiens
  CDR3 for alpha chain variable domain of TCR clone 192455 (TRAV2, TRAJ24)
CAVEVLTDSWAKFQF

SEQ ID NO: 384910 - protein, 13 aa, Homo sapiens
  CDR3 for beta chain variable domain of TCR clone 192455 (TRBV10-2, TRBJ2-7)
CASGTSGGYEQYF

SEQ ID NO: 384911 - protein, 16 aa, Homo sapiens
  CDR3 for alpha chain variable domain of TCR clone 192456 (TRAV16, TRAJ57)
CAPYLITQGGSEKLVF

SEQ ID NO: 384912 - protein, 17 aa, Homo sapiens
  CDR3 for beta chain variable domain of TCR clone 192456 (TRBV24-1, TRBJ2-4)
CATSDAEAWGVRNIQYF

SEQ ID NO: 384913 - protein, 14 aa, Homo sapiens
  CDR3 for alpha chain variable domain of TCR clone 192457 (TRAV29/DV5, TRAJ36)
CAARRKTGANNLFF

SEQ ID NO: 384914 - protein, 12 aa, Homo sapiens
  CDR3 for beta chain variable domain of TCR clone 192457 (TRBV14, TRBJ2-5)
CACSQLKETQYF

SEQ ID NO: 384915 - protein, 15 aa, Homo sapiens
  CDR3 for alpha chain variable domain of TCR clone 192458 (TRAV4, TRAJ39)
CLVGPNNNACNMLTF

SEQ ID NO: 384916 - protein, 14 aa, Homo sapiens
  CDR3 for beta chain variable domain of TCR clone 192458 (TRBV19, TRBJ2-7)
CASNFRDTFTGMYF

SEQ ID NO: 384917 - protein, 12 aa, Homo sapiens
  CDR3 for alpha chain variable domain of TCR clone 192459 (TRAV8-1, TRAJ26)
CAVNNYGQNFVF

SEQ ID NO: 384918 - protein, 15 aa, Homo sapiens
  CDR3 for beta chain variable domain of TCR clone 192459 (TRBV7-3, TRBJ2-1)
CASSYFRGTYNEQFF

SEQ ID NO: 384919 - protein, 15 aa, Homo sapiens
  CDR3 for alpha chain variable domain of TCR clone 192460 (TRAV17, TRAJ28)
CATDPSGAGSYQLTF

SEQ ID NO: 384920 - protein, 12 aa, Homo sapiens
  CDR3 for beta chain variable domain of TCR clone 192460 (TRBV19, TRBJ1-5)
CASSIAQQPQHF

SEQ ID NO: 384921 - protein, 11 aa, Homo sapiens
  CDR3 for alpha chain variable domain of TCR clone 192461 (TRAV21, TRAJ20)
CCRVNDYKLSF

SEQ ID NO: 384922 - protein, 15 aa, Homo sapiens
  CDR3 for beta chain variable domain of TCR clone 192461 (TRBV2, TRBJ2-2)
CASSRQGTNTGELFF

SEQ ID NO: 384923 - protein, 14 aa, Homo sapiens
  CDR3 for alpha chain variable domain of TCR clone 192462 (TRAV1-2, TRAJ16)
CAVNRFSDGEKLLF

SEQ ID NO: 384924 - protein, 15 aa, Homo sapiens
  CDR3 for beta chain variable domain of TCR clone 192462 (TRBV9, TRBJ2-1)
CASSLAGSSYNEQFF

SEQ ID NO: 384925 - protein, 14 aa, Homo sapiens
  CDR3 for alpha chain variable domain of TCR clone 192463 (TRAV17, TRAJ57)
CATDPQGGSEKLVF

SEQ ID NO: 384926 - protein, 20 aa, Homo sapiens
  CDR3 for beta chain variable domain of TCR clone 192463 (TRBV7-8, TRBJ2-2)
SASSHLFPGPTIHITGELFF

SEQ ID NO: 384927 - protein, 14 aa, Homo sapiens
  CDR3 for alpha chain variable domain of TCR clone 192464 (TRAV26-1, TRAJ54)
CIVRRTQGAQKLVF

SEQ ID NO: 384928 - protein, 16 aa, Homo sapiens
  CDR3 for beta chain variable domain of TCR clone 192464 (TRBV4-2, TRBJ2-3)
CASSQELAGDTDTQYF

SEQ ID NO: 384929 - protein, 13 aa, Homo sapiens
  CDR3 for alpha chain variable domain of TCR clone 192465 (TRAV16, TRAJ22)
SAMLAGSAMQLTF

SEQ ID NO: 384930 - protein, 18 aa, Homo sapiens
  CDR3 for beta chain variable domain of TCR clone 192465 (TRBV7-2, TRBJ2-3)
CASSLETSRGRKADTQYF

SEQ ID NO: 384931 - protein, 12 aa, Homo sapiens
  CDR3 for alpha chain variable domain of TCR clone 192466 (TRAV1-2, TRAJ26)
CAVRYYGQNIVF

SEQ ID NO: 384932 - protein, 14 aa, Homo sapiens
  CDR3 for beta chain variable domain of TCR clone 192466 (TRBV11-1, TRBJ2-7)
CASSFRQGSYEQYF

SEQ ID NO: 384933 - protein, 11 aa, Homo sapiens
  CDR3 for alpha chain variable domain of TCR clone 192467 (TRAV13-2, TRAJ45)
VTGGGADGLTF

SEQ ID NO: 384934 - protein, 17 aa, Homo sapiens
  CDR3 for beta chain variable domain of TCR clone 192467 (TRBV19, TRBJ1-1)
CTSSIAGRGLMNTEAFF

SEQ ID NO: 384935 - protein, 12 aa, Homo sapiens
  CDR3 for alpha chain variable domain of TCR clone 192468 (TRAV16, TRAJ10)
CSRTGGGNKLTF

SEQ ID NO: 384936 - protein, 14 aa, Homo sapiens
  CDR3 for beta chain variable domain of TCR clone 192468 (TRBV19, TRBJ2-1)
CASPTCVLSGEQFF

SEQ ID NO: 384937 - protein, 13 aa, Homo sapiens
  CDR3 for alpha chain variable domain of TCR clone 192469 (TRAV6, TRAJ20)
CALAVSNDYKLSF

SEQ ID NO: 384938 - protein, 16 aa, Homo sapiens
  CDR3 for beta chain variable domain of TCR clone 192469 (TRBV7-9, TRBJ2-1)
CASSDVAGGSYKEQFF

SEQ ID NO: 384939 - protein, 13 aa, Homo sapiens
  CDR3 for alpha chain variable domain of TCR clone 192470 (TRAV12-3, TRAJ40)
CAMSDSGTYKYIF

SEQ ID NO: 384940 - protein, 14 aa, Homo sapiens
  CDR3 for beta chain variable domain of TCR clone 192470 (TRBV7-2, TRBJ1-5)
CDSSTQGTGQPQHF

SEQ ID NO: 384941 - protein, 22 aa, Homo sapiens
  CDR3 for alpha chain variable domain of TCR clone 192471 (TRAV40, )
CLLVDGIPDIQNPDPAVYQLRD

SEQ ID NO: 384942 - protein, 16 aa, Homo sapiens
  CDR3 for beta chain variable domain of TCR clone 192471 (TRBV20-1, TRBJ1-5)
CSAELPGQQTNQPQHF

SEQ ID NO: 384943 - protein, 14 aa, Homo sapiens
  CDR3 for alpha chain variable domain of TCR clone 192472 (TRAV3, TRAJ37)
CAVKESGNTGKLIF

SEQ ID NO: 384944 - protein, 16 aa, Homo sapiens
  CDR3 for beta chain variable domain of TCR clone 192472 (TRBV2, TRBJ1-5)
CASSENRGGQRSILVM

SEQ ID NO: 384945 - protein, 14 aa, Homo sapiens
  CDR3 for alpha chain variable domain of TCR clone 192473 (TRAV17, TRAJ57)
CATDPQGGSEKLVF

SEQ ID NO: 384946 - protein, 13 aa, Homo sapiens
  CDR3 for beta chain variable domain of TCR clone 192473 (TRBV13, TRBJ2-7)
CASSKGLTYEQYF

SEQ ID NO: 384947 - protein, 16 aa, Homo sapiens
  CDR3 for alpha chain variable domain of TCR clone 192474 (TRAV3, TRAJ37)
CAVRGKGSGKTGKLIF

SEQ ID NO: 384948 - protein, 15 aa, Homo sapiens
  CDR3 for beta chain variable domain of TCR clone 192474 (TRBV20-1, TRBJ2-1)
CSARGGTRYYNEQFF

SEQ ID NO: 384949 - protein, 14 aa, Homo sapiens
  CDR3 for alpha chain variable domain of TCR clone 192475 (TRAV26-1, TRAJ38)
CLADNAGNNRKLFW

SEQ ID NO: 384950 - protein, 12 aa, Homo sapiens
  CDR3 for beta chain variable domain of TCR clone 192475 (TRBV5-1, TRBJ2-7)
CASSFRGYEQYF

SEQ ID NO: 384951 - protein, 12 aa, Homo sapiens
  CDR3 for alpha chain variable domain of TCR clone 192476 (TRAV13-1, TRAJ21)
CAAKEGFNKFYF

SEQ ID NO: 384952 - protein, 17 aa, Homo sapiens
  CDR3 for beta chain variable domain of TCR clone 192476 (TRBV20-1, TRBJ2-1)
CSASPSGLAGSYNEQFF

SEQ ID NO: 384953 - protein, 18 aa, Homo sapiens
  CDR3 for alpha chain variable domain of TCR clone 192477 (TRAV8-6, TRAJ52)
CAVSRANAGGTSYGKLTF

SEQ ID NO: 384954 - protein, 16 aa, Homo sapiens
  CDR3 for beta chain variable domain of TCR clone 192477 (TRBV7-3, TRBJ2-2)
CASSLKRGTLSGELFF

SEQ ID NO: 384955 - protein, 13 aa, Homo sapiens
  CDR3 for alpha chain variable domain of TCR clone 192478 (TRAV13-1, TRAJ5)
CAAEHTGRRALTF

SEQ ID NO: 384956 - protein, 15 aa, Homo sapiens
  CDR3 for beta chain variable domain of TCR clone 192478 (TRBV10-3, TRBJ1-3)
CAISDSQGAGNTIYF

SEQ ID NO: 384957 - protein, 15 aa, Homo sapiens
  CDR3 for alpha chain variable domain of TCR clone 192479 (TRAV3, TRAJ22)
CAVRDRGGSARQPTF

SEQ ID NO: 384958 - protein, 15 aa, Homo sapiens
  CDR3 for beta chain variable domain of TCR clone 192479 (TRBV20-1, TRBJ1-5)
CSAREGGYSNQPQHF

SEQ ID NO: 384959 - protein, 13 aa, Homo sapiens
  CDR3 for alpha chain variable domain of TCR clone 192480 (TRAV20, TRAJ21)
CAVEGYNFNKFYF

SEQ ID NO: 384960 - protein, 15 aa, Homo sapiens
  CDR3 for beta chain variable domain of TCR clone 192480 (TRBV7-8, TRBJ1-5)
CASSLERRGLEPQHF

SEQ ID NO: 384961 - protein, 14 aa, Homo sapiens
  CDR3 for alpha chain variable domain of TCR clone 192481 (TRAV12-1, TRAJ9)
CVVTGYTGGFKTIF

SEQ ID NO: 384962 - protein, 13 aa, Homo sapiens
  CDR3 for beta chain variable domain of TCR clone 192481 (TRBV20-1, TRBJ1-1)
CSARDGGKNEALF

SEQ ID NO: 384963 - protein, 12 aa, Homo sapiens
  CDR3 for alpha chain variable domain of TCR clone 192482 (TRAV14/DV4, TRAJ33)
CAMREGRDRTIS

SEQ ID NO: 384964 - protein, 15 aa, Homo sapiens
  CDR3 for beta chain variable domain of TCR clone 192482 (TRBV5-5, TRBJ1-5)
CASSSTPGSNQPQHF

SEQ ID NO: 384965 - protein, 14 aa, Homo sapiens
  CDR3 for alpha chain variable domain of TCR clone 192483 (TRAV38-1, TRAJ40)
CALRPTPGTSKYIF

SEQ ID NO: 384966 - protein, 14 aa, Homo sapiens
  CDR3 for beta chain variable domain of TCR clone 192483 (TRBV25-1, TRBJ1-1)
CASTHLGGNTEAFF

SEQ ID NO: 384967 - protein, 12 aa, Homo sapiens
  CDR3 for alpha chain variable domain of TCR clone 192484 (TRAV9-2, TRAJ26)
CALRGYGQNFVF

SEQ ID NO: 384968 - protein, 12 aa, Homo sapiens
  CDR3 for beta chain variable domain of TCR clone 192484 (TRBV29-1, TRBJ2-3)
CSVTVGADTQYF

SEQ ID NO: 384969 - protein, 17 aa, Homo sapiens
  CDR3 for alpha chain variable domain of TCR clone 192485 (TRAV26-1, TRAJ28)
CIVRALYSGAGSYKLTF

SEQ ID NO: 384970 - protein, 12 aa, Homo sapiens
  CDR3 for beta chain variable domain of TCR clone 192485 (TRBV12-4, TRBJ2-1)
CASRQTENEQFF

SEQ ID NO: 384971 - protein, 13 aa, Homo sapiens
  CDR3 for alpha chain variable domain of TCR clone 192486 (TRAV2, TRAJ40)
CALVTSGTYKYIF

SEQ ID NO: 384972 - protein, 14 aa, Homo sapiens
  CDR3 for beta chain variable domain of TCR clone 192486 (TRBV19, TRBJ2-1)
CASPTFVLRGEQFF

SEQ ID NO: 384973 - protein, 17 aa, Homo sapiens
  CDR3 for alpha chain variable domain of TCR clone 192487 (TRAV3, TRAJ28)
CAVRPLYSGAVSYQLTF

SEQ ID NO: 384974 - protein, 16 aa, Homo sapiens
  CDR3 for beta chain variable domain of TCR clone 192487 (TRBV4-2, TRBJ1-4)
CASSQARGPTNEKLFF

SEQ ID NO: 384975 - protein, 11 aa, Homo sapiens
  CDR3 for alpha chain variable domain of TCR clone 192488 (TRAV21, TRAJ11)
CAVNGYSTLTF

SEQ ID NO: 384976 - protein, 16 aa, Homo sapiens
  CDR3 for beta chain variable domain of TCR clone 192488 (TRBV5-1, TRBJ2-3)
CASSLGLAVYTDTQYF

SEQ ID NO: 384977 - protein, 18 aa, Homo sapiens
  CDR3 for alpha chain variable domain of TCR clone 192489 (TRAV21, TRAJ52)
CAVRPSPAGGTSYGKLTF

SEQ ID NO: 384978 - protein, 16 aa, Homo sapiens
  CDR3 for beta chain variable domain of TCR clone 192489 (TRBV7-3, TRBJ2-1)
CASSVEGYRAYNEQFF

SEQ ID NO: 384979 - protein, 13 aa, Homo sapiens
  CDR3 for alpha chain variable domain of TCR clone 192490 (TRAV12-2, TRAJ10)
CAVPTGGGNKLTF

SEQ ID NO: 384980 - protein, 15 aa, Homo sapiens
  CDR3 for beta chain variable domain of TCR clone 192490 (TRBV27, TRBJ2-1)
CASSNGGGSSNEQFF

SEQ ID NO: 384981 - protein, 12 aa, Homo sapiens
  CDR3 for alpha chain variable domain of TCR clone 192491 (TRAV13-1, TRAJ49)
CAASIWGNQFYF

SEQ ID NO: 384982 - protein, 14 aa, Homo sapiens
  CDR3 for beta chain variable domain of TCR clone 192491 (TRBV12-4, TRBJ1-1)
CAGSLDGLNTEAFF

SEQ ID NO: 384983 - protein, 17 aa, Homo sapiens
  CDR3 for alpha chain variable domain of TCR clone 192492 (TRAV4, TRAJ18)
CLVGERSVGSTLGRLYF

SEQ ID NO: 384984 - protein, 16 aa, Homo sapiens
  CDR3 for beta chain variable domain of TCR clone 192492 (TRBV15, TRBJ1-4)
CATSRDSLPGREKLFF

SEQ ID NO: 384985 - protein, 14 aa, Homo sapiens
  CDR3 for alpha chain variable domain of TCR clone 192493 (TRAV1-2, TRAJ8)
CAVREDTGFQTLVF

SEQ ID NO: 384986 - protein, 14 aa, Homo sapiens
  CDR3 for beta chain variable domain of TCR clone 192493 (TRBV7-2, TRBJ2-1)
CASSLVAGRNEQFF

SEQ ID NO: 384987 - protein, 13 aa, Homo sapiens
  CDR3 for alpha chain variable domain of TCR clone 192494 (TRAV8-3, TRAJ28)
CAVGAVGSYKLPF

SEQ ID NO: 384988 - protein, 14 aa, Homo sapiens
  CDR3 for beta chain variable domain of TCR clone 192494 (TRBV7-2, TRBJ2-7)
CASRSQGAAYEQYF

SEQ ID NO: 384989 - protein, 16 aa, Homo sapiens
  CDR3 for alpha chain variable domain of TCR clone 192495 (TRAV26-1, TRAJ45)
CIVEKYSGGGADGLTF

SEQ ID NO: 384990 - protein, 15 aa, Homo sapiens
  CDR3 for beta chain variable domain of TCR clone 192495 (TRBV15, TRBJ2-7)
CHPQRPIQQAYGQYF

SEQ ID NO: 384991 - protein, 13 aa, Homo sapiens
  CDR3 for alpha chain variable domain of TCR clone 192496 (TRAV27, TRAJ41)
CAGEGNSGYALNF

SEQ ID NO: 384992 - protein, 16 aa, Homo sapiens
  CDR3 for beta chain variable domain of TCR clone 192496 (TRBV19, TRBJ1-5)
CASSTWTGGGNQPQHF

SEQ ID NO: 384993 - protein, 11 aa, Homo sapiens
  CDR3 for alpha chain variable domain of TCR clone 192497 (TRAV1-2, TRAJ20)
CAVSNDYKLSF

SEQ ID NO: 384994 - protein, 16 aa, Homo sapiens
  CDR3 for beta chain variable domain of TCR clone 192497 (TRBV29-1, TRBJ2-6)
CSVEDITYSVANVLTF

SEQ ID NO: 384995 - protein, 14 aa, Homo sapiens
  CDR3 for alpha chain variable domain of TCR clone 192498 (TRAV17, TRAJ22)
CATSPSGTARQLTF

SEQ ID NO: 384996 - protein, 15 aa, Homo sapiens
  CDR3 for beta chain variable domain of TCR clone 192498 (TRBV4-1, TRBJ2-5)
CASSQWDLYQETQYF

SEQ ID NO: 384997 - protein, 14 aa, Homo sapiens
  CDR3 for alpha chain variable domain of TCR clone 192499 (TRAV12-3, TRAJ10)
SHLPLTGGGNKLTF

SEQ ID NO: 384998 - protein, 12 aa, Homo sapiens
  CDR3 for beta chain variable domain of TCR clone 192499 (TRBV12-4, TRBJ2-3)
CASSLGQDTQYF

SEQ ID NO: 384999 - protein, 13 aa, Homo sapiens
  CDR3 for alpha chain variable domain of TCR clone 192500 (TRAV30, TRAJ6)
SGFIEGGSYIPTF

SEQ ID NO: 385000 - protein, 13 aa, Homo sapiens
  CDR3 for beta chain variable domain of TCR clone 192500 (TRBV5-4, TRBJ2-5)
CASSPVSQETQYF

SEQ ID NO: 385001 - protein, 15 aa, Homo sapiens
  CDR3 for alpha chain variable domain of TCR clone 192501 (TRAV3, TRAJ13)
CAVRVYSGGYQKVTF

SEQ ID NO: 385002 - protein, 18 aa, Homo sapiens
  CDR3 for beta chain variable domain of TCR clone 192501 (TRBV11-2, TRBJ2-3)
CASSLGGASRGAPNTQYF

SEQ ID NO: 385003 - protein, 16 aa, Homo sapiens
  CDR3 for alpha chain variable domain of TCR clone 192502 (TRAV23/DV6, TRAJ48)
CAASGVVNFGNEQLTF

SEQ ID NO: 385004 - protein, 15 aa, Homo sapiens
  CDR3 for beta chain variable domain of TCR clone 192502 (TRBV20-1, TRBJ2-5)
CSAGLAGVSQETQYF

SEQ ID NO: 385005 - protein, 16 aa, Homo sapiens
  CDR3 for alpha chain variable domain of TCR clone 192503 (TRAV38-2/DV8, TRAJ45)
CAYTTTSGGGADGLTF

SEQ ID NO: 385006 - protein, 12 aa, Homo sapiens
  CDR3 for beta chain variable domain of TCR clone 192503 (TRBV7-8, TRBJ2-7)
CASSLGDREQYF

SEQ ID NO: 385007 - protein, 11 aa, Homo sapiens
  CDR3 for alpha chain variable domain of TCR clone 192504 (TRAV1-2, TRAJ11)
CAVRGYSTLTF

SEQ ID NO: 385008 - protein, 18 aa, Homo sapiens
  CDR3 for beta chain variable domain of TCR clone 192504 (TRBV20-1, TRBJ2-6)
CSAETTPAHGSGANVLTF

SEQ ID NO: 385009 - protein, 13 aa, Homo sapiens
  CDR3 for alpha chain variable domain of TCR clone 192505 (TRAV17, TRAJ39)
CATVSNAGNMLTF

SEQ ID NO: 385010 - protein, 15 aa, Homo sapiens
  CDR3 for beta chain variable domain of TCR clone 192505 (TRBV3-1, TRBJ1-2)
CASSPTRLPEGGYTF

SEQ ID NO: 385011 - protein, 13 aa, Homo sapiens
  CDR3 for alpha chain variable domain of TCR clone 192506 (TRAV17, TRAJ9)
CATDYTGGFKNIF

SEQ ID NO: 385012 - protein, 16 aa, Homo sapiens
  CDR3 for beta chain variable domain of TCR clone 192506 (TRBV7-7, TRBJ2-1)
CASSLATGTSYNEQFF

SEQ ID NO: 385013 - protein, 17 aa, Homo sapiens
  CDR3 for alpha chain variable domain of TCR clone 192507 (TRAV8-6, TRAJ58)
CAVSSWVGETSGSRLTF

SEQ ID NO: 385014 - protein, 15 aa, Homo sapiens
  CDR3 for beta chain variable domain of TCR clone 192507 (TRBV20-1, TRBJ2-7)
CSARDRVSGIDEQYF

SEQ ID NO: 385015 - protein, 14 aa, Homo sapiens
  CDR3 for alpha chain variable domain of TCR clone 192508 (TRAV38-1, TRAJ40)
CALRPTSGTYKYIF

SEQ ID NO: 385016 - protein, 14 aa, Homo sapiens
  CDR3 for beta chain variable domain of TCR clone 192508 (TRBV5-5, TRBJ1-5)
CASSGQGVDQPQHF

SEQ ID NO: 385017 - protein, 14 aa, Homo sapiens
  CDR3 for alpha chain variable domain of TCR clone 192509 (TRAV13-1, TRAJ3)
CSKRGYSSASKIIF

SEQ ID NO: 385018 - protein, 14 aa, Homo sapiens
  CDR3 for beta chain variable domain of TCR clone 192509 (TRBV7-3, TRBJ2-1)
CASSLSGSYNEQFF

SEQ ID NO: 385019 - protein, 11 aa, Homo sapiens
  CDR3 for alpha chain variable domain of TCR clone 192510 (TRAV23/DV6, TRAJ29)
CAASRNTPLVF

SEQ ID NO: 385020 - protein, 14 aa, Homo sapiens
  CDR3 for beta chain variable domain of TCR clone 192510 (TRBV10-3, TRBJ2-5)
CAIKSGGQGETQYF

SEQ ID NO: 385021 - protein, 15 aa, Homo sapiens
  CDR3 for alpha chain variable domain of TCR clone 192511 (TRAV13-2, TRAJ17)
CAETTLKAAGNKLTF

SEQ ID NO: 385022 - protein, 15 aa, Homo sapiens
  CDR3 for beta chain variable domain of TCR clone 192511 (TRBV20-1, TRBJ2-7)
CSARDRVSGMDEQYF

SEQ ID NO: 385023 - protein, 14 aa, Homo sapiens
  CDR3 for alpha chain variable domain of TCR clone 192512 (TRAV12-2, TRAJ40)
CAAKIPSGTYKYIF

SEQ ID NO: 385024 - protein, 15 aa, Homo sapiens
  CDR3 for beta chain variable domain of TCR clone 192512 (TRBV27, TRBJ2-7)
CASSTAGTGSYEQYF

SEQ ID NO: 385025 - protein, 15 aa, Homo sapiens
  CDR3 for alpha chain variable domain of TCR clone 192513 (TRAV23/DV6, TRAJ12)
CAAIDLGAMDSSYKL

SEQ ID NO: 385026 - protein, 12 aa, Homo sapiens
  CDR3 for beta chain variable domain of TCR clone 192513 (TRBV18, TRBJ1-4)
CASSPSREKLFF

SEQ ID NO: 385027 - protein, 13 aa, Homo sapiens
  CDR3 for alpha chain variable domain of TCR clone 192514 (TRAV29/DV5, TRAJ31)
CAASRNNNARLMF

SEQ ID NO: 385028 - protein, 15 aa, Homo sapiens
  CDR3 for beta chain variable domain of TCR clone 192514 (TRBV5-1, TRBJ2-1)
CASSPPRAPYNEQFF

SEQ ID NO: 385029 - protein, 13 aa, Homo sapiens
  CDR3 for alpha chain variable domain of TCR clone 192515 (TRAV27, TRAJ41)
CAGAGNHGYALNF

SEQ ID NO: 385030 - protein, 14 aa, Homo sapiens
  CDR3 for beta chain variable domain of TCR clone 192515 (TRBV7-2, TRBJ1-1)
CASSFLTGTTEAFF

SEQ ID NO: 385031 - protein, 23 aa, Homo sapiens
  CDR3 for alpha chain variable domain of TCR clone 192516 (TRAV12-2, TRAJ43)
CAFDMRFGAGTRLTVNQISRTLT

SEQ ID NO: 385032 - protein, 18 aa, Homo sapiens
  CDR3 for beta chain variable domain of TCR clone 192516 (TRBV20-1, TRBJ2-3)
CSASGLAGGPGTTDTQYF

SEQ ID NO: 385033 - protein, 15 aa, Homo sapiens
  CDR3 for alpha chain variable domain of TCR clone 192517 (TRAV14/DV4, TRAJ10)
CAMRELTGGGNKLTF

SEQ ID NO: 385034 - protein, 16 aa, Homo sapiens
  CDR3 for beta chain variable domain of TCR clone 192517 (TRBV29-1, TRBJ2-7)
CSVEDAEDGTAYEQYF

SEQ ID NO: 385035 - protein, 13 aa, Homo sapiens
  CDR3 for alpha chain variable domain of TCR clone 192518 (TRAV8-6, TRAJ40)
CAVSVTGTYKYIF

SEQ ID NO: 385036 - protein, 15 aa, Homo sapiens
  CDR3 for beta chain variable domain of TCR clone 192518 (TRBV4-1, TRBJ2-3)
CASGRGQGISDTQYF

SEQ ID NO: 385037 - protein, 15 aa, Homo sapiens
  CDR3 for alpha chain variable domain of TCR clone 192519 (TRAV27, TRAJ38)
CAARRNAGNNRKLIW

SEQ ID NO: 385038 - protein, 15 aa, Homo sapiens
  CDR3 for beta chain variable domain of TCR clone 192519 (TRBV7-2, TRBJ2-3)
CASSLAGAFIDTQYF

SEQ ID NO: 385039 - protein, 14 aa, Homo sapiens
  CDR3 for alpha chain variable domain of TCR clone 192520 (TRAV26-1, TRAJ21)
CIVRPPYNFNKFYF

SEQ ID NO: 385040 - protein, 14 aa, Homo sapiens
  CDR3 for beta chain variable domain of TCR clone 192520 (TRBV11-3, TRBJ2-1)
CASSATTIGSIQFF

SEQ ID NO: 385041 - protein, 17 aa, Homo sapiens
  CDR3 for alpha chain variable domain of TCR clone 192521 (TRAV27, TRAJ26)
CAGARAPLDNYGQNFVL

SEQ ID NO: 385042 - protein, 15 aa, Homo sapiens
  CDR3 for beta chain variable domain of TCR clone 192521 (TRBV11-2, TRBJ2-5)
CASSPRSGGLETQYF

SEQ ID NO: 385043 - protein, 13 aa, Homo sapiens
  CDR3 for alpha chain variable domain of TCR clone 192522 (TRAV17, TRAJ9)
CATGYTGGFRTIF

SEQ ID NO: 385044 - protein, 16 aa, Homo sapiens
  CDR3 for beta chain variable domain of TCR clone 192522 (TRBV7-7, TRBJ2-1)
CASSLASGTSYNEQFF

SEQ ID NO: 385045 - protein, 15 aa, Homo sapiens
  CDR3 for alpha chain variable domain of TCR clone 192523 (TRAV8-4, TRAJ48)
CAVSAAYLGNEKLTF

SEQ ID NO: 385046 - protein, 12 aa, Homo sapiens
  CDR3 for beta chain variable domain of TCR clone 192523 (TRBV3-1, TRBJ2-5)
CASSQRGETQFF

SEQ ID NO: 385047 - protein, 15 aa, Homo sapiens
  CDR3 for alpha chain variable domain of TCR clone 192524 (TRAV26-1, TRAJ29)
CIVRVEGSGNTPLVF

SEQ ID NO: 385048 - protein, 15 aa, Homo sapiens
  CDR3 for beta chain variable domain of TCR clone 192524 (TRBV7-2, TRBJ2-7)
CASSLKGALTYEQYF

SEQ ID NO: 385049 - protein, 17 aa, Homo sapiens
  CDR3 for alpha chain variable domain of TCR clone 192525 (TRAV3, TRAJ42)
CAVRDRDYGGSKGNLIF

SEQ ID NO: 385050 - protein, 15 aa, Homo sapiens
  CDR3 for beta chain variable domain of TCR clone 192525 (TRBV6-6, TRBJ2-7)
CASSYSYGGSYKQYF

SEQ ID NO: 385051 - protein, 14 aa, Homo sapiens
  CDR3 for alpha chain variable domain of TCR clone 192526 (TRAV12-2, TRAJ40)
CAVKIPSGTYKYIF

SEQ ID NO: 385052 - protein, 14 aa, Homo sapiens
  CDR3 for beta chain variable domain of TCR clone 192526 (TRBV20-1, TRBJ1-1)
SAVHKHGLGTEAFF

SEQ ID NO: 385053 - protein, 12 aa, Homo sapiens
  CDR3 for alpha chain variable domain of TCR clone 192527 (TRAV12-2, TRAJ10)
WGFTGGGNKLTF

SEQ ID NO: 385054 - protein, 16 aa, Homo sapiens
  CDR3 for beta chain variable domain of TCR clone 192527 (TRBV24-1, TRBJ2-3)
CATSDRRQDLTDTQYF

SEQ ID NO: 385055 - protein, 13 aa, Homo sapiens
  CDR3 for alpha chain variable domain of TCR clone 192528 (TRAV8-6, TRAJ24)
CAVSSDSWGKLQF

SEQ ID NO: 385056 - protein, 15 aa, Homo sapiens
  CDR3 for beta chain variable domain of TCR clone 192528 (TRBV5-1, TRBJ2-1)
CASSPPRAPYNEHFF

SEQ ID NO: 385057 - protein, 14 aa, Homo sapiens
  CDR3 for alpha chain variable domain of TCR clone 192529 (TRAV12-2, TRAJ6)
CAVTVSGGSYIPTF

SEQ ID NO: 385058 - protein, 15 aa, Homo sapiens
  CDR3 for beta chain variable domain of TCR clone 192529 (TRBV12-4, TRBJ2-1)
CASSLGTSAVNEQFF

SEQ ID NO: 385059 - protein, 12 aa, Homo sapiens
  CDR3 for alpha chain variable domain of TCR clone 192530 (TRAV12-3, TRAJ17)
CAMTLTGNQLTF

SEQ ID NO: 385060 - protein, 15 aa, Homo sapiens
  CDR3 for beta chain variable domain of TCR clone 192530 (TRBV7-6, TRBJ2-1)
CASSLGGQSHNEQFF

SEQ ID NO: 385061 - protein, 13 aa, Homo sapiens
  CDR3 for alpha chain variable domain of TCR clone 192531 (TRAV13-1, TRAJ17)
CAADGAAGNRLTF

SEQ ID NO: 385062 - protein, 14 aa, Homo sapiens
  CDR3 for beta chain variable domain of TCR clone 192531 (TRBV11-2, TRBJ1-3)
CASSLTQGRNTIYF

SEQ ID NO: 385063 - protein, 13 aa, Homo sapiens
  CDR3 for alpha chain variable domain of TCR clone 192532 (TRAV13-2, TRAJ48)
CAEMDFGNEKLTF

SEQ ID NO: 385064 - protein, 15 aa, Homo sapiens
  CDR3 for beta chain variable domain of TCR clone 192532 (TRBV28, TRBJ2-1)
RASSGLAEVDNEQFF

SEQ ID NO: 385065 - protein, 13 aa, Homo sapiens
  CDR3 for alpha chain variable domain of TCR clone 192533 (TRAV8-3, TRAJ43)
CAVVPYNNSDMRF

SEQ ID NO: 385066 - protein, 15 aa, Homo sapiens
  CDR3 for beta chain variable domain of TCR clone 192533 (TRBV2, TRBJ2-7)
CASTRLGSGATEQYF

SEQ ID NO: 385067 - protein, 15 aa, Homo sapiens
  CDR3 for alpha chain variable domain of TCR clone 192534 (TRAV41, TRAJ22)
CASDLSWGSARQLTF

SEQ ID NO: 385068 - protein, 14 aa, Homo sapiens
  CDR3 for beta chain variable domain of TCR clone 192534 (TRBV6-1, TRBJ1-1)
CASSGTGLNTEAFF

SEQ ID NO: 385069 - protein, 15 aa, Homo sapiens
  CDR3 for alpha chain variable domain of TCR clone 192535 (TRAV12-1, TRAJ44)
CVVGTPQGTSSKLTF

SEQ ID NO: 385070 - protein, 13 aa, Homo sapiens
  CDR3 for beta chain variable domain of TCR clone 192535 (TRBV27, TRBJ2-1)
CASSSGSYNEQFF

SEQ ID NO: 385071 - protein, 13 aa, Homo sapiens
  CDR3 for alpha chain variable domain of TCR clone 192536 (TRAV2, TRAJ15)
CAVASQAGNALIF

SEQ ID NO: 385072 - protein, 16 aa, Homo sapiens
  CDR3 for beta chain variable domain of TCR clone 192536 (TRBV20-1, TRBJ1-4)
CSAPGQGLLTNEKLFF

SEQ ID NO: 385073 - protein, 12 aa, Homo sapiens
  CDR3 for alpha chain variable domain of TCR clone 192537 (TRAV27, TRAJ13)
CAGVRGYQKVTF

SEQ ID NO: 385074 - protein, 16 aa, Homo sapiens
  CDR3 for beta chain variable domain of TCR clone 192537 (TRBV28, TRBJ2-1)
CASSSTYSGSLNEQFF

SEQ ID NO: 385075 - protein, 16 aa, Homo sapiens
  CDR3 for alpha chain variable domain of TCR clone 192538 (TRAV12-2, TRAJ45)
CAVNRGSGGGADGLTF

SEQ ID NO: 385076 - protein, 15 aa, Homo sapiens
  CDR3 for beta chain variable domain of TCR clone 192538 (TRBV9, TRBJ1-6)
CASSVAGTGDSPLHF

SEQ ID NO: 385077 - protein, 14 aa, Homo sapiens
  CDR3 for alpha chain variable domain of TCR clone 192539 (TRAV9-2, TRAJ39)
CALYIYNAGNMLTF

SEQ ID NO: 385078 - protein, 15 aa, Homo sapiens
  CDR3 for beta chain variable domain of TCR clone 192539 (TRBV19, TRBJ1-6)
CASSTQGAVGSTLHF

SEQ ID NO: 385079 - protein, 12 aa, Homo sapiens
  CDR3 for alpha chain variable domain of TCR clone 192540 (TRAV21, TRAJ29)
CAVTSGNTPLVF

SEQ ID NO: 385080 - protein, 15 aa, Homo sapiens
  CDR3 for beta chain variable domain of TCR clone 192540 (TRBV12-4, TRBJ1-2)
CASRLGVAGNYGYTV

SEQ ID NO: 385081 - protein, 15 aa, Homo sapiens
  CDR3 for alpha chain variable domain of TCR clone 192541 (TRAV25, TRAJ10)
CAGPLLTGGGNKLTF

SEQ ID NO: 385082 - protein, 15 aa, Homo sapiens
  CDR3 for beta chain variable domain of TCR clone 192541 (TRBV2, TRBJ2-1)
CASSEGREGDNEQFF

SEQ ID NO: 385083 - protein, 13 aa, Homo sapiens
  CDR3 for alpha chain variable domain of TCR clone 192542 (TRAV2, TRAJ40)
CAVVTSGTYKYIF

SEQ ID NO: 385084 - protein, 14 aa, Homo sapiens
  CDR3 for beta chain variable domain of TCR clone 192542 (TRBV19, TRBJ2-1)
CARPTFVLSSEQFF

SEQ ID NO: 385085 - protein, 15 aa, Homo sapiens
  CDR3 for alpha chain variable domain of TCR clone 192543 (TRAV8-3, TRAJ32)
CSVGPYGGATNKLIF

SEQ ID NO: 385086 - protein, 14 aa, Homo sapiens
  CDR3 for beta chain variable domain of TCR clone 192543 (TRBV29-1, TRBJ2-2)
CSVLAETNTGELFF

SEQ ID NO: 385087 - protein, 13 aa, Homo sapiens
  CDR3 for alpha chain variable domain of TCR clone 192544 (TRAV3, TRAJ8)
CAVRFTGFQKLVF

SEQ ID NO: 385088 - protein, 14 aa, Homo sapiens
  CDR3 for beta chain variable domain of TCR clone 192544 (TRBV7-2, TRBJ2-7)
CASSPKTSFYEQYF

SEQ ID NO: 385089 - protein, 14 aa, Homo sapiens
  CDR3 for alpha chain variable domain of TCR clone 192545 (TRAV13-1, TRAJ3)
CAESKSSSASKIIF

SEQ ID NO: 385090 - protein, 16 aa, Homo sapiens
  CDR3 for beta chain variable domain of TCR clone 192545 (TRBV15, TRBJ2-3)
CATSRDLGIVTDTQYF

SEQ ID NO: 385091 - protein, 14 aa, Homo sapiens
  CDR3 for alpha chain variable domain of TCR clone 192546 (TRAV13-1, TRAJ35)
CAASKGGFGNVLHR

SEQ ID NO: 385092 - protein, 16 aa, Homo sapiens
  CDR3 for beta chain variable domain of TCR clone 192546 (TRBV2, TRBJ2-3)
CQHRGAPRRWTDTQYF

SEQ ID NO: 385093 - protein, 19 aa, Homo sapiens
  CDR3 for alpha chain variable domain of TCR clone 192547 (TRAV25, TRAJ20)
TATQTTDVGILPHDYKLSF

SEQ ID NO: 385094 - protein, 14 aa, Homo sapiens
  CDR3 for beta chain variable domain of TCR clone 192547 (TRBV12-4, TRBJ2-3)
CASSLGQGTDTQYF

SEQ ID NO: 385095 - protein, 16 aa, Homo sapiens
  CDR3 for alpha chain variable domain of TCR clone 192548 (TRAV3, TRAJ10)
SAVRDMRAGGGNKLTF

SEQ ID NO: 385096 - protein, 15 aa, Homo sapiens
  CDR3 for beta chain variable domain of TCR clone 192548 (TRBV20-1, TRBJ2-5)
CSAGLAGVSQETQYF

SEQ ID NO: 385097 - protein, 14 aa, Homo sapiens
  CDR3 for alpha chain variable domain of TCR clone 192549 (TRAV38-1, TRAJ39)
CAFAYNNAGNMLTF

SEQ ID NO: 385098 - protein, 15 aa, Homo sapiens
  CDR3 for beta chain variable domain of TCR clone 192549 (TRBV19, TRBJ2-6)
CASSIGPSGAKVLTF

SEQ ID NO: 385099 - protein, 13 aa, Homo sapiens
  CDR3 for alpha chain variable domain of TCR clone 192550 (TRAV13-1, TRAJ23)
CAASTILGGKLIF

SEQ ID NO: 385100 - protein, 14 aa, Homo sapiens
  CDR3 for beta chain variable domain of TCR clone 192550 (TRBV19, TRBJ2-1)
CASPTFVLRGEQFF

SEQ ID NO: 385101 - protein, 18 aa, Homo sapiens
  CDR3 for alpha chain variable domain of TCR clone 192551 (TRAV26-2, TRAJ54)
CILRDVEVGIQGAQKLVF

SEQ ID NO: 385102 - protein, 14 aa, Homo sapiens
  CDR3 for beta chain variable domain of TCR clone 192551 (TRBV12-4, TRBJ2-5)
CASSFGASGGTQYF

SEQ ID NO: 385103 - protein, 15 aa, Homo sapiens
  CDR3 for alpha chain variable domain of TCR clone 192552 (TRAV3, TRAJ7)
CAVRDKDNGNNRLAF

SEQ ID NO: 385104 - protein, 19 aa, Homo sapiens
  CDR3 for beta chain variable domain of TCR clone 192552 (TRBV5-8, TRBJ2-3)
CASSFLGTSGSLRTDTQYF

SEQ ID NO: 385105 - protein, 15 aa, Homo sapiens
  CDR3 for alpha chain variable domain of TCR clone 192553 (TRAV12-3, TRAJ6)
CAMSATTGGSYIPTF

SEQ ID NO: 385106 - protein, 15 aa, Homo sapiens
  CDR3 for beta chain variable domain of TCR clone 192553 (TRBV7-2, TRBJ2-5)
CSSSGILAGAETQYF

SEQ ID NO: 385107 - protein, 12 aa, Homo sapiens
  CDR3 for alpha chain variable domain of TCR clone 192554 (TRAV12-2, TRAJ47)
CAVAEYGNKLAC

SEQ ID NO: 385108 - protein, 14 aa, Homo sapiens
  CDR3 for beta chain variable domain of TCR clone 192554 (TRBV20-1, TRBJ1-1)
CSAMGGTANTEAFF

SEQ ID NO: 385109 - protein, 14 aa, Homo sapiens
  CDR3 for alpha chain variable domain of TCR clone 192555 (TRAV2, TRAJ9)
CAVEDRSGGFTTIF

SEQ ID NO: 385110 - protein, 18 aa, Homo sapiens
  CDR3 for beta chain variable domain of TCR clone 192555 (TRBV11-2, TRBJ2-3)
CASSLGGASRGAPNTQYF

SEQ ID NO: 385111 - protein, 16 aa, Homo sapiens
  CDR3 for alpha chain variable domain of TCR clone 192556 (TRAV26-1, TRAJ37)
FIVRGDGSGNTGKLIF

SEQ ID NO: 385112 - protein, 14 aa, Homo sapiens
  CDR3 for beta chain variable domain of TCR clone 192556 (TRBV12-5, TRBJ2-5)
CASGSRTHQETQYF

SEQ ID NO: 385113 - protein, 11 aa, Homo sapiens
  CDR3 for alpha chain variable domain of TCR clone 192557 (TRAV3, TRAJ21)
CAVGNFNKFYF

SEQ ID NO: 385114 - protein, 16 aa, Homo sapiens
  CDR3 for beta chain variable domain of TCR clone 192557 (TRBV6-1, TRBJ1-2)
CASSGAWQGRSHGYTF

SEQ ID NO: 385115 - protein, 14 aa, Homo sapiens
  CDR3 for alpha chain variable domain of TCR clone 192558 (TRAV27, TRAJ33)
CRSGSRDSNYQLIW

SEQ ID NO: 385116 - protein, 15 aa, Homo sapiens
  CDR3 for beta chain variable domain of TCR clone 192558 (TRBV27, TRBJ2-1)
CASSNGGGSSNEQFF

SEQ ID NO: 385117 - protein, 14 aa, Homo sapiens
  CDR3 for alpha chain variable domain of TCR clone 192559 (TRAV8-4, TRAJ34)
CAVSDPGDTDKLIF

SEQ ID NO: 385118 - protein, 16 aa, Homo sapiens
  CDR3 for beta chain variable domain of TCR clone 192559 (TRBV7-3, TRBJ2-2)
CASSLKRGTLSGELFF

SEQ ID NO: 385119 - protein, 13 aa, Homo sapiens
  CDR3 for alpha chain variable domain of TCR clone 192560 (TRAV21, TRAJ20)
CAVGLRVNYKLSF

SEQ ID NO: 385120 - protein, 16 aa, Homo sapiens
  CDR3 for beta chain variable domain of TCR clone 192560 (TRBV9, TRBJ2-2)
CASSAMGKGNTGELFF

SEQ ID NO: 385121 - protein, 13 aa, Homo sapiens
  CDR3 for alpha chain variable domain of TCR clone 192561 (TRAV8-6, TRAJ33)
CAVSEGSNYQLIW

SEQ ID NO: 385122 - protein, 14 aa, Homo sapiens
  CDR3 for beta chain variable domain of TCR clone 192561 (TRBV7-2, TRBJ2-7)
CASRSQGAAYEQYF

SEQ ID NO: 385123 - protein, 13 aa, Homo sapiens
  CDR3 for alpha chain variable domain of TCR clone 192562 (TRAV13-1, TRAJ12)
CAASPDSSYKLIF

SEQ ID NO: 385124 - protein, 13 aa, Homo sapiens
  CDR3 for beta chain variable domain of TCR clone 192562 (TRBV12-4, TRBJ1-2)
CASSSGLTVISTF

SEQ ID NO: 385125 - protein, 14 aa, Homo sapiens
  CDR3 for alpha chain variable domain of TCR clone 192563 (TRAV34, TRAJ44)
CGADGTGTASKLTF

SEQ ID NO: 385126 - protein, 15 aa, Homo sapiens
  CDR3 for beta chain variable domain of TCR clone 192563 (TRBV5-1, TRBJ2-1)
CASSLVANSYNEQFF

SEQ ID NO: 385127 - protein, 14 aa, Homo sapiens
  CDR3 for alpha chain variable domain of TCR clone 192564 (TRAV12-1, TRAJ12)
CVVTRMDSSYKLIF

SEQ ID NO: 385128 - protein, 14 aa, Homo sapiens
  CDR3 for beta chain variable domain of TCR clone 192564 (TRBV28, TRBJ1-2)
CASRIQGANYGYTF

SEQ ID NO: 385129 - protein, 12 aa, Homo sapiens
  CDR3 for alpha chain variable domain of TCR clone 192565 (TRAV12-3, TRAJ17)
CAMALTGNNLTF

SEQ ID NO: 385130 - protein, 15 aa, Homo sapiens
  CDR3 for beta chain variable domain of TCR clone 192565 (TRBV20-1, TRBJ2-7)
CSARDRVSGMDEQYF

SEQ ID NO: 385131 - protein, 17 aa, Homo sapiens
  CDR3 for alpha chain variable domain of TCR clone 192566 (TRAV13-1, TRAJ28)
CSASPPYSGAGSYQLTF

SEQ ID NO: 385132 - protein, 15 aa, Homo sapiens
  CDR3 for beta chain variable domain of TCR clone 192566 (TRBV20-1, TRBJ2-1)
CSARGGTRYYNEQFF

SEQ ID NO: 385133 - protein, 15 aa, Homo sapiens
  CDR3 for alpha chain variable domain of TCR clone 192567 (TRAV4, TRAJ39)
CLVGPNNNAGNMLTF

SEQ ID NO: 385134 - protein, 14 aa, Homo sapiens
  CDR3 for beta chain variable domain of TCR clone 192567 (TRBV12-4, TRBJ1-1)
CASRQGQEYTEAFF

SEQ ID NO: 385135 - protein, 16 aa, Homo sapiens
  CDR3 for alpha chain variable domain of TCR clone 192568 (TRAV26-2, TRAJ57)
CILRDVGSGGSAKLVF

SEQ ID NO: 385136 - protein, 13 aa, Homo sapiens
  CDR3 for beta chain variable domain of TCR clone 192568 (TRBV18, TRBJ2-3)
CASSPGVTDTQYF

SEQ ID NO: 385137 - protein, 17 aa, Homo sapiens
  CDR3 for alpha chain variable domain of TCR clone 192569 (TRAV13-1, TRAJ52)
RAASSGAGGTSYGKLTF

SEQ ID NO: 385138 - protein, 15 aa, Homo sapiens
  CDR3 for beta chain variable domain of TCR clone 192569 (TRBV27, TRBJ2-1)
CASSNGGGSSNEQFF

SEQ ID NO: 385139 - protein, 13 aa, Homo sapiens
  CDR3 for alpha chain variable domain of TCR clone 192570 (TRAV27, TRAJ41)
CAGEGNSGYALNF

SEQ ID NO: 385140 - protein, 13 aa, Homo sapiens
  CDR3 for beta chain variable domain of TCR clone 192570 (TRBV28, TRBJ2-7)
CASTPGLAGEQYF

SEQ ID NO: 385141 - protein, 10 aa, Homo sapiens
  CDR3 for alpha chain variable domain of TCR clone 192571 (TRAV2, TRAJ15)
RGQAGTALIF

SEQ ID NO: 385142 - protein, 14 aa, Homo sapiens
  CDR3 for beta chain variable domain of TCR clone 192571 (TRBV11-2, TRBJ2-5)
CASSRTGGIETQYF

SEQ ID NO: 385143 - protein, 11 aa, Homo sapiens
  CDR3 for alpha chain variable domain of TCR clone 192572 (TRAV13-2, TRAJ47)
CAEIRGSKLVF

SEQ ID NO: 385144 - protein, 16 aa, Homo sapiens
  CDR3 for beta chain variable domain of TCR clone 192572 (TRBV4-1, TRBJ1-2)
CASSQDAGQVLYGYTF

SEQ ID NO: 385145 - protein, 10 aa, Homo sapiens
  CDR3 for alpha chain variable domain of TCR clone 192573 (TRAV36/DV7, TRAJ38)
CAANNRKLIW

SEQ ID NO: 385146 - protein, 18 aa, Homo sapiens
  CDR3 for beta chain variable domain of TCR clone 192573 (TRBV10-2, TRBJ2-2)
CISAPAGHRHADAGELFF

SEQ ID NO: 385147 - protein, 14 aa, Homo sapiens
  CDR3 for alpha chain variable domain of TCR clone 192574 (TRAV16, TRAJ29)
CALTRNSGNTPLVF

SEQ ID NO: 385148 - protein, 12 aa, Homo sapiens
  CDR3 for beta chain variable domain of TCR clone 192574 (TRBV2, TRBJ2-1)
CAKQEGYNEQFF

SEQ ID NO: 385149 - protein, 12 aa, Homo sapiens
  CDR3 for alpha chain variable domain of TCR clone 192575 (TRAV13-1, TRAJ21)
CAAKEGLNKFYF

SEQ ID NO: 385150 - protein, 13 aa, Homo sapiens
  CDR3 for beta chain variable domain of TCR clone 192575 (TRBV7-9, TRBJ2-1)
CASSLGTVNEQFF

SEQ ID NO: 385151 - protein, 12 aa, Homo sapiens
  CDR3 for alpha chain variable domain of TCR clone 192576 (TRAV1-2, TRAJ9)
CDGYTGGFKTIF

SEQ ID NO: 385152 - protein, 15 aa, Homo sapiens
  CDR3 for beta chain variable domain of TCR clone 192576 (TRBV11-2, TRBJ2-1)
CASSPAGQSLNEQFF

SEQ ID NO: 385153 - protein, 15 aa, Homo sapiens
  CDR3 for alpha chain variable domain of TCR clone 192577 (TRAV23/DV6, TRAJ28)
CAALLAYSGAGSYQL

SEQ ID NO: 385154 - protein, 12 aa, Homo sapiens
  CDR3 for beta chain variable domain of TCR clone 192577 (TRBV11-2, TRBJ2-1)
CASSPGNNEQFF

SEQ ID NO: 385155 - protein, 15 aa, Homo sapiens
  CDR3 for alpha chain variable domain of TCR clone 192578 (TRAV29/DV5, TRAJ29)
CAASERSSGNTPLVF

SEQ ID NO: 385156 - protein, 14 aa, Homo sapiens
  CDR3 for beta chain variable domain of TCR clone 192578 (TRBV7-2, TRBJ2-7)
CAGSPKTSFYEQYF

SEQ ID NO: 385157 - protein, 17 aa, Homo sapiens
  CDR3 for alpha chain variable domain of TCR clone 192579 (TRAV12-2, TRAJ48)
CASNETLTFGTGTRLTI

SEQ ID NO: 385158 - protein, 15 aa, Homo sapiens
  CDR3 for beta chain variable domain of TCR clone 192579 (TRBV5-1, TRBJ2-1)
CASSQAGYWWNEQFF

SEQ ID NO: 385159 - protein, 16 aa, Homo sapiens
  CDR3 for alpha chain variable domain of TCR clone 192580 (TRAV4, TRAJ22)
CLVGDLYSGSARQLTF

SEQ ID NO: 385160 - protein, 11 aa, Homo sapiens
  CDR3 for beta chain variable domain of TCR clone 192580 (TRBV7-9, TRBJ2-5)
CASSLGETQYF

SEQ ID NO: 385161 - protein, 17 aa, Homo sapiens
  CDR3 for alpha chain variable domain of TCR clone 192581 (TRAV3, TRAJ6)
CAVRDGPRAGGSYIPTF

SEQ ID NO: 385162 - protein, 15 aa, Homo sapiens
  CDR3 for beta chain variable domain of TCR clone 192581 (TRBV11-3, TRBJ2-1)
CASSLAGQTYNEQFF

SEQ ID NO: 385163 - protein, 16 aa, Homo sapiens
  CDR3 for alpha chain variable domain of TCR clone 192582 (TRAV12-3, TRAJ53)
CAMSPGSGGSKYKPTF

SEQ ID NO: 385164 - protein, 11 aa, Homo sapiens
  CDR3 for beta chain variable domain of TCR clone 192582 (TRBV29-1, TRBJ2-5)
CSEDRTGTQYF

SEQ ID NO: 385165 - protein, 10 aa, Homo sapiens
  CDR3 for alpha chain variable domain of TCR clone 192583 (TRAV16, TRAJ22)
SAMYLRQLTF

SEQ ID NO: 385166 - protein, 15 aa, Homo sapiens
  CDR3 for beta chain variable domain of TCR clone 192583 (TRBV7-9, TRBJ1-6)
CASSSPARGNSPLHF

SEQ ID NO: 385167 - protein, 13 aa, Homo sapiens
  CDR3 for alpha chain variable domain of TCR clone 192584 (TRAV12-2, TRAJ7)
CAVSLYGNNRIAF

SEQ ID NO: 385168 - protein, 18 aa, Homo sapiens
  CDR3 for beta chain variable domain of TCR clone 192584 (TRBV4-2, TRBJ2-1)
CASSQQGLAASSYNEQFF

SEQ ID NO: 385169 - protein, 19 aa, Homo sapiens
  CDR3 for alpha chain variable domain of TCR clone 192585 (TRAV2, TRAJ20)
ILQVREADAAVYRDCKLSF

SEQ ID NO: 385170 - protein, 13 aa, Homo sapiens
  CDR3 for beta chain variable domain of TCR clone 192585 (TRBV15, TRBJ1-6)
CATSGGLNSPPHF

SEQ ID NO: 385171 - protein, 13 aa, Homo sapiens
  CDR3 for alpha chain variable domain of TCR clone 192586 (TRAV12-1, TRAJ26)
CMVRRNYGQNFVF

SEQ ID NO: 385172 - protein, 14 aa, Homo sapiens
  CDR3 for beta chain variable domain of TCR clone 192586 (TRBV6-3, TRBJ1-1)
CASRYTGESTEAFF

SEQ ID NO: 385173 - protein, 13 aa, Homo sapiens
  CDR3 for alpha chain variable domain of TCR clone 192587 (TRAV21, TRAJ27)
CAARPGNAGKSTF

SEQ ID NO: 385174 - protein, 14 aa, Homo sapiens
  CDR3 for beta chain variable domain of TCR clone 192587 (TRBV25-1, TRBJ1-1)
CASTHLGGNTDAFF

SEQ ID NO: 385175 - protein, 14 aa, Homo sapiens
  CDR3 for alpha chain variable domain of TCR clone 192588 (TRAV1-2, TRAJ16)
CAVNRFSDGQKLLF

SEQ ID NO: 385176 - protein, 16 aa, Homo sapiens
  CDR3 for beta chain variable domain of TCR clone 192588 (TRBV20-1, TRBJ1-4)
CSAPGQGLVTNEKLFF

SEQ ID NO: 385177 - protein, 14 aa, Homo sapiens
  CDR3 for alpha chain variable domain of TCR clone 192589 (TRAV38-1, TRAJ40)
CALRPTSGTYKYIF

SEQ ID NO: 385178 - protein, 11 aa, Homo sapiens
  CDR3 for beta chain variable domain of TCR clone 192589 (TRBV11-2, TRBJ2-2)
CASSLPGELFF

SEQ ID NO: 385179 - protein, 15 aa, Homo sapiens
  CDR3 for alpha chain variable domain of TCR clone 192590 (TRAV35, TRAJ40)
CAGQLGQAGNYKYIF

SEQ ID NO: 385180 - protein, 14 aa, Homo sapiens
  CDR3 for beta chain variable domain of TCR clone 192590 (TRBV7-3, TRBJ2-1)
CASSLTGGANEQFF

SEQ ID NO: 385181 - protein, 16 aa, Homo sapiens
  CDR3 for alpha chain variable domain of TCR clone 192591 (TRAV8-2, TRAJ50)
CVVSDHMKTSYDKVIF

SEQ ID NO: 385182 - protein, 15 aa, Homo sapiens
  CDR3 for beta chain variable domain of TCR clone 192591 (TRBV7-2, TRBJ2-1)
CVSSFQADEYNEQFF

SEQ ID NO: 385183 - protein, 14 aa, Homo sapiens
  CDR3 for alpha chain variable domain of TCR clone 192592 (TRAV12-3, TRAJ10)
SHLPLTGGGNKLTF

SEQ ID NO: 385184 - protein, 13 aa, Homo sapiens
  CDR3 for beta chain variable domain of TCR clone 192592 (TRBV7-6, TRBJ2-3)
CASSLAVGDAQYF

SEQ ID NO: 385185 - protein, 16 aa, Homo sapiens
  CDR3 for alpha chain variable domain of TCR clone 192593 (TRAV30, TRAJ57)
CGTGWAPQGGSEKLVF

SEQ ID NO: 385186 - protein, 14 aa, Homo sapiens
  CDR3 for beta chain variable domain of TCR clone 192593 (TRBV18, TRBJ1-1)
CARSPGFQGVEAFF

SEQ ID NO: 385187 - protein, 13 aa, Homo sapiens
  CDR3 for alpha chain variable domain of TCR clone 192594 (TRAV4, TRAJ16)
CLVGSSDGQKLLF

SEQ ID NO: 385188 - protein, 11 aa, Homo sapiens
  CDR3 for beta chain variable domain of TCR clone 192594 (TRBV11-2, TRBJ2-2)
CASSLPGELFF

SEQ ID NO: 385189 - protein, 11 aa, Homo sapiens
  CDR3 for alpha chain variable domain of TCR clone 192595 (TRAV39, TRAJ49)
CAVDISTPFYF

SEQ ID NO: 385190 - protein, 11 aa, Homo sapiens
  CDR3 for beta chain variable domain of TCR clone 192595 (TRBV7-8, TRBJ2-7)
CAGSLSLEQYF

SEQ ID NO: 385191 - protein, 14 aa, Homo sapiens
  CDR3 for alpha chain variable domain of TCR clone 192596 (TRAV3, TRAJ33)
CAVRDMDSNYQLIW

SEQ ID NO: 385192 - protein, 19 aa, Homo sapiens
  CDR3 for beta chain variable domain of TCR clone 192596 (TRBV7-3, TRBJ1-2)
CASSFPQGNEGELWLHLRF

SEQ ID NO: 385193 - protein, 16 aa, Homo sapiens
  CDR3 for alpha chain variable domain of TCR clone 192597 (TRAV1-2, TRAJ10)
CAVRGVLTGGGNKLTF

SEQ ID NO: 385194 - protein, 15 aa, Homo sapiens
  CDR3 for beta chain variable domain of TCR clone 192597 (TRBV29-1, TRBJ2-1)
CSVGRHALFYNEKFF

SEQ ID NO: 385195 - protein, 14 aa, Homo sapiens
  CDR3 for alpha chain variable domain of TCR clone 192598 (TRAV3, TRAJ6)
CAVRRTGRSYIPTF

SEQ ID NO: 385196 - protein, 13 aa, Homo sapiens
  CDR3 for beta chain variable domain of TCR clone 192598 (TRBV6-1, TRBJ1-3)
CASTLDSGNTIYF

SEQ ID NO: 385197 - protein, 12 aa, Homo sapiens
  CDR3 for alpha chain variable domain of TCR clone 192599 (TRAV21, TRAJ49)
CAVNAGGNQFYF

SEQ ID NO: 385198 - protein, 13 aa, Homo sapiens
  CDR3 for beta chain variable domain of TCR clone 192599 (TRBV2, TRBJ1-1)
CASSVLMNTEAFF

SEQ ID NO: 385199 - protein, 12 aa, Homo sapiens
  CDR3 for alpha chain variable domain of TCR clone 192600 (TRAV17, TRAJ20)
CATDSNDYKLSF

SEQ ID NO: 385200 - protein, 12 aa, Homo sapiens
  CDR3 for beta chain variable domain of TCR clone 192600 (TRBV7-8, TRBJ2-7)
CASSLGDREQYF

SEQ ID NO: 385201 - protein, 12 aa, Homo sapiens
  CDR3 for alpha chain variable domain of TCR clone 192601 (TRAV13-2, TRAJ8)
CASWLGFQKLVF

SEQ ID NO: 385202 - protein, 18 aa, Homo sapiens
  CDR3 for beta chain variable domain of TCR clone 192601 (TRBV11-2, TRBJ2-3)
CASSLGGASRGAPNTQYF

SEQ ID NO: 385203 - protein, 15 aa, Homo sapiens
  CDR3 for alpha chain variable domain of TCR clone 192602 (TRAV21, TRAJ53)
CATLNSGGSYYKLTF

SEQ ID NO: 385204 - protein, 16 aa, Homo sapiens
  CDR3 for beta chain variable domain of TCR clone 192602 (TRBV9, TRBJ2-1)
CASSVGGGGNYNEQFF

SEQ ID NO: 385205 - protein, 13 aa, Homo sapiens
  CDR3 for alpha chain variable domain of TCR clone 192603 (TRAV35, TRAJ36)
CAGSRIGANNLFF

SEQ ID NO: 385206 - protein, 15 aa, Homo sapiens
  CDR3 for beta chain variable domain of TCR clone 192603 (TRBV28, TRBJ2-5)
CASSPPWSYQETQYF

SEQ ID NO: 385207 - protein, 15 aa, Homo sapiens
  CDR3 for alpha chain variable domain of TCR clone 192604 (TRAV12-1, TRAJ4)
CVVNGVSGGYNKLIF

SEQ ID NO: 385208 - protein, 18 aa, Homo sapiens
  CDR3 for beta chain variable domain of TCR clone 192604 (TRBV6-5, TRBJ2-1)
CASSYSSRRAEVYNEQFF

SEQ ID NO: 385209 - protein, 13 aa, Homo sapiens
  CDR3 for alpha chain variable domain of TCR clone 192605 (TRAV36/DV7, TRAJ7)
CAVERYGNNRLAF

SEQ ID NO: 385210 - protein, 16 aa, Homo sapiens
  CDR3 for beta chain variable domain of TCR clone 192605 (TRBV5-4, TRBJ2-7)
CASSSKMTSGTYEQYF

SEQ ID NO: 385211 - protein, 12 aa, Homo sapiens
  CDR3 for alpha chain variable domain of TCR clone 192606 (TRAV1-2, TRAJ24)
CAVGGSWGKFQF

SEQ ID NO: 385212 - protein, 15 aa, Homo sapiens
  CDR3 for beta chain variable domain of TCR clone 192606 (TRBV9, TRBJ1-6)
CASSVAGTGDSPLHF

SEQ ID NO: 385213 - protein, 15 aa, Homo sapiens
  CDR3 for alpha chain variable domain of TCR clone 192607 (TRAV26-1, TRAJ15)
CIVRAANPAGTALIF

SEQ ID NO: 385214 - protein, 15 aa, Homo sapiens
  CDR3 for beta chain variable domain of TCR clone 192607 (TRBV20-1, TRBJ1-1)
CSARSAATSNTEAFF

SEQ ID NO: 385215 - protein, 12 aa, Homo sapiens
  CDR3 for alpha chain variable domain of TCR clone 192608 (TRAV12-3, TRAJ17)
CAMTLTGNKLTF

SEQ ID NO: 385216 - protein, 14 aa, Homo sapiens
  CDR3 for beta chain variable domain of TCR clone 192608 (TRBV20-1, TRBJ2-1)
CTAQIGGSANEQFF

SEQ ID NO: 385217 - protein, 14 aa, Homo sapiens
  CDR3 for alpha chain variable domain of TCR clone 192609 (TRAV38-1, TRAJ45)
CAYYSGGGADGLNF

SEQ ID NO: 385218 - protein, 14 aa, Homo sapiens
  CDR3 for beta chain variable domain of TCR clone 192609 (TRBV25-1, TRBJ1-1)
CASTHLGGNTEAFF

SEQ ID NO: 385219 - protein, 14 aa, Homo sapiens
  CDR3 for alpha chain variable domain of TCR clone 192610 (TRAV17, TRAJ56)
CATEDTGANSKLTF

SEQ ID NO: 385220 - protein, 16 aa, Homo sapiens
  CDR3 for beta chain variable domain of TCR clone 192610 (TRBV19, TRBJ2-1)
CASSAKLAGSYNEQFF

SEQ ID NO: 385221 - protein, 11 aa, Homo sapiens
  CDR3 for alpha chain variable domain of TCR clone 192611 (TRAV25, TRAJ23)
CGSNQGGKLIF

SEQ ID NO: 385222 - protein, 16 aa, Homo sapiens
  CDR3 for beta chain variable domain of TCR clone 192611 (TRBV7-3, TRBJ2-2)
CASSLKRGTLSGELFF

SEQ ID NO: 385223 - protein, 10 aa, Homo sapiens
  CDR3 for alpha chain variable domain of TCR clone 192612 (TRAV12-3, TRAJ18)
CAMSAEAQPW

SEQ ID NO: 385224 - protein, 13 aa, Homo sapiens
  CDR3 for beta chain variable domain of TCR clone 192612 (TRBV15, TRBJ1-6)
SATSGGLNSPLHF

SEQ ID NO: 385225 - protein, 12 aa, Homo sapiens
  CDR3 for alpha chain variable domain of TCR clone 192613 (TRAV8-3, TRAJ43)
CAVGAGNNDMRF

SEQ ID NO: 385226 - protein, 15 aa, Homo sapiens
  CDR3 for beta chain variable domain of TCR clone 192613 (TRBV28, TRBJ2-1)
CASSLDTSSYNEQFF

SEQ ID NO: 385227 - protein, 14 aa, Homo sapiens
  CDR3 for alpha chain variable domain of TCR clone 192614 (TRAV12-2, TRAJ13)
CAMKKTGGYQKVTF

SEQ ID NO: 385228 - protein, 16 aa, Homo sapiens
  CDR3 for beta chain variable domain of TCR clone 192614 (TRBV13, TRBJ2-2)
CASSPRTGEHTGELFF

SEQ ID NO: 385229 - protein, 15 aa, Homo sapiens
  CDR3 for alpha chain variable domain of TCR clone 192615 (TRAV4, TRAJ39)
CLVGPNNNAGNMLTF

SEQ ID NO: 385230 - protein, 15 aa, Homo sapiens
  CDR3 for beta chain variable domain of TCR clone 192615 (TRBV7-3, TRBJ2-1)
CASSPRDRGSNEQFF

SEQ ID NO: 385231 - protein, 11 aa, Homo sapiens
  CDR3 for alpha chain variable domain of TCR clone 192616 (TRAV12-2, TRAJ31)
CAILNNARLMF

SEQ ID NO: 385232 - protein, 13 aa, Homo sapiens
  CDR3 for beta chain variable domain of TCR clone 192616 (TRBV27, TRBJ2-1)
CASSSGSYNEQFF

SEQ ID NO: 385233 - protein, 15 aa, Homo sapiens
  CDR3 for alpha chain variable domain of TCR clone 192617 (TRAV41, TRAJ45)
CAASYSGGGADGLTC

SEQ ID NO: 385234 - protein, 14 aa, Homo sapiens
  CDR3 for beta chain variable domain of TCR clone 192617 (TRBV12-5, TRBJ2-5)
CASGSRTHQETQYF

SEQ ID NO: 385235 - protein, 11 aa, Homo sapiens
  CDR3 for alpha chain variable domain of TCR clone 192618 (TRAV21, TRAJ34)
CAVTNTVKLIF

SEQ ID NO: 385236 - protein, 17 aa, Homo sapiens
  CDR3 for beta chain variable domain of TCR clone 192618 (TRBV20-1, TRBJ2-1)
CSARSPSGGPPTMSSSS

SEQ ID NO: 385237 - protein, 13 aa, Homo sapiens
  CDR3 for alpha chain variable domain of TCR clone 192619 (TRAV29/DV5, TRAJ43)
CAASGGNNNDMRF

SEQ ID NO: 385238 - protein, 14 aa, Homo sapiens
  CDR3 for beta chain variable domain of TCR clone 192619 (TRBV5-4, TRBJ2-2)
CASRLDGGTGELFF

SEQ ID NO: 385239 - protein, 14 aa, Homo sapiens
  CDR3 for alpha chain variable domain of TCR clone 192620 (TRAV1-2, TRAJ16)
CAVNRFSAGQKLLF

SEQ ID NO: 385240 - protein, 15 aa, Homo sapiens
  CDR3 for beta chain variable domain of TCR clone 192620 (TRBV27, TRBJ2-3)
CASSSLAGVIDTQYF

SEQ ID NO: 385241 - protein, 12 aa, Homo sapiens
  CDR3 for alpha chain variable domain of TCR clone 192621 (TRAV38-1, TRAJ30)
CAFESEDDKIIF

SEQ ID NO: 385242 - protein, 14 aa, Homo sapiens
  CDR3 for beta chain variable domain of TCR clone 192621 (TRBV19, TRBJ2-1)
CASPTFVLSGEQFF

SEQ ID NO: 385243 - protein, 18 aa, Homo sapiens
  CDR3 for alpha chain variable domain of TCR clone 192622 (TRAV21, TRAJ52)
CAVRPSPAGCTSYGKLTF

SEQ ID NO: 385244 - protein, 17 aa, Homo sapiens
  CDR3 for beta chain variable domain of TCR clone 192622 (TRBV13, TRBJ2-3)
CACSLSRVAGGRNTQYF

SEQ ID NO: 385245 - protein, 16 aa, Homo sapiens
  CDR3 for alpha chain variable domain of TCR clone 192623 (TRAV12-3, TRAJ53)
CAMSPGSGGSNYKLTF

SEQ ID NO: 385246 - protein, 16 aa, Homo sapiens
  CDR3 for beta chain variable domain of TCR clone 192623 (TRBV13, TRBJ2-2)
CASSLGRGYGTGELFF

SEQ ID NO: 385247 - protein, 12 aa, Homo sapiens
  CDR3 for alpha chain variable domain of TCR clone 192624 (TRAV25, TRAJ53)
CQIGGSNYKLTF

SEQ ID NO: 385248 - protein, 15 aa, Homo sapiens
  CDR3 for beta chain variable domain of TCR clone 192624 (TRBV5-1, TRBJ2-2)
CASSWTSPNTGELFF

SEQ ID NO: 385249 - protein, 14 aa, Homo sapiens
  CDR3 for alpha chain variable domain of TCR clone 192625 (TRAV3, TRAJ9)
CAVRGNTGGFKTIF

SEQ ID NO: 385250 - protein, 14 aa, Homo sapiens
  CDR3 for beta chain variable domain of TCR clone 192625 (TRBV15, TRBJ2-1)
CATSGVQDYNEQFF

SEQ ID NO: 385251 - protein, 18 aa, Homo sapiens
  CDR3 for alpha chain variable domain of TCR clone 192626 (TRAV12-3, TRAJ52)
CAMSVGGAGGTSYGKLTF

SEQ ID NO: 385252 - protein, 12 aa, Homo sapiens
  CDR3 for beta chain variable domain of TCR clone 192626 (TRBV7-9, TRBJ1-4)
CASSTDREKLFF

SEQ ID NO: 385253 - protein, 12 aa, Homo sapiens
  CDR3 for alpha chain variable domain of TCR clone 192627 (TRAV13-1, TRAJ49)
CAAPNTGNQFYF

SEQ ID NO: 385254 - protein, 17 aa, Homo sapiens
  CDR3 for beta chain variable domain of TCR clone 192627 (TRBV25-1, TRBJ2-7)
CASSDARVVFSSYEQYV

SEQ ID NO: 385255 - protein, 13 aa, Homo sapiens
  CDR3 for alpha chain variable domain of TCR clone 192628 (TRAV12-3, TRAJ33)
CAMSVNSNYQLIW

SEQ ID NO: 385256 - protein, 16 aa, Homo sapiens
  CDR3 for beta chain variable domain of TCR clone 192628 (TRBV2, TRBJ2-4)
CASSEAPGGEQNIQYF

SEQ ID NO: 385257 - protein, 11 aa, Homo sapiens
  CDR3 for alpha chain variable domain of TCR clone 192629 (TRAV16, TRAJ33)
CALHSNSQLIW

SEQ ID NO: 385258 - protein, 15 aa, Homo sapiens
  CDR3 for beta chain variable domain of TCR clone 192629 (TRBV4-1, TRBJ2-7)
CASSQQGQGFDEHYF

SEQ ID NO: 385259 - protein, 15 aa, Homo sapiens
  CDR3 for alpha chain variable domain of TCR clone 192630 (TRAV20, TRAJ24)
CAVQAAPASWGKFQF

SEQ ID NO: 385260 - protein, 14 aa, Homo sapiens
  CDR3 for beta chain variable domain of TCR clone 192630 (TRBV20-1, TRBJ1-1)
CSARDRGQGSEAFF

SEQ ID NO: 385261 - protein, 13 aa, Homo sapiens
  CDR3 for alpha chain variable domain of TCR clone 192631 (TRAV36/DV7, TRAJ53)
CALSGGSNYKLTF

SEQ ID NO: 385262 - protein, 13 aa, Homo sapiens
  CDR3 for beta chain variable domain of TCR clone 192631 (TRBV28, TRBJ2-4)
CASSQSSKNRQYF

SEQ ID NO: 385263 - protein, 13 aa, Homo sapiens
  CDR3 for alpha chain variable domain of TCR clone 192632 (TRAV13-1, TRAJ43)
CAASKNNNNDMRF

SEQ ID NO: 385264 - protein, 13 aa, Homo sapiens
  CDR3 for beta chain variable domain of TCR clone 192632 (TRBV20-1, TRBJ1-1)
CSAPPGGHTEAFF

SEQ ID NO: 385265 - protein, 15 aa, Homo sapiens
  CDR3 for alpha chain variable domain of TCR clone 192633 (TRAV8-2, TRAJ16)
CIVSDGLSDGQKLLF

SEQ ID NO: 385266 - protein, 14 aa, Homo sapiens
  CDR3 for beta chain variable domain of TCR clone 192633 (TRBV7-3, TRBJ1-1)
CASSLGTGYTEAFF

SEQ ID NO: 385267 - protein, 16 aa, Homo sapiens
  CDR3 for alpha chain variable domain of TCR clone 192634 (TRAV30, TRAJ24)
CGTEIVDADSWGKLQF

SEQ ID NO: 385268 - protein, 17 aa, Homo sapiens
  CDR3 for beta chain variable domain of TCR clone 192634 (TRBV20-1, TRBJ2-1)
CSASSSGLAGSYNEQFF

SEQ ID NO: 385269 - protein, 15 aa, Homo sapiens
  CDR3 for alpha chain variable domain of TCR clone 192635 (TRAV12-2, TRAJ57)
CAVSRGQGGSEKLVF

SEQ ID NO: 385270 - protein, 14 aa, Homo sapiens
  CDR3 for beta chain variable domain of TCR clone 192635 (TRBV20-1, TRBJ2-1)
GSAHPGLPYNEQFF

SEQ ID NO: 385271 - protein, 12 aa, Homo sapiens
  CDR3 for alpha chain variable domain of TCR clone 192636 (TRAV21, TRAJ5)
CCEDTGRRALTF

SEQ ID NO: 385272 - protein, 15 aa, Homo sapiens
  CDR3 for beta chain variable domain of TCR clone 192636 (TRBV7-2, TRBJ1-2)
CASSPRAGWNYGYTF

SEQ ID NO: 385273 - protein, 12 aa, Homo sapiens
  CDR3 for alpha chain variable domain of TCR clone 192637 (TRAV38-1, TRAJ32)
CAPLGATNKLIF

SEQ ID NO: 385274 - protein, 14 aa, Homo sapiens
  CDR3 for beta chain variable domain of TCR clone 192637 (TRBV29-1, TRBJ2-5)
CSVETGGSGETQYF

SEQ ID NO: 385275 - protein, 12 aa, Homo sapiens
  CDR3 for alpha chain variable domain of TCR clone 192638 (TRAV1-1, TRAJ30)
CAVRGRDDKIIF

SEQ ID NO: 385276 - protein, 14 aa, Homo sapiens
  CDR3 for beta chain variable domain of TCR clone 192638 (TRBV7-8, TRBJ2-3)
CASSLEAGTDTQYF

SEQ ID NO: 385277 - protein, 16 aa, Homo sapiens
  CDR3 for alpha chain variable domain of TCR clone 192639 (TRAV3, TRAJ10)
CAVRAMRAGGGNKLTF

SEQ ID NO: 385278 - protein, 13 aa, Homo sapiens
  CDR3 for beta chain variable domain of TCR clone 192639 (TRBV3-1, TRBJ1-1)
CASSPGVITEAFF

SEQ ID NO: 385279 - protein, 12 aa, Homo sapiens
  CDR3 for alpha chain variable domain of TCR clone 192640 (TRAV3, TRAJ43)
CAVRDPNNDMRF

SEQ ID NO: 385280 - protein, 14 aa, Homo sapiens
  CDR3 for beta chain variable domain of TCR clone 192640 (TRBV4-1, TRBJ2-2)
CASSQAVNTGELFF

SEQ ID NO: 385281 - protein, 15 aa, Homo sapiens
  CDR3 for alpha chain variable domain of TCR clone 192641 (TRAV17, TRAJ57)
CATGPSQGGSEKLVF

SEQ ID NO: 385282 - protein, 15 aa, Homo sapiens
  CDR3 for beta chain variable domain of TCR clone 192641 (TRBV15, TRBJ1-5)
CATSRDPVSNQPQHF

SEQ ID NO: 385283 - protein, 14 aa, Homo sapiens
  CDR3 for alpha chain variable domain of TCR clone 192642 (TRAV12-1, TRAJ13)
CVVIDSGGHQIVTF

SEQ ID NO: 385284 - protein, 17 aa, Homo sapiens
  CDR3 for beta chain variable domain of TCR clone 192642 (TRBV15, TRBJ1-5)
CATSRAPPGTRNQPQHF

SEQ ID NO: 385285 - protein, 19 aa, Homo sapiens
  CDR3 for alpha chain variable domain of TCR clone 192643 (TRAV12-2, TRAJ4)
PPPSVPLGWPEGGYNKLIF

SEQ ID NO: 385286 - protein, 16 aa, Homo sapiens
  CDR3 for beta chain variable domain of TCR clone 192643 (TRBV6-1, TRBJ2-5)
CASSETLDRGAETQYF

SEQ ID NO: 385287 - protein, 13 aa, Homo sapiens
  CDR3 for alpha chain variable domain of TCR clone 192644 (TRAV25, TRAJ26)
CAGMDNYGQNFVF

SEQ ID NO: 385288 - protein, 13 aa, Homo sapiens
  CDR3 for beta chain variable domain of TCR clone 192644 (TRBV4-1, TRBJ2-2)
CASSQENTGELFF

SEQ ID NO: 385289 - protein, 13 aa, Homo sapiens
  CDR3 for alpha chain variable domain of TCR clone 192645 (TRAV23/DV6, TRAJ27)
CPASKPMKANQPL

SEQ ID NO: 385290 - protein, 14 aa, Homo sapiens
  CDR3 for beta chain variable domain of TCR clone 192645 (TRBV5-4, TRBJ1-1)
CASSLDSRRDEAFF

SEQ ID NO: 385291 - protein, 14 aa, Homo sapiens
  CDR3 for alpha chain variable domain of TCR clone 192646 (TRAV20, TRAJ42)
CAVQAGGGKGNLIF

SEQ ID NO: 385292 - protein, 19 aa, Homo sapiens
  CDR3 for beta chain variable domain of TCR clone 192646 (TRBV7-2, TRBJ2-3)
CASSFLSRNWGGGTDTQYF

SEQ ID NO: 385293 - protein, 12 aa, Homo sapiens
  CDR3 for alpha chain variable domain of TCR clone 192647 (TRAV26-1, TRAJ26)
CIVFIYGQNFVF

SEQ ID NO: 385294 - protein, 16 aa, Homo sapiens
  CDR3 for beta chain variable domain of TCR clone 192647 (TRBV7-3, TRBJ2-2)
CASSLKRGTLSGELFF

SEQ ID NO: 385295 - protein, 17 aa, Homo sapiens
  CDR3 for alpha chain variable domain of TCR clone 192648 (TRAV26-1, TRAJ37)
CIVRVITVSSNTGKLIF

SEQ ID NO: 385296 - protein, 13 aa, Homo sapiens
  CDR3 for beta chain variable domain of TCR clone 192648 (TRBV18, TRBJ2-5)
CASSLQGQETQYF

SEQ ID NO: 385297 - protein, 14 aa, Homo sapiens
  CDR3 for alpha chain variable domain of TCR clone 192649 (TRAV1-2, TRAJ16)
CAVNRFSDGQKLLF

SEQ ID NO: 385298 - protein, 13 aa, Homo sapiens
  CDR3 for beta chain variable domain of TCR clone 192649 (TRBV4-2, TRBJ1-1)
CASSQAGNTEAFI

SEQ ID NO: 385299 - protein, 17 aa, Homo sapiens
  CDR3 for alpha chain variable domain of TCR clone 192650 (TRAV4, TRAJ13)
CIVGVQGSSGGYQKVNF

SEQ ID NO: 385300 - protein, 18 aa, Homo sapiens
  CDR3 for beta chain variable domain of TCR clone 192650 (TRBV15, TRBJ2-3)
CATSSDGARSWDTDTQYF

SEQ ID NO: 385301 - protein, 14 aa, Homo sapiens
  CDR3 for alpha chain variable domain of TCR clone 192651 (TRAV20, TRAJ10)
CAVRVEGGGNKLTF

SEQ ID NO: 385302 - protein, 15 aa, Homo sapiens
  CDR3 for beta chain variable domain of TCR clone 192651 (TRBV20-1, TRBJ2-7)
CSARDRVSGMDEQYF

SEQ ID NO: 385303 - protein, 17 aa, Homo sapiens
  CDR3 for alpha chain variable domain of TCR clone 192652 (TRAV3, TRAJ6)
CAVRDGPRAGGSYIPTF

SEQ ID NO: 385304 - protein, 15 aa, Homo sapiens
  CDR3 for beta chain variable domain of TCR clone 192652 (TRBV20-1, TRBJ2-7)
CSARDRISGMDEQYF

SEQ ID NO: 385305 - protein, 13 aa, Homo sapiens
  CDR3 for alpha chain variable domain of TCR clone 192653 (TRAV12-2, TRAJ52)
CAVGGTSYGKLTF

SEQ ID NO: 385306 - protein, 14 aa, Homo sapiens
  CDR3 for beta chain variable domain of TCR clone 192653 (TRBV7-9, TRBJ2-7)
CASSLDRPTDEQYF

SEQ ID NO: 385307 - protein, 15 aa, Homo sapiens
  CDR3 for alpha chain variable domain of TCR clone 192654 (TRAV12-2, TRAJ53)
CAVNGGVGSNYKLTF

SEQ ID NO: 385308 - protein, 14 aa, Homo sapiens
  CDR3 for beta chain variable domain of TCR clone 192654 (TRBV18, TRBJ2-7)
CASSPRGGAYEQYF

SEQ ID NO: 385309 - protein, 15 aa, Homo sapiens
  CDR3 for alpha chain variable domain of TCR clone 192655 (TRAV8-3, TRAJ6)
CAVGEDRGGCYIPTF

SEQ ID NO: 385310 - protein, 14 aa, Homo sapiens
  CDR3 for beta chain variable domain of TCR clone 192655 (TRBV27, TRBJ2-2)
CASLRSPPGGELFF

SEQ ID NO: 385311 - protein, 11 aa, Homo sapiens
  CDR3 for alpha chain variable domain of TCR clone 192656 (TRAV38-2/DV8, TRAJ45)
CAYRKGDGLTF

SEQ ID NO: 385312 - protein, 15 aa, Homo sapiens
  CDR3 for beta chain variable domain of TCR clone 192656 (TRBV20-1, TRBJ2-7)
CSARDRVSGMDEQYF

SEQ ID NO: 385313 - protein, 13 aa, Homo sapiens
  CDR3 for alpha chain variable domain of TCR clone 192657 (TRAV2, TRAJ40)
CAVVTSGTYKYIF

SEQ ID NO: 385314 - protein, 14 aa, Homo sapiens
  CDR3 for beta chain variable domain of TCR clone 192657 (TRBV28, TRBJ2-1)
CASSLVAPYNVQFF

SEQ ID NO: 385315 - protein, 10 aa, Homo sapiens
  CDR3 for alpha chain variable domain of TCR clone 192658 (TRAV12-2, TRAJ31)
CAVNNARLMF

SEQ ID NO: 385316 - protein, 17 aa, Homo sapiens
  CDR3 for beta chain variable domain of TCR clone 192658 (TRBV11-2, TRBJ2-1)
CASSLYPPGVEYNEQFF

SEQ ID NO: 385317 - protein, 13 aa, Homo sapiens
  CDR3 for alpha chain variable domain of TCR clone 192659 (TRAV8-3, TRAJ40)
CAVGAQYLRNLQI

SEQ ID NO: 385318 - protein, 15 aa, Homo sapiens
  CDR3 for beta chain variable domain of TCR clone 192659 (TRBV12-4, TRBJ2-2)
CASSPQPGSTGELFF

SEQ ID NO: 385319 - protein, 16 aa, Homo sapiens
  CDR3 for alpha chain variable domain of TCR clone 192660 (TRAV4, TRAJ22)
CLVGDLYSRSARQLTF

SEQ ID NO: 385320 - protein, 16 aa, Homo sapiens
  CDR3 for beta chain variable domain of TCR clone 192660 (TRBV7-9, TRBJ2-1)
CASSDVAGGSYNEQFF

SEQ ID NO: 385321 - protein, 15 aa, Homo sapiens
  CDR3 for alpha chain variable domain of TCR clone 192661 (TRAV20, TRAJ53)
FAVQASGGSNYKLTF

SEQ ID NO: 385322 - protein, 12 aa, Homo sapiens
  CDR3 for beta chain variable domain of TCR clone 192661 (TRBV7-6, TRBJ2-5)
CASSLSQETQYF

SEQ ID NO: 385323 - protein, 14 aa, Homo sapiens
  CDR3 for alpha chain variable domain of TCR clone 192662 (TRAV26-1, TRAJ48)
CIVRTNFVYEKLTF

SEQ ID NO: 385324 - protein, 12 aa, Homo sapiens
  CDR3 for beta chain variable domain of TCR clone 192662 (TRBV20-1, TRBJ2-7)
RSASSGANEQYF

SEQ ID NO: 385325 - protein, 18 aa, Homo sapiens
  CDR3 for alpha chain variable domain of TCR clone 192663 (TRAV26-1, TRAJ56)
CIVRVASRVTGANSKLTF

SEQ ID NO: 385326 - protein, 15 aa, Homo sapiens
  CDR3 for beta chain variable domain of TCR clone 192663 (TRBV7-9, TRBJ2-5)
CASNDTGRGRETQYF

SEQ ID NO: 385327 - protein, 14 aa, Homo sapiens
  CDR3 for alpha chain variable domain of TCR clone 192664 (TRAV3, TRAJ9)
CSVRLNTGGFKTIF

SEQ ID NO: 385328 - protein, 16 aa, Homo sapiens
  CDR3 for beta chain variable domain of TCR clone 192664 (TRBV12-5, TRBJ2-5)
CASGPRTSGNQETQYF

SEQ ID NO: 385329 - protein, 16 aa, Homo sapiens
  CDR3 for alpha chain variable domain of TCR clone 192665 (TRAV30, TRAJ24)
CGTEIVDADGWGKFQF

SEQ ID NO: 385330 - protein, 14 aa, Homo sapiens
  CDR3 for beta chain variable domain of TCR clone 192665 (TRBV12-5, TRBJ2-5)
CASGSRTYQETQYF

SEQ ID NO: 385331 - protein, 16 aa, Homo sapiens
  CDR3 for alpha chain variable domain of TCR clone 192666 (TRAV26-1, TRAJ23)
CIVRVANSNQGGKLIF

SEQ ID NO: 385332 - protein, 16 aa, Homo sapiens
  CDR3 for beta chain variable domain of TCR clone 192666 (TRBV10-3, TRBJ2-1)
CAISGVGDGGGGEQFC

SEQ ID NO: 385333 - protein, 13 aa, Homo sapiens
  CDR3 for alpha chain variable domain of TCR clone 192667 (TRAV1-1, TRAJ11)
CAVLNSGYSTLTF

SEQ ID NO: 385334 - protein, 18 aa, Homo sapiens
  CDR3 for beta chain variable domain of TCR clone 192667 (TRBV7-9, TRBJ2-7)
CASSLTTSGSRTWYEQYF

SEQ ID NO: 385335 - protein, 14 aa, Homo sapiens
  CDR3 for alpha chain variable domain of TCR clone 192668 (TRAV1-1, TRAJ28)
CAVQLWGWVLPTHF

SEQ ID NO: 385336 - protein, 14 aa, Homo sapiens
  CDR3 for beta chain variable domain of TCR clone 192668 (TRBV20-1, TRBJ1-1)
CSAQTRIGGTEAFF

SEQ ID NO: 385337 - protein, 14 aa, Homo sapiens
  CDR3 for alpha chain variable domain of TCR clone 192669 (TRAV13-2, TRAJ22)
CADGTLGSARQLTF

SEQ ID NO: 385338 - protein, 14 aa, Homo sapiens
  CDR3 for beta chain variable domain of TCR clone 192669 (TRBV12-4, TRBJ2-3)
CASSGQGSTDTQYF

SEQ ID NO: 385339 - protein, 16 aa, Homo sapiens
  CDR3 for alpha chain variable domain of TCR clone 192670 (TRAV30, TRAJ24)
CGTEIVDADSWGKFQF

SEQ ID NO: 385340 - protein, 12 aa, Homo sapiens
  CDR3 for beta chain variable domain of TCR clone 192670 (TRBV11-2, TRBJ2-2)
CAISLGDGELFF

SEQ ID NO: 385341 - protein, 19 aa, Homo sapiens
  CDR3 for alpha chain variable domain of TCR clone 192671 (TRAV27, TRAJ53)
ASTSVQSRNSGGSNYKLTF

SEQ ID NO: 385342 - protein, 14 aa, Homo sapiens
  CDR3 for beta chain variable domain of TCR clone 192671 (TRBV11-1, TRBJ2-7)
CASTCAVPSYEQYF

SEQ ID NO: 385343 - protein, 13 aa, Homo sapiens
  CDR3 for alpha chain variable domain of TCR clone 192672 (TRAV8-3, TRAJ44)
CAVLPGTASKLTF

SEQ ID NO: 385344 - protein, 15 aa, Homo sapiens
  CDR3 for beta chain variable domain of TCR clone 192672 (TRBV19, TRBJ1-1)
CASTSGQIQNTEAFF

SEQ ID NO: 385345 - protein, 16 aa, Homo sapiens
  CDR3 for alpha chain variable domain of TCR clone 192673 (TRAV23/DV6, TRAJ9)
CAASIGGNSGGFKTIF

SEQ ID NO: 385346 - protein, 14 aa, Homo sapiens
  CDR3 for beta chain variable domain of TCR clone 192673 (TRBV9, TRBJ2-7)
CASSVGVGSYEQYF

SEQ ID NO: 385347 - protein, 15 aa, Homo sapiens
  CDR3 for alpha chain variable domain of TCR clone 192674 (TRAV26-1, TRAJ29)
CIVRVEGSGNTPLVF

SEQ ID NO: 385348 - protein, 15 aa, Homo sapiens
  CDR3 for beta chain variable domain of TCR clone 192674 (TRBV7-9, TRBJ1-5)
CAGSQGHQPNQPQHV

SEQ ID NO: 385349 - protein, 14 aa, Homo sapiens
  CDR3 for alpha chain variable domain of TCR clone 192675 (TRAV13-2, TRAJ17)
CAENYKAAGNKLTF

SEQ ID NO: 385350 - protein, 15 aa, Homo sapiens
  CDR3 for beta chain variable domain of TCR clone 192675 (TRBV20-1, TRBJ2-7)
CSARDRVSGMDEQYF

SEQ ID NO: 385351 - protein, 13 aa, Homo sapiens
  CDR3 for alpha chain variable domain of TCR clone 192676 (TRAV26-2, TRAJ54)
RIPRVGGAQKLVF

SEQ ID NO: 385352 - protein, 16 aa, Homo sapiens
  CDR3 for beta chain variable domain of TCR clone 192676 (TRBV4-1, TRBJ1-1)
CASSSMSERPNTEAFF

SEQ ID NO: 385353 - protein, 14 aa, Homo sapiens
  CDR3 for alpha chain variable domain of TCR clone 192677 (TRAV29/DV5, TRAJ44)
CAAFLVGTASKLTL

SEQ ID NO: 385354 - protein, 15 aa, Homo sapiens
  CDR3 for beta chain variable domain of TCR clone 192677 (TRBV7-3, TRBJ2-2)
CASSETGQGTGELFF

SEQ ID NO: 385355 - protein, 17 aa, Homo sapiens
  CDR3 for alpha chain variable domain of TCR clone 192678 (TRAV3, TRAJ6)
CAVRHGPRAGGSYIPTF

SEQ ID NO: 385356 - protein, 14 aa, Homo sapiens
  CDR3 for beta chain variable domain of TCR clone 192678 (TRBV7-2, TRBJ2-7)
CASSPKTSFYERYF

SEQ ID NO: 385357 - protein, 13 aa, Homo sapiens
  CDR3 for alpha chain variable domain of TCR clone 192679 (TRAV27, TRAJ8)
CAGGPTAFQKLVF

SEQ ID NO: 385358 - protein, 15 aa, Homo sapiens
  CDR3 for beta chain variable domain of TCR clone 192679 (TRBV6-1, TRBJ2-7)
CASSESMGDFYEQYF

SEQ ID NO: 385359 - protein, 11 aa, Homo sapiens
  CDR3 for alpha chain variable domain of TCR clone 192680 (TRAV24, TRAJ34)
CAPREHRQAHL

SEQ ID NO: 385360 - protein, 18 aa, Homo sapiens
  CDR3 for beta chain variable domain of TCR clone 192680 (TRBV3-1, TRBJ2-1)
CASSSVRTSGGSTVEQFF

SEQ ID NO: 385361 - protein, 14 aa, Homo sapiens
  CDR3 for alpha chain variable domain of TCR clone 192681 (TRAV38-1, TRAJ45)
CASHSGGGADGPTF

SEQ ID NO: 385362 - protein, 13 aa, Homo sapiens
  CDR3 for beta chain variable domain of TCR clone 192681 (TRBV7-9, TRBJ2-2)
CASSSAGTGELFF

SEQ ID NO: 385363 - protein, 10 aa, Homo sapiens
  CDR3 for alpha chain variable domain of TCR clone 192682 (TRAV1-2, TRAJ34)
CAVNTDKLIF

SEQ ID NO: 385364 - protein, 11 aa, Homo sapiens
  CDR3 for beta chain variable domain of TCR clone 192682 (TRBV7-9, TRBJ2-7)
LASRTWYEQYF

SEQ ID NO: 385365 - protein, 13 aa, Homo sapiens
  CDR3 for alpha chain variable domain of TCR clone 192683 (TRAV38-1, TRAJ20)
CAFMKPNDYKLSF

SEQ ID NO: 385366 - protein, 16 aa, Homo sapiens
  CDR3 for beta chain variable domain of TCR clone 192683 (TRBV12-4, TRBJ1-1)
CASSNRRDRQGTEAFF

SEQ ID NO: 385367 - protein, 12 aa, Homo sapiens
  CDR3 for alpha chain variable domain of TCR clone 192684 (TRAV23/DV6, TRAJ16)
CAASGRGQKLLF

SEQ ID NO: 385368 - protein, 19 aa, Homo sapiens
  CDR3 for beta chain variable domain of TCR clone 192684 (TRBV7-2, TRBJ2-3)
CASSFLSRNWGGGTDTQYF

SEQ ID NO: 385369 - protein, 14 aa, Homo sapiens
  CDR3 for alpha chain variable domain of TCR clone 192685 (TRAV21, TRAJ38)
CAVANAGNNRKLIW

SEQ ID NO: 385370 - protein, 16 aa, Homo sapiens
  CDR3 for beta chain variable domain of TCR clone 192685 (TRBV5-4, TRBJ2-1)
CASGLALAGAYNEQFF

SEQ ID NO: 385371 - protein, 12 aa, Homo sapiens
  CDR3 for alpha chain variable domain of TCR clone 192686 (TRAV4, TRAJ26)
CLVGDYGQNVVF

SEQ ID NO: 385372 - protein, 16 aa, Homo sapiens
  CDR3 for beta chain variable domain of TCR clone 192686 (TRBV7-2, TRBJ1-2)
CASSPNQDRRGHGYTF

SEQ ID NO: 385373 - protein, 15 aa, Homo sapiens
  CDR3 for alpha chain variable domain of TCR clone 192687 (TRAV13-1, TRAJ15)
CEASIERQAGTALIF

SEQ ID NO: 385374 - protein, 13 aa, Homo sapiens
  CDR3 for beta chain variable domain of TCR clone 192687 (TRBV5-1, TRBJ2-7)
CASSATGGNEQYF

SEQ ID NO: 385375 - protein, 18 aa, Homo sapiens
  CDR3 for alpha chain variable domain of TCR clone 192688 (TRAV21, TRAJ52)
CAVRPSPAGGTSYGKLTF

SEQ ID NO: 385376 - protein, 16 aa, Homo sapiens
  CDR3 for beta chain variable domain of TCR clone 192688 (TRBV13, TRBJ2-3)
CQQPLQVAGGRNTQYF

SEQ ID NO: 385377 - protein, 14 aa, Homo sapiens
  CDR3 for alpha chain variable domain of TCR clone 192689 (TRAV38-2/DV8, TRAJ30)
CAYMDGLGGDKIIF

SEQ ID NO: 385378 - protein, 15 aa, Homo sapiens
  CDR3 for beta chain variable domain of TCR clone 192689 (TRBV7-9, TRBJ2-2)
CAIRPADRDTGELFF

SEQ ID NO: 385379 - protein, 16 aa, Homo sapiens
  CDR3 for alpha chain variable domain of TCR clone 192690 (TRAV30, TRAJ24)
CGTEIVDADSWGKFQF

SEQ ID NO: 385380 - protein, 13 aa, Homo sapiens
  CDR3 for beta chain variable domain of TCR clone 192690 (TRBV7-2, TRBJ2-2)
CASNLAVTGELFF

SEQ ID NO: 385381 - protein, 19 aa, Homo sapiens
  CDR3 for alpha chain variable domain of TCR clone 192691 (TRAV2, TRAJ20)
ILQVREADAAVYRDCKLSY

SEQ ID NO: 385382 - protein, 13 aa, Homo sapiens
  CDR3 for beta chain variable domain of TCR clone 192691 (TRBV7-3, TRBJ1-1)
CASSQDWGAEAFF

SEQ ID NO: 385383 - protein, 10 aa, Homo sapiens
  CDR3 for alpha chain variable domain of TCR clone 192692 (TRAV13-2, TRAJ49)
CADTGNQFYF

SEQ ID NO: 385384 - protein, 13 aa, Homo sapiens
  CDR3 for beta chain variable domain of TCR clone 192692 (TRBV10-3, TRBJ1-2)
CAISERNSYGYTF

SEQ ID NO: 385385 - protein, 12 aa, Homo sapiens
  CDR3 for alpha chain variable domain of TCR clone 192693 (TRAV35, TRAJ30)
CAGLNRDDKIIF

SEQ ID NO: 385386 - protein, 13 aa, Homo sapiens
  CDR3 for beta chain variable domain of TCR clone 192693 (TRBV7-2, TRBJ2-5)
CASSQTSVETQYF

SEQ ID NO: 385387 - protein, 13 aa, Homo sapiens
  CDR3 for alpha chain variable domain of TCR clone 192694 (TRAV8-4, TRAJ49)
CAVSDPGGNQFYF

SEQ ID NO: 385388 - protein, 17 aa, Homo sapiens
  CDR3 for beta chain variable domain of TCR clone 192694 (TRBV24-1, TRBJ2-1)
CATSDVSTSGTYNEQFF

SEQ ID NO: 385389 - protein, 14 aa, Homo sapiens
  CDR3 for alpha chain variable domain of TCR clone 192695 (TRAV1-1, TRAJ27)
CAVIYSTNAGKSTF

SEQ ID NO: 385390 - protein, 18 aa, Homo sapiens
  CDR3 for beta chain variable domain of TCR clone 192695 (TRBV5-7, TRBJ2-2)
CASSLGASGGLNTGELFF

SEQ ID NO: 385391 - protein, 13 aa, Homo sapiens
  CDR3 for alpha chain variable domain of TCR clone 192696 (TRAV3, TRAJ21)
CAVREPDFNKFYF

SEQ ID NO: 385392 - protein, 15 aa, Homo sapiens
  CDR3 for beta chain variable domain of TCR clone 192696 (TRBV7-9, TRBJ2-2)
CASGPLDTFPGELFF

SEQ ID NO: 385393 - protein, 20 aa, Homo sapiens
  CDR3 for alpha chain variable domain of TCR clone 192697 (TRAV12-1, TRAJ42)
SSVIQPPTSVKGGSQGNLIF

SEQ ID NO: 385394 - protein, 16 aa, Homo sapiens
  CDR3 for beta chain variable domain of TCR clone 192697 (TRBV19, TRBJ2-1)
CASSIWGQGARNEQFF

SEQ ID NO: 385395 - protein, 14 aa, Homo sapiens
  CDR3 for alpha chain variable domain of TCR clone 192698 (TRAV17, TRAJ40)
CATALTSGTYKYIF

SEQ ID NO: 385396 - protein, 15 aa, Homo sapiens
  CDR3 for beta chain variable domain of TCR clone 192698 (TRBV9, TRBJ1-2)
CASSVVGQANYGYTF

SEQ ID NO: 385397 - protein, 13 aa, Homo sapiens
  CDR3 for alpha chain variable domain of TCR clone 192699 (TRAV35, TRAJ40)
CAGLLSGTYKYIF

SEQ ID NO: 385398 - protein, 14 aa, Homo sapiens
  CDR3 for beta chain variable domain of TCR clone 192699 (TRBV3-1, TRBJ2-5)
CASSLQLAGETQYF

SEQ ID NO: 385399 - protein, 14 aa, Homo sapiens
  CDR3 for alpha chain variable domain of TCR clone 192700 (TRAV12-3, TRAJ9)
CAMSPNTGGPKTIF

SEQ ID NO: 385400 - protein, 12 aa, Homo sapiens
  CDR3 for beta chain variable domain of TCR clone 192700 (TRBV11-2, TRBJ2-2)
CASSLGGGELFF

SEQ ID NO: 385401 - protein, 15 aa, Homo sapiens
  CDR3 for alpha chain variable domain of TCR clone 192701 (TRAV26-1, TRAJ29)
CIVRVEGSGNTPLVF

SEQ ID NO: 385402 - protein, 14 aa, Homo sapiens
  CDR3 for beta chain variable domain of TCR clone 192701 (TRBV7-6, TRBJ2-3)
CASNSGGDANTQHL

SEQ ID NO: 385403 - protein, 13 aa, Homo sapiens
  CDR3 for alpha chain variable domain of TCR clone 192702 (TRAV26-1, TRAJ20)
CIVRVGNDYKLSF

SEQ ID NO: 385404 - protein, 16 aa, Homo sapiens
  CDR3 for beta chain variable domain of TCR clone 192702 (TRBV7-9, TRBJ2-3)
CAGSLIPTSLTDTQYF

SEQ ID NO: 385405 - protein, 14 aa, Homo sapiens
  CDR3 for alpha chain variable domain of TCR clone 192703 (TRAV21, TRAJ12)
CAVRNGDSSYKVIF

SEQ ID NO: 385406 - protein, 14 aa, Homo sapiens
  CDR3 for beta chain variable domain of TCR clone 192703 (TRBV7-6, TRBJ2-7)
CASSLTGTGNEQYF

SEQ ID NO: 385407 - protein, 13 aa, Homo sapiens
  CDR3 for alpha chain variable domain of TCR clone 192704 (TRAV2, TRAJ40)
CAVVTSVTYKYIF

SEQ ID NO: 385408 - protein, 15 aa, Homo sapiens
  CDR3 for beta chain variable domain of TCR clone 192704 (TRBV11-3, TRBJ2-3)
CASLEDGREGDTQYF

SEQ ID NO: 385409 - protein, 13 aa, Homo sapiens
  CDR3 for alpha chain variable domain of TCR clone 192705 (TRAV21, TRAJ57)
CAVIEGGSEKLVF

SEQ ID NO: 385410 - protein, 15 aa, Homo sapiens
  CDR3 for beta chain variable domain of TCR clone 192705 (TRBV7-2, TRBJ1-1)
CASSPQGGANTEAFF

SEQ ID NO: 385411 - protein, 18 aa, Homo sapiens
  CDR3 for alpha chain variable domain of TCR clone 192706 (TRAV1-2, TRAJ36)
CAVRDRRMGQTGANNLFF

SEQ ID NO: 385412 - protein, 16 aa, Homo sapiens
  CDR3 for beta chain variable domain of TCR clone 192706 (TRBV19, TRBJ2-1)
CASSKAGPSSYNEQFF

SEQ ID NO: 385413 - protein, 18 aa, Homo sapiens
  CDR3 for alpha chain variable domain of TCR clone 192707 (TRAV21, TRAJ52)
GAVRPSPAGGTSYGKLTF

SEQ ID NO: 385414 - protein, 17 aa, Homo sapiens
  CDR3 for beta chain variable domain of TCR clone 192707 (TRBV13, TRBJ2-3)
YASSLSRVAGGRNTQYF

SEQ ID NO: 385415 - protein, 14 aa, Homo sapiens
  CDR3 for alpha chain variable domain of TCR clone 192708 (TRAV8-1, TRAJ23)
CAVGTYNQGGKLIF

SEQ ID NO: 385416 - protein, 12 aa, Homo sapiens
  CDR3 for beta chain variable domain of TCR clone 192708 (TRBV12-4, TRBJ2-1)
CASSLQGSEQFF

SEQ ID NO: 385417 - protein, 16 aa, Homo sapiens
  CDR3 for alpha chain variable domain of TCR clone 192709 (TRAV3, TRAJ10)
CAVRDMNAGGRNKLTF

SEQ ID NO: 385418 - protein, 16 aa, Homo sapiens
  CDR3 for beta chain variable domain of TCR clone 192709 (TRBV6-3, TRBJ1-2)
CASSYSRRASNYGYTF

SEQ ID NO: 385419 - protein, 16 aa, Homo sapiens
  CDR3 for alpha chain variable domain of TCR clone 192710 (TRAV30, TRAJ24)
CGTEIVDADSWGKFQF

SEQ ID NO: 385420 - protein, 14 aa, Homo sapiens
  CDR3 for beta chain variable domain of TCR clone 192710 (TRBV12-4, TRBJ2-7)
CASSRQGRSYEQYF

SEQ ID NO: 385421 - protein, 11 aa, Homo sapiens
  CDR3 for alpha chain variable domain of TCR clone 192711 (TRAV21, TRAJ11)
CAVNGYSTLTF

SEQ ID NO: 385422 - protein, 15 aa, Homo sapiens
  CDR3 for beta chain variable domain of TCR clone 192711 (TRBV7-9, TRBJ2-7)
CASSLDLQGPYEQYF

SEQ ID NO: 385423 - protein, 15 aa, Homo sapiens
  CDR3 for alpha chain variable domain of TCR clone 192712 (TRAV3, TRAJ47)
CAVRDIGEYGNKLGF

SEQ ID NO: 385424 - protein, 14 aa, Homo sapiens
  CDR3 for beta chain variable domain of TCR clone 192712 (TRBV13, TRBJ2-5)
CAISLERVGETQYF

SEQ ID NO: 385425 - protein, 13 aa, Homo sapiens
  CDR3 for alpha chain variable domain of TCR clone 192713 (TRAV17, TRAJ7)
CATDNYGNNRLAF

SEQ ID NO: 385426 - protein, 13 aa, Homo sapiens
  CDR3 for beta chain variable domain of TCR clone 192713 (TRBV4-1, TRBJ2-1)
CASSQAGGDEQFF

SEQ ID NO: 385427 - protein, 14 aa, Homo sapiens
  CDR3 for alpha chain variable domain of TCR clone 192714 (TRAV1-2, TRAJ16)
CAVNRFSDGQKLLF

SEQ ID NO: 385428 - protein, 14 aa, Homo sapiens
  CDR3 for beta chain variable domain of TCR clone 192714 (TRBV9, TRBJ2-3)
CASSVGLSTDTQYF

SEQ ID NO: 385429 - protein, 11 aa, Homo sapiens
  CDR3 for alpha chain variable domain of TCR clone 192715 (TRAV2, TRAJ33)
CAVDSNYQLIW

SEQ ID NO: 385430 - protein, 15 aa, Homo sapiens
  CDR3 for beta chain variable domain of TCR clone 192715 (TRBV20-1, TRBJ2-7)
CSARREAGAPREQYF

SEQ ID NO: 385431 - protein, 14 aa, Homo sapiens
  CDR3 for alpha chain variable domain of TCR clone 192716 (TRAV1-1, TRAJ28)
CAAPSGAGSYQLTF

SEQ ID NO: 385432 - protein, 15 aa, Homo sapiens
  CDR3 for beta chain variable domain of TCR clone 192716 (TRBV7-2, TRBJ1-2)
CASSLLSGGDYGYTF

SEQ ID NO: 385433 - protein, 14 aa, Homo sapiens
  CDR3 for alpha chain variable domain of TCR clone 192717 (TRAV17, TRAJ40)
CATALTSGTYKYIF

SEQ ID NO: 385434 - protein, 12 aa, Homo sapiens
  CDR3 for beta chain variable domain of TCR clone 192717 (TRBV24-1, TRBJ2-3)
CATSDSTDTQYF

SEQ ID NO: 385435 - protein, 17 aa, Homo sapiens
  CDR3 for alpha chain variable domain of TCR clone 192718 (TRAV3, TRAJ6)
CAVRDSPRAGGSSIPTF

SEQ ID NO: 385436 - protein, 20 aa, Homo sapiens
  CDR3 for beta chain variable domain of TCR clone 192718 (TRBV28, TRBJ2-1)
CASTPIGRSPGLAGGNEQFF

SEQ ID NO: 385437 - protein, 16 aa, Homo sapiens
  CDR3 for alpha chain variable domain of TCR clone 192719 (TRAV8-3, TRAJ52)
CAVQPAGGTSYGKLTF

SEQ ID NO: 385438 - protein, 15 aa, Homo sapiens
  CDR3 for beta chain variable domain of TCR clone 192719 (TRBV11-2, TRBJ2-7)
CASSLAGGVASEQYF

SEQ ID NO: 385439 - protein, 18 aa, Homo sapiens
  CDR3 for alpha chain variable domain of TCR clone 192720 (TRAV13-1, TRAJ52)
CAASKRSAGGTSYGKLTF

SEQ ID NO: 385440 - protein, 17 aa, Homo sapiens
  CDR3 for beta chain variable domain of TCR clone 192720 (TRBV25-1, TRBJ2-7)
CASSDARVVFSSYEQYF

SEQ ID NO: 385441 - protein, 14 aa, Homo sapiens
  CDR3 for alpha chain variable domain of TCR clone 192721 (TRAV35, TRAJ33)
CAGSSQDSNYQLIW

SEQ ID NO: 385442 - protein, 13 aa, Homo sapiens
  CDR3 for beta chain variable domain of TCR clone 192721 (TRBV12-4, TRBJ1-1)
CASSPGTGFEAFF

SEQ ID NO: 385443 - protein, 14 aa, Homo sapiens
  CDR3 for alpha chain variable domain of TCR clone 192722 (TRAV25, TRAJ44)
CAVFPTGTASKLTF

SEQ ID NO: 385444 - protein, 14 aa, Homo sapiens
  CDR3 for beta chain variable domain of TCR clone 192722 (TRBV19, TRBJ1-1)
CASTGHGLNTEAFF

SEQ ID NO: 385445 - protein, 18 aa, Homo sapiens
  CDR3 for alpha chain variable domain of TCR clone 192723 (TRAV13-1, TRAJ52)
CAASKMSAGGTIYGKLTF

SEQ ID NO: 385446 - protein, 13 aa, Homo sapiens
  CDR3 for beta chain variable domain of TCR clone 192723 (TRBV12-4, TRBJ1-2)
CASSLRQGKGYTF

SEQ ID NO: 385447 - protein, 13 aa, Homo sapiens
  CDR3 for alpha chain variable domain of TCR clone 192724 (TRAV27, TRAJ42)
CAGARGSQGNLIF

SEQ ID NO: 385448 - protein, 13 aa, Homo sapiens
  CDR3 for beta chain variable domain of TCR clone 192724 (TRBV11-3, TRBJ1-1)
CASSSNRDTEAFF

SEQ ID NO: 385449 - protein, 14 aa, Homo sapiens
  CDR3 for alpha chain variable domain of TCR clone 192725 (TRAV13-1, TRAJ53)
CAASISGSNYKLKF

SEQ ID NO: 385450 - protein, 15 aa, Homo sapiens
  CDR3 for beta chain variable domain of TCR clone 192725 (TRBV4-1, TRBJ1-4)
CASSDTGGTNEKLFF

SEQ ID NO: 385451 - protein, 15 aa, Homo sapiens
  CDR3 for alpha chain variable domain of TCR clone 192726 (TRAV20, TRAJ43)
CAVQAGKSSNNDIRF

SEQ ID NO: 385452 - protein, 14 aa, Homo sapiens
  CDR3 for beta chain variable domain of TCR clone 192726 (TRBV27, TRBJ2-1)
CASGHLGGGKEQFF

SEQ ID NO: 385453 - protein, 15 aa, Homo sapiens
  CDR3 for alpha chain variable domain of TCR clone 192727 (TRAV12-3, TRAJ6)
CAMSATSGGSYIPTF

SEQ ID NO: 385454 - protein, 14 aa, Homo sapiens
  CDR3 for beta chain variable domain of TCR clone 192727 (TRBV7-3, TRBJ2-1)
CASSLAGGTNEQFF

SEQ ID NO: 385455 - protein, 17 aa, Homo sapiens
  CDR3 for alpha chain variable domain of TCR clone 192728 (TRAV3, TRAJ6)
CAVRDGPRAGGRSIPTF

SEQ ID NO: 385456 - protein, 14 aa, Homo sapiens
  CDR3 for beta chain variable domain of TCR clone 192728 (TRBV7-2, TRBJ2-7)
CASSPKTSFYEQYF

SEQ ID NO: 385457 - protein, 13 aa, Homo sapiens
  CDR3 for alpha chain variable domain of TCR clone 192729 (TRAV3, TRAJ27)
CAVRPLGAGKSTF

SEQ ID NO: 385458 - protein, 11 aa, Homo sapiens
  CDR3 for beta chain variable domain of TCR clone 192729 (TRBV19, TRBJ2-2)
CASRYSGELFF

SEQ ID NO: 385459 - protein, 16 aa, Homo sapiens
  CDR3 for alpha chain variable domain of TCR clone 192730 (TRAV3, TRAJ10)
CAVRDMRAGGGNKLTF

SEQ ID NO: 385460 - protein, 16 aa, Homo sapiens
  CDR3 for beta chain variable domain of TCR clone 192730 (TRBV25-1, TRBJ2-7)
CASSELTGGGIYEQYF

SEQ ID NO: 385461 - protein, 16 aa, Homo sapiens
  CDR3 for alpha chain variable domain of TCR clone 192731 (TRAV30, TRAJ24)
CGTEIVDADSWGKFQL

SEQ ID NO: 385462 - protein, 15 aa, Homo sapiens
  CDR3 for beta chain variable domain of TCR clone 192731 (TRBV7-2, TRBJ2-3)
CASSLRGGSTDTQYF

SEQ ID NO: 385463 - protein, 12 aa, Homo sapiens
  CDR3 for alpha chain variable domain of TCR clone 192732 (TRAV1-2, TRAJ33)
CAALDSNYQLIW

SEQ ID NO: 385464 - protein, 16 aa, Homo sapiens
  CDR3 for beta chain variable domain of TCR clone 192732 (TRBV12-4, TRBJ2-5)
CASSFFVRGRQETQYF

SEQ ID NO: 385465 - protein, 11 aa, Homo sapiens
  CDR3 for alpha chain variable domain of TCR clone 192733 (TRAV12-1, TRAJ30)
CVVHGQDKIIF

SEQ ID NO: 385466 - protein, 12 aa, Homo sapiens
  CDR3 for beta chain variable domain of TCR clone 192733 (TRBV27, TRBJ2-2)
CASKLFTGELFF

SEQ ID NO: 385467 - protein, 15 aa, Homo sapiens
  CDR3 for alpha chain variable domain of TCR clone 192734 (TRAV27, TRAJ38)
CAARRNAGNNRKLIW

SEQ ID NO: 385468 - protein, 17 aa, Homo sapiens
  CDR3 for beta chain variable domain of TCR clone 192734 (TRBV7-6, TRBJ2-5)
CASSLGGLAGGLKTQYF

SEQ ID NO: 385469 - protein, 12 aa, Homo sapiens
  CDR3 for alpha chain variable domain of TCR clone 192735 (TRAV13-1, TRAJ27)
CAAHTNAGKSTF

SEQ ID NO: 385470 - protein, 16 aa, Homo sapiens
  CDR3 for beta chain variable domain of TCR clone 192735 (TRBV20-1, TRBJ1-4)
CSAPGQGLLTNEKLFF

SEQ ID NO: 385471 - protein, 13 aa, Homo sapiens
  CDR3 for alpha chain variable domain of TCR clone 192736 (TRAV20, TRAJ37)
CAGCSSNTGKLIF

SEQ ID NO: 385472 - protein, 17 aa, Homo sapiens
  CDR3 for beta chain variable domain of TCR clone 192736 (TRBV4-1, TRBJ2-3)
CASSQGYVSGGTDTQYF

SEQ ID NO: 385473 - protein, 13 aa, Homo sapiens
  CDR3 for alpha chain variable domain of TCR clone 192737 (TRAV17, TRAJ5)
CAPMDTGRRALTF

SEQ ID NO: 385474 - protein, 14 aa, Homo sapiens
  CDR3 for beta chain variable domain of TCR clone 192737 (TRBV11-2, TRBJ2-3)
CASSRLARTDTQYF

SEQ ID NO: 385475 - protein, 13 aa, Homo sapiens
  CDR3 for alpha chain variable domain of TCR clone 192738 (TRAV35, TRAJ57)
CWSPQGGFEKLVF

SEQ ID NO: 385476 - protein, 18 aa, Homo sapiens
  CDR3 for beta chain variable domain of TCR clone 192738 (TRBV6-6, TRBJ1-3)
CASSYSKWDSISGNTIYF

SEQ ID NO: 385477 - protein, 13 aa, Homo sapiens
  CDR3 for alpha chain variable domain of TCR clone 192739 (TRAV2, TRAJ15)
CAVASQAGTALIL

SEQ ID NO: 385478 - protein, 15 aa, Homo sapiens
  CDR3 for beta chain variable domain of TCR clone 192739 (TRBV28, TRBJ2-5)
CASSFRQGALETQYF

SEQ ID NO: 385479 - protein, 17 aa, Homo sapiens
  CDR3 for alpha chain variable domain of TCR clone 192740 (TRAV4, TRAJ18)
CLVGERSVGSTLGRLYF

SEQ ID NO: 385480 - protein, 15 aa, Homo sapiens
  CDR3 for beta chain variable domain of TCR clone 192740 (TRBV3-1, TRBJ2-5)
CASSANLGGPETQYF

SEQ ID NO: 385481 - protein, 12 aa, Homo sapiens
  CDR3 for alpha chain variable domain of TCR clone 192741 (TRAV12-3, TRAJ39)
CAMTQAGNMLTF

SEQ ID NO: 385482 - protein, 13 aa, Homo sapiens
  CDR3 for beta chain variable domain of TCR clone 192741 (TRBV7-2, TRBJ2-4)
CASSREHANIQYF

SEQ ID NO: 385483 - protein, 16 aa, Homo sapiens
  CDR3 for alpha chain variable domain of TCR clone 192742 (TRAV1-2, TRAJ10)
CAVRGVLTGGGNKLTF

SEQ ID NO: 385484 - protein, 19 aa, Homo sapiens
  CDR3 for beta chain variable domain of TCR clone 192742 (TRBV7-8, TRBJ2-3)
CASSPGLAGGGLTTDTQYF

SEQ ID NO: 385485 - protein, 14 aa, Homo sapiens
  CDR3 for alpha chain variable domain of TCR clone 192743 (TRAV17, TRAJ22)
CATSPSGSARQLTF

SEQ ID NO: 385486 - protein, 15 aa, Homo sapiens
  CDR3 for beta chain variable domain of TCR clone 192743 (TRBV11-3, TRBJ2-3)
CASRKDGREGDTQYF

SEQ ID NO: 385487 - protein, 18 aa, Homo sapiens
  CDR3 for alpha chain variable domain of TCR clone 192744 (TRAV13-1, TRAJ52)
CAAKNPNAGGTSYRKLTF

SEQ ID NO: 385488 - protein, 13 aa, Homo sapiens
  CDR3 for beta chain variable domain of TCR clone 192744 (TRBV11-3, TRBJ2-7)
CASSLDKLYEQYF

SEQ ID NO: 385489 - protein, 13 aa, Homo sapiens
  CDR3 for alpha chain variable domain of TCR clone 192745 (TRAV3, TRAJ20)
CAVRDGGDYNLSF

SEQ ID NO: 385490 - protein, 16 aa, Homo sapiens
  CDR3 for beta chain variable domain of TCR clone 192745 (TRBV4-1, TRBJ2-5)
CASSQTSGGPLETQYF

SEQ ID NO: 385491 - protein, 12 aa, Homo sapiens
  CDR3 for alpha chain variable domain of TCR clone 192746 (TRAV8-6, TRAJ36)
CAVSDWLGQTTS

SEQ ID NO: 385492 - protein, 12 aa, Homo sapiens
  CDR3 for beta chain variable domain of TCR clone 192746 (TRBV28, TRBJ2-3)
CASSLYRDTQYF

SEQ ID NO: 385493 - protein, 13 aa, Homo sapiens
  CDR3 for alpha chain variable domain of TCR clone 192747 (TRAV36/DV7, TRAJ39)
CAVNNNAGNMLTL

SEQ ID NO: 385494 - protein, 16 aa, Homo sapiens
  CDR3 for beta chain variable domain of TCR clone 192747 (TRBV7-3, TRBJ2-2)
CASSLKRGTLSGELFF

SEQ ID NO: 385495 - protein, 14 aa, Homo sapiens
  CDR3 for alpha chain variable domain of TCR clone 192748 (TRAV20, TRAJ37)
CAVQSSSTTGKLIF

SEQ ID NO: 385496 - protein, 13 aa, Homo sapiens
  CDR3 for beta chain variable domain of TCR clone 192748 (TRBV19, TRBJ1-2)
CASSQGQVYGYTF

SEQ ID NO: 385497 - protein, 18 aa, Homo sapiens
  CDR3 for alpha chain variable domain of TCR clone 192749 (TRAV29/DV5, TRAJ53)
CSVLLCSKRGGSNYKPTF

SEQ ID NO: 385498 - protein, 17 aa, Homo sapiens
  CDR3 for beta chain variable domain of TCR clone 192749 (TRBV7-8, TRBJ2-6)
CASSAGTGGAGANVLTF

SEQ ID NO: 385499 - protein, 12 aa, Homo sapiens
  CDR3 for alpha chain variable domain of TCR clone 192750 (TRAV16, TRAJ26)
CASKDGGQNFIF

SEQ ID NO: 385500 - protein, 13 aa, Homo sapiens
  CDR3 for beta chain variable domain of TCR clone 192750 (TRBV25-1, TRBJ1-1)
CASSDRGRAEAFF

SEQ ID NO: 385501 - protein, 21 aa, Homo sapiens
  CDR3 for alpha chain variable domain of TCR clone 192751 (TRAV1-1, TRAJ6)
CLLLLRCERLERTGGSYIPTF

SEQ ID NO: 385502 - protein, 16 aa, Homo sapiens
  CDR3 for beta chain variable domain of TCR clone 192751 (TRBV5-1, TRBJ2-3)
CASSLGLAVYTDTQYF

SEQ ID NO: 385503 - protein, 11 aa, Homo sapiens
  CDR3 for alpha chain variable domain of TCR clone 192752 (TRAV1-1, TRAJ23)
CAVRQGGKLIF

SEQ ID NO: 385504 - protein, 15 aa, Homo sapiens
  CDR3 for beta chain variable domain of TCR clone 192752 (TRBV7-9, TRBJ2-5)
CASSFKAGREETQYF

SEQ ID NO: 385505 - protein, 18 aa, Homo sapiens
  CDR3 for alpha chain variable domain of TCR clone 192753 (TRAV12-3, TRAJ52)
CAMSVGGAGGTSNGKLTF

SEQ ID NO: 385506 - protein, 15 aa, Homo sapiens
  CDR3 for beta chain variable domain of TCR clone 192753 (TRBV27, TRBJ1-6)
CASSFDRGLGSPLHL

SEQ ID NO: 385507 - protein, 16 aa, Homo sapiens
  CDR3 for alpha chain variable domain of TCR clone 192754 (TRAV3, TRAJ42)
CAVRDIDGGSQGNLIF

SEQ ID NO: 385508 - protein, 14 aa, Homo sapiens
  CDR3 for beta chain variable domain of TCR clone 192754 (TRBV18, TRBJ1-1)
CASSPPTGRTEAFF

SEQ ID NO: 385509 - protein, 13 aa, Homo sapiens
  CDR3 for alpha chain variable domain of TCR clone 192755 (TRAV17, TRAJ9)
CATDYTGGFKTIF

SEQ ID NO: 385510 - protein, 16 aa, Homo sapiens
  CDR3 for beta chain variable domain of TCR clone 192755 (TRBV7-7, TRBJ2-1)
CASSLGSGTSYNEQFF

SEQ ID NO: 385511 - protein, 15 aa, Homo sapiens
  CDR3 for alpha chain variable domain of TCR clone 192756 (TRAV2, TRAJ32)
STPPSQGGATNKLIF

SEQ ID NO: 385512 - protein, 12 aa, Homo sapiens
  CDR3 for beta chain variable domain of TCR clone 192756 (TRBV20-1, TRBJ2-7)
CSAITPTKEQYF

SEQ ID NO: 385513 - protein, 17 aa, Homo sapiens
  CDR3 for alpha chain variable domain of TCR clone 192757 (TRAV26-1, TRAJ53)
CIVRVDDSGGSNYKLTF

SEQ ID NO: 385514 - protein, 15 aa, Homo sapiens
  CDR3 for beta chain variable domain of TCR clone 192757 (TRBV7-3, TRBJ2-1)
CASSLDGNSYNEQCF

SEQ ID NO: 385515 - protein, 16 aa, Homo sapiens
  CDR3 for alpha chain variable domain of TCR clone 192758 (TRAV30, TRAJ24)
CGTEIVDADSWGKFQF

SEQ ID NO: 385516 - protein, 15 aa, Homo sapiens
  CDR3 for beta chain variable domain of TCR clone 192758 (TRBV28, TRBJ2-1)
CASSIIAGGRSDQFF

SEQ ID NO: 385517 - protein, 18 aa, Homo sapiens
  CDR3 for alpha chain variable domain of TCR clone 192759 (TRAV21, TRAJ52)
CAVRPSPAGGTSYGELTF

SEQ ID NO: 385518 - protein, 16 aa, Homo sapiens
  CDR3 for beta chain variable domain of TCR clone 192759 (TRBV19, TRBJ2-2)
CASRSPGTGATGELFF

SEQ ID NO: 385519 - protein, 11 aa, Homo sapiens
  CDR3 for alpha chain variable domain of TCR clone 192760 (TRAV2, TRAJ33)
CAVESNYQLIW

SEQ ID NO: 385520 - protein, 13 aa, Homo sapiens
  CDR3 for beta chain variable domain of TCR clone 192760 (TRBV7-9, TRBJ1-2)
CASSSDSIYGYTF

SEQ ID NO: 385521 - protein, 16 aa, Homo sapiens
  CDR3 for alpha chain variable domain of TCR clone 192761 (TRAV13-1, TRAJ18)
CAASRMRGSSLGRLYF

SEQ ID NO: 385522 - protein, 16 aa, Homo sapiens
  CDR3 for beta chain variable domain of TCR clone 192761 (TRBV27, TRBJ1-1)
CASSSRGRTGYTEAFF

SEQ ID NO: 385523 - protein, 13 aa, Homo sapiens
  CDR3 for alpha chain variable domain of TCR clone 192762 (TRAV12-2, TRAJ23)
CAVMGNQGGKLIF

SEQ ID NO: 385524 - protein, 14 aa, Homo sapiens
  CDR3 for beta chain variable domain of TCR clone 192762 (TRBV5-1, TRBJ2-7)
CASSRGESLYEQYF

SEQ ID NO: 385525 - protein, 11 aa, Homo sapiens
  CDR3 for alpha chain variable domain of TCR clone 192763 (TRAV1-1, TRAJ23)
CAVRQGGKLIF

SEQ ID NO: 385526 - protein, 14 aa, Homo sapiens
  CDR3 for beta chain variable domain of TCR clone 192763 (TRBV5-7, TRBJ2-7)
CASSGGLSSYEQYF

SEQ ID NO: 385527 - protein, 12 aa, Homo sapiens
  CDR3 for alpha chain variable domain of TCR clone 192764 (TRAV12-3, TRAJ17)
CAMTHTGNKLTF

SEQ ID NO: 385528 - protein, 17 aa, Homo sapiens
  CDR3 for beta chain variable domain of TCR clone 192764 (TRBV28, TRBJ2-1)
CASSAPWGTPSYNEQFF

SEQ ID NO: 385529 - protein, 12 aa, Homo sapiens
  CDR3 for alpha chain variable domain of TCR clone 192765 (TRAV21, TRAJ58)
CAAETSGSRLTF

SEQ ID NO: 385530 - protein, 16 aa, Homo sapiens
  CDR3 for beta chain variable domain of TCR clone 192765 (TRBV12-5, TRBJ2-5)
CASGPRTSGNQETQYF

SEQ ID NO: 385531 - protein, 14 aa, Homo sapiens
  CDR3 for alpha chain variable domain of TCR clone 192766 (TRAV12-2, TRAJ24)
CAVTPADSWGKLQC

SEQ ID NO: 385532 - protein, 12 aa, Homo sapiens
  CDR3 for beta chain variable domain of TCR clone 192766 (TRBV3-1, TRBJ2-1)
CASSQGSSGQFF

SEQ ID NO: 385533 - protein, 14 aa, Homo sapiens
  CDR3 for alpha chain variable domain of TCR clone 192767 (TRAV23/DV6, TRAJ4)
CAAPSSGGYNKLIF

SEQ ID NO: 385534 - protein, 15 aa, Homo sapiens
  CDR3 for beta chain variable domain of TCR clone 192767 (TRBV28, TRBJ2-5)
CASSSGRTIQETQYF

SEQ ID NO: 385535 - protein, 14 aa, Homo sapiens
  CDR3 for alpha chain variable domain of TCR clone 192768 (TRAV13-1, TRAJ35)
CAASKVGFGNVLQC

SEQ ID NO: 385536 - protein, 13 aa, Homo sapiens
  CDR3 for beta chain variable domain of TCR clone 192768 (TRBV7-3, TRBJ1-1)
CASSQDWGAEAFF

SEQ ID NO: 385537 - protein, 12 aa, Homo sapiens
  CDR3 for alpha chain variable domain of TCR clone 192769 (TRAV10, TRAJ6)
CVVSEGSYIPTF

SEQ ID NO: 385538 - protein, 13 aa, Homo sapiens
  CDR3 for beta chain variable domain of TCR clone 192769 (TRBV12-4, TRBJ1-2)
CASSSGPNYGYTF

SEQ ID NO: 385539 - protein, 13 aa, Homo sapiens
  CDR3 for alpha chain variable domain of TCR clone 192770 (TRAV2, TRAJ40)
CSVVTSGTYKYIF

SEQ ID NO: 385540 - protein, 12 aa, Homo sapiens
  CDR3 for beta chain variable domain of TCR clone 192770 (TRBV11-2, TRBJ2-1)
CASSPGNNEQFF

SEQ ID NO: 385541 - protein, 13 aa, Homo sapiens
  CDR3 for alpha chain variable domain of TCR clone 192771 (TRAV21, TRAJ15)
CAVANQAGTALIF

SEQ ID NO: 385542 - protein, 15 aa, Homo sapiens
  CDR3 for beta chain variable domain of TCR clone 192771 (TRBV15, TRBJ2-7)
CATSRGVTPTYEQYF

SEQ ID NO: 385543 - protein, 16 aa, Homo sapiens
  CDR3 for alpha chain variable domain of TCR clone 192772 (TRAV3, TRAJ40)
CAVRDRIASGTYKYIF

SEQ ID NO: 385544 - protein, 19 aa, Homo sapiens
  CDR3 for beta chain variable domain of TCR clone 192772 (TRBV25-1, TRBJ2-2)
CAILVYRVDRGRKTGELFF

SEQ ID NO: 385545 - protein, 16 aa, Homo sapiens
  CDR3 for alpha chain variable domain of TCR clone 192773 (TRAV1-2, TRAJ6)
CAVRDQGTGGSYIPAF

SEQ ID NO: 385546 - protein, 13 aa, Homo sapiens
  CDR3 for beta chain variable domain of TCR clone 192773 (TRBV28, TRBJ2-7)
CASTPGLAGEQYF

SEQ ID NO: 385547 - protein, 17 aa, Homo sapiens
  CDR3 for alpha chain variable domain of TCR clone 192774 (TRAV23/DV6, TRAJ57)
CAASSTLSQGGSEKLVF

SEQ ID NO: 385548 - protein, 14 aa, Homo sapiens
  CDR3 for beta chain variable domain of TCR clone 192774 (TRBV25-1, TRBJ1-1)
CASTHLGGNTDAFF

SEQ ID NO: 385549 - protein, 14 aa, Homo sapiens
  CDR3 for alpha chain variable domain of TCR clone 192775 (TRAV12-2, TRAJ6)
CASKWGGGSYIPTF

SEQ ID NO: 385550 - protein, 13 aa, Homo sapiens
  CDR3 for beta chain variable domain of TCR clone 192775 (TRBV2, TRBJ1-1)
CASGEGGNTEAFF

SEQ ID NO: 385551 - protein, 12 aa, Homo sapiens
  CDR3 for alpha chain variable domain of TCR clone 192776 (TRAV13-1, TRAJ21)
CAAKEGFNKFYF

SEQ ID NO: 385552 - protein, 13 aa, Homo sapiens
  CDR3 for beta chain variable domain of TCR clone 192776 (TRBV19, TRBJ1-2)
CASSVPGQDGYIF

SEQ ID NO: 385553 - protein, 18 aa, Homo sapiens
  CDR3 for alpha chain variable domain of TCR clone 192777 (TRAV3, TRAJ32)
CAVRDIRGYGGATNKLIF

SEQ ID NO: 385554 - protein, 15 aa, Homo sapiens
  CDR3 for beta chain variable domain of TCR clone 192777 (TRBV12-4, TRBJ2-2)
FASSLGVRHTGELFF

SEQ ID NO: 385555 - protein, 16 aa, Homo sapiens
  CDR3 for alpha chain variable domain of TCR clone 192778 (TRAV27, TRAJ13)
CAGAKSDSGGYQKVTF

SEQ ID NO: 385556 - protein, 17 aa, Homo sapiens
  CDR3 for beta chain variable domain of TCR clone 192778 (TRBV13, TRBJ2-3)
CASSLSRVAGGRNTQYF

SEQ ID NO: 385557 - protein, 13 aa, Homo sapiens
  CDR3 for alpha chain variable domain of TCR clone 192779 (TRAV12-2, TRAJ18)
CAVRGSTLGRLYF

SEQ ID NO: 385558 - protein, 19 aa, Homo sapiens
  CDR3 for beta chain variable domain of TCR clone 192779 (TRBV25-1, TRBJ2-2)
CAILVYRVDRGRKTGELFF

SEQ ID NO: 385559 - protein, 13 aa, Homo sapiens
  CDR3 for alpha chain variable domain of TCR clone 192780 (TRAV17, TRAJ23)
CATDKNQGGKLIF

SEQ ID NO: 385560 - protein, 14 aa, Homo sapiens
  CDR3 for beta chain variable domain of TCR clone 192780 (TRBV7-2, TRBJ2-7)
CASRSQGAAYEQYF

SEQ ID NO: 385561 - protein, 17 aa, Homo sapiens
  CDR3 for alpha chain variable domain of TCR clone 192781 (TRAV3, TRAJ6)
CAVRDGPRAGGSYIPTF

SEQ ID NO: 385562 - protein, 14 aa, Homo sapiens
  CDR3 for beta chain variable domain of TCR clone 192781 (TRBV7-2, TRBJ2-7)
CASSPKTSLYEQHF

SEQ ID NO: 385563 - protein, 17 aa, Homo sapiens
  CDR3 for alpha chain variable domain of TCR clone 192782 (TRAV8-6, TRAJ58)
CAVSSWVGETSGSRLTF

SEQ ID NO: 385564 - protein, 14 aa, Homo sapiens
  CDR3 for beta chain variable domain of TCR clone 192782 (TRBV4-2, TRBJ2-1)
CASGLDRAYNEQYF

SEQ ID NO: 385565 - protein, 14 aa, Homo sapiens
  CDR3 for alpha chain variable domain of TCR clone 192783 (TRAV26-1, TRAJ38)
CIADNADNNRKLIW

SEQ ID NO: 385566 - protein, 14 aa, Homo sapiens
  CDR3 for beta chain variable domain of TCR clone 192783 (TRBV4-1, TRBJ2-2)
CASSQAVNTGELFF

SEQ ID NO: 385567 - protein, 12 aa, Homo sapiens
  CDR3 for alpha chain variable domain of TCR clone 192784 (TRAV9-2, TRAJ26)
CALRGYGQNFVF

SEQ ID NO: 385568 - protein, 12 aa, Homo sapiens
  CDR3 for beta chain variable domain of TCR clone 192784 (TRBV29-1, TRBJ2-3)
CSVTGGAGTQYF

SEQ ID NO: 385569 - protein, 11 aa, Homo sapiens
  CDR3 for alpha chain variable domain of TCR clone 192785 (TRAV21, TRAJ34)
CAHYNTAKLIF

SEQ ID NO: 385570 - protein, 15 aa, Homo sapiens
  CDR3 for beta chain variable domain of TCR clone 192785 (TRBV12-4, TRBJ2-5)
CASSPPTGLQETQYF

SEQ ID NO: 385571 - protein, 13 aa, Homo sapiens
  CDR3 for alpha chain variable domain of TCR clone 192786 (TRAV21, TRAJ27)
CAALPDNAGKSTF

SEQ ID NO: 385572 - protein, 14 aa, Homo sapiens
  CDR3 for beta chain variable domain of TCR clone 192786 (TRBV7-6, TRBJ2-3)
CASSLGTVTDTQYF

SEQ ID NO: 385573 - protein, 18 aa, Homo sapiens
  CDR3 for alpha chain variable domain of TCR clone 192787 (TRAV21, TRAJ52)
CAVRPSPAGGTSYGKLTC

SEQ ID NO: 385574 - protein, 13 aa, Homo sapiens
  CDR3 for beta chain variable domain of TCR clone 192787 (TRBV7-3, TRBJ1-1)
CASSQDWGAEAFS

SEQ ID NO: 385575 - protein, 14 aa, Homo sapiens
  CDR3 for alpha chain variable domain of TCR clone 192788 (TRAV12-2, TRAJ13)
CAVKKTGGYQKVTF

SEQ ID NO: 385576 - protein, 16 aa, Homo sapiens
  CDR3 for beta chain variable domain of TCR clone 192788 (TRBV5-1, TRBJ2-5)
CASSLALLRAGETQYF

SEQ ID NO: 385577 - protein, 12 aa, Homo sapiens
  CDR3 for alpha chain variable domain of TCR clone 192789 (TRAV21, TRAJ56)
CAVGVNRSKLTF

SEQ ID NO: 385578 - protein, 16 aa, Homo sapiens
  CDR3 for beta chain variable domain of TCR clone 192789 (TRBV4-2, TRBJ2-5)
CASSQELVGSQETQYF

SEQ ID NO: 385579 - protein, 13 aa, Homo sapiens
  CDR3 for alpha chain variable domain of TCR clone 192790 (TRAV12-1, TRAJ33)
CGDGPDSNYQLIW

SEQ ID NO: 385580 - protein, 12 aa, Homo sapiens
  CDR3 for beta chain variable domain of TCR clone 192790 (TRBV11-2, TRBJ2-2)
CASNLGGGELFF

SEQ ID NO: 385581 - protein, 17 aa, Homo sapiens
  CDR3 for alpha chain variable domain of TCR clone 192791 (TRAV17, TRAJ52)
CATERPSGCTSYGKLTF

SEQ ID NO: 385582 - protein, 15 aa, Homo sapiens
  CDR3 for beta chain variable domain of TCR clone 192791 (TRBV5-1, TRBJ2-1)
CASSLVANSYNEQFF

SEQ ID NO: 385583 - protein, 14 aa, Homo sapiens
  CDR3 for alpha chain variable domain of TCR clone 192792 (TRAV13-1, TRAJ35)
CAASKGGFGNVLHC

SEQ ID NO: 385584 - protein, 14 aa, Homo sapiens
  CDR3 for beta chain variable domain of TCR clone 192792 (TRBV2, TRBJ2-5)
CASKRDGTTETQYF

SEQ ID NO: 385585 - protein, 13 aa, Homo sapiens
  CDR3 for alpha chain variable domain of TCR clone 192793 (TRAV12-1, TRAJ21)
CVVVGDNFNKFYF

SEQ ID NO: 385586 - protein, 13 aa, Homo sapiens
  CDR3 for beta chain variable domain of TCR clone 192793 (TRBV19, TRBJ2-1)
CATSRGVYNEQFF

SEQ ID NO: 385587 - protein, 15 aa, Homo sapiens
  CDR3 for alpha chain variable domain of TCR clone 192794 (TRAV21, TRAJ13)
CAVPRSFWGLPESYL

SEQ ID NO: 385588 - protein, 13 aa, Homo sapiens
  CDR3 for beta chain variable domain of TCR clone 192794 (TRBV7-9, TRBJ1-2)
CASSLKQNYGYTL

SEQ ID NO: 385589 - protein, 18 aa, Homo sapiens
  CDR3 for alpha chain variable domain of TCR clone 192795 (TRAV21, TRAJ52)
CAVRRSPAGGTSYGKLTF

SEQ ID NO: 385590 - protein, 19 aa, Homo sapiens
  CDR3 for beta chain variable domain of TCR clone 192795 (TRBV7-2, TRBJ2-3)
CASSFLSRNWGGGTDTQYF

SEQ ID NO: 385591 - protein, 15 aa, Homo sapiens
  CDR3 for alpha chain variable domain of TCR clone 192796 (TRAV8-3, TRAJ27)
CAVGPSKTNAGKSTF

SEQ ID NO: 385592 - protein, 15 aa, Homo sapiens
  CDR3 for beta chain variable domain of TCR clone 192796 (TRBV7-9, TRBJ2-2)
CASGPLDTFPGELFF

SEQ ID NO: 385593 - protein, 13 aa, Homo sapiens
  CDR3 for alpha chain variable domain of TCR clone 192797 (TRAV12-2, TRAJ9)
CAVKWAGGVKTIF

SEQ ID NO: 385594 - protein, 12 aa, Homo sapiens
  CDR3 for beta chain variable domain of TCR clone 192797 (TRBV7-8, TRBJ2-7)
CASSLGDREQYF

SEQ ID NO: 385595 - protein, 12 aa, Homo sapiens
  CDR3 for alpha chain variable domain of TCR clone 192798 (TRAV29/DV5, TRAJ49)
CAATDTGNQFYF

SEQ ID NO: 385596 - protein, 20 aa, Homo sapiens
  CDR3 for beta chain variable domain of TCR clone 192798 (TRBV28, TRBJ2-1)
CASTPIGRSPGLAGVNEQFF

SEQ ID NO: 385597 - protein, 16 aa, Homo sapiens
  CDR3 for alpha chain variable domain of TCR clone 192799 (TRAV4, TRAJ36)
CLVGDDAQTGANNLFF

SEQ ID NO: 385598 - protein, 16 aa, Homo sapiens
  CDR3 for beta chain variable domain of TCR clone 192799 (TRBV5-4, TRBJ2-5)
CAESPGLAGTQETQYF

SEQ ID NO: 385599 - protein, 13 aa, Homo sapiens
  CDR3 for alpha chain variable domain of TCR clone 192800 (TRAV13-2, TRAJ48)
CAEMDFGNEKLNF

SEQ ID NO: 385600 - protein, 14 aa, Homo sapiens
  CDR3 for beta chain variable domain of TCR clone 192800 (TRBV15, TRBJ2-3)
CATRSGTSTDTQYF

SEQ ID NO: 385601 - protein, 13 aa, Homo sapiens
  CDR3 for alpha chain variable domain of TCR clone 192801 (TRAV8-3, TRAJ36)
CAVGATGANNLFF

SEQ ID NO: 385602 - protein, 16 aa, Homo sapiens
  CDR3 for beta chain variable domain of TCR clone 192801 (TRBV5-1, TRBJ1-1)
CASSSGGNSLNTEAFF

SEQ ID NO: 385603 - protein, 13 aa, Homo sapiens
  CDR3 for alpha chain variable domain of TCR clone 192802 (TRAV8-6, TRAJ8)
CAVSNTGFQKLVF

SEQ ID NO: 385604 - protein, 15 aa, Homo sapiens
  CDR3 for beta chain variable domain of TCR clone 192802 (TRBV28, TRBJ2-5)
CASSSGRTIQDTQYF

SEQ ID NO: 385605 - protein, 13 aa, Homo sapiens
  CDR3 for alpha chain variable domain of TCR clone 192803 (TRAV3, TRAJ27)
CAVRPLGAGKATV

SEQ ID NO: 385606 - protein, 13 aa, Homo sapiens
  CDR3 for beta chain variable domain of TCR clone 192803 (TRBV7-9, TRBJ2-3)
CASSPGSTDTQYF

SEQ ID NO: 385607 - protein, 13 aa, Homo sapiens
  CDR3 for alpha chain variable domain of TCR clone 192804 (TRAV30, TRAJ49)
CGPEPNTGNQFYF

SEQ ID NO: 385608 - protein, 14 aa, Homo sapiens
  CDR3 for beta chain variable domain of TCR clone 192804 (TRBV29-1, TRBJ2-1)
CSVEFRGIPFEQFF

SEQ ID NO: 385609 - protein, 13 aa, Homo sapiens
  CDR3 for alpha chain variable domain of TCR clone 192805 (TRAV12-3, TRAJ29)
CNEPYSGNTPLVF

SEQ ID NO: 385610 - protein, 12 aa, Homo sapiens
  CDR3 for beta chain variable domain of TCR clone 192805 (TRBV9, TRBJ2-1)
CASSVWGTDIFF

SEQ ID NO: 385611 - protein, 15 aa, Homo sapiens
  CDR3 for alpha chain variable domain of TCR clone 192806 (TRAV23/DV6, TRAJ13)
CAAWPGGGVPRKLPL

SEQ ID NO: 385612 - protein, 17 aa, Homo sapiens
  CDR3 for beta chain variable domain of TCR clone 192806 (TRBV19, TRBJ2-7)
CASSISFYDSYPYEQYF

SEQ ID NO: 385613 - protein, 10 aa, Homo sapiens
  CDR3 for alpha chain variable domain of TCR clone 192807 (TRAV17, TRAJ31)
CATDGARLMF

SEQ ID NO: 385614 - protein, 15 aa, Homo sapiens
  CDR3 for beta chain variable domain of TCR clone 192807 (TRBV18, TRBJ2-1)
CASSPPSASYNEQFF

SEQ ID NO: 385615 - protein, 12 aa, Homo sapiens
  CDR3 for alpha chain variable domain of TCR clone 192808 (TRAV13-1, TRAJ49)
CAASPMGNQFYF

SEQ ID NO: 385616 - protein, 14 aa, Homo sapiens
  CDR3 for beta chain variable domain of TCR clone 192808 (TRBV20-1, TRBJ2-2)
SAVLVPRAPGSCFY

SEQ ID NO: 385617 - protein, 11 aa, Homo sapiens
  CDR3 for alpha chain variable domain of TCR clone 192809 (TRAV3, TRAJ21)
CAVGNLNKFYF

SEQ ID NO: 385618 - protein, 16 aa, Homo sapiens
  CDR3 for beta chain variable domain of TCR clone 192809 (TRBV19, TRBJ2-1)
CASSQAGPRSYNEQFF

SEQ ID NO: 385619 - protein, 14 aa, Homo sapiens
  CDR3 for alpha chain variable domain of TCR clone 192810 (TRAV12-2, TRAJ53)
CAAKGGGSNYKLTF

SEQ ID NO: 385620 - protein, 15 aa, Homo sapiens
  CDR3 for beta chain variable domain of TCR clone 192810 (TRBV11-2, TRBJ2-2)
CASSSDRVNAGELFF

SEQ ID NO: 385621 - protein, 19 aa, Homo sapiens
  CDR3 for alpha chain variable domain of TCR clone 192811 (TRAV26-1, TRAJ38)
CIADNAGNNHIQNPDPAVY

SEQ ID NO: 385622 - protein, 16 aa, Homo sapiens
  CDR3 for beta chain variable domain of TCR clone 192811 (TRBV7-9, TRBJ1-2)
CASSLGFSSGEDGDTF

SEQ ID NO: 385623 - protein, 18 aa, Homo sapiens
  CDR3 for alpha chain variable domain of TCR clone 192812 (TRAV12-3, TRAJ52)
CAMSVGGAGGTSYGKLTF

SEQ ID NO: 385624 - protein, 16 aa, Homo sapiens
  CDR3 for beta chain variable domain of TCR clone 192812 (TRBV7-6, TRBJ2-3)
CASSARTSRGTDTQYF

SEQ ID NO: 385625 - protein, 15 aa, Homo sapiens
  CDR3 for alpha chain variable domain of TCR clone 192813 (TRAV13-1, TRAJ45)
CAAPYSGGGADGFTF

SEQ ID NO: 385626 - protein, 13 aa, Homo sapiens
  CDR3 for beta chain variable domain of TCR clone 192813 (TRBV28, TRBJ2-7)
CASSFGQVYEQYF

SEQ ID NO: 385627 - protein, 13 aa, Homo sapiens
  CDR3 for alpha chain variable domain of TCR clone 192814 (TRAV3, TRAJ43)
CAVKARNNNDMRL

SEQ ID NO: 385628 - protein, 16 aa, Homo sapiens
  CDR3 for beta chain variable domain of TCR clone 192814 (TRBV7-9, TRBJ2-3)
CASSFSVAGGTDTQYF

SEQ ID NO: 385629 - protein, 14 aa, Homo sapiens
  CDR3 for alpha chain variable domain of TCR clone 192815 (TRAV12-2, TRAJ13)
CAVKKTGGYQKVTF

SEQ ID NO: 385630 - protein, 16 aa, Homo sapiens
  CDR3 for beta chain variable domain of TCR clone 192815 (TRBV28, TRBJ2-7)
CASSFPDRRLTYEQYF

SEQ ID NO: 385631 - protein, 14 aa, Homo sapiens
  CDR3 for alpha chain variable domain of TCR clone 192816 (TRAV1-2, TRAJ31)
CLLPLCFFDARLMF

SEQ ID NO: 385632 - protein, 15 aa, Homo sapiens
  CDR3 for beta chain variable domain of TCR clone 192816 (TRBV4-1, TRBJ1-4)
CASSDTGGTNEKLFF

SEQ ID NO: 385633 - protein, 16 aa, Homo sapiens
  CDR3 for alpha chain variable domain of TCR clone 192817 (TRAV12-1, TRAJ42)
CVVTPYYEGSQGNLIF

SEQ ID NO: 385634 - protein, 14 aa, Homo sapiens
  CDR3 for beta chain variable domain of TCR clone 192817 (TRBV19, TRBJ2-1)
CASPTFVLSGEQFF

SEQ ID NO: 385635 - protein, 14 aa, Homo sapiens
  CDR3 for alpha chain variable domain of TCR clone 192818 (TRAV6, TRAJ6)
CALPTSGGSYIPTF

SEQ ID NO: 385636 - protein, 15 aa, Homo sapiens
  CDR3 for beta chain variable domain of TCR clone 192818 (TRBV12-4, TRBJ2-5)
CASSPPTGLQETQYF

SEQ ID NO: 385637 - protein, 12 aa, Homo sapiens
  CDR3 for alpha chain variable domain of TCR clone 192819 (TRAV12-2, TRAJ34)
CAVSYNTDKLIF

SEQ ID NO: 385638 - protein, 14 aa, Homo sapiens
  CDR3 for beta chain variable domain of TCR clone 192819 (TRBV12-4, TRBJ1-1)
CASSLGTGGTEAFF

SEQ ID NO: 385639 - protein, 15 aa, Homo sapiens
  CDR3 for alpha chain variable domain of TCR clone 192820 (TRAV21, TRAJ53)
CATLNSGGSNYKLTF

SEQ ID NO: 385640 - protein, 15 aa, Homo sapiens
  CDR3 for beta chain variable domain of TCR clone 192820 (TRBV5-1, TRBJ2-1)
CASRPPRAPYNEQFF

SEQ ID NO: 385641 - protein, 14 aa, Homo sapiens
  CDR3 for alpha chain variable domain of TCR clone 192821 (TRAV20, TRAJ34)
SVLCTRDNTDKLIF

SEQ ID NO: 385642 - protein, 15 aa, Homo sapiens
  CDR3 for beta chain variable domain of TCR clone 192821 (TRBV2, TRBJ2-1)
CASSVTSEGTDEQFF

SEQ ID NO: 385643 - protein, 15 aa, Homo sapiens
  CDR3 for alpha chain variable domain of TCR clone 192822 (TRAV22, TRAJ45)
CSAKYSGGGADGLTF

SEQ ID NO: 385644 - protein, 14 aa, Homo sapiens
  CDR3 for beta chain variable domain of TCR clone 192822 (TRBV5-1, TRBJ2-3)
CASSLFGPTDTQYF

SEQ ID NO: 385645 - protein, 11 aa, Homo sapiens
  CDR3 for alpha chain variable domain of TCR clone 192823 (TRAV21, TRAJ11)
CAVNGYSTLTF

SEQ ID NO: 385646 - protein, 17 aa, Homo sapiens
  CDR3 for beta chain variable domain of TCR clone 192823 (TRBV5-7, TRBJ2-1)
CASSSYWGLAGRNGQFF

SEQ ID NO: 385647 - protein, 12 aa, Homo sapiens
  CDR3 for alpha chain variable domain of TCR clone 192824 (TRAV12-3, TRAJ17)
CAMTLTGNKVTF

SEQ ID NO: 385648 - protein, 16 aa, Homo sapiens
  CDR3 for beta chain variable domain of TCR clone 192824 (TRBV29-1, TRBJ2-7)
CSVEVVGTSGSYEQYF

SEQ ID NO: 385649 - protein, 12 aa, Homo sapiens
  CDR3 for alpha chain variable domain of TCR clone 192825 (TRAV17, TRAJ12)
CATLRSSYKLIF

SEQ ID NO: 385650 - protein, 14 aa, Homo sapiens
  CDR3 for beta chain variable domain of TCR clone 192825 (TRBV5-5, TRBJ1-5)
CASSGQGVDQPQHF

SEQ ID NO: 385651 - protein, 14 aa, Homo sapiens
  CDR3 for alpha chain variable domain of TCR clone 192826 (TRAV12-2, TRAJ13)
CAVKKIGGYQKVTF

SEQ ID NO: 385652 - protein, 13 aa, Homo sapiens
  CDR3 for beta chain variable domain of TCR clone 192826 (TRBV12-4, TRBJ1-2)
CTSGPAVSYGYTF

SEQ ID NO: 385653 - protein, 13 aa, Homo sapiens
  CDR3 for alpha chain variable domain of TCR clone 192827 (TRAV12-3, TRAJ47)
CAMKKEYGNKLVF

SEQ ID NO: 385654 - protein, 16 aa, Homo sapiens
  CDR3 for beta chain variable domain of TCR clone 192827 (TRBV5-4, TRBJ2-3)
CASSFVAGEGTDTQYF

SEQ ID NO: 385655 - protein, 10 aa, Homo sapiens
  CDR3 for alpha chain variable domain of TCR clone 192828 (TRAV23/DV6, TRAJ57)
CAASSTLSQG

SEQ ID NO: 385656 - protein, 16 aa, Homo sapiens
  CDR3 for beta chain variable domain of TCR clone 192828 (TRBV4-3, TRBJ2-3)
CASSLGLAGEGDTQYF

SEQ ID NO: 385657 - protein, 15 aa, Homo sapiens
  CDR3 for alpha chain variable domain of TCR clone 192829 (TRAV17, TRAJ13)
CATVPNSGGYQKVTF

SEQ ID NO: 385658 - protein, 13 aa, Homo sapiens
  CDR3 for beta chain variable domain of TCR clone 192829 (TRBV3-1, TRBJ1-5)
CASSQAGGQPQQF

SEQ ID NO: 385659 - protein, 14 aa, Homo sapiens
  CDR3 for alpha chain variable domain of TCR clone 192830 (TRAV14/DV4, TRAJ41)
CARGGPDSGYALNF

SEQ ID NO: 385660 - protein, 15 aa, Homo sapiens
  CDR3 for beta chain variable domain of TCR clone 192830 (TRBV28, TRBJ2-1)
CASSIIAGGRSEQFF

SEQ ID NO: 385661 - protein, 13 aa, Homo sapiens
  CDR3 for alpha chain variable domain of TCR clone 192831 (TRAV13-1, TRAJ43)
CAASIPNNNDMRF

SEQ ID NO: 385662 - protein, 16 aa, Homo sapiens
  CDR3 for beta chain variable domain of TCR clone 192831 (TRBV12-5, TRBJ2-5)
CASGPRTSGNQETQYF

SEQ ID NO: 385663 - protein, 15 aa, Homo sapiens
  CDR3 for alpha chain variable domain of TCR clone 192832 (TRAV26-2, TRAJ39)
FSLRGNNNAGNMLTC

SEQ ID NO: 385664 - protein, 15 aa, Homo sapiens
  CDR3 for beta chain variable domain of TCR clone 192832 (TRBV5-4, TRBJ1-1)
CASSSLGWANTEAFF

SEQ ID NO: 385665 - protein, 14 aa, Homo sapiens
  CDR3 for alpha chain variable domain of TCR clone 192833 (TRAV16, TRAJ15)
CALSGPQAGTALTF

SEQ ID NO: 385666 - protein, 12 aa, Homo sapiens
  CDR3 for beta chain variable domain of TCR clone 192833 (TRBV18, TRBJ2-5)
CSSSPSKETQYF

SEQ ID NO: 385667 - protein, 14 aa, Homo sapiens
  CDR3 for alpha chain variable domain of TCR clone 192834 (TRAV13-1, TRAJ23)
FAASRLGRGGKLIF

SEQ ID NO: 385668 - protein, 15 aa, Homo sapiens
  CDR3 for beta chain variable domain of TCR clone 192834 (TRBV7-2, TRBJ2-1)
CASSLVAGRYNEQFF

SEQ ID NO: 385669 - protein, 17 aa, Homo sapiens
  CDR3 for alpha chain variable domain of TCR clone 192835 (TRAV13-1, TRAJ53)
CAASWKSSGGSNYKLTF

SEQ ID NO: 385670 - protein, 19 aa, Homo sapiens
  CDR3 for beta chain variable domain of TCR clone 192835 (TRBV7-9, TRBJ2-1)
CDSSHTRGALLRSYNEQFF

SEQ ID NO: 385671 - protein, 14 aa, Homo sapiens
  CDR3 for alpha chain variable domain of TCR clone 192836 (TRAV12-1, TRAJ4)
CVVPLKSGYNKLIF

SEQ ID NO: 385672 - protein, 13 aa, Homo sapiens
  CDR3 for beta chain variable domain of TCR clone 192836 (TRBV27, TRBJ2-1)
CASGRGGAYEQFF

SEQ ID NO: 385673 - protein, 15 aa, Homo sapiens
  CDR3 for alpha chain variable domain of TCR clone 192837 (TRAV17, TRAJ52)
CATEAGDTSYGKLTF

SEQ ID NO: 385674 - protein, 14 aa, Homo sapiens
  CDR3 for beta chain variable domain of TCR clone 192837 (TRBV28, TRBJ1-5)
CASSLGVLVKPQHF

SEQ ID NO: 385675 - protein, 13 aa, Homo sapiens
  CDR3 for alpha chain variable domain of TCR clone 192838 (TRAV8-3, TRAJ28)
CAVGAVGSYQLTF

SEQ ID NO: 385676 - protein, 17 aa, Homo sapiens
  CDR3 for beta chain variable domain of TCR clone 192838 (TRBV11-2, TRBJ2-1)
CASSLCPPGVEYNEQFF

SEQ ID NO: 385677 - protein, 13 aa, Homo sapiens
  CDR3 for alpha chain variable domain of TCR clone 192839 (TRAV29/DV5, TRAJ31)
CAASRNNNARLMF

SEQ ID NO: 385678 - protein, 15 aa, Homo sapiens
  CDR3 for beta chain variable domain of TCR clone 192839 (TRBV2, TRBJ2-1)
CASSERAGSYNEQFF

SEQ ID NO: 385679 - protein, 14 aa, Homo sapiens
  CDR3 for alpha chain variable domain of TCR clone 192840 (TRAV1-2, TRAJ8)
CAVREDTGFQKLVF

SEQ ID NO: 385680 - protein, 13 aa, Homo sapiens
  CDR3 for beta chain variable domain of TCR clone 192840 (TRBV28, TRBJ2-7)
CASKAGGVYEQHF

SEQ ID NO: 385681 - protein, 15 aa, Homo sapiens
  CDR3 for alpha chain variable domain of TCR clone 192841 (TRAV17, TRAJ57)
CATGPSQGGSEKLVF

SEQ ID NO: 385682 - protein, 13 aa, Homo sapiens
  CDR3 for beta chain variable domain of TCR clone 192841 (TRBV9, TRBJ2-1)
CGSSPSGGSEQFF

SEQ ID NO: 385683 - protein, 12 aa, Homo sapiens
  CDR3 for alpha chain variable domain of TCR clone 192842 (TRAV13-1, TRAJ11)
CAGPSGYSTLTV

SEQ ID NO: 385684 - protein, 13 aa, Homo sapiens
  CDR3 for beta chain variable domain of TCR clone 192842 (TRBV12-4, TRBJ2-1)
CASSLPPSNEQFF

SEQ ID NO: 385685 - protein, 14 aa, Homo sapiens
  CDR3 for alpha chain variable domain of TCR clone 192843 (TRAV1-2, TRAJ8)
CAVREDTGFQKLVF

SEQ ID NO: 385686 - protein, 13 aa, Homo sapiens
  CDR3 for beta chain variable domain of TCR clone 192843 (TRBV10-3, TRBJ1-1)
CAIIPEGGTEAFF

SEQ ID NO: 385687 - protein, 12 aa, Homo sapiens
  CDR3 for alpha chain variable domain of TCR clone 192844 (TRAV27, TRAJ41)
CRRGNSGYALNF

SEQ ID NO: 385688 - protein, 14 aa, Homo sapiens
  CDR3 for beta chain variable domain of TCR clone 192844 (TRBV7-2, TRBJ1-1)
CASSFLTGTTEAVF

SEQ ID NO: 385689 - protein, 16 aa, Homo sapiens
  CDR3 for alpha chain variable domain of TCR clone 192845 (TRAV26-1, TRAJ52)
CIVSNAGCTSYGKLTF

SEQ ID NO: 385690 - protein, 16 aa, Homo sapiens
  CDR3 for beta chain variable domain of TCR clone 192845 (TRBV5-1, TRBJ2-1)
CASSLEGRGLYNEQFF

SEQ ID NO: 385691 - protein, 11 aa, Homo sapiens
  CDR3 for alpha chain variable domain of TCR clone 192846 (TRAV4, TRAJ31)
CLVGDNARLRF

SEQ ID NO: 385692 - protein, 16 aa, Homo sapiens
  CDR3 for beta chain variable domain of TCR clone 192846 (TRBV7-2, TRBJ2-5)
CASSSKWLSGQETQYF

SEQ ID NO: 385693 - protein, 15 aa, Homo sapiens
  CDR3 for alpha chain variable domain of TCR clone 192847 (TRAV3, TRAJ20)
CAVRDIKLSDYKLSF

SEQ ID NO: 385694 - protein, 14 aa, Homo sapiens
  CDR3 for beta chain variable domain of TCR clone 192847 (TRBV7-9, TRBJ1-6)
CASSSPLGNSPLHF

SEQ ID NO: 385695 - protein, 10 aa, Homo sapiens
  CDR3 for alpha chain variable domain of TCR clone 192848 (TRAV29/DV5, TRAJ54)
LIQGAQKLVF

SEQ ID NO: 385696 - protein, 12 aa, Homo sapiens
  CDR3 for beta chain variable domain of TCR clone 192848 (TRBV2, TRBJ2-1)
CAYGPPGNEQFF

SEQ ID NO: 385697 - protein, 14 aa, Homo sapiens
  CDR3 for alpha chain variable domain of TCR clone 192849 (TRAV27, TRAJ15)
CAGFDNQAGTALIF

SEQ ID NO: 385698 - protein, 13 aa, Homo sapiens
  CDR3 for beta chain variable domain of TCR clone 192849 (TRBV6-5, TRBJ2-7)
CASRGRGGYEQYF

SEQ ID NO: 385699 - protein, 12 aa, Homo sapiens
  CDR3 for alpha chain variable domain of TCR clone 192850 (TRAV17, TRAJ31)
CATEQGNARLMF

SEQ ID NO: 385700 - protein, 14 aa, Homo sapiens
  CDR3 for beta chain variable domain of TCR clone 192850 (TRBV27, TRBJ1-1)
CASSPQGKRAEAFF

SEQ ID NO: 385701 - protein, 16 aa, Homo sapiens
  CDR3 for alpha chain variable domain of TCR clone 192851 (TRAV30, TRAJ24)
CDTEIVDADSWGKFQF

SEQ ID NO: 385702 - protein, 14 aa, Homo sapiens
  CDR3 for beta chain variable domain of TCR clone 192851 (TRBV12-5, TRBJ2-5)
CASGSRTHQETQYL

SEQ ID NO: 385703 - protein, 15 aa, Homo sapiens
  CDR3 for alpha chain variable domain of TCR clone 192852 (TRAV14/DV4, TRAJ26)
CAMREGRNYGQNFVF

SEQ ID NO: 385704 - protein, 13 aa, Homo sapiens
  CDR3 for beta chain variable domain of TCR clone 192852 (TRBV24-1, TRBJ2-2)
CATSDWSTGELFF

SEQ ID NO: 385705 - protein, 15 aa, Homo sapiens
  CDR3 for alpha chain variable domain of TCR clone 192853 (TRAV30, TRAJ57)
CGTAIPQGGSEKLVF

SEQ ID NO: 385706 - protein, 13 aa, Homo sapiens
  CDR3 for beta chain variable domain of TCR clone 192853 (TRBV7-9, TRBJ1-2)
CASNPSNFWGYTF

SEQ ID NO: 385707 - protein, 15 aa, Homo sapiens
  CDR3 for alpha chain variable domain of TCR clone 192854 (TRAV3, TRAJ47)
CAVRDLGEYGNKLGF

SEQ ID NO: 385708 - protein, 14 aa, Homo sapiens
  CDR3 for beta chain variable domain of TCR clone 192854 (TRBV13, TRBJ2-5)
CASSLERVGETQYF

SEQ ID NO: 385709 - protein, 14 aa, Homo sapiens
  CDR3 for alpha chain variable domain of TCR clone 192855 (TRAV22, TRAJ37)
CASPSSGNTGKLIF

SEQ ID NO: 385710 - protein, 13 aa, Homo sapiens
  CDR3 for beta chain variable domain of TCR clone 192855 (TRBV20-1, TRBJ2-1)
CSAHGSSYNEQFF

SEQ ID NO: 385711 - protein, 12 aa, Homo sapiens
  CDR3 for alpha chain variable domain of TCR clone 192856 (TRAV13-1, TRAJ49)
CAASPTGNQFYF

SEQ ID NO: 385712 - protein, 15 aa, Homo sapiens
  CDR3 for beta chain variable domain of TCR clone 192856 (TRBV7-9, TRBJ1-1)
CASSLLEQGGTEAFF

SEQ ID NO: 385713 - protein, 14 aa, Homo sapiens
  CDR3 for alpha chain variable domain of TCR clone 192857 (TRAV1-2, TRAJ16)
CAVNRFYDGQKLLF

SEQ ID NO: 385714 - protein, 15 aa, Homo sapiens
  CDR3 for beta chain variable domain of TCR clone 192857 (TRBV7-9, TRBJ1-6)
CASSSPGRGNSPPHF

SEQ ID NO: 385715 - protein, 12 aa, Homo sapiens
  CDR3 for alpha chain variable domain of TCR clone 192858 (TRAV12-3, TRAJ17)
SAMTLTGNKLTL

SEQ ID NO: 385716 - protein, 15 aa, Homo sapiens
  CDR3 for beta chain variable domain of TCR clone 192858 (TRBV20-1, TRBJ2-7)
CSAIDRVSGMDEQYF

SEQ ID NO: 385717 - protein, 15 aa, Homo sapiens
  CDR3 for alpha chain variable domain of TCR clone 192859 (TRAV27, TRAJ38)
CAARRNAGNNRKLIW

SEQ ID NO: 385718 - protein, 17 aa, Homo sapiens
  CDR3 for beta chain variable domain of TCR clone 192859 (TRBV13, TRBJ2-3)
CASSLSRVAGGSNTQYF

SEQ ID NO: 385719 - protein, 14 aa, Homo sapiens
  CDR3 for alpha chain variable domain of TCR clone 192860 (TRAV8-3, TRAJ21)
CAVDARDNFNKFYF

SEQ ID NO: 385720 - protein, 16 aa, Homo sapiens
  CDR3 for beta chain variable domain of TCR clone 192860 (TRBV20-1, TRBJ2-1)
CSARDLAGHSYNGQFF

SEQ ID NO: 385721 - protein, 14 aa, Homo sapiens
  CDR3 for alpha chain variable domain of TCR clone 192861 (TRAV12-3, TRAJ43)
CAMSLGGAGTRLTV

SEQ ID NO: 385722 - protein, 13 aa, Homo sapiens
  CDR3 for beta chain variable domain of TCR clone 192861 (TRBV7-9, TRBJ1-2)
CASSVKQNYGYTF

SEQ ID NO: 385723 - protein, 12 aa, Homo sapiens
  CDR3 for alpha chain variable domain of TCR clone 192862 (TRAV21, TRAJ33)
CAKMDSNYQLIW

SEQ ID NO: 385724 - protein, 18 aa, Homo sapiens
  CDR3 for beta chain variable domain of TCR clone 192862 (TRBV4-1, TRBJ1-5)
CASSHDPRGQGLNQPQHF

SEQ ID NO: 385725 - protein, 12 aa, Homo sapiens
  CDR3 for alpha chain variable domain of TCR clone 192863 (TRAV12-1, TRAJ6)
CVVSERSYIPTF

SEQ ID NO: 385726 - protein, 21 aa, Homo sapiens
  CDR3 for beta chain variable domain of TCR clone 192863 (TRBV7-3, TRBJ2-1)
GGTQPCISVPAAYCLAGAQFF

SEQ ID NO: 385727 - protein, 15 aa, Homo sapiens
  CDR3 for alpha chain variable domain of TCR clone 192864 (TRAV25, TRAJ23)
CALAPNYNQGGKLIF

SEQ ID NO: 385728 - protein, 15 aa, Homo sapiens
  CDR3 for beta chain variable domain of TCR clone 192864 (TRBV7-9, TRBJ1-5)
CASSQGHQPNQPQHF

SEQ ID NO: 385729 - protein, 13 aa, Homo sapiens
  CDR3 for alpha chain variable domain of TCR clone 192865 (TRAV27, TRAJ41)
CAGEGNSGYALNF

SEQ ID NO: 385730 - protein, 16 aa, Homo sapiens
  CDR3 for beta chain variable domain of TCR clone 192865 (TRBV29-1, TRBJ2-7)
CSAEVVGTSGSYEQYF

SEQ ID NO: 385731 - protein, 13 aa, Homo sapiens
  CDR3 for alpha chain variable domain of TCR clone 192866 (TRAV8-3, TRAJ36)
CAVGATGANNLFF

SEQ ID NO: 385732 - protein, 12 aa, Homo sapiens
  CDR3 for beta chain variable domain of TCR clone 192866 (TRBV19, TRBJ1-5)
CASSIAQQPQHF

SEQ ID NO: 385733 - protein, 16 aa, Homo sapiens
  CDR3 for alpha chain variable domain of TCR clone 192867 (TRAV3, TRAJ5)
CAVRNLMDTGRRALSF

SEQ ID NO: 385734 - protein, 16 aa, Homo sapiens
  CDR3 for beta chain variable domain of TCR clone 192867 (TRBV4-2, TRBJ2-7)
CASSQEGLANSYEQYF

SEQ ID NO: 385735 - protein, 14 aa, Homo sapiens
  CDR3 for alpha chain variable domain of TCR clone 192868 (TRAV12-2, TRAJ17)
CAVLFKAAGNKLTF

SEQ ID NO: 385736 - protein, 13 aa, Homo sapiens
  CDR3 for beta chain variable domain of TCR clone 192868 (TRBV29-1, TRBJ2-3)
SAALQGGADTQYF

SEQ ID NO: 385737 - protein, 13 aa, Homo sapiens
  CDR3 for alpha chain variable domain of TCR clone 192869 (TRAV8-3, TRAJ28)
CAVGAVGSYQLTF

SEQ ID NO: 385738 - protein, 20 aa, Homo sapiens
  CDR3 for beta chain variable domain of TCR clone 192869 (TRBV19, TRBJ2-1)
CASSISRTVTSTRLNNEQFF

SEQ ID NO: 385739 - protein, 19 aa, Homo sapiens
  CDR3 for alpha chain variable domain of TCR clone 192870 (TRAV38-1, TRAJ53)
CAFMKHGLESGGSNYKLTF

SEQ ID NO: 385740 - protein, 12 aa, Homo sapiens
  CDR3 for beta chain variable domain of TCR clone 192870 (TRBV11-2, TRBJ2-7)
CASSLPTYEQYF

SEQ ID NO: 385741 - protein, 12 aa, Homo sapiens
  CDR3 for alpha chain variable domain of TCR clone 192871 (TRAV30, TRAJ43)
CGTEERGNDMRF

SEQ ID NO: 385742 - protein, 13 aa, Homo sapiens
  CDR3 for beta chain variable domain of TCR clone 192871 (TRBV25-1, TRBJ2-7)
CASSFSQGYEQYF

SEQ ID NO: 385743 - protein, 13 aa, Homo sapiens
  CDR3 for alpha chain variable domain of TCR clone 192872 (TRAV8-3, TRAJ48)
CAVVPFGNEKLTF

SEQ ID NO: 385744 - protein, 20 aa, Homo sapiens
  CDR3 for beta chain variable domain of TCR clone 192872 (TRBV28, TRBJ2-1)
CASTPIGRSPGLAGGNEQFF

SEQ ID NO: 385745 - protein, 15 aa, Homo sapiens
  CDR3 for alpha chain variable domain of TCR clone 192873 (TRAV26-2, TRAJ28)
CILVESGAGRYQLTF

SEQ ID NO: 385746 - protein, 11 aa, Homo sapiens
  CDR3 for beta chain variable domain of TCR clone 192873 (TRBV25-1, TRBJ2-7)
CASSPSYEQYF

SEQ ID NO: 385747 - protein, 14 aa, Homo sapiens
  CDR3 for alpha chain variable domain of TCR clone 192874 (TRAV12-1, TRAJ17)
CVVNYKAAGNKLTF

SEQ ID NO: 385748 - protein, 12 aa, Homo sapiens
  CDR3 for beta chain variable domain of TCR clone 192874 (TRBV12-4, TRBJ2-3)
CQSSPLGGTQYF

SEQ ID NO: 385749 - protein, 17 aa, Homo sapiens
  CDR3 for alpha chain variable domain of TCR clone 192875 (TRAV12-2, TRAJ48)
CASNEKLTFGTGTRLTI

SEQ ID NO: 385750 - protein, 16 aa, Homo sapiens
  CDR3 for beta chain variable domain of TCR clone 192875 (TRBV7-3, TRBJ2-2)
CASSLTRGTLSGELFF

SEQ ID NO: 385751 - protein, 12 aa, Homo sapiens
  CDR3 for alpha chain variable domain of TCR clone 192876 (TRAV16, TRAJ21)
CALLGNFNKFYF

SEQ ID NO: 385752 - protein, 15 aa, Homo sapiens
  CDR3 for beta chain variable domain of TCR clone 192876 (TRBV4-1, TRBJ1-4)
CASSDTGGTNEKLFF

SEQ ID NO: 385753 - protein, 10 aa, Homo sapiens
  CDR3 for alpha chain variable domain of TCR clone 192877 (TRAV23/DV6, TRAJ57)
CAASSTLSQG

SEQ ID NO: 385754 - protein, 14 aa, Homo sapiens
  CDR3 for beta chain variable domain of TCR clone 192877 (TRBV19, TRBJ2-1)
CASSQDRGQDEQFF

SEQ ID NO: 385755 - protein, 12 aa, Homo sapiens
  CDR3 for alpha chain variable domain of TCR clone 192878 (TRAV23/DV6, TRAJ49)
CAATYTGNQLYF

SEQ ID NO: 385756 - protein, 17 aa, Homo sapiens
  CDR3 for beta chain variable domain of TCR clone 192878 (TRBV4-1, TRBJ2-3)
CASSQVLQGGGTDTQYF

SEQ ID NO: 385757 - protein, 14 aa, Homo sapiens
  CDR3 for alpha chain variable domain of TCR clone 192879 (TRAV26-1, TRAJ15)
CIVRANQAGTALIF

SEQ ID NO: 385758 - protein, 16 aa, Homo sapiens
  CDR3 for beta chain variable domain of TCR clone 192879 (TRBV12-5, TRBJ2-5)
CASGPRTSGNQETQYF

SEQ ID NO: 385759 - protein, 13 aa, Homo sapiens
  CDR3 for alpha chain variable domain of TCR clone 192880 (TRAV13-1, TRAJ5)
CAAEHTGRRALTF

SEQ ID NO: 385760 - protein, 15 aa, Homo sapiens
  CDR3 for beta chain variable domain of TCR clone 192880 (TRBV6-1, TRBJ2-1)
CASSELRGQYNEQYF

SEQ ID NO: 385761 - protein, 18 aa, Homo sapiens
  CDR3 for alpha chain variable domain of TCR clone 192881 (TRAV13-1, TRAJ52)
CAAKNPNAGVTSYGKLTF

SEQ ID NO: 385762 - protein, 15 aa, Homo sapiens
  CDR3 for beta chain variable domain of TCR clone 192881 (TRBV28, TRBJ2-1)
CASSIIAGGRSEQFF

SEQ ID NO: 385763 - protein, 14 aa, Homo sapiens
  CDR3 for alpha chain variable domain of TCR clone 192882 (TRAV9-2, TRAJ39)
CALYIYNAGNMLTF

SEQ ID NO: 385764 - protein, 13 aa, Homo sapiens
  CDR3 for beta chain variable domain of TCR clone 192882 (TRBV20-1, TRBJ2-5)
CSARRGTGATQYF

SEQ ID NO: 385765 - protein, 17 aa, Homo sapiens
  CDR3 for alpha chain variable domain of TCR clone 192883 (TRAV14/DV4, TRAJ28)
CAMREGYSGAGSYQLTF

SEQ ID NO: 385766 - protein, 14 aa, Homo sapiens
  CDR3 for beta chain variable domain of TCR clone 192883 (TRBV6-1, TRBJ1-3)
CASVQGGGGNTIYF

SEQ ID NO: 385767 - protein, 14 aa, Homo sapiens
  CDR3 for alpha chain variable domain of TCR clone 192884 (TRAV35, TRAJ10)
CAGILTGGGNKLTF

SEQ ID NO: 385768 - protein, 14 aa, Homo sapiens
  CDR3 for beta chain variable domain of TCR clone 192884 (TRBV20-1, TRBJ1-1)
CSAQTRIGGTEAFF

SEQ ID NO: 385769 - protein, 17 aa, Homo sapiens
  CDR3 for alpha chain variable domain of TCR clone 192885 (TRAV3, TRAJ6)
CAVRDGPRAGRSYIPTF

SEQ ID NO: 385770 - protein, 15 aa, Homo sapiens
  CDR3 for beta chain variable domain of TCR clone 192885 (TRBV20-1, TRBJ1-1)
CSASWDRVLNTEAFF

SEQ ID NO: 385771 - protein, 13 aa, Homo sapiens
  CDR3 for alpha chain variable domain of TCR clone 192886 (TRAV2, TRAJ40)
CAVVTSGTYKYIF

SEQ ID NO: 385772 - protein, 14 aa, Homo sapiens
  CDR3 for beta chain variable domain of TCR clone 192886 (TRBV19, TRBJ2-1)
CATSQGDTYNEQFF

SEQ ID NO: 385773 - protein, 16 aa, Homo sapiens
  CDR3 for alpha chain variable domain of TCR clone 192887 (TRAV30, TRAJ24)
SGTEIVDADSWGKFQF

SEQ ID NO: 385774 - protein, 15 aa, Homo sapiens
  CDR3 for beta chain variable domain of TCR clone 192887 (TRBV20-1, TRBJ2-6)
CSARDRGPGANVLTF

SEQ ID NO: 385775 - protein, 14 aa, Homo sapiens
  CDR3 for alpha chain variable domain of TCR clone 192888 (TRAV1-2, TRAJ16)
CAVNRFSDGHKLLF

SEQ ID NO: 385776 - protein, 15 aa, Homo sapiens
  CDR3 for beta chain variable domain of TCR clone 192888 (TRBV7-8, TRBJ2-1)
CASSLHGGPYNEQFF

SEQ ID NO: 385777 - protein, 14 aa, Homo sapiens
  CDR3 for alpha chain variable domain of TCR clone 192889 (TRAV13-1, TRAJ9)
CAASALTGGFKTIF

SEQ ID NO: 385778 - protein, 13 aa, Homo sapiens
  CDR3 for beta chain variable domain of TCR clone 192889 (TRBV12-5, TRBJ2-3)
CASGDRQSDTQYF

SEQ ID NO: 385779 - protein, 13 aa, Homo sapiens
  CDR3 for alpha chain variable domain of TCR clone 192890 (TRAV12-3, TRAJ33)
FAMIVNSNYHLIW

SEQ ID NO: 385780 - protein, 13 aa, Homo sapiens
  CDR3 for beta chain variable domain of TCR clone 192890 (TRBV4-1, TRBJ2-2)
CASSQENTGELFF

SEQ ID NO: 385781 - protein, 15 aa, Homo sapiens
  CDR3 for alpha chain variable domain of TCR clone 192891 (TRAV27, TRAJ38)
CAARRNAGSNRKLIW

SEQ ID NO: 385782 - protein, 13 aa, Homo sapiens
  CDR3 for beta chain variable domain of TCR clone 192891 (TRBV12-5, TRBJ2-3)
CTSGDRQSDTQYF

SEQ ID NO: 385783 - protein, 14 aa, Homo sapiens
  CDR3 for alpha chain variable domain of TCR clone 192892 (TRAV17, TRAJ12)
CATDEKDSSYKLIF

SEQ ID NO: 385784 - protein, 16 aa, Homo sapiens
  CDR3 for beta chain variable domain of TCR clone 192892 (TRBV11-2, TRBJ2-1)
CASSPRRAGVYNEQFF

SEQ ID NO: 385785 - protein, 14 aa, Homo sapiens
  CDR3 for alpha chain variable domain of TCR clone 192893 (TRAV2, TRAJ37)
CAVDFTSNTGKLIF

SEQ ID NO: 385786 - protein, 13 aa, Homo sapiens
  CDR3 for beta chain variable domain of TCR clone 192893 (TRBV13, TRBJ2-1)
CASSLGGRGEQFF

SEQ ID NO: 385787 - protein, 14 aa, Homo sapiens
  CDR3 for alpha chain variable domain of TCR clone 192894 (TRAV12-1, TRAJ13)
CVVIDSGCYQKVTF

SEQ ID NO: 385788 - protein, 12 aa, Homo sapiens
  CDR3 for beta chain variable domain of TCR clone 192894 (TRBV29-1, TRBJ2-3)
CSVTGGADTQYF

SEQ ID NO: 385789 - protein, 13 aa, Homo sapiens
  CDR3 for alpha chain variable domain of TCR clone 192895 (TRAV12-3, TRAJ40)
CAMSDSGTYKYIF

SEQ ID NO: 385790 - protein, 17 aa, Homo sapiens
  CDR3 for beta chain variable domain of TCR clone 192895 (TRBV20-1, TRBJ2-1)
CSASSSGLAGSYNEQFF

SEQ ID NO: 385791 - protein, 17 aa, Homo sapiens
  CDR3 for alpha chain variable domain of TCR clone 192896 (TRAV13-1, TRAJ28)
CAASPPYSGAGSYQLTF

SEQ ID NO: 385792 - protein, 15 aa, Homo sapiens
  CDR3 for beta chain variable domain of TCR clone 192896 (TRBV6-6, TRBJ2-5)
CASSPGGGLEETQYF

SEQ ID NO: 385793 - protein, 10 aa, Homo sapiens
  CDR3 for alpha chain variable domain of TCR clone 192897 (TRAV1-2, TRAJ23)
CAGQGGKLIF

SEQ ID NO: 385794 - protein, 14 aa, Homo sapiens
  CDR3 for beta chain variable domain of TCR clone 192897 (TRBV16, TRBJ1-1)
CASSQAGPNTEAFF

SEQ ID NO: 385795 - protein, 15 aa, Homo sapiens
  CDR3 for alpha chain variable domain of TCR clone 192898 (TRAV12-3, TRAJ6)
CAMSPASGGSYLPTF

SEQ ID NO: 385796 - protein, 15 aa, Homo sapiens
  CDR3 for beta chain variable domain of TCR clone 192898 (TRBV2, TRBJ1-2)
CASSESRTVNYGYTF

SEQ ID NO: 385797 - protein, 13 aa, Homo sapiens
  CDR3 for alpha chain variable domain of TCR clone 192899 (TRAV20, TRAJ29)
CAVQAVGNTHLVF

SEQ ID NO: 385798 - protein, 15 aa, Homo sapiens
  CDR3 for beta chain variable domain of TCR clone 192899 (TRBV10-2, TRBJ2-5)
CASRGSGGPQETQYF

SEQ ID NO: 385799 - protein, 15 aa, Homo sapiens
  CDR3 for alpha chain variable domain of TCR clone 192900 (TRAV26-1, TRAJ29)
CLVRVEGSGNTPLVF

SEQ ID NO: 385800 - protein, 15 aa, Homo sapiens
  CDR3 for beta chain variable domain of TCR clone 192900 (TRBV12-4, TRBJ1-1)
CQQQDRVVANTEAFF

SEQ ID NO: 385801 - protein, 12 aa, Homo sapiens
  CDR3 for alpha chain variable domain of TCR clone 192901 (TRAV13-1, TRAJ53)
AASGGSNYKLTF

SEQ ID NO: 385802 - protein, 15 aa, Homo sapiens
  CDR3 for beta chain variable domain of TCR clone 192901 (TRBV5-1, TRBJ2-1)
CASSPPRAPCNEQFF

SEQ ID NO: 385803 - protein, 11 aa, Homo sapiens
  CDR3 for alpha chain variable domain of TCR clone 192902 (TRAV1-1, TRAJ23)
CAVGQGGKLIF

SEQ ID NO: 385804 - protein, 13 aa, Homo sapiens
  CDR3 for beta chain variable domain of TCR clone 192902 (TRBV7-3, TRBJ1-1)
CASSQDWGAEAFF

SEQ ID NO: 385805 - protein, 14 aa, Homo sapiens
  CDR3 for alpha chain variable domain of TCR clone 192903 (TRAV13-1, TRAJ40)
CAARVTSGTYKYIF

SEQ ID NO: 385806 - protein, 15 aa, Homo sapiens
  CDR3 for beta chain variable domain of TCR clone 192903 (TRBV7-3, TRBJ2-1)
CASSPTGGGEVEQFF

SEQ ID NO: 385807 - protein, 15 aa, Homo sapiens
  CDR3 for alpha chain variable domain of TCR clone 192904 (TRAV3, TRAJ29)
CAVRDRYSGNTPLVF

SEQ ID NO: 385808 - protein, 17 aa, Homo sapiens
  CDR3 for beta chain variable domain of TCR clone 192904 (TRBV20-1, TRBJ2-1)
CSARDPLAGVWDNEQFF

SEQ ID NO: 385809 - protein, 12 aa, Homo sapiens
  CDR3 for alpha chain variable domain of TCR clone 192905 (TRAV8-3, TRAJ20)
GAVGANDYKLSF

SEQ ID NO: 385810 - protein, 17 aa, Homo sapiens
  CDR3 for beta chain variable domain of TCR clone 192905 (TRBV13, TRBJ2-3)
CASSLSRVAGGRNTQYF

SEQ ID NO: 385811 - protein, 14 aa, Homo sapiens
  CDR3 for alpha chain variable domain of TCR clone 192906 (TRAV13-2, TRAJ17)
CEENSKAAGNKLTF

SEQ ID NO: 385812 - protein, 11 aa, Homo sapiens
  CDR3 for beta chain variable domain of TCR clone 192906 (TRBV6-3, TRBJ2-3)
CATGQADTQYF

SEQ ID NO: 385813 - protein, 18 aa, Homo sapiens
  CDR3 for alpha chain variable domain of TCR clone 192907 (TRAV3, TRAJ32)
CAVRDIRGYGGVTNKLIF

SEQ ID NO: 385814 - protein, 15 aa, Homo sapiens
  CDR3 for beta chain variable domain of TCR clone 192907 (TRBV12-4, TRBJ2-2)
CASSLGVRHTGELFF

SEQ ID NO: 385815 - protein, 16 aa, Homo sapiens
  CDR3 for alpha chain variable domain of TCR clone 192908 (TRAV8-2, TRAJ7)
CVVSEGPYYGNNRLAF

SEQ ID NO: 385816 - protein, 14 aa, Homo sapiens
  CDR3 for beta chain variable domain of TCR clone 192908 (TRBV4-1, TRBJ2-2)
CASSQAVNTGELFF

SEQ ID NO: 385817 - protein, 11 aa, Homo sapiens
  CDR3 for alpha chain variable domain of TCR clone 192909 (TRAV13-1, TRAJ39)
CASHAGNMLPF

SEQ ID NO: 385818 - protein, 14 aa, Homo sapiens
  CDR3 for beta chain variable domain of TCR clone 192909 (TRBV11-2, TRBJ1-5)
CASSLDRGRQTQHF

SEQ ID NO: 385819 - protein, 10 aa, Homo sapiens
  CDR3 for alpha chain variable domain of TCR clone 192910 (TRAV2, TRAJ15)
RCQAGTALIF

SEQ ID NO: 385820 - protein, 13 aa, Homo sapiens
  CDR3 for beta chain variable domain of TCR clone 192910 (TRBV10-3, TRBJ2-7)
CASKLAVNYEQYF

SEQ ID NO: 385821 - protein, 11 aa, Homo sapiens
  CDR3 for alpha chain variable domain of TCR clone 192911 (TRAV4, TRAJ31)
CLVGDNARLMF

SEQ ID NO: 385822 - protein, 16 aa, Homo sapiens
  CDR3 for beta chain variable domain of TCR clone 192911 (TRBV7-2, TRBJ2-5)
WASSSKWLSGQETQYF

SEQ ID NO: 385823 - protein, 14 aa, Homo sapiens
  CDR3 for alpha chain variable domain of TCR clone 192912 (TRAV35, TRAJ46)
CAGPQKSSGDKLTF

SEQ ID NO: 385824 - protein, 13 aa, Homo sapiens
  CDR3 for beta chain variable domain of TCR clone 192912 (TRBV15, TRBJ1-6)
CATSGGLNSPLHF

SEQ ID NO: 385825 - protein, 14 aa, Homo sapiens
  CDR3 for alpha chain variable domain of TCR clone 192913 (TRAV12-2, TRAJ13)
CAVKKTGGYQKVTF

SEQ ID NO: 385826 - protein, 14 aa, Homo sapiens
  CDR3 for beta chain variable domain of TCR clone 192913 (TRBV5-4, TRBJ2-5)
CASSLVGVEETQYF

SEQ ID NO: 385827 - protein, 13 aa, Homo sapiens
  CDR3 for alpha chain variable domain of TCR clone 192914 (TRAV21, TRAJ27)
CAALNTNAGKSTI

SEQ ID NO: 385828 - protein, 14 aa, Homo sapiens
  CDR3 for beta chain variable domain of TCR clone 192914 (TRBV27, TRBJ1-1)
CASSLLSGLSEAFF

SEQ ID NO: 385829 - protein, 14 aa, Homo sapiens
  CDR3 for alpha chain variable domain of TCR clone 192915 (TRAV13-1, TRAJ35)
CAASKGGFGNVLNC

SEQ ID NO: 385830 - protein, 13 aa, Homo sapiens
  CDR3 for beta chain variable domain of TCR clone 192915 (TRBV7-3, TRBJ1-1)
CASNQDWGAEAFF

SEQ ID NO: 385831 - protein, 10 aa, Homo sapiens
  CDR3 for alpha chain variable domain of TCR clone 192916 (TRAV12-3, TRAJ9)
CAMRGFKTIF

SEQ ID NO: 385832 - protein, 14 aa, Homo sapiens
  CDR3 for beta chain variable domain of TCR clone 192916 (TRBV28, TRBJ2-1)
CASSPGLAGAEQFF

SEQ ID NO: 385833 - protein, 16 aa, Homo sapiens
  CDR3 for alpha chain variable domain of TCR clone 192917 (TRAV4, TRAJ5)
CLVGPVHGHGQESTYF

SEQ ID NO: 385834 - protein, 17 aa, Homo sapiens
  CDR3 for beta chain variable domain of TCR clone 192917 (TRBV11-2, TRBJ2-1)
CASSLYPPGVEYNEQFF

SEQ ID NO: 385835 - protein, 14 aa, Homo sapiens
  CDR3 for alpha chain variable domain of TCR clone 192918 (TRAV13-1, TRAJ35)
CAASKGGFGNVLHC

SEQ ID NO: 385836 - protein, 17 aa, Homo sapiens
  CDR3 for beta chain variable domain of TCR clone 192918 (TRBV25-1, TRBJ2-7)
CASSDARVVFSSYEQYF

SEQ ID NO: 385837 - protein, 15 aa, Homo sapiens
  CDR3 for alpha chain variable domain of TCR clone 192919 (TRAV8-6, TRAJ10)
CAVSSKGGGGNKPTF

SEQ ID NO: 385838 - protein, 15 aa, Homo sapiens
  CDR3 for beta chain variable domain of TCR clone 192919 (TRBV28, TRBJ1-2)
CASSSHSIANYGYTF

SEQ ID NO: 385839 - protein, 14 aa, Homo sapiens
  CDR3 for alpha chain variable domain of TCR clone 192920 (TRAV13-1, TRAJ44)
CAAKATGTASKLTF

SEQ ID NO: 385840 - protein, 13 aa, Homo sapiens
  CDR3 for beta chain variable domain of TCR clone 192920 (TRBV11-2, TRBJ2-5)
CASSFSSQETQYF

SEQ ID NO: 385841 - protein, 16 aa, Homo sapiens
  CDR3 for alpha chain variable domain of TCR clone 192921 (TRAV30, TRAJ24)
CGTEIVDAASWGKFQF

SEQ ID NO: 385842 - protein, 11 aa, Homo sapiens
  CDR3 for beta chain variable domain of TCR clone 192921 (TRBV29-1, TRBJ2-5)
CSEDRTGTQYF

SEQ ID NO: 385843 - protein, 14 aa, Homo sapiens
  CDR3 for alpha chain variable domain of TCR clone 192922 (TRAV8-2, TRAJ4)
CVVSPSGGYNKLIF

SEQ ID NO: 385844 - protein, 15 aa, Homo sapiens
  CDR3 for beta chain variable domain of TCR clone 192922 (TRBV5-1, TRBJ2-5)
CASSFKGGDQETQYF

SEQ ID NO: 385845 - protein, 11 aa, Homo sapiens
  CDR3 for alpha chain variable domain of TCR clone 192923 (TRAV2, TRAJ33)
CAVDSNYQLIW

SEQ ID NO: 385846 - protein, 14 aa, Homo sapiens
  CDR3 for beta chain variable domain of TCR clone 192923 (TRBV27, TRBJ2-7)
CASSFRDGPYEQYF

SEQ ID NO: 385847 - protein, 17 aa, Homo sapiens
  CDR3 for alpha chain variable domain of TCR clone 192924 (TRAV3, TRAJ6)
CAVRDGPRAGGSYIPTF

SEQ ID NO: 385848 - protein, 17 aa, Homo sapiens
  CDR3 for beta chain variable domain of TCR clone 192924 (TRBV27, TRBJ2-6)
CASSSTGFASGANVLPF

SEQ ID NO: 385849 - protein, 17 aa, Homo sapiens
  CDR3 for alpha chain variable domain of TCR clone 192925 (TRAV3, TRAJ6)
CAVRDGSRAGGSYIPTF

SEQ ID NO: 385850 - protein, 18 aa, Homo sapiens
  CDR3 for beta chain variable domain of TCR clone 192925 (TRBV27, TRBJ2-1)
CASGNRAVGVGSKNEQFF

SEQ ID NO: 385851 - protein, 14 aa, Homo sapiens
  CDR3 for alpha chain variable domain of TCR clone 192926 (TRAV38-1, TRAJ31)
CAFMKHDNNARLIF

SEQ ID NO: 385852 - protein, 16 aa, Homo sapiens
  CDR3 for beta chain variable domain of TCR clone 192926 (TRBV23-1, TRBJ2-1)
CISAPATGPTYNEQFF

SEQ ID NO: 385853 - protein, 15 aa, Homo sapiens
  CDR3 for alpha chain variable domain of TCR clone 192927 (TRAV8-3, TRAJ45)
CASSYSGGGAVGLTF

SEQ ID NO: 385854 - protein, 17 aa, Homo sapiens
  CDR3 for beta chain variable domain of TCR clone 192927 (TRBV7-2, TRBJ1-4)
CASSFKAGPTTNEKLFF

SEQ ID NO: 385855 - protein, 10 aa, Homo sapiens
  CDR3 for alpha chain variable domain of TCR clone 192928 (TRAV30, TRAJ48)
CGIGNEKLSF

SEQ ID NO: 385856 - protein, 14 aa, Homo sapiens
  CDR3 for beta chain variable domain of TCR clone 192928 (TRBV6-1, TRBJ1-3)
CASVQGGGGNTIYF

SEQ ID NO: 385857 - protein, 15 aa, Homo sapiens
  CDR3 for alpha chain variable domain of TCR clone 192929 (TRAV17, TRAJ22)
CATVAPSGSARQLTF

SEQ ID NO: 385858 - protein, 15 aa, Homo sapiens
  CDR3 for beta chain variable domain of TCR clone 192929 (TRBV10-3, TRBJ2-7)
CHSADFADRPYEQYF

SEQ ID NO: 385859 - protein, 14 aa, Homo sapiens
  CDR3 for alpha chain variable domain of TCR clone 192930 (TRAV26-1, TRAJ26)
CIVRATFLGQNFVF

SEQ ID NO: 385860 - protein, 13 aa, Homo sapiens
  CDR3 for beta chain variable domain of TCR clone 192930 (TRBV10-3, TRBJ2-7)
CASKLAVNYEQYF

SEQ ID NO: 385861 - protein, 16 aa, Homo sapiens
  CDR3 for alpha chain variable domain of TCR clone 192931 (TRAV3, TRAJ37)
CAVRDSGSGNTGKLIF

SEQ ID NO: 385862 - protein, 13 aa, Homo sapiens
  CDR3 for beta chain variable domain of TCR clone 192931 (TRBV7-2, TRBJ1-2)
CASSLKQNYGYTF

SEQ ID NO: 385863 - protein, 15 aa, Homo sapiens
  CDR3 for alpha chain variable domain of TCR clone 192932 (TRAV21, TRAJ38)
CAVRQDAGNNRKLIW

SEQ ID NO: 385864 - protein, 16 aa, Homo sapiens
  CDR3 for beta chain variable domain of TCR clone 192932 (TRBV19, TRBJ1-5)
CASSTWTGGGNQPQHF

SEQ ID NO: 385865 - protein, 12 aa, Homo sapiens
  CDR3 for alpha chain variable domain of TCR clone 192933 (TRAV12-3, TRAJ17)
CAMTLTGNKLPF

SEQ ID NO: 385866 - protein, 15 aa, Homo sapiens
  CDR3 for beta chain variable domain of TCR clone 192933 (TRBV20-1, TRBJ2-7)
CSARDRGSGMDEQYF

SEQ ID NO: 385867 - protein, 14 aa, Homo sapiens
  CDR3 for alpha chain variable domain of TCR clone 192934 (TRAV12-1, TRAJ4)
FVVTPSGGYNKLIF

SEQ ID NO: 385868 - protein, 14 aa, Homo sapiens
  CDR3 for beta chain variable domain of TCR clone 192934 (TRBV2, TRBJ2-1)
CASSEALIYNEQFF

SEQ ID NO: 385869 - protein, 15 aa, Homo sapiens
  CDR3 for alpha chain variable domain of TCR clone 192935 (TRAV27, TRAJ50)
CAGVGRGTSYDKGIF

SEQ ID NO: 385870 - protein, 14 aa, Homo sapiens
  CDR3 for beta chain variable domain of TCR clone 192935 (TRBV7-2, TRBJ1-1)
CASSFYDLNTEAFC

SEQ ID NO: 385871 - protein, 12 aa, Homo sapiens
  CDR3 for alpha chain variable domain of TCR clone 192936 (TRAV29/DV5, TRAJ49)
CAATDTGNQFYF

SEQ ID NO: 385872 - protein, 12 aa, Homo sapiens
  CDR3 for beta chain variable domain of TCR clone 192936 (TRBV12-4, TRBJ2-7)
CASSLWGYEQYF

SEQ ID NO: 385873 - protein, 14 aa, Homo sapiens
  CDR3 for alpha chain variable domain of TCR clone 192937 (TRAV12-1, TRAJ3)
CVVILYSSASKIIF

SEQ ID NO: 385874 - protein, 15 aa, Homo sapiens
  CDR3 for beta chain variable domain of TCR clone 192937 (TRBV25-1, TRBJ1-4)
CASSPGDSTNEKLFF

SEQ ID NO: 385875 - protein, 14 aa, Homo sapiens
  CDR3 for alpha chain variable domain of TCR clone 192938 (TRAV12-2, TRAJ6)
CASKWGGGSYIPTF

SEQ ID NO: 385876 - protein, 13 aa, Homo sapiens
  CDR3 for beta chain variable domain of TCR clone 192938 (TRBV2, TRBJ1-1)
CSSSEGGNTEAFF

SEQ ID NO: 385877 - protein, 13 aa, Homo sapiens
  CDR3 for alpha chain variable domain of TCR clone 192939 (TRAV13-2, TRAJ48)
CAEMDFGNEKLTF

SEQ ID NO: 385878 - protein, 16 aa, Homo sapiens
  CDR3 for beta chain variable domain of TCR clone 192939 (TRBV7-2, TRBJ1-2)
CASSSNQDRRGHGYTF

SEQ ID NO: 385879 - protein, 13 aa, Homo sapiens
  CDR3 for alpha chain variable domain of TCR clone 192940 (TRAV27, TRAJ6)
CAGGTRGSNIPTF

SEQ ID NO: 385880 - protein, 14 aa, Homo sapiens
  CDR3 for beta chain variable domain of TCR clone 192940 (TRBV6-3, TRBJ1-1)
CASSYQRRDTEAFF

SEQ ID NO: 385881 - protein, 11 aa, Homo sapiens
  CDR3 for alpha chain variable domain of TCR clone 192941 (TRAV2, TRAJ13)
CASGGYQKVTF

SEQ ID NO: 385882 - protein, 14 aa, Homo sapiens
  CDR3 for beta chain variable domain of TCR clone 192941 (TRBV18, TRBJ2-5)
CANSPGVSQETQYF

SEQ ID NO: 385883 - protein, 13 aa, Homo sapiens
  CDR3 for alpha chain variable domain of TCR clone 192942 (TRAV2, TRAJ10)
CAVETGGGNKLTF

SEQ ID NO: 385884 - protein, 14 aa, Homo sapiens
  CDR3 for beta chain variable domain of TCR clone 192942 (TRBV20-1, TRBJ2-3)
CSDGGRRGTDTQYF

SEQ ID NO: 385885 - protein, 16 aa, Homo sapiens
  CDR3 for alpha chain variable domain of TCR clone 192943 (TRAV30, TRAJ24)
CGTEIVDADSWGKFQF

SEQ ID NO: 385886 - protein, 15 aa, Homo sapiens
  CDR3 for beta chain variable domain of TCR clone 192943 (TRBV18, TRBJ2-6)
CASSPSYAGANVLTF

SEQ ID NO: 385887 - protein, 13 aa, Homo sapiens
  CDR3 for alpha chain variable domain of TCR clone 192944 (TRAV12-1, TRAJ34)
CVVTGYNTDKLIF

SEQ ID NO: 385888 - protein, 13 aa, Homo sapiens
  CDR3 for beta chain variable domain of TCR clone 192944 (TRBV28, TRBJ2-7)
CASKAGVVYEQYF

SEQ ID NO: 385889 - protein, 15 aa, Homo sapiens
  CDR3 for alpha chain variable domain of TCR clone 192945 (TRAV21, TRAJ53)
CAVRQSGGSNYKLTF

SEQ ID NO: 385890 - protein, 13 aa, Homo sapiens
  CDR3 for beta chain variable domain of TCR clone 192945 (TRBV7-9, TRBJ1-2)
CASSLKQNYGDTF

SEQ ID NO: 385891 - protein, 15 aa, Homo sapiens
  CDR3 for alpha chain variable domain of TCR clone 192946 (TRAV21, TRAJ53)
CAPLNSGGSNYKLTF

SEQ ID NO: 385892 - protein, 17 aa, Homo sapiens
  CDR3 for beta chain variable domain of TCR clone 192946 (TRBV20-1, TRBJ2-2)
CSASGSGQGGLTGELFF

SEQ ID NO: 385893 - protein, 14 aa, Homo sapiens
  CDR3 for alpha chain variable domain of TCR clone 192947 (TRAV29/DV5, TRAJ36)
CAARRKTGANNLFF

SEQ ID NO: 385894 - protein, 11 aa, Homo sapiens
  CDR3 for beta chain variable domain of TCR clone 192947 (TRBV19, TRBJ1-1)
CASSIGSEAFF

SEQ ID NO: 385895 - protein, 18 aa, Homo sapiens
  CDR3 for alpha chain variable domain of TCR clone 192948 (TRAV21, TRAJ52)
CAVRPSPAGGTSYGKLTF

SEQ ID NO: 385896 - protein, 16 aa, Homo sapiens
  CDR3 for beta chain variable domain of TCR clone 192948 (TRBV5-1, TRBJ2-1)
CASSLEGRGLYNEQFF

SEQ ID NO: 385897 - protein, 14 aa, Homo sapiens
  CDR3 for alpha chain variable domain of TCR clone 192949 (TRAV12-3, TRAJ41)
CAMSAGNSGYALNF

SEQ ID NO: 385898 - protein, 15 aa, Homo sapiens
  CDR3 for beta chain variable domain of TCR clone 192949 (TRBV20-1, TRBJ2-7)
CSARDWVSGMDEQYF

SEQ ID NO: 385899 - protein, 13 aa, Homo sapiens
  CDR3 for alpha chain variable domain of TCR clone 192950 (TRAV8-3, TRAJ43)
CAVVPYNNNDMRF

SEQ ID NO: 385900 - protein, 17 aa, Homo sapiens
  CDR3 for beta chain variable domain of TCR clone 192950 (TRBV7-7, TRBJ1-1)
CASIGDRPNVGVTEAFF

SEQ ID NO: 385901 - protein, 16 aa, Homo sapiens
  CDR3 for alpha chain variable domain of TCR clone 192951 (TRAV30, TRAJ24)
CGTEIVDADSWGKFQF

SEQ ID NO: 385902 - protein, 15 aa, Homo sapiens
  CDR3 for beta chain variable domain of TCR clone 192951 (TRBV4-1, TRBJ1-4)
CASSLATATNEKLFF

SEQ ID NO: 385903 - protein, 14 aa, Homo sapiens
  CDR3 for alpha chain variable domain of TCR clone 192952 (TRAV16, TRAJ17)
CALSEGAAGNKLTF

SEQ ID NO: 385904 - protein, 12 aa, Homo sapiens
  CDR3 for beta chain variable domain of TCR clone 192952 (TRBV11-2, TRBJ2-2)
CASSLGGGELFF

SEQ ID NO: 385905 - protein, 13 aa, Homo sapiens
  CDR3 for alpha chain variable domain of TCR clone 192953 (TRAV20, TRAJ37)
CAGCSSNTGTLIF

SEQ ID NO: 385906 - protein, 10 aa, Homo sapiens
  CDR3 for beta chain variable domain of TCR clone 192953 (TRBV12-4, TRBJ2-3)
CQHRTDTQYF

SEQ ID NO: 385907 - protein, 16 aa, Homo sapiens
  CDR3 for alpha chain variable domain of TCR clone 192954 (TRAV27, TRAJ53)
CAAPEGSGGSNYKRTF

SEQ ID NO: 385908 - protein, 14 aa, Homo sapiens
  CDR3 for beta chain variable domain of TCR clone 192954 (TRBV4-3, TRBJ1-5)
CASSQGGQGWPQHF

SEQ ID NO: 385909 - protein, 14 aa, Homo sapiens
  CDR3 for alpha chain variable domain of TCR clone 192955 (TRAV21, TRAJ35)
CAVMPIGFGNVLHF

SEQ ID NO: 385910 - protein, 12 aa, Homo sapiens
  CDR3 for beta chain variable domain of TCR clone 192955 (TRBV7-9, TRBJ2-7)
CASRIKREEQYF

SEQ ID NO: 385911 - protein, 19 aa, Homo sapiens
  CDR3 for alpha chain variable domain of TCR clone 192956 (TRAV2, TRAJ20)
ILQVREADGAVYRDCKLSF

SEQ ID NO: 385912 - protein, 17 aa, Homo sapiens
  CDR3 for beta chain variable domain of TCR clone 192956 (TRBV11-2, TRBJ2-1)
CASSLYPPGVEYNEQFF

SEQ ID NO: 385913 - protein, 13 aa, Homo sapiens
  CDR3 for alpha chain variable domain of TCR clone 192957 (TRAV21, TRAJ36)
CAVIKTGANNLFF

SEQ ID NO: 385914 - protein, 15 aa, Homo sapiens
  CDR3 for beta chain variable domain of TCR clone 192957 (TRBV7-2, TRBJ2-6)
CASSLQEAGANVLTF

SEQ ID NO: 385915 - protein, 10 aa, Homo sapiens
  CDR3 for alpha chain variable domain of TCR clone 192958 (TRAV12-1, TRAJ43)
CVVHNNDMRF

SEQ ID NO: 385916 - protein, 16 aa, Homo sapiens
  CDR3 for beta chain variable domain of TCR clone 192958 (TRBV18, TRBJ2-3)
CASSPPAGGPRKYAVF

SEQ ID NO: 385917 - protein, 12 aa, Homo sapiens
  CDR3 for alpha chain variable domain of TCR clone 192959 (TRAV13-1, TRAJ15)
CAASQAGTALIF

SEQ ID NO: 385918 - protein, 18 aa, Homo sapiens
  CDR3 for beta chain variable domain of TCR clone 192959 (TRBV7-9, TRBJ2-3)
CASSLPINGQISTHTQYF

SEQ ID NO: 385919 - protein, 13 aa, Homo sapiens
  CDR3 for alpha chain variable domain of TCR clone 192960 (TRAV12-3, TRAJ21)
CAPGPHNFNKFYF

SEQ ID NO: 385920 - protein, 14 aa, Homo sapiens
  CDR3 for beta chain variable domain of TCR clone 192960 (TRBV6-6, TRBJ2-7)
CASSDSGAGYEQYF

SEQ ID NO: 385921 - protein, 13 aa, Homo sapiens
  CDR3 for alpha chain variable domain of TCR clone 192961 (TRAV4, TRAJ34)
CLVGDNNTDKLTF

SEQ ID NO: 385922 - protein, 23 aa, Homo sapiens
  CDR3 for beta chain variable domain of TCR clone 192961 (TRBV4-2, TRBJ2-3)
CASSQDPPRASSISGGRGDTQYF

SEQ ID NO: 385923 - protein, 17 aa, Homo sapiens
  CDR3 for alpha chain variable domain of TCR clone 192962 (TRAV23/DV6, TRAJ58)
CAARLLRGETSGARLTF

SEQ ID NO: 385924 - protein, 15 aa, Homo sapiens
  CDR3 for beta chain variable domain of TCR clone 192962 (TRBV10-3, TRBJ2-3)
CAISLTSGGTDTQYF

SEQ ID NO: 385925 - protein, 13 aa, Homo sapiens
  CDR3 for alpha chain variable domain of TCR clone 192963 (TRAV21, TRAJ57)
CAVTQGGSEKLVF

SEQ ID NO: 385926 - protein, 17 aa, Homo sapiens
  CDR3 for beta chain variable domain of TCR clone 192963 (TRBV20-1, TRBJ2-1)
CSASSSGLAGSYNEQFF

SEQ ID NO: 385927 - protein, 13 aa, Homo sapiens
  CDR3 for alpha chain variable domain of TCR clone 192964 (TRAV22, TRAJ29)
CAVGGSGNTSLVF

SEQ ID NO: 385928 - protein, 12 aa, Homo sapiens
  CDR3 for beta chain variable domain of TCR clone 192964 (TRBV11-2, TRBJ2-2)
CASSLGGGELFF

SEQ ID NO: 385929 - protein, 17 aa, Homo sapiens
  CDR3 for alpha chain variable domain of TCR clone 192965 (TRAV3, TRAJ6)
CAVSRRTATGGSYIPTF

SEQ ID NO: 385930 - protein, 18 aa, Homo sapiens
  CDR3 for beta chain variable domain of TCR clone 192965 (TRBV7-2, TRBJ2-3)
CASSLETSRGRKADTQYF

SEQ ID NO: 385931 - protein, 14 aa, Homo sapiens
  CDR3 for alpha chain variable domain of TCR clone 192966 (TRAV16, TRAJ32)
CALKLGGATNKLIF

SEQ ID NO: 385932 - protein, 13 aa, Homo sapiens
  CDR3 for beta chain variable domain of TCR clone 192966 (TRBV15, TRBJ1-6)
CATSGGLNSSLHF

SEQ ID NO: 385933 - protein, 17 aa, Homo sapiens
  CDR3 for alpha chain variable domain of TCR clone 192967 (TRAV8-6, TRAJ58)
CAVSSWVGETSGSRLTL

SEQ ID NO: 385934 - protein, 15 aa, Homo sapiens
  CDR3 for beta chain variable domain of TCR clone 192967 (TRBV6-3, TRBJ2-7)
CASSSPGTVFYEQYF

SEQ ID NO: 385935 - protein, 16 aa, Homo sapiens
  CDR3 for alpha chain variable domain of TCR clone 192968 (TRAV8-3, TRAJ13)
CAVGAYPSGGYQKVTF

SEQ ID NO: 385936 - protein, 13 aa, Homo sapiens
  CDR3 for beta chain variable domain of TCR clone 192968 (TRBV7-8, TRBJ2-3)
CASSLRGPDTQYF

SEQ ID NO: 385937 - protein, 13 aa, Homo sapiens
  CDR3 for alpha chain variable domain of TCR clone 192969 (TRAV26-1, TRAJ48)
CIVRVVGDEKLTF

SEQ ID NO: 385938 - protein, 19 aa, Homo sapiens
  CDR3 for beta chain variable domain of TCR clone 192969 (TRBV11-3, TRBJ2-2)
CASSTRPGAKTTNTGELVF

SEQ ID NO: 385939 - protein, 12 aa, Homo sapiens
  CDR3 for alpha chain variable domain of TCR clone 192970 (TRAV8-3, TRAJ20)
CAVDFNDYKLSF

SEQ ID NO: 385940 - protein, 12 aa, Homo sapiens
  CDR3 for beta chain variable domain of TCR clone 192970 (TRBV29-1, TRBJ2-3)
CSVTGGANTQYL

SEQ ID NO: 385941 - protein, 11 aa, Homo sapiens
  CDR3 for alpha chain variable domain of TCR clone 192971 (TRAV12-1, TRAJ34)
CVVNKGRELIF

SEQ ID NO: 385942 - protein, 12 aa, Homo sapiens
  CDR3 for beta chain variable domain of TCR clone 192971 (TRBV2, TRBJ2-1)
CASGPAGNEQFF

SEQ ID NO: 385943 - protein, 17 aa, Homo sapiens
  CDR3 for alpha chain variable domain of TCR clone 192972 (TRAV3, TRAJ6)
CAVGAGPRAGGSYIPTF

SEQ ID NO: 385944 - protein, 14 aa, Homo sapiens
  CDR3 for beta chain variable domain of TCR clone 192972 (TRBV7-2, TRBJ2-7)
CASSPKTSFYEQYF

SEQ ID NO: 385945 - protein, 15 aa, Homo sapiens
  CDR3 for alpha chain variable domain of TCR clone 192973 (TRAV13-1, TRAJ44)
CAASRGGGTASKLTF

SEQ ID NO: 385946 - protein, 14 aa, Homo sapiens
  CDR3 for beta chain variable domain of TCR clone 192973 (TRBV2, TRBJ2-7)
CAISRDRSSYEQYF

SEQ ID NO: 385947 - protein, 14 aa, Homo sapiens
  CDR3 for alpha chain variable domain of TCR clone 192974 (TRAV10, TRAJ20)
CVVSARRNDYKLSF

SEQ ID NO: 385948 - protein, 16 aa, Homo sapiens
  CDR3 for beta chain variable domain of TCR clone 192974 (TRBV7-3, TRBJ2-2)
CASSLKRGTLSGELFF

SEQ ID NO: 385949 - protein, 14 aa, Homo sapiens
  CDR3 for alpha chain variable domain of TCR clone 192975 (TRAV12-2, TRAJ13)
CAVKKTGGYQKVTF

SEQ ID NO: 385950 - protein, 12 aa, Homo sapiens
  CDR3 for beta chain variable domain of TCR clone 192975 (TRBV5-1, TRBJ1-1)
CASSFGNTEAFF

SEQ ID NO: 385951 - protein, 14 aa, Homo sapiens
  CDR3 for alpha chain variable domain of TCR clone 192976 (TRAV1-2, TRAJ6)
CAVSLSGGSYIPTF

SEQ ID NO: 385952 - protein, 12 aa, Homo sapiens
  CDR3 for beta chain variable domain of TCR clone 192976 (TRBV19, TRBJ2-1)
CDSSRQGAEQFF

SEQ ID NO: 385953 - protein, 13 aa, Homo sapiens
  CDR3 for alpha chain variable domain of TCR clone 192977 (TRAV17, TRAJ34)
CATDLYNTDKLIF

SEQ ID NO: 385954 - protein, 15 aa, Homo sapiens
  CDR3 for beta chain variable domain of TCR clone 192977 (TRBV20-1, TRBJ2-7)
CSARDPTEVGHEQYF

SEQ ID NO: 385955 - protein, 11 aa, Homo sapiens
  CDR3 for alpha chain variable domain of TCR clone 192978 (TRAV1-2, TRAJ31)
CAVNNNARLMF

SEQ ID NO: 385956 - protein, 12 aa, Homo sapiens
  CDR3 for beta chain variable domain of TCR clone 192978 (TRBV28, TRBJ2-3)
CASSLYRDTQYF

SEQ ID NO: 385957 - protein, 15 aa, Homo sapiens
  CDR3 for alpha chain variable domain of TCR clone 192979 (TRAV38-1, TRAJ37)
CAFIFGSGNTGKLIF

SEQ ID NO: 385958 - protein, 12 aa, Homo sapiens
  CDR3 for beta chain variable domain of TCR clone 192979 (TRBV7-9, TRBJ2-7)
CASRLEGYEQYF

SEQ ID NO: 385959 - protein, 12 aa, Homo sapiens
  CDR3 for alpha chain variable domain of TCR clone 192980 (TRAV12-1, TRAJ9)
CVVHTGGFKTIF

SEQ ID NO: 385960 - protein, 16 aa, Homo sapiens
  CDR3 for beta chain variable domain of TCR clone 192980 (TRBV6-1, TRBJ2-1)
CASSARLAGSYNEQCF

SEQ ID NO: 385961 - protein, 14 aa, Homo sapiens
  CDR3 for alpha chain variable domain of TCR clone 192981 (TRAV12-2, TRAJ15)
CAPHTGQAGTALIF

SEQ ID NO: 385962 - protein, 17 aa, Homo sapiens
  CDR3 for beta chain variable domain of TCR clone 192981 (TRBV5-5, TRBJ1-2)
CASSLGSLDGQSEGYTI

SEQ ID NO: 385963 - protein, 13 aa, Homo sapiens
  CDR3 for alpha chain variable domain of TCR clone 192982 (TRAV12-1, TRAJ26)
CVVCRNYGQNFVF

SEQ ID NO: 385964 - protein, 14 aa, Homo sapiens
  CDR3 for beta chain variable domain of TCR clone 192982 (TRBV6-3, TRBJ1-1)
CASRYTGESTEAFF

SEQ ID NO: 385965 - protein, 16 aa, Homo sapiens
  CDR3 for alpha chain variable domain of TCR clone 192983 (TRAV12-1, TRAJ43)
CVLNPHRFGAGTRLTV

SEQ ID NO: 385966 - protein, 14 aa, Homo sapiens
  CDR3 for beta chain variable domain of TCR clone 192983 (TRBV7-2, TRBJ2-7)
CASRSQWAAYEQYF

SEQ ID NO: 385967 - protein, 12 aa, Homo sapiens
  CDR3 for alpha chain variable domain of TCR clone 192984 (TRAV17, TRAJ57)
CATDGGSDKLVF

SEQ ID NO: 385968 - protein, 12 aa, Homo sapiens
  CDR3 for beta chain variable domain of TCR clone 192984 (TRBV12-4, TRBJ1-2)
CASSFIWLHLRF

SEQ ID NO: 385969 - protein, 15 aa, Homo sapiens
  CDR3 for alpha chain variable domain of TCR clone 192985 (TRAV16, TRAJ4)
CALEDPSGGYNKLIF

SEQ ID NO: 385970 - protein, 15 aa, Homo sapiens
  CDR3 for beta chain variable domain of TCR clone 192985 (TRBV6-1, TRBJ2-3)
CASSERGGITDTQYF

SEQ ID NO: 385971 - protein, 15 aa, Homo sapiens
  CDR3 for alpha chain variable domain of TCR clone 192986 (TRAV21, TRAJ53)
CATLNSGGSNYKLTF

SEQ ID NO: 385972 - protein, 15 aa, Homo sapiens
  CDR3 for beta chain variable domain of TCR clone 192986 (TRBV12-4, TRBJ2-5)
CASSPPTGVQETQYF

SEQ ID NO: 385973 - protein, 14 aa, Homo sapiens
  CDR3 for alpha chain variable domain of TCR clone 192987 (TRAV1-2, TRAJ33)
CAVRAPDSNYQLIW

SEQ ID NO: 385974 - protein, 14 aa, Homo sapiens
  CDR3 for beta chain variable domain of TCR clone 192987 (TRBV11-3, TRBJ1-6)
CASSFPGGDSPLHF

SEQ ID NO: 385975 - protein, 15 aa, Homo sapiens
  CDR3 for alpha chain variable domain of TCR clone 192988 (TRAV3, TRAJ20)
CAVRDIKLSDYKPSF

SEQ ID NO: 385976 - protein, 19 aa, Homo sapiens
  CDR3 for beta chain variable domain of TCR clone 192988 (TRBV25-1, TRBJ2-2)
CAILVYRVDRGRKTGELFF

SEQ ID NO: 385977 - protein, 15 aa, Homo sapiens
  CDR3 for alpha chain variable domain of TCR clone 192989 (TRAV21, TRAJ22)
CAVRLFFWFCKATDL

SEQ ID NO: 385978 - protein, 16 aa, Homo sapiens
  CDR3 for beta chain variable domain of TCR clone 192989 (TRBV20-1, TRBJ2-6)
CSARRGQTSGANVLTF

SEQ ID NO: 385979 - protein, 13 aa, Homo sapiens
  CDR3 for alpha chain variable domain of TCR clone 192990 (TRAV12-2, TRAJ47)
CAVFMEYGSKLVF

SEQ ID NO: 385980 - protein, 14 aa, Homo sapiens
  CDR3 for beta chain variable domain of TCR clone 192990 (TRBV4-1, TRBJ1-5)
CASSQGPTNQPQHF

SEQ ID NO: 385981 - protein, 14 aa, Homo sapiens
  CDR3 for alpha chain variable domain of TCR clone 192991 (TRAV16, TRAJ39)
CALSKNNAGNMLTF

SEQ ID NO: 385982 - protein, 13 aa, Homo sapiens
  CDR3 for beta chain variable domain of TCR clone 192991 (TRBV12-5, TRBJ2-3)
CASGDRQSDTQYF

SEQ ID NO: 385983 - protein, 15 aa, Homo sapiens
  CDR3 for alpha chain variable domain of TCR clone 192992 (TRAV17, TRAJ52)
CATEAGGTSYGNLTF

SEQ ID NO: 385984 - protein, 13 aa, Homo sapiens
  CDR3 for beta chain variable domain of TCR clone 192992 (TRBV28, TRBJ1-5)
CQQFGVLVKPQHF

SEQ ID NO: 385985 - protein, 12 aa, Homo sapiens
  CDR3 for alpha chain variable domain of TCR clone 192993 (TRAV1-2, TRAJ24)
CAVGGSWGKFQF

SEQ ID NO: 385986 - protein, 15 aa, Homo sapiens
  CDR3 for beta chain variable domain of TCR clone 192993 (TRBV6-1, TRBJ2-7)
CASSEGVGNPDEQYF

SEQ ID NO: 385987 - protein, 12 aa, Homo sapiens
  CDR3 for alpha chain variable domain of TCR clone 192994 (TRAV8-3, TRAJ20)
CAVGANTYKLSF

SEQ ID NO: 385988 - protein, 16 aa, Homo sapiens
  CDR3 for beta chain variable domain of TCR clone 192994 (TRBV19, TRBJ2-2)
CASRSPGTGATGELFF

SEQ ID NO: 385989 - protein, 11 aa, Homo sapiens
  CDR3 for alpha chain variable domain of TCR clone 192995 (TRAV12-1, TRAJ26)
CVVAYGQNFFF

SEQ ID NO: 385990 - protein, 13 aa, Homo sapiens
  CDR3 for beta chain variable domain of TCR clone 192995 (TRBV7-2, TRBJ2-4)
CASSREHANIQYF

SEQ ID NO: 385991 - protein, 17 aa, Homo sapiens
  CDR3 for alpha chain variable domain of TCR clone 192996 (TRAV3, TRAJ6)
CAVRDGPRAGGSYIPNF

SEQ ID NO: 385992 - protein, 13 aa, Homo sapiens
  CDR3 for beta chain variable domain of TCR clone 192996 (TRBV7-3, TRBJ1-2)
CASSLKRGYGYTF

SEQ ID NO: 385993 - protein, 13 aa, Homo sapiens
  CDR3 for alpha chain variable domain of TCR clone 192997 (TRAV27, TRAJ56)
CAGKPGANSKLTF

SEQ ID NO: 385994 - protein, 12 aa, Homo sapiens
  CDR3 for beta chain variable domain of TCR clone 192997 (TRBV7-9, TRBJ2-7)
CASSIKREEQYL

SEQ ID NO: 385995 - protein, 18 aa, Homo sapiens
  CDR3 for alpha chain variable domain of TCR clone 192998 (TRAV12-3, TRAJ52)
CAMSVGGAGGASYGKLTF

SEQ ID NO: 385996 - protein, 14 aa, Homo sapiens
  CDR3 for beta chain variable domain of TCR clone 192998 (TRBV7-2, TRBJ2-7)
CASRSQGAAYEQYF

SEQ ID NO: 385997 - protein, 14 aa, Homo sapiens
  CDR3 for alpha chain variable domain of TCR clone 192999 (TRAV12-2, TRAJ5)
CAVNRSTGRRALTF

SEQ ID NO: 385998 - protein, 11 aa, Homo sapiens
  CDR3 for beta chain variable domain of TCR clone 192999 (TRBV12-4, TRBJ2-3)
CASTATDTQYF

SEQ ID NO: 385999 - protein, 11 aa, Homo sapiens
  CDR3 for alpha chain variable domain of TCR clone 193000 (TRAV1-1, TRAJ23)
CAVRPGGKLIF

SEQ ID NO: 386000 - protein, 20 aa, Homo sapiens
  CDR3 for beta chain variable domain of TCR clone 193000 (TRBV7-8, TRBJ2-2)
CASSHLFPGPTIHITGELLF

SEQ ID NO: 386001 - protein, 12 aa, Homo sapiens
  CDR3 for alpha chain variable domain of TCR clone 193001 (TRAV12-3, TRAJ17)
CAMTLTGNKLTF

SEQ ID NO: 386002 - protein, 14 aa, Homo sapiens
  CDR3 for beta chain variable domain of TCR clone 193001 (TRBV7-7, TRBJ2-7)
CASSLGRGVGEQYF

SEQ ID NO: 386003 - protein, 13 aa, Homo sapiens
  CDR3 for alpha chain variable domain of TCR clone 193002 (TRAV17, TRAJ54)
CATSWGGAQKLVF

SEQ ID NO: 386004 - protein, 14 aa, Homo sapiens
  CDR3 for beta chain variable domain of TCR clone 193002 (TRBV7-2, TRBJ2-7)
CASSPKTSFYEQYF

SEQ ID NO: 386005 - protein, 14 aa, Homo sapiens
  CDR3 for alpha chain variable domain of TCR clone 193003 (TRAV17, TRAJ31)
CATVLRNNNARLMF

SEQ ID NO: 386006 - protein, 11 aa, Homo sapiens
  CDR3 for beta chain variable domain of TCR clone 193003 (TRBV19, TRBJ2-5)
CASSIKGTQYF

SEQ ID NO: 386007 - protein, 14 aa, Homo sapiens
  CDR3 for alpha chain variable domain of TCR clone 193004 (TRAV1-2, TRAJ16)
CAVNRFSDGQKLLF

SEQ ID NO: 386008 - protein, 12 aa, Homo sapiens
  CDR3 for beta chain variable domain of TCR clone 193004 (TRBV28, TRBJ2-6)
SAIQAGANVLTF

SEQ ID NO: 386009 - protein, 16 aa, Homo sapiens
  CDR3 for alpha chain variable domain of TCR clone 193005 (TRAV12-3, TRAJ53)
CAMSPGSGGSNYKLTF

SEQ ID NO: 386010 - protein, 15 aa, Homo sapiens
  CDR3 for beta chain variable domain of TCR clone 193005 (TRBV9, TRBJ1-6)
CAGSVAGTGDSPLHF

SEQ ID NO: 386011 - protein, 15 aa, Homo sapiens
  CDR3 for alpha chain variable domain of TCR clone 193006 (TRAV4, TRAJ39)
CLVGPNNNAGNMLTF

SEQ ID NO: 386012 - protein, 14 aa, Homo sapiens
  CDR3 for beta chain variable domain of TCR clone 193006 (TRBV7-2, TRBJ1-2)
CASSQTGSTYGYTF

SEQ ID NO: 386013 - protein, 14 aa, Homo sapiens
  CDR3 for alpha chain variable domain of TCR clone 193007 (TRAV1-2, TRAJ8)
CAVREDTGFQKLVF

SEQ ID NO: 386014 - protein, 15 aa, Homo sapiens
  CDR3 for beta chain variable domain of TCR clone 193007 (TRBV3-1, TRBJ2-3)
CASSRTLDSLDTQYF

SEQ ID NO: 386015 - protein, 12 aa, Homo sapiens
  CDR3 for alpha chain variable domain of TCR clone 193008 (TRAV29/DV5, TRAJ49)
CAATDTGNQFYF

SEQ ID NO: 386016 - protein, 15 aa, Homo sapiens
  CDR3 for beta chain variable domain of TCR clone 193008 (TRBV27, TRBJ2-5)
CTSSLYPRGGETQYF

SEQ ID NO: 386017 - protein, 11 aa, Homo sapiens
  CDR3 for alpha chain variable domain of TCR clone 193009 (TRAV35, TRAJ22)
CAGPGVGQLTF

SEQ ID NO: 386018 - protein, 17 aa, Homo sapiens
  CDR3 for beta chain variable domain of TCR clone 193009 (TRBV20-1, TRBJ2-1)
CSAPPRLAGTRYNEQFF

SEQ ID NO: 386019 - protein, 19 aa, Homo sapiens
  CDR3 for alpha chain variable domain of TCR clone 193010 (TRAV26-1, TRAJ52)
CIVRAHRNAGGTSYGKLTF

SEQ ID NO: 386020 - protein, 15 aa, Homo sapiens
  CDR3 for beta chain variable domain of TCR clone 193010 (TRBV12-4, TRBJ2-5)
CASSPPTGLQESQYF

SEQ ID NO: 386021 - protein, 15 aa, Homo sapiens
  CDR3 for alpha chain variable domain of TCR clone 193011 (TRAV17, TRAJ36)
CATVSLNWGKQPLLW

SEQ ID NO: 386022 - protein, 13 aa, Homo sapiens
  CDR3 for beta chain variable domain of TCR clone 193011 (TRBV4-1, TRBJ1-1)
CASSQLGTGGAFF

SEQ ID NO: 386023 - protein, 14 aa, Homo sapiens
  CDR3 for alpha chain variable domain of TCR clone 193012 (TRAV13-1, TRAJ35)
CAASKGGFGNVLHC

SEQ ID NO: 386024 - protein, 14 aa, Homo sapiens
  CDR3 for beta chain variable domain of TCR clone 193012 (TRBV11-2, TRBJ1-2)
CASSSGQAGDGYTF

SEQ ID NO: 386025 - protein, 19 aa, Homo sapiens
  CDR3 for alpha chain variable domain of TCR clone 193013 (TRAV1-2, TRAJ26)
CLLPLCCERPDNYGQNFVF

SEQ ID NO: 386026 - protein, 13 aa, Homo sapiens
  CDR3 for beta chain variable domain of TCR clone 193013 (TRBV15, TRBJ1-6)
CATSGGLNSPLHF

SEQ ID NO: 386027 - protein, 12 aa, Homo sapiens
  CDR3 for alpha chain variable domain of TCR clone 193014 (TRAV21, TRAJ39)
CAADNAGNMLTF

SEQ ID NO: 386028 - protein, 16 aa, Homo sapiens
  CDR3 for beta chain variable domain of TCR clone 193014 (TRBV27, TRBJ2-5)
CASSFGPGGTKETQYF

SEQ ID NO: 386029 - protein, 14 aa, Homo sapiens
  CDR3 for alpha chain variable domain of TCR clone 193015 (TRAV30, TRAJ33)
CGTERRFSNFQLIW

SEQ ID NO: 386030 - protein, 16 aa, Homo sapiens
  CDR3 for beta chain variable domain of TCR clone 193015 (TRBV7-3, TRBJ2-2)
CASSLKRGTLSGELFF

SEQ ID NO: 386031 - protein, 14 aa, Homo sapiens
  CDR3 for alpha chain variable domain of TCR clone 193016 (TRAV12-3, TRAJ9)
CAMSPNTGGFKTIF

SEQ ID NO: 386032 - protein, 12 aa, Homo sapiens
  CDR3 for beta chain variable domain of TCR clone 193016 (TRBV19, TRBJ1-5)
CASSIAQQPQHF

SEQ ID NO: 386033 - protein, 14 aa, Homo sapiens
  CDR3 for alpha chain variable domain of TCR clone 193017 (TRAV12-2, TRAJ13)
CAVKKTGVYQKVTF

SEQ ID NO: 386034 - protein, 17 aa, Homo sapiens
  CDR3 for beta chain variable domain of TCR clone 193017 (TRBV13, TRBJ2-3)
CASSLSRVAGGRNTQYF

SEQ ID NO: 386035 - protein, 14 aa, Homo sapiens
  CDR3 for alpha chain variable domain of TCR clone 193018 (TRAV26-1, TRAJ38)
CIADNAGNNRKLIW

SEQ ID NO: 386036 - protein, 14 aa, Homo sapiens
  CDR3 for beta chain variable domain of TCR clone 193018 (TRBV4-1, TRBJ2-2)
CASSQAVNTGELFL

SEQ ID NO: 386037 - protein, 16 aa, Homo sapiens
  CDR3 for alpha chain variable domain of TCR clone 193019 (TRAV12-3, TRAJ53)
CAMSPGSGGSNYKLTV

SEQ ID NO: 386038 - protein, 16 aa, Homo sapiens
  CDR3 for beta chain variable domain of TCR clone 193019 (TRBV4-2, TRBJ1-1)
CASSQAGFGMNTEAFF

SEQ ID NO: 386039 - protein, 11 aa, Homo sapiens
  CDR3 for alpha chain variable domain of TCR clone 193020 (TRAV12-1, TRAJ21)
CVVNNFNKFNF

SEQ ID NO: 386040 - protein, 11 aa, Homo sapiens
  CDR3 for beta chain variable domain of TCR clone 193020 (TRBV10-3, TRBJ2-7)
CAISEGLEQYF

SEQ ID NO: 386041 - protein, 14 aa, Homo sapiens
  CDR3 for alpha chain variable domain of TCR clone 193021 (TRAV17, TRAJ57)
CATDPQCGSEKLGF

SEQ ID NO: 386042 - protein, 16 aa, Homo sapiens
  CDR3 for beta chain variable domain of TCR clone 193021 (TRBV20-1, TRBJ1-4)
CSAPGQGLLTNEKLFF

SEQ ID NO: 386043 - protein, 15 aa, Homo sapiens
  CDR3 for alpha chain variable domain of TCR clone 193022 (TRAV3, TRAJ5)
CAVRDRKTGRRALTF

SEQ ID NO: 386044 - protein, 14 aa, Homo sapiens
  CDR3 for beta chain variable domain of TCR clone 193022 (TRBV4-2, TRBJ2-1)
CASGLDRAYNEQFF

SEQ ID NO: 386045 - protein, 12 aa, Homo sapiens
  CDR3 for alpha chain variable domain of TCR clone 193023 (TRAV17, TRAJ57)
CATDGGSEKLVF

SEQ ID NO: 386046 - protein, 14 aa, Homo sapiens
  CDR3 for beta chain variable domain of TCR clone 193023 (TRBV15, TRBJ2-5)
CATSIGGLGETQYF

SEQ ID NO: 386047 - protein, 15 aa, Homo sapiens
  CDR3 for alpha chain variable domain of TCR clone 193024 (TRAV36/DV7, TRAJ53)
WEGENSGGSNYKLTF

SEQ ID NO: 386048 - protein, 14 aa, Homo sapiens
  CDR3 for beta chain variable domain of TCR clone 193024 (TRBV7-2, TRBJ2-7)
CASSPKTSFYEQYF

SEQ ID NO: 386049 - protein, 12 aa, Homo sapiens
  CDR3 for alpha chain variable domain of TCR clone 193025 (TRAV16, TRAJ13)
CITLRGYQKVTF

SEQ ID NO: 386050 - protein, 21 aa, Homo sapiens
  CDR3 for beta chain variable domain of TCR clone 193025 (TRBV28, TRBJ2-5)
CASSRQGGLAGAETSTSGQAR

SEQ ID NO: 386051 - protein, 14 aa, Homo sapiens
  CDR3 for alpha chain variable domain of TCR clone 193026 (TRAV1-2, TRAJ8)
CAVREDTGFQKLVF

SEQ ID NO: 386052 - protein, 14 aa, Homo sapiens
  CDR3 for beta chain variable domain of TCR clone 193026 (TRBV7-8, TRBJ1-5)
CASSTGTVGGPQRF

SEQ ID NO: 386053 - protein, 14 aa, Homo sapiens
  CDR3 for alpha chain variable domain of TCR clone 193027 (TRAV17, TRAJ54)
CATDANQGAQKLVF

SEQ ID NO: 386054 - protein, 14 aa, Homo sapiens
  CDR3 for beta chain variable domain of TCR clone 193027 (TRBV13, TRBJ2-5)
CASYRRLAEETQYF

SEQ ID NO: 386055 - protein, 16 aa, Homo sapiens
  CDR3 for alpha chain variable domain of TCR clone 193028 (TRAV8-3, TRAJ13)
CAVGAYPSGGYQKVTF

SEQ ID NO: 386056 - protein, 15 aa, Homo sapiens
  CDR3 for beta chain variable domain of TCR clone 193028 (TRBV19, TRBJ1-5)
CASSRVWADNQPQHF

SEQ ID NO: 386057 - protein, 13 aa, Homo sapiens
  CDR3 for alpha chain variable domain of TCR clone 193029 (TRAV2, TRAJ40)
CAVVTSGTYKYIF

SEQ ID NO: 386058 - protein, 13 aa, Homo sapiens
  CDR3 for beta chain variable domain of TCR clone 193029 (TRBV14, TRBJ1-2)
CASSQVAVYGYTF

SEQ ID NO: 386059 - protein, 11 aa, Homo sapiens
  CDR3 for alpha chain variable domain of TCR clone 193030 (TRAV2, TRAJ13)
CASGGYRKVTF

SEQ ID NO: 386060 - protein, 12 aa, Homo sapiens
  CDR3 for beta chain variable domain of TCR clone 193030 (TRBV11-2, TRBJ2-2)
CASSLGGGELFF

SEQ ID NO: 386061 - protein, 13 aa, Homo sapiens
  CDR3 for alpha chain variable domain of TCR clone 193031 (TRAV13-1, TRAJ6)
CAASKGGSYIPTF

SEQ ID NO: 386062 - protein, 14 aa, Homo sapiens
  CDR3 for beta chain variable domain of TCR clone 193031 (TRBV7-2, TRBJ2-1)
CASSVRVGYNEQFF

SEQ ID NO: 386063 - protein, 12 aa, Homo sapiens
  CDR3 for alpha chain variable domain of TCR clone 193032 (TRAV8-1, TRAJ26)
CAVNNYGQHFFF

SEQ ID NO: 386064 - protein, 15 aa, Homo sapiens
  CDR3 for beta chain variable domain of TCR clone 193032 (TRBV20-1, TRBJ1-1)
CSASWDRFLNTEAFF

SEQ ID NO: 386065 - protein, 15 aa, Homo sapiens
  CDR3 for alpha chain variable domain of TCR clone 193033 (TRAV8-3, TRAJ45)
CASSYSGGGADVLTF

SEQ ID NO: 386066 - protein, 16 aa, Homo sapiens
  CDR3 for beta chain variable domain of TCR clone 193033 (TRBV7-9, TRBJ2-2)
CASSGFGGANTGELFF

SEQ ID NO: 386067 - protein, 14 aa, Homo sapiens
  CDR3 for alpha chain variable domain of TCR clone 193034 (TRAV21, TRAJ35)
CAVMPIGFGNVLHC

SEQ ID NO: 386068 - protein, 16 aa, Homo sapiens
  CDR3 for beta chain variable domain of TCR clone 193034 (TRBV7-3, TRBJ2-1)
CASSLEGYRSYNEQFF

SEQ ID NO: 386069 - protein, 13 aa, Homo sapiens
  CDR3 for alpha chain variable domain of TCR clone 193035 (TRAV38-2/DV8, TRAJ49)
CAYRRRTGNQFYF

SEQ ID NO: 386070 - protein, 15 aa, Homo sapiens
  CDR3 for beta chain variable domain of TCR clone 193035 (TRBV24-1, TRBJ1-1)
CATSDSKAVNTEAFF

SEQ ID NO: 386071 - protein, 10 aa, Homo sapiens
  CDR3 for alpha chain variable domain of TCR clone 193036 (TRAV12-1, TRAJ37)
ARCNTGELIF

SEQ ID NO: 386072 - protein, 18 aa, Homo sapiens
  CDR3 for beta chain variable domain of TCR clone 193036 (TRBV7-7, TRBJ2-1)
CASSLALTSGRSYNEQFF

SEQ ID NO: 386073 - protein, 17 aa, Homo sapiens
  CDR3 for alpha chain variable domain of TCR clone 193037 (TRAV3, TRAJ12)
CAVRDGGRMDSSYKLIF

SEQ ID NO: 386074 - protein, 14 aa, Homo sapiens
  CDR3 for beta chain variable domain of TCR clone 193037 (TRBV7-9, TRBJ1-2)
CACSRQGANYGYTF

SEQ ID NO: 386075 - protein, 15 aa, Homo sapiens
  CDR3 for alpha chain variable domain of TCR clone 193038 (TRAV13-1, TRAJ5)
CAVYIRDTGRRALTF

SEQ ID NO: 386076 - protein, 16 aa, Homo sapiens
  CDR3 for beta chain variable domain of TCR clone 193038 (TRBV12-4, TRBJ2-1)
CASTEQGMDRSNKQFF

SEQ ID NO: 386077 - protein, 15 aa, Homo sapiens
  CDR3 for alpha chain variable domain of TCR clone 193039 (TRAV8-1, TRAJ6)
CAVNTTSGGSYIPTF

SEQ ID NO: 386078 - protein, 14 aa, Homo sapiens
  CDR3 for beta chain variable domain of TCR clone 193039 (TRBV12-4, TRBJ2-1)
CASSLGQGASEQFF

SEQ ID NO: 386079 - protein, 13 aa, Homo sapiens
  CDR3 for alpha chain variable domain of TCR clone 193040 (TRAV13-1, TRAJ53)
CAASKGSNYKLTF

SEQ ID NO: 386080 - protein, 17 aa, Homo sapiens
  CDR3 for beta chain variable domain of TCR clone 193040 (TRBV7-3, TRBJ2-3)
CASSLMKRMRGADTQYF

SEQ ID NO: 386081 - protein, 16 aa, Homo sapiens
  CDR3 for alpha chain variable domain of TCR clone 193041 (TRAV35, TRAJ37)
CWAFLRGSSNTGKLIF

SEQ ID NO: 386082 - protein, 13 aa, Homo sapiens
  CDR3 for beta chain variable domain of TCR clone 193041 (TRBV4-2, TRBJ1-1)
CASSQAGNTEAFF

SEQ ID NO: 386083 - protein, 13 aa, Homo sapiens
  CDR3 for alpha chain variable domain of TCR clone 193042 (TRAV8-2, TRAJ47)
CVVSEWEGNKLVF

SEQ ID NO: 386084 - protein, 16 aa, Homo sapiens
  CDR3 for beta chain variable domain of TCR clone 193042 (TRBV5-1, TRBJ1-1)
CASSKTGTEVGTEAFF

SEQ ID NO: 386085 - protein, 13 aa, Homo sapiens
  CDR3 for alpha chain variable domain of TCR clone 193043 (TRAV13-2, TRAJ48)
CAEMDFGNEKLTF

SEQ ID NO: 386086 - protein, 16 aa, Homo sapiens
  CDR3 for beta chain variable domain of TCR clone 193043 (TRBV4-2, TRBJ2-7)
CASSQEELAGTYEQYF

SEQ ID NO: 386087 - protein, 13 aa, Homo sapiens
  CDR3 for alpha chain variable domain of TCR clone 193044 (TRAV17, TRAJ21)
CATDGGNFNKFYF

SEQ ID NO: 386088 - protein, 17 aa, Homo sapiens
  CDR3 for beta chain variable domain of TCR clone 193044 (TRBV5-1, TRBJ1-6)
CASSPSLQGSDNSPLHF

SEQ ID NO: 386089 - protein, 13 aa, Homo sapiens
  CDR3 for alpha chain variable domain of TCR clone 193045 (TRAV26-2, TRAJ43)
CILRAVNNNDMRF

SEQ ID NO: 386090 - protein, 15 aa, Homo sapiens
  CDR3 for beta chain variable domain of TCR clone 193045 (TRBV7-2, TRBJ2-1)
CASSLASGRVNEQFF

SEQ ID NO: 386091 - protein, 14 aa, Homo sapiens
  CDR3 for alpha chain variable domain of TCR clone 193046 (TRAV12-1, TRAJ40)
CVVNRDSGTYKYIF

SEQ ID NO: 386092 - protein, 13 aa, Homo sapiens
  CDR3 for beta chain variable domain of TCR clone 193046 (TRBV12-4, TRBJ2-5)
CASSPGTEETQYF

SEQ ID NO: 386093 - protein, 15 aa, Homo sapiens
  CDR3 for alpha chain variable domain of TCR clone 193047 (TRAV12-3, TRAJ6)
CAMSATTGGSYIPTF

SEQ ID NO: 386094 - protein, 13 aa, Homo sapiens
  CDR3 for beta chain variable domain of TCR clone 193047 (TRBV20-1, TRBJ1-2)
CSASDRGSRGYTF

SEQ ID NO: 386095 - protein, 14 aa, Homo sapiens
  CDR3 for alpha chain variable domain of TCR clone 193048 (TRAV12-3, TRAJ10)
SHLPLTGGGNKLTF

SEQ ID NO: 386096 - protein, 16 aa, Homo sapiens
  CDR3 for beta chain variable domain of TCR clone 193048 (TRBV27, TRBJ2-2)
CASSSSGVSNTGELFF

SEQ ID NO: 386097 - protein, 18 aa, Homo sapiens
  CDR3 for alpha chain variable domain of TCR clone 193049 (TRAV21, TRAJ52)
CAVRPSPAGGTSYGKLTF

SEQ ID NO: 386098 - protein, 12 aa, Homo sapiens
  CDR3 for beta chain variable domain of TCR clone 193049 (TRBV29-1, TRBJ2-2)
CSVDKYTGELFF

SEQ ID NO: 386099 - protein, 14 aa, Homo sapiens
  CDR3 for alpha chain variable domain of TCR clone 193050 (TRAV12-3, TRAJ9)
CAMSPNTGSFKTIF

SEQ ID NO: 386100 - protein, 13 aa, Homo sapiens
  CDR3 for beta chain variable domain of TCR clone 193050 (TRBV4-2, TRBJ1-1)
CASSQAGNTEAFF

SEQ ID NO: 386101 - protein, 13 aa, Homo sapiens
  CDR3 for alpha chain variable domain of TCR clone 193051 (TRAV35, TRAJ32)
CAGVGGATNKPIF

SEQ ID NO: 386102 - protein, 17 aa, Homo sapiens
  CDR3 for beta chain variable domain of TCR clone 193051 (TRBV4-3, TRBJ2-1)
CASSQFSSGRASGEQFF

SEQ ID NO: 386103 - protein, 12 aa, Homo sapiens
  CDR3 for alpha chain variable domain of TCR clone 193052 (TRAV13-1, TRAJ36)
WRGGAGANNLFF

SEQ ID NO: 386104 - protein, 16 aa, Homo sapiens
  CDR3 for beta chain variable domain of TCR clone 193052 (TRBV7-9, TRBJ2-5)
CASRLEIGTRKETQYC

SEQ ID NO: 386105 - protein, 16 aa, Homo sapiens
  CDR3 for alpha chain variable domain of TCR clone 193053 (TRAV1-1, TRAJ29)
CAVRSTRNSGNTTLVF

SEQ ID NO: 386106 - protein, 15 aa, Homo sapiens
  CDR3 for beta chain variable domain of TCR clone 193053 (TRBV29-1, TRBJ2-1)
CSVGRHALFYNEQFF

SEQ ID NO: 386107 - protein, 14 aa, Homo sapiens
  CDR3 for alpha chain variable domain of TCR clone 193054 (TRAV12-2, TRAJ13)
WAVKKTGGYQKVTF

SEQ ID NO: 386108 - protein, 13 aa, Homo sapiens
  CDR3 for beta chain variable domain of TCR clone 193054 (TRBV19, TRBJ1-5)
CASSIGGNQPQHF

SEQ ID NO: 386109 - protein, 15 aa, Homo sapiens
  CDR3 for alpha chain variable domain of TCR clone 193055 (TRAV3, TRAJ17)
CAVRDTGAAGNKLTF

SEQ ID NO: 386110 - protein, 14 aa, Homo sapiens
  CDR3 for beta chain variable domain of TCR clone 193055 (TRBV6-3, TRBJ1-1)
CASSNLVAGAEAFF

SEQ ID NO: 386111 - protein, 11 aa, Homo sapiens
  CDR3 for alpha chain variable domain of TCR clone 193056 (TRAV2, TRAJ33)
CAVESNYQLIW

SEQ ID NO: 386112 - protein, 17 aa, Homo sapiens
  CDR3 for beta chain variable domain of TCR clone 193056 (TRBV7-3, TRBJ2-5)
CASSLGSGRSGSETQYF

SEQ ID NO: 386113 - protein, 14 aa, Homo sapiens
  CDR3 for alpha chain variable domain of TCR clone 193057 (TRAV36/DV7, TRAJ16)
CAVEADADGQKLLF

SEQ ID NO: 386114 - protein, 15 aa, Homo sapiens
  CDR3 for beta chain variable domain of TCR clone 193057 (TRBV5-4, TRBJ2-3)
CATKSSGGALDTQYF

SEQ ID NO: 386115 - protein, 10 aa, Homo sapiens
  CDR3 for alpha chain variable domain of TCR clone 193058 (TRAV21, TRAJ27)
CTTNAGKSTF

SEQ ID NO: 386116 - protein, 18 aa, Homo sapiens
  CDR3 for beta chain variable domain of TCR clone 193058 (TRBV12-4, TRBJ2-2)
CASSLVAGTRGRTGELFF

SEQ ID NO: 386117 - protein, 16 aa, Homo sapiens
  CDR3 for alpha chain variable domain of TCR clone 193059 (TRAV12-3, TRAJ58)
CAMTDTEETSGSRLTF

SEQ ID NO: 386118 - protein, 22 aa, Homo sapiens
  CDR3 for beta chain variable domain of TCR clone 193059 (TRBV23-1, TRBJ2-7)
CASGRRLDSGQGYVGGGYEQYF

SEQ ID NO: 386119 - protein, 16 aa, Homo sapiens
  CDR3 for alpha chain variable domain of TCR clone 193060 (TRAV21, TRAJ37)
CAVRTAGSSNTGKLIF

SEQ ID NO: 386120 - protein, 14 aa, Homo sapiens
  CDR3 for beta chain variable domain of TCR clone 193060 (TRBV7-9, TRBJ2-2)
CASSLVQDTGELFF

SEQ ID NO: 386121 - protein, 16 aa, Homo sapiens
  CDR3 for alpha chain variable domain of TCR clone 193061 (TRAV1-2, TRAJ17)
CAVRDGFKAAGNKLTF

SEQ ID NO: 386122 - protein, 19 aa, Homo sapiens
  CDR3 for beta chain variable domain of TCR clone 193061 (TRBV6-1, TRBJ2-5)
CASSYAGGGRDPVLRARHA

SEQ ID NO: 386123 - protein, 15 aa, Homo sapiens
  CDR3 for alpha chain variable domain of TCR clone 193062 (TRAV14/DV4, TRAJ12)
CAMREERDSSNKLIF

SEQ ID NO: 386124 - protein, 16 aa, Homo sapiens
  CDR3 for beta chain variable domain of TCR clone 193062 (TRBV11-2, TRBJ1-2)
CASSLDRGGNNYGYTF

SEQ ID NO: 386125 - protein, 16 aa, Homo sapiens
  CDR3 for alpha chain variable domain of TCR clone 193063 (TRAV12-3, TRAJ53)
CAMSPGSGGSNYKLTF

SEQ ID NO: 386126 - protein, 17 aa, Homo sapiens
  CDR3 for beta chain variable domain of TCR clone 193063 (TRBV13, TRBJ2-3)
CASSLSRVAGGRSTQYF

SEQ ID NO: 386127 - protein, 19 aa, Homo sapiens
  CDR3 for alpha chain variable domain of TCR clone 193064 (TRAV2, TRAJ20)
ILQVREADAAVYRDCKLSF

SEQ ID NO: 386128 - protein, 12 aa, Homo sapiens
  CDR3 for beta chain variable domain of TCR clone 193064 (TRBV7-2, TRBJ1-4)
CASSQANEKLFF

SEQ ID NO: 386129 - protein, 15 aa, Homo sapiens
  CDR3 for alpha chain variable domain of TCR clone 193065 (TRAV34, TRAJ38)
CGADFTPGNNRKLIW

SEQ ID NO: 386130 - protein, 14 aa, Homo sapiens
  CDR3 for beta chain variable domain of TCR clone 193065 (TRBV12-5, TRBJ2-5)
CASGLRTHQETQYF

SEQ ID NO: 386131 - protein, 11 aa, Homo sapiens
  CDR3 for alpha chain variable domain of TCR clone 193066 (TRAV1-1, TRAJ23)
CAVRQGGKLIF

SEQ ID NO: 386132 - protein, 13 aa, Homo sapiens
  CDR3 for beta chain variable domain of TCR clone 193066 (TRBV20-1, TRBJ1-1)
CSARAGGNTEAFF

SEQ ID NO: 386133 - protein, 12 aa, Homo sapiens
  CDR3 for alpha chain variable domain of TCR clone 193067 (TRAV27, TRAJ35)
CAGADFGNVLHC

SEQ ID NO: 386134 - protein, 16 aa, Homo sapiens
  CDR3 for beta chain variable domain of TCR clone 193067 (TRBV6-1, TRBJ2-1)
CVSILRQGSSYDEQFF

SEQ ID NO: 386135 - protein, 13 aa, Homo sapiens
  CDR3 for alpha chain variable domain of TCR clone 193068 (TRAV36/DV7, TRAJ30)
CAVEPVRDDKIIF

SEQ ID NO: 386136 - protein, 16 aa, Homo sapiens
  CDR3 for beta chain variable domain of TCR clone 193068 (TRBV6-5, TRBJ2-5)
CASSYAPAGGQETQYF

SEQ ID NO: 386137 - protein, 15 aa, Homo sapiens
  CDR3 for alpha chain variable domain of TCR clone 193069 (TRAV13-1, TRAJ44)
CAASRNTGTARKLTF

SEQ ID NO: 386138 - protein, 14 aa, Homo sapiens
  CDR3 for beta chain variable domain of TCR clone 193069 (TRBV2, TRBJ2-7)
CASSLTSGGYEQYF

SEQ ID NO: 386139 - protein, 12 aa, Homo sapiens
  CDR3 for alpha chain variable domain of TCR clone 193070 (TRAV12-2, TRAJ43)
CAVNVNNNDMRF

SEQ ID NO: 386140 - protein, 14 aa, Homo sapiens
  CDR3 for beta chain variable domain of TCR clone 193070 (TRBV25-1, TRBJ2-2)
CASSELGLPGELFS

SEQ ID NO: 386141 - protein, 14 aa, Homo sapiens
  CDR3 for alpha chain variable domain of TCR clone 193071 (TRAV14/DV4, TRAJ54)
CAMRGIQGAQKLVF

SEQ ID NO: 386142 - protein, 15 aa, Homo sapiens
  CDR3 for beta chain variable domain of TCR clone 193071 (TRBV7-9, TRBJ1-6)
CASSSATADNSPLHF

SEQ ID NO: 386143 - protein, 11 aa, Homo sapiens
  CDR3 for alpha chain variable domain of TCR clone 193072 (TRAV2, TRAJ13)
CASGGYQKVTF

SEQ ID NO: 386144 - protein, 15 aa, Homo sapiens
  CDR3 for beta chain variable domain of TCR clone 193072 (TRBV18, TRBJ2-7)
CASSPNSGSGNEQYF

SEQ ID NO: 386145 - protein, 13 aa, Homo sapiens
  CDR3 for alpha chain variable domain of TCR clone 193073 (TRAV3, TRAJ7)
CAVSSYGNNRLAF

SEQ ID NO: 386146 - protein, 11 aa, Homo sapiens
  CDR3 for beta chain variable domain of TCR clone 193073 (TRBV18, TRBJ2-5)
CASSPRETQYF

SEQ ID NO: 386147 - protein, 16 aa, Homo sapiens
  CDR3 for alpha chain variable domain of TCR clone 193074 (TRAV23/DV6, TRAJ9)
CAASIGGNTGGFKTIF

SEQ ID NO: 386148 - protein, 18 aa, Homo sapiens
  CDR3 for beta chain variable domain of TCR clone 193074 (TRBV7-9, TRBJ2-6)
CASSFPGAGISGANVLTF

SEQ ID NO: 386149 - protein, 14 aa, Homo sapiens
  CDR3 for alpha chain variable domain of TCR clone 193075 (TRAV1-2, TRAJ8)
CAVREDTGFQKLVF

SEQ ID NO: 386150 - protein, 17 aa, Homo sapiens
  CDR3 for beta chain variable domain of TCR clone 193075 (TRBV11-2, TRBJ2-1)
CANSLYPPGVEYNEQFF

SEQ ID NO: 386151 - protein, 14 aa, Homo sapiens
  CDR3 for alpha chain variable domain of TCR clone 193076 (TRAV1-2, TRAJ8)
CAVREDTGFKKLVF

SEQ ID NO: 386152 - protein, 13 aa, Homo sapiens
  CDR3 for beta chain variable domain of TCR clone 193076 (TRBV14, TRBJ2-7)
CASSQDRRYEQYF

SEQ ID NO: 386153 - protein, 15 aa, Homo sapiens
  CDR3 for alpha chain variable domain of TCR clone 193077 (TRAV3, TRAJ23)
CCENRIYKQGGKLIF

SEQ ID NO: 386154 - protein, 17 aa, Homo sapiens
  CDR3 for beta chain variable domain of TCR clone 193077 (TRBV10-3, TRBJ2-6)
CAISESTAPSGANVLTF

SEQ ID NO: 386155 - protein, 14 aa, Homo sapiens
  CDR3 for alpha chain variable domain of TCR clone 193078 (TRAV8-3, TRAJ6)
CAVGASGGSYIPTF

SEQ ID NO: 386156 - protein, 17 aa, Homo sapiens
  CDR3 for beta chain variable domain of TCR clone 193078 (TRBV18, TRBJ2-2)
CASSPSDPWQNTGELSF

SEQ ID NO: 386157 - protein, 14 aa, Homo sapiens
  CDR3 for alpha chain variable domain of TCR clone 193079 (TRAV20, TRAJ22)
CAVALGGSARQLTF

SEQ ID NO: 386158 - protein, 15 aa, Homo sapiens
  CDR3 for beta chain variable domain of TCR clone 193079 (TRBV6-1, TRBJ2-1)
CASSELRGKYNEQFF

SEQ ID NO: 386159 - protein, 20 aa, Homo sapiens
  CDR3 for alpha chain variable domain of TCR clone 193080 (TRAV12-2, TRAJ52)
SPVIRPPARASGTSYGKLTF

SEQ ID NO: 386160 - protein, 16 aa, Homo sapiens
  CDR3 for beta chain variable domain of TCR clone 193080 (TRBV15, TRBJ1-2)
CATSRGPRTGGGGYTF

SEQ ID NO: 386161 - protein, 16 aa, Homo sapiens
  CDR3 for alpha chain variable domain of TCR clone 193081 (TRAV12-3, TRAJ53)
CAMSPGSGGSNYKLTF

SEQ ID NO: 386162 - protein, 17 aa, Homo sapiens
  CDR3 for beta chain variable domain of TCR clone 193081 (TRBV13, TRBJ2-3)
CASSLSRVAGGRKTQYF

SEQ ID NO: 386163 - protein, 14 aa, Homo sapiens
  CDR3 for alpha chain variable domain of TCR clone 193082 (TRAV12-2, TRAJ11)
CAVNRESGYSTLTF

SEQ ID NO: 386164 - protein, 10 aa, Homo sapiens
  CDR3 for beta chain variable domain of TCR clone 193082 (TRBV20-1, TRBJ2-5)
CSARFETPYF

SEQ ID NO: 386165 - protein, 17 aa, Homo sapiens
  CDR3 for alpha chain variable domain of TCR clone 193083 (TRAV3, TRAJ42)
CAVCDRDYGGSQGNLIF

SEQ ID NO: 386166 - protein, 15 aa, Homo sapiens
  CDR3 for beta chain variable domain of TCR clone 193083 (TRBV2, TRBJ2-7)
CASSEGLARSYEQYF

SEQ ID NO: 386167 - protein, 14 aa, Homo sapiens
  CDR3 for alpha chain variable domain of TCR clone 193084 (TRAV38-1, TRAJ40)
CALRPTSGTYKYIL

SEQ ID NO: 386168 - protein, 16 aa, Homo sapiens
  CDR3 for beta chain variable domain of TCR clone 193084 (TRBV6-1, TRBJ2-5)
CASSETLDRGAETQYF

SEQ ID NO: 386169 - protein, 14 aa, Homo sapiens
  CDR3 for alpha chain variable domain of TCR clone 193085 (TRAV12-2, TRAJ13)
CAVKKTGGYQKVTF

SEQ ID NO: 386170 - protein, 17 aa, Homo sapiens
  CDR3 for beta chain variable domain of TCR clone 193085 (TRBV19, TRBJ2-6)
CASSTGQVFSGANDLTF

SEQ ID NO: 386171 - protein, 13 aa, Homo sapiens
  CDR3 for alpha chain variable domain of TCR clone 193086 (TRAV12-1, TRAJ33)
CGDAPDSNYQLIW

SEQ ID NO: 386172 - protein, 19 aa, Homo sapiens
  CDR3 for beta chain variable domain of TCR clone 193086 (TRBV7-9, TRBJ2-1)
CASSTTRASGRSSYNEQFF

SEQ ID NO: 386173 - protein, 13 aa, Homo sapiens
  CDR3 for alpha chain variable domain of TCR clone 193087 (TRAV35, TRAJ44)
CAGLSGTASKLTF

SEQ ID NO: 386174 - protein, 15 aa, Homo sapiens
  CDR3 for beta chain variable domain of TCR clone 193087 (TRBV11-3, TRBJ2-3)
CASLKDGREGDTQYF

SEQ ID NO: 386175 - protein, 14 aa, Homo sapiens
  CDR3 for alpha chain variable domain of TCR clone 193088 (TRAV12-1, TRAJ13)
CVVIDSGGYQKVTL

SEQ ID NO: 386176 - protein, 13 aa, Homo sapiens
  CDR3 for beta chain variable domain of TCR clone 193088 (TRBV20-1, TRBJ1-1)
CSAPPGGHTEAFF

SEQ ID NO: 386177 - protein, 12 aa, Homo sapiens
  CDR3 for alpha chain variable domain of TCR clone 193089 (TRAV13-2, TRAJ39)
CAENNAGNMLTF

SEQ ID NO: 386178 - protein, 11 aa, Homo sapiens
  CDR3 for beta chain variable domain of TCR clone 193089 (TRBV11-2, TRBJ2-2)
CQQPWRRELFF

SEQ ID NO: 386179 - protein, 12 aa, Homo sapiens
  CDR3 for alpha chain variable domain of TCR clone 193090 (TRAV25, TRAJ11)
CAGSSGYSTLTF

SEQ ID NO: 386180 - protein, 16 aa, Homo sapiens
  CDR3 for beta chain variable domain of TCR clone 193090 (TRBV15, TRBJ1-2)
CATSRGPRTGGGGYTF

SEQ ID NO: 386181 - protein, 16 aa, Homo sapiens
  CDR3 for alpha chain variable domain of TCR clone 193091 (TRAV26-1, TRAJ37)
CIVRGDGSGNTGKLIF

SEQ ID NO: 386182 - protein, 13 aa, Homo sapiens
  CDR3 for beta chain variable domain of TCR clone 193091 (TRBV20-1, TRBJ1-1)
CSAGTVGNTEAFF

SEQ ID NO: 386183 - protein, 11 aa, Homo sapiens
  CDR3 for alpha chain variable domain of TCR clone 193092 (TRAV12-1, TRAJ21)
CVVNNFNKFYF

SEQ ID NO: 386184 - protein, 12 aa, Homo sapiens
  CDR3 for beta chain variable domain of TCR clone 193092 (TRBV7-2, TRBJ2-3)
CASSLEQGIQYF

SEQ ID NO: 386185 - protein, 15 aa, Homo sapiens
  CDR3 for alpha chain variable domain of TCR clone 193093 (TRAV35, TRAJ23)
CAGPRGNNQGGKLIF

SEQ ID NO: 386186 - protein, 14 aa, Homo sapiens
  CDR3 for beta chain variable domain of TCR clone 193093 (TRBV7-9, TRBJ1-1)
CASTPLQSYTEAFF

SEQ ID NO: 386187 - protein, 11 aa, Homo sapiens
  CDR3 for alpha chain variable domain of TCR clone 193094 (TRAV12-1, TRAJ34)
CVVNKGRELIF

SEQ ID NO: 386188 - protein, 15 aa, Homo sapiens
  CDR3 for beta chain variable domain of TCR clone 193094 (TRBV7-2, TRBJ2-3)
CASSSTGLETDTQYF

SEQ ID NO: 386189 - protein, 15 aa, Homo sapiens
  CDR3 for alpha chain variable domain of TCR clone 193095 (TRAV13-2, TRAJ38)
CAVAPNAGNNRKLIW

SEQ ID NO: 386190 - protein, 14 aa, Homo sapiens
  CDR3 for beta chain variable domain of TCR clone 193095 (TRBV6-5, TRBJ1-2)
CASSYDGTGGGYTF

SEQ ID NO: 386191 - protein, 14 aa, Homo sapiens
  CDR3 for alpha chain variable domain of TCR clone 193096 (TRAV26-1, TRAJ45)
CIEVTGGGADGLTF

SEQ ID NO: 386192 - protein, 11 aa, Homo sapiens
  CDR3 for beta chain variable domain of TCR clone 193096 (TRBV7-2, TRBJ2-3)
CASSSSDTQYF

SEQ ID NO: 386193 - protein, 13 aa, Homo sapiens
  CDR3 for alpha chain variable domain of TCR clone 193097 (TRAV13-1, TRAJ21)
CAASIYNFNKFYF

SEQ ID NO: 386194 - protein, 15 aa, Homo sapiens
  CDR3 for beta chain variable domain of TCR clone 193097 (TRBV4-1, TRBJ2-1)
CASSQVSLGSDEQFF

SEQ ID NO: 386195 - protein, 10 aa, Homo sapiens
  CDR3 for alpha chain variable domain of TCR clone 193098 (TRAV20, TRAJ22)
CAAPARQLTF

SEQ ID NO: 386196 - protein, 15 aa, Homo sapiens
  CDR3 for beta chain variable domain of TCR clone 193098 (TRBV20-1, TRBJ2-7)
CSAESGTSGAYEQYF

SEQ ID NO: 386197 - protein, 14 aa, Homo sapiens
  CDR3 for alpha chain variable domain of TCR clone 193099 (TRAV12-2, TRAJ13)
CAVEETGGYQKVTF

SEQ ID NO: 386198 - protein, 15 aa, Homo sapiens
  CDR3 for beta chain variable domain of TCR clone 193099 (TRBV27, TRBJ2-1)
CASSNGGGSANEQFF

SEQ ID NO: 386199 - protein, 13 aa, Homo sapiens
  CDR3 for alpha chain variable domain of TCR clone 193100 (TRAV12-2, TRAJ24)
CAVSTDSWGKLQF

SEQ ID NO: 386200 - protein, 17 aa, Homo sapiens
  CDR3 for beta chain variable domain of TCR clone 193100 (TRBV28, TRBJ2-1)
CASSLFTSGSGHNEQFF

SEQ ID NO: 386201 - protein, 16 aa, Homo sapiens
  CDR3 for alpha chain variable domain of TCR clone 193101 (TRAV30, TRAJ24)
CGTEIVDADSWGKFQF

SEQ ID NO: 386202 - protein, 13 aa, Homo sapiens
  CDR3 for beta chain variable domain of TCR clone 193101 (TRBV7-2, TRBJ1-4)
CASRLAGLENLFF

SEQ ID NO: 386203 - protein, 14 aa, Homo sapiens
  CDR3 for alpha chain variable domain of TCR clone 193102 (TRAV20, TRAJ29)
CAVQAWVGNTPLVF

SEQ ID NO: 386204 - protein, 15 aa, Homo sapiens
  CDR3 for beta chain variable domain of TCR clone 193102 (TRBV29-1, TRBJ2-7)
CSVAFFARGSYEQYF

SEQ ID NO: 386205 - protein, 13 aa, Homo sapiens
  CDR3 for alpha chain variable domain of TCR clone 193103 (TRAV3, TRAJ9)
CCEGNTGGFKTIF

SEQ ID NO: 386206 - protein, 15 aa, Homo sapiens
  CDR3 for beta chain variable domain of TCR clone 193103 (TRBV19, TRBJ2-7)
CASSPAGSGEALRYF

SEQ ID NO: 386207 - protein, 13 aa, Homo sapiens
  CDR3 for alpha chain variable domain of TCR clone 193104 (TRAV12-2, TRAJ20)
CAVNRFDDYKLSF

SEQ ID NO: 386208 - protein, 15 aa, Homo sapiens
  CDR3 for beta chain variable domain of TCR clone 193104 (TRBV10-3, TRBJ2-3)
CAISLTSGGTDTQYF

SEQ ID NO: 386209 - protein, 12 aa, Homo sapiens
  CDR3 for alpha chain variable domain of TCR clone 193105 (TRAV3, TRAJ31)
CAVRDGNARLMF

SEQ ID NO: 386210 - protein, 18 aa, Homo sapiens
  CDR3 for beta chain variable domain of TCR clone 193105 (TRBV7-2, TRBJ2-3)
GASSLKREGSGITDTQYF

SEQ ID NO: 386211 - protein, 14 aa, Homo sapiens
  CDR3 for alpha chain variable domain of TCR clone 193106 (TRAV12-2, TRAJ17)
CAVLFKAAGNKLTF

SEQ ID NO: 386212 - protein, 13 aa, Homo sapiens
  CDR3 for beta chain variable domain of TCR clone 193106 (TRBV19, TRBJ1-2)
CASSQGQVYGYTV

SEQ ID NO: 386213 - protein, 13 aa, Homo sapiens
  CDR3 for alpha chain variable domain of TCR clone 193107 (TRAV35, TRAJ42)
CAGFPGSQGNLIF

SEQ ID NO: 386214 - protein, 13 aa, Homo sapiens
  CDR3 for beta chain variable domain of TCR clone 193107 (TRBV18, TRBJ1-1)
CASSGGRNTEAFF

SEQ ID NO: 386215 - protein, 17 aa, Homo sapiens
  CDR3 for alpha chain variable domain of TCR clone 193108 (TRAV3, TRAJ42)
CAVRDRDYGGSQGKLIF

SEQ ID NO: 386216 - protein, 15 aa, Homo sapiens
  CDR3 for beta chain variable domain of TCR clone 193108 (TRBV6-1, TRBJ2-2)
CASSAGQGYTGELFF

SEQ ID NO: 386217 - protein, 18 aa, Homo sapiens
  CDR3 for alpha chain variable domain of TCR clone 193109 (TRAV21, TRAJ52)
CAVRPSPAGGTSYGKLTF

SEQ ID NO: 386218 - protein, 13 aa, Homo sapiens
  CDR3 for beta chain variable domain of TCR clone 193109 (TRBV19, TRBJ2-5)
CASSMGGAGTQYF

SEQ ID NO: 386219 - protein, 15 aa, Homo sapiens
  CDR3 for alpha chain variable domain of TCR clone 193110 (TRAV21, TRAJ52)
CAVRGGGTSYGKLTF

SEQ ID NO: 386220 - protein, 15 aa, Homo sapiens
  CDR3 for beta chain variable domain of TCR clone 193110 (TRBV18, TRBJ1-5)
CGSSPSDRSNQPQHF

SEQ ID NO: 386221 - protein, 15 aa, Homo sapiens
  CDR3 for alpha chain variable domain of TCR clone 193111 (TRAV17, TRAJ16)
CATALRSSNGQKLLF

SEQ ID NO: 386222 - protein, 15 aa, Homo sapiens
  CDR3 for beta chain variable domain of TCR clone 193111 (TRBV20-1, TRBJ1-1)
CSASRGVTGNTEAFF

SEQ ID NO: 386223 - protein, 11 aa, Homo sapiens
  CDR3 for alpha chain variable domain of TCR clone 193112 (TRAV2, TRAJ13)
CASVGYQKVTF

SEQ ID NO: 386224 - protein, 16 aa, Homo sapiens
  CDR3 for beta chain variable domain of TCR clone 193112 (TRBV6-1, TRBJ2-5)
CASSETLDRGAETQCF

SEQ ID NO: 386225 - protein, 16 aa, Homo sapiens
  CDR3 for alpha chain variable domain of TCR clone 193113 (TRAV35, TRAJ28)
CAGQKYSGAGSYQLTF

SEQ ID NO: 386226 - protein, 17 aa, Homo sapiens
  CDR3 for beta chain variable domain of TCR clone 193113 (TRBV11-2, TRBJ2-1)
CASSLYPPGVEYNEQFF

SEQ ID NO: 386227 - protein, 15 aa, Homo sapiens
  CDR3 for alpha chain variable domain of TCR clone 193114 (TRAV41, TRAJ45)
GAASYSGGGADGLTF

SEQ ID NO: 386228 - protein, 14 aa, Homo sapiens
  CDR3 for beta chain variable domain of TCR clone 193114 (TRBV12-5, TRBJ2-5)
CASGSRTHQETQYF

SEQ ID NO: 386229 - protein, 18 aa, Homo sapiens
  CDR3 for alpha chain variable domain of TCR clone 193115 (TRAV12-3, TRAJ52)
CAMSVGGAGGTSYGKLTF

SEQ ID NO: 386230 - protein, 11 aa, Homo sapiens
  CDR3 for beta chain variable domain of TCR clone 193115 (TRBV7-6, TRBJ2-5)
CASSSQETQYF

SEQ ID NO: 386231 - protein, 14 aa, Homo sapiens
  CDR3 for alpha chain variable domain of TCR clone 193116 (TRAV2, TRAJ37)
CAVDFTSNTGQLIF

SEQ ID NO: 386232 - protein, 14 aa, Homo sapiens
  CDR3 for beta chain variable domain of TCR clone 193116 (TRBV7-7, TRBJ2-7)
CASSLGRGVGEQYF

SEQ ID NO: 386233 - protein, 15 aa, Homo sapiens
  CDR3 for alpha chain variable domain of TCR clone 193117 (TRAV8-3, TRAJ15)
CAVGAPHQAGTALIF

SEQ ID NO: 386234 - protein, 14 aa, Homo sapiens
  CDR3 for beta chain variable domain of TCR clone 193117 (TRBV20-1, TRBJ2-1)
CSPDDEASYNEQFF

SEQ ID NO: 386235 - protein, 15 aa, Homo sapiens
  CDR3 for alpha chain variable domain of TCR clone 193118 (TRAV13-1, TRAJ32)
CAASNGGWCYKQAHL

SEQ ID NO: 386236 - protein, 14 aa, Homo sapiens
  CDR3 for beta chain variable domain of TCR clone 193118 (TRBV20-1, TRBJ2-1)
CSAQIGGSANEQLF

SEQ ID NO: 386237 - protein, 14 aa, Homo sapiens
  CDR3 for alpha chain variable domain of TCR clone 193119 (TRAV8-6, TRAJ53)
CAALVLGSKYKLKF

SEQ ID NO: 386238 - protein, 15 aa, Homo sapiens
  CDR3 for beta chain variable domain of TCR clone 193119 (TRBV20-1, TRBJ2-3)
CSAEPLAGHGDTQYF

SEQ ID NO: 386239 - protein, 14 aa, Homo sapiens
  CDR3 for alpha chain variable domain of TCR clone 193120 (TRAV12-2, TRAJ17)
CAVLFKAAGNKLTF

SEQ ID NO: 386240 - protein, 17 aa, Homo sapiens
  CDR3 for beta chain variable domain of TCR clone 193120 (TRBV20-1, TRBJ2-2)
CSACGSGQGGLTGDLFF

SEQ ID NO: 386241 - protein, 16 aa, Homo sapiens
  CDR3 for alpha chain variable domain of TCR clone 193121 (TRAV16, TRAJ4)
CITVLPFSGGYNKLIF

SEQ ID NO: 386242 - protein, 14 aa, Homo sapiens
  CDR3 for beta chain variable domain of TCR clone 193121 (TRBV19, TRBJ2-7)
CASSTGQGAIEQYF

SEQ ID NO: 386243 - protein, 19 aa, Homo sapiens
  CDR3 for alpha chain variable domain of TCR clone 193122 (TRAV26-1, TRAJ28)
CIVRVAHAYSGAGSYQLTF

SEQ ID NO: 386244 - protein, 12 aa, Homo sapiens
  CDR3 for beta chain variable domain of TCR clone 193122 (TRBV12-4, TRBJ2-3)
CASSLGQDTQYF

SEQ ID NO: 386245 - protein, 12 aa, Homo sapiens
  CDR3 for alpha chain variable domain of TCR clone 193123 (TRAV13-1, TRAJ21)
CAAKEGFNKFYF

SEQ ID NO: 386246 - protein, 11 aa, Homo sapiens
  CDR3 for beta chain variable domain of TCR clone 193123 (TRBV10-3, TRBJ2-1)
CAISDRGLQFF

SEQ ID NO: 386247 - protein, 16 aa, Homo sapiens
  CDR3 for alpha chain variable domain of TCR clone 193124 (TRAV17, TRAJ36)
CATVALNWGKQPLLWD

SEQ ID NO: 386248 - protein, 13 aa, Homo sapiens
  CDR3 for beta chain variable domain of TCR clone 193124 (TRBV4-1, TRBJ1-1)
CASSQLGTGEAFF

SEQ ID NO: 386249 - protein, 13 aa, Homo sapiens
  CDR3 for alpha chain variable domain of TCR clone 193125 (TRAV21, TRAJ27)
CAARPGNAGKSTF

SEQ ID NO: 386250 - protein, 12 aa, Homo sapiens
  CDR3 for beta chain variable domain of TCR clone 193125 (TRBV7-2, TRBJ1-5)
CASSLWSQLQHF

SEQ ID NO: 386251 - protein, 17 aa, Homo sapiens
  CDR3 for alpha chain variable domain of TCR clone 193126 (TRAV13-1, )
CAANIQNPDPAVYQLRD

SEQ ID NO: 386252 - protein, 16 aa, Homo sapiens
  CDR3 for beta chain variable domain of TCR clone 193126 (TRBV7-3, TRBJ2-3)
CASSPRTFPSTDTQYF

SEQ ID NO: 386253 - protein, 13 aa, Homo sapiens
  CDR3 for alpha chain variable domain of TCR clone 193127 (TRAV26-1, TRAJ40)
CIVRVEGTYKYIF

SEQ ID NO: 386254 - protein, 12 aa, Homo sapiens
  CDR3 for beta chain variable domain of TCR clone 193127 (TRBV5-1, TRBJ2-5)
CASSLGLETQYF

SEQ ID NO: 386255 - protein, 14 aa, Homo sapiens
  CDR3 for alpha chain variable domain of TCR clone 193128 (TRAV38-1, TRAJ40)
CAVRPTSGTYKYIF

SEQ ID NO: 386256 - protein, 16 aa, Homo sapiens
  CDR3 for beta chain variable domain of TCR clone 193128 (TRBV6-1, TRBJ1-2)
CASSGAWQGRSHGYTF

SEQ ID NO: 386257 - protein, 15 aa, Homo sapiens
  CDR3 for alpha chain variable domain of TCR clone 193129 (TRAV12-1, TRAJ33)
CVVNMADRSNYQLIW

SEQ ID NO: 386258 - protein, 15 aa, Homo sapiens
  CDR3 for beta chain variable domain of TCR clone 193129 (TRBV7-9, TRBJ1-5)
CASSQGHQPNQPQHF

SEQ ID NO: 386259 - protein, 10 aa, Homo sapiens
  CDR3 for alpha chain variable domain of TCR clone 193130 (TRAV23/DV6, TRAJ10)
CEASRLLYSR

SEQ ID NO: 386260 - protein, 15 aa, Homo sapiens
  CDR3 for beta chain variable domain of TCR clone 193130 (TRBV20-1, TRBJ2-1)
CSAERGLLAGDEQFF

SEQ ID NO: 386261 - protein, 13 aa, Homo sapiens
  CDR3 for alpha chain variable domain of TCR clone 193131 (TRAV21, TRAJ27)
CAARPGNAGKSTF

SEQ ID NO: 386262 - protein, 14 aa, Homo sapiens
  CDR3 for beta chain variable domain of TCR clone 193131 (TRBV18, TRBJ2-5)
CASSPGVYQETQYF

SEQ ID NO: 386263 - protein, 14 aa, Homo sapiens
  CDR3 for alpha chain variable domain of TCR clone 193132 (TRAV12-3, TRAJ10)
SHLPLTGGGNKLSF

SEQ ID NO: 386264 - protein, 17 aa, Homo sapiens
  CDR3 for beta chain variable domain of TCR clone 193132 (TRBV25-1, TRBJ2-5)
CASSRRGGRGGQETQYF

SEQ ID NO: 386265 - protein, 14 aa, Homo sapiens
  CDR3 for alpha chain variable domain of TCR clone 193133 (TRAV12-2, TRAJ13)
CAVKKTGGYEKVTF

SEQ ID NO: 386266 - protein, 18 aa, Homo sapiens
  CDR3 for beta chain variable domain of TCR clone 193133 (TRBV11-2, TRBJ2-3)
CASSLGGASRGAPKTQYF

SEQ ID NO: 386267 - protein, 13 aa, Homo sapiens
  CDR3 for alpha chain variable domain of TCR clone 193134 (TRAV13-2, TRAJ48)
GAEMDFGKEKLTF

SEQ ID NO: 386268 - protein, 13 aa, Homo sapiens
  CDR3 for beta chain variable domain of TCR clone 193134 (TRBV7-9, TRBJ1-2)
CASSLKQNYGYTF

SEQ ID NO: 386269 - protein, 15 aa, Homo sapiens
  CDR3 for alpha chain variable domain of TCR clone 193135 (TRAV3, TRAJ13)
CAVRVDSGGYQKVTF

SEQ ID NO: 386270 - protein, 15 aa, Homo sapiens
  CDR3 for beta chain variable domain of TCR clone 193135 (TRBV5-7, TRBJ1-2)
CASSLGVAANYGDTF

SEQ ID NO: 386271 - protein, 15 aa, Homo sapiens
  CDR3 for alpha chain variable domain of TCR clone 193136 (TRAV30, TRAJ32)
CCTEILGGATNKLIF

SEQ ID NO: 386272 - protein, 13 aa, Homo sapiens
  CDR3 for beta chain variable domain of TCR clone 193136 (TRBV6-3, TRBJ2-7)
CASSFSGGYEQYF

SEQ ID NO: 386273 - protein, 12 aa, Homo sapiens
  CDR3 for alpha chain variable domain of TCR clone 193137 (TRAV21, TRAJ8)
CAVNTGFQKLVF

SEQ ID NO: 386274 - protein, 13 aa, Homo sapiens
  CDR3 for beta chain variable domain of TCR clone 193137 (TRBV6-3, TRBJ2-1)
CASSYDNYNEQFV

SEQ ID NO: 386275 - protein, 14 aa, Homo sapiens
  CDR3 for alpha chain variable domain of TCR clone 193138 (TRAV1-2, TRAJ8)
CAVREDTGSQKLVF

SEQ ID NO: 386276 - protein, 15 aa, Homo sapiens
  CDR3 for beta chain variable domain of TCR clone 193138 (TRBV28, TRBJ2-5)
CASSPPWSYQETQYF

SEQ ID NO: 386277 - protein, 13 aa, Homo sapiens
  CDR3 for alpha chain variable domain of TCR clone 193139 (TRAV26-1, TRAJ34)
CIVRPWITVKLIF

SEQ ID NO: 386278 - protein, 13 aa, Homo sapiens
  CDR3 for beta chain variable domain of TCR clone 193139 (TRBV5-1, TRBJ2-1)
CASSLGSYNEQFF

SEQ ID NO: 386279 - protein, 12 aa, Homo sapiens
  CDR3 for alpha chain variable domain of TCR clone 193140 (TRAV8-4, TRAJ43)
CAVSVNNNDMRF

SEQ ID NO: 386280 - protein, 12 aa, Homo sapiens
  CDR3 for beta chain variable domain of TCR clone 193140 (TRBV28, TRBJ2-7)
CASSFSSYEQYF

SEQ ID NO: 386281 - protein, 14 aa, Homo sapiens
  CDR3 for alpha chain variable domain of TCR clone 193141 (TRAV1-2, TRAJ8)
CAMREDTGFQKLVF

SEQ ID NO: 386282 - protein, 12 aa, Homo sapiens
  CDR3 for beta chain variable domain of TCR clone 193141 (TRBV29-1, TRBJ2-3)
CSVTGGADTQYF

SEQ ID NO: 386283 - protein, 15 aa, Homo sapiens
  CDR3 for alpha chain variable domain of TCR clone 193142 (TRAV3, TRAJ5)
CAVRDRKPGRRELTF

SEQ ID NO: 386284 - protein, 15 aa, Homo sapiens
  CDR3 for beta chain variable domain of TCR clone 193142 (TRBV7-8, TRBJ2-1)
CASSLADSLYNEQFF

SEQ ID NO: 386285 - protein, 18 aa, Homo sapiens
  CDR3 for alpha chain variable domain of TCR clone 193143 (TRAV26-1, TRAJ45)
CIVRPGGYSGGGADGLTF

SEQ ID NO: 386286 - protein, 12 aa, Homo sapiens
  CDR3 for beta chain variable domain of TCR clone 193143 (TRBV11-2, TRBJ2-2)
CASSLGGGELFF

SEQ ID NO: 386287 - protein, 18 aa, Homo sapiens
  CDR3 for alpha chain variable domain of TCR clone 193144 (TRAV12-3, TRAJ52)
CAMSVGGAGGTSYGKRTF

SEQ ID NO: 386288 - protein, 17 aa, Homo sapiens
  CDR3 for beta chain variable domain of TCR clone 193144 (TRBV13, TRBJ2-3)
CASSLSRVAGGRNTQYF

SEQ ID NO: 386289 - protein, 12 aa, Homo sapiens
  CDR3 for alpha chain variable domain of TCR clone 193145 (TRAV17, TRAJ57)
CATDGGSEKLVF

SEQ ID NO: 386290 - protein, 13 aa, Homo sapiens
  CDR3 for beta chain variable domain of TCR clone 193145 (TRBV7-9, TRBJ2-7)
CASSFAGAYEQYF

SEQ ID NO: 386291 - protein, 12 aa, Homo sapiens
  CDR3 for alpha chain variable domain of TCR clone 193146 (TRAV13-1, TRAJ49)
CAASIWGNQFYF

SEQ ID NO: 386292 - protein, 14 aa, Homo sapiens
  CDR3 for beta chain variable domain of TCR clone 193146 (TRBV12-4, TRBJ1-1)
CASSLDGLNTEALF

SEQ ID NO: 386293 - protein, 14 aa, Homo sapiens
  CDR3 for alpha chain variable domain of TCR clone 193147 (TRAV12-1, TRAJ42)
CVVIYGGSQGILIF

SEQ ID NO: 386294 - protein, 17 aa, Homo sapiens
  CDR3 for beta chain variable domain of TCR clone 193147 (TRBV3-1, TRBJ2-6)
CASSPNTGPAGANVLTF

SEQ ID NO: 386295 - protein, 14 aa, Homo sapiens
  CDR3 for alpha chain variable domain of TCR clone 193148 (TRAV26-1, TRAJ39)
CIVRGPRAGNMLTF

SEQ ID NO: 386296 - protein, 14 aa, Homo sapiens
  CDR3 for beta chain variable domain of TCR clone 193148 (TRBV11-2, TRBJ1-2)
CASILGTANYGYTF

SEQ ID NO: 386297 - protein, 15 aa, Homo sapiens
  CDR3 for alpha chain variable domain of TCR clone 193149 (TRAV23/DV6, TRAJ44)
CAARPLTGTASKLPF

SEQ ID NO: 386298 - protein, 17 aa, Homo sapiens
  CDR3 for beta chain variable domain of TCR clone 193149 (TRBV24-1, TRBJ2-1)
CATSDVSTSGTYNEQFF

SEQ ID NO: 386299 - protein, 16 aa, Homo sapiens
  CDR3 for alpha chain variable domain of TCR clone 193150 (TRAV26-1, TRAJ37)
CIVRGDCSGNTGKLIF

SEQ ID NO: 386300 - protein, 15 aa, Homo sapiens
  CDR3 for beta chain variable domain of TCR clone 193150 (TRBV20-1, TRBJ2-7)
CSARDRVSGMDEQYF

SEQ ID NO: 386301 - protein, 16 aa, Homo sapiens
  CDR3 for alpha chain variable domain of TCR clone 193151 (TRAV12-3, TRAJ53)
CAMSPGSGGSNYKLTF

SEQ ID NO: 386302 - protein, 20 aa, Homo sapiens
  CDR3 for beta chain variable domain of TCR clone 193151 (TRBV7-8, TRBJ2-2)
CASSNLFPGPTIHITGELFF

SEQ ID NO: 386303 - protein, 13 aa, Homo sapiens
  CDR3 for alpha chain variable domain of TCR clone 193152 (TRAV12-1, TRAJ29)
CVVDTSGKTPLVF

SEQ ID NO: 386304 - protein, 14 aa, Homo sapiens
  CDR3 for beta chain variable domain of TCR clone 193152 (TRBV12-4, TRBJ2-3)
CASSLVPSTDTQYF

SEQ ID NO: 386305 - protein, 19 aa, Homo sapiens
  CDR3 for alpha chain variable domain of TCR clone 193153 (TRAV27, TRAJ53)
ASTSVQSRNSGGSNYKLTF

SEQ ID NO: 386306 - protein, 14 aa, Homo sapiens
  CDR3 for beta chain variable domain of TCR clone 193153 (TRBV11-1, TRBJ2-7)
CASTFAVPSYEQCF

SEQ ID NO: 386307 - protein, 15 aa, Homo sapiens
  CDR3 for alpha chain variable domain of TCR clone 193154 (TRAV8-3, TRAJ40)
CAAPSLGSGSYKYIF

SEQ ID NO: 386308 - protein, 16 aa, Homo sapiens
  CDR3 for beta chain variable domain of TCR clone 193154 (TRBV7-3, TRBJ2-3)
CASSLSGYRPEDTQYF

SEQ ID NO: 386309 - protein, 13 aa, Homo sapiens
  CDR3 for alpha chain variable domain of TCR clone 193155 (TRAV21, TRAJ57)
CAVTQGGSEKLVF

SEQ ID NO: 386310 - protein, 17 aa, Homo sapiens
  CDR3 for beta chain variable domain of TCR clone 193155 (TRBV15, TRBJ1-5)
CATSRAPPGTRNQPQHF

SEQ ID NO: 386311 - protein, 16 aa, Homo sapiens
  CDR3 for alpha chain variable domain of TCR clone 193156 (TRAV3, TRAJ37)
CAVRPHGSGNTGKLIF

SEQ ID NO: 386312 - protein, 14 aa, Homo sapiens
  CDR3 for beta chain variable domain of TCR clone 193156 (TRBV4-1, TRBJ2-7)
CASRLTSGSYEQYF

SEQ ID NO: 386313 - protein, 15 aa, Homo sapiens
  CDR3 for alpha chain variable domain of TCR clone 193157 (TRAV34, TRAJ38)
CGADYTPGNNRKLIW

SEQ ID NO: 386314 - protein, 16 aa, Homo sapiens
  CDR3 for beta chain variable domain of TCR clone 193157 (TRBV12-5, TRBJ2-5)
CASGPRTSGNQETQYF

SEQ ID NO: 386315 - protein, 12 aa, Homo sapiens
  CDR3 for alpha chain variable domain of TCR clone 193158 (TRAV13-1, TRAJ53)
AASGGSNYKLTF

SEQ ID NO: 386316 - protein, 12 aa, Homo sapiens
  CDR3 for beta chain variable domain of TCR clone 193158 (TRBV18, TRBJ1-4)
CSSSPSREKLFF

SEQ ID NO: 386317 - protein, 16 aa, Homo sapiens
  CDR3 for alpha chain variable domain of TCR clone 193159 (TRAV14/DV4, TRAJ17)
CAMRGAGRAAGNKLTF

SEQ ID NO: 386318 - protein, 16 aa, Homo sapiens
  CDR3 for beta chain variable domain of TCR clone 193159 (TRBV24-1, TRBJ2-3)
CATSDPGTGATDTQYF

SEQ ID NO: 386319 - protein, 14 aa, Homo sapiens
  CDR3 for alpha chain variable domain of TCR clone 193160 (TRAV12-2, TRAJ13)
CAVKKTGGYQKVTF

SEQ ID NO: 386320 - protein, 18 aa, Homo sapiens
  CDR3 for beta chain variable domain of TCR clone 193160 (TRBV24-1, TRBJ2-2)
CATSDSGQRTANTGELFF

SEQ ID NO: 386321 - protein, 12 aa, Homo sapiens
  CDR3 for alpha chain variable domain of TCR clone 193161 (TRAV3, TRAJ20)
CAVRDGDYKLSF

SEQ ID NO: 386322 - protein, 16 aa, Homo sapiens
  CDR3 for beta chain variable domain of TCR clone 193161 (TRBV28, TRBJ1-2)
CASSHGQGVYKDGYTF

SEQ ID NO: 386323 - protein, 12 aa, Homo sapiens
  CDR3 for alpha chain variable domain of TCR clone 193162 (TRAV12-3, TRAJ34)
CAMCYNTDKLIF

SEQ ID NO: 386324 - protein, 15 aa, Homo sapiens
  CDR3 for beta chain variable domain of TCR clone 193162 (TRBV28, TRBJ2-1)
CASSIIAGGRSEQFF

SEQ ID NO: 386325 - protein, 17 aa, Homo sapiens
  CDR3 for alpha chain variable domain of TCR clone 193163 (TRAV17, TRAJ52)
CATERTSGGTSYGKLTF

SEQ ID NO: 386326 - protein, 15 aa, Homo sapiens
  CDR3 for beta chain variable domain of TCR clone 193163 (TRBV5-1, TRBJ2-1)
CASSLVANSYNEHLF

SEQ ID NO: 386327 - protein, 11 aa, Homo sapiens
  CDR3 for alpha chain variable domain of TCR clone 193164 (TRAV13-2, TRAJ39)
CAENAGNMLTF

SEQ ID NO: 386328 - protein, 15 aa, Homo sapiens
  CDR3 for beta chain variable domain of TCR clone 193164 (TRBV9, TRBJ1-6)
CASSVAGTGDSPLHF

SEQ ID NO: 386329 - protein, 23 aa, Homo sapiens
  CDR3 for alpha chain variable domain of TCR clone 193165 (TRAV26-1, TRAJ38)
CIADNAGNNHIQNPDPAVYQLRD

SEQ ID NO: 386330 - protein, 13 aa, Homo sapiens
  CDR3 for beta chain variable domain of TCR clone 193165 (TRBV7-6, TRBJ1-2)
CASSLVADYGYTL

SEQ ID NO: 386331 - protein, 11 aa, Homo sapiens
  CDR3 for alpha chain variable domain of TCR clone 193166 (TRAV1-1, TRAJ20)
FAVFNDYKLSF

SEQ ID NO: 386332 - protein, 16 aa, Homo sapiens
  CDR3 for beta chain variable domain of TCR clone 193166 (TRBV29-1, TRBJ2-2)
CSVEKTSEGNTGELFF

SEQ ID NO: 386333 - protein, 17 aa, Homo sapiens
  CDR3 for alpha chain variable domain of TCR clone 193167 (TRAV26-2, TRAJ42)
CILRDVGYGGSQGNLIC

SEQ ID NO: 386334 - protein, 14 aa, Homo sapiens
  CDR3 for beta chain variable domain of TCR clone 193167 (TRBV18, TRBJ2-5)
CASSPGVSQETQYF

SEQ ID NO: 386335 - protein, 13 aa, Homo sapiens
  CDR3 for alpha chain variable domain of TCR clone 193168 (TRAV12-3, TRAJ13)
CAMGTGGYQKVTF

SEQ ID NO: 386336 - protein, 14 aa, Homo sapiens
  CDR3 for beta chain variable domain of TCR clone 193168 (TRBV7-2, TRBJ2-5)
CASSTGGELKTQYC

SEQ ID NO: 386337 - protein, 14 aa, Homo sapiens
  CDR3 for alpha chain variable domain of TCR clone 193169 (TRAV8-3, TRAJ35)
CAVVPQGFGNMLHC

SEQ ID NO: 386338 - protein, 15 aa, Homo sapiens
  CDR3 for beta chain variable domain of TCR clone 193169 (TRBV6-1, TRBJ2-2)
CASSAGQGYTGELFF

SEQ ID NO: 386339 - protein, 13 aa, Homo sapiens
  CDR3 for alpha chain variable domain of TCR clone 193170 (TRAV8-1, TRAJ30)
CAVIMNRDDKISF

SEQ ID NO: 386340 - protein, 14 aa, Homo sapiens
  CDR3 for beta chain variable domain of TCR clone 193170 (TRBV7-2, TRBJ1-6)
CASSLQGANSPLHF

SEQ ID NO: 386341 - protein, 16 aa, Homo sapiens
  CDR3 for alpha chain variable domain of TCR clone 193171 (TRAV26-1, TRAJ38)
CIVRVSGAGNNRKLIW

SEQ ID NO: 386342 - protein, 13 aa, Homo sapiens
  CDR3 for beta chain variable domain of TCR clone 193171 (TRBV14, TRBJ1-2)
CASSQYRRRGYTF

SEQ ID NO: 386343 - protein, 14 aa, Homo sapiens
  CDR3 for alpha chain variable domain of TCR clone 193172 (TRAV26-1, TRAJ38)
CIADNAVNNRKLIW

SEQ ID NO: 386344 - protein, 13 aa, Homo sapiens
  CDR3 for beta chain variable domain of TCR clone 193172 (TRBV19, TRBJ1-2)
CASSVPGQDGYTF

SEQ ID NO: 386345 - protein, 11 aa, Homo sapiens
  CDR3 for alpha chain variable domain of TCR clone 193173 (TRAV8-4, TRAJ20)
CAVTNVLTTTS

SEQ ID NO: 386346 - protein, 16 aa, Homo sapiens
  CDR3 for beta chain variable domain of TCR clone 193173 (TRBV6-1, TRBJ1-2)
CASRGAWQGRSHGYTF

SEQ ID NO: 386347 - protein, 12 aa, Homo sapiens
  CDR3 for alpha chain variable domain of TCR clone 193174 (TRAV12-3, TRAJ42)
CAPGGSQGNLIF

SEQ ID NO: 386348 - protein, 13 aa, Homo sapiens
  CDR3 for beta chain variable domain of TCR clone 193174 (TRBV5-7, TRBJ2-6)
CASTSSGTNVLTF

SEQ ID NO: 386349 - protein, 18 aa, Homo sapiens
  CDR3 for alpha chain variable domain of TCR clone 193175 (TRAV21, TRAJ52)
CAVRPSPAGGTSYGKLTF

SEQ ID NO: 386350 - protein, 17 aa, Homo sapiens
  CDR3 for beta chain variable domain of TCR clone 193175 (TRBV13, TRBJ2-3)
CASRVSRVAGGRNTQYF

SEQ ID NO: 386351 - protein, 13 aa, Homo sapiens
  CDR3 for alpha chain variable domain of TCR clone 193176 (TRAV23/DV6, TRAJ47)
CAASMTRGNKLVF

SEQ ID NO: 386352 - protein, 17 aa, Homo sapiens
  CDR3 for beta chain variable domain of TCR clone 193176 (TRBV7-3, TRBJ2-2)
CASSLSGASGGTGELFF

SEQ ID NO: 386353 - protein, 18 aa, Homo sapiens
  CDR3 for alpha chain variable domain of TCR clone 193177 (TRAV13-1, TRAJ52)
CAAKNPNAGGTRYGKLTF

SEQ ID NO: 386354 - protein, 14 aa, Homo sapiens
  CDR3 for beta chain variable domain of TCR clone 193177 (TRBV7-2, TRBJ2-7)
CASRSQGAAYEQYF

SEQ ID NO: 386355 - protein, 14 aa, Homo sapiens
  CDR3 for alpha chain variable domain of TCR clone 193178 (TRAV1-2, TRAJ8)
CAVREDPGFQKLVF

SEQ ID NO: 386356 - protein, 17 aa, Homo sapiens
  CDR3 for beta chain variable domain of TCR clone 193178 (TRBV5-1, TRBJ2-5)
CASSPVALGQNQETQYC

SEQ ID NO: 386357 - protein, 12 aa, Homo sapiens
  CDR3 for alpha chain variable domain of TCR clone 193179 (TRAV21, TRAJ23)
CAVMLQGGKLIF

SEQ ID NO: 386358 - protein, 16 aa, Homo sapiens
  CDR3 for beta chain variable domain of TCR clone 193179 (TRBV28, TRBJ2-1)
CASSLWGRTSGTLQFF

SEQ ID NO: 386359 - protein, 13 aa, Homo sapiens
  CDR3 for alpha chain variable domain of TCR clone 193180 (TRAV13-1, TRAJ9)
CAASGTGGFKTSF

SEQ ID NO: 386360 - protein, 14 aa, Homo sapiens
  CDR3 for beta chain variable domain of TCR clone 193180 (TRBV7-3, TRBJ1-1)
CASSLKGGNTEAFF

SEQ ID NO: 386361 - protein, 13 aa, Homo sapiens
  CDR3 for alpha chain variable domain of TCR clone 193181 (TRAV17, TRAJ5)
CALRGTGRRALTF

SEQ ID NO: 386362 - protein, 16 aa, Homo sapiens
  CDR3 for beta chain variable domain of TCR clone 193181 (TRBV19, TRBJ2-1)
CASSKAGPSSYNEQFF

SEQ ID NO: 386363 - protein, 11 aa, Homo sapiens
  CDR3 for alpha chain variable domain of TCR clone 193182 (TRAV3, TRAJ21)
CAVGNFNKFYF

SEQ ID NO: 386364 - protein, 14 aa, Homo sapiens
  CDR3 for beta chain variable domain of TCR clone 193182 (TRBV11-2, TRBJ2-3)
CASSSIASTDTQYF

SEQ ID NO: 386365 - protein, 16 aa, Homo sapiens
  CDR3 for alpha chain variable domain of TCR clone 193183 (TRAV12-2, TRAJ10)
CAVNRVLSGGGNKLTF

SEQ ID NO: 386366 - protein, 12 aa, Homo sapiens
  CDR3 for beta chain variable domain of TCR clone 193183 (TRBV28, TRBJ2-7)
CASSFSSYEQYF

SEQ ID NO: 386367 - protein, 14 aa, Homo sapiens
  CDR3 for alpha chain variable domain of TCR clone 193184 (TRAV8-4, TRAJ9)
CAVRINTGGFKNIF

SEQ ID NO: 386368 - protein, 15 aa, Homo sapiens
  CDR3 for beta chain variable domain of TCR clone 193184 (TRBV10-2, TRBJ2-6)
CASSEQGTGANLLTF

SEQ ID NO: 386369 - protein, 15 aa, Homo sapiens
  CDR3 for alpha chain variable domain of TCR clone 193185 (TRAV30, TRAJ32)
CGTEILGGATNKLIS

SEQ ID NO: 386370 - protein, 17 aa, Homo sapiens
  CDR3 for beta chain variable domain of TCR clone 193185 (TRBV5-4, TRBJ2-1)
RASSSAGGRGPYNEQLF

SEQ ID NO: 386371 - protein, 15 aa, Homo sapiens
  CDR3 for alpha chain variable domain of TCR clone 193186 (TRAV12-3, TRAJ6)
CAMSATTGGSYTPTF

SEQ ID NO: 386372 - protein, 16 aa, Homo sapiens
  CDR3 for beta chain variable domain of TCR clone 193186 (TRBV20-1, TRBJ1-2)
CSASMGQGVANYGYAF

SEQ ID NO: 386373 - protein, 14 aa, Homo sapiens
  CDR3 for alpha chain variable domain of TCR clone 193187 (TRAV26-1, TRAJ34)
CIVRVADNTDKLIF

SEQ ID NO: 386374 - protein, 15 aa, Homo sapiens
  CDR3 for beta chain variable domain of TCR clone 193187 (TRBV20-1, TRBJ2-7)
CSARVPAAYFYEQYL

SEQ ID NO: 386375 - protein, 14 aa, Homo sapiens
  CDR3 for alpha chain variable domain of TCR clone 193188 (TRAV1-2, TRAJ16)
CAVRSASDGQKLLF

SEQ ID NO: 386376 - protein, 17 aa, Homo sapiens
  CDR3 for beta chain variable domain of TCR clone 193188 (TRBV7-3, TRBJ2-3)
CARSLMKRMRGADTQYF

SEQ ID NO: 386377 - protein, 14 aa, Homo sapiens
  CDR3 for alpha chain variable domain of TCR clone 193189 (TRAV16, TRAJ26)
CITLLSAYGQNSVF

SEQ ID NO: 386378 - protein, 14 aa, Homo sapiens
  CDR3 for beta chain variable domain of TCR clone 193189 (TRBV7-2, TRBJ2-7)
CASRSQGAAYEQYF

SEQ ID NO: 386379 - protein, 12 aa, Homo sapiens
  CDR3 for alpha chain variable domain of TCR clone 193190 (TRAV16, TRAJ10)
CSRTGGGNKLTF

SEQ ID NO: 386380 - protein, 12 aa, Homo sapiens
  CDR3 for beta chain variable domain of TCR clone 193190 (TRBV28, TRBJ2-3)
CASSLYRDTQYF

SEQ ID NO: 386381 - protein, 16 aa, Homo sapiens
  CDR3 for alpha chain variable domain of TCR clone 193191 (TRAV3, TRAJ10)
CAVRDMNAGGGNTLTF

SEQ ID NO: 386382 - protein, 16 aa, Homo sapiens
  CDR3 for beta chain variable domain of TCR clone 193191 (TRBV6-3, TRBJ1-2)
CASSYSRRASNYGYTF

SEQ ID NO: 386383 - protein, 14 aa, Homo sapiens
  CDR3 for alpha chain variable domain of TCR clone 193192 (TRAV1-2, TRAJ16)
CVVNRFSDGQKLLF

SEQ ID NO: 386384 - protein, 14 aa, Homo sapiens
  CDR3 for beta chain variable domain of TCR clone 193192 (TRBV10-2, TRBJ1-5)
CASSSTGRNQPQHF

SEQ ID NO: 386385 - protein, 16 aa, Homo sapiens
  CDR3 for alpha chain variable domain of TCR clone 193193 (TRAV3, TRAJ37)
CAVRGEGSGNTGKLIF

SEQ ID NO: 386386 - protein, 12 aa, Homo sapiens
  CDR3 for beta chain variable domain of TCR clone 193193 (TRBV11-2, TRBJ2-2)
CASSLGGGELFF

SEQ ID NO: 386387 - protein, 14 aa, Homo sapiens
  CDR3 for alpha chain variable domain of TCR clone 193194 (TRAV17, TRAJ57)
CATDPQGGSEKLVF

SEQ ID NO: 386388 - protein, 16 aa, Homo sapiens
  CDR3 for beta chain variable domain of TCR clone 193194 (TRBV20-1, TRBJ1-4)
CSAQGQGLLTNEKLFF

SEQ ID NO: 386389 - protein, 17 aa, Homo sapiens
  CDR3 for alpha chain variable domain of TCR clone 193195 (TRAV3, TRAJ38)
CAVRGCLNAGNNRKLTW

SEQ ID NO: 386390 - protein, 16 aa, Homo sapiens
  CDR3 for beta chain variable domain of TCR clone 193195 (TRBV20-1, TRBJ1-4)
CSAPGQGLLTNEKLFF

SEQ ID NO: 386391 - protein, 11 aa, Homo sapiens
  CDR3 for alpha chain variable domain of TCR clone 193196 (TRAV21, TRAJ34)
CAHYNTDKLIF

SEQ ID NO: 386392 - protein, 13 aa, Homo sapiens
  CDR3 for beta chain variable domain of TCR clone 193196 (TRBV12-5, TRBJ2-3)
CASQNRGTDTQYF

SEQ ID NO: 386393 - protein, 16 aa, Homo sapiens
  CDR3 for alpha chain variable domain of TCR clone 193197 (TRAV30, TRAJ42)
CGTSKNYGGSQGNLIF

SEQ ID NO: 386394 - protein, 14 aa, Homo sapiens
  CDR3 for beta chain variable domain of TCR clone 193197 (TRBV19, TRBJ1-5)
CASNSYGTHQPQYF

SEQ ID NO: 386395 - protein, 13 aa, Homo sapiens
  CDR3 for alpha chain variable domain of TCR clone 193198 (TRAV12-1, TRAJ47)
CVVNMEYGNKLVF

SEQ ID NO: 386396 - protein, 14 aa, Homo sapiens
  CDR3 for beta chain variable domain of TCR clone 193198 (TRBV5-5, TRBJ1-5)
CASSGQGVDQPQHF

SEQ ID NO: 386397 - protein, 15 aa, Homo sapiens
  CDR3 for alpha chain variable domain of TCR clone 193199 (TRAV17, TRAJ56)
CATDANTVATSKLTF

SEQ ID NO: 386398 - protein, 12 aa, Homo sapiens
  CDR3 for beta chain variable domain of TCR clone 193199 (TRBV7-8, TRBJ2-7)
CASSLGDREQYF

SEQ ID NO: 386399 - protein, 10 aa, Homo sapiens
  CDR3 for alpha chain variable domain of TCR clone 193200 (TRAV13-1, TRAJ4)
PSPVANKLIF

SEQ ID NO: 386400 - protein, 14 aa, Homo sapiens
  CDR3 for beta chain variable domain of TCR clone 193200 (TRBV19, TRBJ2-1)
CASPTFVLSGEQFF

SEQ ID NO: 386401 - protein, 16 aa, Homo sapiens
  CDR3 for alpha chain variable domain of TCR clone 193201 (TRAV14/DV4, TRAJ54)
CAMREGRIQGAQKLVF

SEQ ID NO: 386402 - protein, 13 aa, Homo sapiens
  CDR3 for beta chain variable domain of TCR clone 193201 (TRBV15, TRBJ2-7)
CATSTTGHYEQYF

SEQ ID NO: 386403 - protein, 15 aa, Homo sapiens
  CDR3 for alpha chain variable domain of TCR clone 193202 (TRAV20, TRAJ50)
CAVRQMKTSYDKVIF

SEQ ID NO: 386404 - protein, 17 aa, Homo sapiens
  CDR3 for beta chain variable domain of TCR clone 193202 (TRBV28, TRBJ2-7)
CASSPLHRASGVYEQYV

SEQ ID NO: 386405 - protein, 12 aa, Homo sapiens
  CDR3 for alpha chain variable domain of TCR clone 193203 (TRAV22, TRAJ36)
CAVGTGANNLFF

SEQ ID NO: 386406 - protein, 13 aa, Homo sapiens
  CDR3 for beta chain variable domain of TCR clone 193203 (TRBV4-2, TRBJ1-1)
CASSQAGNTEAFF

SEQ ID NO: 386407 - protein, 18 aa, Homo sapiens
  CDR3 for alpha chain variable domain of TCR clone 193204 (TRAV13-1, )
CAASGPRRSQIPDIQNPD

SEQ ID NO: 386408 - protein, 16 aa, Homo sapiens
  CDR3 for beta chain variable domain of TCR clone 193204 (TRBV18, TRBJ2-3)
CASSPPAGGPRKYAVF

SEQ ID NO: 386409 - protein, 13 aa, Homo sapiens
  CDR3 for alpha chain variable domain of TCR clone 193205 (TRAV12-1, TRAJ40)
LVVNSSGTYKYIF

SEQ ID NO: 386410 - protein, 14 aa, Homo sapiens
  CDR3 for beta chain variable domain of TCR clone 193205 (TRBV2, TRBJ1-6)
CASEVSSYNSPLHF

SEQ ID NO: 386411 - protein, 15 aa, Homo sapiens
  CDR3 for alpha chain variable domain of TCR clone 193206 (TRAV12-3, TRAJ6)
CAMSATSGGSYIPTF

SEQ ID NO: 386412 - protein, 10 aa, Homo sapiens
  CDR3 for beta chain variable domain of TCR clone 193206 (TRBV28, TRBJ1-2)
CASSSDRAIF

SEQ ID NO: 386413 - protein, 11 aa, Homo sapiens
  CDR3 for alpha chain variable domain of TCR clone 193207 (TRAV2, TRAJ33)
CAVESNYQLIW

SEQ ID NO: 386414 - protein, 15 aa, Homo sapiens
  CDR3 for beta chain variable domain of TCR clone 193207 (TRBV4-1, TRBJ1-6)
CASSAGQGYNSPLHF

SEQ ID NO: 386415 - protein, 13 aa, Homo sapiens
  CDR3 for alpha chain variable domain of TCR clone 193208 (TRAV23/DV6, TRAJ58)
CAARGTSGSRLTF

SEQ ID NO: 386416 - protein, 13 aa, Homo sapiens
  CDR3 for beta chain variable domain of TCR clone 193208 (TRBV19, TRBJ2-2)
CASSIWSTGELFF

SEQ ID NO: 386417 - protein, 14 aa, Homo sapiens
  CDR3 for alpha chain variable domain of TCR clone 193209 (TRAV13-2, TRAJ17)
CAENSKAAGNKLTF

SEQ ID NO: 386418 - protein, 17 aa, Homo sapiens
  CDR3 for beta chain variable domain of TCR clone 193209 (TRBV7-3, TRBJ2-5)
CASSLGSGRSGSETQYF

SEQ ID NO: 386419 - protein, 14 aa, Homo sapiens
  CDR3 for alpha chain variable domain of TCR clone 193210 (TRAV17, TRAJ31)
CATVLRNNNARLMF

SEQ ID NO: 386420 - protein, 14 aa, Homo sapiens
  CDR3 for beta chain variable domain of TCR clone 193210 (TRBV12-4, TRBJ2-5)
CASSLWQKQEPQYF

SEQ ID NO: 386421 - protein, 23 aa, Homo sapiens
  CDR3 for alpha chain variable domain of TCR clone 193211 (TRAV2, TRAJ32)
CAFTMVVLQTSSSLELAICLLSS

SEQ ID NO: 386422 - protein, 16 aa, Homo sapiens
  CDR3 for beta chain variable domain of TCR clone 193211 (TRBV7-9, TRBJ2-7)
CASSYPDREGGYEQYF

SEQ ID NO: 386423 - protein, 12 aa, Homo sapiens
  CDR3 for alpha chain variable domain of TCR clone 193212 (TRAV27, TRAJ35)
CAGADFGNVLHC

SEQ ID NO: 386424 - protein, 13 aa, Homo sapiens
  CDR3 for beta chain variable domain of TCR clone 193212 (TRBV19, TRBJ1-2)
CASSVPVQDGYTF

SEQ ID NO: 386425 - protein, 13 aa, Homo sapiens
  CDR3 for alpha chain variable domain of TCR clone 193213 (TRAV35, TRAJ57)
CAGSQGGSEKLDF

SEQ ID NO: 386426 - protein, 14 aa, Homo sapiens
  CDR3 for beta chain variable domain of TCR clone 193213 (TRBV25-1, TRBJ1-1)
CASTHLGGNTEAFF

SEQ ID NO: 386427 - protein, 16 aa, Homo sapiens
  CDR3 for alpha chain variable domain of TCR clone 193214 (TRAV16, TRAJ52)
CALSGVGGTSYGKLTF

SEQ ID NO: 386428 - protein, 14 aa, Homo sapiens
  CDR3 for beta chain variable domain of TCR clone 193214 (TRBV4-1, TRBJ1-6)
CASSPGSDSSPLHF

SEQ ID NO: 386429 - protein, 14 aa, Homo sapiens
  CDR3 for alpha chain variable domain of TCR clone 193215 (TRAV27, TRAJ36)
CAGPPKRGANNLLF

SEQ ID NO: 386430 - protein, 15 aa, Homo sapiens
  CDR3 for beta chain variable domain of TCR clone 193215 (TRBV18, TRBJ2-7)
CASPPASTPNYEQYF

SEQ ID NO: 386431 - protein, 15 aa, Homo sapiens
  CDR3 for alpha chain variable domain of TCR clone 193216 (TRAV38-1, TRAJ57)
CAFMDLQGGSEKLVF

SEQ ID NO: 386432 - protein, 16 aa, Homo sapiens
  CDR3 for beta chain variable domain of TCR clone 193216 (TRBV10-3, TRBJ2-1)
CAIRGGGRGDYNEQFF

SEQ ID NO: 386433 - protein, 15 aa, Homo sapiens
  CDR3 for alpha chain variable domain of TCR clone 193217 (TRAV30, TRAJ57)
CGTAIPQGGSEKLVF

SEQ ID NO: 386434 - protein, 13 aa, Homo sapiens
  CDR3 for beta chain variable domain of TCR clone 193217 (TRBV7-9, TRBJ1-2)
CASSPSNFWGDTF

SEQ ID NO: 386435 - protein, 10 aa, Homo sapiens
  CDR3 for alpha chain variable domain of TCR clone 193218 (TRAV39, TRAJ49)
CAVAGTSSIL

SEQ ID NO: 386436 - protein, 14 aa, Homo sapiens
  CDR3 for beta chain variable domain of TCR clone 193218 (TRBV7-8, TRBJ2-7)
CASSPRDRVYEQYF

SEQ ID NO: 386437 - protein, 15 aa, Homo sapiens
  CDR3 for alpha chain variable domain of TCR clone 193219 (TRAV21, TRAJ52)
CAVRGGGTSYGKLTF

SEQ ID NO: 386438 - protein, 15 aa, Homo sapiens
  CDR3 for beta chain variable domain of TCR clone 193219 (TRBV15, TRBJ2-3)
CATSRDARGTDTQYF

SEQ ID NO: 386439 - protein, 16 aa, Homo sapiens
  CDR3 for alpha chain variable domain of TCR clone 193220 (TRAV3, TRAJ10)
CAVIDMRAGGGNKLTF

SEQ ID NO: 386440 - protein, 14 aa, Homo sapiens
  CDR3 for beta chain variable domain of TCR clone 193220 (TRBV12-4, TRBJ1-4)
CASRMTGRSEKLFF

SEQ ID NO: 386441 - protein, 15 aa, Homo sapiens
  CDR3 for alpha chain variable domain of TCR clone 193221 (TRAV12-3, TRAJ6)
CAMSATTGGSYIPTF

SEQ ID NO: 386442 - protein, 13 aa, Homo sapiens
  CDR3 for beta chain variable domain of TCR clone 193221 (TRBV2, TRBJ2-2)
CASRAWRTGELFF

SEQ ID NO: 386443 - protein, 16 aa, Homo sapiens
  CDR3 for alpha chain variable domain of TCR clone 193222 (TRAV3, TRAJ37)
CAVRQHGSGNTGKLIF

SEQ ID NO: 386444 - protein, 14 aa, Homo sapiens
  CDR3 for beta chain variable domain of TCR clone 193222 (TRBV20-1, TRBJ2-1)
CSARGGSSYNEQFF

SEQ ID NO: 386445 - protein, 22 aa, Homo sapiens
  CDR3 for alpha chain variable domain of TCR clone 193223 (TRAV12-2, TRAJ43)
CSSETPSPVIQPPTSVPEMTCA

SEQ ID NO: 386446 - protein, 16 aa, Homo sapiens
  CDR3 for beta chain variable domain of TCR clone 193223 (TRBV2, TRBJ2-4)
CASSEAPGGEQNIQYF

SEQ ID NO: 386447 - protein, 14 aa, Homo sapiens
  CDR3 for alpha chain variable domain of TCR clone 193224 (TRAV12-3, TRAJ10)
SHLPLTGGGNKLTF

SEQ ID NO: 386448 - protein, 15 aa, Homo sapiens
  CDR3 for beta chain variable domain of TCR clone 193224 (TRBV12-4, TRBJ1-1)
CASSLGGLSDTESFF

SEQ ID NO: 386449 - protein, 13 aa, Homo sapiens
  CDR3 for alpha chain variable domain of TCR clone 193225 (TRAV12-1, TRAJ21)
CVVIGDNFNKFYF

SEQ ID NO: 386450 - protein, 15 aa, Homo sapiens
  CDR3 for beta chain variable domain of TCR clone 193225 (TRBV28, TRBJ2-4)
CAAGSGTLLMGIQYF

SEQ ID NO: 386451 - protein, 12 aa, Homo sapiens
  CDR3 for alpha chain variable domain of TCR clone 193226 (TRAV2, TRAJ24)
CAATDSWGKFQF

SEQ ID NO: 386452 - protein, 16 aa, Homo sapiens
  CDR3 for beta chain variable domain of TCR clone 193226 (TRBV19, TRBJ2-2)
CASSFPGQGLAGELFF

SEQ ID NO: 386453 - protein, 14 aa, Homo sapiens
  CDR3 for alpha chain variable domain of TCR clone 193227 (TRAV12-3, TRAJ42)
CAMNYGGSQGNLIF

SEQ ID NO: 386454 - protein, 14 aa, Homo sapiens
  CDR3 for beta chain variable domain of TCR clone 193227 (TRBV19, TRBJ2-7)
CASSMGQGAIEQYF

SEQ ID NO: 386455 - protein, 14 aa, Homo sapiens
  CDR3 for alpha chain variable domain of TCR clone 193228 (TRAV30, TRAJ33)
CGTVAPRSNYQLIW

SEQ ID NO: 386456 - protein, 16 aa, Homo sapiens
  CDR3 for beta chain variable domain of TCR clone 193228 (TRBV13, TRBJ2-2)
CASSTRTGEHTGELFF

SEQ ID NO: 386457 - protein, 13 aa, Homo sapiens
  CDR3 for alpha chain variable domain of TCR clone 193229 (TRAV35, TRAJ42)
CAGFPGSQGNLIF

SEQ ID NO: 386458 - protein, 13 aa, Homo sapiens
  CDR3 for beta chain variable domain of TCR clone 193229 (TRBV29-1, TRBJ2-1)
CSVEGGRVMSSSS

SEQ ID NO: 386459 - protein, 13 aa, Homo sapiens
  CDR3 for alpha chain variable domain of TCR clone 193230 (TRAV2, TRAJ40)
CAVVTPGTYKYIF

SEQ ID NO: 386460 - protein, 16 aa, Homo sapiens
  CDR3 for beta chain variable domain of TCR clone 193230 (TRBV7-2, TRBJ1-2)
CAGSSNQDRRGHGYTF

SEQ ID NO: 386461 - protein, 18 aa, Homo sapiens
  CDR3 for alpha chain variable domain of TCR clone 193231 (TRAV21, TRAJ52)
CAVRPSPAGGTSYGKLTF

SEQ ID NO: 386462 - protein, 13 aa, Homo sapiens
  CDR3 for beta chain variable domain of TCR clone 193231 (TRBV2, TRBJ1-5)
CAPAGPGNQPQHF

SEQ ID NO: 386463 - protein, 13 aa, Homo sapiens
  CDR3 for alpha chain variable domain of TCR clone 193232 (TRAV2, TRAJ40)
CAVVTSGTYKYIF

SEQ ID NO: 386464 - protein, 17 aa, Homo sapiens
  CDR3 for beta chain variable domain of TCR clone 193232 (TRBV7-3, TRBJ2-3)
CASSLIKRMRGADTQYF

SEQ ID NO: 386465 - protein, 16 aa, Homo sapiens
  CDR3 for alpha chain variable domain of TCR clone 193233 (TRAV21, TRAJ17)
CAVRPGEEAAGNKITF

SEQ ID NO: 386466 - protein, 16 aa, Homo sapiens
  CDR3 for beta chain variable domain of TCR clone 193233 (TRBV2, TRBJ2-7)
CASSEPWTGPSYEQYF

SEQ ID NO: 386467 - protein, 16 aa, Homo sapiens
  CDR3 for alpha chain variable domain of TCR clone 193234 (TRAV30, TRAJ24)
CGTEIVDADSWGKFQF

SEQ ID NO: 386468 - protein, 13 aa, Homo sapiens
  CDR3 for beta chain variable domain of TCR clone 193234 (TRBV5-4, TRBJ2-5)
CASSPVPQETQYF

SEQ ID NO: 386469 - protein, 17 aa, Homo sapiens
  CDR3 for alpha chain variable domain of TCR clone 193235 (TRAV3, TRAJ38)
CAVRDCLNAGNNRKLIW

SEQ ID NO: 386470 - protein, 15 aa, Homo sapiens
  CDR3 for beta chain variable domain of TCR clone 193235 (TRBV12-4, TRBJ1-5)
CASTQGTGPLQPQHF

SEQ ID NO: 386471 - protein, 13 aa, Homo sapiens
  CDR3 for alpha chain variable domain of TCR clone 193236 (TRAV8-3, TRAJ28)
CAVGAVGSYKLTF

SEQ ID NO: 386472 - protein, 15 aa, Homo sapiens
  CDR3 for beta chain variable domain of TCR clone 193236 (TRBV20-1, TRBJ2-1)
CSAGIGTGTYNEQFF

SEQ ID NO: 386473 - protein, 12 aa, Homo sapiens
  CDR3 for alpha chain variable domain of TCR clone 193237 (TRAV13-2, TRAJ58)
GAERRLDSRLTF

SEQ ID NO: 386474 - protein, 15 aa, Homo sapiens
  CDR3 for beta chain variable domain of TCR clone 193237 (TRBV5-1, TRBJ2-5)
CASSSGREMVETQYF

SEQ ID NO: 386475 - protein, 11 aa, Homo sapiens
  CDR3 for alpha chain variable domain of TCR clone 193238 (TRAV12-1, TRAJ26)
CVVAYGQNFVF

SEQ ID NO: 386476 - protein, 13 aa, Homo sapiens
  CDR3 for beta chain variable domain of TCR clone 193238 (TRBV19, TRBJ1-2)
CASSVPGQDGYTF

SEQ ID NO: 386477 - protein, 14 aa, Homo sapiens
  CDR3 for alpha chain variable domain of TCR clone 193239 (TRAV12-3, TRAJ54)
CAMSALQGAQKLVF

SEQ ID NO: 386478 - protein, 12 aa, Homo sapiens
  CDR3 for beta chain variable domain of TCR clone 193239 (TRBV19, TRBJ2-7)
CASSLGGYEQYF

SEQ ID NO: 386479 - protein, 12 aa, Homo sapiens
  CDR3 for alpha chain variable domain of TCR clone 193240 (TRAV1-1, TRAJ8)
CAGGTGFQKLVF

SEQ ID NO: 386480 - protein, 13 aa, Homo sapiens
  CDR3 for beta chain variable domain of TCR clone 193240 (TRBV12-4, TRBJ2-5)
CASRLAVQETQYF

SEQ ID NO: 386481 - protein, 13 aa, Homo sapiens
  CDR3 for alpha chain variable domain of TCR clone 193241 (TRAV20, TRAJ21)
CAVEGYNFNKFYF

SEQ ID NO: 386482 - protein, 13 aa, Homo sapiens
  CDR3 for beta chain variable domain of TCR clone 193241 (TRBV4-1, TRBJ2-2)
CASSQENTGELFF

SEQ ID NO: 386483 - protein, 14 aa, Homo sapiens
  CDR3 for alpha chain variable domain of TCR clone 193242 (TRAV20, TRAJ10)
CAVRVEGGGNKLTF

SEQ ID NO: 386484 - protein, 18 aa, Homo sapiens
  CDR3 for beta chain variable domain of TCR clone 193242 (TRBV24-1, TRBJ2-1)
CAASDLMFLGRGVHEQFF

SEQ ID NO: 386485 - protein, 12 aa, Homo sapiens
  CDR3 for alpha chain variable domain of TCR clone 193243 (TRAV8-3, TRAJ20)
CAVGGGDYKLSF

SEQ ID NO: 386486 - protein, 14 aa, Homo sapiens
  CDR3 for beta chain variable domain of TCR clone 193243 (TRBV5-1, TRBJ2-7)
CGSSRGESLYEQYF

SEQ ID NO: 386487 - protein, 16 aa, Homo sapiens
  CDR3 for alpha chain variable domain of TCR clone 193244 (TRAV12-1, TRAJ28)
CVVIAYSGAGSCQLTF

SEQ ID NO: 386488 - protein, 13 aa, Homo sapiens
  CDR3 for beta chain variable domain of TCR clone 193244 (TRBV15, TRBJ1-6)
CATSGGPNSPLHF

SEQ ID NO: 386489 - protein, 13 aa, Homo sapiens
  CDR3 for alpha chain variable domain of TCR clone 193245 (TRAV12-2, TRAJ20)
CAVYPSNDYMLSF

SEQ ID NO: 386490 - protein, 15 aa, Homo sapiens
  CDR3 for beta chain variable domain of TCR clone 193245 (TRBV27, TRBJ2-5)
CASSLYPRGGETQYF

SEQ ID NO: 386491 - protein, 15 aa, Homo sapiens
  CDR3 for alpha chain variable domain of TCR clone 193246 (TRAV26-1, TRAJ37)
CIVRLGSGNTGKLIF

SEQ ID NO: 386492 - protein, 19 aa, Homo sapiens
  CDR3 for beta chain variable domain of TCR clone 193246 (TRBV2, TRBJ2-2)
CASSQPGLAGGGNTGELFF

SEQ ID NO: 386493 - protein, 11 aa, Homo sapiens
  CDR3 for alpha chain variable domain of TCR clone 193247 (TRAV13-1, TRAJ6)
CATLGSDIPTF

SEQ ID NO: 386494 - protein, 12 aa, Homo sapiens
  CDR3 for beta chain variable domain of TCR clone 193247 (TRBV11-2, TRBJ2-1)
CASSPGNNAQFF

SEQ ID NO: 386495 - protein, 13 aa, Homo sapiens
  CDR3 for alpha chain variable domain of TCR clone 193248 (TRAV17, TRAJ9)
CATDYTGGFKTIF

SEQ ID NO: 386496 - protein, 14 aa, Homo sapiens
  CDR3 for beta chain variable domain of TCR clone 193248 (TRBV19, TRBJ2-5)
CASSRTGQQETQYF

SEQ ID NO: 386497 - protein, 15 aa, Homo sapiens
  CDR3 for alpha chain variable domain of TCR clone 193249 (TRAV14/DV4, TRAJ49)
CAMREGMNTGNQFYF

SEQ ID NO: 386498 - protein, 12 aa, Homo sapiens
  CDR3 for beta chain variable domain of TCR clone 193249 (TRBV11-2, TRBJ2-2)
CASSLPTGELFF

SEQ ID NO: 386499 - protein, 13 aa, Homo sapiens
  CDR3 for alpha chain variable domain of TCR clone 193250 (TRAV30, TRAJ22)
CGTLSGSARRLTF

SEQ ID NO: 386500 - protein, 14 aa, Homo sapiens
  CDR3 for beta chain variable domain of TCR clone 193250 (TRBV6-1, TRBJ2-1)
CASSEATRVNEQFF

SEQ ID NO: 386501 - protein, 12 aa, Homo sapiens
  CDR3 for alpha chain variable domain of TCR clone 193251 (TRAV12-3, TRAJ17)
CAMTLTGNKLTF

SEQ ID NO: 386502 - protein, 17 aa, Homo sapiens
  CDR3 for beta chain variable domain of TCR clone 193251 (TRBV25-1, TRBJ2-1)
CASSAYGQGRGVYEQFL

SEQ ID NO: 386503 - protein, 16 aa, Homo sapiens
  CDR3 for alpha chain variable domain of TCR clone 193252 (TRAV12-3, TRAJ10)
CAMKKGITGGGNKLTF

SEQ ID NO: 386504 - protein, 12 aa, Homo sapiens
  CDR3 for beta chain variable domain of TCR clone 193252 (TRBV20-1, TRBJ2-7)
CSAITPTKEQYL

SEQ ID NO: 386505 - protein, 12 aa, Homo sapiens
  CDR3 for alpha chain variable domain of TCR clone 193253 (TRAV13-1, TRAJ9)
CASHTGGFKTIF

SEQ ID NO: 386506 - protein, 13 aa, Homo sapiens
  CDR3 for beta chain variable domain of TCR clone 193253 (TRBV12-4, TRBJ1-2)
CASSSRSKDGYTF

SEQ ID NO: 386507 - protein, 13 aa, Homo sapiens
  CDR3 for alpha chain variable domain of TCR clone 193254 (TRAV8-6, TRAJ41)
CAVSENSGYALNS

SEQ ID NO: 386508 - protein, 17 aa, Homo sapiens
  CDR3 for beta chain variable domain of TCR clone 193254 (TRBV7-2, TRBJ2-3)
CASSLEARGTSTDTQYF

SEQ ID NO: 386509 - protein, 10 aa, Homo sapiens
  CDR3 for alpha chain variable domain of TCR clone 193255 (TRAV16, TRAJ15)
CSLAGTALIF

SEQ ID NO: 386510 - protein, 14 aa, Homo sapiens
  CDR3 for beta chain variable domain of TCR clone 193255 (TRBV7-2, TRBJ2-7)
CASSPKTSFYEQYF

SEQ ID NO: 386511 - protein, 14 aa, Homo sapiens
  CDR3 for alpha chain variable domain of TCR clone 193256 (TRAV8-3, TRAJ3)
CAVVPRSSASKIIF

SEQ ID NO: 386512 - protein, 13 aa, Homo sapiens
  CDR3 for beta chain variable domain of TCR clone 193256 (TRBV7-9, TRBJ1-2)
CASSLKQNYGYTF

SEQ ID NO: 386513 - protein, 16 aa, Homo sapiens
  CDR3 for alpha chain variable domain of TCR clone 193257 (TRAV26-2, TRAJ45)
CTTASPIGGGADGLTF

SEQ ID NO: 386514 - protein, 15 aa, Homo sapiens
  CDR3 for beta chain variable domain of TCR clone 193257 (TRBV28, TRBJ1-3)
CASSMGWASGNTIYF

SEQ ID NO: 386515 - protein, 11 aa, Homo sapiens
  CDR3 for alpha chain variable domain of TCR clone 193258 (TRAV3, TRAJ21)
CAVGIFNKFYF

SEQ ID NO: 386516 - protein, 12 aa, Homo sapiens
  CDR3 for beta chain variable domain of TCR clone 193258 (TRBV19, TRBJ2-1)
CASSMQDTEQFF

SEQ ID NO: 386517 - protein, 13 aa, Homo sapiens
  CDR3 for alpha chain variable domain of TCR clone 193259 (TRAV8-3, TRAJ28)
CAVGAVGRYQLTF

SEQ ID NO: 386518 - protein, 15 aa, Homo sapiens
  CDR3 for beta chain variable domain of TCR clone 193259 (TRBV7-9, TRBJ1-5)
CASSQGHQPNQPKHF

SEQ ID NO: 386519 - protein, 12 aa, Homo sapiens
  CDR3 for alpha chain variable domain of TCR clone 193260 (TRAV1-2, TRAJ26)
CAVRYYGQNFVF

SEQ ID NO: 386520 - protein, 12 aa, Homo sapiens
  CDR3 for beta chain variable domain of TCR clone 193260 (TRBV2, TRBJ2-1)
CAYGPPGNEQFF

SEQ ID NO: 386521 - protein, 17 aa, Homo sapiens
  CDR3 for alpha chain variable domain of TCR clone 193261 (TRAV3, TRAJ38)
CAVRDCLKAGDNRKLIW

SEQ ID NO: 386522 - protein, 13 aa, Homo sapiens
  CDR3 for beta chain variable domain of TCR clone 193261 (TRBV23-1, TRBJ1-4)
CASRGKFNEKLFF

SEQ ID NO: 386523 - protein, 13 aa, Homo sapiens
  CDR3 for alpha chain variable domain of TCR clone 193262 (TRAV8-6, TRAJ8)
CAFMNTGFQKLVF

SEQ ID NO: 386524 - protein, 15 aa, Homo sapiens
  CDR3 for beta chain variable domain of TCR clone 193262 (TRBV28, TRBJ2-5)
CACSSGRVIQETQYF

SEQ ID NO: 386525 - protein, 13 aa, Homo sapiens
  CDR3 for alpha chain variable domain of TCR clone 193263 (TRAV13-1, TRAJ35)
CAASLGFGNVLHC

SEQ ID NO: 386526 - protein, 15 aa, Homo sapiens
  CDR3 for beta chain variable domain of TCR clone 193263 (TRBV20-1, TRBJ2-7)
RSARDRVSGMDEQYF

SEQ ID NO: 386527 - protein, 15 aa, Homo sapiens
  CDR3 for alpha chain variable domain of TCR clone 193264 (TRAV8-3, TRAJ45)
CASSYSGGGADGLTF

SEQ ID NO: 386528 - protein, 12 aa, Homo sapiens
  CDR3 for beta chain variable domain of TCR clone 193264 (TRBV29-1, TRBJ2-3)
CSVTGGADTHYF

SEQ ID NO: 386529 - protein, 14 aa, Homo sapiens
  CDR3 for alpha chain variable domain of TCR clone 193265 (TRAV12-2, TRAJ44)
CAVNPAGTASKLTF

SEQ ID NO: 386530 - protein, 13 aa, Homo sapiens
  CDR3 for beta chain variable domain of TCR clone 193265 (TRBV4-1, TRBJ2-2)
CASSQENTGELFF

SEQ ID NO: 386531 - protein, 14 aa, Homo sapiens
  CDR3 for alpha chain variable domain of TCR clone 193266 (TRAV2, TRAJ37)
CAVDFTSNTGKLIF

SEQ ID NO: 386532 - protein, 13 aa, Homo sapiens
  CDR3 for beta chain variable domain of TCR clone 193266 (TRBV5-5, TRBJ1-2)
CASSFWRGEDYTF

SEQ ID NO: 386533 - protein, 14 aa, Homo sapiens
  CDR3 for alpha chain variable domain of TCR clone 193267 (TRAV21, TRAJ21)
CAVKGFGNFNKFYF

SEQ ID NO: 386534 - protein, 18 aa, Homo sapiens
  CDR3 for beta chain variable domain of TCR clone 193267 (TRBV4-1, TRBJ1-5)
CASSQDPRGQGLNQPQHF

SEQ ID NO: 386535 - protein, 14 aa, Homo sapiens
  CDR3 for alpha chain variable domain of TCR clone 193268 (TRAV12-3, TRAJ29)
CAMSPYSGDTPLVF

SEQ ID NO: 386536 - protein, 15 aa, Homo sapiens
  CDR3 for beta chain variable domain of TCR clone 193268 (TRBV11-3, TRBJ2-3)
CASLKDGREGDTQYF

SEQ ID NO: 386537 - protein, 14 aa, Homo sapiens
  CDR3 for alpha chain variable domain of TCR clone 193269 (TRAV20, TRAJ53)
CAVQAGSSNYKLTF

SEQ ID NO: 386538 - protein, 14 aa, Homo sapiens
  CDR3 for beta chain variable domain of TCR clone 193269 (TRBV19, TRBJ2-1)
CASPTFVLSGEQFF

SEQ ID NO: 386539 - protein, 14 aa, Homo sapiens
  CDR3 for alpha chain variable domain of TCR clone 193270 (TRAV13-1, TRAJ35)
CAAGKGGFGNVLHC

SEQ ID NO: 386540 - protein, 13 aa, Homo sapiens
  CDR3 for beta chain variable domain of TCR clone 193270 (TRBV7-3, TRBJ1-1)
CASSQDWGAEAFF

SEQ ID NO: 386541 - protein, 12 aa, Homo sapiens
  CDR3 for alpha chain variable domain of TCR clone 193271 (TRAV8-3, TRAJ20)
CALGANDYKLSF

SEQ ID NO: 386542 - protein, 15 aa, Homo sapiens
  CDR3 for beta chain variable domain of TCR clone 193271 (TRBV11-2, TRBJ2-1)
CASSLGTSGLNEQFF

SEQ ID NO: 386543 - protein, 14 aa, Homo sapiens
  CDR3 for alpha chain variable domain of TCR clone 193272 (TRAV12-2, TRAJ13)
CAVKKTGGYQKVTF

SEQ ID NO: 386544 - protein, 17 aa, Homo sapiens
  CDR3 for beta chain variable domain of TCR clone 193272 (TRBV19, TRBJ1-1)
CASSIAGRGLMDTEAFF

SEQ ID NO: 386545 - protein, 14 aa, Homo sapiens
  CDR3 for alpha chain variable domain of TCR clone 193273 (TRAV29/DV5, TRAJ44)
CAAFLVGTASKLTF

SEQ ID NO: 386546 - protein, 15 aa, Homo sapiens
  CDR3 for beta chain variable domain of TCR clone 193273 (TRBV7-3, TRBJ2-2)
CASSGTGQGTGELFF

SEQ ID NO: 386547 - protein, 16 aa, Homo sapiens
  CDR3 for alpha chain variable domain of TCR clone 193274 (TRAV8-3, TRAJ10)
CAVGPILTGGGNKLTF

SEQ ID NO: 386548 - protein, 12 aa, Homo sapiens
  CDR3 for beta chain variable domain of TCR clone 193274 (TRBV5-7, TRBJ2-1)
CASSLDWGEQFF

SEQ ID NO: 386549 - protein, 11 aa, Homo sapiens
  CDR3 for alpha chain variable domain of TCR clone 193275 (TRAV8-3, TRAJ49)
CAVNTGNQFYF

SEQ ID NO: 386550 - protein, 14 aa, Homo sapiens
  CDR3 for beta chain variable domain of TCR clone 193275 (TRBV25-1, TRBJ1-1)
CASTHLGGNTEAFF

SEQ ID NO: 386551 - protein, 13 aa, Homo sapiens
  CDR3 for alpha chain variable domain of TCR clone 193276 (TRAV30, TRAJ24)
CGTVTDSRGKLQF

SEQ ID NO: 386552 - protein, 15 aa, Homo sapiens
  CDR3 for beta chain variable domain of TCR clone 193276 (TRBV4-1, TRBJ2-1)
CASSQDPGNYNEQFF

SEQ ID NO: 386553 - protein, 13 aa, Homo sapiens
  CDR3 for alpha chain variable domain of TCR clone 193277 (TRAV21, TRAJ11)
CAVPNSGYSTLTF

SEQ ID NO: 386554 - protein, 19 aa, Homo sapiens
  CDR3 for beta chain variable domain of TCR clone 193277 (TRBV5-1, TRBJ2-3)
CASSLWLAGGITTADTQYF

SEQ ID NO: 386555 - protein, 12 aa, Homo sapiens
  CDR3 for alpha chain variable domain of TCR clone 193278 (TRAV8-3, TRAJ26)
CAGDNYGQNFDF

SEQ ID NO: 386556 - protein, 15 aa, Homo sapiens
  CDR3 for beta chain variable domain of TCR clone 193278 (TRBV5-1, TRBJ2-3)
CASSVTSGSTDTQYF

SEQ ID NO: 386557 - protein, 14 aa, Homo sapiens
  CDR3 for alpha chain variable domain of TCR clone 193279 (TRAV23/DV6, TRAJ6)
CAASRTGGSYIPTF

SEQ ID NO: 386558 - protein, 17 aa, Homo sapiens
  CDR3 for beta chain variable domain of TCR clone 193279 (TRBV20-1, TRBJ2-1)
CSASASGLAGSYNEQFF

SEQ ID NO: 386559 - protein, 13 aa, Homo sapiens
  CDR3 for alpha chain variable domain of TCR clone 193280 (TRAV8-4, TRAJ10)
CAAFTGGGNKLTF

SEQ ID NO: 386560 - protein, 15 aa, Homo sapiens
  CDR3 for beta chain variable domain of TCR clone 193280 (TRBV2, TRBJ2-3)
CASSDFEKATDTHYF

SEQ ID NO: 386561 - protein, 13 aa, Homo sapiens
  CDR3 for alpha chain variable domain of TCR clone 193281 (TRAV12-2, TRAJ42)
CAVKRGSQGNLIF

SEQ ID NO: 386562 - protein, 14 aa, Homo sapiens
  CDR3 for beta chain variable domain of TCR clone 193281 (TRBV11-2, TRBJ2-5)
CASSRTGGIETQYF

SEQ ID NO: 386563 - protein, 12 aa, Homo sapiens
  CDR3 for alpha chain variable domain of TCR clone 193282 (TRAV13-1, TRAJ21)
CAAKEGFNKFYF

SEQ ID NO: 386564 - protein, 15 aa, Homo sapiens
  CDR3 for beta chain variable domain of TCR clone 193282 (TRBV20-1, TRBJ2-7)
CSARDRVSGVDEQFF

SEQ ID NO: 386565 - protein, 10 aa, Homo sapiens
  CDR3 for alpha chain variable domain of TCR clone 193283 (TRAV12-1, TRAJ43)
CVVHNNDMRF

SEQ ID NO: 386566 - protein, 13 aa, Homo sapiens
  CDR3 for beta chain variable domain of TCR clone 193283 (TRBV19, TRBJ1-2)
CASSVPGQDGYTF

SEQ ID NO: 386567 - protein, 13 aa, Homo sapiens
  CDR3 for alpha chain variable domain of TCR clone 193284 (TRAV1-1, TRAJ9)
CAARNTGGFKTIF

SEQ ID NO: 386568 - protein, 14 aa, Homo sapiens
  CDR3 for beta chain variable domain of TCR clone 193284 (TRBV12-5, TRBJ2-5)
CASGSRTHQETQYF

SEQ ID NO: 386569 - protein, 14 aa, Homo sapiens
  CDR3 for alpha chain variable domain of TCR clone 193285 (TRAV12-1, TRAJ29)
CVVNEGSGNTPLVF

SEQ ID NO: 386570 - protein, 13 aa, Homo sapiens
  CDR3 for beta chain variable domain of TCR clone 193285 (TRBV7-9, TRBJ2-3)
CASSPGSKDTQYF

SEQ ID NO: 386571 - protein, 14 aa, Homo sapiens
  CDR3 for alpha chain variable domain of TCR clone 193286 (TRAV12-2, TRAJ13)
CAVKKTGGYQNVTF

SEQ ID NO: 386572 - protein, 15 aa, Homo sapiens
  CDR3 for beta chain variable domain of TCR clone 193286 (TRBV4-3, TRBJ2-7)
CASSQGDWGDYEQYF

SEQ ID NO: 386573 - protein, 14 aa, Homo sapiens
  CDR3 for alpha chain variable domain of TCR clone 193287 (TRAV12-1, TRAJ17)
CVVNYKAAGNKLTF

SEQ ID NO: 386574 - protein, 12 aa, Homo sapiens
  CDR3 for beta chain variable domain of TCR clone 193287 (TRBV19, TRBJ2-7)
CASTDRDYEQYF

SEQ ID NO: 386575 - protein, 14 aa, Homo sapiens
  CDR3 for alpha chain variable domain of TCR clone 193288 (TRAV1-2, TRAJ16)
CAVNRFSDGQKLLF

SEQ ID NO: 386576 - protein, 14 aa, Homo sapiens
  CDR3 for beta chain variable domain of TCR clone 193288 (TRBV13, TRBJ2-5)
CASSLGRGKETQYF

SEQ ID NO: 386577 - protein, 14 aa, Homo sapiens
  CDR3 for alpha chain variable domain of TCR clone 193289 (TRAV12-2, TRAJ17)
CAVLFKAAGNKLTF

SEQ ID NO: 386578 - protein, 13 aa, Homo sapiens
  CDR3 for beta chain variable domain of TCR clone 193289 (TRBV7-2, TRBJ1-1)
CASSRNTNTEAFF

SEQ ID NO: 386579 - protein, 12 aa, Homo sapiens
  CDR3 for alpha chain variable domain of TCR clone 193290 (TRAV27, TRAJ41)
CAGRNSGYALNF

SEQ ID NO: 386580 - protein, 13 aa, Homo sapiens
  CDR3 for beta chain variable domain of TCR clone 193290 (TRBV4-2, TRBJ1-1)
CASSQAGNTEAFF

SEQ ID NO: 386581 - protein, 13 aa, Homo sapiens
  CDR3 for alpha chain variable domain of TCR clone 193291 (TRAV25, TRAJ47)
CAGHREYVNKLVF

SEQ ID NO: 386582 - protein, 17 aa, Homo sapiens
  CDR3 for beta chain variable domain of TCR clone 193291 (TRBV7-8, TRBJ2-5)
CASSLASGGRFQETQYF

SEQ ID NO: 386583 - protein, 12 aa, Homo sapiens
  CDR3 for alpha chain variable domain of TCR clone 193292 (TRAV12-3, TRAJ17)
CAMTLTGNKLTF

SEQ ID NO: 386584 - protein, 13 aa, Homo sapiens
  CDR3 for beta chain variable domain of TCR clone 193292 (TRBV7-3, TRBJ1-1)
CASSQDWGDEAFF

SEQ ID NO: 386585 - protein, 14 aa, Homo sapiens
  CDR3 for alpha chain variable domain of TCR clone 193293 (TRAV1-1, TRAJ28)
CAAPSGAGSYQLTF

SEQ ID NO: 386586 - protein, 12 aa, Homo sapiens
  CDR3 for beta chain variable domain of TCR clone 193293 (TRBV28, TRBJ2-7)
CASSFSSYEQYF

SEQ ID NO: 386587 - protein, 12 aa, Homo sapiens
  CDR3 for alpha chain variable domain of TCR clone 193294 (TRAV2, TRAJ31)
CAVDDNNARLMF

SEQ ID NO: 386588 - protein, 14 aa, Homo sapiens
  CDR3 for beta chain variable domain of TCR clone 193294 (TRBV19, TRBJ2-1)
CASPTFVLSGEQFF

SEQ ID NO: 386589 - protein, 16 aa, Homo sapiens
  CDR3 for alpha chain variable domain of TCR clone 193295 (TRAV3, TRAJ34)
CALRARGTPTSSSLVL

SEQ ID NO: 386590 - protein, 15 aa, Homo sapiens
  CDR3 for beta chain variable domain of TCR clone 193295 (TRBV6-3, TRBJ2-7)
CASSSPGTVFYEQYF

SEQ ID NO: 386591 - protein, 14 aa, Homo sapiens
  CDR3 for alpha chain variable domain of TCR clone 193296 (TRAV12-2, TRAJ13)
CAVKKTGGYQKVTF

SEQ ID NO: 386592 - protein, 17 aa, Homo sapiens
  CDR3 for beta chain variable domain of TCR clone 193296 (TRBV15, TRBJ2-4)
CATSRDNPQTGLDTQCF

SEQ ID NO: 386593 - protein, 14 aa, Homo sapiens
  CDR3 for alpha chain variable domain of TCR clone 193297 (TRAV12-1, TRAJ12)
CVVTRMDSSYKLIF

SEQ ID NO: 386594 - protein, 14 aa, Homo sapiens
  CDR3 for beta chain variable domain of TCR clone 193297 (TRBV4-1, TRBJ2-2)
CASSQAVDTGELFF

SEQ ID NO: 386595 - protein, 16 aa, Homo sapiens
  CDR3 for alpha chain variable domain of TCR clone 193298 (TRAV16, TRAJ24)
CALSVGSTDSWGKLQF

SEQ ID NO: 386596 - protein, 15 aa, Homo sapiens
  CDR3 for beta chain variable domain of TCR clone 193298 (TRBV27, TRBJ2-1)
CASSNGGGSSNEQFF

SEQ ID NO: 386597 - protein, 21 aa, Homo sapiens
  CDR3 for alpha chain variable domain of TCR clone 193299 (TRAV1-1, TRAJ6)
CLLLLRCERLEGTGGSYIPTF

SEQ ID NO: 386598 - protein, 14 aa, Homo sapiens
  CDR3 for beta chain variable domain of TCR clone 193299 (TRBV19, TRBJ2-7)
CASNFRDTFTGMYF

SEQ ID NO: 386599 - protein, 11 aa, Homo sapiens
  CDR3 for alpha chain variable domain of TCR clone 193300 (TRAV3, TRAJ21)
CAVGNFDKFYF

SEQ ID NO: 386600 - protein, 17 aa, Homo sapiens
  CDR3 for beta chain variable domain of TCR clone 193300 (TRBV4-2, TRBJ1-1)
CASTQFGGGSGNTEAFF

SEQ ID NO: 386601 - protein, 15 aa, Homo sapiens
  CDR3 for alpha chain variable domain of TCR clone 193301 (TRAV26-1, TRAJ47)
CIVRVGWGYGNKLVF

SEQ ID NO: 386602 - protein, 17 aa, Homo sapiens
  CDR3 for beta chain variable domain of TCR clone 193301 (TRBV11-2, TRBJ2-1)
CASSLYPPGVEYNEQFF

SEQ ID NO: 386603 - protein, 14 aa, Homo sapiens
  CDR3 for alpha chain variable domain of TCR clone 193302 (TRAV21, TRAJ15)
CAVSLNQAGTALIF

SEQ ID NO: 386604 - protein, 13 aa, Homo sapiens
  CDR3 for beta chain variable domain of TCR clone 193302 (TRBV11-3, TRBJ1-1)
CASSLTRNTEAFF

SEQ ID NO: 386605 - protein, 11 aa, Homo sapiens
  CDR3 for alpha chain variable domain of TCR clone 193303 (TRAV21, TRAJ39)
LLVNAGNMLTF

SEQ ID NO: 386606 - protein, 17 aa, Homo sapiens
  CDR3 for beta chain variable domain of TCR clone 193303 (TRBV11-2, TRBJ2-1)
CASSLYPPGVEYNEQFF

SEQ ID NO: 386607 - protein, 14 aa, Homo sapiens
  CDR3 for alpha chain variable domain of TCR clone 193304 (TRAV13-1, TRAJ44)
CAAKATGTASKLTF

SEQ ID NO: 386608 - protein, 13 aa, Homo sapiens
  CDR3 for beta chain variable domain of TCR clone 193304 (TRBV7-9, TRBJ2-1)
CASSLDVGNEQFF

SEQ ID NO: 386609 - protein, 13 aa, Homo sapiens
  CDR3 for alpha chain variable domain of TCR clone 193305 (TRAV12-1, TRAJ34)
CVVTGYNTDMLIF

SEQ ID NO: 386610 - protein, 13 aa, Homo sapiens
  CDR3 for beta chain variable domain of TCR clone 193305 (TRBV28, TRBJ2-7)
CASKAGGVYEQYF

SEQ ID NO: 386611 - protein, 14 aa, Homo sapiens
  CDR3 for alpha chain variable domain of TCR clone 193306 (TRAV36/DV7, TRAJ44)
CCGANTGTASKLTF

SEQ ID NO: 386612 - protein, 15 aa, Homo sapiens
  CDR3 for beta chain variable domain of TCR clone 193306 (TRBV12-4, TRBJ2-5)
CASSPPTGLQETQYV

SEQ ID NO: 386613 - protein, 14 aa, Homo sapiens
  CDR3 for alpha chain variable domain of TCR clone 193307 (TRAV29/DV5, TRAJ36)
CAARRKTGADNLFF

SEQ ID NO: 386614 - protein, 14 aa, Homo sapiens
  CDR3 for beta chain variable domain of TCR clone 193307 (TRBV12-5, TRBJ2-5)
CASGSRTHQDTQYF

SEQ ID NO: 386615 - protein, 14 aa, Homo sapiens
  CDR3 for alpha chain variable domain of TCR clone 193308 (TRAV26-1, TRAJ26)
CIVRATFLGQNFVF

SEQ ID NO: 386616 - protein, 16 aa, Homo sapiens
  CDR3 for beta chain variable domain of TCR clone 193308 (TRBV12-4, TRBJ2-7)
CASRSTGTGPSYEQFF

SEQ ID NO: 386617 - protein, 12 aa, Homo sapiens
  CDR3 for alpha chain variable domain of TCR clone 193309 (TRAV13-2, TRAJ23)
CAELHRGGKLIF

SEQ ID NO: 386618 - protein, 14 aa, Homo sapiens
  CDR3 for beta chain variable domain of TCR clone 193309 (TRBV5-1, TRBJ1-2)
CASSPQGANYGYTF

SEQ ID NO: 386619 - protein, 12 aa, Homo sapiens
  CDR3 for alpha chain variable domain of TCR clone 193310 (TRAV12-3, TRAJ17)
CAMKLTGNKLTF

SEQ ID NO: 386620 - protein, 20 aa, Homo sapiens
  CDR3 for beta chain variable domain of TCR clone 193310 (TRBV7-8, TRBJ2-2)
GASSHLFPGPTIHITGELFF

SEQ ID NO: 386621 - protein, 16 aa, Homo sapiens
  CDR3 for alpha chain variable domain of TCR clone 193311 (TRAV4, TRAJ5)
CLVGPDHGHGQESTYF

SEQ ID NO: 386622 - protein, 16 aa, Homo sapiens
  CDR3 for beta chain variable domain of TCR clone 193311 (TRBV11-2, TRBJ2-7)
CASSLAPTGVNYEQYF

SEQ ID NO: 386623 - protein, 17 aa, Homo sapiens
  CDR3 for alpha chain variable domain of TCR clone 193312 (TRAV12-2, TRAJ36)
CAVTDNLFFGTGTRLTV

SEQ ID NO: 386624 - protein, 15 aa, Homo sapiens
  CDR3 for beta chain variable domain of TCR clone 193312 (TRBV28, TRBJ2-2)
CASTVAGANTGELFF

SEQ ID NO: 386625 - protein, 13 aa, Homo sapiens
  CDR3 for alpha chain variable domain of TCR clone 193313 (TRAV17, TRAJ9)
YATDYTGGFKTIF

SEQ ID NO: 386626 - protein, 16 aa, Homo sapiens
  CDR3 for beta chain variable domain of TCR clone 193313 (TRBV7-7, TRBJ2-1)
CASSLASGTSYNEQFF

SEQ ID NO: 386627 - protein, 15 aa, Homo sapiens
  CDR3 for alpha chain variable domain of TCR clone 193314 (TRAV23/DV6, TRAJ12)
CAAIDLGAMDSSYKL

SEQ ID NO: 386628 - protein, 15 aa, Homo sapiens
  CDR3 for beta chain variable domain of TCR clone 193314 (TRBV12-4, TRBJ2-5)
CARTLNSGRGETQYF

SEQ ID NO: 386629 - protein, 13 aa, Homo sapiens
  CDR3 for alpha chain variable domain of TCR clone 193315 (TRAV13-1, TRAJ41)
CADAPNSGYALNF

SEQ ID NO: 386630 - protein, 14 aa, Homo sapiens
  CDR3 for beta chain variable domain of TCR clone 193315 (TRBV19, TRBJ2-1)
CASSRLASINEQFF

SEQ ID NO: 386631 - protein, 14 aa, Homo sapiens
  CDR3 for alpha chain variable domain of TCR clone 193316 (TRAV2, TRAJ9)
CAVEARSGGFKTIF

SEQ ID NO: 386632 - protein, 15 aa, Homo sapiens
  CDR3 for beta chain variable domain of TCR clone 193316 (TRBV7-2, TRBJ2-5)
CASSFLRGGEETQYF

SEQ ID NO: 386633 - protein, 12 aa, Homo sapiens
  CDR3 for alpha chain variable domain of TCR clone 193317 (TRAV12-3, TRAJ39)
CAMTQAGNMLTF

SEQ ID NO: 386634 - protein, 15 aa, Homo sapiens
  CDR3 for beta chain variable domain of TCR clone 193317 (TRBV3-1, TRBJ2-1)
CASSQDYTPRGEQFF

SEQ ID NO: 386635 - protein, 13 aa, Homo sapiens
  CDR3 for alpha chain variable domain of TCR clone 193318 (TRAV16, TRAJ34)
CALISYNTDKLVF

SEQ ID NO: 386636 - protein, 16 aa, Homo sapiens
  CDR3 for beta chain variable domain of TCR clone 193318 (TRBV5-1, TRBJ1-1)
CASSSGGNSLNTEAFF

SEQ ID NO: 386637 - protein, 12 aa, Homo sapiens
  CDR3 for alpha chain variable domain of TCR clone 193319 (TRAV13-1, TRAJ49)
CAAPNTANQFYF

SEQ ID NO: 386638 - protein, 17 aa, Homo sapiens
  CDR3 for beta chain variable domain of TCR clone 193319 (TRBV25-1, TRBJ2-7)
CASSDARVVFSSYEQYF

SEQ ID NO: 386639 - protein, 14 aa, Homo sapiens
  CDR3 for alpha chain variable domain of TCR clone 193320 (TRAV12-1, TRAJ17)
CVVNYKAAGNKLTF

SEQ ID NO: 386640 - protein, 16 aa, Homo sapiens
  CDR3 for beta chain variable domain of TCR clone 193320 (TRBV12-4, TRBJ1-5)
CASSGPVGGSNQPQHF

SEQ ID NO: 386641 - protein, 11 aa, Homo sapiens
  CDR3 for alpha chain variable domain of TCR clone 193321 (TRAV26-1, TRAJ37)
CIVRVGRKLIF

SEQ ID NO: 386642 - protein, 14 aa, Homo sapiens
  CDR3 for beta chain variable domain of TCR clone 193321 (TRBV7-3, TRBJ2-1)
CASSLGTSANEQFF

SEQ ID NO: 386643 - protein, 14 aa, Homo sapiens
  CDR3 for alpha chain variable domain of TCR clone 193322 (TRAV12-2, TRAJ24)
CAVTPADSWGKLQF

SEQ ID NO: 386644 - protein, 12 aa, Homo sapiens
  CDR3 for beta chain variable domain of TCR clone 193322 (TRBV11-2, TRBJ2-2)
CASSLPTGELFF

SEQ ID NO: 386645 - protein, 15 aa, Homo sapiens
  CDR3 for alpha chain variable domain of TCR clone 193323 (TRAV3, TRAJ29)
CAVRDPLSGNTPLVF

SEQ ID NO: 386646 - protein, 13 aa, Homo sapiens
  CDR3 for beta chain variable domain of TCR clone 193323 (TRBV27, TRBJ2-1)
CASRTLGVGEQFF

SEQ ID NO: 386647 - protein, 18 aa, Homo sapiens
  CDR3 for alpha chain variable domain of TCR clone 193324 (TRAV12-3, TRAJ52)
CAMSVGGAGGTSYGKLTF

SEQ ID NO: 386648 - protein, 15 aa, Homo sapiens
  CDR3 for beta chain variable domain of TCR clone 193324 (TRBV27, TRBJ1-6)
CASSFARGLGSALHF

SEQ ID NO: 386649 - protein, 10 aa, Homo sapiens
  CDR3 for alpha chain variable domain of TCR clone 193325 (TRAV13-1, TRAJ52)
CAAKTPMLVV

SEQ ID NO: 386650 - protein, 14 aa, Homo sapiens
  CDR3 for beta chain variable domain of TCR clone 193325 (TRBV6-5, TRBJ1-1)
CASSFGQGLTEAFS

SEQ ID NO: 386651 - protein, 12 aa, Homo sapiens
  CDR3 for alpha chain variable domain of TCR clone 193326 (TRAV25, TRAJ20)
CAGRSNDYKLSF

SEQ ID NO: 386652 - protein, 15 aa, Homo sapiens
  CDR3 for beta chain variable domain of TCR clone 193326 (TRBV7-6, TRBJ2-7)
CASSGRRDTFGEQYF

SEQ ID NO: 386653 - protein, 14 aa, Homo sapiens
  CDR3 for alpha chain variable domain of TCR clone 193327 (TRAV17, TRAJ57)
CATDPQGGSEKLVF

SEQ ID NO: 386654 - protein, 14 aa, Homo sapiens
  CDR3 for beta chain variable domain of TCR clone 193327 (TRBV7-8, TRBJ2-7)
CASSPRDRVYEKYF

SEQ ID NO: 386655 - protein, 12 aa, Homo sapiens
  CDR3 for alpha chain variable domain of TCR clone 193328 (TRAV13-2, TRAJ23)
CAERHRGGKLIL

SEQ ID NO: 386656 - protein, 16 aa, Homo sapiens
  CDR3 for beta chain variable domain of TCR clone 193328 (TRBV20-1, TRBJ1-4)
CSAPGQGLLTNDKLFF

SEQ ID NO: 386657 - protein, 12 aa, Homo sapiens
  CDR3 for alpha chain variable domain of TCR clone 193329 (TRAV36/DV7, TRAJ54)
CAVVRGAQKLVF

SEQ ID NO: 386658 - protein, 16 aa, Homo sapiens
  CDR3 for beta chain variable domain of TCR clone 193329 (TRBV15, TRBJ2-3)
CATSRDLGSVTDTQYF

SEQ ID NO: 386659 - protein, 13 aa, Homo sapiens
  CDR3 for alpha chain variable domain of TCR clone 193330 (TRAV36/DV7, TRAJ33)
CAVDMDSNYQLIW

SEQ ID NO: 386660 - protein, 16 aa, Homo sapiens
  CDR3 for beta chain variable domain of TCR clone 193330 (TRBV15, TRBJ2-3)
CASRLSGGRAPDTQYF

SEQ ID NO: 386661 - protein, 10 aa, Homo sapiens
  CDR3 for alpha chain variable domain of TCR clone 193331 (TRAV27, TRAJ49)
CVVPVTSSIL

SEQ ID NO: 386662 - protein, 16 aa, Homo sapiens
  CDR3 for beta chain variable domain of TCR clone 193331 (TRBV20-1, TRBJ1-4)
CSAPGQGLLTNEKLFF

SEQ ID NO: 386663 - protein, 14 aa, Homo sapiens
  CDR3 for alpha chain variable domain of TCR clone 193332 (TRAV8-3, TRAJ4)
CAVGAAGGYNKLIF

SEQ ID NO: 386664 - protein, 12 aa, Homo sapiens
  CDR3 for beta chain variable domain of TCR clone 193332 (TRBV11-2, TRBJ2-1)
CASSPGNNEQFF

SEQ ID NO: 386665 - protein, 15 aa, Homo sapiens
  CDR3 for alpha chain variable domain of TCR clone 193333 (TRAV25, TRAJ52)
CAGTSGGTSYGKQTF

SEQ ID NO: 386666 - protein, 16 aa, Homo sapiens
  CDR3 for beta chain variable domain of TCR clone 193333 (TRBV15, TRBJ1-2)
CATSRGPRTGGGGYTF

SEQ ID NO: 386667 - protein, 17 aa, Homo sapiens
  CDR3 for alpha chain variable domain of TCR clone 193334 (TRAV3, TRAJ6)
CAVRDGPRAGGSYIPTL

SEQ ID NO: 386668 - protein, 16 aa, Homo sapiens
  CDR3 for beta chain variable domain of TCR clone 193334 (TRBV15, TRBJ2-3)
CATSRDLGIVTDTQYF

SEQ ID NO: 386669 - protein, 15 aa, Homo sapiens
  CDR3 for alpha chain variable domain of TCR clone 193335 (TRAV2, TRAJ15)
CAVEDRGQAGTPLIF

SEQ ID NO: 386670 - protein, 13 aa, Homo sapiens
  CDR3 for beta chain variable domain of TCR clone 193335 (TRBV10-2, TRBJ2-7)
RASGASGGYEQYF

SEQ ID NO: 386671 - protein, 13 aa, Homo sapiens
  CDR3 for alpha chain variable domain of TCR clone 193336 (TRAV3, TRAJ15)
CAVRDQAGTALIF

SEQ ID NO: 386672 - protein, 13 aa, Homo sapiens
  CDR3 for beta chain variable domain of TCR clone 193336 (TRBV10-2, TRBJ2-3)
CASSESGDHTQYF

SEQ ID NO: 386673 - protein, 12 aa, Homo sapiens
  CDR3 for alpha chain variable domain of TCR clone 193337 (TRAV2, TRAJ33)
CAFMDSNYQLIW

SEQ ID NO: 386674 - protein, 16 aa, Homo sapiens
  CDR3 for beta chain variable domain of TCR clone 193337 (TRBV2, TRBJ2-7)
CASSEPWTGPSYVQYF

SEQ ID NO: 386675 - protein, 12 aa, Homo sapiens
  CDR3 for alpha chain variable domain of TCR clone 193338 (TRAV27, TRAJ48)
CAGARGNGKLTF

SEQ ID NO: 386676 - protein, 14 aa, Homo sapiens
  CDR3 for beta chain variable domain of TCR clone 193338 (TRBV12-5, TRBJ2-5)
CASGSRTHQETQYF

SEQ ID NO: 386677 - protein, 15 aa, Homo sapiens
  CDR3 for alpha chain variable domain of TCR clone 193339 (TRAV13-1, TRAJ4)
CAASLISGGYNKLIF

SEQ ID NO: 386678 - protein, 15 aa, Homo sapiens
  CDR3 for beta chain variable domain of TCR clone 193339 (TRBV5-1, TRBJ2-1)
CASSPPRAPYNEQFF

SEQ ID NO: 386679 - protein, 15 aa, Homo sapiens
  CDR3 for alpha chain variable domain of TCR clone 193340 (TRAV12-1, TRAJ4)
CVVNPFSGGFNKLIF

SEQ ID NO: 386680 - protein, 13 aa, Homo sapiens
  CDR3 for beta chain variable domain of TCR clone 193340 (TRBV20-1, TRBJ1-2)
CSARGTADYGYTF

SEQ ID NO: 386681 - protein, 18 aa, Homo sapiens
  CDR3 for alpha chain variable domain of TCR clone 193341 (TRAV13-1, TRAJ52)
CAAKNPNAGGTSYGKLTF

SEQ ID NO: 386682 - protein, 18 aa, Homo sapiens
  CDR3 for beta chain variable domain of TCR clone 193341 (TRBV4-1, TRBJ1-4)
CASSRRTGGAWTNEKLFF

SEQ ID NO: 386683 - protein, 14 aa, Homo sapiens
  CDR3 for alpha chain variable domain of TCR clone 193342 (TRAV12-2, TRAJ17)
CAVLFKAAGNKLTF

SEQ ID NO: 386684 - protein, 14 aa, Homo sapiens
  CDR3 for beta chain variable domain of TCR clone 193342 (TRBV7-2, TRBJ2-7)
CASRSQGVAYEQYF

SEQ ID NO: 386685 - protein, 15 aa, Homo sapiens
  CDR3 for alpha chain variable domain of TCR clone 193343 (TRAV25, TRAJ53)
CPTSNSGGSNNKLTL

SEQ ID NO: 386686 - protein, 14 aa, Homo sapiens
  CDR3 for beta chain variable domain of TCR clone 193343 (TRBV11-2, TRBJ2-3)
CASSRLARTDTQYF

SEQ ID NO: 386687 - protein, 17 aa, Homo sapiens
  CDR3 for alpha chain variable domain of TCR clone 193344 (TRAV4, TRAJ18)
CLVGERSVGSTLGRLYF

SEQ ID NO: 386688 - protein, 16 aa, Homo sapiens
  CDR3 for beta chain variable domain of TCR clone 193344 (TRBV15, TRBJ1-4)
CATSRDSPPGCEKLFF

SEQ ID NO: 386689 - protein, 15 aa, Homo sapiens
  CDR3 for alpha chain variable domain of TCR clone 193345 (TRAV17, TRAJ57)
CATGPSQGGSEKLVF

SEQ ID NO: 386690 - protein, 14 aa, Homo sapiens
  CDR3 for beta chain variable domain of TCR clone 193345 (TRBV6-1, TRBJ2-1)
CATFTSGQNNEQFF

SEQ ID NO: 386691 - protein, 15 aa, Homo sapiens
  CDR3 for alpha chain variable domain of TCR clone 193346 (TRAV21, TRAJ53)
CATLNSGGSNYKLSF

SEQ ID NO: 386692 - protein, 16 aa, Homo sapiens
  CDR3 for beta chain variable domain of TCR clone 193346 (TRBV9, TRBJ2-1)
CASSVGGGGNYNEQFF

SEQ ID NO: 386693 - protein, 13 aa, Homo sapiens
  CDR3 for alpha chain variable domain of TCR clone 193347 (TRAV8-3, TRAJ28)
CAVGAVGSYQLTF

SEQ ID NO: 386694 - protein, 14 aa, Homo sapiens
  CDR3 for beta chain variable domain of TCR clone 193347 (TRBV7-9, TRBJ1-5)
CQQRRSPAQSAQHF

SEQ ID NO: 386695 - protein, 20 aa, Homo sapiens
  CDR3 for alpha chain variable domain of TCR clone 193348 (TRAV21, TRAJ4)
AASQPGDSATLAGGYNNLIF

SEQ ID NO: 386696 - protein, 19 aa, Homo sapiens
  CDR3 for beta chain variable domain of TCR clone 193348 (TRBV18, TRBJ1-3)
CASSPLSRTGMSSGNTIYF

SEQ ID NO: 386697 - protein, 13 aa, Homo sapiens
  CDR3 for alpha chain variable domain of TCR clone 193349 (TRAV2, TRAJ40)
CAVVTSGTYIYIF

SEQ ID NO: 386698 - protein, 16 aa, Homo sapiens
  CDR3 for beta chain variable domain of TCR clone 193349 (TRBV19, TRBJ2-2)
CASRSPGTGATGELFF

SEQ ID NO: 386699 - protein, 14 aa, Homo sapiens
  CDR3 for alpha chain variable domain of TCR clone 193350 (TRAV27, TRAJ22)
CAGVSVLGKRQLTF

SEQ ID NO: 386700 - protein, 14 aa, Homo sapiens
  CDR3 for beta chain variable domain of TCR clone 193350 (TRBV20-1, TRBJ2-1)
CSAQIGGSANEQFF

SEQ ID NO: 386701 - protein, 11 aa, Homo sapiens
  CDR3 for alpha chain variable domain of TCR clone 193351 (TRAV3, TRAJ21)
FAVGNFNKFYF

SEQ ID NO: 386702 - protein, 15 aa, Homo sapiens
  CDR3 for beta chain variable domain of TCR clone 193351 (TRBV29-1, TRBJ2-1)
CSFEGGPASYNEQFF

SEQ ID NO: 386703 - protein, 13 aa, Homo sapiens
  CDR3 for alpha chain variable domain of TCR clone 193352 (TRAV4, TRAJ9)
CLVAEGGGFKTIF

SEQ ID NO: 386704 - protein, 13 aa, Homo sapiens
  CDR3 for beta chain variable domain of TCR clone 193352 (TRBV12-4, TRBJ1-1)
CASSPGTGFEAFF

SEQ ID NO: 386705 - protein, 13 aa, Homo sapiens
  CDR3 for alpha chain variable domain of TCR clone 193353 (TRAV27, TRAJ11)
CAGARSGYSTLTF

SEQ ID NO: 386706 - protein, 16 aa, Homo sapiens
  CDR3 for beta chain variable domain of TCR clone 193353 (TRBV10-2, TRBJ2-2)
CASSESRDRGSGELFF

SEQ ID NO: 386707 - protein, 13 aa, Homo sapiens
  CDR3 for alpha chain variable domain of TCR clone 193354 (TRAV13-1, TRAJ39)
CAASIWAGNMLTF

SEQ ID NO: 386708 - protein, 13 aa, Homo sapiens
  CDR3 for beta chain variable domain of TCR clone 193354 (TRBV11-2, TRBJ1-3)
CASSLEPLNTIYF

SEQ ID NO: 386709 - protein, 14 aa, Homo sapiens
  CDR3 for alpha chain variable domain of TCR clone 193355 (TRAV4, TRAJ43)
CLVGPMYNNNDMRF

SEQ ID NO: 386710 - protein, 21 aa, Homo sapiens
  CDR3 for beta chain variable domain of TCR clone 193355 (TRBV11-3, TRBJ2-1)
CASSARERLRPEGPSYNEQFF

SEQ ID NO: 386711 - protein, 15 aa, Homo sapiens
  CDR3 for alpha chain variable domain of TCR clone 193356 (TRAV26-1, TRAJ52)
CIVGEGGTSYGKLTF

SEQ ID NO: 386712 - protein, 16 aa, Homo sapiens
  CDR3 for beta chain variable domain of TCR clone 193356 (TRBV6-5, TRBJ2-7)
CASSSLAGTFSYEQYV

SEQ ID NO: 386713 - protein, 15 aa, Homo sapiens
  CDR3 for alpha chain variable domain of TCR clone 193357 (TRAV16, TRAJ12)
CSKWPLRDSSYKLIF

SEQ ID NO: 386714 - protein, 14 aa, Homo sapiens
  CDR3 for beta chain variable domain of TCR clone 193357 (TRBV5-1, TRBJ1-1)
CASSLTRRSTEAFF

SEQ ID NO: 386715 - protein, 11 aa, Homo sapiens
  CDR3 for alpha chain variable domain of TCR clone 193358 (TRAV12-3, TRAJ20)
CAMSYDSKLSF

SEQ ID NO: 386716 - protein, 14 aa, Homo sapiens
  CDR3 for beta chain variable domain of TCR clone 193358 (TRBV7-2, TRBJ2-7)
CASSPKTSFYEQYF

SEQ ID NO: 386717 - protein, 14 aa, Homo sapiens
  CDR3 for alpha chain variable domain of TCR clone 193359 (TRAV1-2, TRAJ16)
CAVNRFSDGQKLLF

SEQ ID NO: 386718 - protein, 14 aa, Homo sapiens
  CDR3 for beta chain variable domain of TCR clone 193359 (TRBV5-1, TRBJ2-5)
CASSSGGSQETQYF

SEQ ID NO: 386719 - protein, 10 aa, Homo sapiens
  CDR3 for alpha chain variable domain of TCR clone 193360 (TRAV30, TRAJ48)
CGIGNEKLTF

SEQ ID NO: 386720 - protein, 19 aa, Homo sapiens
  CDR3 for beta chain variable domain of TCR clone 193360 (TRBV7-2, TRBJ2-3)
CASSFLSRNWGGGTDTQYF

SEQ ID NO: 386721 - protein, 14 aa, Homo sapiens
  CDR3 for alpha chain variable domain of TCR clone 193361 (TRAV13-1, TRAJ44)
CAAKATGTASKLPF

SEQ ID NO: 386722 - protein, 17 aa, Homo sapiens
  CDR3 for beta chain variable domain of TCR clone 193361 (TRBV13, TRBJ2-3)
CASSLSRVAGGRNTQYF

SEQ ID NO: 386723 - protein, 16 aa, Homo sapiens
  CDR3 for alpha chain variable domain of TCR clone 193362 (TRAV16, TRAJ4)
CALIRMFSGGYNKLIF

SEQ ID NO: 386724 - protein, 16 aa, Homo sapiens
  CDR3 for beta chain variable domain of TCR clone 193362 (TRBV24-1, TRBJ2-3)
CATSDPGTGATDTQYF

SEQ ID NO: 386725 - protein, 15 aa, Homo sapiens
  CDR3 for alpha chain variable domain of TCR clone 193363 (TRAV23/DV6, TRAJ13)
CAAWPGGGGYQKVTF

SEQ ID NO: 386726 - protein, 14 aa, Homo sapiens
  CDR3 for beta chain variable domain of TCR clone 193363 (TRBV7-2, TRBJ1-1)
CASSLLTGTTEAFF

SEQ ID NO: 386727 - protein, 15 aa, Homo sapiens
  CDR3 for alpha chain variable domain of TCR clone 193364 (TRAV14/DV4, TRAJ12)
CAMREERDSSYKLIF

SEQ ID NO: 386728 - protein, 16 aa, Homo sapiens
  CDR3 for beta chain variable domain of TCR clone 193364 (TRBV7-7, TRBJ2-3)
CASSPGTSGSTDTQYF

SEQ ID NO: 386729 - protein, 18 aa, Homo sapiens
  CDR3 for alpha chain variable domain of TCR clone 193365 (TRAV26-1, TRAJ38)
CCVLCIADNAGNNRKLIW

SEQ ID NO: 386730 - protein, 14 aa, Homo sapiens
  CDR3 for beta chain variable domain of TCR clone 193365 (TRBV20-1, TRBJ1-1)
CSAQTRIGGTEAFF

SEQ ID NO: 386731 - protein, 15 aa, Homo sapiens
  CDR3 for alpha chain variable domain of TCR clone 193366 (TRAV23/DV6, TRAJ45)
CAASSSGGGADGLTF

SEQ ID NO: 386732 - protein, 14 aa, Homo sapiens
  CDR3 for beta chain variable domain of TCR clone 193366 (TRBV11-1, TRBJ2-2)
CASSTLAGTGELFF

SEQ ID NO: 386733 - protein, 17 aa, Homo sapiens
  CDR3 for alpha chain variable domain of TCR clone 193367 (TRAV13-1, TRAJ52)
CAAGRNAGGTSYGKLTI

SEQ ID NO: 386734 - protein, 13 aa, Homo sapiens
  CDR3 for beta chain variable domain of TCR clone 193367 (TRBV7-2, TRBJ1-1)
CASNLKGAKVAFF

SEQ ID NO: 386735 - protein, 16 aa, Homo sapiens
  CDR3 for alpha chain variable domain of TCR clone 193368 (TRAV21, TRAJ52)
CAVTNAGSTSYGKLTF

SEQ ID NO: 386736 - protein, 11 aa, Homo sapiens
  CDR3 for beta chain variable domain of TCR clone 193368 (TRBV2, TRBJ1-1)
CASREGTEAFF

SEQ ID NO: 386737 - protein, 14 aa, Homo sapiens
  CDR3 for alpha chain variable domain of TCR clone 193369 (TRAV13-1, TRAJ35)
CAASKGGFGNVLHC

SEQ ID NO: 386738 - protein, 15 aa, Homo sapiens
  CDR3 for beta chain variable domain of TCR clone 193369 (TRBV7-6, TRBJ1-2)
CASSSGGRGGYGYTF

SEQ ID NO: 386739 - protein, 10 aa, Homo sapiens
  CDR3 for alpha chain variable domain of TCR clone 193370 (TRAV12-2, TRAJ52)
RSTSYGKLTF

SEQ ID NO: 386740 - protein, 11 aa, Homo sapiens
  CDR3 for beta chain variable domain of TCR clone 193370 (TRBV11-2, TRBJ2-2)
CASSLPRELFF

SEQ ID NO: 386741 - protein, 17 aa, Homo sapiens
  CDR3 for alpha chain variable domain of TCR clone 193371 (TRAV3, TRAJ38)
CPVRDCLNAGNNRKLIW

SEQ ID NO: 386742 - protein, 16 aa, Homo sapiens
  CDR3 for beta chain variable domain of TCR clone 193371 (TRBV20-1, TRBJ1-4)
CSAPGQGLLTNEKLFF

SEQ ID NO: 386743 - protein, 16 aa, Homo sapiens
  CDR3 for alpha chain variable domain of TCR clone 193372 (TRAV8-3, TRAJ10)
CAVGPGVTGGGNKLTV

SEQ ID NO: 386744 - protein, 13 aa, Homo sapiens
  CDR3 for beta chain variable domain of TCR clone 193372 (TRBV18, TRBJ1-1)
CASSPGPSGEAFF

SEQ ID NO: 386745 - protein, 16 aa, Homo sapiens
  CDR3 for alpha chain variable domain of TCR clone 193373 (TRAV16, TRAJ52)
CALSAAGGTSYGKLTF

SEQ ID NO: 386746 - protein, 12 aa, Homo sapiens
  CDR3 for beta chain variable domain of TCR clone 193373 (TRBV12-4, TRBJ1-3)
CASSVSGNTMYF

SEQ ID NO: 386747 - protein, 14 aa, Homo sapiens
  CDR3 for alpha chain variable domain of TCR clone 193374 (TRAV29/DV5, TRAJ34)
CAASASRETAKLIF

SEQ ID NO: 386748 - protein, 15 aa, Homo sapiens
  CDR3 for beta chain variable domain of TCR clone 193374 (TRBV7-8, TRBJ2-7)
CASSLERAGSYEQYF

SEQ ID NO: 386749 - protein, 13 aa, Homo sapiens
  CDR3 for alpha chain variable domain of TCR clone 193375 (TRAV36/DV7, TRAJ57)
CAVVLGGSEKLVF

SEQ ID NO: 386750 - protein, 14 aa, Homo sapiens
  CDR3 for beta chain variable domain of TCR clone 193375 (TRBV4-1, TRBJ1-2)
CARSQDGQVRGYTF

SEQ ID NO: 386751 - protein, 12 aa, Homo sapiens
  CDR3 for alpha chain variable domain of TCR clone 193376 (TRAV2, TRAJ33)
CAVQDSNYQLIW

SEQ ID NO: 386752 - protein, 18 aa, Homo sapiens
  CDR3 for beta chain variable domain of TCR clone 193376 (TRBV7-3, TRBJ2-3)
CASSSTGTYPGSTDTQYF

SEQ ID NO: 386753 - protein, 13 aa, Homo sapiens
  CDR3 for alpha chain variable domain of TCR clone 193377 (TRAV8-3, TRAJ28)
CAVGAVGSYQLTF

SEQ ID NO: 386754 - protein, 14 aa, Homo sapiens
  CDR3 for beta chain variable domain of TCR clone 193377 (TRBV11-2, TRBJ2-7)
CASSLGAGAYEQYF

SEQ ID NO: 386755 - protein, 14 aa, Homo sapiens
  CDR3 for alpha chain variable domain of TCR clone 193378 (TRAV17, TRAJ4)
CATAPSGGSNKMIF

SEQ ID NO: 386756 - protein, 13 aa, Homo sapiens
  CDR3 for beta chain variable domain of TCR clone 193378 (TRBV12-4, TRBJ1-3)
CASSLASGNTIYF

SEQ ID NO: 386757 - protein, 17 aa, Homo sapiens
  CDR3 for alpha chain variable domain of TCR clone 193379 (TRAV38-1, TRAJ45)
CAFMRSHSGGGADGLTF

SEQ ID NO: 386758 - protein, 14 aa, Homo sapiens
  CDR3 for beta chain variable domain of TCR clone 193379 (TRBV7-9, TRBJ2-1)
CASSIRQGWDEQFF

SEQ ID NO: 386759 - protein, 14 aa, Homo sapiens
  CDR3 for alpha chain variable domain of TCR clone 193380 (TRAV36/DV7, TRAJ50)
CAVEPENLLREGDI

SEQ ID NO: 386760 - protein, 13 aa, Homo sapiens
  CDR3 for beta chain variable domain of TCR clone 193380 (TRBV7-2, TRBJ2-7)
CASSSPSGSEQYF

SEQ ID NO: 386761 - protein, 14 aa, Homo sapiens
  CDR3 for alpha chain variable domain of TCR clone 193381 (TRAV12-3, TRAJ10)
SHLPLTGGGNKLTF

SEQ ID NO: 386762 - protein, 16 aa, Homo sapiens
  CDR3 for beta chain variable domain of TCR clone 193381 (TRBV11-3, TRBJ2-7)
CASSPGWGPTSSTSGR

SEQ ID NO: 386763 - protein, 10 aa, Homo sapiens
  CDR3 for alpha chain variable domain of TCR clone 193382 (TRAV13-2, TRAJ49)
CADTGNQFYF

SEQ ID NO: 386764 - protein, 14 aa, Homo sapiens
  CDR3 for beta chain variable domain of TCR clone 193382 (TRBV7-2, TRBJ1-2)
CASSQTGSTYGDTF

SEQ ID NO: 386765 - protein, 15 aa, Homo sapiens
  CDR3 for alpha chain variable domain of TCR clone 193383 (TRAV17, TRAJ57)
CATGPSQGGSEKLVF

SEQ ID NO: 386766 - protein, 18 aa, Homo sapiens
  CDR3 for beta chain variable domain of TCR clone 193383 (TRBV11-2, TRBJ2-6)
CASSLNPFLGTGANVLTF

SEQ ID NO: 386767 - protein, 12 aa, Homo sapiens
  CDR3 for alpha chain variable domain of TCR clone 193384 (TRAV8-4, TRAJ37)
CAVSGNTGKVIF

SEQ ID NO: 386768 - protein, 17 aa, Homo sapiens
  CDR3 for beta chain variable domain of TCR clone 193384 (TRBV7-2, TRBJ2-3)
CASSPQGRARVQDTQYS

SEQ ID NO: 386769 - protein, 15 aa, Homo sapiens
  CDR3 for alpha chain variable domain of TCR clone 193385 (TRAV17, TRAJ37)
CATDGGSSNTGKLIF

SEQ ID NO: 386770 - protein, 13 aa, Homo sapiens
  CDR3 for beta chain variable domain of TCR clone 193385 (TRBV20-1, TRBJ1-1)
CSAPPGGHTEAFF

SEQ ID NO: 386771 - protein, 13 aa, Homo sapiens
  CDR3 for alpha chain variable domain of TCR clone 193386 (TRAV30, TRAJ24)
CGTVTDSWGKLQL

SEQ ID NO: 386772 - protein, 16 aa, Homo sapiens
  CDR3 for beta chain variable domain of TCR clone 193386 (TRBV7-3, TRBJ2-2)
CASSLKRGTLSGELFF

SEQ ID NO: 386773 - protein, 15 aa, Homo sapiens
  CDR3 for alpha chain variable domain of TCR clone 193387 (TRAV13-1, TRAJ52)
CALRTCGTSYGKLTF

SEQ ID NO: 386774 - protein, 14 aa, Homo sapiens
  CDR3 for beta chain variable domain of TCR clone 193387 (TRBV20-1, TRBJ2-5)
CSASDSGSGETQYF

SEQ ID NO: 386775 - protein, 14 aa, Homo sapiens
  CDR3 for alpha chain variable domain of TCR clone 193388 (TRAV2, TRAJ9)
CAVEDRSGGFKTIF

SEQ ID NO: 386776 - protein, 15 aa, Homo sapiens
  CDR3 for beta chain variable domain of TCR clone 193388 (TRBV11-2, TRBJ2-1)
CASSLAPRAHNEQFF

SEQ ID NO: 386777 - protein, 13 aa, Homo sapiens
  CDR3 for alpha chain variable domain of TCR clone 193389 (TRAV12-2, TRAJ53)
CAPDLSSNYKLTF

SEQ ID NO: 386778 - protein, 13 aa, Homo sapiens
  CDR3 for beta chain variable domain of TCR clone 193389 (TRBV7-7, TRBJ2-3)
CASSLSRADTQYF

SEQ ID NO: 386779 - protein, 11 aa, Homo sapiens
  CDR3 for alpha chain variable domain of TCR clone 193390 (TRAV1-2, TRAJ8)
CAVSSFQKLVF

SEQ ID NO: 386780 - protein, 13 aa, Homo sapiens
  CDR3 for beta chain variable domain of TCR clone 193390 (TRBV7-3, TRBJ1-1)
CASSQDWGAEAFF

SEQ ID NO: 386781 - protein, 13 aa, Homo sapiens
  CDR3 for alpha chain variable domain of TCR clone 193391 (TRAV13-1, TRAJ41)
CADAPNSGYALNF

SEQ ID NO: 386782 - protein, 13 aa, Homo sapiens
  CDR3 for beta chain variable domain of TCR clone 193391 (TRBV19, TRBJ2-7)
RASEGTTTYEKYF

SEQ ID NO: 386783 - protein, 17 aa, Homo sapiens
  CDR3 for alpha chain variable domain of TCR clone 193392 (TRAV19, TRAJ32)
CSLSERPYGGATNKLIF

SEQ ID NO: 386784 - protein, 15 aa, Homo sapiens
  CDR3 for beta chain variable domain of TCR clone 193392 (TRBV28, TRBJ1-3)
CASSMGWASGNTIYF

SEQ ID NO: 386785 - protein, 11 aa, Homo sapiens
  CDR3 for alpha chain variable domain of TCR clone 193393 (TRAV25, TRAJ23)
CGSNQGGKLIF

SEQ ID NO: 386786 - protein, 15 aa, Homo sapiens
  CDR3 for beta chain variable domain of TCR clone 193393 (TRBV20-1, TRBJ2-7)
CSARDRVSGMDEQYF

SEQ ID NO: 386787 - protein, 15 aa, Homo sapiens
  CDR3 for alpha chain variable domain of TCR clone 193394 (TRAV26-1, TRAJ42)
CIVRVKGGSQGNLIF

SEQ ID NO: 386788 - protein, 16 aa, Homo sapiens
  CDR3 for beta chain variable domain of TCR clone 193394 (TRBV6-4, TRBJ1-2)
CASCEAVGDPNYGYTF

SEQ ID NO: 386789 - protein, 14 aa, Homo sapiens
  CDR3 for alpha chain variable domain of TCR clone 193395 (TRAV23/DV6, TRAJ38)
CAASFVGNNRTLIW

SEQ ID NO: 386790 - protein, 18 aa, Homo sapiens
  CDR3 for beta chain variable domain of TCR clone 193395 (TRBV7-8, TRBJ2-7)
CASSHATPGRLRAYEQYF

SEQ ID NO: 386791 - protein, 18 aa, Homo sapiens
  CDR3 for alpha chain variable domain of TCR clone 193396 (TRAV3, TRAJ10)
CAVRDPRGLTRGGNKLTF

SEQ ID NO: 386792 - protein, 14 aa, Homo sapiens
  CDR3 for beta chain variable domain of TCR clone 193396 (TRBV18, TRBJ2-7)
CASSPRGGAYEQYF

SEQ ID NO: 386793 - protein, 11 aa, Homo sapiens
  CDR3 for alpha chain variable domain of TCR clone 193397 (TRAV4, TRAJ20)
CLVGDNVTTTS

SEQ ID NO: 386794 - protein, 15 aa, Homo sapiens
  CDR3 for beta chain variable domain of TCR clone 193397 (TRBV18, TRBJ2-7)
CASSPSSTGNYEQYF

SEQ ID NO: 386795 - protein, 13 aa, Homo sapiens
  CDR3 for alpha chain variable domain of TCR clone 193398 (TRAV38-1, TRAJ52)
CAFRGTSYGKLTF

SEQ ID NO: 386796 - protein, 15 aa, Homo sapiens
  CDR3 for beta chain variable domain of TCR clone 193398 (TRBV7-8, TRBJ2-5)
CASSYAAGSQETQYF

SEQ ID NO: 386797 - protein, 15 aa, Homo sapiens
  CDR3 for alpha chain variable domain of TCR clone 193399 (TRAV12-3, TRAJ27)
CAMRAYNTNAGKSTF

SEQ ID NO: 386798 - protein, 13 aa, Homo sapiens
  CDR3 for beta chain variable domain of TCR clone 193399 (TRBV11-2, TRBJ2-7)
CASSRGPSETQYF

SEQ ID NO: 386799 - protein, 14 aa, Homo sapiens
  CDR3 for alpha chain variable domain of TCR clone 193400 (TRAV1-2, TRAJ16)
CTVNRFSDGQKLLF

SEQ ID NO: 386800 - protein, 13 aa, Homo sapiens
  CDR3 for beta chain variable domain of TCR clone 193400 (TRBV4-1, TRBJ2-1)
CASSQAGGDEQFF

SEQ ID NO: 386801 - protein, 18 aa, Homo sapiens
  CDR3 for alpha chain variable domain of TCR clone 193401 (TRAV13-1, TRAJ52)
CAASKRRAGGTSYGKQTF

SEQ ID NO: 386802 - protein, 14 aa, Homo sapiens
  CDR3 for beta chain variable domain of TCR clone 193401 (TRBV19, TRBJ2-1)
CASPTFVLSGEQFF

SEQ ID NO: 386803 - protein, 11 aa, Homo sapiens
  CDR3 for alpha chain variable domain of TCR clone 193402 (TRAV21, TRAJ39)
LLVNAGNMLTF

SEQ ID NO: 386804 - protein, 15 aa, Homo sapiens
  CDR3 for beta chain variable domain of TCR clone 193402 (TRBV28, TRBJ2-1)
CASSIIAGGRSEQFF

SEQ ID NO: 386805 - protein, 12 aa, Homo sapiens
  CDR3 for alpha chain variable domain of TCR clone 193403 (TRAV30, TRAJ20)
CGTESNDYKLSF

SEQ ID NO: 386806 - protein, 16 aa, Homo sapiens
  CDR3 for beta chain variable domain of TCR clone 193403 (TRBV20-1, TRBJ1-4)
CSAPGQGLLTNEKLFF

SEQ ID NO: 386807 - protein, 12 aa, Homo sapiens
  CDR3 for alpha chain variable domain of TCR clone 193404 (TRAV35, TRAJ30)
CAGLNRADKIIF

SEQ ID NO: 386808 - protein, 15 aa, Homo sapiens
  CDR3 for beta chain variable domain of TCR clone 193404 (TRBV18, TRBJ2-3)
CASSPLAGETDTQYF

SEQ ID NO: 386809 - protein, 14 aa, Homo sapiens
  CDR3 for alpha chain variable domain of TCR clone 193405 (TRAV38-1, TRAJ45)
CASHSGGGADGLTL

SEQ ID NO: 386810 - protein, 13 aa, Homo sapiens
  CDR3 for beta chain variable domain of TCR clone 193405 (TRBV7-9, TRBJ2-2)
CASSSAGTGELFF

SEQ ID NO: 386811 - protein, 12 aa, Homo sapiens
  CDR3 for alpha chain variable domain of TCR clone 193406 (TRAV12-3, TRAJ20)
CAMVRGDYKLSF

SEQ ID NO: 386812 - protein, 12 aa, Homo sapiens
  CDR3 for beta chain variable domain of TCR clone 193406 (TRBV7-8, TRBJ2-5)
CASSLRAETQYF

SEQ ID NO: 386813 - protein, 14 aa, Homo sapiens
  CDR3 for alpha chain variable domain of TCR clone 193407 (TRAV26-1, TRAJ45)
CIEVTGGGADGLTF

SEQ ID NO: 386814 - protein, 16 aa, Homo sapiens
  CDR3 for beta chain variable domain of TCR clone 193407 (TRBV19, TRBJ2-2)
CASSFPGQGLAGELFF

SEQ ID NO: 386815 - protein, 18 aa, Homo sapiens
  CDR3 for alpha chain variable domain of TCR clone 193408 (TRAV26-1, TRAJ37)
CIVRVDMHGSSNKGKLIF

SEQ ID NO: 386816 - protein, 15 aa, Homo sapiens
  CDR3 for beta chain variable domain of TCR clone 193408 (TRBV20-1, TRBJ2-7)
CSARVLASPLYEQYF

SEQ ID NO: 386817 - protein, 12 aa, Homo sapiens
  CDR3 for alpha chain variable domain of TCR clone 193409 (TRAV12-1, TRAJ23)
CVVNVPGGKLIF

SEQ ID NO: 386818 - protein, 15 aa, Homo sapiens
  CDR3 for beta chain variable domain of TCR clone 193409 (TRBV7-2, TRBJ2-7)
CASSLVSSGSYEQYF

SEQ ID NO: 386819 - protein, 15 aa, Homo sapiens
  CDR3 for alpha chain variable domain of TCR clone 193410 (TRAV21, TRAJ53)
CATLNSGGSNYKLTF

SEQ ID NO: 386820 - protein, 11 aa, Homo sapiens
  CDR3 for beta chain variable domain of TCR clone 193410 (TRBV20-1, TRBJ2-7)
CSARTSYEQYF

SEQ ID NO: 386821 - protein, 10 aa, Homo sapiens
  CDR3 for alpha chain variable domain of TCR clone 193411 (TRAV1-2, TRAJ20)
CALNDYKLSF

SEQ ID NO: 386822 - protein, 16 aa, Homo sapiens
  CDR3 for beta chain variable domain of TCR clone 193411 (TRBV20-1, TRBJ1-1)
CSARALTQGMNTEAVF

SEQ ID NO: 386823 - protein, 15 aa, Homo sapiens
  CDR3 for alpha chain variable domain of TCR clone 193412 (TRAV38-2/DV8, TRAJ48)
CAYRSSESGNEKLTF

SEQ ID NO: 386824 - protein, 13 aa, Homo sapiens
  CDR3 for beta chain variable domain of TCR clone 193412 (TRBV4-2, TRBJ1-2)
CASSLSASGGYTF

SEQ ID NO: 386825 - protein, 12 aa, Homo sapiens
  CDR3 for alpha chain variable domain of TCR clone 193413 (TRAV1-1, TRAJ8)
CAGGTGFQKLVF

SEQ ID NO: 386826 - protein, 13 aa, Homo sapiens
  CDR3 for beta chain variable domain of TCR clone 193413 (TRBV7-9, TRBJ1-6)
CASSLKFDSPLHF

SEQ ID NO: 386827 - protein, 14 aa, Homo sapiens
  CDR3 for alpha chain variable domain of TCR clone 193414 (TRAV38-1, TRAJ45)
CAYYSGGGAYGLTF

SEQ ID NO: 386828 - protein, 20 aa, Homo sapiens
  CDR3 for beta chain variable domain of TCR clone 193414 (TRBV28, TRBJ2-1)
CASTPTGRSPGLAGGNEQFF

SEQ ID NO: 386829 - protein, 14 aa, Homo sapiens
  CDR3 for alpha chain variable domain of TCR clone 193415 (TRAV3, TRAJ7)
CAVREEEREQQTRF

SEQ ID NO: 386830 - protein, 15 aa, Homo sapiens
  CDR3 for beta chain variable domain of TCR clone 193415 (TRBV7-9, TRBJ1-6)
CASSSPGRGNSPLHF

SEQ ID NO: 386831 - protein, 14 aa, Homo sapiens
  CDR3 for alpha chain variable domain of TCR clone 193416 (TRAV1-2, TRAJ16)
CAVNRFSYGQKLLF

SEQ ID NO: 386832 - protein, 14 aa, Homo sapiens
  CDR3 for beta chain variable domain of TCR clone 193416 (TRBV25-1, TRBJ1-1)
CASTHLGGNTEAFF

SEQ ID NO: 386833 - protein, 11 aa, Homo sapiens
  CDR3 for alpha chain variable domain of TCR clone 193417 (TRAV13-2, TRAJ20)
CADSNDYKLSF

SEQ ID NO: 386834 - protein, 12 aa, Homo sapiens
  CDR3 for beta chain variable domain of TCR clone 193417 (TRBV5-1, TRBJ2-3)
CASSLAADTQYY

SEQ ID NO: 386835 - protein, 16 aa, Homo sapiens
  CDR3 for alpha chain variable domain of TCR clone 193418 (TRAV3, TRAJ10)
CAVRDMRAGGGNKLTF

SEQ ID NO: 386836 - protein, 16 aa, Homo sapiens
  CDR3 for beta chain variable domain of TCR clone 193418 (TRBV20-1, TRBJ2-3)
CSARLHSAGAIDTQYF

SEQ ID NO: 386837 - protein, 15 aa, Homo sapiens
  CDR3 for alpha chain variable domain of TCR clone 193419 (TRAV26-1, TRAJ29)
CIVRVEGSGNTPLVF

SEQ ID NO: 386838 - protein, 14 aa, Homo sapiens
  CDR3 for beta chain variable domain of TCR clone 193419 (TRBV11-2, TRBJ2-1)
CASSPGSRDNEQFF

SEQ ID NO: 386839 - protein, 14 aa, Homo sapiens
  CDR3 for alpha chain variable domain of TCR clone 193420 (TRAV17, TRAJ57)
CATDPQGGSEKLVF

SEQ ID NO: 386840 - protein, 20 aa, Homo sapiens
  CDR3 for beta chain variable domain of TCR clone 193420 (TRBV28, TRBJ2-1)
CASTPIGRSPGLAGGNEQFF

SEQ ID NO: 386841 - protein, 12 aa, Homo sapiens
  CDR3 for alpha chain variable domain of TCR clone 193421 (TRAV26-1, TRAJ17)
CIVRSAGNKLTF

SEQ ID NO: 386842 - protein, 15 aa, Homo sapiens
  CDR3 for beta chain variable domain of TCR clone 193421 (TRBV7-6, TRBJ1-2)
CASSSGGRGGYDYTF

SEQ ID NO: 386843 - protein, 14 aa, Homo sapiens
  CDR3 for alpha chain variable domain of TCR clone 193422 (TRAV26-1, TRAJ38)
CIADNAGNNRKLIW

SEQ ID NO: 386844 - protein, 15 aa, Homo sapiens
  CDR3 for beta chain variable domain of TCR clone 193422 (TRBV5-1, TRBJ2-3)
CASSLDPASTDTQYF

SEQ ID NO: 386845 - protein, 14 aa, Homo sapiens
  CDR3 for alpha chain variable domain of TCR clone 193423 (TRAV1-2, TRAJ16)
CAVNRFSDGQKLLF

SEQ ID NO: 386846 - protein, 12 aa, Homo sapiens
  CDR3 for beta chain variable domain of TCR clone 193423 (TRBV28, TRBJ2-1)
CASSFYRHEQFF

SEQ ID NO: 386847 - protein, 15 aa, Homo sapiens
  CDR3 for alpha chain variable domain of TCR clone 193424 (TRAV12-1, TRAJ44)
GVADLPTGTASKLTF

SEQ ID NO: 386848 - protein, 13 aa, Homo sapiens
  CDR3 for beta chain variable domain of TCR clone 193424 (TRBV6-5, TRBJ2-5)
CASSPQGGETQYF

SEQ ID NO: 386849 - protein, 18 aa, Homo sapiens
  CDR3 for alpha chain variable domain of TCR clone 193425 (TRAV12-3, TRAJ52)
CAMSVGGAGGTSYGKLTF

SEQ ID NO: 386850 - protein, 13 aa, Homo sapiens
  CDR3 for beta chain variable domain of TCR clone 193425 (TRBV19, TRBJ1-3)
CASRLSLGNTIYF

SEQ ID NO: 386851 - protein, 14 aa, Homo sapiens
  CDR3 for alpha chain variable domain of TCR clone 193426 (TRAV12-2, TRAJ40)
CAVKIPSGTYKYIF

SEQ ID NO: 386852 - protein, 20 aa, Homo sapiens
  CDR3 for beta chain variable domain of TCR clone 193426 (TRBV28, TRBJ2-1)
CASSPIGRSPGLAGGNEQFF

SEQ ID NO: 386853 - protein, 16 aa, Homo sapiens
  CDR3 for alpha chain variable domain of TCR clone 193427 (TRAV12-3, TRAJ53)
CAMSPGSGGRNYKLTF

SEQ ID NO: 386854 - protein, 16 aa, Homo sapiens
  CDR3 for beta chain variable domain of TCR clone 193427 (TRBV5-1, TRBJ2-3)
CASSLEGGSFTDTQYF

SEQ ID NO: 386855 - protein, 12 aa, Homo sapiens
  CDR3 for alpha chain variable domain of TCR clone 193428 (TRAV27, TRAJ13)
CAGAGGYKKVTF

SEQ ID NO: 386856 - protein, 15 aa, Homo sapiens
  CDR3 for beta chain variable domain of TCR clone 193428 (TRBV20-1, TRBJ2-6)
CSARDRGPGANVLTF

SEQ ID NO: 386857 - protein, 13 aa, Homo sapiens
  CDR3 for alpha chain variable domain of TCR clone 193429 (TRAV21, TRAJ11)
CAVPNSGYSTLTF

SEQ ID NO: 386858 - protein, 15 aa, Homo sapiens
  CDR3 for beta chain variable domain of TCR clone 193429 (TRBV10-3, TRBJ2-1)
CAISDVQDRAYEQFF

SEQ ID NO: 386859 - protein, 13 aa, Homo sapiens
  CDR3 for alpha chain variable domain of TCR clone 193430 (TRAV3, TRAJ21)
CAVREPDFNKFYF

SEQ ID NO: 386860 - protein, 15 aa, Homo sapiens
  CDR3 for beta chain variable domain of TCR clone 193430 (TRBV18, TRBJ2-1)
CASSPPSASYNEQFF

SEQ ID NO: 386861 - protein, 15 aa, Homo sapiens
  CDR3 for alpha chain variable domain of TCR clone 193431 (TRAV8-3, TRAJ41)
CAVGSNSNSGYALNF

SEQ ID NO: 386862 - protein, 11 aa, Homo sapiens
  CDR3 for beta chain variable domain of TCR clone 193431 (TRBV19, TRBJ1-1)
CASSIGSEAFF

SEQ ID NO: 386863 - protein, 14 aa, Homo sapiens
  CDR3 for alpha chain variable domain of TCR clone 193432 (TRAV1-2, TRAJ8)
CAVREDTGSQKLVF

SEQ ID NO: 386864 - protein, 15 aa, Homo sapiens
  CDR3 for beta chain variable domain of TCR clone 193432 (TRBV5-5, TRBJ2-3)
CASSPGLATTDTQYF

SEQ ID NO: 386865 - protein, 13 aa, Homo sapiens
  CDR3 for alpha chain variable domain of TCR clone 193433 (TRAV8-3, TRAJ6)
GAVEKGGSYIPTV

SEQ ID NO: 386866 - protein, 15 aa, Homo sapiens
  CDR3 for beta chain variable domain of TCR clone 193433 (TRBV28, TRBJ2-5)
CASSADRGRGETQYF

SEQ ID NO: 386867 - protein, 15 aa, Homo sapiens
  CDR3 for alpha chain variable domain of TCR clone 193434 (TRAV4, TRAJ39)
CLVDPNNNAGNMLTF

SEQ ID NO: 386868 - protein, 13 aa, Homo sapiens
  CDR3 for beta chain variable domain of TCR clone 193434 (TRBV11-2, TRBJ2-5)
CASSSTGEETQYF

SEQ ID NO: 386869 - protein, 14 aa, Homo sapiens
  CDR3 for alpha chain variable domain of TCR clone 193435 (TRAV8-6, TRAJ8)
CAVNENTGFQKLVF

SEQ ID NO: 386870 - protein, 13 aa, Homo sapiens
  CDR3 for beta chain variable domain of TCR clone 193435 (TRBV29-1, TRBJ2-2)
CSVYREDTGELFF

SEQ ID NO: 386871 - protein, 16 aa, Homo sapiens
  CDR3 for alpha chain variable domain of TCR clone 193436 (TRAV29/DV5, TRAJ36)
CAASAHYQSGANNLFF

SEQ ID NO: 386872 - protein, 12 aa, Homo sapiens
  CDR3 for beta chain variable domain of TCR clone 193436 (TRBV2, TRBJ1-2)
CASSGQTYGYSF

SEQ ID NO: 386873 - protein, 14 aa, Homo sapiens
  CDR3 for alpha chain variable domain of TCR clone 193437 (TRAV12-2, TRAJ24)
CAVTPAESWGKLQF

SEQ ID NO: 386874 - protein, 17 aa, Homo sapiens
  CDR3 for beta chain variable domain of TCR clone 193437 (TRBV19, TRBJ2-7)
CASSISFYDSYPYEQYF

SEQ ID NO: 386875 - protein, 12 aa, Homo sapiens
  CDR3 for alpha chain variable domain of TCR clone 193438 (TRAV13-2, TRAJ41)
CAKNIGRYALNF

SEQ ID NO: 386876 - protein, 12 aa, Homo sapiens
  CDR3 for beta chain variable domain of TCR clone 193438 (TRBV7-9, TRBJ1-1)
CASSLSGGVAFL

SEQ ID NO: 386877 - protein, 16 aa, Homo sapiens
  CDR3 for alpha chain variable domain of TCR clone 193439 (TRAV26-1, TRAJ36)
CIVRVPDQTGANNHFF

SEQ ID NO: 386878 - protein, 21 aa, Homo sapiens
  CDR3 for beta chain variable domain of TCR clone 193439 (TRBV6-1, TRBJ1-1)
CASSGVGNYKGISGFDTEAFF

SEQ ID NO: 386879 - protein, 17 aa, Homo sapiens
  CDR3 for alpha chain variable domain of TCR clone 193440 (TRAV27, TRAJ42)
CAERVSYYGGSQGNLIF

SEQ ID NO: 386880 - protein, 14 aa, Homo sapiens
  CDR3 for beta chain variable domain of TCR clone 193440 (TRBV6-6, TRBJ2-3)
CASRLQREADTQYF

SEQ ID NO: 386881 - protein, 12 aa, Homo sapiens
  CDR3 for alpha chain variable domain of TCR clone 193441 (TRAV13-1, TRAJ21)
CAAKEGFNKFYF

SEQ ID NO: 386882 - protein, 13 aa, Homo sapiens
  CDR3 for beta chain variable domain of TCR clone 193441 (TRBV12-4, TRBJ1-5)
CASSPRQYQPQHF

SEQ ID NO: 386883 - protein, 17 aa, Homo sapiens
  CDR3 for alpha chain variable domain of TCR clone 193442 (TRAV3, TRAJ6)
CAVRDGPRAGGRHTPTF

SEQ ID NO: 386884 - protein, 14 aa, Homo sapiens
  CDR3 for beta chain variable domain of TCR clone 193442 (TRBV7-2, TRBJ2-7)
CASSPKTSFYEQYF

SEQ ID NO: 386885 - protein, 16 aa, Homo sapiens
  CDR3 for alpha chain variable domain of TCR clone 193443 (TRAV30, TRAJ24)
CGTEIVEADSWGKFQF

SEQ ID NO: 386886 - protein, 15 aa, Homo sapiens
  CDR3 for beta chain variable domain of TCR clone 193443 (TRBV28, TRBJ2-1)
CASSIIAGGRSEQFF

SEQ ID NO: 386887 - protein, 14 aa, Homo sapiens
  CDR3 for alpha chain variable domain of TCR clone 193444 (TRAV12-2, TRAJ3)
CAVSLYSNASKIIF

SEQ ID NO: 386888 - protein, 14 aa, Homo sapiens
  CDR3 for beta chain variable domain of TCR clone 193444 (TRBV27, TRBJ2-1)
CAGSIAETYNEQFF

SEQ ID NO: 386889 - protein, 11 aa, Homo sapiens
  CDR3 for alpha chain variable domain of TCR clone 193445 (TRAV12-1, TRAJ37)
CVVNTPGKLIF

SEQ ID NO: 386890 - protein, 13 aa, Homo sapiens
  CDR3 for beta chain variable domain of TCR clone 193445 (TRBV19, TRBJ1-2)
CASSQGQVYGYTF

SEQ ID NO: 386891 - protein, 13 aa, Homo sapiens
  CDR3 for alpha chain variable domain of TCR clone 193446 (TRAV22, TRAJ31)
CAVKGRDNARLMF

SEQ ID NO: 386892 - protein, 16 aa, Homo sapiens
  CDR3 for beta chain variable domain of TCR clone 193446 (TRBV27, TRBJ1-1)
CASSSRGRTGYTEAFF

SEQ ID NO: 386893 - protein, 14 aa, Homo sapiens
  CDR3 for alpha chain variable domain of TCR clone 193447 (TRAV17, TRAJ12)
CAILPMDSSYKLIF

SEQ ID NO: 386894 - protein, 12 aa, Homo sapiens
  CDR3 for beta chain variable domain of TCR clone 193447 (TRBV11-2, TRBJ2-1)
CASSPGNNEQFF

SEQ ID NO: 386895 - protein, 11 aa, Homo sapiens
  CDR3 for alpha chain variable domain of TCR clone 193448 (TRAV21, TRAJ9)
CAVPGGFKTIF

SEQ ID NO: 386896 - protein, 13 aa, Homo sapiens
  CDR3 for beta chain variable domain of TCR clone 193448 (TRBV7-3, TRBJ1-1)
CASSQDWGAEAFF

SEQ ID NO: 386897 - protein, 12 aa, Homo sapiens
  CDR3 for alpha chain variable domain of TCR clone 193449 (TRAV17, TRAJ49)
CATVTTGNQFYF

SEQ ID NO: 386898 - protein, 13 aa, Homo sapiens
  CDR3 for beta chain variable domain of TCR clone 193449 (TRBV3-1, TRBJ1-1)
CASSPGVITEAFF

SEQ ID NO: 386899 - protein, 13 aa, Homo sapiens
  CDR3 for alpha chain variable domain of TCR clone 193450 (TRAV1-2, TRAJ9)
CATLNTGGFKTIF

SEQ ID NO: 386900 - protein, 13 aa, Homo sapiens
  CDR3 for beta chain variable domain of TCR clone 193450 (TRBV19, TRBJ1-2)
CASSVPGQGGYTF

SEQ ID NO: 386901 - protein, 14 aa, Homo sapiens
  CDR3 for alpha chain variable domain of TCR clone 193451 (TRAV8-3, TRAJ35)
CAVVPQGFGNVLHC

SEQ ID NO: 386902 - protein, 16 aa, Homo sapiens
  CDR3 for beta chain variable domain of TCR clone 193451 (TRBV20-1, TRBJ2-3)
YSARLHSAGAIDTQYF

SEQ ID NO: 386903 - protein, 13 aa, Homo sapiens
  CDR3 for alpha chain variable domain of TCR clone 193452 (TRAV12-1, TRAJ16)
CVVNGPDGQKLLF

SEQ ID NO: 386904 - protein, 15 aa, Homo sapiens
  CDR3 for beta chain variable domain of TCR clone 193452 (TRBV6-3, TRBJ2-7)
CASSSPGTGFYEQYF

SEQ ID NO: 386905 - protein, 13 aa, Homo sapiens
  CDR3 for alpha chain variable domain of TCR clone 193453 (TRAV12-3, TRAJ13)
CAMTYGGYQKVTF

SEQ ID NO: 386906 - protein, 13 aa, Homo sapiens
  CDR3 for beta chain variable domain of TCR clone 193453 (TRBV7-9, TRBJ1-2)
CASSLKQNYGYTF

SEQ ID NO: 386907 - protein, 13 aa, Homo sapiens
  CDR3 for alpha chain variable domain of TCR clone 193454 (TRAV12-3, TRAJ7)
CAMTPYVNNRLAF

SEQ ID NO: 386908 - protein, 16 aa, Homo sapiens
  CDR3 for beta chain variable domain of TCR clone 193454 (TRBV5-1, TRBJ2-2)
CASSLWDTTNTGELFF

SEQ ID NO: 386909 - protein, 13 aa, Homo sapiens
  CDR3 for alpha chain variable domain of TCR clone 193455 (TRAV21, TRAJ56)
CAVRTGAHSKLTF

SEQ ID NO: 386910 - protein, 12 aa, Homo sapiens
  CDR3 for beta chain variable domain of TCR clone 193455 (TRBV6-5, TRBJ1-6)
CASSSHNSPLHF

SEQ ID NO: 386911 - protein, 21 aa, Homo sapiens
  CDR3 for alpha chain variable domain of TCR clone 193456 (TRAV1-2, TRAJ37)
CLLPLCCERFHGSGNTGKLIF

SEQ ID NO: 386912 - protein, 14 aa, Homo sapiens
  CDR3 for beta chain variable domain of TCR clone 193456 (TRBV2, TRBJ2-5)
CASSEVLAQETQYF

SEQ ID NO: 386913 - protein, 14 aa, Homo sapiens
  CDR3 for alpha chain variable domain of TCR clone 193457 (TRAV16, TRAJ42)
CALLAGGSHGNLIF

SEQ ID NO: 386914 - protein, 15 aa, Homo sapiens
  CDR3 for beta chain variable domain of TCR clone 193457 (TRBV2, TRBJ2-7)
CASSEGLARSYEQYF

SEQ ID NO: 386915 - protein, 12 aa, Homo sapiens
  CDR3 for alpha chain variable domain of TCR clone 193458 (TRAV13-1, TRAJ21)
CAAEEGFNKFYF

SEQ ID NO: 386916 - protein, 17 aa, Homo sapiens
  CDR3 for beta chain variable domain of TCR clone 193458 (TRBV20-1, TRBJ2-1)
CSASSSGLAGSYNEQFF

SEQ ID NO: 386917 - protein, 17 aa, Homo sapiens
  CDR3 for alpha chain variable domain of TCR clone 193459 (TRAV3, TRAJ12)
CAVRDGGRMDSSYKLIF

SEQ ID NO: 386918 - protein, 15 aa, Homo sapiens
  CDR3 for beta chain variable domain of TCR clone 193459 (TRBV12-4, TRBJ2-1)
CASSLLATGNNEQFF

SEQ ID NO: 386919 - protein, 14 aa, Homo sapiens
  CDR3 for alpha chain variable domain of TCR clone 193460 (TRAV2, TRAJ37)
CAVDFTSNTGKLIF

SEQ ID NO: 386920 - protein, 13 aa, Homo sapiens
  CDR3 for beta chain variable domain of TCR clone 193460 (TRBV7-9, TRBJ2-5)
CASSSTGTGTQYF

SEQ ID NO: 386921 - protein, 13 aa, Homo sapiens
  CDR3 for alpha chain variable domain of TCR clone 193461 (TRAV3, TRAJ20)
CCEAFCNDYKLSF

SEQ ID NO: 386922 - protein, 16 aa, Homo sapiens
  CDR3 for beta chain variable domain of TCR clone 193461 (TRBV12-5, TRBJ2-5)
CASGPRTSANQETQYF

SEQ ID NO: 386923 - protein, 11 aa, Homo sapiens
  CDR3 for alpha chain variable domain of TCR clone 193462 (TRAV14/DV4, )
CAMREISRTLN

SEQ ID NO: 386924 - protein, 14 aa, Homo sapiens
  CDR3 for beta chain variable domain of TCR clone 193462 (TRBV2, TRBJ2-1)
CASSDRAYYNEQFF

SEQ ID NO: 386925 - protein, 12 aa, Homo sapiens
  CDR3 for alpha chain variable domain of TCR clone 193463 (TRAV21, TRAJ31)
CAVWGNNARLMF

SEQ ID NO: 386926 - protein, 14 aa, Homo sapiens
  CDR3 for beta chain variable domain of TCR clone 193463 (TRBV6-1, TRBJ1-3)
CASVQWGGGNTIYF

SEQ ID NO: 386927 - protein, 15 aa, Homo sapiens
  CDR3 for alpha chain variable domain of TCR clone 193464 (TRAV21, TRAJ53)
CATLTSGGSNYKLTF

SEQ ID NO: 386928 - protein, 16 aa, Homo sapiens
  CDR3 for beta chain variable domain of TCR clone 193464 (TRBV29-1, TRBJ1-2)
CSVEANRDIANYGYTF

SEQ ID NO: 386929 - protein, 15 aa, Homo sapiens
  CDR3 for alpha chain variable domain of TCR clone 193465 (TRAV26-1, TRAJ48)
CTSRWSWFGNEKLTF

SEQ ID NO: 386930 - protein, 12 aa, Homo sapiens
  CDR3 for beta chain variable domain of TCR clone 193465 (TRBV19, TRBJ2-5)
CASSISEETQYF

SEQ ID NO: 386931 - protein, 11 aa, Homo sapiens
  CDR3 for alpha chain variable domain of TCR clone 193466 (TRAV2, TRAJ13)
CASGGYQNVTF

SEQ ID NO: 386932 - protein, 16 aa, Homo sapiens
  CDR3 for beta chain variable domain of TCR clone 193466 (TRBV27, TRBJ2-2)
CASSLSGFWVTGELFF

SEQ ID NO: 386933 - protein, 14 aa, Homo sapiens
  CDR3 for alpha chain variable domain of TCR clone 193467 (TRAV12-2, TRAJ29)
CAVRRNSGNTPRVF

SEQ ID NO: 386934 - protein, 13 aa, Homo sapiens
  CDR3 for beta chain variable domain of TCR clone 193467 (TRBV12-4, TRBJ2-1)
CASSHSTDNEQFF

SEQ ID NO: 386935 - protein, 17 aa, Homo sapiens
  CDR3 for alpha chain variable domain of TCR clone 193468 (TRAV13-1, TRAJ52)
CAASSGAGGTSYGKLTF

SEQ ID NO: 386936 - protein, 13 aa, Homo sapiens
  CDR3 for beta chain variable domain of TCR clone 193468 (TRBV7-2, TRBJ1-2)
CASSSRGAYGYTF

SEQ ID NO: 386937 - protein, 14 aa, Homo sapiens
  CDR3 for alpha chain variable domain of TCR clone 193469 (TRAV17, TRAJ4)
CATVPSGGYNKLIF

SEQ ID NO: 386938 - protein, 14 aa, Homo sapiens
  CDR3 for beta chain variable domain of TCR clone 193469 (TRBV7-9, TRBJ1-2)
CASKRGTLTYGYTF

SEQ ID NO: 386939 - protein, 16 aa, Homo sapiens
  CDR3 for alpha chain variable domain of TCR clone 193470 (TRAV13-1, TRAJ18)
CAASRMRGSTLGRLDF

SEQ ID NO: 386940 - protein, 15 aa, Homo sapiens
  CDR3 for beta chain variable domain of TCR clone 193470 (TRBV29-1, TRBJ2-1)
CSVGRHALFYNEQFF

SEQ ID NO: 386941 - protein, 14 aa, Homo sapiens
  CDR3 for alpha chain variable domain of TCR clone 193471 (TRAV38-1, TRAJ39)
CAFAYHNAGNMLTF

SEQ ID NO: 386942 - protein, 15 aa, Homo sapiens
  CDR3 for beta chain variable domain of TCR clone 193471 (TRBV19, TRBJ2-6)
CASSIGPSGANVLTF

SEQ ID NO: 386943 - protein, 14 aa, Homo sapiens
  CDR3 for alpha chain variable domain of TCR clone 193472 (TRAV1-2, TRAJ16)
CAVNRFSDGKKLLF

SEQ ID NO: 386944 - protein, 16 aa, Homo sapiens
  CDR3 for beta chain variable domain of TCR clone 193472 (TRBV27, TRBJ2-2)
CASSFRGLVRTGELFF

SEQ ID NO: 386945 - protein, 13 aa, Homo sapiens
  CDR3 for alpha chain variable domain of TCR clone 193473 (TRAV12-3, TRAJ7)
CAMTPYGNNRLAF

SEQ ID NO: 386946 - protein, 16 aa, Homo sapiens
  CDR3 for beta chain variable domain of TCR clone 193473 (TRBV20-1, IGLJ4)
CSARPYGGELNEKLFF

SEQ ID NO: 386947 - protein, 15 aa, Homo sapiens
  CDR3 for alpha chain variable domain of TCR clone 193474 (TRAV8-6, TRAJ11)
CAVSDRRAGYSTLTF

SEQ ID NO: 386948 - protein, 15 aa, Homo sapiens
  CDR3 for beta chain variable domain of TCR clone 193474 (TRBV7-3, TRBJ2-1)
CASSPTGGSRNEQFF

SEQ ID NO: 386949 - protein, 15 aa, Homo sapiens
  CDR3 for alpha chain variable domain of TCR clone 193475 (TRAV3, TRAJ22)
CAVRDRGGSARQLTF

SEQ ID NO: 386950 - protein, 15 aa, Homo sapiens
  CDR3 for beta chain variable domain of TCR clone 193475 (TRBV27, TRBJ2-1)
CASRNGGASSNEQFF

SEQ ID NO: 386951 - protein, 16 aa, Homo sapiens
  CDR3 for alpha chain variable domain of TCR clone 193476 (TRAV30, TRAJ24)
FGTEIVDADSRGKFQF

SEQ ID NO: 386952 - protein, 14 aa, Homo sapiens
  CDR3 for beta chain variable domain of TCR clone 193476 (TRBV20-1, TRBJ1-1)
CSAQTRIGGTEAFF

SEQ ID NO: 386953 - protein, 13 aa, Homo sapiens
  CDR3 for alpha chain variable domain of TCR clone 193477 (TRAV12-3, TRAJ7)
CAMSASGNNRLAF

SEQ ID NO: 386954 - protein, 14 aa, Homo sapiens
  CDR3 for beta chain variable domain of TCR clone 193477 (TRBV13, TRBJ2-5)
CASSLGPRGETQYF

SEQ ID NO: 386955 - protein, 10 aa, Homo sapiens
  CDR3 for alpha chain variable domain of TCR clone 193478 (TRAV12-3, TRAJ18)
CAMSAEAQPW

SEQ ID NO: 386956 - protein, 13 aa, Homo sapiens
  CDR3 for beta chain variable domain of TCR clone 193478 (TRBV15, TRBJ1-6)
CAASGGLNSPLHF

SEQ ID NO: 386957 - protein, 16 aa, Homo sapiens
  CDR3 for alpha chain variable domain of TCR clone 193479 (TRAV20, TRAJ22)
CAVQASSSGSARQLTF

SEQ ID NO: 386958 - protein, 14 aa, Homo sapiens
  CDR3 for beta chain variable domain of TCR clone 193479 (TRBV11-2, TRBJ2-5)
CASSRTGGIETQYF

SEQ ID NO: 386959 - protein, 15 aa, Homo sapiens
  CDR3 for alpha chain variable domain of TCR clone 193480 (TRAV2, TRAJ15)
CAVEDRGLAGTALIF

SEQ ID NO: 386960 - protein, 13 aa, Homo sapiens
  CDR3 for beta chain variable domain of TCR clone 193480 (TRBV10-2, TRBJ2-7)
CASGASGGYEQYF

SEQ ID NO: 386961 - protein, 18 aa, Homo sapiens
  CDR3 for alpha chain variable domain of TCR clone 193481 (TRAV21, TRAJ4)
SLVTQPPTPRGGYNKLIF

SEQ ID NO: 386962 - protein, 16 aa, Homo sapiens
  CDR3 for beta chain variable domain of TCR clone 193481 (TRBV12-5, TRBJ2-5)
CASGPRTSGNQETQYF

SEQ ID NO: 386963 - protein, 17 aa, Homo sapiens
  CDR3 for alpha chain variable domain of TCR clone 193482 (TRAV13-1, TRAJ52)
CAASSGAGGTSYGKLTF

SEQ ID NO: 386964 - protein, 15 aa, Homo sapiens
  CDR3 for beta chain variable domain of TCR clone 193482 (TRBV27, TRBJ2-7)
CASSTAGTGSYEQYF

SEQ ID NO: 386965 - protein, 12 aa, Homo sapiens
  CDR3 for alpha chain variable domain of TCR clone 193483 (TRAV12-1, TRAJ50)
CVGRTSYDKEIF

SEQ ID NO: 386966 - protein, 12 aa, Homo sapiens
  CDR3 for beta chain variable domain of TCR clone 193483 (TRBV5-7, TRBJ1-1)
CASILVGTEAFF

SEQ ID NO: 386967 - protein, 12 aa, Homo sapiens
  CDR3 for alpha chain variable domain of TCR clone 193484 (TRAV8-4, TRAJ43)
CAGRVNNNDMRF

SEQ ID NO: 386968 - protein, 18 aa, Homo sapiens
  CDR3 for beta chain variable domain of TCR clone 193484 (TRBV5-7, TRBJ2-2)
CASSLGASGGLNTGELFF

SEQ ID NO: 386969 - protein, 21 aa, Homo sapiens
  CDR3 for alpha chain variable domain of TCR clone 193485 (TRAV1-1, TRAJ6)
CLLLLRCERLEKTGGSYIPTF

SEQ ID NO: 386970 - protein, 13 aa, Homo sapiens
  CDR3 for beta chain variable domain of TCR clone 193485 (TRBV10-2, TRBJ2-7)
CASGASGGYEQYF

SEQ ID NO: 386971 - protein, 18 aa, Homo sapiens
  CDR3 for alpha chain variable domain of TCR clone 193486 (TRAV21, TRAJ52)
CAVRPSPAGGTSYGKLTF

SEQ ID NO: 386972 - protein, 14 aa, Homo sapiens
  CDR3 for beta chain variable domain of TCR clone 193486 (TRBV12-4, TRBJ2-5)
CASSLWQKQETQYF

SEQ ID NO: 386973 - protein, 13 aa, Homo sapiens
  CDR3 for alpha chain variable domain of TCR clone 193487 (TRAV38-1, TRAJ7)
CAFIMDGNNRLAF

SEQ ID NO: 386974 - protein, 14 aa, Homo sapiens
  CDR3 for beta chain variable domain of TCR clone 193487 (TRBV4-2, TRBJ2-3)
CASRETRAPGMQYF

SEQ ID NO: 386975 - protein, 19 aa, Homo sapiens
  CDR3 for alpha chain variable domain of TCR clone 193488 (TRAV3, TRAJ6)
CAVRDGPGQEEVTYLHLEE

SEQ ID NO: 386976 - protein, 14 aa, Homo sapiens
  CDR3 for beta chain variable domain of TCR clone 193488 (TRBV7-2, TRBJ2-7)
CASSPKTSFYEQYF

SEQ ID NO: 386977 - protein, 12 aa, Homo sapiens
  CDR3 for alpha chain variable domain of TCR clone 193489 (TRAV24, TRAJ40)
CAFMPGTYKYIF

SEQ ID NO: 386978 - protein, 11 aa, Homo sapiens
  CDR3 for beta chain variable domain of TCR clone 193489 (TRBV10-1, TRBJ2-3)
CSSSDSDTQYF

SEQ ID NO: 386979 - protein, 13 aa, Homo sapiens
  CDR3 for alpha chain variable domain of TCR clone 193490 (TRAV12-1, TRAJ7)
CVVNMRGNNRLAF

SEQ ID NO: 386980 - protein, 12 aa, Homo sapiens
  CDR3 for beta chain variable domain of TCR clone 193490 (TRBV5-1, TRBJ2-2)
CASSPNTGELFF

SEQ ID NO: 386981 - protein, 16 aa, Homo sapiens
  CDR3 for alpha chain variable domain of TCR clone 193491 (TRAV4, TRAJ22)
CLVGDLYSGSASQLTF

SEQ ID NO: 386982 - protein, 16 aa, Homo sapiens
  CDR3 for beta chain variable domain of TCR clone 193491 (TRBV7-9, TRBJ2-3)
CASSPWREVGTDTQYF

SEQ ID NO: 386983 - protein, 14 aa, Homo sapiens
  CDR3 for alpha chain variable domain of TCR clone 193492 (TRAV1-2, TRAJ16)
CAVNRFSDGQKLLF

SEQ ID NO: 386984 - protein, 16 aa, Homo sapiens
  CDR3 for beta chain variable domain of TCR clone 193492 (TRBV12-4, TRBJ2-5)
CASSFFVRWRQETQYF

SEQ ID NO: 386985 - protein, 13 aa, Homo sapiens
  CDR3 for alpha chain variable domain of TCR clone 193493 (TRAV12-2, TRAJ9)
CAVKWAGGSKTIF

SEQ ID NO: 386986 - protein, 13 aa, Homo sapiens
  CDR3 for beta chain variable domain of TCR clone 193493 (TRBV4-2, TRBJ1-1)
CASSQAGNTEAFF

SEQ ID NO: 386987 - protein, 14 aa, Homo sapiens
  CDR3 for alpha chain variable domain of TCR clone 193494 (TRAV12-2, TRAJ40)
CAVKIPSGAYKNIF

SEQ ID NO: 386988 - protein, 14 aa, Homo sapiens
  CDR3 for beta chain variable domain of TCR clone 193494 (TRBV20-1, TRBJ1-1)
CSAQTRIGGTEAFF

SEQ ID NO: 386989 - protein, 15 aa, Homo sapiens
  CDR3 for alpha chain variable domain of TCR clone 193495 (TRAV26-1, TRAJ29)
CIFRVEGSGNTPLVF

SEQ ID NO: 386990 - protein, 15 aa, Homo sapiens
  CDR3 for beta chain variable domain of TCR clone 193495 (TRBV7-9, TRBJ1-5)
CASSQGHQPKQPQHF

SEQ ID NO: 386991 - protein, 12 aa, Homo sapiens
  CDR3 for alpha chain variable domain of TCR clone 193496 (TRAV12-3, TRAJ17)
CAITLTGNTLTF

SEQ ID NO: 386992 - protein, 15 aa, Homo sapiens
  CDR3 for beta chain variable domain of TCR clone 193496 (TRBV20-1, TRBJ2-7)
CSARDRVSGMDEQYF

SEQ ID NO: 386993 - protein, 11 aa, Homo sapiens
  CDR3 for alpha chain variable domain of TCR clone 193497 (TRAV8-6, TRAJ13)
CALGIYQKVTF

SEQ ID NO: 386994 - protein, 13 aa, Homo sapiens
  CDR3 for beta chain variable domain of TCR clone 193497 (TRBV7-7, TRBJ2-5)
CASSRSGQETQYF

SEQ ID NO: 386995 - protein, 15 aa, Homo sapiens
  CDR3 for alpha chain variable domain of TCR clone 193498 (TRAV34, TRAJ36)
CGAPSRLGGANNLFF

SEQ ID NO: 386996 - protein, 16 aa, Homo sapiens
  CDR3 for beta chain variable domain of TCR clone 193498 (TRBV4-3, TRBJ2-1)
CASSYRRLGGWDEQFF

SEQ ID NO: 386997 - protein, 12 aa, Homo sapiens
  CDR3 for alpha chain variable domain of TCR clone 193499 (TRAV21, TRAJ49)
CAVRNTGNQFYF

SEQ ID NO: 386998 - protein, 16 aa, Homo sapiens
  CDR3 for beta chain variable domain of TCR clone 193499 (TRBV7-9, TRBJ2-7)
CASSLARTDVAWGQYF

SEQ ID NO: 386999 - protein, 14 aa, Homo sapiens
  CDR3 for alpha chain variable domain of TCR clone 193500 (TRAV1-2, TRAJ8)
CAVREDTGFQKLVF

SEQ ID NO: 387000 - protein, 15 aa, Homo sapiens
  CDR3 for beta chain variable domain of TCR clone 193500 (TRBV7-9, TRBJ2-2)
CASGPVDTFPGELFF

SEQ ID NO: 387001 - protein, 14 aa, Homo sapiens
  CDR3 for alpha chain variable domain of TCR clone 193501 (TRAV12-2, TRAJ36)
CAVNPPTGPNNLFF

SEQ ID NO: 387002 - protein, 13 aa, Homo sapiens
  CDR3 for beta chain variable domain of TCR clone 193501 (TRBV20-1, TRBJ1-6)
CSAPTGLGSPLHF

SEQ ID NO: 387003 - protein, 14 aa, Homo sapiens
  CDR3 for alpha chain variable domain of TCR clone 193502 (TRAV8-1, TRAJ9)
CAVNAWTGGFKTIF

SEQ ID NO: 387004 - protein, 14 aa, Homo sapiens
  CDR3 for beta chain variable domain of TCR clone 193502 (TRBV7-8, TRBJ2-3)
CASSSRDSTDTQYF

SEQ ID NO: 387005 - protein, 14 aa, Homo sapiens
  CDR3 for alpha chain variable domain of TCR clone 193503 (TRAV26-1, TRAJ38)
CIADNAGNSRKLIW

SEQ ID NO: 387006 - protein, 14 aa, Homo sapiens
  CDR3 for beta chain variable domain of TCR clone 193503 (TRBV4-1, TRBJ2-2)
CASSQAVNTGELFF

SEQ ID NO: 387007 - protein, 16 aa, Homo sapiens
  CDR3 for alpha chain variable domain of TCR clone 193504 (TRAV20, TRAJ54)
CAVQRVLIQGAQKLVF

SEQ ID NO: 387008 - protein, 13 aa, Homo sapiens
  CDR3 for beta chain variable domain of TCR clone 193504 (TRBV15, TRBJ2-7)
CATSTTGHYEQYF

SEQ ID NO: 387009 - protein, 16 aa, Homo sapiens
  CDR3 for alpha chain variable domain of TCR clone 193505 (TRAV26-1, TRAJ11)
CIVRVVLGFRIQHPHL

SEQ ID NO: 387010 - protein, 15 aa, Homo sapiens
  CDR3 for beta chain variable domain of TCR clone 193505 (TRBV11-3, TRBJ2-3)
CASLKDGREGDTQYF

SEQ ID NO: 387011 - protein, 14 aa, Homo sapiens
  CDR3 for alpha chain variable domain of TCR clone 193506 (TRAV17, TRAJ37)
CATDGSSNSGKLIF

SEQ ID NO: 387012 - protein, 13 aa, Homo sapiens
  CDR3 for beta chain variable domain of TCR clone 193506 (TRBV11-2, TRBJ2-1)
CASSLDLVNEQFF

SEQ ID NO: 387013 - protein, 13 aa, Homo sapiens
  CDR3 for alpha chain variable domain of TCR clone 193507 (TRAV12-2, TRAJ6)
CAARGGGSYIPTF

SEQ ID NO: 387014 - protein, 17 aa, Homo sapiens
  CDR3 for beta chain variable domain of TCR clone 193507 (TRBV11-2, TRBJ2-1)
CASSLYPPGVEYNEQFF

SEQ ID NO: 387015 - protein, 14 aa, Homo sapiens
  CDR3 for alpha chain variable domain of TCR clone 193508 (TRAV2, TRAJ3)
CAVLPYSSASKIIF

SEQ ID NO: 387016 - protein, 17 aa, Homo sapiens
  CDR3 for beta chain variable domain of TCR clone 193508 (TRBV7-6, TRBJ2-5)
CASSSPQAGDPSETQYF

SEQ ID NO: 387017 - protein, 14 aa, Homo sapiens
  CDR3 for alpha chain variable domain of TCR clone 193509 (TRAV12-1, TRAJ17)
CVVNYKAAGNKLTF

SEQ ID NO: 387018 - protein, 15 aa, Homo sapiens
  CDR3 for beta chain variable domain of TCR clone 193509 (TRBV19, TRBJ1-2)
CASNLGGETPYGYTF

SEQ ID NO: 387019 - protein, 14 aa, Homo sapiens
  CDR3 for alpha chain variable domain of TCR clone 193510 (TRAV21, TRAJ28)
CAVGSGAGSYQLTS

SEQ ID NO: 387020 - protein, 14 aa, Homo sapiens
  CDR3 for beta chain variable domain of TCR clone 193510 (TRBV18, TRBJ1-4)
CASSPGPNGEKLFF

SEQ ID NO: 387021 - protein, 14 aa, Homo sapiens
  CDR3 for alpha chain variable domain of TCR clone 193511 (TRAV1-2, TRAJ8)
CAVREDTGFQKLVF

SEQ ID NO: 387022 - protein, 16 aa, Homo sapiens
  CDR3 for beta chain variable domain of TCR clone 193511 (TRBV9, TRBJ2-2)
CASSAMGKGNTGELFF

SEQ ID NO: 387023 - protein, 14 aa, Homo sapiens
  CDR3 for alpha chain variable domain of TCR clone 193512 (TRAV40, TRAJ41)
CLLGPPNSGYVLNF

SEQ ID NO: 387024 - protein, 11 aa, Homo sapiens
  CDR3 for beta chain variable domain of TCR clone 193512 (TRBV19, TRBJ2-7)
CASSILGEQYF

SEQ ID NO: 387025 - protein, 11 aa, Homo sapiens
  CDR3 for alpha chain variable domain of TCR clone 193513 (TRAV35, TRAJ30)
CAGPGDDKIIF

SEQ ID NO: 387026 - protein, 18 aa, Homo sapiens
  CDR3 for beta chain variable domain of TCR clone 193513 (TRBV7-6, TRBJ2-1)
CASSRRTSGMSSYNEQFF

SEQ ID NO: 387027 - protein, 16 aa, Homo sapiens
  CDR3 for alpha chain variable domain of TCR clone 193514 (TRAV26-1, TRAJ53)
CIVRVAMGGSNYKLTF

SEQ ID NO: 387028 - protein, 13 aa, Homo sapiens
  CDR3 for beta chain variable domain of TCR clone 193514 (TRBV19, TRBJ2-7)
CASRKAGGSEQYF

SEQ ID NO: 387029 - protein, 14 aa, Homo sapiens
  CDR3 for alpha chain variable domain of TCR clone 193515 (TRAV17, TRAJ37)
CATNGSSNTGKLIF

SEQ ID NO: 387030 - protein, 13 aa, Homo sapiens
  CDR3 for beta chain variable domain of TCR clone 193515 (TRBV11-2, TRBJ2-1)
CASSLDLVNEQFF

SEQ ID NO: 387031 - protein, 15 aa, Homo sapiens
  CDR3 for alpha chain variable domain of TCR clone 193516 (TRAV17, TRAJ32)
TSVLRTGGATNKLIF

SEQ ID NO: 387032 - protein, 14 aa, Homo sapiens
  CDR3 for beta chain variable domain of TCR clone 193516 (TRBV2, TRBJ1-5)
CASSENRGGQPQHF

SEQ ID NO: 387033 - protein, 14 aa, Homo sapiens
  CDR3 for alpha chain variable domain of TCR clone 193517 (TRAV23/DV6, TRAJ8)
CAASKAAGFQKLVF

SEQ ID NO: 387034 - protein, 15 aa, Homo sapiens
  CDR3 for beta chain variable domain of TCR clone 193517 (TRBV28, TRBJ2-3)
CASSPDRQGANTQYF

SEQ ID NO: 387035 - protein, 13 aa, Homo sapiens
  CDR3 for alpha chain variable domain of TCR clone 193518 (TRAV2, TRAJ40)
CAVVTSGTYKYIS

SEQ ID NO: 387036 - protein, 14 aa, Homo sapiens
  CDR3 for beta chain variable domain of TCR clone 193518 (TRBV19, TRBJ2-1)
CASPTFVLSGELFF

SEQ ID NO: 387037 - protein, 12 aa, Homo sapiens
  CDR3 for alpha chain variable domain of TCR clone 193519 (TRAV13-1, TRAJ15)
CAASQAGTALIF

SEQ ID NO: 387038 - protein, 14 aa, Homo sapiens
  CDR3 for beta chain variable domain of TCR clone 193519 (TRBV19, TRBJ2-2)
RASSTLHRSGELFF

SEQ ID NO: 387039 - protein, 13 aa, Homo sapiens
  CDR3 for alpha chain variable domain of TCR clone 193520 (TRAV2, TRAJ40)
CAVVTSGTYKYIF

SEQ ID NO: 387040 - protein, 14 aa, Homo sapiens
  CDR3 for beta chain variable domain of TCR clone 193520 (TRBV7-9, TRBJ2-1)
CAISSMVGFGEQFF

SEQ ID NO: 387041 - protein, 15 aa, Homo sapiens
  CDR3 for alpha chain variable domain of TCR clone 193521 (TRAV1-2, TRAJ15)
CAVDVMGSAGTALIF

SEQ ID NO: 387042 - protein, 11 aa, Homo sapiens
  CDR3 for beta chain variable domain of TCR clone 193521 (TRBV29-1, TRBJ2-5)
CSEDRTGTQYF

SEQ ID NO: 387043 - protein, 12 aa, Homo sapiens
  CDR3 for alpha chain variable domain of TCR clone 193522 (TRAV21, TRAJ27)
CAANTNAGKSTF

SEQ ID NO: 387044 - protein, 13 aa, Homo sapiens
  CDR3 for beta chain variable domain of TCR clone 193522 (TRBV7-3, TRBJ1-1)
CASSQDWGAEAFF

SEQ ID NO: 387045 - protein, 19 aa, Homo sapiens
  CDR3 for alpha chain variable domain of TCR clone 193523 (TRAV25, TRAJ20)
TATQTTDVGILPHDYKLSF

SEQ ID NO: 387046 - protein, 14 aa, Homo sapiens
  CDR3 for beta chain variable domain of TCR clone 193523 (TRBV4-1, TRBJ2-2)
CASSQAVNTGELFF

SEQ ID NO: 387047 - protein, 16 aa, Homo sapiens
  CDR3 for alpha chain variable domain of TCR clone 193524 (TRAV30, TRAJ48)
CGTGIKSNFGNEKLTF

SEQ ID NO: 387048 - protein, 17 aa, Homo sapiens
  CDR3 for beta chain variable domain of TCR clone 193524 (TRBV27, TRBJ2-1)
CASRSERGGQSADEQFF

SEQ ID NO: 387049 - protein, 14 aa, Homo sapiens
  CDR3 for alpha chain variable domain of TCR clone 193525 (TRAV12-2, TRAJ13)
CAVKKTGGYQKVTF

SEQ ID NO: 387050 - protein, 14 aa, Homo sapiens
  CDR3 for beta chain variable domain of TCR clone 193525 (TRBV11-2, TRBJ1-5)
CASSSRTGNQPQHF

SEQ ID NO: 387051 - protein, 13 aa, Homo sapiens
  CDR3 for alpha chain variable domain of TCR clone 193526 (TRAV12-1, TRAJ20)
CVSQRFNDYKLSF

SEQ ID NO: 387052 - protein, 14 aa, Homo sapiens
  CDR3 for beta chain variable domain of TCR clone 193526 (TRBV6-3, TRBJ1-5)
CASSYSRSAQPQHF

SEQ ID NO: 387053 - protein, 14 aa, Homo sapiens
  CDR3 for alpha chain variable domain of TCR clone 193527 (TRAV4, TRAJ26)
CIVGPHNYGQNFVF

SEQ ID NO: 387054 - protein, 16 aa, Homo sapiens
  CDR3 for beta chain variable domain of TCR clone 193527 (TRBV19, TRBJ2-1)
CASSKAGPSSYNEQFF

SEQ ID NO: 387055 - protein, 13 aa, Homo sapiens
  CDR3 for alpha chain variable domain of TCR clone 193528 (TRAV21, TRAJ34)
CAVSEGDTDTLIF

SEQ ID NO: 387056 - protein, 17 aa, Homo sapiens
  CDR3 for beta chain variable domain of TCR clone 193528 (TRBV20-1, TRBJ1-5)
CSARDPSAQGFNQPQHF

SEQ ID NO: 387057 - protein, 14 aa, Homo sapiens
  CDR3 for alpha chain variable domain of TCR clone 193529 (TRAV13-1, TRAJ10)
CAALLTGGGNKLTF

SEQ ID NO: 387058 - protein, 15 aa, Homo sapiens
  CDR3 for beta chain variable domain of TCR clone 193529 (TRBV10-3, TRBJ2-2)
CAISEGDRAAGELFF

SEQ ID NO: 387059 - protein, 14 aa, Homo sapiens
  CDR3 for alpha chain variable domain of TCR clone 193530 (TRAV27, TRAJ12)
CAGARMDSSYKLIF

SEQ ID NO: 387060 - protein, 12 aa, Homo sapiens
  CDR3 for beta chain variable domain of TCR clone 193530 (TRBV11-2, TRBJ2-2)
CASSLGGGELFF

SEQ ID NO: 387061 - protein, 14 aa, Homo sapiens
  CDR3 for alpha chain variable domain of TCR clone 193531 (TRAV12-2, TRAJ4)
CAVLIGGGYNKLIF

SEQ ID NO: 387062 - protein, 16 aa, Homo sapiens
  CDR3 for beta chain variable domain of TCR clone 193531 (TRBV15, TRBJ2-3)
CATSRDLGIVTDTQYF

SEQ ID NO: 387063 - protein, 16 aa, Homo sapiens
  CDR3 for alpha chain variable domain of TCR clone 193532 (TRAV12-1, TRAJ48)
CVVNMVSNFGNEKLTF

SEQ ID NO: 387064 - protein, 18 aa, Homo sapiens
  CDR3 for beta chain variable domain of TCR clone 193532 (TRBV7-9, TRBJ2-1)
CASSLAVSGTSGRNEQFF

SEQ ID NO: 387065 - protein, 16 aa, Homo sapiens
  CDR3 for alpha chain variable domain of TCR clone 193533 (TRAV12-3, TRAJ53)
CAMSPGSVGSNYKLTF

SEQ ID NO: 387066 - protein, 17 aa, Homo sapiens
  CDR3 for beta chain variable domain of TCR clone 193533 (TRBV28, TRBJ2-5)
CASSTPEGDALQETQYF

SEQ ID NO: 387067 - protein, 14 aa, Homo sapiens
  CDR3 for alpha chain variable domain of TCR clone 193534 (TRAV29/DV5, TRAJ36)
CAARRKTGANNLFF

SEQ ID NO: 387068 - protein, 12 aa, Homo sapiens
  CDR3 for beta chain variable domain of TCR clone 193534 (TRBV27, TRBJ2-7)
CASSGGFYEQYF

SEQ ID NO: 387069 - protein, 13 aa, Homo sapiens
  CDR3 for alpha chain variable domain of TCR clone 193535 (TRAV12-1, TRAJ21)
CVVTLYNFNKFYF

SEQ ID NO: 387070 - protein, 20 aa, Homo sapiens
  CDR3 for beta chain variable domain of TCR clone 193535 (TRBV7-8, TRBJ2-1)
CACSLAHRLAGVRSYNEQFF

SEQ ID NO: 387071 - protein, 11 aa, Homo sapiens
  CDR3 for alpha chain variable domain of TCR clone 193536 (TRAV1-2, TRAJ20)
CAVSNDYKLSF

SEQ ID NO: 387072 - protein, 13 aa, Homo sapiens
  CDR3 for beta chain variable domain of TCR clone 193536 (TRBV7-3, TRBJ2-5)
CASSFRGGETQYF

SEQ ID NO: 387073 - protein, 13 aa, Homo sapiens
  CDR3 for alpha chain variable domain of TCR clone 193537 (TRAV1-2, TRAJ9)
CAALNTGGFKTIF

SEQ ID NO: 387074 - protein, 13 aa, Homo sapiens
  CDR3 for beta chain variable domain of TCR clone 193537 (TRBV19, TRBJ1-2)
CASSVHGQDSYTF

SEQ ID NO: 387075 - protein, 14 aa, Homo sapiens
  CDR3 for alpha chain variable domain of TCR clone 193538 (TRAV12-3, TRAJ9)
CAMSPNTGGFKTIF

SEQ ID NO: 387076 - protein, 14 aa, Homo sapiens
  CDR3 for beta chain variable domain of TCR clone 193538 (TRBV4-1, TRBJ2-2)
CASSQAVNTGELFF

SEQ ID NO: 387077 - protein, 12 aa, Homo sapiens
  CDR3 for alpha chain variable domain of TCR clone 193539 (TRAV1-2, TRAJ17)
CAVRAAGNKLTF

SEQ ID NO: 387078 - protein, 16 aa, Homo sapiens
  CDR3 for beta chain variable domain of TCR clone 193539 (TRBV20-1, TRBJ2-1)
CSAPGLAGSHSDEQFF

SEQ ID NO: 387079 - protein, 12 aa, Homo sapiens
  CDR3 for alpha chain variable domain of TCR clone 193540 (TRAV1-1, TRAJ24)
CAVRGSWGKFQF

SEQ ID NO: 387080 - protein, 17 aa, Homo sapiens
  CDR3 for beta chain variable domain of TCR clone 193540 (TRBV11-2, TRBJ2-1)
CASSLYPPGVEYNEQFF

SEQ ID NO: 387081 - protein, 15 aa, Homo sapiens
  CDR3 for alpha chain variable domain of TCR clone 193541 (TRAV12-3, TRAJ6)
CAMSATTGGSYIPTF

SEQ ID NO: 387082 - protein, 16 aa, Homo sapiens
  CDR3 for beta chain variable domain of TCR clone 193541 (TRBV4-2, TRBJ1-1)
CASSQAGFGMNTEAFF

SEQ ID NO: 387083 - protein, 14 aa, Homo sapiens
  CDR3 for alpha chain variable domain of TCR clone 193542 (TRAV13-2, TRAJ17)
CAENSKAAGNKLTF

SEQ ID NO: 387084 - protein, 11 aa, Homo sapiens
  CDR3 for beta chain variable domain of TCR clone 193542 (TRBV6-3, TRBJ2-3)
CATGQADTPYF

SEQ ID NO: 387085 - protein, 14 aa, Homo sapiens
  CDR3 for alpha chain variable domain of TCR clone 193543 (TRAV3, TRAJ21)
CAVESQAIFNKFYF

SEQ ID NO: 387086 - protein, 18 aa, Homo sapiens
  CDR3 for beta chain variable domain of TCR clone 193543 (TRBV7-9, TRBJ2-1)
CASSLAVSGTSGRNEQFF

SEQ ID NO: 387087 - protein, 14 aa, Homo sapiens
  CDR3 for alpha chain variable domain of TCR clone 193544 (TRAV12-2, TRAJ5)
CAVNRSTGRRALTF

SEQ ID NO: 387088 - protein, 16 aa, Homo sapiens
  CDR3 for beta chain variable domain of TCR clone 193544 (TRBV7-3, TRBJ2-2)
CASSLKRGTLSGELFF

SEQ ID NO: 387089 - protein, 14 aa, Homo sapiens
  CDR3 for alpha chain variable domain of TCR clone 193545 (TRAV1-2, TRAJ8)
CAVIEDTGFPKLVF

SEQ ID NO: 387090 - protein, 16 aa, Homo sapiens
  CDR3 for beta chain variable domain of TCR clone 193545 (TRBV5-7, TRBJ2-5)
CASTLAPAGGRETQYF

SEQ ID NO: 387091 - protein, 15 aa, Homo sapiens
  CDR3 for alpha chain variable domain of TCR clone 193546 (TRAV17, TRAJ22)
CATAALLGSARQLTF

SEQ ID NO: 387092 - protein, 13 aa, Homo sapiens
  CDR3 for beta chain variable domain of TCR clone 193546 (TRBV29-1, TRBJ2-3)
CSVVPQGVDTQYF

SEQ ID NO: 387093 - protein, 15 aa, Homo sapiens
  CDR3 for alpha chain variable domain of TCR clone 193547 (TRAV21, TRAJ53)
CATLNSGGSNYKLTF

SEQ ID NO: 387094 - protein, 15 aa, Homo sapiens
  CDR3 for beta chain variable domain of TCR clone 193547 (TRBV5-1, TRBJ2-3)
CASSVTSGSTDTQYF

SEQ ID NO: 387095 - protein, 14 aa, Homo sapiens
  CDR3 for alpha chain variable domain of TCR clone 193548 (TRAV23/DV6, TRAJ11)
CAALIGGGYSTLTL

SEQ ID NO: 387096 - protein, 13 aa, Homo sapiens
  CDR3 for beta chain variable domain of TCR clone 193548 (TRBV11-3, TRBJ1-1)
CASSLGGNTEAFF

SEQ ID NO: 387097 - protein, 11 aa, Homo sapiens
  CDR3 for alpha chain variable domain of TCR clone 193549 (TRAV1-2, TRAJ20)
CAVANDYKLSF

SEQ ID NO: 387098 - protein, 13 aa, Homo sapiens
  CDR3 for beta chain variable domain of TCR clone 193549 (TRBV3-1, TRBJ1-1)
CASSPGVITEAFF

SEQ ID NO: 387099 - protein, 19 aa, Homo sapiens
  CDR3 for alpha chain variable domain of TCR clone 193550 (TRAV2, TRAJ20)
ILQVREADAAVYQDCKLSF

SEQ ID NO: 387100 - protein, 13 aa, Homo sapiens
  CDR3 for beta chain variable domain of TCR clone 193550 (TRBV15, TRBJ1-6)
CATSGGLNSPLLF

SEQ ID NO: 387101 - protein, 14 aa, Homo sapiens
  CDR3 for alpha chain variable domain of TCR clone 193551 (TRAV13-1, TRAJ44)
CAAKATGTASKLTF

SEQ ID NO: 387102 - protein, 14 aa, Homo sapiens
  CDR3 for beta chain variable domain of TCR clone 193551 (TRBV7-3, TRBJ2-2)
CASSSGGYTGELFF

SEQ ID NO: 387103 - protein, 12 aa, Homo sapiens
  CDR3 for alpha chain variable domain of TCR clone 193552 (TRAV20, TRAJ56)
CAVTGANSKLTF

SEQ ID NO: 387104 - protein, 14 aa, Homo sapiens
  CDR3 for beta chain variable domain of TCR clone 193552 (TRBV20-1, TRBJ2-5)
CSALIPGYQETQYF

SEQ ID NO: 387105 - protein, 14 aa, Homo sapiens
  CDR3 for alpha chain variable domain of TCR clone 193553 (TRAV13-1, TRAJ9)
CAASALTGGFKIIF

SEQ ID NO: 387106 - protein, 13 aa, Homo sapiens
  CDR3 for beta chain variable domain of TCR clone 193553 (TRBV20-1, TRBJ1-1)
CSAGTVGNAEAFF

SEQ ID NO: 387107 - protein, 12 aa, Homo sapiens
  CDR3 for alpha chain variable domain of TCR clone 193554 (TRAV8-3, TRAJ41)
CAVALSGYALIF

SEQ ID NO: 387108 - protein, 16 aa, Homo sapiens
  CDR3 for beta chain variable domain of TCR clone 193554 (TRBV27, TRBJ2-7)
CASSSERRDSAYEQYF

SEQ ID NO: 387109 - protein, 12 aa, Homo sapiens
  CDR3 for alpha chain variable domain of TCR clone 193555 (TRAV3, TRAJ26)
CAVRDYGQNFVF

SEQ ID NO: 387110 - protein, 18 aa, Homo sapiens
  CDR3 for beta chain variable domain of TCR clone 193555 (TRBV7-9, TRBJ2-7)
CASSLTTSGSRTWYEQYF

SEQ ID NO: 387111 - protein, 14 aa, Homo sapiens
  CDR3 for alpha chain variable domain of TCR clone 193556 (TRAV12-2, TRAJ6)
CASKWGGGSYIPTF

SEQ ID NO: 387112 - protein, 20 aa, Homo sapiens
  CDR3 for beta chain variable domain of TCR clone 193556 (TRBV28, TRBJ2-1)
CASTPIGRSPGLAGGNEQFF

SEQ ID NO: 387113 - protein, 11 aa, Homo sapiens
  CDR3 for alpha chain variable domain of TCR clone 193557 (TRAV2, TRAJ13)
CASGGYQKVTF

SEQ ID NO: 387114 - protein, 16 aa, Homo sapiens
  CDR3 for beta chain variable domain of TCR clone 193557 (TRBV6-1, TRBJ2-5)
CASRDTLDRGAETQYF

SEQ ID NO: 387115 - protein, 15 aa, Homo sapiens
  CDR3 for alpha chain variable domain of TCR clone 193558 (TRAV13-1, TRAJ38)
CAAGSLMLATTVSCF

SEQ ID NO: 387116 - protein, 14 aa, Homo sapiens
  CDR3 for beta chain variable domain of TCR clone 193558 (TRBV11-2, TRBJ2-1)
CASSLEVANNEQFF

SEQ ID NO: 387117 - protein, 14 aa, Homo sapiens
  CDR3 for alpha chain variable domain of TCR clone 193559 (TRAV13-2, TRAJ40)
CAENMGSGTYKYIF

SEQ ID NO: 387118 - protein, 10 aa, Homo sapiens
  CDR3 for beta chain variable domain of TCR clone 193559 (TRBV20-1, TRBJ2-1)
RSASYNEQFF

SEQ ID NO: 387119 - protein, 18 aa, Homo sapiens
  CDR3 for alpha chain variable domain of TCR clone 193560 (TRAV29/DV5, TRAJ52)
QCTSVQQAGGTSYGKLTF

SEQ ID NO: 387120 - protein, 13 aa, Homo sapiens
  CDR3 for beta chain variable domain of TCR clone 193560 (TRBV7-2, TRBJ1-1)
CASNLKGAKVAFF

SEQ ID NO: 387121 - protein, 14 aa, Homo sapiens
  CDR3 for alpha chain variable domain of TCR clone 193561 (TRAV8-1, TRAJ49)
CASAIANTVNQFYF

SEQ ID NO: 387122 - protein, 13 aa, Homo sapiens
  CDR3 for beta chain variable domain of TCR clone 193561 (TRBV11-2, TRBJ2-5)
CASSFSSQETQYF

SEQ ID NO: 387123 - protein, 16 aa, Homo sapiens
  CDR3 for alpha chain variable domain of TCR clone 193562 (TRAV4, TRAJ18)
CCVLLLGGSTLGRLYF

SEQ ID NO: 387124 - protein, 14 aa, Homo sapiens
  CDR3 for beta chain variable domain of TCR clone 193562 (TRBV7-3, TRBJ2-1)
CASSLAGGTNEQFF

SEQ ID NO: 387125 - protein, 14 aa, Homo sapiens
  CDR3 for alpha chain variable domain of TCR clone 193563 (TRAV12-3, TRAJ47)
CAMSVREYGNKLVF

SEQ ID NO: 387126 - protein, 15 aa, Homo sapiens
  CDR3 for beta chain variable domain of TCR clone 193563 (TRBV20-1, TRBJ2-2)
CSARDTRLNTGERFF

SEQ ID NO: 387127 - protein, 14 aa, Homo sapiens
  CDR3 for alpha chain variable domain of TCR clone 193564 (TRAV8-3, TRAJ4)
CAVGAAGGYNKLIF

SEQ ID NO: 387128 - protein, 15 aa, Homo sapiens
  CDR3 for beta chain variable domain of TCR clone 193564 (TRBV11-3, TRBJ2-3)
CASLKDGREGDTQYV

SEQ ID NO: 387129 - protein, 13 aa, Homo sapiens
  CDR3 for alpha chain variable domain of TCR clone 193565 (TRAV1-2, TRAJ9)
CAALNTGGFKTIF

SEQ ID NO: 387130 - protein, 13 aa, Homo sapiens
  CDR3 for beta chain variable domain of TCR clone 193565 (TRBV19, TRBJ1-2)
CASSGPGQDGYHF

SEQ ID NO: 387131 - protein, 18 aa, Homo sapiens
  CDR3 for alpha chain variable domain of TCR clone 193566 (TRAV21, TRAJ52)
CAVRPSPAGGTSYGKLTF

SEQ ID NO: 387132 - protein, 15 aa, Homo sapiens
  CDR3 for beta chain variable domain of TCR clone 193566 (TRBV29-1, TRBJ2-6)
CSVGDRGSGANVLTF

SEQ ID NO: 387133 - protein, 13 aa, Homo sapiens
  CDR3 for alpha chain variable domain of TCR clone 193567 (TRAV3, TRAJ29)
CAVRDWGNTPLFF

SEQ ID NO: 387134 - protein, 15 aa, Homo sapiens
  CDR3 for beta chain variable domain of TCR clone 193567 (TRBV12-4, TRBJ2-5)
CASIGRTGEGETQYF

SEQ ID NO: 387135 - protein, 14 aa, Homo sapiens
  CDR3 for alpha chain variable domain of TCR clone 193568 (TRAV17, TRAJ16)
CATADFSDGQKLLF

SEQ ID NO: 387136 - protein, 13 aa, Homo sapiens
  CDR3 for beta chain variable domain of TCR clone 193568 (TRBV7-2, TRBJ2-7)
CASSSPSGSEQYF

SEQ ID NO: 387137 - protein, 13 aa, Homo sapiens
  CDR3 for alpha chain variable domain of TCR clone 193569 (TRAV17, TRAJ33)
CATDEDSNYQLIW

SEQ ID NO: 387138 - protein, 17 aa, Homo sapiens
  CDR3 for beta chain variable domain of TCR clone 193569 (TRBV20-1, TRBJ2-3)
CSAVSPGLAGGQDTQYF

SEQ ID NO: 387139 - protein, 11 aa, Homo sapiens
  CDR3 for alpha chain variable domain of TCR clone 193570 (TRAV2, TRAJ13)
CASGGYQKVTF

SEQ ID NO: 387140 - protein, 14 aa, Homo sapiens
  CDR3 for beta chain variable domain of TCR clone 193570 (TRBV18, TRBJ2-5)
CASSPGVSQETQYV

SEQ ID NO: 387141 - protein, 13 aa, Homo sapiens
  CDR3 for alpha chain variable domain of TCR clone 193571 (TRAV2, TRAJ15)
CAVASQAGTALIF

SEQ ID NO: 387142 - protein, 14 aa, Homo sapiens
  CDR3 for beta chain variable domain of TCR clone 193571 (TRBV6-1, TRBJ1-3)
CASVQGGGGNTMYF

SEQ ID NO: 387143 - protein, 12 aa, Homo sapiens
  CDR3 for alpha chain variable domain of TCR clone 193572 (TRAV21, TRAJ27)
CAPPGSAGKSTF

SEQ ID NO: 387144 - protein, 13 aa, Homo sapiens
  CDR3 for beta chain variable domain of TCR clone 193572 (TRBV2, TRBJ1-1)
CARNPTGGFHAFF

SEQ ID NO: 387145 - protein, 12 aa, Homo sapiens
  CDR3 for alpha chain variable domain of TCR clone 193573 (TRAV16, TRAJ49)
CALNEGGKQCYF

SEQ ID NO: 387146 - protein, 14 aa, Homo sapiens
  CDR3 for beta chain variable domain of TCR clone 193573 (TRBV7-9, TRBJ2-1)
CASRPTGLRNEQFF

SEQ ID NO: 387147 - protein, 14 aa, Homo sapiens
  CDR3 for alpha chain variable domain of TCR clone 193574 (TRAV21, TRAJ35)
CAVMPIGFGNVLHC

SEQ ID NO: 387148 - protein, 14 aa, Homo sapiens
  CDR3 for beta chain variable domain of TCR clone 193574 (TRBV18, TRBJ2-7)
CASSPRGGSYEQYF

SEQ ID NO: 387149 - protein, 13 aa, Homo sapiens
  CDR3 for alpha chain variable domain of TCR clone 193575 (TRAV3, TRAJ20)
CAVRRLNDYKLSF

SEQ ID NO: 387150 - protein, 13 aa, Homo sapiens
  CDR3 for beta chain variable domain of TCR clone 193575 (TRBV6-1, TRBJ2-1)
CAGMDSTNNEQFF

SEQ ID NO: 387151 - protein, 17 aa, Homo sapiens
  CDR3 for alpha chain variable domain of TCR clone 193576 (TRAV12-2, TRAJ48)
CASNEKLTFGTGTRLTI

SEQ ID NO: 387152 - protein, 12 aa, Homo sapiens
  CDR3 for beta chain variable domain of TCR clone 193576 (TRBV29-1, TRBJ2-3)
CSVTGGADTQYF

SEQ ID NO: 387153 - protein, 15 aa, Homo sapiens
  CDR3 for alpha chain variable domain of TCR clone 193577 (TRAV13-1, TRAJ44)
CAASRGGSTSSKLTF

SEQ ID NO: 387154 - protein, 14 aa, Homo sapiens
  CDR3 for beta chain variable domain of TCR clone 193577 (TRBV7-2, TRBJ2-5)
CARSPRGSSETQYF

SEQ ID NO: 387155 - protein, 12 aa, Homo sapiens
  CDR3 for alpha chain variable domain of TCR clone 193578 (TRAV16, TRAJ10)
CSRTGGGNKLTF

SEQ ID NO: 387156 - protein, 14 aa, Homo sapiens
  CDR3 for beta chain variable domain of TCR clone 193578 (TRBV11-3, TRBJ1-1)
CASSHRQGEAFLDK

SEQ ID NO: 387157 - protein, 12 aa, Homo sapiens
  CDR3 for alpha chain variable domain of TCR clone 193579 (TRAV12-1, TRAJ16)
CVVFRDGQKLLF

SEQ ID NO: 387158 - protein, 16 aa, Homo sapiens
  CDR3 for beta chain variable domain of TCR clone 193579 (TRBV10-3, TRBJ2-1)
CAIRGGGRGDYNEQFF

SEQ ID NO: 387159 - protein, 18 aa, Homo sapiens
  CDR3 for alpha chain variable domain of TCR clone 193580 (TRAV8-3, TRAJ44)
CAVGPLFKALPVNSPLRL

SEQ ID NO: 387160 - protein, 16 aa, Homo sapiens
  CDR3 for beta chain variable domain of TCR clone 193580 (TRBV11-2, TRBJ2-7)
CASSPTTGGVSYEQYF

SEQ ID NO: 387161 - protein, 13 aa, Homo sapiens
  CDR3 for alpha chain variable domain of TCR clone 193581 (TRAV4, TRAJ9)
CLVAEGGGFKTIF

SEQ ID NO: 387162 - protein, 13 aa, Homo sapiens
  CDR3 for beta chain variable domain of TCR clone 193581 (TRBV7-9, TRBJ1-2)
CASSLKQNYGYTF

SEQ ID NO: 387163 - protein, 15 aa, Homo sapiens
  CDR3 for alpha chain variable domain of TCR clone 193582 (TRAV12-1, TRAJ44)
CVVFVNTGTASKLTF

SEQ ID NO: 387164 - protein, 16 aa, Homo sapiens
  CDR3 for beta chain variable domain of TCR clone 193582 (TRBV7-3, TRBJ2-1)
CASSLEGYRSYNEQFF

SEQ ID NO: 387165 - protein, 16 aa, Homo sapiens
  CDR3 for alpha chain variable domain of TCR clone 193583 (TRAV3, TRAJ10)
WAVRDMRAGGGNKLTF

SEQ ID NO: 387166 - protein, 13 aa, Homo sapiens
  CDR3 for beta chain variable domain of TCR clone 193583 (TRBV7-9, TRBJ1-2)
CASSLKQNYGYTF

SEQ ID NO: 387167 - protein, 15 aa, Homo sapiens
  CDR3 for alpha chain variable domain of TCR clone 193584 (TRAV13-1, TRAJ42)
CAASIAVGSQGNLIF

SEQ ID NO: 387168 - protein, 15 aa, Homo sapiens
  CDR3 for beta chain variable domain of TCR clone 193584 (TRBV19, TRBJ2-1)
CASSIVRGEGREQFF

SEQ ID NO: 387169 - protein, 13 aa, Homo sapiens
  CDR3 for alpha chain variable domain of TCR clone 193585 (TRAV13-2, TRAJ48)
CAEMDFGNEKLTF

SEQ ID NO: 387170 - protein, 12 aa, Homo sapiens
  CDR3 for beta chain variable domain of TCR clone 193585 (TRBV2, TRBJ2-1)
GRGLPSYNEQFF

SEQ ID NO: 387171 - protein, 10 aa, Homo sapiens
  CDR3 for alpha chain variable domain of TCR clone 193586 (TRAV20, TRAJ49)
CAVQAYPVLF

SEQ ID NO: 387172 - protein, 12 aa, Homo sapiens
  CDR3 for beta chain variable domain of TCR clone 193586 (TRBV7-3, TRBJ2-1)
CASSFINNEQFF

SEQ ID NO: 387173 - protein, 12 aa, Homo sapiens
  CDR3 for alpha chain variable domain of TCR clone 193587 (TRAV12-3, TRAJ17)
CAMTLTGNKLTF

SEQ ID NO: 387174 - protein, 18 aa, Homo sapiens
  CDR3 for beta chain variable domain of TCR clone 193587 (TRBV7-2, TRBJ2-3)
CASSLKREGSGTTDTQYF

SEQ ID NO: 387175 - protein, 13 aa, Homo sapiens
  CDR3 for alpha chain variable domain of TCR clone 193588 (TRAV23/DV6, TRAJ22)
CASRAGSARQLIF

SEQ ID NO: 387176 - protein, 14 aa, Homo sapiens
  CDR3 for beta chain variable domain of TCR clone 193588 (TRBV7-2, TRBJ2-7)
CASSPKTSFYEQYF

SEQ ID NO: 387177 - protein, 11 aa, Homo sapiens
  CDR3 for alpha chain variable domain of TCR clone 193589 (TRAV1-2, TRAJ20)
CAVSNDYKLSF

SEQ ID NO: 387178 - protein, 16 aa, Homo sapiens
  CDR3 for beta chain variable domain of TCR clone 193589 (TRBV29-1, TRBJ2-6)
CSVEDITYSGANVLTS

SEQ ID NO: 387179 - protein, 12 aa, Homo sapiens
  CDR3 for alpha chain variable domain of TCR clone 193590 (TRAV2, TRAJ31)
CAVEEGNARLMF

SEQ ID NO: 387180 - protein, 18 aa, Homo sapiens
  CDR3 for beta chain variable domain of TCR clone 193590 (TRBV7-9, TRBJ2-3)
CASSLDLAGLETPDTQYF

SEQ ID NO: 387181 - protein, 13 aa, Homo sapiens
  CDR3 for alpha chain variable domain of TCR clone 193591 (TRAV27, TRAJ49)
CAPRPYTGNQFYF

SEQ ID NO: 387182 - protein, 14 aa, Homo sapiens
  CDR3 for beta chain variable domain of TCR clone 193591 (TRBV7-2, TRBJ2-5)
CASSVGWAEETQYF

SEQ ID NO: 387183 - protein, 13 aa, Homo sapiens
  CDR3 for alpha chain variable domain of TCR clone 193592 (TRAV29/DV5, TRAJ31)
CAASRNNNARLMF

SEQ ID NO: 387184 - protein, 12 aa, Homo sapiens
  CDR3 for beta chain variable domain of TCR clone 193592 (TRBV14, TRBJ2-5)
CAISHLKETQYF

SEQ ID NO: 387185 - protein, 15 aa, Homo sapiens
  CDR3 for alpha chain variable domain of TCR clone 193593 (TRAV3, TRAJ4)
CAQNMFSGGYNKLIF

SEQ ID NO: 387186 - protein, 13 aa, Homo sapiens
  CDR3 for beta chain variable domain of TCR clone 193593 (TRBV2, TRBJ1-1)
CASRWTVNTEAFF

SEQ ID NO: 387187 - protein, 12 aa, Homo sapiens
  CDR3 for alpha chain variable domain of TCR clone 193594 (TRAV21, TRAJ49)
CAVTNTGNQFYV

SEQ ID NO: 387188 - protein, 17 aa, Homo sapiens
  CDR3 for beta chain variable domain of TCR clone 193594 (TRBV13, TRBJ2-3)
CASSLSRVAGGRNTQYF

SEQ ID NO: 387189 - protein, 13 aa, Homo sapiens
  CDR3 for alpha chain variable domain of TCR clone 193595 (TRAV22, TRAJ29)
CAVGGSGNTPLVF

SEQ ID NO: 387190 - protein, 16 aa, Homo sapiens
  CDR3 for beta chain variable domain of TCR clone 193595 (TRBV19, TRBJ1-1)
CASSPTRFWPGTEAFF

SEQ ID NO: 387191 - protein, 13 aa, Homo sapiens
  CDR3 for alpha chain variable domain of TCR clone 193596 (TRAV13-2, TRAJ48)
CAEMDFGNEKLTF

SEQ ID NO: 387192 - protein, 15 aa, Homo sapiens
  CDR3 for beta chain variable domain of TCR clone 193596 (TRBV5-1, TRBJ2-3)
CASSSTSGSTDTQYF

SEQ ID NO: 387193 - protein, 14 aa, Homo sapiens
  CDR3 for alpha chain variable domain of TCR clone 193597 (TRAV1-2, TRAJ8)
CAVREDTGFQKLVF

SEQ ID NO: 387194 - protein, 18 aa, Homo sapiens
  CDR3 for beta chain variable domain of TCR clone 193597 (TRBV5-7, TRBJ2-1)
CASSLDFRRLTGGNEQFF

SEQ ID NO: 387195 - protein, 15 aa, Homo sapiens
  CDR3 for alpha chain variable domain of TCR clone 193598 (TRAV17, TRAJ57)
CATGPSQGGSAKLVF

SEQ ID NO: 387196 - protein, 16 aa, Homo sapiens
  CDR3 for beta chain variable domain of TCR clone 193598 (TRBV20-1, TRBJ2-2)
CSASASGIPGAGELFF

SEQ ID NO: 387197 - protein, 16 aa, Homo sapiens
  CDR3 for alpha chain variable domain of TCR clone 193599 (TRAV26-1, TRAJ37)
CIVRGDGLGNTGKLIF

SEQ ID NO: 387198 - protein, 17 aa, Homo sapiens
  CDR3 for beta chain variable domain of TCR clone 193599 (TRBV4-1, TRBJ2-7)
CASSRDPLGVRGGEQYF

SEQ ID NO: 387199 - protein, 14 aa, Homo sapiens
  CDR3 for alpha chain variable domain of TCR clone 193600 (TRAV12-2, TRAJ13)
CAVKKTGGYQKVTF

SEQ ID NO: 387200 - protein, 16 aa, Homo sapiens
  CDR3 for beta chain variable domain of TCR clone 193600 (TRBV12-5, TRBJ2-5)
CASGPRTSGKQETQYF

SEQ ID NO: 387201 - protein, 13 aa, Homo sapiens
  CDR3 for alpha chain variable domain of TCR clone 193601 (TRAV17, TRAJ40)
CAGALWGTYKYIF

SEQ ID NO: 387202 - protein, 16 aa, Homo sapiens
  CDR3 for beta chain variable domain of TCR clone 193601 (TRBV11-2, TRBJ1-2)
CASSLDTGGADYGYTF

SEQ ID NO: 387203 - protein, 14 aa, Homo sapiens
  CDR3 for alpha chain variable domain of TCR clone 193602 (TRAV12-1, TRAJ6)
CVVARIRRKLHTYI

SEQ ID NO: 387204 - protein, 15 aa, Homo sapiens
  CDR3 for beta chain variable domain of TCR clone 193602 (TRBV7-3, TRBJ2-1)
CASSLKASEYNGRFF

SEQ ID NO: 387205 - protein, 13 aa, Homo sapiens
  CDR3 for alpha chain variable domain of TCR clone 193603 (TRAV14/DV4, TRAJ23)
CAMREVKGGKLIF

SEQ ID NO: 387206 - protein, 20 aa, Homo sapiens
  CDR3 for beta chain variable domain of TCR clone 193603 (TRBV7-8, TRBJ2-2)
CASSHLFPGPTIHITGELFF

SEQ ID NO: 387207 - protein, 15 aa, Homo sapiens
  CDR3 for alpha chain variable domain of TCR clone 193604 (TRAV21, TRAJ52)
CAVRGGGTSYGKLTF

SEQ ID NO: 387208 - protein, 11 aa, Homo sapiens
  CDR3 for beta chain variable domain of TCR clone 193604 (TRBV20-1, TRBJ2-1)
CSLSSGSEQFF

SEQ ID NO: 387209 - protein, 20 aa, Homo sapiens
  CDR3 for alpha chain variable domain of TCR clone 193605 (TRAV12-3, TRAJ41)
SLFIRDSQPSDSATPEALNF

SEQ ID NO: 387210 - protein, 20 aa, Homo sapiens
  CDR3 for beta chain variable domain of TCR clone 193605 (TRBV19, TRBJ2-1)
CASSISRTVTSTRLNNEQFF

SEQ ID NO: 387211 - protein, 15 aa, Homo sapiens
  CDR3 for alpha chain variable domain of TCR clone 193606 (TRAV21, TRAJ40)
CAVRPQTSGTYKYIF

SEQ ID NO: 387212 - protein, 14 aa, Homo sapiens
  CDR3 for beta chain variable domain of TCR clone 193606 (TRBV4-1, TRBJ2-2)
CASSQAVNTGELFF

SEQ ID NO: 387213 - protein, 13 aa, Homo sapiens
  CDR3 for alpha chain variable domain of TCR clone 193607 (TRAV21, TRAJ57)
CAVTQGGSEKLVF

SEQ ID NO: 387214 - protein, 15 aa, Homo sapiens
  CDR3 for beta chain variable domain of TCR clone 193607 (TRBV5-1, TRBJ1-1)
CASGSTTGTNTEAFF

SEQ ID NO: 387215 - protein, 13 aa, Homo sapiens
  CDR3 for alpha chain variable domain of TCR clone 193608 (TRAV9-2, TRAJ49)
CALIQIGGNQFYS

SEQ ID NO: 387216 - protein, 13 aa, Homo sapiens
  CDR3 for beta chain variable domain of TCR clone 193608 (TRBV20-1, TRBJ1-1)
CSARGGGNTEAFF

SEQ ID NO: 387217 - protein, 14 aa, Homo sapiens
  CDR3 for alpha chain variable domain of TCR clone 193609 (TRAV1-2, TRAJ8)
CSVREDTGFQKLGF

SEQ ID NO: 387218 - protein, 15 aa, Homo sapiens
  CDR3 for beta chain variable domain of TCR clone 193609 (TRBV6-3, TRBJ2-7)
CASSSPGTVFYEQYF

SEQ ID NO: 387219 - protein, 15 aa, Homo sapiens
  CDR3 for alpha chain variable domain of TCR clone 193610 (TRAV21, TRAJ53)
CATLNSGGSNYKLTF

SEQ ID NO: 387220 - protein, 14 aa, Homo sapiens
  CDR3 for beta chain variable domain of TCR clone 193610 (TRBV7-3, TRBJ2-1)
CASSLSGSYNEQFF

SEQ ID NO: 387221 - protein, 11 aa, Homo sapiens
  CDR3 for alpha chain variable domain of TCR clone 193611 (TRAV12-3, TRAJ26)
CAMSHGQNFVF

SEQ ID NO: 387222 - protein, 13 aa, Homo sapiens
  CDR3 for beta chain variable domain of TCR clone 193611 (TRBV7-9, TRBJ2-3)
CASSPGSTDTQYF

SEQ ID NO: 387223 - protein, 14 aa, Homo sapiens
  CDR3 for alpha chain variable domain of TCR clone 193612 (TRAV1-2, TRAJ16)
CAVNRFSDGQKLLF

SEQ ID NO: 387224 - protein, 17 aa, Homo sapiens
  CDR3 for beta chain variable domain of TCR clone 193612 (TRBV19, TRBJ2-5)
CASSIAAWGTGSGTQYF

SEQ ID NO: 387225 - protein, 14 aa, Homo sapiens
  CDR3 for alpha chain variable domain of TCR clone 193613 (TRAV12-2, TRAJ40)
CAVKIPSGTYKYIF

SEQ ID NO: 387226 - protein, 14 aa, Homo sapiens
  CDR3 for beta chain variable domain of TCR clone 193613 (TRBV13, TRBJ2-7)
CASSLKGASYEQCF

SEQ ID NO: 387227 - protein, 15 aa, Homo sapiens
  CDR3 for alpha chain variable domain of TCR clone 193614 (TRAV1-2, TRAJ30)
CAVRPHGNRDNKIIF

SEQ ID NO: 387228 - protein, 13 aa, Homo sapiens
  CDR3 for beta chain variable domain of TCR clone 193614 (TRBV4-1, TRBJ2-7)
CASSQGQAYEQYF

SEQ ID NO: 387229 - protein, 12 aa, Homo sapiens
  CDR3 for alpha chain variable domain of TCR clone 193615 (TRAV2, TRAJ9)
CAVGAGGFKTIF

SEQ ID NO: 387230 - protein, 14 aa, Homo sapiens
  CDR3 for beta chain variable domain of TCR clone 193615 (TRBV6-1, TRBJ1-3)
CASVQGGGGHTMYF

SEQ ID NO: 387231 - protein, 15 aa, Homo sapiens
  CDR3 for alpha chain variable domain of TCR clone 193616 (TRAV8-3, TRAJ27)
CAVGPSKTNAGKSTF

SEQ ID NO: 387232 - protein, 17 aa, Homo sapiens
  CDR3 for beta chain variable domain of TCR clone 193616 (TRBV13, TRBJ2-3)
GASSLSRVAGGRNTQYF

SEQ ID NO: 387233 - protein, 14 aa, Homo sapiens
  CDR3 for alpha chain variable domain of TCR clone 193617 (TRAV3, TRAJ9)
CAVRGNTGGFKTIF

SEQ ID NO: 387234 - protein, 16 aa, Homo sapiens
  CDR3 for beta chain variable domain of TCR clone 193617 (TRBV7-2, TRBJ2-7)
CASSLGLAGGAYEQSF

SEQ ID NO: 387235 - protein, 14 aa, Homo sapiens
  CDR3 for alpha chain variable domain of TCR clone 193618 (TRAV29/DV5, TRAJ45)
CAASFRGGADGLTF

SEQ ID NO: 387236 - protein, 16 aa, Homo sapiens
  CDR3 for beta chain variable domain of TCR clone 193618 (TRBV27, TRBJ1-1)
CASSLLAGTGETEAFF

SEQ ID NO: 387237 - protein, 15 aa, Homo sapiens
  CDR3 for alpha chain variable domain of TCR clone 193619 (TRAV29/DV5, TRAJ24)
CAASGVTDSWGKFQF

SEQ ID NO: 387238 - protein, 12 aa, Homo sapiens
  CDR3 for beta chain variable domain of TCR clone 193619 (TRBV11-2, TRBJ2-2)
CASSLPTGELFF

SEQ ID NO: 387239 - protein, 17 aa, Homo sapiens
  CDR3 for alpha chain variable domain of TCR clone 193620 (TRAV3, TRAJ6)
CAVRDGPRAGGSYIPTF

SEQ ID NO: 387240 - protein, 15 aa, Homo sapiens
  CDR3 for beta chain variable domain of TCR clone 193620 (TRBV11-2, TRBJ2-1)
CASSLAPRAHNEQFF

SEQ ID NO: 387241 - protein, 14 aa, Homo sapiens
  CDR3 for alpha chain variable domain of TCR clone 193621 (TRAV16, TRAJ39)
CALSKNNAGNMLTF

SEQ ID NO: 387242 - protein, 15 aa, Homo sapiens
  CDR3 for beta chain variable domain of TCR clone 193621 (TRBV12-4, TRBJ2-5)
CASSPPTGLQETQYF

SEQ ID NO: 387243 - protein, 14 aa, Homo sapiens
  CDR3 for alpha chain variable domain of TCR clone 193622 (TRAV8-6, TRAJ12)
CAVKAADSSYKLIF

SEQ ID NO: 387244 - protein, 15 aa, Homo sapiens
  CDR3 for beta chain variable domain of TCR clone 193622 (TRBV28, TRBJ2-3)
CAPTFREWSTDTQYF

SEQ ID NO: 387245 - protein, 13 aa, Homo sapiens
  CDR3 for alpha chain variable domain of TCR clone 193623 (TRAV1-2, TRAJ33)
CAVSEDSNYQLIW

SEQ ID NO: 387246 - protein, 16 aa, Homo sapiens
  CDR3 for beta chain variable domain of TCR clone 193623 (TRBV7-3, TRBJ2-2)
CASSLKRGTLSGELFF

SEQ ID NO: 387247 - protein, 13 aa, Homo sapiens
  CDR3 for alpha chain variable domain of TCR clone 193624 (TRAV13-2, TRAJ8)
CAFMKTGFQKLVF

SEQ ID NO: 387248 - protein, 17 aa, Homo sapiens
  CDR3 for beta chain variable domain of TCR clone 193624 (TRBV28, TRBJ2-1)
CASSSARQALTYNEQFF

SEQ ID NO: 387249 - protein, 14 aa, Homo sapiens
  CDR3 for alpha chain variable domain of TCR clone 193625 (TRAV12-2, TRAJ17)
CAVLFKAAGNKLTF

SEQ ID NO: 387250 - protein, 14 aa, Homo sapiens
  CDR3 for beta chain variable domain of TCR clone 193625 (TRBV4-1, TRBJ2-2)
CASSQVVNTGELFF

SEQ ID NO: 387251 - protein, 16 aa, Homo sapiens
  CDR3 for alpha chain variable domain of TCR clone 193626 (TRAV26-1, TRAJ53)
CIVRVAMGGSNYKLTF

SEQ ID NO: 387252 - protein, 15 aa, Homo sapiens
  CDR3 for beta chain variable domain of TCR clone 193626 (TRBV27, TRBJ1-6)
CASSFDRGLGSPLHF

SEQ ID NO: 387253 - protein, 15 aa, Homo sapiens
  CDR3 for alpha chain variable domain of TCR clone 193627 (TRAV8-3, TRAJ40)
CAAPSLGSGTYRSIF

SEQ ID NO: 387254 - protein, 12 aa, Homo sapiens
  CDR3 for beta chain variable domain of TCR clone 193627 (TRBV11-2, TRBJ2-2)
CASSLGGGELFF

SEQ ID NO: 387255 - protein, 17 aa, Homo sapiens
  CDR3 for alpha chain variable domain of TCR clone 193628 (TRAV1-2, TRAJ8)
CAVRDPDENTDFQKLVF

SEQ ID NO: 387256 - protein, 16 aa, Homo sapiens
  CDR3 for beta chain variable domain of TCR clone 193628 (TRBV7-9, TRBJ2-2)
CASSGFGGANTGELFF

SEQ ID NO: 387257 - protein, 13 aa, Homo sapiens
  CDR3 for alpha chain variable domain of TCR clone 193629 (TRAV2, TRAJ15)
CAVASQAGTALIF

SEQ ID NO: 387258 - protein, 14 aa, Homo sapiens
  CDR3 for beta chain variable domain of TCR clone 193629 (TRBV11-2, TRBJ2-5)
CASRPLAGRETQYF

SEQ ID NO: 387259 - protein, 12 aa, Homo sapiens
  CDR3 for alpha chain variable domain of TCR clone 193630 (TRAV17, TRAJ39)
CATGAAGNMLTF

SEQ ID NO: 387260 - protein, 15 aa, Homo sapiens
  CDR3 for beta chain variable domain of TCR clone 193630 (TRBV7-2, TRBJ2-1)
CASSFRERSYNEQFF

SEQ ID NO: 387261 - protein, 16 aa, Homo sapiens
  CDR3 for alpha chain variable domain of TCR clone 193631 (TRAV20, TRAJ26)
CAVQHRRANYGQNFVF

SEQ ID NO: 387262 - protein, 15 aa, Homo sapiens
  CDR3 for beta chain variable domain of TCR clone 193631 (TRBV7-2, TRBJ2-7)
CASSWGQGAIYEQYF

SEQ ID NO: 387263 - protein, 14 aa, Homo sapiens
  CDR3 for alpha chain variable domain of TCR clone 193632 (TRAV10, TRAJ34)
CVVSRGGDTDKLTF

SEQ ID NO: 387264 - protein, 17 aa, Homo sapiens
  CDR3 for beta chain variable domain of TCR clone 193632 (TRBV6-3, TRBJ2-3)
CASRRPLGGGSTDTQYF

SEQ ID NO: 387265 - protein, 15 aa, Homo sapiens
  CDR3 for alpha chain variable domain of TCR clone 193633 (TRAV8-2, TRAJ16)
CVVSDGFSDGQKLVF

SEQ ID NO: 387266 - protein, 14 aa, Homo sapiens
  CDR3 for beta chain variable domain of TCR clone 193633 (TRBV7-3, TRBJ1-1)
CASSLGTGYTEAFF

SEQ ID NO: 387267 - protein, 15 aa, Homo sapiens
  CDR3 for alpha chain variable domain of TCR clone 193634 (TRAV21, TRAJ40)
CAVTPQTSGTYKYVF

SEQ ID NO: 387268 - protein, 13 aa, Homo sapiens
  CDR3 for beta chain variable domain of TCR clone 193634 (TRBV7-2, TRBJ2-2)
CASSSVRAGELFF

SEQ ID NO: 387269 - protein, 15 aa, Homo sapiens
  CDR3 for alpha chain variable domain of TCR clone 193635 (TRAV27, TRAJ53)
CRAINSGGSNYKLTF

SEQ ID NO: 387270 - protein, 14 aa, Homo sapiens
  CDR3 for beta chain variable domain of TCR clone 193635 (TRBV7-3, TRBJ2-1)
CACSLAGGTNEQFF

SEQ ID NO: 387271 - protein, 15 aa, Homo sapiens
  CDR3 for alpha chain variable domain of TCR clone 193636 (TRAV8-3, TRAJ11)
CAVGLLNSGYSTLTF

SEQ ID NO: 387272 - protein, 16 aa, Homo sapiens
  CDR3 for beta chain variable domain of TCR clone 193636 (TRBV7-9, TRBJ1-2)
CASSSGFSSGEDGYTF

SEQ ID NO: 387273 - protein, 16 aa, Homo sapiens
  CDR3 for alpha chain variable domain of TCR clone 193637 (TRAV3, TRAJ28)
CAVLPRTGAGSYQLTF

SEQ ID NO: 387274 - protein, 18 aa, Homo sapiens
  CDR3 for beta chain variable domain of TCR clone 193637 (TRBV23-1, TRBJ2-7)
CASSQYRRTDSTSSTSGR

SEQ ID NO: 387275 - protein, 21 aa, Homo sapiens
  CDR3 for alpha chain variable domain of TCR clone 193638 (TRAV9-2, )
CALIQIGDIQNPDPAVYQLRD

SEQ ID NO: 387276 - protein, 14 aa, Homo sapiens
  CDR3 for beta chain variable domain of TCR clone 193638 (TRBV7-8, TRBJ2-3)
CASSFRGITDTQYF

SEQ ID NO: 387277 - protein, 15 aa, Homo sapiens
  CDR3 for alpha chain variable domain of TCR clone 193639 (TRAV38-1, TRAJ37)
CALIHGPGNTGKLIF

SEQ ID NO: 387278 - protein, 12 aa, Homo sapiens
  CDR3 for beta chain variable domain of TCR clone 193639 (TRBV7-9, TRBJ2-7)
CASSFGSYEQYF

SEQ ID NO: 387279 - protein, 13 aa, Homo sapiens
  CDR3 for alpha chain variable domain of TCR clone 193640 (TRAV8-3, TRAJ28)
CAVGAVGSYQLTF

SEQ ID NO: 387280 - protein, 17 aa, Homo sapiens
  CDR3 for beta chain variable domain of TCR clone 193640 (TRBV20-1, TRBJ2-2)
CSASGSGQGGLTGDLFF

SEQ ID NO: 387281 - protein, 12 aa, Homo sapiens
  CDR3 for alpha chain variable domain of TCR clone 193641 (TRAV8-3, TRAJ26)
CAGDNYGQNFVI

SEQ ID NO: 387282 - protein, 14 aa, Homo sapiens
  CDR3 for beta chain variable domain of TCR clone 193641 (TRBV7-9, TRBJ2-1)
CASSPRDSLYEQFF

SEQ ID NO: 387283 - protein, 13 aa, Homo sapiens
  CDR3 for alpha chain variable domain of TCR clone 193642 (TRAV21, TRAJ45)
CAVMGGGADGLTF

SEQ ID NO: 387284 - protein, 14 aa, Homo sapiens
  CDR3 for beta chain variable domain of TCR clone 193642 (TRBV5-1, TRBJ2-7)
CASSRGESLYEQYF

SEQ ID NO: 387285 - protein, 14 aa, Homo sapiens
  CDR3 for alpha chain variable domain of TCR clone 193643 (TRAV23/DV6, TRAJ22)
CADIPSGSARQLTF

SEQ ID NO: 387286 - protein, 16 aa, Homo sapiens
  CDR3 for beta chain variable domain of TCR clone 193643 (TRBV5-1, TRBJ2-3)
CASSVFPMSSTDTQYF

SEQ ID NO: 387287 - protein, 15 aa, Homo sapiens
  CDR3 for alpha chain variable domain of TCR clone 193644 (TRAV25, TRAJ52)
CAGRPGGTSYGKLTF

SEQ ID NO: 387288 - protein, 15 aa, Homo sapiens
  CDR3 for beta chain variable domain of TCR clone 193644 (TRBV2, TRBJ2-1)
CASSELAGSYNEQFF

SEQ ID NO: 387289 - protein, 14 aa, Homo sapiens
  CDR3 for alpha chain variable domain of TCR clone 193645 (TRAV9-2, TRAJ39)
CSLYIYNAGNMLTF

SEQ ID NO: 387290 - protein, 18 aa, Homo sapiens
  CDR3 for beta chain variable domain of TCR clone 193645 (TRBV18, TRBJ1-3)
CASSPRGGAGPSGNTIYF

SEQ ID NO: 387291 - protein, 14 aa, Homo sapiens
  CDR3 for alpha chain variable domain of TCR clone 193646 (TRAV38-1, TRAJ45)
CASHSGGGADGITF

SEQ ID NO: 387292 - protein, 13 aa, Homo sapiens
  CDR3 for beta chain variable domain of TCR clone 193646 (TRBV10-3, TRBJ1-2)
CAISEWDSYGYTF

SEQ ID NO: 387293 - protein, 13 aa, Homo sapiens
  CDR3 for alpha chain variable domain of TCR clone 193647 (TRAV12-3, TRAJ9)
CAMRTTGGFKTIF

SEQ ID NO: 387294 - protein, 16 aa, Homo sapiens
  CDR3 for beta chain variable domain of TCR clone 193647 (TRBV19, TRBJ2-1)
CASSIDGSFAYNEQFF

SEQ ID NO: 387295 - protein, 12 aa, Homo sapiens
  CDR3 for alpha chain variable domain of TCR clone 193648 (TRAV20, TRAJ39)
CAVGNAGNMLTF

SEQ ID NO: 387296 - protein, 11 aa, Homo sapiens
  CDR3 for beta chain variable domain of TCR clone 193648 (TRBV11-2, TRBJ2-2)
CASSLPGELFF

SEQ ID NO: 387297 - protein, 14 aa, Homo sapiens
  CDR3 for alpha chain variable domain of TCR clone 193649 (TRAV17, TRAJ22)
CATSPSGSARQLTF

SEQ ID NO: 387298 - protein, 16 aa, Homo sapiens
  CDR3 for beta chain variable domain of TCR clone 193649 (TRBV6-1, TRBJ2-2)
CASSFGQGANTGELFF

SEQ ID NO: 387299 - protein, 13 aa, Homo sapiens
  CDR3 for alpha chain variable domain of TCR clone 193650 (TRAV12-2, TRAJ6)
CAVNVSRKLHTYI

SEQ ID NO: 387300 - protein, 16 aa, Homo sapiens
  CDR3 for beta chain variable domain of TCR clone 193650 (TRBV7-2, TRBJ1-2)
CASSWGTGGSSYGYTF

SEQ ID NO: 387301 - protein, 14 aa, Homo sapiens
  CDR3 for alpha chain variable domain of TCR clone 193651 (TRAV1-2, TRAJ8)
CAVREDTGFKKLVF

SEQ ID NO: 387302 - protein, 13 aa, Homo sapiens
  CDR3 for beta chain variable domain of TCR clone 193651 (TRBV12-4, TRBJ1-5)
CASSPDRAQPQHF

SEQ ID NO: 387303 - protein, 15 aa, Homo sapiens
  CDR3 for alpha chain variable domain of TCR clone 193652 (TRAV17, TRAJ45)
TSVLRTGGGADGLTF

SEQ ID NO: 387304 - protein, 15 aa, Homo sapiens
  CDR3 for beta chain variable domain of TCR clone 193652 (TRBV10-3, TRBJ2-1)
CATNGGPGQGDEQFF

SEQ ID NO: 387305 - protein, 14 aa, Homo sapiens
  CDR3 for alpha chain variable domain of TCR clone 193653 (TRAV22, TRAJ6)
CAGVGPGGSYIPTF

SEQ ID NO: 387306 - protein, 14 aa, Homo sapiens
  CDR3 for beta chain variable domain of TCR clone 193653 (TRBV9, TRBJ2-7)
CASSVSVGSYEQYF

SEQ ID NO: 387307 - protein, 11 aa, Homo sapiens
  CDR3 for alpha chain variable domain of TCR clone 193654 (TRAV35, TRAJ30)
CAPGGDDKIIF

SEQ ID NO: 387308 - protein, 14 aa, Homo sapiens
  CDR3 for beta chain variable domain of TCR clone 193654 (TRBV7-6, TRBJ2-1)
WARSLGGGADEQFF

SEQ ID NO: 387309 - protein, 13 aa, Homo sapiens
  CDR3 for alpha chain variable domain of TCR clone 193655 (TRAV12-2, TRAJ4)
CAVFSGGYNKLIF

SEQ ID NO: 387310 - protein, 13 aa, Homo sapiens
  CDR3 for beta chain variable domain of TCR clone 193655 (TRBV19, TRBJ1-5)
FASSIDRDQPQHF

SEQ ID NO: 387311 - protein, 18 aa, Homo sapiens
  CDR3 for alpha chain variable domain of TCR clone 193656 (TRAV26-1, TRAJ52)
CIVRFAGAGGTSYGKLTF

SEQ ID NO: 387312 - protein, 13 aa, Homo sapiens
  CDR3 for beta chain variable domain of TCR clone 193656 (TRBV7-8, TRBJ1-2)
CASSAQSYYGYTF

SEQ ID NO: 387313 - protein, 18 aa, Homo sapiens
  CDR3 for alpha chain variable domain of TCR clone 193657 (TRAV13-1, TRAJ52)
CAAKNPNAGGTSYGKLSF

SEQ ID NO: 387314 - protein, 15 aa, Homo sapiens
  CDR3 for beta chain variable domain of TCR clone 193657 (TRBV6-1, TRBJ2-3)
CASSERGGITDTQYF

SEQ ID NO: 387315 - protein, 12 aa, Homo sapiens
  CDR3 for alpha chain variable domain of TCR clone 193658 (TRAV21, TRAJ31)
CVLAGNNARLMF

SEQ ID NO: 387316 - protein, 16 aa, Homo sapiens
  CDR3 for beta chain variable domain of TCR clone 193658 (TRBV27, TRBJ2-5)
YASSFGPGGTKETQYF

SEQ ID NO: 387317 - protein, 14 aa, Homo sapiens
  CDR3 for alpha chain variable domain of TCR clone 193659 (TRAV1-2, TRAJ8)
CAVRADTGFQKLVF

SEQ ID NO: 387318 - protein, 15 aa, Homo sapiens
  CDR3 for beta chain variable domain of TCR clone 193659 (TRBV6-3, TRBJ2-7)
CASSFPGTVFYEQYF

SEQ ID NO: 387319 - protein, 13 aa, Homo sapiens
  CDR3 for alpha chain variable domain of TCR clone 193660 (TRAV8-3, TRAJ36)
CAVGATGANNLFF

SEQ ID NO: 387320 - protein, 14 aa, Homo sapiens
  CDR3 for beta chain variable domain of TCR clone 193660 (TRBV7-7, TRBJ2-2)
CATRQDSDTGELFF

SEQ ID NO: 387321 - protein, 19 aa, Homo sapiens
  CDR3 for alpha chain variable domain of TCR clone 193661 (TRAV1-2, TRAJ26)
CLLPLCCERPDNYGQNFVF

SEQ ID NO: 387322 - protein, 17 aa, Homo sapiens
  CDR3 for beta chain variable domain of TCR clone 193661 (TRBV13, TRBJ2-3)
CASSLSRVAGWRNTQYF

SEQ ID NO: 387323 - protein, 13 aa, Homo sapiens
  CDR3 for alpha chain variable domain of TCR clone 193662 (TRAV27, TRAJ3)
ASLWGSRASKIIF

SEQ ID NO: 387324 - protein, 15 aa, Homo sapiens
  CDR3 for beta chain variable domain of TCR clone 193662 (TRBV28, TRBJ1-3)
CASSMGWASGNTIYF

SEQ ID NO: 387325 - protein, 15 aa, Homo sapiens
  CDR3 for alpha chain variable domain of TCR clone 193663 (TRAV8-3, TRAJ45)
CASPYSGGGADVLTF

SEQ ID NO: 387326 - protein, 13 aa, Homo sapiens
  CDR3 for beta chain variable domain of TCR clone 193663 (TRBV10-3, TRBJ2-7)
CASKLAVNYEQYF

SEQ ID NO: 387327 - protein, 21 aa, Homo sapiens
  CDR3 for alpha chain variable domain of TCR clone 193664 (TRAV27, TRAJ39)
PILVIQASTSVQENAGNMLTF

SEQ ID NO: 387328 - protein, 14 aa, Homo sapiens
  CDR3 for beta chain variable domain of TCR clone 193664 (TRBV15, TRBJ2-7)
CATSPDRGLYEQYF

SEQ ID NO: 387329 - protein, 13 aa, Homo sapiens
  CDR3 for alpha chain variable domain of TCR clone 193665 (TRAV23/DV6, TRAJ24)
CAASTDSWGKFQF

SEQ ID NO: 387330 - protein, 14 aa, Homo sapiens
  CDR3 for beta chain variable domain of TCR clone 193665 (TRBV19, TRBJ2-5)
CASSMTGQQETQYF

SEQ ID NO: 387331 - protein, 12 aa, Homo sapiens
  CDR3 for alpha chain variable domain of TCR clone 193666 (TRAV13-2, TRAJ8)
CAPWLGFQKLVF

SEQ ID NO: 387332 - protein, 14 aa, Homo sapiens
  CDR3 for beta chain variable domain of TCR clone 193666 (TRBV29-1, TRBJ2-5)
CSVGPAGGQETQYF

SEQ ID NO: 387333 - protein, 14 aa, Homo sapiens
  CDR3 for alpha chain variable domain of TCR clone 193667 (TRAV12-2, TRAJ11)
CAVEGGSGYSTLTF

SEQ ID NO: 387334 - protein, 12 aa, Homo sapiens
  CDR3 for beta chain variable domain of TCR clone 193667 (TRBV12-4, TRBJ2-3)
CASSSTTDTQYF

SEQ ID NO: 387335 - protein, 13 aa, Homo sapiens
  CDR3 for alpha chain variable domain of TCR clone 193668 (TRAV9-2, TRAJ10)
CALATGGGNKLTF

SEQ ID NO: 387336 - protein, 16 aa, Homo sapiens
  CDR3 for beta chain variable domain of TCR clone 193668 (TRBV7-3, TRBJ2-1)
CACSLEGYRSYNEQFF

SEQ ID NO: 387337 - protein, 13 aa, Homo sapiens
  CDR3 for alpha chain variable domain of TCR clone 193669 (TRAV2, TRAJ15)
CAVASQAGTALIF

SEQ ID NO: 387338 - protein, 12 aa, Homo sapiens
  CDR3 for beta chain variable domain of TCR clone 193669 (TRBV29-1, TRBJ1-3)
CSTRDSGNTIYF

SEQ ID NO: 387339 - protein, 20 aa, Homo sapiens
  CDR3 for alpha chain variable domain of TCR clone 193670 (TRAV25, TRAJ21)
TATQTTDVGTYPLSFNKFYF

SEQ ID NO: 387340 - protein, 15 aa, Homo sapiens
  CDR3 for beta chain variable domain of TCR clone 193670 (TRBV18, TRBJ2-1)
CASSPPSASYNEQFF

SEQ ID NO: 387341 - protein, 11 aa, Homo sapiens
  CDR3 for alpha chain variable domain of TCR clone 193671 (TRAV23/DV6, TRAJ49)
CAARAGTQFYF

SEQ ID NO: 387342 - protein, 13 aa, Homo sapiens
  CDR3 for beta chain variable domain of TCR clone 193671 (TRBV19, TRBJ1-5)
CASSINFSQPQHF

SEQ ID NO: 387343 - protein, 15 aa, Homo sapiens
  CDR3 for alpha chain variable domain of TCR clone 193672 (TRAV34, TRAJ38)
CGADFTPGTNRKLLW

SEQ ID NO: 387344 - protein, 16 aa, Homo sapiens
  CDR3 for beta chain variable domain of TCR clone 193672 (TRBV12-5, TRBJ2-5)
CASGPRTSGNQETQYF

SEQ ID NO: 387345 - protein, 14 aa, Homo sapiens
  CDR3 for alpha chain variable domain of TCR clone 193673 (TRAV12-3, TRAJ13)
CAVKKTGGYQKVTF

SEQ ID NO: 387346 - protein, 13 aa, Homo sapiens
  CDR3 for beta chain variable domain of TCR clone 193673 (TRBV20-1, TRBJ1-1)
CSARLGQGTEAFF

SEQ ID NO: 387347 - protein, 18 aa, Homo sapiens
  CDR3 for alpha chain variable domain of TCR clone 193674 (TRAV21, TRAJ52)
CAVRPSPAGGTSYGKLTF

SEQ ID NO: 387348 - protein, 16 aa, Homo sapiens
  CDR3 for beta chain variable domain of TCR clone 193674 (TRBV28, TRBJ1-1)
CASSPGHGGLKLSLDK

SEQ ID NO: 387349 - protein, 11 aa, Homo sapiens
  CDR3 for alpha chain variable domain of TCR clone 193675 (TRAV17, TRAJ9)
CATTGGFKTIF

SEQ ID NO: 387350 - protein, 16 aa, Homo sapiens
  CDR3 for beta chain variable domain of TCR clone 193675 (TRBV18, TRBJ2-4)
CASSPPYSGAKNIQYF

SEQ ID NO: 387351 - protein, 14 aa, Homo sapiens
  CDR3 for alpha chain variable domain of TCR clone 193676 (TRAV12-2, TRAJ45)
CAVYSGGGADGLTF

SEQ ID NO: 387352 - protein, 14 aa, Homo sapiens
  CDR3 for beta chain variable domain of TCR clone 193676 (TRBV6-5, TRBJ1-2)
GASTRGGGSDGYTF

SEQ ID NO: 387353 - protein, 13 aa, Homo sapiens
  CDR3 for alpha chain variable domain of TCR clone 193677 (TRAV3, TRAJ21)
CAVREPDFNKFYF

SEQ ID NO: 387354 - protein, 17 aa, Homo sapiens
  CDR3 for beta chain variable domain of TCR clone 193677 (TRBV7-8, TRBJ2-6)
SASSAGTGGAGANVLTF

SEQ ID NO: 387355 - protein, 12 aa, Homo sapiens
  CDR3 for alpha chain variable domain of TCR clone 193678 (TRAV13-1, TRAJ42)
SVLRGSQGNLLF

SEQ ID NO: 387356 - protein, 13 aa, Homo sapiens
  CDR3 for beta chain variable domain of TCR clone 193678 (TRBV2, TRBJ1-4)
CASSELGVEKLFF

SEQ ID NO: 387357 - protein, 14 aa, Homo sapiens
  CDR3 for alpha chain variable domain of TCR clone 193679 (TRAV12-2, TRAJ13)
CAVKKTGGYQKVTF

SEQ ID NO: 387358 - protein, 13 aa, Homo sapiens
  CDR3 for beta chain variable domain of TCR clone 193679 (TRBV7-3, TRBJ1-1)
CASSLDWGAEAFF

SEQ ID NO: 387359 - protein, 15 aa, Homo sapiens
  CDR3 for alpha chain variable domain of TCR clone 193680 (TRAV23/DV6, TRAJ38)
CAASGGAGNNRKLIL

SEQ ID NO: 387360 - protein, 13 aa, Homo sapiens
  CDR3 for beta chain variable domain of TCR clone 193680 (TRBV7-2, TRBJ1-2)
CAGSLPGLYGYTF

SEQ ID NO: 387361 - protein, 14 aa, Homo sapiens
  CDR3 for alpha chain variable domain of TCR clone 193681 (TRAV17, TRAJ57)
CATDPQGGSEKLGF

SEQ ID NO: 387362 - protein, 15 aa, Homo sapiens
  CDR3 for beta chain variable domain of TCR clone 193681 (TRBV12-4, TRBJ1-2)
CASRLGVAGNYGYTF

SEQ ID NO: 387363 - protein, 16 aa, Homo sapiens
  CDR3 for alpha chain variable domain of TCR clone 193682 (TRAV12-3, TRAJ53)
CAMSPGSGGSNYKLTF

SEQ ID NO: 387364 - protein, 12 aa, Homo sapiens
  CDR3 for beta chain variable domain of TCR clone 193682 (TRBV5-1, TRBJ2-4)
LAGEWTKNIQYF

SEQ ID NO: 387365 - protein, 12 aa, Homo sapiens
  CDR3 for alpha chain variable domain of TCR clone 193683 (TRAV1-2, TRAJ42)
CVAGGSQGNLIF

SEQ ID NO: 387366 - protein, 13 aa, Homo sapiens
  CDR3 for beta chain variable domain of TCR clone 193683 (TRBV12-4, TRBJ1-1)
CASSPGTGFEAFF

SEQ ID NO: 387367 - protein, 14 aa, Homo sapiens
  CDR3 for alpha chain variable domain of TCR clone 193684 (TRAV21, TRAJ15)
CAVSLNQAGTALIF

SEQ ID NO: 387368 - protein, 13 aa, Homo sapiens
  CDR3 for beta chain variable domain of TCR clone 193684 (TRBV14, TRBJ2-7)
CASSQDRRYEQYF

SEQ ID NO: 387369 - protein, 12 aa, Homo sapiens
  CDR3 for alpha chain variable domain of TCR clone 193685 (TRAV12-2, TRAJ7)
CAVMRGNNRLAF

SEQ ID NO: 387370 - protein, 16 aa, Homo sapiens
  CDR3 for beta chain variable domain of TCR clone 193685 (TRBV7-9, TRBJ2-3)
CASSPTVAGDLRYAVF

SEQ ID NO: 387371 - protein, 12 aa, Homo sapiens
  CDR3 for alpha chain variable domain of TCR clone 193686 (TRAV17, TRAJ57)
RATDGGSEKLVF

SEQ ID NO: 387372 - protein, 15 aa, Homo sapiens
  CDR3 for beta chain variable domain of TCR clone 193686 (TRBV7-6, TRBJ1-5)
CASSQSSGINQPQHF

SEQ ID NO: 387373 - protein, 12 aa, Homo sapiens
  CDR3 for alpha chain variable domain of TCR clone 193687 (TRAV27, TRAJ13)
CAGAGGYQKVTF

SEQ ID NO: 387374 - protein, 15 aa, Homo sapiens
  CDR3 for beta chain variable domain of TCR clone 193687 (TRBV9, TRBJ1-6)
CASSVAGTGDSPLHF

SEQ ID NO: 387375 - protein, 14 aa, Homo sapiens
  CDR3 for alpha chain variable domain of TCR clone 193688 (TRAV12-1, TRAJ17)
CVVNPKAAGNKLTF

SEQ ID NO: 387376 - protein, 11 aa, Homo sapiens
  CDR3 for beta chain variable domain of TCR clone 193688 (TRBV29-1, TRBJ2-5)
CSEDRTGTQYF

SEQ ID NO: 387377 - protein, 13 aa, Homo sapiens
  CDR3 for alpha chain variable domain of TCR clone 193689 (TRAV35, TRAJ32)
CAGVGGGTNKLIF

SEQ ID NO: 387378 - protein, 17 aa, Homo sapiens
  CDR3 for beta chain variable domain of TCR clone 193689 (TRBV4-3, TRBJ2-1)
CASSQFSSGRASGEQFF

SEQ ID NO: 387379 - protein, 15 aa, Homo sapiens
  CDR3 for alpha chain variable domain of TCR clone 193690 (TRAV8-3, TRAJ37)
CAGGAPSSNTGKLIF

SEQ ID NO: 387380 - protein, 15 aa, Homo sapiens
  CDR3 for beta chain variable domain of TCR clone 193690 (TRBV11-2, TRBJ1-2)
CASSQMRGLNYGYTF

SEQ ID NO: 387381 - protein, 14 aa, Homo sapiens
  CDR3 for alpha chain variable domain of TCR clone 193691 (TRAV21, TRAJ58)
CAVRRGRSGSRLTF

SEQ ID NO: 387382 - protein, 13 aa, Homo sapiens
  CDR3 for beta chain variable domain of TCR clone 193691 (TRBV14, TRBJ2-7)
CASSQDRRYEQYF

SEQ ID NO: 387383 - protein, 16 aa, Homo sapiens
  CDR3 for alpha chain variable domain of TCR clone 193692 (TRAV3, TRAJ37)
CAVRGKGSGNTGKLIF

SEQ ID NO: 387384 - protein, 15 aa, Homo sapiens
  CDR3 for beta chain variable domain of TCR clone 193692 (TRBV7-9, TRBJ1-6)
CASSSPGRGDSPLHF

SEQ ID NO: 387385 - protein, 15 aa, Homo sapiens
  CDR3 for alpha chain variable domain of TCR clone 193693 (TRAV4, TRAJ39)
CLVVPNNNAGNMLTF

SEQ ID NO: 387386 - protein, 12 aa, Homo sapiens
  CDR3 for beta chain variable domain of TCR clone 193693 (TRBV12-4, TRBJ2-7)
CASNPGGGEQYF

SEQ ID NO: 387387 - protein, 14 aa, Homo sapiens
  CDR3 for alpha chain variable domain of TCR clone 193694 (TRAV13-1, TRAJ44)
CAAKSTGTASKLTF

SEQ ID NO: 387388 - protein, 15 aa, Homo sapiens
  CDR3 for beta chain variable domain of TCR clone 193694 (TRBV10-3, TRBJ2-1)
CAISDVQDRAYEQFF

SEQ ID NO: 387389 - protein, 15 aa, Homo sapiens
  CDR3 for alpha chain variable domain of TCR clone 193695 (TRAV12-2, TRAJ53)
CAVNGGGGSNYKLTF

SEQ ID NO: 387390 - protein, 13 aa, Homo sapiens
  CDR3 for beta chain variable domain of TCR clone 193695 (TRBV7-9, TRBJ1-2)
CASSPSNFWGYTF

SEQ ID NO: 387391 - protein, 13 aa, Homo sapiens
  CDR3 for alpha chain variable domain of TCR clone 193696 (TRAV12-1, TRAJ26)
CVVGRNYGQNFVF

SEQ ID NO: 387392 - protein, 16 aa, Homo sapiens
  CDR3 for beta chain variable domain of TCR clone 193696 (TRBV4-2, TRBJ2-3)
CASSQELAGDTDTQYF

SEQ ID NO: 387393 - protein, 14 aa, Homo sapiens
  CDR3 for alpha chain variable domain of TCR clone 193697 (TRAV12-3, TRAJ10)
SHLPVTGGGNKLTF

SEQ ID NO: 387394 - protein, 11 aa, Homo sapiens
  CDR3 for beta chain variable domain of TCR clone 193697 (TRBV20-1, TRBJ2-5)
CSADRAETQYF

SEQ ID NO: 387395 - protein, 18 aa, Homo sapiens
  CDR3 for alpha chain variable domain of TCR clone 193698 (TRAV14/DV4, TRAJ3)
CAMREGSGGYSSASKIIF

SEQ ID NO: 387396 - protein, 14 aa, Homo sapiens
  CDR3 for beta chain variable domain of TCR clone 193698 (TRBV7-8, TRBJ2-3)
CASSSRDSTDTQYF

SEQ ID NO: 387397 - protein, 14 aa, Homo sapiens
  CDR3 for alpha chain variable domain of TCR clone 193699 (TRAV12-2, TRAJ53)
CAVKGGGSNYKLTF

SEQ ID NO: 387398 - protein, 13 aa, Homo sapiens
  CDR3 for beta chain variable domain of TCR clone 193699 (TRBV7-3, TRBJ1-1)
CASSQDWGAEAFF

SEQ ID NO: 387399 - protein, 18 aa, Homo sapiens
  CDR3 for alpha chain variable domain of TCR clone 193700 (TRAV12-2, )
CAVEDIQNPDPAVYQLRD

SEQ ID NO: 387400 - protein, 13 aa, Homo sapiens
  CDR3 for beta chain variable domain of TCR clone 193700 (TRBV7-3, TRBJ1-1)
CASSQDWGAEAFL

SEQ ID NO: 387401 - protein, 11 aa, Homo sapiens
  CDR3 for alpha chain variable domain of TCR clone 193701 (TRAV1-2, TRAJ40)
CAVPGTYKYLL

SEQ ID NO: 387402 - protein, 15 aa, Homo sapiens
  CDR3 for beta chain variable domain of TCR clone 193701 (TRBV25-1, TRBJ1-4)
CASSPGDSTNEKLFF

SEQ ID NO: 387403 - protein, 14 aa, Homo sapiens
  CDR3 for alpha chain variable domain of TCR clone 193702 (TRAV9-2, TRAJ39)
CALYIYNSGNMLTF

SEQ ID NO: 387404 - protein, 15 aa, Homo sapiens
  CDR3 for beta chain variable domain of TCR clone 193702 (TRBV5-1, TRBJ2-1)
CASSPPRAPYNEQFF

SEQ ID NO: 387405 - protein, 13 aa, Homo sapiens
  CDR3 for alpha chain variable domain of TCR clone 193703 (TRAV12-2, TRAJ20)
CAVYPSNDYKLSF

SEQ ID NO: 387406 - protein, 12 aa, Homo sapiens
  CDR3 for beta chain variable domain of TCR clone 193703 (TRBV12-4, TRBJ2-3)
CASSTLPDTQYF

SEQ ID NO: 387407 - protein, 11 aa, Homo sapiens
  CDR3 for alpha chain variable domain of TCR clone 193704 (TRAV41, TRAJ49)
CAVSSRNQFYF

SEQ ID NO: 387408 - protein, 16 aa, Homo sapiens
  CDR3 for beta chain variable domain of TCR clone 193704 (TRBV27, TRBJ2-7)
CASSKQGRGWAYEQYF

SEQ ID NO: 387409 - protein, 13 aa, Homo sapiens
  CDR3 for alpha chain variable domain of TCR clone 193705 (TRAV17, TRAJ26)
CATVDNYGENFVF

SEQ ID NO: 387410 - protein, 16 aa, Homo sapiens
  CDR3 for beta chain variable domain of TCR clone 193705 (TRBV2, TRBJ2-1)
CASSVGGSLSYNEQFF

SEQ ID NO: 387411 - protein, 15 aa, Homo sapiens
  CDR3 for alpha chain variable domain of TCR clone 193706 (TRAV12-2, TRAJ53)
CAVNGGGGSNYKLTF

SEQ ID NO: 387412 - protein, 16 aa, Homo sapiens
  CDR3 for beta chain variable domain of TCR clone 193706 (TRBV5-1, TRBJ2-3)
CASSLGLAVYTDTQYF

SEQ ID NO: 387413 - protein, 12 aa, Homo sapiens
  CDR3 for alpha chain variable domain of TCR clone 193707 (TRAV12-2, TRAJ42)
CAVGGSQGNLIF

SEQ ID NO: 387414 - protein, 15 aa, Homo sapiens
  CDR3 for beta chain variable domain of TCR clone 193707 (TRBV6-3, TRBJ2-7)
CASSRTGVNLYEQYF

SEQ ID NO: 387415 - protein, 15 aa, Homo sapiens
  CDR3 for alpha chain variable domain of TCR clone 193708 (TRAV3, TRAJ5)
CAVRDLDPGRRALTS

SEQ ID NO: 387416 - protein, 13 aa, Homo sapiens
  CDR3 for beta chain variable domain of TCR clone 193708 (TRBV12-4, TRBJ2-7)
CASSPTETYEQYF

SEQ ID NO: 387417 - protein, 13 aa, Homo sapiens
  CDR3 for alpha chain variable domain of TCR clone 193709 (TRAV6, TRAJ33)
CALPMDSNYQLIW

SEQ ID NO: 387418 - protein, 15 aa, Homo sapiens
  CDR3 for beta chain variable domain of TCR clone 193709 (TRBV11-2, TRBJ2-2)
CASRGLAANTGELFF

SEQ ID NO: 387419 - protein, 21 aa, Homo sapiens
  CDR3 for alpha chain variable domain of TCR clone 193710 (TRAV36/DV7, TRAJ39)
TATRTGDSAIYLPNAGNMLTF

SEQ ID NO: 387420 - protein, 20 aa, Homo sapiens
  CDR3 for beta chain variable domain of TCR clone 193710 (TRBV28, TRBJ2-1)
CASTPIGRSPGLAGGNEQFF

SEQ ID NO: 387421 - protein, 11 aa, Homo sapiens
  CDR3 for alpha chain variable domain of TCR clone 193711 (TRAV12-2, TRAJ29)
FAVTLRSPLVF

SEQ ID NO: 387422 - protein, 16 aa, Homo sapiens
  CDR3 for beta chain variable domain of TCR clone 193711 (TRBV5-1, TRBJ2-2)
CASSLGGTGSTGELFF

SEQ ID NO: 387423 - protein, 14 aa, Homo sapiens
  CDR3 for alpha chain variable domain of TCR clone 193712 (TRAV12-2, TRAJ17)
CVVLFKAAGNKLTF

SEQ ID NO: 387424 - protein, 14 aa, Homo sapiens
  CDR3 for beta chain variable domain of TCR clone 193712 (TRBV12-5, TRBJ2-5)
CASGSRTHQGTQYF

SEQ ID NO: 387425 - protein, 11 aa, Homo sapiens
  CDR3 for alpha chain variable domain of TCR clone 193713 (TRAV1-2, TRAJ31)
CAVNNNARLMF

SEQ ID NO: 387426 - protein, 15 aa, Homo sapiens
  CDR3 for beta chain variable domain of TCR clone 193713 (TRBV28, TRBJ2-1)
CASSLIAGGRSEQFF

SEQ ID NO: 387427 - protein, 13 aa, Homo sapiens
  CDR3 for alpha chain variable domain of TCR clone 193714 (TRAV23/DV6, TRAJ12)
CAPRVDSSYKLNF

SEQ ID NO: 387428 - protein, 12 aa, Homo sapiens
  CDR3 for beta chain variable domain of TCR clone 193714 (TRBV7-8, TRBJ2-7)
CASSLGDREQYF

SEQ ID NO: 387429 - protein, 14 aa, Homo sapiens
  CDR3 for alpha chain variable domain of TCR clone 193715 (TRAV2, TRAJ9)
CAVEDRGGGFKTIF

SEQ ID NO: 387430 - protein, 18 aa, Homo sapiens
  CDR3 for beta chain variable domain of TCR clone 193715 (TRBV20-1, TRBJ2-6)
CSAETTPTHGSGANVLTF

SEQ ID NO: 387431 - protein, 16 aa, Homo sapiens
  CDR3 for alpha chain variable domain of TCR clone 193716 (TRAV3, TRAJ21)
CAGRDIERGNFNKFYF

SEQ ID NO: 387432 - protein, 15 aa, Homo sapiens
  CDR3 for beta chain variable domain of TCR clone 193716 (TRBV7-6, TRBJ2-5)
CASSKPTGPRETQYF

SEQ ID NO: 387433 - protein, 15 aa, Homo sapiens
  CDR3 for alpha chain variable domain of TCR clone 193717 (TRAV29/DV5, TRAJ53)
CAARYSGGSNYKLTC

SEQ ID NO: 387434 - protein, 15 aa, Homo sapiens
  CDR3 for beta chain variable domain of TCR clone 193717 (TRBV28, TRBJ2-1)
CASSLGTRLYNEQFF

SEQ ID NO: 387435 - protein, 15 aa, Homo sapiens
  CDR3 for alpha chain variable domain of TCR clone 193718 (TRAV21, TRAJ37)
CAVRPTLSNTGKIIF

SEQ ID NO: 387436 - protein, 16 aa, Homo sapiens
  CDR3 for beta chain variable domain of TCR clone 193718 (TRBV24-1, TRBJ2-3)
CATSDRRQDLTDTQYF

SEQ ID NO: 387437 - protein, 15 aa, Homo sapiens
  CDR3 for alpha chain variable domain of TCR clone 193719 (TRAV12-3, TRAJ10)
CASYILTGGGNKLTF

SEQ ID NO: 387438 - protein, 14 aa, Homo sapiens
  CDR3 for beta chain variable domain of TCR clone 193719 (TRBV13, TRBJ2-5)
CASSLERVVETQYF

SEQ ID NO: 387439 - protein, 15 aa, Homo sapiens
  CDR3 for alpha chain variable domain of TCR clone 193720 (TRAV12-2, TRAJ53)
CAVNGGGGSNYKLTF

SEQ ID NO: 387440 - protein, 17 aa, Homo sapiens
  CDR3 for beta chain variable domain of TCR clone 193720 (TRBV7-3, TRBJ2-3)
RASSLMKRMRGADAQYF

SEQ ID NO: 387441 - protein, 16 aa, Homo sapiens
  CDR3 for alpha chain variable domain of TCR clone 193721 (TRAV16, TRAJ52)
CALSGVGGTIYGKLTF

SEQ ID NO: 387442 - protein, 14 aa, Homo sapiens
  CDR3 for beta chain variable domain of TCR clone 193721 (TRBV19, TRBJ1-2)
CTSSLQGQAYGYTF

SEQ ID NO: 387443 - protein, 15 aa, Homo sapiens
  CDR3 for alpha chain variable domain of TCR clone 193722 (TRAV3, TRAJ17)
CAVRDGPAAGNKLTF

SEQ ID NO: 387444 - protein, 12 aa, Homo sapiens
  CDR3 for beta chain variable domain of TCR clone 193722 (TRBV12-4, TRBJ2-1)
CASSPGRNEQCF

SEQ ID NO: 387445 - protein, 15 aa, Homo sapiens
  CDR3 for alpha chain variable domain of TCR clone 193723 (TRAV3, TRAJ11)
CAVRDRGSGYSTLTF

SEQ ID NO: 387446 - protein, 11 aa, Homo sapiens
  CDR3 for beta chain variable domain of TCR clone 193723 (TRBV29-1, TRBJ2-5)
CSEDRTGTQYV

SEQ ID NO: 387447 - protein, 14 aa, Homo sapiens
  CDR3 for alpha chain variable domain of TCR clone 193724 (TRAV38-2/DV8, TRAJ45)
CYWDSGGGADGLTF

SEQ ID NO: 387448 - protein, 14 aa, Homo sapiens
  CDR3 for beta chain variable domain of TCR clone 193724 (TRBV7-2, TRBJ2-7)
CASRSQGAAYEQYF

SEQ ID NO: 387449 - protein, 12 aa, Homo sapiens
  CDR3 for alpha chain variable domain of TCR clone 193725 (TRAV16, TRAJ10)
CSRTGGGNKLTF

SEQ ID NO: 387450 - protein, 17 aa, Homo sapiens
  CDR3 for beta chain variable domain of TCR clone 193725 (TRBV4-1, TRBJ2-7)
CASSRDPLGVRWGEQYF

SEQ ID NO: 387451 - protein, 19 aa, Homo sapiens
  CDR3 for alpha chain variable domain of TCR clone 193726 (TRAV12-1, TRAJ45)
CVVTHDVGYSGGGADGLTF

SEQ ID NO: 387452 - protein, 13 aa, Homo sapiens
  CDR3 for beta chain variable domain of TCR clone 193726 (TRBV11-2, TRBJ2-5)
CASSSTGEETQYF

SEQ ID NO: 387453 - protein, 15 aa, Homo sapiens
  CDR3 for alpha chain variable domain of TCR clone 193727 (TRAV3, TRAJ22)
CAVRDRGGSARQLTF

SEQ ID NO: 387454 - protein, 13 aa, Homo sapiens
  CDR3 for beta chain variable domain of TCR clone 193727 (TRBV10-2, TRBJ2-1)
CASGASGDAKQFF

SEQ ID NO: 387455 - protein, 11 aa, Homo sapiens
  CDR3 for alpha chain variable domain of TCR clone 193728 (TRAV1-2, TRAJ20)
CAVANDYKLSF

SEQ ID NO: 387456 - protein, 12 aa, Homo sapiens
  CDR3 for beta chain variable domain of TCR clone 193728 (TRBV2, TRBJ2-1)
GRGPPSYNEQFF

SEQ ID NO: 387457 - protein, 17 aa, Homo sapiens
  CDR3 for alpha chain variable domain of TCR clone 193729 (TRAV8-4, TRAJ53)
CAASWKSRGGSNYKLTF

SEQ ID NO: 387458 - protein, 19 aa, Homo sapiens
  CDR3 for beta chain variable domain of TCR clone 193729 (TRBV7-9, TRBJ2-1)
CASSHNRGALLRSYSEQFF

SEQ ID NO: 387459 - protein, 15 aa, Homo sapiens
  CDR3 for alpha chain variable domain of TCR clone 193730 (TRAV8-1, TRAJ6)
CAVNTPPGGSSIPTF

SEQ ID NO: 387460 - protein, 15 aa, Homo sapiens
  CDR3 for beta chain variable domain of TCR clone 193730 (TRBV11-2, TRBJ2-2)
CASSSDRVNAGELFF

SEQ ID NO: 387461 - protein, 15 aa, Homo sapiens
  CDR3 for alpha chain variable domain of TCR clone 193731 (TRAV26-1, TRAJ29)
CIVRVEGSGNTPLVF

SEQ ID NO: 387462 - protein, 17 aa, Homo sapiens
  CDR3 for beta chain variable domain of TCR clone 193731 (TRBV3-1, TRBJ2-5)
CASSNWGGTSGQETQYF

SEQ ID NO: 387463 - protein, 16 aa, Homo sapiens
  CDR3 for alpha chain variable domain of TCR clone 193732 (TRAV23/DV6, TRAJ9)
CAASIGGNTGGFKTIF

SEQ ID NO: 387464 - protein, 13 aa, Homo sapiens
  CDR3 for beta chain variable domain of TCR clone 193732 (TRBV10-3, TRBJ2-7)
CATKLAVNYEQYF

SEQ ID NO: 387465 - protein, 16 aa, Homo sapiens
  CDR3 for alpha chain variable domain of TCR clone 193733 (TRAV8-3, TRAJ10)
CAVGPILTGGGNTLTF

SEQ ID NO: 387466 - protein, 16 aa, Homo sapiens
  CDR3 for beta chain variable domain of TCR clone 193733 (TRBV7-2, TRBJ2-5)
CASSSKWLSGQETQYF

SEQ ID NO: 387467 - protein, 12 aa, Homo sapiens
  CDR3 for alpha chain variable domain of TCR clone 193734 (TRAV8-6, TRAJ43)
CAVSNNNNDMRF

SEQ ID NO: 387468 - protein, 15 aa, Homo sapiens
  CDR3 for beta chain variable domain of TCR clone 193734 (TRBV7-3, TRBJ2-6)
CARSLGGSGANVLTF

SEQ ID NO: 387469 - protein, 21 aa, Homo sapiens
  CDR3 for alpha chain variable domain of TCR clone 193735 (TRAV17, TRAJ9)
CATDYTGGFKLSLEQEQDYLL

SEQ ID NO: 387470 - protein, 15 aa, Homo sapiens
  CDR3 for beta chain variable domain of TCR clone 193735 (TRBV6-3, TRBJ2-7)
CASSSPGTVFYEQYF

SEQ ID NO: 387471 - protein, 14 aa, Homo sapiens
  CDR3 for alpha chain variable domain of TCR clone 193736 (TRAV12-1, TRAJ17)
CVVNYKAAGNKLTF

SEQ ID NO: 387472 - protein, 14 aa, Homo sapiens
  CDR3 for beta chain variable domain of TCR clone 193736 (TRBV28, TRBJ2-1)
CASSPSTGDNEQFF

SEQ ID NO: 387473 - protein, 14 aa, Homo sapiens
  CDR3 for alpha chain variable domain of TCR clone 193737 (TRAV8-4, TRAJ45)
ELGGPGGGADGLTF

SEQ ID NO: 387474 - protein, 16 aa, Homo sapiens
  CDR3 for beta chain variable domain of TCR clone 193737 (TRBV4-2, TRBJ2-3)
CASSQELAGDTDTQYF

SEQ ID NO: 387475 - protein, 12 aa, Homo sapiens
  CDR3 for alpha chain variable domain of TCR clone 193738 (TRAV12-3, TRAJ42)
CAPGGSQGNLIF

SEQ ID NO: 387476 - protein, 15 aa, Homo sapiens
  CDR3 for beta chain variable domain of TCR clone 193738 (TRBV6-3, TRBJ2-7)
CASSSPGTVFYEQYF

SEQ ID NO: 387477 - protein, 13 aa, Homo sapiens
  CDR3 for alpha chain variable domain of TCR clone 193739 (TRAV3, TRAJ43)
RAVKARNNNDMRF

SEQ ID NO: 387478 - protein, 16 aa, Homo sapiens
  CDR3 for beta chain variable domain of TCR clone 193739 (TRBV7-9, TRBJ2-3)
GASSFSVAGGTDTQYF

SEQ ID NO: 387479 - protein, 12 aa, Homo sapiens
  CDR3 for alpha chain variable domain of TCR clone 193740 (TRAV16, TRAJ5)
CAQLTGRRALTF

SEQ ID NO: 387480 - protein, 16 aa, Homo sapiens
  CDR3 for beta chain variable domain of TCR clone 193740 (TRBV19, TRBJ2-1)
CASSKAGPSSYNEQFF

SEQ ID NO: 387481 - protein, 15 aa, Homo sapiens
  CDR3 for alpha chain variable domain of TCR clone 193741 (TRAV3, TRAJ22)
CAVRDRGGSARQLTF

SEQ ID NO: 387482 - protein, 13 aa, Homo sapiens
  CDR3 for beta chain variable domain of TCR clone 193741 (TRBV20-1, TRBJ1-1)
CSASVGGNTEAFF

SEQ ID NO: 387483 - protein, 12 aa, Homo sapiens
  CDR3 for alpha chain variable domain of TCR clone 193742 (TRAV2, TRAJ33)
CAVEDSNYQLIW

SEQ ID NO: 387484 - protein, 15 aa, Homo sapiens
  CDR3 for beta chain variable domain of TCR clone 193742 (TRBV20-1, TRBJ2-7)
CSARDRVSGMDEQYF

SEQ ID NO: 387485 - protein, 16 aa, Homo sapiens
  CDR3 for alpha chain variable domain of TCR clone 193743 (TRAV12-1, TRAJ28)
CVVIAYSGAGCYQLTF

SEQ ID NO: 387486 - protein, 14 aa, Homo sapiens
  CDR3 for beta chain variable domain of TCR clone 193743 (TRBV5-4, TRBJ1-1)
CASSLDSRRDEAFF

SEQ ID NO: 387487 - protein, 16 aa, Homo sapiens
  CDR3 for alpha chain variable domain of TCR clone 193744 (TRAV13-1, TRAJ18)
CAASRMRGSTRGRLYF

SEQ ID NO: 387488 - protein, 15 aa, Homo sapiens
  CDR3 for beta chain variable domain of TCR clone 193744 (TRBV29-1, TRBJ2-1)
CSVGRHALFYNEQFF

SEQ ID NO: 387489 - protein, 12 aa, Homo sapiens
  CDR3 for alpha chain variable domain of TCR clone 193745 (TRAV8-3, TRAJ20)
CAVGANDDKLSF

SEQ ID NO: 387490 - protein, 16 aa, Homo sapiens
  CDR3 for beta chain variable domain of TCR clone 193745 (TRBV19, TRBJ2-2)
CASRSPGTGATGELFF

SEQ ID NO: 387491 - protein, 17 aa, Homo sapiens
  CDR3 for alpha chain variable domain of TCR clone 193746 (TRAV23/DV6, TRAJ58)
CAARLLRGETSGSRLTF

SEQ ID NO: 387492 - protein, 19 aa, Homo sapiens
  CDR3 for beta chain variable domain of TCR clone 193746 (TRBV25-1, TRBJ2-2)
CAILVYRVDRGRKTGELFF

SEQ ID NO: 387493 - protein, 12 aa, Homo sapiens
  CDR3 for alpha chain variable domain of TCR clone 193747 (TRAV1-1, TRAJ39)
CAVSVVGNMLTF

SEQ ID NO: 387494 - protein, 18 aa, Homo sapiens
  CDR3 for beta chain variable domain of TCR clone 193747 (TRBV7-9, TRBJ2-7)
CASSLTTSGSRTWYEQYF

SEQ ID NO: 387495 - protein, 16 aa, Homo sapiens
  CDR3 for alpha chain variable domain of TCR clone 193748 (TRAV30, TRAJ24)
CGTEFVDADSWGKFQF

SEQ ID NO: 387496 - protein, 14 aa, Homo sapiens
  CDR3 for beta chain variable domain of TCR clone 193748 (TRBV7-8, TRBJ2-3)
CASSLEAGTDTQYF

SEQ ID NO: 387497 - protein, 13 aa, Homo sapiens
  CDR3 for alpha chain variable domain of TCR clone 193749 (TRAV3, TRAJ20)
CAVRDTPRYKLSF

SEQ ID NO: 387498 - protein, 14 aa, Homo sapiens
  CDR3 for beta chain variable domain of TCR clone 193749 (TRBV11-1, TRBJ2-7)
CASTFAVPSYERYF

SEQ ID NO: 387499 - protein, 14 aa, Homo sapiens
  CDR3 for alpha chain variable domain of TCR clone 193750 (TRAV9-2, TRAJ39)
CALYIYNAGNMPTF

SEQ ID NO: 387500 - protein, 15 aa, Homo sapiens
  CDR3 for beta chain variable domain of TCR clone 193750 (TRBV7-9, TRBJ1-4)
CASSARTGGNEKLFF

SEQ ID NO: 387501 - protein, 12 aa, Homo sapiens
  CDR3 for alpha chain variable domain of TCR clone 193751 (TRAV13-1, TRAJ21)
CTAKEGFNKFYF

SEQ ID NO: 387502 - protein, 20 aa, Homo sapiens
  CDR3 for beta chain variable domain of TCR clone 193751 (TRBV28, TRBJ2-1)
CASTPIGRSPGLAGGNEQFF

SEQ ID NO: 387503 - protein, 13 aa, Homo sapiens
  CDR3 for alpha chain variable domain of TCR clone 193752 (TRAV27, TRAJ56)
CAGKPGANSKLTF

SEQ ID NO: 387504 - protein, 14 aa, Homo sapiens
  CDR3 for beta chain variable domain of TCR clone 193752 (TRBV5-4, TRBJ2-2)
CASRLDGGTGELFF

SEQ ID NO: 387505 - protein, 11 aa, Homo sapiens
  CDR3 for alpha chain variable domain of TCR clone 193753 (TRAV3, TRAJ21)
CAVGNFNKFYF

SEQ ID NO: 387506 - protein, 19 aa, Homo sapiens
  CDR3 for beta chain variable domain of TCR clone 193753 (TRBV7-2, TRBJ2-3)
CASSFLSRNWGGGTETQYF

SEQ ID NO: 387507 - protein, 14 aa, Homo sapiens
  CDR3 for alpha chain variable domain of TCR clone 193754 (TRAV1-2, TRAJ8)
CAVREDTGVQKLVF

SEQ ID NO: 387508 - protein, 11 aa, Homo sapiens
  CDR3 for beta chain variable domain of TCR clone 193754 (TRBV27, TRBJ2-3)
CASSLGDTQYF

SEQ ID NO: 387509 - protein, 12 aa, Homo sapiens
  CDR3 for alpha chain variable domain of TCR clone 193755 (TRAV8-3, TRAJ20)
CAVDFTDYKLSF

SEQ ID NO: 387510 - protein, 12 aa, Homo sapiens
  CDR3 for beta chain variable domain of TCR clone 193755 (TRBV12-4, TRBJ1-3)
CASSFSGNTIYF

SEQ ID NO: 387511 - protein, 16 aa, Homo sapiens
  CDR3 for alpha chain variable domain of TCR clone 193756 (TRAV16, TRAJ21)
CACGWATTSTNFTLDL

SEQ ID NO: 387512 - protein, 12 aa, Homo sapiens
  CDR3 for beta chain variable domain of TCR clone 193756 (TRBV11-2, TRBJ2-2)
CASSLGGGELFF

SEQ ID NO: 387513 - protein, 12 aa, Homo sapiens
  CDR3 for alpha chain variable domain of TCR clone 193757 (TRAV27, TRAJ58)
CAGASDTSRLTF

SEQ ID NO: 387514 - protein, 14 aa, Homo sapiens
  CDR3 for beta chain variable domain of TCR clone 193757 (TRBV7-3, TRBJ2-1)
CASSLGTSANEQFF

SEQ ID NO: 387515 - protein, 18 aa, Homo sapiens
  CDR3 for alpha chain variable domain of TCR clone 193758 (TRAV26-2, TRAJ45)
CILRLWGYSGGGADGLTF

SEQ ID NO: 387516 - protein, 18 aa, Homo sapiens
  CDR3 for beta chain variable domain of TCR clone 193758 (TRBV11-2, TRBJ2-3)
CASSLGGASRGAPNTQYF

SEQ ID NO: 387517 - protein, 11 aa, Homo sapiens
  CDR3 for alpha chain variable domain of TCR clone 193759 (TRAV21, TRAJ34)
CAHYNTDKLIF

SEQ ID NO: 387518 - protein, 17 aa, Homo sapiens
  CDR3 for beta chain variable domain of TCR clone 193759 (TRBV4-2, TRBJ2-5)
CASSQDAAGGPVETQYF

SEQ ID NO: 387519 - protein, 15 aa, Homo sapiens
  CDR3 for alpha chain variable domain of TCR clone 193760 (TRAV27, TRAJ33)
CAGADIMDSNYQLIW

SEQ ID NO: 387520 - protein, 13 aa, Homo sapiens
  CDR3 for beta chain variable domain of TCR clone 193760 (TRBV28, TRBJ1-2)
CASILQGRGGYTF

SEQ ID NO: 387521 - protein, 19 aa, Homo sapiens
  CDR3 for alpha chain variable domain of TCR clone 193761 (TRAV13-1, TRAJ52)
CAASSSPNAGGTSSGKLTF

SEQ ID NO: 387522 - protein, 15 aa, Homo sapiens
  CDR3 for beta chain variable domain of TCR clone 193761 (TRBV9, TRBJ1-6)
CASSTGGGVDSPLHF

SEQ ID NO: 387523 - protein, 18 aa, Homo sapiens
  CDR3 for alpha chain variable domain of TCR clone 193762 (TRAV26-2, TRAJ45)
CILRLWGYSGGGADGLTF

SEQ ID NO: 387524 - protein, 17 aa, Homo sapiens
  CDR3 for beta chain variable domain of TCR clone 193762 (TRBV4-1, TRBJ2-7)
CASSRDPLGVRGGEQYF

SEQ ID NO: 387525 - protein, 12 aa, Homo sapiens
  CDR3 for alpha chain variable domain of TCR clone 193763 (TRAV2, TRAJ31)
CAVEDNNARLMF

SEQ ID NO: 387526 - protein, 15 aa, Homo sapiens
  CDR3 for beta chain variable domain of TCR clone 193763 (TRBV7-9, TRBJ1-4)
CASSRTGGFNEKLFF

SEQ ID NO: 387527 - protein, 12 aa, Homo sapiens
  CDR3 for alpha chain variable domain of TCR clone 193764 (TRAV12-1, TRAJ40)
CVVYSGTYKYIL

SEQ ID NO: 387528 - protein, 14 aa, Homo sapiens
  CDR3 for beta chain variable domain of TCR clone 193764 (TRBV19, TRBJ2-7)
CASSMGQGAIEQYF

SEQ ID NO: 387529 - protein, 13 aa, Homo sapiens
  CDR3 for alpha chain variable domain of TCR clone 193765 (TRAV3, TRAJ20)
CAVRDTPRYKLSF

SEQ ID NO: 387530 - protein, 16 aa, Homo sapiens
  CDR3 for beta chain variable domain of TCR clone 193765 (TRBV12-5, TRBJ2-5)
CASGPRTSGNQETQYF

SEQ ID NO: 387531 - protein, 14 aa, Homo sapiens
  CDR3 for alpha chain variable domain of TCR clone 193766 (TRAV23/DV6, TRAJ22)
CAPSVPGSARQLTF

SEQ ID NO: 387532 - protein, 16 aa, Homo sapiens
  CDR3 for beta chain variable domain of TCR clone 193766 (TRBV19, TRBJ2-2)
CASSFPGQGLAGELFF

SEQ ID NO: 387533 - protein, 14 aa, Homo sapiens
  CDR3 for alpha chain variable domain of TCR clone 193767 (TRAV26-2, TRAJ32)
CCVGYGGATNKLIF

SEQ ID NO: 387534 - protein, 14 aa, Homo sapiens
  CDR3 for beta chain variable domain of TCR clone 193767 (TRBV13, TRBJ2-7)
CASSLKGASYEQYF

SEQ ID NO: 387535 - protein, 13 aa, Homo sapiens
  CDR3 for alpha chain variable domain of TCR clone 193768 (TRAV12-3, TRAJ7)
CAMTPYGNNRLAF

SEQ ID NO: 387536 - protein, 16 aa, Homo sapiens
  CDR3 for beta chain variable domain of TCR clone 193768 (TRBV20-1, TRBJ1-4)
CSARPYGGELNEELFF

SEQ ID NO: 387537 - protein, 13 aa, Homo sapiens
  CDR3 for alpha chain variable domain of TCR clone 193769 (TRAV35, TRAJ33)
CAGLMDSNYKLIL

SEQ ID NO: 387538 - protein, 13 aa, Homo sapiens
  CDR3 for beta chain variable domain of TCR clone 193769 (TRBV10-3, TRBJ2-1)
CAISEFSGREQFF

SEQ ID NO: 387539 - protein, 13 aa, Homo sapiens
  CDR3 for alpha chain variable domain of TCR clone 193770 (TRAV12-3, TRAJ47)
CAMKKEYGNKLVF

SEQ ID NO: 387540 - protein, 16 aa, Homo sapiens
  CDR3 for beta chain variable domain of TCR clone 193770 (TRBV3-1, TRBJ2-6)
CASGLTWVSGANVLTF

SEQ ID NO: 387541 - protein, 13 aa, Homo sapiens
  CDR3 for alpha chain variable domain of TCR clone 193771 (TRAV20, TRAJ37)
CAGCSSNTGKLIF

SEQ ID NO: 387542 - protein, 11 aa, Homo sapiens
  CDR3 for beta chain variable domain of TCR clone 193771 (TRBV7-2, TRBJ2-3)
CASSSSDTQYF

SEQ ID NO: 387543 - protein, 15 aa, Homo sapiens
  CDR3 for alpha chain variable domain of TCR clone 193772 (TRAV8-2, TRAJ40)
CVVGDRGSGTDKYIF

SEQ ID NO: 387544 - protein, 17 aa, Homo sapiens
  CDR3 for beta chain variable domain of TCR clone 193772 (TRBV9, TRBJ2-1)
CASSVRSLSGGNNEQFF

SEQ ID NO: 387545 - protein, 14 aa, Homo sapiens
  CDR3 for alpha chain variable domain of TCR clone 193773 (TRAV1-1, TRAJ27)
CAFSETPMQANQPL

SEQ ID NO: 387546 - protein, 17 aa, Homo sapiens
  CDR3 for beta chain variable domain of TCR clone 193773 (TRBV20-1, TRBJ2-3)
CSARDTKGVSATDTQYF

SEQ ID NO: 387547 - protein, 14 aa, Homo sapiens
  CDR3 for alpha chain variable domain of TCR clone 193774 (TRAV26-1, TRAJ45)
CIEVTGGGADGLTF

SEQ ID NO: 387548 - protein, 12 aa, Homo sapiens
  CDR3 for beta chain variable domain of TCR clone 193774 (TRBV12-3, TRBJ2-7)
CARSLGGYEQYF

SEQ ID NO: 387549 - protein, 15 aa, Homo sapiens
  CDR3 for alpha chain variable domain of TCR clone 193775 (TRAV2, TRAJ9)
CAVEDRGTGGFKTIF

SEQ ID NO: 387550 - protein, 15 aa, Homo sapiens
  CDR3 for beta chain variable domain of TCR clone 193775 (TRBV28, TRBJ2-7)
CASSVRQVSSYEQYF

SEQ ID NO: 387551 - protein, 14 aa, Homo sapiens
  CDR3 for alpha chain variable domain of TCR clone 193776 (TRAV1-2, TRAJ16)
CAVNRFSDGQKLLF

SEQ ID NO: 387552 - protein, 15 aa, Homo sapiens
  CDR3 for beta chain variable domain of TCR clone 193776 (TRBV7-9, TRBJ1-6)
CASSSPGRGNSPLPF

SEQ ID NO: 387553 - protein, 14 aa, Homo sapiens
  CDR3 for alpha chain variable domain of TCR clone 193777 (TRAV25, TRAJ42)
CAGNYGGSQGNLIF

SEQ ID NO: 387554 - protein, 15 aa, Homo sapiens
  CDR3 for beta chain variable domain of TCR clone 193777 (TRBV6-1, TRBJ2-6)
CASTGSRSGAKVLTF

SEQ ID NO: 387555 - protein, 11 aa, Homo sapiens
  CDR3 for alpha chain variable domain of TCR clone 193778 (TRAV3, TRAJ21)
CAVGNFNEIYF

SEQ ID NO: 387556 - protein, 14 aa, Homo sapiens
  CDR3 for beta chain variable domain of TCR clone 193778 (TRBV18, TRBJ2-5)
CASSPGVSQETQYF

SEQ ID NO: 387557 - protein, 15 aa, Homo sapiens
  CDR3 for alpha chain variable domain of TCR clone 193779 (TRAV12-3, TRAJ6)
CVMSATTGGSYIPTF

SEQ ID NO: 387558 - protein, 19 aa, Homo sapiens
  CDR3 for beta chain variable domain of TCR clone 193779 (TRBV25-1, TRBJ2-2)
CAILVYRVDRGCKTGELFF

SEQ ID NO: 387559 - protein, 13 aa, Homo sapiens
  CDR3 for alpha chain variable domain of TCR clone 193780 (TRAV17, TRAJ5)
CAPMDTGRRALTF

SEQ ID NO: 387560 - protein, 15 aa, Homo sapiens
  CDR3 for beta chain variable domain of TCR clone 193780 (TRBV6-3, TRBJ2-7)
CASSSPGTVFYEQYF

SEQ ID NO: 387561 - protein, 12 aa, Homo sapiens
  CDR3 for alpha chain variable domain of TCR clone 193781 (TRAV12-3, TRAJ20)
CAMVRGDYKLSF

SEQ ID NO: 387562 - protein, 12 aa, Homo sapiens
  CDR3 for beta chain variable domain of TCR clone 193781 (TRBV6-1, TRBJ2-7)
CASSAYSYEQYF

SEQ ID NO: 387563 - protein, 13 aa, Homo sapiens
  CDR3 for alpha chain variable domain of TCR clone 193782 (TRAV2, TRAJ27)
CAVDAPMQANQPL

SEQ ID NO: 387564 - protein, 13 aa, Homo sapiens
  CDR3 for beta chain variable domain of TCR clone 193782 (TRBV10-2, TRBJ2-3)
CASSESGDHTQYF

SEQ ID NO: 387565 - protein, 12 aa, Homo sapiens
  CDR3 for alpha chain variable domain of TCR clone 193783 (TRAV13-1, TRAJ5)
CAAKAGRRALTF

SEQ ID NO: 387566 - protein, 15 aa, Homo sapiens
  CDR3 for beta chain variable domain of TCR clone 193783 (TRBV7-2, TRBJ2-2)
CASSLGQGVAGELFF

SEQ ID NO: 387567 - protein, 14 aa, Homo sapiens
  CDR3 for alpha chain variable domain of TCR clone 193784 (TRAV38-1, TRAJ40)
CALRPTSGTYKYIF

SEQ ID NO: 387568 - protein, 15 aa, Homo sapiens
  CDR3 for beta chain variable domain of TCR clone 193784 (TRBV6-1, TRBJ2-3)
CASSGQVLNTDTQYF

SEQ ID NO: 387569 - protein, 11 aa, Homo sapiens
  CDR3 for alpha chain variable domain of TCR clone 193785 (TRAV13-1, TRAJ48)
CSKLWNEKLTF

SEQ ID NO: 387570 - protein, 16 aa, Homo sapiens
  CDR3 for beta chain variable domain of TCR clone 193785 (TRBV19, TRBJ1-5)
CASSIAGGGAIQPQHF

SEQ ID NO: 387571 - protein, 15 aa, Homo sapiens
  CDR3 for alpha chain variable domain of TCR clone 193786 (TRAV20, TRAJ53)
CAVQASGGSNYNMTF

SEQ ID NO: 387572 - protein, 12 aa, Homo sapiens
  CDR3 for beta chain variable domain of TCR clone 193786 (TRBV7-8, TRBJ2-7)
CASSLGDREQYF

SEQ ID NO: 387573 - protein, 14 aa, Homo sapiens
  CDR3 for alpha chain variable domain of TCR clone 193787 (TRAV38-1, TRAJ29)
CAFITPSGNTPLVF

SEQ ID NO: 387574 - protein, 15 aa, Homo sapiens
  CDR3 for beta chain variable domain of TCR clone 193787 (TRBV18, TRBJ2-1)
CASSPPSASYNEQFF

SEQ ID NO: 387575 - protein, 15 aa, Homo sapiens
  CDR3 for alpha chain variable domain of TCR clone 193788 (TRAV21, TRAJ53)
CATLNSGGSNYTLTF

SEQ ID NO: 387576 - protein, 13 aa, Homo sapiens
  CDR3 for beta chain variable domain of TCR clone 193788 (TRBV12-5, TRBJ2-1)
CASGLGRGNEQFF

SEQ ID NO: 387577 - protein, 13 aa, Homo sapiens
  CDR3 for alpha chain variable domain of TCR clone 193789 (TRAV13-2, TRAJ49)
CAETLHGGNQFYF

SEQ ID NO: 387578 - protein, 16 aa, Homo sapiens
  CDR3 for beta chain variable domain of TCR clone 193789 (TRBV19, TRBJ2-7)
CASSLTGTSELGEQYF

SEQ ID NO: 387579 - protein, 14 aa, Homo sapiens
  CDR3 for alpha chain variable domain of TCR clone 193790 (TRAV12-3, TRAJ10)
SHLPLTGGGNKLTF

SEQ ID NO: 387580 - protein, 15 aa, Homo sapiens
  CDR3 for beta chain variable domain of TCR clone 193790 (TRBV25-1, TRBJ2-4)
CASSEAESAKNIQYF

SEQ ID NO: 387581 - protein, 15 aa, Homo sapiens
  CDR3 for alpha chain variable domain of TCR clone 193791 (TRAV13-1, TRAJ11)
CAASNRNSGYGTLTF

SEQ ID NO: 387582 - protein, 11 aa, Homo sapiens
  CDR3 for beta chain variable domain of TCR clone 193791 (TRBV20-1, TRBJ2-7)
CSARLSYEQYF

SEQ ID NO: 387583 - protein, 13 aa, Homo sapiens
  CDR3 for alpha chain variable domain of TCR clone 193792 (TRAV3, TRAJ29)
CAVRDIVDTPLVF

SEQ ID NO: 387584 - protein, 13 aa, Homo sapiens
  CDR3 for beta chain variable domain of TCR clone 193792 (TRBV11-2, TRBJ1-2)
CASSLDSPSGYTF

SEQ ID NO: 387585 - protein, 13 aa, Homo sapiens
  CDR3 for alpha chain variable domain of TCR clone 193793 (TRAV2, TRAJ40)
CAVVTSGTYKYIF

SEQ ID NO: 387586 - protein, 13 aa, Homo sapiens
  CDR3 for beta chain variable domain of TCR clone 193793 (TRBV7-2, TRBJ1-1)
CASNLKGAKVAFF

SEQ ID NO: 387587 - protein, 14 aa, Homo sapiens
  CDR3 for alpha chain variable domain of TCR clone 193794 (TRAV12-2, TRAJ17)
CAVLFKAAGNKVTF

SEQ ID NO: 387588 - protein, 17 aa, Homo sapiens
  CDR3 for beta chain variable domain of TCR clone 193794 (TRBV20-1, TRBJ2-2)
CSASGSGQGGLTGELFF

SEQ ID NO: 387589 - protein, 16 aa, Homo sapiens
  CDR3 for alpha chain variable domain of TCR clone 193795 (TRAV1-2, TRAJ10)
CAVRGVLTGGGNKHTF

SEQ ID NO: 387590 - protein, 15 aa, Homo sapiens
  CDR3 for beta chain variable domain of TCR clone 193795 (TRBV6-3, TRBJ2-7)
CASSSPGTVFYEQYF

SEQ ID NO: 387591 - protein, 10 aa, Homo sapiens
  CDR3 for alpha chain variable domain of TCR clone 193796 (TRAV12-1, TRAJ22)
HSGSARQLTF

SEQ ID NO: 387592 - protein, 15 aa, Homo sapiens
  CDR3 for beta chain variable domain of TCR clone 193796 (TRBV12-4, TRBJ2-5)
CASSPPTGLQETQYF

SEQ ID NO: 387593 - protein, 15 aa, Homo sapiens
  CDR3 for alpha chain variable domain of TCR clone 193797 (TRAV12-1, TRAJ4)
CVVNPFSGGYNKLIF

SEQ ID NO: 387594 - protein, 16 aa, Homo sapiens
  CDR3 for beta chain variable domain of TCR clone 193797 (TRBV5-1, TRBJ1-1)
CANSKTGTEVGTEAFF

SEQ ID NO: 387595 - protein, 13 aa, Homo sapiens
  CDR3 for alpha chain variable domain of TCR clone 193798 (TRAV12-1, TRAJ9)
CVVTNTRGFKTIF

SEQ ID NO: 387596 - protein, 19 aa, Homo sapiens
  CDR3 for beta chain variable domain of TCR clone 193798 (TRBV25-1, TRBJ2-2)
CAILVYRVDRGRKTGELFF

SEQ ID NO: 387597 - protein, 18 aa, Homo sapiens
  CDR3 for alpha chain variable domain of TCR clone 193799 (TRAV25, TRAJ37)
CRNLLLSPRGSNTGKLIF

SEQ ID NO: 387598 - protein, 12 aa, Homo sapiens
  CDR3 for beta chain variable domain of TCR clone 193799 (TRBV7-9, TRBJ2-7)
CASSLEGYEQYF

SEQ ID NO: 387599 - protein, 15 aa, Homo sapiens
  CDR3 for alpha chain variable domain of TCR clone 193800 (TRAV3, TRAJ3)
FAVRDGHSSASKIIF

SEQ ID NO: 387600 - protein, 14 aa, Homo sapiens
  CDR3 for beta chain variable domain of TCR clone 193800 (TRBV18, TRBJ2-1)
CASSPQGRFNEQFF

SEQ ID NO: 387601 - protein, 13 aa, Homo sapiens
  CDR3 for alpha chain variable domain of TCR clone 193801 (TRAV1-1, TRAJ9)
CAAKNTGGFKTIF

SEQ ID NO: 387602 - protein, 16 aa, Homo sapiens
  CDR3 for beta chain variable domain of TCR clone 193801 (TRBV19, TRBJ2-1)
CASSKVGPSSYNEQFF

SEQ ID NO: 387603 - protein, 19 aa, Homo sapiens
  CDR3 for alpha chain variable domain of TCR clone 193802 (TRAV2, TRAJ20)
ILQVREADAAVYRDCKLSF

SEQ ID NO: 387604 - protein, 15 aa, Homo sapiens
  CDR3 for beta chain variable domain of TCR clone 193802 (TRBV19, TRBJ1-2)
CASSVGQVLNYGYTF

SEQ ID NO: 387605 - protein, 12 aa, Homo sapiens
  CDR3 for alpha chain variable domain of TCR clone 193803 (TRAV29/DV5, TRAJ34)
CAARGNTDKLIF

SEQ ID NO: 387606 - protein, 15 aa, Homo sapiens
  CDR3 for beta chain variable domain of TCR clone 193803 (TRBV10-2, TRBJ2-6)
CASSEQGTGANDLTF

SEQ ID NO: 387607 - protein, 13 aa, Homo sapiens
  CDR3 for alpha chain variable domain of TCR clone 193804 (TRAV27, TRAJ6)
CAGGTRGSYIPTF

SEQ ID NO: 387608 - protein, 15 aa, Homo sapiens
  CDR3 for beta chain variable domain of TCR clone 193804 (TRBV5-5, TRBJ2-7)
CASSLAAPLSYEQFF

SEQ ID NO: 387609 - protein, 12 aa, Homo sapiens
  CDR3 for alpha chain variable domain of TCR clone 193805 (TRAV13-1, TRAJ27)
CAAHTNAGTSTF

SEQ ID NO: 387610 - protein, 14 aa, Homo sapiens
  CDR3 for beta chain variable domain of TCR clone 193805 (TRBV19, TRBJ2-2)
CASSGQGIAGELFF

SEQ ID NO: 387611 - protein, 16 aa, Homo sapiens
  CDR3 for alpha chain variable domain of TCR clone 193806 (TRAV16, TRAJ4)
CALSRMFSGGYNKLIF

SEQ ID NO: 387612 - protein, 16 aa, Homo sapiens
  CDR3 for beta chain variable domain of TCR clone 193806 (TRBV24-1, TRBJ2-3)
CATSDAGRGATDTQYF

SEQ ID NO: 387613 - protein, 11 aa, Homo sapiens
  CDR3 for alpha chain variable domain of TCR clone 193807 (TRAV12-1, TRAJ15)
CVVNAGTALIF

SEQ ID NO: 387614 - protein, 16 aa, Homo sapiens
  CDR3 for beta chain variable domain of TCR clone 193807 (TRBV28, TRBJ2-1)
CARSSRVRDSYNEQFF

SEQ ID NO: 387615 - protein, 14 aa, Homo sapiens
  CDR3 for alpha chain variable domain of TCR clone 193808 (TRAV20, TRAJ42)
CAVQAGGGQGNLIS

SEQ ID NO: 387616 - protein, 14 aa, Homo sapiens
  CDR3 for beta chain variable domain of TCR clone 193808 (TRBV28, TRBJ1-2)
CASRIQGANYGYTF

SEQ ID NO: 387617 - protein, 13 aa, Homo sapiens
  CDR3 for alpha chain variable domain of TCR clone 193809 (TRAV17, TRAJ9)
CAPAITGGFRTIF

SEQ ID NO: 387618 - protein, 16 aa, Homo sapiens
  CDR3 for beta chain variable domain of TCR clone 193809 (TRBV15, TRBJ2-1)
CATSRNLAGGYNEQFF

SEQ ID NO: 387619 - protein, 18 aa, Homo sapiens
  CDR3 for alpha chain variable domain of TCR clone 193810 (TRAV13-1, TRAJ52)
CAAQNPNAGGTSYGKLTF

SEQ ID NO: 387620 - protein, 18 aa, Homo sapiens
  CDR3 for beta chain variable domain of TCR clone 193810 (TRBV4-1, TRBJ1-5)
CASSQDPRGQGLNQPQHF

SEQ ID NO: 387621 - protein, 12 aa, Homo sapiens
  CDR3 for alpha chain variable domain of TCR clone 193811 (TRAV12-1, TRAJ23)
CVVNWGGGTLIF

SEQ ID NO: 387622 - protein, 14 aa, Homo sapiens
  CDR3 for beta chain variable domain of TCR clone 193811 (TRBV27, TRBJ2-7)
CASSPQRGTYEQYF

SEQ ID NO: 387623 - protein, 13 aa, Homo sapiens
  CDR3 for alpha chain variable domain of TCR clone 193812 (TRAV27, TRAJ17)
FAGAATAGNKLTF

SEQ ID NO: 387624 - protein, 15 aa, Homo sapiens
  CDR3 for beta chain variable domain of TCR clone 193812 (TRBV5-1, TRBJ2-3)
CASRNQAGSTDTQYF

SEQ ID NO: 387625 - protein, 12 aa, Homo sapiens
  CDR3 for alpha chain variable domain of TCR clone 193813 (TRAV12-3, TRAJ17)
CAMTLTGNKLTF

SEQ ID NO: 387626 - protein, 20 aa, Homo sapiens
  CDR3 for beta chain variable domain of TCR clone 193813 (TRBV19, TRBJ2-1)
CASSISRTVTSSRLNNEQFF

SEQ ID NO: 387627 - protein, 17 aa, Homo sapiens
  CDR3 for alpha chain variable domain of TCR clone 193814 (TRAV27, TRAJ26)
CAGARATLDKYGQNFVF

SEQ ID NO: 387628 - protein, 15 aa, Homo sapiens
  CDR3 for beta chain variable domain of TCR clone 193814 (TRBV11-2, TRBJ2-5)
CASSPRSGGLETQYF

SEQ ID NO: 387629 - protein, 14 aa, Homo sapiens
  CDR3 for alpha chain variable domain of TCR clone 193815 (TRAV26-1, TRAJ21)
CIVRVLGNFNKFYF

SEQ ID NO: 387630 - protein, 13 aa, Homo sapiens
  CDR3 for beta chain variable domain of TCR clone 193815 (TRBV10-3, TRBJ2-7)
CASKLAVNYEQYF

SEQ ID NO: 387631 - protein, 16 aa, Homo sapiens
  CDR3 for alpha chain variable domain of TCR clone 193816 (TRAV30, TRAJ24)
YGTEIVDADSWGKFQV

SEQ ID NO: 387632 - protein, 15 aa, Homo sapiens
  CDR3 for beta chain variable domain of TCR clone 193816 (TRBV20-1, TRBJ2-7)
CSARDRVSGMDEQYF

SEQ ID NO: 387633 - protein, 18 aa, Homo sapiens
  CDR3 for alpha chain variable domain of TCR clone 193817 (TRAV13-1, TRAJ52)
CAASKRSAVGTSYGKLTF

SEQ ID NO: 387634 - protein, 13 aa, Homo sapiens
  CDR3 for beta chain variable domain of TCR clone 193817 (TRBV27, TRBJ1-1)
CASSLSIGAEAFF

SEQ ID NO: 387635 - protein, 15 aa, Homo sapiens
  CDR3 for alpha chain variable domain of TCR clone 193818 (TRAV20, TRAJ37)
CAVQARSSNTGKLIF

SEQ ID NO: 387636 - protein, 15 aa, Homo sapiens
  CDR3 for beta chain variable domain of TCR clone 193818 (TRBV2, TRBJ2-7)
CASSEGLARSYEQYF

SEQ ID NO: 387637 - protein, 12 aa, Homo sapiens
  CDR3 for alpha chain variable domain of TCR clone 193819 (TRAV38-1, TRAJ20)
CAFIWNDYKLSF

SEQ ID NO: 387638 - protein, 14 aa, Homo sapiens
  CDR3 for beta chain variable domain of TCR clone 193819 (TRBV19, TRBJ2-1)
CASSMGSRATEQFF

SEQ ID NO: 387639 - protein, 11 aa, Homo sapiens
  CDR3 for alpha chain variable domain of TCR clone 193820 (TRAV35, TRAJ30)
CAGLRDDKIIF

SEQ ID NO: 387640 - protein, 15 aa, Homo sapiens
  CDR3 for beta chain variable domain of TCR clone 193820 (TRBV19, TRBJ2-3)
CAAGDTNAPNDTQYF

SEQ ID NO: 387641 - protein, 12 aa, Homo sapiens
  CDR3 for alpha chain variable domain of TCR clone 193821 (TRAV13-1, TRAJ20)
CAARQNDHKLSF

SEQ ID NO: 387642 - protein, 14 aa, Homo sapiens
  CDR3 for beta chain variable domain of TCR clone 193821 (TRBV5-1, TRBJ2-7)
CASSFASGVNEQYF

SEQ ID NO: 387643 - protein, 14 aa, Homo sapiens
  CDR3 for alpha chain variable domain of TCR clone 193822 (TRAV38-1, TRAJ29)
CAFITPSGNTPLVF

SEQ ID NO: 387644 - protein, 16 aa, Homo sapiens
  CDR3 for beta chain variable domain of TCR clone 193822 (TRBV7-7, TRBJ2-1)
CASSLASGTSYNEQFF

SEQ ID NO: 387645 - protein, 13 aa, Homo sapiens
  CDR3 for alpha chain variable domain of TCR clone 193823 (TRAV2, TRAJ15)
CAVASQAGTALTF

SEQ ID NO: 387646 - protein, 14 aa, Homo sapiens
  CDR3 for beta chain variable domain of TCR clone 193823 (TRBV5-7, TRBJ1-1)
CASSLAGDWTEAFF

SEQ ID NO: 387647 - protein, 16 aa, Homo sapiens
  CDR3 for alpha chain variable domain of TCR clone 193824 (TRAV12-3, TRAJ53)
CTMSPGSGGSNYKLTF

SEQ ID NO: 387648 - protein, 11 aa, Homo sapiens
  CDR3 for beta chain variable domain of TCR clone 193824 (TRBV29-1, TRBJ2-5)
CSEDRTGTHYF

SEQ ID NO: 387649 - protein, 14 aa, Homo sapiens
  CDR3 for alpha chain variable domain of TCR clone 193825 (TRAV12-2, TRAJ13)
CAVKKTGGYQKVTY

SEQ ID NO: 387650 - protein, 16 aa, Homo sapiens
  CDR3 for beta chain variable domain of TCR clone 193825 (TRBV20-1, TRBJ2-2)
CSASASGIPGAGELFF

SEQ ID NO: 387651 - protein, 15 aa, Homo sapiens
  CDR3 for alpha chain variable domain of TCR clone 193826 (TRAV12-1, TRAJ17)
CGEHDEKAAGNKLTF

SEQ ID NO: 387652 - protein, 17 aa, Homo sapiens
  CDR3 for beta chain variable domain of TCR clone 193826 (TRBV13, TRBJ2-3)
SASSLSRVAGGRNTQYF

SEQ ID NO: 387653 - protein, 15 aa, Homo sapiens
  CDR3 for alpha chain variable domain of TCR clone 193827 (TRAV13-2, TRAJ5)
CAENPHWTGRSALTF

SEQ ID NO: 387654 - protein, 16 aa, Homo sapiens
  CDR3 for beta chain variable domain of TCR clone 193827 (TRBV7-9, TRBJ1-3)
CASSQTCGLRMGTIYF

SEQ ID NO: 387655 - protein, 14 aa, Homo sapiens
  CDR3 for alpha chain variable domain of TCR clone 193828 (TRAV30, TRAJ33)
CGTVAPRSYYQLIW

SEQ ID NO: 387656 - protein, 16 aa, Homo sapiens
  CDR3 for beta chain variable domain of TCR clone 193828 (TRBV3-1, TRBJ2-5)
CASSPGQFNGFGTQYF

SEQ ID NO: 387657 - protein, 12 aa, Homo sapiens
  CDR3 for alpha chain variable domain of TCR clone 193829 (TRAV9-2, TRAJ26)
CALRGYGQRFVF

SEQ ID NO: 387658 - protein, 12 aa, Homo sapiens
  CDR3 for beta chain variable domain of TCR clone 193829 (TRBV29-1, TRBJ2-3)
CSVTGGADTQYF

SEQ ID NO: 387659 - protein, 12 aa, Homo sapiens
  CDR3 for alpha chain variable domain of TCR clone 193830 (TRAV13-2, TRAJ16)
CAASPDGQKLLF

SEQ ID NO: 387660 - protein, 13 aa, Homo sapiens
  CDR3 for beta chain variable domain of TCR clone 193830 (TRBV19, TRBJ1-2)
CASSVPGQDGYTF

SEQ ID NO: 387661 - protein, 13 aa, Homo sapiens
  CDR3 for alpha chain variable domain of TCR clone 193831 (TRAV26-2, TRAJ43)
CILRAGNNNDMRF

SEQ ID NO: 387662 - protein, 14 aa, Homo sapiens
  CDR3 for beta chain variable domain of TCR clone 193831 (TRBV19, TRBJ2-1)
CASPTFVLSGEQFF

SEQ ID NO: 387663 - protein, 15 aa, Homo sapiens
  CDR3 for alpha chain variable domain of TCR clone 193832 (TRAV35, TRAJ40)
CAGQLGTSGTYKYIF

SEQ ID NO: 387664 - protein, 11 aa, Homo sapiens
  CDR3 for beta chain variable domain of TCR clone 193832 (TRBV7-8, TRBJ2-7)
CASSLSLEQYF

SEQ ID NO: 387665 - protein, 14 aa, Homo sapiens
  CDR3 for alpha chain variable domain of TCR clone 193833 (TRAV25, TRAJ6)
CAGRESGGSYIPTF

SEQ ID NO: 387666 - protein, 13 aa, Homo sapiens
  CDR3 for beta chain variable domain of TCR clone 193833 (TRBV27, TRBJ1-1)
CASSLSMGAEASF

SEQ ID NO: 387667 - protein, 15 aa, Homo sapiens
  CDR3 for alpha chain variable domain of TCR clone 193834 (TRAV27, TRAJ50)
CAGRERGTSYDKVIF

SEQ ID NO: 387668 - protein, 16 aa, Homo sapiens
  CDR3 for beta chain variable domain of TCR clone 193834 (TRBV10-3, TRBJ1-5)
CAISDQVGAPNQPQHF

SEQ ID NO: 387669 - protein, 14 aa, Homo sapiens
  CDR3 for alpha chain variable domain of TCR clone 193835 (TRAV13-1, TRAJ35)
CSASKGGFGNVLHC

SEQ ID NO: 387670 - protein, 15 aa, Homo sapiens
  CDR3 for beta chain variable domain of TCR clone 193835 (TRBV28, TRBJ2-1)
CASSGLAEVDNEQFF

SEQ ID NO: 387671 - protein, 19 aa, Homo sapiens
  CDR3 for alpha chain variable domain of TCR clone 193836 (TRAV26-1, TRAJ52)
CIVRAHRNAGGTSYGKLTF

SEQ ID NO: 387672 - protein, 15 aa, Homo sapiens
  CDR3 for beta chain variable domain of TCR clone 193836 (TRBV12-4, TRBJ2-5)
CANSPPTGLQETQYF

SEQ ID NO: 387673 - protein, 13 aa, Homo sapiens
  CDR3 for alpha chain variable domain of TCR clone 193837 (TRAV12-1, TRAJ13)
CVVNLGGYQKVTF

SEQ ID NO: 387674 - protein, 13 aa, Homo sapiens
  CDR3 for beta chain variable domain of TCR clone 193837 (TRBV12-5, TRBJ2-3)
RASGDRQSDTQYF

SEQ ID NO: 387675 - protein, 13 aa, Homo sapiens
  CDR3 for alpha chain variable domain of TCR clone 193838 (TRAV21, TRAJ20)
CAVGLRVDYKLSF

SEQ ID NO: 387676 - protein, 15 aa, Homo sapiens
  CDR3 for beta chain variable domain of TCR clone 193838 (TRBV5-1, TRBJ2-7)
CASSLNGGPAREQYF

SEQ ID NO: 387677 - protein, 13 aa, Homo sapiens
  CDR3 for alpha chain variable domain of TCR clone 193839 (TRAV13-2, TRAJ48)
CAEMDFGNEKLTF

SEQ ID NO: 387678 - protein, 13 aa, Homo sapiens
  CDR3 for beta chain variable domain of TCR clone 193839 (TRBV12-4, TRBJ2-1)
CASSFHSGSEQFF

SEQ ID NO: 387679 - protein, 11 aa, Homo sapiens
  CDR3 for alpha chain variable domain of TCR clone 193840 (TRAV35, TRAJ34)
CWARNTDKLIF

SEQ ID NO: 387680 - protein, 14 aa, Homo sapiens
  CDR3 for beta chain variable domain of TCR clone 193840 (TRBV5-1, TRBJ2-7)
CASSRGESLYEQYC

SEQ ID NO: 387681 - protein, 15 aa, Homo sapiens
  CDR3 for alpha chain variable domain of TCR clone 193841 (TRAV1-2, TRAJ6)
CAVRGGKGGSYIPTF

SEQ ID NO: 387682 - protein, 13 aa, Homo sapiens
  CDR3 for beta chain variable domain of TCR clone 193841 (TRBV5-1, TRBJ2-1)
CASSLGSYNEQFF

SEQ ID NO: 387683 - protein, 17 aa, Homo sapiens
  CDR3 for alpha chain variable domain of TCR clone 193842 (TRAV8-3, TRAJ34)
CAIPGKLIFGTGTRLQV

SEQ ID NO: 387684 - protein, 14 aa, Homo sapiens
  CDR3 for beta chain variable domain of TCR clone 193842 (TRBV18, TRBJ2-7)
CASSPPAGAPEQYF

SEQ ID NO: 387685 - protein, 14 aa, Homo sapiens
  CDR3 for alpha chain variable domain of TCR clone 193843 (TRAV13-1, TRAJ10)
CAAKEPGGGNKLTF

SEQ ID NO: 387686 - protein, 12 aa, Homo sapiens
  CDR3 for beta chain variable domain of TCR clone 193843 (TRBV20-1, TRBJ2-1)
CSARLGTDEQFF

SEQ ID NO: 387687 - protein, 16 aa, Homo sapiens
  CDR3 for alpha chain variable domain of TCR clone 193844 (TRAV29/DV5, TRAJ57)
CAASAVVQGGSEKLVL

SEQ ID NO: 387688 - protein, 13 aa, Homo sapiens
  CDR3 for beta chain variable domain of TCR clone 193844 (TRBV12-5, TRBJ2-3)
CASGDRQSDTQYF

SEQ ID NO: 387689 - protein, 15 aa, Homo sapiens
  CDR3 for alpha chain variable domain of TCR clone 193845 (TRAV3, TRAJ13)
CAVRDIAGGYQKVTF

SEQ ID NO: 387690 - protein, 13 aa, Homo sapiens
  CDR3 for beta chain variable domain of TCR clone 193845 (TRBV2, TRBJ2-2)
CASSKKNTGELFV

SEQ ID NO: 387691 - protein, 15 aa, Homo sapiens
  CDR3 for alpha chain variable domain of TCR clone 193846 (TRAV16, TRAJ16)
CALQGGGSDGQKLLF

SEQ ID NO: 387692 - protein, 15 aa, Homo sapiens
  CDR3 for beta chain variable domain of TCR clone 193846 (TRBV28, TRBJ2-1)
CASSGLAEVDNEQFF

SEQ ID NO: 387693 - protein, 12 aa, Homo sapiens
  CDR3 for alpha chain variable domain of TCR clone 193847 (TRAV21, TRAJ13)
PGPSGGYQKVTF

SEQ ID NO: 387694 - protein, 14 aa, Homo sapiens
  CDR3 for beta chain variable domain of TCR clone 193847 (TRBV20-1, TRBJ2-7)
CSAKDREGAYEQYF

SEQ ID NO: 387695 - protein, 14 aa, Homo sapiens
  CDR3 for alpha chain variable domain of TCR clone 193848 (TRAV12-1, TRAJ26)
LVVKGSNYGQNFVF

SEQ ID NO: 387696 - protein, 14 aa, Homo sapiens
  CDR3 for beta chain variable domain of TCR clone 193848 (TRBV5-4, TRBJ1-1)
CASSLDSRRDEAFF

SEQ ID NO: 387697 - protein, 16 aa, Homo sapiens
  CDR3 for alpha chain variable domain of TCR clone 193849 (TRAV2, TRAJ4)
CAVEDRFSGGYIKLIF

SEQ ID NO: 387698 - protein, 13 aa, Homo sapiens
  CDR3 for beta chain variable domain of TCR clone 193849 (TRBV7-7, TRBJ2-5)
CASSRSGQETQYF

SEQ ID NO: 387699 - protein, 13 aa, Homo sapiens
  CDR3 for alpha chain variable domain of TCR clone 193850 (TRAV16, TRAJ34)
CALSPYNTDKLIF

SEQ ID NO: 387700 - protein, 15 aa, Homo sapiens
  CDR3 for beta chain variable domain of TCR clone 193850 (TRBV12-4, TRBJ2-5)
CASSPPTGLQETKYF

SEQ ID NO: 387701 - protein, 12 aa, Homo sapiens
  CDR3 for alpha chain variable domain of TCR clone 193851 (TRAV12-3, TRAJ17)
CAMTLTGNKLTF

SEQ ID NO: 387702 - protein, 16 aa, Homo sapiens
  CDR3 for beta chain variable domain of TCR clone 193851 (TRBV7-2, TRBJ2-6)
CAILSGVSSGANVLTF

SEQ ID NO: 387703 - protein, 14 aa, Homo sapiens
  CDR3 for alpha chain variable domain of TCR clone 193852 (TRAV26-1, TRAJ22)
CIVRVYGSARQLTF

SEQ ID NO: 387704 - protein, 18 aa, Homo sapiens
  CDR3 for beta chain variable domain of TCR clone 193852 (TRBV7-9, TRBJ2-3)
CASSLDLAGLATPDTQYF

SEQ ID NO: 387705 - protein, 17 aa, Homo sapiens
  CDR3 for alpha chain variable domain of TCR clone 193853 (TRAV13-1, TRAJ31)
CAPRDRLMFGDGTQLVV

SEQ ID NO: 387706 - protein, 13 aa, Homo sapiens
  CDR3 for beta chain variable domain of TCR clone 193853 (TRBV7-2, TRBJ2-2)
CASSSVRAGELFF

SEQ ID NO: 387707 - protein, 12 aa, Homo sapiens
  CDR3 for alpha chain variable domain of TCR clone 193854 (TRAV13-2, TRAJ23)
CAGRHRGGKLIF

SEQ ID NO: 387708 - protein, 15 aa, Homo sapiens
  CDR3 for beta chain variable domain of TCR clone 193854 (TRBV7-9, TRBJ1-6)
CASSSPGRGNSPLHF

SEQ ID NO: 387709 - protein, 11 aa, Homo sapiens
  CDR3 for alpha chain variable domain of TCR clone 193855 (TRAV2, TRAJ13)
CAYGGYQKVTF

SEQ ID NO: 387710 - protein, 16 aa, Homo sapiens
  CDR3 for beta chain variable domain of TCR clone 193855 (TRBV12-5, TRBJ2-5)
CASGPRTSGNQETQYF

SEQ ID NO: 387711 - protein, 14 aa, Homo sapiens
  CDR3 for alpha chain variable domain of TCR clone 193856 (TRAV12-2, TRAJ17)
CAVLFKAAGNKITF

SEQ ID NO: 387712 - protein, 17 aa, Homo sapiens
  CDR3 for beta chain variable domain of TCR clone 193856 (TRBV20-1, TRBJ2-2)
CSASGTGQSGLTVELFF

SEQ ID NO: 387713 - protein, 12 aa, Homo sapiens
  CDR3 for alpha chain variable domain of TCR clone 193857 (TRAV26-1, TRAJ13)
CIVSRGYQKVTF

SEQ ID NO: 387714 - protein, 13 aa, Homo sapiens
  CDR3 for beta chain variable domain of TCR clone 193857 (TRBV7-2, TRBJ1-6)
CASSLKFDSPLHF

SEQ ID NO: 387715 - protein, 13 aa, Homo sapiens
  CDR3 for alpha chain variable domain of TCR clone 193858 (TRAV12-1, TRAJ40)
CVVPTSGTYKYIF

SEQ ID NO: 387716 - protein, 13 aa, Homo sapiens
  CDR3 for beta chain variable domain of TCR clone 193858 (TRBV4-2, TRBJ1-1)
CASSQAGNTEAFL

SEQ ID NO: 387717 - protein, 13 aa, Homo sapiens
  CDR3 for alpha chain variable domain of TCR clone 193859 (TRAV12-3, TRAJ9)
CAMRNTGGFKTIF

SEQ ID NO: 387718 - protein, 15 aa, Homo sapiens
  CDR3 for beta chain variable domain of TCR clone 193859 (TRBV20-1, TRBJ2-7)
CSARDRGSGMDEQYF

SEQ ID NO: 387719 - protein, 15 aa, Homo sapiens
  CDR3 for alpha chain variable domain of TCR clone 193860 (TRAV13-2, TRAJ5)
CAENPHWTGRRAVTF

SEQ ID NO: 387720 - protein, 16 aa, Homo sapiens
  CDR3 for beta chain variable domain of TCR clone 193860 (TRBV7-9, TRBJ1-3)
CASSQTSGLRMGTIYF

SEQ ID NO: 387721 - protein, 15 aa, Homo sapiens
  CDR3 for alpha chain variable domain of TCR clone 193861 (TRAV29/DV5, TRAJ53)
CAASASGGSNYKMTF

SEQ ID NO: 387722 - protein, 19 aa, Homo sapiens
  CDR3 for beta chain variable domain of TCR clone 193861 (TRBV5-1, TRBJ2-3)
CASSLWLAGGITTTDTQYF

SEQ ID NO: 387723 - protein, 10 aa, Homo sapiens
  CDR3 for alpha chain variable domain of TCR clone 193862 (TRAV6, TRAJ36)
PLCTANNLFF

SEQ ID NO: 387724 - protein, 14 aa, Homo sapiens
  CDR3 for beta chain variable domain of TCR clone 193862 (TRBV10-2, TRBJ1-5)
CASSSTGGNQPQHF

SEQ ID NO: 387725 - protein, 14 aa, Homo sapiens
  CDR3 for alpha chain variable domain of TCR clone 193863 (TRAV8-3, TRAJ33)
CAVGRMDSNYQLFW

SEQ ID NO: 387726 - protein, 15 aa, Homo sapiens
  CDR3 for beta chain variable domain of TCR clone 193863 (TRBV4-1, TRBJ1-1)
CASSQAPGLNTEAFF

SEQ ID NO: 387727 - protein, 15 aa, Homo sapiens
  CDR3 for alpha chain variable domain of TCR clone 193864 (TRAV1-2, TRAJ12)
CADARWMYSSYKFIF

SEQ ID NO: 387728 - protein, 11 aa, Homo sapiens
  CDR3 for beta chain variable domain of TCR clone 193864 (TRBV29-1, TRBJ2-5)
CSEDRTGTQYF

SEQ ID NO: 387729 - protein, 17 aa, Homo sapiens
  CDR3 for alpha chain variable domain of TCR clone 193865 (TRAV3, TRAJ42)
CAVRDRDYGGSQGNLIF

SEQ ID NO: 387730 - protein, 12 aa, Homo sapiens
  CDR3 for beta chain variable domain of TCR clone 193865 (TRBV6-3, TRBJ2-7)
CASSLTPYEQYF

SEQ ID NO: 387731 - protein, 14 aa, Homo sapiens
  CDR3 for alpha chain variable domain of TCR clone 193866 (TRAV30, TRAJ33)
CGTVAPRSNYQLIW

SEQ ID NO: 387732 - protein, 14 aa, Homo sapiens
  CDR3 for beta chain variable domain of TCR clone 193866 (TRBV7-8, TRBJ2-7)
CASSPRDRVYEQYF

SEQ ID NO: 387733 - protein, 14 aa, Homo sapiens
  CDR3 for alpha chain variable domain of TCR clone 193867 (TRAV21, TRAJ45)
CAVSSGGGADGLTF

SEQ ID NO: 387734 - protein, 14 aa, Homo sapiens
  CDR3 for beta chain variable domain of TCR clone 193867 (TRBV19, TRBJ2-2)
CASSTLHRSGELFF

SEQ ID NO: 387735 - protein, 19 aa, Homo sapiens
  CDR3 for alpha chain variable domain of TCR clone 193868 (TRAV2, TRAJ20)
ILQVREADAAVYRDCKLSF

SEQ ID NO: 387736 - protein, 14 aa, Homo sapiens
  CDR3 for beta chain variable domain of TCR clone 193868 (TRBV13, TRBJ2-5)
CASSLERVGETQYF

SEQ ID NO: 387737 - protein, 19 aa, Homo sapiens
  CDR3 for alpha chain variable domain of TCR clone 193869 (TRAV21, TRAJ48)
AASQPGDSATSQSDEKLTF

SEQ ID NO: 387738 - protein, 20 aa, Homo sapiens
  CDR3 for beta chain variable domain of TCR clone 193869 (TRBV28, TRBJ2-1)
SASTNQTSMYLCARGGEQFF

SEQ ID NO: 387739 - protein, 18 aa, Homo sapiens
  CDR3 for alpha chain variable domain of TCR clone 193870 (TRAV21, TRAJ52)
CAVRPSPAGCTSYGELTF

SEQ ID NO: 387740 - protein, 17 aa, Homo sapiens
  CDR3 for beta chain variable domain of TCR clone 193870 (TRBV13, TRBJ2-3)
CASSLSRVAGGRNTQYF

SEQ ID NO: 387741 - protein, 11 aa, Homo sapiens
  CDR3 for alpha chain variable domain of TCR clone 193871 (TRAV2, TRAJ13)
CASGGYQKVNF

SEQ ID NO: 387742 - protein, 16 aa, Homo sapiens
  CDR3 for beta chain variable domain of TCR clone 193871 (TRBV4-2, TRBJ2-3)
CASSQELAGDTDTQYF

SEQ ID NO: 387743 - protein, 13 aa, Homo sapiens
  CDR3 for alpha chain variable domain of TCR clone 193872 (TRAV13-2, TRAJ48)
CAEMDFGTEKLTF

SEQ ID NO: 387744 - protein, 14 aa, Homo sapiens
  CDR3 for beta chain variable domain of TCR clone 193872 (TRBV20-1, TRBJ2-7)
CSAKRGRSSYEQYF

SEQ ID NO: 387745 - protein, 15 aa, Homo sapiens
  CDR3 for alpha chain variable domain of TCR clone 193873 (TRAV3, TRAJ5)
CAVRARKTGRRALTF

SEQ ID NO: 387746 - protein, 15 aa, Homo sapiens
  CDR3 for beta chain variable domain of TCR clone 193873 (TRBV7-8, TRBJ2-1)
CASSLGPDSYNEQFF

SEQ ID NO: 387747 - protein, 17 aa, Homo sapiens
  CDR3 for alpha chain variable domain of TCR clone 193874 (TRAV3, TRAJ6)
CAVRDGPRAGGSYIPTF

SEQ ID NO: 387748 - protein, 14 aa, Homo sapiens
  CDR3 for beta chain variable domain of TCR clone 193874 (TRBV7-2, TRBJ2-7)
CASSPRTSFYEQYF

SEQ ID NO: 387749 - protein, 15 aa, Homo sapiens
  CDR3 for alpha chain variable domain of TCR clone 193875 (TRAV8-4, TRAJ10)
CAVSDGPGGGNKLTF

SEQ ID NO: 387750 - protein, 14 aa, Homo sapiens
  CDR3 for beta chain variable domain of TCR clone 193875 (TRBV15, TRBJ2-7)
CATSRVARGYEQYF

SEQ ID NO: 387751 - protein, 13 aa, Homo sapiens
  CDR3 for alpha chain variable domain of TCR clone 193876 (TRAV17, TRAJ9)
CATDYTGGFKTIF

SEQ ID NO: 387752 - protein, 14 aa, Homo sapiens
  CDR3 for beta chain variable domain of TCR clone 193876 (TRBV19, TRBJ2-1)
CASSRLASINEQFF

SEQ ID NO: 387753 - protein, 13 aa, Homo sapiens
  CDR3 for alpha chain variable domain of TCR clone 193877 (TRAV12-2, TRAJ9)
CAVKWAGGFTTIF

SEQ ID NO: 387754 - protein, 12 aa, Homo sapiens
  CDR3 for beta chain variable domain of TCR clone 193877 (TRBV7-8, TRBJ2-7)
CASSLGDREQYF

SEQ ID NO: 387755 - protein, 13 aa, Homo sapiens
  CDR3 for alpha chain variable domain of TCR clone 193878 (TRAV8-1, TRAJ28)
CAVSGAGSYLLAF

SEQ ID NO: 387756 - protein, 14 aa, Homo sapiens
  CDR3 for beta chain variable domain of TCR clone 193878 (TRBV7-2, TRBJ2-2)
CASRGQGAAGELFF

SEQ ID NO: 387757 - protein, 14 aa, Homo sapiens
  CDR3 for alpha chain variable domain of TCR clone 193879 (TRAV29/DV5, TRAJ36)
CAARRKTGANNLFF

SEQ ID NO: 387758 - protein, 13 aa, Homo sapiens
  CDR3 for beta chain variable domain of TCR clone 193879 (TRBV5-5, TRBJ1-2)
CASSFWRGEDYTF

SEQ ID NO: 387759 - protein, 15 aa, Homo sapiens
  CDR3 for alpha chain variable domain of TCR clone 193880 (TRAV3, TRAJ4)
CAVRDGTGGYNKLIF

SEQ ID NO: 387760 - protein, 14 aa, Homo sapiens
  CDR3 for beta chain variable domain of TCR clone 193880 (TRBV5-1, TRBJ2-7)
CASSRGESLYEQYF

SEQ ID NO: 387761 - protein, 13 aa, Homo sapiens
  CDR3 for alpha chain variable domain of TCR clone 193881 (TRAV8-3, TRAJ28)
CAVGAVGSYQLTF

SEQ ID NO: 387762 - protein, 15 aa, Homo sapiens
  CDR3 for beta chain variable domain of TCR clone 193881 (TRBV18, TRBJ2-7)
CASSPSSTGNYEQYF

SEQ ID NO: 387763 - protein, 14 aa, Homo sapiens
  CDR3 for alpha chain variable domain of TCR clone 193882 (TRAV17, TRAJ15)
CATGPKQAGTALIF

SEQ ID NO: 387764 - protein, 15 aa, Homo sapiens
  CDR3 for beta chain variable domain of TCR clone 193882 (TRBV11-2, TRBJ2-2)
CASSSDRVNAGELFF

SEQ ID NO: 387765 - protein, 14 aa, Homo sapiens
  CDR3 for alpha chain variable domain of TCR clone 193883 (TRAV20, TRAJ13)
CSVLNSGGYQKVTF

SEQ ID NO: 387766 - protein, 14 aa, Homo sapiens
  CDR3 for beta chain variable domain of TCR clone 193883 (TRBV7-2, TRBJ1-1)
CASSFLTGTTEAFF

SEQ ID NO: 387767 - protein, 13 aa, Homo sapiens
  CDR3 for alpha chain variable domain of TCR clone 193884 (TRAV35, TRAJ32)
CAGVGGATNKLIF

SEQ ID NO: 387768 - protein, 13 aa, Homo sapiens
  CDR3 for beta chain variable domain of TCR clone 193884 (TRBV11-2, TRBJ2-5)
CASSFSSQETQYF

SEQ ID NO: 387769 - protein, 15 aa, Homo sapiens
  CDR3 for alpha chain variable domain of TCR clone 193885 (TRAV13-1, TRAJ43)
CAASGGFGAGTRLTV

SEQ ID NO: 387770 - protein, 15 aa, Homo sapiens
  CDR3 for beta chain variable domain of TCR clone 193885 (TRBV9, TRBJ1-6)
CASSVAGTGDSPLHF

SEQ ID NO: 387771 - protein, 11 aa, Homo sapiens
  CDR3 for alpha chain variable domain of TCR clone 193886 (TRAV2, TRAJ33)
CAVDSNYQLIW

SEQ ID NO: 387772 - protein, 15 aa, Homo sapiens
  CDR3 for beta chain variable domain of TCR clone 193886 (TRBV19, TRBJ1-1)
CASTSGQVQNTEAFF

SEQ ID NO: 387773 - protein, 17 aa, Homo sapiens
  CDR3 for alpha chain variable domain of TCR clone 193887 (TRAV23/DV6, TRAJ57)
CAASSTLSQGGSEKLVF

SEQ ID NO: 387774 - protein, 13 aa, Homo sapiens
  CDR3 for beta chain variable domain of TCR clone 193887 (TRBV12-5, TRBJ2-3)
CASQNRGTDTQYF

SEQ ID NO: 387775 - protein, 15 aa, Homo sapiens
  CDR3 for alpha chain variable domain of TCR clone 193888 (TRAV13-1, TRAJ42)
CAASIAGGSQGNHIF

SEQ ID NO: 387776 - protein, 15 aa, Homo sapiens
  CDR3 for beta chain variable domain of TCR clone 193888 (TRBV19, TRBJ2-1)
CASSIVRGEGREQFF

SEQ ID NO: 387777 - protein, 10 aa, Homo sapiens
  CDR3 for alpha chain variable domain of TCR clone 193889 (TRAV12-3, TRAJ49)
CAMNDDQFYF

SEQ ID NO: 387778 - protein, 15 aa, Homo sapiens
  CDR3 for beta chain variable domain of TCR clone 193889 (TRBV7-2, TRBJ2-2)
CASRRRGQNTGELFF

SEQ ID NO: 387779 - protein, 12 aa, Homo sapiens
  CDR3 for alpha chain variable domain of TCR clone 193890 (TRAV12-3, TRAJ20)
RAMVRGDYELSC

SEQ ID NO: 387780 - protein, 13 aa, Homo sapiens
  CDR3 for beta chain variable domain of TCR clone 193890 (TRBV23-1, TRBJ1-4)
CASRGKFNEKLFF

SEQ ID NO: 387781 - protein, 14 aa, Homo sapiens
  CDR3 for alpha chain variable domain of TCR clone 193891 (TRAV1-2, TRAJ16)
CAVNRFSDAQKLLF

SEQ ID NO: 387782 - protein, 16 aa, Homo sapiens
  CDR3 for beta chain variable domain of TCR clone 193891 (TRBV27, TRBJ2-2)
CAGSFRGLVRTGELFF

SEQ ID NO: 387783 - protein, 11 aa, Homo sapiens
  CDR3 for alpha chain variable domain of TCR clone 193892 (TRAV12-3, TRAJ49)
CAMSSGNQFYF

SEQ ID NO: 387784 - protein, 17 aa, Homo sapiens
  CDR3 for beta chain variable domain of TCR clone 193892 (TRBV5-7, TRBJ2-7)
CASSLWRGLAGSYEQYF

SEQ ID NO: 387785 - protein, 14 aa, Homo sapiens
  CDR3 for alpha chain variable domain of TCR clone 193893 (TRAV1-2, TRAJ16)
CAVNRFSDGQKLLF

SEQ ID NO: 387786 - protein, 14 aa, Homo sapiens
  CDR3 for beta chain variable domain of TCR clone 193893 (TRBV13, TRBJ2-5)
CASYRRLAEETQYF

SEQ ID NO: 387787 - protein, 18 aa, Homo sapiens
  CDR3 for alpha chain variable domain of TCR clone 193894 (TRAV26-1, TRAJ44)
CIVRVAGGGISTASKLTF

SEQ ID NO: 387788 - protein, 15 aa, Homo sapiens
  CDR3 for beta chain variable domain of TCR clone 193894 (TRBV9, TRBJ1-6)
CASSVAGTGDSPLHF

SEQ ID NO: 387789 - protein, 15 aa, Homo sapiens
  CDR3 for alpha chain variable domain of TCR clone 193895 (TRAV12-3, TRAJ54)
CAMSPPFQGAPKLVF

SEQ ID NO: 387790 - protein, 15 aa, Homo sapiens
  CDR3 for beta chain variable domain of TCR clone 193895 (TRBV20-1, TRBJ2-7)
CSARDRVSGMDEQYF

SEQ ID NO: 387791 - protein, 11 aa, Homo sapiens
  CDR3 for alpha chain variable domain of TCR clone 193896 (TRAV3, TRAJ21)
CAVGNCNKFYF

SEQ ID NO: 387792 - protein, 14 aa, Homo sapiens
  CDR3 for beta chain variable domain of TCR clone 193896 (TRBV7-3, TRBJ2-1)
CASSLAGGTNEQFF

SEQ ID NO: 387793 - protein, 13 aa, Homo sapiens
  CDR3 for alpha chain variable domain of TCR clone 193897 (TRAV23/DV6, TRAJ12)
CAPRVDSSYKLIF

SEQ ID NO: 387794 - protein, 12 aa, Homo sapiens
  CDR3 for beta chain variable domain of TCR clone 193897 (TRBV7-6, TRBJ2-5)
CASSLSQGTQYF

SEQ ID NO: 387795 - protein, 15 aa, Homo sapiens
  CDR3 for alpha chain variable domain of TCR clone 193898 (TRAV12-1, TRAJ36)
CVVNEHQTGANNHFF

SEQ ID NO: 387796 - protein, 12 aa, Homo sapiens
  CDR3 for beta chain variable domain of TCR clone 193898 (TRBV29-1, TRBJ2-3)
CSVTGGADTQYF

SEQ ID NO: 387797 - protein, 18 aa, Homo sapiens
  CDR3 for alpha chain variable domain of TCR clone 193899 (TRAV21, TRAJ52)
CAVRPPPAGGTSYGKLTS

SEQ ID NO: 387798 - protein, 17 aa, Homo sapiens
  CDR3 for beta chain variable domain of TCR clone 193899 (TRBV13, TRBJ2-3)
CASSLSRVAGGRNTQYF

SEQ ID NO: 387799 - protein, 22 aa, Homo sapiens
  CDR3 for alpha chain variable domain of TCR clone 193900 (TRAV8-2, TRAJ45)
HLTKPSAHMSDAAEYSADGLTF

SEQ ID NO: 387800 - protein, 15 aa, Homo sapiens
  CDR3 for beta chain variable domain of TCR clone 193900 (TRBV4-1, TRBJ1-4)
CASSDTGGTNEKLFF

SEQ ID NO: 387801 - protein, 13 aa, Homo sapiens
  CDR3 for alpha chain variable domain of TCR clone 193901 (TRAV1-1, TRAJ31)
CASYLNNNARLMF

SEQ ID NO: 387802 - protein, 14 aa, Homo sapiens
  CDR3 for beta chain variable domain of TCR clone 193901 (TRBV13, TRBJ1-1)
CASTVITVNTEAFF

SEQ ID NO: 387803 - protein, 16 aa, Homo sapiens
  CDR3 for alpha chain variable domain of TCR clone 193902 (TRAV4, TRAJ18)
CCVLLIGGPTLGRLYF

SEQ ID NO: 387804 - protein, 14 aa, Homo sapiens
  CDR3 for beta chain variable domain of TCR clone 193902 (TRBV12-5, TRBJ2-5)
CASGSRTQQETQYF

SEQ ID NO: 387805 - protein, 12 aa, Homo sapiens
  CDR3 for alpha chain variable domain of TCR clone 193903 (TRAV12-3, TRAJ17)
CAMTLTGNKLTF

SEQ ID NO: 387806 - protein, 14 aa, Homo sapiens
  CDR3 for beta chain variable domain of TCR clone 193903 (TRBV7-3, TRBJ2-1)
CASSLAGVTNEQFF

SEQ ID NO: 387807 - protein, 15 aa, Homo sapiens
  CDR3 for alpha chain variable domain of TCR clone 193904 (TRAV26-1, TRAJ17)
CIVSSFKAAGNKLTF

SEQ ID NO: 387808 - protein, 13 aa, Homo sapiens
  CDR3 for beta chain variable domain of TCR clone 193904 (TRBV6-1, TRBJ2-2)
CQHVAANTGELFF

SEQ ID NO: 387809 - protein, 16 aa, Homo sapiens
  CDR3 for alpha chain variable domain of TCR clone 193905 (TRAV12-1, TRAJ42)
CVVKPYYGGSQGNLIF

SEQ ID NO: 387810 - protein, 15 aa, Homo sapiens
  CDR3 for beta chain variable domain of TCR clone 193905 (TRBV4-3, TRBJ2-7)
CASSQGGRGIYEQYF

SEQ ID NO: 387811 - protein, 14 aa, Homo sapiens
  CDR3 for alpha chain variable domain of TCR clone 193906 (TRAV1-2, TRAJ10)
CAVRVTGGGNKLTF

SEQ ID NO: 387812 - protein, 13 aa, Homo sapiens
  CDR3 for beta chain variable domain of TCR clone 193906 (TRBV7-9, TRBJ1-2)
CASSLKQNYGETF

SEQ ID NO: 387813 - protein, 13 aa, Homo sapiens
  CDR3 for alpha chain variable domain of TCR clone 193907 (TRAV13-1, TRAJ5)
CAASDTGRRALTF

SEQ ID NO: 387814 - protein, 14 aa, Homo sapiens
  CDR3 for beta chain variable domain of TCR clone 193907 (TRBV19, TRBJ1-5)
CASSYTGSNQPQHF

SEQ ID NO: 387815 - protein, 13 aa, Homo sapiens
  CDR3 for alpha chain variable domain of TCR clone 193908 (TRAV36/DV7, TRAJ33)
CAVDMDSDYQLIW

SEQ ID NO: 387816 - protein, 16 aa, Homo sapiens
  CDR3 for beta chain variable domain of TCR clone 193908 (TRBV15, TRBJ2-3)
CATRLSGGRAPDTQYF

SEQ ID NO: 387817 - protein, 15 aa, Homo sapiens
  CDR3 for alpha chain variable domain of TCR clone 193909 (TRAV2, TRAJ13)
CAVEANSGGYQKVTF

SEQ ID NO: 387818 - protein, 16 aa, Homo sapiens
  CDR3 for beta chain variable domain of TCR clone 193909 (TRBV5-5, TRBJ2-2)
CASSGRREGATGELFF

SEQ ID NO: 387819 - protein, 12 aa, Homo sapiens
  CDR3 for alpha chain variable domain of TCR clone 193910 (TRAV2, TRAJ26)
CAGSPGRLWSAF

SEQ ID NO: 387820 - protein, 16 aa, Homo sapiens
  CDR3 for beta chain variable domain of TCR clone 193910 (TRBV13, TRBJ2-2)
CASSPRTGEHTGELFF

SEQ ID NO: 387821 - protein, 15 aa, Homo sapiens
  CDR3 for alpha chain variable domain of TCR clone 193911 (TRAV13-1, TRAJ5)
CAVSSIDTGRRALTF

SEQ ID NO: 387822 - protein, 18 aa, Homo sapiens
  CDR3 for beta chain variable domain of TCR clone 193911 (TRBV4-1, TRBJ2-2)
CASSFRTSGGEGPGELFF

SEQ ID NO: 387823 - protein, 17 aa, Homo sapiens
  CDR3 for alpha chain variable domain of TCR clone 193912 (TRAV23/DV6, TRAJ57)
CAASSTLSQGGSEKLVF

SEQ ID NO: 387824 - protein, 13 aa, Homo sapiens
  CDR3 for beta chain variable domain of TCR clone 193912 (TRBV4-2, TRBJ1-1)
CASSQAGNTEAFF

SEQ ID NO: 387825 - protein, 12 aa, Homo sapiens
  CDR3 for alpha chain variable domain of TCR clone 193913 (TRAV2, TRAJ9)
CAVGAGGFESIF

SEQ ID NO: 387826 - protein, 16 aa, Homo sapiens
  CDR3 for beta chain variable domain of TCR clone 193913 (TRBV13, TRBJ2-2)
CASSPRTGEHTGELFF

SEQ ID NO: 387827 - protein, 13 aa, Homo sapiens
  CDR3 for alpha chain variable domain of TCR clone 193914 (TRAV8-1, TRAJ30)
CAVIMNRDDKIIF

SEQ ID NO: 387828 - protein, 14 aa, Homo sapiens
  CDR3 for beta chain variable domain of TCR clone 193914 (TRBV7-2, TRBJ1-6)
CASSRQGANSPLHF

SEQ ID NO: 387829 - protein, 14 aa, Homo sapiens
  CDR3 for alpha chain variable domain of TCR clone 193915 (TRAV1-2, TRAJ16)
CDVNRFSDGQKLLF

SEQ ID NO: 387830 - protein, 14 aa, Homo sapiens
  CDR3 for beta chain variable domain of TCR clone 193915 (TRBV13, TRBJ2-5)
CASSLGRGQETQYF

SEQ ID NO: 387831 - protein, 14 aa, Homo sapiens
  CDR3 for alpha chain variable domain of TCR clone 193916 (TRAV38-2/DV8, TRAJ54)
AAMYQIQGAQKLVF

SEQ ID NO: 387832 - protein, 17 aa, Homo sapiens
  CDR3 for beta chain variable domain of TCR clone 193916 (TRBV6-1, TRBJ2-3)
CASREALRLISTDTQYF

SEQ ID NO: 387833 - protein, 13 aa, Homo sapiens
  CDR3 for alpha chain variable domain of TCR clone 193917 (TRAV2, TRAJ40)
CAVVTSGTYKYIF

SEQ ID NO: 387834 - protein, 15 aa, Homo sapiens
  CDR3 for beta chain variable domain of TCR clone 193917 (TRBV28, TRBJ2-3)
CASSQELGGTDTQYF

SEQ ID NO: 387835 - protein, 14 aa, Homo sapiens
  CDR3 for alpha chain variable domain of TCR clone 193918 (TRAV13-1, TRAJ3)
CVASKSSSASKIIF

SEQ ID NO: 387836 - protein, 17 aa, Homo sapiens
  CDR3 for beta chain variable domain of TCR clone 193918 (TRBV20-1, TRBJ2-2)
CSASGSGQGGLTGELFF

SEQ ID NO: 387837 - protein, 14 aa, Homo sapiens
  CDR3 for alpha chain variable domain of TCR clone 193919 (TRAV6, TRAJ17)
CALDIEAAGNKLTF

SEQ ID NO: 387838 - protein, 14 aa, Homo sapiens
  CDR3 for beta chain variable domain of TCR clone 193919 (TRBV4-1, TRBJ2-2)
CASSQAVNTGELFF

SEQ ID NO: 387839 - protein, 14 aa, Homo sapiens
  CDR3 for alpha chain variable domain of TCR clone 193920 (TRAV13-1, TRAJ26)
CAAPKGPDGQNFVF

SEQ ID NO: 387840 - protein, 16 aa, Homo sapiens
  CDR3 for beta chain variable domain of TCR clone 193920 (TRBV7-2, TRBJ2-7)
RASSLDLSGGAYEQYF

SEQ ID NO: 387841 - protein, 12 aa, Homo sapiens
  CDR3 for alpha chain variable domain of TCR clone 193921 (TRAV2, TRAJ31)
CGVEDNNARLMF

SEQ ID NO: 387842 - protein, 16 aa, Homo sapiens
  CDR3 for beta chain variable domain of TCR clone 193921 (TRBV10-3, TRBJ2-1)
CAISGVGDGGGGEQFF

SEQ ID NO: 387843 - protein, 11 aa, Homo sapiens
  CDR3 for alpha chain variable domain of TCR clone 193922 (TRAV12-1, TRAJ21)
CVVSNFNKFYF

SEQ ID NO: 387844 - protein, 16 aa, Homo sapiens
  CDR3 for beta chain variable domain of TCR clone 193922 (TRBV3-1, TRBJ2-3)
CASSQGTGGATDTQYF

SEQ ID NO: 387845 - protein, 11 aa, Homo sapiens
  CDR3 for alpha chain variable domain of TCR clone 193923 (TRAV2, TRAJ13)
CASGGYQKVTF

SEQ ID NO: 387846 - protein, 18 aa, Homo sapiens
  CDR3 for beta chain variable domain of TCR clone 193923 (TRBV4-1, TRBJ1-5)
CASSQDPRGQGLNQPQHF

SEQ ID NO: 387847 - protein, 15 aa, Homo sapiens
  CDR3 for alpha chain variable domain of TCR clone 193924 (TRAV26-1, TRAJ22)
CIVRVSFWFSKATDL

SEQ ID NO: 387848 - protein, 16 aa, Homo sapiens
  CDR3 for beta chain variable domain of TCR clone 193924 (TRBV24-1, TRBJ2-3)
CATSDPGTGATDTQYF

SEQ ID NO: 387849 - protein, 18 aa, Homo sapiens
  CDR3 for alpha chain variable domain of TCR clone 193925 (TRAV13-1, TRAJ52)
CAAKNPNAGGTSYGKMTF

SEQ ID NO: 387850 - protein, 14 aa, Homo sapiens
  CDR3 for beta chain variable domain of TCR clone 193925 (TRBV25-1, TRBJ1-1)
CASTHLGGNTEAFF

SEQ ID NO: 387851 - protein, 15 aa, Homo sapiens
  CDR3 for alpha chain variable domain of TCR clone 193926 (TRAV13-1, TRAJ44)
CAASRGGGTASKLTF

SEQ ID NO: 387852 - protein, 14 aa, Homo sapiens
  CDR3 for beta chain variable domain of TCR clone 193926 (TRBV7-2, TRBJ1-2)
CASSRGGTNYGYTF

SEQ ID NO: 387853 - protein, 14 aa, Homo sapiens
  CDR3 for alpha chain variable domain of TCR clone 193927 (TRAV23/DV6, TRAJ11)
CAALIGGGYSHLTF

SEQ ID NO: 387854 - protein, 13 aa, Homo sapiens
  CDR3 for beta chain variable domain of TCR clone 193927 (TRBV11-3, TRBJ1-1)
CASSLGGNTEAFF

SEQ ID NO: 387855 - protein, 16 aa, Homo sapiens
  CDR3 for alpha chain variable domain of TCR clone 193928 (TRAV3, TRAJ15)
CAVRDRTNQAGTALIF

SEQ ID NO: 387856 - protein, 13 aa, Homo sapiens
  CDR3 for beta chain variable domain of TCR clone 193928 (TRBV4-2, TRBJ1-1)
CASSQAGNTEAFF

SEQ ID NO: 387857 - protein, 14 aa, Homo sapiens
  CDR3 for alpha chain variable domain of TCR clone 193929 (TRAV1-2, TRAJ8)
CAVREDTGFPKLVF

SEQ ID NO: 387858 - protein, 15 aa, Homo sapiens
  CDR3 for beta chain variable domain of TCR clone 193929 (TRBV6-3, TRBJ2-7)
CASSPPGTVFYEQYF

SEQ ID NO: 387859 - protein, 11 aa, Homo sapiens
  CDR3 for alpha chain variable domain of TCR clone 193930 (TRAV8-1, TRAJ45)
CAVTPEEVLTD

SEQ ID NO: 387860 - protein, 14 aa, Homo sapiens
  CDR3 for beta chain variable domain of TCR clone 193930 (TRBV15, TRBJ2-5)
CATSIGGLGETQYF

SEQ ID NO: 387861 - protein, 11 aa, Homo sapiens
  CDR3 for alpha chain variable domain of TCR clone 193931 (TRAV21, TRAJ31)
SPPRANARLMF

SEQ ID NO: 387862 - protein, 14 aa, Homo sapiens
  CDR3 for beta chain variable domain of TCR clone 193931 (TRBV27, TRBJ2-1)
CAGSIAETYNEQFF

SEQ ID NO: 387863 - protein, 15 aa, Homo sapiens
  CDR3 for alpha chain variable domain of TCR clone 193932 (TRAV3, TRAJ5)
CAVRDLDTGRIALTF

SEQ ID NO: 387864 - protein, 12 aa, Homo sapiens
  CDR3 for beta chain variable domain of TCR clone 193932 (TRBV11-2, TRBJ2-2)
CASSLGGGELFF

SEQ ID NO: 387865 - protein, 13 aa, Homo sapiens
  CDR3 for alpha chain variable domain of TCR clone 193933 (TRAV13-1, TRAJ39)
CSKYSNAGNMLTF

SEQ ID NO: 387866 - protein, 16 aa, Homo sapiens
  CDR3 for beta chain variable domain of TCR clone 193933 (TRBV20-1, TRBJ1-4)
CSAPGQGLLTNKKLFF

SEQ ID NO: 387867 - protein, 12 aa, Homo sapiens
  CDR3 for alpha chain variable domain of TCR clone 193934 (TRAV12-3, TRAJ17)
CAMTLTGNKLTF

SEQ ID NO: 387868 - protein, 15 aa, Homo sapiens
  CDR3 for beta chain variable domain of TCR clone 193934 (TRBV20-1, TRBJ2-7)
CSARGPLAGGREQYF

SEQ ID NO: 387869 - protein, 16 aa, Homo sapiens
  CDR3 for alpha chain variable domain of TCR clone 193935 (TRAV30, TRAJ24)
CGAEIVDADSWGKFQF

SEQ ID NO: 387870 - protein, 14 aa, Homo sapiens
  CDR3 for beta chain variable domain of TCR clone 193935 (TRBV7-2, TRBJ2-7)
CASRSQGAAYEQYF

SEQ ID NO: 387871 - protein, 14 aa, Homo sapiens
  CDR3 for alpha chain variable domain of TCR clone 193936 (TRAV17, TRAJ57)
CATDPQRGSEKLVF

SEQ ID NO: 387872 - protein, 18 aa, Homo sapiens
  CDR3 for beta chain variable domain of TCR clone 193936 (TRBV6-6, TRBJ1-3)
CASSYSKWDSISGNTIYF

SEQ ID NO: 387873 - protein, 12 aa, Homo sapiens
  CDR3 for alpha chain variable domain of TCR clone 193937 (TRAV21, TRAJ33)
CAKMDSNYQLIW

SEQ ID NO: 387874 - protein, 11 aa, Homo sapiens
  CDR3 for beta chain variable domain of TCR clone 193937 (TRBV11-2, TRBJ2-5)
CASSLERTQYF

SEQ ID NO: 387875 - protein, 15 aa, Homo sapiens
  CDR3 for alpha chain variable domain of TCR clone 193938 (TRAV3, TRAJ17)
CAVRDTGAAGNKLTF

SEQ ID NO: 387876 - protein, 15 aa, Homo sapiens
  CDR3 for beta chain variable domain of TCR clone 193938 (TRBV27, TRBJ2-1)
CASSNGGGSSNEQFF

SEQ ID NO: 387877 - protein, 15 aa, Homo sapiens
  CDR3 for alpha chain variable domain of TCR clone 193939 (TRAV13-1, TRAJ52)
CAATSPRTSYGKLTF

SEQ ID NO: 387878 - protein, 12 aa, Homo sapiens
  CDR3 for beta chain variable domain of TCR clone 193939 (TRBV7-8, TRBJ2-7)
CTSSLGDREQYF

SEQ ID NO: 387879 - protein, 14 aa, Homo sapiens
  CDR3 for alpha chain variable domain of TCR clone 193940 (TRAV9-2, TRAJ39)
CALYIYNAGNMLTF

SEQ ID NO: 387880 - protein, 17 aa, Homo sapiens
  CDR3 for beta chain variable domain of TCR clone 193940 (TRBV7-9, TRBJ2-6)
CASSFGAGYSGANVLTF

SEQ ID NO: 387881 - protein, 16 aa, Homo sapiens
  CDR3 for alpha chain variable domain of TCR clone 193941 (TRAV30, TRAJ24)
CGTEIVDADSWGKFKF

SEQ ID NO: 387882 - protein, 13 aa, Homo sapiens
  CDR3 for beta chain variable domain of TCR clone 193941 (TRBV7-3, TRBJ1-1)
CASSQEWGAEAFF

SEQ ID NO: 387883 - protein, 14 aa, Homo sapiens
  CDR3 for alpha chain variable domain of TCR clone 193942 (TRAV27, TRAJ41)
CAVRTQIPGMHSTS

SEQ ID NO: 387884 - protein, 13 aa, Homo sapiens
  CDR3 for beta chain variable domain of TCR clone 193942 (TRBV7-9, TRBJ1-2)
CASSLKQNYGYTF

SEQ ID NO: 387885 - protein, 15 aa, Homo sapiens
  CDR3 for alpha chain variable domain of TCR clone 193943 (TRAV12-3, TRAJ54)
CAMSPPFQGAHKLVF

SEQ ID NO: 387886 - protein, 15 aa, Homo sapiens
  CDR3 for beta chain variable domain of TCR clone 193943 (TRBV20-1, TRBJ2-7)
CSARDRVSGMDEQYF

SEQ ID NO: 387887 - protein, 14 aa, Homo sapiens
  CDR3 for alpha chain variable domain of TCR clone 193944 (TRAV41, TRAJ48)
CAVISNFGNEKLTF

SEQ ID NO: 387888 - protein, 14 aa, Homo sapiens
  CDR3 for beta chain variable domain of TCR clone 193944 (TRBV18, TRBJ2-7)
CASSPRGGAYEQYF

SEQ ID NO: 387889 - protein, 16 aa, Homo sapiens
  CDR3 for alpha chain variable domain of TCR clone 193945 (TRAV30, TRAJ24)
CGTEIVDADSWGKFQF

SEQ ID NO: 387890 - protein, 13 aa, Homo sapiens
  CDR3 for beta chain variable domain of TCR clone 193945 (TRBV4-1, TRBJ2-2)
CASSQENAGELFF

SEQ ID NO: 387891 - protein, 11 aa, Homo sapiens
  CDR3 for alpha chain variable domain of TCR clone 193946 (TRAV23/DV6, TRAJ58)
CAARLLRGETS

SEQ ID NO: 387892 - protein, 14 aa, Homo sapiens
  CDR3 for beta chain variable domain of TCR clone 193946 (TRBV7-3, TRBJ2-3)
CASSPGASRDTQYF

SEQ ID NO: 387893 - protein, 14 aa, Homo sapiens
  CDR3 for alpha chain variable domain of TCR clone 193947 (TRAV2, TRAJ9)
CAVEDRSGGFKTIF

SEQ ID NO: 387894 - protein, 13 aa, Homo sapiens
  CDR3 for beta chain variable domain of TCR clone 193947 (TRBV15, TRBJ2-7)
CATSTTGHYEQYF

SEQ ID NO: 387895 - protein, 16 aa, Homo sapiens
  CDR3 for alpha chain variable domain of TCR clone 193948 (TRAV12-2, TRAJ32)
CAVNLGQGGATNKLIF

SEQ ID NO: 387896 - protein, 13 aa, Homo sapiens
  CDR3 for beta chain variable domain of TCR clone 193948 (TRBV14, TRBJ1-2)
CASSEDRRYGYTF

SEQ ID NO: 387897 - protein, 15 aa, Homo sapiens
  CDR3 for alpha chain variable domain of TCR clone 193949 (TRAV8-2, TRAJ24)
CVLSDRTDSWGKLQF

SEQ ID NO: 387898 - protein, 14 aa, Homo sapiens
  CDR3 for beta chain variable domain of TCR clone 193949 (TRBV19, TRBJ2-7)
CASSIEASSYEQYF

SEQ ID NO: 387899 - protein, 14 aa, Homo sapiens
  CDR3 for alpha chain variable domain of TCR clone 193950 (TRAV17, TRAJ4)
CATVPSGGYNKLIF

SEQ ID NO: 387900 - protein, 13 aa, Homo sapiens
  CDR3 for beta chain variable domain of TCR clone 193950 (TRBV19, TRBJ1-2)
CASSVPGQDGYTF

SEQ ID NO: 387901 - protein, 14 aa, Homo sapiens
  CDR3 for alpha chain variable domain of TCR clone 193951 (TRAV12-1, TRAJ30)
CVPTGTNRDDKIIF

SEQ ID NO: 387902 - protein, 15 aa, Homo sapiens
  CDR3 for beta chain variable domain of TCR clone 193951 (TRBV28, TRBJ2-7)
CASSPGGRGFYEQYF

SEQ ID NO: 387903 - protein, 14 aa, Homo sapiens
  CDR3 for alpha chain variable domain of TCR clone 193952 (TRAV26-1, TRAJ38)
CIADNAGNNRKLIW

SEQ ID NO: 387904 - protein, 14 aa, Homo sapiens
  CDR3 for beta chain variable domain of TCR clone 193952 (TRBV19, TRBJ2-1)
CASPTFVVSGEQFF

SEQ ID NO: 387905 - protein, 14 aa, Homo sapiens
  CDR3 for alpha chain variable domain of TCR clone 193953 (TRAV12-2, TRAJ44)
CAVNPAGTASKLTF

SEQ ID NO: 387906 - protein, 13 aa, Homo sapiens
  CDR3 for beta chain variable domain of TCR clone 193953 (TRBV20-1, TRBJ1-6)
CSAPVGGGSPLHF

SEQ ID NO: 387907 - protein, 17 aa, Homo sapiens
  CDR3 for alpha chain variable domain of TCR clone 193954 (TRAV3, TRAJ6)
CAVRDGPRAGGSDLPTF

SEQ ID NO: 387908 - protein, 14 aa, Homo sapiens
  CDR3 for beta chain variable domain of TCR clone 193954 (TRBV7-2, TRBJ2-7)
CASSPKTSFYEQYF

SEQ ID NO: 387909 - protein, 14 aa, Homo sapiens
  CDR3 for alpha chain variable domain of TCR clone 193955 (TRAV12-2, TRAJ13)
CAVKKTGGYQKVTF

SEQ ID NO: 387910 - protein, 14 aa, Homo sapiens
  CDR3 for beta chain variable domain of TCR clone 193955 (TRBV7-2, TRBJ2-7)
CASIPKTSFYEQYF

SEQ ID NO: 387911 - protein, 13 aa, Homo sapiens
  CDR3 for alpha chain variable domain of TCR clone 193956 (TRAV35, TRAJ42)
CAGFPGSQGNLIF

SEQ ID NO: 387912 - protein, 16 aa, Homo sapiens
  CDR3 for beta chain variable domain of TCR clone 193956 (TRBV4-2, TRBJ2-3)
CASSQELAGDTDTQYF

SEQ ID NO: 387913 - protein, 14 aa, Homo sapiens
  CDR3 for alpha chain variable domain of TCR clone 193957 (TRAV13-2, TRAJ17)
CAENSRAAGNKLTF

SEQ ID NO: 387914 - protein, 13 aa, Homo sapiens
  CDR3 for beta chain variable domain of TCR clone 193957 (TRBV12-4, TRBJ1-2)
CASSLRQGKGYTF

SEQ ID NO: 387915 - protein, 17 aa, Homo sapiens
  CDR3 for alpha chain variable domain of TCR clone 193958 (TRAV3, TRAJ12)
CAVRDGGRMDSSYKLIF

SEQ ID NO: 387916 - protein, 14 aa, Homo sapiens
  CDR3 for beta chain variable domain of TCR clone 193958 (TRBV7-3, TRBJ2-2)
CASSSGGYTGELFF

SEQ ID NO: 387917 - protein, 15 aa, Homo sapiens
  CDR3 for alpha chain variable domain of TCR clone 193959 (TRAV8-2, TRAJ15)
CVVTMGNQAETALIF

SEQ ID NO: 387918 - protein, 12 aa, Homo sapiens
  CDR3 for beta chain variable domain of TCR clone 193959 (TRBV6-1, TRBJ2-7)
CASSDYSYEQYF

SEQ ID NO: 387919 - protein, 17 aa, Homo sapiens
  CDR3 for alpha chain variable domain of TCR clone 193960 (TRAV3, TRAJ42)
CAVRDRDYGGSQGNLIF

SEQ ID NO: 387920 - protein, 15 aa, Homo sapiens
  CDR3 for beta chain variable domain of TCR clone 193960 (TRBV10-3, TRBJ2-7)
CASSYSYGGSYEQYF

SEQ ID NO: 387921 - protein, 14 aa, Homo sapiens
  CDR3 for alpha chain variable domain of TCR clone 193961 (TRAV8-2, TRAJ11)
CVVSERSGYSTLTF

SEQ ID NO: 387922 - protein, 13 aa, Homo sapiens
  CDR3 for beta chain variable domain of TCR clone 193961 (TRBV27, TRBJ2-3)
CASSWGRTDTQYF

SEQ ID NO: 387923 - protein, 12 aa, Homo sapiens
  CDR3 for alpha chain variable domain of TCR clone 193962 (TRAV30, TRAJ43)
CGAEERGNDMRF

SEQ ID NO: 387924 - protein, 17 aa, Homo sapiens
  CDR3 for beta chain variable domain of TCR clone 193962 (TRBV11-3, TRBJ2-6)
CASKWGQGLSGANVLTF

SEQ ID NO: 387925 - protein, 14 aa, Homo sapiens
  CDR3 for alpha chain variable domain of TCR clone 193963 (TRAV12-3, TRAJ33)
CAMSEEDSNYQLIW

SEQ ID NO: 387926 - protein, 14 aa, Homo sapiens
  CDR3 for beta chain variable domain of TCR clone 193963 (TRBV19, TRBJ2-1)
CASPTFVLSGEQFF

SEQ ID NO: 387927 - protein, 15 aa, Homo sapiens
  CDR3 for alpha chain variable domain of TCR clone 193964 (TRAV12-3, TRAJ6)
CAMSATTGGSYIPTF

SEQ ID NO: 387928 - protein, 15 aa, Homo sapiens
  CDR3 for beta chain variable domain of TCR clone 193964 (TRBV7-6, TRBJ1-5)
CASSQSSGSNQPQHF

SEQ ID NO: 387929 - protein, 13 aa, Homo sapiens
  CDR3 for alpha chain variable domain of TCR clone 193965 (TRAV8-6, TRAJ13)
CAVSSGGYQNVTF

SEQ ID NO: 387930 - protein, 15 aa, Homo sapiens
  CDR3 for beta chain variable domain of TCR clone 193965 (TRBV7-9, TRBJ2-7)
CASSLPMGQANEQYF

SEQ ID NO: 387931 - protein, 14 aa, Homo sapiens
  CDR3 for alpha chain variable domain of TCR clone 193966 (TRAV14/DV4, TRAJ20)
CAMRESLNDYKLSF

SEQ ID NO: 387932 - protein, 15 aa, Homo sapiens
  CDR3 for beta chain variable domain of TCR clone 193966 (TRBV28, TRBJ2-7)
CASSPGGRGFYEQYF

SEQ ID NO: 387933 - protein, 16 aa, Homo sapiens
  CDR3 for alpha chain variable domain of TCR clone 193967 (TRAV27, TRAJ48)
TAAQPGDTGLYFPLTF

SEQ ID NO: 387934 - protein, 13 aa, Homo sapiens
  CDR3 for beta chain variable domain of TCR clone 193967 (TRBV7-2, TRBJ2-5)
CASSQTSVETQYF

SEQ ID NO: 387935 - protein, 14 aa, Homo sapiens
  CDR3 for alpha chain variable domain of TCR clone 193968 (TRAV16, TRAJ3)
CALSQYSSASKIIF

SEQ ID NO: 387936 - protein, 12 aa, Homo sapiens
  CDR3 for beta chain variable domain of TCR clone 193968 (TRBV11-2, TRBJ2-2)
CASSLPTGELFF

SEQ ID NO: 387937 - protein, 11 aa, Homo sapiens
  CDR3 for alpha chain variable domain of TCR clone 193969 (TRAV12-1, TRAJ43)
CVEYDNNDMRF

SEQ ID NO: 387938 - protein, 16 aa, Homo sapiens
  CDR3 for beta chain variable domain of TCR clone 193969 (TRBV5-4, TRBJ2-1)
RASSLVGSGQDNEQFF

SEQ ID NO: 387939 - protein, 13 aa, Homo sapiens
  CDR3 for alpha chain variable domain of TCR clone 193970 (TRAV21, TRAJ27)
CAARPGHAGKSTF

SEQ ID NO: 387940 - protein, 14 aa, Homo sapiens
  CDR3 for beta chain variable domain of TCR clone 193970 (TRBV7-6, TRBJ2-3)
CASSLGTVKDTQYF

SEQ ID NO: 387941 - protein, 14 aa, Homo sapiens
  CDR3 for alpha chain variable domain of TCR clone 193971 (TRAV13-1, TRAJ35)
CAASKGGFGNVLHC

SEQ ID NO: 387942 - protein, 16 aa, Homo sapiens
  CDR3 for beta chain variable domain of TCR clone 193971 (TRBV20-1, TRBJ1-2)
CSASMGQGVANYGYTF

SEQ ID NO: 387943 - protein, 16 aa, Homo sapiens
  CDR3 for alpha chain variable domain of TCR clone 193972 (TRAV3, TRAJ10)
CAVRDMRAGGGNKLTF

SEQ ID NO: 387944 - protein, 14 aa, Homo sapiens
  CDR3 for beta chain variable domain of TCR clone 193972 (TRBV12-4, TRBJ1-4)
CVSRMTGRSEKLFF

SEQ ID NO: 387945 - protein, 15 aa, Homo sapiens
  CDR3 for alpha chain variable domain of TCR clone 193973 (TRAV3, TRAJ5)
CAVRDLDTGRRALTF

SEQ ID NO: 387946 - protein, 15 aa, Homo sapiens
  CDR3 for beta chain variable domain of TCR clone 193973 (TRBV20-1, TRBJ2-1)
CSARSPGGPGNEQFC

SEQ ID NO: 387947 - protein, 12 aa, Homo sapiens
  CDR3 for alpha chain variable domain of TCR clone 193974 (TRAV12-2, TRAJ9)
CAVNTGGFKTIF

SEQ ID NO: 387948 - protein, 15 aa, Homo sapiens
  CDR3 for beta chain variable domain of TCR clone 193974 (TRBV4-2, TRBJ1-3)
CASSQDGAQGTTIYF

SEQ ID NO: 387949 - protein, 11 aa, Homo sapiens
  CDR3 for alpha chain variable domain of TCR clone 193975 (TRAV27, TRAJ47)
CAGASGNKLVF

SEQ ID NO: 387950 - protein, 13 aa, Homo sapiens
  CDR3 for beta chain variable domain of TCR clone 193975 (TRBV19, TRBJ1-2)
CASSVPGQDGYTF

SEQ ID NO: 387951 - protein, 13 aa, Homo sapiens
  CDR3 for alpha chain variable domain of TCR clone 193976 (TRAV26-2, TRAJ43)
CILRAVNNNDMRF

SEQ ID NO: 387952 - protein, 15 aa, Homo sapiens
  CDR3 for beta chain variable domain of TCR clone 193976 (TRBV7-2, TRBJ2-1)
CASTYGTGIYNEQFF

SEQ ID NO: 387953 - protein, 14 aa, Homo sapiens
  CDR3 for alpha chain variable domain of TCR clone 193977 (TRAV2, TRAJ22)
CAVEVKRAARQLTF

SEQ ID NO: 387954 - protein, 19 aa, Homo sapiens
  CDR3 for beta chain variable domain of TCR clone 193977 (TRBV7-2, TRBJ2-3)
CASSLVLSAYISRPDTQYF

SEQ ID NO: 387955 - protein, 14 aa, Homo sapiens
  CDR3 for alpha chain variable domain of TCR clone 193978 (TRAV8-3, TRAJ39)
CAVGANNAGNMLTF

SEQ ID NO: 387956 - protein, 15 aa, Homo sapiens
  CDR3 for beta chain variable domain of TCR clone 193978 (TRBV5-1, TRBJ2-3)
CASSVTSGSTDTQYF

SEQ ID NO: 387957 - protein, 13 aa, Homo sapiens
  CDR3 for alpha chain variable domain of TCR clone 193979 (TRAV13-2, TRAJ48)
CSEMDFGSEKLTF

SEQ ID NO: 387958 - protein, 15 aa, Homo sapiens
  CDR3 for beta chain variable domain of TCR clone 193979 (TRBV7-9, TRBJ1-6)
CASSSPGRGNSPLHF

SEQ ID NO: 387959 - protein, 16 aa, Homo sapiens
  CDR3 for alpha chain variable domain of TCR clone 193980 (TRAV30, TRAJ24)
CGTEIVDADSWGKFQF

SEQ ID NO: 387960 - protein, 15 aa, Homo sapiens
  CDR3 for beta chain variable domain of TCR clone 193980 (TRBV6-3, TRBJ2-7)
CDSSSPGTVFYEQYF

SEQ ID NO: 387961 - protein, 13 aa, Homo sapiens
  CDR3 for alpha chain variable domain of TCR clone 193981 (TRAV12-2, TRAJ20)
WAVYPSNDYKLSF

SEQ ID NO: 387962 - protein, 13 aa, Homo sapiens
  CDR3 for beta chain variable domain of TCR clone 193981 (TRBV7-7, TRBJ2-2)
CASSLPSAGELFF

SEQ ID NO: 387963 - protein, 13 aa, Homo sapiens
  CDR3 for alpha chain variable domain of TCR clone 193982 (TRAV3, TRAJ21)
CAVREPDFTKFYF

SEQ ID NO: 387964 - protein, 12 aa, Homo sapiens
  CDR3 for beta chain variable domain of TCR clone 193982 (TRBV5-1, TRBJ2-4)
LAGEWAKNIQYF

SEQ ID NO: 387965 - protein, 14 aa, Homo sapiens
  CDR3 for alpha chain variable domain of TCR clone 193983 (TRAV2, TRAJ9)
CAVDPNTGGFKTIF

SEQ ID NO: 387966 - protein, 14 aa, Homo sapiens
  CDR3 for beta chain variable domain of TCR clone 193983 (TRBV4-1, TRBJ2-2)
RASSQAVNTGELFF

SEQ ID NO: 387967 - protein, 14 aa, Homo sapiens
  CDR3 for alpha chain variable domain of TCR clone 193984 (TRAV38-2/DV8, TRAJ23)
CAYRSQNQGGKLIF

SEQ ID NO: 387968 - protein, 14 aa, Homo sapiens
  CDR3 for beta chain variable domain of TCR clone 193984 (TRBV4-1, TRBJ2-2)
CASSQAVNTGELFF

SEQ ID NO: 387969 - protein, 13 aa, Homo sapiens
  CDR3 for alpha chain variable domain of TCR clone 193985 (TRAV2, TRAJ29)
CAAQNSGNTPLVF

SEQ ID NO: 387970 - protein, 13 aa, Homo sapiens
  CDR3 for beta chain variable domain of TCR clone 193985 (TRBV12-5, TRBJ2-3)
CASGDRQSDTQYF

SEQ ID NO: 387971 - protein, 14 aa, Homo sapiens
  CDR3 for alpha chain variable domain of TCR clone 193986 (TRAV8-2, TRAJ23)
CVVSDDNQGGKLIF

SEQ ID NO: 387972 - protein, 16 aa, Homo sapiens
  CDR3 for beta chain variable domain of TCR clone 193986 (TRBV9, TRBJ2-1)
CASSVGGGGNYNEQFF

SEQ ID NO: 387973 - protein, 14 aa, Homo sapiens
  CDR3 for alpha chain variable domain of TCR clone 193987 (TRAV8-4, TRAJ34)
CAVSDLGDPDKLIF

SEQ ID NO: 387974 - protein, 14 aa, Homo sapiens
  CDR3 for beta chain variable domain of TCR clone 193987 (TRBV20-1, TRBJ2-5)
CSARDGRAGETQYF

SEQ ID NO: 387975 - protein, 15 aa, Homo sapiens
  CDR3 for alpha chain variable domain of TCR clone 193988 (TRAV3, TRAJ22)
CAVRDRGGSARQLTF

SEQ ID NO: 387976 - protein, 17 aa, Homo sapiens
  CDR3 for beta chain variable domain of TCR clone 193988 (TRBV28, TRBJ2-7)
CASSPLHRASGVYEQYF

SEQ ID NO: 387977 - protein, 11 aa, Homo sapiens
  CDR3 for alpha chain variable domain of TCR clone 193989 (TRAV17, TRAJ31)
CATSNNARLMF

SEQ ID NO: 387978 - protein, 16 aa, Homo sapiens
  CDR3 for beta chain variable domain of TCR clone 193989 (TRBV7-8, TRBJ2-4)
CASSAGRTLAKNMQYF

SEQ ID NO: 387979 - protein, 13 aa, Homo sapiens
  CDR3 for alpha chain variable domain of TCR clone 193990 (TRAV13-2, TRAJ48)
CAEMDFGNEKLTF

SEQ ID NO: 387980 - protein, 15 aa, Homo sapiens
  CDR3 for beta chain variable domain of TCR clone 193990 (TRBV18, TRBJ2-7)
CASSPSSTGNYEQYF

SEQ ID NO: 387981 - protein, 14 aa, Homo sapiens
  CDR3 for alpha chain variable domain of TCR clone 193991 (TRAV22, TRAJ40)
CAVESTSGTYEYNF

SEQ ID NO: 387982 - protein, 17 aa, Homo sapiens
  CDR3 for beta chain variable domain of TCR clone 193991 (TRBV7-9, TRBJ2-2)
CASSLGVAGMNTGELFF

SEQ ID NO: 387983 - protein, 14 aa, Homo sapiens
  CDR3 for alpha chain variable domain of TCR clone 193992 (TRAV12-2, TRAJ45)
CAVYSGGGADGLTF

SEQ ID NO: 387984 - protein, 15 aa, Homo sapiens
  CDR3 for beta chain variable domain of TCR clone 193992 (TRBV20-1, TRBJ2-7)
CSAESGTSGAYEQYF

SEQ ID NO: 387985 - protein, 15 aa, Homo sapiens
  CDR3 for alpha chain variable domain of TCR clone 193993 (TRAV4, TRAJ10)
CLVGSITGGGNKLTF

SEQ ID NO: 387986 - protein, 14 aa, Homo sapiens
  CDR3 for beta chain variable domain of TCR clone 193993 (TRBV5-8, TRBJ2-3)
CASSLGQGTDTQYF

SEQ ID NO: 387987 - protein, 14 aa, Homo sapiens
  CDR3 for alpha chain variable domain of TCR clone 193994 (TRAV12-2, TRAJ17)
CAVLFKAPGSKLTF

SEQ ID NO: 387988 - protein, 17 aa, Homo sapiens
  CDR3 for beta chain variable domain of TCR clone 193994 (TRBV20-1, TRBJ2-2)
CSASGSGQGGLTGELFF

SEQ ID NO: 387989 - protein, 13 aa, Homo sapiens
  CDR3 for alpha chain variable domain of TCR clone 193995 (TRAV39, TRAJ48)
CAAVNVGNEKLTF

SEQ ID NO: 387990 - protein, 12 aa, Homo sapiens
  CDR3 for beta chain variable domain of TCR clone 193995 (TRBV5-5, TRBJ2-5)
CASSYFGETQYF

SEQ ID NO: 387991 - protein, 12 aa, Homo sapiens
  CDR3 for alpha chain variable domain of TCR clone 193996 (TRAV13-1, TRAJ53)
AASGGSNYKLTF

SEQ ID NO: 387992 - protein, 11 aa, Homo sapiens
  CDR3 for beta chain variable domain of TCR clone 193996 (TRBV12-4, TRBJ2-2)
CASSAAGELFF

SEQ ID NO: 387993 - protein, 14 aa, Homo sapiens
  CDR3 for alpha chain variable domain of TCR clone 193997 (TRAV38-2/DV8, TRAJ48)
CLWGWDFGNEKLTF

SEQ ID NO: 387994 - protein, 18 aa, Homo sapiens
  CDR3 for beta chain variable domain of TCR clone 193997 (TRBV5-1, TRBJ1-6)
CASSRSGQGTARGSPLHF

SEQ ID NO: 387995 - protein, 15 aa, Homo sapiens
  CDR3 for alpha chain variable domain of TCR clone 193998 (TRAV3, TRAJ5)
CAVRDLDTGSGALTF

SEQ ID NO: 387996 - protein, 13 aa, Homo sapiens
  CDR3 for beta chain variable domain of TCR clone 193998 (TRBV12-4, TRBJ2-7)
CASSPTETYEQYF

SEQ ID NO: 387997 - protein, 12 aa, Homo sapiens
  CDR3 for alpha chain variable domain of TCR clone 193999 (TRAV27, TRAJ21)
CAGVRQLQQILL

SEQ ID NO: 387998 - protein, 14 aa, Homo sapiens
  CDR3 for beta chain variable domain of TCR clone 193999 (TRBV7-9, TRBJ1-4)
CARSLEGQSEKLFF

SEQ ID NO: 387999 - protein, 14 aa, Homo sapiens
  CDR3 for alpha chain variable domain of TCR clone 194000 (TRAV29/DV5, TRAJ48)
CAAMALFGNEKLTF

SEQ ID NO: 388000 - protein, 20 aa, Homo sapiens
  CDR3 for beta chain variable domain of TCR clone 194000 (TRBV7-8, TRBJ2-2)
CASSHLFPGPTIHITGELFF

SEQ ID NO: 388001 - protein, 14 aa, Homo sapiens
  CDR3 for alpha chain variable domain of TCR clone 194001 (TRAV16, TRAJ17)
CALSGRAAGNKLTF

SEQ ID NO: 388002 - protein, 15 aa, Homo sapiens
  CDR3 for beta chain variable domain of TCR clone 194001 (TRBV3-1, TRBJ1-2)
CASSPTRLPEGCYAF

SEQ ID NO: 388003 - protein, 12 aa, Homo sapiens
  CDR3 for alpha chain variable domain of TCR clone 194002 (TRAV12-2, TRAJ20)
CAVRPSDYKLSF

SEQ ID NO: 388004 - protein, 13 aa, Homo sapiens
  CDR3 for beta chain variable domain of TCR clone 194002 (TRBV12-4, TRBJ1-2)
CASSLRQGKGYTF

SEQ ID NO: 388005 - protein, 12 aa, Homo sapiens
  CDR3 for alpha chain variable domain of TCR clone 194003 (TRAV13-1, TRAJ49)
CAASIRSNQFYF

SEQ ID NO: 388006 - protein, 14 aa, Homo sapiens
  CDR3 for beta chain variable domain of TCR clone 194003 (TRBV7-2, TRBJ2-1)
GASSPGLAGNEQFF

SEQ ID NO: 388007 - protein, 12 aa, Homo sapiens
  CDR3 for alpha chain variable domain of TCR clone 194004 (TRAV1-2, TRAJ24)
CAVGGSWGKFQF

SEQ ID NO: 388008 - protein, 15 aa, Homo sapiens
  CDR3 for beta chain variable domain of TCR clone 194004 (TRBV6-1, TRBJ2-7)
CASSEGVGKPYEQYF

SEQ ID NO: 388009 - protein, 12 aa, Homo sapiens
  CDR3 for alpha chain variable domain of TCR clone 194005 (TRAV13-1, TRAJ21)
CAAKEGFNKFYF

SEQ ID NO: 388010 - protein, 14 aa, Homo sapiens
  CDR3 for beta chain variable domain of TCR clone 194005 (TRBV28, TRBJ2-2)
CASTRRSGDGELFF

SEQ ID NO: 388011 - protein, 17 aa, Homo sapiens
  CDR3 for alpha chain variable domain of TCR clone 194006 (TRAV3, TRAJ6)
CAVRDSPRAGGSYIPTF

SEQ ID NO: 388012 - protein, 14 aa, Homo sapiens
  CDR3 for beta chain variable domain of TCR clone 194006 (TRBV7-2, TRBJ2-7)
CASSPKTSVYEQYF

SEQ ID NO: 388013 - protein, 14 aa, Homo sapiens
  CDR3 for alpha chain variable domain of TCR clone 194007 (TRAV3, TRAJ17)
CAVRDAAASNKLTF

SEQ ID NO: 388014 - protein, 15 aa, Homo sapiens
  CDR3 for beta chain variable domain of TCR clone 194007 (TRBV6-3, TRBJ2-5)
CASSLLRGDQEPQYF

SEQ ID NO: 388015 - protein, 15 aa, Homo sapiens
  CDR3 for alpha chain variable domain of TCR clone 194008 (TRAV13-2, TRAJ50)
CAEEPLKTSYDKLIF

SEQ ID NO: 388016 - protein, 15 aa, Homo sapiens
  CDR3 for beta chain variable domain of TCR clone 194008 (TRBV20-1, TRBJ1-5)
CSARGSVDSNQPQHF

SEQ ID NO: 388017 - protein, 12 aa, Homo sapiens
  CDR3 for alpha chain variable domain of TCR clone 194009 (TRAV12-2, TRAJ21)
CAPSDNFNKFYF

SEQ ID NO: 388018 - protein, 13 aa, Homo sapiens
  CDR3 for beta chain variable domain of TCR clone 194009 (TRBV28, TRBJ1-2)
CAGRDRGNYGYTF

SEQ ID NO: 388019 - protein, 14 aa, Homo sapiens
  CDR3 for alpha chain variable domain of TCR clone 194010 (TRAV12-2, TRAJ40)
CAVKIPSGTYKYIF

SEQ ID NO: 388020 - protein, 15 aa, Homo sapiens
  CDR3 for beta chain variable domain of TCR clone 194010 (TRBV20-1, TRBJ1-4)
CSARRQWGVNEKLFF

SEQ ID NO: 388021 - protein, 15 aa, Homo sapiens
  CDR3 for alpha chain variable domain of TCR clone 194011 (TRAV12-1, TRAJ8)
CVVNVENTGFQKLVF

SEQ ID NO: 388022 - protein, 14 aa, Homo sapiens
  CDR3 for beta chain variable domain of TCR clone 194011 (TRBV25-1, TRBJ1-1)
CASTHLGGNTEAFF

SEQ ID NO: 388023 - protein, 13 aa, Homo sapiens
  CDR3 for alpha chain variable domain of TCR clone 194012 (TRAV1-1, TRAJ9)
CAAKNTGGFKTIF

SEQ ID NO: 388024 - protein, 18 aa, Homo sapiens
  CDR3 for beta chain variable domain of TCR clone 194012 (TRBV5-1, TRBJ2-5)
CASSLLGETSGIGETQYF

SEQ ID NO: 388025 - protein, 11 aa, Homo sapiens
  CDR3 for alpha chain variable domain of TCR clone 194013 (TRAV3, TRAJ21)
CAVSNFNKFYF

SEQ ID NO: 388026 - protein, 16 aa, Homo sapiens
  CDR3 for beta chain variable domain of TCR clone 194013 (TRBV19, TRBJ2-1)
CASSKAGPSYYNEQFF

SEQ ID NO: 388027 - protein, 16 aa, Homo sapiens
  CDR3 for alpha chain variable domain of TCR clone 194014 (TRAV26-1, TRAJ37)
CIVRGDGSCNTGKLIF

SEQ ID NO: 388028 - protein, 17 aa, Homo sapiens
  CDR3 for beta chain variable domain of TCR clone 194014 (TRBV4-1, TRBJ2-7)
CASSRAPLGVRGGEQYF

SEQ ID NO: 388029 - protein, 15 aa, Homo sapiens
  CDR3 for alpha chain variable domain of TCR clone 194015 (TRAV35, TRAJ40)
YAGQLGTSGTYKYIF

SEQ ID NO: 388030 - protein, 11 aa, Homo sapiens
  CDR3 for beta chain variable domain of TCR clone 194015 (TRBV23-1, TRBJ2-7)
SSSGTGLEQYF

SEQ ID NO: 388031 - protein, 11 aa, Homo sapiens
  CDR3 for alpha chain variable domain of TCR clone 194016 (TRAV35, TRAJ12)
RWMDSSYKLIF

SEQ ID NO: 388032 - protein, 14 aa, Homo sapiens
  CDR3 for beta chain variable domain of TCR clone 194016 (TRBV19, TRBJ1-1)
CASSPNRGDTEAFF

SEQ ID NO: 388033 - protein, 10 aa, Homo sapiens
  CDR3 for alpha chain variable domain of TCR clone 194017 (TRAV13-2, TRAJ49)
CADTGNQFYF

SEQ ID NO: 388034 - protein, 14 aa, Homo sapiens
  CDR3 for beta chain variable domain of TCR clone 194017 (TRBV5-7, TRBJ2-7)
CASSGGLSSYEQYF

SEQ ID NO: 388035 - protein, 14 aa, Homo sapiens
  CDR3 for alpha chain variable domain of TCR clone 194018 (TRAV19, TRAJ49)
CALSEANTGNQFYF

SEQ ID NO: 388036 - protein, 14 aa, Homo sapiens
  CDR3 for beta chain variable domain of TCR clone 194018 (TRBV4-1, TRBJ1-2)
CAGSQDGQVRGYTF

SEQ ID NO: 388037 - protein, 17 aa, Homo sapiens
  CDR3 for alpha chain variable domain of TCR clone 194019 (TRAV8-6, TRAJ58)
CAVRSWVGETSGSRLTF

SEQ ID NO: 388038 - protein, 15 aa, Homo sapiens
  CDR3 for beta chain variable domain of TCR clone 194019 (TRBV20-1, TRBJ2-7)
CSARDRVSGMDEQYF

SEQ ID NO: 388039 - protein, 15 aa, Homo sapiens
  CDR3 for alpha chain variable domain of TCR clone 194020 (TRAV8-6, TRAJ5)
CAVSDTRTGRRALTF

SEQ ID NO: 388040 - protein, 15 aa, Homo sapiens
  CDR3 for beta chain variable domain of TCR clone 194020 (TRBV15, TRBJ1-5)
CATSRDPVSNQPQHF

SEQ ID NO: 388041 - protein, 14 aa, Homo sapiens
  CDR3 for alpha chain variable domain of TCR clone 194021 (TRAV23/DV6, TRAJ50)
CAADMKTSYDKVIF

SEQ ID NO: 388042 - protein, 14 aa, Homo sapiens
  CDR3 for beta chain variable domain of TCR clone 194021 (TRBV4-2, TRBJ2-1)
CASGPDRAYNEQFF

SEQ ID NO: 388043 - protein, 13 aa, Homo sapiens
  CDR3 for alpha chain variable domain of TCR clone 194022 (TRAV21, TRAJ36)
CTVIKTGANNLFF

SEQ ID NO: 388044 - protein, 13 aa, Homo sapiens
  CDR3 for beta chain variable domain of TCR clone 194022 (TRBV29-1, TRBJ2-3)
CSATRGGRDTQYF

SEQ ID NO: 388045 - protein, 13 aa, Homo sapiens
  CDR3 for alpha chain variable domain of TCR clone 194023 (TRAV13-2, TRAJ11)
CAEGDSGYSTLTF

SEQ ID NO: 388046 - protein, 12 aa, Homo sapiens
  CDR3 for beta chain variable domain of TCR clone 194023 (TRBV7-9, TRBJ1-1)
FASSLEGAEAFF

SEQ ID NO: 388047 - protein, 18 aa, Homo sapiens
  CDR3 for alpha chain variable domain of TCR clone 194024 (TRAV26-2, TRAJ45)
CILRVVKYSGGGADGLTF

SEQ ID NO: 388048 - protein, 17 aa, Homo sapiens
  CDR3 for beta chain variable domain of TCR clone 194024 (TRBV25-1, TRBJ2-1)
CASSAYGQGRGVYEQFF

SEQ ID NO: 388049 - protein, 14 aa, Homo sapiens
  CDR3 for alpha chain variable domain of TCR clone 194025 (TRAV13-2, TRAJ17)
CAENSKAAGNNLTF

SEQ ID NO: 388050 - protein, 12 aa, Homo sapiens
  CDR3 for beta chain variable domain of TCR clone 194025 (TRBV7-8, TRBJ2-1)
CASSALAGRVFF

SEQ ID NO: 388051 - protein, 13 aa, Homo sapiens
  CDR3 for alpha chain variable domain of TCR clone 194026 (TRAV9-2, TRAJ49)
CALRHFTGNQFYF

SEQ ID NO: 388052 - protein, 16 aa, Homo sapiens
  CDR3 for beta chain variable domain of TCR clone 194026 (TRBV7-9, TRBJ2-1)
CVSSPRLGSSYNEQFF

SEQ ID NO: 388053 - protein, 15 aa, Homo sapiens
  CDR3 for alpha chain variable domain of TCR clone 194027 (TRAV13-2, TRAJ10)
CAENRDTGGGNKLTF

SEQ ID NO: 388054 - protein, 20 aa, Homo sapiens
  CDR3 for beta chain variable domain of TCR clone 194027 (TRBV28, TRBJ2-1)
CASTAIGRSPGLAGGNEQFF

SEQ ID NO: 388055 - protein, 10 aa, Homo sapiens
  CDR3 for alpha chain variable domain of TCR clone 194028 (TRAV1-2, TRAJ31)
CAFFDARLLF

SEQ ID NO: 388056 - protein, 17 aa, Homo sapiens
  CDR3 for beta chain variable domain of TCR clone 194028 (TRBV15, TRBJ1-2)
CATSGREIDVVNYGYTF

SEQ ID NO: 388057 - protein, 12 aa, Homo sapiens
  CDR3 for alpha chain variable domain of TCR clone 194029 (TRAV12-2, TRAJ10)
WGVTGGGNKLTF

SEQ ID NO: 388058 - protein, 14 aa, Homo sapiens
  CDR3 for beta chain variable domain of TCR clone 194029 (TRBV4-1, TRBJ2-2)
CASSQAVNTGELFF

SEQ ID NO: 388059 - protein, 14 aa, Homo sapiens
  CDR3 for alpha chain variable domain of TCR clone 194030 (TRAV2, TRAJ9)
CAVEDRSGGFKTIF

SEQ ID NO: 388060 - protein, 14 aa, Homo sapiens
  CDR3 for beta chain variable domain of TCR clone 194030 (TRBV5-1, TRBJ1-2)
CASSLEPVNYGYTF

SEQ ID NO: 388061 - protein, 14 aa, Homo sapiens
  CDR3 for alpha chain variable domain of TCR clone 194031 (TRAV25, TRAJ22)
CAVRSSGSARQMTF

SEQ ID NO: 388062 - protein, 16 aa, Homo sapiens
  CDR3 for beta chain variable domain of TCR clone 194031 (TRBV4-2, TRBJ1-1)
CASSPSPGRAAPEAFF

SEQ ID NO: 388063 - protein, 13 aa, Homo sapiens
  CDR3 for alpha chain variable domain of TCR clone 194032 (TRAV2, TRAJ40)
CAVVTSGTYKYLF

SEQ ID NO: 388064 - protein, 15 aa, Homo sapiens
  CDR3 for beta chain variable domain of TCR clone 194032 (TRBV7-3, TRBJ2-2)
CASSETGQGTGELFF

SEQ ID NO: 388065 - protein, 14 aa, Homo sapiens
  CDR3 for alpha chain variable domain of TCR clone 194033 (TRAV35, TRAJ50)
CAGHRKTSYDKVIF

SEQ ID NO: 388066 - protein, 17 aa, Homo sapiens
  CDR3 for beta chain variable domain of TCR clone 194033 (TRBV5-1, TRBJ1-5)
CASSLVGREEGNQPQHF

SEQ ID NO: 388067 - protein, 12 aa, Homo sapiens
  CDR3 for alpha chain variable domain of TCR clone 194034 (TRAV13-1, TRAJ15)
CAANQAGDALIF

SEQ ID NO: 388068 - protein, 14 aa, Homo sapiens
  CDR3 for beta chain variable domain of TCR clone 194034 (TRBV20-1, TRBJ2-5)
CSARYRGLQETQYF

SEQ ID NO: 388069 - protein, 14 aa, Homo sapiens
  CDR3 for alpha chain variable domain of TCR clone 194035 (TRAV8-4, TRAJ34)
CAVSDLGDTDKLIF

SEQ ID NO: 388070 - protein, 13 aa, Homo sapiens
  CDR3 for beta chain variable domain of TCR clone 194035 (TRBV7-9, TRBJ2-5)
CASLSPGQETQYF

SEQ ID NO: 388071 - protein, 10 aa, Homo sapiens
  CDR3 for alpha chain variable domain of TCR clone 194036 (TRAV3, TRAJ20)
CAVRPSVTTT

SEQ ID NO: 388072 - protein, 15 aa, Homo sapiens
  CDR3 for beta chain variable domain of TCR clone 194036 (TRBV19, TRBJ2-3)
CAAGDTNAPNDTQYF

SEQ ID NO: 388073 - protein, 15 aa, Homo sapiens
  CDR3 for alpha chain variable domain of TCR clone 194037 (TRAV34, TRAJ38)
CGADFTPGNNRKLIW

SEQ ID NO: 388074 - protein, 16 aa, Homo sapiens
  CDR3 for beta chain variable domain of TCR clone 194037 (TRBV6-6, TRBJ2-4)
CASSNAGQGAKNMQYF

SEQ ID NO: 388075 - protein, 11 aa, Homo sapiens
  CDR3 for alpha chain variable domain of TCR clone 194038 (TRAV4, TRAJ28)
CLVGEHRAETP

SEQ ID NO: 388076 - protein, 13 aa, Homo sapiens
  CDR3 for beta chain variable domain of TCR clone 194038 (TRBV20-1, TRBJ2-7)
CSATHTSGYEQYF

SEQ ID NO: 388077 - protein, 15 aa, Homo sapiens
  CDR3 for alpha chain variable domain of TCR clone 194039 (TRAV8-2, TRAJ16)
CGVSDGFSDGQKLLF

SEQ ID NO: 388078 - protein, 12 aa, Homo sapiens
  CDR3 for beta chain variable domain of TCR clone 194039 (TRBV12-4, TRBJ2-7)
CASSLGGYEQYF

SEQ ID NO: 388079 - protein, 14 aa, Homo sapiens
  CDR3 for alpha chain variable domain of TCR clone 194040 (TRAV12-1, TRAJ33)
CVVNPEDSNYQLIW

SEQ ID NO: 388080 - protein, 11 aa, Homo sapiens
  CDR3 for beta chain variable domain of TCR clone 194040 (TRBV7-6, TRBJ2-1)
CASSDYGEQFF

SEQ ID NO: 388081 - protein, 14 aa, Homo sapiens
  CDR3 for alpha chain variable domain of TCR clone 194041 (TRAV8-3, TRAJ4)
CAVGAAGGYNKLIF

SEQ ID NO: 388082 - protein, 17 aa, Homo sapiens
  CDR3 for beta chain variable domain of TCR clone 194041 (TRBV19, TRBJ2-1)
CASSPRTSGGPYNEQFF

SEQ ID NO: 388083 - protein, 14 aa, Homo sapiens
  CDR3 for alpha chain variable domain of TCR clone 194042 (TRAV17, TRAJ45)
CVLRTGGGADGLTF

SEQ ID NO: 388084 - protein, 15 aa, Homo sapiens
  CDR3 for beta chain variable domain of TCR clone 194042 (TRBV5-7, TRBJ1-5)
CASSYGKLWDQPQHF

SEQ ID NO: 388085 - protein, 14 aa, Homo sapiens
  CDR3 for alpha chain variable domain of TCR clone 194043 (TRAV17, TRAJ16)
CATADFSDGQKLLF

SEQ ID NO: 388086 - protein, 18 aa, Homo sapiens
  CDR3 for beta chain variable domain of TCR clone 194043 (TRBV6-6, TRBJ1-3)
CASSYSKWDSISGNTIYF

SEQ ID NO: 388087 - protein, 18 aa, Homo sapiens
  CDR3 for alpha chain variable domain of TCR clone 194044 (TRAV12-2, )
CAVEDIQNLDPAVYHLRD

SEQ ID NO: 388088 - protein, 16 aa, Homo sapiens
  CDR3 for beta chain variable domain of TCR clone 194044 (TRBV6-1, TRBJ1-2)
CASSGAWQGRSHGYTF

SEQ ID NO: 388089 - protein, 12 aa, Homo sapiens
  CDR3 for alpha chain variable domain of TCR clone 194045 (TRAV17, TRAJ4)
CATDGGYNKLIF

SEQ ID NO: 388090 - protein, 13 aa, Homo sapiens
  CDR3 for beta chain variable domain of TCR clone 194045 (TRBV29-1, TRBJ2-2)
CSTTGVNTGKLFF

SEQ ID NO: 388091 - protein, 13 aa, Homo sapiens
  CDR3 for alpha chain variable domain of TCR clone 194046 (TRAV3, TRAJ20)
YAVRDWAAGKLSF

SEQ ID NO: 388092 - protein, 13 aa, Homo sapiens
  CDR3 for beta chain variable domain of TCR clone 194046 (TRBV7-3, TRBJ1-1)
CASSQDWGAEAFF

SEQ ID NO: 388093 - protein, 15 aa, Homo sapiens
  CDR3 for alpha chain variable domain of TCR clone 194047 (TRAV12-2, TRAJ50)
CAVNGLETSYDKVIF

SEQ ID NO: 388094 - protein, 14 aa, Homo sapiens
  CDR3 for beta chain variable domain of TCR clone 194047 (TRBV7-2, TRBJ2-7)
CASSSISGFSEQYF

SEQ ID NO: 388095 - protein, 10 aa, Homo sapiens
  CDR3 for alpha chain variable domain of TCR clone 194048 (TRAV12-2, TRAJ43)
CGVKVLSMRF

SEQ ID NO: 388096 - protein, 14 aa, Homo sapiens
  CDR3 for beta chain variable domain of TCR clone 194048 (TRBV11-2, TRBJ2-7)
CASSLGNSLYEQYF

SEQ ID NO: 388097 - protein, 12 aa, Homo sapiens
  CDR3 for alpha chain variable domain of TCR clone 194049 (TRAV12-3, TRAJ34)
CAMGYNTDKLIF

SEQ ID NO: 388098 - protein, 14 aa, Homo sapiens
  CDR3 for beta chain variable domain of TCR clone 194049 (TRBV4-1, TRBJ2-2)
CASSRAVNTGELFF

SEQ ID NO: 388099 - protein, 15 aa, Homo sapiens
  CDR3 for alpha chain variable domain of TCR clone 194050 (TRAV8-3, TRAJ45)
CASAYSGGGADGPTF

SEQ ID NO: 388100 - protein, 13 aa, Homo sapiens
  CDR3 for beta chain variable domain of TCR clone 194050 (TRBV10-3, TRBJ2-7)
CASKLAVNYEQYF

SEQ ID NO: 388101 - protein, 14 aa, Homo sapiens
  CDR3 for alpha chain variable domain of TCR clone 194051 (TRAV1-2, TRAJ16)
CAVNRFSDGQKLLF

SEQ ID NO: 388102 - protein, 13 aa, Homo sapiens
  CDR3 for beta chain variable domain of TCR clone 194051 (TRBV4-1, TRBJ2-1)
CASSQAGGDEQFV

SEQ ID NO: 388103 - protein, 13 aa, Homo sapiens
  CDR3 for alpha chain variable domain of TCR clone 194052 (TRAV12-1, TRAJ21)
CVVTLYNFNKFYF

SEQ ID NO: 388104 - protein, 14 aa, Homo sapiens
  CDR3 for beta chain variable domain of TCR clone 194052 (TRBV7-9, TRBJ2-1)
CASSPRDSLYEQFF

SEQ ID NO: 388105 - protein, 13 aa, Homo sapiens
  CDR3 for alpha chain variable domain of TCR clone 194053 (TRAV13-2, TRAJ15)
CAEGPQAGTALIF

SEQ ID NO: 388106 - protein, 15 aa, Homo sapiens
  CDR3 for beta chain variable domain of TCR clone 194053 (TRBV11-2, TRBJ2-7)
CASRFPGTGGYEQYF

SEQ ID NO: 388107 - protein, 14 aa, Homo sapiens
  CDR3 for alpha chain variable domain of TCR clone 194054 (TRAV1-2, TRAJ8)
CAVRADTGFQKLVF

SEQ ID NO: 388108 - protein, 12 aa, Homo sapiens
  CDR3 for beta chain variable domain of TCR clone 194054 (TRBV24-1, TRBJ1-1)
CATLYPDTEAFF

SEQ ID NO: 388109 - protein, 13 aa, Homo sapiens
  CDR3 for alpha chain variable domain of TCR clone 194055 (TRAV26-1, TRAJ36)
CIVVWTGANNLFF

SEQ ID NO: 388110 - protein, 15 aa, Homo sapiens
  CDR3 for beta chain variable domain of TCR clone 194055 (TRBV27, TRBJ2-1)
CASSNGGGSSNEQFF

SEQ ID NO: 388111 - protein, 13 aa, Homo sapiens
  CDR3 for alpha chain variable domain of TCR clone 194056 (TRAV1-2, TRAJ31)
CAVRPHNNARLMF

SEQ ID NO: 388112 - protein, 14 aa, Homo sapiens
  CDR3 for beta chain variable domain of TCR clone 194056 (TRBV11-2, TRBJ2-1)
CASSLSGPYNEQFF

SEQ ID NO: 388113 - protein, 12 aa, Homo sapiens
  CDR3 for alpha chain variable domain of TCR clone 194057 (TRAV12-3, TRAJ40)
CAMSSGTYKYIY

SEQ ID NO: 388114 - protein, 15 aa, Homo sapiens
  CDR3 for beta chain variable domain of TCR clone 194057 (TRBV7-3, TRBJ2-2)
CASSETGQGTGELFF

SEQ ID NO: 388115 - protein, 14 aa, Homo sapiens
  CDR3 for alpha chain variable domain of TCR clone 194058 (TRAV13-1, TRAJ35)
CAASKGGFGNVLHC

SEQ ID NO: 388116 - protein, 13 aa, Homo sapiens
  CDR3 for beta chain variable domain of TCR clone 194058 (TRBV10-2, TRBJ2-7)
CASGTSGGYEQYF

SEQ ID NO: 388117 - protein, 13 aa, Homo sapiens
  CDR3 for alpha chain variable domain of TCR clone 194059 (TRAV23/DV6, TRAJ22)
CAPWGGSARQLTF

SEQ ID NO: 388118 - protein, 14 aa, Homo sapiens
  CDR3 for beta chain variable domain of TCR clone 194059 (TRBV7-2, TRBJ2-7)
CASSPKTSVYEQYF

SEQ ID NO: 388119 - protein, 15 aa, Homo sapiens
  CDR3 for alpha chain variable domain of TCR clone 194060 (TRAV27, TRAJ38)
CAARRNAGNNRKLIW

SEQ ID NO: 388120 - protein, 13 aa, Homo sapiens
  CDR3 for beta chain variable domain of TCR clone 194060 (TRBV7-3, TRBJ2-1)
CASILDSYNEQFF

SEQ ID NO: 388121 - protein, 14 aa, Homo sapiens
  CDR3 for alpha chain variable domain of TCR clone 194061 (TRAV27, TRAJ37)
CAVERSSNTGKLIF

SEQ ID NO: 388122 - protein, 15 aa, Homo sapiens
  CDR3 for beta chain variable domain of TCR clone 194061 (TRBV11-3, TRBJ1-6)
CASSLDWGANSPLHF

SEQ ID NO: 388123 - protein, 12 aa, Homo sapiens
  CDR3 for alpha chain variable domain of TCR clone 194062 (TRAV29/DV5, TRAJ49)
CAATDTGNQFYF

SEQ ID NO: 388124 - protein, 14 aa, Homo sapiens
  CDR3 for beta chain variable domain of TCR clone 194062 (TRBV15, TRBJ2-1)
CATSGVEDYNEQFF

SEQ ID NO: 388125 - protein, 14 aa, Homo sapiens
  CDR3 for alpha chain variable domain of TCR clone 194063 (TRAV12-3, TRAJ9)
CAMSPNTGGSKTNF

SEQ ID NO: 388126 - protein, 12 aa, Homo sapiens
  CDR3 for beta chain variable domain of TCR clone 194063 (TRBV11-2, TRBJ2-2)
CASNLGGGELFF

SEQ ID NO: 388127 - protein, 14 aa, Homo sapiens
  CDR3 for alpha chain variable domain of TCR clone 194064 (TRAV13-1, TRAJ40)
CAARSTSGTYKYIF

SEQ ID NO: 388128 - protein, 15 aa, Homo sapiens
  CDR3 for beta chain variable domain of TCR clone 194064 (TRBV18, TRBJ1-5)
CDSSETGGNNQPQHF

SEQ ID NO: 388129 - protein, 16 aa, Homo sapiens
  CDR3 for alpha chain variable domain of TCR clone 194065 (TRAV3, TRAJ37)
CAVRPHGSGNTGKLIF

SEQ ID NO: 388130 - protein, 14 aa, Homo sapiens
  CDR3 for beta chain variable domain of TCR clone 194065 (TRBV7-3, TRBJ2-1)
CASSALAGGPEQFF

SEQ ID NO: 388131 - protein, 13 aa, Homo sapiens
  CDR3 for alpha chain variable domain of TCR clone 194066 (TRAV27, TRAJ49)
CAPRPYTGDQFYF

SEQ ID NO: 388132 - protein, 18 aa, Homo sapiens
  CDR3 for beta chain variable domain of TCR clone 194066 (TRBV7-3, TRBJ2-5)
CASSLGGAAQGRWETQYF

SEQ ID NO: 388133 - protein, 15 aa, Homo sapiens
  CDR3 for alpha chain variable domain of TCR clone 194067 (TRAV12-1, TRAJ42)
CVVTRDGGSQGNLIF

SEQ ID NO: 388134 - protein, 14 aa, Homo sapiens
  CDR3 for beta chain variable domain of TCR clone 194067 (TRBV11-2, TRBJ2-3)
CASSLGGVANTQYF

SEQ ID NO: 388135 - protein, 14 aa, Homo sapiens
  CDR3 for alpha chain variable domain of TCR clone 194068 (TRAV13-1, TRAJ32)
CAARGSGATNKLIF

SEQ ID NO: 388136 - protein, 14 aa, Homo sapiens
  CDR3 for beta chain variable domain of TCR clone 194068 (TRBV4-2, TRBJ2-1)
CASGLDRAYNEQFF

SEQ ID NO: 388137 - protein, 14 aa, Homo sapiens
  CDR3 for alpha chain variable domain of TCR clone 194069 (TRAV12-2, TRAJ13)
CAVKKTGGYQKVTF

SEQ ID NO: 388138 - protein, 16 aa, Homo sapiens
  CDR3 for beta chain variable domain of TCR clone 194069 (TRBV4-1, TRBJ1-5)
CASSPRGGLSPSILVM

SEQ ID NO: 388139 - protein, 14 aa, Homo sapiens
  CDR3 for alpha chain variable domain of TCR clone 194070 (TRAV21, TRAJ45)
CAVSSGGGADGLTF

SEQ ID NO: 388140 - protein, 20 aa, Homo sapiens
  CDR3 for beta chain variable domain of TCR clone 194070 (TRBV7-8, TRBJ2-2)
CASSHLFPGPTIHITGELFF

SEQ ID NO: 388141 - protein, 16 aa, Homo sapiens
  CDR3 for alpha chain variable domain of TCR clone 194071 (TRAV17, TRAJ35)
CATAEGGIGFGNVLHC

SEQ ID NO: 388142 - protein, 16 aa, Homo sapiens
  CDR3 for beta chain variable domain of TCR clone 194071 (TRBV6-5, TRBJ2-7)
CASSSDPTSGFYEPYF

SEQ ID NO: 388143 - protein, 14 aa, Homo sapiens
  CDR3 for alpha chain variable domain of TCR clone 194072 (TRAV1-2, TRAJ16)
CAVNRFSDGQKLLF

SEQ ID NO: 388144 - protein, 15 aa, Homo sapiens
  CDR3 for beta chain variable domain of TCR clone 194072 (TRBV27, TRBJ2-3)
CASRSLAGVIDTPYF

SEQ ID NO: 388145 - protein, 11 aa, Homo sapiens
  CDR3 for alpha chain variable domain of TCR clone 194073 (TRAV23/DV6, TRAJ58)
CAARLLRGETS

SEQ ID NO: 388146 - protein, 17 aa, Homo sapiens
  CDR3 for beta chain variable domain of TCR clone 194073 (TRBV6-1, TRBJ2-3)
CASSEALRLISTDTQYF

SEQ ID NO: 388147 - protein, 14 aa, Homo sapiens
  CDR3 for alpha chain variable domain of TCR clone 194074 (TRAV1-2, TRAJ16)
CAVNRFSDVQKLLF

SEQ ID NO: 388148 - protein, 13 aa, Homo sapiens
  CDR3 for beta chain variable domain of TCR clone 194074 (TRBV7-2, TRBJ2-2)
CASSLAVTGELFF

SEQ ID NO: 388149 - protein, 16 aa, Homo sapiens
  CDR3 for alpha chain variable domain of TCR clone 194075 (TRAV12-2, TRAJ10)
CAVNRVLTGGGNKLTL

SEQ ID NO: 388150 - protein, 12 aa, Homo sapiens
  CDR3 for beta chain variable domain of TCR clone 194075 (TRBV28, TRBJ2-7)
CASSFSIYEQYF

SEQ ID NO: 388151 - protein, 17 aa, Homo sapiens
  CDR3 for alpha chain variable domain of TCR clone 194076 (TRAV13-1, TRAJ52)
CAAGRNAGGTSYGKLTF

SEQ ID NO: 388152 - protein, 17 aa, Homo sapiens
  CDR3 for beta chain variable domain of TCR clone 194076 (TRBV6-5, TRBJ2-3)
CASSYTTGTGRGDTQYF

SEQ ID NO: 388153 - protein, 15 aa, Homo sapiens
  CDR3 for alpha chain variable domain of TCR clone 194077 (TRAV13-1, TRAJ11)
CAASNRISGYSTLTF

SEQ ID NO: 388154 - protein, 11 aa, Homo sapiens
  CDR3 for beta chain variable domain of TCR clone 194077 (TRBV20-1, TRBJ2-7)
CSARLSYEQYF

SEQ ID NO: 388155 - protein, 13 aa, Homo sapiens
  CDR3 for alpha chain variable domain of TCR clone 194078 (TRAV3, TRAJ26)
CSVSRGYGQNFVF

SEQ ID NO: 388156 - protein, 15 aa, Homo sapiens
  CDR3 for beta chain variable domain of TCR clone 194078 (TRBV27, TRBJ2-1)
CASSLARGAYNEQFF

SEQ ID NO: 388157 - protein, 12 aa, Homo sapiens
  CDR3 for alpha chain variable domain of TCR clone 194079 (TRAV8-6, TRAJ4)
CAVSDHPNKLIF

SEQ ID NO: 388158 - protein, 16 aa, Homo sapiens
  CDR3 for beta chain variable domain of TCR clone 194079 (TRBV9, TRBJ2-2)
CASSAMGKGNTGELFF

SEQ ID NO: 388159 - protein, 12 aa, Homo sapiens
  CDR3 for alpha chain variable domain of TCR clone 194080 (TRAV3, TRAJ43)
CAVRDPNNDMRF

SEQ ID NO: 388160 - protein, 15 aa, Homo sapiens
  CDR3 for beta chain variable domain of TCR clone 194080 (TRBV27, TRBJ1-5)
CASSLGTGFDQPQNF

SEQ ID NO: 388161 - protein, 10 aa, Homo sapiens
  CDR3 for alpha chain variable domain of TCR clone 194081 (TRAV23/DV6, TRAJ57)
CAASSTLSQG

SEQ ID NO: 388162 - protein, 17 aa, Homo sapiens
  CDR3 for beta chain variable domain of TCR clone 194081 (TRBV24-1, TRBJ2-4)
CATSDAEARGVRNIQYF

SEQ ID NO: 388163 - protein, 15 aa, Homo sapiens
  CDR3 for alpha chain variable domain of TCR clone 194082 (TRAV13-1, TRAJ32)
CAASNGWRCYKQAHL

SEQ ID NO: 388164 - protein, 17 aa, Homo sapiens
  CDR3 for beta chain variable domain of TCR clone 194082 (TRBV15, TRBJ1-2)
CATSGREIDVVNYGYTF

SEQ ID NO: 388165 - protein, 14 aa, Homo sapiens
  CDR3 for alpha chain variable domain of TCR clone 194083 (TRAV1-2, TRAJ8)
CAVREDTGFQKLVF

SEQ ID NO: 388166 - protein, 14 aa, Homo sapiens
  CDR3 for beta chain variable domain of TCR clone 194083 (TRBV12-4, TRBJ1-5)
CASSRGQVDQPQHF

SEQ ID NO: 388167 - protein, 12 aa, Homo sapiens
  CDR3 for alpha chain variable domain of TCR clone 194084 (TRAV12-3, TRAJ17)
CAMTLTGNKLTF

SEQ ID NO: 388168 - protein, 12 aa, Homo sapiens
  CDR3 for beta chain variable domain of TCR clone 194084 (TRBV7-3, TRBJ2-7)
RASKLRGYEQYF

SEQ ID NO: 388169 - protein, 16 aa, Homo sapiens
  CDR3 for alpha chain variable domain of TCR clone 194085 (TRAV30, TRAJ24)
CGTEIVDADSWGKFQF

SEQ ID NO: 388170 - protein, 13 aa, Homo sapiens
  CDR3 for beta chain variable domain of TCR clone 194085 (TRBV7-2, TRBJ1-5)
CASSFARNQPQHF

SEQ ID NO: 388171 - protein, 13 aa, Homo sapiens
  CDR3 for alpha chain variable domain of TCR clone 194086 (TRAV26-2, TRAJ43)
CILRAANNNDMRF

SEQ ID NO: 388172 - protein, 14 aa, Homo sapiens
  CDR3 for beta chain variable domain of TCR clone 194086 (TRBV19, TRBJ2-1)
CASPTFVLSGEQFF

SEQ ID NO: 388173 - protein, 13 aa, Homo sapiens
  CDR3 for alpha chain variable domain of TCR clone 194087 (TRAV12-1, TRAJ39)
CVVNYNAGNILTF

SEQ ID NO: 388174 - protein, 14 aa, Homo sapiens
  CDR3 for beta chain variable domain of TCR clone 194087 (TRBV27, TRBJ2-3)
CASSPLGTTDTQYF

SEQ ID NO: 388175 - protein, 17 aa, Homo sapiens
  CDR3 for alpha chain variable domain of TCR clone 194088 (TRAV3, TRAJ42)
CAVRDRDYGGSQGNLIF

SEQ ID NO: 388176 - protein, 15 aa, Homo sapiens
  CDR3 for beta chain variable domain of TCR clone 194088 (TRBV6-5, TRBJ2-1)
CASSYDAGAGSEQFF

SEQ ID NO: 388177 - protein, 14 aa, Homo sapiens
  CDR3 for alpha chain variable domain of TCR clone 194089 (TRAV12-2, TRAJ29)
CAVNWETGNTPLVF

SEQ ID NO: 388178 - protein, 12 aa, Homo sapiens
  CDR3 for beta chain variable domain of TCR clone 194089 (TRBV11-2, TRBJ2-2)
CASSLGGGELFF

SEQ ID NO: 388179 - protein, 15 aa, Homo sapiens
  CDR3 for alpha chain variable domain of TCR clone 194090 (TRAV21, TRAJ4)
CCEAPFSGGYNKLIF

SEQ ID NO: 388180 - protein, 15 aa, Homo sapiens
  CDR3 for beta chain variable domain of TCR clone 194090 (TRBV7-2, TRBJ2-1)
CASSSGLAGGNEQFF

SEQ ID NO: 388181 - protein, 17 aa, Homo sapiens
  CDR3 for alpha chain variable domain of TCR clone 194091 (TRAV4, TRAJ18)
CLVGERSVGSTLGRRYF

SEQ ID NO: 388182 - protein, 16 aa, Homo sapiens
  CDR3 for beta chain variable domain of TCR clone 194091 (TRBV15, TRBJ1-4)
CATSRDSPPGREKLFF

SEQ ID NO: 388183 - protein, 14 aa, Homo sapiens
  CDR3 for alpha chain variable domain of TCR clone 194092 (TRAV13-1, TRAJ48)
CAASRSFGNEKLTF

SEQ ID NO: 388184 - protein, 16 aa, Homo sapiens
  CDR3 for beta chain variable domain of TCR clone 194092 (TRBV12-5, TRBJ2-5)
CASGPRTSGNQETQYF

SEQ ID NO: 388185 - protein, 15 aa, Homo sapiens
  CDR3 for alpha chain variable domain of TCR clone 194093 (TRAV3, TRAJ22)
CAVRDRGGSARHLTF

SEQ ID NO: 388186 - protein, 13 aa, Homo sapiens
  CDR3 for beta chain variable domain of TCR clone 194093 (TRBV2, TRBJ1-5)
CATAGPGNQPQHF

SEQ ID NO: 388187 - protein, 12 aa, Homo sapiens
  CDR3 for alpha chain variable domain of TCR clone 194094 (TRAV9-2, TRAJ49)
CALLGFGNQFYF

SEQ ID NO: 388188 - protein, 12 aa, Homo sapiens
  CDR3 for beta chain variable domain of TCR clone 194094 (TRBV5-1, TRBJ2-7)
CASSFRGYEQYF

SEQ ID NO: 388189 - protein, 12 aa, Homo sapiens
  CDR3 for alpha chain variable domain of TCR clone 194095 (TRAV29/DV5, TRAJ49)
CAATDTGNPVYF

SEQ ID NO: 388190 - protein, 12 aa, Homo sapiens
  CDR3 for beta chain variable domain of TCR clone 194095 (TRBV12-4, TRBJ2-7)
CASSLGGYEQYF

SEQ ID NO: 388191 - protein, 15 aa, Homo sapiens
  CDR3 for alpha chain variable domain of TCR clone 194096 (TRAV27, TRAJ38)
CAARRNAGNNRKLIW

SEQ ID NO: 388192 - protein, 16 aa, Homo sapiens
  CDR3 for beta chain variable domain of TCR clone 194096 (TRBV5-1, TRBJ2-2)
CASSSYREGDTGELFF

SEQ ID NO: 388193 - protein, 14 aa, Homo sapiens
  CDR3 for alpha chain variable domain of TCR clone 194097 (TRAV13-1, TRAJ13)
CAASRVGSYQKVTF

SEQ ID NO: 388194 - protein, 17 aa, Homo sapiens
  CDR3 for beta chain variable domain of TCR clone 194097 (TRBV15, TRBJ1-5)
CATSRAPPGTRNQPQHF

SEQ ID NO: 388195 - protein, 16 aa, Homo sapiens
  CDR3 for alpha chain variable domain of TCR clone 194098 (TRAV30, TRAJ24)
CGTEVVDADSWGKFQF

SEQ ID NO: 388196 - protein, 14 aa, Homo sapiens
  CDR3 for beta chain variable domain of TCR clone 194098 (TRBV12-5, TRBJ2-5)
CASGSRIHQETQYF

SEQ ID NO: 388197 - protein, 14 aa, Homo sapiens
  CDR3 for alpha chain variable domain of TCR clone 194099 (TRAV1-2, TRAJ16)
CAVNRFSDGQKLLF

SEQ ID NO: 388198 - protein, 14 aa, Homo sapiens
  CDR3 for beta chain variable domain of TCR clone 194099 (TRBV19, TRBJ1-1)
CTTTSGTRGTEAFF

SEQ ID NO: 388199 - protein, 13 aa, Homo sapiens
  CDR3 for alpha chain variable domain of TCR clone 194100 (TRAV1-1, TRAJ9)
CAAKNTGGFKTIF

SEQ ID NO: 388200 - protein, 15 aa, Homo sapiens
  CDR3 for beta chain variable domain of TCR clone 194100 (TRBV3-1, TRBJ2-7)
CASSQVAGAQYEQYF

SEQ ID NO: 388201 - protein, 13 aa, Homo sapiens
  CDR3 for alpha chain variable domain of TCR clone 194101 (TRAV12-1, TRAJ49)
CVVTPFTGNQFYF

SEQ ID NO: 388202 - protein, 15 aa, Homo sapiens
  CDR3 for beta chain variable domain of TCR clone 194101 (TRBV20-1, TRBJ1-1)
CSARGGRTLKISLDK

SEQ ID NO: 388203 - protein, 13 aa, Homo sapiens
  CDR3 for alpha chain variable domain of TCR clone 194102 (TRAV13-1, TRAJ21)
CAASIYNFNKFYF

SEQ ID NO: 388204 - protein, 12 aa, Homo sapiens
  CDR3 for beta chain variable domain of TCR clone 194102 (TRBV14, TRBJ2-7)
CASSLYKDEQYF

SEQ ID NO: 388205 - protein, 17 aa, Homo sapiens
  CDR3 for alpha chain variable domain of TCR clone 194103 (TRAV8-3, TRAJ32)
CAVGPLDYGGATNKLIF

SEQ ID NO: 388206 - protein, 15 aa, Homo sapiens
  CDR3 for beta chain variable domain of TCR clone 194103 (TRBV18, TRBJ1-2)
CASSPGNGLGYGYTF

SEQ ID NO: 388207 - protein, 14 aa, Homo sapiens
  CDR3 for alpha chain variable domain of TCR clone 194104 (TRAV13-1, TRAJ3)
CAASKSSSASKIIF

SEQ ID NO: 388208 - protein, 13 aa, Homo sapiens
  CDR3 for beta chain variable domain of TCR clone 194104 (TRBV4-1, TRBJ1-1)
CASSRKMNTEAFF

SEQ ID NO: 388209 - protein, 15 aa, Homo sapiens
  CDR3 for alpha chain variable domain of TCR clone 194105 (TRAV38-1, TRAJ37)
CAFIFGSGNTGKLIF

SEQ ID NO: 388210 - protein, 16 aa, Homo sapiens
  CDR3 for beta chain variable domain of TCR clone 194105 (TRBV7-3, TRBJ2-3)
CASSLSGYRPEDTQYF

SEQ ID NO: 388211 - protein, 14 aa, Homo sapiens
  CDR3 for alpha chain variable domain of TCR clone 194106 (TRAV38-1, TRAJ45)
CASHSGGGADGLTF

SEQ ID NO: 388212 - protein, 13 aa, Homo sapiens
  CDR3 for beta chain variable domain of TCR clone 194106 (TRBV7-9, TRBJ2-2)
CASSSAGTGELLF

SEQ ID NO: 388213 - protein, 12 aa, Homo sapiens
  CDR3 for alpha chain variable domain of TCR clone 194107 (TRAV17, TRAJ12)
CATLRSSYKWIF

SEQ ID NO: 388214 - protein, 16 aa, Homo sapiens
  CDR3 for beta chain variable domain of TCR clone 194107 (TRBV28, TRBJ2-7)
CASSLFFETGGPEQYF

SEQ ID NO: 388215 - protein, 14 aa, Homo sapiens
  CDR3 for alpha chain variable domain of TCR clone 194108 (TRAV26-1, TRAJ39)
CIVRGSRAGNMLTF

SEQ ID NO: 388216 - protein, 13 aa, Homo sapiens
  CDR3 for beta chain variable domain of TCR clone 194108 (TRBV7-9, TRBJ2-3)
CASSPGSTDTQYF

SEQ ID NO: 388217 - protein, 16 aa, Homo sapiens
  CDR3 for alpha chain variable domain of TCR clone 194109 (TRAV20, TRAJ38)
CAVQASNAGNNRKPIG

SEQ ID NO: 388218 - protein, 16 aa, Homo sapiens
  CDR3 for beta chain variable domain of TCR clone 194109 (TRBV7-8, TRBJ2-6)
CASRVGDSSGANVLTF

SEQ ID NO: 388219 - protein, 14 aa, Homo sapiens
  CDR3 for alpha chain variable domain of TCR clone 194110 (TRAV12-2, TRAJ17)
CAALFKAAGNKLTF

SEQ ID NO: 388220 - protein, 16 aa, Homo sapiens
  CDR3 for beta chain variable domain of TCR clone 194110 (TRBV20-1, TRBJ2-2)
CSASASGITGAGELFF

SEQ ID NO: 388221 - protein, 11 aa, Homo sapiens
  CDR3 for alpha chain variable domain of TCR clone 194111 (TRAV1-1, TRAJ23)
CAVRQGGKLIF

SEQ ID NO: 388222 - protein, 14 aa, Homo sapiens
  CDR3 for beta chain variable domain of TCR clone 194111 (TRBV2, TRBJ1-2)
CASSELQVNYGYTF

SEQ ID NO: 388223 - protein, 13 aa, Homo sapiens
  CDR3 for alpha chain variable domain of TCR clone 194112 (TRAV27, TRAJ49)
CAPRPYTGNQFYF

SEQ ID NO: 388224 - protein, 14 aa, Homo sapiens
  CDR3 for beta chain variable domain of TCR clone 194112 (TRBV7-6, TRBJ2-3)
CASSLGTVTDTQYF

SEQ ID NO: 388225 - protein, 13 aa, Homo sapiens
  CDR3 for alpha chain variable domain of TCR clone 194113 (TRAV13-1, TRAJ9)
CAARGTGGFKTIF

SEQ ID NO: 388226 - protein, 17 aa, Homo sapiens
  CDR3 for beta chain variable domain of TCR clone 194113 (TRBV13, TRBJ2-3)
CSSSLSRVVGGRNTQYF

SEQ ID NO: 388227 - protein, 18 aa, Homo sapiens
  CDR3 for alpha chain variable domain of TCR clone 194114 (TRAV3, TRAJ13)
CAVRDRPFRPTSYPKVTF

SEQ ID NO: 388228 - protein, 15 aa, Homo sapiens
  CDR3 for beta chain variable domain of TCR clone 194114 (TRBV20-1, TRBJ2-7)
CSARDRVSGMDEQYF

SEQ ID NO: 388229 - protein, 13 aa, Homo sapiens
  CDR3 for alpha chain variable domain of TCR clone 194115 (TRAV12-3, TRAJ33)
CAMSLSSNYQLIW

SEQ ID NO: 388230 - protein, 13 aa, Homo sapiens
  CDR3 for beta chain variable domain of TCR clone 194115 (TRBV7-2, TRBJ2-2)
CASSLAVTGELFF

SEQ ID NO: 388231 - protein, 12 aa, Homo sapiens
  CDR3 for alpha chain variable domain of TCR clone 194116 (TRAV12-1, TRAJ40)
CVVPSGTYKYIF

SEQ ID NO: 388232 - protein, 11 aa, Homo sapiens
  CDR3 for beta chain variable domain of TCR clone 194116 (TRBV19, TRBJ1-1)
CASSIGSEAFF

SEQ ID NO: 388233 - protein, 14 aa, Homo sapiens
  CDR3 for alpha chain variable domain of TCR clone 194117 (TRAV12-2, TRAJ44)
CAVNPAGTASKLTF

SEQ ID NO: 388234 - protein, 13 aa, Homo sapiens
  CDR3 for beta chain variable domain of TCR clone 194117 (TRBV10-3, TRBJ1-2)
CAISERDSYGYTF

SEQ ID NO: 388235 - protein, 12 aa, Homo sapiens
  CDR3 for alpha chain variable domain of TCR clone 194118 (TRAV13-1, TRAJ27)
CAAHTNAGKSTF

SEQ ID NO: 388236 - protein, 14 aa, Homo sapiens
  CDR3 for beta chain variable domain of TCR clone 194118 (TRBV19, TRBJ2-2)
CASSGQGIAGERFC

SEQ ID NO: 388237 - protein, 14 aa, Homo sapiens
  CDR3 for alpha chain variable domain of TCR clone 194119 (TRAV13-2, TRAJ43)
YAEIPTYNNNDMRF

SEQ ID NO: 388238 - protein, 15 aa, Homo sapiens
  CDR3 for beta chain variable domain of TCR clone 194119 (TRBV7-9, TRBJ2-2)
CASGPLDTFPGELFF

SEQ ID NO: 388239 - protein, 14 aa, Homo sapiens
  CDR3 for alpha chain variable domain of TCR clone 194120 (TRAV1-2, TRAJ16)
CAVNRFSDGQKLLF

SEQ ID NO: 388240 - protein, 15 aa, Homo sapiens
  CDR3 for beta chain variable domain of TCR clone 194120 (TRBV4-3, TRBJ2-7)
CASSQDLGSSYEQYF

SEQ ID NO: 388241 - protein, 15 aa, Homo sapiens
  CDR3 for alpha chain variable domain of TCR clone 194121 (TRAV23/DV6, TRAJ30)
CAASSQESRDDKIIF

SEQ ID NO: 388242 - protein, 20 aa, Homo sapiens
  CDR3 for beta chain variable domain of TCR clone 194121 (TRBV7-8, TRBJ2-2)
CASSHLFPGPTIHITGELFF

SEQ ID NO: 388243 - protein, 16 aa, Homo sapiens
  CDR3 for alpha chain variable domain of TCR clone 194122 (TRAV30, TRAJ24)
CGTEIVDADSWGKFQF

SEQ ID NO: 388244 - protein, 17 aa, Homo sapiens
  CDR3 for beta chain variable domain of TCR clone 194122 (TRBV29-1, TRBJ2-3)
CSVNAFRASGGVDTQYF

SEQ ID NO: 388245 - protein, 23 aa, Homo sapiens
  CDR3 for alpha chain variable domain of TCR clone 194123 (TRAV1-1, TRAJ11)
LLQELQMKDSASYFCAGYSTLTF

SEQ ID NO: 388246 - protein, 15 aa, Homo sapiens
  CDR3 for beta chain variable domain of TCR clone 194123 (TRBV6-5, TRBJ2-1)
CASRGDVASYNEQFF

SEQ ID NO: 388247 - protein, 15 aa, Homo sapiens
  CDR3 for alpha chain variable domain of TCR clone 194124 (TRAV8-1, TRAJ42)
CAVRSYGGSQGNLIF

SEQ ID NO: 388248 - protein, 14 aa, Homo sapiens
  CDR3 for beta chain variable domain of TCR clone 194124 (TRBV7-8, TRBJ2-3)
CASSLEAGTDTQYF

SEQ ID NO: 388249 - protein, 15 aa, Homo sapiens
  CDR3 for alpha chain variable domain of TCR clone 194125 (TRAV3, TRAJ20)
CAVRDSRSNDYKLSF

SEQ ID NO: 388250 - protein, 13 aa, Homo sapiens
  CDR3 for beta chain variable domain of TCR clone 194125 (TRBV20-1, TRBJ2-7)
CSARPSTNYEQYF

SEQ ID NO: 388251 - protein, 14 aa, Homo sapiens
  CDR3 for alpha chain variable domain of TCR clone 194126 (TRAV1-2, TRAJ16)
CAVKRFSDGQKPLF

SEQ ID NO: 388252 - protein, 16 aa, Homo sapiens
  CDR3 for beta chain variable domain of TCR clone 194126 (TRBV12-4, TRBJ1-5)
CASSRPVGGSNQPQHF

SEQ ID NO: 388253 - protein, 14 aa, Homo sapiens
  CDR3 for alpha chain variable domain of TCR clone 194127 (TRAV26-1, TRAJ34)
CIVRVAYNTDKLIF

SEQ ID NO: 388254 - protein, 12 aa, Homo sapiens
  CDR3 for beta chain variable domain of TCR clone 194127 (TRBV7-9, TRBJ1-1)
CASSLVRGEAFF

SEQ ID NO: 388255 - protein, 15 aa, Homo sapiens
  CDR3 for alpha chain variable domain of TCR clone 194128 (TRAV3, TRAJ6)
CAVRDFVGGSYIPTF

SEQ ID NO: 388256 - protein, 16 aa, Homo sapiens
  CDR3 for beta chain variable domain of TCR clone 194128 (TRBV7-9, TRBJ2-1)
CASSPVLASGTVEQFF

SEQ ID NO: 388257 - protein, 14 aa, Homo sapiens
  CDR3 for alpha chain variable domain of TCR clone 194129 (TRAV8-3, TRAJ4)
CAVGASGGYNKLIF

SEQ ID NO: 388258 - protein, 14 aa, Homo sapiens
  CDR3 for beta chain variable domain of TCR clone 194129 (TRBV18, TRBJ2-5)
CASSLGVSQETQYF

SEQ ID NO: 388259 - protein, 15 aa, Homo sapiens
  CDR3 for alpha chain variable domain of TCR clone 194130 (TRAV26-1, TRAJ48)
CIVRVGDFGNEKLTF

SEQ ID NO: 388260 - protein, 16 aa, Homo sapiens
  CDR3 for beta chain variable domain of TCR clone 194130 (TRBV4-1, TRBJ2-3)
CASSQRAGGLTDTQYV

SEQ ID NO: 388261 - protein, 15 aa, Homo sapiens
  CDR3 for alpha chain variable domain of TCR clone 194131 (TRAV8-4, TRAJ48)
CAVSAAYFGNEKLTF

SEQ ID NO: 388262 - protein, 12 aa, Homo sapiens
  CDR3 for beta chain variable domain of TCR clone 194131 (TRBV3-1, TRBJ2-5)
CASSLRGETQYF

SEQ ID NO: 388263 - protein, 14 aa, Homo sapiens
  CDR3 for alpha chain variable domain of TCR clone 194132 (TRAV8-4, TRAJ13)
CAVTLSGGYQKVTF

SEQ ID NO: 388264 - protein, 13 aa, Homo sapiens
  CDR3 for beta chain variable domain of TCR clone 194132 (TRBV7-2, TRBJ1-2)
CQSQTGSTYGYTF

SEQ ID NO: 388265 - protein, 16 aa, Homo sapiens
  CDR3 for alpha chain variable domain of TCR clone 194133 (TRAV3, TRAJ37)
CAVRGKGSGNTGKLIF

SEQ ID NO: 388266 - protein, 15 aa, Homo sapiens
  CDR3 for beta chain variable domain of TCR clone 194133 (TRBV5-1, TRBJ2-7)
CASSLDGGPAREQYF

SEQ ID NO: 388267 - protein, 13 aa, Homo sapiens
  CDR3 for alpha chain variable domain of TCR clone 194134 (TRAV2, TRAJ40)
CAVVTSGTYKYIF

SEQ ID NO: 388268 - protein, 14 aa, Homo sapiens
  CDR3 for beta chain variable domain of TCR clone 194134 (TRBV11-3, TRBJ2-3)
CRPEGRAGRGYEVF

SEQ ID NO: 388269 - protein, 14 aa, Homo sapiens
  CDR3 for alpha chain variable domain of TCR clone 194135 (TRAV1-2, TRAJ16)
FAVNRFSDGQRLLF

SEQ ID NO: 388270 - protein, 15 aa, Homo sapiens
  CDR3 for beta chain variable domain of TCR clone 194135 (TRBV9, TRBJ1-6)
CASSVAGTGDSPLHF

SEQ ID NO: 388271 - protein, 13 aa, Homo sapiens
  CDR3 for alpha chain variable domain of TCR clone 194136 (TRAV1-2, TRAJ9)
CAALNTGGFKTIF

SEQ ID NO: 388272 - protein, 13 aa, Homo sapiens
  CDR3 for beta chain variable domain of TCR clone 194136 (TRBV7-9, TRBJ1-2)
CASSLKRNYGYTF

SEQ ID NO: 388273 - protein, 12 aa, Homo sapiens
  CDR3 for alpha chain variable domain of TCR clone 194137 (TRAV12-3, TRAJ17)
CAMTLTGNKLTF

SEQ ID NO: 388274 - protein, 16 aa, Homo sapiens
  CDR3 for beta chain variable domain of TCR clone 194137 (TRBV6-5, TRBJ2-5)
CASSQREGPDRKTQYF

SEQ ID NO: 388275 - protein, 14 aa, Homo sapiens
  CDR3 for alpha chain variable domain of TCR clone 194138 (TRAV8-4, TRAJ15)
CAVTIREAGTPLIL

SEQ ID NO: 388276 - protein, 13 aa, Homo sapiens
  CDR3 for beta chain variable domain of TCR clone 194138 (TRBV10-3, TRBJ2-7)
CAISEKGGYEQYF

SEQ ID NO: 388277 - protein, 16 aa, Homo sapiens
  CDR3 for alpha chain variable domain of TCR clone 194139 (TRAV3, TRAJ42)
CAVRDIEGGSQGNLIF

SEQ ID NO: 388278 - protein, 14 aa, Homo sapiens
  CDR3 for beta chain variable domain of TCR clone 194139 (TRBV6-1, TRBJ1-3)
CASVQGGGGNTIYF

SEQ ID NO: 388279 - protein, 16 aa, Homo sapiens
  CDR3 for alpha chain variable domain of TCR clone 194140 (TRAV16, TRAJ42)
CARKMNYGGSQGNLIF

SEQ ID NO: 388280 - protein, 15 aa, Homo sapiens
  CDR3 for beta chain variable domain of TCR clone 194140 (TRBV20-1, TRBJ2-7)
GSAREGRDSLYEQYF

SEQ ID NO: 388281 - protein, 13 aa, Homo sapiens
  CDR3 for alpha chain variable domain of TCR clone 194141 (TRAV29/DV5, TRAJ31)
CAASRNNNARLMF

SEQ ID NO: 388282 - protein, 12 aa, Homo sapiens
  CDR3 for beta chain variable domain of TCR clone 194141 (TRBV14, TRBJ2-5)
CASSQLKETRYV

SEQ ID NO: 388283 - protein, 15 aa, Homo sapiens
  CDR3 for alpha chain variable domain of TCR clone 194142 (TRAV17, TRAJ35)
CATAFVIGFGNVLHC

SEQ ID NO: 388284 - protein, 16 aa, Homo sapiens
  CDR3 for beta chain variable domain of TCR clone 194142 (TRBV7-3, TRBJ2-2)
CASSLKRGTLSGELFF

SEQ ID NO: 388285 - protein, 16 aa, Homo sapiens
  CDR3 for alpha chain variable domain of TCR clone 194143 (TRAV30, TRAJ24)
CGTEIVDADSWGKFQF

SEQ ID NO: 388286 - protein, 13 aa, Homo sapiens
  CDR3 for beta chain variable domain of TCR clone 194143 (TRBV20-1, TRBJ1-1)
CSAPAGGHTEAFF

SEQ ID NO: 388287 - protein, 15 aa, Homo sapiens
  CDR3 for alpha chain variable domain of TCR clone 194144 (TRAV3, TRAJ22)
CAVRDRGGSARQMTF

SEQ ID NO: 388288 - protein, 13 aa, Homo sapiens
  CDR3 for beta chain variable domain of TCR clone 194144 (TRBV10-3, TRBJ2-7)
CASKLAVNYEQYF

SEQ ID NO: 388289 - protein, 15 aa, Homo sapiens
  CDR3 for alpha chain variable domain of TCR clone 194145 (TRAV38-2/DV8, TRAJ45)
GAYWDSGGGADGLTF

SEQ ID NO: 388290 - protein, 14 aa, Homo sapiens
  CDR3 for beta chain variable domain of TCR clone 194145 (TRBV7-2, TRBJ2-7)
CASRSQGAAYEQYF

SEQ ID NO: 388291 - protein, 10 aa, Homo sapiens
  CDR3 for alpha chain variable domain of TCR clone 194146 (TRAV12-3, TRAJ49)
CAMNDDQFYF

SEQ ID NO: 388292 - protein, 16 aa, Homo sapiens
  CDR3 for beta chain variable domain of TCR clone 194146 (TRBV7-2, TRBJ2-1)
CASTLDSGGSRNEQFF

SEQ ID NO: 388293 - protein, 15 aa, Homo sapiens
  CDR3 for alpha chain variable domain of TCR clone 194147 (TRAV26-1, TRAJ37)
CIVENGSGNTGELIF

SEQ ID NO: 388294 - protein, 16 aa, Homo sapiens
  CDR3 for beta chain variable domain of TCR clone 194147 (TRBV25-1, TRBJ1-1)
CASSGDRDRGRIEAFF

SEQ ID NO: 388295 - protein, 12 aa, Homo sapiens
  CDR3 for alpha chain variable domain of TCR clone 194148 (TRAV8-3, TRAJ43)
CAVGAGNNDMRF

SEQ ID NO: 388296 - protein, 17 aa, Homo sapiens
  CDR3 for beta chain variable domain of TCR clone 194148 (TRBV20-1, TRBJ2-2)
CSASGSGQGGLTGELFF

SEQ ID NO: 388297 - protein, 14 aa, Homo sapiens
  CDR3 for alpha chain variable domain of TCR clone 194149 (TRAV1-2, TRAJ16)
CAVNRFSDGQKLLF

SEQ ID NO: 388298 - protein, 19 aa, Homo sapiens
  CDR3 for beta chain variable domain of TCR clone 194149 (TRBV12-4, TRBJ1-5)
CTSVPAADRSGGPNQPQHF

SEQ ID NO: 388299 - protein, 16 aa, Homo sapiens
  CDR3 for alpha chain variable domain of TCR clone 194150 (TRAV38-1, TRAJ56)
CAFMKRQTGANSKLTF

SEQ ID NO: 388300 - protein, 12 aa, Homo sapiens
  CDR3 for beta chain variable domain of TCR clone 194150 (TRBV7-8, TRBJ2-7)
CASSLGDREQYF

SEQ ID NO: 388301 - protein, 14 aa, Homo sapiens
  CDR3 for alpha chain variable domain of TCR clone 194151 (TRAV20, TRAJ29)
CAVQAWVGNTPLVF

SEQ ID NO: 388302 - protein, 15 aa, Homo sapiens
  CDR3 for beta chain variable domain of TCR clone 194151 (TRBV29-1, TRBJ2-7)
CSVVFFDRGSYEQYF

SEQ ID NO: 388303 - protein, 12 aa, Homo sapiens
  CDR3 for alpha chain variable domain of TCR clone 194152 (TRAV12-2, TRAJ9)
CAVYNGGFKTIF

SEQ ID NO: 388304 - protein, 14 aa, Homo sapiens
  CDR3 for beta chain variable domain of TCR clone 194152 (TRBV6-1, TRBJ1-5)
CASSETGMEQHQHF

SEQ ID NO: 388305 - protein, 18 aa, Homo sapiens
  CDR3 for alpha chain variable domain of TCR clone 194153 (TRAV23/DV6, TRAJ21)
CAASSGGGPTSTNFTLDL

SEQ ID NO: 388306 - protein, 11 aa, Homo sapiens
  CDR3 for beta chain variable domain of TCR clone 194153 (TRBV7-8, TRBJ2-7)
WASSLSLEQYF

SEQ ID NO: 388307 - protein, 16 aa, Homo sapiens
  CDR3 for alpha chain variable domain of TCR clone 194154 (TRAV12-3, TRAJ53)
CAMSPGSGGGNYKLTF

SEQ ID NO: 388308 - protein, 13 aa, Homo sapiens
  CDR3 for beta chain variable domain of TCR clone 194154 (TRBV7-3, TRBJ2-1)
CASSPVAYNEQFF

SEQ ID NO: 388309 - protein, 14 aa, Homo sapiens
  CDR3 for alpha chain variable domain of TCR clone 194155 (TRAV12-3, TRAJ10)
SHLPLTGGGNKLTF

SEQ ID NO: 388310 - protein, 15 aa, Homo sapiens
  CDR3 for beta chain variable domain of TCR clone 194155 (TRBV12-4, TRBJ2-5)
CACSPPTGLQETQYF

SEQ ID NO: 388311 - protein, 12 aa, Homo sapiens
  CDR3 for alpha chain variable domain of TCR clone 194156 (TRAV30, TRAJ43)
CGTAERGNDMRF

SEQ ID NO: 388312 - protein, 13 aa, Homo sapiens
  CDR3 for beta chain variable domain of TCR clone 194156 (TRBV7-9, TRBJ2-3)
CASSPGSTDTQYF

SEQ ID NO: 388313 - protein, 14 aa, Homo sapiens
  CDR3 for alpha chain variable domain of TCR clone 194157 (TRAV17, TRAJ54)
CATDANHGAHKLVF

SEQ ID NO: 388314 - protein, 12 aa, Homo sapiens
  CDR3 for beta chain variable domain of TCR clone 194157 (TRBV7-9, TRBJ2-7)
CASSIKREEQYF

SEQ ID NO: 388315 - protein, 11 aa, Homo sapiens
  CDR3 for alpha chain variable domain of TCR clone 194158 (TRAV27, TRAJ57)
CAGGRRADLKS

SEQ ID NO: 388316 - protein, 11 aa, Homo sapiens
  CDR3 for beta chain variable domain of TCR clone 194158 (TRBV11-2, TRBJ1-1)
CASSINTEAFF

SEQ ID NO: 388317 - protein, 12 aa, Homo sapiens
  CDR3 for alpha chain variable domain of TCR clone 194159 (TRAV12-3, TRAJ20)
CAMVRGDYKLSF

SEQ ID NO: 388318 - protein, 13 aa, Homo sapiens
  CDR3 for beta chain variable domain of TCR clone 194159 (TRBV12-5, TRBJ2-3)
CASGDRQSDMQYF

SEQ ID NO: 388319 - protein, 15 aa, Homo sapiens
  CDR3 for alpha chain variable domain of TCR clone 194160 (TRAV8-4, TRAJ11)
CAVGRALSGYSTLTF

SEQ ID NO: 388320 - protein, 13 aa, Homo sapiens
  CDR3 for beta chain variable domain of TCR clone 194160 (TRBV10-3, TRBJ2-7)
CASKLAVNYEQYF

SEQ ID NO: 388321 - protein, 13 aa, Homo sapiens
  CDR3 for alpha chain variable domain of TCR clone 194161 (TRAV8-3, TRAJ28)
CAVGAVGSYQLTL

SEQ ID NO: 388322 - protein, 15 aa, Homo sapiens
  CDR3 for beta chain variable domain of TCR clone 194161 (TRBV6-1, TRBJ2-3)
CASSERGGITDTQYF

SEQ ID NO: 388323 - protein, 15 aa, Homo sapiens
  CDR3 for alpha chain variable domain of TCR clone 194162 (TRAV26-1, TRAJ44)
CIVRIGTGTSSKLTF

SEQ ID NO: 388324 - protein, 15 aa, Homo sapiens
  CDR3 for beta chain variable domain of TCR clone 194162 (TRBV7-6, TRBJ2-1)
CASSSLAGEGNEQFF

SEQ ID NO: 388325 - protein, 14 aa, Homo sapiens
  CDR3 for alpha chain variable domain of TCR clone 194163 (TRAV8-6, TRAJ54)
CAVRKFQGAQKLVF

SEQ ID NO: 388326 - protein, 13 aa, Homo sapiens
  CDR3 for beta chain variable domain of TCR clone 194163 (TRBV7-9, TRBJ1-2)
CASSLKQNYGYTF

SEQ ID NO: 388327 - protein, 15 aa, Homo sapiens
  CDR3 for alpha chain variable domain of TCR clone 194164 (TRAV29/DV5, TRAJ47)
FAARPTMEYGNKLVF

SEQ ID NO: 388328 - protein, 13 aa, Homo sapiens
  CDR3 for beta chain variable domain of TCR clone 194164 (TRBV20-1, TRBJ1-1)
CSARAGGNTEAFF

SEQ ID NO: 388329 - protein, 13 aa, Homo sapiens
  CDR3 for alpha chain variable domain of TCR clone 194165 (TRAV14/DV4, TRAJ20)
CAMRESNDYKLGF

SEQ ID NO: 388330 - protein, 15 aa, Homo sapiens
  CDR3 for beta chain variable domain of TCR clone 194165 (TRBV7-9, TRBJ1-1)
CASSRPGTANTEAFF

SEQ ID NO: 388331 - protein, 16 aa, Homo sapiens
  CDR3 for alpha chain variable domain of TCR clone 194166 (TRAV3, TRAJ10)
CAVRDMRAGGGNKLTL

SEQ ID NO: 388332 - protein, 15 aa, Homo sapiens
  CDR3 for beta chain variable domain of TCR clone 194166 (TRBV11-3, TRBJ2-7)
CASSPGPASSYEQYF

SEQ ID NO: 388333 - protein, 12 aa, Homo sapiens
  CDR3 for alpha chain variable domain of TCR clone 194167 (TRAV2, TRAJ33)
CAVPASNYQLIW

SEQ ID NO: 388334 - protein, 17 aa, Homo sapiens
  CDR3 for beta chain variable domain of TCR clone 194167 (TRBV6-5, TRBJ2-3)
CASSYGTSLYKSDTQYF

SEQ ID NO: 388335 - protein, 15 aa, Homo sapiens
  CDR3 for alpha chain variable domain of TCR clone 194168 (TRAV21, TRAJ24)
CAARSSTDSWGKLQF

SEQ ID NO: 388336 - protein, 11 aa, Homo sapiens
  CDR3 for beta chain variable domain of TCR clone 194168 (TRBV11-2, TRBJ2-2)
CASSLTGELFF

SEQ ID NO: 388337 - protein, 12 aa, Homo sapiens
  CDR3 for alpha chain variable domain of TCR clone 194169 (TRAV27, TRAJ36)
ASTPAGSNNLFF

SEQ ID NO: 388338 - protein, 13 aa, Homo sapiens
  CDR3 for beta chain variable domain of TCR clone 194169 (TRBV7-9, TRBJ2-3)
CASSPGSTDTQYF

SEQ ID NO: 388339 - protein, 16 aa, Homo sapiens
  CDR3 for alpha chain variable domain of TCR clone 194170 (TRAV12-1, TRAJ53)
CVVTSVAGGSNYKLTF

SEQ ID NO: 388340 - protein, 20 aa, Homo sapiens
  CDR3 for beta chain variable domain of TCR clone 194170 (TRBV7-8, TRBJ2-2)
CASSHLFPGPTIHITGELFF

SEQ ID NO: 388341 - protein, 11 aa, Homo sapiens
  CDR3 for alpha chain variable domain of TCR clone 194171 (TRAV12-2, TRAJ33)
CAVVSNYQLIW

SEQ ID NO: 388342 - protein, 14 aa, Homo sapiens
  CDR3 for beta chain variable domain of TCR clone 194171 (TRBV6-1, TRBJ2-2)
CASVEHIESGELFF

SEQ ID NO: 388343 - protein, 16 aa, Homo sapiens
  CDR3 for alpha chain variable domain of TCR clone 194172 (TRAV8-6, TRAJ28)
CAVTSKPGAGSYQLTF

SEQ ID NO: 388344 - protein, 16 aa, Homo sapiens
  CDR3 for beta chain variable domain of TCR clone 194172 (TRBV12-4, TRBJ2-5)
CASSWRPSGDLETQYV

SEQ ID NO: 388345 - protein, 14 aa, Homo sapiens
  CDR3 for alpha chain variable domain of TCR clone 194173 (TRAV2, TRAJ37)
CAVDFTSNTGKLIF

SEQ ID NO: 388346 - protein, 12 aa, Homo sapiens
  CDR3 for beta chain variable domain of TCR clone 194173 (TRBV28, TRBJ2-6)
CAIQAGANVLTF

SEQ ID NO: 388347 - protein, 14 aa, Homo sapiens
  CDR3 for alpha chain variable domain of TCR clone 194174 (TRAV1-2, TRAJ8)
CAVREDTSFQKLVF

SEQ ID NO: 388348 - protein, 15 aa, Homo sapiens
  CDR3 for beta chain variable domain of TCR clone 194174 (TRBV6-3, TRBJ2-7)
CASSSPGTVLYEQYF

SEQ ID NO: 388349 - protein, 15 aa, Homo sapiens
  CDR3 for alpha chain variable domain of TCR clone 194175 (TRAV4, TRAJ39)
CLVVPNNNAGNMLTF

SEQ ID NO: 388350 - protein, 12 aa, Homo sapiens
  CDR3 for beta chain variable domain of TCR clone 194175 (TRBV7-8, TRBJ2-7)
CASSLGDREQYF

SEQ ID NO: 388351 - protein, 14 aa, Homo sapiens
  CDR3 for alpha chain variable domain of TCR clone 194176 (TRAV1-2, TRAJ16)
CAVSRFSDGQKLLF

SEQ ID NO: 388352 - protein, 14 aa, Homo sapiens
  CDR3 for beta chain variable domain of TCR clone 194176 (TRBV19, TRBJ2-1)
CASPTVVLSGEQFF

SEQ ID NO: 388353 - protein, 14 aa, Homo sapiens
  CDR3 for alpha chain variable domain of TCR clone 194177 (TRAV20, TRAJ56)
CAVQFGGANSKLTF

SEQ ID NO: 388354 - protein, 13 aa, Homo sapiens
  CDR3 for beta chain variable domain of TCR clone 194177 (TRBV7-2, TRBJ2-2)
CASSLAVTGELFF

SEQ ID NO: 388355 - protein, 11 aa, Homo sapiens
  CDR3 for alpha chain variable domain of TCR clone 194178 (TRAV12-3, TRAJ41)
CAMNAREALNF

SEQ ID NO: 388356 - protein, 14 aa, Homo sapiens
  CDR3 for beta chain variable domain of TCR clone 194178 (TRBV7-9, TRBJ2-1)
CASSPRDSLYEQFF

SEQ ID NO: 388357 - protein, 14 aa, Homo sapiens
  CDR3 for alpha chain variable domain of TCR clone 194179 (TRAV17, TRAJ12)
CAIPPMDSSYKLIF

SEQ ID NO: 388358 - protein, 15 aa, Homo sapiens
  CDR3 for beta chain variable domain of TCR clone 194179 (TRBV5-1, TRBJ1-1)
CASSLGEGENTEAFF

SEQ ID NO: 388359 - protein, 13 aa, Homo sapiens
  CDR3 for alpha chain variable domain of TCR clone 194180 (TRAV27, TRAJ8)
CAGGPTGFQKLVF

SEQ ID NO: 388360 - protein, 14 aa, Homo sapiens
  CDR3 for beta chain variable domain of TCR clone 194180 (TRBV7-9, TRBJ2-5)
CASSLVGGEETQYF

SEQ ID NO: 388361 - protein, 12 aa, Homo sapiens
  CDR3 for alpha chain variable domain of TCR clone 194181 (TRAV21, TRAJ31)
CVLAGNNTRLMF

SEQ ID NO: 388362 - protein, 16 aa, Homo sapiens
  CDR3 for beta chain variable domain of TCR clone 194181 (TRBV27, TRBJ2-5)
CASSFGPGGTKETQYF

SEQ ID NO: 388363 - protein, 15 aa, Homo sapiens
  CDR3 for alpha chain variable domain of TCR clone 194182 (TRAV25, TRAJ52)
CAGRPGGTNYGKLTF

SEQ ID NO: 388364 - protein, 18 aa, Homo sapiens
  CDR3 for beta chain variable domain of TCR clone 194182 (TRBV11-2, TRBJ2-3)
CSSSLGGASRGAPNTQYF

SEQ ID NO: 388365 - protein, 13 aa, Homo sapiens
  CDR3 for alpha chain variable domain of TCR clone 194183 (TRAV12-1, TRAJ39)
CGDDNNAGNMLTF

SEQ ID NO: 388366 - protein, 17 aa, Homo sapiens
  CDR3 for beta chain variable domain of TCR clone 194183 (TRBV11-2, TRBJ2-1)
CASSLYPPGVEYNEQFF

SEQ ID NO: 388367 - protein, 23 aa, Homo sapiens
  CDR3 for alpha chain variable domain of TCR clone 194184 (TRAV39, TRAJ33)
PCMTSLPPTSVPWTSSKNYQLIW

SEQ ID NO: 388368 - protein, 18 aa, Homo sapiens
  CDR3 for beta chain variable domain of TCR clone 194184 (TRBV20-1, TRBJ2-3)
CSASGLAGGPGTTDTQYF

SEQ ID NO: 388369 - protein, 13 aa, Homo sapiens
  CDR3 for alpha chain variable domain of TCR clone 194185 (TRAV25, TRAJ24)
CAGGTDSWGKFQS

SEQ ID NO: 388370 - protein, 16 aa, Homo sapiens
  CDR3 for beta chain variable domain of TCR clone 194185 (TRBV28, TRBJ2-3)
CASSLFTGVSTDTQYF

SEQ ID NO: 388371 - protein, 14 aa, Homo sapiens
  CDR3 for alpha chain variable domain of TCR clone 194186 (TRAV12-2, TRAJ13)
CAVKKTGGYQKVTF

SEQ ID NO: 388372 - protein, 13 aa, Homo sapiens
  CDR3 for beta chain variable domain of TCR clone 194186 (TRBV7-9, TRBJ1-2)
CASSLKQSYGYTF

SEQ ID NO: 388373 - protein, 16 aa, Homo sapiens
  CDR3 for alpha chain variable domain of TCR clone 194187 (TRAV30, TRAJ24)
CGTEIVDSDSWGKFQF

SEQ ID NO: 388374 - protein, 14 aa, Homo sapiens
  CDR3 for beta chain variable domain of TCR clone 194187 (TRBV7-9, TRBJ2-4)
CASSLAMGGNIQYF

SEQ ID NO: 388375 - protein, 16 aa, Homo sapiens
  CDR3 for alpha chain variable domain of TCR clone 194188 (TRAV3, TRAJ37)
CAVRGKGSGNTGKLIF

SEQ ID NO: 388376 - protein, 15 aa, Homo sapiens
  CDR3 for beta chain variable domain of TCR clone 194188 (TRBV27, TRBJ2-7)
CASSTAGTGSYEQYF

SEQ ID NO: 388377 - protein, 15 aa, Homo sapiens
  CDR3 for alpha chain variable domain of TCR clone 194189 (TRAV20, TRAJ4)
CAVEGSSGGYNKLIL

SEQ ID NO: 388378 - protein, 16 aa, Homo sapiens
  CDR3 for beta chain variable domain of TCR clone 194189 (TRBV7-8, TRBJ2-7)
CASTLGGPLASSTSGR

SEQ ID NO: 388379 - protein, 14 aa, Homo sapiens
  CDR3 for alpha chain variable domain of TCR clone 194190 (TRAV27, TRAJ23)
CAGAFDNQGGKLIF

SEQ ID NO: 388380 - protein, 15 aa, Homo sapiens
  CDR3 for beta chain variable domain of TCR clone 194190 (TRBV7-3, TRBJ2-7)
CASSLAGQGTYEQYF

SEQ ID NO: 388381 - protein, 11 aa, Homo sapiens
  CDR3 for alpha chain variable domain of TCR clone 194191 (TRAV20, TRAJ4)
SASGGYNKLIF

SEQ ID NO: 388382 - protein, 13 aa, Homo sapiens
  CDR3 for beta chain variable domain of TCR clone 194191 (TRBV9, TRBJ2-1)
CASGPSGGNEQFF

SEQ ID NO: 388383 - protein, 12 aa, Homo sapiens
  CDR3 for alpha chain variable domain of TCR clone 194192 (TRAV12-2, TRAJ31)
CAVNTPDARLMF

SEQ ID NO: 388384 - protein, 17 aa, Homo sapiens
  CDR3 for beta chain variable domain of TCR clone 194192 (TRBV20-1, TRBJ1-6)
CSARGGYTFSYNSPRHF

SEQ ID NO: 388385 - protein, 15 aa, Homo sapiens
  CDR3 for alpha chain variable domain of TCR clone 194193 (TRAV13-2, TRAJ58)
CVTAQKETSGSRLTL

SEQ ID NO: 388386 - protein, 14 aa, Homo sapiens
  CDR3 for beta chain variable domain of TCR clone 194193 (TRBV7-2, TRBJ2-3)
CASRRGLAADTQYF

SEQ ID NO: 388387 - protein, 11 aa, Homo sapiens
  CDR3 for alpha chain variable domain of TCR clone 194194 (TRAV21, TRAJ34)
CAHYNTAKLIF

SEQ ID NO: 388388 - protein, 13 aa, Homo sapiens
  CDR3 for beta chain variable domain of TCR clone 194194 (TRBV7-6, TRBJ1-2)
CASSLVADYGYTC

SEQ ID NO: 388389 - protein, 16 aa, Homo sapiens
  CDR3 for alpha chain variable domain of TCR clone 194195 (TRAV17, TRAJ28)
CASYAYSGAGSYQLTF

SEQ ID NO: 388390 - protein, 15 aa, Homo sapiens
  CDR3 for beta chain variable domain of TCR clone 194195 (TRBV4-3, TRBJ2-1)
WASSPSGGLYNEQFF

SEQ ID NO: 388391 - protein, 21 aa, Homo sapiens
  CDR3 for alpha chain variable domain of TCR clone 194196 (TRAV1-2, TRAJ37)
CLLPLCCERFHGSGNTGKLTF

SEQ ID NO: 388392 - protein, 14 aa, Homo sapiens
  CDR3 for beta chain variable domain of TCR clone 194196 (TRBV2, TRBJ2-5)
CASSEVLAQETQYF

SEQ ID NO: 388393 - protein, 13 aa, Homo sapiens
  CDR3 for alpha chain variable domain of TCR clone 194197 (TRAV1-2, TRAJ9)
CAVLNTGGFKTIF

SEQ ID NO: 388394 - protein, 18 aa, Homo sapiens
  CDR3 for beta chain variable domain of TCR clone 194197 (TRBV7-9, TRBJ2-7)
CASSLTTSGSRTWYEQYF

SEQ ID NO: 388395 - protein, 12 aa, Homo sapiens
  CDR3 for alpha chain variable domain of TCR clone 194198 (TRAV13-1, TRAJ21)
CAAKEVFNKFYF

SEQ ID NO: 388396 - protein, 13 aa, Homo sapiens
  CDR3 for beta chain variable domain of TCR clone 194198 (TRBV7-3, TRBJ1-1)
CASSQDWGAEAFF

SEQ ID NO: 388397 - protein, 20 aa, Homo sapiens
  CDR3 for alpha chain variable domain of TCR clone 194199 (TRAV38-1, TRAJ37)
CDVFLCFQGDGSSNTGKLIF

SEQ ID NO: 388398 - protein, 13 aa, Homo sapiens
  CDR3 for beta chain variable domain of TCR clone 194199 (TRBV12-4, TRBJ2-5)
CASSLFRRETQYF

SEQ ID NO: 388399 - protein, 14 aa, Homo sapiens
  CDR3 for alpha chain variable domain of TCR clone 194200 (TRAV12-1, TRAJ10)
CVAILKGGGNKLTF

SEQ ID NO: 388400 - protein, 15 aa, Homo sapiens
  CDR3 for beta chain variable domain of TCR clone 194200 (TRBV20-1, TRBJ2-7)
CSARGFRPQTYEQYF

SEQ ID NO: 388401 - protein, 16 aa, Homo sapiens
  CDR3 for alpha chain variable domain of TCR clone 194201 (TRAV35, TRAJ20)
CWADPISGFNDYKLSF

SEQ ID NO: 388402 - protein, 16 aa, Homo sapiens
  CDR3 for beta chain variable domain of TCR clone 194201 (TRBV4-3, TRBJ1-6)
CASSAQPGGEGSPLHF

SEQ ID NO: 388403 - protein, 15 aa, Homo sapiens
  CDR3 for alpha chain variable domain of TCR clone 194202 (TRAV17, TRAJ57)
CATGPSQGGSEKLVF

SEQ ID NO: 388404 - protein, 10 aa, Homo sapiens
  CDR3 for beta chain variable domain of TCR clone 194202 (TRBV2, TRBJ2-4)
CASRGSIQYF

SEQ ID NO: 388405 - protein, 14 aa, Homo sapiens
  CDR3 for alpha chain variable domain of TCR clone 194203 (TRAV13-1, TRAJ35)
CAASKGGFGNVLHC

SEQ ID NO: 388406 - protein, 13 aa, Homo sapiens
  CDR3 for beta chain variable domain of TCR clone 194203 (TRBV7-3, TRBJ1-1)
CASSQDRGAEAFF

SEQ ID NO: 388407 - protein, 15 aa, Homo sapiens
  CDR3 for alpha chain variable domain of TCR clone 194204 (TRAV8-3, TRAJ11)
CAVGLLNSGYSTLTF

SEQ ID NO: 388408 - protein, 18 aa, Homo sapiens
  CDR3 for beta chain variable domain of TCR clone 194204 (TRBV10-3, TRBJ2-3)
CAISESRVGPMRGDTQYF

SEQ ID NO: 388409 - protein, 11 aa, Homo sapiens
  CDR3 for alpha chain variable domain of TCR clone 194205 (TRAV12-3, TRAJ43)
CAMSVSNDMRF

SEQ ID NO: 388410 - protein, 17 aa, Homo sapiens
  CDR3 for beta chain variable domain of TCR clone 194205 (TRBV20-1, TRBJ2-1)
CSASSSGLAGPYNEQFF

SEQ ID NO: 388411 - protein, 14 aa, Homo sapiens
  CDR3 for alpha chain variable domain of TCR clone 194206 (TRAV13-2, TRAJ17)
CAENKEAAGNKLTF

SEQ ID NO: 388412 - protein, 13 aa, Homo sapiens
  CDR3 for beta chain variable domain of TCR clone 194206 (TRBV7-9, TRBJ2-5)
CASLPSGRETQYF

SEQ ID NO: 388413 - protein, 13 aa, Homo sapiens
  CDR3 for alpha chain variable domain of TCR clone 194207 (TRAV16, TRAJ54)
CALMVQGAQKLVF

SEQ ID NO: 388414 - protein, 12 aa, Homo sapiens
  CDR3 for beta chain variable domain of TCR clone 194207 (TRBV18, TRBJ2-7)
CASSTTMGEQYF

SEQ ID NO: 388415 - protein, 16 aa, Homo sapiens
  CDR3 for alpha chain variable domain of TCR clone 194208 (TRAV30, TRAJ24)
CGPETVDADSWGKFQF

SEQ ID NO: 388416 - protein, 15 aa, Homo sapiens
  CDR3 for beta chain variable domain of TCR clone 194208 (TRBV5-1, TRBJ1-1)
CASSSTTGTNTEAFF

SEQ ID NO: 388417 - protein, 15 aa, Homo sapiens
  CDR3 for alpha chain variable domain of TCR clone 194209 (TRAV14/DV4, TRAJ10)
CAMRELTGGGNKLTF

SEQ ID NO: 388418 - protein, 18 aa, Homo sapiens
  CDR3 for beta chain variable domain of TCR clone 194209 (TRBV7-9, TRBJ2-7)
CASSLTTSGSKTWYEQYF

SEQ ID NO: 388419 - protein, 13 aa, Homo sapiens
  CDR3 for alpha chain variable domain of TCR clone 194210 (TRAV21, TRAJ27)
CAARPGNAGKSTF

SEQ ID NO: 388420 - protein, 15 aa, Homo sapiens
  CDR3 for beta chain variable domain of TCR clone 194210 (TRBV11-3, TRBJ2-7)
CASSPGPASSYERYF

SEQ ID NO: 388421 - protein, 13 aa, Homo sapiens
  CDR3 for alpha chain variable domain of TCR clone 194211 (TRAV21, TRAJ27)
CAARPGNAGKSTF

SEQ ID NO: 388422 - protein, 14 aa, Homo sapiens
  CDR3 for beta chain variable domain of TCR clone 194211 (TRBV4-2, TRBJ2-3)
CASSQERGTDTQYF

SEQ ID NO: 388423 - protein, 10 aa, Homo sapiens
  CDR3 for alpha chain variable domain of TCR clone 194212 (TRAV23/DV6, TRAJ57)
CAASSTLSQV

SEQ ID NO: 388424 - protein, 13 aa, Homo sapiens
  CDR3 for beta chain variable domain of TCR clone 194212 (TRBV15, TRBJ1-6)
CATSGGLNSPLHF

SEQ ID NO: 388425 - protein, 15 aa, Homo sapiens
  CDR3 for alpha chain variable domain of TCR clone 194213 (TRAV27, TRAJ37)
CAGIHGSSKTGKLIF

SEQ ID NO: 388426 - protein, 13 aa, Homo sapiens
  CDR3 for beta chain variable domain of TCR clone 194213 (TRBV19, TRBJ2-1)
CASSIRSSWEQFF

SEQ ID NO: 388427 - protein, 13 aa, Homo sapiens
  CDR3 for alpha chain variable domain of TCR clone 194214 (TRAV12-2, TRAJ42)
CAVKRGSQGNHIF

SEQ ID NO: 388428 - protein, 13 aa, Homo sapiens
  CDR3 for beta chain variable domain of TCR clone 194214 (TRBV4-1, TRBJ2-1)
CASSQAGGDEQFF

SEQ ID NO: 388429 - protein, 10 aa, Homo sapiens
  CDR3 for alpha chain variable domain of TCR clone 194215 (TRAV23/DV6, TRAJ57)
CAASSTLSQG

SEQ ID NO: 388430 - protein, 13 aa, Homo sapiens
  CDR3 for beta chain variable domain of TCR clone 194215 (TRBV15, TRBJ2-7)
CATSTTGHYEQYF

SEQ ID NO: 388431 - protein, 14 aa, Homo sapiens
  CDR3 for alpha chain variable domain of TCR clone 194216 (TRAV26-1, TRAJ34)
CIVKESYNTDKLIF

SEQ ID NO: 388432 - protein, 13 aa, Homo sapiens
  CDR3 for beta chain variable domain of TCR clone 194216 (TRBV19, TRBJ2-1)
CATSRGVYNEQFF

SEQ ID NO: 388433 - protein, 15 aa, Homo sapiens
  CDR3 for alpha chain variable domain of TCR clone 194217 (TRAV8-2, TRAJ40)
CVVLGTTSGTYKYIF

SEQ ID NO: 388434 - protein, 16 aa, Homo sapiens
  CDR3 for beta chain variable domain of TCR clone 194217 (TRBV7-3, TRBJ2-1)
CASSLEGYRSYNERFF

SEQ ID NO: 388435 - protein, 13 aa, Homo sapiens
  CDR3 for alpha chain variable domain of TCR clone 194218 (TRAV17, TRAJ54)
CATDARGAQKLVF

SEQ ID NO: 388436 - protein, 16 aa, Homo sapiens
  CDR3 for beta chain variable domain of TCR clone 194218 (TRBV7-3, TRBJ2-2)
CASSLKRGTLSGELFF

SEQ ID NO: 388437 - protein, 14 aa, Homo sapiens
  CDR3 for alpha chain variable domain of TCR clone 194219 (TRAV26-1, TRAJ34)
CIVRVAYNTDKLIF

SEQ ID NO: 388438 - protein, 16 aa, Homo sapiens
  CDR3 for beta chain variable domain of TCR clone 194219 (TRBV13, TRBJ2-2)
CASSTRTGEHTGELFF

SEQ ID NO: 388439 - protein, 10 aa, Homo sapiens
  CDR3 for alpha chain variable domain of TCR clone 194220 (TRAV12-3, TRAJ49)
CAMNDDQFYF

SEQ ID NO: 388440 - protein, 14 aa, Homo sapiens
  CDR3 for beta chain variable domain of TCR clone 194220 (TRBV28, TRBJ1-2)
CASRIQGANYGYTF

SEQ ID NO: 388441 - protein, 13 aa, Homo sapiens
  CDR3 for alpha chain variable domain of TCR clone 194221 (TRAV8-3, TRAJ43)
CAVVQYNNNDMRF

SEQ ID NO: 388442 - protein, 17 aa, Homo sapiens
  CDR3 for beta chain variable domain of TCR clone 194221 (TRBV7-7, TRBJ1-1)
CASIGDRPNLGVTEAFF

SEQ ID NO: 388443 - protein, 10 aa, Homo sapiens
  CDR3 for alpha chain variable domain of TCR clone 194222 (TRAV1-2, TRAJ20)
CALNDYKLSF

SEQ ID NO: 388444 - protein, 14 aa, Homo sapiens
  CDR3 for beta chain variable domain of TCR clone 194222 (TRBV20-1, TRBJ2-5)
CSAHRQGLWETQYF

SEQ ID NO: 388445 - protein, 11 aa, Homo sapiens
  CDR3 for alpha chain variable domain of TCR clone 194223 (TRAV2, TRAJ33)
CAVESNYQLIW

SEQ ID NO: 388446 - protein, 14 aa, Homo sapiens
  CDR3 for beta chain variable domain of TCR clone 194223 (TRBV18, TRBJ2-7)
CASSPRGGSYEQYF

SEQ ID NO: 388447 - protein, 12 aa, Homo sapiens
  CDR3 for alpha chain variable domain of TCR clone 194224 (TRAV2, TRAJ36)
CDELTGANNLFF

SEQ ID NO: 388448 - protein, 18 aa, Homo sapiens
  CDR3 for beta chain variable domain of TCR clone 194224 (TRBV19, TRBJ1-1)
CASSIDGGDYTGNTEAFF

SEQ ID NO: 388449 - protein, 15 aa, Homo sapiens
  CDR3 for alpha chain variable domain of TCR clone 194225 (TRAV26-1, TRAJ38)
CIVRAEGGNNRKLIW

SEQ ID NO: 388450 - protein, 12 aa, Homo sapiens
  CDR3 for beta chain variable domain of TCR clone 194225 (TRBV11-2, TRBJ2-2)
CASSLGGGELFF

SEQ ID NO: 388451 - protein, 15 aa, Homo sapiens
  CDR3 for alpha chain variable domain of TCR clone 194226 (TRAV26-1, TRAJ48)
CIVRFGDFGNEKLTF

SEQ ID NO: 388452 - protein, 16 aa, Homo sapiens
  CDR3 for beta chain variable domain of TCR clone 194226 (TRBV4-1, TRBJ2-3)
CASSQRAGGLTDTQYF

SEQ ID NO: 388453 - protein, 12 aa, Homo sapiens
  CDR3 for alpha chain variable domain of TCR clone 194227 (TRAV13-2, TRAJ23)
CAERHRGGKLIF

SEQ ID NO: 388454 - protein, 14 aa, Homo sapiens
  CDR3 for beta chain variable domain of TCR clone 194227 (TRBV11-3, TRBJ2-7)
CASSLGVGDYEQYF

SEQ ID NO: 388455 - protein, 14 aa, Homo sapiens
  CDR3 for alpha chain variable domain of TCR clone 194228 (TRAV12-1, TRAJ12)
CVVNGRDSSYKLIF

SEQ ID NO: 388456 - protein, 14 aa, Homo sapiens
  CDR3 for beta chain variable domain of TCR clone 194228 (TRBV6-1, TRBJ1-3)
CASVQGGGGNTIYF

SEQ ID NO: 388457 - protein, 12 aa, Homo sapiens
  CDR3 for alpha chain variable domain of TCR clone 194229 (TRAV13-1, TRAJ21)
CAAKEGFNKFYF

SEQ ID NO: 388458 - protein, 13 aa, Homo sapiens
  CDR3 for beta chain variable domain of TCR clone 194229 (TRBV7-3, TRBJ1-1)
CASSQDWVAEAFF

SEQ ID NO: 388459 - protein, 15 aa, Homo sapiens
  CDR3 for alpha chain variable domain of TCR clone 194230 (TRAV4, TRAJ39)
CLVGPNNNAGNMLTI

SEQ ID NO: 388460 - protein, 13 aa, Homo sapiens
  CDR3 for beta chain variable domain of TCR clone 194230 (TRBV11-2, TRBJ2-5)
CASSSTGEETQYF

SEQ ID NO: 388461 - protein, 16 aa, Homo sapiens
  CDR3 for alpha chain variable domain of TCR clone 194231 (TRAV26-1, TRAJ38)
CIVRVELGGNNRQLIW

SEQ ID NO: 388462 - protein, 14 aa, Homo sapiens
  CDR3 for beta chain variable domain of TCR clone 194231 (TRBV5-1, TRBJ2-3)
CASSPGLVADTQYF

SEQ ID NO: 388463 - protein, 16 aa, Homo sapiens
  CDR3 for alpha chain variable domain of TCR clone 194232 (TRAV1-2, TRAJ10)
CAVSGVLTGGGNKLTF

SEQ ID NO: 388464 - protein, 13 aa, Homo sapiens
  CDR3 for beta chain variable domain of TCR clone 194232 (TRBV20-1, TRBJ1-1)
CSAGTVGNTEAFF

SEQ ID NO: 388465 - protein, 13 aa, Homo sapiens
  CDR3 for alpha chain variable domain of TCR clone 194233 (TRAV12-3, TRAJ13)
CAMSSGGYQKVTF

SEQ ID NO: 388466 - protein, 13 aa, Homo sapiens
  CDR3 for beta chain variable domain of TCR clone 194233 (TRBV19, TRBJ1-3)
CASRLSLGNTIYF

SEQ ID NO: 388467 - protein, 12 aa, Homo sapiens
  CDR3 for alpha chain variable domain of TCR clone 194234 (TRAV36/DV7, TRAJ37)
CACHGNTGKLIF

SEQ ID NO: 388468 - protein, 14 aa, Homo sapiens
  CDR3 for beta chain variable domain of TCR clone 194234 (TRBV6-3, TRBJ1-4)
CASSGQNLNEKLFF

SEQ ID NO: 388469 - protein, 15 aa, Homo sapiens
  CDR3 for alpha chain variable domain of TCR clone 194235 (TRAV12-3, TRAJ6)
CAMSPASGGSYIPTF

SEQ ID NO: 388470 - protein, 15 aa, Homo sapiens
  CDR3 for beta chain variable domain of TCR clone 194235 (TRBV7-9, TRBJ1-6)
CASSSPGRGNSPLHF

SEQ ID NO: 388471 - protein, 11 aa, Homo sapiens
  CDR3 for alpha chain variable domain of TCR clone 194236 (TRAV27, TRAJ45)
CAGAQEEVLTE

SEQ ID NO: 388472 - protein, 17 aa, Homo sapiens
  CDR3 for beta chain variable domain of TCR clone 194236 (TRBV11-2, TRBJ2-1)
CASSLYPPGVEYNEQFF

SEQ ID NO: 388473 - protein, 10 aa, Homo sapiens
  CDR3 for alpha chain variable domain of TCR clone 194237 (TRAV12-2, TRAJ10)
CAAWTGVETH

SEQ ID NO: 388474 - protein, 11 aa, Homo sapiens
  CDR3 for beta chain variable domain of TCR clone 194237 (TRBV29-1, TRBJ2-5)
CSVASGETQYF

SEQ ID NO: 388475 - protein, 12 aa, Homo sapiens
  CDR3 for alpha chain variable domain of TCR clone 194238 (TRAV1-1, TRAJ8)
YAGGTGFQKLVF

SEQ ID NO: 388476 - protein, 16 aa, Homo sapiens
  CDR3 for beta chain variable domain of TCR clone 194238 (TRBV12-5, TRBJ2-5)
CASGPRTSGNQETQYF

SEQ ID NO: 388477 - protein, 17 aa, Homo sapiens
  CDR3 for alpha chain variable domain of TCR clone 194239 (TRAV8-3, TRAJ34)
CAIPGKIIFGTGTRLQV

SEQ ID NO: 388478 - protein, 15 aa, Homo sapiens
  CDR3 for beta chain variable domain of TCR clone 194239 (TRBV5-7, TRBJ2-1)
CASSRRLAGDNEQFF

SEQ ID NO: 388479 - protein, 18 aa, Homo sapiens
  CDR3 for alpha chain variable domain of TCR clone 194240 (TRAV26-2, TRAJ54)
CILRDVEVGIQGAQKLVF

SEQ ID NO: 388480 - protein, 14 aa, Homo sapiens
  CDR3 for beta chain variable domain of TCR clone 194240 (TRBV7-8, TRBJ2-3)
CASSSRDSTDTQYF

SEQ ID NO: 388481 - protein, 15 aa, Homo sapiens
  CDR3 for alpha chain variable domain of TCR clone 194241 (TRAV3, TRAJ3)
CAVRDRDSSASQIIF

SEQ ID NO: 388482 - protein, 18 aa, Homo sapiens
  CDR3 for beta chain variable domain of TCR clone 194241 (TRBV25-1, TRBJ1-2)
CASSGLQNGQGLIFGYTF

SEQ ID NO: 388483 - protein, 18 aa, Homo sapiens
  CDR3 for alpha chain variable domain of TCR clone 194242 (TRAV26-1, TRAJ37)
CIVRVDMHGSNNTGKLIF

SEQ ID NO: 388484 - protein, 15 aa, Homo sapiens
  CDR3 for beta chain variable domain of TCR clone 194242 (TRBV20-1, TRBJ2-7)
CSARVLASPLYEQYF

SEQ ID NO: 388485 - protein, 12 aa, Homo sapiens
  CDR3 for alpha chain variable domain of TCR clone 194243 (TRAV16, TRAJ10)
CSRTGGGNKLTF

SEQ ID NO: 388486 - protein, 13 aa, Homo sapiens
  CDR3 for beta chain variable domain of TCR clone 194243 (TRBV7-9, TRBJ1-2)
CASSLKQNYGDTF

SEQ ID NO: 388487 - protein, 14 aa, Homo sapiens
  CDR3 for alpha chain variable domain of TCR clone 194244 (TRAV26-1, TRAJ45)
CIEVTGGGAAGLTF

SEQ ID NO: 388488 - protein, 11 aa, Homo sapiens
  CDR3 for beta chain variable domain of TCR clone 194244 (TRBV7-8, TRBJ2-7)
CASSLSLEQYF

SEQ ID NO: 388489 - protein, 15 aa, Homo sapiens
  CDR3 for alpha chain variable domain of TCR clone 194245 (TRAV21, TRAJ45)
CAVSYSGGGADGLTF

SEQ ID NO: 388490 - protein, 13 aa, Homo sapiens
  CDR3 for beta chain variable domain of TCR clone 194245 (TRBV20-1, TRBJ2-5)
CRAATELQETQYF

SEQ ID NO: 388491 - protein, 15 aa, Homo sapiens
  CDR3 for alpha chain variable domain of TCR clone 194246 (TRAV3, TRAJ13)
CAVRDIGGGYQKVTF

SEQ ID NO: 388492 - protein, 15 aa, Homo sapiens
  CDR3 for beta chain variable domain of TCR clone 194246 (TRBV5-5, TRBJ1-5)
CASSLKGGGEQPQHF

SEQ ID NO: 388493 - protein, 15 aa, Homo sapiens
  CDR3 for alpha chain variable domain of TCR clone 194247 (TRAV34, TRAJ38)
CGADFTPGNNRKLIC

SEQ ID NO: 388494 - protein, 14 aa, Homo sapiens
  CDR3 for beta chain variable domain of TCR clone 194247 (TRBV12-5, TRBJ2-5)
CASGSRTHQETQYF

SEQ ID NO: 388495 - protein, 12 aa, Homo sapiens
  CDR3 for alpha chain variable domain of TCR clone 194248 (TRAV21, TRAJ6)
CAVKGGSYIPTF

SEQ ID NO: 388496 - protein, 14 aa, Homo sapiens
  CDR3 for beta chain variable domain of TCR clone 194248 (TRBV19, TRBJ2-1)
CASPTFVLSGEQFF

SEQ ID NO: 388497 - protein, 12 aa, Homo sapiens
  CDR3 for alpha chain variable domain of TCR clone 194249 (TRAV13-1, TRAJ27)
CAAHTNAGKSTF

SEQ ID NO: 388498 - protein, 14 aa, Homo sapiens
  CDR3 for beta chain variable domain of TCR clone 194249 (TRBV7-9, TRBJ2-1)
CASSPRDSLYEQFF

SEQ ID NO: 388499 - protein, 16 aa, Homo sapiens
  CDR3 for alpha chain variable domain of TCR clone 194250 (TRAV30, TRAJ24)
CGIEIVDADSWGKFQF

SEQ ID NO: 388500 - protein, 14 aa, Homo sapiens
  CDR3 for beta chain variable domain of TCR clone 194250 (TRBV12-5, TRBJ2-5)
CASGLRTHQETQYF

SEQ ID NO: 388501 - protein, 15 aa, Homo sapiens
  CDR3 for alpha chain variable domain of TCR clone 194251 (TRAV17, TRAJ57)
CATGPSQGGSEQLVF

SEQ ID NO: 388502 - protein, 15 aa, Homo sapiens
  CDR3 for beta chain variable domain of TCR clone 194251 (TRBV7-9, TRBJ1-6)
CASSSPGRGNSPLHF

SEQ ID NO: 388503 - protein, 19 aa, Homo sapiens
  CDR3 for alpha chain variable domain of TCR clone 194252 (TRAV1-2, TRAJ26)
CLLPLCCERPDNYGQNFVF

SEQ ID NO: 388504 - protein, 14 aa, Homo sapiens
  CDR3 for beta chain variable domain of TCR clone 194252 (TRBV19, TRBJ2-7)
CASSMGQGAIEQYF

SEQ ID NO: 388505 - protein, 15 aa, Homo sapiens
  CDR3 for alpha chain variable domain of TCR clone 194253 (TRAV3, TRAJ3)
CALRDRDSSASKIIF

SEQ ID NO: 388506 - protein, 16 aa, Homo sapiens
  CDR3 for beta chain variable domain of TCR clone 194253 (TRBV12-4, TRBJ1-5)
CASSRPVGGSNQPQHF

SEQ ID NO: 388507 - protein, 16 aa, Homo sapiens
  CDR3 for alpha chain variable domain of TCR clone 194254 (TRAV12-3, TRAJ50)
CAMRDPMKTPYDKVIF

SEQ ID NO: 388508 - protein, 13 aa, Homo sapiens
  CDR3 for beta chain variable domain of TCR clone 194254 (TRBV4-1, TRBJ2-3)
CASSLDFTDTQYF

SEQ ID NO: 388509 - protein, 14 aa, Homo sapiens
  CDR3 for alpha chain variable domain of TCR clone 194255 (TRAV8-1, TRAJ49)
CASSIANTGNQFYF

SEQ ID NO: 388510 - protein, 13 aa, Homo sapiens
  CDR3 for beta chain variable domain of TCR clone 194255 (TRBV11-2, TRBJ2-5)
CASSFCSQETQYF

SEQ ID NO: 388511 - protein, 13 aa, Homo sapiens
  CDR3 for alpha chain variable domain of TCR clone 194256 (TRAV12-2, TRAJ20)
CAVYPSNDYKLSF

SEQ ID NO: 388512 - protein, 19 aa, Homo sapiens
  CDR3 for beta chain variable domain of TCR clone 194256 (TRBV27, TRBJ2-5)
CASSLYPRGRDPVLRARHA

SEQ ID NO: 388513 - protein, 14 aa, Homo sapiens
  CDR3 for alpha chain variable domain of TCR clone 194257 (TRAV12-2, TRAJ13)
CAVKKTGGYQKVTF

SEQ ID NO: 388514 - protein, 16 aa, Homo sapiens
  CDR3 for beta chain variable domain of TCR clone 194257 (TRBV20-1, TRBJ1-4)
CSAPGQGLLTNEQLFF

SEQ ID NO: 388515 - protein, 17 aa, Homo sapiens
  CDR3 for alpha chain variable domain of TCR clone 194258 (TRAV38-1, TRAJ28)
CAFMKPTSGAGSYQLTF

SEQ ID NO: 388516 - protein, 18 aa, Homo sapiens
  CDR3 for beta chain variable domain of TCR clone 194258 (TRBV12-4, TRBJ1-5)
CASSLFLVGVGAYQPQHF

SEQ ID NO: 388517 - protein, 16 aa, Homo sapiens
  CDR3 for alpha chain variable domain of TCR clone 194259 (TRAV12-3, TRAJ53)
CAMSPGSGGSNYKLTF

SEQ ID NO: 388518 - protein, 12 aa, Homo sapiens
  CDR3 for beta chain variable domain of TCR clone 194259 (TRBV12-4, TRBJ2-1)
CASSKDRRWQFF

SEQ ID NO: 388519 - protein, 11 aa, Homo sapiens
  CDR3 for alpha chain variable domain of TCR clone 194260 (TRAV9-2, TRAJ13)
YAQGGYQKVTF

SEQ ID NO: 388520 - protein, 13 aa, Homo sapiens
  CDR3 for beta chain variable domain of TCR clone 194260 (TRBV5-1, TRBJ1-2)
CASSSTGVYGYTF

SEQ ID NO: 388521 - protein, 12 aa, Homo sapiens
  CDR3 for alpha chain variable domain of TCR clone 194261 (TRAV17, TRAJ20)
CATYSNDYRLSF

SEQ ID NO: 388522 - protein, 11 aa, Homo sapiens
  CDR3 for beta chain variable domain of TCR clone 194261 (TRBV4-1, TRBJ2-2)
CASEHTGELFF

SEQ ID NO: 388523 - protein, 15 aa, Homo sapiens
  CDR3 for alpha chain variable domain of TCR clone 194262 (TRAV27, TRAJ53)
CRAINSGGSNYKLTF

SEQ ID NO: 388524 - protein, 12 aa, Homo sapiens
  CDR3 for beta chain variable domain of TCR clone 194262 (TRBV7-9, TRBJ2-7)
CASSIKREEQYF

SEQ ID NO: 388525 - protein, 14 aa, Homo sapiens
  CDR3 for alpha chain variable domain of TCR clone 194263 (TRAV12-3, TRAJ9)
CAMSPNTGCFKTTF

SEQ ID NO: 388526 - protein, 16 aa, Homo sapiens
  CDR3 for beta chain variable domain of TCR clone 194263 (TRBV4-2, TRBJ2-1)
CASSPRAGQGANEQFF

SEQ ID NO: 388527 - protein, 12 aa, Homo sapiens
  CDR3 for alpha chain variable domain of TCR clone 194264 (TRAV3, TRAJ43)
CAVRDPNNDMRF

SEQ ID NO: 388528 - protein, 14 aa, Homo sapiens
  CDR3 for beta chain variable domain of TCR clone 194264 (TRBV7-3, TRBJ1-1)
CASSLKGGNTEAFF

SEQ ID NO: 388529 - protein, 16 aa, Homo sapiens
  CDR3 for alpha chain variable domain of TCR clone 194265 (TRAV35, TRAJ37)
CWAFVRGSSNTGKLIF

SEQ ID NO: 388530 - protein, 13 aa, Homo sapiens
  CDR3 for beta chain variable domain of TCR clone 194265 (TRBV2, TRBJ1-2)
CASSVRGNYGYTF

SEQ ID NO: 388531 - protein, 13 aa, Homo sapiens
  CDR3 for alpha chain variable domain of TCR clone 194266 (TRAV3, TRAJ27)
CAVRPLGAGKSTF

SEQ ID NO: 388532 - protein, 13 aa, Homo sapiens
  CDR3 for beta chain variable domain of TCR clone 194266 (TRBV28, TRBJ1-5)
CASSLRGNQPQHF

SEQ ID NO: 388533 - protein, 13 aa, Homo sapiens
  CDR3 for alpha chain variable domain of TCR clone 194267 (TRAV38-1, TRAJ45)
CAFRDYVGDGLTF

SEQ ID NO: 388534 - protein, 14 aa, Homo sapiens
  CDR3 for beta chain variable domain of TCR clone 194267 (TRBV19, TRBJ2-7)
CASSPGTAYYEQYF

SEQ ID NO: 388535 - protein, 23 aa, Homo sapiens
  CDR3 for alpha chain variable domain of TCR clone 194268 (TRAV26-1, TRAJ38)
CIADNAGNNHIQNPDPAVYQLRD

SEQ ID NO: 388536 - protein, 12 aa, Homo sapiens
  CDR3 for beta chain variable domain of TCR clone 194268 (TRBV14, TRBJ2-7)
CASSSLKGEQYF

SEQ ID NO: 388537 - protein, 17 aa, Homo sapiens
  CDR3 for alpha chain variable domain of TCR clone 194269 (TRAV12-1, TRAJ42)
CVVMRMNYGGSQGNLIV

SEQ ID NO: 388538 - protein, 13 aa, Homo sapiens
  CDR3 for beta chain variable domain of TCR clone 194269 (TRBV7-2, TRBJ1-1)
CASSLARPAEAFS

SEQ ID NO: 388539 - protein, 10 aa, Homo sapiens
  CDR3 for alpha chain variable domain of TCR clone 194270 (TRAV23/DV6, TRAJ10)
CAASRLLYSW

SEQ ID NO: 388540 - protein, 15 aa, Homo sapiens
  CDR3 for beta chain variable domain of TCR clone 194270 (TRBV20-1, TRBJ2-1)
CSAGGGLLAGDEQFF

SEQ ID NO: 388541 - protein, 12 aa, Homo sapiens
  CDR3 for alpha chain variable domain of TCR clone 194271 (TRAV8-3, TRAJ26)
CAGDNYGQNLVF

SEQ ID NO: 388542 - protein, 12 aa, Homo sapiens
  CDR3 for beta chain variable domain of TCR clone 194271 (TRBV11-2, TRBJ2-2)
CASSLGGGELFF

SEQ ID NO: 388543 - protein, 16 aa, Homo sapiens
  CDR3 for alpha chain variable domain of TCR clone 194272 (TRAV12-3, TRAJ53)
CAMSPGSGGSNYKLTF

SEQ ID NO: 388544 - protein, 14 aa, Homo sapiens
  CDR3 for beta chain variable domain of TCR clone 194272 (TRBV7-2, TRBJ1-5)
CASSPRGGPQPQHF

SEQ ID NO: 388545 - protein, 12 aa, Homo sapiens
  CDR3 for alpha chain variable domain of TCR clone 194273 (TRAV12-1, TRAJ40)
CVVYSGTYKYIF

SEQ ID NO: 388546 - protein, 14 aa, Homo sapiens
  CDR3 for beta chain variable domain of TCR clone 194273 (TRBV3-1, TRBJ2-1)
CASSQAVYLGEQFF

SEQ ID NO: 388547 - protein, 12 aa, Homo sapiens
  CDR3 for alpha chain variable domain of TCR clone 194274 (TRAV17, TRAJ6)
CATGGGSYIPTF

SEQ ID NO: 388548 - protein, 15 aa, Homo sapiens
  CDR3 for beta chain variable domain of TCR clone 194274 (TRBV5-1, TRBJ2-3)
CASSVTSGSTDTQYF

SEQ ID NO: 388549 - protein, 13 aa, Homo sapiens
  CDR3 for alpha chain variable domain of TCR clone 194275 (TRAV8-4, TRAJ10)
CAAFTGGGNKLTF

SEQ ID NO: 388550 - protein, 14 aa, Homo sapiens
  CDR3 for beta chain variable domain of TCR clone 194275 (TRBV7-9, TRBJ1-2)
CASSRQGANYGYTF

SEQ ID NO: 388551 - protein, 18 aa, Homo sapiens
  CDR3 for alpha chain variable domain of TCR clone 194276 (TRAV21, TRAJ52)
CAVRPSPAGGTSYGKLTF

SEQ ID NO: 388552 - protein, 14 aa, Homo sapiens
  CDR3 for beta chain variable domain of TCR clone 194276 (TRBV7-2, TRBJ2-3)
CQQLRGGGRDTQYF

SEQ ID NO: 388553 - protein, 15 aa, Homo sapiens
  CDR3 for alpha chain variable domain of TCR clone 194277 (TRAV26-1, TRAJ29)
CIVRVEGSGNTPLVF

SEQ ID NO: 388554 - protein, 20 aa, Homo sapiens
  CDR3 for beta chain variable domain of TCR clone 194277 (TRBV11-3, TRBJ2-7)
CASSQRTSGSLRAVLRAGHQ

SEQ ID NO: 388555 - protein, 13 aa, Homo sapiens
  CDR3 for alpha chain variable domain of TCR clone 194278 (TRAV17, TRAJ22)
CAHHSGSARQLTF

SEQ ID NO: 388556 - protein, 17 aa, Homo sapiens
  CDR3 for beta chain variable domain of TCR clone 194278 (TRBV4-1, TRBJ1-2)
CASSQDAGGSLWLHLRF

SEQ ID NO: 388557 - protein, 15 aa, Homo sapiens
  CDR3 for alpha chain variable domain of TCR clone 194279 (TRAV8-6, TRAJ10)
CAVSDQAGGGNNLTF

SEQ ID NO: 388558 - protein, 16 aa, Homo sapiens
  CDR3 for beta chain variable domain of TCR clone 194279 (TRBV27, TRBJ2-7)
CASSSERRDSAYEQYF

SEQ ID NO: 388559 - protein, 15 aa, Homo sapiens
  CDR3 for alpha chain variable domain of TCR clone 194280 (TRAV10, TRAJ6)
CVVKPRTGGSYIPTF

SEQ ID NO: 388560 - protein, 14 aa, Homo sapiens
  CDR3 for beta chain variable domain of TCR clone 194280 (TRBV20-1, TRBJ2-4)
CSASGRVGENIQYF

SEQ ID NO: 388561 - protein, 16 aa, Homo sapiens
  CDR3 for alpha chain variable domain of TCR clone 194281 (TRAV26-1, )
CIDIQNPDPAVYQLRD

SEQ ID NO: 388562 - protein, 19 aa, Homo sapiens
  CDR3 for beta chain variable domain of TCR clone 194281 (TRBV19, TRBJ2-5)
GASSIGQVTDFFLGETQYF

SEQ ID NO: 388563 - protein, 12 aa, Homo sapiens
  CDR3 for alpha chain variable domain of TCR clone 194282 (TRAV13-1, TRAJ21)
CAAKEGFNKFYF

SEQ ID NO: 388564 - protein, 13 aa, Homo sapiens
  CDR3 for beta chain variable domain of TCR clone 194282 (TRBV7-3, TRBJ1-5)
CASSLDSNQPQHF

SEQ ID NO: 388565 - protein, 14 aa, Homo sapiens
  CDR3 for alpha chain variable domain of TCR clone 194283 (TRAV12-1, TRAJ17)
CVVDYKAAGNKLTF

SEQ ID NO: 388566 - protein, 17 aa, Homo sapiens
  CDR3 for beta chain variable domain of TCR clone 194283 (TRBV20-1, TRBJ2-1)
RSASSSGLAGSYNEQFF

SEQ ID NO: 388567 - protein, 11 aa, Homo sapiens
  CDR3 for alpha chain variable domain of TCR clone 194284 (TRAV3, TRAJ17)
PRGAACNKLTF

SEQ ID NO: 388568 - protein, 16 aa, Homo sapiens
  CDR3 for beta chain variable domain of TCR clone 194284 (TRBV7-6, TRBJ2-1)
CASSAPGPSSYNEQFF

SEQ ID NO: 388569 - protein, 15 aa, Homo sapiens
  CDR3 for alpha chain variable domain of TCR clone 194285 (TRAV3, TRAJ4)
CAQNMFSGGYNKLIF

SEQ ID NO: 388570 - protein, 14 aa, Homo sapiens
  CDR3 for beta chain variable domain of TCR clone 194285 (TRBV7-3, TRBJ2-1)
CASSLAGGTNEQFF

SEQ ID NO: 388571 - protein, 14 aa, Homo sapiens
  CDR3 for alpha chain variable domain of TCR clone 194286 (TRAV17, TRAJ24)
CATLTTDSWGKFQV

SEQ ID NO: 388572 - protein, 16 aa, Homo sapiens
  CDR3 for beta chain variable domain of TCR clone 194286 (TRBV4-2, TRBJ2-7)
CASSQDGGSLRGEQYF

SEQ ID NO: 388573 - protein, 13 aa, Homo sapiens
  CDR3 for alpha chain variable domain of TCR clone 194287 (TRAV3, TRAJ39)
ENPTNNAGNMLTF

SEQ ID NO: 388574 - protein, 15 aa, Homo sapiens
  CDR3 for beta chain variable domain of TCR clone 194287 (TRBV7-6, TRBJ2-7)
CASSLGQGASYEQYF

SEQ ID NO: 388575 - protein, 17 aa, Homo sapiens
  CDR3 for alpha chain variable domain of TCR clone 194288 (TRAV3, TRAJ6)
CAVRDGPRAGGSYIPTF

SEQ ID NO: 388576 - protein, 18 aa, Homo sapiens
  CDR3 for beta chain variable domain of TCR clone 194288 (TRBV7-3, TRBJ2-3)
CTSSSTGTYPGSTDTQYF

SEQ ID NO: 388577 - protein, 12 aa, Homo sapiens
  CDR3 for alpha chain variable domain of TCR clone 194289 (TRAV12-3, TRAJ17)
CAMTLTGSKLTF

SEQ ID NO: 388578 - protein, 15 aa, Homo sapiens
  CDR3 for beta chain variable domain of TCR clone 194289 (TRBV20-1, TRBJ2-7)
CSARDRVSGVDEQYF

SEQ ID NO: 388579 - protein, 14 aa, Homo sapiens
  CDR3 for alpha chain variable domain of TCR clone 194290 (TRAV12-3, TRAJ41)
FAMSAGNSGYALNF

SEQ ID NO: 388580 - protein, 11 aa, Homo sapiens
  CDR3 for beta chain variable domain of TCR clone 194290 (TRBV7-2, TRBJ2-3)
CASSSSDTQYF

SEQ ID NO: 388581 - protein, 13 aa, Homo sapiens
  CDR3 for alpha chain variable domain of TCR clone 194291 (TRAV13-2, TRAJ5)
CAVMDTGRRALTF

SEQ ID NO: 388582 - protein, 12 aa, Homo sapiens
  CDR3 for beta chain variable domain of TCR clone 194291 (TRBV28, TRBJ2-7)
CASSCSSYEQYF

SEQ ID NO: 388583 - protein, 13 aa, Homo sapiens
  CDR3 for alpha chain variable domain of TCR clone 194292 (TRAV26-1, TRAJ20)
CIVRVGNDYKLSF

SEQ ID NO: 388584 - protein, 17 aa, Homo sapiens
  CDR3 for beta chain variable domain of TCR clone 194292 (TRBV28, TRBJ2-5)
CASSRQGGLAGAETQYF

SEQ ID NO: 388585 - protein, 14 aa, Homo sapiens
  CDR3 for alpha chain variable domain of TCR clone 194293 (TRAV29/DV5, TRAJ45)
CAASFRGGADGLTF

SEQ ID NO: 388586 - protein, 13 aa, Homo sapiens
  CDR3 for beta chain variable domain of TCR clone 194293 (TRBV29-1, TRBJ2-5)
CSVTIASEETQYF

SEQ ID NO: 388587 - protein, 13 aa, Homo sapiens
  CDR3 for alpha chain variable domain of TCR clone 194294 (TRAV23/DV6, TRAJ24)
CAASEDSWGKLQF

SEQ ID NO: 388588 - protein, 12 aa, Homo sapiens
  CDR3 for beta chain variable domain of TCR clone 194294 (TRBV5-1, TRBJ2-7)
YASSDSTYEQYF

SEQ ID NO: 388589 - protein, 13 aa, Homo sapiens
  CDR3 for alpha chain variable domain of TCR clone 194295 (TRAV12-1, TRAJ6)
CVVFPGGSYIPTF

SEQ ID NO: 388590 - protein, 14 aa, Homo sapiens
  CDR3 for beta chain variable domain of TCR clone 194295 (TRBV20-1, TRBJ1-3)
CSASPTGVGNTMYF

SEQ ID NO: 388591 - protein, 14 aa, Homo sapiens
  CDR3 for alpha chain variable domain of TCR clone 194296 (TRAV13-1, TRAJ40)
CAASMTSGTNKYIF

SEQ ID NO: 388592 - protein, 15 aa, Homo sapiens
  CDR3 for beta chain variable domain of TCR clone 194296 (TRBV7-3, TRBJ2-1)
CASSPTGGGEDEQFF

SEQ ID NO: 388593 - protein, 14 aa, Homo sapiens
  CDR3 for alpha chain variable domain of TCR clone 194297 (TRAV12-1, TRAJ12)
CVVTRMDSSYKLIL

SEQ ID NO: 388594 - protein, 14 aa, Homo sapiens
  CDR3 for beta chain variable domain of TCR clone 194297 (TRBV7-2, TRBJ2-2)
CASSLGQNTGELFF

SEQ ID NO: 388595 - protein, 14 aa, Homo sapiens
  CDR3 for alpha chain variable domain of TCR clone 194298 (TRAV12-3, TRAJ10)
SHPPLTGGGNKLTF

SEQ ID NO: 388596 - protein, 12 aa, Homo sapiens
  CDR3 for beta chain variable domain of TCR clone 194298 (TRBV7-9, TRBJ2-7)
RATRTDAYEQYF

SEQ ID NO: 388597 - protein, 14 aa, Homo sapiens
  CDR3 for alpha chain variable domain of TCR clone 194299 (TRAV12-3, TRAJ12)
CAMSALDSSYKLIF

SEQ ID NO: 388598 - protein, 13 aa, Homo sapiens
  CDR3 for beta chain variable domain of TCR clone 194299 (TRBV12-5, TRBJ2-3)
CASGDRQSDTQYF

SEQ ID NO: 388599 - protein, 16 aa, Homo sapiens
  CDR3 for alpha chain variable domain of TCR clone 194300 (TRAV30, TRAJ24)
CGTEIVDAESWGKFQF

SEQ ID NO: 388600 - protein, 13 aa, Homo sapiens
  CDR3 for beta chain variable domain of TCR clone 194300 (TRBV12-4, TRBJ1-2)
CASSLRQGKGYTF

SEQ ID NO: 388601 - protein, 17 aa, Homo sapiens
  CDR3 for alpha chain variable domain of TCR clone 194301 (TRAV8-6, TRAJ58)
CAVSSWVGETSGSRLTF

SEQ ID NO: 388602 - protein, 17 aa, Homo sapiens
  CDR3 for beta chain variable domain of TCR clone 194301 (TRBV15, TRBJ1-5)
CATSRAPPGTRNQPQHF

SEQ ID NO: 388603 - protein, 15 aa, Homo sapiens
  CDR3 for alpha chain variable domain of TCR clone 194302 (TRAV21, TRAJ37)
CAVRPTLSNTGKLIF

SEQ ID NO: 388604 - protein, 14 aa, Homo sapiens
  CDR3 for beta chain variable domain of TCR clone 194302 (TRBV7-9, TRBJ2-1)
CASSPRDSLYEQFF

SEQ ID NO: 388605 - protein, 16 aa, Homo sapiens
  CDR3 for alpha chain variable domain of TCR clone 194303 (TRAV26-1, TRAJ37)
CIVRGDGSGNTGKLIF

SEQ ID NO: 388606 - protein, 11 aa, Homo sapiens
  CDR3 for beta chain variable domain of TCR clone 194303 (TRBV12-4, TRBJ2-3)
CASTATDTQYF

SEQ ID NO: 388607 - protein, 14 aa, Homo sapiens
  CDR3 for alpha chain variable domain of TCR clone 194304 (TRAV35, TRAJ13)
CAGSPSGGYQKVTF

SEQ ID NO: 388608 - protein, 13 aa, Homo sapiens
  CDR3 for beta chain variable domain of TCR clone 194304 (TRBV7-3, TRBJ1-1)
CASSQDWGAEAFF

SEQ ID NO: 388609 - protein, 13 aa, Homo sapiens
  CDR3 for alpha chain variable domain of TCR clone 194305 (TRAV21, TRAJ20)
CAVGLRVDYKLSF

SEQ ID NO: 388610 - protein, 12 aa, Homo sapiens
  CDR3 for beta chain variable domain of TCR clone 194305 (TRBV28, TRBJ2-7)
CASSFSSYEQYF

SEQ ID NO: 388611 - protein, 16 aa, Homo sapiens
  CDR3 for alpha chain variable domain of TCR clone 194306 (TRAV30, TRAJ24)
CGTEIEDAASWGKFQF

SEQ ID NO: 388612 - protein, 14 aa, Homo sapiens
  CDR3 for beta chain variable domain of TCR clone 194306 (TRBV12-5, TRBJ2-5)
CASGSRTHQETQYF

SEQ ID NO: 388613 - protein, 14 aa, Homo sapiens
  CDR3 for alpha chain variable domain of TCR clone 194307 (TRAV21, TRAJ37)
CAVKGSSNTGKLIF

SEQ ID NO: 388614 - protein, 15 aa, Homo sapiens
  CDR3 for beta chain variable domain of TCR clone 194307 (TRBV28, TRBJ2-1)
CASIVGLDEYNEQFF

SEQ ID NO: 388615 - protein, 14 aa, Homo sapiens
  CDR3 for alpha chain variable domain of TCR clone 194308 (TRAV17, TRAJ15)
CATDRGQAGTALIF

SEQ ID NO: 388616 - protein, 12 aa, Homo sapiens
  CDR3 for beta chain variable domain of TCR clone 194308 (TRBV11-2, TRBJ2-2)
CASSLGGGELFF

SEQ ID NO: 388617 - protein, 11 aa, Homo sapiens
  CDR3 for alpha chain variable domain of TCR clone 194309 (TRAV8-4, TRAJ26)
CAGGAGQNFVF

SEQ ID NO: 388618 - protein, 17 aa, Homo sapiens
  CDR3 for beta chain variable domain of TCR clone 194309 (TRBV7-9, TRBJ2-3)
CASSPTVAGDLTDTQYF

SEQ ID NO: 388619 - protein, 14 aa, Homo sapiens
  CDR3 for alpha chain variable domain of TCR clone 194310 (TRAV12-1, TRAJ9)
CVVTGYTGGFKTIF

SEQ ID NO: 388620 - protein, 16 aa, Homo sapiens
  CDR3 for beta chain variable domain of TCR clone 194310 (TRBV19, TRBJ2-1)
CASSKAGPSSYNEQFF

SEQ ID NO: 388621 - protein, 15 aa, Homo sapiens
  CDR3 for alpha chain variable domain of TCR clone 194311 (TRAV17, TRAJ48)
CATDETNFGNETLTF

SEQ ID NO: 388622 - protein, 14 aa, Homo sapiens
  CDR3 for beta chain variable domain of TCR clone 194311 (TRBV10-3, TRBJ1-3)
CAIRGQRAGNTIYF

SEQ ID NO: 388623 - protein, 14 aa, Homo sapiens
  CDR3 for alpha chain variable domain of TCR clone 194312 (TRAV16, TRAJ54)
CALSWVQGAQKLVF

SEQ ID NO: 388624 - protein, 15 aa, Homo sapiens
  CDR3 for beta chain variable domain of TCR clone 194312 (TRBV18, TRBJ2-2)
CASSTSGLHTGELFF

SEQ ID NO: 388625 - protein, 12 aa, Homo sapiens
  CDR3 for alpha chain variable domain of TCR clone 194313 (TRAV16, TRAJ10)
CSRTGGGNKLTF

SEQ ID NO: 388626 - protein, 14 aa, Homo sapiens
  CDR3 for beta chain variable domain of TCR clone 194313 (TRBV12-4, TRBJ1-1)
CASSFDRVNTEAFL

SEQ ID NO: 388627 - protein, 14 aa, Homo sapiens
  CDR3 for alpha chain variable domain of TCR clone 194314 (TRAV12-3, TRAJ54)
CAMSAQQGAQKLVF

SEQ ID NO: 388628 - protein, 15 aa, Homo sapiens
  CDR3 for beta chain variable domain of TCR clone 194314 (TRBV7-2, TRBJ1-5)
CASSSGQGHAQPQHF

SEQ ID NO: 388629 - protein, 12 aa, Homo sapiens
  CDR3 for alpha chain variable domain of TCR clone 194315 (TRAV27, TRAJ35)
CAGADFGNVLHC

SEQ ID NO: 388630 - protein, 12 aa, Homo sapiens
  CDR3 for beta chain variable domain of TCR clone 194315 (TRBV2, TRBJ2-1)
CAKREGYNEQFF

SEQ ID NO: 388631 - protein, 14 aa, Homo sapiens
  CDR3 for alpha chain variable domain of TCR clone 194316 (TRAV16, TRAJ29)
CALTRNSGNTPLVF

SEQ ID NO: 388632 - protein, 15 aa, Homo sapiens
  CDR3 for beta chain variable domain of TCR clone 194316 (TRBV27, TRBJ1-6)
CASSFDRGLGSPLHF

SEQ ID NO: 388633 - protein, 15 aa, Homo sapiens
  CDR3 for alpha chain variable domain of TCR clone 194317 (TRAV22, TRAJ24)
CAVPLSTDSWGKLQF

SEQ ID NO: 388634 - protein, 20 aa, Homo sapiens
  CDR3 for beta chain variable domain of TCR clone 194317 (TRBV7-8, TRBJ2-2)
CASSHLFPGPTIHITGELFF

SEQ ID NO: 388635 - protein, 14 aa, Homo sapiens
  CDR3 for alpha chain variable domain of TCR clone 194318 (TRAV30, TRAJ33)
CGTVAPRSNYQLIW

SEQ ID NO: 388636 - protein, 17 aa, Homo sapiens
  CDR3 for beta chain variable domain of TCR clone 194318 (TRBV19, TRBJ2-7)
CASSISFYDSYPYEQYF

SEQ ID NO: 388637 - protein, 13 aa, Homo sapiens
  CDR3 for alpha chain variable domain of TCR clone 194319 (TRAV23/DV6, TRAJ12)
CAPRVDSTYKLIF

SEQ ID NO: 388638 - protein, 12 aa, Homo sapiens
  CDR3 for beta chain variable domain of TCR clone 194319 (TRBV7-6, TRBJ2-5)
CASSLSQETQYF

SEQ ID NO: 388639 - protein, 14 aa, Homo sapiens
  CDR3 for alpha chain variable domain of TCR clone 194320 (TRAV13-1, TRAJ6)
CAASNGGGSYIPTF

SEQ ID NO: 388640 - protein, 18 aa, Homo sapiens
  CDR3 for beta chain variable domain of TCR clone 194320 (TRBV7-2, TRBJ2-3)
CASSLETSRGRKADTQYF

SEQ ID NO: 388641 - protein, 16 aa, Homo sapiens
  CDR3 for alpha chain variable domain of TCR clone 194321 (TRAV27, TRAJ53)
CAAPEGSGGSNYKLTF

SEQ ID NO: 388642 - protein, 17 aa, Homo sapiens
  CDR3 for beta chain variable domain of TCR clone 194321 (TRBV20-1, TRBJ2-2)
CSASGSGQGGLTGELFF

SEQ ID NO: 388643 - protein, 14 aa, Homo sapiens
  CDR3 for alpha chain variable domain of TCR clone 194322 (TRAV2, TRAJ9)
CAVEDRSGGFKTIF

SEQ ID NO: 388644 - protein, 16 aa, Homo sapiens
  CDR3 for beta chain variable domain of TCR clone 194322 (TRBV7-3, TRBJ2-2)
CASSLKRGSLSGELFF

SEQ ID NO: 388645 - protein, 15 aa, Homo sapiens
  CDR3 for alpha chain variable domain of TCR clone 194323 (TRAV12-2, TRAJ43)
CAFDMRFGAGTRLTV

SEQ ID NO: 388646 - protein, 13 aa, Homo sapiens
  CDR3 for beta chain variable domain of TCR clone 194323 (TRBV10-3, TRBJ2-7)
CASKLAVNYEQYF

SEQ ID NO: 388647 - protein, 14 aa, Homo sapiens
  CDR3 for alpha chain variable domain of TCR clone 194324 (TRAV1-2, TRAJ8)
CAVREDTGFQKLVF

SEQ ID NO: 388648 - protein, 15 aa, Homo sapiens
  CDR3 for beta chain variable domain of TCR clone 194324 (TRBV7-6, TRBJ1-2)
CASSSGGRGSYGYTF

SEQ ID NO: 388649 - protein, 15 aa, Homo sapiens
  CDR3 for alpha chain variable domain of TCR clone 194325 (TRAV3, TRAJ36)
CAVRASQTGANNLFF

SEQ ID NO: 388650 - protein, 14 aa, Homo sapiens
  CDR3 for beta chain variable domain of TCR clone 194325 (TRBV7-2, TRBJ2-7)
CASRSQGAAYEQYF

SEQ ID NO: 388651 - protein, 14 aa, Homo sapiens
  CDR3 for alpha chain variable domain of TCR clone 194326 (TRAV38-1, TRAJ40)
CALRPTSGTYKYIF

SEQ ID NO: 388652 - protein, 13 aa, Homo sapiens
  CDR3 for beta chain variable domain of TCR clone 194326 (TRBV12-4, TRBJ2-1)
CASSSRAYNEQFF

SEQ ID NO: 388653 - protein, 13 aa, Homo sapiens
  CDR3 for alpha chain variable domain of TCR clone 194327 (TRAV26-1, TRAJ39)
CIVRVVAGNMLTF

SEQ ID NO: 388654 - protein, 14 aa, Homo sapiens
  CDR3 for beta chain variable domain of TCR clone 194327 (TRBV20-1, TRBJ2-5)
CSARREGIRETQYF

SEQ ID NO: 388655 - protein, 13 aa, Homo sapiens
  CDR3 for alpha chain variable domain of TCR clone 194328 (TRAV1-2, TRAJ9)
CVALNTGGFKTIF

SEQ ID NO: 388656 - protein, 12 aa, Homo sapiens
  CDR3 for beta chain variable domain of TCR clone 194328 (TRBV11-3, TRBJ1-1)
CASSHRQGEAFF

SEQ ID NO: 388657 - protein, 10 aa, Homo sapiens
  CDR3 for alpha chain variable domain of TCR clone 194329 (TRAV1-2, TRAJ31)
CVSEDARLMF

SEQ ID NO: 388658 - protein, 15 aa, Homo sapiens
  CDR3 for beta chain variable domain of TCR clone 194329 (TRBV7-2, TRBJ2-1)
CASRKTGSSYNEQFF

SEQ ID NO: 388659 - protein, 13 aa, Homo sapiens
  CDR3 for alpha chain variable domain of TCR clone 194330 (TRAV21, TRAJ15)
CAAANQAGTALIF

SEQ ID NO: 388660 - protein, 14 aa, Homo sapiens
  CDR3 for beta chain variable domain of TCR clone 194330 (TRBV27, TRBJ2-2)
CASSLGAATGELFF

SEQ ID NO: 388661 - protein, 12 aa, Homo sapiens
  CDR3 for alpha chain variable domain of TCR clone 194331 (TRAV13-1, TRAJ49)
CAASPMGNQFYF

SEQ ID NO: 388662 - protein, 14 aa, Homo sapiens
  CDR3 for beta chain variable domain of TCR clone 194331 (TRBV3-1, TRBJ2-5)
CASSQGPDQETQYF

SEQ ID NO: 388663 - protein, 16 aa, Homo sapiens
  CDR3 for alpha chain variable domain of TCR clone 194332 (TRAV38-2/DV8, TRAJ47)
CAYRSAIMEYGNKLVF

SEQ ID NO: 388664 - protein, 14 aa, Homo sapiens
  CDR3 for beta chain variable domain of TCR clone 194332 (TRBV19, TRBJ2-7)
CASSICAGTYEQYF

SEQ ID NO: 388665 - protein, 14 aa, Homo sapiens
  CDR3 for alpha chain variable domain of TCR clone 194333 (TRAV36/DV7, TRAJ57)
CAVGFPGGSEKLVF

SEQ ID NO: 388666 - protein, 12 aa, Homo sapiens
  CDR3 for beta chain variable domain of TCR clone 194333 (TRBV19, TRBJ2-7)
CASTSGTYKQYF

SEQ ID NO: 388667 - protein, 13 aa, Homo sapiens
  CDR3 for alpha chain variable domain of TCR clone 194334 (TRAV2, TRAJ40)
CAVVTSRTYKYIF

SEQ ID NO: 388668 - protein, 17 aa, Homo sapiens
  CDR3 for beta chain variable domain of TCR clone 194334 (TRBV7-3, TRBJ2-3)
CASSLMKRMRGADTQYF

SEQ ID NO: 388669 - protein, 14 aa, Homo sapiens
  CDR3 for alpha chain variable domain of TCR clone 194335 (TRAV2, TRAJ3)
CAVPPCSSASKIIF

SEQ ID NO: 388670 - protein, 16 aa, Homo sapiens
  CDR3 for beta chain variable domain of TCR clone 194335 (TRBV19, TRBJ2-1)
CASSKAGPSAYNEQFF

SEQ ID NO: 388671 - protein, 12 aa, Homo sapiens
  CDR3 for alpha chain variable domain of TCR clone 194336 (TRAV21, TRAJ49)
CAVNDGGNQFYF

SEQ ID NO: 388672 - protein, 11 aa, Homo sapiens
  CDR3 for beta chain variable domain of TCR clone 194336 (TRBV29-1, TRBJ2-5)
CSEDRTGTQYF

SEQ ID NO: 388673 - protein, 11 aa, Homo sapiens
  CDR3 for alpha chain variable domain of TCR clone 194337 (TRAV1-1, TRAJ23)
CALRQGGKLIF

SEQ ID NO: 388674 - protein, 16 aa, Homo sapiens
  CDR3 for beta chain variable domain of TCR clone 194337 (TRBV7-2, TRBJ1-4)
CASSPVGRFDREKLFF

SEQ ID NO: 388675 - protein, 12 aa, Homo sapiens
  CDR3 for alpha chain variable domain of TCR clone 194338 (TRAV12-3, TRAJ17)
CAMTLTDNKLTF

SEQ ID NO: 388676 - protein, 14 aa, Homo sapiens
  CDR3 for beta chain variable domain of TCR clone 194338 (TRBV19, TRBJ2-1)
CASPTFVLSGEQFF

SEQ ID NO: 388677 - protein, 11 aa, Homo sapiens
  CDR3 for alpha chain variable domain of TCR clone 194339 (TRAV1-2, TRAJ31)
CAVNNNARLMF

SEQ ID NO: 388678 - protein, 14 aa, Homo sapiens
  CDR3 for beta chain variable domain of TCR clone 194339 (TRBV28, TRBJ2-1)
CASIIAGGRSEQFF

SEQ ID NO: 388679 - protein, 14 aa, Homo sapiens
  CDR3 for alpha chain variable domain of TCR clone 194340 (TRAV38-1, TRAJ40)
CASRPTSGTYKYIF

SEQ ID NO: 388680 - protein, 20 aa, Homo sapiens
  CDR3 for beta chain variable domain of TCR clone 194340 (TRBV11-2, TRBJ2-2)
LRTRPCISVPAALEAGSCFF

SEQ ID NO: 388681 - protein, 14 aa, Homo sapiens
  CDR3 for alpha chain variable domain of TCR clone 194341 (TRAV1-2, TRAJ16)
CSVNRFSDGQKLLF

SEQ ID NO: 388682 - protein, 13 aa, Homo sapiens
  CDR3 for beta chain variable domain of TCR clone 194341 (TRBV7-3, TRBJ2-5)
CASSFRGGETQYF

SEQ ID NO: 388683 - protein, 12 aa, Homo sapiens
  CDR3 for alpha chain variable domain of TCR clone 194342 (TRAV20, TRAJ39)
CAVGNAGNMLTF

SEQ ID NO: 388684 - protein, 15 aa, Homo sapiens
  CDR3 for beta chain variable domain of TCR clone 194342 (TRBV28, TRBJ2-7)
CASKKPSGRAYEQYF

SEQ ID NO: 388685 - protein, 13 aa, Homo sapiens
  CDR3 for alpha chain variable domain of TCR clone 194343 (TRAV13-1, TRAJ49)
CAAIWALGNQFYF

SEQ ID NO: 388686 - protein, 13 aa, Homo sapiens
  CDR3 for beta chain variable domain of TCR clone 194343 (TRBV7-2, TRBJ2-7)
CASSSPSGSEQYF

SEQ ID NO: 388687 - protein, 16 aa, Homo sapiens
  CDR3 for alpha chain variable domain of TCR clone 194344 (TRAV8-3, TRAJ42)
CAVGEGNGGSQGNFIF

SEQ ID NO: 388688 - protein, 14 aa, Homo sapiens
  CDR3 for beta chain variable domain of TCR clone 194344 (TRBV7-2, TRBJ2-1)
CASSRGGARNEQFF

SEQ ID NO: 388689 - protein, 15 aa, Homo sapiens
  CDR3 for alpha chain variable domain of TCR clone 194345 (TRAV12-3, TRAJ6)
CAMSATTGGSYIPTF

SEQ ID NO: 388690 - protein, 13 aa, Homo sapiens
  CDR3 for beta chain variable domain of TCR clone 194345 (TRBV7-9, TRBJ1-2)
CASSLKRNYGYTF

SEQ ID NO: 388691 - protein, 14 aa, Homo sapiens
  CDR3 for alpha chain variable domain of TCR clone 194346 (TRAV13-1, TRAJ6)
CAATITGGSYIPTF

SEQ ID NO: 388692 - protein, 14 aa, Homo sapiens
  CDR3 for beta chain variable domain of TCR clone 194346 (TRBV6-3, TRBJ2-1)
CASLHSAYYNEQFF

SEQ ID NO: 388693 - protein, 11 aa, Homo sapiens
  CDR3 for alpha chain variable domain of TCR clone 194347 (TRAV3, TRAJ21)
FAVGNFNKFYF

SEQ ID NO: 388694 - protein, 14 aa, Homo sapiens
  CDR3 for beta chain variable domain of TCR clone 194347 (TRBV29-1, TRBJ2-2)
CSGRGSGNTGELFF

SEQ ID NO: 388695 - protein, 12 aa, Homo sapiens
  CDR3 for alpha chain variable domain of TCR clone 194348 (TRAV23/DV6, TRAJ31)
CAARRIGARLMF

SEQ ID NO: 388696 - protein, 16 aa, Homo sapiens
  CDR3 for beta chain variable domain of TCR clone 194348 (TRBV28, TRBJ2-7)
CTSVPEKRGGVYEQYF

SEQ ID NO: 388697 - protein, 12 aa, Homo sapiens
  CDR3 for alpha chain variable domain of TCR clone 194349 (TRAV12-3, TRAJ43)
CAISSNNNDMRF

SEQ ID NO: 388698 - protein, 16 aa, Homo sapiens
  CDR3 for beta chain variable domain of TCR clone 194349 (TRBV5-1, TRBJ1-1)
CASSSTTGNSNTEAFF

SEQ ID NO: 388699 - protein, 14 aa, Homo sapiens
  CDR3 for alpha chain variable domain of TCR clone 194350 (TRAV12-3, TRAJ10)
SHLPLTGGGNKLTF

SEQ ID NO: 388700 - protein, 16 aa, Homo sapiens
  CDR3 for beta chain variable domain of TCR clone 194350 (TRBV4-1, TRBJ2-7)
CASSQEWTSGPLEQYF

SEQ ID NO: 388701 - protein, 14 aa, Homo sapiens
  CDR3 for alpha chain variable domain of TCR clone 194351 (TRAV1-2, TRAJ16)
CAVNRFSDGQKLLF

SEQ ID NO: 388702 - protein, 12 aa, Homo sapiens
  CDR3 for beta chain variable domain of TCR clone 194351 (TRBV12-5, TRBJ2-5)
CASGRGVETQYF

SEQ ID NO: 388703 - protein, 13 aa, Homo sapiens
  CDR3 for alpha chain variable domain of TCR clone 194352 (TRAV21, TRAJ27)
CAALNTNAGQSTF

SEQ ID NO: 388704 - protein, 15 aa, Homo sapiens
  CDR3 for beta chain variable domain of TCR clone 194352 (TRBV20-1, TRBJ2-7)
CSARKGLAESYEQYF

SEQ ID NO: 388705 - protein, 14 aa, Homo sapiens
  CDR3 for alpha chain variable domain of TCR clone 194353 (TRAV38-1, TRAJ45)
CAYYSGGGADGLTF

SEQ ID NO: 388706 - protein, 14 aa, Homo sapiens
  CDR3 for beta chain variable domain of TCR clone 194353 (TRBV25-1, TRBJ1-1)
CASTHLGGKTEAFF

SEQ ID NO: 388707 - protein, 11 aa, Homo sapiens
  CDR3 for alpha chain variable domain of TCR clone 194354 (TRAV2, TRAJ13)
CASGGYQKVTF

SEQ ID NO: 388708 - protein, 16 aa, Homo sapiens
  CDR3 for beta chain variable domain of TCR clone 194354 (TRBV5-1, TRBJ2-7)
CASSLVAGGPSGEQYF

SEQ ID NO: 388709 - protein, 13 aa, Homo sapiens
  CDR3 for alpha chain variable domain of TCR clone 194355 (TRAV13-1, TRAJ28)
CAANEAGSYQLTC

SEQ ID NO: 388710 - protein, 15 aa, Homo sapiens
  CDR3 for beta chain variable domain of TCR clone 194355 (TRBV7-9, TRBJ1-6)
CASSSPGRGNSPLHF

SEQ ID NO: 388711 - protein, 14 aa, Homo sapiens
  CDR3 for alpha chain variable domain of TCR clone 194356 (TRAV1-2, TRAJ16)
CAVNRFSDGQKLLF

SEQ ID NO: 388712 - protein, 12 aa, Homo sapiens
  CDR3 for beta chain variable domain of TCR clone 194356 (TRBV12-4, TRBJ1-5)
CASSLGRQPQHF

SEQ ID NO: 388713 - protein, 13 aa, Homo sapiens
  CDR3 for alpha chain variable domain of TCR clone 194357 (TRAV17, TRAJ9)
CATAITGGFKTIF

SEQ ID NO: 388714 - protein, 15 aa, Homo sapiens
  CDR3 for beta chain variable domain of TCR clone 194357 (TRBV15, TRBJ2-1)
CHQQNPSGGYNEQFF

SEQ ID NO: 388715 - protein, 13 aa, Homo sapiens
  CDR3 for alpha chain variable domain of TCR clone 194358 (TRAV8-6, TRAJ21)
CAVSPSSLNKFYF

SEQ ID NO: 388716 - protein, 13 aa, Homo sapiens
  CDR3 for beta chain variable domain of TCR clone 194358 (TRBV24-1, TRBJ1-5)
CATSDRGDQPQHF

SEQ ID NO: 388717 - protein, 16 aa, Homo sapiens
  CDR3 for alpha chain variable domain of TCR clone 194359 (TRAV3, TRAJ37)
CAVRGKGAGNTGKLIF

SEQ ID NO: 388718 - protein, 15 aa, Homo sapiens
  CDR3 for beta chain variable domain of TCR clone 194359 (TRBV7-9, TRBJ1-6)
CASSSPGRGNSPLHF

SEQ ID NO: 388719 - protein, 15 aa, Homo sapiens
  CDR3 for alpha chain variable domain of TCR clone 194360 (TRAV26-1, TRAJ22)
CIVRVSFWFCKATDL

SEQ ID NO: 388720 - protein, 13 aa, Homo sapiens
  CDR3 for beta chain variable domain of TCR clone 194360 (TRBV7-9, TRBJ1-2)
RASSLKQNYGETF

SEQ ID NO: 388721 - protein, 10 aa, Homo sapiens
  CDR3 for alpha chain variable domain of TCR clone 194361 (TRAV8-4, TRAJ43)
CAVSEDDMRF

SEQ ID NO: 388722 - protein, 11 aa, Homo sapiens
  CDR3 for beta chain variable domain of TCR clone 194361 (TRBV12-4, TRBJ2-3)
CASTATDTQYF

SEQ ID NO: 388723 - protein, 11 aa, Homo sapiens
  CDR3 for alpha chain variable domain of TCR clone 194362 (TRAV21, TRAJ41)
CAVRYGYALNF

SEQ ID NO: 388724 - protein, 13 aa, Homo sapiens
  CDR3 for beta chain variable domain of TCR clone 194362 (TRBV7-9, TRBJ1-2)
CASSLKQNYGYTV

SEQ ID NO: 388725 - protein, 13 aa, Homo sapiens
  CDR3 for alpha chain variable domain of TCR clone 194363 (TRAV13-1, TRAJ5)
CAARGTGRRALTF

SEQ ID NO: 388726 - protein, 15 aa, Homo sapiens
  CDR3 for beta chain variable domain of TCR clone 194363 (TRBV28, TRBJ2-7)
CASSPGGRGFYEQYF

SEQ ID NO: 388727 - protein, 18 aa, Homo sapiens
  CDR3 for alpha chain variable domain of TCR clone 194364 (TRAV21, TRAJ52)
CAVRPSPAGGTSYGKLTF

SEQ ID NO: 388728 - protein, 17 aa, Homo sapiens
  CDR3 for beta chain variable domain of TCR clone 194364 (TRBV13, TRBJ2-3)
RASSPSRVAGGRNTQYF

SEQ ID NO: 388729 - protein, 14 aa, Homo sapiens
  CDR3 for alpha chain variable domain of TCR clone 194365 (TRAV35, TRAJ22)
CAGLRPGSARQLTF

SEQ ID NO: 388730 - protein, 13 aa, Homo sapiens
  CDR3 for beta chain variable domain of TCR clone 194365 (TRBV20-1, TRBJ2-7)
CSATHSSGYEQYF

SEQ ID NO: 388731 - protein, 10 aa, Homo sapiens
  CDR3 for alpha chain variable domain of TCR clone 194366 (TRAV23/DV6, TRAJ31)
CARGGARLMF

SEQ ID NO: 388732 - protein, 13 aa, Homo sapiens
  CDR3 for beta chain variable domain of TCR clone 194366 (TRBV7-9, TRBJ2-3)
CASSPGSTDTQYF

SEQ ID NO: 388733 - protein, 20 aa, Homo sapiens
  CDR3 for alpha chain variable domain of TCR clone 194367 (TRAV12-1, TRAJ18)
CVPRTDIGPDRGSTLGRLYF

SEQ ID NO: 388734 - protein, 17 aa, Homo sapiens
  CDR3 for beta chain variable domain of TCR clone 194367 (TRBV13, TRBJ2-3)
CASSLSRVAGGRNTQYF

SEQ ID NO: 388735 - protein, 12 aa, Homo sapiens
  CDR3 for alpha chain variable domain of TCR clone 194368 (TRAV12-1, TRAJ20)
CVVNIDDYKLSF

SEQ ID NO: 388736 - protein, 17 aa, Homo sapiens
  CDR3 for beta chain variable domain of TCR clone 194368 (TRBV20-1, TRBJ2-1)
CSAPPRLAGTRYNEQFF

SEQ ID NO: 388737 - protein, 17 aa, Homo sapiens
  CDR3 for alpha chain variable domain of TCR clone 194369 (TRAV38-1, TRAJ45)
CAFMKHYMGGGADGLTF

SEQ ID NO: 388738 - protein, 14 aa, Homo sapiens
  CDR3 for beta chain variable domain of TCR clone 194369 (TRBV7-2, TRBJ2-7)
CASRSQGAAYEQYF

SEQ ID NO: 388739 - protein, 11 aa, Homo sapiens
  CDR3 for alpha chain variable domain of TCR clone 194370 (TRAV17, TRAJ31)
CATSNNARLMF

SEQ ID NO: 388740 - protein, 13 aa, Homo sapiens
  CDR3 for beta chain variable domain of TCR clone 194370 (TRBV13, TRBJ2-5)
CASSLGGEETQYF

SEQ ID NO: 388741 - protein, 11 aa, Homo sapiens
  CDR3 for alpha chain variable domain of TCR clone 194371 (TRAV17, TRAJ9)
CGFTGGFKTIF

SEQ ID NO: 388742 - protein, 14 aa, Homo sapiens
  CDR3 for beta chain variable domain of TCR clone 194371 (TRBV7-3, TRBJ2-1)
CASSLSGSYNEQFF

SEQ ID NO: 388743 - protein, 11 aa, Homo sapiens
  CDR3 for alpha chain variable domain of TCR clone 194372 (TRAV2, TRAJ23)
CAVETRGKLIF

SEQ ID NO: 388744 - protein, 14 aa, Homo sapiens
  CDR3 for beta chain variable domain of TCR clone 194372 (TRBV7-3, TRBJ2-1)
CASSLAGGTNEQFF

SEQ ID NO: 388745 - protein, 14 aa, Homo sapiens
  CDR3 for alpha chain variable domain of TCR clone 194373 (TRAV12-2, TRAJ17)
CAVLFKAAGNKLTF

SEQ ID NO: 388746 - protein, 14 aa, Homo sapiens
  CDR3 for beta chain variable domain of TCR clone 194373 (TRBV3-1, TRBJ2-7)
CASSPSSGTYEQYF

SEQ ID NO: 388747 - protein, 12 aa, Homo sapiens
  CDR3 for alpha chain variable domain of TCR clone 194374 (TRAV16, TRAJ49)
CALNEGGNQFYF

SEQ ID NO: 388748 - protein, 14 aa, Homo sapiens
  CDR3 for beta chain variable domain of TCR clone 194374 (TRBV7-2, TRBJ1-1)
CASSFLTGTTEAFF

SEQ ID NO: 388749 - protein, 14 aa, Homo sapiens
  CDR3 for alpha chain variable domain of TCR clone 194375 (TRAV35, TRAJ13)
CAWRSPGGYQKVTF

SEQ ID NO: 388750 - protein, 14 aa, Homo sapiens
  CDR3 for beta chain variable domain of TCR clone 194375 (TRBV19, TRBJ2-2)
CASSMVGRSGELFF

SEQ ID NO: 388751 - protein, 11 aa, Homo sapiens
  CDR3 for alpha chain variable domain of TCR clone 194376 (TRAV17, TRAJ31)
CATDRTARLMF

SEQ ID NO: 388752 - protein, 12 aa, Homo sapiens
  CDR3 for beta chain variable domain of TCR clone 194376 (TRBV5-1, TRBJ2-5)
CASSLGLETQYF

SEQ ID NO: 388753 - protein, 15 aa, Homo sapiens
  CDR3 for alpha chain variable domain of TCR clone 194377 (TRAV35, TRAJ50)
CAGQLRKTSYDKVIF

SEQ ID NO: 388754 - protein, 12 aa, Homo sapiens
  CDR3 for beta chain variable domain of TCR clone 194377 (TRBV5-1, TRBJ2-5)
CVGWLGLGGLFF

SEQ ID NO: 388755 - protein, 13 aa, Homo sapiens
  CDR3 for alpha chain variable domain of TCR clone 194378 (TRAV12-2, TRAJ13)
CREKTGGYQKVTF

SEQ ID NO: 388756 - protein, 16 aa, Homo sapiens
  CDR3 for beta chain variable domain of TCR clone 194378 (TRBV4-1, TRBJ2-3)
CASSQSTSGAEDTQYF

SEQ ID NO: 388757 - protein, 14 aa, Homo sapiens
  CDR3 for alpha chain variable domain of TCR clone 194379 (TRAV29/DV5, TRAJ36)
CAARRKTGANNLFF

SEQ ID NO: 388758 - protein, 15 aa, Homo sapiens
  CDR3 for beta chain variable domain of TCR clone 194379 (TRBV28, TRBJ2-5)
CASSSGRVIQETQYF

SEQ ID NO: 388759 - protein, 15 aa, Homo sapiens
  CDR3 for alpha chain variable domain of TCR clone 194380 (TRAV26-1, TRAJ56)
CIVRVATGANSKLTF

SEQ ID NO: 388760 - protein, 15 aa, Homo sapiens
  CDR3 for beta chain variable domain of TCR clone 194380 (TRBV11-2, TRBJ2-2)
CASSSDRVNAGELFF

SEQ ID NO: 388761 - protein, 12 aa, Homo sapiens
  CDR3 for alpha chain variable domain of TCR clone 194381 (TRAV2, TRAJ37)
CAVAGNTGQLIF

SEQ ID NO: 388762 - protein, 17 aa, Homo sapiens
  CDR3 for beta chain variable domain of TCR clone 194381 (TRBV28, TRBJ2-5)
CASSTPEGDALQETQYF

SEQ ID NO: 388763 - protein, 14 aa, Homo sapiens
  CDR3 for alpha chain variable domain of TCR clone 194382 (TRAV9-2, TRAJ39)
CALYIYNAGNMLTF

SEQ ID NO: 388764 - protein, 16 aa, Homo sapiens
  CDR3 for beta chain variable domain of TCR clone 194382 (TRBV29-1, TRBJ2-6)
CSVEDITDSGANVLTF

SEQ ID NO: 388765 - protein, 11 aa, Homo sapiens
  CDR3 for alpha chain variable domain of TCR clone 194383 (TRAV1-2, TRAJ11)
CAVRGYSTLTF

SEQ ID NO: 388766 - protein, 15 aa, Homo sapiens
  CDR3 for beta chain variable domain of TCR clone 194383 (TRBV5-1, TRBJ2-3)
CASSYTSGSTDTQYF

SEQ ID NO: 388767 - protein, 15 aa, Homo sapiens
  CDR3 for alpha chain variable domain of TCR clone 194384 (TRAV12-3, TRAJ27)
CAMRAYSTNAGKSTF

SEQ ID NO: 388768 - protein, 13 aa, Homo sapiens
  CDR3 for beta chain variable domain of TCR clone 194384 (TRBV11-2, TRBJ2-5)
CGSSRGPSETQYL

SEQ ID NO: 388769 - protein, 14 aa, Homo sapiens
  CDR3 for alpha chain variable domain of TCR clone 194385 (TRAV13-1, TRAJ35)
CAASKGGFGNVLHC

SEQ ID NO: 388770 - protein, 15 aa, Homo sapiens
  CDR3 for beta chain variable domain of TCR clone 194385 (TRBV7-2, TRBJ2-1)
CASTHGTGIYNEQFF

SEQ ID NO: 388771 - protein, 11 aa, Homo sapiens
  CDR3 for alpha chain variable domain of TCR clone 194386 (TRAV1-1, TRAJ23)
CAVRQGGKLIF

SEQ ID NO: 388772 - protein, 15 aa, Homo sapiens
  CDR3 for beta chain variable domain of TCR clone 194386 (TRBV6-5, TRBJ2-7)
CASSRTSGFSYEQYF

SEQ ID NO: 388773 - protein, 15 aa, Homo sapiens
  CDR3 for alpha chain variable domain of TCR clone 194387 (TRAV26-1, TRAJ38)
CIADNAGNNHIQNPA

SEQ ID NO: 388774 - protein, 13 aa, Homo sapiens
  CDR3 for beta chain variable domain of TCR clone 194387 (TRBV20-1, TRBJ1-1)
CSARGGGNTEAFF

SEQ ID NO: 388775 - protein, 17 aa, Homo sapiens
  CDR3 for alpha chain variable domain of TCR clone 194388 (TRAV36/DV7, TRAJ52)
CAVAQRAGGTSYGKLTF

SEQ ID NO: 388776 - protein, 14 aa, Homo sapiens
  CDR3 for beta chain variable domain of TCR clone 194388 (TRBV7-3, TRBJ2-1)
CASSLTGGANEQFF

SEQ ID NO: 388777 - protein, 17 aa, Homo sapiens
  CDR3 for alpha chain variable domain of TCR clone 194389 (TRAV26-1, TRAJ58)
CIVRVGAEDTRGSRLTF

SEQ ID NO: 388778 - protein, 13 aa, Homo sapiens
  CDR3 for beta chain variable domain of TCR clone 194389 (TRBV12-5, TRBJ1-2)
CASGVRTGNGYTF

SEQ ID NO: 388779 - protein, 13 aa, Homo sapiens
  CDR3 for alpha chain variable domain of TCR clone 194390 (TRAV21, TRAJ37)
CAVSSGNTGKLIF

SEQ ID NO: 388780 - protein, 15 aa, Homo sapiens
  CDR3 for beta chain variable domain of TCR clone 194390 (TRBV10-3, TRBJ2-3)
CAISLTSGGTDTQYF

SEQ ID NO: 388781 - protein, 12 aa, Homo sapiens
  CDR3 for alpha chain variable domain of TCR clone 194391 (TRAV1-1, TRAJ8)
CAGGTGFQKLVF

SEQ ID NO: 388782 - protein, 12 aa, Homo sapiens
  CDR3 for beta chain variable domain of TCR clone 194391 (TRBV3-1, TRBJ2-2)
CASSLFPGELFF

SEQ ID NO: 388783 - protein, 13 aa, Homo sapiens
  CDR3 for alpha chain variable domain of TCR clone 194392 (TRAV27, TRAJ45)
CRSSGGGADGLTF

SEQ ID NO: 388784 - protein, 16 aa, Homo sapiens
  CDR3 for beta chain variable domain of TCR clone 194392 (TRBV7-9, TRBJ2-1)
CASSDVAGGSYNEQFF

SEQ ID NO: 388785 - protein, 12 aa, Homo sapiens
  CDR3 for alpha chain variable domain of TCR clone 194393 (TRAV3, TRAJ20)
CAVRDPDYKLSL

SEQ ID NO: 388786 - protein, 15 aa, Homo sapiens
  CDR3 for beta chain variable domain of TCR clone 194393 (TRBV2, TRBJ2-2)
CASSRETVGTGELFF

SEQ ID NO: 388787 - protein, 13 aa, Homo sapiens
  CDR3 for alpha chain variable domain of TCR clone 194394 (TRAV12-3, TRAJ13)
CAMSSGGYQKVTF

SEQ ID NO: 388788 - protein, 14 aa, Homo sapiens
  CDR3 for beta chain variable domain of TCR clone 194394 (TRBV6-3, TRBJ2-1)
CASSIALGSNEQFF

SEQ ID NO: 388789 - protein, 14 aa, Homo sapiens
  CDR3 for alpha chain variable domain of TCR clone 194395 (TRAV12-2, TRAJ44)
GAVNPAGTASKLTF

SEQ ID NO: 388790 - protein, 13 aa, Homo sapiens
  CDR3 for beta chain variable domain of TCR clone 194395 (TRBV20-1, TRBJ1-6)
CSAPLGVGSPLHF

SEQ ID NO: 388791 - protein, 14 aa, Homo sapiens
  CDR3 for alpha chain variable domain of TCR clone 194396 (TRAV12-3, TRAJ10)
SHLPLTGGGNKLTF

SEQ ID NO: 388792 - protein, 19 aa, Homo sapiens
  CDR3 for beta chain variable domain of TCR clone 194396 (TRBV18, TRBJ1-3)
CASSPLSRTGMSSGNTIYF

SEQ ID NO: 388793 - protein, 14 aa, Homo sapiens
  CDR3 for alpha chain variable domain of TCR clone 194397 (TRAV1-2, TRAJ8)
CAVREDTGFQKLVF

SEQ ID NO: 388794 - protein, 13 aa, Homo sapiens
  CDR3 for beta chain variable domain of TCR clone 194397 (TRBV18, TRBJ2-7)
CASQSGGGYEQYF

SEQ ID NO: 388795 - protein, 12 aa, Homo sapiens
  CDR3 for alpha chain variable domain of TCR clone 194398 (TRAV16, TRAJ10)
CSRTGGGNKLTF

SEQ ID NO: 388796 - protein, 12 aa, Homo sapiens
  CDR3 for beta chain variable domain of TCR clone 194398 (TRBV18, TRBJ2-1)
CASSSDEDEQSF

SEQ ID NO: 388797 - protein, 14 aa, Homo sapiens
  CDR3 for alpha chain variable domain of TCR clone 194399 (TRAV26-1, TRAJ38)
CIADNDGNNRKLIW

SEQ ID NO: 388798 - protein, 16 aa, Homo sapiens
  CDR3 for beta chain variable domain of TCR clone 194399 (TRBV19, TRBJ2-1)
CASSKAGPSSYNEQFF

SEQ ID NO: 388799 - protein, 15 aa, Homo sapiens
  CDR3 for alpha chain variable domain of TCR clone 194400 (TRAV12-1, TRAJ4)
CVVTPWMGGYNKLIF

SEQ ID NO: 388800 - protein, 17 aa, Homo sapiens
  CDR3 for beta chain variable domain of TCR clone 194400 (TRBV28, TRBJ2-5)
CASSRQGGLAGAETQYF

SEQ ID NO: 388801 - protein, 13 aa, Homo sapiens
  CDR3 for alpha chain variable domain of TCR clone 194401 (TRAV12-1, TRAJ11)
CVVNRAGYSTLTF

SEQ ID NO: 388802 - protein, 18 aa, Homo sapiens
  CDR3 for beta chain variable domain of TCR clone 194401 (TRBV20-1, TRBJ2-6)
CSAETTPTHGSGANVLTF

SEQ ID NO: 388803 - protein, 14 aa, Homo sapiens
  CDR3 for alpha chain variable domain of TCR clone 194402 (TRAV16, TRAJ15)
CALSGPQAGTALIF

SEQ ID NO: 388804 - protein, 12 aa, Homo sapiens
  CDR3 for beta chain variable domain of TCR clone 194402 (TRBV18, TRBJ2-5)
CASSRSKETQYF

SEQ ID NO: 388805 - protein, 16 aa, Homo sapiens
  CDR3 for alpha chain variable domain of TCR clone 194403 (TRAV30, TRAJ24)
CGTEIVDADSCGKFQF

SEQ ID NO: 388806 - protein, 11 aa, Homo sapiens
  CDR3 for beta chain variable domain of TCR clone 194403 (TRBV29-1, TRBJ2-5)
CSEDRTGTQYF

SEQ ID NO: 388807 - protein, 18 aa, Homo sapiens
  CDR3 for alpha chain variable domain of TCR clone 194404 (TRAV17, TRAJ28)
CATDPPRGSGAGSYQLTF

SEQ ID NO: 388808 - protein, 14 aa, Homo sapiens
  CDR3 for beta chain variable domain of TCR clone 194404 (TRBV13, TRBJ2-5)
CAGSLDYPQETQYF

SEQ ID NO: 388809 - protein, 19 aa, Homo sapiens
  CDR3 for alpha chain variable domain of TCR clone 194405 (TRAV3, TRAJ6)
CAVRDRNPSRSGGSYIPTF

SEQ ID NO: 388810 - protein, 16 aa, Homo sapiens
  CDR3 for beta chain variable domain of TCR clone 194405 (TRBV4-2, TRBJ2-3)
CASSQELAGDTDTQYF

SEQ ID NO: 388811 - protein, 11 aa, Homo sapiens
  CDR3 for alpha chain variable domain of TCR clone 194406 (TRAV8-3, TRAJ16)
CAVVPCQKLLF

SEQ ID NO: 388812 - protein, 12 aa, Homo sapiens
  CDR3 for beta chain variable domain of TCR clone 194406 (TRBV3-1, TRBJ1-1)
CASSQDPTDAFF

SEQ ID NO: 388813 - protein, 15 aa, Homo sapiens
  CDR3 for alpha chain variable domain of TCR clone 194407 (TRAV29/DV5, TRAJ29)
CAASERSSGNTPLVF

SEQ ID NO: 388814 - protein, 10 aa, Homo sapiens
  CDR3 for beta chain variable domain of TCR clone 194407 (TRBV4-1, TRBJ1-4)
CASSQEGPRG

SEQ ID NO: 388815 - protein, 12 aa, Homo sapiens
  CDR3 for alpha chain variable domain of TCR clone 194408 (TRAV13-1, TRAJ21)
CAAQEGFNKFYF

SEQ ID NO: 388816 - protein, 15 aa, Homo sapiens
  CDR3 for beta chain variable domain of TCR clone 194408 (TRBV19, TRBJ2-4)
CASRGPRRGENIQYF

SEQ ID NO: 388817 - protein, 13 aa, Homo sapiens
  CDR3 for alpha chain variable domain of TCR clone 194409 (TRAV2, TRAJ24)
CDLQLTAGGNSSL

SEQ ID NO: 388818 - protein, 13 aa, Homo sapiens
  CDR3 for beta chain variable domain of TCR clone 194409 (TRBV7-9, TRBJ1-2)
CASSLKQNYGDIF

SEQ ID NO: 388819 - protein, 13 aa, Homo sapiens
  CDR3 for alpha chain variable domain of TCR clone 194410 (TRAV3, TRAJ8)
CAVRFTGFQKLVF

SEQ ID NO: 388820 - protein, 15 aa, Homo sapiens
  CDR3 for beta chain variable domain of TCR clone 194410 (TRBV20-1, TRBJ2-7)
CRARDRVSGMDEQYF

SEQ ID NO: 388821 - protein, 14 aa, Homo sapiens
  CDR3 for alpha chain variable domain of TCR clone 194411 (TRAV8-3, TRAJ35)
CAVVTQGFGNVLHC

SEQ ID NO: 388822 - protein, 15 aa, Homo sapiens
  CDR3 for beta chain variable domain of TCR clone 194411 (TRBV6-1, TRBJ2-2)
CASSAGQGYTGELFF

SEQ ID NO: 388823 - protein, 13 aa, Homo sapiens
  CDR3 for alpha chain variable domain of TCR clone 194412 (TRAV3, TRAJ29)
CAVRDITDTPLVF

SEQ ID NO: 388824 - protein, 14 aa, Homo sapiens
  CDR3 for beta chain variable domain of TCR clone 194412 (TRBV27, TRBJ2-1)
CASSATGGYNEQFF

SEQ ID NO: 388825 - protein, 14 aa, Homo sapiens
  CDR3 for alpha chain variable domain of TCR clone 194413 (TRAV12-2, TRAJ53)
CAVKGGGSNYKLTF

SEQ ID NO: 388826 - protein, 14 aa, Homo sapiens
  CDR3 for beta chain variable domain of TCR clone 194413 (TRBV7-7, TRBJ2-2)
CATRQDSGTGELFF

SEQ ID NO: 388827 - protein, 14 aa, Homo sapiens
  CDR3 for alpha chain variable domain of TCR clone 194414 (TRAV38-1, TRAJ45)
CAYYSGGGADGLTF

SEQ ID NO: 388828 - protein, 13 aa, Homo sapiens
  CDR3 for beta chain variable domain of TCR clone 194414 (TRBV4-2, TRBJ1-1)
CASSQAGNTEAFF

SEQ ID NO: 388829 - protein, 13 aa, Homo sapiens
  CDR3 for alpha chain variable domain of TCR clone 194415 (TRAV8-3, TRAJ43)
CAVGPDNNNDMRF

SEQ ID NO: 388830 - protein, 12 aa, Homo sapiens
  CDR3 for beta chain variable domain of TCR clone 194415 (TRBV7-2, TRBJ1-6)
CASSLSSSTLLF

SEQ ID NO: 388831 - protein, 15 aa, Homo sapiens
  CDR3 for alpha chain variable domain of TCR clone 194416 (TRAV3, TRAJ22)
CAVRDRSGSARQLTF

SEQ ID NO: 388832 - protein, 12 aa, Homo sapiens
  CDR3 for beta chain variable domain of TCR clone 194416 (TRBV12-4, TRBJ1-2)
CASSFIWLHLRF

SEQ ID NO: 388833 - protein, 11 aa, Homo sapiens
  CDR3 for alpha chain variable domain of TCR clone 194417 (TRAV12-1, TRAJ21)
CVVNNFNKFYF

SEQ ID NO: 388834 - protein, 15 aa, Homo sapiens
  CDR3 for beta chain variable domain of TCR clone 194417 (TRBV19, TRBJ2-7)
CASSPAGSGEAVRYF

SEQ ID NO: 388835 - protein, 13 aa, Homo sapiens
  CDR3 for alpha chain variable domain of TCR clone 194418 (TRAV8-3, TRAJ6)
CAARRGGSYIPTF

SEQ ID NO: 388836 - protein, 15 aa, Homo sapiens
  CDR3 for beta chain variable domain of TCR clone 194418 (TRBV4-1, TRBJ2-3)
CASSNLAGGLDTQYF

SEQ ID NO: 388837 - protein, 14 aa, Homo sapiens
  CDR3 for alpha chain variable domain of TCR clone 194419 (TRAV2, TRAJ9)
CAVEDRSGGFKTIF

SEQ ID NO: 388838 - protein, 16 aa, Homo sapiens
  CDR3 for beta chain variable domain of TCR clone 194419 (TRBV12-4, TRBJ2-5)
CASSPGTSGRQETQYF

SEQ ID NO: 388839 - protein, 13 aa, Homo sapiens
  CDR3 for alpha chain variable domain of TCR clone 194420 (TRAV17, TRAJ26)
CATVDNYGQNFVF

SEQ ID NO: 388840 - protein, 15 aa, Homo sapiens
  CDR3 for beta chain variable domain of TCR clone 194420 (TRBV12-4, TRBJ1-2)
CASSPITGGGYGYTF

SEQ ID NO: 388841 - protein, 12 aa, Homo sapiens
  CDR3 for alpha chain variable domain of TCR clone 194421 (TRAV38-1, TRAJ47)
CAFETYGNKQVF

SEQ ID NO: 388842 - protein, 15 aa, Homo sapiens
  CDR3 for beta chain variable domain of TCR clone 194421 (TRBV5-7, TRBJ2-7)
CASSGGRPVPYEQYF

SEQ ID NO: 388843 - protein, 14 aa, Homo sapiens
  CDR3 for alpha chain variable domain of TCR clone 194422 (TRAV16, TRAJ42)
CSLLAGGSQGNLIF

SEQ ID NO: 388844 - protein, 13 aa, Homo sapiens
  CDR3 for beta chain variable domain of TCR clone 194422 (TRBV7-9, TRBJ1-2)
CASSLKQNYGYTF

SEQ ID NO: 388845 - protein, 15 aa, Homo sapiens
  CDR3 for alpha chain variable domain of TCR clone 194423 (TRAV13-2, TRAJ10)
CAENRDTGGGNKLTF

SEQ ID NO: 388846 - protein, 20 aa, Homo sapiens
  CDR3 for beta chain variable domain of TCR clone 194423 (TRBV28, TRBJ2-1)
CASTPIGRSPGLAGGNELFF

SEQ ID NO: 388847 - protein, 17 aa, Homo sapiens
  CDR3 for alpha chain variable domain of TCR clone 194424 (TRAV2, TRAJ32)
CAFNPPSQGGATNKLIF

SEQ ID NO: 388848 - protein, 12 aa, Homo sapiens
  CDR3 for beta chain variable domain of TCR clone 194424 (TRBV20-1, TRBJ2-7)
CSAITPTKEQYF

SEQ ID NO: 388849 - protein, 13 aa, Homo sapiens
  CDR3 for alpha chain variable domain of TCR clone 194425 (TRAV8-1, TRAJ30)
CAVIMNSDYKIIF

SEQ ID NO: 388850 - protein, 14 aa, Homo sapiens
  CDR3 for beta chain variable domain of TCR clone 194425 (TRBV7-2, TRBJ1-6)
CASSLQGANSPLHF

SEQ ID NO: 388851 - protein, 18 aa, Homo sapiens
  CDR3 for alpha chain variable domain of TCR clone 194426 (TRAV13-1, TRAJ52)
CAAKNPNAGGTSYGKLTF

SEQ ID NO: 388852 - protein, 15 aa, Homo sapiens
  CDR3 for beta chain variable domain of TCR clone 194426 (TRBV27, TRBJ2-1)
FASSNGGGSSNEQFF

SEQ ID NO: 388853 - protein, 22 aa, Homo sapiens
  CDR3 for alpha chain variable domain of TCR clone 194427 (TRAV2, TRAJ10)
ILQAREADAAVYYTGGGNKLTF

SEQ ID NO: 388854 - protein, 16 aa, Homo sapiens
  CDR3 for beta chain variable domain of TCR clone 194427 (TRBV5-7, TRBJ1-2)
CASSRGVTGGSYGYTF

SEQ ID NO: 388855 - protein, 15 aa, Homo sapiens
  CDR3 for alpha chain variable domain of TCR clone 194428 (TRAV8-3, TRAJ40)
CAAPSLGSGTYKYIF

SEQ ID NO: 388856 - protein, 17 aa, Homo sapiens
  CDR3 for beta chain variable domain of TCR clone 194428 (TRBV5-5, TRBJ1-2)
CASSLGSLDGQSEGYTF

SEQ ID NO: 388857 - protein, 13 aa, Homo sapiens
  CDR3 for alpha chain variable domain of TCR clone 194429 (TRAV3, TRAJ21)
CAVREPDFNKFYF

SEQ ID NO: 388858 - protein, 14 aa, Homo sapiens
  CDR3 for beta chain variable domain of TCR clone 194429 (TRBV4-1, TRBJ2-2)
CASSQAVGTGELFF

SEQ ID NO: 388859 - protein, 14 aa, Homo sapiens
  CDR3 for alpha chain variable domain of TCR clone 194430 (TRAV12-3, TRAJ10)
IHLPLTGGGNKLTF

SEQ ID NO: 388860 - protein, 12 aa, Homo sapiens
  CDR3 for beta chain variable domain of TCR clone 194430 (TRBV7-8, TRBJ2-7)
CASSLGDREQYF

SEQ ID NO: 388861 - protein, 15 aa, Homo sapiens
  CDR3 for alpha chain variable domain of TCR clone 194431 (TRAV12-3, TRAJ11)
CAMSEENSGYSTLTF

SEQ ID NO: 388862 - protein, 12 aa, Homo sapiens
  CDR3 for beta chain variable domain of TCR clone 194431 (TRBV11-2, TRBJ2-2)
CASSLGGGELFF

SEQ ID NO: 388863 - protein, 20 aa, Homo sapiens
  CDR3 for alpha chain variable domain of TCR clone 194432 (TRAV25, TRAJ21)
TATQTTDVGTYPLSFNKFYF

SEQ ID NO: 388864 - protein, 13 aa, Homo sapiens
  CDR3 for beta chain variable domain of TCR clone 194432 (TRBV7-7, TRBJ2-3)
CASSLSRADTQYF

SEQ ID NO: 388865 - protein, 13 aa, Homo sapiens
  CDR3 for alpha chain variable domain of TCR clone 194433 (TRAV27, TRAJ45)
CRSSGGGAGGLTF

SEQ ID NO: 388866 - protein, 11 aa, Homo sapiens
  CDR3 for beta chain variable domain of TCR clone 194433 (TRBV19, TRBJ1-1)
CASSIGSEAFF

SEQ ID NO: 388867 - protein, 15 aa, Homo sapiens
  CDR3 for alpha chain variable domain of TCR clone 194434 (TRAV21, TRAJ53)
CATLNSGGSNYKLTI

SEQ ID NO: 388868 - protein, 12 aa, Homo sapiens
  CDR3 for beta chain variable domain of TCR clone 194434 (TRBV14, TRBJ2-4)
CASSNLKSIQYF

SEQ ID NO: 388869 - protein, 17 aa, Homo sapiens
  CDR3 for alpha chain variable domain of TCR clone 194435 (TRAV12-1, TRAJ32)
CVVNMQGYGGATTKLIF

SEQ ID NO: 388870 - protein, 13 aa, Homo sapiens
  CDR3 for beta chain variable domain of TCR clone 194435 (TRBV6-6, TRBJ2-1)
CASSLHQGDEQFF

SEQ ID NO: 388871 - protein, 18 aa, Homo sapiens
  CDR3 for alpha chain variable domain of TCR clone 194436 (TRAV26-2, TRAJ54)
CILRDVEVGIQGAQKLVF

SEQ ID NO: 388872 - protein, 17 aa, Homo sapiens
  CDR3 for beta chain variable domain of TCR clone 194436 (TRBV7-8, TRBJ2-6)
CASSAGTGGTGANVLTF

SEQ ID NO: 388873 - protein, 13 aa, Homo sapiens
  CDR3 for alpha chain variable domain of TCR clone 194437 (TRAV24, TRAJ23)
CASFLVQGGKLIF

SEQ ID NO: 388874 - protein, 16 aa, Homo sapiens
  CDR3 for beta chain variable domain of TCR clone 194437 (TRBV20-1, TRBJ1-4)
CSAPGQGLLTNEKLFF

SEQ ID NO: 388875 - protein, 21 aa, Homo sapiens
  CDR3 for alpha chain variable domain of TCR clone 194438 (TRAV35, TRAJ52)
CWAGYADGPNAGGTSYGKLNF

SEQ ID NO: 388876 - protein, 12 aa, Homo sapiens
  CDR3 for beta chain variable domain of TCR clone 194438 (TRBV5-1, TRBJ2-7)
CASSFRGYEQYF

SEQ ID NO: 388877 - protein, 12 aa, Homo sapiens
  CDR3 for alpha chain variable domain of TCR clone 194439 (TRAV9-2, TRAJ36)
CALRKGATNLFF

SEQ ID NO: 388878 - protein, 13 aa, Homo sapiens
  CDR3 for beta chain variable domain of TCR clone 194439 (TRBV27, TRBJ1-1)
CASSLSIGAEAFF

SEQ ID NO: 388879 - protein, 14 aa, Homo sapiens
  CDR3 for alpha chain variable domain of TCR clone 194440 (TRAV12-2, TRAJ45)
CAVNKGGGADGLTF

SEQ ID NO: 388880 - protein, 15 aa, Homo sapiens
  CDR3 for beta chain variable domain of TCR clone 194440 (TRBV6-3, TRBJ2-7)
CASSSPGTVFYEQYF

SEQ ID NO: 388881 - protein, 13 aa, Homo sapiens
  CDR3 for alpha chain variable domain of TCR clone 194441 (TRAV27, TRAJ6)
SAGGTRGSYIPTF

SEQ ID NO: 388882 - protein, 14 aa, Homo sapiens
  CDR3 for beta chain variable domain of TCR clone 194441 (TRBV6-3, TRBJ1-1)
CASSYQRRDTEAFF

SEQ ID NO: 388883 - protein, 14 aa, Homo sapiens
  CDR3 for alpha chain variable domain of TCR clone 194442 (TRAV12-2, TRAJ11)
CAVEGGSGYSTLTF

SEQ ID NO: 388884 - protein, 15 aa, Homo sapiens
  CDR3 for beta chain variable domain of TCR clone 194442 (TRBV28, TRBJ2-1)
CASSIIAGGRSEQFF

SEQ ID NO: 388885 - protein, 13 aa, Homo sapiens
  CDR3 for alpha chain variable domain of TCR clone 194443 (TRAV35, TRAJ42)
CAGCPGSQGNLIF

SEQ ID NO: 388886 - protein, 13 aa, Homo sapiens
  CDR3 for beta chain variable domain of TCR clone 194443 (TRBV29-1, TRBJ2-1)
CSVAGGRVNEQFF

SEQ ID NO: 388887 - protein, 15 aa, Homo sapiens
  CDR3 for alpha chain variable domain of TCR clone 194444 (TRAV26-1, TRAJ22)
CIVRVSFWFCKATDL

SEQ ID NO: 388888 - protein, 14 aa, Homo sapiens
  CDR3 for beta chain variable domain of TCR clone 194444 (TRBV7-9, TRBJ2-1)
CASSPGLAGNEQFF

SEQ ID NO: 388889 - protein, 13 aa, Homo sapiens
  CDR3 for alpha chain variable domain of TCR clone 194445 (TRAV12-3, TRAJ9)
CAMRNTGGIKTIF

SEQ ID NO: 388890 - protein, 15 aa, Homo sapiens
  CDR3 for beta chain variable domain of TCR clone 194445 (TRBV20-1, TRBJ2-7)
CSARDRVSGMDEQYF

SEQ ID NO: 388891 - protein, 15 aa, Homo sapiens
  CDR3 for alpha chain variable domain of TCR clone 194446 (TRAV23/DV6, TRAJ18)
CAARYRGSTLGRLYF

SEQ ID NO: 388892 - protein, 13 aa, Homo sapiens
  CDR3 for beta chain variable domain of TCR clone 194446 (TRBV7-2, TRBJ2-7)
CASSSPSESEQYF

SEQ ID NO: 388893 - protein, 10 aa, Homo sapiens
  CDR3 for alpha chain variable domain of TCR clone 194447 (TRAV23/DV6, TRAJ4)
CAARDFWSRD

SEQ ID NO: 388894 - protein, 13 aa, Homo sapiens
  CDR3 for beta chain variable domain of TCR clone 194447 (TRBV7-2, TRBJ1-1)
CASSRNTNAEAFF

SEQ ID NO: 388895 - protein, 13 aa, Homo sapiens
  CDR3 for alpha chain variable domain of TCR clone 194448 (TRAV26-1, TRAJ33)
CIVRVEGNYQLIW

SEQ ID NO: 388896 - protein, 14 aa, Homo sapiens
  CDR3 for beta chain variable domain of TCR clone 194448 (TRBV7-2, TRBJ2-7)
CASSPKTSFYEQYF

SEQ ID NO: 388897 - protein, 15 aa, Homo sapiens
  CDR3 for alpha chain variable domain of TCR clone 194449 (TRAV27, TRAJ38)
CAARRNAGNNRKLIW

SEQ ID NO: 388898 - protein, 15 aa, Homo sapiens
  CDR3 for beta chain variable domain of TCR clone 194449 (TRBV19, TRBJ2-7)
CASSFNSGGVWEQYF

SEQ ID NO: 388899 - protein, 13 aa, Homo sapiens
  CDR3 for alpha chain variable domain of TCR clone 194450 (TRAV35, TRAJ43)
CAGYPYNNNYMRF

SEQ ID NO: 388900 - protein, 15 aa, Homo sapiens
  CDR3 for beta chain variable domain of TCR clone 194450 (TRBV25-1, TRBJ1-4)
CASSKRIAINEKLFF

SEQ ID NO: 388901 - protein, 14 aa, Homo sapiens
  CDR3 for alpha chain variable domain of TCR clone 194451 (TRAV17, TRAJ57)
CATDPQGGSEKLVF

SEQ ID NO: 388902 - protein, 16 aa, Homo sapiens
  CDR3 for beta chain variable domain of TCR clone 194451 (TRBV20-1, TRBJ1-4)
CSAPVQGLLTNEKLFF

SEQ ID NO: 388903 - protein, 12 aa, Homo sapiens
  CDR3 for alpha chain variable domain of TCR clone 194452 (TRAV8-3, TRAJ26)
CAGDNYGQNFVF

SEQ ID NO: 388904 - protein, 13 aa, Homo sapiens
  CDR3 for beta chain variable domain of TCR clone 194452 (TRBV20-1, TRBJ1-1)
SSAPLGGGTEAFF

SEQ ID NO: 388905 - protein, 13 aa, Homo sapiens
  CDR3 for alpha chain variable domain of TCR clone 194453 (TRAV2, TRAJ40)
CAVVTSGTYKYIF

SEQ ID NO: 388906 - protein, 15 aa, Homo sapiens
  CDR3 for beta chain variable domain of TCR clone 194453 (TRBV11-3, TRBJ2-3)
CASLKDGREGDTQFF

SEQ ID NO: 388907 - protein, 14 aa, Homo sapiens
  CDR3 for alpha chain variable domain of TCR clone 194454 (TRAV35, TRAJ33)
CAGSSQDSNYQLVW

SEQ ID NO: 388908 - protein, 15 aa, Homo sapiens
  CDR3 for beta chain variable domain of TCR clone 194454 (TRBV5-1, TRBJ1-4)
FAPAAWKDGNEKLFF

SEQ ID NO: 388909 - protein, 15 aa, Homo sapiens
  CDR3 for alpha chain variable domain of TCR clone 194455 (TRAV26-1, TRAJ29)
CIVRVEGSGNTPLVF

SEQ ID NO: 388910 - protein, 13 aa, Homo sapiens
  CDR3 for beta chain variable domain of TCR clone 194455 (TRBV7-2, TRBJ2-2)
CASSSVRAGELFF

SEQ ID NO: 388911 - protein, 17 aa, Homo sapiens
  CDR3 for alpha chain variable domain of TCR clone 194456 (TRAV3, TRAJ6)
CAVRDGPRAGGSYIPTS

SEQ ID NO: 388912 - protein, 20 aa, Homo sapiens
  CDR3 for beta chain variable domain of TCR clone 194456 (TRBV28, TRBJ2-1)
CASTPIGRSPGLAGGNEQFL

SEQ ID NO: 388913 - protein, 10 aa, Homo sapiens
  CDR3 for alpha chain variable domain of TCR clone 194457 (TRAV12-1, TRAJ37)
ARGNKGKLIF

SEQ ID NO: 388914 - protein, 15 aa, Homo sapiens
  CDR3 for beta chain variable domain of TCR clone 194457 (TRBV7-2, TRBJ2-3)
CASSLEQGGTDTQYF

SEQ ID NO: 388915 - protein, 13 aa, Homo sapiens
  CDR3 for alpha chain variable domain of TCR clone 194458 (TRAV1-2, TRAJ9)
SAALNTGGFKTIF

SEQ ID NO: 388916 - protein, 13 aa, Homo sapiens
  CDR3 for beta chain variable domain of TCR clone 194458 (TRBV19, TRBJ1-2)
CASSVPGQDGYTF

SEQ ID NO: 388917 - protein, 14 aa, Homo sapiens
  CDR3 for alpha chain variable domain of TCR clone 194459 (TRAV8-6, TRAJ37)
CAVRLAGNTGKLIF

SEQ ID NO: 388918 - protein, 18 aa, Homo sapiens
  CDR3 for beta chain variable domain of TCR clone 194459 (TRBV7-9, TRBJ2-7)
CASSLTTSGSRTWYEQYF

SEQ ID NO: 388919 - protein, 11 aa, Homo sapiens
  CDR3 for alpha chain variable domain of TCR clone 194460 (TRAV17, TRAJ9)
CATTGGFKTIF

SEQ ID NO: 388920 - protein, 13 aa, Homo sapiens
  CDR3 for beta chain variable domain of TCR clone 194460 (TRBV11-3, TRBJ1-1)
CATEEGLNTEAFF

SEQ ID NO: 388921 - protein, 16 aa, Homo sapiens
  CDR3 for alpha chain variable domain of TCR clone 194461 (TRAV13-1, TRAJ42)
CAASGEYGGSQGNLIF

SEQ ID NO: 388922 - protein, 12 aa, Homo sapiens
  CDR3 for beta chain variable domain of TCR clone 194461 (TRBV11-2, TRBJ1-1)
CQQLSLQPAAFF

SEQ ID NO: 388923 - protein, 13 aa, Homo sapiens
  CDR3 for alpha chain variable domain of TCR clone 194462 (TRAV2, TRAJ40)
CAVVTSGTYKYIF

SEQ ID NO: 388924 - protein, 12 aa, Homo sapiens
  CDR3 for beta chain variable domain of TCR clone 194462 (TRBV9, TRBJ2-2)
CASSLVTGELFF

SEQ ID NO: 388925 - protein, 15 aa, Homo sapiens
  CDR3 for alpha chain variable domain of TCR clone 194463 (TRAV13-1, TRAJ32)
CAASNGWWCYNQAHL

SEQ ID NO: 388926 - protein, 17 aa, Homo sapiens
  CDR3 for beta chain variable domain of TCR clone 194463 (TRBV15, TRBJ1-2)
CATSGREIDVVSYGYTF

SEQ ID NO: 388927 - protein, 12 aa, Homo sapiens
  CDR3 for alpha chain variable domain of TCR clone 194464 (TRAV12-3, TRAJ41)
CAMSYSGYALNF

SEQ ID NO: 388928 - protein, 13 aa, Homo sapiens
  CDR3 for beta chain variable domain of TCR clone 194464 (TRBV7-3, TRBJ2-1)
CASSIDSYNEQFF

SEQ ID NO: 388929 - protein, 16 aa, Homo sapiens
  CDR3 for alpha chain variable domain of TCR clone 194465 (TRAV4, TRAJ5)
CLVGPDHGHGQESTYF

SEQ ID NO: 388930 - protein, 14 aa, Homo sapiens
  CDR3 for beta chain variable domain of TCR clone 194465 (TRBV2, TRBJ1-1)
CASTQVGENTEAFF

SEQ ID NO: 388931 - protein, 13 aa, Homo sapiens
  CDR3 for alpha chain variable domain of TCR clone 194466 (TRAV29/DV5, TRAJ9)
CAASETGGFKTIF

SEQ ID NO: 388932 - protein, 15 aa, Homo sapiens
  CDR3 for beta chain variable domain of TCR clone 194466 (TRBV19, TRBJ2-1)
CASSMGSGTGRQHFF

SEQ ID NO: 388933 - protein, 15 aa, Homo sapiens
  CDR3 for alpha chain variable domain of TCR clone 194467 (TRAV21, TRAJ18)
CAVRDRGSPLGRLYF

SEQ ID NO: 388934 - protein, 17 aa, Homo sapiens
  CDR3 for beta chain variable domain of TCR clone 194467 (TRBV7-2, TRBJ2-3)
CASSSYSGTRRADTQYF

SEQ ID NO: 388935 - protein, 15 aa, Homo sapiens
  CDR3 for alpha chain variable domain of TCR clone 194468 (TRAV14/DV4, TRAJ10)
CAMRELTGGGNKLTF

SEQ ID NO: 388936 - protein, 13 aa, Homo sapiens
  CDR3 for beta chain variable domain of TCR clone 194468 (TRBV7-9, TRBJ1-2)
CASSLKQNYDYTF

SEQ ID NO: 388937 - protein, 12 aa, Homo sapiens
  CDR3 for alpha chain variable domain of TCR clone 194469 (TRAV12-3, TRAJ17)
CAMTLTVNKLTF

SEQ ID NO: 388938 - protein, 15 aa, Homo sapiens
  CDR3 for beta chain variable domain of TCR clone 194469 (TRBV20-1, TRBJ2-7)
CSARYRVSGMDEQYF

SEQ ID NO: 388939 - protein, 13 aa, Homo sapiens
  CDR3 for alpha chain variable domain of TCR clone 194470 (TRAV21, TRAJ27)
CAARPCNAGKSTF

SEQ ID NO: 388940 - protein, 14 aa, Homo sapiens
  CDR3 for beta chain variable domain of TCR clone 194470 (TRBV7-6, TRBJ2-3)
CASSVGTVTDTQYF

SEQ ID NO: 388941 - protein, 15 aa, Homo sapiens
  CDR3 for alpha chain variable domain of TCR clone 194471 (TRAV8-3, TRAJ21)
CAVGALPPRGYKFYF

SEQ ID NO: 388942 - protein, 15 aa, Homo sapiens
  CDR3 for beta chain variable domain of TCR clone 194471 (TRBV7-8, TRBJ1-5)
CASSLGRRGLEPQHF

SEQ ID NO: 388943 - protein, 16 aa, Homo sapiens
  CDR3 for alpha chain variable domain of TCR clone 194472 (TRAV12-2, TRAJ40)
CAVIRGGTAGTYKYIF

SEQ ID NO: 388944 - protein, 14 aa, Homo sapiens
  CDR3 for beta chain variable domain of TCR clone 194472 (TRBV25-1, TRBJ1-1)
CASTHLGGNTEAFF

SEQ ID NO: 388945 - protein, 15 aa, Homo sapiens
  CDR3 for alpha chain variable domain of TCR clone 194473 (TRAV8-6, TRAJ26)
CAVSDQSPGGQNFVF

SEQ ID NO: 388946 - protein, 14 aa, Homo sapiens
  CDR3 for beta chain variable domain of TCR clone 194473 (TRBV6-1, TRBJ1-3)
CASVQGGGGNTIYF

SEQ ID NO: 388947 - protein, 14 aa, Homo sapiens
  CDR3 for alpha chain variable domain of TCR clone 194474 (TRAV12-2, TRAJ13)
CAVNKTGGYQKVTF

SEQ ID NO: 388948 - protein, 15 aa, Homo sapiens
  CDR3 for beta chain variable domain of TCR clone 194474 (TRBV7-8, TRBJ2-5)
CASSDAAGSQETQYV

SEQ ID NO: 388949 - protein, 16 aa, Homo sapiens
  CDR3 for alpha chain variable domain of TCR clone 194475 (TRAV4, TRAJ18)
CCVLLIGGSTLGRLYF

SEQ ID NO: 388950 - protein, 16 aa, Homo sapiens
  CDR3 for beta chain variable domain of TCR clone 194475 (TRBV18, TRBJ1-6)
CASSQTEISYNSPLHF

SEQ ID NO: 388951 - protein, 12 aa, Homo sapiens
  CDR3 for alpha chain variable domain of TCR clone 194476 (TRAV21, TRAJ33)
CAKKDSNYQLIW

SEQ ID NO: 388952 - protein, 14 aa, Homo sapiens
  CDR3 for beta chain variable domain of TCR clone 194476 (TRBV2, TRBJ2-7)
CASSLTSGGYEQYF

SEQ ID NO: 388953 - protein, 15 aa, Homo sapiens
  CDR3 for alpha chain variable domain of TCR clone 194477 (TRAV13-2, TRAJ22)
CAENSRPGSASQLTF

SEQ ID NO: 388954 - protein, 17 aa, Homo sapiens
  CDR3 for beta chain variable domain of TCR clone 194477 (TRBV20-1, TRBJ2-6)
CSATRDRGPSGANVLTF

SEQ ID NO: 388955 - protein, 18 aa, Homo sapiens
  CDR3 for alpha chain variable domain of TCR clone 194478 (TRAV13-1, TRAJ52)
CAASIVSSGGTSYGKLTF

SEQ ID NO: 388956 - protein, 15 aa, Homo sapiens
  CDR3 for beta chain variable domain of TCR clone 194478 (TRBV20-1, TRBJ1-5)
CSAFKNGQRNQPQHF

SEQ ID NO: 388957 - protein, 12 aa, Homo sapiens
  CDR3 for alpha chain variable domain of TCR clone 194479 (TRAV21, TRAJ42)
CAVGGSQGNLIF

SEQ ID NO: 388958 - protein, 14 aa, Homo sapiens
  CDR3 for beta chain variable domain of TCR clone 194479 (TRBV7-6, TRBJ2-3)
CASSLGTVTDTQYF

SEQ ID NO: 388959 - protein, 16 aa, Homo sapiens
  CDR3 for alpha chain variable domain of TCR clone 194480 (TRAV16, TRAJ21)
CACGWATTSPNFTLDL

SEQ ID NO: 388960 - protein, 15 aa, Homo sapiens
  CDR3 for beta chain variable domain of TCR clone 194480 (TRBV19, TRBJ2-1)
CASSIQATSYNEQFF

SEQ ID NO: 388961 - protein, 17 aa, Homo sapiens
  CDR3 for alpha chain variable domain of TCR clone 194481 (TRAV12-2, TRAJ45)
CAVNIWGSGGGADGLTF

SEQ ID NO: 388962 - protein, 18 aa, Homo sapiens
  CDR3 for beta chain variable domain of TCR clone 194481 (TRBV20-1, TRBJ2-6)
CSAETTPTHGSGANVLTS

SEQ ID NO: 388963 - protein, 12 aa, Homo sapiens
  CDR3 for alpha chain variable domain of TCR clone 194482 (TRAV3, TRAJ20)
CAVRDGDYKLSF

SEQ ID NO: 388964 - protein, 12 aa, Homo sapiens
  CDR3 for beta chain variable domain of TCR clone 194482 (TRBV24-1, TRBJ2-3)
CATSDSTDTQYF

SEQ ID NO: 388965 - protein, 18 aa, Homo sapiens
  CDR3 for alpha chain variable domain of TCR clone 194483 (TRAV8-3, TRAJ4)
WVRDPTSNDPGGYNKLIF

SEQ ID NO: 388966 - protein, 13 aa, Homo sapiens
  CDR3 for beta chain variable domain of TCR clone 194483 (TRBV20-1, TRBJ1-2)
CSATGIQGYGYTF

SEQ ID NO: 388967 - protein, 16 aa, Homo sapiens
  CDR3 for alpha chain variable domain of TCR clone 194484 (TRAV20, TRAJ38)
CAVQASNAGNNREPIW

SEQ ID NO: 388968 - protein, 16 aa, Homo sapiens
  CDR3 for beta chain variable domain of TCR clone 194484 (TRBV7-8, TRBJ2-6)
CASRVGDSSGANVLTF

SEQ ID NO: 388969 - protein, 13 aa, Homo sapiens
  CDR3 for alpha chain variable domain of TCR clone 194485 (TRAV13-1, TRAJ21)
CAASIYNFNKFYF

SEQ ID NO: 388970 - protein, 16 aa, Homo sapiens
  CDR3 for beta chain variable domain of TCR clone 194485 (TRBV7-2, TRBJ2-7)
CASSLEAGGPWYEQYF

SEQ ID NO: 388971 - protein, 12 aa, Homo sapiens
  CDR3 for alpha chain variable domain of TCR clone 194486 (TRAV12-2, TRAJ47)
CAVAEYGNKLVF

SEQ ID NO: 388972 - protein, 15 aa, Homo sapiens
  CDR3 for beta chain variable domain of TCR clone 194486 (TRBV28, TRBJ2-1)
CASSIIEGGRSEQFF

SEQ ID NO: 388973 - protein, 15 aa, Homo sapiens
  CDR3 for alpha chain variable domain of TCR clone 194487 (TRAV25, TRAJ52)
CAGRPGGTSYGKLTF

SEQ ID NO: 388974 - protein, 12 aa, Homo sapiens
  CDR3 for beta chain variable domain of TCR clone 194487 (TRBV12-4, TRBJ2-1)
CASSPGRNEQFF

SEQ ID NO: 388975 - protein, 12 aa, Homo sapiens
  CDR3 for alpha chain variable domain of TCR clone 194488 (TRAV12-3, TRAJ48)
CAMRIGNEKLTF

SEQ ID NO: 388976 - protein, 12 aa, Homo sapiens
  CDR3 for beta chain variable domain of TCR clone 194488 (TRBV13, TRBJ2-7)
CASSLQAYELYF

SEQ ID NO: 388977 - protein, 14 aa, Homo sapiens
  CDR3 for alpha chain variable domain of TCR clone 194489 (TRAV12-1, TRAJ17)
CVVNYKAAGNKLTF

SEQ ID NO: 388978 - protein, 17 aa, Homo sapiens
  CDR3 for beta chain variable domain of TCR clone 194489 (TRBV20-1, TRBJ2-1)
CSASSPGLAGSYNGQFF

SEQ ID NO: 388979 - protein, 14 aa, Homo sapiens
  CDR3 for alpha chain variable domain of TCR clone 194490 (TRAV12-1, TRAJ30)
CVVNIGGRDGKNIF

SEQ ID NO: 388980 - protein, 14 aa, Homo sapiens
  CDR3 for beta chain variable domain of TCR clone 194490 (TRBV7-6, TRBJ2-3)
CASSLGTVTDTQYF

SEQ ID NO: 388981 - protein, 15 aa, Homo sapiens
  CDR3 for alpha chain variable domain of TCR clone 194491 (TRAV13-1, TRAJ5)
CAASKADTGRRALTF

SEQ ID NO: 388982 - protein, 15 aa, Homo sapiens
  CDR3 for beta chain variable domain of TCR clone 194491 (TRBV7-2, TRBJ2-1)
CQQLRRTSGDNEQFF

SEQ ID NO: 388983 - protein, 15 aa, Homo sapiens
  CDR3 for alpha chain variable domain of TCR clone 194492 (TRAV3, TRAJ17)
FAVSPKEAAGNKLTF

SEQ ID NO: 388984 - protein, 12 aa, Homo sapiens
  CDR3 for beta chain variable domain of TCR clone 194492 (TRBV7-9, TRBJ1-6)
CASSLMTSPLHF

SEQ ID NO: 388985 - protein, 15 aa, Homo sapiens
  CDR3 for alpha chain variable domain of TCR clone 194493 (TRAV8-4, TRAJ36)
CAVRKSWTGANNLFF

SEQ ID NO: 388986 - protein, 17 aa, Homo sapiens
  CDR3 for beta chain variable domain of TCR clone 194493 (TRBV3-1, TRBJ2-2)
CASSKDSQGPNTGELFF

SEQ ID NO: 388987 - protein, 12 aa, Homo sapiens
  CDR3 for alpha chain variable domain of TCR clone 194494 (TRAV2, TRAJ9)
CAVGAGGFKTIF

SEQ ID NO: 388988 - protein, 14 aa, Homo sapiens
  CDR3 for beta chain variable domain of TCR clone 194494 (TRBV7-9, TRBJ2-1)
CASSPRDSLYEQFF

SEQ ID NO: 388989 - protein, 13 aa, Homo sapiens
  CDR3 for alpha chain variable domain of TCR clone 194495 (TRAV8-3, TRAJ43)
CAVEPYNNNDMRF

SEQ ID NO: 388990 - protein, 17 aa, Homo sapiens
  CDR3 for beta chain variable domain of TCR clone 194495 (TRBV7-7, TRBJ1-1)
CASIGDRPNLGVTEAFF

SEQ ID NO: 388991 - protein, 14 aa, Homo sapiens
  CDR3 for alpha chain variable domain of TCR clone 194496 (TRAV1-2, TRAJ8)
CAVREDTGLQKLVF

SEQ ID NO: 388992 - protein, 20 aa, Homo sapiens
  CDR3 for beta chain variable domain of TCR clone 194496 (TRBV7-8, TRBJ2-2)
CASSHLFPGPTIHITGELFF

SEQ ID NO: 388993 - protein, 11 aa, Homo sapiens
  CDR3 for alpha chain variable domain of TCR clone 194497 (TRAV12-3, TRAJ20)
CAMSSDYKLSF

SEQ ID NO: 388994 - protein, 14 aa, Homo sapiens
  CDR3 for beta chain variable domain of TCR clone 194497 (TRBV7-2, TRBJ2-7)
CASSPKTSFYEQYF

SEQ ID NO: 388995 - protein, 13 aa, Homo sapiens
  CDR3 for alpha chain variable domain of TCR clone 194498 (TRAV16, TRAJ58)
CALSIPSGPWLTF

SEQ ID NO: 388996 - protein, 15 aa, Homo sapiens
  CDR3 for beta chain variable domain of TCR clone 194498 (TRBV2, TRBJ2-5)
RASSEQGLIGETQYF

SEQ ID NO: 388997 - protein, 14 aa, Homo sapiens
  CDR3 for alpha chain variable domain of TCR clone 194499 (TRAV23/DV6, TRAJ27)
CAASRHTNAGKSTF

SEQ ID NO: 388998 - protein, 13 aa, Homo sapiens
  CDR3 for beta chain variable domain of TCR clone 194499 (TRBV20-1, TRBJ1-5)
CSASGRGNQPQHF

SEQ ID NO: 388999 - protein, 14 aa, Homo sapiens
  CDR3 for alpha chain variable domain of TCR clone 194500 (TRAV2, TRAJ37)
CAVDFTSNTGKLII

SEQ ID NO: 389000 - protein, 15 aa, Homo sapiens
  CDR3 for beta chain variable domain of TCR clone 194500 (TRBV7-9, TRBJ1-4)
CASSARTGGNEKLFF

SEQ ID NO: 389001 - protein, 14 aa, Homo sapiens
  CDR3 for alpha chain variable domain of TCR clone 194501 (TRAV1-2, TRAJ8)
CAAREDTGFQKLVF

SEQ ID NO: 389002 - protein, 15 aa, Homo sapiens
  CDR3 for beta chain variable domain of TCR clone 194501 (TRBV29-1, TRBJ2-1)
CSVPTGLALYNEQFF

SEQ ID NO: 389003 - protein, 13 aa, Homo sapiens
  CDR3 for alpha chain variable domain of TCR clone 194502 (TRAV2, TRAJ40)
CAVVTSGTYKYIF

SEQ ID NO: 389004 - protein, 13 aa, Homo sapiens
  CDR3 for beta chain variable domain of TCR clone 194502 (TRBV11-2, TRBJ2-1)
CASSLGLAGGRFF

SEQ ID NO: 389005 - protein, 21 aa, Homo sapiens
  CDR3 for alpha chain variable domain of TCR clone 194503 (TRAV1-1, TRAJ6)
CLLLLRCERLERTGGSYIPTF

SEQ ID NO: 389006 - protein, 13 aa, Homo sapiens
  CDR3 for beta chain variable domain of TCR clone 194503 (TRBV10-2, TRBJ2-7)
WASGASGGYEQYF

SEQ ID NO: 389007 - protein, 13 aa, Homo sapiens
  CDR3 for alpha chain variable domain of TCR clone 194504 (TRAV17, TRAJ31)
CATAENNNARLMF

SEQ ID NO: 389008 - protein, 14 aa, Homo sapiens
  CDR3 for beta chain variable domain of TCR clone 194504 (TRBV11-2, TRBJ2-1)
CASSPSRQGGGQFF

SEQ ID NO: 389009 - protein, 12 aa, Homo sapiens
  CDR3 for alpha chain variable domain of TCR clone 194505 (TRAV35, TRAJ49)
CAGWNTGNQFYF

SEQ ID NO: 389010 - protein, 16 aa, Homo sapiens
  CDR3 for beta chain variable domain of TCR clone 194505 (TRBV5-1, TRBJ2-2)
CASSVWDTTNTGELFF

SEQ ID NO: 389011 - protein, 11 aa, Homo sapiens
  CDR3 for alpha chain variable domain of TCR clone 194506 (TRAV3, TRAJ21)
CAVGNFNKFYF

SEQ ID NO: 389012 - protein, 18 aa, Homo sapiens
  CDR3 for beta chain variable domain of TCR clone 194506 (TRBV24-1, TRBJ2-1)
TSVPPVTFRLGTYNEQFF

SEQ ID NO: 389013 - protein, 15 aa, Homo sapiens
  CDR3 for alpha chain variable domain of TCR clone 194507 (TRAV3, TRAJ22)
CAVRDRGGSARQLTF

SEQ ID NO: 389014 - protein, 14 aa, Homo sapiens
  CDR3 for beta chain variable domain of TCR clone 194507 (TRBV19, TRBJ1-5)
CASSLGLIGQPHHF

SEQ ID NO: 389015 - protein, 13 aa, Homo sapiens
  CDR3 for alpha chain variable domain of TCR clone 194508 (TRAV3, TRAJ3)
CAVADSSASKIIF

SEQ ID NO: 389016 - protein, 12 aa, Homo sapiens
  CDR3 for beta chain variable domain of TCR clone 194508 (TRBV11-2, TRBJ2-2)
CASSLGGGELFF

SEQ ID NO: 389017 - protein, 12 aa, Homo sapiens
  CDR3 for alpha chain variable domain of TCR clone 194509 (TRAV3, TRAJ20)
CAVRDPDYKLSV

SEQ ID NO: 389018 - protein, 13 aa, Homo sapiens
  CDR3 for beta chain variable domain of TCR clone 194509 (TRBV9, TRBJ2-1)
CASSVGQGGEQFF

SEQ ID NO: 389019 - protein, 15 aa, Homo sapiens
  CDR3 for alpha chain variable domain of TCR clone 194510 (TRAV26-1, TRAJ47)
CIVRVGWGYGNKLVF

SEQ ID NO: 389020 - protein, 11 aa, Homo sapiens
  CDR3 for beta chain variable domain of TCR clone 194510 (TRBV29-1, TRBJ2-5)
YSEDRTGTQYF

SEQ ID NO: 389021 - protein, 15 aa, Homo sapiens
  CDR3 for alpha chain variable domain of TCR clone 194511 (TRAV25, TRAJ53)
CAATGGGGSNYKLTL

SEQ ID NO: 389022 - protein, 12 aa, Homo sapiens
  CDR3 for beta chain variable domain of TCR clone 194511 (TRBV7-8, TRBJ2-7)
CASSLGDREQYF

SEQ ID NO: 389023 - protein, 15 aa, Homo sapiens
  CDR3 for alpha chain variable domain of TCR clone 194512 (TRAV27, TRAJ38)
CAARRNAGNNRKLLW

SEQ ID NO: 389024 - protein, 13 aa, Homo sapiens
  CDR3 for beta chain variable domain of TCR clone 194512 (TRBV12-5, TRBJ2-3)
CARGDRQSDTQYF

SEQ ID NO: 389025 - protein, 12 aa, Homo sapiens
  CDR3 for alpha chain variable domain of TCR clone 194513 (TRAV3, TRAJ31)
CAVRDGNARLMC

SEQ ID NO: 389026 - protein, 18 aa, Homo sapiens
  CDR3 for beta chain variable domain of TCR clone 194513 (TRBV7-2, TRBJ2-3)
CASSLKREGSGITDTQYF

SEQ ID NO: 389027 - protein, 12 aa, Homo sapiens
  CDR3 for alpha chain variable domain of TCR clone 194514 (TRAV12-3, TRAJ17)
CAMTLTGNNLTF

SEQ ID NO: 389028 - protein, 13 aa, Homo sapiens
  CDR3 for beta chain variable domain of TCR clone 194514 (TRBV10-3, TRBJ1-2)
CAISERDSYGYTF

SEQ ID NO: 389029 - protein, 14 aa, Homo sapiens
  CDR3 for alpha chain variable domain of TCR clone 194515 (TRAV12-2, TRAJ13)
CAVKKTGGYQKVTF

SEQ ID NO: 389030 - protein, 15 aa, Homo sapiens
  CDR3 for beta chain variable domain of TCR clone 194515 (TRBV25-1, TRBJ2-2)
CAILVYRGGQGAQNR

SEQ ID NO: 389031 - protein, 11 aa, Homo sapiens
  CDR3 for alpha chain variable domain of TCR clone 194516 (TRAV2, TRAJ33)
CAVDSNYQLIW

SEQ ID NO: 389032 - protein, 15 aa, Homo sapiens
  CDR3 for beta chain variable domain of TCR clone 194516 (TRBV5-7, TRBJ2-7)
CASSLGPGRGHEQYF

SEQ ID NO: 389033 - protein, 15 aa, Homo sapiens
  CDR3 for alpha chain variable domain of TCR clone 194517 (TRAV13-2, TRAJ16)
CAENDRFSDGQKLLF

SEQ ID NO: 389034 - protein, 17 aa, Homo sapiens
  CDR3 for beta chain variable domain of TCR clone 194517 (TRBV11-2, TRBJ2-1)
CASSLYPPGVEYNEQFF

SEQ ID NO: 389035 - protein, 14 aa, Homo sapiens
  CDR3 for alpha chain variable domain of TCR clone 194518 (TRAV8-3, TRAJ4)
CAVGASGGYNKLIF

SEQ ID NO: 389036 - protein, 17 aa, Homo sapiens
  CDR3 for beta chain variable domain of TCR clone 194518 (TRBV11-2, TRBJ2-1)
CASSLYPPVVEYNEQFF

SEQ ID NO: 389037 - protein, 17 aa, Homo sapiens
  CDR3 for alpha chain variable domain of TCR clone 194519 (TRAV8-6, TRAJ58)
CAVSSWVGETSGSRLSF

SEQ ID NO: 389038 - protein, 17 aa, Homo sapiens
  CDR3 for beta chain variable domain of TCR clone 194519 (TRBV4-3, TRBJ1-2)
CASSSRLQAGGSVGYTF

SEQ ID NO: 389039 - protein, 11 aa, Homo sapiens
  CDR3 for alpha chain variable domain of TCR clone 194520 (TRAV2, TRAJ13)
CASGGYQKVTF

SEQ ID NO: 389040 - protein, 13 aa, Homo sapiens
  CDR3 for beta chain variable domain of TCR clone 194520 (TRBV7-2, TRBJ2-5)
CASSYWTGETQYF

SEQ ID NO: 389041 - protein, 12 aa, Homo sapiens
  CDR3 for alpha chain variable domain of TCR clone 194521 (TRAV21, TRAJ49)
CAVSWTGKQFYF

SEQ ID NO: 389042 - protein, 18 aa, Homo sapiens
  CDR3 for beta chain variable domain of TCR clone 194521 (TRBV7-8, TRBJ2-1)
CASSPAEGLAGGLNEQFF

SEQ ID NO: 389043 - protein, 15 aa, Homo sapiens
  CDR3 for alpha chain variable domain of TCR clone 194522 (TRAV12-3, TRAJ6)
CAMSATTGGSYIPTF

SEQ ID NO: 389044 - protein, 11 aa, Homo sapiens
  CDR3 for beta chain variable domain of TCR clone 194522 (TRBV23-1, TRBJ2-7)
SSSGTGLEQYF

SEQ ID NO: 389045 - protein, 16 aa, Homo sapiens
  CDR3 for alpha chain variable domain of TCR clone 194523 (TRAV3, TRAJ37)
CAVRPHGSGNTGKLIF

SEQ ID NO: 389046 - protein, 16 aa, Homo sapiens
  CDR3 for beta chain variable domain of TCR clone 194523 (TRBV9, TRBJ1-2)
CAGSVEEKVSPYGYAF

SEQ ID NO: 389047 - protein, 13 aa, Homo sapiens
  CDR3 for alpha chain variable domain of TCR clone 194524 (TRAV3, TRAJ21)
CAVREPDFNKFYF

SEQ ID NO: 389048 - protein, 14 aa, Homo sapiens
  CDR3 for beta chain variable domain of TCR clone 194524 (TRBV6-5, TRBJ1-1)
CASRQGGMNTEAFF

SEQ ID NO: 389049 - protein, 12 aa, Homo sapiens
  CDR3 for alpha chain variable domain of TCR clone 194525 (TRAV12-1, TRAJ35)
CPAGALGMCCIA

SEQ ID NO: 389050 - protein, 15 aa, Homo sapiens
  CDR3 for beta chain variable domain of TCR clone 194525 (TRBV19, TRBJ1-2)
CASSVGQVLNYGYTF

SEQ ID NO: 389051 - protein, 13 aa, Homo sapiens
  CDR3 for alpha chain variable domain of TCR clone 194526 (TRAV13-1, TRAJ11)
CAAVLAGYSTLTF

SEQ ID NO: 389052 - protein, 15 aa, Homo sapiens
  CDR3 for beta chain variable domain of TCR clone 194526 (TRBV19, TRBJ2-7)
CASSPAGSGEALRYF

SEQ ID NO: 389053 - protein, 13 aa, Homo sapiens
  CDR3 for alpha chain variable domain of TCR clone 194527 (TRAV35, TRAJ42)
CAGFPGSQGNLIF

SEQ ID NO: 389054 - protein, 13 aa, Homo sapiens
  CDR3 for beta chain variable domain of TCR clone 194527 (TRBV29-1, TRBJ2-1)
CSVEGGIVNEQFF

SEQ ID NO: 389055 - protein, 13 aa, Homo sapiens
  CDR3 for alpha chain variable domain of TCR clone 194528 (TRAV12-1, TRAJ40)
CVVPTSGTYNYIF

SEQ ID NO: 389056 - protein, 13 aa, Homo sapiens
  CDR3 for beta chain variable domain of TCR clone 194528 (TRBV4-2, TRBJ1-1)
CASSQAGNTEAFF

SEQ ID NO: 389057 - protein, 16 aa, Homo sapiens
  CDR3 for alpha chain variable domain of TCR clone 194529 (TRAV30, TRAJ24)
CGTEIVDADSWGKFQF

SEQ ID NO: 389058 - protein, 14 aa, Homo sapiens
  CDR3 for beta chain variable domain of TCR clone 194529 (TRBV7-9, TRBJ2-4)
RASSLAMGGNIQYF

SEQ ID NO: 389059 - protein, 13 aa, Homo sapiens
  CDR3 for alpha chain variable domain of TCR clone 194530 (TRAV17, TRAJ5)
CATMDTGRGALTL

SEQ ID NO: 389060 - protein, 15 aa, Homo sapiens
  CDR3 for beta chain variable domain of TCR clone 194530 (TRBV20-1, TRBJ2-5)
CSATRTSGSLETQYF

SEQ ID NO: 389061 - protein, 15 aa, Homo sapiens
  CDR3 for alpha chain variable domain of TCR clone 194531 (TRAV1-2, TRAJ26)
CAVRDLITMVRILSF

SEQ ID NO: 389062 - protein, 17 aa, Homo sapiens
  CDR3 for beta chain variable domain of TCR clone 194531 (TRBV13, TRBJ2-3)
CASSLSRVAGGRNTQYF

SEQ ID NO: 389063 - protein, 13 aa, Homo sapiens
  CDR3 for alpha chain variable domain of TCR clone 194532 (TRAV8-3, TRAJ6)
CAVEKGGSYIPTF

SEQ ID NO: 389064 - protein, 12 aa, Homo sapiens
  CDR3 for beta chain variable domain of TCR clone 194532 (TRBV19, TRBJ1-1)
CASSIGTEEALF

SEQ ID NO: 389065 - protein, 16 aa, Homo sapiens
  CDR3 for alpha chain variable domain of TCR clone 194533 (TRAV35, TRAJ28)
CAGYLYSGAGSYKLTF

SEQ ID NO: 389066 - protein, 16 aa, Homo sapiens
  CDR3 for beta chain variable domain of TCR clone 194533 (TRBV5-1, TRBJ2-1)
CASSHGLAGPQNEQFF

SEQ ID NO: 389067 - protein, 16 aa, Homo sapiens
  CDR3 for alpha chain variable domain of TCR clone 194534 (TRAV13-1, TRAJ37)
CAASSLGSSDKGKLIF

SEQ ID NO: 389068 - protein, 12 aa, Homo sapiens
  CDR3 for beta chain variable domain of TCR clone 194534 (TRBV6-1, TRBJ2-5)
CASSEGRETQYF

SEQ ID NO: 389069 - protein, 10 aa, Homo sapiens
  CDR3 for alpha chain variable domain of TCR clone 194535 (TRAV12-3, TRAJ49)
CAMNDDQFYF

SEQ ID NO: 389070 - protein, 15 aa, Homo sapiens
  CDR3 for beta chain variable domain of TCR clone 194535 (TRBV7-2, TRBJ2-1)
CASSLVAGRYNEQFF

SEQ ID NO: 389071 - protein, 20 aa, Homo sapiens
  CDR3 for alpha chain variable domain of TCR clone 194536 (TRAV4, TRAJ29)
CCVLLPRGCVPFSGNTPLVF

SEQ ID NO: 389072 - protein, 17 aa, Homo sapiens
  CDR3 for beta chain variable domain of TCR clone 194536 (TRBV27, TRBJ2-6)
CASSLTGFASGANVLTF

SEQ ID NO: 389073 - protein, 11 aa, Homo sapiens
  CDR3 for alpha chain variable domain of TCR clone 194537 (TRAV3, TRAJ21)
CAVGNFNKFYF

SEQ ID NO: 389074 - protein, 16 aa, Homo sapiens
  CDR3 for beta chain variable domain of TCR clone 194537 (TRBV29-1, TRBJ2-7)
CSVEDAEDGTAYEQYF

SEQ ID NO: 389075 - protein, 13 aa, Homo sapiens
  CDR3 for alpha chain variable domain of TCR clone 194538 (TRAV27, TRAJ11)
CAGARSGYSTLTF

SEQ ID NO: 389076 - protein, 17 aa, Homo sapiens
  CDR3 for beta chain variable domain of TCR clone 194538 (TRBV11-2, TRBJ2-3)
CASSPTGTGGLTDTQYF

SEQ ID NO: 389077 - protein, 15 aa, Homo sapiens
  CDR3 for alpha chain variable domain of TCR clone 194539 (TRAV25, TRAJ53)
CPTSNSGGSNYKLTF

SEQ ID NO: 389078 - protein, 17 aa, Homo sapiens
  CDR3 for beta chain variable domain of TCR clone 194539 (TRBV11-2, TRBJ2-1)
CASSVCPPGVEYNEQFF

SEQ ID NO: 389079 - protein, 14 aa, Homo sapiens
  CDR3 for alpha chain variable domain of TCR clone 194540 (TRAV12-3, TRAJ9)
CAMSPNTGGFKTIF

SEQ ID NO: 389080 - protein, 11 aa, Homo sapiens
  CDR3 for beta chain variable domain of TCR clone 194540 (TRBV29-1, TRBJ2-5)
CSEDRTGTQYC

SEQ ID NO: 389081 - protein, 13 aa, Homo sapiens
  CDR3 for alpha chain variable domain of TCR clone 194541 (TRAV21, TRAJ27)
CASRPGNAGKSTF

SEQ ID NO: 389082 - protein, 17 aa, Homo sapiens
  CDR3 for beta chain variable domain of TCR clone 194541 (TRBV7-6, TRBJ2-1)
HASLCQQLGGGADEQFF

SEQ ID NO: 389083 - protein, 16 aa, Homo sapiens
  CDR3 for alpha chain variable domain of TCR clone 194542 (TRAV12-3, TRAJ53)
CAMSPGSGGSNYKLTY

SEQ ID NO: 389084 - protein, 14 aa, Homo sapiens
  CDR3 for beta chain variable domain of TCR clone 194542 (TRBV20-1, TRBJ1-4)
CSAPPGQGNEKLFF

SEQ ID NO: 389085 - protein, 12 aa, Homo sapiens
  CDR3 for alpha chain variable domain of TCR clone 194543 (TRAV21, TRAJ33)
CAKMDSNYQLIW

SEQ ID NO: 389086 - protein, 16 aa, Homo sapiens
  CDR3 for beta chain variable domain of TCR clone 194543 (TRBV20-1, TRBJ2-1)
CSASLAGGPGYNEQFF

SEQ ID NO: 389087 - protein, 17 aa, Homo sapiens
  CDR3 for alpha chain variable domain of TCR clone 194544 (TRAV17, TRAJ28)
CATDPRRGGAGSYQLTF

SEQ ID NO: 389088 - protein, 16 aa, Homo sapiens
  CDR3 for beta chain variable domain of TCR clone 194544 (TRBV5-1, TRBJ1-1)
CASSSGGNSLNTEAFF

SEQ ID NO: 389089 - protein, 13 aa, Homo sapiens
  CDR3 for alpha chain variable domain of TCR clone 194545 (TRAV3, TRAJ21)
CAVREPDFNKFYF

SEQ ID NO: 389090 - protein, 14 aa, Homo sapiens
  CDR3 for beta chain variable domain of TCR clone 194545 (TRBV7-2, TRBJ1-3)
CASSRGGTGNTMYF

SEQ ID NO: 389091 - protein, 16 aa, Homo sapiens
  CDR3 for alpha chain variable domain of TCR clone 194546 (TRAV38-1, TRAJ56)
CAFMKRQTGANSKLTF

SEQ ID NO: 389092 - protein, 18 aa, Homo sapiens
  CDR3 for beta chain variable domain of TCR clone 194546 (TRBV11-2, TRBJ2-3)
CASSLGGASRGAPNTQYF

SEQ ID NO: 389093 - protein, 14 aa, Homo sapiens
  CDR3 for alpha chain variable domain of TCR clone 194547 (TRAV3, TRAJ9)
CAVRGNTGGFKTIF

SEQ ID NO: 389094 - protein, 16 aa, Homo sapiens
  CDR3 for beta chain variable domain of TCR clone 194547 (TRBV7-2, TRBJ2-7)
CASRLGLAGGASEQYF

SEQ ID NO: 389095 - protein, 12 aa, Homo sapiens
  CDR3 for alpha chain variable domain of TCR clone 194548 (TRAV12-3, TRAJ34)
CAMGYNTDKLIF

SEQ ID NO: 389096 - protein, 14 aa, Homo sapiens
  CDR3 for beta chain variable domain of TCR clone 194548 (TRBV5-6, TRBJ1-5)
CSSSRTGGGQPQHF

SEQ ID NO: 389097 - protein, 16 aa, Homo sapiens
  CDR3 for alpha chain variable domain of TCR clone 194549 (TRAV17, TRAJ16)
CATADFSDGRSCSLQG

SEQ ID NO: 389098 - protein, 12 aa, Homo sapiens
  CDR3 for beta chain variable domain of TCR clone 194549 (TRBV24-1, TRBJ1-1)
CATLYPDTEAFF

SEQ ID NO: 389099 - protein, 14 aa, Homo sapiens
  CDR3 for alpha chain variable domain of TCR clone 194550 (TRAV2, TRAJ37)
CAVDFTSNTVKLIF

SEQ ID NO: 389100 - protein, 13 aa, Homo sapiens
  CDR3 for beta chain variable domain of TCR clone 194550 (TRBV20-1, TRBJ1-1)
SSAPLGGGTEAFF

SEQ ID NO: 389101 - protein, 17 aa, Homo sapiens
  CDR3 for alpha chain variable domain of TCR clone 194551 (TRAV26-1, TRAJ58)
CIVRGGAEETSGSRLTF

SEQ ID NO: 389102 - protein, 13 aa, Homo sapiens
  CDR3 for beta chain variable domain of TCR clone 194551 (TRBV12-5, TRBJ1-2)
CASGVRTGNGYTF

SEQ ID NO: 389103 - protein, 14 aa, Homo sapiens
  CDR3 for alpha chain variable domain of TCR clone 194552 (TRAV12-3, TRAJ54)
CAMRGIQGAQKLVF

SEQ ID NO: 389104 - protein, 13 aa, Homo sapiens
  CDR3 for beta chain variable domain of TCR clone 194552 (TRBV19, TRBJ1-1)
CAISPSNGGEAFF

SEQ ID NO: 389105 - protein, 13 aa, Homo sapiens
  CDR3 for alpha chain variable domain of TCR clone 194553 (TRAV35, TRAJ36)
CAGPRIGANNPFF

SEQ ID NO: 389106 - protein, 15 aa, Homo sapiens
  CDR3 for beta chain variable domain of TCR clone 194553 (TRBV28, TRBJ2-5)
CASSPPWSYQETQYC

SEQ ID NO: 389107 - protein, 16 aa, Homo sapiens
  CDR3 for alpha chain variable domain of TCR clone 194554 (TRAV23/DV6, )
CADIQNPDPAVYQLRV

SEQ ID NO: 389108 - protein, 13 aa, Homo sapiens
  CDR3 for beta chain variable domain of TCR clone 194554 (TRBV28, TRBJ2-7)
CASRSSGVYEQYF

SEQ ID NO: 389109 - protein, 14 aa, Homo sapiens
  CDR3 for alpha chain variable domain of TCR clone 194555 (TRAV12-3, TRAJ9)
CAMSVEPGGFKTIF

SEQ ID NO: 389110 - protein, 14 aa, Homo sapiens
  CDR3 for beta chain variable domain of TCR clone 194555 (TRBV7-2, TRBJ2-7)
CASRSQGAAYEQYF

SEQ ID NO: 389111 - protein, 11 aa, Homo sapiens
  CDR3 for alpha chain variable domain of TCR clone 194556 (TRAV1-1, TRAJ23)
CAVRQGGKLIF

SEQ ID NO: 389112 - protein, 20 aa, Homo sapiens
  CDR3 for beta chain variable domain of TCR clone 194556 (TRBV7-8, TRBJ2-2)
RASSHLFPGPTIHNTGELFF

SEQ ID NO: 389113 - protein, 13 aa, Homo sapiens
  CDR3 for alpha chain variable domain of TCR clone 194557 (TRAV2, TRAJ40)
CAVVTSGTYKYIL

SEQ ID NO: 389114 - protein, 16 aa, Homo sapiens
  CDR3 for beta chain variable domain of TCR clone 194557 (TRBV4-2, TRBJ2-5)
CASSQELVGSQETQYF

SEQ ID NO: 389115 - protein, 14 aa, Homo sapiens
  CDR3 for alpha chain variable domain of TCR clone 194558 (TRAV12-2, TRAJ45)
CAAYSGGGADGLTF

SEQ ID NO: 389116 - protein, 16 aa, Homo sapiens
  CDR3 for beta chain variable domain of TCR clone 194558 (TRBV12-4, TRBJ2-5)
CASSFFVRGRQETQYF

SEQ ID NO: 389117 - protein, 15 aa, Homo sapiens
  CDR3 for alpha chain variable domain of TCR clone 194559 (TRAV23/DV6, TRAJ32)
CAASKMGGATNKLIF

SEQ ID NO: 389118 - protein, 14 aa, Homo sapiens
  CDR3 for beta chain variable domain of TCR clone 194559 (TRBV4-1, TRBJ2-2)
CASSQAVNTGELFF

SEQ ID NO: 389119 - protein, 16 aa, Homo sapiens
  CDR3 for alpha chain variable domain of TCR clone 194560 (TRAV3, TRAJ37)
CAVRPHGSGNTGKRIF

SEQ ID NO: 389120 - protein, 16 aa, Homo sapiens
  CDR3 for beta chain variable domain of TCR clone 194560 (TRBV20-1, TRBJ1-4)
CSAPGQGLLTNEKLFF

SEQ ID NO: 389121 - protein, 10 aa, Homo sapiens
  CDR3 for alpha chain variable domain of TCR clone 194561 (TRAV30, TRAJ48)
CGIGNEKLTF

SEQ ID NO: 389122 - protein, 15 aa, Homo sapiens
  CDR3 for beta chain variable domain of TCR clone 194561 (TRBV10-2, TRBJ2-6)
CASSEQGTGANVLTF

SEQ ID NO: 389123 - protein, 17 aa, Homo sapiens
  CDR3 for alpha chain variable domain of TCR clone 194562 (TRAV26-1, TRAJ53)
CIFRVDDRGGSNYKLTF

SEQ ID NO: 389124 - protein, 15 aa, Homo sapiens
  CDR3 for beta chain variable domain of TCR clone 194562 (TRBV20-1, TRBJ2-7)
CSARDRVSGMDEQYF

SEQ ID NO: 389125 - protein, 13 aa, Homo sapiens
  CDR3 for alpha chain variable domain of TCR clone 194563 (TRAV12-2, TRAJ4)
CAGCSGGYNKLIF

SEQ ID NO: 389126 - protein, 14 aa, Homo sapiens
  CDR3 for beta chain variable domain of TCR clone 194563 (TRBV24-1, TRBJ1-1)
CATSIPRGDTEAFF

SEQ ID NO: 389127 - protein, 12 aa, Homo sapiens
  CDR3 for alpha chain variable domain of TCR clone 194564 (TRAV25, TRAJ31)
RAGHLNNARLMF

SEQ ID NO: 389128 - protein, 16 aa, Homo sapiens
  CDR3 for beta chain variable domain of TCR clone 194564 (TRBV10-3, TRBJ2-1)
CAIRGGGRGDYNEQFF

SEQ ID NO: 389129 - protein, 15 aa, Homo sapiens
  CDR3 for alpha chain variable domain of TCR clone 194565 (TRAV2, TRAJ15)
CAVEDREQAGTALVF

SEQ ID NO: 389130 - protein, 13 aa, Homo sapiens
  CDR3 for beta chain variable domain of TCR clone 194565 (TRBV10-2, TRBJ2-3)
CASSESGDHTQYF

SEQ ID NO: 389131 - protein, 13 aa, Homo sapiens
  CDR3 for alpha chain variable domain of TCR clone 194566 (TRAV13-2, TRAJ48)
CAEMDFGNAQLTF

SEQ ID NO: 389132 - protein, 15 aa, Homo sapiens
  CDR3 for beta chain variable domain of TCR clone 194566 (TRBV7-9, TRBJ1-6)
CASSSPGRGNSPRHF

SEQ ID NO: 389133 - protein, 13 aa, Homo sapiens
  CDR3 for alpha chain variable domain of TCR clone 194567 (TRAV21, TRAJ27)
CAARPGNAGKSTF

SEQ ID NO: 389134 - protein, 15 aa, Homo sapiens
  CDR3 for beta chain variable domain of TCR clone 194567 (TRBV7-6, TRBJ1-6)
CASSSPGRGNSPLHF

SEQ ID NO: 389135 - protein, 15 aa, Homo sapiens
  CDR3 for alpha chain variable domain of TCR clone 194568 (TRAV3, TRAJ4)
CAVRDGTGGDNKLIF

SEQ ID NO: 389136 - protein, 16 aa, Homo sapiens
  CDR3 for beta chain variable domain of TCR clone 194568 (TRBV27, TRBJ2-2)
CASSSSGVSNTGEMFF

SEQ ID NO: 389137 - protein, 15 aa, Homo sapiens
  CDR3 for alpha chain variable domain of TCR clone 194569 (TRAV26-1, TRAJ44)
CIVRANTGTASKLTC

SEQ ID NO: 389138 - protein, 16 aa, Homo sapiens
  CDR3 for beta chain variable domain of TCR clone 194569 (TRBV7-7, TRBJ2-1)
CARSLASGTSYNEQFF

SEQ ID NO: 389139 - protein, 16 aa, Homo sapiens
  CDR3 for alpha chain variable domain of TCR clone 194570 (TRAV20, TRAJ22)
CAVQASSSGSARQLTF

SEQ ID NO: 389140 - protein, 15 aa, Homo sapiens
  CDR3 for beta chain variable domain of TCR clone 194570 (TRBV7-2, TRBJ1-2)
CASSPRAGWNYGYTF

SEQ ID NO: 389141 - protein, 13 aa, Homo sapiens
  CDR3 for alpha chain variable domain of TCR clone 194571 (TRAV21, TRAJ27)
CAARPGNAGKSTF

SEQ ID NO: 389142 - protein, 16 aa, Homo sapiens
  CDR3 for beta chain variable domain of TCR clone 194571 (TRBV4-1, TRBJ1-4)
CASSQDLRRGGEKLFF

SEQ ID NO: 389143 - protein, 16 aa, Homo sapiens
  CDR3 for alpha chain variable domain of TCR clone 194572 (TRAV3, TRAJ37)
CAVRPHGSGNTGKLIF

SEQ ID NO: 389144 - protein, 17 aa, Homo sapiens
  CDR3 for beta chain variable domain of TCR clone 194572 (TRBV5-1, TRBJ2-5)
CASSPAALGQNQETQYF

SEQ ID NO: 389145 - protein, 14 aa, Homo sapiens
  CDR3 for alpha chain variable domain of TCR clone 194573 (TRAV3, TRAJ28)
CAVRRGAGSYQLTF

SEQ ID NO: 389146 - protein, 13 aa, Homo sapiens
  CDR3 for beta chain variable domain of TCR clone 194573 (TRBV12-4, TRBJ2-7)
CASSPTETYEQYF

SEQ ID NO: 389147 - protein, 12 aa, Homo sapiens
  CDR3 for alpha chain variable domain of TCR clone 194574 (TRAV12-3, TRAJ17)
CAMTLTGSKLTF

SEQ ID NO: 389148 - protein, 15 aa, Homo sapiens
  CDR3 for beta chain variable domain of TCR clone 194574 (TRBV6-3, TRBJ2-7)
CASSSPGTVFYEQYF

SEQ ID NO: 389149 - protein, 14 aa, Homo sapiens
  CDR3 for alpha chain variable domain of TCR clone 194575 (TRAV8-4, TRAJ40)
CAVIPTAGTYKYIF

SEQ ID NO: 389150 - protein, 15 aa, Homo sapiens
  CDR3 for beta chain variable domain of TCR clone 194575 (TRBV7-2, TRBJ2-1)
CASTSASGDYNEQFF

SEQ ID NO: 389151 - protein, 18 aa, Homo sapiens
  CDR3 for alpha chain variable domain of TCR clone 194576 (TRAV26-2, TRAJ45)
CILRVDKYSGGGADGLTF

SEQ ID NO: 389152 - protein, 20 aa, Homo sapiens
  CDR3 for beta chain variable domain of TCR clone 194576 (TRBV4-1, TRBJ2-2)
CASSQASPPGLASNTGELFF

SEQ ID NO: 389153 - protein, 14 aa, Homo sapiens
  CDR3 for alpha chain variable domain of TCR clone 194577 (TRAV1-2, TRAJ16)
CAVNRFSDGQKLLF

SEQ ID NO: 389154 - protein, 12 aa, Homo sapiens
  CDR3 for beta chain variable domain of TCR clone 194577 (TRBV11-2, TRBJ2-2)
CASSLGGEELFF

SEQ ID NO: 389155 - protein, 10 aa, Homo sapiens
  CDR3 for alpha chain variable domain of TCR clone 194578 (TRAV13-1, TRAJ52)
CAAKTPMLVV

SEQ ID NO: 389156 - protein, 18 aa, Homo sapiens
  CDR3 for beta chain variable domain of TCR clone 194578 (TRBV4-1, TRBJ1-4)
CASSPRTGGAWTNEKLFF

SEQ ID NO: 389157 - protein, 12 aa, Homo sapiens
  CDR3 for alpha chain variable domain of TCR clone 194579 (TRAV2, TRAJ31)
CAVDDNNARLMF

SEQ ID NO: 389158 - protein, 15 aa, Homo sapiens
  CDR3 for beta chain variable domain of TCR clone 194579 (TRBV11-2, TRBJ2-1)
CASSKNRGLIYEQFF

SEQ ID NO: 389159 - protein, 17 aa, Homo sapiens
  CDR3 for alpha chain variable domain of TCR clone 194580 (TRAV3, TRAJ12)
CAVRDGGRMDSSYKLIF

SEQ ID NO: 389160 - protein, 13 aa, Homo sapiens
  CDR3 for beta chain variable domain of TCR clone 194580 (TRBV7-7, TRBJ2-5)
CATTGGAMETQYF

SEQ ID NO: 389161 - protein, 14 aa, Homo sapiens
  CDR3 for alpha chain variable domain of TCR clone 194581 (TRAV12-1, TRAJ9)
CVVTLKTGGFKTIF

SEQ ID NO: 389162 - protein, 11 aa, Homo sapiens
  CDR3 for beta chain variable domain of TCR clone 194581 (TRBV29-1, TRBJ2-5)
CSEDRTGTQYF

SEQ ID NO: 389163 - protein, 14 aa, Homo sapiens
  CDR3 for alpha chain variable domain of TCR clone 194582 (TRAV12-2, TRAJ40)
CAAKIPSGTYKYIF

SEQ ID NO: 389164 - protein, 13 aa, Homo sapiens
  CDR3 for beta chain variable domain of TCR clone 194582 (TRBV7-9, TRBJ1-2)
CASSLKKNYGYTF

SEQ ID NO: 389165 - protein, 14 aa, Homo sapiens
  CDR3 for alpha chain variable domain of TCR clone 194583 (TRAV1-2, TRAJ16)
CAVNRSSDGQKLLF

SEQ ID NO: 389166 - protein, 15 aa, Homo sapiens
  CDR3 for beta chain variable domain of TCR clone 194583 (TRBV20-1, TRBJ2-1)
CSARVNRGFSNEQFF

SEQ ID NO: 389167 - protein, 14 aa, Homo sapiens
  CDR3 for alpha chain variable domain of TCR clone 194584 (TRAV12-3, TRAJ15)
CAMIPPQAGTALIF

SEQ ID NO: 389168 - protein, 14 aa, Homo sapiens
  CDR3 for beta chain variable domain of TCR clone 194584 (TRBV20-1, TRBJ2-2)
CSARRGLATGELFF

SEQ ID NO: 389169 - protein, 14 aa, Homo sapiens
  CDR3 for alpha chain variable domain of TCR clone 194585 (TRAV3, TRAJ9)
CAVRLNTGGFKTIF

SEQ ID NO: 389170 - protein, 15 aa, Homo sapiens
  CDR3 for beta chain variable domain of TCR clone 194585 (TRBV7-3, TRBJ2-1)
CASSLSSGSFDEQFF

SEQ ID NO: 389171 - protein, 14 aa, Homo sapiens
  CDR3 for alpha chain variable domain of TCR clone 194586 (TRAV12-3, TRAJ9)
CAMSPNTGGSKSIF

SEQ ID NO: 389172 - protein, 12 aa, Homo sapiens
  CDR3 for beta chain variable domain of TCR clone 194586 (TRBV11-2, TRBJ2-2)
CASSLGGGELFF

SEQ ID NO: 389173 - protein, 12 aa, Homo sapiens
  CDR3 for alpha chain variable domain of TCR clone 194587 (TRAV13-2, TRAJ23)
CAERHRGGKLIF

SEQ ID NO: 389174 - protein, 14 aa, Homo sapiens
  CDR3 for beta chain variable domain of TCR clone 194587 (TRBV5-1, TRBJ1-2)
CASSPQGANYGDTF

SEQ ID NO: 389175 - protein, 15 aa, Homo sapiens
  CDR3 for alpha chain variable domain of TCR clone 194588 (TRAV23/DV6, TRAJ18)
CAARYRGSTLGRLYF

SEQ ID NO: 389176 - protein, 16 aa, Homo sapiens
  CDR3 for beta chain variable domain of TCR clone 194588 (TRBV11-2, TRBJ2-7)
CASSPLAGGPRYEQYF

SEQ ID NO: 389177 - protein, 13 aa, Homo sapiens
  CDR3 for alpha chain variable domain of TCR clone 194589 (TRAV3, TRAJ20)
CAVRDTPRYKPSF

SEQ ID NO: 389178 - protein, 14 aa, Homo sapiens
  CDR3 for beta chain variable domain of TCR clone 194589 (TRBV11-1, TRBJ2-7)
GASTFAVPSYEQYF

SEQ ID NO: 389179 - protein, 14 aa, Homo sapiens
  CDR3 for alpha chain variable domain of TCR clone 194590 (TRAV20, TRAJ18)
CAVGRGSTLGKLYF

SEQ ID NO: 389180 - protein, 14 aa, Homo sapiens
  CDR3 for beta chain variable domain of TCR clone 194590 (TRBV28, TRBJ2-4)
CASTQVTGVNIQYF

SEQ ID NO: 389181 - protein, 13 aa, Homo sapiens
  CDR3 for alpha chain variable domain of TCR clone 194591 (TRAV35, TRAJ21)
CAGQLSNFNKFYF

SEQ ID NO: 389182 - protein, 14 aa, Homo sapiens
  CDR3 for beta chain variable domain of TCR clone 194591 (TRBV7-2, TRBJ2-7)
CASSLPPGQGPQYF

SEQ ID NO: 389183 - protein, 13 aa, Homo sapiens
  CDR3 for alpha chain variable domain of TCR clone 194592 (TRAV20, TRAJ9)
CAVPDTGGFETIF

SEQ ID NO: 389184 - protein, 15 aa, Homo sapiens
  CDR3 for beta chain variable domain of TCR clone 194592 (TRBV27, TRBJ2-7)
CASSKAGRGGYEQYF

SEQ ID NO: 389185 - protein, 15 aa, Homo sapiens
  CDR3 for alpha chain variable domain of TCR clone 194593 (TRAV9-2, TRAJ56)
CALSDVDGANSKLTF

SEQ ID NO: 389186 - protein, 15 aa, Homo sapiens
  CDR3 for beta chain variable domain of TCR clone 194593 (TRBV27, TRBJ2-2)
CQQFSGTSSHRSCFF

SEQ ID NO: 389187 - protein, 14 aa, Homo sapiens
  CDR3 for alpha chain variable domain of TCR clone 194594 (TRAV1-2, TRAJ8)
CAVREDTGFQKLVF

SEQ ID NO: 389188 - protein, 14 aa, Homo sapiens
  CDR3 for beta chain variable domain of TCR clone 194594 (TRBV7-9, TRBJ1-1)
CAITPLQSYTEAFF

SEQ ID NO: 389189 - protein, 16 aa, Homo sapiens
  CDR3 for alpha chain variable domain of TCR clone 194595 (TRAV3, TRAJ18)
CAVRDGRGPTLGRLYV

SEQ ID NO: 389190 - protein, 15 aa, Homo sapiens
  CDR3 for beta chain variable domain of TCR clone 194595 (TRBV7-9, TRBJ1-6)
CASSSPGRGNSPLHF

SEQ ID NO: 389191 - protein, 17 aa, Homo sapiens
  CDR3 for alpha chain variable domain of TCR clone 194596 (TRAV8-3, TRAJ8)
CAVGPNEHRLSETCICN

SEQ ID NO: 389192 - protein, 15 aa, Homo sapiens
  CDR3 for beta chain variable domain of TCR clone 194596 (TRBV20-1, TRBJ2-7)
CSARDRVSGMDEQYF

SEQ ID NO: 389193 - protein, 13 aa, Homo sapiens
  CDR3 for alpha chain variable domain of TCR clone 194597 (TRAV3, TRAJ11)
CALTQSGYSTLTF

SEQ ID NO: 389194 - protein, 14 aa, Homo sapiens
  CDR3 for beta chain variable domain of TCR clone 194597 (TRBV19, TRBJ2-7)
CASSTTRSPYEQYF

SEQ ID NO: 389195 - protein, 16 aa, Homo sapiens
  CDR3 for alpha chain variable domain of TCR clone 194598 (TRAV21, TRAJ37)
CAVRTAGSSNTGKLIF

SEQ ID NO: 389196 - protein, 14 aa, Homo sapiens
  CDR3 for beta chain variable domain of TCR clone 194598 (TRBV7-6, TRBJ2-7)
CASSLNSGTYEQYF

SEQ ID NO: 389197 - protein, 17 aa, Homo sapiens
  CDR3 for alpha chain variable domain of TCR clone 194599 (TRAV36/DV7, TRAJ52)
CAVAQRAGGTSYGKLTF

SEQ ID NO: 389198 - protein, 14 aa, Homo sapiens
  CDR3 for beta chain variable domain of TCR clone 194599 (TRBV7-8, TRBJ2-3)
CASSLEAGTDTQYF

SEQ ID NO: 389199 - protein, 17 aa, Homo sapiens
  CDR3 for alpha chain variable domain of TCR clone 194600 (TRAV29/DV5, TRAJ45)
CAADGPFSGGGADGLTF

SEQ ID NO: 389200 - protein, 14 aa, Homo sapiens
  CDR3 for beta chain variable domain of TCR clone 194600 (TRBV4-2, TRBJ2-1)
CASGLDRAYNEQFF

SEQ ID NO: 389201 - protein, 14 aa, Homo sapiens
  CDR3 for alpha chain variable domain of TCR clone 194601 (TRAV8-6, TRAJ54)
CAVSGLQGAQKLVF

SEQ ID NO: 389202 - protein, 15 aa, Homo sapiens
  CDR3 for beta chain variable domain of TCR clone 194601 (TRBV5-1, TRBJ2-1)
CASKGLAGVYNEQFF

SEQ ID NO: 389203 - protein, 14 aa, Homo sapiens
  CDR3 for alpha chain variable domain of TCR clone 194602 (TRAV30, TRAJ52)
CGTVGGTSYGKLTF

SEQ ID NO: 389204 - protein, 18 aa, Homo sapiens
  CDR3 for beta chain variable domain of TCR clone 194602 (TRBV13, TRBJ2-6)
CASSPMTSGGSGANVLTF

SEQ ID NO: 389205 - protein, 14 aa, Homo sapiens
  CDR3 for alpha chain variable domain of TCR clone 194603 (TRAV35, TRAJ22)
CAGLRPGSARQLTF

SEQ ID NO: 389206 - protein, 16 aa, Homo sapiens
  CDR3 for beta chain variable domain of TCR clone 194603 (TRBV7-6, TRBJ2-3)
CASSLWREMGPDTQYF

SEQ ID NO: 389207 - protein, 11 aa, Homo sapiens
  CDR3 for alpha chain variable domain of TCR clone 194604 (TRAV4, TRAJ23)
CLVAPGGKLIF

SEQ ID NO: 389208 - protein, 15 aa, Homo sapiens
  CDR3 for beta chain variable domain of TCR clone 194604 (TRBV12-4, TRBJ2-5)
CASSPPTGLQETQYF

SEQ ID NO: 389209 - protein, 14 aa, Homo sapiens
  CDR3 for alpha chain variable domain of TCR clone 194605 (TRAV13-1, TRAJ35)
CAASKGGFGNVLHC

SEQ ID NO: 389210 - protein, 17 aa, Homo sapiens
  CDR3 for beta chain variable domain of TCR clone 194605 (TRBV6-5, TRBJ2-1)
CASRKNPRTGGHNEQFF

SEQ ID NO: 389211 - protein, 13 aa, Homo sapiens
  CDR3 for alpha chain variable domain of TCR clone 194606 (TRAV21, TRAJ27)
CAALNTNAGKSTF

SEQ ID NO: 389212 - protein, 14 aa, Homo sapiens
  CDR3 for beta chain variable domain of TCR clone 194606 (TRBV27, TRBJ1-1)
CASSLLSGLSESFF

SEQ ID NO: 389213 - protein, 23 aa, Homo sapiens
  CDR3 for alpha chain variable domain of TCR clone 194607 (TRAV26-1, TRAJ38)
CIADNAGNNHIQNPDPAVYQLRD

SEQ ID NO: 389214 - protein, 16 aa, Homo sapiens
  CDR3 for beta chain variable domain of TCR clone 194607 (TRBV18, TRBJ2-5)
CASSPPSSGGAKTQYF

SEQ ID NO: 389215 - protein, 15 aa, Homo sapiens
  CDR3 for alpha chain variable domain of TCR clone 194608 (TRAV13-2, TRAJ35)
CAESPNIGFGNVLHC

SEQ ID NO: 389216 - protein, 13 aa, Homo sapiens
  CDR3 for beta chain variable domain of TCR clone 194608 (TRBV10-2, TRBJ2-5)
CASSTRARETQYF

SEQ ID NO: 389217 - protein, 14 aa, Homo sapiens
  CDR3 for alpha chain variable domain of TCR clone 194609 (TRAV26-1, TRAJ38)
CIADNAGNNRKLIW

SEQ ID NO: 389218 - protein, 14 aa, Homo sapiens
  CDR3 for beta chain variable domain of TCR clone 194609 (TRBV4-1, TRBJ2-2)
CASSQAVNTRELFF

SEQ ID NO: 389219 - protein, 13 aa, Homo sapiens
  CDR3 for alpha chain variable domain of TCR clone 194610 (TRAV39, TRAJ58)
CAGEETSGSRLTF

SEQ ID NO: 389220 - protein, 14 aa, Homo sapiens
  CDR3 for beta chain variable domain of TCR clone 194610 (TRBV12-4, TRBJ2-7)
CASTFGLSTYEQYF

SEQ ID NO: 389221 - protein, 16 aa, Homo sapiens
  CDR3 for alpha chain variable domain of TCR clone 194611 (TRAV12-3, TRAJ53)
CAMSPGSGGSNYKLKL

SEQ ID NO: 389222 - protein, 11 aa, Homo sapiens
  CDR3 for beta chain variable domain of TCR clone 194611 (TRBV29-1, TRBJ2-5)
CSEDRTGTQYF

SEQ ID NO: 389223 - protein, 14 aa, Homo sapiens
  CDR3 for alpha chain variable domain of TCR clone 194612 (TRAV16, TRAJ15)
CALSFNQAGTALIF

SEQ ID NO: 389224 - protein, 16 aa, Homo sapiens
  CDR3 for beta chain variable domain of TCR clone 194612 (TRBV9, TRBJ2-7)
CASSAGPHRSPYEQYF

SEQ ID NO: 389225 - protein, 13 aa, Homo sapiens
  CDR3 for alpha chain variable domain of TCR clone 194613 (TRAV8-6, TRAJ49)
CAVITNTGNQFYF

SEQ ID NO: 389226 - protein, 14 aa, Homo sapiens
  CDR3 for beta chain variable domain of TCR clone 194613 (TRBV7-8, TRBJ2-3)
CASSLEAGTDTQYF

SEQ ID NO: 389227 - protein, 10 aa, Homo sapiens
  CDR3 for alpha chain variable domain of TCR clone 194614 (TRAV8-3, TRAJ43)
CAVALADMRF

SEQ ID NO: 389228 - protein, 17 aa, Homo sapiens
  CDR3 for beta chain variable domain of TCR clone 194614 (TRBV11-2, TRBJ2-1)
CASSLYPPGVEYNEQFF

SEQ ID NO: 389229 - protein, 11 aa, Homo sapiens
  CDR3 for alpha chain variable domain of TCR clone 194615 (TRAV8-3, TRAJ49)
CAVNTGNQFYF

SEQ ID NO: 389230 - protein, 12 aa, Homo sapiens
  CDR3 for beta chain variable domain of TCR clone 194615 (TRBV11-2, TRBJ2-7)
CASSPPADEQNF

SEQ ID NO: 389231 - protein, 14 aa, Homo sapiens
  CDR3 for alpha chain variable domain of TCR clone 194616 (TRAV13-1, TRAJ35)
CAASKGGIGNVLYC

SEQ ID NO: 389232 - protein, 13 aa, Homo sapiens
  CDR3 for beta chain variable domain of TCR clone 194616 (TRBV7-3, TRBJ1-1)
CASSQDWGAEAFF

SEQ ID NO: 389233 - protein, 13 aa, Homo sapiens
  CDR3 for alpha chain variable domain of TCR clone 194617 (TRAV12-3, TRAJ54)
CAMTLQGAQKLVF

SEQ ID NO: 389234 - protein, 14 aa, Homo sapiens
  CDR3 for beta chain variable domain of TCR clone 194617 (TRBV4-1, TRBJ2-2)
CASSQAVNTRELFF

SEQ ID NO: 389235 - protein, 14 aa, Homo sapiens
  CDR3 for alpha chain variable domain of TCR clone 194618 (TRAV8-3, TRAJ4)
CAVGAAGGYNKLIF

SEQ ID NO: 389236 - protein, 16 aa, Homo sapiens
  CDR3 for beta chain variable domain of TCR clone 194618 (TRBV28, TRBJ2-6)
CASSFRTYSGANVLTF

SEQ ID NO: 389237 - protein, 14 aa, Homo sapiens
  CDR3 for alpha chain variable domain of TCR clone 194619 (TRAV26-1, TRAJ21)
FIVRVVYNFNKFYF

SEQ ID NO: 389238 - protein, 17 aa, Homo sapiens
  CDR3 for beta chain variable domain of TCR clone 194619 (TRBV11-2, TRBJ2-1)
CASSLYPPGVEYNEQFF

SEQ ID NO: 389239 - protein, 14 aa, Homo sapiens
  CDR3 for alpha chain variable domain of TCR clone 194620 (TRAV21, TRAJ45)
CAVSSGGGADGLTF

SEQ ID NO: 389240 - protein, 14 aa, Homo sapiens
  CDR3 for beta chain variable domain of TCR clone 194620 (TRBV18, TRBJ2-7)
CASSPRGGAYEQYF

SEQ ID NO: 389241 - protein, 17 aa, Homo sapiens
  CDR3 for alpha chain variable domain of TCR clone 194621 (TRAV4, TRAJ18)
CLVGERSVGSTLGRLYF

SEQ ID NO: 389242 - protein, 15 aa, Homo sapiens
  CDR3 for beta chain variable domain of TCR clone 194621 (TRBV28, TRBJ2-7)
CASSPGGRGFYEQYF

SEQ ID NO: 389243 - protein, 14 aa, Homo sapiens
  CDR3 for alpha chain variable domain of TCR clone 194622 (TRAV2, TRAJ37)
CAVDFTSNTGKLIF

SEQ ID NO: 389244 - protein, 15 aa, Homo sapiens
  CDR3 for beta chain variable domain of TCR clone 194622 (TRBV2, TRBJ2-3)
CASSERSGHTDTQYF

SEQ ID NO: 389245 - protein, 17 aa, Homo sapiens
  CDR3 for alpha chain variable domain of TCR clone 194623 (TRAV8-2, )
CVVNIQNPDPAVYQLRD

SEQ ID NO: 389246 - protein, 13 aa, Homo sapiens
  CDR3 for beta chain variable domain of TCR clone 194623 (TRBV7-3, TRBJ1-1)
CASSQDWGAEAFL

SEQ ID NO: 389247 - protein, 23 aa, Homo sapiens
  CDR3 for alpha chain variable domain of TCR clone 194624 (TRAV8-3, TRAJ6)
CAVGGEEATYLHLEGEPALLLIR

SEQ ID NO: 389248 - protein, 14 aa, Homo sapiens
  CDR3 for beta chain variable domain of TCR clone 194624 (TRBV5-1, TRBJ2-7)
CASSRGESLYEQYF

SEQ ID NO: 389249 - protein, 16 aa, Homo sapiens
  CDR3 for alpha chain variable domain of TCR clone 194625 (TRAV26-1, TRAJ52)
CIVSNAGGTSYVKLTF

SEQ ID NO: 389250 - protein, 16 aa, Homo sapiens
  CDR3 for beta chain variable domain of TCR clone 194625 (TRBV5-1, TRBJ2-1)
CASSLEGRGLYNEQFF

SEQ ID NO: 389251 - protein, 12 aa, Homo sapiens
  CDR3 for alpha chain variable domain of TCR clone 194626 (TRAV12-3, TRAJ5)
CATDTGRRALTF

SEQ ID NO: 389252 - protein, 13 aa, Homo sapiens
  CDR3 for beta chain variable domain of TCR clone 194626 (TRBV7-7, TRBJ2-2)
CASSLTSAGELFF

SEQ ID NO: 389253 - protein, 14 aa, Homo sapiens
  CDR3 for alpha chain variable domain of TCR clone 194627 (TRAV8-2, TRAJ37)
CVVSISGNTGKLIF

SEQ ID NO: 389254 - protein, 13 aa, Homo sapiens
  CDR3 for beta chain variable domain of TCR clone 194627 (TRBV12-4, TRBJ2-5)
CASSLGGSRTQYF

SEQ ID NO: 389255 - protein, 12 aa, Homo sapiens
  CDR3 for alpha chain variable domain of TCR clone 194628 (TRAV1-2, TRAJ29)
CAVPSGNTPLVF

SEQ ID NO: 389256 - protein, 12 aa, Homo sapiens
  CDR3 for beta chain variable domain of TCR clone 194628 (TRBV7-9, TRBJ2-7)
CSSSFGSYEQYF

SEQ ID NO: 389257 - protein, 18 aa, Homo sapiens
  CDR3 for alpha chain variable domain of TCR clone 194629 (TRAV16, TRAJ45)
CAQASYPSSGGGADGLTF

SEQ ID NO: 389258 - protein, 16 aa, Homo sapiens
  CDR3 for beta chain variable domain of TCR clone 194629 (TRBV27, TRBJ2-5)
CASSGSGTSEVETQYF

SEQ ID NO: 389259 - protein, 15 aa, Homo sapiens
  CDR3 for alpha chain variable domain of TCR clone 194630 (TRAV12-2, TRAJ53)
CAVNGGGGSNYKLTF

SEQ ID NO: 389260 - protein, 14 aa, Homo sapiens
  CDR3 for beta chain variable domain of TCR clone 194630 (TRBV18, TRBJ2-7)
CASSPRGGSYEQYF

SEQ ID NO: 389261 - protein, 13 aa, Homo sapiens
  CDR3 for alpha chain variable domain of TCR clone 194631 (TRAV2, TRAJ21)
CAVEDNNFNKFYF

SEQ ID NO: 389262 - protein, 14 aa, Homo sapiens
  CDR3 for beta chain variable domain of TCR clone 194631 (TRBV4-2, TRBJ2-1)
CASGLDRAYNEQFF

SEQ ID NO: 389263 - protein, 15 aa, Homo sapiens
  CDR3 for alpha chain variable domain of TCR clone 194632 (TRAV8-6, TRAJ4)
CAVRSFSGGYNKLIF

SEQ ID NO: 389264 - protein, 16 aa, Homo sapiens
  CDR3 for beta chain variable domain of TCR clone 194632 (TRBV4-1, TRBJ2-5)
CASSQAIAASSATQYF

SEQ ID NO: 389265 - protein, 15 aa, Homo sapiens
  CDR3 for alpha chain variable domain of TCR clone 194633 (TRAV3, TRAJ22)
CAVRDRGGSAMQLTF

SEQ ID NO: 389266 - protein, 20 aa, Homo sapiens
  CDR3 for beta chain variable domain of TCR clone 194633 (TRBV11-2, TRBJ1-6)
CASSLVFATGGSVHPSTLGT

SEQ ID NO: 389267 - protein, 14 aa, Homo sapiens
  CDR3 for alpha chain variable domain of TCR clone 194634 (TRAV1-2, TRAJ8)
CAVREDTGFQKLVF

SEQ ID NO: 389268 - protein, 14 aa, Homo sapiens
  CDR3 for beta chain variable domain of TCR clone 194634 (TRBV11-2, TRBJ2-3)
CASSRLARTETQYF

SEQ ID NO: 389269 - protein, 14 aa, Homo sapiens
  CDR3 for alpha chain variable domain of TCR clone 194635 (TRAV9-2, TRAJ39)
CALCIYNAGNMLTF

SEQ ID NO: 389270 - protein, 16 aa, Homo sapiens
  CDR3 for beta chain variable domain of TCR clone 194635 (TRBV12-5, TRBJ2-5)
CASGPRTSGNQETQYF

SEQ ID NO: 389271 - protein, 16 aa, Homo sapiens
  CDR3 for alpha chain variable domain of TCR clone 194636 (TRAV13-1, TRAJ48)
CAASIFGNFGIAKLTF

SEQ ID NO: 389272 - protein, 15 aa, Homo sapiens
  CDR3 for beta chain variable domain of TCR clone 194636 (TRBV11-3, TRBJ2-3)
CASLKDGREGDTQYF

SEQ ID NO: 389273 - protein, 14 aa, Homo sapiens
  CDR3 for alpha chain variable domain of TCR clone 194637 (TRAV12-1, TRAJ43)
CVVNGRSNNNDMRF

SEQ ID NO: 389274 - protein, 15 aa, Homo sapiens
  CDR3 for beta chain variable domain of TCR clone 194637 (TRBV20-1, TRBJ2-7)
CSARDRVSGMDEQYF

SEQ ID NO: 389275 - protein, 16 aa, Homo sapiens
  CDR3 for alpha chain variable domain of TCR clone 194638 (TRAV16, TRAJ52)
CALSGVGGTSYAKLTF

SEQ ID NO: 389276 - protein, 14 aa, Homo sapiens
  CDR3 for beta chain variable domain of TCR clone 194638 (TRBV19, TRBJ1-2)
CASSLQGQAYGYTF

SEQ ID NO: 389277 - protein, 13 aa, Homo sapiens
  CDR3 for alpha chain variable domain of TCR clone 194639 (TRAV14/DV4, TRAJ16)
CAMREGGGQKLLF

SEQ ID NO: 389278 - protein, 15 aa, Homo sapiens
  CDR3 for beta chain variable domain of TCR clone 194639 (TRBV7-9, TRBJ2-7)
CASSLDLDRGYEQYF

SEQ ID NO: 389279 - protein, 12 aa, Homo sapiens
  CDR3 for alpha chain variable domain of TCR clone 194640 (TRAV8-3, TRAJ38)
CAVGASNAGNNH

SEQ ID NO: 389280 - protein, 15 aa, Homo sapiens
  CDR3 for beta chain variable domain of TCR clone 194640 (TRBV11-3, TRBJ1-3)
CASSLFGPSGNTIYF

SEQ ID NO: 389281 - protein, 16 aa, Homo sapiens
  CDR3 for alpha chain variable domain of TCR clone 194641 (TRAV8-4, TRAJ52)
CAVSDPGGTSYGKLTS

SEQ ID NO: 389282 - protein, 15 aa, Homo sapiens
  CDR3 for beta chain variable domain of TCR clone 194641 (TRBV12-4, TRBJ2-7)
CASSQRTSGNYEQYF

SEQ ID NO: 389283 - protein, 18 aa, Homo sapiens
  CDR3 for alpha chain variable domain of TCR clone 194642 (TRAV13-1, TRAJ52)
CAAKNPNAGGTSYGKLTF

SEQ ID NO: 389284 - protein, 15 aa, Homo sapiens
  CDR3 for beta chain variable domain of TCR clone 194642 (TRBV20-1, TRBJ2-7)
CSARDRVAGMDEQYF

SEQ ID NO: 389285 - protein, 10 aa, Homo sapiens
  CDR3 for alpha chain variable domain of TCR clone 194643 (TRAV4, TRAJ22)
TSGSARQLTF

SEQ ID NO: 389286 - protein, 16 aa, Homo sapiens
  CDR3 for beta chain variable domain of TCR clone 194643 (TRBV7-9, TRBJ2-3)
CASSPWREVGTDTQYF

SEQ ID NO: 389287 - protein, 15 aa, Homo sapiens
  CDR3 for alpha chain variable domain of TCR clone 194644 (TRAV8-3, TRAJ23)
CAVGDRYNQGGKLIF

SEQ ID NO: 389288 - protein, 13 aa, Homo sapiens
  CDR3 for beta chain variable domain of TCR clone 194644 (TRBV24-1, TRBJ2-2)
CATTATRTGELFF

SEQ ID NO: 389289 - protein, 19 aa, Homo sapiens
  CDR3 for alpha chain variable domain of TCR clone 194645 (TRAV26-1, TRAJ28)
CIVRVAHAYSGAGSYQLTF

SEQ ID NO: 389290 - protein, 17 aa, Homo sapiens
  CDR3 for beta chain variable domain of TCR clone 194645 (TRBV4-1, IGHJ2)
CASSQEGPRGVEEKLFF

SEQ ID NO: 389291 - protein, 16 aa, Homo sapiens
  CDR3 for alpha chain variable domain of TCR clone 194646 (TRAV27, TRAJ48)
TAAQPGDTGLYLPLTF

SEQ ID NO: 389292 - protein, 15 aa, Homo sapiens
  CDR3 for beta chain variable domain of TCR clone 194646 (TRBV20-1, TRBJ2-7)
CSARDRVSGMDEQYF

SEQ ID NO: 389293 - protein, 12 aa, Homo sapiens
  CDR3 for alpha chain variable domain of TCR clone 194647 (TRAV30, TRAJ43)
CGTEERGNDMRF

SEQ ID NO: 389294 - protein, 13 aa, Homo sapiens
  CDR3 for beta chain variable domain of TCR clone 194647 (TRBV27, TRBJ2-7)
CASSFSQGYQQYF

SEQ ID NO: 389295 - protein, 23 aa, Homo sapiens
  CDR3 for alpha chain variable domain of TCR clone 194648 (TRAV9-2, TRAJ4)
CQTQRCTSVLWVIRSGGYNKLIV

SEQ ID NO: 389296 - protein, 12 aa, Homo sapiens
  CDR3 for beta chain variable domain of TCR clone 194648 (TRBV11-2, TRBJ2-2)
CASSLGGGELFF

SEQ ID NO: 389297 - protein, 12 aa, Homo sapiens
  CDR3 for alpha chain variable domain of TCR clone 194649 (TRAV20, TRAJ39)
CAVGNAGNMLTF

SEQ ID NO: 389298 - protein, 14 aa, Homo sapiens
  CDR3 for beta chain variable domain of TCR clone 194649 (TRBV28, TRBJ2-1)
CASSRPGLRDEQFF

SEQ ID NO: 389299 - protein, 13 aa, Homo sapiens
  CDR3 for alpha chain variable domain of TCR clone 194650 (TRAV3, TRAJ21)
CAVREPDFNKFYF

SEQ ID NO: 389300 - protein, 13 aa, Homo sapiens
  CDR3 for beta chain variable domain of TCR clone 194650 (TRBV4-1, TRBJ2-1)
CASSQEVQYEQFF

SEQ ID NO: 389301 - protein, 14 aa, Homo sapiens
  CDR3 for alpha chain variable domain of TCR clone 194651 (TRAV12-2, TRAJ40)
CAVKIPSGTYKYIF

SEQ ID NO: 389302 - protein, 17 aa, Homo sapiens
  CDR3 for beta chain variable domain of TCR clone 194651 (TRBV11-2, TRBJ2-1)
CASSLYPPGLEYNEQFF

SEQ ID NO: 389303 - protein, 12 aa, Homo sapiens
  CDR3 for alpha chain variable domain of TCR clone 194652 (TRAV8-3, TRAJ41)
CAVALSGYALNF

SEQ ID NO: 389304 - protein, 13 aa, Homo sapiens
  CDR3 for beta chain variable domain of TCR clone 194652 (TRBV12-4, TRBJ2-7)
CASSPTETYEQYF

SEQ ID NO: 389305 - protein, 13 aa, Homo sapiens
  CDR3 for alpha chain variable domain of TCR clone 194653 (TRAV26-1, TRAJ33)
CIVRVEGNYQLIW

SEQ ID NO: 389306 - protein, 13 aa, Homo sapiens
  CDR3 for beta chain variable domain of TCR clone 194653 (TRBV6-5, TRBJ2-5)
CASSPQGGETQSC

SEQ ID NO: 389307 - protein, 14 aa, Homo sapiens
  CDR3 for alpha chain variable domain of TCR clone 194654 (TRAV12-1, TRAJ22)
CVVTTSGSARQLTF

SEQ ID NO: 389308 - protein, 13 aa, Homo sapiens
  CDR3 for beta chain variable domain of TCR clone 194654 (TRBV4-1, TRBJ2-1)
CASSQAGGDEQFF

SEQ ID NO: 389309 - protein, 14 aa, Homo sapiens
  CDR3 for alpha chain variable domain of TCR clone 194655 (TRAV12-2, TRAJ49)
CAVTLGLYGNQFYF

SEQ ID NO: 389310 - protein, 15 aa, Homo sapiens
  CDR3 for beta chain variable domain of TCR clone 194655 (TRBV20-1, TRBJ2-7)
CSARDRVSGMDEQYF

SEQ ID NO: 389311 - protein, 14 aa, Homo sapiens
  CDR3 for alpha chain variable domain of TCR clone 194656 (TRAV12-2, TRAJ40)
CAMKIPSGPYKYIF

SEQ ID NO: 389312 - protein, 14 aa, Homo sapiens
  CDR3 for beta chain variable domain of TCR clone 194656 (TRBV20-1, TRBJ1-1)
CSAQTRIGGTEAFF

SEQ ID NO: 389313 - protein, 12 aa, Homo sapiens
  CDR3 for alpha chain variable domain of TCR clone 194657 (TRAV12-2, TRAJ45)
CAPGGGADGLTF

SEQ ID NO: 389314 - protein, 16 aa, Homo sapiens
  CDR3 for beta chain variable domain of TCR clone 194657 (TRBV19, TRBJ2-3)
CASSPGLLASTDTQYF

SEQ ID NO: 389315 - protein, 17 aa, Homo sapiens
  CDR3 for alpha chain variable domain of TCR clone 194658 (TRAV26-1, TRAJ46)
IASSESEKKSSGDKLTF

SEQ ID NO: 389316 - protein, 16 aa, Homo sapiens
  CDR3 for beta chain variable domain of TCR clone 194658 (TRBV7-2, TRBJ2-6)
CAILSGVSSGANVLTF

SEQ ID NO: 389317 - protein, 15 aa, Homo sapiens
  CDR3 for alpha chain variable domain of TCR clone 194659 (TRAV26-1, TRAJ29)
CIVRVEGSGNTPLVF

SEQ ID NO: 389318 - protein, 15 aa, Homo sapiens
  CDR3 for beta chain variable domain of TCR clone 194659 (TRBV7-9, TRBJ1-5)
CASSQGHQPSQTQHF

SEQ ID NO: 389319 - protein, 13 aa, Homo sapiens
  CDR3 for alpha chain variable domain of TCR clone 194660 (TRAV8-3, TRAJ36)
CAVGATGANNLIF

SEQ ID NO: 389320 - protein, 13 aa, Homo sapiens
  CDR3 for beta chain variable domain of TCR clone 194660 (TRBV12-4, TRBJ1-2)
CASSLRQGKGYTF

SEQ ID NO: 389321 - protein, 14 aa, Homo sapiens
  CDR3 for alpha chain variable domain of TCR clone 194661 (TRAV12-3, TRAJ10)
SHLPMTGGGNKLTF

SEQ ID NO: 389322 - protein, 16 aa, Homo sapiens
  CDR3 for beta chain variable domain of TCR clone 194661 (TRBV10-3, TRBJ2-1)
CAISGVGDGGGGEQFF

SEQ ID NO: 389323 - protein, 14 aa, Homo sapiens
  CDR3 for alpha chain variable domain of TCR clone 194662 (TRAV12-2, TRAJ13)
CAVKKTGGYQKVTF

SEQ ID NO: 389324 - protein, 16 aa, Homo sapiens
  CDR3 for beta chain variable domain of TCR clone 194662 (TRBV9, TRBJ2-1)
CASSVMGVAGYNEQFF

SEQ ID NO: 389325 - protein, 15 aa, Homo sapiens
  CDR3 for alpha chain variable domain of TCR clone 194663 (TRAV21, TRAJ24)
CAARSSNDSWGKLQF

SEQ ID NO: 389326 - protein, 13 aa, Homo sapiens
  CDR3 for beta chain variable domain of TCR clone 194663 (TRBV11-2, TRBJ2-5)
CASSSTGEETQYF

SEQ ID NO: 389327 - protein, 13 aa, Homo sapiens
  CDR3 for alpha chain variable domain of TCR clone 194664 (TRAV12-3, TRAJ9)
CAMRNNGGFKTIF

SEQ ID NO: 389328 - protein, 15 aa, Homo sapiens
  CDR3 for beta chain variable domain of TCR clone 194664 (TRBV27, TRBJ1-4)
CASSAQQDLNEKLFF

SEQ ID NO: 389329 - protein, 14 aa, Homo sapiens
  CDR3 for alpha chain variable domain of TCR clone 194665 (TRAV12-3, TRAJ10)
SHLPLTGGGNKLTF

SEQ ID NO: 389330 - protein, 17 aa, Homo sapiens
  CDR3 for beta chain variable domain of TCR clone 194665 (TRBV7-3, TRBJ2-3)
CASSPRGQGYGTDTQYF

SEQ ID NO: 389331 - protein, 11 aa, Homo sapiens
  CDR3 for alpha chain variable domain of TCR clone 194666 (TRAV12-2, TRAJ31)
CAILINARLMF

SEQ ID NO: 389332 - protein, 15 aa, Homo sapiens
  CDR3 for beta chain variable domain of TCR clone 194666 (TRBV20-1, TRBJ2-6)
CSARDRGPGANVLTF

SEQ ID NO: 389333 - protein, 11 aa, Homo sapiens
  CDR3 for alpha chain variable domain of TCR clone 194667 (TRAV4, TRAJ23)
CLLAPGGKLIF

SEQ ID NO: 389334 - protein, 13 aa, Homo sapiens
  CDR3 for beta chain variable domain of TCR clone 194667 (TRBV7-9, TRBJ1-2)
CASSLKQNYGYTC

SEQ ID NO: 389335 - protein, 13 aa, Homo sapiens
  CDR3 for alpha chain variable domain of TCR clone 194668 (TRAV13-1, TRAJ5)
CAERVTGRRALTF

SEQ ID NO: 389336 - protein, 15 aa, Homo sapiens
  CDR3 for beta chain variable domain of TCR clone 194668 (TRBV7-9, TRBJ2-7)
CASSPGGGLTYEQYF

SEQ ID NO: 389337 - protein, 15 aa, Homo sapiens
  CDR3 for alpha chain variable domain of TCR clone 194669 (TRAV3, TRAJ36)
CAVRASQTGANNLFF

SEQ ID NO: 389338 - protein, 15 aa, Homo sapiens
  CDR3 for beta chain variable domain of TCR clone 194669 (TRBV3-1, TRBJ2-1)
CASSQYYTPRGEQFF

SEQ ID NO: 389339 - protein, 14 aa, Homo sapiens
  CDR3 for alpha chain variable domain of TCR clone 194670 (TRAV12-3, TRAJ12)
CAMSEVDSSYKLIF

SEQ ID NO: 389340 - protein, 14 aa, Homo sapiens
  CDR3 for beta chain variable domain of TCR clone 194670 (TRBV7-6, TRBJ1-6)
CASSQAGGGSPLHF

SEQ ID NO: 389341 - protein, 13 aa, Homo sapiens
  CDR3 for alpha chain variable domain of TCR clone 194671 (TRAV8-4, TRAJ48)
CAVSLFGNEKLTF

SEQ ID NO: 389342 - protein, 14 aa, Homo sapiens
  CDR3 for beta chain variable domain of TCR clone 194671 (TRBV7-6, TRBJ2-3)
CASSLGTVTDTQYF

SEQ ID NO: 389343 - protein, 14 aa, Homo sapiens
  CDR3 for alpha chain variable domain of TCR clone 194672 (TRAV1-2, TRAJ8)
CAVREDTGFQKLGF

SEQ ID NO: 389344 - protein, 12 aa, Homo sapiens
  CDR3 for beta chain variable domain of TCR clone 194672 (TRBV2, TRBJ2-1)
CAYGPPGNEQFF

SEQ ID NO: 389345 - protein, 13 aa, Homo sapiens
  CDR3 for alpha chain variable domain of TCR clone 194673 (TRAV3, TRAJ30)
CAVRDRGDDKIIF

SEQ ID NO: 389346 - protein, 16 aa, Homo sapiens
  CDR3 for beta chain variable domain of TCR clone 194673 (TRBV20-1, TRBJ1-2)
CSASMGQGVANYGDSF

SEQ ID NO: 389347 - protein, 14 aa, Homo sapiens
  CDR3 for alpha chain variable domain of TCR clone 194674 (TRAV2, TRAJ9)
CAVEDRSGGFKTIF

SEQ ID NO: 389348 - protein, 16 aa, Homo sapiens
  CDR3 for beta chain variable domain of TCR clone 194674 (TRBV7-3, TRBJ2-1)
WASSLEGYRSYNEQFF

SEQ ID NO: 389349 - protein, 14 aa, Homo sapiens
  CDR3 for alpha chain variable domain of TCR clone 194675 (TRAV12-2, TRAJ49)
CAVNPRTPGTSSLL

SEQ ID NO: 389350 - protein, 19 aa, Homo sapiens
  CDR3 for beta chain variable domain of TCR clone 194675 (TRBV12-5, TRBJ2-2)
CASGLGQGTMFADTGELFF

SEQ ID NO: 389351 - protein, 15 aa, Homo sapiens
  CDR3 for alpha chain variable domain of TCR clone 194676 (TRAV27, TRAJ38)
CAARRNAGNNRKLIW

SEQ ID NO: 389352 - protein, 11 aa, Homo sapiens
  CDR3 for beta chain variable domain of TCR clone 194676 (TRBV13, TRBJ2-2)
CASSPRTGEHT

SEQ ID NO: 389353 - protein, 13 aa, Homo sapiens
  CDR3 for alpha chain variable domain of TCR clone 194677 (TRAV26-1, TRAJ49)
CIVRAETGNQFYF

SEQ ID NO: 389354 - protein, 14 aa, Homo sapiens
  CDR3 for beta chain variable domain of TCR clone 194677 (TRBV5-1, TRBJ2-7)
CASSLGPGAHEQYF

SEQ ID NO: 389355 - protein, 10 aa, Homo sapiens
  CDR3 for alpha chain variable domain of TCR clone 194678 (TRAV12-3, TRAJ49)
CAMNDDQFYF

SEQ ID NO: 389356 - protein, 11 aa, Homo sapiens
  CDR3 for beta chain variable domain of TCR clone 194678 (TRBV11-2, TRBJ2-2)
CASSLPGELFF

SEQ ID NO: 389357 - protein, 12 aa, Homo sapiens
  CDR3 for alpha chain variable domain of TCR clone 194679 (TRAV1-2, TRAJ29)
CAVPSGNNPLVF

SEQ ID NO: 389358 - protein, 16 aa, Homo sapiens
  CDR3 for beta chain variable domain of TCR clone 194679 (TRBV19, TRBJ2-2)
CASSAAGTGGTGELFF

SEQ ID NO: 389359 - protein, 13 aa, Homo sapiens
  CDR3 for alpha chain variable domain of TCR clone 194680 (TRAV38-1, TRAJ42)
CARWGGSQGNLIF

SEQ ID NO: 389360 - protein, 15 aa, Homo sapiens
  CDR3 for beta chain variable domain of TCR clone 194680 (TRBV6-3, TRBJ2-7)
CASSSPGTVFYEQYC

SEQ ID NO: 389361 - protein, 16 aa, Homo sapiens
  CDR3 for alpha chain variable domain of TCR clone 194681 (TRAV8-6, TRAJ37)
CAVSGLGSSNTGKLIF

SEQ ID NO: 389362 - protein, 15 aa, Homo sapiens
  CDR3 for beta chain variable domain of TCR clone 194681 (TRBV7-9, TRBJ1-4)
CASSRTGGFNEKLFF

SEQ ID NO: 389363 - protein, 14 aa, Homo sapiens
  CDR3 for alpha chain variable domain of TCR clone 194682 (TRAV12-3, TRAJ54)
CAMRIIKGAQKLVF

SEQ ID NO: 389364 - protein, 16 aa, Homo sapiens
  CDR3 for beta chain variable domain of TCR clone 194682 (TRBV28, TRBJ2-1)
CASRVPASGRIGEQFF

SEQ ID NO: 389365 - protein, 16 aa, Homo sapiens
  CDR3 for alpha chain variable domain of TCR clone 194683 (TRAV3, TRAJ37)
CAARGRGSGNTGKLIF

SEQ ID NO: 389366 - protein, 16 aa, Homo sapiens
  CDR3 for beta chain variable domain of TCR clone 194683 (TRBV12-4, TRBJ1-5)
CASSRPVGGSNQPQHF

SEQ ID NO: 389367 - protein, 16 aa, Homo sapiens
  CDR3 for alpha chain variable domain of TCR clone 194684 (TRAV3, TRAJ10)
CAVRDMNAGGGNKHTF

SEQ ID NO: 389368 - protein, 11 aa, Homo sapiens
  CDR3 for beta chain variable domain of TCR clone 194684 (TRBV7-8, TRBJ2-7)
CASSLSFEQYF

SEQ ID NO: 389369 - protein, 12 aa, Homo sapiens
  CDR3 for alpha chain variable domain of TCR clone 194685 (TRAV20, TRAJ39)
CAVGNAGTMLTF

SEQ ID NO: 389370 - protein, 17 aa, Homo sapiens
  CDR3 for beta chain variable domain of TCR clone 194685 (TRBV4-1, TRBJ2-3)
CASSQGYVSGGTDTQYF

SEQ ID NO: 389371 - protein, 13 aa, Homo sapiens
  CDR3 for alpha chain variable domain of TCR clone 194686 (TRAV1-2, TRAJ9)
CAALNTGGFTTIF

SEQ ID NO: 389372 - protein, 13 aa, Homo sapiens
  CDR3 for beta chain variable domain of TCR clone 194686 (TRBV19, TRBJ1-2)
CASSVPGQDGYAF

SEQ ID NO: 389373 - protein, 11 aa, Homo sapiens
  CDR3 for alpha chain variable domain of TCR clone 194687 (TRAV12-3, TRAJ49)
CAANTGNPFYF

SEQ ID NO: 389374 - protein, 13 aa, Homo sapiens
  CDR3 for beta chain variable domain of TCR clone 194687 (TRBV7-9, TRBJ1-2)
CASSLKQNYGYTF

SEQ ID NO: 389375 - protein, 15 aa, Homo sapiens
  CDR3 for alpha chain variable domain of TCR clone 194688 (TRAV3, TRAJ41)
CAVRDARNSGYALNF

SEQ ID NO: 389376 - protein, 16 aa, Homo sapiens
  CDR3 for beta chain variable domain of TCR clone 194688 (TRBV10-3, TRBJ2-7)
CAISADFADRPYEQYF

SEQ ID NO: 389377 - protein, 12 aa, Homo sapiens
  CDR3 for alpha chain variable domain of TCR clone 194689 (TRAV23/DV6, TRAJ30)
CAASKGDDKIIF

SEQ ID NO: 389378 - protein, 15 aa, Homo sapiens
  CDR3 for beta chain variable domain of TCR clone 194689 (TRBV20-1, TRBJ2-7)
CSTRDRVSGMDEQYF

SEQ ID NO: 389379 - protein, 14 aa, Homo sapiens
  CDR3 for alpha chain variable domain of TCR clone 194690 (TRAV21, TRAJ45)
CAVSSGGGADGLTF

SEQ ID NO: 389380 - protein, 19 aa, Homo sapiens
  CDR3 for beta chain variable domain of TCR clone 194690 (TRBV25-1, TRBJ2-2)
CAILVYRVDRGRKTGELFF

SEQ ID NO: 389381 - protein, 12 aa, Homo sapiens
  CDR3 for alpha chain variable domain of TCR clone 194691 (TRAV12-1, TRAJ34)
CVVAEATDKLIF

SEQ ID NO: 389382 - protein, 12 aa, Homo sapiens
  CDR3 for beta chain variable domain of TCR clone 194691 (TRBV7-9, TRBJ1-1)
CASSLVRGEAFF

SEQ ID NO: 389383 - protein, 16 aa, Homo sapiens
  CDR3 for alpha chain variable domain of TCR clone 194692 (TRAV17, TRAJ36)
CATVSLNGGKQPLLWD

SEQ ID NO: 389384 - protein, 13 aa, Homo sapiens
  CDR3 for beta chain variable domain of TCR clone 194692 (TRBV4-1, TRBJ1-1)
CASSQLGTGEAFF

SEQ ID NO: 389385 - protein, 17 aa, Homo sapiens
  CDR3 for alpha chain variable domain of TCR clone 194693 (TRAV1-1, TRAJ10)
EASNTVILTGGGNKLTF

SEQ ID NO: 389386 - protein, 15 aa, Homo sapiens
  CDR3 for beta chain variable domain of TCR clone 194693 (TRBV28, TRBJ2-1)
CASSLDTSSYNEQFF

SEQ ID NO: 389387 - protein, 11 aa, Homo sapiens
  CDR3 for alpha chain variable domain of TCR clone 194694 (TRAV12-1, TRAJ43)
CVEYDNNNMRF

SEQ ID NO: 389388 - protein, 14 aa, Homo sapiens
  CDR3 for beta chain variable domain of TCR clone 194694 (TRBV20-1, TRBJ1-1)
CSAQTRIGGTEAFF

SEQ ID NO: 389389 - protein, 13 aa, Homo sapiens
  CDR3 for alpha chain variable domain of TCR clone 194695 (TRAV8-4, TRAJ44)
CDVCTGTASKLTF

SEQ ID NO: 389390 - protein, 15 aa, Homo sapiens
  CDR3 for beta chain variable domain of TCR clone 194695 (TRBV14, TRBJ2-1)
CASSQMGLHFNEQFF

SEQ ID NO: 389391 - protein, 11 aa, Homo sapiens
  CDR3 for alpha chain variable domain of TCR clone 194696 (TRAV23/DV6, TRAJ17)
CKWAAGNKLTF

SEQ ID NO: 389392 - protein, 14 aa, Homo sapiens
  CDR3 for beta chain variable domain of TCR clone 194696 (TRBV7-2, TRBJ1-1)
CASSFLTGTTEAFF

SEQ ID NO: 389393 - protein, 13 aa, Homo sapiens
  CDR3 for alpha chain variable domain of TCR clone 194697 (TRAV12-1, TRAJ26)
SATYLYYGQNFVF

SEQ ID NO: 389394 - protein, 18 aa, Homo sapiens
  CDR3 for beta chain variable domain of TCR clone 194697 (TRBV11-2, TRBJ2-3)
CASSLGGASRGAPNTQYF

SEQ ID NO: 389395 - protein, 14 aa, Homo sapiens
  CDR3 for alpha chain variable domain of TCR clone 194698 (TRAV1-2, TRAJ8)
CAVREGTGFQKLVF

SEQ ID NO: 389396 - protein, 16 aa, Homo sapiens
  CDR3 for beta chain variable domain of TCR clone 194698 (TRBV5-1, TRBJ2-2)
CASSLWDTTNTGELFF

SEQ ID NO: 389397 - protein, 13 aa, Homo sapiens
  CDR3 for alpha chain variable domain of TCR clone 194699 (TRAV2, TRAJ40)
CAVVTSGTYKYIF

SEQ ID NO: 389398 - protein, 14 aa, Homo sapiens
  CDR3 for beta chain variable domain of TCR clone 194699 (TRBV11-3, TRBJ1-2)
CASSLGTANYGYTF

SEQ ID NO: 389399 - protein, 13 aa, Homo sapiens
  CDR3 for alpha chain variable domain of TCR clone 194700 (TRAV12-3, TRAJ33)
CAMSVNSNYQLIW

SEQ ID NO: 389400 - protein, 13 aa, Homo sapiens
  CDR3 for beta chain variable domain of TCR clone 194700 (TRBV2, TRBJ1-1)
CASSVLMNTEAFF

SEQ ID NO: 389401 - protein, 13 aa, Homo sapiens
  CDR3 for alpha chain variable domain of TCR clone 194701 (TRAV1-2, TRAJ27)
CAVFNTNAGKSTF

SEQ ID NO: 389402 - protein, 17 aa, Homo sapiens
  CDR3 for beta chain variable domain of TCR clone 194701 (TRBV11-2, TRBJ2-4)
RASSLGGGEGGKNIQYF

SEQ ID NO: 389403 - protein, 14 aa, Homo sapiens
  CDR3 for alpha chain variable domain of TCR clone 194702 (TRAV12-2, TRAJ40)
CAVKIPSGTYKYIF

SEQ ID NO: 389404 - protein, 15 aa, Homo sapiens
  CDR3 for beta chain variable domain of TCR clone 194702 (TRBV28, TRBJ2-1)
CASSLDTSSYNEQFF

SEQ ID NO: 389405 - protein, 15 aa, Homo sapiens
  CDR3 for alpha chain variable domain of TCR clone 194703 (TRAV3, TRAJ22)
CAVRDRGGSARQLTF

SEQ ID NO: 389406 - protein, 13 aa, Homo sapiens
  CDR3 for beta chain variable domain of TCR clone 194703 (TRBV7-3, TRBJ2-1)
CAGSPVAYNEQFF

SEQ ID NO: 389407 - protein, 14 aa, Homo sapiens
  CDR3 for alpha chain variable domain of TCR clone 194704 (TRAV1-1, TRAJ27)
CAVIYNTNADKSTF

SEQ ID NO: 389408 - protein, 15 aa, Homo sapiens
  CDR3 for beta chain variable domain of TCR clone 194704 (TRBV7-2, TRBJ2-1)
CASSAGLAGGNEQFF

SEQ ID NO: 389409 - protein, 17 aa, Homo sapiens
  CDR3 for alpha chain variable domain of TCR clone 194705 (TRAV3, TRAJ42)
CAVRDRDYGGSQGNFIF

SEQ ID NO: 389410 - protein, 13 aa, Homo sapiens
  CDR3 for beta chain variable domain of TCR clone 194705 (TRBV10-2, TRBJ2-7)
CASGASGGYEQYF

SEQ ID NO: 389411 - protein, 13 aa, Homo sapiens
  CDR3 for alpha chain variable domain of TCR clone 194706 (TRAV39, TRAJ48)
CAAVNFGNEKLTF

SEQ ID NO: 389412 - protein, 16 aa, Homo sapiens
  CDR3 for beta chain variable domain of TCR clone 194706 (TRBV5-1, TRBJ1-1)
CASSSGGNSLNTEAFF

SEQ ID NO: 389413 - protein, 14 aa, Homo sapiens
  CDR3 for alpha chain variable domain of TCR clone 194707 (TRAV23/DV6, TRAJ8)
CAASKATGFQKLVV

SEQ ID NO: 389414 - protein, 15 aa, Homo sapiens
  CDR3 for beta chain variable domain of TCR clone 194707 (TRBV28, TRBJ2-3)
CASSPDRQGANTQYF

SEQ ID NO: 389415 - protein, 14 aa, Homo sapiens
  CDR3 for alpha chain variable domain of TCR clone 194708 (TRAV1-2, TRAJ16)
CAVNRFSDGQTLLF

SEQ ID NO: 389416 - protein, 17 aa, Homo sapiens
  CDR3 for beta chain variable domain of TCR clone 194708 (TRBV5-1, TRBJ2-2)
CASSLAGLSGGTGELFF

SEQ ID NO: 389417 - protein, 10 aa, Homo sapiens
  CDR3 for alpha chain variable domain of TCR clone 194709 (TRAV21, TRAJ20)
CAAYRLQAQL

SEQ ID NO: 389418 - protein, 14 aa, Homo sapiens
  CDR3 for beta chain variable domain of TCR clone 194709 (TRBV7-2, TRBJ1-3)
CASSRLRSGNTIYF

SEQ ID NO: 389419 - protein, 12 aa, Homo sapiens
  CDR3 for alpha chain variable domain of TCR clone 194710 (TRAV1-2, TRAJ26)
CAVSPYGQNFVF

SEQ ID NO: 389420 - protein, 14 aa, Homo sapiens
  CDR3 for beta chain variable domain of TCR clone 194710 (TRBV5-1, TRBJ2-7)
FASSFASGVNEQYF

SEQ ID NO: 389421 - protein, 14 aa, Homo sapiens
  CDR3 for alpha chain variable domain of TCR clone 194711 (TRAV8-3, TRAJ4)
CAAGASGGYNKLIF

SEQ ID NO: 389422 - protein, 13 aa, Homo sapiens
  CDR3 for beta chain variable domain of TCR clone 194711 (TRBV18, TRBJ2-5)
CASSLQGQETQYF

SEQ ID NO: 389423 - protein, 11 aa, Homo sapiens
  CDR3 for alpha chain variable domain of TCR clone 194712 (TRAV13-1, TRAJ27)
CAAYNAGKSTF

SEQ ID NO: 389424 - protein, 17 aa, Homo sapiens
  CDR3 for beta chain variable domain of TCR clone 194712 (TRBV13, TRBJ2-3)
CASSLSRVAGGRNTQHF

SEQ ID NO: 389425 - protein, 17 aa, Homo sapiens
  CDR3 for alpha chain variable domain of TCR clone 194713 (TRAV3, TRAJ6)
CAVRDGPRAGGSNIPTF

SEQ ID NO: 389426 - protein, 18 aa, Homo sapiens
  CDR3 for beta chain variable domain of TCR clone 194713 (TRBV25-1, TRBJ1-2)
CASSGLQNGQGLIFGYTF

SEQ ID NO: 389427 - protein, 17 aa, Homo sapiens
  CDR3 for alpha chain variable domain of TCR clone 194714 (TRAV26-1, TRAJ58)
CIVRVGAEETSGSRLTS

SEQ ID NO: 389428 - protein, 18 aa, Homo sapiens
  CDR3 for beta chain variable domain of TCR clone 194714 (TRBV7-9, TRBJ2-7)
CASSLTTSGSRTWYEQYF

SEQ ID NO: 389429 - protein, 20 aa, Homo sapiens
  CDR3 for alpha chain variable domain of TCR clone 194715 (TRAV38-1, TRAJ37)
CDVFLCFKGDGSSNTGKLIY

SEQ ID NO: 389430 - protein, 13 aa, Homo sapiens
  CDR3 for beta chain variable domain of TCR clone 194715 (TRBV12-4, TRBJ2-5)
CASSLFRRETQYF

SEQ ID NO: 389431 - protein, 14 aa, Homo sapiens
  CDR3 for alpha chain variable domain of TCR clone 194716 (TRAV13-2, TRAJ10)
CAENITGGGNKPTF

SEQ ID NO: 389432 - protein, 15 aa, Homo sapiens
  CDR3 for beta chain variable domain of TCR clone 194716 (TRBV7-2, TRBJ2-7)
CASSLGGAKAGEQYF

SEQ ID NO: 389433 - protein, 13 aa, Homo sapiens
  CDR3 for alpha chain variable domain of TCR clone 194717 (TRAV12-1, TRAJ29)
CVGRNSGNTPLVF

SEQ ID NO: 389434 - protein, 14 aa, Homo sapiens
  CDR3 for beta chain variable domain of TCR clone 194717 (TRBV7-2, TRBJ2-7)
CASRSQGAAYEQYF

SEQ ID NO: 389435 - protein, 16 aa, Homo sapiens
  CDR3 for alpha chain variable domain of TCR clone 194718 (TRAV30, TRAJ24)
CGTEIVDADSWGKLQF

SEQ ID NO: 389436 - protein, 14 aa, Homo sapiens
  CDR3 for beta chain variable domain of TCR clone 194718 (TRBV7-9, TRBJ2-4)
CASSFALGGTIQYF

SEQ ID NO: 389437 - protein, 11 aa, Homo sapiens
  CDR3 for alpha chain variable domain of TCR clone 194719 (TRAV12-3, TRAJ43)
CAMSVSNDIRF

SEQ ID NO: 389438 - protein, 12 aa, Homo sapiens
  CDR3 for beta chain variable domain of TCR clone 194719 (TRBV20-1, TRBJ1-1)
QCSTWGGIEAFF

SEQ ID NO: 389439 - protein, 14 aa, Homo sapiens
  CDR3 for alpha chain variable domain of TCR clone 194720 (TRAV8-1, TRAJ4)
CAVKFSGGYNKLIF

SEQ ID NO: 389440 - protein, 15 aa, Homo sapiens
  CDR3 for beta chain variable domain of TCR clone 194720 (TRBV7-9, TRBJ1-4)
CASSARTGGNEKLFF

SEQ ID NO: 389441 - protein, 15 aa, Homo sapiens
  CDR3 for alpha chain variable domain of TCR clone 194721 (TRAV30, TRAJ32)
RVTEILGGATNKLIF

SEQ ID NO: 389442 - protein, 13 aa, Homo sapiens
  CDR3 for beta chain variable domain of TCR clone 194721 (TRBV6-3, TRBJ2-7)
CASSFSGGYEQYF

SEQ ID NO: 389443 - protein, 13 aa, Homo sapiens
  CDR3 for alpha chain variable domain of TCR clone 194722 (TRAV17, TRAJ39)
CAISTNAGNMLTF

SEQ ID NO: 389444 - protein, 16 aa, Homo sapiens
  CDR3 for beta chain variable domain of TCR clone 194722 (TRBV7-9, TRBJ1-2)
CASSLGFSSGEDGYTF

SEQ ID NO: 389445 - protein, 17 aa, Homo sapiens
  CDR3 for alpha chain variable domain of TCR clone 194723 (TRAV3, TRAJ6)
CAVRDGPRAGGSYTPTF

SEQ ID NO: 389446 - protein, 18 aa, Homo sapiens
  CDR3 for beta chain variable domain of TCR clone 194723 (TRBV28, TRBJ1-2)
CASRQQQGKRGSNYGYTV

SEQ ID NO: 389447 - protein, 17 aa, Homo sapiens
  CDR3 for alpha chain variable domain of TCR clone 194724 (TRAV23/DV6, TRAJ58)
CAARLLRGETSGSRLTF

SEQ ID NO: 389448 - protein, 16 aa, Homo sapiens
  CDR3 for beta chain variable domain of TCR clone 194724 (TRBV27, TRBJ2-2)
CASSFRGLVRTGELFF

SEQ ID NO: 389449 - protein, 15 aa, Homo sapiens
  CDR3 for alpha chain variable domain of TCR clone 194725 (TRAV26-1, TRAJ22)
CIVRVSFWFCRATDL

SEQ ID NO: 389450 - protein, 20 aa, Homo sapiens
  CDR3 for beta chain variable domain of TCR clone 194725 (TRBV28, TRBJ2-1)
CASTPIGRSPGLAGGNEQFF

SEQ ID NO: 389451 - protein, 14 aa, Homo sapiens
  CDR3 for alpha chain variable domain of TCR clone 194726 (TRAV23/DV6, TRAJ13)
CAAMYSGGYQKVTF

SEQ ID NO: 389452 - protein, 14 aa, Homo sapiens
  CDR3 for beta chain variable domain of TCR clone 194726 (TRBV7-9, TRBJ2-1)
CASSPRDSLHEQFF

SEQ ID NO: 389453 - protein, 16 aa, Homo sapiens
  CDR3 for alpha chain variable domain of TCR clone 194727 (TRAV30, TRAJ24)
CGTEIVDADSWGKFQF

SEQ ID NO: 389454 - protein, 14 aa, Homo sapiens
  CDR3 for beta chain variable domain of TCR clone 194727 (TRBV19, TRBJ2-1)
CASPAFVLSGEQFF

SEQ ID NO: 389455 - protein, 12 aa, Homo sapiens
  CDR3 for alpha chain variable domain of TCR clone 194728 (TRAV1-1, TRAJ8)
CAGGTGFQKLGF

SEQ ID NO: 389456 - protein, 13 aa, Homo sapiens
  CDR3 for beta chain variable domain of TCR clone 194728 (TRBV19, TRBJ1-2)
CASSQGQVYGYTF

SEQ ID NO: 389457 - protein, 12 aa, Homo sapiens
  CDR3 for alpha chain variable domain of TCR clone 194729 (TRAV2, TRAJ10)
CASTGGGNKLTF

SEQ ID NO: 389458 - protein, 13 aa, Homo sapiens
  CDR3 for beta chain variable domain of TCR clone 194729 (TRBV12-4, TRBJ1-2)
CASSLRQGKGYTF

SEQ ID NO: 389459 - protein, 15 aa, Homo sapiens
  CDR3 for alpha chain variable domain of TCR clone 194730 (TRAV12-1, TRAJ10)
CVFHILTGGGNKLTF

SEQ ID NO: 389460 - protein, 13 aa, Homo sapiens
  CDR3 for beta chain variable domain of TCR clone 194730 (TRBV27, TRBJ1-4)
CASSLMGDEKLFF

SEQ ID NO: 389461 - protein, 15 aa, Homo sapiens
  CDR3 for alpha chain variable domain of TCR clone 194731 (TRAV12-3, TRAJ22)
CAMRSSSGSASQLTF

SEQ ID NO: 389462 - protein, 18 aa, Homo sapiens
  CDR3 for beta chain variable domain of TCR clone 194731 (TRBV27, TRBJ2-1)
CASRRSGRGESSGNEQFF

SEQ ID NO: 389463 - protein, 16 aa, Homo sapiens
  CDR3 for alpha chain variable domain of TCR clone 194732 (TRAV30, TRAJ24)
CGTEIVDADSWGRFQF

SEQ ID NO: 389464 - protein, 14 aa, Homo sapiens
  CDR3 for beta chain variable domain of TCR clone 194732 (TRBV12-5, TRBJ2-5)
CASGSRTHQETQSF

SEQ ID NO: 389465 - protein, 17 aa, Homo sapiens
  CDR3 for alpha chain variable domain of TCR clone 194733 (TRAV3, TRAJ6)
CAVRDGPRAGESYIPTF

SEQ ID NO: 389466 - protein, 13 aa, Homo sapiens
  CDR3 for beta chain variable domain of TCR clone 194733 (TRBV15, TRBJ1-6)
CATSGGLNSPLHF

SEQ ID NO: 389467 - protein, 11 aa, Homo sapiens
  CDR3 for alpha chain variable domain of TCR clone 194734 (TRAV3, TRAJ21)
CAVGNFNKFYF

SEQ ID NO: 389468 - protein, 13 aa, Homo sapiens
  CDR3 for beta chain variable domain of TCR clone 194734 (TRBV4-2, TRBJ1-1)
CASSQAGSTEAFF

SEQ ID NO: 389469 - protein, 21 aa, Homo sapiens
  CDR3 for alpha chain variable domain of TCR clone 194735 (TRAV29/DV5, TRAJ52)
QCTSVQQALGVRGTSYGKLTF

SEQ ID NO: 389470 - protein, 16 aa, Homo sapiens
  CDR3 for beta chain variable domain of TCR clone 194735 (TRBV7-3, TRBJ2-2)
CASSLKRGTLSGELFF

SEQ ID NO: 389471 - protein, 13 aa, Homo sapiens
  CDR3 for alpha chain variable domain of TCR clone 194736 (TRAV27, TRAJ49)
CAPRPYTGNQFYF

SEQ ID NO: 389472 - protein, 15 aa, Homo sapiens
  CDR3 for beta chain variable domain of TCR clone 194736 (TRBV2, TRBJ2-1)
CASSELAGSYNEQFF

SEQ ID NO: 389473 - protein, 13 aa, Homo sapiens
  CDR3 for alpha chain variable domain of TCR clone 194737 (TRAV13-1, TRAJ6)
CARGSGGSYIPTF

SEQ ID NO: 389474 - protein, 13 aa, Homo sapiens
  CDR3 for beta chain variable domain of TCR clone 194737 (TRBV20-1, TRBJ2-1)
CSARGLVSNEQFF

SEQ ID NO: 389475 - protein, 15 aa, Homo sapiens
  CDR3 for alpha chain variable domain of TCR clone 194738 (TRAV1-2, TRAJ28)
CAVQYSGAGSYQLTI

SEQ ID NO: 389476 - protein, 13 aa, Homo sapiens
  CDR3 for beta chain variable domain of TCR clone 194738 (TRBV20-1, TRBJ2-7)
CSATHTSGYEQYF

SEQ ID NO: 389477 - protein, 15 aa, Homo sapiens
  CDR3 for alpha chain variable domain of TCR clone 194739 (TRAV8-2, TRAJ16)
CVVSDGFSDGQQLLF

SEQ ID NO: 389478 - protein, 15 aa, Homo sapiens
  CDR3 for beta chain variable domain of TCR clone 194739 (TRBV12-4, TRBJ2-5)
CASSPPTGLQETQYF

SEQ ID NO: 389479 - protein, 16 aa, Homo sapiens
  CDR3 for alpha chain variable domain of TCR clone 194740 (TRAV3, TRAJ32)
CAVRDMAGGATNKLIF

SEQ ID NO: 389480 - protein, 11 aa, Homo sapiens
  CDR3 for beta chain variable domain of TCR clone 194740 (TRBV12-4, TRBJ2-1)
CASSRLNEQFF

SEQ ID NO: 389481 - protein, 11 aa, Homo sapiens
  CDR3 for alpha chain variable domain of TCR clone 194741 (TRAV12-2, TRAJ54)
CAVEGAQKLVF

SEQ ID NO: 389482 - protein, 17 aa, Homo sapiens
  CDR3 for beta chain variable domain of TCR clone 194741 (TRBV18, TRBJ1-3)
WASSPYPTGPSGNTIYF

SEQ ID NO: 389483 - protein, 13 aa, Homo sapiens
  CDR3 for alpha chain variable domain of TCR clone 194742 (TRAV12-3, TRAJ4)
CNEQAGVYNKLIF

SEQ ID NO: 389484 - protein, 15 aa, Homo sapiens
  CDR3 for beta chain variable domain of TCR clone 194742 (TRBV5-1, TRBJ1-1)
CASSLSDLGGTEAFF

SEQ ID NO: 389485 - protein, 16 aa, Homo sapiens
  CDR3 for alpha chain variable domain of TCR clone 194743 (TRAV12-2, TRAJ13)
CAVKKTGVTRKVPLEL

SEQ ID NO: 389486 - protein, 15 aa, Homo sapiens
  CDR3 for beta chain variable domain of TCR clone 194743 (TRBV27, TRBJ2-1)
CASSNGGGSSNEQFF

SEQ ID NO: 389487 - protein, 14 aa, Homo sapiens
  CDR3 for alpha chain variable domain of TCR clone 194744 (TRAV29/DV5, TRAJ45)
CAASFSGGADGLTF

SEQ ID NO: 389488 - protein, 12 aa, Homo sapiens
  CDR3 for beta chain variable domain of TCR clone 194744 (TRBV29-1, TRBJ2-3)
CSVTGGADTQYF

SEQ ID NO: 389489 - protein, 12 aa, Homo sapiens
  CDR3 for alpha chain variable domain of TCR clone 194745 (TRAV12-1, TRAJ31)
CVVNRNNARPMF

SEQ ID NO: 389490 - protein, 15 aa, Homo sapiens
  CDR3 for beta chain variable domain of TCR clone 194745 (TRBV10-3, TRBJ2-3)
CAISEALSSTDTQYF

SEQ ID NO: 389491 - protein, 11 aa, Homo sapiens
  CDR3 for alpha chain variable domain of TCR clone 194746 (TRAV3, TRAJ21)
CAVGSFNKFYF

SEQ ID NO: 389492 - protein, 16 aa, Homo sapiens
  CDR3 for beta chain variable domain of TCR clone 194746 (TRBV19, TRBJ2-1)
CASSRAGPGSYNEQFF

SEQ ID NO: 389493 - protein, 15 aa, Homo sapiens
  CDR3 for alpha chain variable domain of TCR clone 194747 (TRAV2, TRAJ15)
CAVEDRGQAGTALIF

SEQ ID NO: 389494 - protein, 15 aa, Homo sapiens
  CDR3 for beta chain variable domain of TCR clone 194747 (TRBV11-1, TRBJ2-7)
CASSLNYGASYEQYF

SEQ ID NO: 389495 - protein, 13 aa, Homo sapiens
  CDR3 for alpha chain variable domain of TCR clone 194748 (TRAV26-1, TRAJ48)
CIVRIVGDEKLTF

SEQ ID NO: 389496 - protein, 18 aa, Homo sapiens
  CDR3 for beta chain variable domain of TCR clone 194748 (TRBV4-3, TRBJ1-6)
CASSQETPASSYNSPLHF

SEQ ID NO: 389497 - protein, 13 aa, Homo sapiens
  CDR3 for alpha chain variable domain of TCR clone 194749 (TRAV35, TRAJ57)
CAGSQGGSEKLVF

SEQ ID NO: 389498 - protein, 13 aa, Homo sapiens
  CDR3 for beta chain variable domain of TCR clone 194749 (TRBV12-4, TRBJ1-2)
CASSSGSKDGYTF

SEQ ID NO: 389499 - protein, 13 aa, Homo sapiens
  CDR3 for alpha chain variable domain of TCR clone 194750 (TRAV1-1, TRAJ9)
CAAKNTGGFKTIF

SEQ ID NO: 389500 - protein, 13 aa, Homo sapiens
  CDR3 for beta chain variable domain of TCR clone 194750 (TRBV20-1, TRBJ2-7)
CSATHTSGYEQYF

SEQ ID NO: 389501 - protein, 13 aa, Homo sapiens
  CDR3 for alpha chain variable domain of TCR clone 194751 (TRAV14/DV4, TRAJ34)
CAMRDYNTDKLIF

SEQ ID NO: 389502 - protein, 16 aa, Homo sapiens
  CDR3 for beta chain variable domain of TCR clone 194751 (TRBV7-2, TRBJ1-2)
CASSSNQDRRGHGYTF

SEQ ID NO: 389503 - protein, 17 aa, Homo sapiens
  CDR3 for alpha chain variable domain of TCR clone 194752 (TRAV3, TRAJ42)
CAVRDRDYGGSQGNLIC

SEQ ID NO: 389504 - protein, 15 aa, Homo sapiens
  CDR3 for beta chain variable domain of TCR clone 194752 (TRBV6-5, TRBJ2-1)
CASSYDAGAGNEQFF

SEQ ID NO: 389505 - protein, 15 aa, Homo sapiens
  CDR3 for alpha chain variable domain of TCR clone 194753 (TRAV25, TRAJ53)
CPTSNSGGSNYKLTF

SEQ ID NO: 389506 - protein, 17 aa, Homo sapiens
  CDR3 for beta chain variable domain of TCR clone 194753 (TRBV15, TRBJ1-4)
CATSRYGTGDPNEKLFF

SEQ ID NO: 389507 - protein, 14 aa, Homo sapiens
  CDR3 for alpha chain variable domain of TCR clone 194754 (TRAV13-1, TRAJ35)
CAASKGGFGNVLHC

SEQ ID NO: 389508 - protein, 13 aa, Homo sapiens
  CDR3 for beta chain variable domain of TCR clone 194754 (TRBV7-6, TRBJ2-3)
CASSLAVGDTQYF

SEQ ID NO: 389509 - protein, 14 aa, Homo sapiens
  CDR3 for alpha chain variable domain of TCR clone 194755 (TRAV26-1, TRAJ45)
CIEGTGGGADGPTF

SEQ ID NO: 389510 - protein, 13 aa, Homo sapiens
  CDR3 for beta chain variable domain of TCR clone 194755 (TRBV7-6, TRBJ1-2)
CASSLVADYGYTF

SEQ ID NO: 389511 - protein, 12 aa, Homo sapiens
  CDR3 for alpha chain variable domain of TCR clone 194756 (TRAV26-1, TRAJ54)
CIGGWGAQKLVF

SEQ ID NO: 389512 - protein, 14 aa, Homo sapiens
  CDR3 for beta chain variable domain of TCR clone 194756 (TRBV11-2, TRBJ1-2)
CASSYGQAGDSYTF

SEQ ID NO: 389513 - protein, 14 aa, Homo sapiens
  CDR3 for alpha chain variable domain of TCR clone 194757 (TRAV38-1, TRAJ45)
CAYYSGGGADGLTF

SEQ ID NO: 389514 - protein, 11 aa, Homo sapiens
  CDR3 for beta chain variable domain of TCR clone 194757 (TRBV6-5, TRBJ1-1)
CATGTGGAAFF

SEQ ID NO: 389515 - protein, 12 aa, Homo sapiens
  CDR3 for alpha chain variable domain of TCR clone 194758 (TRAV12-3, TRAJ17)
CAMTLTGNKLTF

SEQ ID NO: 389516 - protein, 15 aa, Homo sapiens
  CDR3 for beta chain variable domain of TCR clone 194758 (TRBV20-1, TRBJ2-7)
CSARDRVSAMHEQYF

SEQ ID NO: 389517 - protein, 12 aa, Homo sapiens
  CDR3 for alpha chain variable domain of TCR clone 194759 (TRAV21, TRAJ49)
WAVTNTGNQFYF

SEQ ID NO: 389518 - protein, 17 aa, Homo sapiens
  CDR3 for beta chain variable domain of TCR clone 194759 (TRBV13, TRBJ2-3)
CASSLSRVAGGRNTQYF

SEQ ID NO: 389519 - protein, 12 aa, Homo sapiens
  CDR3 for alpha chain variable domain of TCR clone 194760 (TRAV2, TRAJ9)
CAVVAVGFKTIF

SEQ ID NO: 389520 - protein, 16 aa, Homo sapiens
  CDR3 for beta chain variable domain of TCR clone 194760 (TRBV13, TRBJ2-2)
CASSPRTGEHTGELFF

SEQ ID NO: 389521 - protein, 14 aa, Homo sapiens
  CDR3 for alpha chain variable domain of TCR clone 194761 (TRAV12-2, TRAJ24)
CAVTPADSWGKLQF

SEQ ID NO: 389522 - protein, 11 aa, Homo sapiens
  CDR3 for beta chain variable domain of TCR clone 194761 (TRBV12-4, TRBJ2-2)
CASSSAGELFF

SEQ ID NO: 389523 - protein, 12 aa, Homo sapiens
  CDR3 for alpha chain variable domain of TCR clone 194762 (TRAV1-2, TRAJ9)
CAGYTGGFKTIF

SEQ ID NO: 389524 - protein, 19 aa, Homo sapiens
  CDR3 for beta chain variable domain of TCR clone 194762 (TRBV25-1, TRBJ2-2)
CAILVYRVDRGRKTGELFF

SEQ ID NO: 389525 - protein, 16 aa, Homo sapiens
  CDR3 for alpha chain variable domain of TCR clone 194763 (TRAV3, TRAJ27)
CAVRDPQGTNAGKSTF

SEQ ID NO: 389526 - protein, 16 aa, Homo sapiens
  CDR3 for beta chain variable domain of TCR clone 194763 (TRBV27, TRBJ1-1)
CASSTRTGGVGTEAFF

SEQ ID NO: 389527 - protein, 11 aa, Homo sapiens
  CDR3 for alpha chain variable domain of TCR clone 194764 (TRAV35, TRAJ39)
GLNNAGNMLTF

SEQ ID NO: 389528 - protein, 14 aa, Homo sapiens
  CDR3 for beta chain variable domain of TCR clone 194764 (TRBV7-8, TRBJ1-2)
CASSPDSLSYGYTF

SEQ ID NO: 389529 - protein, 14 aa, Homo sapiens
  CDR3 for alpha chain variable domain of TCR clone 194765 (TRAV8-3, TRAJ4)
CAVGAAGGYNKLIF

SEQ ID NO: 389530 - protein, 16 aa, Homo sapiens
  CDR3 for beta chain variable domain of TCR clone 194765 (TRBV12-5, TRBJ2-5)
CASGPRTGGNQETQYF

SEQ ID NO: 389531 - protein, 14 aa, Homo sapiens
  CDR3 for alpha chain variable domain of TCR clone 194766 (TRAV26-1, TRAJ38)
CIADNAGNNRTLIW

SEQ ID NO: 389532 - protein, 13 aa, Homo sapiens
  CDR3 for beta chain variable domain of TCR clone 194766 (TRBV20-1, TRBJ1-1)
CSARGGGNTEASF

SEQ ID NO: 389533 - protein, 12 aa, Homo sapiens
  CDR3 for alpha chain variable domain of TCR clone 194767 (TRAV27, TRAJ35)
CAGADFGNVLHC

SEQ ID NO: 389534 - protein, 13 aa, Homo sapiens
  CDR3 for beta chain variable domain of TCR clone 194767 (TRBV7-3, TRBJ1-1)
CASRKDWGAEAFF

SEQ ID NO: 389535 - protein, 14 aa, Homo sapiens
  CDR3 for alpha chain variable domain of TCR clone 194768 (TRAV17, TRAJ57)
CATDPQGGSEKLVS

SEQ ID NO: 389536 - protein, 14 aa, Homo sapiens
  CDR3 for beta chain variable domain of TCR clone 194768 (TRBV20-1, TRBJ1-3)
CSASPTGAGNTIYF

SEQ ID NO: 389537 - protein, 15 aa, Homo sapiens
  CDR3 for alpha chain variable domain of TCR clone 194769 (TRAV25, TRAJ53)
CPTSNSGGSNYKLTF

SEQ ID NO: 389538 - protein, 14 aa, Homo sapiens
  CDR3 for beta chain variable domain of TCR clone 194769 (TRBV7-8, TRBJ2-3)
GASSLDRGTDTQYF

SEQ ID NO: 389539 - protein, 15 aa, Homo sapiens
  CDR3 for alpha chain variable domain of TCR clone 194770 (TRAV3, TRAJ9)
CAVRARNTGGFKTIF

SEQ ID NO: 389540 - protein, 14 aa, Homo sapiens
  CDR3 for beta chain variable domain of TCR clone 194770 (TRBV4-2, TRBJ2-3)
CASSQERGTDTQYF

SEQ ID NO: 389541 - protein, 19 aa, Homo sapiens
  CDR3 for alpha chain variable domain of TCR clone 194771 (TRAV1-2, TRAJ26)
CLLPLCCERPDNYAQNFVF

SEQ ID NO: 389542 - protein, 12 aa, Homo sapiens
  CDR3 for beta chain variable domain of TCR clone 194771 (TRBV7-9, TRBJ2-7)
CATRTDAYEQYF

SEQ ID NO: 389543 - protein, 14 aa, Homo sapiens
  CDR3 for alpha chain variable domain of TCR clone 194772 (TRAV8-4, TRAJ40)
CAVIPTPGTYKYFF

SEQ ID NO: 389544 - protein, 15 aa, Homo sapiens
  CDR3 for beta chain variable domain of TCR clone 194772 (TRBV7-2, TRBJ2-1)
CASTSASGDYNEQFF

SEQ ID NO: 389545 - protein, 15 aa, Homo sapiens
  CDR3 for alpha chain variable domain of TCR clone 194773 (TRAV8-1, TRAJ6)
CAVNTPPGGSYIPTF

SEQ ID NO: 389546 - protein, 17 aa, Homo sapiens
  CDR3 for beta chain variable domain of TCR clone 194773 (TRBV4-1, TRBJ1-4)
CASSQEGPRGVEEKLFF

SEQ ID NO: 389547 - protein, 19 aa, Homo sapiens
  CDR3 for alpha chain variable domain of TCR clone 194774 (TRAV26-1, TRAJ52)
CIVRAHRNAGGTSYGKLTF

SEQ ID NO: 389548 - protein, 15 aa, Homo sapiens
  CDR3 for beta chain variable domain of TCR clone 194774 (TRBV29-1, TRBJ2-1)
CSGRDRKSSYHEQFF

SEQ ID NO: 389549 - protein, 13 aa, Homo sapiens
  CDR3 for alpha chain variable domain of TCR clone 194775 (TRAV8-3, TRAJ36)
CAVGATGANNLFF

SEQ ID NO: 389550 - protein, 12 aa, Homo sapiens
  CDR3 for beta chain variable domain of TCR clone 194775 (TRBV18, TRBJ2-1)
CASSPGTSEGFF

SEQ ID NO: 389551 - protein, 12 aa, Homo sapiens
  CDR3 for alpha chain variable domain of TCR clone 194776 (TRAV16, TRAJ10)
CSRTGGGNKLNF

SEQ ID NO: 389552 - protein, 14 aa, Homo sapiens
  CDR3 for beta chain variable domain of TCR clone 194776 (TRBV7-2, TRBJ1-1)
CASSFLTGTTEAFF

SEQ ID NO: 389553 - protein, 15 aa, Homo sapiens
  CDR3 for alpha chain variable domain of TCR clone 194777 (TRAV12-1, TRAJ44)
CVMDEYTGTASKLTF

SEQ ID NO: 389554 - protein, 14 aa, Homo sapiens
  CDR3 for beta chain variable domain of TCR clone 194777 (TRBV5-1, TRBJ1-2)
CASSLEPVNYGYTF

SEQ ID NO: 389555 - protein, 13 aa, Homo sapiens
  CDR3 for alpha chain variable domain of TCR clone 194778 (TRAV38-1, TRAJ42)
CARWGGSQGNLIF

SEQ ID NO: 389556 - protein, 13 aa, Homo sapiens
  CDR3 for beta chain variable domain of TCR clone 194778 (TRBV7-9, TRBJ2-3)
CASSPGSTDTQYF

SEQ ID NO: 389557 - protein, 14 aa, Homo sapiens
  CDR3 for alpha chain variable domain of TCR clone 194779 (TRAV1-1, TRAJ35)
CAVRSIGFGNVLHF

SEQ ID NO: 389558 - protein, 14 aa, Homo sapiens
  CDR3 for beta chain variable domain of TCR clone 194779 (TRBV5-7, TRBJ2-7)
CASSGGLGSYEQYS

SEQ ID NO: 389559 - protein, 11 aa, Homo sapiens
  CDR3 for alpha chain variable domain of TCR clone 194780 (TRAV12-1, TRAJ3)
CVVSSASKIIF

SEQ ID NO: 389560 - protein, 12 aa, Homo sapiens
  CDR3 for beta chain variable domain of TCR clone 194780 (TRBV19, TRBJ1-5)
CAISIAQQPQHF

SEQ ID NO: 389561 - protein, 16 aa, Homo sapiens
  CDR3 for alpha chain variable domain of TCR clone 194781 (TRAV30, TRAJ24)
CGTEMVDADSWGKFQF

SEQ ID NO: 389562 - protein, 17 aa, Homo sapiens
  CDR3 for beta chain variable domain of TCR clone 194781 (TRBV20-1, TRBJ2-1)
CSAPPRLAGTRYNEQFF

SEQ ID NO: 389563 - protein, 15 aa, Homo sapiens
  CDR3 for alpha chain variable domain of TCR clone 194782 (TRAV14/DV4, TRAJ33)
CAMRGGRDSNYQLIW

SEQ ID NO: 389564 - protein, 15 aa, Homo sapiens
  CDR3 for beta chain variable domain of TCR clone 194782 (TRBV5-5, TRBJ1-5)
CASSSTPGSNQPQHF

SEQ ID NO: 389565 - protein, 21 aa, Homo sapiens
  CDR3 for alpha chain variable domain of TCR clone 194783 (TRAV2, TRAJ10)
CCLLLGGGGSTVTGGGNKLTF

SEQ ID NO: 389566 - protein, 16 aa, Homo sapiens
  CDR3 for beta chain variable domain of TCR clone 194783 (TRBV18, TRBJ1-5)
CASSPSTGNSNQPQHF

SEQ ID NO: 389567 - protein, 13 aa, Homo sapiens
  CDR3 for alpha chain variable domain of TCR clone 194784 (TRAV27, TRAJ56)
CAGKPGANSKLSF

SEQ ID NO: 389568 - protein, 15 aa, Homo sapiens
  CDR3 for beta chain variable domain of TCR clone 194784 (TRBV6-1, TRBJ2-3)
CASSERWDSTDTQYF

SEQ ID NO: 389569 - protein, 18 aa, Homo sapiens
  CDR3 for alpha chain variable domain of TCR clone 194785 (TRAV21, TRAJ52)
CAVRPSPAGGTSYGKLTF

SEQ ID NO: 389570 - protein, 13 aa, Homo sapiens
  CDR3 for beta chain variable domain of TCR clone 194785 (TRBV10-3, TRBJ1-1)
CAIIPEGGTEAFF

SEQ ID NO: 389571 - protein, 14 aa, Homo sapiens
  CDR3 for alpha chain variable domain of TCR clone 194786 (TRAV29/DV5, TRAJ48)
CAAMALFGNEKLTC

SEQ ID NO: 389572 - protein, 15 aa, Homo sapiens
  CDR3 for beta chain variable domain of TCR clone 194786 (TRBV7-2, TRBJ2-1)
CASTHGTGIYNEQFF

SEQ ID NO: 389573 - protein, 16 aa, Homo sapiens
  CDR3 for alpha chain variable domain of TCR clone 194787 (TRAV30, TRAJ24)
CGTEIVDADSWGKFQF

SEQ ID NO: 389574 - protein, 16 aa, Homo sapiens
  CDR3 for beta chain variable domain of TCR clone 194787 (TRBV13, TRBJ2-2)
CASSPRTGEHTGELLF

SEQ ID NO: 389575 - protein, 14 aa, Homo sapiens
  CDR3 for alpha chain variable domain of TCR clone 194788 (TRAV9-2, TRAJ39)
CALYIYNAGNILTF

SEQ ID NO: 389576 - protein, 16 aa, Homo sapiens
  CDR3 for beta chain variable domain of TCR clone 194788 (TRBV19, TRBJ2-2)
CASRSPGTGATGELFF

SEQ ID NO: 389577 - protein, 13 aa, Homo sapiens
  CDR3 for alpha chain variable domain of TCR clone 194789 (TRAV8-2, TRAJ8)
CVVSDLSFQKLVF

SEQ ID NO: 389578 - protein, 15 aa, Homo sapiens
  CDR3 for beta chain variable domain of TCR clone 194789 (TRBV4-1, TRBJ1-4)
CASSPGRQGNEKLFF

SEQ ID NO: 389579 - protein, 14 aa, Homo sapiens
  CDR3 for alpha chain variable domain of TCR clone 194790 (TRAV1-2, TRAJ16)
CAVRSASDGQKLLF

SEQ ID NO: 389580 - protein, 17 aa, Homo sapiens
  CDR3 for beta chain variable domain of TCR clone 194790 (TRBV7-3, TRBJ2-3)
CASSLMKRMRGADTQYV

SEQ ID NO: 389581 - protein, 14 aa, Homo sapiens
  CDR3 for alpha chain variable domain of TCR clone 194791 (TRAV1-2, TRAJ16)
CAVNRFSDGQKLLF

SEQ ID NO: 389582 - protein, 20 aa, Homo sapiens
  CDR3 for beta chain variable domain of TCR clone 194791 (TRBV3-1, TRBJ2-6)
CASSPRPGLEGGAGANVLTF

SEQ ID NO: 389583 - protein, 11 aa, Homo sapiens
  CDR3 for alpha chain variable domain of TCR clone 194792 (TRAV2, TRAJ4)
CAVGWSNKLIF

SEQ ID NO: 389584 - protein, 15 aa, Homo sapiens
  CDR3 for beta chain variable domain of TCR clone 194792 (TRBV7-2, TRBJ2-2)
CASSFQRGETGELFF

SEQ ID NO: 389585 - protein, 14 aa, Homo sapiens
  CDR3 for alpha chain variable domain of TCR clone 194793 (TRAV12-3, TRAJ10)
SHLPLTGGGNKLTF

SEQ ID NO: 389586 - protein, 14 aa, Homo sapiens
  CDR3 for beta chain variable domain of TCR clone 194793 (TRBV12-5, TRBJ2-5)
CASGSRTHQETQYI

SEQ ID NO: 389587 - protein, 12 aa, Homo sapiens
  CDR3 for alpha chain variable domain of TCR clone 194794 (TRAV29/DV5, TRAJ49)
CAALNNGNQFYF

SEQ ID NO: 389588 - protein, 14 aa, Homo sapiens
  CDR3 for beta chain variable domain of TCR clone 194794 (TRBV2, TRBJ2-2)
CASSEWTPTGELFF

SEQ ID NO: 389589 - protein, 18 aa, Homo sapiens
  CDR3 for alpha chain variable domain of TCR clone 194795 (TRAV13-1, TRAJ52)
CAAKNPNAGGTGYGKLTF

SEQ ID NO: 389590 - protein, 12 aa, Homo sapiens
  CDR3 for beta chain variable domain of TCR clone 194795 (TRBV11-2, TRBJ2-2)
CASSLGGGELFF

SEQ ID NO: 389591 - protein, 17 aa, Homo sapiens
  CDR3 for alpha chain variable domain of TCR clone 194796 (TRAV13-1, )
CAANIQNPDPAVYQLRD

SEQ ID NO: 389592 - protein, 16 aa, Homo sapiens
  CDR3 for beta chain variable domain of TCR clone 194796 (TRBV28, TRBJ2-2)
CASSLEGGSNTGELFF

SEQ ID NO: 389593 - protein, 10 aa, Homo sapiens
  CDR3 for alpha chain variable domain of TCR clone 194797 (TRAV8-4, TRAJ39)
CAVSGNMLAF

SEQ ID NO: 389594 - protein, 14 aa, Homo sapiens
  CDR3 for beta chain variable domain of TCR clone 194797 (TRBV6-9, TRBJ1-5)
CASSYPTGGQPQHF

SEQ ID NO: 389595 - protein, 14 aa, Homo sapiens
  CDR3 for alpha chain variable domain of TCR clone 194798 (TRAV26-1, TRAJ45)
CIEVTGGGADGLTF

SEQ ID NO: 389596 - protein, 15 aa, Homo sapiens
  CDR3 for beta chain variable domain of TCR clone 194798 (TRBV11-1, TRBJ2-7)
CASSRGRFKTYEQYF

SEQ ID NO: 389597 - protein, 11 aa, Homo sapiens
  CDR3 for alpha chain variable domain of TCR clone 194799 (TRAV35, TRAJ30)
CAPGGDDKIIF

SEQ ID NO: 389598 - protein, 18 aa, Homo sapiens
  CDR3 for beta chain variable domain of TCR clone 194799 (TRBV7-6, TRBJ2-1)
GHVSLGQQLGGGADKQFF

SEQ ID NO: 389599 - protein, 14 aa, Homo sapiens
  CDR3 for alpha chain variable domain of TCR clone 194800 (TRAV12-2, TRAJ44)
CAVNPAGTASKLTS

SEQ ID NO: 389600 - protein, 16 aa, Homo sapiens
  CDR3 for beta chain variable domain of TCR clone 194800 (TRBV2, TRBJ2-6)
CASSEVGGAGANVLTF

SEQ ID NO: 389601 - protein, 15 aa, Homo sapiens
  CDR3 for alpha chain variable domain of TCR clone 194801 (TRAV3, TRAJ20)
CAVRDIQLSDYKLSF

SEQ ID NO: 389602 - protein, 15 aa, Homo sapiens
  CDR3 for beta chain variable domain of TCR clone 194801 (TRBV7-9, TRBJ1-6)
CASSSPGRGNSPLLF

SEQ ID NO: 389603 - protein, 15 aa, Homo sapiens
  CDR3 for alpha chain variable domain of TCR clone 194802 (TRAV25, TRAJ52)
CAGRPGGASYGKLTF

SEQ ID NO: 389604 - protein, 17 aa, Homo sapiens
  CDR3 for beta chain variable domain of TCR clone 194802 (TRBV7-8, TRBJ2-6)
CASSAGTGGAGANGLTF

SEQ ID NO: 389605 - protein, 15 aa, Homo sapiens
  CDR3 for alpha chain variable domain of TCR clone 194803 (TRAV2, TRAJ9)
CAVAALNTGGFKTIF

SEQ ID NO: 389606 - protein, 15 aa, Homo sapiens
  CDR3 for beta chain variable domain of TCR clone 194803 (TRBV6-1, TRBJ2-6)
CASSSRPSGANVLTF

SEQ ID NO: 389607 - protein, 14 aa, Homo sapiens
  CDR3 for alpha chain variable domain of TCR clone 194804 (TRAV20, TRAJ56)
YAVQFGGANSKLTF

SEQ ID NO: 389608 - protein, 14 aa, Homo sapiens
  CDR3 for beta chain variable domain of TCR clone 194804 (TRBV7-2, TRBJ1-1)
CASSFLTGTTEAFF

SEQ ID NO: 389609 - protein, 16 aa, Homo sapiens
  CDR3 for alpha chain variable domain of TCR clone 194805 (TRAV12-1, TRAJ53)
CVVTSVAGGSNYKLTF

SEQ ID NO: 389610 - protein, 15 aa, Homo sapiens
  CDR3 for beta chain variable domain of TCR clone 194805 (TRBV20-1, TRBJ1-1)
CSASRGVTGSTEAFF

SEQ ID NO: 389611 - protein, 14 aa, Homo sapiens
  CDR3 for alpha chain variable domain of TCR clone 194806 (TRAV3, TRAJ34)
CAVRDINNTDKLIF

SEQ ID NO: 389612 - protein, 14 aa, Homo sapiens
  CDR3 for beta chain variable domain of TCR clone 194806 (TRBV7-2, TRBJ2-2)
CASSLGQNTGEPFF

SEQ ID NO: 389613 - protein, 18 aa, Homo sapiens
  CDR3 for alpha chain variable domain of TCR clone 194807 (TRAV17, TRAJ45)
CATSLDLYAGGGADGLTF

SEQ ID NO: 389614 - protein, 15 aa, Homo sapiens
  CDR3 for beta chain variable domain of TCR clone 194807 (TRBV11-2, TRBJ2-1)
CASSKNRGLIYEQFF

SEQ ID NO: 389615 - protein, 12 aa, Homo sapiens
  CDR3 for alpha chain variable domain of TCR clone 194808 (TRAV8-4, TRAJ33)
CAVSEGNYQLIR

SEQ ID NO: 389616 - protein, 13 aa, Homo sapiens
  CDR3 for beta chain variable domain of TCR clone 194808 (TRBV12-4, TRBJ1-2)
CASSVRQGKGYTF

SEQ ID NO: 389617 - protein, 15 aa, Homo sapiens
  CDR3 for alpha chain variable domain of TCR clone 194809 (TRAV3, TRAJ22)
CAVRDRGGSARQLTF

SEQ ID NO: 389618 - protein, 16 aa, Homo sapiens
  CDR3 for beta chain variable domain of TCR clone 194809 (TRBV12-4, TRBJ2-5)
CASSFFVRGRQETQYF

SEQ ID NO: 389619 - protein, 15 aa, Homo sapiens
  CDR3 for alpha chain variable domain of TCR clone 194810 (TRAV12-2, TRAJ3)
CAVRSEYSSASKIIF

SEQ ID NO: 389620 - protein, 15 aa, Homo sapiens
  CDR3 for beta chain variable domain of TCR clone 194810 (TRBV28, TRBJ2-7)
CASSSEVQTSYEQYF

SEQ ID NO: 389621 - protein, 14 aa, Homo sapiens
  CDR3 for alpha chain variable domain of TCR clone 194811 (TRAV3, TRAJ10)
CAVRDMRAGGGNKL

SEQ ID NO: 389622 - protein, 16 aa, Homo sapiens
  CDR3 for beta chain variable domain of TCR clone 194811 (TRBV19, TRBJ2-2)
CASSFPGQGLAGELFF

SEQ ID NO: 389623 - protein, 14 aa, Homo sapiens
  CDR3 for alpha chain variable domain of TCR clone 194812 (TRAV12-3, TRAJ33)
CAMSVPGSNYQLIW

SEQ ID NO: 389624 - protein, 12 aa, Homo sapiens
  CDR3 for beta chain variable domain of TCR clone 194812 (TRBV7-8, TRBJ2-7)
CASSRGDREQYF

SEQ ID NO: 389625 - protein, 12 aa, Homo sapiens
  CDR3 for alpha chain variable domain of TCR clone 194813 (TRAV12-3, TRAJ17)
CAMKPTGNKLTF

SEQ ID NO: 389626 - protein, 16 aa, Homo sapiens
  CDR3 for beta chain variable domain of TCR clone 194813 (TRBV15, TRBJ2-3)
CATSRDLGIVTDTQYF

SEQ ID NO: 389627 - protein, 13 aa, Homo sapiens
  CDR3 for alpha chain variable domain of TCR clone 194814 (TRAV12-1, TRAJ29)
CVVDTSGNKPLVF

SEQ ID NO: 389628 - protein, 14 aa, Homo sapiens
  CDR3 for beta chain variable domain of TCR clone 194814 (TRBV12-4, TRBJ2-3)
CASSLVPSTDTQYF

SEQ ID NO: 389629 - protein, 13 aa, Homo sapiens
  CDR3 for alpha chain variable domain of TCR clone 194815 (TRAV25, TRAJ26)
CAGMDNYGQNLVF

SEQ ID NO: 389630 - protein, 17 aa, Homo sapiens
  CDR3 for beta chain variable domain of TCR clone 194815 (TRBV4-1, TRBJ1-3)
CASSPQRGIRFGNTIYF

SEQ ID NO: 389631 - protein, 15 aa, Homo sapiens
  CDR3 for alpha chain variable domain of TCR clone 194816 (TRAV35, TRAJ50)
CAGQLRKTSYDKVIF

SEQ ID NO: 389632 - protein, 12 aa, Homo sapiens
  CDR3 for beta chain variable domain of TCR clone 194816 (TRBV5-1, TRBJ2-5)
CASSLGLETQDF

SEQ ID NO: 389633 - protein, 10 aa, Homo sapiens
  CDR3 for alpha chain variable domain of TCR clone 194817 (TRAV12-2, TRAJ43)
CAVKLLSMRF

SEQ ID NO: 389634 - protein, 14 aa, Homo sapiens
  CDR3 for beta chain variable domain of TCR clone 194817 (TRBV11-2, TRBJ2-7)
CASSLGNSLYEQYF

SEQ ID NO: 389635 - protein, 13 aa, Homo sapiens
  CDR3 for alpha chain variable domain of TCR clone 194818 (TRAV12-1, TRAJ34)
CVVTGYNTDKLIF

SEQ ID NO: 389636 - protein, 18 aa, Homo sapiens
  CDR3 for beta chain variable domain of TCR clone 194818 (TRBV28, TRBJ2-7)
CASKAGGGIRAVLRAGHQ

SEQ ID NO: 389637 - protein, 15 aa, Homo sapiens
  CDR3 for alpha chain variable domain of TCR clone 194819 (TRAV26-1, TRAJ29)
CIVRVEGSGNTPLVV

SEQ ID NO: 389638 - protein, 15 aa, Homo sapiens
  CDR3 for beta chain variable domain of TCR clone 194819 (TRBV6-5, TRBJ2-1)
CASSYDAGAGNEQFF

SEQ ID NO: 389639 - protein, 14 aa, Homo sapiens
  CDR3 for alpha chain variable domain of TCR clone 194820 (TRAV26-1, TRAJ45)
CIVRVVGGADGRPF

SEQ ID NO: 389640 - protein, 16 aa, Homo sapiens
  CDR3 for beta chain variable domain of TCR clone 194820 (TRBV7-9, TRBJ1-1)
CASSLTQVRSNTEAFF

SEQ ID NO: 389641 - protein, 11 aa, Homo sapiens
  CDR3 for alpha chain variable domain of TCR clone 194821 (TRAV21, TRAJ41)
CAVRSGYALNL

SEQ ID NO: 389642 - protein, 14 aa, Homo sapiens
  CDR3 for beta chain variable domain of TCR clone 194821 (TRBV6-1, TRBJ1-6)
CASSGTAYNSPLHF

SEQ ID NO: 389643 - protein, 12 aa, Homo sapiens
  CDR3 for alpha chain variable domain of TCR clone 194822 (TRAV27, TRAJ49)
CAGARLGNQFYF

SEQ ID NO: 389644 - protein, 14 aa, Homo sapiens
  CDR3 for beta chain variable domain of TCR clone 194822 (TRBV6-1, TRBJ1-3)
CASVQGGGGNTIYF

SEQ ID NO: 389645 - protein, 15 aa, Homo sapiens
  CDR3 for alpha chain variable domain of TCR clone 194823 (TRAV8-1, TRAJ6)
CAVNSGAGGSYIPTF

SEQ ID NO: 389646 - protein, 14 aa, Homo sapiens
  CDR3 for beta chain variable domain of TCR clone 194823 (TRBV25-1, TRBJ1-6)
CASSLSADISPLHF

SEQ ID NO: 389647 - protein, 13 aa, Homo sapiens
  CDR3 for alpha chain variable domain of TCR clone 194824 (TRAV21, TRAJ49)
CAVRQSTGNQFYF

SEQ ID NO: 389648 - protein, 16 aa, Homo sapiens
  CDR3 for beta chain variable domain of TCR clone 194824 (TRBV28, TRBJ2-2)
CASSLEGGSNTGEPFF

SEQ ID NO: 389649 - protein, 15 aa, Homo sapiens
  CDR3 for alpha chain variable domain of TCR clone 194825 (TRAV27, TRAJ38)
CAARRNAGNNRKLIW

SEQ ID NO: 389650 - protein, 14 aa, Homo sapiens
  CDR3 for beta chain variable domain of TCR clone 194825 (TRBV5-1, TRBJ1-2)
CASSLEPVNYGYTF

SEQ ID NO: 389651 - protein, 11 aa, Homo sapiens
  CDR3 for alpha chain variable domain of TCR clone 194826 (TRAV27, TRAJ45)
CAGAKEEVLTD

SEQ ID NO: 389652 - protein, 17 aa, Homo sapiens
  CDR3 for beta chain variable domain of TCR clone 194826 (TRBV20-1, TRBJ2-3)
CSARDGWNAKERDTQYF

SEQ ID NO: 389653 - protein, 23 aa, Homo sapiens
  CDR3 for alpha chain variable domain of TCR clone 194827 (TRAV12-2, TRAJ36)
SLLIRDSQPSDSATLERANNLFF

SEQ ID NO: 389654 - protein, 14 aa, Homo sapiens
  CDR3 for beta chain variable domain of TCR clone 194827 (TRBV4-1, TRBJ2-2)
CASSQAVNTGELFF

SEQ ID NO: 389655 - protein, 18 aa, Homo sapiens
  CDR3 for alpha chain variable domain of TCR clone 194828 (TRAV38-2/DV8, TRAJ52)
CAYRSVGAGGTSYGKLTF

SEQ ID NO: 389656 - protein, 16 aa, Homo sapiens
  CDR3 for beta chain variable domain of TCR clone 194828 (TRBV12-4, TRBJ1-5)
CASSRPVGGSNQPQHF

SEQ ID NO: 389657 - protein, 14 aa, Homo sapiens
  CDR3 for alpha chain variable domain of TCR clone 194829 (TRAV1-2, TRAJ8)
CAVREDTGFQKLVF

SEQ ID NO: 389658 - protein, 15 aa, Homo sapiens
  CDR3 for beta chain variable domain of TCR clone 194829 (TRBV7-9, TRBJ1-4)
CASSARTGGNDKLFF

SEQ ID NO: 389659 - protein, 15 aa, Homo sapiens
  CDR3 for alpha chain variable domain of TCR clone 194830 (TRAV26-1, TRAJ44)
CIVRIDTGTASKLTF

SEQ ID NO: 389660 - protein, 15 aa, Homo sapiens
  CDR3 for beta chain variable domain of TCR clone 194830 (TRBV7-6, TRBJ2-1)
CASSSLAGEGNEQLF

SEQ ID NO: 389661 - protein, 14 aa, Homo sapiens
  CDR3 for alpha chain variable domain of TCR clone 194831 (TRAV1-2, TRAJ8)
CAVREDTGFQKLVF

SEQ ID NO: 389662 - protein, 14 aa, Homo sapiens
  CDR3 for beta chain variable domain of TCR clone 194831 (TRBV2, TRBJ1-1)
CASRDTIRNTEAFF

SEQ ID NO: 389663 - protein, 14 aa, Homo sapiens
  CDR3 for alpha chain variable domain of TCR clone 194832 (TRAV14/DV4, TRAJ56)
CAMSSTGANSKLTF

SEQ ID NO: 389664 - protein, 15 aa, Homo sapiens
  CDR3 for beta chain variable domain of TCR clone 194832 (TRBV2, TRBJ2-1)
CASSELAGSYNEQFF

SEQ ID NO: 389665 - protein, 18 aa, Homo sapiens
  CDR3 for alpha chain variable domain of TCR clone 194833 (TRAV21, TRAJ52)
CAVSPSPAGGTSYGKLTF

SEQ ID NO: 389666 - protein, 17 aa, Homo sapiens
  CDR3 for beta chain variable domain of TCR clone 194833 (TRBV13, TRBJ2-3)
CASSLYRVAGGRNTQYF

SEQ ID NO: 389667 - protein, 12 aa, Homo sapiens
  CDR3 for alpha chain variable domain of TCR clone 194834 (TRAV17, TRAJ30)
CVPERRDDKIIF

SEQ ID NO: 389668 - protein, 12 aa, Homo sapiens
  CDR3 for beta chain variable domain of TCR clone 194834 (TRBV27, TRBJ2-2)
CASKLFTGELFF

SEQ ID NO: 389669 - protein, 13 aa, Homo sapiens
  CDR3 for alpha chain variable domain of TCR clone 194835 (TRAV12-1, TRAJ11)
CMVNRAGYSTLTF

SEQ ID NO: 389670 - protein, 16 aa, Homo sapiens
  CDR3 for beta chain variable domain of TCR clone 194835 (TRBV27, TRBJ2-2)
CASSLRPGGAPGELFF

SEQ ID NO: 389671 - protein, 12 aa, Homo sapiens
  CDR3 for alpha chain variable domain of TCR clone 194836 (TRAV13-1, TRAJ43)
CAASIGDNDMRF

SEQ ID NO: 389672 - protein, 17 aa, Homo sapiens
  CDR3 for beta chain variable domain of TCR clone 194836 (TRBV11-3, TRBJ2-3)
CDSSPGSSGGRTDTQYF

SEQ ID NO: 389673 - protein, 16 aa, Homo sapiens
  CDR3 for alpha chain variable domain of TCR clone 194837 (TRAV30, TRAJ24)
CGTEIVDADSWGKFQF

SEQ ID NO: 389674 - protein, 17 aa, Homo sapiens
  CDR3 for beta chain variable domain of TCR clone 194837 (TRBV7-9, TRBJ2-3)
CASSLEEAGAYPDTQYV

SEQ ID NO: 389675 - protein, 13 aa, Homo sapiens
  CDR3 for alpha chain variable domain of TCR clone 194838 (TRAV13-2, TRAJ53)
CAENMGSNYKLTF

SEQ ID NO: 389676 - protein, 16 aa, Homo sapiens
  CDR3 for beta chain variable domain of TCR clone 194838 (TRBV6-1, TRBJ2-3)
CASSGNRGRGTDTQYF

SEQ ID NO: 389677 - protein, 16 aa, Homo sapiens
  CDR3 for alpha chain variable domain of TCR clone 194839 (TRAV30, TRAJ24)
CGTEIVDADSWGKSQF

SEQ ID NO: 389678 - protein, 15 aa, Homo sapiens
  CDR3 for beta chain variable domain of TCR clone 194839 (TRBV19, TRBJ1-2)
CASSVGQVLNYGYTF

SEQ ID NO: 389679 - protein, 15 aa, Homo sapiens
  CDR3 for alpha chain variable domain of TCR clone 194840 (TRAV17, TRAJ23)
CATDAEDNQGGKLIF

SEQ ID NO: 389680 - protein, 15 aa, Homo sapiens
  CDR3 for beta chain variable domain of TCR clone 194840 (TRBV7-9, TRBJ2-2)
CASGPLDTFPGELFF

SEQ ID NO: 389681 - protein, 13 aa, Homo sapiens
  CDR3 for alpha chain variable domain of TCR clone 194841 (TRAV12-2, TRAJ20)
CAVYPSNDYRLSF

SEQ ID NO: 389682 - protein, 20 aa, Homo sapiens
  CDR3 for beta chain variable domain of TCR clone 194841 (TRBV27, TRBJ2-5)
CASSLYPRGGRDPVLRARHA

SEQ ID NO: 389683 - protein, 14 aa, Homo sapiens
  CDR3 for alpha chain variable domain of TCR clone 194842 (TRAV8-4, TRAJ40)
CAVIPTSGTYKYIF

SEQ ID NO: 389684 - protein, 11 aa, Homo sapiens
  CDR3 for beta chain variable domain of TCR clone 194842 (TRBV7-2, TRBJ2-1)
VASGDYNEQFF

SEQ ID NO: 389685 - protein, 11 aa, Homo sapiens
  CDR3 for alpha chain variable domain of TCR clone 194843 (TRAV2, TRAJ13)
CASGGYQKVTF

SEQ ID NO: 389686 - protein, 18 aa, Homo sapiens
  CDR3 for beta chain variable domain of TCR clone 194843 (TRBV20-1, TRBJ2-6)
CSAETTPTHGSGVNVLTF

SEQ ID NO: 389687 - protein, 14 aa, Homo sapiens
  CDR3 for alpha chain variable domain of TCR clone 194844 (TRAV23/DV6, TRAJ13)
FAAMYSGGYQKVTF

SEQ ID NO: 389688 - protein, 16 aa, Homo sapiens
  CDR3 for beta chain variable domain of TCR clone 194844 (TRBV9, TRBJ2-1)
CASSALGGIGNNEQFF

SEQ ID NO: 389689 - protein, 16 aa, Homo sapiens
  CDR3 for alpha chain variable domain of TCR clone 194845 (TRAV17, TRAJ52)
CATSNAGGTSFGKLTF

SEQ ID NO: 389690 - protein, 13 aa, Homo sapiens
  CDR3 for beta chain variable domain of TCR clone 194845 (TRBV27, TRBJ1-6)
CASSLVLVSPLHF

SEQ ID NO: 389691 - protein, 14 aa, Homo sapiens
  CDR3 for alpha chain variable domain of TCR clone 194846 (TRAV26-1, TRAJ48)
CIVRVGFGNDKLTF

SEQ ID NO: 389692 - protein, 13 aa, Homo sapiens
  CDR3 for beta chain variable domain of TCR clone 194846 (TRBV11-3, TRBJ2-3)
CASSHDTKDTQYF

SEQ ID NO: 389693 - protein, 14 aa, Homo sapiens
  CDR3 for alpha chain variable domain of TCR clone 194847 (TRAV12-2, TRAJ17)
CAALFKAAGNKLTF

SEQ ID NO: 389694 - protein, 15 aa, Homo sapiens
  CDR3 for beta chain variable domain of TCR clone 194847 (TRBV6-3, TRBJ2-7)
CASSSPGTVFYEQYF

SEQ ID NO: 389695 - protein, 15 aa, Homo sapiens
  CDR3 for alpha chain variable domain of TCR clone 194848 (TRAV12-2, TRAJ53)
CAVHGGGGSNYKLTF

SEQ ID NO: 389696 - protein, 15 aa, Homo sapiens
  CDR3 for beta chain variable domain of TCR clone 194848 (TRBV20-1, TRBJ2-7)
CSARDRVSGMDEQYF

SEQ ID NO: 389697 - protein, 10 aa, Homo sapiens
  CDR3 for alpha chain variable domain of TCR clone 194849 (TRAV12-3, TRAJ18)
CAMSVEAQPW

SEQ ID NO: 389698 - protein, 13 aa, Homo sapiens
  CDR3 for beta chain variable domain of TCR clone 194849 (TRBV15, TRBJ1-6)
CATSGGLNSPLHF

SEQ ID NO: 389699 - protein, 14 aa, Homo sapiens
  CDR3 for alpha chain variable domain of TCR clone 194850 (TRAV8-3, TRAJ4)
CAVGASGGYNKLIF

SEQ ID NO: 389700 - protein, 13 aa, Homo sapiens
  CDR3 for beta chain variable domain of TCR clone 194850 (TRBV27, TRBJ2-1)
CASRTLGVGEQFF

SEQ ID NO: 389701 - protein, 15 aa, Homo sapiens
  CDR3 for alpha chain variable domain of TCR clone 194851 (TRAV26-1, TRAJ48)
CIVRVGDFGNEKLTF

SEQ ID NO: 389702 - protein, 16 aa, Homo sapiens
  CDR3 for beta chain variable domain of TCR clone 194851 (TRBV7-3, TRBJ2-2)
CASSLKRGTLSGELFF

SEQ ID NO: 389703 - protein, 14 aa, Homo sapiens
  CDR3 for alpha chain variable domain of TCR clone 194852 (TRAV29/DV5, TRAJ49)
CAASLSNTGNQFYF

SEQ ID NO: 389704 - protein, 14 aa, Homo sapiens
  CDR3 for beta chain variable domain of TCR clone 194852 (TRBV20-1, TRBJ1-3)
CSASPTGAGNTIYF

SEQ ID NO: 389705 - protein, 16 aa, Homo sapiens
  CDR3 for alpha chain variable domain of TCR clone 194853 (TRAV35, TRAJ28)
CAGYLYSGAGSYQLTF

SEQ ID NO: 389706 - protein, 16 aa, Homo sapiens
  CDR3 for beta chain variable domain of TCR clone 194853 (TRBV5-1, TRBJ2-1)
CASSHGLAGPQNEQCF

SEQ ID NO: 389707 - protein, 14 aa, Homo sapiens
  CDR3 for alpha chain variable domain of TCR clone 194854 (TRAV26-1, TRAJ45)
CIVRVVGGADGLTF

SEQ ID NO: 389708 - protein, 16 aa, Homo sapiens
  CDR3 for beta chain variable domain of TCR clone 194854 (TRBV7-9, TRBJ1-1)
CASSLTQVRSNPEAFF

SEQ ID NO: 389709 - protein, 17 aa, Homo sapiens
  CDR3 for alpha chain variable domain of TCR clone 194855 (TRAV12-2, TRAJ6)
CAPQGPPRAGGSYIPTF

SEQ ID NO: 389710 - protein, 16 aa, Homo sapiens
  CDR3 for beta chain variable domain of TCR clone 194855 (TRBV19, TRBJ2-2)
CASSTARASNTGELFI

SEQ ID NO: 389711 - protein, 14 aa, Homo sapiens
  CDR3 for alpha chain variable domain of TCR clone 194856 (TRAV12-2, TRAJ13)
CAVKKTGGYQKVTF

SEQ ID NO: 389712 - protein, 16 aa, Homo sapiens
  CDR3 for beta chain variable domain of TCR clone 194856 (TRBV6-1, TRBJ2-5)
CASRETLYRGAETQYF

SEQ ID NO: 389713 - protein, 20 aa, Homo sapiens
  CDR3 for alpha chain variable domain of TCR clone 194857 (TRAV2, TRAJ9)
CAVGAGASKLSLEQEQDYLL

SEQ ID NO: 389714 - protein, 16 aa, Homo sapiens
  CDR3 for beta chain variable domain of TCR clone 194857 (TRBV13, TRBJ2-2)
CASSPRTGEHTGELFF

SEQ ID NO: 389715 - protein, 14 aa, Homo sapiens
  CDR3 for alpha chain variable domain of TCR clone 194858 (TRAV12-2, TRAJ40)
CAVKIPSGTYKYIF

SEQ ID NO: 389716 - protein, 14 aa, Homo sapiens
  CDR3 for beta chain variable domain of TCR clone 194858 (TRBV11-2, TRBJ2-3)
CASSRLARTDTQYF

SEQ ID NO: 389717 - protein, 13 aa, Homo sapiens
  CDR3 for alpha chain variable domain of TCR clone 194859 (TRAV12-3, TRAJ33)
CAMSENSNYQLIW

SEQ ID NO: 389718 - protein, 14 aa, Homo sapiens
  CDR3 for beta chain variable domain of TCR clone 194859 (TRBV27, TRBJ2-7)
CASSLAGLSYEQYF

SEQ ID NO: 389719 - protein, 15 aa, Homo sapiens
  CDR3 for alpha chain variable domain of TCR clone 194860 (TRAV12-2, TRAJ53)
CAVNGGGGSNDKLTF

SEQ ID NO: 389720 - protein, 16 aa, Homo sapiens
  CDR3 for beta chain variable domain of TCR clone 194860 (TRBV7-3, TRBJ2-3)
CASSLGLAGVADTQYF

SEQ ID NO: 389721 - protein, 12 aa, Homo sapiens
  CDR3 for alpha chain variable domain of TCR clone 194861 (TRAV21, TRAJ47)
CAVMEYGNKLVF

SEQ ID NO: 389722 - protein, 15 aa, Homo sapiens
  CDR3 for beta chain variable domain of TCR clone 194861 (TRBV4-1, TRBJ1-4)
CASSDTGGTNEKLFF

SEQ ID NO: 389723 - protein, 16 aa, Homo sapiens
  CDR3 for alpha chain variable domain of TCR clone 194862 (TRAV23/DV6, TRAJ21)
CAASSGGGTTSTNFTL

SEQ ID NO: 389724 - protein, 16 aa, Homo sapiens
  CDR3 for beta chain variable domain of TCR clone 194862 (TRBV12-4, TRBJ1-5)
CASSRPVGGSNQPQHF

SEQ ID NO: 389725 - protein, 16 aa, Homo sapiens
  CDR3 for alpha chain variable domain of TCR clone 194863 (TRAV8-3, TRAJ18)
CAVGARRGSALGRLYF

SEQ ID NO: 389726 - protein, 12 aa, Homo sapiens
  CDR3 for beta chain variable domain of TCR clone 194863 (TRBV2, TRBJ2-1)
CAYGPPGNEQFF

SEQ ID NO: 389727 - protein, 13 aa, Homo sapiens
  CDR3 for alpha chain variable domain of TCR clone 194864 (TRAV25, TRAJ10)
CAGRTGGGNKLTF

SEQ ID NO: 389728 - protein, 22 aa, Homo sapiens
  CDR3 for beta chain variable domain of TCR clone 194864 (TRBV6-1, TRBJ1-3)
CASVQGGGWKHHIFWREKLAHC

SEQ ID NO: 389729 - protein, 15 aa, Homo sapiens
  CDR3 for alpha chain variable domain of TCR clone 194865 (TRAV25, TRAJ53)
CVATGGGGSNYKLTF

SEQ ID NO: 389730 - protein, 19 aa, Homo sapiens
  CDR3 for beta chain variable domain of TCR clone 194865 (TRBV7-2, TRBJ2-3)
CASSFLSRNWGGGTDTQYF

SEQ ID NO: 389731 - protein, 14 aa, Homo sapiens
  CDR3 for alpha chain variable domain of TCR clone 194866 (TRAV1-2, TRAJ16)
CAVNRFSDGQRLLF

SEQ ID NO: 389732 - protein, 16 aa, Homo sapiens
  CDR3 for beta chain variable domain of TCR clone 194866 (TRBV6-1, TRBJ2-5)
CASSETLDRGAETQYF

SEQ ID NO: 389733 - protein, 14 aa, Homo sapiens
  CDR3 for alpha chain variable domain of TCR clone 194867 (TRAV26-1, TRAJ38)
CIADNAGNNCKLIW

SEQ ID NO: 389734 - protein, 14 aa, Homo sapiens
  CDR3 for beta chain variable domain of TCR clone 194867 (TRBV4-1, TRBJ2-2)
CASSQAVNTGELFF

SEQ ID NO: 389735 - protein, 14 aa, Homo sapiens
  CDR3 for alpha chain variable domain of TCR clone 194868 (TRAV38-2/DV8, TRAJ31)
CAYRSDNNNARLMF

SEQ ID NO: 389736 - protein, 16 aa, Homo sapiens
  CDR3 for beta chain variable domain of TCR clone 194868 (TRBV12-4, TRBJ1-5)
CASSRPVGGSNQPQHF

SEQ ID NO: 389737 - protein, 11 aa, Homo sapiens
  CDR3 for alpha chain variable domain of TCR clone 194869 (TRAV2, TRAJ13)
CASAGYQKVTF

SEQ ID NO: 389738 - protein, 16 aa, Homo sapiens
  CDR3 for beta chain variable domain of TCR clone 194869 (TRBV6-1, TRBJ2-5)
CASSEALDRGAETQYF

SEQ ID NO: 389739 - protein, 23 aa, Homo sapiens
  CDR3 for alpha chain variable domain of TCR clone 194870 (TRAV12-2, TRAJ36)
SLLIRDSQPSDSATLERANNLFF

SEQ ID NO: 389740 - protein, 15 aa, Homo sapiens
  CDR3 for beta chain variable domain of TCR clone 194870 (TRBV7-2, TRBJ1-2)
CASSLVSGGDYGYTF

SEQ ID NO: 389741 - protein, 16 aa, Homo sapiens
  CDR3 for alpha chain variable domain of TCR clone 194871 (TRAV8-3, TRAJ13)
CAVGAYRSGGYQKVTF

SEQ ID NO: 389742 - protein, 14 aa, Homo sapiens
  CDR3 for beta chain variable domain of TCR clone 194871 (TRBV18, TRBJ2-5)
CASSPRASSETQYF

SEQ ID NO: 389743 - protein, 14 aa, Homo sapiens
  CDR3 for alpha chain variable domain of TCR clone 194872 (TRAV4, TRAJ30)
CLVGDMNRDDKIIF

SEQ ID NO: 389744 - protein, 12 aa, Homo sapiens
  CDR3 for beta chain variable domain of TCR clone 194872 (TRBV7-9, TRBJ2-7)
CASSVVSYEQYF

SEQ ID NO: 389745 - protein, 16 aa, Homo sapiens
  CDR3 for alpha chain variable domain of TCR clone 194873 (TRAV30, TRAJ24)
CGTEIVDADSWRKFQF

SEQ ID NO: 389746 - protein, 14 aa, Homo sapiens
  CDR3 for beta chain variable domain of TCR clone 194873 (TRBV7-9, TRBJ2-4)
CASSLAMGGNIQYF

SEQ ID NO: 389747 - protein, 12 aa, Homo sapiens
  CDR3 for alpha chain variable domain of TCR clone 194874 (TRAV13-2, TRAJ23)
CAERHRGGKLIF

SEQ ID NO: 389748 - protein, 13 aa, Homo sapiens
  CDR3 for beta chain variable domain of TCR clone 194874 (TRBV5-5, TRBJ2-7)
CASSSQTRQRQYF

SEQ ID NO: 389749 - protein, 12 aa, Homo sapiens
  CDR3 for alpha chain variable domain of TCR clone 194875 (TRAV12-2, TRAJ43)
CAVNVNNNNMRF

SEQ ID NO: 389750 - protein, 14 aa, Homo sapiens
  CDR3 for beta chain variable domain of TCR clone 194875 (TRBV7-2, TRBJ2-7)
CASSFLGRVFEQYF

SEQ ID NO: 389751 - protein, 13 aa, Homo sapiens
  CDR3 for alpha chain variable domain of TCR clone 194876 (TRAV2, TRAJ15)
CAVASQAGTTLIF

SEQ ID NO: 389752 - protein, 16 aa, Homo sapiens
  CDR3 for beta chain variable domain of TCR clone 194876 (TRBV5-1, TRBJ1-1)
CASSSGGNSLNTEAFF

SEQ ID NO: 389753 - protein, 22 aa, Homo sapiens
  CDR3 for alpha chain variable domain of TCR clone 194877 (TRAV12-2, TRAJ6)
CASKWEEEATYLHLEEEPALLF

SEQ ID NO: 389754 - protein, 13 aa, Homo sapiens
  CDR3 for beta chain variable domain of TCR clone 194877 (TRBV2, TRBJ1-1)
CASSEGGNTEAFF

SEQ ID NO: 389755 - protein, 13 aa, Homo sapiens
  CDR3 for alpha chain variable domain of TCR clone 194878 (TRAV13-2, TRAJ48)
CAEMDFGNEKLTF

SEQ ID NO: 389756 - protein, 15 aa, Homo sapiens
  CDR3 for beta chain variable domain of TCR clone 194878 (TRBV20-1, TRBJ2-7)
CSARDRLSGMDEQYF

SEQ ID NO: 389757 - protein, 18 aa, Homo sapiens
  CDR3 for alpha chain variable domain of TCR clone 194879 (TRAV13-1, TRAJ52)
CAAKNPNAGGTSYGKLTF

SEQ ID NO: 389758 - protein, 14 aa, Homo sapiens
  CDR3 for beta chain variable domain of TCR clone 194879 (TRBV6-1, TRBJ2-3)
CSSERGGITDTQYF

SEQ ID NO: 389759 - protein, 14 aa, Homo sapiens
  CDR3 for alpha chain variable domain of TCR clone 194880 (TRAV1-2, TRAJ8)
CAVREDTGFQKLVF

SEQ ID NO: 389760 - protein, 20 aa, Homo sapiens
  CDR3 for beta chain variable domain of TCR clone 194880 (TRBV19, TRBJ2-7)
CASTQVAPESLRAVLRAGHQ

SEQ ID NO: 389761 - protein, 13 aa, Homo sapiens
  CDR3 for alpha chain variable domain of TCR clone 194881 (TRAV30, TRAJ34)
CGTVGYNTDKLIL

SEQ ID NO: 389762 - protein, 16 aa, Homo sapiens
  CDR3 for beta chain variable domain of TCR clone 194881 (TRBV7-9, TRBJ1-2)
CASSLGFSAGEDGYTF

SEQ ID NO: 389763 - protein, 14 aa, Homo sapiens
  CDR3 for alpha chain variable domain of TCR clone 194882 (TRAV12-2, TRAJ9)
CAVNLNTGGFKTIF

SEQ ID NO: 389764 - protein, 17 aa, Homo sapiens
  CDR3 for beta chain variable domain of TCR clone 194882 (TRBV20-1, TRBJ2-2)
CSASRRVGQGYTGELFF

SEQ ID NO: 389765 - protein, 11 aa, Homo sapiens
  CDR3 for alpha chain variable domain of TCR clone 194883 (TRAV35, TRAJ30)
CAPGGDDKIIF

SEQ ID NO: 389766 - protein, 18 aa, Homo sapiens
  CDR3 for beta chain variable domain of TCR clone 194883 (TRBV7-6, TRBJ2-1)
GHVSLGRQLGGGADEQFF

SEQ ID NO: 389767 - protein, 13 aa, Homo sapiens
  CDR3 for alpha chain variable domain of TCR clone 194884 (TRAV17, TRAJ26)
CATVDNYGQNFVF

SEQ ID NO: 389768 - protein, 13 aa, Homo sapiens
  CDR3 for beta chain variable domain of TCR clone 194884 (TRBV15, TRBJ2-7)
CATSTTGHYEQYF

SEQ ID NO: 389769 - protein, 15 aa, Homo sapiens
  CDR3 for alpha chain variable domain of TCR clone 194885 (TRAV21, TRAJ53)
CATLNSGGSNYKLTF

SEQ ID NO: 389770 - protein, 16 aa, Homo sapiens
  CDR3 for beta chain variable domain of TCR clone 194885 (TRBV9, TRBJ2-1)
CASSVGGGGHYNEQFF

SEQ ID NO: 389771 - protein, 13 aa, Homo sapiens
  CDR3 for alpha chain variable domain of TCR clone 194886 (TRAV12-1, TRAJ6)
CVVFPGGSYIPTF

SEQ ID NO: 389772 - protein, 12 aa, Homo sapiens
  CDR3 for beta chain variable domain of TCR clone 194886 (TRBV14, TRBJ2-7)
CASSLYKDEQYF

SEQ ID NO: 389773 - protein, 13 aa, Homo sapiens
  CDR3 for alpha chain variable domain of TCR clone 194887 (TRAV25, TRAJ26)
CAGMDNYGQNFVF

SEQ ID NO: 389774 - protein, 15 aa, Homo sapiens
  CDR3 for beta chain variable domain of TCR clone 194887 (TRBV10-3, TRBJ2-1)
CSIRNGTSGHNEQFF

SEQ ID NO: 389775 - protein, 13 aa, Homo sapiens
  CDR3 for alpha chain variable domain of TCR clone 194888 (TRAV27, TRAJ43)
CAGAGNNNNDMSL

SEQ ID NO: 389776 - protein, 14 aa, Homo sapiens
  CDR3 for beta chain variable domain of TCR clone 194888 (TRBV7-2, TRBJ2-7)
CASRSQGAAYEQYF

SEQ ID NO: 389777 - protein, 12 aa, Homo sapiens
  CDR3 for alpha chain variable domain of TCR clone 194889 (TRAV1-1, TRAJ8)
CAGGTGFQKLVF

SEQ ID NO: 389778 - protein, 16 aa, Homo sapiens
  CDR3 for beta chain variable domain of TCR clone 194889 (TRBV2, TRBJ1-3)
CASSRTGGSTGNTIYF

SEQ ID NO: 389779 - protein, 15 aa, Homo sapiens
  CDR3 for alpha chain variable domain of TCR clone 194890 (TRAV26-1, TRAJ44)
CIVRANTGTASKLTF

SEQ ID NO: 389780 - protein, 13 aa, Homo sapiens
  CDR3 for beta chain variable domain of TCR clone 194890 (TRBV6-1, TRBJ2-1)
CASSPDRNNEQFF

SEQ ID NO: 389781 - protein, 15 aa, Homo sapiens
  CDR3 for alpha chain variable domain of TCR clone 194891 (TRAV3, TRAJ22)
CAVRDRGGSARQLTF

SEQ ID NO: 389782 - protein, 14 aa, Homo sapiens
  CDR3 for beta chain variable domain of TCR clone 194891 (TRBV20-1, TRBJ1-1)
CSAQTRIGGTEAFF

SEQ ID NO: 389783 - protein, 17 aa, Homo sapiens
  CDR3 for alpha chain variable domain of TCR clone 194892 (TRAV3, TRAJ6)
CAVRDGPRAGGSYIPTF

SEQ ID NO: 389784 - protein, 14 aa, Homo sapiens
  CDR3 for beta chain variable domain of TCR clone 194892 (TRBV7-2, TRBJ2-7)
CAGSPKTSCYEQYF

SEQ ID NO: 389785 - protein, 15 aa, Homo sapiens
  CDR3 for alpha chain variable domain of TCR clone 194893 (TRAV8-3, TRAJ23)
CAVGAPYNQGGKLIF

SEQ ID NO: 389786 - protein, 13 aa, Homo sapiens
  CDR3 for beta chain variable domain of TCR clone 194893 (TRBV19, TRBJ1-2)
CASSVPGQDGYTF

SEQ ID NO: 389787 - protein, 12 aa, Homo sapiens
  CDR3 for alpha chain variable domain of TCR clone 194894 (TRAV17, TRAJ43)
CATDAFPANMRF

SEQ ID NO: 389788 - protein, 14 aa, Homo sapiens
  CDR3 for beta chain variable domain of TCR clone 194894 (TRBV20-1, TRBJ2-3)
CSARDGGSTDTQYF

SEQ ID NO: 389789 - protein, 12 aa, Homo sapiens
  CDR3 for alpha chain variable domain of TCR clone 194895 (TRAV27, TRAJ35)
CAGADFGNVLHC

SEQ ID NO: 389790 - protein, 14 aa, Homo sapiens
  CDR3 for beta chain variable domain of TCR clone 194895 (TRBV10-3, TRBJ2-3)
CATMGTGGLETQYL

SEQ ID NO: 389791 - protein, 14 aa, Homo sapiens
  CDR3 for alpha chain variable domain of TCR clone 194896 (TRAV1-2, TRAJ8)
CAVREDTGFQKLVF

SEQ ID NO: 389792 - protein, 11 aa, Homo sapiens
  CDR3 for beta chain variable domain of TCR clone 194896 (TRBV23-1, TRBJ2-7)
SSSGTGLEQYF

SEQ ID NO: 389793 - protein, 15 aa, Homo sapiens
  CDR3 for alpha chain variable domain of TCR clone 194897 (TRAV13-2, TRAJ10)
CAENRDTGGGNKLTF

SEQ ID NO: 389794 - protein, 15 aa, Homo sapiens
  CDR3 for beta chain variable domain of TCR clone 194897 (TRBV4-3, TRBJ2-3)
CASSLGTRSSDTQYF

SEQ ID NO: 389795 - protein, 22 aa, Homo sapiens
  CDR3 for alpha chain variable domain of TCR clone 194898 (TRAV26-2, TRAJ54)
CCVLLHPERRGGGNSGSQKLVF

SEQ ID NO: 389796 - protein, 16 aa, Homo sapiens
  CDR3 for beta chain variable domain of TCR clone 194898 (TRBV6-1, TRBJ2-5)
CASSETLDRGAETQYF

SEQ ID NO: 389797 - protein, 12 aa, Homo sapiens
  CDR3 for alpha chain variable domain of TCR clone 194899 (TRAV8-3, TRAJ34)
WASGYNTDTLIF

SEQ ID NO: 389798 - protein, 13 aa, Homo sapiens
  CDR3 for beta chain variable domain of TCR clone 194899 (TRBV6-4, TRBJ2-3)
CASSVSWADTQYF

SEQ ID NO: 389799 - protein, 16 aa, Homo sapiens
  CDR3 for alpha chain variable domain of TCR clone 194900 (TRAV12-2, TRAJ4)
CAVILPFSGGYNKLIF

SEQ ID NO: 389800 - protein, 14 aa, Homo sapiens
  CDR3 for beta chain variable domain of TCR clone 194900 (TRBV12-4, TRBJ1-1)
CASTWTGHDTEAFF

SEQ ID NO: 389801 - protein, 13 aa, Homo sapiens
  CDR3 for alpha chain variable domain of TCR clone 194901 (TRAV36/DV7, TRAJ7)
CAVERYGNNRLAF

SEQ ID NO: 389802 - protein, 15 aa, Homo sapiens
  CDR3 for beta chain variable domain of TCR clone 194901 (TRBV27, TRBJ2-3)
CASSLGLAATDTQYF

SEQ ID NO: 389803 - protein, 17 aa, Homo sapiens
  CDR3 for alpha chain variable domain of TCR clone 194902 (TRAV3, TRAJ6)
CAVRDGPRAGGSYIPTF

SEQ ID NO: 389804 - protein, 15 aa, Homo sapiens
  CDR3 for beta chain variable domain of TCR clone 194902 (TRBV28, TRBJ1-3)
CASSLAGSSGNTIYF

SEQ ID NO: 389805 - protein, 15 aa, Homo sapiens
  CDR3 for alpha chain variable domain of TCR clone 194903 (TRAV21, TRAJ37)
CAVRPTLSNPGKLIF

SEQ ID NO: 389806 - protein, 16 aa, Homo sapiens
  CDR3 for beta chain variable domain of TCR clone 194903 (TRBV24-1, TRBJ2-3)
CATRDRRQDLTDTQYF

SEQ ID NO: 389807 - protein, 12 aa, Homo sapiens
  CDR3 for alpha chain variable domain of TCR clone 194904 (TRAV27, TRAJ35)
CAGADFGNVLHF

SEQ ID NO: 389808 - protein, 16 aa, Homo sapiens
  CDR3 for beta chain variable domain of TCR clone 194904 (TRBV6-1, TRBJ2-1)
WASILRQGSSYNEQFF

SEQ ID NO: 389809 - protein, 14 aa, Homo sapiens
  CDR3 for alpha chain variable domain of TCR clone 194905 (TRAV12-2, TRAJ40)
CAVKIPSGTYKYIF

SEQ ID NO: 389810 - protein, 14 aa, Homo sapiens
  CDR3 for beta chain variable domain of TCR clone 194905 (TRBV3-1, TRBJ1-2)
CASSQGRTNYGYTF

SEQ ID NO: 389811 - protein, 16 aa, Homo sapiens
  CDR3 for alpha chain variable domain of TCR clone 194906 (TRAV23/DV6, TRAJ9)
CAASIGGNTGGFKTNF

SEQ ID NO: 389812 - protein, 12 aa, Homo sapiens
  CDR3 for beta chain variable domain of TCR clone 194906 (TRBV11-2, TRBJ2-1)
CASSVQREGQFF

SEQ ID NO: 389813 - protein, 14 aa, Homo sapiens
  CDR3 for alpha chain variable domain of TCR clone 194907 (TRAV13-2, TRAJ17)
CAENSKAAGNKLTF

SEQ ID NO: 389814 - protein, 16 aa, Homo sapiens
  CDR3 for beta chain variable domain of TCR clone 194907 (TRBV5-1, TRBJ2-2)
CASSSRTGGRTGELFL

SEQ ID NO: 389815 - protein, 12 aa, Homo sapiens
  CDR3 for alpha chain variable domain of TCR clone 194908 (TRAV17, TRAJ20)
CATDSNDYKLSF

SEQ ID NO: 389816 - protein, 17 aa, Homo sapiens
  CDR3 for beta chain variable domain of TCR clone 194908 (TRBV15, TRBJ2-4)
CATSRDNPQTGLDIQYF

SEQ ID NO: 389817 - protein, 16 aa, Homo sapiens
  CDR3 for alpha chain variable domain of TCR clone 194909 (TRAV3, TRAJ37)
CAVRGKGSGHTGKLIF

SEQ ID NO: 389818 - protein, 16 aa, Homo sapiens
  CDR3 for beta chain variable domain of TCR clone 194909 (TRBV12-4, TRBJ1-5)
CASSRPVGGSNQPQHF

SEQ ID NO: 389819 - protein, 14 aa, Homo sapiens
  CDR3 for alpha chain variable domain of TCR clone 194910 (TRAV9-2, TRAJ39)
CALYIYNAGNTLTF

SEQ ID NO: 389820 - protein, 16 aa, Homo sapiens
  CDR3 for beta chain variable domain of TCR clone 194910 (TRBV5-1, TRBJ1-1)
CASSSGGNSLNTEAFF

SEQ ID NO: 389821 - protein, 12 aa, Homo sapiens
  CDR3 for alpha chain variable domain of TCR clone 194911 (TRAV16, TRAJ10)
CSRTGGGNKLTF

SEQ ID NO: 389822 - protein, 15 aa, Homo sapiens
  CDR3 for beta chain variable domain of TCR clone 194911 (TRBV7-3, TRBJ2-1)
CSSSQRGGALIEQFF

SEQ ID NO: 389823 - protein, 15 aa, Homo sapiens
  CDR3 for alpha chain variable domain of TCR clone 194912 (TRAV20, TRAJ43)
CAVQAGKRSNNDMRF

SEQ ID NO: 389824 - protein, 13 aa, Homo sapiens
  CDR3 for beta chain variable domain of TCR clone 194912 (TRBV27, TRBJ1-1)
CASSVSIGAEAFF

SEQ ID NO: 389825 - protein, 15 aa, Homo sapiens
  CDR3 for alpha chain variable domain of TCR clone 194913 (TRAV17, TRAJ57)
CATCPSQCGSEKLVL

SEQ ID NO: 389826 - protein, 16 aa, Homo sapiens
  CDR3 for beta chain variable domain of TCR clone 194913 (TRBV12-4, TRBJ1-5)
CASSRPVGGSNQPQHF

SEQ ID NO: 389827 - protein, 16 aa, Homo sapiens
  CDR3 for alpha chain variable domain of TCR clone 194914 (TRAV30, TRAJ24)
CGTEIVDADSWGKFQF

SEQ ID NO: 389828 - protein, 15 aa, Homo sapiens
  CDR3 for beta chain variable domain of TCR clone 194914 (TRBV19, TRBJ2-2)
CASSPRTGWTGELFF

SEQ ID NO: 389829 - protein, 12 aa, Homo sapiens
  CDR3 for alpha chain variable domain of TCR clone 194915 (TRAV8-3, TRAJ20)
CAVGVGDYKLSF

SEQ ID NO: 389830 - protein, 14 aa, Homo sapiens
  CDR3 for beta chain variable domain of TCR clone 194915 (TRBV5-1, TRBJ2-7)
CASSRGESLYEQYF

SEQ ID NO: 389831 - protein, 17 aa, Homo sapiens
  CDR3 for alpha chain variable domain of TCR clone 194916 (TRAV23/DV6, TRAJ57)
CAASSTLSQGGSEKLVF

SEQ ID NO: 389832 - protein, 17 aa, Homo sapiens
  CDR3 for beta chain variable domain of TCR clone 194916 (TRBV11-2, TRBJ2-1)
CASSLYPPGVEYSEQFF

SEQ ID NO: 389833 - protein, 15 aa, Homo sapiens
  CDR3 for alpha chain variable domain of TCR clone 194917 (TRAV17, TRAJ16)
CATALRFSDGQKLLF

SEQ ID NO: 389834 - protein, 12 aa, Homo sapiens
  CDR3 for beta chain variable domain of TCR clone 194917 (TRBV2, TRBJ2-7)
CGSSDPDYEQYF

SEQ ID NO: 389835 - protein, 13 aa, Homo sapiens
  CDR3 for alpha chain variable domain of TCR clone 194918 (TRAV35, TRAJ36)
CAGPRIGANNLFF

SEQ ID NO: 389836 - protein, 15 aa, Homo sapiens
  CDR3 for beta chain variable domain of TCR clone 194918 (TRBV4-1, TRBJ1-4)
CASSDTGGTNEKLFF

SEQ ID NO: 389837 - protein, 12 aa, Homo sapiens
  CDR3 for alpha chain variable domain of TCR clone 194919 (TRAV2, TRAJ34)
CAVERNADKLIF

SEQ ID NO: 389838 - protein, 14 aa, Homo sapiens
  CDR3 for beta chain variable domain of TCR clone 194919 (TRBV7-9, TRBJ2-1)
CASSDNSGYNEQFF

SEQ ID NO: 389839 - protein, 13 aa, Homo sapiens
  CDR3 for alpha chain variable domain of TCR clone 194920 (TRAV26-1, TRAJ35)
FIVSRRVGEMLHF

SEQ ID NO: 389840 - protein, 17 aa, Homo sapiens
  CDR3 for beta chain variable domain of TCR clone 194920 (TRBV7-9, TRBJ2-7)
CASSFDGSRGGAYEQYF

SEQ ID NO: 389841 - protein, 14 aa, Homo sapiens
  CDR3 for alpha chain variable domain of TCR clone 194921 (TRAV1-2, TRAJ8)
CAVREDTGSQKLVF

SEQ ID NO: 389842 - protein, 13 aa, Homo sapiens
  CDR3 for beta chain variable domain of TCR clone 194921 (TRBV2, TRBJ2-3)
CASGRGRTDTQYF

SEQ ID NO: 389843 - protein, 14 aa, Homo sapiens
  CDR3 for alpha chain variable domain of TCR clone 194922 (TRAV21, TRAJ58)
CAVKRETSGSRLTF

SEQ ID NO: 389844 - protein, 15 aa, Homo sapiens
  CDR3 for beta chain variable domain of TCR clone 194922 (TRBV7-2, TRBJ2-3)
CASTPTSGETDTQYF

SEQ ID NO: 389845 - protein, 10 aa, Homo sapiens
  CDR3 for alpha chain variable domain of TCR clone 194923 (TRAV1-2, TRAJ20)
CTCNDYKLSF

SEQ ID NO: 389846 - protein, 16 aa, Homo sapiens
  CDR3 for beta chain variable domain of TCR clone 194923 (TRBV20-1, TRBJ2-1)
CSARDLKQGMNNEQFF

SEQ ID NO: 389847 - protein, 15 aa, Homo sapiens
  CDR3 for alpha chain variable domain of TCR clone 194924 (TRAV16, TRAJ57)
CALSGGQGGSEKLVF

SEQ ID NO: 389848 - protein, 16 aa, Homo sapiens
  CDR3 for beta chain variable domain of TCR clone 194924 (TRBV2, TRBJ1-3)
CASSRTGGSTGNTIYF

SEQ ID NO: 389849 - protein, 12 aa, Homo sapiens
  CDR3 for alpha chain variable domain of TCR clone 194925 (TRAV3, TRAJ20)
WSVRDPDYKLIF

SEQ ID NO: 389850 - protein, 13 aa, Homo sapiens
  CDR3 for beta chain variable domain of TCR clone 194925 (TRBV9, TRBJ2-1)
CASSVGQGGEQFF

SEQ ID NO: 389851 - protein, 16 aa, Homo sapiens
  CDR3 for alpha chain variable domain of TCR clone 194926 (TRAV3, TRAJ28)
CAVLHRSGAGSYQLTF

SEQ ID NO: 389852 - protein, 13 aa, Homo sapiens
  CDR3 for beta chain variable domain of TCR clone 194926 (TRBV12-4, TRBJ2-5)
CASRLAVQETQYF

SEQ ID NO: 389853 - protein, 12 aa, Homo sapiens
  CDR3 for alpha chain variable domain of TCR clone 194927 (TRAV38-2/DV8, TRAJ48)
CALLSGNEKLTF

SEQ ID NO: 389854 - protein, 16 aa, Homo sapiens
  CDR3 for beta chain variable domain of TCR clone 194927 (TRBV24-1, TRBJ2-3)
CATSDRRQDLTDTQYF

SEQ ID NO: 389855 - protein, 15 aa, Homo sapiens
  CDR3 for alpha chain variable domain of TCR clone 194928 (TRAV26-1, TRAJ40)
CIDRYATSGTYKYIF

SEQ ID NO: 389856 - protein, 11 aa, Homo sapiens
  CDR3 for beta chain variable domain of TCR clone 194928 (TRBV7-9, TRBJ2-1)
CASISQNEQFF

SEQ ID NO: 389857 - protein, 13 aa, Homo sapiens
  CDR3 for alpha chain variable domain of TCR clone 194929 (TRAV2, TRAJ20)
CAVEDPSEYKLSF

SEQ ID NO: 389858 - protein, 16 aa, Homo sapiens
  CDR3 for beta chain variable domain of TCR clone 194929 (TRBV25-1, TRBJ2-7)
CASSELTGGGIYWQYF

SEQ ID NO: 389859 - protein, 14 aa, Homo sapiens
  CDR3 for alpha chain variable domain of TCR clone 194930 (TRAV8-3, TRAJ6)
CAVGASGGSYMPTF

SEQ ID NO: 389860 - protein, 17 aa, Homo sapiens
  CDR3 for beta chain variable domain of TCR clone 194930 (TRBV18, TRBJ2-2)
CASSPSDPWQNTGELFF

SEQ ID NO: 389861 - protein, 23 aa, Homo sapiens
  CDR3 for alpha chain variable domain of TCR clone 194931 (TRAV26-1, TRAJ38)
CIADNAGNNHIQNPDPTVYPLRD

SEQ ID NO: 389862 - protein, 13 aa, Homo sapiens
  CDR3 for beta chain variable domain of TCR clone 194931 (TRBV20-1, TRBJ1-1)
CSARGGGNTEAFF

SEQ ID NO: 389863 - protein, 16 aa, Homo sapiens
  CDR3 for alpha chain variable domain of TCR clone 194932 (TRAV30, TRAJ24)
CGTEIVDADSWGKFQF

SEQ ID NO: 389864 - protein, 12 aa, Homo sapiens
  CDR3 for beta chain variable domain of TCR clone 194932 (TRBV11-2, TRBJ2-1)
CASNPGNNEQFF

SEQ ID NO: 389865 - protein, 10 aa, Homo sapiens
  CDR3 for alpha chain variable domain of TCR clone 194933 (TRAV12-3, TRAJ50)
CAMSALGNLL

SEQ ID NO: 389866 - protein, 12 aa, Homo sapiens
  CDR3 for beta chain variable domain of TCR clone 194933 (TRBV14, TRBJ2-7)
CASSRLKGEQYF

SEQ ID NO: 389867 - protein, 15 aa, Homo sapiens
  CDR3 for alpha chain variable domain of TCR clone 194934 (TRAV3, TRAJ10)
CAVRDSTGGGNKLTF

SEQ ID NO: 389868 - protein, 15 aa, Homo sapiens
  CDR3 for beta chain variable domain of TCR clone 194934 (TRBV4-1, TRBJ1-4)
CASSDTGGTNEKLFF

SEQ ID NO: 389869 - protein, 20 aa, Homo sapiens
  CDR3 for alpha chain variable domain of TCR clone 194935 (TRAV21, TRAJ13)
CAVPRSFWGLPESYLWNLNK

SEQ ID NO: 389870 - protein, 14 aa, Homo sapiens
  CDR3 for beta chain variable domain of TCR clone 194935 (TRBV20-1, TRBJ2-7)
CSAKDRKGAYEQYF

SEQ ID NO: 389871 - protein, 12 aa, Homo sapiens
  CDR3 for alpha chain variable domain of TCR clone 194936 (TRAV12-3, TRAJ29)
CAAREGTTPLVF

SEQ ID NO: 389872 - protein, 17 aa, Homo sapiens
  CDR3 for beta chain variable domain of TCR clone 194936 (TRBV18, TRBJ2-1)
CASSPLAAGAGDNEQFF

SEQ ID NO: 389873 - protein, 14 aa, Homo sapiens
  CDR3 for alpha chain variable domain of TCR clone 194937 (TRAV1-2, TRAJ8)
CAVREDTGFQKLVF

SEQ ID NO: 389874 - protein, 15 aa, Homo sapiens
  CDR3 for beta chain variable domain of TCR clone 194937 (TRBV29-1, TRBJ2-5)
CSVEGLAVNQETQYF

SEQ ID NO: 389875 - protein, 13 aa, Homo sapiens
  CDR3 for alpha chain variable domain of TCR clone 194938 (TRAV30, TRAJ24)
CGTVTDSWGKLQF

SEQ ID NO: 389876 - protein, 13 aa, Homo sapiens
  CDR3 for beta chain variable domain of TCR clone 194938 (TRBV4-1, TRBJ2-1)
CASSQAGGDEQFF

SEQ ID NO: 389877 - protein, 13 aa, Homo sapiens
  CDR3 for alpha chain variable domain of TCR clone 194939 (TRAV8-6, TRAJ9)
CAVWDTGGFKTIF

SEQ ID NO: 389878 - protein, 15 aa, Homo sapiens
  CDR3 for beta chain variable domain of TCR clone 194939 (TRBV7-9, TRBJ1-5)
CASSQGHQPNQPQHF

SEQ ID NO: 389879 - protein, 14 aa, Homo sapiens
  CDR3 for alpha chain variable domain of TCR clone 194940 (TRAV8-3, TRAJ39)
CAVGANNAGNMLTF

SEQ ID NO: 389880 - protein, 13 aa, Homo sapiens
  CDR3 for beta chain variable domain of TCR clone 194940 (TRBV7-7, TRBJ2-2)
CASSLTSAGELFF

SEQ ID NO: 389881 - protein, 11 aa, Homo sapiens
  CDR3 for alpha chain variable domain of TCR clone 194941 (TRAV12-2, TRAJ31)
CAVTRWARLMF

SEQ ID NO: 389882 - protein, 15 aa, Homo sapiens
  CDR3 for beta chain variable domain of TCR clone 194941 (TRBV19, TRBJ2-7)
SASSIGGGLVNEQYF

SEQ ID NO: 389883 - protein, 14 aa, Homo sapiens
  CDR3 for alpha chain variable domain of TCR clone 194942 (TRAV1-2, TRAJ16)
CAVKRFSDGQKLLF

SEQ ID NO: 389884 - protein, 12 aa, Homo sapiens
  CDR3 for beta chain variable domain of TCR clone 194942 (TRBV2, TRBJ2-1)
CAYGPPGNEQFF

SEQ ID NO: 389885 - protein, 15 aa, Homo sapiens
  CDR3 for alpha chain variable domain of TCR clone 194943 (TRAV27, TRAJ38)
CAACRNAGNNRKLIW

SEQ ID NO: 389886 - protein, 16 aa, Homo sapiens
  CDR3 for beta chain variable domain of TCR clone 194943 (TRBV24-1, TRBJ2-3)
CATSDPGTGATDTQYF

SEQ ID NO: 389887 - protein, 17 aa, Homo sapiens
  CDR3 for alpha chain variable domain of TCR clone 194944 (TRAV3, TRAJ6)
CAVRYGPRAGGSYIPTF

SEQ ID NO: 389888 - protein, 13 aa, Homo sapiens
  CDR3 for beta chain variable domain of TCR clone 194944 (TRBV27, TRBJ1-1)
CASSLSIGAEAFF

SEQ ID NO: 389889 - protein, 12 aa, Homo sapiens
  CDR3 for alpha chain variable domain of TCR clone 194945 (TRAV1-1, TRAJ8)
CAGGTGFQKLVF

SEQ ID NO: 389890 - protein, 15 aa, Homo sapiens
  CDR3 for beta chain variable domain of TCR clone 194945 (TRBV7-9, TRBJ1-4)
CASCRTGGFNEKLFF

SEQ ID NO: 389891 - protein, 15 aa, Homo sapiens
  CDR3 for alpha chain variable domain of TCR clone 194946 (TRAV23/DV6, TRAJ18)
CAARYRGSTLGRLYF

SEQ ID NO: 389892 - protein, 14 aa, Homo sapiens
  CDR3 for beta chain variable domain of TCR clone 194946 (TRBV16, TRBJ1-1)
CASSQAGPNTEAFF

SEQ ID NO: 389893 - protein, 12 aa, Homo sapiens
  CDR3 for alpha chain variable domain of TCR clone 194947 (TRAV22, TRAJ22)
CAPGGSARQLTF

SEQ ID NO: 389894 - protein, 15 aa, Homo sapiens
  CDR3 for beta chain variable domain of TCR clone 194947 (TRBV11-2, TRBJ1-6)
CASTLRGTGNSPLHF

SEQ ID NO: 389895 - protein, 18 aa, Homo sapiens
  CDR3 for alpha chain variable domain of TCR clone 194948 (TRAV21, TRAJ52)
CAVRPSPAGGTSYGKLTF

SEQ ID NO: 389896 - protein, 14 aa, Homo sapiens
  CDR3 for beta chain variable domain of TCR clone 194948 (TRBV4-1, TRBJ2-7)
CASSPVAGGDEQYF

SEQ ID NO: 389897 - protein, 12 aa, Homo sapiens
  CDR3 for alpha chain variable domain of TCR clone 194949 (TRAV3, TRAJ31)
CAAQRANARLMF

SEQ ID NO: 389898 - protein, 16 aa, Homo sapiens
  CDR3 for beta chain variable domain of TCR clone 194949 (TRBV7-3, TRBJ2-2)
CASSLKRGTLSGELFF

SEQ ID NO: 389899 - protein, 15 aa, Homo sapiens
  CDR3 for alpha chain variable domain of TCR clone 194950 (TRAV3, TRAJ22)
CAVRDRGGSARQLTF

SEQ ID NO: 389900 - protein, 15 aa, Homo sapiens
  CDR3 for beta chain variable domain of TCR clone 194950 (TRBV7-3, TRBJ2-2)
CASSETAQGTGELFF

SEQ ID NO: 389901 - protein, 12 aa, Homo sapiens
  CDR3 for alpha chain variable domain of TCR clone 194951 (TRAV2, TRAJ36)
CAELTGANNLFF

SEQ ID NO: 389902 - protein, 14 aa, Homo sapiens
  CDR3 for beta chain variable domain of TCR clone 194951 (TRBV18, TRBJ2-7)
CASSPRGGAYEQYY

SEQ ID NO: 389903 - protein, 16 aa, Homo sapiens
  CDR3 for alpha chain variable domain of TCR clone 194952 (TRAV1-2, TRAJ33)
CAVRDGGPRSNYQLIW

SEQ ID NO: 389904 - protein, 13 aa, Homo sapiens
  CDR3 for beta chain variable domain of TCR clone 194952 (TRBV19, TRBJ1-5)
CASSIGGNQPQHF

SEQ ID NO: 389905 - protein, 14 aa, Homo sapiens
  CDR3 for alpha chain variable domain of TCR clone 194953 (TRAV1-2, TRAJ8)
CAVREDTGFQKLVF

SEQ ID NO: 389906 - protein, 16 aa, Homo sapiens
  CDR3 for beta chain variable domain of TCR clone 194953 (TRBV7-7, TRBJ2-2)
CASSPRTGLNTGELFF

SEQ ID NO: 389907 - protein, 15 aa, Homo sapiens
  CDR3 for alpha chain variable domain of TCR clone 194954 (TRAV29/DV5, TRAJ24)
SAASGATDSWGKFQF

SEQ ID NO: 389908 - protein, 12 aa, Homo sapiens
  CDR3 for beta chain variable domain of TCR clone 194954 (TRBV11-2, TRBJ2-2)
CASSLPTGELFF

SEQ ID NO: 389909 - protein, 13 aa, Homo sapiens
  CDR3 for alpha chain variable domain of TCR clone 194955 (TRAV26-2, TRAJ43)
CILRAVNNNDMRF

SEQ ID NO: 389910 - protein, 15 aa, Homo sapiens
  CDR3 for beta chain variable domain of TCR clone 194955 (TRBV7-2, TRBJ2-1)
CASTHGTGISNEQFF

SEQ ID NO: 389911 - protein, 15 aa, Homo sapiens
  CDR3 for alpha chain variable domain of TCR clone 194956 (TRAV21, TRAJ36)
SAVRRKQTGANNLFF

SEQ ID NO: 389912 - protein, 13 aa, Homo sapiens
  CDR3 for beta chain variable domain of TCR clone 194956 (TRBV3-1, TRBJ1-5)
CASSQFGDQTQHF

SEQ ID NO: 389913 - protein, 15 aa, Homo sapiens
  CDR3 for alpha chain variable domain of TCR clone 194957 (TRAV27, TRAJ38)
CAARRNAGNNRKLIS

SEQ ID NO: 389914 - protein, 11 aa, Homo sapiens
  CDR3 for beta chain variable domain of TCR clone 194957 (TRBV12-4, TRBJ2-2)
CASSSAGELFF

SEQ ID NO: 389915 - protein, 12 aa, Homo sapiens
  CDR3 for alpha chain variable domain of TCR clone 194958 (TRAV12-3, TRAJ42)
CAPGGSLGNLIF

SEQ ID NO: 389916 - protein, 13 aa, Homo sapiens
  CDR3 for beta chain variable domain of TCR clone 194958 (TRBV5-7, TRBJ2-6)
CASTSSGANVLTF

SEQ ID NO: 389917 - protein, 15 aa, Homo sapiens
  CDR3 for alpha chain variable domain of TCR clone 194959 (TRAV23/DV6, TRAJ58)
CAARLLRGGNQWLSV

SEQ ID NO: 389918 - protein, 15 aa, Homo sapiens
  CDR3 for beta chain variable domain of TCR clone 194959 (TRBV9, TRBJ1-6)
CASSVAGTGDSPLHF

SEQ ID NO: 389919 - protein, 10 aa, Homo sapiens
  CDR3 for alpha chain variable domain of TCR clone 194960 (TRAV1-2, TRAJ31)
CAFFDARLMF

SEQ ID NO: 389920 - protein, 13 aa, Homo sapiens
  CDR3 for beta chain variable domain of TCR clone 194960 (TRBV7-9, TRBJ1-2)
CASSLKQNYCYTF

SEQ ID NO: 389921 - protein, 16 aa, Homo sapiens
  CDR3 for alpha chain variable domain of TCR clone 194961 (TRAV3, TRAJ10)
CAVRDMRAGGGNKLTF

SEQ ID NO: 389922 - protein, 14 aa, Homo sapiens
  CDR3 for beta chain variable domain of TCR clone 194961 (TRBV15, TRBJ2-5)
CATCIGGLGETQYF

SEQ ID NO: 389923 - protein, 15 aa, Homo sapiens
  CDR3 for alpha chain variable domain of TCR clone 194962 (TRAV21, TRAJ10)
CAVRGLTGGGNKLTF

SEQ ID NO: 389924 - protein, 12 aa, Homo sapiens
  CDR3 for beta chain variable domain of TCR clone 194962 (TRBV7-9, TRBJ2-7)
CASSIKREEQYF

SEQ ID NO: 389925 - protein, 16 aa, Homo sapiens
  CDR3 for alpha chain variable domain of TCR clone 194963 (TRAV26-1, TRAJ58)
IASSESGETSGSRLTF

SEQ ID NO: 389926 - protein, 16 aa, Homo sapiens
  CDR3 for beta chain variable domain of TCR clone 194963 (TRBV19, TRBJ2-1)
CASSKAGPSSYNEQFF

SEQ ID NO: 389927 - protein, 15 aa, Homo sapiens
  CDR3 for alpha chain variable domain of TCR clone 194964 (TRAV8-3, TRAJ11)
CAVGLLNSGYSTLTF

SEQ ID NO: 389928 - protein, 15 aa, Homo sapiens
  CDR3 for beta chain variable domain of TCR clone 194964 (TRBV19, TRBJ1-2)
CASSVGQVLNYGYTF

SEQ ID NO: 389929 - protein, 16 aa, Homo sapiens
  CDR3 for alpha chain variable domain of TCR clone 194965 (TRAV12-1, TRAJ8)
CVVNGRGNTGFQKLVF

SEQ ID NO: 389930 - protein, 15 aa, Homo sapiens
  CDR3 for beta chain variable domain of TCR clone 194965 (TRBV6-1, TRBJ1-2)
CTSNPGRGGSYGYTF

SEQ ID NO: 389931 - protein, 14 aa, Homo sapiens
  CDR3 for alpha chain variable domain of TCR clone 194966 (TRAV17, TRAJ16)
CATADFSDGQKLLF

SEQ ID NO: 389932 - protein, 15 aa, Homo sapiens
  CDR3 for beta chain variable domain of TCR clone 194966 (TRBV18, TRBJ2-1)
CASSSPSASHNEQFF

SEQ ID NO: 389933 - protein, 11 aa, Homo sapiens
  CDR3 for alpha chain variable domain of TCR clone 194967 (TRAV27, TRAJ20)
CAGLNDYKLSF

SEQ ID NO: 389934 - protein, 15 aa, Homo sapiens
  CDR3 for beta chain variable domain of TCR clone 194967 (TRBV5-1, TRBJ2-1)
CASKGLAGVYNEQFF

SEQ ID NO: 389935 - protein, 15 aa, Homo sapiens
  CDR3 for alpha chain variable domain of TCR clone 194968 (TRAV29/DV5, TRAJ28)
CAAGYSGAGSYKLTF

SEQ ID NO: 389936 - protein, 18 aa, Homo sapiens
  CDR3 for beta chain variable domain of TCR clone 194968 (TRBV3-1, TRBJ1-2)
CASSQDVIGWNGDYGYTF

SEQ ID NO: 389937 - protein, 13 aa, Homo sapiens
  CDR3 for alpha chain variable domain of TCR clone 194969 (TRAV38-1, TRAJ57)
CALVQGGSEELVF

SEQ ID NO: 389938 - protein, 17 aa, Homo sapiens
  CDR3 for beta chain variable domain of TCR clone 194969 (TRBV29-1, TRBJ2-3)
CSVDSPPRGARTDTQYF

SEQ ID NO: 389939 - protein, 14 aa, Homo sapiens
  CDR3 for alpha chain variable domain of TCR clone 194970 (TRAV12-3, TRAJ10)
SHLPLTGGGNKLTF

SEQ ID NO: 389940 - protein, 15 aa, Homo sapiens
  CDR3 for beta chain variable domain of TCR clone 194970 (TRBV11-2, TRBJ1-2)
CASSLEGVQRNGYTF

SEQ ID NO: 389941 - protein, 14 aa, Homo sapiens
  CDR3 for alpha chain variable domain of TCR clone 194971 (TRAV1-1, TRAJ27)
CAVIYNTNAGKSTF

SEQ ID NO: 389942 - protein, 13 aa, Homo sapiens
  CDR3 for beta chain variable domain of TCR clone 194971 (TRBV20-1, TRBJ2-7)
CSATHTSGYEQYF

SEQ ID NO: 389943 - protein, 14 aa, Homo sapiens
  CDR3 for alpha chain variable domain of TCR clone 194972 (TRAV17, TRAJ9)
CATVTLGGGFKTIF

SEQ ID NO: 389944 - protein, 19 aa, Homo sapiens
  CDR3 for beta chain variable domain of TCR clone 194972 (TRBV2, TRBJ2-7)
CASSDDETSGRANDYEQYF

SEQ ID NO: 389945 - protein, 18 aa, Homo sapiens
  CDR3 for alpha chain variable domain of TCR clone 194973 (TRAV13-1, TRAJ52)
CAAKNPNAGGTSYGKLTF

SEQ ID NO: 389946 - protein, 15 aa, Homo sapiens
  CDR3 for beta chain variable domain of TCR clone 194973 (TRBV2, TRBJ2-2)
CAGSSETVGTGELFF

SEQ ID NO: 389947 - protein, 14 aa, Homo sapiens
  CDR3 for alpha chain variable domain of TCR clone 194974 (TRAV13-1, TRAJ40)
CAASMTSGTYKYIF

SEQ ID NO: 389948 - protein, 13 aa, Homo sapiens
  CDR3 for beta chain variable domain of TCR clone 194974 (TRBV7-9, TRBJ1-2)
CASSLKQNYGDTF

SEQ ID NO: 389949 - protein, 16 aa, Homo sapiens
  CDR3 for alpha chain variable domain of TCR clone 194975 (TRAV38-1, TRAJ32)
CAFMKGGGGAPNKLIF

SEQ ID NO: 389950 - protein, 13 aa, Homo sapiens
  CDR3 for beta chain variable domain of TCR clone 194975 (TRBV20-1, TRBJ2-5)
CSAREAFQETQYF

SEQ ID NO: 389951 - protein, 14 aa, Homo sapiens
  CDR3 for alpha chain variable domain of TCR clone 194976 (TRAV1-2, TRAJ16)
CAVNRFSDGQKLLF

SEQ ID NO: 389952 - protein, 14 aa, Homo sapiens
  CDR3 for beta chain variable domain of TCR clone 194976 (TRBV2, TRBJ2-3)
CASTAQTSTDTQYF

SEQ ID NO: 389953 - protein, 14 aa, Homo sapiens
  CDR3 for alpha chain variable domain of TCR clone 194977 (TRAV1-2, TRAJ8)
CAVREDTGFQNLVF

SEQ ID NO: 389954 - protein, 14 aa, Homo sapiens
  CDR3 for beta chain variable domain of TCR clone 194977 (TRBV7-9, TRBJ1-1)
CASSLGGANTEAFF

SEQ ID NO: 389955 - protein, 15 aa, Homo sapiens
  CDR3 for alpha chain variable domain of TCR clone 194978 (TRAV8-2, TRAJ28)
CVVSESGAGSYQLTF

SEQ ID NO: 389956 - protein, 18 aa, Homo sapiens
  CDR3 for beta chain variable domain of TCR clone 194978 (TRBV11-2, TRBJ2-3)
CASSLGGASRGAPNTQYF

SEQ ID NO: 389957 - protein, 14 aa, Homo sapiens
  CDR3 for alpha chain variable domain of TCR clone 194979 (TRAV12-2, TRAJ17)
CAVLFKDAGNKLTF

SEQ ID NO: 389958 - protein, 17 aa, Homo sapiens
  CDR3 for beta chain variable domain of TCR clone 194979 (TRBV20-1, TRBJ2-2)
CSASGSGHGGLTGELFF

SEQ ID NO: 389959 - protein, 12 aa, Homo sapiens
  CDR3 for alpha chain variable domain of TCR clone 194980 (TRAV13-1, TRAJ53)
AASGGSNYKLTF

SEQ ID NO: 389960 - protein, 16 aa, Homo sapiens
  CDR3 for beta chain variable domain of TCR clone 194980 (TRBV7-9, TRBJ2-3)
CASSPWREVGTDTQYF

SEQ ID NO: 389961 - protein, 14 aa, Homo sapiens
  CDR3 for alpha chain variable domain of TCR clone 194981 (TRAV25, TRAJ45)
CARESVGGADGLTF

SEQ ID NO: 389962 - protein, 12 aa, Homo sapiens
  CDR3 for beta chain variable domain of TCR clone 194981 (TRBV7-9, TRBJ2-7)
CASSFDSYEQYF

SEQ ID NO: 389963 - protein, 11 aa, Homo sapiens
  CDR3 for alpha chain variable domain of TCR clone 194982 (TRAV1-1, TRAJ30)
CAVSRDDKIIF

SEQ ID NO: 389964 - protein, 17 aa, Homo sapiens
  CDR3 for beta chain variable domain of TCR clone 194982 (TRBV20-1, TRBJ2-1)
CSAPPRLAGTRYNEQFF

SEQ ID NO: 389965 - protein, 13 aa, Homo sapiens
  CDR3 for alpha chain variable domain of TCR clone 194983 (TRAV30, TRAJ24)
CGTVTDSWGKLQF

SEQ ID NO: 389966 - protein, 15 aa, Homo sapiens
  CDR3 for beta chain variable domain of TCR clone 194983 (TRBV9, TRBJ1-6)
CASSVAGTGDSPLHL

SEQ ID NO: 389967 - protein, 13 aa, Homo sapiens
  CDR3 for alpha chain variable domain of TCR clone 194984 (TRAV8-2, TRAJ47)
CVVSEREGKKLVF

SEQ ID NO: 389968 - protein, 15 aa, Homo sapiens
  CDR3 for beta chain variable domain of TCR clone 194984 (TRBV6-3, TRBJ2-7)
CASSSPGTVFYEQYF

SEQ ID NO: 389969 - protein, 14 aa, Homo sapiens
  CDR3 for alpha chain variable domain of TCR clone 194985 (TRAV12-2, TRAJ17)
CAVLFKAAGNKLTF

SEQ ID NO: 389970 - protein, 17 aa, Homo sapiens
  CDR3 for beta chain variable domain of TCR clone 194985 (TRBV20-1, TRBJ2-2)
CSASGSGQGRLTGELFS

SEQ ID NO: 389971 - protein, 14 aa, Homo sapiens
  CDR3 for alpha chain variable domain of TCR clone 194986 (TRAV17, TRAJ57)
CATDASGGSEKLVF

SEQ ID NO: 389972 - protein, 14 aa, Homo sapiens
  CDR3 for beta chain variable domain of TCR clone 194986 (TRBV4-3, TRBJ2-1)
YASGLDRAYNEQFF

SEQ ID NO: 389973 - protein, 13 aa, Homo sapiens
  CDR3 for alpha chain variable domain of TCR clone 194987 (TRAV12-2, TRAJ20)
CAVYPSNDYKLSF

SEQ ID NO: 389974 - protein, 15 aa, Homo sapiens
  CDR3 for beta chain variable domain of TCR clone 194987 (TRBV27, TRBJ2-5)
CASSLYPLGGETQYF

SEQ ID NO: 389975 - protein, 15 aa, Homo sapiens
  CDR3 for alpha chain variable domain of TCR clone 194988 (TRAV2, TRAJ42)
CAVEGYGGSQGNLIF

SEQ ID NO: 389976 - protein, 14 aa, Homo sapiens
  CDR3 for beta chain variable domain of TCR clone 194988 (TRBV11-3, TRBJ2-7)
CASSPDRNTYEQYS

SEQ ID NO: 389977 - protein, 13 aa, Homo sapiens
  CDR3 for alpha chain variable domain of TCR clone 194989 (TRAV36/DV7, TRAJ7)
CAGTRYGNNRLAF

SEQ ID NO: 389978 - protein, 15 aa, Homo sapiens
  CDR3 for beta chain variable domain of TCR clone 194989 (TRBV11-3, TRBJ2-7)
CASSPGPASCYEQYF

SEQ ID NO: 389979 - protein, 15 aa, Homo sapiens
  CDR3 for alpha chain variable domain of TCR clone 194990 (TRAV8-3, TRAJ6)
CAVGEDRRGSYIPTF

SEQ ID NO: 389980 - protein, 14 aa, Homo sapiens
  CDR3 for beta chain variable domain of TCR clone 194990 (TRBV27, TRBJ2-2)
CASLRSPPGGELFF

SEQ ID NO: 389981 - protein, 16 aa, Homo sapiens
  CDR3 for alpha chain variable domain of TCR clone 194991 (TRAV3, TRAJ10)
CAVRDMRAGGGNKLTF

SEQ ID NO: 389982 - protein, 16 aa, Homo sapiens
  CDR3 for beta chain variable domain of TCR clone 194991 (TRBV7-2, TRBJ2-3)
CASSLVALYSTDTQYF

SEQ ID NO: 389983 - protein, 10 aa, Homo sapiens
  CDR3 for alpha chain variable domain of TCR clone 194992 (TRAV26-1, TRAJ40)
CIAGTYKYIF

SEQ ID NO: 389984 - protein, 15 aa, Homo sapiens
  CDR3 for beta chain variable domain of TCR clone 194992 (TRBV7-2, TRBJ2-3)
CASSLAGAFIDTQYF

SEQ ID NO: 389985 - protein, 12 aa, Homo sapiens
  CDR3 for alpha chain variable domain of TCR clone 194993 (TRAV13-1, TRAJ21)
CAEKEGFNKFYF

SEQ ID NO: 389986 - protein, 13 aa, Homo sapiens
  CDR3 for beta chain variable domain of TCR clone 194993 (TRBV19, TRBJ1-2)
CASSVPGQDGYTF

SEQ ID NO: 389987 - protein, 14 aa, Homo sapiens
  CDR3 for alpha chain variable domain of TCR clone 194994 (TRAV2, TRAJ3)
CAVRPYSSASKIIF

SEQ ID NO: 389988 - protein, 17 aa, Homo sapiens
  CDR3 for beta chain variable domain of TCR clone 194994 (TRBV7-6, TRBJ2-5)
CASSSAQAGDPSETQYF

SEQ ID NO: 389989 - protein, 16 aa, Homo sapiens
  CDR3 for alpha chain variable domain of TCR clone 194995 (TRAV38-2/DV8, TRAJ47)
CAYRSAIMEYGNKLVF

SEQ ID NO: 389990 - protein, 16 aa, Homo sapiens
  CDR3 for beta chain variable domain of TCR clone 194995 (TRBV10-3, TRBJ2-1)
CAISLTSGNSYNEQFF

SEQ ID NO: 389991 - protein, 13 aa, Homo sapiens
  CDR3 for alpha chain variable domain of TCR clone 194996 (TRAV12-3, TRAJ9)
CAMRNTGGFKTIF

SEQ ID NO: 389992 - protein, 14 aa, Homo sapiens
  CDR3 for beta chain variable domain of TCR clone 194996 (TRBV11-2, TRBJ2-7)
CASSSTGEGDEQYF

SEQ ID NO: 389993 - protein, 17 aa, Homo sapiens
  CDR3 for alpha chain variable domain of TCR clone 194997 (TRAV2, TRAJ22)
ILQVREADAAEQRQLTF

SEQ ID NO: 389994 - protein, 16 aa, Homo sapiens
  CDR3 for beta chain variable domain of TCR clone 194997 (TRBV11-2, TRBJ2-7)
CASSPTTGGVSYEQYF

SEQ ID NO: 389995 - protein, 19 aa, Homo sapiens
  CDR3 for alpha chain variable domain of TCR clone 194998 (TRAV39, TRAJ43)
PCMTTLPPTSVPWANDMRF

SEQ ID NO: 389996 - protein, 15 aa, Homo sapiens
  CDR3 for beta chain variable domain of TCR clone 194998 (TRBV12-4, TRBJ2-5)
CASSPPTGLQETQYF

SEQ ID NO: 389997 - protein, 13 aa, Homo sapiens
  CDR3 for alpha chain variable domain of TCR clone 194999 (TRAV8-1, TRAJ43)
CAVTSYGNNDMRF

SEQ ID NO: 389998 - protein, 15 aa, Homo sapiens
  CDR3 for beta chain variable domain of TCR clone 194999 (TRBV9, TRBJ1-6)
CASSVAGTGDSPLHF

SEQ ID NO: 389999 - protein, 14 aa, Homo sapiens
  CDR3 for alpha chain variable domain of TCR clone 195000 (TRAV1-2, TRAJ16)
CAVNRFSDGQKLLF

SEQ ID NO: 390000 - protein, 15 aa, Homo sapiens
  CDR3 for beta chain variable domain of TCR clone 195000 (TRBV7-9, TRBJ2-2)
CASGPLDTFPGELFV

SEQ ID NO: 390001 - protein, 23 aa, Homo sapiens
  CDR3 for alpha chain variable domain of TCR clone 195001 (TRAV1-1, TRAJ11)
LLQELQMKDSASYFCAGYSTLTF

SEQ ID NO: 390002 - protein, 14 aa, Homo sapiens
  CDR3 for beta chain variable domain of TCR clone 195001 (TRBV20-1, TRBJ1-1)
CSAQTRIGGTEAFF

SEQ ID NO: 390003 - protein, 14 aa, Homo sapiens
  CDR3 for alpha chain variable domain of TCR clone 195002 (TRAV12-3, TRAJ9)
CAMSPNTGCFKTIF

SEQ ID NO: 390004 - protein, 12 aa, Homo sapiens
  CDR3 for beta chain variable domain of TCR clone 195002 (TRBV11-2, TRBJ2-2)
CASSLGGGELFF

SEQ ID NO: 390005 - protein, 16 aa, Homo sapiens
  CDR3 for alpha chain variable domain of TCR clone 195003 (TRAV35, TRAJ28)
FAGQKYSGAGSYQLTF

SEQ ID NO: 390006 - protein, 13 aa, Homo sapiens
  CDR3 for beta chain variable domain of TCR clone 195003 (TRBV19, TRBJ1-2)
CASSQGQVYGYTF

SEQ ID NO: 390007 - protein, 15 aa, Homo sapiens
  CDR3 for alpha chain variable domain of TCR clone 195004 (TRAV13-1, TRAJ13)
CATQGDSGGYQKVTF

SEQ ID NO: 390008 - protein, 16 aa, Homo sapiens
  CDR3 for beta chain variable domain of TCR clone 195004 (TRBV7-8, TRBJ2-6)
CASRVGDSSGANVLTF

SEQ ID NO: 390009 - protein, 13 aa, Homo sapiens
  CDR3 for alpha chain variable domain of TCR clone 195005 (TRAV1-2, TRAJ9)
CAVLNTGGFKTIF

SEQ ID NO: 390010 - protein, 16 aa, Homo sapiens
  CDR3 for beta chain variable domain of TCR clone 195005 (TRBV20-1, TRBJ1-2)
CSASMGQGVANYGYTF

SEQ ID NO: 390011 - protein, 14 aa, Homo sapiens
  CDR3 for alpha chain variable domain of TCR clone 195006 (TRAV13-1, TRAJ40)
CAASMTSGTYKYIF

SEQ ID NO: 390012 - protein, 15 aa, Homo sapiens
  CDR3 for beta chain variable domain of TCR clone 195006 (TRBV7-3, TRBJ2-1)
CASSPTGGVEVEQFF

SEQ ID NO: 390013 - protein, 14 aa, Homo sapiens
  CDR3 for alpha chain variable domain of TCR clone 195007 (TRAV13-1, TRAJ3)
CAASKSSSASKIIF

SEQ ID NO: 390014 - protein, 12 aa, Homo sapiens
  CDR3 for beta chain variable domain of TCR clone 195007 (TRBV11-2, TRBJ2-2)
CASSLGGGELLF

SEQ ID NO: 390015 - protein, 15 aa, Homo sapiens
  CDR3 for alpha chain variable domain of TCR clone 195008 (TRAV3, TRAJ47)
CAVRDIGEYGNKLVF

SEQ ID NO: 390016 - protein, 17 aa, Homo sapiens
  CDR3 for beta chain variable domain of TCR clone 195008 (TRBV20-1, TRBJ2-2)
CSARDRTSGRHTGELFF

SEQ ID NO: 390017 - protein, 17 aa, Homo sapiens
  CDR3 for alpha chain variable domain of TCR clone 195009 (TRAV1-1, TRAJ28)
CVVDPAYSGAGSYQLTF

SEQ ID NO: 390018 - protein, 14 aa, Homo sapiens
  CDR3 for beta chain variable domain of TCR clone 195009 (TRBV19, TRBJ2-1)
CASPTFVLSGEQFF

SEQ ID NO: 390019 - protein, 16 aa, Homo sapiens
  CDR3 for alpha chain variable domain of TCR clone 195010 (TRAV12-3, TRAJ53)
CAMSPGSGGSNYKLTF

SEQ ID NO: 390020 - protein, 13 aa, Homo sapiens
  CDR3 for beta chain variable domain of TCR clone 195010 (TRBV12-4, TRBJ1-2)
CASSLRQGKGYAF

SEQ ID NO: 390021 - protein, 18 aa, Homo sapiens
  CDR3 for alpha chain variable domain of TCR clone 195011 (TRAV13-1, TRAJ52)
RAAKNPNAAGTSHGKLTF

SEQ ID NO: 390022 - protein, 15 aa, Homo sapiens
  CDR3 for beta chain variable domain of TCR clone 195011 (TRBV6-1, TRBJ2-3)
CASSERGGITDTQYF

SEQ ID NO: 390023 - protein, 17 aa, Homo sapiens
  CDR3 for alpha chain variable domain of TCR clone 195012 (TRAV27, TRAJ18)
CAGLHRGRGPTLGRLYS

SEQ ID NO: 390024 - protein, 14 aa, Homo sapiens
  CDR3 for beta chain variable domain of TCR clone 195012 (TRBV20-1, TRBJ1-5)
CSARGRGSDQPQHF

SEQ ID NO: 390025 - protein, 12 aa, Homo sapiens
  CDR3 for alpha chain variable domain of TCR clone 195013 (TRAV35, TRAJ42)
CWVSGSQGNLIF

SEQ ID NO: 390026 - protein, 14 aa, Homo sapiens
  CDR3 for beta chain variable domain of TCR clone 195013 (TRBV19, TRBJ2-1)
CASPTFVLSGEQFF

SEQ ID NO: 390027 - protein, 22 aa, Homo sapiens
  CDR3 for alpha chain variable domain of TCR clone 195014 (TRAV12-2, TRAJ32)
CSSETPSPVIQPPKSATNKLIF

SEQ ID NO: 390028 - protein, 15 aa, Homo sapiens
  CDR3 for beta chain variable domain of TCR clone 195014 (TRBV28, TRBJ2-5)
CASSADRGRGETQFF

SEQ ID NO: 390029 - protein, 13 aa, Homo sapiens
  CDR3 for alpha chain variable domain of TCR clone 195015 (TRAV3, TRAJ21)
CAVREPDFNKSYF

SEQ ID NO: 390030 - protein, 15 aa, Homo sapiens
  CDR3 for beta chain variable domain of TCR clone 195015 (TRBV5-1, TRBJ2-4)
CASSFPTSGRVDQKH

SEQ ID NO: 390031 - protein, 13 aa, Homo sapiens
  CDR3 for alpha chain variable domain of TCR clone 195016 (TRAV21, TRAJ45)
CAVMGGGADGLTF

SEQ ID NO: 390032 - protein, 18 aa, Homo sapiens
  CDR3 for beta chain variable domain of TCR clone 195016 (TRBV7-9, TRBJ2-7)
CASSLTTSGSRTWYEQYF

SEQ ID NO: 390033 - protein, 17 aa, Homo sapiens
  CDR3 for alpha chain variable domain of TCR clone 195017 (TRAV13-1, TRAJ52)
CAAGRNAGGTSYGKLTF

SEQ ID NO: 390034 - protein, 16 aa, Homo sapiens
  CDR3 for beta chain variable domain of TCR clone 195017 (TRBV7-9, TRBJ2-5)
CASSPSGQGVKGTQYF

SEQ ID NO: 390035 - protein, 12 aa, Homo sapiens
  CDR3 for alpha chain variable domain of TCR clone 195018 (TRAV8-3, TRAJ20)
CAVGANDYKLSF

SEQ ID NO: 390036 - protein, 15 aa, Homo sapiens
  CDR3 for beta chain variable domain of TCR clone 195018 (TRBV7-3, TRBJ2-2)
CASSETGQGTGELFF

SEQ ID NO: 390037 - protein, 17 aa, Homo sapiens
  CDR3 for alpha chain variable domain of TCR clone 195019 (TRAV17, TRAJ28)
CATDPRPGGAGSYQLPF

SEQ ID NO: 390038 - protein, 16 aa, Homo sapiens
  CDR3 for beta chain variable domain of TCR clone 195019 (TRBV25-1, TRBJ1-1)
CASSGDRDRGRIEAFF

SEQ ID NO: 390039 - protein, 13 aa, Homo sapiens
  CDR3 for alpha chain variable domain of TCR clone 195020 (TRAV13-1, TRAJ5)
CAASDTGRRALTF

SEQ ID NO: 390040 - protein, 14 aa, Homo sapiens
  CDR3 for beta chain variable domain of TCR clone 195020 (TRBV7-7, TRBJ2-2)
CATRQDSDAGELFF

SEQ ID NO: 390041 - protein, 14 aa, Homo sapiens
  CDR3 for alpha chain variable domain of TCR clone 195021 (TRAV12-1, TRAJ26)
CVVKGSNYGQNFVF

SEQ ID NO: 390042 - protein, 17 aa, Homo sapiens
  CDR3 for beta chain variable domain of TCR clone 195021 (TRBV11-2, TRBJ2-6)
CASSQRDIVSGANVLTF

SEQ ID NO: 390043 - protein, 12 aa, Homo sapiens
  CDR3 for alpha chain variable domain of TCR clone 195022 (TRAV13-1, TRAJ21)
CAAKEGFNKFYF

SEQ ID NO: 390044 - protein, 16 aa, Homo sapiens
  CDR3 for beta chain variable domain of TCR clone 195022 (TRBV4-1, TRBJ1-1)
CASSQDAGMGNTEAFF

SEQ ID NO: 390045 - protein, 20 aa, Homo sapiens
  CDR3 for alpha chain variable domain of TCR clone 195023 (TRAV26-1, TRAJ42)
CCVLLHHQTYYGGSQGNLIF

SEQ ID NO: 390046 - protein, 16 aa, Homo sapiens
  CDR3 for beta chain variable domain of TCR clone 195023 (TRBV7-3, TRBJ2-2)
CASSLKRGTLSGELFF

SEQ ID NO: 390047 - protein, 13 aa, Homo sapiens
  CDR3 for alpha chain variable domain of TCR clone 195024 (TRAV1-2, TRAJ9)
CAALNTGGFKTNF

SEQ ID NO: 390048 - protein, 17 aa, Homo sapiens
  CDR3 for beta chain variable domain of TCR clone 195024 (TRBV4-1, TRBJ2-7)
CASSRDPLGVRGGEQYF

SEQ ID NO: 390049 - protein, 13 aa, Homo sapiens
  CDR3 for alpha chain variable domain of TCR clone 195025 (TRAV12-3, TRAJ13)
CAMTSGGYQKVTF

SEQ ID NO: 390050 - protein, 13 aa, Homo sapiens
  CDR3 for beta chain variable domain of TCR clone 195025 (TRBV7-9, TRBJ1-2)
CASSLKQNYAYTF

SEQ ID NO: 390051 - protein, 14 aa, Homo sapiens
  CDR3 for alpha chain variable domain of TCR clone 195026 (TRAV8-1, TRAJ5)
CAVSMDTGGRALTF

SEQ ID NO: 390052 - protein, 15 aa, Homo sapiens
  CDR3 for beta chain variable domain of TCR clone 195026 (TRBV19, TRBJ2-4)
CASRGPRRGENIQYF

SEQ ID NO: 390053 - protein, 14 aa, Homo sapiens
  CDR3 for alpha chain variable domain of TCR clone 195027 (TRAV26-1, TRAJ38)
CIADNAGNNRKLIW

SEQ ID NO: 390054 - protein, 14 aa, Homo sapiens
  CDR3 for beta chain variable domain of TCR clone 195027 (TRBV4-1, TRBJ2-2)
CASSQSVNTGELFF

SEQ ID NO: 390055 - protein, 16 aa, Homo sapiens
  CDR3 for alpha chain variable domain of TCR clone 195028 (TRAV17, TRAJ28)
CATASVSGAGSYQLTF

SEQ ID NO: 390056 - protein, 14 aa, Homo sapiens
  CDR3 for beta chain variable domain of TCR clone 195028 (TRBV19, TRBJ2-1)
CASPTFVLSGEQFF

SEQ ID NO: 390057 - protein, 13 aa, Homo sapiens
  CDR3 for alpha chain variable domain of TCR clone 195029 (TRAV12-3, TRAJ13)
CAMSSGGYQKVTF

SEQ ID NO: 390058 - protein, 14 aa, Homo sapiens
  CDR3 for beta chain variable domain of TCR clone 195029 (TRBV2, TRBJ2-1)
CASRTGRSYNKQFF

SEQ ID NO: 390059 - protein, 17 aa, Homo sapiens
  CDR3 for alpha chain variable domain of TCR clone 195030 (TRAV13-1, TRAJ31)
CAPRDRLMFGDGTQLVV

SEQ ID NO: 390060 - protein, 18 aa, Homo sapiens
  CDR3 for beta chain variable domain of TCR clone 195030 (TRBV20-1, TRBJ2-3)
CSASGLAGGPGTTDTQYF

SEQ ID NO: 390061 - protein, 14 aa, Homo sapiens
  CDR3 for alpha chain variable domain of TCR clone 195031 (TRAV4, TRAJ17)
CLVGDMAAGNKLTF

SEQ ID NO: 390062 - protein, 16 aa, Homo sapiens
  CDR3 for beta chain variable domain of TCR clone 195031 (TRBV4-1, TRBJ2-7)
CASSQEWTSGPLEQYF

SEQ ID NO: 390063 - protein, 16 aa, Homo sapiens
  CDR3 for alpha chain variable domain of TCR clone 195032 (TRAV23/DV6, TRAJ9)
CAASIGGNTGGFKTIF

SEQ ID NO: 390064 - protein, 17 aa, Homo sapiens
  CDR3 for beta chain variable domain of TCR clone 195032 (TRBV13, TRBJ2-3)
CASSLSRVAVGRNTQYF

SEQ ID NO: 390065 - protein, 13 aa, Homo sapiens
  CDR3 for alpha chain variable domain of TCR clone 195033 (TRAV16, TRAJ34)
CALTGYNTDKLIF

SEQ ID NO: 390066 - protein, 13 aa, Homo sapiens
  CDR3 for beta chain variable domain of TCR clone 195033 (TRBV6-1, TRBJ2-1)
CASREDGGHAQFF

SEQ ID NO: 390067 - protein, 15 aa, Homo sapiens
  CDR3 for alpha chain variable domain of TCR clone 195034 (TRAV13-1, TRAJ17)
CAASIERAAGNKLTF

SEQ ID NO: 390068 - protein, 13 aa, Homo sapiens
  CDR3 for beta chain variable domain of TCR clone 195034 (TRBV7-7, TRBJ2-3)
CASSLSRADTQDF

SEQ ID NO: 390069 - protein, 15 aa, Homo sapiens
  CDR3 for alpha chain variable domain of TCR clone 195035 (TRAV12-1, TRAJ44)
CVVFVNTGTASKLTF

SEQ ID NO: 390070 - protein, 17 aa, Homo sapiens
  CDR3 for beta chain variable domain of TCR clone 195035 (TRBV7-8, TRBJ2-1)
CASSPPTGTLAYNEQFF

SEQ ID NO: 390071 - protein, 15 aa, Homo sapiens
  CDR3 for alpha chain variable domain of TCR clone 195036 (TRAV3, TRAJ4)
CAQNMFSGGYNTLIF

SEQ ID NO: 390072 - protein, 16 aa, Homo sapiens
  CDR3 for beta chain variable domain of TCR clone 195036 (TRBV3-1, TRBJ1-6)
CASSQEFQGSYSPLHF

SEQ ID NO: 390073 - protein, 13 aa, Homo sapiens
  CDR3 for alpha chain variable domain of TCR clone 195037 (TRAV9-2, TRAJ53)
CALSGGSNYKLTF

SEQ ID NO: 390074 - protein, 13 aa, Homo sapiens
  CDR3 for beta chain variable domain of TCR clone 195037 (TRBV12-4, TRBJ2-7)
CASSPTETYEQYV

SEQ ID NO: 390075 - protein, 13 aa, Homo sapiens
  CDR3 for alpha chain variable domain of TCR clone 195038 (TRAV12-2, TRAJ18)
CAVRGSALGRLYF

SEQ ID NO: 390076 - protein, 20 aa, Homo sapiens
  CDR3 for beta chain variable domain of TCR clone 195038 (TRBV7-8, TRBJ2-2)
CASSHLFPGPTIHITGELFF

SEQ ID NO: 390077 - protein, 11 aa, Homo sapiens
  CDR3 for alpha chain variable domain of TCR clone 195039 (TRAV39, TRAJ49)
CAVDMSTQFYF

SEQ ID NO: 390078 - protein, 11 aa, Homo sapiens
  CDR3 for beta chain variable domain of TCR clone 195039 (TRBV7-8, TRBJ2-7)
CASSLSLEQYF

SEQ ID NO: 390079 - protein, 14 aa, Homo sapiens
  CDR3 for alpha chain variable domain of TCR clone 195040 (TRAV1-2, TRAJ16)
CAVNRFSDGQKLLF

SEQ ID NO: 390080 - protein, 12 aa, Homo sapiens
  CDR3 for beta chain variable domain of TCR clone 195040 (TRBV9, TRBJ2-1)
CASSVGGTDIFF

SEQ ID NO: 390081 - protein, 12 aa, Homo sapiens
  CDR3 for alpha chain variable domain of TCR clone 195041 (TRAV17, TRAJ12)
CATLRSSYKLIC

SEQ ID NO: 390082 - protein, 14 aa, Homo sapiens
  CDR3 for beta chain variable domain of TCR clone 195041 (TRBV19, TRBJ2-1)
CARGARSFQWEQFF

SEQ ID NO: 390083 - protein, 16 aa, Homo sapiens
  CDR3 for alpha chain variable domain of TCR clone 195042 (TRAV1-2, TRAJ10)
CAVRGVLTGGGNKLTF

SEQ ID NO: 390084 - protein, 14 aa, Homo sapiens
  CDR3 for beta chain variable domain of TCR clone 195042 (TRBV7-8, TRBJ2-2)
CASSQAVNTGELFF

SEQ ID NO: 390085 - protein, 15 aa, Homo sapiens
  CDR3 for alpha chain variable domain of TCR clone 195043 (TRAV3, TRAJ12)
CTSVPWMDSSYKLIF

SEQ ID NO: 390086 - protein, 19 aa, Homo sapiens
  CDR3 for beta chain variable domain of TCR clone 195043 (TRBV2, TRBJ2-7)
CASSDDETSGRANDYEQYF

SEQ ID NO: 390087 - protein, 12 aa, Homo sapiens
  CDR3 for alpha chain variable domain of TCR clone 195044 (TRAV13-1, TRAJ15)
CAASQAGTALIF

SEQ ID NO: 390088 - protein, 14 aa, Homo sapiens
  CDR3 for beta chain variable domain of TCR clone 195044 (TRBV19, TRBJ2-2)
CASSTLRRAGELFF

SEQ ID NO: 390089 - protein, 14 aa, Homo sapiens
  CDR3 for alpha chain variable domain of TCR clone 195045 (TRAV8-4, TRAJ9)
CAVRINTGGFITIF

SEQ ID NO: 390090 - protein, 15 aa, Homo sapiens
  CDR3 for beta chain variable domain of TCR clone 195045 (TRBV10-2, TRBJ2-6)
CASSEQGTGANVLTF

SEQ ID NO: 390091 - protein, 11 aa, Homo sapiens
  CDR3 for alpha chain variable domain of TCR clone 195046 (TRAV1-1, TRAJ23)
CAVRQGGKLIF

SEQ ID NO: 390092 - protein, 20 aa, Homo sapiens
  CDR3 for beta chain variable domain of TCR clone 195046 (TRBV7-8, TRBJ2-2)
CASSHLFPAPTIHITGELFF

SEQ ID NO: 390093 - protein, 14 aa, Homo sapiens
  CDR3 for alpha chain variable domain of TCR clone 195047 (TRAV29/DV5, TRAJ32)
CAAAYGGATNKLIF

SEQ ID NO: 390094 - protein, 11 aa, Homo sapiens
  CDR3 for beta chain variable domain of TCR clone 195047 (TRBV11-2, TRBJ2-2)
CARSLPGELFF

SEQ ID NO: 390095 - protein, 11 aa, Homo sapiens
  CDR3 for alpha chain variable domain of TCR clone 195048 (TRAV2, TRAJ33)
CAVDNNYQLIW

SEQ ID NO: 390096 - protein, 13 aa, Homo sapiens
  CDR3 for beta chain variable domain of TCR clone 195048 (TRBV7-2, TRBJ2-7)
CASSSPSGSEQYF

SEQ ID NO: 390097 - protein, 16 aa, Homo sapiens
  CDR3 for alpha chain variable domain of TCR clone 195049 (TRAV12-2, TRAJ40)
CAVIRGGTSGTYKYIF

SEQ ID NO: 390098 - protein, 14 aa, Homo sapiens
  CDR3 for beta chain variable domain of TCR clone 195049 (TRBV12-5, TRBJ2-5)
CASGSRTHQETQYF

SEQ ID NO: 390099 - protein, 15 aa, Homo sapiens
  CDR3 for alpha chain variable domain of TCR clone 195050 (TRAV13-2, TRAJ5)
CSENPHWTGRRALTF

SEQ ID NO: 390100 - protein, 14 aa, Homo sapiens
  CDR3 for beta chain variable domain of TCR clone 195050 (TRBV5-7, TRBJ2-7)
CASSFKGATGEQYF

SEQ ID NO: 390101 - protein, 21 aa, Homo sapiens
  CDR3 for alpha chain variable domain of TCR clone 195051 (TRAV12-1, TRAJ37)
CVVNGGLWQHRQTTLWARDNF

SEQ ID NO: 390102 - protein, 12 aa, Homo sapiens
  CDR3 for beta chain variable domain of TCR clone 195051 (TRBV20-1, TRBJ1-2)
CSAPGFNYGYTF

SEQ ID NO: 390103 - protein, 14 aa, Homo sapiens
  CDR3 for alpha chain variable domain of TCR clone 195052 (TRAV35, TRAJ38)
CAGSNAGNNRKLIW

SEQ ID NO: 390104 - protein, 12 aa, Homo sapiens
  CDR3 for beta chain variable domain of TCR clone 195052 (TRBV7-9, TRBJ2-7)
CASSFGSYEQYF

SEQ ID NO: 390105 - protein, 11 aa, Homo sapiens
  CDR3 for alpha chain variable domain of TCR clone 195053 (TRAV3, TRAJ21)
CAVGNFIKFYF

SEQ ID NO: 390106 - protein, 15 aa, Homo sapiens
  CDR3 for beta chain variable domain of TCR clone 195053 (TRBV19, TRBJ1-5)
CASSIVWADNQPQHF

SEQ ID NO: 390107 - protein, 14 aa, Homo sapiens
  CDR3 for alpha chain variable domain of TCR clone 195054 (TRAV1-2, TRAJ8)
CAVREDTGFQKLVF

SEQ ID NO: 390108 - protein, 14 aa, Homo sapiens
  CDR3 for beta chain variable domain of TCR clone 195054 (TRBV7-3, TRBJ2-1)
CARSLAGGTNEQFF

SEQ ID NO: 390109 - protein, 14 aa, Homo sapiens
  CDR3 for alpha chain variable domain of TCR clone 195055 (TRAV12-2, TRAJ53)
CAVKGGGSNYKLTF

SEQ ID NO: 390110 - protein, 15 aa, Homo sapiens
  CDR3 for beta chain variable domain of TCR clone 195055 (TRBV6-3, TRBJ2-7)
CASSSPGTVFYEQYF

SEQ ID NO: 390111 - protein, 13 aa, Homo sapiens
  CDR3 for alpha chain variable domain of TCR clone 195056 (TRAV29/DV5, TRAJ44)
CAASTGTASKLTF

SEQ ID NO: 390112 - protein, 14 aa, Homo sapiens
  CDR3 for beta chain variable domain of TCR clone 195056 (TRBV12-4, TRBJ2-3)
CASTIAGWGDTQYF

SEQ ID NO: 390113 - protein, 15 aa, Homo sapiens
  CDR3 for alpha chain variable domain of TCR clone 195057 (TRAV4, TRAJ48)
CLVGDIDFGNEKLTF

SEQ ID NO: 390114 - protein, 14 aa, Homo sapiens
  CDR3 for beta chain variable domain of TCR clone 195057 (TRBV7-2, TRBJ2-3)
CASSSGISTDTQYF

SEQ ID NO: 390115 - protein, 14 aa, Homo sapiens
  CDR3 for alpha chain variable domain of TCR clone 195058 (TRAV17, TRAJ45)
CATASGGGADGLTF

SEQ ID NO: 390116 - protein, 13 aa, Homo sapiens
  CDR3 for beta chain variable domain of TCR clone 195058 (TRBV19, TRBJ1-4)
CASSRGDNEKLFF

SEQ ID NO: 390117 - protein, 18 aa, Homo sapiens
  CDR3 for alpha chain variable domain of TCR clone 195059 (TRAV21, TRAJ52)
CAVRRANAGGTSYGKMTF

SEQ ID NO: 390118 - protein, 15 aa, Homo sapiens
  CDR3 for beta chain variable domain of TCR clone 195059 (TRBV11-2, TRBJ2-1)
CASSKNRGLIYEQFF

SEQ ID NO: 390119 - protein, 13 aa, Homo sapiens
  CDR3 for alpha chain variable domain of TCR clone 195060 (TRAV2, TRAJ29)
CAAGDSGNTPLVV

SEQ ID NO: 390120 - protein, 16 aa, Homo sapiens
  CDR3 for beta chain variable domain of TCR clone 195060 (TRBV7-9, TRBJ1-2)
CASSPGGGAINYGYTF

SEQ ID NO: 390121 - protein, 13 aa, Homo sapiens
  CDR3 for alpha chain variable domain of TCR clone 195061 (TRAV8-4, TRAJ9)
CAVSETGGFKTIF

SEQ ID NO: 390122 - protein, 19 aa, Homo sapiens
  CDR3 for beta chain variable domain of TCR clone 195061 (TRBV5-1, TRBJ2-3)
CASSLWLAGGITTTDTQYF

SEQ ID NO: 390123 - protein, 16 aa, Homo sapiens
  CDR3 for alpha chain variable domain of TCR clone 195062 (TRAV26-1, TRAJ36)
CIVRVPDQTGANNLFF

SEQ ID NO: 390124 - protein, 14 aa, Homo sapiens
  CDR3 for beta chain variable domain of TCR clone 195062 (TRBV7-2, TRBJ2-7)
CASSLYPGRYEQFF

SEQ ID NO: 390125 - protein, 14 aa, Homo sapiens
  CDR3 for alpha chain variable domain of TCR clone 195063 (TRAV27, TRAJ23)
CAGAFDNQGGKLIF

SEQ ID NO: 390126 - protein, 16 aa, Homo sapiens
  CDR3 for beta chain variable domain of TCR clone 195063 (TRBV7-6, TRBJ2-1)
CASSAPGPSSYNEQFF

SEQ ID NO: 390127 - protein, 12 aa, Homo sapiens
  CDR3 for alpha chain variable domain of TCR clone 195064 (TRAV27, TRAJ21)
CAGVRQLQQILL

SEQ ID NO: 390128 - protein, 14 aa, Homo sapiens
  CDR3 for beta chain variable domain of TCR clone 195064 (TRBV19, TRBJ2-1)
CASGKSTQYNEQFF

SEQ ID NO: 390129 - protein, 17 aa, Homo sapiens
  CDR3 for alpha chain variable domain of TCR clone 195065 (TRAV24, TRAJ42)
CAFRVKNYGGSQGNPIF

SEQ ID NO: 390130 - protein, 15 aa, Homo sapiens
  CDR3 for beta chain variable domain of TCR clone 195065 (TRBV4-3, TRBJ2-7)
CASSQGDWGDYEQYF

SEQ ID NO: 390131 - protein, 14 aa, Homo sapiens
  CDR3 for alpha chain variable domain of TCR clone 195066 (TRAV3, TRAJ20)
CAVHPAPNDYKLSF

SEQ ID NO: 390132 - protein, 13 aa, Homo sapiens
  CDR3 for beta chain variable domain of TCR clone 195066 (TRBV15, TRBJ1-2)
CATSRVDARSPVF

SEQ ID NO: 390133 - protein, 11 aa, Homo sapiens
  CDR3 for alpha chain variable domain of TCR clone 195067 (TRAV1-2, TRAJ40)
CAVPGTYKYIF

SEQ ID NO: 390134 - protein, 13 aa, Homo sapiens
  CDR3 for beta chain variable domain of TCR clone 195067 (TRBV5-4, TRBJ2-3)
CASSRTGLGTQYF

SEQ ID NO: 390135 - protein, 15 aa, Homo sapiens
  CDR3 for alpha chain variable domain of TCR clone 195068 (TRAV2, TRAJ15)
CAVEDRGQAGTALIF

SEQ ID NO: 390136 - protein, 11 aa, Homo sapiens
  CDR3 for beta chain variable domain of TCR clone 195068 (TRBV10-3, TRBJ2-7)
CAISEGLEQYF

SEQ ID NO: 390137 - protein, 21 aa, Homo sapiens
  CDR3 for alpha chain variable domain of TCR clone 195069 (TRAV1-1, TRAJ6)
CLLLLRCERLERTGGSYIPTF

SEQ ID NO: 390138 - protein, 14 aa, Homo sapiens
  CDR3 for beta chain variable domain of TCR clone 195069 (TRBV7-3, TRBJ2-2)
CASSSGGYTGELFF

SEQ ID NO: 390139 - protein, 13 aa, Homo sapiens
  CDR3 for alpha chain variable domain of TCR clone 195070 (TRAV17, TRAJ5)
CAPMDTGRRALTF

SEQ ID NO: 390140 - protein, 16 aa, Homo sapiens
  CDR3 for beta chain variable domain of TCR clone 195070 (TRBV19, TRBJ2-3)
CASSPGAASRTDTQYF

SEQ ID NO: 390141 - protein, 15 aa, Homo sapiens
  CDR3 for alpha chain variable domain of TCR clone 195071 (TRAV26-2, TRAJ57)
CILRDIRGGSEKLVF

SEQ ID NO: 390142 - protein, 15 aa, Homo sapiens
  CDR3 for beta chain variable domain of TCR clone 195071 (TRBV2, TRBJ2-1)
CASDIGLAGAGEQFF

SEQ ID NO: 390143 - protein, 13 aa, Homo sapiens
  CDR3 for alpha chain variable domain of TCR clone 195072 (TRAV26-2, TRAJ54)
CIPRGGGAQKLVF

SEQ ID NO: 390144 - protein, 16 aa, Homo sapiens
  CDR3 for beta chain variable domain of TCR clone 195072 (TRBV4-1, TRBJ1-1)
CASSSMSERPNTEAFF

SEQ ID NO: 390145 - protein, 14 aa, Homo sapiens
  CDR3 for alpha chain variable domain of TCR clone 195073 (TRAV26-1, TRAJ38)
CIADNAGNNRKLIW

SEQ ID NO: 390146 - protein, 13 aa, Homo sapiens
  CDR3 for beta chain variable domain of TCR clone 195073 (TRBV15, TRBJ1-6)
CATSGGVNSPLHF

SEQ ID NO: 390147 - protein, 13 aa, Homo sapiens
  CDR3 for alpha chain variable domain of TCR clone 195074 (TRAV8-3, TRAJ21)
CAVGAYNFNKFYF

SEQ ID NO: 390148 - protein, 16 aa, Homo sapiens
  CDR3 for beta chain variable domain of TCR clone 195074 (TRBV19, TRBJ2-1)
CASSMGGWSSYNEQFF

SEQ ID NO: 390149 - protein, 13 aa, Homo sapiens
  CDR3 for alpha chain variable domain of TCR clone 195075 (TRAV17, TRAJ5)
CALRGTGRRALAF

SEQ ID NO: 390150 - protein, 13 aa, Homo sapiens
  CDR3 for beta chain variable domain of TCR clone 195075 (TRBV6-1, TRBJ1-1)
CASSRQGNTEAFF

SEQ ID NO: 390151 - protein, 15 aa, Homo sapiens
  CDR3 for alpha chain variable domain of TCR clone 195076 (TRAV38-1, TRAJ37)
CAFIHGSGNTGKLIF

SEQ ID NO: 390152 - protein, 12 aa, Homo sapiens
  CDR3 for beta chain variable domain of TCR clone 195076 (TRBV7-9, TRBJ2-7)
CASRFGSYEQYF

SEQ ID NO: 390153 - protein, 13 aa, Homo sapiens
  CDR3 for alpha chain variable domain of TCR clone 195077 (TRAV29/DV5, TRAJ31)
CSASRNNNARLMF

SEQ ID NO: 390154 - protein, 12 aa, Homo sapiens
  CDR3 for beta chain variable domain of TCR clone 195077 (TRBV14, TRBJ2-7)
CASSSLKGEQYF

SEQ ID NO: 390155 - protein, 15 aa, Homo sapiens
  CDR3 for alpha chain variable domain of TCR clone 195078 (TRAV16, TRAJ10)
CALEGLSGGGNKLTF

SEQ ID NO: 390156 - protein, 14 aa, Homo sapiens
  CDR3 for beta chain variable domain of TCR clone 195078 (TRBV7-6, TRBJ2-3)
CASSLGTVTDTQYF

SEQ ID NO: 390157 - protein, 15 aa, Homo sapiens
  CDR3 for alpha chain variable domain of TCR clone 195079 (TRAV23/DV6, TRAJ45)
CAAKNGGGGAAGLTF

SEQ ID NO: 390158 - protein, 13 aa, Homo sapiens
  CDR3 for beta chain variable domain of TCR clone 195079 (TRBV20-1, TRBJ1-1)
CSARGGGNTEAFF

SEQ ID NO: 390159 - protein, 11 aa, Homo sapiens
  CDR3 for alpha chain variable domain of TCR clone 195080 (TRAV12-2, TRAJ43)
CAAYNNNDMRF

SEQ ID NO: 390160 - protein, 14 aa, Homo sapiens
  CDR3 for beta chain variable domain of TCR clone 195080 (TRBV7-8, TRBJ1-2)
CASSAGTASYGYTF

SEQ ID NO: 390161 - protein, 14 aa, Homo sapiens
  CDR3 for alpha chain variable domain of TCR clone 195081 (TRAV23/DV6, TRAJ17)
CAASIGAAGNRLTF

SEQ ID NO: 390162 - protein, 12 aa, Homo sapiens
  CDR3 for beta chain variable domain of TCR clone 195081 (TRBV20-1, TRBJ2-5)
CSAGGAGETQYF

SEQ ID NO: 390163 - protein, 14 aa, Homo sapiens
  CDR3 for alpha chain variable domain of TCR clone 195082 (TRAV17, TRAJ54)
CATDANQGAQKLVF

SEQ ID NO: 390164 - protein, 12 aa, Homo sapiens
  CDR3 for beta chain variable domain of TCR clone 195082 (TRBV2, TRBJ2-1)
CAKREGYNEQFF

SEQ ID NO: 390165 - protein, 14 aa, Homo sapiens
  CDR3 for alpha chain variable domain of TCR clone 195083 (TRAV2, TRAJ9)
CAVEDRSGGFKTIF

SEQ ID NO: 390166 - protein, 16 aa, Homo sapiens
  CDR3 for beta chain variable domain of TCR clone 195083 (TRBV5-1, TRBJ2-2)
CASSLWDTTNTGELFF

SEQ ID NO: 390167 - protein, 14 aa, Homo sapiens
  CDR3 for alpha chain variable domain of TCR clone 195084 (TRAV29/DV5, TRAJ36)
CAALRKTGANNLFF

SEQ ID NO: 390168 - protein, 13 aa, Homo sapiens
  CDR3 for beta chain variable domain of TCR clone 195084 (TRBV4-2, TRBJ1-1)
CASSQAGNTEAFF

SEQ ID NO: 390169 - protein, 11 aa, Homo sapiens
  CDR3 for alpha chain variable domain of TCR clone 195085 (TRAV35, TRAJ30)
CAGERDDKIIY

SEQ ID NO: 390170 - protein, 14 aa, Homo sapiens
  CDR3 for beta chain variable domain of TCR clone 195085 (TRBV15, TRBJ2-5)
CATSGDRGQETQYF

SEQ ID NO: 390171 - protein, 20 aa, Homo sapiens
  CDR3 for alpha chain variable domain of TCR clone 195086 (TRAV12-1, TRAJ42)
SSVIQPPTSVKGGSQGNLIF

SEQ ID NO: 390172 - protein, 20 aa, Homo sapiens
  CDR3 for beta chain variable domain of TCR clone 195086 (TRBV4-3, TRBJ2-3)
CASSPRVEMRASGRPDTQYF

SEQ ID NO: 390173 - protein, 11 aa, Homo sapiens
  CDR3 for alpha chain variable domain of TCR clone 195087 (TRAV12-1, TRAJ31)
CVGRVQCQTHV

SEQ ID NO: 390174 - protein, 15 aa, Homo sapiens
  CDR3 for beta chain variable domain of TCR clone 195087 (TRBV5-7, TRBJ2-7)
CASSGGRPVPYEQYF

SEQ ID NO: 390175 - protein, 15 aa, Homo sapiens
  CDR3 for alpha chain variable domain of TCR clone 195088 (TRAV3, TRAJ22)
CAVRDRGGSAKQLTF

SEQ ID NO: 390176 - protein, 14 aa, Homo sapiens
  CDR3 for beta chain variable domain of TCR clone 195088 (TRBV20-1, TRBJ2-5)
CSALVPGYQETQYF

SEQ ID NO: 390177 - protein, 13 aa, Homo sapiens
  CDR3 for alpha chain variable domain of TCR clone 195089 (TRAV8-3, TRAJ4)
WVFYSGGYNKLIF

SEQ ID NO: 390178 - protein, 14 aa, Homo sapiens
  CDR3 for beta chain variable domain of TCR clone 195089 (TRBV18, TRBJ2-5)
CASSPGVSQETQYF

SEQ ID NO: 390179 - protein, 14 aa, Homo sapiens
  CDR3 for alpha chain variable domain of TCR clone 195090 (TRAV12-2, TRAJ45)
CALPERGGADGLTF

SEQ ID NO: 390180 - protein, 12 aa, Homo sapiens
  CDR3 for beta chain variable domain of TCR clone 195090 (TRBV11-2, TRBJ2-2)
CASSLGGGELFF

SEQ ID NO: 390181 - protein, 11 aa, Homo sapiens
  CDR3 for alpha chain variable domain of TCR clone 195091 (TRAV1-2, TRAJ20)
CAVANDYKLSF

SEQ ID NO: 390182 - protein, 13 aa, Homo sapiens
  CDR3 for beta chain variable domain of TCR clone 195091 (TRBV4-2, TRBJ1-1)
CASSQAGNTEAFF

SEQ ID NO: 390183 - protein, 15 aa, Homo sapiens
  CDR3 for alpha chain variable domain of TCR clone 195092 (TRAV12-1, TRAJ15)
CVVTQANQAGTALIF

SEQ ID NO: 390184 - protein, 14 aa, Homo sapiens
  CDR3 for beta chain variable domain of TCR clone 195092 (TRBV25-1, TRBJ1-1)
CASTHLGGNTEAFF

SEQ ID NO: 390185 - protein, 14 aa, Homo sapiens
  CDR3 for alpha chain variable domain of TCR clone 195093 (TRAV1-2, TRAJ16)
CAVNRFSDGQKLLF

SEQ ID NO: 390186 - protein, 11 aa, Homo sapiens
  CDR3 for beta chain variable domain of TCR clone 195093 (TRBV19, TRBJ2-7)
CASGLSHEQYF

SEQ ID NO: 390187 - protein, 18 aa, Homo sapiens
  CDR3 for alpha chain variable domain of TCR clone 195094 (TRAV21, TRAJ52)
FAVRPSPAGGTSCGKLTF

SEQ ID NO: 390188 - protein, 17 aa, Homo sapiens
  CDR3 for beta chain variable domain of TCR clone 195094 (TRBV13, TRBJ2-3)
CASSLSRVAGGRNTQYF

SEQ ID NO: 390189 - protein, 11 aa, Homo sapiens
  CDR3 for alpha chain variable domain of TCR clone 195095 (TRAV12-1, TRAJ43)
CVEYDNNDMRF

SEQ ID NO: 390190 - protein, 12 aa, Homo sapiens
  CDR3 for beta chain variable domain of TCR clone 195095 (TRBV12-5, TRBJ2-5)
CASGQGVETQYF

SEQ ID NO: 390191 - protein, 11 aa, Homo sapiens
  CDR3 for alpha chain variable domain of TCR clone 195096 (TRAV8-3, TRAJ49)
CAVNTGNQFFF

SEQ ID NO: 390192 - protein, 20 aa, Homo sapiens
  CDR3 for beta chain variable domain of TCR clone 195096 (TRBV11-2, TRBJ2-7)
LRTRPCISVPAAPPADEQYF

SEQ ID NO: 390193 - protein, 11 aa, Homo sapiens
  CDR3 for alpha chain variable domain of TCR clone 195097 (TRAV12-1, TRAJ34)
CVVNKGRELIF

SEQ ID NO: 390194 - protein, 15 aa, Homo sapiens
  CDR3 for beta chain variable domain of TCR clone 195097 (TRBV19, TRBJ2-1)
CASSLETSGYNEQFF

SEQ ID NO: 390195 - protein, 15 aa, Homo sapiens
  CDR3 for alpha chain variable domain of TCR clone 195098 (TRAV3, TRAJ22)
CAVRDRGGSARQLTF

SEQ ID NO: 390196 - protein, 13 aa, Homo sapiens
  CDR3 for beta chain variable domain of TCR clone 195098 (TRBV7-9, TRBJ1-2)
CASSLKQNYGDTF

SEQ ID NO: 390197 - protein, 15 aa, Homo sapiens
  CDR3 for alpha chain variable domain of TCR clone 195099 (TRAV26-1, TRAJ29)
CIVRVEGSGNTPLVF

SEQ ID NO: 390198 - protein, 17 aa, Homo sapiens
  CDR3 for beta chain variable domain of TCR clone 195099 (TRBV4-2, TRBJ2-1)
CASSQFPGQGIYNEQFF

SEQ ID NO: 390199 - protein, 15 aa, Homo sapiens
  CDR3 for alpha chain variable domain of TCR clone 195100 (TRAV27, TRAJ38)
CAARRNAGNNRKLPW

SEQ ID NO: 390200 - protein, 13 aa, Homo sapiens
  CDR3 for beta chain variable domain of TCR clone 195100 (TRBV12-5, TRBJ2-3)
CASGDRQSDTQYF

SEQ ID NO: 390201 - protein, 13 aa, Homo sapiens
  CDR3 for alpha chain variable domain of TCR clone 195101 (TRAV12-2, TRAJ9)
WAVKWAGGFKTIF

SEQ ID NO: 390202 - protein, 12 aa, Homo sapiens
  CDR3 for beta chain variable domain of TCR clone 195101 (TRBV7-8, TRBJ2-7)
CASSLGDREQYF

SEQ ID NO: 390203 - protein, 12 aa, Homo sapiens
  CDR3 for alpha chain variable domain of TCR clone 195102 (TRAV13-1, TRAJ27)
CAAHTNAGKSTF

SEQ ID NO: 390204 - protein, 14 aa, Homo sapiens
  CDR3 for beta chain variable domain of TCR clone 195102 (TRBV12-5, TRBJ2-5)
CASGSRTHQETQHF

SEQ ID NO: 390205 - protein, 13 aa, Homo sapiens
  CDR3 for alpha chain variable domain of TCR clone 195103 (TRAV3, TRAJ15)
CAVIDQAGTALIF

SEQ ID NO: 390206 - protein, 13 aa, Homo sapiens
  CDR3 for beta chain variable domain of TCR clone 195103 (TRBV7-3, TRBJ2-2)
CASSVNVLGELFF

SEQ ID NO: 390207 - protein, 14 aa, Homo sapiens
  CDR3 for alpha chain variable domain of TCR clone 195104 (TRAV12-1, TRAJ38)
CVVNNAGNNRKLIW

SEQ ID NO: 390208 - protein, 19 aa, Homo sapiens
  CDR3 for beta chain variable domain of TCR clone 195104 (TRBV7-2, TRBJ2-3)
CASSFPSRNWGGGTDTQYF

SEQ ID NO: 390209 - protein, 14 aa, Homo sapiens
  CDR3 for alpha chain variable domain of TCR clone 195105 (TRAV13-2, TRAJ23)
CAENTYNQGGKLIF

SEQ ID NO: 390210 - protein, 17 aa, Homo sapiens
  CDR3 for beta chain variable domain of TCR clone 195105 (TRBV7-8, TRBJ2-6)
CASSAGTGGAGANVLTF

SEQ ID NO: 390211 - protein, 14 aa, Homo sapiens
  CDR3 for alpha chain variable domain of TCR clone 195106 (TRAV13-1, TRAJ40)
CAARSTSGTYKYLF

SEQ ID NO: 390212 - protein, 15 aa, Homo sapiens
  CDR3 for beta chain variable domain of TCR clone 195106 (TRBV18, TRBJ1-5)
CASSETGGNNQPQHF

SEQ ID NO: 390213 - protein, 15 aa, Homo sapiens
  CDR3 for alpha chain variable domain of TCR clone 195107 (TRAV3, TRAJ45)
CAVRTPWGGADGLTS

SEQ ID NO: 390214 - protein, 14 aa, Homo sapiens
  CDR3 for beta chain variable domain of TCR clone 195107 (TRBV3-1, TRBJ2-1)
CASNHGTRSNEQFF

SEQ ID NO: 390215 - protein, 12 aa, Homo sapiens
  CDR3 for alpha chain variable domain of TCR clone 195108 (TRAV2, TRAJ9)
CAVGAGGFKTIF

SEQ ID NO: 390216 - protein, 20 aa, Homo sapiens
  CDR3 for beta chain variable domain of TCR clone 195108 (TRBV11-2, TRBJ2-2)
LRTRPCISVPAASLPGSCFF

SEQ ID NO: 390217 - protein, 12 aa, Homo sapiens
  CDR3 for alpha chain variable domain of TCR clone 195109 (TRAV8-3, TRAJ26)
CAGDNYGQNFVF

SEQ ID NO: 390218 - protein, 15 aa, Homo sapiens
  CDR3 for beta chain variable domain of TCR clone 195109 (TRBV9, TRBJ2-1)
CAGSLAGSSYNEQFL

SEQ ID NO: 390219 - protein, 12 aa, Homo sapiens
  CDR3 for alpha chain variable domain of TCR clone 195110 (TRAV12-3, TRAJ17)
CSMTLTGNKLTF

SEQ ID NO: 390220 - protein, 12 aa, Homo sapiens
  CDR3 for beta chain variable domain of TCR clone 195110 (TRBV11-2, TRBJ2-7)
CASSLPTYEQYF

SEQ ID NO: 390221 - protein, 12 aa, Homo sapiens
  CDR3 for alpha chain variable domain of TCR clone 195111 (TRAV26-1, TRAJ35)
CIGLSFGNVLHC

SEQ ID NO: 390222 - protein, 14 aa, Homo sapiens
  CDR3 for beta chain variable domain of TCR clone 195111 (TRBV19, TRBJ2-1)
CASPTFVLSSEQFF

SEQ ID NO: 390223 - protein, 14 aa, Homo sapiens
  CDR3 for alpha chain variable domain of TCR clone 195112 (TRAV26-1, TRAJ38)
CIADNAGNNRKLIW

SEQ ID NO: 390224 - protein, 15 aa, Homo sapiens
  CDR3 for beta chain variable domain of TCR clone 195112 (TRBV11-2, TRBJ2-1)
CASSKNRGLIYEQFF

SEQ ID NO: 390225 - protein, 12 aa, Homo sapiens
  CDR3 for alpha chain variable domain of TCR clone 195113 (TRAV25, TRAJ53)
CQSGGSHYKLTF

SEQ ID NO: 390226 - protein, 15 aa, Homo sapiens
  CDR3 for beta chain variable domain of TCR clone 195113 (TRBV5-1, TRBJ2-2)
CASSWTSPNTGELFF

SEQ ID NO: 390227 - protein, 12 aa, Homo sapiens
  CDR3 for alpha chain variable domain of TCR clone 195114 (TRAV12-3, TRAJ41)
CAMSYSGYALNF

SEQ ID NO: 390228 - protein, 15 aa, Homo sapiens
  CDR3 for beta chain variable domain of TCR clone 195114 (TRBV5-1, TRBJ2-1)
CASSPPRAHYNEQFF

SEQ ID NO: 390229 - protein, 14 aa, Homo sapiens
  CDR3 for alpha chain variable domain of TCR clone 195115 (TRAV12-3, TRAJ10)
SHLPLTGGGNKLTF

SEQ ID NO: 390230 - protein, 15 aa, Homo sapiens
  CDR3 for beta chain variable domain of TCR clone 195115 (TRBV12-4, TRBJ1-6)
CASSLGGQGTSHLHF

SEQ ID NO: 390231 - protein, 16 aa, Homo sapiens
  CDR3 for alpha chain variable domain of TCR clone 195116 (TRAV16, TRAJ42)
CALSGLLGGSQGNLIF

SEQ ID NO: 390232 - protein, 16 aa, Homo sapiens
  CDR3 for beta chain variable domain of TCR clone 195116 (TRBV15, TRBJ2-7)
CATSRDGGIPSYEQYF

SEQ ID NO: 390233 - protein, 15 aa, Homo sapiens
  CDR3 for alpha chain variable domain of TCR clone 195117 (TRAV16, TRAJ48)
CALLVSNFGNEKLTF

SEQ ID NO: 390234 - protein, 15 aa, Homo sapiens
  CDR3 for beta chain variable domain of TCR clone 195117 (TRBV5-4, TRBJ2-7)
CASSRFGTGSCEQYF

SEQ ID NO: 390235 - protein, 12 aa, Homo sapiens
  CDR3 for alpha chain variable domain of TCR clone 195118 (TRAV4, TRAJ26)
CLVGDYGQNFVF

SEQ ID NO: 390236 - protein, 18 aa, Homo sapiens
  CDR3 for beta chain variable domain of TCR clone 195118 (TRBV4-3, TRBJ1-2)
CASSQDGQSAPSDYGYTF

SEQ ID NO: 390237 - protein, 15 aa, Homo sapiens
  CDR3 for alpha chain variable domain of TCR clone 195119 (TRAV17, TRAJ56)
CTTDANTGANSKLTF

SEQ ID NO: 390238 - protein, 14 aa, Homo sapiens
  CDR3 for beta chain variable domain of TCR clone 195119 (TRBV19, TRBJ1-5)
CASSLGTGGQPQHF

SEQ ID NO: 390239 - protein, 15 aa, Homo sapiens
  CDR3 for alpha chain variable domain of TCR clone 195120 (TRAV13-1, TRAJ9)
CAASTLNTGGFKTIF

SEQ ID NO: 390240 - protein, 15 aa, Homo sapiens
  CDR3 for beta chain variable domain of TCR clone 195120 (TRBV7-2, TRBJ2-2)
CASRRPGQNTGELFF

SEQ ID NO: 390241 - protein, 14 aa, Homo sapiens
  CDR3 for alpha chain variable domain of TCR clone 195121 (TRAV38-2/DV8, TRAJ23)
CAYRKPNQGGKLIF

SEQ ID NO: 390242 - protein, 14 aa, Homo sapiens
  CDR3 for beta chain variable domain of TCR clone 195121 (TRBV7-2, TRBJ2-7)
CASRSQGAAYEQYF

SEQ ID NO: 390243 - protein, 15 aa, Homo sapiens
  CDR3 for alpha chain variable domain of TCR clone 195122 (TRAV12-1, TRAJ44)
CVVFVNTGTASKLTF

SEQ ID NO: 390244 - protein, 16 aa, Homo sapiens
  CDR3 for beta chain variable domain of TCR clone 195122 (TRBV7-3, TRBJ2-1)
CASSLVSGSSNNEQFF

SEQ ID NO: 390245 - protein, 14 aa, Homo sapiens
  CDR3 for alpha chain variable domain of TCR clone 195123 (TRAV29/DV5, TRAJ36)
CAARRKTGANNLFF

SEQ ID NO: 390246 - protein, 13 aa, Homo sapiens
  CDR3 for beta chain variable domain of TCR clone 195123 (TRBV6-1, TRBJ1-1)
CASSRQGNTEAFF

SEQ ID NO: 390247 - protein, 13 aa, Homo sapiens
  CDR3 for alpha chain variable domain of TCR clone 195124 (TRAV1-2, TRAJ31)
CAVRPNNNARLMF

SEQ ID NO: 390248 - protein, 13 aa, Homo sapiens
  CDR3 for beta chain variable domain of TCR clone 195124 (TRBV7-9, TRBJ1-2)
CASSLKQNYGYTF

SEQ ID NO: 390249 - protein, 13 aa, Homo sapiens
  CDR3 for alpha chain variable domain of TCR clone 195125 (TRAV21, TRAJ57)
CAVTQGGSEKLVF

SEQ ID NO: 390250 - protein, 14 aa, Homo sapiens
  CDR3 for beta chain variable domain of TCR clone 195125 (TRBV18, TRBJ2-5)
CASSPGVSKETQYF

SEQ ID NO: 390251 - protein, 10 aa, Homo sapiens
  CDR3 for alpha chain variable domain of TCR clone 195126 (TRAV12-2, TRAJ52)
RSTSYGKLTF

SEQ ID NO: 390252 - protein, 16 aa, Homo sapiens
  CDR3 for beta chain variable domain of TCR clone 195126 (TRBV20-1, TRBJ1-4)
CSAPGQGLLTNEKLFF

SEQ ID NO: 390253 - protein, 15 aa, Homo sapiens
  CDR3 for alpha chain variable domain of TCR clone 195127 (TRAV3, TRAJ22)
CAVRDRGGSSRQLTF

SEQ ID NO: 390254 - protein, 12 aa, Homo sapiens
  CDR3 for beta chain variable domain of TCR clone 195127 (TRBV5-5, TRBJ2-5)
CASSYFGETQYF

SEQ ID NO: 390255 - protein, 15 aa, Homo sapiens
  CDR3 for alpha chain variable domain of TCR clone 195128 (TRAV21, TRAJ32)
CAVNSYGGATNKLIF

SEQ ID NO: 390256 - protein, 18 aa, Homo sapiens
  CDR3 for beta chain variable domain of TCR clone 195128 (TRBV7-9, TRBJ2-1)
CASSTGLAEGSPYNEQFF

SEQ ID NO: 390257 - protein, 14 aa, Homo sapiens
  CDR3 for alpha chain variable domain of TCR clone 195129 (TRAV26-1, TRAJ24)
CIVRRVGGWGKFQI

SEQ ID NO: 390258 - protein, 16 aa, Homo sapiens
  CDR3 for beta chain variable domain of TCR clone 195129 (TRBV6-3, TRBJ2-1)
CASSYRRGDSYNEQFF

SEQ ID NO: 390259 - protein, 11 aa, Homo sapiens
  CDR3 for alpha chain variable domain of TCR clone 195130 (TRAV3, TRAJ21)
CALGNFNKFYF

SEQ ID NO: 390260 - protein, 16 aa, Homo sapiens
  CDR3 for beta chain variable domain of TCR clone 195130 (TRBV19, TRBJ2-1)
WASSKAGPSSYNEQFF

SEQ ID NO: 390261 - protein, 14 aa, Homo sapiens
  CDR3 for alpha chain variable domain of TCR clone 195131 (TRAV20, TRAJ22)
CAVALGGSARQLTF

SEQ ID NO: 390262 - protein, 15 aa, Homo sapiens
  CDR3 for beta chain variable domain of TCR clone 195131 (TRBV7-2, TRBJ1-1)
CASSFAGDRDNEAFF

SEQ ID NO: 390263 - protein, 14 aa, Homo sapiens
  CDR3 for alpha chain variable domain of TCR clone 195132 (TRAV12-2, TRAJ9)
CAANLNTGGFKTLF

SEQ ID NO: 390264 - protein, 17 aa, Homo sapiens
  CDR3 for beta chain variable domain of TCR clone 195132 (TRBV20-1, TRBJ2-2)
CSASRQVGQGYTGELFF

SEQ ID NO: 390265 - protein, 13 aa, Homo sapiens
  CDR3 for alpha chain variable domain of TCR clone 195133 (TRAV13-1, TRAJ49)
CAAMLYTGNQFYF

SEQ ID NO: 390266 - protein, 16 aa, Homo sapiens
  CDR3 for beta chain variable domain of TCR clone 195133 (TRBV20-1, TRBJ1-2)
CSASMGQGVANYGYTF

SEQ ID NO: 390267 - protein, 14 aa, Homo sapiens
  CDR3 for alpha chain variable domain of TCR clone 195134 (TRAV21, TRAJ45)
CAVSSGGGADGLTF

SEQ ID NO: 390268 - protein, 15 aa, Homo sapiens
  CDR3 for beta chain variable domain of TCR clone 195134 (TRBV7-3, TRBJ2-7)
CASSLTGQGKYEQYF

SEQ ID NO: 390269 - protein, 11 aa, Homo sapiens
  CDR3 for alpha chain variable domain of TCR clone 195135 (TRAV17, TRAJ43)
CATPRSNDMRF

SEQ ID NO: 390270 - protein, 15 aa, Homo sapiens
  CDR3 for beta chain variable domain of TCR clone 195135 (TRBV11-2, TRBJ2-1)
CASGLGTSGLNEQFF

SEQ ID NO: 390271 - protein, 14 aa, Homo sapiens
  CDR3 for alpha chain variable domain of TCR clone 195136 (TRAV3, TRAJ6)
CAVRRTGGSYIPTF

SEQ ID NO: 390272 - protein, 13 aa, Homo sapiens
  CDR3 for beta chain variable domain of TCR clone 195136 (TRBV12-5, TRBJ2-3)
CASGDRQSDTQYF

SEQ ID NO: 390273 - protein, 17 aa, Homo sapiens
  CDR3 for alpha chain variable domain of TCR clone 195137 (TRAV29/DV5, TRAJ10)
CSVLLGRATGGGNKLTF

SEQ ID NO: 390274 - protein, 18 aa, Homo sapiens
  CDR3 for beta chain variable domain of TCR clone 195137 (TRBV4-1, TRBJ2-3)
CASSHQLAGGRSTDTQYF

SEQ ID NO: 390275 - protein, 15 aa, Homo sapiens
  CDR3 for alpha chain variable domain of TCR clone 195138 (TRAV13-1, TRAJ5)
CAASKADTGRRALTF

SEQ ID NO: 390276 - protein, 16 aa, Homo sapiens
  CDR3 for beta chain variable domain of TCR clone 195138 (TRBV7-2, TRBJ2-1)
CASSLGRTRGDNEQFF

SEQ ID NO: 390277 - protein, 12 aa, Homo sapiens
  CDR3 for alpha chain variable domain of TCR clone 195139 (TRAV2, TRAJ31)
CAVEDNNARLMF

SEQ ID NO: 390278 - protein, 12 aa, Homo sapiens
  CDR3 for beta chain variable domain of TCR clone 195139 (TRBV28, TRBJ2-3)
CASSLYRGTQYF

SEQ ID NO: 390279 - protein, 16 aa, Homo sapiens
  CDR3 for alpha chain variable domain of TCR clone 195140 (TRAV30, TRAJ24)
CGTEIVDADSWWKFQF

SEQ ID NO: 390280 - protein, 14 aa, Homo sapiens
  CDR3 for beta chain variable domain of TCR clone 195140 (TRBV12-5, TRBJ2-5)
CASGSRTHQETQHF

SEQ ID NO: 390281 - protein, 14 aa, Homo sapiens
  CDR3 for alpha chain variable domain of TCR clone 195141 (TRAV1-2, TRAJ16)
CAVNRFSDGQTLLF

SEQ ID NO: 390282 - protein, 16 aa, Homo sapiens
  CDR3 for beta chain variable domain of TCR clone 195141 (TRBV7-3, TRBJ2-2)
CASSLKRGTLSGELFF

SEQ ID NO: 390283 - protein, 14 aa, Homo sapiens
  CDR3 for alpha chain variable domain of TCR clone 195142 (TRAV12-2, TRAJ40)
FAVKIPSGTYKYIF

SEQ ID NO: 390284 - protein, 15 aa, Homo sapiens
  CDR3 for beta chain variable domain of TCR clone 195142 (TRBV6-3, TRBJ2-7)
CASSSPGTVFYEQYF

SEQ ID NO: 390285 - protein, 13 aa, Homo sapiens
  CDR3 for alpha chain variable domain of TCR clone 195143 (TRAV2, TRAJ40)
RAVVTSGTYKYIF

SEQ ID NO: 390286 - protein, 14 aa, Homo sapiens
  CDR3 for beta chain variable domain of TCR clone 195143 (TRBV19, TRBJ2-1)
CASPTVVLSGEQFF

SEQ ID NO: 390287 - protein, 14 aa, Homo sapiens
  CDR3 for alpha chain variable domain of TCR clone 195144 (TRAV2, TRAJ37)
CAVDFTGNTGKLIF

SEQ ID NO: 390288 - protein, 15 aa, Homo sapiens
  CDR3 for beta chain variable domain of TCR clone 195144 (TRBV20-1, TRBJ1-1)
CSASRGVTGSTEAFF

SEQ ID NO: 390289 - protein, 15 aa, Homo sapiens
  CDR3 for alpha chain variable domain of TCR clone 195145 (TRAV1-2, TRAJ15)
CAVDIIGSAGTALIF

SEQ ID NO: 390290 - protein, 13 aa, Homo sapiens
  CDR3 for beta chain variable domain of TCR clone 195145 (TRBV20-1, TRBJ1-1)
CSAFDRENTEAFF

SEQ ID NO: 390291 - protein, 14 aa, Homo sapiens
  CDR3 for alpha chain variable domain of TCR clone 195146 (TRAV27, TRAJ49)
GAGRPEGTGNQFYF

SEQ ID NO: 390292 - protein, 14 aa, Homo sapiens
  CDR3 for beta chain variable domain of TCR clone 195146 (TRBV19, TRBJ2-1)
CASPTFVLSGEQFF

SEQ ID NO: 390293 - protein, 17 aa, Homo sapiens
  CDR3 for alpha chain variable domain of TCR clone 195147 (TRAV4, TRAJ18)
CLVGERSVGSTLGRLYF

SEQ ID NO: 390294 - protein, 15 aa, Homo sapiens
  CDR3 for beta chain variable domain of TCR clone 195147 (TRBV7-2, TRBJ2-5)
CASSLGLGGLETQYF

SEQ ID NO: 390295 - protein, 14 aa, Homo sapiens
  CDR3 for alpha chain variable domain of TCR clone 195148 (TRAV29/DV5, TRAJ34)
CAASASRETDKLIF

SEQ ID NO: 390296 - protein, 13 aa, Homo sapiens
  CDR3 for beta chain variable domain of TCR clone 195148 (TRBV10-3, TRBJ2-7)
CASKLAVNYEQYF

SEQ ID NO: 390297 - protein, 13 aa, Homo sapiens
  CDR3 for alpha chain variable domain of TCR clone 195149 (TRAV27, TRAJ49)
CATRPYTGNQFYF

SEQ ID NO: 390298 - protein, 16 aa, Homo sapiens
  CDR3 for beta chain variable domain of TCR clone 195149 (TRBV4-1, TRBJ1-2)
CASSQDAGQVLYGYTL

SEQ ID NO: 390299 - protein, 11 aa, Homo sapiens
  CDR3 for alpha chain variable domain of TCR clone 195150 (TRAV12-3, TRAJ27)
CAMANAGKSTF

SEQ ID NO: 390300 - protein, 12 aa, Homo sapiens
  CDR3 for beta chain variable domain of TCR clone 195150 (TRBV12-4, TRBJ2-7)
CASILGGYEQYF

SEQ ID NO: 390301 - protein, 14 aa, Homo sapiens
  CDR3 for alpha chain variable domain of TCR clone 195151 (TRAV14/DV4, TRAJ7)
CAMREAYWNNRLAF

SEQ ID NO: 390302 - protein, 15 aa, Homo sapiens
  CDR3 for beta chain variable domain of TCR clone 195151 (TRBV19, TRBJ2-1)
CASSINREPSHEQFF

SEQ ID NO: 390303 - protein, 12 aa, Homo sapiens
  CDR3 for alpha chain variable domain of TCR clone 195152 (TRAV21, TRAJ11)
CAATSGYSTLTF

SEQ ID NO: 390304 - protein, 17 aa, Homo sapiens
  CDR3 for beta chain variable domain of TCR clone 195152 (TRBV7-3, TRBJ2-3)
CASSLMKRMRGADTQYF

SEQ ID NO: 390305 - protein, 13 aa, Homo sapiens
  CDR3 for alpha chain variable domain of TCR clone 195153 (TRAV2, TRAJ40)
CAVGTSGTYKDIF

SEQ ID NO: 390306 - protein, 14 aa, Homo sapiens
  CDR3 for beta chain variable domain of TCR clone 195153 (TRBV19, TRBJ2-1)
CASPTFVLSGEQFF

SEQ ID NO: 390307 - protein, 12 aa, Homo sapiens
  CDR3 for alpha chain variable domain of TCR clone 195154 (TRAV1-1, TRAJ8)
CAGGTSFHKLVF

SEQ ID NO: 390308 - protein, 15 aa, Homo sapiens
  CDR3 for beta chain variable domain of TCR clone 195154 (TRBV7-9, TRBJ1-4)
CASSRTGGFNEKLFF

SEQ ID NO: 390309 - protein, 15 aa, Homo sapiens
  CDR3 for alpha chain variable domain of TCR clone 195155 (TRAV2, TRAJ42)
CAVEEYGGSQGNLIF

SEQ ID NO: 390310 - protein, 13 aa, Homo sapiens
  CDR3 for beta chain variable domain of TCR clone 195155 (TRBV4-1, TRBJ2-2)
CASSQENTGELFF

SEQ ID NO: 390311 - protein, 11 aa, Homo sapiens
  CDR3 for alpha chain variable domain of TCR clone 195156 (TRAV25, TRAJ5)
CRGGGRRALTF

SEQ ID NO: 390312 - protein, 11 aa, Homo sapiens
  CDR3 for beta chain variable domain of TCR clone 195156 (TRBV27, TRBJ2-3)
CASSLGDTQYF

SEQ ID NO: 390313 - protein, 13 aa, Homo sapiens
  CDR3 for alpha chain variable domain of TCR clone 195157 (TRAV9-2, TRAJ9)
CSLSDRGGFKTIF

SEQ ID NO: 390314 - protein, 14 aa, Homo sapiens
  CDR3 for beta chain variable domain of TCR clone 195157 (TRBV20-1, TRBJ2-2)
CSAPDTANTGELFF

SEQ ID NO: 390315 - protein, 14 aa, Homo sapiens
  CDR3 for alpha chain variable domain of TCR clone 195158 (TRAV20, TRAJ42)
CAVQAGGSPGNLIF

SEQ ID NO: 390316 - protein, 14 aa, Homo sapiens
  CDR3 for beta chain variable domain of TCR clone 195158 (TRBV28, TRBJ1-2)
CASRIQGANYGYTF

SEQ ID NO: 390317 - protein, 14 aa, Homo sapiens
  CDR3 for alpha chain variable domain of TCR clone 195159 (TRAV3, TRAJ27)
CAVRDDTNAVKSTF

SEQ ID NO: 390318 - protein, 15 aa, Homo sapiens
  CDR3 for beta chain variable domain of TCR clone 195159 (TRBV7-7, TRBJ2-2)
CATSKLAKNTGELFF

SEQ ID NO: 390319 - protein, 13 aa, Homo sapiens
  CDR3 for alpha chain variable domain of TCR clone 195160 (TRAV6, TRAJ16)
CALDDSDGQKLLF

SEQ ID NO: 390320 - protein, 13 aa, Homo sapiens
  CDR3 for beta chain variable domain of TCR clone 195160 (TRBV12-4, TRBJ1-6)
CQNLQGKGSPLHF

SEQ ID NO: 390321 - protein, 10 aa, Homo sapiens
  CDR3 for alpha chain variable domain of TCR clone 195161 (TRAV1-2, TRAJ31)
CAFFDARPMF

SEQ ID NO: 390322 - protein, 14 aa, Homo sapiens
  CDR3 for beta chain variable domain of TCR clone 195161 (TRBV10-3, TRBJ2-7)
CHQCGTSETYEQYF

SEQ ID NO: 390323 - protein, 16 aa, Homo sapiens
  CDR3 for alpha chain variable domain of TCR clone 195162 (TRAV35, TRAJ28)
CAGQRYSGAGSYQLTF

SEQ ID NO: 390324 - protein, 13 aa, Homo sapiens
  CDR3 for beta chain variable domain of TCR clone 195162 (TRBV19, TRBJ1-2)
CAGSQGQVYGYTF

SEQ ID NO: 390325 - protein, 14 aa, Homo sapiens
  CDR3 for alpha chain variable domain of TCR clone 195163 (TRAV12-3, TRAJ42)
CAMNYGGSQGNLIF

SEQ ID NO: 390326 - protein, 14 aa, Homo sapiens
  CDR3 for beta chain variable domain of TCR clone 195163 (TRBV4-2, TRBJ2-3)
CASSQERGTDTQYF

SEQ ID NO: 390327 - protein, 14 aa, Homo sapiens
  CDR3 for alpha chain variable domain of TCR clone 195164 (TRAV12-3, TRAJ58)
CAMSTETSGTRLTF

SEQ ID NO: 390328 - protein, 12 aa, Homo sapiens
  CDR3 for beta chain variable domain of TCR clone 195164 (TRBV7-8, TRBJ2-7)
CASSLGDREQYF

SEQ ID NO: 390329 - protein, 13 aa, Homo sapiens
  CDR3 for alpha chain variable domain of TCR clone 195165 (TRAV27, TRAJ45)
CRSPGGGADGLTF

SEQ ID NO: 390330 - protein, 14 aa, Homo sapiens
  CDR3 for beta chain variable domain of TCR clone 195165 (TRBV7-3, TRBJ2-1)
CASSLGTSANEQFF

SEQ ID NO: 390331 - protein, 15 aa, Homo sapiens
  CDR3 for alpha chain variable domain of TCR clone 195166 (TRAV8-3, TRAJ45)
CASSYSGGGADGLTF

SEQ ID NO: 390332 - protein, 14 aa, Homo sapiens
  CDR3 for beta chain variable domain of TCR clone 195166 (TRBV10-2, TRBJ1-5)
CASSSTGRNQPQHF

SEQ ID NO: 390333 - protein, 13 aa, Homo sapiens
  CDR3 for alpha chain variable domain of TCR clone 195167 (TRAV2, TRAJ40)
CAVVTSGTYKYIL

SEQ ID NO: 390334 - protein, 14 aa, Homo sapiens
  CDR3 for beta chain variable domain of TCR clone 195167 (TRBV19, TRBJ2-1)
CASPTFVLSGERFF

SEQ ID NO: 390335 - protein, 13 aa, Homo sapiens
  CDR3 for alpha chain variable domain of TCR clone 195168 (TRAV12-3, TRAJ7)
CAMTPYGNNRLAF

SEQ ID NO: 390336 - protein, 14 aa, Homo sapiens
  CDR3 for beta chain variable domain of TCR clone 195168 (TRBV7-6, TRBJ2-4)
CASSPAPGSFVWYF

SEQ ID NO: 390337 - protein, 11 aa, Homo sapiens
  CDR3 for alpha chain variable domain of TCR clone 195169 (TRAV16, TRAJ49)
CALRSGNQFYF

SEQ ID NO: 390338 - protein, 16 aa, Homo sapiens
  CDR3 for beta chain variable domain of TCR clone 195169 (TRBV20-1, TRBJ1-5)
RSARDVGGGWIQPQHF

SEQ ID NO: 390339 - protein, 13 aa, Homo sapiens
  CDR3 for alpha chain variable domain of TCR clone 195170 (TRAV8-6, TRAJ49)
CAVITNTGNQFYF

SEQ ID NO: 390340 - protein, 12 aa, Homo sapiens
  CDR3 for beta chain variable domain of TCR clone 195170 (TRBV5-1, TRBJ2-5)
CASSFSWETQYF

SEQ ID NO: 390341 - protein, 13 aa, Homo sapiens
  CDR3 for alpha chain variable domain of TCR clone 195171 (TRAV8-6, TRAJ49)
CAVITHTGNQFYF

SEQ ID NO: 390342 - protein, 13 aa, Homo sapiens
  CDR3 for beta chain variable domain of TCR clone 195171 (TRBV7-9, TRBJ2-7)
CASSFAGAYEQYF

SEQ ID NO: 390343 - protein, 14 aa, Homo sapiens
  CDR3 for alpha chain variable domain of TCR clone 195172 (TRAV26-1, TRAJ38)
CISDNAGNNRKLIW

SEQ ID NO: 390344 - protein, 13 aa, Homo sapiens
  CDR3 for beta chain variable domain of TCR clone 195172 (TRBV7-9, TRBJ1-2)
CASSLKQNYGYTF

SEQ ID NO: 390345 - protein, 14 aa, Homo sapiens
  CDR3 for alpha chain variable domain of TCR clone 195173 (TRAV1-2, TRAJ8)
CAVREDTGFLKLVF

SEQ ID NO: 390346 - protein, 14 aa, Homo sapiens
  CDR3 for beta chain variable domain of TCR clone 195173 (TRBV7-2, TRBJ2-7)
CASSPKTSFYEQYF

SEQ ID NO: 390347 - protein, 15 aa, Homo sapiens
  CDR3 for alpha chain variable domain of TCR clone 195174 (TRAV3, TRAJ32)
CAVSSYGGATNKLIF

SEQ ID NO: 390348 - protein, 14 aa, Homo sapiens
  CDR3 for beta chain variable domain of TCR clone 195174 (TRBV6-1, TRBJ1-3)
CASVEGGGGNTIYF

SEQ ID NO: 390349 - protein, 13 aa, Homo sapiens
  CDR3 for alpha chain variable domain of TCR clone 195175 (TRAV17, TRAJ5)
CALRGTGRRALTF

SEQ ID NO: 390350 - protein, 23 aa, Homo sapiens
  CDR3 for beta chain variable domain of TCR clone 195175 (TRBV4-2, TRBJ1-1)
PCSQKTRPCISVPAAKPNTEAFF

SEQ ID NO: 390351 - protein, 14 aa, Homo sapiens
  CDR3 for alpha chain variable domain of TCR clone 195176 (TRAV23/DV6, TRAJ17)
CAARGRAAGTKLTF

SEQ ID NO: 390352 - protein, 12 aa, Homo sapiens
  CDR3 for beta chain variable domain of TCR clone 195176 (TRBV7-9, TRBJ2-3)
CASSSITDTQYF

SEQ ID NO: 390353 - protein, 11 aa, Homo sapiens
  CDR3 for alpha chain variable domain of TCR clone 195177 (TRAV3, TRAJ21)
CAVGNFNKFYF

SEQ ID NO: 390354 - protein, 15 aa, Homo sapiens
  CDR3 for beta chain variable domain of TCR clone 195177 (TRBV11-1, TRBJ2-3)
CASSLLLASTDTQYF

SEQ ID NO: 390355 - protein, 14 aa, Homo sapiens
  CDR3 for alpha chain variable domain of TCR clone 195178 (TRAV26-1, TRAJ49)
CIVRAATGGNQFYF

SEQ ID NO: 390356 - protein, 14 aa, Homo sapiens
  CDR3 for beta chain variable domain of TCR clone 195178 (TRBV7-2, TRBJ2-7)
CASRSQGAAYEQYF

SEQ ID NO: 390357 - protein, 18 aa, Homo sapiens
  CDR3 for alpha chain variable domain of TCR clone 195179 (TRAV16, TRAJ45)
CAQASYPSTGGGADGLTF

SEQ ID NO: 390358 - protein, 12 aa, Homo sapiens
  CDR3 for beta chain variable domain of TCR clone 195179 (TRBV11-3, TRBJ2-4)
CASSAGRVIQYF

SEQ ID NO: 390359 - protein, 12 aa, Homo sapiens
  CDR3 for alpha chain variable domain of TCR clone 195180 (TRAV13-2, TRAJ8)
CAPWLGFQKLVV

SEQ ID NO: 390360 - protein, 16 aa, Homo sapiens
  CDR3 for beta chain variable domain of TCR clone 195180 (TRBV11-2, TRBJ2-7)
CASSPTTGGVSYEQYF

SEQ ID NO: 390361 - protein, 14 aa, Homo sapiens
  CDR3 for alpha chain variable domain of TCR clone 195181 (TRAV12-2, TRAJ40)
CAVKIPSGTYKYIF

SEQ ID NO: 390362 - protein, 17 aa, Homo sapiens
  CDR3 for beta chain variable domain of TCR clone 195181 (TRBV13, TRBJ2-3)
FASSLSRVAGGRNTQYF

SEQ ID NO: 390363 - protein, 14 aa, Homo sapiens
  CDR3 for alpha chain variable domain of TCR clone 195182 (TRAV1-2, TRAJ8)
CVVREDTGFQKLVF

SEQ ID NO: 390364 - protein, 16 aa, Homo sapiens
  CDR3 for beta chain variable domain of TCR clone 195182 (TRBV12-5, TRBJ2-5)
CASGPRTSGNQETQYF

SEQ ID NO: 390365 - protein, 14 aa, Homo sapiens
  CDR3 for alpha chain variable domain of TCR clone 195183 (TRAV8-4, TRAJ9)
CAVRINTGGLKTIF

SEQ ID NO: 390366 - protein, 15 aa, Homo sapiens
  CDR3 for beta chain variable domain of TCR clone 195183 (TRBV10-2, TRBJ2-6)
CASSEQGTGTNVLTF

SEQ ID NO: 390367 - protein, 18 aa, Homo sapiens
  CDR3 for alpha chain variable domain of TCR clone 195184 (TRAV21, TRAJ53)
CAVKGGENSGGSNYKLTF

SEQ ID NO: 390368 - protein, 13 aa, Homo sapiens
  CDR3 for beta chain variable domain of TCR clone 195184 (TRBV20-1, TRBJ1-5)
CSARILGNQPQHF

SEQ ID NO: 390369 - protein, 12 aa, Homo sapiens
  CDR3 for alpha chain variable domain of TCR clone 195185 (TRAV16, TRAJ27)
CALNHQCRQINL

SEQ ID NO: 390370 - protein, 14 aa, Homo sapiens
  CDR3 for beta chain variable domain of TCR clone 195185 (TRBV11-2, TRBJ1-5)
CASSLDRGRQPQNF

SEQ ID NO: 390371 - protein, 16 aa, Homo sapiens
  CDR3 for alpha chain variable domain of TCR clone 195186 (TRAV3, TRAJ37)
CAVRPHGSGNTGKPIF

SEQ ID NO: 390372 - protein, 15 aa, Homo sapiens
  CDR3 for beta chain variable domain of TCR clone 195186 (TRBV20-1, TRBJ2-7)
CSARDRVSGMDEQYF

SEQ ID NO: 390373 - protein, 13 aa, Homo sapiens
  CDR3 for alpha chain variable domain of TCR clone 195187 (TRAV23/DV6, TRAJ22)
CAPYSGSARQLTF

SEQ ID NO: 390374 - protein, 14 aa, Homo sapiens
  CDR3 for beta chain variable domain of TCR clone 195187 (TRBV20-1, TRBJ2-1)
CSAQIGGSANEQLF

SEQ ID NO: 390375 - protein, 17 aa, Homo sapiens
  CDR3 for alpha chain variable domain of TCR clone 195188 (TRAV23/DV6, TRAJ28)
CAALLAYSGAGSYQLTF

SEQ ID NO: 390376 - protein, 15 aa, Homo sapiens
  CDR3 for beta chain variable domain of TCR clone 195188 (TRBV7-2, TRBJ2-3)
CASSLRGGSTDTQYF

SEQ ID NO: 390377 - protein, 14 aa, Homo sapiens
  CDR3 for alpha chain variable domain of TCR clone 195189 (TRAV12-1, TRAJ39)
CVVNFNNAGNMLTF

SEQ ID NO: 390378 - protein, 14 aa, Homo sapiens
  CDR3 for beta chain variable domain of TCR clone 195189 (TRBV12-3, TRBJ1-1)
CASSLGTGGTEAPF

SEQ ID NO: 390379 - protein, 12 aa, Homo sapiens
  CDR3 for alpha chain variable domain of TCR clone 195190 (TRAV12-1, TRAJ34)
CVVAGATDNPIL

SEQ ID NO: 390380 - protein, 12 aa, Homo sapiens
  CDR3 for beta chain variable domain of TCR clone 195190 (TRBV7-9, TRBJ1-1)
CASSLVRGEAFF

SEQ ID NO: 390381 - protein, 13 aa, Homo sapiens
  CDR3 for alpha chain variable domain of TCR clone 195191 (TRAV9-2, TRAJ53)
CALSGGSDYKLTF

SEQ ID NO: 390382 - protein, 17 aa, Homo sapiens
  CDR3 for beta chain variable domain of TCR clone 195191 (TRBV11-2, TRBJ2-1)
CASSLYPPGVEYNEQFF

SEQ ID NO: 390383 - protein, 14 aa, Homo sapiens
  CDR3 for alpha chain variable domain of TCR clone 195192 (TRAV10, TRAJ29)
CVVSANTGNTPLVF

SEQ ID NO: 390384 - protein, 16 aa, Homo sapiens
  CDR3 for beta chain variable domain of TCR clone 195192 (TRBV29-1, TRBJ2-7)
CSVEDAEDGTAYEQYF

SEQ ID NO: 390385 - protein, 14 aa, Homo sapiens
  CDR3 for alpha chain variable domain of TCR clone 195193 (TRAV13-2, TRAJ32)
CAENYGGATNKLIF

SEQ ID NO: 390386 - protein, 17 aa, Homo sapiens
  CDR3 for beta chain variable domain of TCR clone 195193 (TRBV9, TRBJ2-2)
CASSVGGQGTDTGELFF

SEQ ID NO: 390387 - protein, 14 aa, Homo sapiens
  CDR3 for alpha chain variable domain of TCR clone 195194 (TRAV12-2, TRAJ53)
CAVKGGGSNYKLTF

SEQ ID NO: 390388 - protein, 16 aa, Homo sapiens
  CDR3 for beta chain variable domain of TCR clone 195194 (TRBV29-1, TRBJ1-2)
CSVEANRDIANYGDTF

SEQ ID NO: 390389 - protein, 18 aa, Homo sapiens
  CDR3 for alpha chain variable domain of TCR clone 195195 (TRAV12-3, TRAJ52)
CAMSVGGAGGTSYGKLTF

SEQ ID NO: 390390 - protein, 14 aa, Homo sapiens
  CDR3 for beta chain variable domain of TCR clone 195195 (TRBV7-2, TRBJ2-7)
CASRSQGVAYEQYF

SEQ ID NO: 390391 - protein, 16 aa, Homo sapiens
  CDR3 for alpha chain variable domain of TCR clone 195196 (TRAV12-2, TRAJ18)
CAVTTDRGSTLGRLYF

SEQ ID NO: 390392 - protein, 14 aa, Homo sapiens
  CDR3 for beta chain variable domain of TCR clone 195196 (TRBV4-2, TRBJ1-5)
CASSHDSINQPQHF

SEQ ID NO: 390393 - protein, 15 aa, Homo sapiens
  CDR3 for alpha chain variable domain of TCR clone 195197 (TRAV17, TRAJ57)
CATGPSQGGSDKLVF

SEQ ID NO: 390394 - protein, 16 aa, Homo sapiens
  CDR3 for beta chain variable domain of TCR clone 195197 (TRBV12-4, TRBJ1-5)
CASSRPVGGSKQPQHF

SEQ ID NO: 390395 - protein, 16 aa, Homo sapiens
  CDR3 for alpha chain variable domain of TCR clone 195198 (TRAV8-2, TRAJ48)
CVVSDVSNFGNEKLTF

SEQ ID NO: 390396 - protein, 13 aa, Homo sapiens
  CDR3 for beta chain variable domain of TCR clone 195198 (TRBV7-2, TRBJ2-3)
CASSTNTRDTQYF

SEQ ID NO: 390397 - protein, 14 aa, Homo sapiens
  CDR3 for alpha chain variable domain of TCR clone 195199 (TRAV4, TRAJ30)
CLVGDMNRDDQIIF

SEQ ID NO: 390398 - protein, 14 aa, Homo sapiens
  CDR3 for beta chain variable domain of TCR clone 195199 (TRBV19, TRBJ2-7)
CASSIQEWSYEQYF

SEQ ID NO: 390399 - protein, 21 aa, Homo sapiens
  CDR3 for alpha chain variable domain of TCR clone 195200 (TRAV1-1, TRAJ37)
CAVRDKALATQANYLWARDNF

SEQ ID NO: 390400 - protein, 14 aa, Homo sapiens
  CDR3 for beta chain variable domain of TCR clone 195200 (TRBV7-2, TRBJ2-7)
CASSPKTSFYEQYF

SEQ ID NO: 390401 - protein, 13 aa, Homo sapiens
  CDR3 for alpha chain variable domain of TCR clone 195201 (TRAV3, TRAJ20)
CAVRDTPRYKLSF

SEQ ID NO: 390402 - protein, 16 aa, Homo sapiens
  CDR3 for beta chain variable domain of TCR clone 195201 (TRBV6-5, TRBJ2-7)
CASSPGGREWTYEQYF

SEQ ID NO: 390403 - protein, 15 aa, Homo sapiens
  CDR3 for alpha chain variable domain of TCR clone 195202 (TRAV8-4, TRAJ52)
CAVSDGGTSYGKLTF

SEQ ID NO: 390404 - protein, 19 aa, Homo sapiens
  CDR3 for beta chain variable domain of TCR clone 195202 (TRBV6-6, TRBJ2-1)
AAPSQTSVYFCASSYEQFF

SEQ ID NO: 390405 - protein, 11 aa, Homo sapiens
  CDR3 for alpha chain variable domain of TCR clone 195203 (TRAV30, TRAJ23)
CGTEIAGKLIF

SEQ ID NO: 390406 - protein, 16 aa, Homo sapiens
  CDR3 for beta chain variable domain of TCR clone 195203 (TRBV7-2, TRBJ2-7)
SASTSQAASGGYEQYF

SEQ ID NO: 390407 - protein, 12 aa, Homo sapiens
  CDR3 for alpha chain variable domain of TCR clone 195204 (TRAV1-2, TRAJ33)
CAELDSNYQLIW

SEQ ID NO: 390408 - protein, 16 aa, Homo sapiens
  CDR3 for beta chain variable domain of TCR clone 195204 (TRBV6-4, TRBJ1-2)
CASSEAVGDPNYGYTF

SEQ ID NO: 390409 - protein, 15 aa, Homo sapiens
  CDR3 for alpha chain variable domain of TCR clone 195205 (TRAV8-4, TRAJ37)
CAVSTRSGNTGKLIF

SEQ ID NO: 390410 - protein, 17 aa, Homo sapiens
  CDR3 for beta chain variable domain of TCR clone 195205 (TRBV7-9, TRBJ2-3)
CASSPTVAGDLTDTQYF

SEQ ID NO: 390411 - protein, 16 aa, Homo sapiens
  CDR3 for alpha chain variable domain of TCR clone 195206 (TRAV17, TRAJ28)
CATDPRGGAGSYQLTF

SEQ ID NO: 390412 - protein, 16 aa, Homo sapiens
  CDR3 for beta chain variable domain of TCR clone 195206 (TRBV25-1, TRBJ1-1)
CASSGDRDRGRIEAFF

SEQ ID NO: 390413 - protein, 15 aa, Homo sapiens
  CDR3 for alpha chain variable domain of TCR clone 195207 (TRAV3, TRAJ13)
CAVRVYSGGYQKVTF

SEQ ID NO: 390414 - protein, 16 aa, Homo sapiens
  CDR3 for beta chain variable domain of TCR clone 195207 (TRBV12-5, TRBJ2-5)
CASGPRTSGNQETQYF

SEQ ID NO: 390415 - protein, 22 aa, Homo sapiens
  CDR3 for alpha chain variable domain of TCR clone 195208 (TRAV12-2, TRAJ32)
CSSETPSPVIQPPKSATNKLIF

SEQ ID NO: 390416 - protein, 14 aa, Homo sapiens
  CDR3 for beta chain variable domain of TCR clone 195208 (TRBV12-4, TRBJ1-1)
CASSLGTGGTEAFF

SEQ ID NO: 390417 - protein, 14 aa, Homo sapiens
  CDR3 for alpha chain variable domain of TCR clone 195209 (TRAV1-2, TRAJ16)
CAVNRFSDGQKLLF

SEQ ID NO: 390418 - protein, 13 aa, Homo sapiens
  CDR3 for beta chain variable domain of TCR clone 195209 (TRBV28, TRBJ2-2)
CASIGGLGGELFF

SEQ ID NO: 390419 - protein, 14 aa, Homo sapiens
  CDR3 for alpha chain variable domain of TCR clone 195210 (TRAV36/DV7, TRAJ44)
CCGANTGTASKLTF

SEQ ID NO: 390420 - protein, 16 aa, Homo sapiens
  CDR3 for beta chain variable domain of TCR clone 195210 (TRBV7-3, TRBJ2-2)
CASSLKRGTLSGELFF

SEQ ID NO: 390421 - protein, 14 aa, Homo sapiens
  CDR3 for alpha chain variable domain of TCR clone 195211 (TRAV13-1, TRAJ22)
CAASYAGSARQLTF

SEQ ID NO: 390422 - protein, 15 aa, Homo sapiens
  CDR3 for beta chain variable domain of TCR clone 195211 (TRBV11-1, TRBJ2-7)
CASSLNYGASYEQYF

SEQ ID NO: 390423 - protein, 11 aa, Homo sapiens
  CDR3 for alpha chain variable domain of TCR clone 195212 (TRAV1-2, TRAJ20)
CAVSNDHKLSF

SEQ ID NO: 390424 - protein, 16 aa, Homo sapiens
  CDR3 for beta chain variable domain of TCR clone 195212 (TRBV29-1, TRBJ2-6)
CSVEDITYSGANDLTF

SEQ ID NO: 390425 - protein, 20 aa, Homo sapiens
  CDR3 for alpha chain variable domain of TCR clone 195213 (TRAV12-1, TRAJ42)
SSVIQPPTSVKGGSQGNLIL

SEQ ID NO: 390426 - protein, 15 aa, Homo sapiens
  CDR3 for beta chain variable domain of TCR clone 195213 (TRBV4-1, TRBJ2-7)
CASSQNTGRFYEQYF

SEQ ID NO: 390427 - protein, 19 aa, Homo sapiens
  CDR3 for alpha chain variable domain of TCR clone 195214 (TRAV21, TRAJ41)
CAVREFRVCTQLRQRHLAF

SEQ ID NO: 390428 - protein, 15 aa, Homo sapiens
  CDR3 for beta chain variable domain of TCR clone 195214 (TRBV18, TRBJ1-5)
CASSPQARSNQPQHF

SEQ ID NO: 390429 - protein, 14 aa, Homo sapiens
  CDR3 for alpha chain variable domain of TCR clone 195215 (TRAV8-6, TRAJ29)
CAVSRASGNPPLVF

SEQ ID NO: 390430 - protein, 13 aa, Homo sapiens
  CDR3 for beta chain variable domain of TCR clone 195215 (TRBV19, TRBJ1-5)
CASSEGSSQPQHF

SEQ ID NO: 390431 - protein, 14 aa, Homo sapiens
  CDR3 for alpha chain variable domain of TCR clone 195216 (TRAV13-1, TRAJ44)
CAAKATGTASKLTL

SEQ ID NO: 390432 - protein, 16 aa, Homo sapiens
  CDR3 for beta chain variable domain of TCR clone 195216 (TRBV15, TRBJ1-2)
CATSRGPGTGGGGYTF

SEQ ID NO: 390433 - protein, 12 aa, Homo sapiens
  CDR3 for alpha chain variable domain of TCR clone 195217 (TRAV2, TRAJ9)
CAVGAGGFKTIF

SEQ ID NO: 390434 - protein, 20 aa, Homo sapiens
  CDR3 for beta chain variable domain of TCR clone 195217 (TRBV7-9, TRBJ1-5)
CISVSEAGQGAPYSNQPQHF

SEQ ID NO: 390435 - protein, 12 aa, Homo sapiens
  CDR3 for alpha chain variable domain of TCR clone 195218 (TRAV8-3, TRAJ40)
CAVTSGTYKYIF

SEQ ID NO: 390436 - protein, 14 aa, Homo sapiens
  CDR3 for beta chain variable domain of TCR clone 195218 (TRBV12-4, TRBJ2-3)
CASSGQGSTDTQYV

SEQ ID NO: 390437 - protein, 14 aa, Homo sapiens
  CDR3 for alpha chain variable domain of TCR clone 195219 (TRAV13-1, TRAJ35)
CAASRGGLGNVLHC

SEQ ID NO: 390438 - protein, 13 aa, Homo sapiens
  CDR3 for beta chain variable domain of TCR clone 195219 (TRBV7-3, TRBJ1-1)
CASSQDWGAEAFF

SEQ ID NO: 390439 - protein, 15 aa, Homo sapiens
  CDR3 for alpha chain variable domain of TCR clone 195220 (TRAV20, TRAJ37)
CCAGGGSSNTGKLIF

SEQ ID NO: 390440 - protein, 16 aa, Homo sapiens
  CDR3 for beta chain variable domain of TCR clone 195220 (TRBV19, TRBJ2-1)
CASSKAGPSSYNEQFF

SEQ ID NO: 390441 - protein, 15 aa, Homo sapiens
  CDR3 for alpha chain variable domain of TCR clone 195221 (TRAV35, TRAJ58)
CAGRRQETSGSRLTF

SEQ ID NO: 390442 - protein, 17 aa, Homo sapiens
  CDR3 for beta chain variable domain of TCR clone 195221 (TRBV2, TRBJ2-3)
CASSLSRVAGGRNTQYF

SEQ ID NO: 390443 - protein, 14 aa, Homo sapiens
  CDR3 for alpha chain variable domain of TCR clone 195222 (TRAV16, TRAJ33)
RALSAMDSNYQLIW

SEQ ID NO: 390444 - protein, 14 aa, Homo sapiens
  CDR3 for beta chain variable domain of TCR clone 195222 (TRBV25-1, TRBJ1-1)
CASTHLGGNTKAFF

SEQ ID NO: 390445 - protein, 12 aa, Homo sapiens
  CDR3 for alpha chain variable domain of TCR clone 195223 (TRAV3, TRAJ39)
CAVIEWSNMLTF

SEQ ID NO: 390446 - protein, 15 aa, Homo sapiens
  CDR3 for beta chain variable domain of TCR clone 195223 (TRBV5-1, TRBJ2-7)
CASSLNGGPAREQYF

SEQ ID NO: 390447 - protein, 12 aa, Homo sapiens
  CDR3 for alpha chain variable domain of TCR clone 195224 (TRAV13-1, TRAJ53)
CAAGGSNYKLTF

SEQ ID NO: 390448 - protein, 15 aa, Homo sapiens
  CDR3 for beta chain variable domain of TCR clone 195224 (TRBV7-2, TRBJ2-1)
CASSSGLAGSNEQFF

SEQ ID NO: 390449 - protein, 11 aa, Homo sapiens
  CDR3 for alpha chain variable domain of TCR clone 195225 (TRAV12-3, TRAJ49)
CAANTGNQFYF

SEQ ID NO: 390450 - protein, 11 aa, Homo sapiens
  CDR3 for beta chain variable domain of TCR clone 195225 (TRBV12-4, TRBJ2-3)
CASTATDTQYF

SEQ ID NO: 390451 - protein, 14 aa, Homo sapiens
  CDR3 for alpha chain variable domain of TCR clone 195226 (TRAV29/DV5, TRAJ36)
CAARRKTGANNLFF

SEQ ID NO: 390452 - protein, 14 aa, Homo sapiens
  CDR3 for beta chain variable domain of TCR clone 195226 (TRBV7-8, TRBJ1-2)
CASSPDSLSYGYTF

SEQ ID NO: 390453 - protein, 13 aa, Homo sapiens
  CDR3 for alpha chain variable domain of TCR clone 195227 (TRAV9-2, TRAJ53)
CALSGGSNYKLTF

SEQ ID NO: 390454 - protein, 15 aa, Homo sapiens
  CDR3 for beta chain variable domain of TCR clone 195227 (TRBV7-2, TRBJ1-2)
CASSPRAGWNYGYTF

SEQ ID NO: 390455 - protein, 15 aa, Homo sapiens
  CDR3 for alpha chain variable domain of TCR clone 195228 (TRAV35, TRAJ22)
CAGTISSGSARQLTF

SEQ ID NO: 390456 - protein, 19 aa, Homo sapiens
  CDR3 for beta chain variable domain of TCR clone 195228 (TRBV25-1, TRBJ2-2)
CAILVYRVDRGRKTGELFF

SEQ ID NO: 390457 - protein, 16 aa, Homo sapiens
  CDR3 for alpha chain variable domain of TCR clone 195229 (TRAV13-1, TRAJ37)
CAASSLGSSNTVKLIF

SEQ ID NO: 390458 - protein, 12 aa, Homo sapiens
  CDR3 for beta chain variable domain of TCR clone 195229 (TRBV6-1, TRBJ2-5)
CASSEGRETQYF

SEQ ID NO: 390459 - protein, 15 aa, Homo sapiens
  CDR3 for alpha chain variable domain of TCR clone 195230 (TRAV8-3, TRAJ40)
CAVGPYTSGTYKNIF

SEQ ID NO: 390460 - protein, 16 aa, Homo sapiens
  CDR3 for beta chain variable domain of TCR clone 195230 (TRBV7-2, TRBJ2-7)
CASSLDPGGGSGGQYF

SEQ ID NO: 390461 - protein, 11 aa, Homo sapiens
  CDR3 for alpha chain variable domain of TCR clone 195231 (TRAV12-1, TRAJ21)
CVVYNVNKFYF

SEQ ID NO: 390462 - protein, 16 aa, Homo sapiens
  CDR3 for beta chain variable domain of TCR clone 195231 (TRBV6-5, TRBJ2-7)
CASSYFRVGISDEQYF

SEQ ID NO: 390463 - protein, 12 aa, Homo sapiens
  CDR3 for alpha chain variable domain of TCR clone 195232 (TRAV8-3, TRAJ41)
CAVALSGYALNF

SEQ ID NO: 390464 - protein, 18 aa, Homo sapiens
  CDR3 for beta chain variable domain of TCR clone 195232 (TRBV20-1, TRBJ2-6)
CSADTTPTHGSGANVLTF

SEQ ID NO: 390465 - protein, 12 aa, Homo sapiens
  CDR3 for alpha chain variable domain of TCR clone 195233 (TRAV22, TRAJ36)
CAVGTGANNLFF

SEQ ID NO: 390466 - protein, 13 aa, Homo sapiens
  CDR3 for beta chain variable domain of TCR clone 195233 (TRBV27, TRBJ2-7)
CASSFSQGYEQYF

SEQ ID NO: 390467 - protein, 13 aa, Homo sapiens
  CDR3 for alpha chain variable domain of TCR clone 195234 (TRAV8-4, TRAJ27)
CAVSPRNAGKSTF

SEQ ID NO: 390468 - protein, 14 aa, Homo sapiens
  CDR3 for beta chain variable domain of TCR clone 195234 (TRBV7-9, TRBJ2-1)
CASSDNSGYNEQFF

SEQ ID NO: 390469 - protein, 13 aa, Homo sapiens
  CDR3 for alpha chain variable domain of TCR clone 195235 (TRAV13-2, TRAJ40)
CAEFTSGTYKYIF

SEQ ID NO: 390470 - protein, 15 aa, Homo sapiens
  CDR3 for beta chain variable domain of TCR clone 195235 (TRBV12-4, TRBJ1-2)
CASSKTAGAIYGYTF

SEQ ID NO: 390471 - protein, 15 aa, Homo sapiens
  CDR3 for alpha chain variable domain of TCR clone 195236 (TRAV3, TRAJ22)
CAVRDRGGSARQLTF

SEQ ID NO: 390472 - protein, 17 aa, Homo sapiens
  CDR3 for beta chain variable domain of TCR clone 195236 (TRBV28, TRBJ2-5)
CASSTPEGDVLQETQYF

SEQ ID NO: 390473 - protein, 14 aa, Homo sapiens
  CDR3 for alpha chain variable domain of TCR clone 195237 (TRAV1-2, TRAJ8)
CAVREDTGFQKLVF

SEQ ID NO: 390474 - protein, 15 aa, Homo sapiens
  CDR3 for beta chain variable domain of TCR clone 195237 (TRBV6-1, TRBJ2-3)
CASSERGGTTDTQYF

SEQ ID NO: 390475 - protein, 13 aa, Homo sapiens
  CDR3 for alpha chain variable domain of TCR clone 195238 (TRAV21, TRAJ27)
CAARPGNAGKSTF

SEQ ID NO: 390476 - protein, 14 aa, Homo sapiens
  CDR3 for beta chain variable domain of TCR clone 195238 (TRBV7-9, TRBJ2-5)
CASSLVGGEETQYF

SEQ ID NO: 390477 - protein, 11 aa, Homo sapiens
  CDR3 for alpha chain variable domain of TCR clone 195239 (TRAV12-3, TRAJ43)
CAMSVSNDMRF

SEQ ID NO: 390478 - protein, 16 aa, Homo sapiens
  CDR3 for beta chain variable domain of TCR clone 195239 (TRBV12-4, TRBJ2-3)
CASSSPSGGGTDTQYF

SEQ ID NO: 390479 - protein, 14 aa, Homo sapiens
  CDR3 for alpha chain variable domain of TCR clone 195240 (TRAV16, TRAJ32)
CALKSGGAPNKLIF

SEQ ID NO: 390480 - protein, 17 aa, Homo sapiens
  CDR3 for beta chain variable domain of TCR clone 195240 (TRBV20-1, TRBJ2-1)
CSASSSGLAGSYNEQFF

SEQ ID NO: 390481 - protein, 15 aa, Homo sapiens
  CDR3 for alpha chain variable domain of TCR clone 195241 (TRAV26-1, TRAJ56)
CIVRVDNGANSKLTF

SEQ ID NO: 390482 - protein, 16 aa, Homo sapiens
  CDR3 for beta chain variable domain of TCR clone 195241 (TRBV11-2, TRBJ2-2)
CASSLRTGNLIGELFF

SEQ ID NO: 390483 - protein, 18 aa, Homo sapiens
  CDR3 for alpha chain variable domain of TCR clone 195242 (TRAV21, TRAJ52)
CAVRPSPAGGTSYGNLTF

SEQ ID NO: 390484 - protein, 13 aa, Homo sapiens
  CDR3 for beta chain variable domain of TCR clone 195242 (TRBV10-3, TRBJ2-1)
CAISEFSGREQFF

SEQ ID NO: 390485 - protein, 18 aa, Homo sapiens
  CDR3 for alpha chain variable domain of TCR clone 195243 (TRAV12-3, TRAJ52)
CAMSVGGAGGTSYVKLTF

SEQ ID NO: 390486 - protein, 16 aa, Homo sapiens
  CDR3 for beta chain variable domain of TCR clone 195243 (TRBV2, TRBJ2-1)
CASSVGGSLSYNEQFF

SEQ ID NO: 390487 - protein, 13 aa, Homo sapiens
  CDR3 for alpha chain variable domain of TCR clone 195244 (TRAV21, TRAJ27)
CAARPGNAGKSTF

SEQ ID NO: 390488 - protein, 14 aa, Homo sapiens
  CDR3 for beta chain variable domain of TCR clone 195244 (TRBV13, TRBJ2-5)
CASSLERVGETQYF

SEQ ID NO: 390489 - protein, 15 aa, Homo sapiens
  CDR3 for alpha chain variable domain of TCR clone 195245 (TRAV23/DV6, TRAJ33)
CSASNSGGGNYQLIR

SEQ ID NO: 390490 - protein, 14 aa, Homo sapiens
  CDR3 for beta chain variable domain of TCR clone 195245 (TRBV7-2, TRBJ2-7)
CASSLYPGRYEQYF

SEQ ID NO: 390491 - protein, 13 aa, Homo sapiens
  CDR3 for alpha chain variable domain of TCR clone 195246 (TRAV3, TRAJ36)
CAVRDTGANKLFF

SEQ ID NO: 390492 - protein, 15 aa, Homo sapiens
  CDR3 for beta chain variable domain of TCR clone 195246 (TRBV24-1, TRBJ2-1)
CATSGSGGFYNEQFF

SEQ ID NO: 390493 - protein, 14 aa, Homo sapiens
  CDR3 for alpha chain variable domain of TCR clone 195247 (TRAV1-2, TRAJ16)
CVGRSASDGQKLLF

SEQ ID NO: 390494 - protein, 17 aa, Homo sapiens
  CDR3 for beta chain variable domain of TCR clone 195247 (TRBV7-3, TRBJ2-3)
CASSLMKRMRGADTQYF

SEQ ID NO: 390495 - protein, 14 aa, Homo sapiens
  CDR3 for alpha chain variable domain of TCR clone 195248 (TRAV2, TRAJ20)
CAVDLRKHDYKLSF

SEQ ID NO: 390496 - protein, 15 aa, Homo sapiens
  CDR3 for beta chain variable domain of TCR clone 195248 (TRBV11-3, TRBJ2-7)
CASSLLSGSAYEQYF

SEQ ID NO: 390497 - protein, 12 aa, Homo sapiens
  CDR3 for alpha chain variable domain of TCR clone 195249 (TRAV29/DV5, TRAJ49)
CAATDTGNQFYF

SEQ ID NO: 390498 - protein, 19 aa, Homo sapiens
  CDR3 for beta chain variable domain of TCR clone 195249 (TRBV25-1, TRBJ2-2)
CGILVYRVDRGRKTGEPFF

SEQ ID NO: 390499 - protein, 14 aa, Homo sapiens
  CDR3 for alpha chain variable domain of TCR clone 195250 (TRAV4, TRAJ20)
CLVGDFINDYKLSF

SEQ ID NO: 390500 - protein, 15 aa, Homo sapiens
  CDR3 for beta chain variable domain of TCR clone 195250 (TRBV6-5, TRBJ1-1)
CTSSYLRGSVPEAFF

SEQ ID NO: 390501 - protein, 14 aa, Homo sapiens
  CDR3 for alpha chain variable domain of TCR clone 195251 (TRAV3, TRAJ6)
CAVRDWGGSYIPTF

SEQ ID NO: 390502 - protein, 17 aa, Homo sapiens
  CDR3 for beta chain variable domain of TCR clone 195251 (TRBV6-5, TRBJ2-1)
CASRLSGGFESYNEQFF

SEQ ID NO: 390503 - protein, 14 aa, Homo sapiens
  CDR3 for alpha chain variable domain of TCR clone 195252 (TRAV23/DV6, TRAJ5)
CAAKRPAGRRALPF

SEQ ID NO: 390504 - protein, 13 aa, Homo sapiens
  CDR3 for beta chain variable domain of TCR clone 195252 (TRBV25-1, TRBJ2-7)
CASSEDGDYEQYF

SEQ ID NO: 390505 - protein, 14 aa, Homo sapiens
  CDR3 for alpha chain variable domain of TCR clone 195253 (TRAV12-2, TRAJ53)
CAVKGGGGNYKLTF

SEQ ID NO: 390506 - protein, 14 aa, Homo sapiens
  CDR3 for beta chain variable domain of TCR clone 195253 (TRBV7-7, TRBJ2-2)
CATRQDSDTGELFF

SEQ ID NO: 390507 - protein, 14 aa, Homo sapiens
  CDR3 for alpha chain variable domain of TCR clone 195254 (TRAV1-2, TRAJ37)
CAVRSKSNTGKLIF

SEQ ID NO: 390508 - protein, 14 aa, Homo sapiens
  CDR3 for beta chain variable domain of TCR clone 195254 (TRBV6-3, TRBJ1-2)
CASSEGRGSYGYTF

SEQ ID NO: 390509 - protein, 18 aa, Homo sapiens
  CDR3 for alpha chain variable domain of TCR clone 195255 (TRAV8-3, TRAJ44)
CAVVPLIPALPVNSTLGL

SEQ ID NO: 390510 - protein, 15 aa, Homo sapiens
  CDR3 for beta chain variable domain of TCR clone 195255 (TRBV27, TRBJ1-5)
CASTFNRGSNQPQHF

SEQ ID NO: 390511 - protein, 13 aa, Homo sapiens
  CDR3 for alpha chain variable domain of TCR clone 195256 (TRAV8-6, TRAJ13)
CAVSSGGYQKVTF

SEQ ID NO: 390512 - protein, 15 aa, Homo sapiens
  CDR3 for beta chain variable domain of TCR clone 195256 (TRBV7-9, TRBJ2-7)
CASSLPMGQANKQYF

SEQ ID NO: 390513 - protein, 12 aa, Homo sapiens
  CDR3 for alpha chain variable domain of TCR clone 195257 (TRAV13-1, TRAJ21)
CAAKEGFNKFYF

SEQ ID NO: 390514 - protein, 15 aa, Homo sapiens
  CDR3 for beta chain variable domain of TCR clone 195257 (TRBV7-3, TRBJ2-2)
CASSATGQGTGELFF

SEQ ID NO: 390515 - protein, 13 aa, Homo sapiens
  CDR3 for alpha chain variable domain of TCR clone 195258 (TRAV12-3, TRAJ13)
CAMTSGGYQKVTF

SEQ ID NO: 390516 - protein, 13 aa, Homo sapiens
  CDR3 for beta chain variable domain of TCR clone 195258 (TRBV20-1, TRBJ2-2)
CSSLSGGAGELFF

SEQ ID NO: 390517 - protein, 12 aa, Homo sapiens
  CDR3 for alpha chain variable domain of TCR clone 195259 (TRAV8-6, TRAJ4)
CAVSDHPNKLIF

SEQ ID NO: 390518 - protein, 14 aa, Homo sapiens
  CDR3 for beta chain variable domain of TCR clone 195259 (TRBV20-1, TRBJ2-5)
CSAHRQGLWETQYF

SEQ ID NO: 390519 - protein, 12 aa, Homo sapiens
  CDR3 for alpha chain variable domain of TCR clone 195260 (TRAV23/DV6, TRAJ43)
CAASYIKGDMRF

SEQ ID NO: 390520 - protein, 15 aa, Homo sapiens
  CDR3 for beta chain variable domain of TCR clone 195260 (TRBV9, TRBJ2-1)
CASSLAGSSYNEQFF

SEQ ID NO: 390521 - protein, 13 aa, Homo sapiens
  CDR3 for alpha chain variable domain of TCR clone 195261 (TRAV30, TRAJ24)
CGTVTDSWGKLQF

SEQ ID NO: 390522 - protein, 15 aa, Homo sapiens
  CDR3 for beta chain variable domain of TCR clone 195261 (TRBV4-1, TRBJ2-1)
CASSQGPGNYNEQFF

SEQ ID NO: 390523 - protein, 15 aa, Homo sapiens
  CDR3 for alpha chain variable domain of TCR clone 195262 (TRAV3, TRAJ3)
CAVRDMSSSASKIIF

SEQ ID NO: 390524 - protein, 14 aa, Homo sapiens
  CDR3 for beta chain variable domain of TCR clone 195262 (TRBV12-4, TRBJ1-1)
CASSLGTGGTEAFF

SEQ ID NO: 390525 - protein, 11 aa, Homo sapiens
  CDR3 for alpha chain variable domain of TCR clone 195263 (TRAV2, TRAJ16)
CPVGDGQKLLF

SEQ ID NO: 390526 - protein, 15 aa, Homo sapiens
  CDR3 for beta chain variable domain of TCR clone 195263 (TRBV11-2, TRBJ2-1)
CASSPAGQSLNEQFF

SEQ ID NO: 390527 - protein, 14 aa, Homo sapiens
  CDR3 for alpha chain variable domain of TCR clone 195264 (TRAV12-1, TRAJ12)
CVVNGRDSSYKLIC

SEQ ID NO: 390528 - protein, 13 aa, Homo sapiens
  CDR3 for beta chain variable domain of TCR clone 195264 (TRBV28, TRBJ2-2)
CASIRESTGELFF

SEQ ID NO: 390529 - protein, 16 aa, Homo sapiens
  CDR3 for alpha chain variable domain of TCR clone 195265 (TRAV23/DV6, TRAJ57)
CAASSTLSPAGSEKLV

SEQ ID NO: 390530 - protein, 14 aa, Homo sapiens
  CDR3 for beta chain variable domain of TCR clone 195265 (TRBV25-1, TRBJ1-1)
CASTHLGGNTEAFF

SEQ ID NO: 390531 - protein, 12 aa, Homo sapiens
  CDR3 for alpha chain variable domain of TCR clone 195266 (TRAV4, TRAJ34)
CLVGAGTDKLIF

SEQ ID NO: 390532 - protein, 13 aa, Homo sapiens
  CDR3 for beta chain variable domain of TCR clone 195266 (TRBV2, TRBJ2-7)
CATSMGLVYEQYF

SEQ ID NO: 390533 - protein, 14 aa, Homo sapiens
  CDR3 for alpha chain variable domain of TCR clone 195267 (TRAV2, TRAJ9)
CAVEDRSGGFKAIF

SEQ ID NO: 390534 - protein, 14 aa, Homo sapiens
  CDR3 for beta chain variable domain of TCR clone 195267 (TRBV18, TRBJ1-5)
CASSRQQRNQPQHF

SEQ ID NO: 390535 - protein, 14 aa, Homo sapiens
  CDR3 for alpha chain variable domain of TCR clone 195268 (TRAV16, TRAJ33)
CALSAMYSNYQLIW

SEQ ID NO: 390536 - protein, 13 aa, Homo sapiens
  CDR3 for beta chain variable domain of TCR clone 195268 (TRBV20-1, TRBJ2-5)
CSAREAFQETQYF

SEQ ID NO: 390537 - protein, 14 aa, Homo sapiens
  CDR3 for alpha chain variable domain of TCR clone 195269 (TRAV38-2/DV8, TRAJ29)
CAYRSWSGNTPLVF

SEQ ID NO: 390538 - protein, 17 aa, Homo sapiens
  CDR3 for beta chain variable domain of TCR clone 195269 (TRBV6-1, TRBJ1-2)
CASSGTHSQRGNYGYTF

SEQ ID NO: 390539 - protein, 13 aa, Homo sapiens
  CDR3 for alpha chain variable domain of TCR clone 195270 (TRAV13-2, TRAJ48)
CAEMDFGNEKLTF

SEQ ID NO: 390540 - protein, 14 aa, Homo sapiens
  CDR3 for beta chain variable domain of TCR clone 195270 (TRBV15, TRBJ2-3)
CATRSGTSTDTHDF

SEQ ID NO: 390541 - protein, 16 aa, Homo sapiens
  CDR3 for alpha chain variable domain of TCR clone 195271 (TRAV3, TRAJ37)
CAVRERGSGNTGKLIF

SEQ ID NO: 390542 - protein, 13 aa, Homo sapiens
  CDR3 for beta chain variable domain of TCR clone 195271 (TRBV14, TRBJ2-7)
CASSQDRRGEQYF

SEQ ID NO: 390543 - protein, 13 aa, Homo sapiens
  CDR3 for alpha chain variable domain of TCR clone 195272 (TRAV13-2, TRAJ40)
CAETLSGTYKYIF

SEQ ID NO: 390544 - protein, 16 aa, Homo sapiens
  CDR3 for beta chain variable domain of TCR clone 195272 (TRBV20-1, TRBJ2-1)
CSARDFSRRIGDEQFF

SEQ ID NO: 390545 - protein, 14 aa, Homo sapiens
  CDR3 for alpha chain variable domain of TCR clone 195273 (TRAV27, TRAJ22)
CAGLPSGSARQLTF

SEQ ID NO: 390546 - protein, 12 aa, Homo sapiens
  CDR3 for beta chain variable domain of TCR clone 195273 (TRBV7-2, TRBJ1-6)
CASSLSSSPLHF

SEQ ID NO: 390547 - protein, 15 aa, Homo sapiens
  CDR3 for alpha chain variable domain of TCR clone 195274 (TRAV2, TRAJ37)
CAVGDGSSNTGKLIF

SEQ ID NO: 390548 - protein, 13 aa, Homo sapiens
  CDR3 for beta chain variable domain of TCR clone 195274 (TRBV20-1, TRBJ2-7)
CSAQTGRSYEQYF

SEQ ID NO: 390549 - protein, 17 aa, Homo sapiens
  CDR3 for alpha chain variable domain of TCR clone 195275 (TRAV4, TRAJ18)
CLVGERSVGSTLGRLYF

SEQ ID NO: 390550 - protein, 13 aa, Homo sapiens
  CDR3 for beta chain variable domain of TCR clone 195275 (TRBV4-1, TRBJ2-2)
CASSQENTGELIF

SEQ ID NO: 390551 - protein, 16 aa, Homo sapiens
  CDR3 for alpha chain variable domain of TCR clone 195276 (TRAV26-2, TRAJ13)
CILRRRGSGGYQKGTF

SEQ ID NO: 390552 - protein, 12 aa, Homo sapiens
  CDR3 for beta chain variable domain of TCR clone 195276 (TRBV18, TRBJ1-4)
CASSPSREKLFF

SEQ ID NO: 390553 - protein, 14 aa, Homo sapiens
  CDR3 for alpha chain variable domain of TCR clone 195277 (TRAV2, TRAJ9)
SAVEDRSGGFKTIF

SEQ ID NO: 390554 - protein, 13 aa, Homo sapiens
  CDR3 for beta chain variable domain of TCR clone 195277 (TRBV7-3, TRBJ1-1)
CASSQDWGAEASF

SEQ ID NO: 390555 - protein, 15 aa, Homo sapiens
  CDR3 for alpha chain variable domain of TCR clone 195278 (TRAV27, TRAJ38)
CAARRNAGNNRKLIW

SEQ ID NO: 390556 - protein, 13 aa, Homo sapiens
  CDR3 for beta chain variable domain of TCR clone 195278 (TRBV12-5, TRBJ2-3)
CASGDGQSDTRYF

SEQ ID NO: 390557 - protein, 14 aa, Homo sapiens
  CDR3 for alpha chain variable domain of TCR clone 195279 (TRAV12-2, TRAJ13)
CAAKKTGGYQEVTF

SEQ ID NO: 390558 - protein, 15 aa, Homo sapiens
  CDR3 for beta chain variable domain of TCR clone 195279 (TRBV6-6, TRBJ1-1)
CASSYPTAMNTEAFF

SEQ ID NO: 390559 - protein, 16 aa, Homo sapiens
  CDR3 for alpha chain variable domain of TCR clone 195280 (TRAV20, TRAJ38)
CAVQASNACNNRKPIW

SEQ ID NO: 390560 - protein, 16 aa, Homo sapiens
  CDR3 for beta chain variable domain of TCR clone 195280 (TRBV7-8, TRBJ2-6)
CASRVGDSSGANVLTF

SEQ ID NO: 390561 - protein, 14 aa, Homo sapiens
  CDR3 for alpha chain variable domain of TCR clone 195281 (TRAV2, TRAJ37)
CAVEDQGNTGKLIF

SEQ ID NO: 390562 - protein, 14 aa, Homo sapiens
  CDR3 for beta chain variable domain of TCR clone 195281 (TRBV18, TRBJ2-1)
CASSPQGRFDEQFF

SEQ ID NO: 390563 - protein, 14 aa, Homo sapiens
  CDR3 for alpha chain variable domain of TCR clone 195282 (TRAV1-2, TRAJ16)
CAVNRLSDGQKLLV

SEQ ID NO: 390564 - protein, 13 aa, Homo sapiens
  CDR3 for beta chain variable domain of TCR clone 195282 (TRBV20-1, TRBJ1-1)
CSARLGQGTEAFF

SEQ ID NO: 390565 - protein, 11 aa, Homo sapiens
  CDR3 for alpha chain variable domain of TCR clone 195283 (TRAV21, TRAJ11)
CAVTGYSTLTF

SEQ ID NO: 390566 - protein, 11 aa, Homo sapiens
  CDR3 for beta chain variable domain of TCR clone 195283 (TRBV11-2, TRBJ2-7)
CASSSDYEQYF

SEQ ID NO: 390567 - protein, 13 aa, Homo sapiens
  CDR3 for alpha chain variable domain of TCR clone 195284 (TRAV8-4, TRAJ9)
CAVSETGGFKTIF

SEQ ID NO: 390568 - protein, 14 aa, Homo sapiens
  CDR3 for beta chain variable domain of TCR clone 195284 (TRBV18, TRBJ2-3)
CASSGLADTDSQYF

SEQ ID NO: 390569 - protein, 12 aa, Homo sapiens
  CDR3 for alpha chain variable domain of TCR clone 195285 (TRAV17, TRAJ57)
CAKDGGSEKLVF

SEQ ID NO: 390570 - protein, 12 aa, Homo sapiens
  CDR3 for beta chain variable domain of TCR clone 195285 (TRBV29-1, TRBJ2-2)
CSVDKYTGELFF

SEQ ID NO: 390571 - protein, 12 aa, Homo sapiens
  CDR3 for alpha chain variable domain of TCR clone 195286 (TRAV12-2, TRAJ21)
CAVNRNFNKFYF

SEQ ID NO: 390572 - protein, 12 aa, Homo sapiens
  CDR3 for beta chain variable domain of TCR clone 195286 (TRBV11-2, TRBJ2-2)
CASSLPTGELFF

SEQ ID NO: 390573 - protein, 16 aa, Homo sapiens
  CDR3 for alpha chain variable domain of TCR clone 195287 (TRAV3, TRAJ37)
CAVRPHGSGNTGKLIF

SEQ ID NO: 390574 - protein, 14 aa, Homo sapiens
  CDR3 for beta chain variable domain of TCR clone 195287 (TRBV20-1, TRBJ2-7)
CSARGGSSYNEQFF

SEQ ID NO: 390575 - protein, 11 aa, Homo sapiens
  CDR3 for alpha chain variable domain of TCR clone 195288 (TRAV12-1, TRAJ31)
CVGRVQCQTHV

SEQ ID NO: 390576 - protein, 16 aa, Homo sapiens
  CDR3 for beta chain variable domain of TCR clone 195288 (TRBV13, TRBJ2-3)
CQQPLQGSGGRNTQYF

SEQ ID NO: 390577 - protein, 13 aa, Homo sapiens
  CDR3 for alpha chain variable domain of TCR clone 195289 (TRAV17, TRAJ13)
CATDSGGYQKVTS

SEQ ID NO: 390578 - protein, 14 aa, Homo sapiens
  CDR3 for beta chain variable domain of TCR clone 195289 (TRBV11-1, TRBJ2-7)
CASSFRQGSYEQYF

SEQ ID NO: 390579 - protein, 14 aa, Homo sapiens
  CDR3 for alpha chain variable domain of TCR clone 195290 (TRAV12-2, TRAJ40)
CAVKIPSGTYKYIF

SEQ ID NO: 390580 - protein, 16 aa, Homo sapiens
  CDR3 for beta chain variable domain of TCR clone 195290 (TRBV6-6, TRBJ1-5)
CASSYSTLVGNQPQHF

SEQ ID NO: 390581 - protein, 11 aa, Homo sapiens
  CDR3 for alpha chain variable domain of TCR clone 195291 (TRAV2, TRAJ33)
CAVESNYQLIW

SEQ ID NO: 390582 - protein, 16 aa, Homo sapiens
  CDR3 for beta chain variable domain of TCR clone 195291 (TRBV7-2, TRBJ2-3)
CASSPRTGVSTDTQYF

SEQ ID NO: 390583 - protein, 13 aa, Homo sapiens
  CDR3 for alpha chain variable domain of TCR clone 195292 (TRAV29/DV5, TRAJ29)
CAASAAGNTPLVF

SEQ ID NO: 390584 - protein, 16 aa, Homo sapiens
  CDR3 for beta chain variable domain of TCR clone 195292 (TRBV6-6, TRBJ2-3)
CASSYLKATSTDTQYF

SEQ ID NO: 390585 - protein, 14 aa, Homo sapiens
  CDR3 for alpha chain variable domain of TCR clone 195293 (TRAV12-2, TRAJ13)
CAVKKTGGYRKVTF

SEQ ID NO: 390586 - protein, 15 aa, Homo sapiens
  CDR3 for beta chain variable domain of TCR clone 195293 (TRBV28, TRBJ2-1)
CASSIIAGGRSEQFF

SEQ ID NO: 390587 - protein, 14 aa, Homo sapiens
  CDR3 for alpha chain variable domain of TCR clone 195294 (TRAV27, TRAJ17)
CRSTIRAAGNELTF

SEQ ID NO: 390588 - protein, 16 aa, Homo sapiens
  CDR3 for beta chain variable domain of TCR clone 195294 (TRBV5-7, TRBJ2-5)
CASTLAPAGGRETQYF

SEQ ID NO: 390589 - protein, 12 aa, Homo sapiens
  CDR3 for alpha chain variable domain of TCR clone 195295 (TRAV3, TRAJ27)
CAVRDGAGKPTF

SEQ ID NO: 390590 - protein, 15 aa, Homo sapiens
  CDR3 for beta chain variable domain of TCR clone 195295 (TRBV13, TRBJ2-2)
CASGYRGRRTGELFF

SEQ ID NO: 390591 - protein, 14 aa, Homo sapiens
  CDR3 for alpha chain variable domain of TCR clone 195296 (TRAV12-2, TRAJ17)
CAALFKAAGNKLTF

SEQ ID NO: 390592 - protein, 15 aa, Homo sapiens
  CDR3 for beta chain variable domain of TCR clone 195296 (TRBV11-2, TRBJ2-1)
CASSSPSTRYNEQFF

SEQ ID NO: 390593 - protein, 12 aa, Homo sapiens
  CDR3 for alpha chain variable domain of TCR clone 195297 (TRAV23/DV6, TRAJ30)
CAASKGDDKIIF

SEQ ID NO: 390594 - protein, 18 aa, Homo sapiens
  CDR3 for beta chain variable domain of TCR clone 195297 (TRBV10-3, TRBJ2-3)
CAISESTVGPMRGDTQYF

SEQ ID NO: 390595 - protein, 14 aa, Homo sapiens
  CDR3 for alpha chain variable domain of TCR clone 195298 (TRAV9-2, TRAJ39)
CALYIYNAGNMLTF

SEQ ID NO: 390596 - protein, 17 aa, Homo sapiens
  CDR3 for beta chain variable domain of TCR clone 195298 (TRBV28, TRBJ2-5)
CASSTPEGEALQETQYF

SEQ ID NO: 390597 - protein, 17 aa, Homo sapiens
  CDR3 for alpha chain variable domain of TCR clone 195299 (TRAV3, TRAJ38)
CAVRGCLNAGNNGKLIW

SEQ ID NO: 390598 - protein, 16 aa, Homo sapiens
  CDR3 for beta chain variable domain of TCR clone 195299 (TRBV20-1, TRBJ1-4)
CSAPGQGLLTNEKLFF

SEQ ID NO: 390599 - protein, 16 aa, Homo sapiens
  CDR3 for alpha chain variable domain of TCR clone 195300 (TRAV35, TRAJ20)
CWADPSSGFNDSKLSF

SEQ ID NO: 390600 - protein, 16 aa, Homo sapiens
  CDR3 for beta chain variable domain of TCR clone 195300 (TRBV4-3, TRBJ1-6)
CASSAQPGGEGSPLHF

SEQ ID NO: 390601 - protein, 16 aa, Homo sapiens
  CDR3 for alpha chain variable domain of TCR clone 195301 (TRAV14/DV4, TRAJ53)
CAMREGGGGSNYKPTF

SEQ ID NO: 390602 - protein, 18 aa, Homo sapiens
  CDR3 for beta chain variable domain of TCR clone 195301 (TRBV18, TRBJ1-3)
CASSPRGGAGPSGNTIDF

SEQ ID NO: 390603 - protein, 12 aa, Homo sapiens
  CDR3 for alpha chain variable domain of TCR clone 195302 (TRAV17, TRAJ29)
CYASSGNAPLVF

SEQ ID NO: 390604 - protein, 17 aa, Homo sapiens
  CDR3 for beta chain variable domain of TCR clone 195302 (TRBV20-1, TRBJ2-2)
CSASGSGQGGLTGELFF

SEQ ID NO: 390605 - protein, 12 aa, Homo sapiens
  CDR3 for alpha chain variable domain of TCR clone 195303 (TRAV16, TRAJ22)
CVLEVSARQLTF

SEQ ID NO: 390606 - protein, 14 aa, Homo sapiens
  CDR3 for beta chain variable domain of TCR clone 195303 (TRBV11-2, TRBJ2-3)
CASSSIASTDTQYF

SEQ ID NO: 390607 - protein, 14 aa, Homo sapiens
  CDR3 for alpha chain variable domain of TCR clone 195304 (TRAV12-3, TRAJ54)
CAMRIIQGAQKLVF

SEQ ID NO: 390608 - protein, 16 aa, Homo sapiens
  CDR3 for beta chain variable domain of TCR clone 195304 (TRBV28, TRBJ2-1)
CASRGPASGRIGEQFF

SEQ ID NO: 390609 - protein, 12 aa, Homo sapiens
  CDR3 for alpha chain variable domain of TCR clone 195305 (TRAV35, TRAJ20)
CAVPTLVAELTT

SEQ ID NO: 390610 - protein, 16 aa, Homo sapiens
  CDR3 for beta chain variable domain of TCR clone 195305 (TRBV4-3, TRBJ1-6)
CASSAQPGGEGSPLHF

SEQ ID NO: 390611 - protein, 15 aa, Homo sapiens
  CDR3 for alpha chain variable domain of TCR clone 195306 (TRAV26-1, TRAJ29)
CIVRVEGSGNTPLVF

SEQ ID NO: 390612 - protein, 13 aa, Homo sapiens
  CDR3 for beta chain variable domain of TCR clone 195306 (TRBV28, TRBJ1-1)
CASSKQGWTEDFF

SEQ ID NO: 390613 - protein, 12 aa, Homo sapiens
  CDR3 for alpha chain variable domain of TCR clone 195307 (TRAV3, TRAJ27)
CAVSDKAGKSTF

SEQ ID NO: 390614 - protein, 14 aa, Homo sapiens
  CDR3 for beta chain variable domain of TCR clone 195307 (TRBV5-1, TRBJ1-2)
CASSVDSTNYGYTF

SEQ ID NO: 390615 - protein, 11 aa, Homo sapiens
  CDR3 for alpha chain variable domain of TCR clone 195308 (TRAV2, TRAJ13)
CASGGYQKVTF

SEQ ID NO: 390616 - protein, 15 aa, Homo sapiens
  CDR3 for beta chain variable domain of TCR clone 195308 (TRBV29-1, TRBJ2-1)
FSGRDRKSSYNEQFF

SEQ ID NO: 390617 - protein, 13 aa, Homo sapiens
  CDR3 for alpha chain variable domain of TCR clone 195309 (TRAV12-1, TRAJ16)
CVVNGPHGQKLLF

SEQ ID NO: 390618 - protein, 13 aa, Homo sapiens
  CDR3 for beta chain variable domain of TCR clone 195309 (TRBV2, TRBJ1-1)
CARNPTGGFHAFF

SEQ ID NO: 390619 - protein, 22 aa, Homo sapiens
  CDR3 for alpha chain variable domain of TCR clone 195310 (TRAV25, TRAJ13)
TATQTTDVGTFLDSGGYQKVTF

SEQ ID NO: 390620 - protein, 13 aa, Homo sapiens
  CDR3 for beta chain variable domain of TCR clone 195310 (TRBV7-9, TRBJ1-2)
CASSPKTGYGYTF

SEQ ID NO: 390621 - protein, 11 aa, Homo sapiens
  CDR3 for alpha chain variable domain of TCR clone 195311 (TRAV13-1, TRAJ39)
CASHAGNMLTF

SEQ ID NO: 390622 - protein, 14 aa, Homo sapiens
  CDR3 for beta chain variable domain of TCR clone 195311 (TRBV7-9, TRBJ2-1)
CASSPRDSLYEQFF

SEQ ID NO: 390623 - protein, 13 aa, Homo sapiens
  CDR3 for alpha chain variable domain of TCR clone 195312 (TRAV2, TRAJ40)
CAVVTSGTYKYIF

SEQ ID NO: 390624 - protein, 12 aa, Homo sapiens
  CDR3 for beta chain variable domain of TCR clone 195312 (TRBV2, TRBJ2-1)
CAKREGYNEQFF

SEQ ID NO: 390625 - protein, 14 aa, Homo sapiens
  CDR3 for alpha chain variable domain of TCR clone 195313 (TRAV2, TRAJ9)
CGVEDRSGGFKTIF

SEQ ID NO: 390626 - protein, 12 aa, Homo sapiens
  CDR3 for beta chain variable domain of TCR clone 195313 (TRBV12-4, TRBJ2-4)
CASSSSGNIQYF

SEQ ID NO: 390627 - protein, 11 aa, Homo sapiens
  CDR3 for alpha chain variable domain of TCR clone 195314 (TRAV2, TRAJ13)
CASGGYQKVTF

SEQ ID NO: 390628 - protein, 18 aa, Homo sapiens
  CDR3 for beta chain variable domain of TCR clone 195314 (TRBV11-3, TRBJ2-1)
CASSSYPGGRDSYNEQFF

SEQ ID NO: 390629 - protein, 15 aa, Homo sapiens
  CDR3 for alpha chain variable domain of TCR clone 195315 (TRAV27, TRAJ38)
CAARRNAGNNSKLIC

SEQ ID NO: 390630 - protein, 13 aa, Homo sapiens
  CDR3 for beta chain variable domain of TCR clone 195315 (TRBV12-5, TRBJ2-3)
CASGDRQSDTQYF

SEQ ID NO: 390631 - protein, 12 aa, Homo sapiens
  CDR3 for alpha chain variable domain of TCR clone 195316 (TRAV12-2, TRAJ31)
CAVNTPDARLIF

SEQ ID NO: 390632 - protein, 17 aa, Homo sapiens
  CDR3 for beta chain variable domain of TCR clone 195316 (TRBV20-1, TRBJ1-6)
CSARGGYTFSDNSPLHF

SEQ ID NO: 390633 - protein, 14 aa, Homo sapiens
  CDR3 for alpha chain variable domain of TCR clone 195317 (TRAV29/DV5, TRAJ28)
CAARAGAGSYQLTF

SEQ ID NO: 390634 - protein, 14 aa, Homo sapiens
  CDR3 for beta chain variable domain of TCR clone 195317 (TRBV7-2, TRBJ2-7)
CASSPKTSFYEQYF

SEQ ID NO: 390635 - protein, 14 aa, Homo sapiens
  CDR3 for alpha chain variable domain of TCR clone 195318 (TRAV12-2, TRAJ45)
CAVYSGGGADGLTF

SEQ ID NO: 390636 - protein, 15 aa, Homo sapiens
  CDR3 for beta chain variable domain of TCR clone 195318 (TRBV7-2, TRBJ2-1)
CASSSGVAGGNEQFF

SEQ ID NO: 390637 - protein, 15 aa, Homo sapiens
  CDR3 for alpha chain variable domain of TCR clone 195319 (TRAV8-4, TRAJ40)
CAVSSITPGTYKYIF

SEQ ID NO: 390638 - protein, 13 aa, Homo sapiens
  CDR3 for beta chain variable domain of TCR clone 195319 (TRBV2, TRBJ2-1)
CATSRGTDNEQFF

SEQ ID NO: 390639 - protein, 14 aa, Homo sapiens
  CDR3 for alpha chain variable domain of TCR clone 195320 (TRAV12-2, TRAJ13)
CAVKKTGGYQKVTF

SEQ ID NO: 390640 - protein, 15 aa, Homo sapiens
  CDR3 for beta chain variable domain of TCR clone 195320 (TRBV27, TRBJ2-1)
CGHSKGGGSSNEQFF

SEQ ID NO: 390641 - protein, 11 aa, Homo sapiens
  CDR3 for alpha chain variable domain of TCR clone 195321 (TRAV1-1, TRAJ23)
CAVRQGGKLIF

SEQ ID NO: 390642 - protein, 20 aa, Homo sapiens
  CDR3 for beta chain variable domain of TCR clone 195321 (TRBV7-8, TRBJ2-2)
CASSHLCPGTTIHITGELFF

SEQ ID NO: 390643 - protein, 12 aa, Homo sapiens
  CDR3 for alpha chain variable domain of TCR clone 195322 (TRAV12-1, TRAJ40)
CWVYSGTYKYIF

SEQ ID NO: 390644 - protein, 18 aa, Homo sapiens
  CDR3 for beta chain variable domain of TCR clone 195322 (TRBV11-2, TRBJ2-3)
CASSLGGASRGAPNTQYF

SEQ ID NO: 390645 - protein, 16 aa, Homo sapiens
  CDR3 for alpha chain variable domain of TCR clone 195323 (TRAV8-3, TRAJ44)
CAVGASNTGTASKLTF

SEQ ID NO: 390646 - protein, 15 aa, Homo sapiens
  CDR3 for beta chain variable domain of TCR clone 195323 (TRBV27, TRBJ1-5)
CASTFHRGSNQPQHF

SEQ ID NO: 390647 - protein, 14 aa, Homo sapiens
  CDR3 for alpha chain variable domain of TCR clone 195324 (TRAV4, TRAJ26)
CLVGAHNYGQNFVF

SEQ ID NO: 390648 - protein, 17 aa, Homo sapiens
  CDR3 for beta chain variable domain of TCR clone 195324 (TRBV24-1, TRBJ2-1)
CATSDVSTSGTYNEQFF

SEQ ID NO: 390649 - protein, 14 aa, Homo sapiens
  CDR3 for alpha chain variable domain of TCR clone 195325 (TRAV23/DV6, TRAJ8)
CAASKNTGFKKLVF

SEQ ID NO: 390650 - protein, 16 aa, Homo sapiens
  CDR3 for beta chain variable domain of TCR clone 195325 (TRBV4-1, TRBJ2-6)
CASSQVGDPGANVLTF

SEQ ID NO: 390651 - protein, 11 aa, Homo sapiens
  CDR3 for alpha chain variable domain of TCR clone 195326 (TRAV13-1, TRAJ39)
CASHAGNMLTF

SEQ ID NO: 390652 - protein, 15 aa, Homo sapiens
  CDR3 for beta chain variable domain of TCR clone 195326 (TRBV2, TRBJ2-1)
CASSELAGSYNEQFF

SEQ ID NO: 390653 - protein, 13 aa, Homo sapiens
  CDR3 for alpha chain variable domain of TCR clone 195327 (TRAV12-3, TRAJ7)
CAMSASGNNRLAF

SEQ ID NO: 390654 - protein, 17 aa, Homo sapiens
  CDR3 for beta chain variable domain of TCR clone 195327 (TRBV13, TRBJ2-3)
CASSLSRVAGGWNTQYF

SEQ ID NO: 390655 - protein, 13 aa, Homo sapiens
  CDR3 for alpha chain variable domain of TCR clone 195328 (TRAV12-3, TRAJ7)
RAMSASGNNSLAF

SEQ ID NO: 390656 - protein, 14 aa, Homo sapiens
  CDR3 for beta chain variable domain of TCR clone 195328 (TRBV13, TRBJ2-5)
CASSLGPRGETQYF

SEQ ID NO: 390657 - protein, 17 aa, Homo sapiens
  CDR3 for alpha chain variable domain of TCR clone 195329 (TRAV12-2, TRAJ36)
CAVKDNLFFGTGTRLTF

SEQ ID NO: 390658 - protein, 15 aa, Homo sapiens
  CDR3 for beta chain variable domain of TCR clone 195329 (TRBV28, TRBJ2-2)
CASTVAGANTGELFF

SEQ ID NO: 390659 - protein, 16 aa, Homo sapiens
  CDR3 for alpha chain variable domain of TCR clone 195330 (TRAV12-2, TRAJ10)
RAVNRVLTGGGNKLTF

SEQ ID NO: 390660 - protein, 16 aa, Homo sapiens
  CDR3 for beta chain variable domain of TCR clone 195330 (TRBV12-5, TRBJ2-5)
CASGPRTSGNQETQYF

SEQ ID NO: 390661 - protein, 11 aa, Homo sapiens
  CDR3 for alpha chain variable domain of TCR clone 195331 (TRAV2, TRAJ33)
CAVESNYQLIW

SEQ ID NO: 390662 - protein, 19 aa, Homo sapiens
  CDR3 for beta chain variable domain of TCR clone 195331 (TRBV7-9, TRBJ2-6)
CASSLESATVLPGANVLTF

SEQ ID NO: 390663 - protein, 12 aa, Homo sapiens
  CDR3 for alpha chain variable domain of TCR clone 195332 (TRAV2, TRAJ9)
CAVGAGGFKTIF

SEQ ID NO: 390664 - protein, 19 aa, Homo sapiens
  CDR3 for beta chain variable domain of TCR clone 195332 (TRBV7-9, TRBJ2-6)
CASSIESATVLPGANVLTF

SEQ ID NO: 390665 - protein, 15 aa, Homo sapiens
  CDR3 for alpha chain variable domain of TCR clone 195333 (TRAV27, TRAJ38)
CTGRFNAGNNRKLIW

SEQ ID NO: 390666 - protein, 13 aa, Homo sapiens
  CDR3 for beta chain variable domain of TCR clone 195333 (TRBV20-1, TRBJ1-1)
CSARVGGNTEAFF

SEQ ID NO: 390667 - protein, 23 aa, Homo sapiens
  CDR3 for alpha chain variable domain of TCR clone 195334 (TRAV6, TRAJ34)
ISQPPSLQTQLPTSVPYTDKLIF

SEQ ID NO: 390668 - protein, 16 aa, Homo sapiens
  CDR3 for beta chain variable domain of TCR clone 195334 (TRBV18, TRBJ1-5)
CASSPRTGGGNQPQHF

SEQ ID NO: 390669 - protein, 13 aa, Homo sapiens
  CDR3 for alpha chain variable domain of TCR clone 195335 (TRAV12-1, TRAJ13)
CVVGTGGYQKVTF

SEQ ID NO: 390670 - protein, 14 aa, Homo sapiens
  CDR3 for beta chain variable domain of TCR clone 195335 (TRBV7-3, TRBJ2-1)
CASSLAGGTNEQFF

SEQ ID NO: 390671 - protein, 12 aa, Homo sapiens
  CDR3 for alpha chain variable domain of TCR clone 195336 (TRAV12-1, TRAJ32)
CVVKGATNKLIF

SEQ ID NO: 390672 - protein, 15 aa, Homo sapiens
  CDR3 for beta chain variable domain of TCR clone 195336 (TRBV20-1, TRBJ2-3)
CSASGTSGYTVTQYF

SEQ ID NO: 390673 - protein, 14 aa, Homo sapiens
  CDR3 for alpha chain variable domain of TCR clone 195337 (TRAV9-2, TRAJ39)
CALYIYNEGNMLTF

SEQ ID NO: 390674 - protein, 16 aa, Homo sapiens
  CDR3 for beta chain variable domain of TCR clone 195337 (TRBV29-1, TRBJ2-6)
CSVEDITYSGANVLTF

SEQ ID NO: 390675 - protein, 14 aa, Homo sapiens
  CDR3 for alpha chain variable domain of TCR clone 195338 (TRAV12-2, TRAJ5)
CAVNRSTGRKALTF

SEQ ID NO: 390676 - protein, 15 aa, Homo sapiens
  CDR3 for beta chain variable domain of TCR clone 195338 (TRBV11-2, TRBJ1-3)
CASSLSPLVRDTIYF

SEQ ID NO: 390677 - protein, 15 aa, Homo sapiens
  CDR3 for alpha chain variable domain of TCR clone 195339 (TRAV17, TRAJ10)
CATVLRTGGGNKLTF

SEQ ID NO: 390678 - protein, 14 aa, Homo sapiens
  CDR3 for beta chain variable domain of TCR clone 195339 (TRBV12-5, TRBJ2-7)
CASGQTGNSYEQYF

SEQ ID NO: 390679 - protein, 14 aa, Homo sapiens
  CDR3 for alpha chain variable domain of TCR clone 195340 (TRAV13-1, TRAJ35)
CAASKGGFGNVLHC

SEQ ID NO: 390680 - protein, 16 aa, Homo sapiens
  CDR3 for beta chain variable domain of TCR clone 195340 (TRBV7-3, TRBJ2-1)
CASSLSSGGGAKEQFF

SEQ ID NO: 390681 - protein, 10 aa, Homo sapiens
  CDR3 for alpha chain variable domain of TCR clone 195341 (TRAV12-3, TRAJ49)
CAMNDDQFYF

SEQ ID NO: 390682 - protein, 15 aa, Homo sapiens
  CDR3 for beta chain variable domain of TCR clone 195341 (TRBV27, TRBJ2-1)
CASSLARGAYNEQFF

SEQ ID NO: 390683 - protein, 15 aa, Homo sapiens
  CDR3 for alpha chain variable domain of TCR clone 195342 (TRAV13-1, TRAJ52)
SYYNAGGTSYGKLTF

SEQ ID NO: 390684 - protein, 14 aa, Homo sapiens
  CDR3 for beta chain variable domain of TCR clone 195342 (TRBV4-1, TRBJ2-7)
CASSPVAGGDEQYF

SEQ ID NO: 390685 - protein, 16 aa, Homo sapiens
  CDR3 for alpha chain variable domain of TCR clone 195343 (TRAV30, TRAJ24)
CGTEIVDADSWGKFQF

SEQ ID NO: 390686 - protein, 16 aa, Homo sapiens
  CDR3 for beta chain variable domain of TCR clone 195343 (TRBV12-5, TRBJ2-5)
CASGPRTSGNKETQYF

SEQ ID NO: 390687 - protein, 13 aa, Homo sapiens
  CDR3 for alpha chain variable domain of TCR clone 195344 (TRAV13-1, TRAJ39)
CAASIWAGNMLTF

SEQ ID NO: 390688 - protein, 15 aa, Homo sapiens
  CDR3 for beta chain variable domain of TCR clone 195344 (TRBV20-1, TRBJ1-1)
CCASRGVTGNTEAFF

SEQ ID NO: 390689 - protein, 16 aa, Homo sapiens
  CDR3 for alpha chain variable domain of TCR clone 195345 (TRAV2, TRAJ20)
TTVLWIFRSNDYKLSF

SEQ ID NO: 390690 - protein, 12 aa, Homo sapiens
  CDR3 for beta chain variable domain of TCR clone 195345 (TRBV7-6, TRBJ2-3)
CASSTGTDTQYF

SEQ ID NO: 390691 - protein, 14 aa, Homo sapiens
  CDR3 for alpha chain variable domain of TCR clone 195346 (TRAV26-1, TRAJ38)
CIADNAGNNRKLIL

SEQ ID NO: 390692 - protein, 20 aa, Homo sapiens
  CDR3 for beta chain variable domain of TCR clone 195346 (TRBV4-1, TRBJ2-2)
CASSQASPPGLASNTGELFF

SEQ ID NO: 390693 - protein, 14 aa, Homo sapiens
  CDR3 for alpha chain variable domain of TCR clone 195347 (TRAV16, TRAJ13)
CALSRSGGYQKVNF

SEQ ID NO: 390694 - protein, 14 aa, Homo sapiens
  CDR3 for beta chain variable domain of TCR clone 195347 (TRBV2, TRBJ2-7)
CASTVGRSSYEQYF

SEQ ID NO: 390695 - protein, 14 aa, Homo sapiens
  CDR3 for alpha chain variable domain of TCR clone 195348 (TRAV9-2, TRAJ13)
CALSPSGGYQKVTF

SEQ ID NO: 390696 - protein, 13 aa, Homo sapiens
  CDR3 for beta chain variable domain of TCR clone 195348 (TRBV12-4, TRBJ1-1)
CASSFGEDTEAFF

SEQ ID NO: 390697 - protein, 12 aa, Homo sapiens
  CDR3 for alpha chain variable domain of TCR clone 195349 (TRAV13-2, TRAJ23)
CAERHRGGKLIF

SEQ ID NO: 390698 - protein, 11 aa, Homo sapiens
  CDR3 for beta chain variable domain of TCR clone 195349 (TRBV29-1, TRBJ2-5)
CSEERPGTQYF

SEQ ID NO: 390699 - protein, 14 aa, Homo sapiens
  CDR3 for alpha chain variable domain of TCR clone 195350 (TRAV13-1, TRAJ15)
CAASTNQAGTALIF

SEQ ID NO: 390700 - protein, 11 aa, Homo sapiens
  CDR3 for beta chain variable domain of TCR clone 195350 (TRBV7-2, TRBJ2-1)
CASSLWDNEFF

SEQ ID NO: 390701 - protein, 13 aa, Homo sapiens
  CDR3 for alpha chain variable domain of TCR clone 195351 (TRAV38-2/DV8, TRAJ45)
CAYVGGGADGLTF

SEQ ID NO: 390702 - protein, 13 aa, Homo sapiens
  CDR3 for beta chain variable domain of TCR clone 195351 (TRBV29-1, TRBJ2-1)
CSVEGGRVNEQFL

SEQ ID NO: 390703 - protein, 15 aa, Homo sapiens
  CDR3 for alpha chain variable domain of TCR clone 195352 (TRAV21, TRAJ53)
CATLNSGSSNYKLTF

SEQ ID NO: 390704 - protein, 13 aa, Homo sapiens
  CDR3 for beta chain variable domain of TCR clone 195352 (TRBV27, TRBJ1-1)
CASSVSANTEAFF

SEQ ID NO: 390705 - protein, 16 aa, Homo sapiens
  CDR3 for alpha chain variable domain of TCR clone 195353 (TRAV16, TRAJ4)
CALSRMFSGGYNKLIF

SEQ ID NO: 390706 - protein, 16 aa, Homo sapiens
  CDR3 for beta chain variable domain of TCR clone 195353 (TRBV24-1, TRBJ2-3)
CATSDPGTGATYTQYF

SEQ ID NO: 390707 - protein, 15 aa, Homo sapiens
  CDR3 for alpha chain variable domain of TCR clone 195354 (TRAV26-1, TRAJ44)
CIVRANTGTSSKLTF

SEQ ID NO: 390708 - protein, 15 aa, Homo sapiens
  CDR3 for beta chain variable domain of TCR clone 195354 (TRBV15, TRBJ1-5)
CATSREQGGNQPQHF

SEQ ID NO: 390709 - protein, 14 aa, Homo sapiens
  CDR3 for alpha chain variable domain of TCR clone 195355 (TRAV1-2, TRAJ16)
CTVNRFSDGQKLLF

SEQ ID NO: 390710 - protein, 16 aa, Homo sapiens
  CDR3 for beta chain variable domain of TCR clone 195355 (TRBV19, TRBJ2-3)
CASSPEWDRGTDTQYF

SEQ ID NO: 390711 - protein, 18 aa, Homo sapiens
  CDR3 for alpha chain variable domain of TCR clone 195356 (TRAV26-2, TRAJ54)
CILRDVEVGIQGAQKLVF

SEQ ID NO: 390712 - protein, 16 aa, Homo sapiens
  CDR3 for beta chain variable domain of TCR clone 195356 (TRBV6-1, TRBJ2-5)
CAGSETLDRGAETQYF

SEQ ID NO: 390713 - protein, 13 aa, Homo sapiens
  CDR3 for alpha chain variable domain of TCR clone 195357 (TRAV35, TRAJ44)
CAGLSGTASKLTF

SEQ ID NO: 390714 - protein, 15 aa, Homo sapiens
  CDR3 for beta chain variable domain of TCR clone 195357 (TRBV12-4, TRBJ2-5)
CASSPPTGLQETQYF

SEQ ID NO: 390715 - protein, 17 aa, Homo sapiens
  CDR3 for alpha chain variable domain of TCR clone 195358 (TRAV3, TRAJ28)
CAVREAYSGAGSYQLTF

SEQ ID NO: 390716 - protein, 17 aa, Homo sapiens
  CDR3 for beta chain variable domain of TCR clone 195358 (TRBV13, TRBJ2-3)
CASSLSRVAGGRNTQYF

SEQ ID NO: 390717 - protein, 16 aa, Homo sapiens
  CDR3 for alpha chain variable domain of TCR clone 195359 (TRAV8-2, TRAJ7)
CAVSEGPYYGNNRLDF

SEQ ID NO: 390718 - protein, 15 aa, Homo sapiens
  CDR3 for beta chain variable domain of TCR clone 195359 (TRBV27, TRBJ2-3)
CASSLGLAATDTQYF

SEQ ID NO: 390719 - protein, 18 aa, Homo sapiens
  CDR3 for alpha chain variable domain of TCR clone 195360 (TRAV12-3, TRAJ52)
CAMSVGGAGGTSYGKLTF

SEQ ID NO: 390720 - protein, 13 aa, Homo sapiens
  CDR3 for beta chain variable domain of TCR clone 195360 (TRBV12-4, TRBJ1-5)
CASRSRGNQPQHF

SEQ ID NO: 390721 - protein, 13 aa, Homo sapiens
  CDR3 for alpha chain variable domain of TCR clone 195361 (TRAV20, TRAJ20)
CCAAGINDYKLSF

SEQ ID NO: 390722 - protein, 13 aa, Homo sapiens
  CDR3 for beta chain variable domain of TCR clone 195361 (TRBV19, TRBJ2-5)
CASSETAPETQYF

SEQ ID NO: 390723 - protein, 14 aa, Homo sapiens
  CDR3 for alpha chain variable domain of TCR clone 195362 (TRAV13-1, TRAJ35)
CAASKGGLGNVLHC

SEQ ID NO: 390724 - protein, 13 aa, Homo sapiens
  CDR3 for beta chain variable domain of TCR clone 195362 (TRBV7-3, TRBJ1-1)
CASSQEWGAEAFF

SEQ ID NO: 390725 - protein, 17 aa, Homo sapiens
  CDR3 for alpha chain variable domain of TCR clone 195363 (TRAV8-6, TRAJ58)
CAVSSWVGETSVSRLTF

SEQ ID NO: 390726 - protein, 15 aa, Homo sapiens
  CDR3 for beta chain variable domain of TCR clone 195363 (TRBV20-1, TRBJ2-7)
CSARDRVSGMDEQYF

SEQ ID NO: 390727 - protein, 14 aa, Homo sapiens
  CDR3 for alpha chain variable domain of TCR clone 195364 (TRAV12-1, TRAJ30)
CVVNIGGRDYKIIF

SEQ ID NO: 390728 - protein, 14 aa, Homo sapiens
  CDR3 for beta chain variable domain of TCR clone 195364 (TRBV7-6, TRBJ2-3)
CVSSLGTVTDTQYF

SEQ ID NO: 390729 - protein, 19 aa, Homo sapiens
  CDR3 for alpha chain variable domain of TCR clone 195365 (TRAV26-1, TRAJ38)
CIADNAGNNHIQNPDPAVY

SEQ ID NO: 390730 - protein, 17 aa, Homo sapiens
  CDR3 for beta chain variable domain of TCR clone 195365 (TRBV11-2, TRBJ2-6)
CASSQRDIFSGANVLTF

SEQ ID NO: 390731 - protein, 23 aa, Homo sapiens
  CDR3 for alpha chain variable domain of TCR clone 195366 (TRAV8-6, TRAJ38)
CAVRNAGNNHIQNPDPAVYQLRD

SEQ ID NO: 390732 - protein, 15 aa, Homo sapiens
  CDR3 for beta chain variable domain of TCR clone 195366 (TRBV4-1, TRBJ2-2)
CASSEGQGSTGELFF

SEQ ID NO: 390733 - protein, 13 aa, Homo sapiens
  CDR3 for alpha chain variable domain of TCR clone 195367 (TRAV12-2, TRAJ12)
CAGPEDSCYKLIF

SEQ ID NO: 390734 - protein, 13 aa, Homo sapiens
  CDR3 for beta chain variable domain of TCR clone 195367 (TRBV28, TRBJ2-1)
CASSLIGRDEQFF

SEQ ID NO: 390735 - protein, 13 aa, Homo sapiens
  CDR3 for alpha chain variable domain of TCR clone 195368 (TRAV1-2, TRAJ9)
CAVLNIGGFKTIF

SEQ ID NO: 390736 - protein, 15 aa, Homo sapiens
  CDR3 for beta chain variable domain of TCR clone 195368 (TRBV18, TRBJ2-1)
CASSPPSASYNEQFF

SEQ ID NO: 390737 - protein, 13 aa, Homo sapiens
  CDR3 for alpha chain variable domain of TCR clone 195369 (TRAV27, TRAJ17)
CAGAATAGTKLTF

SEQ ID NO: 390738 - protein, 12 aa, Homo sapiens
  CDR3 for beta chain variable domain of TCR clone 195369 (TRBV6-1, TRBJ2-5)
CASSEGRETQYF

SEQ ID NO: 390739 - protein, 18 aa, Homo sapiens
  CDR3 for alpha chain variable domain of TCR clone 195370 (TRAV12-3, TRAJ52)
CAMSVGGAGGTSYGKLTF

SEQ ID NO: 390740 - protein, 13 aa, Homo sapiens
  CDR3 for beta chain variable domain of TCR clone 195370 (TRBV7-3, TRBJ1-1)
CASSLTQGTEAFF

SEQ ID NO: 390741 - protein, 13 aa, Homo sapiens
  CDR3 for alpha chain variable domain of TCR clone 195371 (TRAV4, TRAJ42)
CLVGGGSQGNLIF

SEQ ID NO: 390742 - protein, 14 aa, Homo sapiens
  CDR3 for beta chain variable domain of TCR clone 195371 (TRBV25-1, TRBJ1-1)
CASTHLGGNTEAFF

SEQ ID NO: 390743 - protein, 14 aa, Homo sapiens
  CDR3 for alpha chain variable domain of TCR clone 195372 (TRAV26-2, TRAJ45)
CGGYSGGGADGLTF

SEQ ID NO: 390744 - protein, 17 aa, Homo sapiens
  CDR3 for beta chain variable domain of TCR clone 195372 (TRBV28, TRBJ2-3)
CASSPTPAGGRVDTQYS

SEQ ID NO: 390745 - protein, 15 aa, Homo sapiens
  CDR3 for alpha chain variable domain of TCR clone 195373 (TRAV26-1, TRAJ29)
CIVKVEGSGNTPLVF

SEQ ID NO: 390746 - protein, 13 aa, Homo sapiens
  CDR3 for beta chain variable domain of TCR clone 195373 (TRBV7-9, TRBJ1-2)
CASSLKQNYGYTF

SEQ ID NO: 390747 - protein, 12 aa, Homo sapiens
  CDR3 for alpha chain variable domain of TCR clone 195374 (TRAV29/DV5, TRAJ49)
CAAPDTGNQFYF

SEQ ID NO: 390748 - protein, 19 aa, Homo sapiens
  CDR3 for beta chain variable domain of TCR clone 195374 (TRBV25-1, TRBJ2-2)
CAILVYRVDRGRKTGELFF

SEQ ID NO: 390749 - protein, 13 aa, Homo sapiens
  CDR3 for alpha chain variable domain of TCR clone 195375 (TRAV8-3, TRAJ21)
CAVGAYNFNKFYF

SEQ ID NO: 390750 - protein, 16 aa, Homo sapiens
  CDR3 for beta chain variable domain of TCR clone 195375 (TRBV19, TRBJ2-1)
CASSMGGGSSYNEQFI

SEQ ID NO: 390751 - protein, 14 aa, Homo sapiens
  CDR3 for alpha chain variable domain of TCR clone 195376 (TRAV1-2, TRAJ8)
CAVREDTGFQKLVF

SEQ ID NO: 390752 - protein, 14 aa, Homo sapiens
  CDR3 for beta chain variable domain of TCR clone 195376 (TRBV11-2, TRBJ2-3)
CASSRLACTDTQYF

SEQ ID NO: 390753 - protein, 16 aa, Homo sapiens
  CDR3 for alpha chain variable domain of TCR clone 195377 (TRAV35, TRAJ28)
CAGQKYSGAGSYQLTF

SEQ ID NO: 390754 - protein, 13 aa, Homo sapiens
  CDR3 for beta chain variable domain of TCR clone 195377 (TRBV19, TRBJ1-2)
CASSQGQVYGYSF

SEQ ID NO: 390755 - protein, 14 aa, Homo sapiens
  CDR3 for alpha chain variable domain of TCR clone 195378 (TRAV38-2/DV8, TRAJ58)
CAYRSAPSGSRLTF

SEQ ID NO: 390756 - protein, 14 aa, Homo sapiens
  CDR3 for beta chain variable domain of TCR clone 195378 (TRBV11-3, TRBJ2-7)
CASSPDRNTYEQYF

SEQ ID NO: 390757 - protein, 17 aa, Homo sapiens
  CDR3 for alpha chain variable domain of TCR clone 195379 (TRAV3, TRAJ6)
CAVRDGPRAGGSYIPTF

SEQ ID NO: 390758 - protein, 20 aa, Homo sapiens
  CDR3 for beta chain variable domain of TCR clone 195379 (TRBV28, TRBJ2-1)
CASSPIGRSPGLAGGNEQCF

SEQ ID NO: 390759 - protein, 16 aa, Homo sapiens
  CDR3 for alpha chain variable domain of TCR clone 195380 (TRAV29/DV5, TRAJ22)
CAASASTSGSARQLTF

SEQ ID NO: 390760 - protein, 14 aa, Homo sapiens
  CDR3 for beta chain variable domain of TCR clone 195380 (TRBV7-9, TRBJ2-1)
CASSPRDSLYEQFF

SEQ ID NO: 390761 - protein, 12 aa, Homo sapiens
  CDR3 for alpha chain variable domain of TCR clone 195381 (TRAV23/DV6, TRAJ11)
CAASWGYSTLTF

SEQ ID NO: 390762 - protein, 15 aa, Homo sapiens
  CDR3 for beta chain variable domain of TCR clone 195381 (TRBV5-1, TRBJ2-1)
CASSPPRAPYNEQFF

SEQ ID NO: 390763 - protein, 17 aa, Homo sapiens
  CDR3 for alpha chain variable domain of TCR clone 195382 (TRAV3, TRAJ12)
CAVIDGGRMDSSYKLIF

SEQ ID NO: 390764 - protein, 13 aa, Homo sapiens
  CDR3 for beta chain variable domain of TCR clone 195382 (TRBV4-2, TRBJ1-1)
CASSQAGNTEAFF

SEQ ID NO: 390765 - protein, 15 aa, Homo sapiens
  CDR3 for alpha chain variable domain of TCR clone 195383 (TRAV21, TRAJ38)
CAVRQDAGNNRKLIC

SEQ ID NO: 390766 - protein, 16 aa, Homo sapiens
  CDR3 for beta chain variable domain of TCR clone 195383 (TRBV4-2, TRBJ1-1)
CASRPLDGGGDTEAFC

SEQ ID NO: 390767 - protein, 15 aa, Homo sapiens
  CDR3 for alpha chain variable domain of TCR clone 195384 (TRAV14/DV4, TRAJ49)
CAMREGMNTGNQFYF

SEQ ID NO: 390768 - protein, 14 aa, Homo sapiens
  CDR3 for beta chain variable domain of TCR clone 195384 (TRBV7-9, TRBJ2-1)
CASSPRDSLYEQFF

SEQ ID NO: 390769 - protein, 12 aa, Homo sapiens
  CDR3 for alpha chain variable domain of TCR clone 195385 (TRAV21, TRAJ49)
CAVNDGGNQFYF

SEQ ID NO: 390770 - protein, 11 aa, Homo sapiens
  CDR3 for beta chain variable domain of TCR clone 195385 (TRBV19, TRBJ1-1)
CASSIGSEAFF

SEQ ID NO: 390771 - protein, 14 aa, Homo sapiens
  CDR3 for alpha chain variable domain of TCR clone 195386 (TRAV8-6, TRAJ49)
CAVSDPGTGNQFYF

SEQ ID NO: 390772 - protein, 13 aa, Homo sapiens
  CDR3 for beta chain variable domain of TCR clone 195386 (TRBV7-9, TRBJ1-2)
CASSLKKNYGYTV

SEQ ID NO: 390773 - protein, 14 aa, Homo sapiens
  CDR3 for alpha chain variable domain of TCR clone 195387 (TRAV12-2, TRAJ13)
FAVEKTGGYQKVTF

SEQ ID NO: 390774 - protein, 16 aa, Homo sapiens
  CDR3 for beta chain variable domain of TCR clone 195387 (TRBV12-5, TRBJ2-7)
CASGSQGAPTSSTSGR

SEQ ID NO: 390775 - protein, 11 aa, Homo sapiens
  CDR3 for alpha chain variable domain of TCR clone 195388 (TRAV35, TRAJ30)
CAPGGDDKIIF

SEQ ID NO: 390776 - protein, 15 aa, Homo sapiens
  CDR3 for beta chain variable domain of TCR clone 195388 (TRBV28, TRBJ2-3)
CAPTFRDWSTDTQYF

SEQ ID NO: 390777 - protein, 14 aa, Homo sapiens
  CDR3 for alpha chain variable domain of TCR clone 195389 (TRAV8-3, TRAJ28)
CAVVPGAGSYQLTF

SEQ ID NO: 390778 - protein, 17 aa, Homo sapiens
  CDR3 for beta chain variable domain of TCR clone 195389 (TRBV20-1, TRBJ2-1)
CSASSSGLAGSYNEQFF

SEQ ID NO: 390779 - protein, 13 aa, Homo sapiens
  CDR3 for alpha chain variable domain of TCR clone 195390 (TRAV21, TRAJ33)
CAVAGDSNYQLIW

SEQ ID NO: 390780 - protein, 15 aa, Homo sapiens
  CDR3 for beta chain variable domain of TCR clone 195390 (TRBV19, TRBJ1-2)
CASSVGQVLNDGYTF

SEQ ID NO: 390781 - protein, 10 aa, Homo sapiens
  CDR3 for alpha chain variable domain of TCR clone 195391 (TRAV26-1, TRAJ40)
CIAGTYKYIF

SEQ ID NO: 390782 - protein, 15 aa, Homo sapiens
  CDR3 for beta chain variable domain of TCR clone 195391 (TRBV19, TRBJ2-1)
CAISSPGVPLDEQFF

SEQ ID NO: 390783 - protein, 13 aa, Homo sapiens
  CDR3 for alpha chain variable domain of TCR clone 195392 (TRAV13-2, TRAJ48)
CAEMDFGNEKLTF

SEQ ID NO: 390784 - protein, 14 aa, Homo sapiens
  CDR3 for beta chain variable domain of TCR clone 195392 (TRBV5-1, TRBJ2-7)
CASSRGESLYEQYF

SEQ ID NO: 390785 - protein, 12 aa, Homo sapiens
  CDR3 for alpha chain variable domain of TCR clone 195393 (TRAV13-1, TRAJ49)
CAASPMGNQFYF

SEQ ID NO: 390786 - protein, 12 aa, Homo sapiens
  CDR3 for beta chain variable domain of TCR clone 195393 (TRBV11-2, TRBJ2-2)
CASSLPTGELFF

SEQ ID NO: 390787 - protein, 16 aa, Homo sapiens
  CDR3 for alpha chain variable domain of TCR clone 195394 (TRAV4, TRAJ22)
CLVGDLYSCAARQLTF

SEQ ID NO: 390788 - protein, 16 aa, Homo sapiens
  CDR3 for beta chain variable domain of TCR clone 195394 (TRBV7-9, TRBJ2-1)
CASSDVAGGSYNEQFF

SEQ ID NO: 390789 - protein, 13 aa, Homo sapiens
  CDR3 for alpha chain variable domain of TCR clone 195395 (TRAV14/DV4, TRAJ4)
CAMKAGGYNKLIF

SEQ ID NO: 390790 - protein, 15 aa, Homo sapiens
  CDR3 for beta chain variable domain of TCR clone 195395 (TRBV11-3, TRBJ1-1)
CASSLGGTGDTEAFF

SEQ ID NO: 390791 - protein, 16 aa, Homo sapiens
  CDR3 for alpha chain variable domain of TCR clone 195396 (TRAV26-2, TRAJ28)
FILRPYSGAGSYQLTF

SEQ ID NO: 390792 - protein, 17 aa, Homo sapiens
  CDR3 for beta chain variable domain of TCR clone 195396 (TRBV27, TRBJ2-5)
CASRLRPGQGVQETQYF

SEQ ID NO: 390793 - protein, 11 aa, Homo sapiens
  CDR3 for alpha chain variable domain of TCR clone 195397 (TRAV8-4, TRAJ52)
AGGTSYGKLTF

SEQ ID NO: 390794 - protein, 13 aa, Homo sapiens
  CDR3 for beta chain variable domain of TCR clone 195397 (TRBV28, TRBJ2-2)
CASTGGLGGELFF

SEQ ID NO: 390795 - protein, 14 aa, Homo sapiens
  CDR3 for alpha chain variable domain of TCR clone 195398 (TRAV30, TRAJ33)
CGTVAPRSNYQLIW

SEQ ID NO: 390796 - protein, 16 aa, Homo sapiens
  CDR3 for beta chain variable domain of TCR clone 195398 (TRBV3-1, TRBJ2-5)
CASSPGQFSGFGTQYF

SEQ ID NO: 390797 - protein, 17 aa, Homo sapiens
  CDR3 for alpha chain variable domain of TCR clone 195399 (TRAV36/DV7, TRAJ42)
CAGGGMNYGGSQGNLIF

SEQ ID NO: 390798 - protein, 13 aa, Homo sapiens
  CDR3 for beta chain variable domain of TCR clone 195399 (TRBV19, TRBJ2-7)
CASRKAGGSEQYF

SEQ ID NO: 390799 - protein, 18 aa, Homo sapiens
  CDR3 for alpha chain variable domain of TCR clone 195400 (TRAV9-2, TRAJ52)
CALSRHNAGGTSYGKLTF

SEQ ID NO: 390800 - protein, 17 aa, Homo sapiens
  CDR3 for beta chain variable domain of TCR clone 195400 (TRBV6-5, TRBJ2-3)
CASSYGTSLYKSDTQYF

SEQ ID NO: 390801 - protein, 15 aa, Homo sapiens
  CDR3 for alpha chain variable domain of TCR clone 195401 (TRAV27, TRAJ38)
CAARRTAGNNRKLIW

SEQ ID NO: 390802 - protein, 16 aa, Homo sapiens
  CDR3 for beta chain variable domain of TCR clone 195401 (TRBV28, TRBJ2-7)
CASSPWVATGDLSQYF

SEQ ID NO: 390803 - protein, 14 aa, Homo sapiens
  CDR3 for alpha chain variable domain of TCR clone 195402 (TRAV1-2, TRAJ16)
CAVNRFSDGQKLLF

SEQ ID NO: 390804 - protein, 14 aa, Homo sapiens
  CDR3 for beta chain variable domain of TCR clone 195402 (TRBV12-4, TRBJ2-7)
CASSLTAGGYEQYF

SEQ ID NO: 390805 - protein, 11 aa, Homo sapiens
  CDR3 for alpha chain variable domain of TCR clone 195403 (TRAV17, TRAJ9)
CATTGGFKTIF

SEQ ID NO: 390806 - protein, 16 aa, Homo sapiens
  CDR3 for beta chain variable domain of TCR clone 195403 (TRBV25-1, TRBJ2-5)
CASSEMGSRAPETQYF

SEQ ID NO: 390807 - protein, 13 aa, Homo sapiens
  CDR3 for alpha chain variable domain of TCR clone 195404 (TRAV21, TRAJ36)
CAVIKTGANNLFF

SEQ ID NO: 390808 - protein, 13 aa, Homo sapiens
  CDR3 for beta chain variable domain of TCR clone 195404 (TRBV29-1, TRBJ2-3)
CSATQGGRDTQYF

SEQ ID NO: 390809 - protein, 14 aa, Homo sapiens
  CDR3 for alpha chain variable domain of TCR clone 195405 (TRAV12-1, TRAJ24)
CVVRSTDSWGKFQF

SEQ ID NO: 390810 - protein, 13 aa, Homo sapiens
  CDR3 for beta chain variable domain of TCR clone 195405 (TRBV14, TRBJ2-7)
CASSQDRRYEQYF

SEQ ID NO: 390811 - protein, 14 aa, Homo sapiens
  CDR3 for alpha chain variable domain of TCR clone 195406 (TRAV8-3, TRAJ39)
CAVGANNAGNMLTF

SEQ ID NO: 390812 - protein, 13 aa, Homo sapiens
  CDR3 for beta chain variable domain of TCR clone 195406 (TRBV3-1, TRBJ2-5)
CASSTVLSKTQYF

SEQ ID NO: 390813 - protein, 13 aa, Homo sapiens
  CDR3 for alpha chain variable domain of TCR clone 195407 (TRAV13-1, TRAJ5)
CAARVTGRRALTC

SEQ ID NO: 390814 - protein, 12 aa, Homo sapiens
  CDR3 for beta chain variable domain of TCR clone 195407 (TRBV3-1, TRBJ2-5)
CASSQRGETQYF

SEQ ID NO: 390815 - protein, 14 aa, Homo sapiens
  CDR3 for alpha chain variable domain of TCR clone 195408 (TRAV13-2, TRAJ17)
CAEKGKAAGNKLTF

SEQ ID NO: 390816 - protein, 13 aa, Homo sapiens
  CDR3 for beta chain variable domain of TCR clone 195408 (TRBV2, TRBJ1-5)
CATAGPGNQPQHF

SEQ ID NO: 390817 - protein, 13 aa, Homo sapiens
  CDR3 for alpha chain variable domain of TCR clone 195409 (TRAV27, TRAJ45)
CRSSGGGADGLTF

SEQ ID NO: 390818 - protein, 13 aa, Homo sapiens
  CDR3 for beta chain variable domain of TCR clone 195409 (TRBV4-1, TRBJ2-7)
CASSQGQAYEQYF

SEQ ID NO: 390819 - protein, 18 aa, Homo sapiens
  CDR3 for alpha chain variable domain of TCR clone 195410 (TRAV26-1, TRAJ44)
CIVRVAGGGVSTASKPTF

SEQ ID NO: 390820 - protein, 12 aa, Homo sapiens
  CDR3 for beta chain variable domain of TCR clone 195410 (TRBV14, TRBJ2-7)
CASSRLKGEQYF

SEQ ID NO: 390821 - protein, 17 aa, Homo sapiens
  CDR3 for alpha chain variable domain of TCR clone 195411 (TRAV3, TRAJ42)
CAVRDRDYGGSQGNLIF

SEQ ID NO: 390822 - protein, 18 aa, Homo sapiens
  CDR3 for beta chain variable domain of TCR clone 195411 (TRBV20-1, TRBJ2-3)
CSASGLAGGPGATDMQYF

SEQ ID NO: 390823 - protein, 15 aa, Homo sapiens
  CDR3 for alpha chain variable domain of TCR clone 195412 (TRAV8-3, TRAJ45)
CASSYSGGVADELTF

SEQ ID NO: 390824 - protein, 13 aa, Homo sapiens
  CDR3 for beta chain variable domain of TCR clone 195412 (TRBV10-3, TRBJ2-7)
CASKLAVNYEQYF

SEQ ID NO: 390825 - protein, 14 aa, Homo sapiens
  CDR3 for alpha chain variable domain of TCR clone 195413 (TRAV8-6, TRAJ5)
CAVSVDTGRRARTC

SEQ ID NO: 390826 - protein, 11 aa, Homo sapiens
  CDR3 for beta chain variable domain of TCR clone 195413 (TRBV7-3, TRBJ2-5)
CASSLSETQYF

SEQ ID NO: 390827 - protein, 14 aa, Homo sapiens
  CDR3 for alpha chain variable domain of TCR clone 195414 (TRAV9-2, TRAJ39)
CALYIYNAGNMLTF

SEQ ID NO: 390828 - protein, 12 aa, Homo sapiens
  CDR3 for beta chain variable domain of TCR clone 195414 (TRBV5-1, TRBJ2-5)
CASSFSWETQYF

SEQ ID NO: 390829 - protein, 14 aa, Homo sapiens
  CDR3 for alpha chain variable domain of TCR clone 195415 (TRAV8-6, TRAJ54)
CAVSPAIGAQKLVF

SEQ ID NO: 390830 - protein, 15 aa, Homo sapiens
  CDR3 for beta chain variable domain of TCR clone 195415 (TRBV4-1, TRBJ1-6)
CASSAGQGYNSPLHF

SEQ ID NO: 390831 - protein, 13 aa, Homo sapiens
  CDR3 for alpha chain variable domain of TCR clone 195416 (TRAV23/DV6, TRAJ45)
CAARRGCADGLTF

SEQ ID NO: 390832 - protein, 14 aa, Homo sapiens
  CDR3 for beta chain variable domain of TCR clone 195416 (TRBV7-2, TRBJ2-3)
CASSLARGTDTQYF

SEQ ID NO: 390833 - protein, 14 aa, Homo sapiens
  CDR3 for alpha chain variable domain of TCR clone 195417 (TRAV21, TRAJ35)
CAVMPIGFGNVLHF

SEQ ID NO: 390834 - protein, 12 aa, Homo sapiens
  CDR3 for beta chain variable domain of TCR clone 195417 (TRBV7-9, TRBJ2-7)
CARSIKREEQYF

SEQ ID NO: 390835 - protein, 12 aa, Homo sapiens
  CDR3 for alpha chain variable domain of TCR clone 195418 (TRAV13-1, TRAJ53)
AASGGSNYKLTF

SEQ ID NO: 390836 - protein, 13 aa, Homo sapiens
  CDR3 for beta chain variable domain of TCR clone 195418 (TRBV7-9, TRBJ2-5)
CASLPSGRETQYF

SEQ ID NO: 390837 - protein, 12 aa, Homo sapiens
  CDR3 for alpha chain variable domain of TCR clone 195419 (TRAV1-1, TRAJ29)
CALISGNTPLVF

SEQ ID NO: 390838 - protein, 17 aa, Homo sapiens
  CDR3 for beta chain variable domain of TCR clone 195419 (TRBV20-1, TRBJ2-2)
CSASGSGQGGLTGELFF

SEQ ID NO: 390839 - protein, 15 aa, Homo sapiens
  CDR3 for alpha chain variable domain of TCR clone 195420 (TRAV8-4, TRAJ3)
CAVSEPYTSASKLIF

SEQ ID NO: 390840 - protein, 11 aa, Homo sapiens
  CDR3 for beta chain variable domain of TCR clone 195420 (TRBV29-1, TRBJ2-5)
CSEDRTGTQYF

SEQ ID NO: 390841 - protein, 10 aa, Homo sapiens
  CDR3 for alpha chain variable domain of TCR clone 195421 (TRAV26-1, TRAJ40)
CIAGTYKYIF

SEQ ID NO: 390842 - protein, 18 aa, Homo sapiens
  CDR3 for beta chain variable domain of TCR clone 195421 (TRBV28, TRBJ2-1)
CASSSTSGRANSYNEQFF

SEQ ID NO: 390843 - protein, 13 aa, Homo sapiens
  CDR3 for alpha chain variable domain of TCR clone 195422 (TRAV27, TRAJ3)
ASLRGSSASKIIF

SEQ ID NO: 390844 - protein, 18 aa, Homo sapiens
  CDR3 for beta chain variable domain of TCR clone 195422 (TRBV7-9, TRBJ2-7)
CASSLTTSGSRTWYEQYF

SEQ ID NO: 390845 - protein, 15 aa, Homo sapiens
  CDR3 for alpha chain variable domain of TCR clone 195423 (TRAV27, TRAJ56)
CAGRDGTGANSKLTF

SEQ ID NO: 390846 - protein, 14 aa, Homo sapiens
  CDR3 for beta chain variable domain of TCR clone 195423 (TRBV7-3, TRBJ1-1)
CASSLKGGNTEAFF

SEQ ID NO: 390847 - protein, 14 aa, Homo sapiens
  CDR3 for alpha chain variable domain of TCR clone 195424 (TRAV8-4, TRAJ40)
CPVIPTSGTYKYIF

SEQ ID NO: 390848 - protein, 15 aa, Homo sapiens
  CDR3 for beta chain variable domain of TCR clone 195424 (TRBV7-2, TRBJ2-1)
CASTSASGDYNEQFF

SEQ ID NO: 390849 - protein, 13 aa, Homo sapiens
  CDR3 for alpha chain variable domain of TCR clone 195425 (TRAV12-3, TRAJ13)
CAMTSGGYQKVTF

SEQ ID NO: 390850 - protein, 13 aa, Homo sapiens
  CDR3 for beta chain variable domain of TCR clone 195425 (TRBV7-2, TRBJ1-6)
CASSLKFDSPLHF

SEQ ID NO: 390851 - protein, 13 aa, Homo sapiens
  CDR3 for alpha chain variable domain of TCR clone 195426 (TRAV13-1, TRAJ4)
CAASMGGYNKLIF

SEQ ID NO: 390852 - protein, 16 aa, Homo sapiens
  CDR3 for beta chain variable domain of TCR clone 195426 (TRBV20-1, TRBJ2-1)
CSAPGLAGSYSDEQFF

SEQ ID NO: 390853 - protein, 15 aa, Homo sapiens
  CDR3 for alpha chain variable domain of TCR clone 195427 (TRAV3, TRAJ36)
CAVRASQTGANNLFF

SEQ ID NO: 390854 - protein, 13 aa, Homo sapiens
  CDR3 for beta chain variable domain of TCR clone 195427 (TRBV14, TRBJ2-7)
CASSQDRRYEQYF

SEQ ID NO: 390855 - protein, 10 aa, Homo sapiens
  CDR3 for alpha chain variable domain of TCR clone 195428 (TRAV1-2, TRAJ23)
CAGQGGKLIF

SEQ ID NO: 390856 - protein, 15 aa, Homo sapiens
  CDR3 for beta chain variable domain of TCR clone 195428 (TRBV11-2, TRBJ1-1)
CAISQQGAGDTEAFF

SEQ ID NO: 390857 - protein, 11 aa, Homo sapiens
  CDR3 for alpha chain variable domain of TCR clone 195429 (TRAV1-2, TRAJ20)
CAVANHYKLSF

SEQ ID NO: 390858 - protein, 18 aa, Homo sapiens
  CDR3 for beta chain variable domain of TCR clone 195429 (TRBV20-1, TRBJ2-6)
CSAETTPTHGSGANVLTF

SEQ ID NO: 390859 - protein, 13 aa, Homo sapiens
  CDR3 for alpha chain variable domain of TCR clone 195430 (TRAV3, TRAJ5)
CAVREGGRRALTF

SEQ ID NO: 390860 - protein, 13 aa, Homo sapiens
  CDR3 for beta chain variable domain of TCR clone 195430 (TRBV14, TRBJ1-2)
CASSQDRRYRHTF

SEQ ID NO: 390861 - protein, 21 aa, Homo sapiens
  CDR3 for alpha chain variable domain of TCR clone 195431 (TRAV12-2, TRAJ26)
SPVIQPPTSVPRDNYGQNFVF

SEQ ID NO: 390862 - protein, 12 aa, Homo sapiens
  CDR3 for beta chain variable domain of TCR clone 195431 (TRBV28, TRBJ2-3)
CASSLYRDTQYF

SEQ ID NO: 390863 - protein, 15 aa, Homo sapiens
  CDR3 for alpha chain variable domain of TCR clone 195432 (TRAV12-3, TRAJ11)
CAMSEENSGYSTLTF

SEQ ID NO: 390864 - protein, 16 aa, Homo sapiens
  CDR3 for beta chain variable domain of TCR clone 195432 (TRBV5-1, TRBJ2-7)
CASSLAGLAGLYEQYF

SEQ ID NO: 390865 - protein, 10 aa, Homo sapiens
  CDR3 for alpha chain variable domain of TCR clone 195433 (TRAV21, TRAJ31)
CAVDNARLMF

SEQ ID NO: 390866 - protein, 16 aa, Homo sapiens
  CDR3 for beta chain variable domain of TCR clone 195433 (TRBV7-9, TRBJ1-2)
CASSLGFSSGEDGYTF

SEQ ID NO: 390867 - protein, 13 aa, Homo sapiens
  CDR3 for alpha chain variable domain of TCR clone 195434 (TRAV14/DV4, TRAJ20)
CAMRESKDYKLSF

SEQ ID NO: 390868 - protein, 15 aa, Homo sapiens
  CDR3 for beta chain variable domain of TCR clone 195434 (TRBV7-9, TRBJ1-1)
CASSRPGTANTEAFY

SEQ ID NO: 390869 - protein, 14 aa, Homo sapiens
  CDR3 for alpha chain variable domain of TCR clone 195435 (TRAV12-2, TRAJ33)
CAVKRARSNYQLIG

SEQ ID NO: 390870 - protein, 12 aa, Homo sapiens
  CDR3 for beta chain variable domain of TCR clone 195435 (TRBV24-1, TRBJ2-3)
CATSDYTDTQYF

SEQ ID NO: 390871 - protein, 12 aa, Homo sapiens
  CDR3 for alpha chain variable domain of TCR clone 195436 (TRAV17, TRAJ30)
CATDARDDKIIF

SEQ ID NO: 390872 - protein, 15 aa, Homo sapiens
  CDR3 for beta chain variable domain of TCR clone 195436 (TRBV4-1, TRBJ2-1)
CASSQGGELYNEQFY

SEQ ID NO: 390873 - protein, 15 aa, Homo sapiens
  CDR3 for alpha chain variable domain of TCR clone 195437 (TRAV20, TRAJ52)
CAVQAGGTSYGKLTF

SEQ ID NO: 390874 - protein, 13 aa, Homo sapiens
  CDR3 for beta chain variable domain of TCR clone 195437 (TRBV19, TRBJ1-1)
CASSITGESEAFF

SEQ ID NO: 390875 - protein, 14 aa, Homo sapiens
  CDR3 for alpha chain variable domain of TCR clone 195438 (TRAV3, TRAJ5)
CAVRSDTGRRALTF

SEQ ID NO: 390876 - protein, 14 aa, Homo sapiens
  CDR3 for beta chain variable domain of TCR clone 195438 (TRBV7-2, TRBJ2-3)
CASSFVMPTETQYV

SEQ ID NO: 390877 - protein, 15 aa, Homo sapiens
  CDR3 for alpha chain variable domain of TCR clone 195439 (TRAV26-1, TRAJ15)
CIVRAANQAGTALIF

SEQ ID NO: 390878 - protein, 14 aa, Homo sapiens
  CDR3 for beta chain variable domain of TCR clone 195439 (TRBV20-1, TRBJ1-1)
CSAQTRIGGTEAFF

SEQ ID NO: 390879 - protein, 13 aa, Homo sapiens
  CDR3 for alpha chain variable domain of TCR clone 195440 (TRAV12-3, TRAJ41)
CAIAPNSGYALNF

SEQ ID NO: 390880 - protein, 14 aa, Homo sapiens
  CDR3 for beta chain variable domain of TCR clone 195440 (TRBV7-2, TRBJ2-7)
CASRSQGAAYEQYF

SEQ ID NO: 390881 - protein, 14 aa, Homo sapiens
  CDR3 for alpha chain variable domain of TCR clone 195441 (TRAV21, TRAJ16)
CAVRPVSDGQKLLF

SEQ ID NO: 390882 - protein, 14 aa, Homo sapiens
  CDR3 for beta chain variable domain of TCR clone 195441 (TRBV19, TRBJ1-5)
CASSGASGNQPQHF

SEQ ID NO: 390883 - protein, 15 aa, Homo sapiens
  CDR3 for alpha chain variable domain of TCR clone 195442 (TRAV2, TRAJ24)
CAVEVLTDSWGKFQF

SEQ ID NO: 390884 - protein, 14 aa, Homo sapiens
  CDR3 for beta chain variable domain of TCR clone 195442 (TRBV19, TRBJ2-1)
CASSMGSGRRSSYS

SEQ ID NO: 390885 - protein, 23 aa, Homo sapiens
  CDR3 for alpha chain variable domain of TCR clone 195443 (TRAV30, TRAJ43)
CTLRPPSSVTQEPTAAALSDMRF

SEQ ID NO: 390886 - protein, 13 aa, Homo sapiens
  CDR3 for beta chain variable domain of TCR clone 195443 (TRBV12-4, TRBJ2-2)
CASSITGSGELFF

SEQ ID NO: 390887 - protein, 13 aa, Homo sapiens
  CDR3 for alpha chain variable domain of TCR clone 195444 (TRAV36/DV7, TRAJ32)
CAGYGGATNKLIF

SEQ ID NO: 390888 - protein, 16 aa, Homo sapiens
  CDR3 for beta chain variable domain of TCR clone 195444 (TRBV4-1, TRBJ2-7)
CASRPSGGGADNEQYF

SEQ ID NO: 390889 - protein, 16 aa, Homo sapiens
  CDR3 for alpha chain variable domain of TCR clone 195445 (TRAV26-1, TRAJ53)
CIVRVAMGGSNYELTF

SEQ ID NO: 390890 - protein, 16 aa, Homo sapiens
  CDR3 for beta chain variable domain of TCR clone 195445 (TRBV28, TRBJ2-7)
CASSLFFETGGPEQYF

SEQ ID NO: 390891 - protein, 13 aa, Homo sapiens
  CDR3 for alpha chain variable domain of TCR clone 195446 (TRAV8-3, TRAJ28)
CAVGAVGSYQLTF

SEQ ID NO: 390892 - protein, 14 aa, Homo sapiens
  CDR3 for beta chain variable domain of TCR clone 195446 (TRBV25-1, TRBJ1-1)
CASTHLGGSTEAFF

SEQ ID NO: 390893 - protein, 15 aa, Homo sapiens
  CDR3 for alpha chain variable domain of TCR clone 195447 (TRAV30, TRAJ32)
CGTEILGGATNKLIF

SEQ ID NO: 390894 - protein, 15 aa, Homo sapiens
  CDR3 for beta chain variable domain of TCR clone 195447 (TRBV11-3, TRBJ2-3)
CASLKDGREGDTQYF

SEQ ID NO: 390895 - protein, 14 aa, Homo sapiens
  CDR3 for alpha chain variable domain of TCR clone 195448 (TRAV9-2, TRAJ39)
CALYIYNAGNMLTF

SEQ ID NO: 390896 - protein, 13 aa, Homo sapiens
  CDR3 for beta chain variable domain of TCR clone 195448 (TRBV7-2, TRBJ2-7)
CASRTSSSWEQYF

SEQ ID NO: 390897 - protein, 15 aa, Homo sapiens
  CDR3 for alpha chain variable domain of TCR clone 195449 (TRAV21, TRAJ24)
CAARSSTDSWGKLQF

SEQ ID NO: 390898 - protein, 15 aa, Homo sapiens
  CDR3 for beta chain variable domain of TCR clone 195449 (TRBV4-1, TRBJ2-7)
CASSQNTGRVYEQYF

SEQ ID NO: 390899 - protein, 18 aa, Homo sapiens
  CDR3 for alpha chain variable domain of TCR clone 195450 (TRAV21, TRAJ52)
CAVRPSPAGGTIYGKLTF

SEQ ID NO: 390900 - protein, 13 aa, Homo sapiens
  CDR3 for beta chain variable domain of TCR clone 195450 (TRBV2, TRBJ1-5)
CATAGPGNQPQHF

SEQ ID NO: 390901 - protein, 15 aa, Homo sapiens
  CDR3 for alpha chain variable domain of TCR clone 195451 (TRAV3, TRAJ17)
CAVSPKETAGNKLTF

SEQ ID NO: 390902 - protein, 12 aa, Homo sapiens
  CDR3 for beta chain variable domain of TCR clone 195451 (TRBV7-9, TRBJ1-6)
CASSLMTSPLHF

SEQ ID NO: 390903 - protein, 14 aa, Homo sapiens
  CDR3 for alpha chain variable domain of TCR clone 195452 (TRAV12-2, TRAJ13)
CAVKKAGGYQKVTF

SEQ ID NO: 390904 - protein, 15 aa, Homo sapiens
  CDR3 for beta chain variable domain of TCR clone 195452 (TRBV11-1, TRBJ2-1)
CASSNGGGSSNEQFF

SEQ ID NO: 390905 - protein, 14 aa, Homo sapiens
  CDR3 for alpha chain variable domain of TCR clone 195453 (TRAV13-2, TRAJ32)
CAESLGGATNKLIF

SEQ ID NO: 390906 - protein, 16 aa, Homo sapiens
  CDR3 for beta chain variable domain of TCR clone 195453 (TRBV7-3, TRBJ2-2)
CASSLKRGTLSGELFF

SEQ ID NO: 390907 - protein, 15 aa, Homo sapiens
  CDR3 for alpha chain variable domain of TCR clone 195454 (TRAV3, TRAJ20)
CAVRDIKLSDYKLSF

SEQ ID NO: 390908 - protein, 15 aa, Homo sapiens
  CDR3 for beta chain variable domain of TCR clone 195454 (TRBV7-9, TRBJ1-6)
CAISSPGRGNSPLHF

SEQ ID NO: 390909 - protein, 15 aa, Homo sapiens
  CDR3 for alpha chain variable domain of TCR clone 195455 (TRAV25, TRAJ52)
CAGRPGGTSYGKLTF

SEQ ID NO: 390910 - protein, 13 aa, Homo sapiens
  CDR3 for beta chain variable domain of TCR clone 195455 (TRBV10-3, TRBJ2-3)
CAIRDTGADTQYF

SEQ ID NO: 390911 - protein, 13 aa, Homo sapiens
  CDR3 for alpha chain variable domain of TCR clone 195456 (TRAV2, TRAJ29)
CAAQNSGNTTLVF

SEQ ID NO: 390912 - protein, 14 aa, Homo sapiens
  CDR3 for beta chain variable domain of TCR clone 195456 (TRBV7-9, TRBJ2-4)
CASSLAMGGNIQYF

SEQ ID NO: 390913 - protein, 13 aa, Homo sapiens
  CDR3 for alpha chain variable domain of TCR clone 195457 (TRAV12-1, TRAJ33)
CGDAPDSNYQLIG

SEQ ID NO: 390914 - protein, 12 aa, Homo sapiens
  CDR3 for beta chain variable domain of TCR clone 195457 (TRBV11-2, TRBJ2-2)
CASSLGGGELFF

SEQ ID NO: 390915 - protein, 12 aa, Homo sapiens
  CDR3 for alpha chain variable domain of TCR clone 195458 (TRAV36/DV7, TRAJ30)
CAIMNRDDKIIF

SEQ ID NO: 390916 - protein, 16 aa, Homo sapiens
  CDR3 for beta chain variable domain of TCR clone 195458 (TRBV27, TRBJ2-2)
CASSSSGVSNTGELFF

SEQ ID NO: 390917 - protein, 18 aa, Homo sapiens
  CDR3 for alpha chain variable domain of TCR clone 195459 (TRAV12-3, TRAJ52)
CAMSRTNAGGTSYGKLTF

SEQ ID NO: 390918 - protein, 15 aa, Homo sapiens
  CDR3 for beta chain variable domain of TCR clone 195459 (TRBV4-1, TRBJ1-4)
CASSDTGGTNEKLFF

SEQ ID NO: 390919 - protein, 14 aa, Homo sapiens
  CDR3 for alpha chain variable domain of TCR clone 195460 (TRAV16, TRAJ17)
CALSEGAAGNKLTF

SEQ ID NO: 390920 - protein, 15 aa, Homo sapiens
  CDR3 for beta chain variable domain of TCR clone 195460 (TRBV7-9, TRBJ1-4)
CASSRTGGFNEKLFF

SEQ ID NO: 390921 - protein, 14 aa, Homo sapiens
  CDR3 for alpha chain variable domain of TCR clone 195461 (TRAV8-6, TRAJ37)
CAVRSRSNTGKLIF

SEQ ID NO: 390922 - protein, 12 aa, Homo sapiens
  CDR3 for beta chain variable domain of TCR clone 195461 (TRBV7-8, TRBJ2-7)
CASSLGDREQYF

SEQ ID NO: 390923 - protein, 13 aa, Homo sapiens
  CDR3 for alpha chain variable domain of TCR clone 195462 (TRAV13-1, TRAJ15)
CAALYQAGTALIF

SEQ ID NO: 390924 - protein, 14 aa, Homo sapiens
  CDR3 for beta chain variable domain of TCR clone 195462 (TRBV4-1, TRBJ2-2)
CASSQAVNTGELFF

SEQ ID NO: 390925 - protein, 13 aa, Homo sapiens
  CDR3 for alpha chain variable domain of TCR clone 195463 (TRAV13-2, TRAJ48)
FAEVDFGNEKLTF

SEQ ID NO: 390926 - protein, 15 aa, Homo sapiens
  CDR3 for beta chain variable domain of TCR clone 195463 (TRBV7-9, TRBJ1-6)
CASSSPGRGNSPLHF

SEQ ID NO: 390927 - protein, 14 aa, Homo sapiens
  CDR3 for alpha chain variable domain of TCR clone 195464 (TRAV14/DV4, TRAJ26)
CAMREGTYGQNFVF

SEQ ID NO: 390928 - protein, 13 aa, Homo sapiens
  CDR3 for beta chain variable domain of TCR clone 195464 (TRBV4-1, TRBJ1-1)
CASSLRGPTEAFF

SEQ ID NO: 390929 - protein, 12 aa, Homo sapiens
  CDR3 for alpha chain variable domain of TCR clone 195465 (TRAV21, TRAJ11)
CAATSGYSTLTV

SEQ ID NO: 390930 - protein, 14 aa, Homo sapiens
  CDR3 for beta chain variable domain of TCR clone 195465 (TRBV7-3, TRBJ2-2)
CASSSGGYTGELFF

SEQ ID NO: 390931 - protein, 14 aa, Homo sapiens
  CDR3 for alpha chain variable domain of TCR clone 195466 (TRAV1-1, TRAJ27)
CAVIYNTNAGKSTC

SEQ ID NO: 390932 - protein, 14 aa, Homo sapiens
  CDR3 for beta chain variable domain of TCR clone 195466 (TRBV25-1, TRBJ1-1)
CASTHLGGNTEAFF

SEQ ID NO: 390933 - protein, 15 aa, Homo sapiens
  CDR3 for alpha chain variable domain of TCR clone 195467 (TRAV1-2, TRAJ32)
CAVRGSGGATNKLIF

SEQ ID NO: 390934 - protein, 15 aa, Homo sapiens
  CDR3 for beta chain variable domain of TCR clone 195467 (TRBV25-1, TRBJ2-5)
CASSDTGTHQETQYF

SEQ ID NO: 390935 - protein, 17 aa, Homo sapiens
  CDR3 for alpha chain variable domain of TCR clone 195468 (TRAV26-1, TRAJ11)
CIVRVGQSNSGYSTLTF

SEQ ID NO: 390936 - protein, 15 aa, Homo sapiens
  CDR3 for beta chain variable domain of TCR clone 195468 (TRBV27, TRBJ2-5)
CASSLIPSGGGTQYF

SEQ ID NO: 390937 - protein, 14 aa, Homo sapiens
  CDR3 for alpha chain variable domain of TCR clone 195469 (TRAV12-3, TRAJ10)
SHLPLTGGGNKLTF

SEQ ID NO: 390938 - protein, 15 aa, Homo sapiens
  CDR3 for beta chain variable domain of TCR clone 195469 (TRBV15, TRBJ2-2)
CATSRGLADTGELFF

SEQ ID NO: 390939 - protein, 17 aa, Homo sapiens
  CDR3 for alpha chain variable domain of TCR clone 195470 (TRAV3, TRAJ22)
CALRPFISSGSARQLTF

SEQ ID NO: 390940 - protein, 16 aa, Homo sapiens
  CDR3 for beta chain variable domain of TCR clone 195470 (TRBV7-6, TRBJ2-3)
CASSPLSGGSTDTQYF

SEQ ID NO: 390941 - protein, 12 aa, Homo sapiens
  CDR3 for alpha chain variable domain of TCR clone 195471 (TRAV27, TRAJ37)
CADSGSTGKLIF

SEQ ID NO: 390942 - protein, 18 aa, Homo sapiens
  CDR3 for beta chain variable domain of TCR clone 195471 (TRBV7-9, TRBJ1-1)
CASSKPCDTMGMNTEAFF

SEQ ID NO: 390943 - protein, 16 aa, Homo sapiens
  CDR3 for alpha chain variable domain of TCR clone 195472 (TRAV26-1, TRAJ23)
CIVRVHPYNQGGKLIF

SEQ ID NO: 390944 - protein, 15 aa, Homo sapiens
  CDR3 for beta chain variable domain of TCR clone 195472 (TRBV5-7, TRBJ2-7)
CASSPSFEGSYEQYF

SEQ ID NO: 390945 - protein, 13 aa, Homo sapiens
  CDR3 for alpha chain variable domain of TCR clone 195473 (TRAV8-3, TRAJ44)
CAVVPGTASKLTF

SEQ ID NO: 390946 - protein, 13 aa, Homo sapiens
  CDR3 for beta chain variable domain of TCR clone 195473 (TRBV12-4, TRBJ2-2)
CASSITGSGELFF

SEQ ID NO: 390947 - protein, 14 aa, Homo sapiens
  CDR3 for alpha chain variable domain of TCR clone 195474 (TRAV2, TRAJ37)
CAVDFTSNTGKLIF

SEQ ID NO: 390948 - protein, 17 aa, Homo sapiens
  CDR3 for beta chain variable domain of TCR clone 195474 (TRBV18, TRBJ2-2)
CASSQRSSGQGPGELFF

SEQ ID NO: 390949 - protein, 13 aa, Homo sapiens
  CDR3 for alpha chain variable domain of TCR clone 195475 (TRAV12-3, TRAJ40)
CAMSDSGTYKYIF

SEQ ID NO: 390950 - protein, 14 aa, Homo sapiens
  CDR3 for beta chain variable domain of TCR clone 195475 (TRBV7-7, TRBJ2-2)
YATRQDSDTGELFF

SEQ ID NO: 390951 - protein, 15 aa, Homo sapiens
  CDR3 for alpha chain variable domain of TCR clone 195476 (TRAV12-3, TRAJ6)
CAMSPASGGSYIPTF

SEQ ID NO: 390952 - protein, 15 aa, Homo sapiens
  CDR3 for beta chain variable domain of TCR clone 195476 (TRBV27, TRBJ2-7)
CASSTAGTGSYEQYF

SEQ ID NO: 390953 - protein, 15 aa, Homo sapiens
  CDR3 for alpha chain variable domain of TCR clone 195477 (TRAV3, TRAJ35)
CAVRDRTGFGNVLHC

SEQ ID NO: 390954 - protein, 16 aa, Homo sapiens
  CDR3 for beta chain variable domain of TCR clone 195477 (TRBV7-3, TRBJ2-1)
CASSLEAYRSYKEQFF

SEQ ID NO: 390955 - protein, 15 aa, Homo sapiens
  CDR3 for alpha chain variable domain of TCR clone 195478 (TRAV26-1, TRAJ44)
CIVRVATGTASELTF

SEQ ID NO: 390956 - protein, 19 aa, Homo sapiens
  CDR3 for beta chain variable domain of TCR clone 195478 (TRBV11-2, TRBJ2-3)
CASSLTSGTRFRVTDTQYF

SEQ ID NO: 390957 - protein, 10 aa, Homo sapiens
  CDR3 for alpha chain variable domain of TCR clone 195479 (TRAV25, TRAJ53)
CAGSNYKMTF

SEQ ID NO: 390958 - protein, 14 aa, Homo sapiens
  CDR3 for beta chain variable domain of TCR clone 195479 (TRBV7-7, TRBJ2-7)
CASSLGRGVGEQYF

SEQ ID NO: 390959 - protein, 14 aa, Homo sapiens
  CDR3 for alpha chain variable domain of TCR clone 195480 (TRAV23/DV6, TRAJ40)
CAASLTSGTYKYIF

SEQ ID NO: 390960 - protein, 14 aa, Homo sapiens
  CDR3 for beta chain variable domain of TCR clone 195480 (TRBV5-1, TRBJ2-3)
CASSRGQCGGTQYF

SEQ ID NO: 390961 - protein, 11 aa, Homo sapiens
  CDR3 for alpha chain variable domain of TCR clone 195481 (TRAV3, TRAJ21)
CAVGHFNKFYF

SEQ ID NO: 390962 - protein, 13 aa, Homo sapiens
  CDR3 for beta chain variable domain of TCR clone 195481 (TRBV7-9, TRBJ1-2)
CASSLKQNYGYTF

SEQ ID NO: 390963 - protein, 13 aa, Homo sapiens
  CDR3 for alpha chain variable domain of TCR clone 195482 (TRAV2, TRAJ20)
CAVEDPSEYKLSF

SEQ ID NO: 390964 - protein, 14 aa, Homo sapiens
  CDR3 for beta chain variable domain of TCR clone 195482 (TRBV7-2, TRBJ2-2)
CASSSDGHTGELFF

SEQ ID NO: 390965 - protein, 17 aa, Homo sapiens
  CDR3 for alpha chain variable domain of TCR clone 195483 (TRAV8-3, TRAJ52)
CAVGAEAGGTSYGKLTF

SEQ ID NO: 390966 - protein, 15 aa, Homo sapiens
  CDR3 for beta chain variable domain of TCR clone 195483 (TRBV5-1, TRBJ2-1)
CASSPPRAPYNEQFF

SEQ ID NO: 390967 - protein, 11 aa, Homo sapiens
  CDR3 for alpha chain variable domain of TCR clone 195484 (TRAV23/DV6, TRAJ48)
CAPRWGEKLTF

SEQ ID NO: 390968 - protein, 17 aa, Homo sapiens
  CDR3 for beta chain variable domain of TCR clone 195484 (TRBV12-4, TRBJ2-3)
CASSLMKRMRGADTQYF

SEQ ID NO: 390969 - protein, 16 aa, Homo sapiens
  CDR3 for alpha chain variable domain of TCR clone 195485 (TRAV17, TRAJ52)
CATGIIVGTSYGKLTF

SEQ ID NO: 390970 - protein, 14 aa, Homo sapiens
  CDR3 for beta chain variable domain of TCR clone 195485 (TRBV7-3, TRBJ2-2)
CASSSGGYTGELFF

SEQ ID NO: 390971 - protein, 14 aa, Homo sapiens
  CDR3 for alpha chain variable domain of TCR clone 195486 (TRAV27, TRAJ37)
WAGERSSNTGKLIF

SEQ ID NO: 390972 - protein, 15 aa, Homo sapiens
  CDR3 for beta chain variable domain of TCR clone 195486 (TRBV11-3, TRBJ1-6)
CASSLDWGANSPLHF

SEQ ID NO: 390973 - protein, 13 aa, Homo sapiens
  CDR3 for alpha chain variable domain of TCR clone 195487 (TRAV36/DV7, TRAJ41)
CAVEANSGYALNF

SEQ ID NO: 390974 - protein, 16 aa, Homo sapiens
  CDR3 for beta chain variable domain of TCR clone 195487 (TRBV13, TRBJ2-7)
CASSSRESGRTYEQYF

SEQ ID NO: 390975 - protein, 12 aa, Homo sapiens
  CDR3 for alpha chain variable domain of TCR clone 195488 (TRAV21, TRAJ29)
CAVTSGNRPLVF

SEQ ID NO: 390976 - protein, 15 aa, Homo sapiens
  CDR3 for beta chain variable domain of TCR clone 195488 (TRBV10-2, TRBJ2-6)
CASSEQGTGANVLTF

SEQ ID NO: 390977 - protein, 14 aa, Homo sapiens
  CDR3 for alpha chain variable domain of TCR clone 195489 (TRAV26-1, TRAJ29)
CNVRVEPGNTPLVF

SEQ ID NO: 390978 - protein, 14 aa, Homo sapiens
  CDR3 for beta chain variable domain of TCR clone 195489 (TRBV25-1, TRBJ1-1)
CASTHLGGNTEAFF

SEQ ID NO: 390979 - protein, 16 aa, Homo sapiens
  CDR3 for alpha chain variable domain of TCR clone 195490 (TRAV26-1, TRAJ37)
CIVRGDGSGNTGKLIF

SEQ ID NO: 390980 - protein, 14 aa, Homo sapiens
  CDR3 for beta chain variable domain of TCR clone 195490 (TRBV19, TRBJ2-2)
CASSGQGISGVLFF

SEQ ID NO: 390981 - protein, 14 aa, Homo sapiens
  CDR3 for alpha chain variable domain of TCR clone 195491 (TRAV1-2, TRAJ16)
CAVDRFSDGQKLLF

SEQ ID NO: 390982 - protein, 15 aa, Homo sapiens
  CDR3 for beta chain variable domain of TCR clone 195491 (TRBV3-1, TRBJ2-5)
CASSANLGGPETQYF

SEQ ID NO: 390983 - protein, 13 aa, Homo sapiens
  CDR3 for alpha chain variable domain of TCR clone 195492 (TRAV12-3, TRAJ9)
CAMRNTGGFKTIF

SEQ ID NO: 390984 - protein, 14 aa, Homo sapiens
  CDR3 for beta chain variable domain of TCR clone 195492 (TRBV11-2, TRBJ2-7)
CASSSTWEGYEQYF

SEQ ID NO: 390985 - protein, 15 aa, Homo sapiens
  CDR3 for alpha chain variable domain of TCR clone 195493 (TRAV12-1, TRAJ9)
CVVSFGYTGGFKTIF

SEQ ID NO: 390986 - protein, 12 aa, Homo sapiens
  CDR3 for beta chain variable domain of TCR clone 195493 (TRBV11-3, TRBJ1-1)
CASSHRQGEAFL

SEQ ID NO: 390987 - protein, 12 aa, Homo sapiens
  CDR3 for alpha chain variable domain of TCR clone 195494 (TRAV12-2, TRAJ52)
IGGGTSYGKLTF

SEQ ID NO: 390988 - protein, 14 aa, Homo sapiens
  CDR3 for beta chain variable domain of TCR clone 195494 (TRBV7-3, TRBJ2-1)
CASSLAGGTNEQFF

SEQ ID NO: 390989 - protein, 15 aa, Homo sapiens
  CDR3 for alpha chain variable domain of TCR clone 195495 (TRAV23/DV6, TRAJ37)
CAAGEGSSNTGKLIF

SEQ ID NO: 390990 - protein, 13 aa, Homo sapiens
  CDR3 for beta chain variable domain of TCR clone 195495 (TRBV7-9, TRBJ2-7)
CASSFAGAYEQYF

SEQ ID NO: 390991 - protein, 14 aa, Homo sapiens
  CDR3 for alpha chain variable domain of TCR clone 195496 (TRAV12-3, TRAJ10)
SHLPLTGGGNKLTF

SEQ ID NO: 390992 - protein, 16 aa, Homo sapiens
  CDR3 for beta chain variable domain of TCR clone 195496 (TRBV20-1, TRBJ1-4)
RSAPGQGLLTNEKPFF

SEQ ID NO: 390993 - protein, 13 aa, Homo sapiens
  CDR3 for alpha chain variable domain of TCR clone 195497 (TRAV13-2, TRAJ22)
CRDPSGSARQLTF

SEQ ID NO: 390994 - protein, 14 aa, Homo sapiens
  CDR3 for beta chain variable domain of TCR clone 195497 (TRBV7-9, TRBJ2-5)
CASSPAQDQETQYF

SEQ ID NO: 390995 - protein, 12 aa, Homo sapiens
  CDR3 for alpha chain variable domain of TCR clone 195498 (TRAV23/DV6, TRAJ58)
CAARSLRGETSG

SEQ ID NO: 390996 - protein, 14 aa, Homo sapiens
  CDR3 for beta chain variable domain of TCR clone 195498 (TRBV7-3, TRBJ2-1)
CASSLAGGTNEQFF

SEQ ID NO: 390997 - protein, 11 aa, Homo sapiens
  CDR3 for alpha chain variable domain of TCR clone 195499 (TRAV2, TRAJ13)
CASGGYQKVTF

SEQ ID NO: 390998 - protein, 20 aa, Homo sapiens
  CDR3 for beta chain variable domain of TCR clone 195499 (TRBV28, TRBJ2-1)
CASTPIGRSPGLAGRNEQFF

SEQ ID NO: 390999 - protein, 10 aa, Homo sapiens
  CDR3 for alpha chain variable domain of TCR clone 195500 (TRAV21, TRAJ31)
CAVDNARLMF

SEQ ID NO: 391000 - protein, 17 aa, Homo sapiens
  CDR3 for beta chain variable domain of TCR clone 195500 (TRBV7-7, TRBJ1-1)
CASIGDRPNLGVTEAFF

SEQ ID NO: 391001 - protein, 14 aa, Homo sapiens
  CDR3 for alpha chain variable domain of TCR clone 195501 (TRAV20, TRAJ10)
CAVRVGGGGNKLTF

SEQ ID NO: 391002 - protein, 13 aa, Homo sapiens
  CDR3 for beta chain variable domain of TCR clone 195501 (TRBV13, TRBJ2-2)
CASSPGLTGELFF

SEQ ID NO: 391003 - protein, 14 aa, Homo sapiens
  CDR3 for alpha chain variable domain of TCR clone 195502 (TRAV9-2, TRAJ39)
CALYIYNAGNMLTF

SEQ ID NO: 391004 - protein, 15 aa, Homo sapiens
  CDR3 for beta chain variable domain of TCR clone 195502 (TRBV5-5, TRBJ1-5)
CASSSTPGSNQAQHF

SEQ ID NO: 391005 - protein, 11 aa, Homo sapiens
  CDR3 for alpha chain variable domain of TCR clone 195503 (TRAV16, TRAJ29)
WAPSGNTPLFF

SEQ ID NO: 391006 - protein, 15 aa, Homo sapiens
  CDR3 for beta chain variable domain of TCR clone 195503 (TRBV5-7, TRBJ2-7)
GASSPYFEGSYEQYF

SEQ ID NO: 391007 - protein, 12 aa, Homo sapiens
  CDR3 for alpha chain variable domain of TCR clone 195504 (TRAV25, TRAJ5)
CAGGGGRRALTF

SEQ ID NO: 391008 - protein, 15 aa, Homo sapiens
  CDR3 for beta chain variable domain of TCR clone 195504 (TRBV20-1, TRBJ2-7)
RSARDRVSGMDEQYF

SEQ ID NO: 391009 - protein, 15 aa, Homo sapiens
  CDR3 for alpha chain variable domain of TCR clone 195505 (TRAV2, TRAJ15)
CAVEDRCQAGTALIF

SEQ ID NO: 391010 - protein, 15 aa, Homo sapiens
  CDR3 for beta chain variable domain of TCR clone 195505 (TRBV20-1, TRBJ1-5)
CSATSDRGLGQPQHF

SEQ ID NO: 391011 - protein, 13 aa, Homo sapiens
  CDR3 for alpha chain variable domain of TCR clone 195506 (TRAV8-6, TRAJ40)
CAVSVTGTYKNIF

SEQ ID NO: 391012 - protein, 15 aa, Homo sapiens
  CDR3 for beta chain variable domain of TCR clone 195506 (TRBV4-1, TRBJ2-3)
CASGRGQGIPDTQYF

SEQ ID NO: 391013 - protein, 18 aa, Homo sapiens
  CDR3 for alpha chain variable domain of TCR clone 195507 (TRAV1-1, TRAJ42)
CAASPSAFYGGSQGNLIF

SEQ ID NO: 391014 - protein, 16 aa, Homo sapiens
  CDR3 for beta chain variable domain of TCR clone 195507 (TRBV12-4, TRBJ1-5)
CASSRPVGGSNQPQHF

SEQ ID NO: 391015 - protein, 17 aa, Homo sapiens
  CDR3 for alpha chain variable domain of TCR clone 195508 (TRAV4, TRAJ42)
CLVGVLNYGGSQGNLIF

SEQ ID NO: 391016 - protein, 13 aa, Homo sapiens
  CDR3 for beta chain variable domain of TCR clone 195508 (TRBV20-1, TRBJ2-7)
CSARAGSPYEQYF

SEQ ID NO: 391017 - protein, 14 aa, Homo sapiens
  CDR3 for alpha chain variable domain of TCR clone 195509 (TRAV6, TRAJ6)
CALDRAGGSYIPTF

SEQ ID NO: 391018 - protein, 13 aa, Homo sapiens
  CDR3 for beta chain variable domain of TCR clone 195509 (TRBV10-2, TRBJ2-5)
CASSEGGKETQDF

SEQ ID NO: 391019 - protein, 12 aa, Homo sapiens
  CDR3 for alpha chain variable domain of TCR clone 195510 (TRAV13-1, TRAJ48)
CAANFGNEKLTF

SEQ ID NO: 391020 - protein, 13 aa, Homo sapiens
  CDR3 for beta chain variable domain of TCR clone 195510 (TRBV20-1, TRBJ1-1)
CSARGGGNTEAFF

SEQ ID NO: 391021 - protein, 16 aa, Homo sapiens
  CDR3 for alpha chain variable domain of TCR clone 195511 (TRAV9-2, TRAJ18)
CALTSDRGSTLGRLYF

SEQ ID NO: 391022 - protein, 15 aa, Homo sapiens
  CDR3 for beta chain variable domain of TCR clone 195511 (TRBV28, TRBJ2-1)
CASSYQSGYYNEQFF

SEQ ID NO: 391023 - protein, 14 aa, Homo sapiens
  CDR3 for alpha chain variable domain of TCR clone 195512 (TRAV1-2, TRAJ16)
CAVDRFSDGPKLLF

SEQ ID NO: 391024 - protein, 13 aa, Homo sapiens
  CDR3 for beta chain variable domain of TCR clone 195512 (TRBV10-3, TRBJ2-1)
YATGLADNNEQFF

SEQ ID NO: 391025 - protein, 12 aa, Homo sapiens
  CDR3 for alpha chain variable domain of TCR clone 195513 (TRAV21, TRAJ39)
CAADDAGNMPTF

SEQ ID NO: 391026 - protein, 13 aa, Homo sapiens
  CDR3 for beta chain variable domain of TCR clone 195513 (TRBV6-1, TRBJ1-1)
CASSRQGNTEAFF

SEQ ID NO: 391027 - protein, 16 aa, Homo sapiens
  CDR3 for alpha chain variable domain of TCR clone 195514 (TRAV4, TRAJ22)
CLVGDLYSGSARQLTF

SEQ ID NO: 391028 - protein, 14 aa, Homo sapiens
  CDR3 for beta chain variable domain of TCR clone 195514 (TRBV6-1, TRBJ1-3)
CASVQGGGGNTIYF

SEQ ID NO: 391029 - protein, 16 aa, Homo sapiens
  CDR3 for alpha chain variable domain of TCR clone 195515 (TRAV30, TRAJ28)
CGPPPYSGAGSYQLTF

SEQ ID NO: 391030 - protein, 15 aa, Homo sapiens
  CDR3 for beta chain variable domain of TCR clone 195515 (TRBV28, TRBJ2-5)
CASSPPWSYQETQYF

SEQ ID NO: 391031 - protein, 15 aa, Homo sapiens
  CDR3 for alpha chain variable domain of TCR clone 195516 (TRAV23/DV6, TRAJ13)
CAAWPGGGGYQKVTF

SEQ ID NO: 391032 - protein, 14 aa, Homo sapiens
  CDR3 for beta chain variable domain of TCR clone 195516 (TRBV7-2, TRBJ1-1)
CASSFLTGTTESFF

SEQ ID NO: 391033 - protein, 15 aa, Homo sapiens
  CDR3 for alpha chain variable domain of TCR clone 195517 (TRAV27, TRAJ38)
CAARRNAGNNRKLIW

SEQ ID NO: 391034 - protein, 13 aa, Homo sapiens
  CDR3 for beta chain variable domain of TCR clone 195517 (TRBV28, TRBJ2-5)
CAGVSRGEETQCF

SEQ ID NO: 391035 - protein, 16 aa, Homo sapiens
  CDR3 for alpha chain variable domain of TCR clone 195518 (TRAV30, TRAJ24)
CGTEIVDADSWGKFQF

SEQ ID NO: 391036 - protein, 14 aa, Homo sapiens
  CDR3 for beta chain variable domain of TCR clone 195518 (TRBV20-1, TRBJ1-2)
CSASEQGAVYGYTF

SEQ ID NO: 391037 - protein, 14 aa, Homo sapiens
  CDR3 for alpha chain variable domain of TCR clone 195519 (TRAV12-2, TRAJ13)
CAVKKIGGYQKVTF

SEQ ID NO: 391038 - protein, 15 aa, Homo sapiens
  CDR3 for beta chain variable domain of TCR clone 195519 (TRBV27, TRBJ2-1)
CASSNGGGSANEQFF

SEQ ID NO: 391039 - protein, 17 aa, Homo sapiens
  CDR3 for alpha chain variable domain of TCR clone 195520 (TRAV3, TRAJ6)
CAVRDGPRAGGSYIPTF

SEQ ID NO: 391040 - protein, 18 aa, Homo sapiens
  CDR3 for beta chain variable domain of TCR clone 195520 (TRBV7-9, TRBJ2-7)
CASSLKTSGSRTWYEQYF

SEQ ID NO: 391041 - protein, 15 aa, Homo sapiens
  CDR3 for alpha chain variable domain of TCR clone 195521 (TRAV12-3, TRAJ6)
CAMSATTGGSYIPTF

SEQ ID NO: 391042 - protein, 16 aa, Homo sapiens
  CDR3 for beta chain variable domain of TCR clone 195521 (TRBV13, TRBJ2-2)
CASSPSTGEHTGELFF

SEQ ID NO: 391043 - protein, 19 aa, Homo sapiens
  CDR3 for alpha chain variable domain of TCR clone 195522 (TRAV21, TRAJ20)
SLVTQPPTSVLPNDYKLRF

SEQ ID NO: 391044 - protein, 14 aa, Homo sapiens
  CDR3 for beta chain variable domain of TCR clone 195522 (TRBV7-2, TRBJ1-3)
CASSRLRSGNTIYF

SEQ ID NO: 391045 - protein, 17 aa, Homo sapiens
  CDR3 for alpha chain variable domain of TCR clone 195523 (TRAV1-2, TRAJ8)
CAVRDPDENTGFQKLVF

SEQ ID NO: 391046 - protein, 16 aa, Homo sapiens
  CDR3 for beta chain variable domain of TCR clone 195523 (TRBV7-9, TRBJ2-2)
CASSGFGGASTGELFF

SEQ ID NO: 391047 - protein, 16 aa, Homo sapiens
  CDR3 for alpha chain variable domain of TCR clone 195524 (TRAV30, TRAJ24)
CGTEIVYADSWGKFKF

SEQ ID NO: 391048 - protein, 14 aa, Homo sapiens
  CDR3 for beta chain variable domain of TCR clone 195524 (TRBV12-5, TRBJ2-5)
CASGSRTHQETQYF

SEQ ID NO: 391049 - protein, 15 aa, Homo sapiens
  CDR3 for alpha chain variable domain of TCR clone 195525 (TRAV23/DV6, TRAJ4)
CAASPLRGGYNKLIF

SEQ ID NO: 391050 - protein, 17 aa, Homo sapiens
  CDR3 for beta chain variable domain of TCR clone 195525 (TRBV7-3, TRBJ2-3)
RASSLMKRLRGADTQYF

SEQ ID NO: 391051 - protein, 14 aa, Homo sapiens
  CDR3 for alpha chain variable domain of TCR clone 195526 (TRAV12-3, TRAJ56)
CAMSVTGANSKLTF

SEQ ID NO: 391052 - protein, 17 aa, Homo sapiens
  CDR3 for beta chain variable domain of TCR clone 195526 (TRBV20-1, TRBJ2-3)
CSASLRGRGGGADTQYF

SEQ ID NO: 391053 - protein, 19 aa, Homo sapiens
  CDR3 for alpha chain variable domain of TCR clone 195527 (TRAV29/DV5, TRAJ49)
CSVLLCSKLTVDTGNQVYL

SEQ ID NO: 391054 - protein, 16 aa, Homo sapiens
  CDR3 for beta chain variable domain of TCR clone 195527 (TRBV7-3, TRBJ2-2)
CASSLKRGTLPGELFF

SEQ ID NO: 391055 - protein, 14 aa, Homo sapiens
  CDR3 for alpha chain variable domain of TCR clone 195528 (TRAV2, TRAJ9)
CAVEDRSGGFKTIF

SEQ ID NO: 391056 - protein, 13 aa, Homo sapiens
  CDR3 for beta chain variable domain of TCR clone 195528 (TRBV4-1, TRBJ2-1)
CASSQEVQYEQFF

SEQ ID NO: 391057 - protein, 13 aa, Homo sapiens
  CDR3 for alpha chain variable domain of TCR clone 195529 (TRAV13-1, TRAJ40)
CAARTSGTYKYIF

SEQ ID NO: 391058 - protein, 16 aa, Homo sapiens
  CDR3 for beta chain variable domain of TCR clone 195529 (TRBV7-3, TRBJ2-2)
CASSLKRGTLSGELFF

SEQ ID NO: 391059 - protein, 14 aa, Homo sapiens
  CDR3 for alpha chain variable domain of TCR clone 195530 (TRAV1-2, TRAJ8)
CAVREDTAFQNLVF

SEQ ID NO: 391060 - protein, 15 aa, Homo sapiens
  CDR3 for beta chain variable domain of TCR clone 195530 (TRBV7-3, TRBJ2-2)
CASSETGQGTGELFF

SEQ ID NO: 391061 - protein, 16 aa, Homo sapiens
  CDR3 for alpha chain variable domain of TCR clone 195531 (TRAV3, TRAJ3)
CAVRDRAKSSASKIIF

SEQ ID NO: 391062 - protein, 13 aa, Homo sapiens
  CDR3 for beta chain variable domain of TCR clone 195531 (TRBV2, TRBJ1-4)
CASSERAGEKLFF

SEQ ID NO: 391063 - protein, 15 aa, Homo sapiens
  CDR3 for alpha chain variable domain of TCR clone 195532 (TRAV13-2, TRAJ53)
CAERGSRGSNYKLTF

SEQ ID NO: 391064 - protein, 14 aa, Homo sapiens
  CDR3 for beta chain variable domain of TCR clone 195532 (TRBV4-1, TRBJ2-2)
CASSQYADTGELFF

SEQ ID NO: 391065 - protein, 13 aa, Homo sapiens
  CDR3 for alpha chain variable domain of TCR clone 195533 (TRAV26-1, TRAJ40)
CIVATSGTYKYIF

SEQ ID NO: 391066 - protein, 14 aa, Homo sapiens
  CDR3 for beta chain variable domain of TCR clone 195533 (TRBV7-2, TRBJ2-7)
CASSPKTSFYEQYF

SEQ ID NO: 391067 - protein, 15 aa, Homo sapiens
  CDR3 for alpha chain variable domain of TCR clone 195534 (TRAV21, TRAJ24)
CAARSSTDSWGKLQF

SEQ ID NO: 391068 - protein, 12 aa, Homo sapiens
  CDR3 for beta chain variable domain of TCR clone 195534 (TRBV11-2, TRBJ2-4)
CASSSASGSEYF

SEQ ID NO: 391069 - protein, 14 aa, Homo sapiens
  CDR3 for alpha chain variable domain of TCR clone 195535 (TRAV1-2, TRAJ8)
CAVREDTGFQKLVF

SEQ ID NO: 391070 - protein, 12 aa, Homo sapiens
  CDR3 for beta chain variable domain of TCR clone 195535 (TRBV29-1, TRBJ2-3)
YSVTGGADTQYF

SEQ ID NO: 391071 - protein, 17 aa, Homo sapiens
  CDR3 for alpha chain variable domain of TCR clone 195536 (TRAV13-1, TRAJ52)
CAAGRNAGGTSYGKLTF

SEQ ID NO: 391072 - protein, 13 aa, Homo sapiens
  CDR3 for beta chain variable domain of TCR clone 195536 (TRBV10-3, TRBJ2-7)
CASKLAVNYEQYF

SEQ ID NO: 391073 - protein, 16 aa, Homo sapiens
  CDR3 for alpha chain variable domain of TCR clone 195537 (TRAV2, TRAJ4)
CAVEDRFSGGYKKLIF

SEQ ID NO: 391074 - protein, 13 aa, Homo sapiens
  CDR3 for beta chain variable domain of TCR clone 195537 (TRBV7-7, TRBJ2-5)
CASSRSGQETQYF

SEQ ID NO: 391075 - protein, 17 aa, Homo sapiens
  CDR3 for alpha chain variable domain of TCR clone 195538 (TRAV23/DV6, TRAJ57)
CAASSTLSQGGSEKLVF

SEQ ID NO: 391076 - protein, 15 aa, Homo sapiens
  CDR3 for beta chain variable domain of TCR clone 195538 (TRBV25-1, TRBJ1-4)
CASSPGDSTNEKLFF

SEQ ID NO: 391077 - protein, 16 aa, Homo sapiens
  CDR3 for alpha chain variable domain of TCR clone 195539 (TRAV38-2/DV8, TRAJ9)
CAYRSLLNTGGFKTIF

SEQ ID NO: 391078 - protein, 15 aa, Homo sapiens
  CDR3 for beta chain variable domain of TCR clone 195539 (TRBV2, TRBJ2-1)
CASEGRVSAYNEQFF

SEQ ID NO: 391079 - protein, 16 aa, Homo sapiens
  CDR3 for alpha chain variable domain of TCR clone 195540 (TRAV26-1, TRAJ32)
CIVRTNYGGATNKPIF

SEQ ID NO: 391080 - protein, 14 aa, Homo sapiens
  CDR3 for beta chain variable domain of TCR clone 195540 (TRBV25-1, TRBJ1-1)
CASTHLGGNTEAFF

SEQ ID NO: 391081 - protein, 20 aa, Homo sapiens
  CDR3 for alpha chain variable domain of TCR clone 195541 (TRAV8-3, )
CAGDNYEIQNPDPAVYQLRD

SEQ ID NO: 391082 - protein, 16 aa, Homo sapiens
  CDR3 for beta chain variable domain of TCR clone 195541 (TRBV7-3, TRBJ2-2)
CASSLKRGTLSGELFF

SEQ ID NO: 391083 - protein, 12 aa, Homo sapiens
  CDR3 for alpha chain variable domain of TCR clone 195542 (TRAV8-3, TRAJ26)
CAGDNYGQNFVF

SEQ ID NO: 391084 - protein, 18 aa, Homo sapiens
  CDR3 for beta chain variable domain of TCR clone 195542 (TRBV12-4, TRBJ2-2)
CASSLVAGTRGRTGDLFF

SEQ ID NO: 391085 - protein, 15 aa, Homo sapiens
  CDR3 for alpha chain variable domain of TCR clone 195543 (TRAV12-1, TRAJ44)
CVVNINTGTASKLTF

SEQ ID NO: 391086 - protein, 16 aa, Homo sapiens
  CDR3 for beta chain variable domain of TCR clone 195543 (TRBV12-5, TRBJ2-5)
CASGPRTSGNQEAQYF

SEQ ID NO: 391087 - protein, 16 aa, Homo sapiens
  CDR3 for alpha chain variable domain of TCR clone 195544 (TRAV22, TRAJ45)
CAVERGKRGGADGLTF

SEQ ID NO: 391088 - protein, 15 aa, Homo sapiens
  CDR3 for beta chain variable domain of TCR clone 195544 (TRBV7-9, TRBJ1-6)
CASSSPGRGNSPLHF

SEQ ID NO: 391089 - protein, 12 aa, Homo sapiens
  CDR3 for alpha chain variable domain of TCR clone 195545 (TRAV30, TRAJ43)
CGTEDRGNDMRF

SEQ ID NO: 391090 - protein, 13 aa, Homo sapiens
  CDR3 for beta chain variable domain of TCR clone 195545 (TRBV12-4, TRBJ1-2)
CASSSGSKDGYTF

SEQ ID NO: 391091 - protein, 12 aa, Homo sapiens
  CDR3 for alpha chain variable domain of TCR clone 195546 (TRAV12-3, TRAJ17)
CAMTLTGTKLTF

SEQ ID NO: 391092 - protein, 15 aa, Homo sapiens
  CDR3 for beta chain variable domain of TCR clone 195546 (TRBV20-1, TRBJ2-7)
CSASDRVSGMDEQYF

SEQ ID NO: 391093 - protein, 15 aa, Homo sapiens
  CDR3 for alpha chain variable domain of TCR clone 195547 (TRAV20, TRAJ4)
CAVEGSSGGDNKLIF

SEQ ID NO: 391094 - protein, 14 aa, Homo sapiens
  CDR3 for beta chain variable domain of TCR clone 195547 (TRBV7-8, TRBJ2-7)
CASTLGGALGEQYF

SEQ ID NO: 391095 - protein, 16 aa, Homo sapiens
  CDR3 for alpha chain variable domain of TCR clone 195548 (TRAV30, TRAJ24)
CVTEIVDADSWGKFQF

SEQ ID NO: 391096 - protein, 16 aa, Homo sapiens
  CDR3 for beta chain variable domain of TCR clone 195548 (TRBV12-4, TRBJ2-5)
CASSFFVRGRQETQYF

SEQ ID NO: 391097 - protein, 16 aa, Homo sapiens
  CDR3 for alpha chain variable domain of TCR clone 195549 (TRAV8-3, TRAJ42)
CAVGEGNGGSQGNLIF

SEQ ID NO: 391098 - protein, 17 aa, Homo sapiens
  CDR3 for beta chain variable domain of TCR clone 195549 (TRBV7-3, TRBJ2-3)
CASSLMKRMRGADTQYF

SEQ ID NO: 391099 - protein, 15 aa, Homo sapiens
  CDR3 for alpha chain variable domain of TCR clone 195550 (TRAV36/DV7, TRAJ44)
CAVCRTTGTASKLTF

SEQ ID NO: 391100 - protein, 13 aa, Homo sapiens
  CDR3 for beta chain variable domain of TCR clone 195550 (TRBV18, TRBJ2-3)
CASSTGRTDTQYF

SEQ ID NO: 391101 - protein, 15 aa, Homo sapiens
  CDR3 for alpha chain variable domain of TCR clone 195551 (TRAV12-1, TRAJ44)
CVVDEYTGTANKLTF

SEQ ID NO: 391102 - protein, 17 aa, Homo sapiens
  CDR3 for beta chain variable domain of TCR clone 195551 (TRBV10-3, TRBJ2-4)
CTSVPSVNKGSKNIQYF

SEQ ID NO: 391103 - protein, 14 aa, Homo sapiens
  CDR3 for alpha chain variable domain of TCR clone 195552 (TRAV12-1, TRAJ39)
CVVSLNNAGNMLTF

SEQ ID NO: 391104 - protein, 12 aa, Homo sapiens
  CDR3 for beta chain variable domain of TCR clone 195552 (TRBV11-2, TRBJ2-2)
CASSLGGGELFF

SEQ ID NO: 391105 - protein, 13 aa, Homo sapiens
  CDR3 for alpha chain variable domain of TCR clone 195553 (TRAV2, TRAJ15)
CAVASQGGTALIF

SEQ ID NO: 391106 - protein, 15 aa, Homo sapiens
  CDR3 for beta chain variable domain of TCR clone 195553 (TRBV20-1, TRBJ2-7)
CSARDRVSGMDEQYF

SEQ ID NO: 391107 - protein, 13 aa, Homo sapiens
  CDR3 for alpha chain variable domain of TCR clone 195554 (TRAV35, TRAJ43)
CAGYPYTNNDMRF

SEQ ID NO: 391108 - protein, 15 aa, Homo sapiens
  CDR3 for beta chain variable domain of TCR clone 195554 (TRBV25-1, TRBJ1-4)
CASSKRIATNEKLFF

SEQ ID NO: 391109 - protein, 11 aa, Homo sapiens
  CDR3 for alpha chain variable domain of TCR clone 195555 (TRAV12-1, TRAJ3)
CVVSSASTIIF

SEQ ID NO: 391110 - protein, 11 aa, Homo sapiens
  CDR3 for beta chain variable domain of TCR clone 195555 (TRBV29-1, TRBJ2-5)
CSEDRTGTQYF

SEQ ID NO: 391111 - protein, 12 aa, Homo sapiens
  CDR3 for alpha chain variable domain of TCR clone 195556 (TRAV26-1, TRAJ43)
CIVRPRGADMRF

SEQ ID NO: 391112 - protein, 16 aa, Homo sapiens
  CDR3 for beta chain variable domain of TCR clone 195556 (TRBV3-1, TRBJ2-1)
CASSQGGRRSFDEQFF

SEQ ID NO: 391113 - protein, 14 aa, Homo sapiens
  CDR3 for alpha chain variable domain of TCR clone 195557 (TRAV38-1, TRAJ45)
CAYYSGGGADGPTF

SEQ ID NO: 391114 - protein, 14 aa, Homo sapiens
  CDR3 for beta chain variable domain of TCR clone 195557 (TRBV19, TRBJ2-3)
CASSAPRGTDTQYF

SEQ ID NO: 391115 - protein, 17 aa, Homo sapiens
  CDR3 for alpha chain variable domain of TCR clone 195558 (TRAV3, TRAJ12)
CAVGDGGRMDSSYKLIF

SEQ ID NO: 391116 - protein, 16 aa, Homo sapiens
  CDR3 for beta chain variable domain of TCR clone 195558 (TRBV9, TRBJ2-2)
CASSAMGKGNTGELFF

SEQ ID NO: 391117 - protein, 12 aa, Homo sapiens
  CDR3 for alpha chain variable domain of TCR clone 195559 (TRAV8-4, TRAJ31)
CAVSDSNARLMF

SEQ ID NO: 391118 - protein, 12 aa, Homo sapiens
  CDR3 for beta chain variable domain of TCR clone 195559 (TRBV11-2, TRBJ2-2)
CASSLGGGELFF

SEQ ID NO: 391119 - protein, 12 aa, Homo sapiens
  CDR3 for alpha chain variable domain of TCR clone 195560 (TRAV21, TRAJ37)
CAVRGNTGKLIF

SEQ ID NO: 391120 - protein, 14 aa, Homo sapiens
  CDR3 for beta chain variable domain of TCR clone 195560 (TRBV19, TRBJ2-1)
CASEVTGARKEQFF

SEQ ID NO: 391121 - protein, 16 aa, Homo sapiens
  CDR3 for alpha chain variable domain of TCR clone 195561 (TRAV16, TRAJ21)
CACGWATTSTYFTLDL

SEQ ID NO: 391122 - protein, 15 aa, Homo sapiens
  CDR3 for beta chain variable domain of TCR clone 195561 (TRBV19, TRBJ2-1)
CASSIQATSYNEQFF

SEQ ID NO: 391123 - protein, 13 aa, Homo sapiens
  CDR3 for alpha chain variable domain of TCR clone 195562 (TRAV38-1, TRAJ42)
CARWGGSQGNLIS

SEQ ID NO: 391124 - protein, 17 aa, Homo sapiens
  CDR3 for beta chain variable domain of TCR clone 195562 (TRBV20-1, TRBJ2-1)
CSARDPLAGVWDNEQFF

SEQ ID NO: 391125 - protein, 14 aa, Homo sapiens
  CDR3 for alpha chain variable domain of TCR clone 195563 (TRAV8-4, TRAJ34)
CAVSDPGDTDKLIF

SEQ ID NO: 391126 - protein, 14 aa, Homo sapiens
  CDR3 for beta chain variable domain of TCR clone 195563 (TRBV7-9, TRBJ2-5)
CASSRWAVSETQYF

SEQ ID NO: 391127 - protein, 14 aa, Homo sapiens
  CDR3 for alpha chain variable domain of TCR clone 195564 (TRAV4, TRAJ13)
CLVGYSGGYQKVTF

SEQ ID NO: 391128 - protein, 12 aa, Homo sapiens
  CDR3 for beta chain variable domain of TCR clone 195564 (TRBV11-2, TRBJ2-1)
CASSPGNNEQFF

SEQ ID NO: 391129 - protein, 12 aa, Homo sapiens
  CDR3 for alpha chain variable domain of TCR clone 195565 (TRAV1-1, TRAJ30)
CAVRGRDDKIIF

SEQ ID NO: 391130 - protein, 14 aa, Homo sapiens
  CDR3 for beta chain variable domain of TCR clone 195565 (TRBV6-6, TRBJ2-7)
CASSDSGAGYEQYS

SEQ ID NO: 391131 - protein, 14 aa, Homo sapiens
  CDR3 for alpha chain variable domain of TCR clone 195566 (TRAV12-2, TRAJ13)
CAVKKTGGYQKVTF

SEQ ID NO: 391132 - protein, 15 aa, Homo sapiens
  CDR3 for beta chain variable domain of TCR clone 195566 (TRBV28, TRBJ2-5)
CASSPPWSYQETQFF

SEQ ID NO: 391133 - protein, 14 aa, Homo sapiens
  CDR3 for alpha chain variable domain of TCR clone 195567 (TRAV21, TRAJ6)
CAVKWLVGSYIPTF

SEQ ID NO: 391134 - protein, 14 aa, Homo sapiens
  CDR3 for beta chain variable domain of TCR clone 195567 (TRBV19, TRBJ2-1)
CASPTFVLSGEQFF

SEQ ID NO: 391135 - protein, 13 aa, Homo sapiens
  CDR3 for alpha chain variable domain of TCR clone 195568 (TRAV12-3, TRAJ6)
CTMIPGGSYIPTF

SEQ ID NO: 391136 - protein, 13 aa, Homo sapiens
  CDR3 for beta chain variable domain of TCR clone 195568 (TRBV25-1, TRBJ2-5)
CASSESGRETQYF

SEQ ID NO: 391137 - protein, 12 aa, Homo sapiens
  CDR3 for alpha chain variable domain of TCR clone 195569 (TRAV12-3, TRAJ17)
CAMTLTGNKLTL

SEQ ID NO: 391138 - protein, 20 aa, Homo sapiens
  CDR3 for beta chain variable domain of TCR clone 195569 (TRBV7-9, TRBJ2-1)
CASSSPRAPRTRSSYNEQFF

SEQ ID NO: 391139 - protein, 17 aa, Homo sapiens
  CDR3 for alpha chain variable domain of TCR clone 195570 (TRAV1-1, TRAJ28)
CAVDPAYSGAGSYQLTF

SEQ ID NO: 391140 - protein, 14 aa, Homo sapiens
  CDR3 for beta chain variable domain of TCR clone 195570 (TRBV19, TRBJ2-1)
CASPTFVLIGEQFF

SEQ ID NO: 391141 - protein, 13 aa, Homo sapiens
  CDR3 for alpha chain variable domain of TCR clone 195571 (TRAV3, TRAJ3)
CAVADSSASKVIF

SEQ ID NO: 391142 - protein, 12 aa, Homo sapiens
  CDR3 for beta chain variable domain of TCR clone 195571 (TRBV7-8, TRBJ2-7)
CASEGGPHGQYF

SEQ ID NO: 391143 - protein, 15 aa, Homo sapiens
  CDR3 for alpha chain variable domain of TCR clone 195572 (TRAV1-2, TRAJ3)
CAVRGGYSSASKIIF

SEQ ID NO: 391144 - protein, 12 aa, Homo sapiens
  CDR3 for beta chain variable domain of TCR clone 195572 (TRBV11-2, TRBJ2-2)
CASSLGGGELFF

SEQ ID NO: 391145 - protein, 12 aa, Homo sapiens
  CDR3 for alpha chain variable domain of TCR clone 195573 (TRAV21, TRAJ31)
CAVWGNNARLMF

SEQ ID NO: 391146 - protein, 15 aa, Homo sapiens
  CDR3 for beta chain variable domain of TCR clone 195573 (TRBV28, TRBJ2-5)
CASSPPWSYQETQYF

SEQ ID NO: 391147 - protein, 12 aa, Homo sapiens
  CDR3 for alpha chain variable domain of TCR clone 195574 (TRAV12-2, TRAJ52)
IGGGTSYGKMTF

SEQ ID NO: 391148 - protein, 13 aa, Homo sapiens
  CDR3 for beta chain variable domain of TCR clone 195574 (TRBV15, TRBJ2-7)
CATSTTGHYEQYF

SEQ ID NO: 391149 - protein, 14 aa, Homo sapiens
  CDR3 for alpha chain variable domain of TCR clone 195575 (TRAV1-2, TRAJ8)
CAVREDTGFQKLVF

SEQ ID NO: 391150 - protein, 14 aa, Homo sapiens
  CDR3 for beta chain variable domain of TCR clone 195575 (TRBV11-3, TRBJ2-5)
CASSLGQGRETQYF

SEQ ID NO: 391151 - protein, 14 aa, Homo sapiens
  CDR3 for alpha chain variable domain of TCR clone 195576 (TRAV8-3, TRAJ13)
CAVGGTVGYQKVTF

SEQ ID NO: 391152 - protein, 17 aa, Homo sapiens
  CDR3 for beta chain variable domain of TCR clone 195576 (TRBV7-9, TRBJ2-1)
CASSAGTLGRSYNEQFF

SEQ ID NO: 391153 - protein, 19 aa, Homo sapiens
  CDR3 for alpha chain variable domain of TCR clone 195577 (TRAV29/DV5, TRAJ49)
CSVLLCSKLTVDTGNQFYF

SEQ ID NO: 391154 - protein, 14 aa, Homo sapiens
  CDR3 for beta chain variable domain of TCR clone 195577 (TRBV4-2, TRBJ1-5)
CASSRDRGNQPQHF

SEQ ID NO: 391155 - protein, 13 aa, Homo sapiens
  CDR3 for alpha chain variable domain of TCR clone 195578 (TRAV13-2, TRAJ13)
CAERPGGYQKGTF

SEQ ID NO: 391156 - protein, 15 aa, Homo sapiens
  CDR3 for beta chain variable domain of TCR clone 195578 (TRBV11-3, TRBJ2-7)
CASSPGPASSYEQYF

SEQ ID NO: 391157 - protein, 10 aa, Homo sapiens
  CDR3 for alpha chain variable domain of TCR clone 195579 (TRAV36/DV7, TRAJ38)
CAANNRKLVW

SEQ ID NO: 391158 - protein, 15 aa, Homo sapiens
  CDR3 for beta chain variable domain of TCR clone 195579 (TRBV20-1, TRBJ2-7)
CSARDRVSGMDEQYF

SEQ ID NO: 391159 - protein, 13 aa, Homo sapiens
  CDR3 for alpha chain variable domain of TCR clone 195580 (TRAV12-3, TRAJ7)
CAMTPYGNNRLAF

SEQ ID NO: 391160 - protein, 13 aa, Homo sapiens
  CDR3 for beta chain variable domain of TCR clone 195580 (TRBV18, TRBJ2-5)
CASSLQGQETQYF

SEQ ID NO: 391161 - protein, 14 aa, Homo sapiens
  CDR3 for alpha chain variable domain of TCR clone 195581 (TRAV12-3, TRAJ12)
CAMSEVDSSYKLIF

SEQ ID NO: 391162 - protein, 12 aa, Homo sapiens
  CDR3 for beta chain variable domain of TCR clone 195581 (TRBV18, TRBJ1-4)
GASSPSREKLFF

SEQ ID NO: 391163 - protein, 16 aa, Homo sapiens
  CDR3 for alpha chain variable domain of TCR clone 195582 (TRAV17, TRAJ22)
CATDAISFGSARQLTF

SEQ ID NO: 391164 - protein, 15 aa, Homo sapiens
  CDR3 for beta chain variable domain of TCR clone 195582 (TRBV5-1, TRBJ2-1)
CASSPPRAPYNEQFF

SEQ ID NO: 391165 - protein, 12 aa, Homo sapiens
  CDR3 for alpha chain variable domain of TCR clone 195583 (TRAV12-3, TRAJ17)
CAMTLTGNKLTF

SEQ ID NO: 391166 - protein, 14 aa, Homo sapiens
  CDR3 for beta chain variable domain of TCR clone 195583 (TRBV7-3, TRBJ2-1)
CASSLAGGTNEQVF

SEQ ID NO: 391167 - protein, 17 aa, Homo sapiens
  CDR3 for alpha chain variable domain of TCR clone 195584 (TRAV3, TRAJ12)
CAVREIGGRDSSYKLIF

SEQ ID NO: 391168 - protein, 14 aa, Homo sapiens
  CDR3 for beta chain variable domain of TCR clone 195584 (TRBV12-4, TRBJ1-1)
CASSFQSFGTEAFF

SEQ ID NO: 391169 - protein, 14 aa, Homo sapiens
  CDR3 for alpha chain variable domain of TCR clone 195585 (TRAV8-2, TRAJ11)
CVVSEKSGYSTLTF

SEQ ID NO: 391170 - protein, 14 aa, Homo sapiens
  CDR3 for beta chain variable domain of TCR clone 195585 (TRBV28, TRBJ1-5)
CASSLGVLVKPQHL

SEQ ID NO: 391171 - protein, 14 aa, Homo sapiens
  CDR3 for alpha chain variable domain of TCR clone 195586 (TRAV8-4, TRAJ13)
CAVTLSGGYQNVTF

SEQ ID NO: 391172 - protein, 16 aa, Homo sapiens
  CDR3 for beta chain variable domain of TCR clone 195586 (TRBV19, TRBJ2-2)
CASRSPGTGATGELFF

SEQ ID NO: 391173 - protein, 13 aa, Homo sapiens
  CDR3 for alpha chain variable domain of TCR clone 195587 (TRAV13-1, TRAJ13)
CAASKGGYQKVTF

SEQ ID NO: 391174 - protein, 16 aa, Homo sapiens
  CDR3 for beta chain variable domain of TCR clone 195587 (TRBV18, TRBJ1-2)
CPSSPPERVTIYGYTF

SEQ ID NO: 391175 - protein, 16 aa, Homo sapiens
  CDR3 for alpha chain variable domain of TCR clone 195588 (TRAV3, TRAJ37)
CAVRGKGSGNTGKLIF

SEQ ID NO: 391176 - protein, 16 aa, Homo sapiens
  CDR3 for beta chain variable domain of TCR clone 195588 (TRBV20-1, TRBJ2-3)
CSARLHSAGAIDTQYF

SEQ ID NO: 391177 - protein, 11 aa, Homo sapiens
  CDR3 for alpha chain variable domain of TCR clone 195589 (TRAV25, TRAJ21)
CAGTIFNKFYF

SEQ ID NO: 391178 - protein, 16 aa, Homo sapiens
  CDR3 for beta chain variable domain of TCR clone 195589 (TRBV12-4, TRBJ2-5)
CASSFFVRGRQETQYF

SEQ ID NO: 391179 - protein, 12 aa, Homo sapiens
  CDR3 for alpha chain variable domain of TCR clone 195590 (TRAV13-1, TRAJ21)
CAAKEGFNKFYF

SEQ ID NO: 391180 - protein, 18 aa, Homo sapiens
  CDR3 for beta chain variable domain of TCR clone 195590 (TRBV28, TRBJ1-3)
CASSPPGTVTSSGNTIYF

SEQ ID NO: 391181 - protein, 14 aa, Homo sapiens
  CDR3 for alpha chain variable domain of TCR clone 195591 (TRAV1-2, TRAJ29)
CAVRELTSATPLFF

SEQ ID NO: 391182 - protein, 11 aa, Homo sapiens
  CDR3 for beta chain variable domain of TCR clone 195591 (TRBV7-2, TRBJ2-3)
CASSSSDTQYF

SEQ ID NO: 391183 - protein, 15 aa, Homo sapiens
  CDR3 for alpha chain variable domain of TCR clone 195592 (TRAV13-1, TRAJ5)
CAVYIRDTGRRALTF

SEQ ID NO: 391184 - protein, 16 aa, Homo sapiens
  CDR3 for beta chain variable domain of TCR clone 195592 (TRBV12-4, TRBJ2-1)
CASTEQGMHLSNEQFF

SEQ ID NO: 391185 - protein, 15 aa, Homo sapiens
  CDR3 for alpha chain variable domain of TCR clone 195593 (TRAV8-3, TRAJ27)
CAVGPSKTNAGKSAF

SEQ ID NO: 391186 - protein, 15 aa, Homo sapiens
  CDR3 for beta chain variable domain of TCR clone 195593 (TRBV7-2, TRBJ2-1)
CASSSGLAGGNEQFF

SEQ ID NO: 391187 - protein, 13 aa, Homo sapiens
  CDR3 for alpha chain variable domain of TCR clone 195594 (TRAV38-1, TRAJ20)
CAFMKPNDYKLSF

SEQ ID NO: 391188 - protein, 16 aa, Homo sapiens
  CDR3 for beta chain variable domain of TCR clone 195594 (TRBV12-4, TRBJ1-1)
CASSHRRDRQGTEAFV

SEQ ID NO: 391189 - protein, 16 aa, Homo sapiens
  CDR3 for alpha chain variable domain of TCR clone 195595 (TRAV3, TRAJ37)
CAVRPHGSGNTGKLIF

SEQ ID NO: 391190 - protein, 15 aa, Homo sapiens
  CDR3 for beta chain variable domain of TCR clone 195595 (TRBV6-6, TRBJ2-1)
CATRQGVSSYNEQFF

SEQ ID NO: 391191 - protein, 15 aa, Homo sapiens
  CDR3 for alpha chain variable domain of TCR clone 195596 (TRAV8-3, TRAJ45)
CASSYSGGGAAGLTC

SEQ ID NO: 391192 - protein, 13 aa, Homo sapiens
  CDR3 for beta chain variable domain of TCR clone 195596 (TRBV10-3, TRBJ2-7)
CASKLAVNYEQYF

SEQ ID NO: 391193 - protein, 16 aa, Homo sapiens
  CDR3 for alpha chain variable domain of TCR clone 195597 (TRAV26-1, TRAJ37)
CIVRGDGSGNTGKLIF

SEQ ID NO: 391194 - protein, 14 aa, Homo sapiens
  CDR3 for beta chain variable domain of TCR clone 195597 (TRBV11-2, TRBJ2-1)
CASSLSGPYNEQFF

SEQ ID NO: 391195 - protein, 14 aa, Homo sapiens
  CDR3 for alpha chain variable domain of TCR clone 195598 (TRAV1-2, TRAJ8)
CAVREYTGFQKLVF

SEQ ID NO: 391196 - protein, 16 aa, Homo sapiens
  CDR3 for beta chain variable domain of TCR clone 195598 (TRBV2, TRBJ2-1)
CASRSPAGGKYNEQFF

SEQ ID NO: 391197 - protein, 14 aa, Homo sapiens
  CDR3 for alpha chain variable domain of TCR clone 195599 (TRAV1-2, TRAJ16)
CAVNRFSDGQKLLF

SEQ ID NO: 391198 - protein, 14 aa, Homo sapiens
  CDR3 for beta chain variable domain of TCR clone 195599 (TRBV7-9, TRBJ2-5)
CASSLAFDQETQYF

SEQ ID NO: 391199 - protein, 14 aa, Homo sapiens
  CDR3 for alpha chain variable domain of TCR clone 195600 (TRAV12-1, TRAJ17)
CVVNYKAAGNKLTF

SEQ ID NO: 391200 - protein, 13 aa, Homo sapiens
  CDR3 for beta chain variable domain of TCR clone 195600 (TRBV5-1, TRBJ1-2)
CASSLQGNYGYTS

SEQ ID NO: 391201 - protein, 15 aa, Homo sapiens
  CDR3 for alpha chain variable domain of TCR clone 195601 (TRAV27, TRAJ17)
CRSTMIKAAGNKLTF

SEQ ID NO: 391202 - protein, 12 aa, Homo sapiens
  CDR3 for beta chain variable domain of TCR clone 195601 (TRBV12-4, TRBJ1-3)
CASSFSGNTIYF

SEQ ID NO: 391203 - protein, 16 aa, Homo sapiens
  CDR3 for alpha chain variable domain of TCR clone 195602 (TRAV38-1, TRAJ56)
CAFMKRQTGANSKLTF

SEQ ID NO: 391204 - protein, 14 aa, Homo sapiens
  CDR3 for beta chain variable domain of TCR clone 195602 (TRBV7-9, TRBJ1-1)
CASSWGQGDTEAFF

SEQ ID NO: 391205 - protein, 12 aa, Homo sapiens
  CDR3 for alpha chain variable domain of TCR clone 195603 (TRAV13-2, TRAJ23)
FAERHGGGKLIF

SEQ ID NO: 391206 - protein, 16 aa, Homo sapiens
  CDR3 for beta chain variable domain of TCR clone 195603 (TRBV20-1, TRBJ1-4)
CSAPGQGLLTNEKLFF

SEQ ID NO: 391207 - protein, 15 aa, Homo sapiens
  CDR3 for alpha chain variable domain of TCR clone 195604 (TRAV8-6, TRAJ6)
CAVSGESGGSYIPTF

SEQ ID NO: 391208 - protein, 16 aa, Homo sapiens
  CDR3 for beta chain variable domain of TCR clone 195604 (TRBV7-2, TRBJ2-3)
CASSAPWGRIADTQYF

SEQ ID NO: 391209 - protein, 16 aa, Homo sapiens
  CDR3 for alpha chain variable domain of TCR clone 195605 (TRAV36/DV7, TRAJ30)
CAVETYGLYRDDKITF

SEQ ID NO: 391210 - protein, 15 aa, Homo sapiens
  CDR3 for beta chain variable domain of TCR clone 195605 (TRBV6-6, TRBJ2-5)
CASSYGKIIQETQYF

SEQ ID NO: 391211 - protein, 14 aa, Homo sapiens
  CDR3 for alpha chain variable domain of TCR clone 195606 (TRAV16, TRAJ32)
CALKSGGATNWLIF

SEQ ID NO: 391212 - protein, 13 aa, Homo sapiens
  CDR3 for beta chain variable domain of TCR clone 195606 (TRBV15, TRBJ1-6)
CATSGGLNSPLHF

SEQ ID NO: 391213 - protein, 11 aa, Homo sapiens
  CDR3 for alpha chain variable domain of TCR clone 195607 (TRAV12-3, TRAJ27)
CAMANAGKATF

SEQ ID NO: 391214 - protein, 13 aa, Homo sapiens
  CDR3 for beta chain variable domain of TCR clone 195607 (TRBV20-1, TRBJ1-1)
CSARVDGNTEAFF

SEQ ID NO: 391215 - protein, 13 aa, Homo sapiens
  CDR3 for alpha chain variable domain of TCR clone 195608 (TRAV2, TRAJ29)
CAAQNSGNTPLVF

SEQ ID NO: 391216 - protein, 15 aa, Homo sapiens
  CDR3 for beta chain variable domain of TCR clone 195608 (TRBV7-6, TRBJ1-5)
CASSQSSGINQPQHF

SEQ ID NO: 391217 - protein, 13 aa, Homo sapiens
  CDR3 for alpha chain variable domain of TCR clone 195609 (TRAV8-3, TRAJ36)
CAVGATGANNLFF

SEQ ID NO: 391218 - protein, 14 aa, Homo sapiens
  CDR3 for beta chain variable domain of TCR clone 195609 (TRBV7-3, TRBJ1-1)
CASSLGTGYTEAFF

SEQ ID NO: 391219 - protein, 15 aa, Homo sapiens
  CDR3 for alpha chain variable domain of TCR clone 195610 (TRAV27, TRAJ38)
CAGRFNAGTNRKLIW

SEQ ID NO: 391220 - protein, 13 aa, Homo sapiens
  CDR3 for beta chain variable domain of TCR clone 195610 (TRBV20-1, TRBJ2-1)
TSGALPPGNEQFF

SEQ ID NO: 391221 - protein, 18 aa, Homo sapiens
  CDR3 for alpha chain variable domain of TCR clone 195611 (TRAV13-2, TRAJ52)
CAETPLNAGGTSYGKLTF

SEQ ID NO: 391222 - protein, 15 aa, Homo sapiens
  CDR3 for beta chain variable domain of TCR clone 195611 (TRBV6-3, TRBJ2-7)
CASSSPGTVFYEQYF

SEQ ID NO: 391223 - protein, 14 aa, Homo sapiens
  CDR3 for alpha chain variable domain of TCR clone 195612 (TRAV35, TRAJ13)
CAGSPSGGYQKVTF

SEQ ID NO: 391224 - protein, 17 aa, Homo sapiens
  CDR3 for beta chain variable domain of TCR clone 195612 (TRBV7-6, TRBJ2-5)
CASSPGLADPWGETQYL

SEQ ID NO: 391225 - protein, 14 aa, Homo sapiens
  CDR3 for alpha chain variable domain of TCR clone 195613 (TRAV1-1, TRAJ27)
CAVTYNTNAGKSTF

SEQ ID NO: 391226 - protein, 15 aa, Homo sapiens
  CDR3 for beta chain variable domain of TCR clone 195613 (TRBV6-3, TRBJ2-7)
CASSSPGTVFYEQYF

SEQ ID NO: 391227 - protein, 12 aa, Homo sapiens
  CDR3 for alpha chain variable domain of TCR clone 195614 (TRAV12-1, TRAJ40)
FVWPSGTYKYIF

SEQ ID NO: 391228 - protein, 15 aa, Homo sapiens
  CDR3 for beta chain variable domain of TCR clone 195614 (TRBV12-4, TRBJ2-1)
CASSPLSGRNSEQFF

SEQ ID NO: 391229 - protein, 15 aa, Homo sapiens
  CDR3 for alpha chain variable domain of TCR clone 195615 (TRAV17, TRAJ56)
CATDANTGANSKLTF

SEQ ID NO: 391230 - protein, 16 aa, Homo sapiens
  CDR3 for beta chain variable domain of TCR clone 195615 (TRBV19, TRBJ1-5)
CASSLGTGVSPSILVM

SEQ ID NO: 391231 - protein, 13 aa, Homo sapiens
  CDR3 for alpha chain variable domain of TCR clone 195616 (TRAV8-3, TRAJ21)
CAVGLDNFNKFYF

SEQ ID NO: 391232 - protein, 18 aa, Homo sapiens
  CDR3 for beta chain variable domain of TCR clone 195616 (TRBV11-2, TRBJ2-3)
CASSLGGASRGAPNTQYF

SEQ ID NO: 391233 - protein, 12 aa, Homo sapiens
  CDR3 for alpha chain variable domain of TCR clone 195617 (TRAV1-2, TRAJ29)
CVVPSGNTPLVF

SEQ ID NO: 391234 - protein, 12 aa, Homo sapiens
  CDR3 for beta chain variable domain of TCR clone 195617 (TRBV7-9, TRBJ2-7)
CASSFGSYEQYF

SEQ ID NO: 391235 - protein, 15 aa, Homo sapiens
  CDR3 for alpha chain variable domain of TCR clone 195618 (TRAV29/DV5, TRAJ24)
CAASGATDSWGKSQF

SEQ ID NO: 391236 - protein, 13 aa, Homo sapiens
  CDR3 for beta chain variable domain of TCR clone 195618 (TRBV19, TRBJ1-2)
CASSVPGQDGYTF

SEQ ID NO: 391237 - protein, 12 aa, Homo sapiens
  CDR3 for alpha chain variable domain of TCR clone 195619 (TRAV35, TRAJ30)
CAGLNRDEKIIF

SEQ ID NO: 391238 - protein, 15 aa, Homo sapiens
  CDR3 for beta chain variable domain of TCR clone 195619 (TRBV18, TRBJ2-3)
CASPPLAGETDTQYF

SEQ ID NO: 391239 - protein, 13 aa, Homo sapiens
  CDR3 for alpha chain variable domain of TCR clone 195620 (TRAV16, TRAJ26)
CITVLCLGQNFVF

SEQ ID NO: 391240 - protein, 14 aa, Homo sapiens
  CDR3 for beta chain variable domain of TCR clone 195620 (TRBV7-3, TRBJ2-1)
CASSLAGGTNEQFF

SEQ ID NO: 391241 - protein, 18 aa, Homo sapiens
  CDR3 for alpha chain variable domain of TCR clone 195621 (TRAV29/DV5, TRAJ52)
CAAGFRGAGGTSYGKLTF

SEQ ID NO: 391242 - protein, 16 aa, Homo sapiens
  CDR3 for beta chain variable domain of TCR clone 195621 (TRBV7-3, TRBJ2-2)
CASSLKRWTLSGELFF

SEQ ID NO: 391243 - protein, 21 aa, Homo sapiens
  CDR3 for alpha chain variable domain of TCR clone 195622 (TRAV8-3, TRAJ6)
CAVGGEEATYLHLEEEPAVLF

SEQ ID NO: 391244 - protein, 14 aa, Homo sapiens
  CDR3 for beta chain variable domain of TCR clone 195622 (TRBV5-1, TRBJ2-7)
CASSRGESLYEQYF

SEQ ID NO: 391245 - protein, 14 aa, Homo sapiens
  CDR3 for alpha chain variable domain of TCR clone 195623 (TRAV25, TRAJ35)
YARRMEGFGNVLHC

SEQ ID NO: 391246 - protein, 13 aa, Homo sapiens
  CDR3 for beta chain variable domain of TCR clone 195623 (TRBV7-2, TRBJ1-4)
CASSLAGLGKLFF

SEQ ID NO: 391247 - protein, 10 aa, Homo sapiens
  CDR3 for alpha chain variable domain of TCR clone 195624 (TRAV12-1, TRAJ37)
ARGNTGELLF

SEQ ID NO: 391248 - protein, 15 aa, Homo sapiens
  CDR3 for beta chain variable domain of TCR clone 195624 (TRBV7-2, TRBJ2-3)
CASSLEQGGTDTQYF

SEQ ID NO: 391249 - protein, 16 aa, Homo sapiens
  CDR3 for alpha chain variable domain of TCR clone 195625 (TRAV8-4, TRAJ18)
CAVTANGGSTLGRPYF

SEQ ID NO: 391250 - protein, 14 aa, Homo sapiens
  CDR3 for beta chain variable domain of TCR clone 195625 (TRBV12-4, TRBJ1-2)
CASSSAGHIYGYTF

SEQ ID NO: 391251 - protein, 14 aa, Homo sapiens
  CDR3 for alpha chain variable domain of TCR clone 195626 (TRAV13-2, TRAJ17)
CAEDSKAAGNKLTF

SEQ ID NO: 391252 - protein, 20 aa, Homo sapiens
  CDR3 for beta chain variable domain of TCR clone 195626 (TRBV28, TRBJ2-1)
CASTPIGRSPGLAGGNEQFF

SEQ ID NO: 391253 - protein, 14 aa, Homo sapiens
  CDR3 for alpha chain variable domain of TCR clone 195627 (TRAV21, TRAJ35)
CAVMPIGFGNVLHC

SEQ ID NO: 391254 - protein, 13 aa, Homo sapiens
  CDR3 for beta chain variable domain of TCR clone 195627 (TRBV7-2, TRBJ1-1)
CASSRNTNTEAFF

SEQ ID NO: 391255 - protein, 11 aa, Homo sapiens
  CDR3 for alpha chain variable domain of TCR clone 195628 (TRAV13-1, TRAJ8)
CAARGFQKLVF

SEQ ID NO: 391256 - protein, 16 aa, Homo sapiens
  CDR3 for beta chain variable domain of TCR clone 195628 (TRBV19, TRBJ1-5)
CASSTRWTRSNQPQHF

SEQ ID NO: 391257 - protein, 14 aa, Homo sapiens
  CDR3 for alpha chain variable domain of TCR clone 195629 (TRAV13-1, TRAJ12)
CAASYMDSSYNLIF

SEQ ID NO: 391258 - protein, 13 aa, Homo sapiens
  CDR3 for beta chain variable domain of TCR clone 195629 (TRBV2, TRBJ2-5)
CASSDGIQETQYF

SEQ ID NO: 391259 - protein, 14 aa, Homo sapiens
  CDR3 for alpha chain variable domain of TCR clone 195630 (TRAV1-2, TRAJ8)
CSVREDTGFQKLVF

SEQ ID NO: 391260 - protein, 14 aa, Homo sapiens
  CDR3 for beta chain variable domain of TCR clone 195630 (TRBV5-4, TRBJ1-1)
CASSLDSRRDEAFF

SEQ ID NO: 391261 - protein, 12 aa, Homo sapiens
  CDR3 for alpha chain variable domain of TCR clone 195631 (TRAV17, TRAJ53)
CAGGGSDYKLTF

SEQ ID NO: 391262 - protein, 16 aa, Homo sapiens
  CDR3 for beta chain variable domain of TCR clone 195631 (TRBV11-2, TRBJ2-3)
CASRFQGRGALDTQYF

SEQ ID NO: 391263 - protein, 13 aa, Homo sapiens
  CDR3 for alpha chain variable domain of TCR clone 195632 (TRAV27, TRAJ57)
CRSAQGGSEKMVF

SEQ ID NO: 391264 - protein, 11 aa, Homo sapiens
  CDR3 for beta chain variable domain of TCR clone 195632 (TRBV11-2, TRBJ1-1)
CASSINTEAFF

SEQ ID NO: 391265 - protein, 12 aa, Homo sapiens
  CDR3 for alpha chain variable domain of TCR clone 195633 (TRAV3, TRAJ43)
CAVRDPNNDMRF

SEQ ID NO: 391266 - protein, 15 aa, Homo sapiens
  CDR3 for beta chain variable domain of TCR clone 195633 (TRBV4-3, TRBJ2-7)
CARSQGDWGDYEQYF

SEQ ID NO: 391267 - protein, 17 aa, Homo sapiens
  CDR3 for alpha chain variable domain of TCR clone 195634 (TRAV3, TRAJ6)
CAVSDGPRAGGRYIPTF

SEQ ID NO: 391268 - protein, 14 aa, Homo sapiens
  CDR3 for beta chain variable domain of TCR clone 195634 (TRBV6-1, TRBJ1-3)
CASVQGGGGNTIYF

SEQ ID NO: 391269 - protein, 14 aa, Homo sapiens
  CDR3 for alpha chain variable domain of TCR clone 195635 (TRAV25, TRAJ9)
CAGPGNTGGFKTIF

SEQ ID NO: 391270 - protein, 13 aa, Homo sapiens
  CDR3 for beta chain variable domain of TCR clone 195635 (TRBV7-2, TRBJ1-1)
CASNLKGAKVAFF

SEQ ID NO: 391271 - protein, 18 aa, Homo sapiens
  CDR3 for alpha chain variable domain of TCR clone 195636 (TRAV26-1, TRAJ39)
CCVLLHRWGSRAGNMLTF

SEQ ID NO: 391272 - protein, 15 aa, Homo sapiens
  CDR3 for beta chain variable domain of TCR clone 195636 (TRBV28, TRBJ2-5)
CASSPGQGSIETQYF

SEQ ID NO: 391273 - protein, 14 aa, Homo sapiens
  CDR3 for alpha chain variable domain of TCR clone 195637 (TRAV17, TRAJ35)
CATDRPGFGNVLHC

SEQ ID NO: 391274 - protein, 13 aa, Homo sapiens
  CDR3 for beta chain variable domain of TCR clone 195637 (TRBV20-1, TRBJ1-1)
CSARGGGNTEAFF

SEQ ID NO: 391275 - protein, 12 aa, Homo sapiens
  CDR3 for alpha chain variable domain of TCR clone 195638 (TRAV13-1, TRAJ9)
CASHTGGFKTIF

SEQ ID NO: 391276 - protein, 18 aa, Homo sapiens
  CDR3 for beta chain variable domain of TCR clone 195638 (TRBV11-2, TRBJ2-3)
CAGSLGGAARGAPNTQYF

SEQ ID NO: 391277 - protein, 13 aa, Homo sapiens
  CDR3 for alpha chain variable domain of TCR clone 195639 (TRAV8-3, TRAJ36)
CAVGATGANNLFF

SEQ ID NO: 391278 - protein, 15 aa, Homo sapiens
  CDR3 for beta chain variable domain of TCR clone 195639 (TRBV7-2, TRBJ1-2)
CASSPRAGWNDGYTF

SEQ ID NO: 391279 - protein, 15 aa, Homo sapiens
  CDR3 for alpha chain variable domain of TCR clone 195640 (TRAV2, TRAJ9)
CAVEDRGTGGFKTVF

SEQ ID NO: 391280 - protein, 15 aa, Homo sapiens
  CDR3 for beta chain variable domain of TCR clone 195640 (TRBV7-3, TRBJ2-2)
CASSETGRGTGELFF

SEQ ID NO: 391281 - protein, 12 aa, Homo sapiens
  CDR3 for alpha chain variable domain of TCR clone 195641 (TRAV8-3, TRAJ20)
CAVGANDYKVSF

SEQ ID NO: 391282 - protein, 16 aa, Homo sapiens
  CDR3 for beta chain variable domain of TCR clone 195641 (TRBV19, TRBJ2-2)
CASRSPGTGATGELFF

SEQ ID NO: 391283 - protein, 23 aa, Homo sapiens
  CDR3 for alpha chain variable domain of TCR clone 195642 (TRAV12-2, TRAJ36)
SLLIRDSQPSDSATLERANNLFF

SEQ ID NO: 391284 - protein, 12 aa, Homo sapiens
  CDR3 for beta chain variable domain of TCR clone 195642 (TRBV11-2, TRBJ2-2)
CASSLGGGELFF

SEQ ID NO: 391285 - protein, 14 aa, Homo sapiens
  CDR3 for alpha chain variable domain of TCR clone 195643 (TRAV12-3, TRAJ10)
SHLPLTGGGNKLTF

SEQ ID NO: 391286 - protein, 16 aa, Homo sapiens
  CDR3 for beta chain variable domain of TCR clone 195643 (TRBV27, TRBJ2-2)
CASSLRPGGAPGELFF

SEQ ID NO: 391287 - protein, 12 aa, Homo sapiens
  CDR3 for alpha chain variable domain of TCR clone 195644 (TRAV29/DV5, TRAJ49)
CAATDTGNQFYF

SEQ ID NO: 391288 - protein, 11 aa, Homo sapiens
  CDR3 for beta chain variable domain of TCR clone 195644 (TRBV7-6, TRBJ2-1)
CASSNYGEQFF

SEQ ID NO: 391289 - protein, 11 aa, Homo sapiens
  CDR3 for alpha chain variable domain of TCR clone 195645 (TRAV21, TRAJ34)
CAHYNTDKLIF

SEQ ID NO: 391290 - protein, 14 aa, Homo sapiens
  CDR3 for beta chain variable domain of TCR clone 195645 (TRBV2, TRBJ2-5)
CASTWGRAQETQYF

SEQ ID NO: 391291 - protein, 14 aa, Homo sapiens
  CDR3 for alpha chain variable domain of TCR clone 195646 (TRAV8-3, TRAJ35)
CAVVPQGFGNVLHC

SEQ ID NO: 391292 - protein, 15 aa, Homo sapiens
  CDR3 for beta chain variable domain of TCR clone 195646 (TRBV5-1, TRBJ2-7)
CASSLNGGPAREQYF

SEQ ID NO: 391293 - protein, 16 aa, Homo sapiens
  CDR3 for alpha chain variable domain of TCR clone 195647 (TRAV8-3, TRAJ13)
CAVGAYPSGGYQQVTF

SEQ ID NO: 391294 - protein, 15 aa, Homo sapiens
  CDR3 for beta chain variable domain of TCR clone 195647 (TRBV19, TRBJ1-5)
CASSVVWADNQPQHF

SEQ ID NO: 391295 - protein, 15 aa, Homo sapiens
  CDR3 for alpha chain variable domain of TCR clone 195648 (TRAV16, TRAJ16)
CSKWPGHRDGQKLLF

SEQ ID NO: 391296 - protein, 14 aa, Homo sapiens
  CDR3 for beta chain variable domain of TCR clone 195648 (TRBV7-9, TRBJ2-4)
CASTTGGAKNSQYF

SEQ ID NO: 391297 - protein, 18 aa, Homo sapiens
  CDR3 for alpha chain variable domain of TCR clone 195649 (TRAV29/DV5, TRAJ52)
CAAGFRGAGGTSYGKLTF

SEQ ID NO: 391298 - protein, 15 aa, Homo sapiens
  CDR3 for beta chain variable domain of TCR clone 195649 (TRBV7-3, TRBJ2-2)
CQQLKAGDLSGELFF

SEQ ID NO: 391299 - protein, 18 aa, Homo sapiens
  CDR3 for alpha chain variable domain of TCR clone 195650 (TRAV9-2, TRAJ52)
CSLRGPAPGGTSYGKLTF

SEQ ID NO: 391300 - protein, 15 aa, Homo sapiens
  CDR3 for beta chain variable domain of TCR clone 195650 (TRBV6-3, TRBJ2-7)
CASSSPGTVFYEQYF

SEQ ID NO: 391301 - protein, 13 aa, Homo sapiens
  CDR3 for alpha chain variable domain of TCR clone 195651 (TRAV12-3, TRAJ9)
CAMRNNGGFKTIS

SEQ ID NO: 391302 - protein, 13 aa, Homo sapiens
  CDR3 for beta chain variable domain of TCR clone 195651 (TRBV27, TRBJ2-1)
CASRTLGVGEQFF

SEQ ID NO: 391303 - protein, 12 aa, Homo sapiens
  CDR3 for alpha chain variable domain of TCR clone 195652 (TRAV12-3, TRAJ17)
CAMTLTGNKLTF

SEQ ID NO: 391304 - protein, 16 aa, Homo sapiens
  CDR3 for beta chain variable domain of TCR clone 195652 (TRBV7-2, TRBJ2-7)
CASRSQGRRTSSTSGR

SEQ ID NO: 391305 - protein, 13 aa, Homo sapiens
  CDR3 for alpha chain variable domain of TCR clone 195653 (TRAV12-1, TRAJ39)
CVVNYNAGNMLTS

SEQ ID NO: 391306 - protein, 12 aa, Homo sapiens
  CDR3 for beta chain variable domain of TCR clone 195653 (TRBV5-7, TRBJ1-1)
CGSSLGRGKAFF

SEQ ID NO: 391307 - protein, 15 aa, Homo sapiens
  CDR3 for alpha chain variable domain of TCR clone 195654 (TRAV8-6, TRAJ10)
CAGRDQAGGGNKLTF

SEQ ID NO: 391308 - protein, 15 aa, Homo sapiens
  CDR3 for beta chain variable domain of TCR clone 195654 (TRBV3-1, TRBJ2-5)
CASSANLGGPETQYF

SEQ ID NO: 391309 - protein, 11 aa, Homo sapiens
  CDR3 for alpha chain variable domain of TCR clone 195655 (TRAV3, TRAJ17)
PRGAAGNKLTF

SEQ ID NO: 391310 - protein, 12 aa, Homo sapiens
  CDR3 for beta chain variable domain of TCR clone 195655 (TRBV7-8, TRBJ2-7)
CASSLGDREQYF

SEQ ID NO: 391311 - protein, 13 aa, Homo sapiens
  CDR3 for alpha chain variable domain of TCR clone 195656 (TRAV12-3, TRAJ43)
CAMIRPNKNDMRF

SEQ ID NO: 391312 - protein, 12 aa, Homo sapiens
  CDR3 for beta chain variable domain of TCR clone 195656 (TRBV11-2, TRBJ2-5)
CASSVGQETQYF

SEQ ID NO: 391313 - protein, 12 aa, Homo sapiens
  CDR3 for alpha chain variable domain of TCR clone 195657 (TRAV12-3, TRAJ17)
CAMTLTGNKLTF

SEQ ID NO: 391314 - protein, 11 aa, Homo sapiens
  CDR3 for beta chain variable domain of TCR clone 195657 (TRBV20-1, TRBJ1-2)
CSVQGAGGYTF

SEQ ID NO: 391315 - protein, 17 aa, Homo sapiens
  CDR3 for alpha chain variable domain of TCR clone 195658 (TRAV3, TRAJ42)
CAVRDRDYGGSQGNLIF

SEQ ID NO: 391316 - protein, 12 aa, Homo sapiens
  CDR3 for beta chain variable domain of TCR clone 195658 (TRBV11-2, TRBJ2-1)
CASSRGNNEQFF

SEQ ID NO: 391317 - protein, 13 aa, Homo sapiens
  CDR3 for alpha chain variable domain of TCR clone 195659 (TRAV3, TRAJ21)
CAVREPDFDKFYF

SEQ ID NO: 391318 - protein, 15 aa, Homo sapiens
  CDR3 for beta chain variable domain of TCR clone 195659 (TRBV2, TRBJ2-1)
CASSELAGGYNEQFF

SEQ ID NO: 391319 - protein, 14 aa, Homo sapiens
  CDR3 for alpha chain variable domain of TCR clone 195660 (TRAV12-1, TRAJ23)
CVVIVYNQGGKRIF

SEQ ID NO: 391320 - protein, 13 aa, Homo sapiens
  CDR3 for beta chain variable domain of TCR clone 195660 (TRBV11-2, TRBJ2-5)
CASSFSSQETQYF

SEQ ID NO: 391321 - protein, 14 aa, Homo sapiens
  CDR3 for alpha chain variable domain of TCR clone 195661 (TRAV22, TRAJ40)
CAVAPTSGTYNYIF

SEQ ID NO: 391322 - protein, 16 aa, Homo sapiens
  CDR3 for beta chain variable domain of TCR clone 195661 (TRBV5-1, TRBJ2-7)
CASSFTTGTALVEQYF

SEQ ID NO: 391323 - protein, 14 aa, Homo sapiens
  CDR3 for alpha chain variable domain of TCR clone 195662 (TRAV35, TRAJ13)
CAGSPSGGYQKVSF

SEQ ID NO: 391324 - protein, 13 aa, Homo sapiens
  CDR3 for beta chain variable domain of TCR clone 195662 (TRBV29-1, TRBJ1-1)
CSVGDSRNTEAFF

SEQ ID NO: 391325 - protein, 17 aa, Homo sapiens
  CDR3 for alpha chain variable domain of TCR clone 195663 (TRAV3, TRAJ7)
CAVRDMSPLEGTTDSLL

SEQ ID NO: 391326 - protein, 13 aa, Homo sapiens
  CDR3 for beta chain variable domain of TCR clone 195663 (TRBV9, TRBJ2-7)
CASSVAEYYEQYF

SEQ ID NO: 391327 - protein, 14 aa, Homo sapiens
  CDR3 for alpha chain variable domain of TCR clone 195664 (TRAV35, TRAJ13)
FAGSPSGGYQKVTF

SEQ ID NO: 391328 - protein, 13 aa, Homo sapiens
  CDR3 for beta chain variable domain of TCR clone 195664 (TRBV29-1, TRBJ1-1)
CSVGDSRNTEAFS

SEQ ID NO: 391329 - protein, 13 aa, Homo sapiens
  CDR3 for alpha chain variable domain of TCR clone 195665 (TRAV8-3, TRAJ48)
CAVFPFGNEKLTF

SEQ ID NO: 391330 - protein, 15 aa, Homo sapiens
  CDR3 for beta chain variable domain of TCR clone 195665 (TRBV11-2, TRBJ2-1)
CASSSPSTRYNEQFF

SEQ ID NO: 391331 - protein, 13 aa, Homo sapiens
  CDR3 for alpha chain variable domain of TCR clone 195666 (TRAV12-2, TRAJ4)
CAVRSGSYNKLIF

SEQ ID NO: 391332 - protein, 15 aa, Homo sapiens
  CDR3 for beta chain variable domain of TCR clone 195666 (TRBV10-3, TRBJ2-1)
CAISDVQDRAYEQFF

SEQ ID NO: 391333 - protein, 16 aa, Homo sapiens
  CDR3 for alpha chain variable domain of TCR clone 195667 (TRAV12-2, TRAJ32)
CAVNFGQGGATNKLIF

SEQ ID NO: 391334 - protein, 12 aa, Homo sapiens
  CDR3 for beta chain variable domain of TCR clone 195667 (TRBV29-1, TRBJ2-3)
CSVTGGADTQYF

SEQ ID NO: 391335 - protein, 15 aa, Homo sapiens
  CDR3 for alpha chain variable domain of TCR clone 195668 (TRAV20, TRAJ16)
CAVQIRFSDGQKLLF

SEQ ID NO: 391336 - protein, 13 aa, Homo sapiens
  CDR3 for beta chain variable domain of TCR clone 195668 (TRBV19, TRBJ1-2)
CASSVPGQDGYTF

SEQ ID NO: 391337 - protein, 13 aa, Homo sapiens
  CDR3 for alpha chain variable domain of TCR clone 195669 (TRAV17, TRAJ40)
CAGALGGTYKYIF

SEQ ID NO: 391338 - protein, 16 aa, Homo sapiens
  CDR3 for beta chain variable domain of TCR clone 195669 (TRBV7-8, TRBJ1-4)
CASSLAPGRRDEKLFF

SEQ ID NO: 391339 - protein, 14 aa, Homo sapiens
  CDR3 for alpha chain variable domain of TCR clone 195670 (TRAV1-2, TRAJ16)
CAVNRFSDGQKLLF

SEQ ID NO: 391340 - protein, 15 aa, Homo sapiens
  CDR3 for beta chain variable domain of TCR clone 195670 (TRBV18, TRBJ2-1)
CANLPDRGRDNEQFF

SEQ ID NO: 391341 - protein, 14 aa, Homo sapiens
  CDR3 for alpha chain variable domain of TCR clone 195671 (TRAV29/DV5, TRAJ36)
CAARRKTWANNLFF

SEQ ID NO: 391342 - protein, 14 aa, Homo sapiens
  CDR3 for beta chain variable domain of TCR clone 195671 (TRBV6-1, TRBJ1-3)
CASVQGGGGNTIYF

SEQ ID NO: 391343 - protein, 11 aa, Homo sapiens
  CDR3 for alpha chain variable domain of TCR clone 195672 (TRAV17, TRAJ36)
CAPTGANNLFF

SEQ ID NO: 391344 - protein, 14 aa, Homo sapiens
  CDR3 for beta chain variable domain of TCR clone 195672 (TRBV25-1, TRBJ1-1)
CASTHLGGNTEAFF

SEQ ID NO: 391345 - protein, 18 aa, Homo sapiens
  CDR3 for alpha chain variable domain of TCR clone 195673 (TRAV3, TRAJ17)
CAVRARRGGRSCRQQANF

SEQ ID NO: 391346 - protein, 13 aa, Homo sapiens
  CDR3 for beta chain variable domain of TCR clone 195673 (TRBV2, TRBJ2-7)
CASSVGGSGEQYF

SEQ ID NO: 391347 - protein, 14 aa, Homo sapiens
  CDR3 for alpha chain variable domain of TCR clone 195674 (TRAV13-1, TRAJ44)
CAAKATGTASKLTF

SEQ ID NO: 391348 - protein, 17 aa, Homo sapiens
  CDR3 for beta chain variable domain of TCR clone 195674 (TRBV7-3, TRBJ2-3)
CARSLMKRMRGADTQYF

SEQ ID NO: 391349 - protein, 14 aa, Homo sapiens
  CDR3 for alpha chain variable domain of TCR clone 195675 (TRAV1-2, TRAJ8)
CAVREDTGFQKLVL

SEQ ID NO: 391350 - protein, 15 aa, Homo sapiens
  CDR3 for beta chain variable domain of TCR clone 195675 (TRBV7-3, TRBJ2-2)
CASSETGQGTGEMFF

SEQ ID NO: 391351 - protein, 14 aa, Homo sapiens
  CDR3 for alpha chain variable domain of TCR clone 195676 (TRAV1-2, TRAJ8)
CAGREDTGFQKLVF

SEQ ID NO: 391352 - protein, 16 aa, Homo sapiens
  CDR3 for beta chain variable domain of TCR clone 195676 (TRBV12-5, TRBJ2-5)
CASGPRTSGNQETQYF

SEQ ID NO: 391353 - protein, 16 aa, Homo sapiens
  CDR3 for alpha chain variable domain of TCR clone 195677 (TRAV3, TRAJ21)
CAVRDIERGNFNKFYF

SEQ ID NO: 391354 - protein, 16 aa, Homo sapiens
  CDR3 for beta chain variable domain of TCR clone 195677 (TRBV24-1, TRBJ2-3)
CATSDPGTGATDTQYF

SEQ ID NO: 391355 - protein, 12 aa, Homo sapiens
  CDR3 for alpha chain variable domain of TCR clone 195678 (TRAV8-3, TRAJ26)
CAGDNYGQNFVF

SEQ ID NO: 391356 - protein, 14 aa, Homo sapiens
  CDR3 for beta chain variable domain of TCR clone 195678 (TRBV7-8, TRBJ2-5)
CASSATGGQETQYF

SEQ ID NO: 391357 - protein, 14 aa, Homo sapiens
  CDR3 for alpha chain variable domain of TCR clone 195679 (TRAV12-3, TRAJ10)
SHLPLTGVGNKLTF

SEQ ID NO: 391358 - protein, 13 aa, Homo sapiens
  CDR3 for beta chain variable domain of TCR clone 195679 (TRBV2, TRBJ1-6)
CADSGSYNSTLHF

SEQ ID NO: 391359 - protein, 15 aa, Homo sapiens
  CDR3 for alpha chain variable domain of TCR clone 195680 (TRAV1-1, TRAJ10)
CLLLLRGGGGNKLTF

SEQ ID NO: 391360 - protein, 15 aa, Homo sapiens
  CDR3 for beta chain variable domain of TCR clone 195680 (TRBV18, TRBJ2-1)
CASSPPSASYNEQFF

SEQ ID NO: 391361 - protein, 12 aa, Homo sapiens
  CDR3 for alpha chain variable domain of TCR clone 195681 (TRAV12-3, TRAJ40)
CAVSSGTYKYIF

SEQ ID NO: 391362 - protein, 16 aa, Homo sapiens
  CDR3 for beta chain variable domain of TCR clone 195681 (TRBV7-3, TRBJ2-2)
CASSLKRGTLSGELFF

SEQ ID NO: 391363 - protein, 14 aa, Homo sapiens
  CDR3 for alpha chain variable domain of TCR clone 195682 (TRAV38-1, TRAJ45)
CAYYSGGGADGLTF

SEQ ID NO: 391364 - protein, 14 aa, Homo sapiens
  CDR3 for beta chain variable domain of TCR clone 195682 (TRBV25-1, TRBJ1-1)
CASTYLGGNTEAFF

SEQ ID NO: 391365 - protein, 13 aa, Homo sapiens
  CDR3 for alpha chain variable domain of TCR clone 195683 (TRAV35, TRAJ53)
CAGQESSNYKLTF

SEQ ID NO: 391366 - protein, 11 aa, Homo sapiens
  CDR3 for beta chain variable domain of TCR clone 195683 (TRBV29-1, TRBJ2-5)
CSEDRTGTQHF

SEQ ID NO: 391367 - protein, 14 aa, Homo sapiens
  CDR3 for alpha chain variable domain of TCR clone 195684 (TRAV12-2, TRAJ40)
CAVKIPSGTYKYIF

SEQ ID NO: 391368 - protein, 17 aa, Homo sapiens
  CDR3 for beta chain variable domain of TCR clone 195684 (TRBV4-3, TRBJ2-1)
CASSQFSSGRASGEQFF

SEQ ID NO: 391369 - protein, 16 aa, Homo sapiens
  CDR3 for alpha chain variable domain of TCR clone 195685 (TRAV3, TRAJ10)
CAVRDMRAGGGNKLTF

SEQ ID NO: 391370 - protein, 19 aa, Homo sapiens
  CDR3 for beta chain variable domain of TCR clone 195685 (TRBV7-2, TRBJ2-3)
CASSFLSRNWGGGTDTQYF

SEQ ID NO: 391371 - protein, 13 aa, Homo sapiens
  CDR3 for alpha chain variable domain of TCR clone 195686 (TRAV12-3, TRAJ7)
CASTPYGNNRLAF

SEQ ID NO: 391372 - protein, 16 aa, Homo sapiens
  CDR3 for beta chain variable domain of TCR clone 195686 (TRBV20-1, TRBJ1-4)
CSARPYGGELNEKLFF

SEQ ID NO: 391373 - protein, 12 aa, Homo sapiens
  CDR3 for alpha chain variable domain of TCR clone 195687 (TRAV1-1, TRAJ39)
CAVPVVGNMLTF

SEQ ID NO: 391374 - protein, 13 aa, Homo sapiens
  CDR3 for beta chain variable domain of TCR clone 195687 (TRBV4-1, TRBJ2-1)
CASSQAGGDEQFF

SEQ ID NO: 391375 - protein, 15 aa, Homo sapiens
  CDR3 for alpha chain variable domain of TCR clone 195688 (TRAV13-1, TRAJ52)
CAATSPRTSYRKLTF

SEQ ID NO: 391376 - protein, 12 aa, Homo sapiens
  CDR3 for beta chain variable domain of TCR clone 195688 (TRBV7-8, TRBJ2-7)
CASSLGDREQYF

SEQ ID NO: 391377 - protein, 11 aa, Homo sapiens
  CDR3 for alpha chain variable domain of TCR clone 195689 (TRAV23/DV6, TRAJ58)
CAVRLLREETS

SEQ ID NO: 391378 - protein, 13 aa, Homo sapiens
  CDR3 for beta chain variable domain of TCR clone 195689 (TRBV6-4, TRBJ1-5)
CASSADLNQPQHF

SEQ ID NO: 391379 - protein, 12 aa, Homo sapiens
  CDR3 for alpha chain variable domain of TCR clone 195690 (TRAV10, TRAJ43)
CVVVRVGNDMRF

SEQ ID NO: 391380 - protein, 15 aa, Homo sapiens
  CDR3 for beta chain variable domain of TCR clone 195690 (TRBV2, TRBJ2-7)
CASSAGLARSYEQYF

SEQ ID NO: 391381 - protein, 13 aa, Homo sapiens
  CDR3 for alpha chain variable domain of TCR clone 195691 (TRAV8-3, TRAJ43)
CAVVPYNNNDMRF

SEQ ID NO: 391382 - protein, 16 aa, Homo sapiens
  CDR3 for beta chain variable domain of TCR clone 195691 (TRBV7-2, TRBJ2-5)
CASSPFRTGGEETQYF

SEQ ID NO: 391383 - protein, 13 aa, Homo sapiens
  CDR3 for alpha chain variable domain of TCR clone 195692 (TRAV27, TRAJ11)
CAGALSGYSTLTF

SEQ ID NO: 391384 - protein, 16 aa, Homo sapiens
  CDR3 for beta chain variable domain of TCR clone 195692 (TRBV10-2, TRBJ2-2)
CASSESRDRGSGELFF

SEQ ID NO: 391385 - protein, 15 aa, Homo sapiens
  CDR3 for alpha chain variable domain of TCR clone 195693 (TRAV26-1, TRAJ44)
CIVRANTGTASKLTF

SEQ ID NO: 391386 - protein, 14 aa, Homo sapiens
  CDR3 for beta chain variable domain of TCR clone 195693 (TRBV7-2, TRBJ2-7)
CASSIDRGPREQYF

SEQ ID NO: 391387 - protein, 14 aa, Homo sapiens
  CDR3 for alpha chain variable domain of TCR clone 195694 (TRAV12-2, TRAJ5)
CAVNRSTGRRALTF

SEQ ID NO: 391388 - protein, 13 aa, Homo sapiens
  CDR3 for beta chain variable domain of TCR clone 195694 (TRBV27, TRBJ2-7)
CASSLTTGYEQYF

SEQ ID NO: 391389 - protein, 13 aa, Homo sapiens
  CDR3 for alpha chain variable domain of TCR clone 195695 (TRAV35, TRAJ42)
CAGFPGSQGNLIF

SEQ ID NO: 391390 - protein, 14 aa, Homo sapiens
  CDR3 for beta chain variable domain of TCR clone 195695 (TRBV19, TRBJ1-2)
CATSLQGQAYGYTF

SEQ ID NO: 391391 - protein, 15 aa, Homo sapiens
  CDR3 for alpha chain variable domain of TCR clone 195696 (TRAV8-3, TRAJ45)
CASSYSGGGADGLTF

SEQ ID NO: 391392 - protein, 13 aa, Homo sapiens
  CDR3 for beta chain variable domain of TCR clone 195696 (TRBV7-9, TRBJ2-5)
CASLPSGRETQYF

SEQ ID NO: 391393 - protein, 14 aa, Homo sapiens
  CDR3 for alpha chain variable domain of TCR clone 195697 (TRAV1-2, TRAJ16)
CAVNRSSDGQKLLF

SEQ ID NO: 391394 - protein, 16 aa, Homo sapiens
  CDR3 for beta chain variable domain of TCR clone 195697 (TRBV4-1, TRBJ2-3)
CASSQSTSGAEDTQYF

SEQ ID NO: 391395 - protein, 13 aa, Homo sapiens
  CDR3 for alpha chain variable domain of TCR clone 195698 (TRAV27, TRAJ57)
CRSAQGGSEKLVF

SEQ ID NO: 391396 - protein, 11 aa, Homo sapiens
  CDR3 for beta chain variable domain of TCR clone 195698 (TRBV11-2, TRBJ1-1)
CASSINTEAFV

SEQ ID NO: 391397 - protein, 15 aa, Homo sapiens
  CDR3 for alpha chain variable domain of TCR clone 195699 (TRAV8-3, TRAJ27)
CAVGPSKTNAGKSTF

SEQ ID NO: 391398 - protein, 13 aa, Homo sapiens
  CDR3 for beta chain variable domain of TCR clone 195699 (TRBV2, TRBJ1-5)
CATAGPGNQPQHF

SEQ ID NO: 391399 - protein, 13 aa, Homo sapiens
  CDR3 for alpha chain variable domain of TCR clone 195700 (TRAV23/DV6, TRAJ6)
CAAKTGGSYIPTF

SEQ ID NO: 391400 - protein, 15 aa, Homo sapiens
  CDR3 for beta chain variable domain of TCR clone 195700 (TRBV5-1, TRBJ1-2)
CASSSFGEFDYGYTF

SEQ ID NO: 391401 - protein, 15 aa, Homo sapiens
  CDR3 for alpha chain variable domain of TCR clone 195701 (TRAV13-1, TRAJ52)
CALRTGGTSYGKLTF

SEQ ID NO: 391402 - protein, 14 aa, Homo sapiens
  CDR3 for beta chain variable domain of TCR clone 195701 (TRBV20-1, TRBJ2-5)
CSASDSRSGETQHF

SEQ ID NO: 391403 - protein, 12 aa, Homo sapiens
  CDR3 for alpha chain variable domain of TCR clone 195702 (TRAV12-1, TRAJ20)
CVVNPDDYKLSF

SEQ ID NO: 391404 - protein, 16 aa, Homo sapiens
  CDR3 for beta chain variable domain of TCR clone 195702 (TRBV5-1, TRBJ1-1)
CASSSGGNSLNTEAFF

SEQ ID NO: 391405 - protein, 11 aa, Homo sapiens
  CDR3 for alpha chain variable domain of TCR clone 195703 (TRAV20, TRAJ31)
CAVQMRARLMF

SEQ ID NO: 391406 - protein, 16 aa, Homo sapiens
  CDR3 for beta chain variable domain of TCR clone 195703 (TRBV12-4, TRBJ2-5)
CASSFFVRGRQETQYF

SEQ ID NO: 391407 - protein, 14 aa, Homo sapiens
  CDR3 for alpha chain variable domain of TCR clone 195704 (TRAV26-1, TRAJ45)
CIEATGGGADGLTF

SEQ ID NO: 391408 - protein, 13 aa, Homo sapiens
  CDR3 for beta chain variable domain of TCR clone 195704 (TRBV7-6, TRBJ1-2)
CASSLVADYGYAF

SEQ ID NO: 391409 - protein, 16 aa, Homo sapiens
  CDR3 for alpha chain variable domain of TCR clone 195705 (TRAV16, TRAJ4)
CALSRMFSGGYNKLIF

SEQ ID NO: 391410 - protein, 17 aa, Homo sapiens
  CDR3 for beta chain variable domain of TCR clone 195705 (TRBV7-8, TRBJ1-2)
CASSLRPLQGHLYSYTF

SEQ ID NO: 391411 - protein, 11 aa, Homo sapiens
  CDR3 for alpha chain variable domain of TCR clone 195706 (TRAV12-2, TRAJ49)
CAVNTGNQFDF

SEQ ID NO: 391412 - protein, 12 aa, Homo sapiens
  CDR3 for beta chain variable domain of TCR clone 195706 (TRBV2, TRBJ2-3)
CASSGRFDTQYF

SEQ ID NO: 391413 - protein, 15 aa, Homo sapiens
  CDR3 for alpha chain variable domain of TCR clone 195707 (TRAV8-3, TRAJ6)
CAVGPLGGGSYIPTF

SEQ ID NO: 391414 - protein, 14 aa, Homo sapiens
  CDR3 for beta chain variable domain of TCR clone 195707 (TRBV19, TRBJ2-2)
CAGSTGQGAGELFF

SEQ ID NO: 391415 - protein, 12 aa, Homo sapiens
  CDR3 for alpha chain variable domain of TCR clone 195708 (TRAV12-3, TRAJ31)
CAMSVPNARLMF

SEQ ID NO: 391416 - protein, 14 aa, Homo sapiens
  CDR3 for beta chain variable domain of TCR clone 195708 (TRBV7-2, TRBJ2-7)
CASRSQGAAYEQYF

SEQ ID NO: 391417 - protein, 21 aa, Homo sapiens
  CDR3 for alpha chain variable domain of TCR clone 195709 (TRAV21, TRAJ27)
CAALNTNAGKSTLGDGAPLTV

SEQ ID NO: 391418 - protein, 14 aa, Homo sapiens
  CDR3 for beta chain variable domain of TCR clone 195709 (TRBV27, TRBJ1-1)
CASSLLSGLSEAFF

SEQ ID NO: 391419 - protein, 15 aa, Homo sapiens
  CDR3 for alpha chain variable domain of TCR clone 195710 (TRAV23/DV6, TRAJ13)
CAAWPGGGGYQKGTF

SEQ ID NO: 391420 - protein, 14 aa, Homo sapiens
  CDR3 for beta chain variable domain of TCR clone 195710 (TRBV25-1, TRBJ1-1)
CASTHLGGNTEAFF

SEQ ID NO: 391421 - protein, 11 aa, Homo sapiens
  CDR3 for alpha chain variable domain of TCR clone 195711 (TRAV2, TRAJ13)
CASGGYQKVTF

SEQ ID NO: 391422 - protein, 22 aa, Homo sapiens
  CDR3 for beta chain variable domain of TCR clone 195711 (TRBV6-1, TRBJ2-5)
CASSFYICSAPPRTGFGETQYF

SEQ ID NO: 391423 - protein, 16 aa, Homo sapiens
  CDR3 for alpha chain variable domain of TCR clone 195712 (TRAV3, TRAJ10)
FAVRDMRAGGGNKLTF

SEQ ID NO: 391424 - protein, 17 aa, Homo sapiens
  CDR3 for beta chain variable domain of TCR clone 195712 (TRBV28, TRBJ2-5)
CASSTPEGDALQETQYF

SEQ ID NO: 391425 - protein, 17 aa, Homo sapiens
  CDR3 for alpha chain variable domain of TCR clone 195713 (TRAV3, TRAJ6)
CAVRDGPRAGGSYITTF

SEQ ID NO: 391426 - protein, 16 aa, Homo sapiens
  CDR3 for beta chain variable domain of TCR clone 195713 (TRBV4-1, TRBJ2-7)
CASSLTAGQATYEQYF

SEQ ID NO: 391427 - protein, 15 aa, Homo sapiens
  CDR3 for alpha chain variable domain of TCR clone 195714 (TRAV8-3, TRAJ23)
CAVGDRYNQGGKLIF

SEQ ID NO: 391428 - protein, 13 aa, Homo sapiens
  CDR3 for beta chain variable domain of TCR clone 195714 (TRBV4-2, TRBJ1-1)
CASSQAGNTEAFF

SEQ ID NO: 391429 - protein, 10 aa, Homo sapiens
  CDR3 for alpha chain variable domain of TCR clone 195715 (TRAV30, TRAJ48)
CGIGNEKLTF

SEQ ID NO: 391430 - protein, 15 aa, Homo sapiens
  CDR3 for beta chain variable domain of TCR clone 195715 (TRBV28, TRBJ2-5)
CASSSGRTIQETQYF

SEQ ID NO: 391431 - protein, 15 aa, Homo sapiens
  CDR3 for alpha chain variable domain of TCR clone 195716 (TRAV12-2, TRAJ43)
CAFDMRFGAGTRLTV

SEQ ID NO: 391432 - protein, 17 aa, Homo sapiens
  CDR3 for beta chain variable domain of TCR clone 195716 (TRBV13, TRBJ2-3)
CASSISRVAGGRNTQYF

SEQ ID NO: 391433 - protein, 12 aa, Homo sapiens
  CDR3 for alpha chain variable domain of TCR clone 195717 (TRAV2, TRAJ34)
CAVERNTDKLIF

SEQ ID NO: 391434 - protein, 13 aa, Homo sapiens
  CDR3 for beta chain variable domain of TCR clone 195717 (TRBV7-2, TRBJ2-1)
CASSPVAYNEQFF

SEQ ID NO: 391435 - protein, 15 aa, Homo sapiens
  CDR3 for alpha chain variable domain of TCR clone 195718 (TRAV12-3, TRAJ10)
CASYILTGGGNKLTF

SEQ ID NO: 391436 - protein, 15 aa, Homo sapiens
  CDR3 for beta chain variable domain of TCR clone 195718 (TRBV7-2, TRBJ1-6)
CASSLGPDRGMPLDF

SEQ ID NO: 391437 - protein, 14 aa, Homo sapiens
  CDR3 for alpha chain variable domain of TCR clone 195719 (TRAV12-2, TRAJ44)
CAVNKAGTASKLTF

SEQ ID NO: 391438 - protein, 14 aa, Homo sapiens
  CDR3 for beta chain variable domain of TCR clone 195719 (TRBV25-1, TRBJ1-1)
CASTHLGGNTEAFF

SEQ ID NO: 391439 - protein, 13 aa, Homo sapiens
  CDR3 for alpha chain variable domain of TCR clone 195720 (TRAV36/DV7, TRAJ38)
WVPNAGNNRKLIW

SEQ ID NO: 391440 - protein, 14 aa, Homo sapiens
  CDR3 for beta chain variable domain of TCR clone 195720 (TRBV7-2, TRBJ2-7)
CASSLRWEVNEQYF

SEQ ID NO: 391441 - protein, 12 aa, Homo sapiens
  CDR3 for alpha chain variable domain of TCR clone 195721 (TRAV12-3, TRAJ17)
CAMTLTGNKLSF

SEQ ID NO: 391442 - protein, 13 aa, Homo sapiens
  CDR3 for beta chain variable domain of TCR clone 195721 (TRBV5-1, TRBJ1-1)
CASSADWDTEAFF

SEQ ID NO: 391443 - protein, 19 aa, Homo sapiens
  CDR3 for alpha chain variable domain of TCR clone 195722 (TRAV38-1, TRAJ53)
CAFMKHGLERGGCNYKLTF

SEQ ID NO: 391444 - protein, 13 aa, Homo sapiens
  CDR3 for beta chain variable domain of TCR clone 195722 (TRBV19, TRBJ2-7)
CASSPRQSYEQYF

SEQ ID NO: 391445 - protein, 17 aa, Homo sapiens
  CDR3 for alpha chain variable domain of TCR clone 195723 (TRAV3, TRAJ6)
CAVRDGPRVGGSYIPTF

SEQ ID NO: 391446 - protein, 20 aa, Homo sapiens
  CDR3 for beta chain variable domain of TCR clone 195723 (TRBV28, TRBJ2-1)
CASTPIGRSPGLAGGNEQFL

SEQ ID NO: 391447 - protein, 14 aa, Homo sapiens
  CDR3 for alpha chain variable domain of TCR clone 195724 (TRAV26-1, TRAJ38)
CIADNAGNKRKLIG

SEQ ID NO: 391448 - protein, 13 aa, Homo sapiens
  CDR3 for beta chain variable domain of TCR clone 195724 (TRBV20-1, TRBJ1-1)
CSARGEGNTEAFF

SEQ ID NO: 391449 - protein, 13 aa, Homo sapiens
  CDR3 for alpha chain variable domain of TCR clone 195725 (TRAV21, TRAJ27)
CAARPGNAGKSTF

SEQ ID NO: 391450 - protein, 13 aa, Homo sapiens
  CDR3 for beta chain variable domain of TCR clone 195725 (TRBV7-3, TRBJ2-7)
CASSQAGGYDQYF

SEQ ID NO: 391451 - protein, 14 aa, Homo sapiens
  CDR3 for alpha chain variable domain of TCR clone 195726 (TRAV1-2, TRAJ16)
CAVNRFSDGQKLLF

SEQ ID NO: 391452 - protein, 14 aa, Homo sapiens
  CDR3 for beta chain variable domain of TCR clone 195726 (TRBV13, TRBJ2-5)
CASSLGRELETQYF

SEQ ID NO: 391453 - protein, 14 aa, Homo sapiens
  CDR3 for alpha chain variable domain of TCR clone 195727 (TRAV17, TRAJ12)
CAILPMDSSYKLIF

SEQ ID NO: 391454 - protein, 17 aa, Homo sapiens
  CDR3 for beta chain variable domain of TCR clone 195727 (TRBV5-1, TRBJ1-1)
CASSLGREKTLKLSLDK

SEQ ID NO: 391455 - protein, 14 aa, Homo sapiens
  CDR3 for alpha chain variable domain of TCR clone 195728 (TRAV17, TRAJ56)
CATDVGGANSKLIF

SEQ ID NO: 391456 - protein, 15 aa, Homo sapiens
  CDR3 for beta chain variable domain of TCR clone 195728 (TRBV20-1, TRBJ2-7)
CSARDRVSGMDEQYF

SEQ ID NO: 391457 - protein, 14 aa, Homo sapiens
  CDR3 for alpha chain variable domain of TCR clone 195729 (TRAV17, TRAJ45)
CATSPGGGADGLTF

SEQ ID NO: 391458 - protein, 16 aa, Homo sapiens
  CDR3 for beta chain variable domain of TCR clone 195729 (TRBV20-1, TRBJ2-1)
CSAITIAGGYYNEQFF

SEQ ID NO: 391459 - protein, 16 aa, Homo sapiens
  CDR3 for alpha chain variable domain of TCR clone 195730 (TRAV30, TRAJ24)
CGTEIVDADSWGKFKF

SEQ ID NO: 391460 - protein, 19 aa, Homo sapiens
  CDR3 for beta chain variable domain of TCR clone 195730 (TRBV25-1, TRBJ2-2)
RAILVYRVDRGRKTGELFF

SEQ ID NO: 391461 - protein, 16 aa, Homo sapiens
  CDR3 for alpha chain variable domain of TCR clone 195731 (TRAV21, TRAJ52)
CAVTNAGGTSYGKLTF

SEQ ID NO: 391462 - protein, 17 aa, Homo sapiens
  CDR3 for beta chain variable domain of TCR clone 195731 (TRBV11-2, TRBJ2-1)
CASSLYPPGVEYNEQFF

SEQ ID NO: 391463 - protein, 13 aa, Homo sapiens
  CDR3 for alpha chain variable domain of TCR clone 195732 (TRAV3, TRAJ21)
CAVREPDFNKSYF

SEQ ID NO: 391464 - protein, 13 aa, Homo sapiens
  CDR3 for beta chain variable domain of TCR clone 195732 (TRBV9, TRBJ2-1)
CASSPSGGNEQFF

SEQ ID NO: 391465 - protein, 13 aa, Homo sapiens
  CDR3 for alpha chain variable domain of TCR clone 195733 (TRAV2, TRAJ40)
CAVVTSGTYKYIF

SEQ ID NO: 391466 - protein, 14 aa, Homo sapiens
  CDR3 for beta chain variable domain of TCR clone 195733 (TRBV19, TRBJ2-1)
CASPTFVLSIEQFF

SEQ ID NO: 391467 - protein, 15 aa, Homo sapiens
  CDR3 for alpha chain variable domain of TCR clone 195734 (TRAV8-6, TRAJ11)
CAVNFMNSGYSTLTF

SEQ ID NO: 391468 - protein, 15 aa, Homo sapiens
  CDR3 for beta chain variable domain of TCR clone 195734 (TRBV6-3, TRBJ2-7)
CASSSPGTVFYEQYF

SEQ ID NO: 391469 - protein, 19 aa, Homo sapiens
  CDR3 for alpha chain variable domain of TCR clone 195735 (TRAV8-3, TRAJ30)
CAVGEMTRSSLEKGQDFIF

SEQ ID NO: 391470 - protein, 14 aa, Homo sapiens
  CDR3 for beta chain variable domain of TCR clone 195735 (TRBV7-8, TRBJ2-3)
CASSLEAGTDTQYF

SEQ ID NO: 391471 - protein, 15 aa, Homo sapiens
  CDR3 for alpha chain variable domain of TCR clone 195736 (TRAV38-1, TRAJ57)
CAFMDSQGGSEKLVF

SEQ ID NO: 391472 - protein, 16 aa, Homo sapiens
  CDR3 for beta chain variable domain of TCR clone 195736 (TRBV10-3, TRBJ2-1)
CAIRGGGRGDHNEQFF

SEQ ID NO: 391473 - protein, 11 aa, Homo sapiens
  CDR3 for alpha chain variable domain of TCR clone 195737 (TRAV17, TRAJ36)
CAPTGANNLFF

SEQ ID NO: 391474 - protein, 12 aa, Homo sapiens
  CDR3 for beta chain variable domain of TCR clone 195737 (TRBV29-1, TRBJ2-3)
CSVTGGADTKYF

SEQ ID NO: 391475 - protein, 12 aa, Homo sapiens
  CDR3 for alpha chain variable domain of TCR clone 195738 (TRAV12-3, TRAJ17)
CAMTLTGNKLTF

SEQ ID NO: 391476 - protein, 15 aa, Homo sapiens
  CDR3 for beta chain variable domain of TCR clone 195738 (TRBV20-1, TRBJ2-7)
GSARDRVSGMDEQYI

SEQ ID NO: 391477 - protein, 14 aa, Homo sapiens
  CDR3 for alpha chain variable domain of TCR clone 195739 (TRAV3, TRAJ22)
CAVRDYGSARQLTF

SEQ ID NO: 391478 - protein, 13 aa, Homo sapiens
  CDR3 for beta chain variable domain of TCR clone 195739 (TRBV11-2, TRBJ2-5)
CASGHGAKESQYF

SEQ ID NO: 391479 - protein, 16 aa, Homo sapiens
  CDR3 for alpha chain variable domain of TCR clone 195740 (TRAV30, TRAJ24)
CGTEVVDADSWGKFQL

SEQ ID NO: 391480 - protein, 14 aa, Homo sapiens
  CDR3 for beta chain variable domain of TCR clone 195740 (TRBV7-9, TRBJ2-4)
CASSLAMGGNIQYF

SEQ ID NO: 391481 - protein, 14 aa, Homo sapiens
  CDR3 for alpha chain variable domain of TCR clone 195741 (TRAV29/DV5, TRAJ36)
CAARRKTGANNLFF

SEQ ID NO: 391482 - protein, 12 aa, Homo sapiens
  CDR3 for beta chain variable domain of TCR clone 195741 (TRBV20-1, TRBJ1-1)
CSASGYTLRAFF

SEQ ID NO: 391483 - protein, 14 aa, Homo sapiens
  CDR3 for alpha chain variable domain of TCR clone 195742 (TRAV12-2, TRAJ13)
CAVKKTGGYQKVTF

SEQ ID NO: 391484 - protein, 11 aa, Homo sapiens
  CDR3 for beta chain variable domain of TCR clone 195742 (TRBV4-1, TRBJ2-2)
CASEHTGELFF

SEQ ID NO: 391485 - protein, 14 aa, Homo sapiens
  CDR3 for alpha chain variable domain of TCR clone 195743 (TRAV13-2, TRAJ17)
CAENSKAAGNKLTF

SEQ ID NO: 391486 - protein, 15 aa, Homo sapiens
  CDR3 for beta chain variable domain of TCR clone 195743 (TRBV10-2, TRBJ2-6)
CASSEQGTGANVLSF

SEQ ID NO: 391487 - protein, 13 aa, Homo sapiens
  CDR3 for alpha chain variable domain of TCR clone 195744 (TRAV12-3, TRAJ13)
CAMTSGGRQKVTF

SEQ ID NO: 391488 - protein, 13 aa, Homo sapiens
  CDR3 for beta chain variable domain of TCR clone 195744 (TRBV20-1, TRBJ2-2)
CSALSGGAGELFF

SEQ ID NO: 391489 - protein, 12 aa, Homo sapiens
  CDR3 for alpha chain variable domain of TCR clone 195745 (TRAV21, TRAJ11)
CAATSGYSTLTF

SEQ ID NO: 391490 - protein, 14 aa, Homo sapiens
  CDR3 for beta chain variable domain of TCR clone 195745 (TRBV20-1, TRBJ2-7)
YSAPELAGVGEQYF

SEQ ID NO: 391491 - protein, 18 aa, Homo sapiens
  CDR3 for alpha chain variable domain of TCR clone 195746 (TRAV21, TRAJ52)
CAVRPSPAGGTSYGKLKF

SEQ ID NO: 391492 - protein, 16 aa, Homo sapiens
  CDR3 for beta chain variable domain of TCR clone 195746 (TRBV19, TRBJ2-1)
CASSKAGPSSYNEQFF

SEQ ID NO: 391493 - protein, 16 aa, Homo sapiens
  CDR3 for alpha chain variable domain of TCR clone 195747 (TRAV4, TRAJ37)
CLVGWFGSSNTGKLIY

SEQ ID NO: 391494 - protein, 15 aa, Homo sapiens
  CDR3 for beta chain variable domain of TCR clone 195747 (TRBV12-4, TRBJ2-3)
CASSLAERPTDTQYF

SEQ ID NO: 391495 - protein, 11 aa, Homo sapiens
  CDR3 for alpha chain variable domain of TCR clone 195748 (TRAV17, TRAJ9)
CATTGGFKTIF

SEQ ID NO: 391496 - protein, 11 aa, Homo sapiens
  CDR3 for beta chain variable domain of TCR clone 195748 (TRBV29-1, TRBJ2-5)
CSEDRMGTQYF

SEQ ID NO: 391497 - protein, 13 aa, Homo sapiens
  CDR3 for alpha chain variable domain of TCR clone 195749 (TRAV12-1, TRAJ33)
CGDAPDSNYQLIW

SEQ ID NO: 391498 - protein, 14 aa, Homo sapiens
  CDR3 for beta chain variable domain of TCR clone 195749 (TRBV11-2, TRBJ1-5)
CASSLDRGRQPQHF

SEQ ID NO: 391499 - protein, 14 aa, Homo sapiens
  CDR3 for alpha chain variable domain of TCR clone 195750 (TRAV12-2, TRAJ13)
CAVKKTGGYQKVTF

SEQ ID NO: 391500 - protein, 14 aa, Homo sapiens
  CDR3 for beta chain variable domain of TCR clone 195750 (TRBV19, TRBJ2-7)
CASSDRDRSYEQYF

SEQ ID NO: 391501 - protein, 13 aa, Homo sapiens
  CDR3 for alpha chain variable domain of TCR clone 195751 (TRAV1-2, TRAJ12)
CAVSMDSSYKLIF

SEQ ID NO: 391502 - protein, 15 aa, Homo sapiens
  CDR3 for beta chain variable domain of TCR clone 195751 (TRBV27, TRBJ2-5)
CASSLIPSGGEDQYF

SEQ ID NO: 391503 - protein, 16 aa, Homo sapiens
  CDR3 for alpha chain variable domain of TCR clone 195752 (TRAV3, TRAJ40)
CAVRDRIASGTYKYIF

SEQ ID NO: 391504 - protein, 17 aa, Homo sapiens
  CDR3 for beta chain variable domain of TCR clone 195752 (TRBV11-1, TRBJ2-7)
CASSLLDGGDSAYEQYF

SEQ ID NO: 391505 - protein, 13 aa, Homo sapiens
  CDR3 for alpha chain variable domain of TCR clone 195753 (TRAV26-1, TRAJ48)
CIVRVVGDEKVTF

SEQ ID NO: 391506 - protein, 16 aa, Homo sapiens
  CDR3 for beta chain variable domain of TCR clone 195753 (TRBV12-5, TRBJ2-5)
CASGPRTSGNQETQYF

SEQ ID NO: 391507 - protein, 15 aa, Homo sapiens
  CDR3 for alpha chain variable domain of TCR clone 195754 (TRAV23/DV6, TRAJ22)
CAASFSSGSARQLTF

SEQ ID NO: 391508 - protein, 16 aa, Homo sapiens
  CDR3 for beta chain variable domain of TCR clone 195754 (TRBV29-1, TRBJ2-6)
CSVEDITYSGANVLTF

SEQ ID NO: 391509 - protein, 17 aa, Homo sapiens
  CDR3 for alpha chain variable domain of TCR clone 195755 (TRAV23/DV6, TRAJ28)
CAALLAYSGAWSYQLTF

SEQ ID NO: 391510 - protein, 13 aa, Homo sapiens
  CDR3 for beta chain variable domain of TCR clone 195755 (TRBV4-2, TRBJ2-3)
CASSQGNTDTQYF

SEQ ID NO: 391511 - protein, 16 aa, Homo sapiens
  CDR3 for alpha chain variable domain of TCR clone 195756 (TRAV30, TRAJ24)
CGTEIVDADNWGKFQF

SEQ ID NO: 391512 - protein, 13 aa, Homo sapiens
  CDR3 for beta chain variable domain of TCR clone 195756 (TRBV7-3, TRBJ1-1)
CASSQDWGAEAFF

SEQ ID NO: 391513 - protein, 14 aa, Homo sapiens
  CDR3 for alpha chain variable domain of TCR clone 195757 (TRAV12-2, TRAJ13)
CAVKKTGGYQKVTF

SEQ ID NO: 391514 - protein, 12 aa, Homo sapiens
  CDR3 for beta chain variable domain of TCR clone 195757 (TRBV5-7, TRBJ1-1)
CANSLGRGKAFF

SEQ ID NO: 391515 - protein, 16 aa, Homo sapiens
  CDR3 for alpha chain variable domain of TCR clone 195758 (TRAV8-3, TRAJ8)
CAVPRDGNTGFQKLVF

SEQ ID NO: 391516 - protein, 12 aa, Homo sapiens
  CDR3 for beta chain variable domain of TCR clone 195758 (TRBV7-8, TRBJ2-7)
CASSLGDREQYF

SEQ ID NO: 391517 - protein, 16 aa, Homo sapiens
  CDR3 for alpha chain variable domain of TCR clone 195759 (TRAV17, TRAJ4)
CATAAHSSGGYNKLIF

SEQ ID NO: 391518 - protein, 13 aa, Homo sapiens
  CDR3 for beta chain variable domain of TCR clone 195759 (TRBV7-9, TRBJ1-2)
CASSLKQNYGYTF

SEQ ID NO: 391519 - protein, 14 aa, Homo sapiens
  CDR3 for alpha chain variable domain of TCR clone 195760 (TRAV1-2, TRAJ15)
CAVRDRQAGTALIF

SEQ ID NO: 391520 - protein, 15 aa, Homo sapiens
  CDR3 for beta chain variable domain of TCR clone 195760 (TRBV4-1, TRBJ2-7)
CASSQNTGRLYEQYF

SEQ ID NO: 391521 - protein, 14 aa, Homo sapiens
  CDR3 for alpha chain variable domain of TCR clone 195761 (TRAV29/DV5, TRAJ36)
CAARRKTGANNLSF

SEQ ID NO: 391522 - protein, 12 aa, Homo sapiens
  CDR3 for beta chain variable domain of TCR clone 195761 (TRBV12-5, TRBJ2-5)
CASGQGVETQYF

SEQ ID NO: 391523 - protein, 14 aa, Homo sapiens
  CDR3 for alpha chain variable domain of TCR clone 195762 (TRAV12-2, TRAJ11)
CAVNMNSGYSTLTF

SEQ ID NO: 391524 - protein, 13 aa, Homo sapiens
  CDR3 for beta chain variable domain of TCR clone 195762 (TRBV6-1, TRBJ1-2)
CASSDSQSYGYTF

SEQ ID NO: 391525 - protein, 16 aa, Homo sapiens
  CDR3 for alpha chain variable domain of TCR clone 195763 (TRAV12-2, TRAJ32)
CAVNLGQGGATNKLIF

SEQ ID NO: 391526 - protein, 15 aa, Homo sapiens
  CDR3 for beta chain variable domain of TCR clone 195763 (TRBV20-1, TRBJ2-7)
CSAESGTSGAYEQYF

SEQ ID NO: 391527 - protein, 14 aa, Homo sapiens
  CDR3 for alpha chain variable domain of TCR clone 195764 (TRAV3, TRAJ17)
CAVRDAAAGNKLTF

SEQ ID NO: 391528 - protein, 13 aa, Homo sapiens
  CDR3 for beta chain variable domain of TCR clone 195764 (TRBV2, TRBJ1-1)
CASSEGGNTEAFF

SEQ ID NO: 391529 - protein, 15 aa, Homo sapiens
  CDR3 for alpha chain variable domain of TCR clone 195765 (TRAV8-6, TRAJ45)
CAVSEQGGGADGLTF

SEQ ID NO: 391530 - protein, 14 aa, Homo sapiens
  CDR3 for beta chain variable domain of TCR clone 195765 (TRBV28, TRBJ2-5)
CASRGSSFWGTQYF

SEQ ID NO: 391531 - protein, 10 aa, Homo sapiens
  CDR3 for alpha chain variable domain of TCR clone 195766 (TRAV8-4, TRAJ43)
CAVSADDMRF

SEQ ID NO: 391532 - protein, 15 aa, Homo sapiens
  CDR3 for beta chain variable domain of TCR clone 195766 (TRBV20-1, TRBJ2-7)
CSAESGTSGAYEQYF

SEQ ID NO: 391533 - protein, 13 aa, Homo sapiens
  CDR3 for alpha chain variable domain of TCR clone 195767 (TRAV30, TRAJ6)
CGFIEGGSYIPTF

SEQ ID NO: 391534 - protein, 14 aa, Homo sapiens
  CDR3 for beta chain variable domain of TCR clone 195767 (TRBV7-2, TRBJ1-1)
CASSFLTGTTEAFF

SEQ ID NO: 391535 - protein, 12 aa, Homo sapiens
  CDR3 for alpha chain variable domain of TCR clone 195768 (TRAV8-3, TRAJ26)
CAGDNYGQNFVF

SEQ ID NO: 391536 - protein, 14 aa, Homo sapiens
  CDR3 for beta chain variable domain of TCR clone 195768 (TRBV7-6, TRBJ2-3)
CASSLGTVTDTQYV

SEQ ID NO: 391537 - protein, 23 aa, Homo sapiens
  CDR3 for alpha chain variable domain of TCR clone 195769 (TRAV35, TRAJ42)
CAVYLLEEAKEISSLETALNSLF

SEQ ID NO: 391538 - protein, 15 aa, Homo sapiens
  CDR3 for beta chain variable domain of TCR clone 195769 (TRBV27, TRBJ2-5)
CASSLIPSGGETQYF

SEQ ID NO: 391539 - protein, 13 aa, Homo sapiens
  CDR3 for alpha chain variable domain of TCR clone 195770 (TRAV21, TRAJ56)
CAVRLGANSKLTF

SEQ ID NO: 391540 - protein, 13 aa, Homo sapiens
  CDR3 for beta chain variable domain of TCR clone 195770 (TRBV19, TRBJ2-7)
CASRKAGGSEQYF

SEQ ID NO: 391541 - protein, 15 aa, Homo sapiens
  CDR3 for alpha chain variable domain of TCR clone 195771 (TRAV12-2, TRAJ53)
CAVNGGGGSNYKLTF

SEQ ID NO: 391542 - protein, 13 aa, Homo sapiens
  CDR3 for beta chain variable domain of TCR clone 195771 (TRBV20-1, TRBJ1-2)
CSATGIQGSGYTF

SEQ ID NO: 391543 - protein, 13 aa, Homo sapiens
  CDR3 for alpha chain variable domain of TCR clone 195772 (TRAV21, TRAJ27)
CAARPGNAGKSAF

SEQ ID NO: 391544 - protein, 16 aa, Homo sapiens
  CDR3 for beta chain variable domain of TCR clone 195772 (TRBV7-6, TRBJ2-3)
CASSQSTSGAEDTQYF

SEQ ID NO: 391545 - protein, 13 aa, Homo sapiens
  CDR3 for alpha chain variable domain of TCR clone 195773 (TRAV1-2, TRAJ12)
CAVSMDSSYKLIF

SEQ ID NO: 391546 - protein, 17 aa, Homo sapiens
  CDR3 for beta chain variable domain of TCR clone 195773 (TRBV11-3, TRBJ2-1)
CASSLYPPGVAYNEQFF

SEQ ID NO: 391547 - protein, 16 aa, Homo sapiens
  CDR3 for alpha chain variable domain of TCR clone 195774 (TRAV26-1, TRAJ23)
RIVRVANSNQGGKLIF

SEQ ID NO: 391548 - protein, 16 aa, Homo sapiens
  CDR3 for beta chain variable domain of TCR clone 195774 (TRBV10-3, TRBJ2-1)
CAISGVGDGGGGEQFF

SEQ ID NO: 391549 - protein, 15 aa, Homo sapiens
  CDR3 for alpha chain variable domain of TCR clone 195775 (TRAV21, TRAJ43)
CAVRPSKAVFDDMRF

SEQ ID NO: 391550 - protein, 17 aa, Homo sapiens
  CDR3 for beta chain variable domain of TCR clone 195775 (TRBV7-8, TRBJ2-6)
CASSAGTGGAGANVLTF

SEQ ID NO: 391551 - protein, 13 aa, Homo sapiens
  CDR3 for alpha chain variable domain of TCR clone 195776 (TRAV12-1, TRAJ31)
CVLIPNNNARLMF

SEQ ID NO: 391552 - protein, 15 aa, Homo sapiens
  CDR3 for beta chain variable domain of TCR clone 195776 (TRBV19, TRBJ1-2)
CASNLGGETPYGYTF

SEQ ID NO: 391553 - protein, 14 aa, Homo sapiens
  CDR3 for alpha chain variable domain of TCR clone 195777 (TRAV3, TRAJ22)
CAVRDYGSARQLTF

SEQ ID NO: 391554 - protein, 12 aa, Homo sapiens
  CDR3 for beta chain variable domain of TCR clone 195777 (TRBV11-2, TRBJ2-5)
CQRPRAKETQYF

SEQ ID NO: 391555 - protein, 14 aa, Homo sapiens
  CDR3 for alpha chain variable domain of TCR clone 195778 (TRAV12-1, TRAJ28)
CVAISGAGSYQLTF

SEQ ID NO: 391556 - protein, 12 aa, Homo sapiens
  CDR3 for beta chain variable domain of TCR clone 195778 (TRBV11-2, TRBJ2-1)
CASSPGNNEQFF

SEQ ID NO: 391557 - protein, 13 aa, Homo sapiens
  CDR3 for alpha chain variable domain of TCR clone 195779 (TRAV8-1, TRAJ28)
CADSGAGSYQLTF

SEQ ID NO: 391558 - protein, 14 aa, Homo sapiens
  CDR3 for beta chain variable domain of TCR clone 195779 (TRBV19, TRBJ2-5)
CASSMTGQQETQYF

SEQ ID NO: 391559 - protein, 14 aa, Homo sapiens
  CDR3 for alpha chain variable domain of TCR clone 195780 (TRAV20, TRAJ29)
CAVQESFRKHTFCL

SEQ ID NO: 391560 - protein, 16 aa, Homo sapiens
  CDR3 for beta chain variable domain of TCR clone 195780 (TRBV7-2, TRBJ2-7)
CASSLDLSGGAYEQYF

SEQ ID NO: 391561 - protein, 20 aa, Homo sapiens
  CDR3 for alpha chain variable domain of TCR clone 195781 (TRAV8-4, TRAJ38)
CARLNAGNNHIQNPDPAVYQ

SEQ ID NO: 391562 - protein, 19 aa, Homo sapiens
  CDR3 for beta chain variable domain of TCR clone 195781 (TRBV7-2, TRBJ2-3)
CASSFLSRNWGGGTDTQYF

SEQ ID NO: 391563 - protein, 14 aa, Homo sapiens
  CDR3 for alpha chain variable domain of TCR clone 195782 (TRAV13-1, TRAJ17)
CAASRDAAGYKLTF

SEQ ID NO: 391564 - protein, 13 aa, Homo sapiens
  CDR3 for beta chain variable domain of TCR clone 195782 (TRBV12-4, TRBJ1-2)
CASSLRQGKGYTF

SEQ ID NO: 391565 - protein, 13 aa, Homo sapiens
  CDR3 for alpha chain variable domain of TCR clone 195783 (TRAV23/DV6, TRAJ6)
CAAKTGGSYILTF

SEQ ID NO: 391566 - protein, 15 aa, Homo sapiens
  CDR3 for beta chain variable domain of TCR clone 195783 (TRBV5-1, TRBJ1-2)
CASSSYGEFDYGYTF

SEQ ID NO: 391567 - protein, 14 aa, Homo sapiens
  CDR3 for alpha chain variable domain of TCR clone 195784 (TRAV12-3, TRAJ13)
CSMRNSGGYQKVTF

SEQ ID NO: 391568 - protein, 14 aa, Homo sapiens
  CDR3 for beta chain variable domain of TCR clone 195784 (TRBV4-1, TRBJ1-6)
CASSPGSDSSPLHF

SEQ ID NO: 391569 - protein, 14 aa, Homo sapiens
  CDR3 for alpha chain variable domain of TCR clone 195785 (TRAV12-3, TRAJ22)
CAMSLFGSARQLTF

SEQ ID NO: 391570 - protein, 10 aa, Homo sapiens
  CDR3 for beta chain variable domain of TCR clone 195785 (TRBV12-4, TRBJ2-2)
CQQLRGELFF

SEQ ID NO: 391571 - protein, 12 aa, Homo sapiens
  CDR3 for alpha chain variable domain of TCR clone 195786 (TRAV8-4, TRAJ37)
CAKSSNTGKLIF

SEQ ID NO: 391572 - protein, 14 aa, Homo sapiens
  CDR3 for beta chain variable domain of TCR clone 195786 (TRBV7-9, TRBJ2-7)
CASSLSQGSYEQYF

SEQ ID NO: 391573 - protein, 13 aa, Homo sapiens
  CDR3 for alpha chain variable domain of TCR clone 195787 (TRAV35, TRAJ58)
CAGLETSGSRLTF

SEQ ID NO: 391574 - protein, 15 aa, Homo sapiens
  CDR3 for beta chain variable domain of TCR clone 195787 (TRBV20-1, TRBJ2-1)
WSARFSAGGLNEQFF

SEQ ID NO: 391575 - protein, 14 aa, Homo sapiens
  CDR3 for alpha chain variable domain of TCR clone 195788 (TRAV12-2, TRAJ13)
CAVQKTGGYQKVTF

SEQ ID NO: 391576 - protein, 15 aa, Homo sapiens
  CDR3 for beta chain variable domain of TCR clone 195788 (TRBV27, TRBJ2-1)
CASSNGGGSANEQFF

SEQ ID NO: 391577 - protein, 14 aa, Homo sapiens
  CDR3 for alpha chain variable domain of TCR clone 195789 (TRAV17, TRAJ31)
CATVLRNKNARLMF

SEQ ID NO: 391578 - protein, 14 aa, Homo sapiens
  CDR3 for beta chain variable domain of TCR clone 195789 (TRBV12-4, TRBJ2-5)
CASSLWQKQGTQYF

SEQ ID NO: 391579 - protein, 14 aa, Homo sapiens
  CDR3 for alpha chain variable domain of TCR clone 195790 (TRAV1-2, TRAJ16)
CAVNRFSDGQKLLF

SEQ ID NO: 391580 - protein, 15 aa, Homo sapiens
  CDR3 for beta chain variable domain of TCR clone 195790 (TRBV29-1, TRBJ2-7)
GSVEFFDRGSYEQYF

SEQ ID NO: 391581 - protein, 13 aa, Homo sapiens
  CDR3 for alpha chain variable domain of TCR clone 195791 (TRAV13-2, TRAJ17)
CREFQSCRQQATF

SEQ ID NO: 391582 - protein, 15 aa, Homo sapiens
  CDR3 for beta chain variable domain of TCR clone 195791 (TRBV27, TRBJ2-1)
CASSNGGGSSNEQFF

SEQ ID NO: 391583 - protein, 15 aa, Homo sapiens
  CDR3 for alpha chain variable domain of TCR clone 195792 (TRAV20, TRAJ53)
CAVQASVGSNYKLTF

SEQ ID NO: 391584 - protein, 12 aa, Homo sapiens
  CDR3 for beta chain variable domain of TCR clone 195792 (TRBV7-6, TRBJ2-5)
CASSLSQETQYF

SEQ ID NO: 391585 - protein, 15 aa, Homo sapiens
  CDR3 for alpha chain variable domain of TCR clone 195793 (TRAV12-3, TRAJ6)
YAMSAASGGSYIPTF

SEQ ID NO: 391586 - protein, 13 aa, Homo sapiens
  CDR3 for beta chain variable domain of TCR clone 195793 (TRBV20-1, TRBJ1-2)
CSASTERIYGYTF

SEQ ID NO: 391587 - protein, 18 aa, Homo sapiens
  CDR3 for alpha chain variable domain of TCR clone 195794 (TRAV21, TRAJ52)
CAVRPSRAGGASYGKLTF

SEQ ID NO: 391588 - protein, 17 aa, Homo sapiens
  CDR3 for beta chain variable domain of TCR clone 195794 (TRBV13, TRBJ2-3)
CASSLSRVAGGRNTQYF

SEQ ID NO: 391589 - protein, 14 aa, Homo sapiens
  CDR3 for alpha chain variable domain of TCR clone 195795 (TRAV17, TRAJ45)
CATASGGGADGLTF

SEQ ID NO: 391590 - protein, 15 aa, Homo sapiens
  CDR3 for beta chain variable domain of TCR clone 195795 (TRBV11-2, TRBJ2-1)
CASSRNRGLCMSSSS

SEQ ID NO: 391591 - protein, 11 aa, Homo sapiens
  CDR3 for alpha chain variable domain of TCR clone 195796 (TRAV2, TRAJ13)
CASGGYQKVTF

SEQ ID NO: 391592 - protein, 13 aa, Homo sapiens
  CDR3 for beta chain variable domain of TCR clone 195796 (TRBV12-4, TRBJ2-7)
CASSLSGVYEQYF

SEQ ID NO: 391593 - protein, 19 aa, Homo sapiens
  CDR3 for alpha chain variable domain of TCR clone 195797 (TRAV27, TRAJ53)
ASTSVQSRNSGGSNYKLTF

SEQ ID NO: 391594 - protein, 15 aa, Homo sapiens
  CDR3 for beta chain variable domain of TCR clone 195797 (TRBV11-1, TRBJ2-3)
CASSLLLASTDTQYF

SEQ ID NO: 391595 - protein, 14 aa, Homo sapiens
  CDR3 for alpha chain variable domain of TCR clone 195798 (TRAV12-3, TRAJ42)
CAMNYGGSQGNLIF

SEQ ID NO: 391596 - protein, 15 aa, Homo sapiens
  CDR3 for beta chain variable domain of TCR clone 195798 (TRBV7-2, TRBJ2-3)
CASSLEQGGTDTQYF

SEQ ID NO: 391597 - protein, 14 aa, Homo sapiens
  CDR3 for alpha chain variable domain of TCR clone 195799 (TRAV8-2, TRAJ37)
CVVSISGNTGKLIF

SEQ ID NO: 391598 - protein, 13 aa, Homo sapiens
  CDR3 for beta chain variable domain of TCR clone 195799 (TRBV27, TRBJ1-1)
CASSLSIGAEALF

SEQ ID NO: 391599 - protein, 12 aa, Homo sapiens
  CDR3 for alpha chain variable domain of TCR clone 195800 (TRAV2, TRAJ4)
CAVSGGYNKLIF

SEQ ID NO: 391600 - protein, 15 aa, Homo sapiens
  CDR3 for beta chain variable domain of TCR clone 195800 (TRBV4-3, TRBJ2-7)
CASSHYPRGAYEQYF

SEQ ID NO: 391601 - protein, 16 aa, Homo sapiens
  CDR3 for alpha chain variable domain of TCR clone 195801 (TRAV26-1, TRAJ38)
CIVRVELGGNNRKLIC

SEQ ID NO: 391602 - protein, 14 aa, Homo sapiens
  CDR3 for beta chain variable domain of TCR clone 195801 (TRBV5-1, TRBJ2-3)
CASSPGLAADTQYF

SEQ ID NO: 391603 - protein, 14 aa, Homo sapiens
  CDR3 for alpha chain variable domain of TCR clone 195802 (TRAV1-2, TRAJ16)
CAVNRFSDGQKLLF

SEQ ID NO: 391604 - protein, 13 aa, Homo sapiens
  CDR3 for beta chain variable domain of TCR clone 195802 (TRBV4-3, TRBJ1-1)
CASSPTGNTEAFF

SEQ ID NO: 391605 - protein, 13 aa, Homo sapiens
  CDR3 for alpha chain variable domain of TCR clone 195803 (TRAV3, TRAJ27)
CAVRPLGAGKSTF

SEQ ID NO: 391606 - protein, 14 aa, Homo sapiens
  CDR3 for beta chain variable domain of TCR clone 195803 (TRBV11-1, TRBJ2-7)
CASSFRQGSYEQYF

SEQ ID NO: 391607 - protein, 18 aa, Homo sapiens
  CDR3 for alpha chain variable domain of TCR clone 195804 (TRAV12-2, )
CAVEDIQNPDPAVYQLSD

SEQ ID NO: 391608 - protein, 15 aa, Homo sapiens
  CDR3 for beta chain variable domain of TCR clone 195804 (TRBV11-1, TRBJ2-7)
CASSLNYGASYEQYF

SEQ ID NO: 391609 - protein, 16 aa, Homo sapiens
  CDR3 for alpha chain variable domain of TCR clone 195805 (TRAV3, TRAJ37)
CAVRPHGSGNTGKLIF

SEQ ID NO: 391610 - protein, 15 aa, Homo sapiens
  CDR3 for beta chain variable domain of TCR clone 195805 (TRBV27, TRBJ1-6)
CASSFDRGRGSPHHF

SEQ ID NO: 391611 - protein, 13 aa, Homo sapiens
  CDR3 for alpha chain variable domain of TCR clone 195806 (TRAV13-1, TRAJ39)
CAAPFECRQHAHL

SEQ ID NO: 391612 - protein, 13 aa, Homo sapiens
  CDR3 for beta chain variable domain of TCR clone 195806 (TRBV11-2, TRBJ1-3)
CASSLEPVNTIYF

SEQ ID NO: 391613 - protein, 11 aa, Homo sapiens
  CDR3 for alpha chain variable domain of TCR clone 195807 (TRAV21, TRAJ7)
CAAYGNNRLAF

SEQ ID NO: 391614 - protein, 14 aa, Homo sapiens
  CDR3 for beta chain variable domain of TCR clone 195807 (TRBV4-1, TRBJ2-7)
CAISRTGVAFEQYF

SEQ ID NO: 391615 - protein, 14 aa, Homo sapiens
  CDR3 for alpha chain variable domain of TCR clone 195808 (TRAV8-2, TRAJ37)
CVVSISGNTGKLIF

SEQ ID NO: 391616 - protein, 13 aa, Homo sapiens
  CDR3 for beta chain variable domain of TCR clone 195808 (TRBV12-4, TRBJ1-2)
CASSLRQGKGYTF

SEQ ID NO: 391617 - protein, 12 aa, Homo sapiens
  CDR3 for alpha chain variable domain of TCR clone 195809 (TRAV17, TRAJ49)
CATVTTGNQFYF

SEQ ID NO: 391618 - protein, 16 aa, Homo sapiens
  CDR3 for beta chain variable domain of TCR clone 195809 (TRBV19, TRBJ2-2)
CASRSPGTGANGELLF

SEQ ID NO: 391619 - protein, 15 aa, Homo sapiens
  CDR3 for alpha chain variable domain of TCR clone 195810 (TRAV12-3, TRAJ49)
CAMAVTPNTGNQFYF

SEQ ID NO: 391620 - protein, 18 aa, Homo sapiens
  CDR3 for beta chain variable domain of TCR clone 195810 (TRBV4-1, TRBJ1-5)
CASSQAPRGQGLDQPQHF

SEQ ID NO: 391621 - protein, 14 aa, Homo sapiens
  CDR3 for alpha chain variable domain of TCR clone 195811 (TRAV21, TRAJ35)
CSVMPIGFGNVLHC

SEQ ID NO: 391622 - protein, 12 aa, Homo sapiens
  CDR3 for beta chain variable domain of TCR clone 195811 (TRBV7-9, TRBJ2-7)
YASSIKREEQYF

SEQ ID NO: 391623 - protein, 14 aa, Homo sapiens
  CDR3 for alpha chain variable domain of TCR clone 195812 (TRAV36/DV7, TRAJ57)
WAVGFPGGSEKLVF

SEQ ID NO: 391624 - protein, 12 aa, Homo sapiens
  CDR3 for beta chain variable domain of TCR clone 195812 (TRBV19, TRBJ2-7)
CASTSGTYEQYF

SEQ ID NO: 391625 - protein, 16 aa, Homo sapiens
  CDR3 for alpha chain variable domain of TCR clone 195813 (TRAV3, TRAJ21)
CAVESWPTSTNFTLDL

SEQ ID NO: 391626 - protein, 18 aa, Homo sapiens
  CDR3 for beta chain variable domain of TCR clone 195813 (TRBV7-9, TRBJ2-1)
CASSLAVSGTSGRNEQFF

SEQ ID NO: 391627 - protein, 17 aa, Homo sapiens
  CDR3 for alpha chain variable domain of TCR clone 195814 (TRAV1-2, TRAJ27)
CAVRDKTGDTNAGKSTF

SEQ ID NO: 391628 - protein, 12 aa, Homo sapiens
  CDR3 for beta chain variable domain of TCR clone 195814 (TRBV7-8, TRBJ2-7)
CASSLGDREQYF

SEQ ID NO: 391629 - protein, 14 aa, Homo sapiens
  CDR3 for alpha chain variable domain of TCR clone 195815 (TRAV1-2, TRAJ17)
CALRRGAEGNKLTF

SEQ ID NO: 391630 - protein, 13 aa, Homo sapiens
  CDR3 for beta chain variable domain of TCR clone 195815 (TRBV9, TRBJ2-1)
CASSVGQGGEQFF

SEQ ID NO: 391631 - protein, 14 aa, Homo sapiens
  CDR3 for alpha chain variable domain of TCR clone 195816 (TRAV35, TRAJ24)
CAGPRRDSWGKLQF

SEQ ID NO: 391632 - protein, 14 aa, Homo sapiens
  CDR3 for beta chain variable domain of TCR clone 195816 (TRBV6-1, TRBJ1-3)
CASVQGGGGNTIYF

SEQ ID NO: 391633 - protein, 19 aa, Homo sapiens
  CDR3 for alpha chain variable domain of TCR clone 195817 (TRAV2, TRAJ20)
ILQVREADAAVYRDCKLSF

SEQ ID NO: 391634 - protein, 16 aa, Homo sapiens
  CDR3 for beta chain variable domain of TCR clone 195817 (TRBV19, TRBJ2-1)
CASSKVGPSSYNEQFF

SEQ ID NO: 391635 - protein, 15 aa, Homo sapiens
  CDR3 for alpha chain variable domain of TCR clone 195818 (TRAV8-3, TRAJ45)
CASSYSGGGADGFTF

SEQ ID NO: 391636 - protein, 13 aa, Homo sapiens
  CDR3 for beta chain variable domain of TCR clone 195818 (TRBV10-3, TRBJ2-7)
CASKLAVNYEQYC

SEQ ID NO: 391637 - protein, 16 aa, Homo sapiens
  CDR3 for alpha chain variable domain of TCR clone 195819 (TRAV12-3, TRAJ53)
CAMSPGSGGSNYKLTF

SEQ ID NO: 391638 - protein, 15 aa, Homo sapiens
  CDR3 for beta chain variable domain of TCR clone 195819 (TRBV25-1, TRBJ1-4)
CASIKRIATNEKLFF

SEQ ID NO: 391639 - protein, 15 aa, Homo sapiens
  CDR3 for alpha chain variable domain of TCR clone 195820 (TRAV20, TRAJ43)
CAVQAGKSSNNDMRS

SEQ ID NO: 391640 - protein, 15 aa, Homo sapiens
  CDR3 for beta chain variable domain of TCR clone 195820 (TRBV28, TRBJ2-1)
CASSIIAGGRSEQFF

SEQ ID NO: 391641 - protein, 13 aa, Homo sapiens
  CDR3 for alpha chain variable domain of TCR clone 195821 (TRAV8-3, TRAJ43)
CAVGIYNNDDMRF

SEQ ID NO: 391642 - protein, 16 aa, Homo sapiens
  CDR3 for beta chain variable domain of TCR clone 195821 (TRBV7-2, TRBJ2-5)
CASSLVLWTKQETQYF

SEQ ID NO: 391643 - protein, 12 aa, Homo sapiens
  CDR3 for alpha chain variable domain of TCR clone 195822 (TRAV21, TRAJ33)
CAKMDSNYQLIW

SEQ ID NO: 391644 - protein, 16 aa, Homo sapiens
  CDR3 for beta chain variable domain of TCR clone 195822 (TRBV7-7, TRBJ2-1)
CASSLASGTSYNEQFF

SEQ ID NO: 391645 - protein, 12 aa, Homo sapiens
  CDR3 for alpha chain variable domain of TCR clone 195823 (TRAV35, TRAJ31)
CAAASNNARLMF

SEQ ID NO: 391646 - protein, 15 aa, Homo sapiens
  CDR3 for beta chain variable domain of TCR clone 195823 (TRBV7-3, TRBJ2-3)
CASSLGLTLGDTQYF

SEQ ID NO: 391647 - protein, 11 aa, Homo sapiens
  CDR3 for alpha chain variable domain of TCR clone 195824 (TRAV23/DV6, TRAJ48)
CAPCWGEKLTF

SEQ ID NO: 391648 - protein, 13 aa, Homo sapiens
  CDR3 for beta chain variable domain of TCR clone 195824 (TRBV12-4, TRBJ2-5)
CASSPGTEETQYF

SEQ ID NO: 391649 - protein, 14 aa, Homo sapiens
  CDR3 for alpha chain variable domain of TCR clone 195825 (TRAV21, TRAJ28)
FAVGSGAWSYQLTF

SEQ ID NO: 391650 - protein, 14 aa, Homo sapiens
  CDR3 for beta chain variable domain of TCR clone 195825 (TRBV18, TRBJ1-4)
CASSPGPNGEKLFF

SEQ ID NO: 391651 - protein, 12 aa, Homo sapiens
  CDR3 for alpha chain variable domain of TCR clone 195826 (TRAV12-3, TRAJ17)
CAMTLTGNELTF

SEQ ID NO: 391652 - protein, 15 aa, Homo sapiens
  CDR3 for beta chain variable domain of TCR clone 195826 (TRBV20-1, TRBJ2-7)
CSARGRVSGMDEQYF

SEQ ID NO: 391653 - protein, 13 aa, Homo sapiens
  CDR3 for alpha chain variable domain of TCR clone 195827 (TRAV13-1, TRAJ6)
CAVSKGGSYIPTF

SEQ ID NO: 391654 - protein, 13 aa, Homo sapiens
  CDR3 for beta chain variable domain of TCR clone 195827 (TRBV7-9, TRBJ2-5)
CASLPSGRETQYF

SEQ ID NO: 391655 - protein, 15 aa, Homo sapiens
  CDR3 for alpha chain variable domain of TCR clone 195828 (TRAV38-2/DV8, TRAJ28)
CAYRSRGAGRYQLPF

SEQ ID NO: 391656 - protein, 14 aa, Homo sapiens
  CDR3 for beta chain variable domain of TCR clone 195828 (TRBV7-9, TRBJ2-7)
CASSLSQGSYEQYF

SEQ ID NO: 391657 - protein, 13 aa, Homo sapiens
  CDR3 for alpha chain variable domain of TCR clone 195829 (TRAV1-2, TRAJ9)
CAVLNTGGFKTIF

SEQ ID NO: 391658 - protein, 13 aa, Homo sapiens
  CDR3 for beta chain variable domain of TCR clone 195829 (TRBV19, TRBJ2-7)
CASREAGGSEQYF

SEQ ID NO: 391659 - protein, 10 aa, Homo sapiens
  CDR3 for alpha chain variable domain of TCR clone 195830 (TRAV23/DV6, TRAJ57)
CAASSTLSQG

SEQ ID NO: 391660 - protein, 13 aa, Homo sapiens
  CDR3 for beta chain variable domain of TCR clone 195830 (TRBV13, TRBJ2-5)
CASSPEVGETQYF

SEQ ID NO: 391661 - protein, 15 aa, Homo sapiens
  CDR3 for alpha chain variable domain of TCR clone 195831 (TRAV13-1, TRAJ57)
CAASNTQGGSEKLAL

SEQ ID NO: 391662 - protein, 16 aa, Homo sapiens
  CDR3 for beta chain variable domain of TCR clone 195831 (TRBV19, TRBJ2-1)
CASSKAGPSSYNEQFF

SEQ ID NO: 391663 - protein, 17 aa, Homo sapiens
  CDR3 for alpha chain variable domain of TCR clone 195832 (TRAV3, TRAJ42)
CAVRDRDYGGSQGNLIF

SEQ ID NO: 391664 - protein, 13 aa, Homo sapiens
  CDR3 for beta chain variable domain of TCR clone 195832 (TRBV19, TRBJ2-5)
CASSIPYGETQYF

SEQ ID NO: 391665 - protein, 15 aa, Homo sapiens
  CDR3 for alpha chain variable domain of TCR clone 195833 (TRAV17, TRAJ35)
CATAFVIGFGNVLQC

SEQ ID NO: 391666 - protein, 16 aa, Homo sapiens
  CDR3 for beta chain variable domain of TCR clone 195833 (TRBV11-2, TRBJ2-7)
CASSPLAGGPRYEQYF

SEQ ID NO: 391667 - protein, 14 aa, Homo sapiens
  CDR3 for alpha chain variable domain of TCR clone 195834 (TRAV8-6, TRAJ13)
CAVSDSGGYQKVTF

SEQ ID NO: 391668 - protein, 15 aa, Homo sapiens
  CDR3 for beta chain variable domain of TCR clone 195834 (TRBV7-3, TRBJ2-6)
CASSRTGTVANVLTF

SEQ ID NO: 391669 - protein, 12 aa, Homo sapiens
  CDR3 for alpha chain variable domain of TCR clone 195835 (TRAV2, TRAJ36)
CAELTGANNLFF

SEQ ID NO: 391670 - protein, 14 aa, Homo sapiens
  CDR3 for beta chain variable domain of TCR clone 195835 (TRBV18, TRBJ2-7)
CASSPRGGAYQQYF

SEQ ID NO: 391671 - protein, 13 aa, Homo sapiens
  CDR3 for alpha chain variable domain of TCR clone 195836 (TRAV21, TRAJ27)
CAARPGNAGKSTF

SEQ ID NO: 391672 - protein, 13 aa, Homo sapiens
  CDR3 for beta chain variable domain of TCR clone 195836 (TRBV2, TRBJ1-4)
CASSELGVEKLFF

SEQ ID NO: 391673 - protein, 16 aa, Homo sapiens
  CDR3 for alpha chain variable domain of TCR clone 195837 (TRAV12-3, TRAJ53)
CAMSPGRGGSNYKLKF

SEQ ID NO: 391674 - protein, 18 aa, Homo sapiens
  CDR3 for beta chain variable domain of TCR clone 195837 (TRBV11-2, TRBJ2-3)
CASSLGGASRGAPNTQYF

SEQ ID NO: 391675 - protein, 14 aa, Homo sapiens
  CDR3 for alpha chain variable domain of TCR clone 195838 (TRAV13-1, TRAJ44)
CAAKATGTASKRTF

SEQ ID NO: 391676 - protein, 14 aa, Homo sapiens
  CDR3 for beta chain variable domain of TCR clone 195838 (TRBV7-8, TRBJ2-3)
CASSLEAGTDTQYF

SEQ ID NO: 391677 - protein, 17 aa, Homo sapiens
  CDR3 for alpha chain variable domain of TCR clone 195839 (TRAV3, TRAJ42)
CAGRDRDYGGSQGNLIF

SEQ ID NO: 391678 - protein, 18 aa, Homo sapiens
  CDR3 for beta chain variable domain of TCR clone 195839 (TRBV20-1, TRBJ2-3)
CSASGLAGGPGATDTQYF

SEQ ID NO: 391679 - protein, 10 aa, Homo sapiens
  CDR3 for alpha chain variable domain of TCR clone 195840 (TRAV8-4, TRAJ39)
CAVAGNMLTF

SEQ ID NO: 391680 - protein, 17 aa, Homo sapiens
  CDR3 for beta chain variable domain of TCR clone 195840 (TRBV7-8, TRBJ2-6)
CASSAGTGGAGANVLTF

SEQ ID NO: 391681 - protein, 13 aa, Homo sapiens
  CDR3 for alpha chain variable domain of TCR clone 195841 (TRAV2, TRAJ29)
CAVRNSGNTPLVF

SEQ ID NO: 391682 - protein, 20 aa, Homo sapiens
  CDR3 for beta chain variable domain of TCR clone 195841 (TRBV7-8, TRBJ2-2)
CATSHLFPGPTIHITGELFF

SEQ ID NO: 391683 - protein, 12 aa, Homo sapiens
  CDR3 for alpha chain variable domain of TCR clone 195842 (TRAV17, TRAJ5)
CAILTGRRALTF

SEQ ID NO: 391684 - protein, 14 aa, Homo sapiens
  CDR3 for beta chain variable domain of TCR clone 195842 (TRBV7-2, TRBJ2-7)
CASRSQGAAYEQYF

SEQ ID NO: 391685 - protein, 14 aa, Homo sapiens
  CDR3 for alpha chain variable domain of TCR clone 195843 (TRAV34, TRAJ22)
CVADTSGSARQLTF

SEQ ID NO: 391686 - protein, 16 aa, Homo sapiens
  CDR3 for beta chain variable domain of TCR clone 195843 (TRBV2, TRBJ2-3)
CQHRGAPRRWTDTQYF

SEQ ID NO: 391687 - protein, 12 aa, Homo sapiens
  CDR3 for alpha chain variable domain of TCR clone 195844 (TRAV2, TRAJ31)
CAVEDNKARLMF

SEQ ID NO: 391688 - protein, 16 aa, Homo sapiens
  CDR3 for beta chain variable domain of TCR clone 195844 (TRBV10-3, TRBJ2-1)
CAISGVGDGGGGEQFF

SEQ ID NO: 391689 - protein, 12 aa, Homo sapiens
  CDR3 for alpha chain variable domain of TCR clone 195845 (TRAV8-4, TRAJ43)
CAVSVNNNDMRF

SEQ ID NO: 391690 - protein, 13 aa, Homo sapiens
  CDR3 for beta chain variable domain of TCR clone 195845 (TRBV7-9, TRBJ1-2)
CASSLKQNYGYNF

SEQ ID NO: 391691 - protein, 14 aa, Homo sapiens
  CDR3 for alpha chain variable domain of TCR clone 195846 (TRAV8-1, TRAJ9)
CAVNAWTGGLKTIF

SEQ ID NO: 391692 - protein, 16 aa, Homo sapiens
  CDR3 for beta chain variable domain of TCR clone 195846 (TRBV28, TRBJ2-2)
CASSLEGGSNTGELFF

SEQ ID NO: 391693 - protein, 13 aa, Homo sapiens
  CDR3 for alpha chain variable domain of TCR clone 195847 (TRAV24, TRAJ9)
CSSRNTGGFKTIF

SEQ ID NO: 391694 - protein, 14 aa, Homo sapiens
  CDR3 for beta chain variable domain of TCR clone 195847 (TRBV11-2, TRBJ2-3)
CASSRLARTDTQYF

SEQ ID NO: 391695 - protein, 15 aa, Homo sapiens
  CDR3 for alpha chain variable domain of TCR clone 195848 (TRAV23/DV6, TRAJ4)
CAASPLRGGYNKLIF

SEQ ID NO: 391696 - protein, 12 aa, Homo sapiens
  CDR3 for beta chain variable domain of TCR clone 195848 (TRBV7-9, TRBJ2-7)
CASSLEGYEQYF

SEQ ID NO: 391697 - protein, 12 aa, Homo sapiens
  CDR3 for alpha chain variable domain of TCR clone 195849 (TRAV12-3, TRAJ40)
CAMSSGTYKYIF

SEQ ID NO: 391698 - protein, 15 aa, Homo sapiens
  CDR3 for beta chain variable domain of TCR clone 195849 (TRBV7-3, TRBJ2-2)
CACSETGQGTGELFF

SEQ ID NO: 391699 - protein, 17 aa, Homo sapiens
  CDR3 for alpha chain variable domain of TCR clone 195850 (TRAV21, TRAJ52)
CCEAFPAGGTSYGRLTF

SEQ ID NO: 391700 - protein, 17 aa, Homo sapiens
  CDR3 for beta chain variable domain of TCR clone 195850 (TRBV13, TRBJ2-3)
CASSLSRVAGGRNTQYF

SEQ ID NO: 391701 - protein, 11 aa, Homo sapiens
  CDR3 for alpha chain variable domain of TCR clone 195851 (TRAV39, TRAJ49)
CAVDISTQFYF

SEQ ID NO: 391702 - protein, 13 aa, Homo sapiens
  CDR3 for beta chain variable domain of TCR clone 195851 (TRBV12-4, TRBJ1-1)
CASSRPGNTEAFF

SEQ ID NO: 391703 - protein, 12 aa, Homo sapiens
  CDR3 for alpha chain variable domain of TCR clone 195852 (TRAV8-3, TRAJ20)
CAVGANDYKLGF

SEQ ID NO: 391704 - protein, 16 aa, Homo sapiens
  CDR3 for beta chain variable domain of TCR clone 195852 (TRBV19, TRBJ2-2)
CASRSPGTGATGELFF

SEQ ID NO: 391705 - protein, 15 aa, Homo sapiens
  CDR3 for alpha chain variable domain of TCR clone 195853 (TRAV2, TRAJ9)
CAVEDRGTGGFKTIF

SEQ ID NO: 391706 - protein, 17 aa, Homo sapiens
  CDR3 for beta chain variable domain of TCR clone 195853 (TRBV4-1, TRBJ2-7)
CASRRDPLGVRGGEQYF

SEQ ID NO: 391707 - protein, 14 aa, Homo sapiens
  CDR3 for alpha chain variable domain of TCR clone 195854 (TRAV13-1, TRAJ44)
CAAKATGTASKLTF

SEQ ID NO: 391708 - protein, 13 aa, Homo sapiens
  CDR3 for beta chain variable domain of TCR clone 195854 (TRBV5-5, TRBJ1-2)
SASSFWRGEDYTF

SEQ ID NO: 391709 - protein, 15 aa, Homo sapiens
  CDR3 for alpha chain variable domain of TCR clone 195855 (TRAV20, TRAJ58)
CAVQDLETSGSRLTF

SEQ ID NO: 391710 - protein, 15 aa, Homo sapiens
  CDR3 for beta chain variable domain of TCR clone 195855 (TRBV6-3, TRBJ2-3)
CASSWRDGDADTQYF

SEQ ID NO: 391711 - protein, 14 aa, Homo sapiens
  CDR3 for alpha chain variable domain of TCR clone 195856 (TRAV1-1, TRAJ27)
CAVIYNTNAGKSTF

SEQ ID NO: 391712 - protein, 14 aa, Homo sapiens
  CDR3 for beta chain variable domain of TCR clone 195856 (TRBV7-2, TRBJ2-5)
CASSPRGSSETQYF

SEQ ID NO: 391713 - protein, 14 aa, Homo sapiens
  CDR3 for alpha chain variable domain of TCR clone 195857 (TRAV12-2, TRAJ13)
FAVKKTGGYQKVTF

SEQ ID NO: 391714 - protein, 14 aa, Homo sapiens
  CDR3 for beta chain variable domain of TCR clone 195857 (TRBV19, TRBJ2-7)
CASSIFAGTYEQYF

SEQ ID NO: 391715 - protein, 14 aa, Homo sapiens
  CDR3 for alpha chain variable domain of TCR clone 195858 (TRAV29/DV5, TRAJ36)
CAARRKTGANNLFF

SEQ ID NO: 391716 - protein, 13 aa, Homo sapiens
  CDR3 for beta chain variable domain of TCR clone 195858 (TRBV28, TRBJ2-1)
CASRSGGLNEQFF

SEQ ID NO: 391717 - protein, 13 aa, Homo sapiens
  CDR3 for alpha chain variable domain of TCR clone 195859 (TRAV12-2, TRAJ37)
CAGGSGNTGKLIF

SEQ ID NO: 391718 - protein, 17 aa, Homo sapiens
  CDR3 for beta chain variable domain of TCR clone 195859 (TRBV11-2, TRBJ2-1)
CASSSYPPGVEYNGQFF

SEQ ID NO: 391719 - protein, 17 aa, Homo sapiens
  CDR3 for alpha chain variable domain of TCR clone 195860 (TRAV3, TRAJ6)
RAARDGPRAGGSYIPTF

SEQ ID NO: 391720 - protein, 13 aa, Homo sapiens
  CDR3 for beta chain variable domain of TCR clone 195860 (TRBV19, TRBJ2-7)
CASSIDRTYEQYF

SEQ ID NO: 391721 - protein, 16 aa, Homo sapiens
  CDR3 for alpha chain variable domain of TCR clone 195861 (TRAV13-1, TRAJ48)
CAASIFGNFGNEKLTF

SEQ ID NO: 391722 - protein, 14 aa, Homo sapiens
  CDR3 for beta chain variable domain of TCR clone 195861 (TRBV7-3, TRBJ1-1)
CASSLKGVNTEAFF

SEQ ID NO: 391723 - protein, 15 aa, Homo sapiens
  CDR3 for alpha chain variable domain of TCR clone 195862 (TRAV12-1, TRAJ42)
CVVTRDGGSQGNLIF

SEQ ID NO: 391724 - protein, 17 aa, Homo sapiens
  CDR3 for beta chain variable domain of TCR clone 195862 (TRBV11-2, TRBJ2-1)
CASSLALAEFGRNEQFF

SEQ ID NO: 391725 - protein, 13 aa, Homo sapiens
  CDR3 for alpha chain variable domain of TCR clone 195863 (TRAV12-2, TRAJ22)
CALYSGSARQPTF

SEQ ID NO: 391726 - protein, 13 aa, Homo sapiens
  CDR3 for beta chain variable domain of TCR clone 195863 (TRBV19, TRBJ2-1)
CASMEFRSNEQFF

SEQ ID NO: 391727 - protein, 13 aa, Homo sapiens
  CDR3 for alpha chain variable domain of TCR clone 195864 (TRAV8-3, TRAJ36)
CAVGATGANNLFF

SEQ ID NO: 391728 - protein, 14 aa, Homo sapiens
  CDR3 for beta chain variable domain of TCR clone 195864 (TRBV12-4, TRBJ1-3)
CASVQGGGGNTIYF

SEQ ID NO: 391729 - protein, 14 aa, Homo sapiens
  CDR3 for alpha chain variable domain of TCR clone 195865 (TRAV38-1, TRAJ31)
CAFMKHDNNARLMC

SEQ ID NO: 391730 - protein, 16 aa, Homo sapiens
  CDR3 for beta chain variable domain of TCR clone 195865 (TRBV23-1, TRBJ2-1)
CISAPATGPTYNEQFF

SEQ ID NO: 391731 - protein, 14 aa, Homo sapiens
  CDR3 for alpha chain variable domain of TCR clone 195866 (TRAV1-2, TRAJ8)
YAVREDTGFQKLVL

SEQ ID NO: 391732 - protein, 16 aa, Homo sapiens
  CDR3 for beta chain variable domain of TCR clone 195866 (TRBV28, TRBJ1-4)
CASSPPYRGRSEKLFF

SEQ ID NO: 391733 - protein, 15 aa, Homo sapiens
  CDR3 for alpha chain variable domain of TCR clone 195867 (TRAV29/DV5, TRAJ48)
CAASLGVFGNEKLTF

SEQ ID NO: 391734 - protein, 11 aa, Homo sapiens
  CDR3 for beta chain variable domain of TCR clone 195867 (TRBV20-1, TRBJ2-3)
CSGTSSTTQYF

SEQ ID NO: 391735 - protein, 13 aa, Homo sapiens
  CDR3 for alpha chain variable domain of TCR clone 195868 (TRAV38-1, TRAJ42)
CARWGGSQGNLIF

SEQ ID NO: 391736 - protein, 10 aa, Homo sapiens
  CDR3 for beta chain variable domain of TCR clone 195868 (TRBV2, TRBJ2-5)
CASIAATQYF

SEQ ID NO: 391737 - protein, 13 aa, Homo sapiens
  CDR3 for alpha chain variable domain of TCR clone 195869 (TRAV13-1, TRAJ20)
CAARVSNDYKLSF

SEQ ID NO: 391738 - protein, 12 aa, Homo sapiens
  CDR3 for beta chain variable domain of TCR clone 195869 (TRBV20-1, TRBJ2-1)
CSARLGTDEQFC

SEQ ID NO: 391739 - protein, 15 aa, Homo sapiens
  CDR3 for alpha chain variable domain of TCR clone 195870 (TRAV16, TRAJ57)
CALSGGQGGSEKLVF

SEQ ID NO: 391740 - protein, 17 aa, Homo sapiens
  CDR3 for beta chain variable domain of TCR clone 195870 (TRBV10-1, TRBJ2-3)
CASSATRGGLIRSILAQ

SEQ ID NO: 391741 - protein, 14 aa, Homo sapiens
  CDR3 for alpha chain variable domain of TCR clone 195871 (TRAV17, TRAJ6)
CATDASGGSYIPTF

SEQ ID NO: 391742 - protein, 19 aa, Homo sapiens
  CDR3 for beta chain variable domain of TCR clone 195871 (TRBV4-3, TRBJ2-7)
CASSQEFIGWQVTPYEQFF

SEQ ID NO: 391743 - protein, 12 aa, Homo sapiens
  CDR3 for alpha chain variable domain of TCR clone 195872 (TRAV12-1, TRAJ20)
CVVMGNDYKLSF

SEQ ID NO: 391744 - protein, 14 aa, Homo sapiens
  CDR3 for beta chain variable domain of TCR clone 195872 (TRBV7-3, TRBJ2-1)
CASSLAGGTNEQFF

SEQ ID NO: 391745 - protein, 14 aa, Homo sapiens
  CDR3 for alpha chain variable domain of TCR clone 195873 (TRAV12-2, TRAJ13)
CAVKKTGGYQKVTF

SEQ ID NO: 391746 - protein, 13 aa, Homo sapiens
  CDR3 for beta chain variable domain of TCR clone 195873 (TRBV19, TRBJ1-2)
CASSVPGQDGYTC

SEQ ID NO: 391747 - protein, 12 aa, Homo sapiens
  CDR3 for alpha chain variable domain of TCR clone 195874 (TRAV29/DV5, TRAJ34)
CAASGNTDKLIF

SEQ ID NO: 391748 - protein, 15 aa, Homo sapiens
  CDR3 for beta chain variable domain of TCR clone 195874 (TRBV7-9, TRBJ1-5)
CASSQGHQPNQPQHF

SEQ ID NO: 391749 - protein, 13 aa, Homo sapiens
  CDR3 for alpha chain variable domain of TCR clone 195875 (TRAV13-1, TRAJ27)
CAASTNQCRQINL

SEQ ID NO: 391750 - protein, 16 aa, Homo sapiens
  CDR3 for beta chain variable domain of TCR clone 195875 (TRBV27, TRBJ2-2)
CASSFRGLVRTGELFF

SEQ ID NO: 391751 - protein, 15 aa, Homo sapiens
  CDR3 for alpha chain variable domain of TCR clone 195876 (TRAV26-2, TRAJ13)
CILRVLSGGYQKVTF

SEQ ID NO: 391752 - protein, 11 aa, Homo sapiens
  CDR3 for beta chain variable domain of TCR clone 195876 (TRBV7-9, TRBJ2-3)
CASSYTDTQYF

SEQ ID NO: 391753 - protein, 14 aa, Homo sapiens
  CDR3 for alpha chain variable domain of TCR clone 195877 (TRAV1-2, TRAJ6)
CAARSSGGSYIPTF

SEQ ID NO: 391754 - protein, 16 aa, Homo sapiens
  CDR3 for beta chain variable domain of TCR clone 195877 (TRBV7-3, TRBJ2-2)
CASSLKRGTLSGELFF

SEQ ID NO: 391755 - protein, 15 aa, Homo sapiens
  CDR3 for alpha chain variable domain of TCR clone 195878 (TRAV12-3, TRAJ6)
CAMSATTGGSYIPTF

SEQ ID NO: 391756 - protein, 19 aa, Homo sapiens
  CDR3 for beta chain variable domain of TCR clone 195878 (TRBV10-3, TRBJ2-3)
CAISEPTSGGAMSTDTQYF

SEQ ID NO: 391757 - protein, 14 aa, Homo sapiens
  CDR3 for alpha chain variable domain of TCR clone 195879 (TRAV1-2, TRAJ8)
CAVREDTGFKKLVF

SEQ ID NO: 391758 - protein, 14 aa, Homo sapiens
  CDR3 for beta chain variable domain of TCR clone 195879 (TRBV5-4, TRBJ1-1)
CASSLDSRRDEAFF

SEQ ID NO: 391759 - protein, 11 aa, Homo sapiens
  CDR3 for alpha chain variable domain of TCR clone 195880 (TRAV17, TRAJ9)
CATTGGFKTIF

SEQ ID NO: 391760 - protein, 16 aa, Homo sapiens
  CDR3 for beta chain variable domain of TCR clone 195880 (TRBV4-1, TRBJ1-2)
CASSQDAGQVLYGYTF

SEQ ID NO: 391761 - protein, 14 aa, Homo sapiens
  CDR3 for alpha chain variable domain of TCR clone 195881 (TRAV8-3, TRAJ39)
CAGGANNAGNMLTF

SEQ ID NO: 391762 - protein, 12 aa, Homo sapiens
  CDR3 for beta chain variable domain of TCR clone 195881 (TRBV11-3, TRBJ1-1)
CASSHRQGEAFF

SEQ ID NO: 391763 - protein, 13 aa, Homo sapiens
  CDR3 for alpha chain variable domain of TCR clone 195882 (TRAV12-3, TRAJ7)
CAMSASGNNRLAS

SEQ ID NO: 391764 - protein, 14 aa, Homo sapiens
  CDR3 for beta chain variable domain of TCR clone 195882 (TRBV13, TRBJ2-5)
CASSLGPRGETQYF

SEQ ID NO: 391765 - protein, 12 aa, Homo sapiens
  CDR3 for alpha chain variable domain of TCR clone 195883 (TRAV29/DV5, TRAJ34)
CAASGNTDKLIF

SEQ ID NO: 391766 - protein, 14 aa, Homo sapiens
  CDR3 for beta chain variable domain of TCR clone 195883 (TRBV5-1, TRBJ2-2)
CASSLGGGSGELFF

SEQ ID NO: 391767 - protein, 16 aa, Homo sapiens
  CDR3 for alpha chain variable domain of TCR clone 195884 (TRAV13-1, TRAJ18)
CAASRMRGSTLGRLYF

SEQ ID NO: 391768 - protein, 16 aa, Homo sapiens
  CDR3 for beta chain variable domain of TCR clone 195884 (TRBV7-9, TRBJ2-7)
CASSYPDREGGYEQYF

SEQ ID NO: 391769 - protein, 14 aa, Homo sapiens
  CDR3 for alpha chain variable domain of TCR clone 195885 (TRAV8-3, TRAJ9)
CAVVYNTGGFKTIF

SEQ ID NO: 391770 - protein, 17 aa, Homo sapiens
  CDR3 for beta chain variable domain of TCR clone 195885 (TRBV13, TRBJ2-3)
CASSLSRVAGGRNTQYF

SEQ ID NO: 391771 - protein, 14 aa, Homo sapiens
  CDR3 for alpha chain variable domain of TCR clone 195886 (TRAV2, TRAJ37)
CAVDFTSNTGKLIF

SEQ ID NO: 391772 - protein, 15 aa, Homo sapiens
  CDR3 for beta chain variable domain of TCR clone 195886 (TRBV7-3, TRBJ2-1)
CASSPTGGGEVEQFF

SEQ ID NO: 391773 - protein, 12 aa, Homo sapiens
  CDR3 for alpha chain variable domain of TCR clone 195887 (TRAV29/DV5, TRAJ49)
CAATDTGNQYYF

SEQ ID NO: 391774 - protein, 19 aa, Homo sapiens
  CDR3 for beta chain variable domain of TCR clone 195887 (TRBV25-1, TRBJ2-2)
CAILVYRVDRGRKTGELFF

SEQ ID NO: 391775 - protein, 12 aa, Homo sapiens
  CDR3 for alpha chain variable domain of TCR clone 195888 (TRAV12-3, TRAJ17)
CAMTLTGNKLTF

SEQ ID NO: 391776 - protein, 17 aa, Homo sapiens
  CDR3 for beta chain variable domain of TCR clone 195888 (TRBV15, TRBJ1-5)
CATSRVKGIYSNQPQHF

SEQ ID NO: 391777 - protein, 11 aa, Homo sapiens
  CDR3 for alpha chain variable domain of TCR clone 195889 (TRAV12-2, TRAJ11)
CAVNPYSTLTF

SEQ ID NO: 391778 - protein, 16 aa, Homo sapiens
  CDR3 for beta chain variable domain of TCR clone 195889 (TRBV19, TRBJ2-2)
CASRSPGTGATGELFF

SEQ ID NO: 391779 - protein, 12 aa, Homo sapiens
  CDR3 for alpha chain variable domain of TCR clone 195890 (TRAV1-1, TRAJ39)
CAVPVVGNMLTF

SEQ ID NO: 391780 - protein, 15 aa, Homo sapiens
  CDR3 for beta chain variable domain of TCR clone 195890 (TRBV27, TRBJ2-5)
CASSLYPRGGETQYF

SEQ ID NO: 391781 - protein, 15 aa, Homo sapiens
  CDR3 for alpha chain variable domain of TCR clone 195891 (TRAV12-2, TRAJ40)
CAVRPQTSGTYKYIF

SEQ ID NO: 391782 - protein, 13 aa, Homo sapiens
  CDR3 for beta chain variable domain of TCR clone 195891 (TRBV7-2, TRBJ2-2)
CASSSVRAGELFF

SEQ ID NO: 391783 - protein, 15 aa, Homo sapiens
  CDR3 for alpha chain variable domain of TCR clone 195892 (TRAV4, TRAJ39)
CLVGPNNNAGNMLTF

SEQ ID NO: 391784 - protein, 15 aa, Homo sapiens
  CDR3 for beta chain variable domain of TCR clone 195892 (TRBV19, TRBJ1-1)
CASTSGQIQNAEAFF

SEQ ID NO: 391785 - protein, 16 aa, Homo sapiens
  CDR3 for alpha chain variable domain of TCR clone 195893 (TRAV39, TRAJ32)
CAVDMEYGGATNKLIF

SEQ ID NO: 391786 - protein, 17 aa, Homo sapiens
  CDR3 for beta chain variable domain of TCR clone 195893 (TRBV28, TRBJ2-5)
CASSRQGGLAGAETEYF

SEQ ID NO: 391787 - protein, 15 aa, Homo sapiens
  CDR3 for alpha chain variable domain of TCR clone 195894 (TRAV17, TRAJ10)
CATVLLPGGGNKLTF

SEQ ID NO: 391788 - protein, 16 aa, Homo sapiens
  CDR3 for beta chain variable domain of TCR clone 195894 (TRBV7-9, TRBJ2-3)
CASSPWREVGTDTQYF

SEQ ID NO: 391789 - protein, 15 aa, Homo sapiens
  CDR3 for alpha chain variable domain of TCR clone 195895 (TRAV3, TRAJ17)
FAVSPTEAAGNKLTF

SEQ ID NO: 391790 - protein, 12 aa, Homo sapiens
  CDR3 for beta chain variable domain of TCR clone 195895 (TRBV7-9, TRBJ1-6)
CASSLMTSPLHF

SEQ ID NO: 391791 - protein, 14 aa, Homo sapiens
  CDR3 for alpha chain variable domain of TCR clone 195896 (TRAV26-1, TRAJ39)
CIVRGSRAGKMLPF

SEQ ID NO: 391792 - protein, 15 aa, Homo sapiens
  CDR3 for beta chain variable domain of TCR clone 195896 (TRBV7-9, TRBJ1-5)
CASSQGHQPNQPQHF

SEQ ID NO: 391793 - protein, 13 aa, Homo sapiens
  CDR3 for alpha chain variable domain of TCR clone 195897 (TRAV3, TRAJ21)
CAVREPDFNKFYF

SEQ ID NO: 391794 - protein, 16 aa, Homo sapiens
  CDR3 for beta chain variable domain of TCR clone 195897 (TRBV2, TRBJ2-1)
CVSSVGGSLSYNEQFF

SEQ ID NO: 391795 - protein, 10 aa, Homo sapiens
  CDR3 for alpha chain variable domain of TCR clone 195898 (TRAV13-1, TRAJ26)
CAPYGQNFVF

SEQ ID NO: 391796 - protein, 15 aa, Homo sapiens
  CDR3 for beta chain variable domain of TCR clone 195898 (TRBV28, TRBJ2-3)
CASSQELGGHRYAVF

SEQ ID NO: 391797 - protein, 11 aa, Homo sapiens
  CDR3 for alpha chain variable domain of TCR clone 195899 (TRAV17, TRAJ31)
CATSNNARLMF

SEQ ID NO: 391798 - protein, 14 aa, Homo sapiens
  CDR3 for beta chain variable domain of TCR clone 195899 (TRBV18, TRBJ2-7)
CASSPRGVAYEQYF

SEQ ID NO: 391799 - protein, 11 aa, Homo sapiens
  CDR3 for alpha chain variable domain of TCR clone 195900 (TRAV26-1, TRAJ36)
CIVGGANNLFF

SEQ ID NO: 391800 - protein, 14 aa, Homo sapiens
  CDR3 for beta chain variable domain of TCR clone 195900 (TRBV9, TRBJ2-7)
CASSSHGSSYEQYF

SEQ ID NO: 391801 - protein, 18 aa, Homo sapiens
  CDR3 for alpha chain variable domain of TCR clone 195901 (TRAV21, TRAJ52)
CAVRHSTAGGTSYGKLTF

SEQ ID NO: 391802 - protein, 17 aa, Homo sapiens
  CDR3 for beta chain variable domain of TCR clone 195901 (TRBV13, TRBJ2-3)
CASSLSRVAGGRNTQYF

SEQ ID NO: 391803 - protein, 16 aa, Homo sapiens
  CDR3 for alpha chain variable domain of TCR clone 195902 (TRAV26-2, TRAJ48)
CILRPPFNFGNEKLTF

SEQ ID NO: 391804 - protein, 15 aa, Homo sapiens
  CDR3 for beta chain variable domain of TCR clone 195902 (TRBV20-1, TRBJ2-3)
CSARVAGTYTDTQYF

SEQ ID NO: 391805 - protein, 13 aa, Homo sapiens
  CDR3 for alpha chain variable domain of TCR clone 195903 (TRAV13-1, TRAJ21)
GAASIYNFNKFYF

SEQ ID NO: 391806 - protein, 13 aa, Homo sapiens
  CDR3 for beta chain variable domain of TCR clone 195903 (TRBV27, TRBJ1-4)
CASSLMGDENLFF

SEQ ID NO: 391807 - protein, 11 aa, Homo sapiens
  CDR3 for alpha chain variable domain of TCR clone 195904 (TRAV3, TRAJ21)
CAVGNFNKSYF

SEQ ID NO: 391808 - protein, 16 aa, Homo sapiens
  CDR3 for beta chain variable domain of TCR clone 195904 (TRBV19, TRBJ2-1)
CANSKAGPSSYNEQFF

SEQ ID NO: 391809 - protein, 13 aa, Homo sapiens
  CDR3 for alpha chain variable domain of TCR clone 195905 (TRAV17, TRAJ7)
CATDNYGNNRLAF

SEQ ID NO: 391810 - protein, 16 aa, Homo sapiens
  CDR3 for beta chain variable domain of TCR clone 195905 (TRBV4-1, TRBJ2-5)
CASSQAIAASSATRYF

SEQ ID NO: 391811 - protein, 14 aa, Homo sapiens
  CDR3 for alpha chain variable domain of TCR clone 195906 (TRAV13-2, TRAJ17)
CAENSQAAGNKLTF

SEQ ID NO: 391812 - protein, 11 aa, Homo sapiens
  CDR3 for beta chain variable domain of TCR clone 195906 (TRBV6-3, TRBJ2-3)
CATGQADTQYF

SEQ ID NO: 391813 - protein, 14 aa, Homo sapiens
  CDR3 for alpha chain variable domain of TCR clone 195907 (TRAV12-2, TRAJ3)
CAVSLYSSASKIIF

SEQ ID NO: 391814 - protein, 14 aa, Homo sapiens
  CDR3 for beta chain variable domain of TCR clone 195907 (TRBV27, TRBJ2-1)
CAGSMAETYNEQFF

SEQ ID NO: 391815 - protein, 12 aa, Homo sapiens
  CDR3 for alpha chain variable domain of TCR clone 195908 (TRAV2, TRAJ26)
CAGSPGRLWSEF

SEQ ID NO: 391816 - protein, 16 aa, Homo sapiens
  CDR3 for beta chain variable domain of TCR clone 195908 (TRBV13, TRBJ2-2)
CASSPRTGEHTGELVF

SEQ ID NO: 391817 - protein, 20 aa, Homo sapiens
  CDR3 for alpha chain variable domain of TCR clone 195909 (TRAV1-1, TRAJ4)
CLLLLRCEGFLSGGYNKLIF

SEQ ID NO: 391818 - protein, 16 aa, Homo sapiens
  CDR3 for beta chain variable domain of TCR clone 195909 (TRBV27, TRBJ2-2)
CASSFRGLVRTGELFF

SEQ ID NO: 391819 - protein, 12 aa, Homo sapiens
  CDR3 for alpha chain variable domain of TCR clone 195910 (TRAV1-1, TRAJ9)
CAVDTGGFKTIF

SEQ ID NO: 391820 - protein, 14 aa, Homo sapiens
  CDR3 for beta chain variable domain of TCR clone 195910 (TRBV7-8, TRBJ1-1)
CASSFLTGTTEAFF

SEQ ID NO: 391821 - protein, 13 aa, Homo sapiens
  CDR3 for alpha chain variable domain of TCR clone 195911 (TRAV35, TRAJ42)
CAGFPGSQGNLIF

SEQ ID NO: 391822 - protein, 14 aa, Homo sapiens
  CDR3 for beta chain variable domain of TCR clone 195911 (TRBV19, TRBJ2-7)
CASSIFAGTYEQYF

SEQ ID NO: 391823 - protein, 14 aa, Homo sapiens
  CDR3 for alpha chain variable domain of TCR clone 195912 (TRAV8-2, TRAJ11)
CVLSEKAGYSTLTF

SEQ ID NO: 391824 - protein, 16 aa, Homo sapiens
  CDR3 for beta chain variable domain of TCR clone 195912 (TRBV28, TRBJ2-1)
CASSSPEYPRDNEQFF

SEQ ID NO: 391825 - protein, 13 aa, Homo sapiens
  CDR3 for alpha chain variable domain of TCR clone 195913 (TRAV8-3, TRAJ28)
CAVGAVGSYQLTF

SEQ ID NO: 391826 - protein, 14 aa, Homo sapiens
  CDR3 for beta chain variable domain of TCR clone 195913 (TRBV24-1, TRBJ1-1)
CATSIPRGDTEAFF

SEQ ID NO: 391827 - protein, 15 aa, Homo sapiens
  CDR3 for alpha chain variable domain of TCR clone 195914 (TRAV4, TRAJ36)
CLVGDRQTGANNLFF

SEQ ID NO: 391828 - protein, 13 aa, Homo sapiens
  CDR3 for beta chain variable domain of TCR clone 195914 (TRBV7-3, TRBJ1-1)
CASSQDWGAEAFF

SEQ ID NO: 391829 - protein, 13 aa, Homo sapiens
  CDR3 for alpha chain variable domain of TCR clone 195915 (TRAV26-1, TRAJ41)
CIVRINSGYALNF

SEQ ID NO: 391830 - protein, 13 aa, Homo sapiens
  CDR3 for beta chain variable domain of TCR clone 195915 (TRBV20-1, TRBJ1-5)
CSATAAGGQPQHC

SEQ ID NO: 391831 - protein, 14 aa, Homo sapiens
  CDR3 for alpha chain variable domain of TCR clone 195916 (TRAV13-1, TRAJ9)
CAASRPSGGFKTNF

SEQ ID NO: 391832 - protein, 14 aa, Homo sapiens
  CDR3 for beta chain variable domain of TCR clone 195916 (TRBV9, TRBJ2-2)
CASSVGFLTGELFF

SEQ ID NO: 391833 - protein, 14 aa, Homo sapiens
  CDR3 for alpha chain variable domain of TCR clone 195917 (TRAV38-1, TRAJ45)
CAYYSGGGADGLTF

SEQ ID NO: 391834 - protein, 20 aa, Homo sapiens
  CDR3 for beta chain variable domain of TCR clone 195917 (TRBV19, TRBJ2-1)
CASSISRTVTSTRLNNEQFF

SEQ ID NO: 391835 - protein, 12 aa, Homo sapiens
  CDR3 for alpha chain variable domain of TCR clone 195918 (TRAV20, TRAJ39)
CAVGNAGNMLTF

SEQ ID NO: 391836 - protein, 17 aa, Homo sapiens
  CDR3 for beta chain variable domain of TCR clone 195918 (TRBV4-1, TRBJ2-3)
CASSKGYVSGGTDTQYF

SEQ ID NO: 391837 - protein, 13 aa, Homo sapiens
  CDR3 for alpha chain variable domain of TCR clone 195919 (TRAV1-2, TRAJ9)
CAALNTGGFKTIF

SEQ ID NO: 391838 - protein, 13 aa, Homo sapiens
  CDR3 for beta chain variable domain of TCR clone 195919 (TRBV5-7, TRBJ2-5)
CASSLRLQETQYF

SEQ ID NO: 391839 - protein, 14 aa, Homo sapiens
  CDR3 for alpha chain variable domain of TCR clone 195920 (TRAV12-2, TRAJ33)
CAVKRARSKYLLIW

SEQ ID NO: 391840 - protein, 12 aa, Homo sapiens
  CDR3 for beta chain variable domain of TCR clone 195920 (TRBV24-1, TRBJ2-3)
CATSDSTDTQYF

SEQ ID NO: 391841 - protein, 14 aa, Homo sapiens
  CDR3 for alpha chain variable domain of TCR clone 195921 (TRAV17, TRAJ57)
CATDPQGGSEKLVF

SEQ ID NO: 391842 - protein, 15 aa, Homo sapiens
  CDR3 for beta chain variable domain of TCR clone 195921 (TRBV5-1, TRBJ2-7)
CARSLDLTSPYEQYF

SEQ ID NO: 391843 - protein, 10 aa, Homo sapiens
  CDR3 for alpha chain variable domain of TCR clone 195922 (TRAV30, TRAJ48)
CGIGNEKLTF

SEQ ID NO: 391844 - protein, 14 aa, Homo sapiens
  CDR3 for beta chain variable domain of TCR clone 195922 (TRBV7-6, TRBJ2-3)
CASSVAGCTDTQYF

SEQ ID NO: 391845 - protein, 14 aa, Homo sapiens
  CDR3 for alpha chain variable domain of TCR clone 195923 (TRAV1-2, TRAJ8)
CAVREDTGFQKLGF

SEQ ID NO: 391846 - protein, 19 aa, Homo sapiens
  CDR3 for beta chain variable domain of TCR clone 195923 (TRBV7-2, TRBJ2-3)
CASSFLSRNWGGGTDTQYF

SEQ ID NO: 391847 - protein, 13 aa, Homo sapiens
  CDR3 for alpha chain variable domain of TCR clone 195924 (TRAV5, TRAJ30)
CAEIANRDDKIIF

SEQ ID NO: 391848 - protein, 14 aa, Homo sapiens
  CDR3 for beta chain variable domain of TCR clone 195924 (TRBV4-1, TRBJ2-2)
CASSQAANTGELFF

SEQ ID NO: 391849 - protein, 14 aa, Homo sapiens
  CDR3 for alpha chain variable domain of TCR clone 195925 (TRAV8-3, TRAJ7)
CAAIELYGNNRLAF

SEQ ID NO: 391850 - protein, 17 aa, Homo sapiens
  CDR3 for beta chain variable domain of TCR clone 195925 (TRBV20-1, TRBJ2-1)
CSAPPRLAGTRYNEQFF

SEQ ID NO: 391851 - protein, 13 aa, Homo sapiens
  CDR3 for alpha chain variable domain of TCR clone 195926 (TRAV12-1, TRAJ26)
CVVRRNHGQNFVF

SEQ ID NO: 391852 - protein, 15 aa, Homo sapiens
  CDR3 for beta chain variable domain of TCR clone 195926 (TRBV28, TRBJ2-1)
CASSVIAGGRSEQFF

SEQ ID NO: 391853 - protein, 18 aa, Homo sapiens
  CDR3 for alpha chain variable domain of TCR clone 195927 (TRAV13-1, TRAJ52)
FAAKNPNAGGTSYGKLTF

SEQ ID NO: 391854 - protein, 17 aa, Homo sapiens
  CDR3 for beta chain variable domain of TCR clone 195927 (TRBV11-2, TRBJ2-1)
CASSLYPPGVEYNEQFF

SEQ ID NO: 391855 - protein, 17 aa, Homo sapiens
  CDR3 for alpha chain variable domain of TCR clone 195928 (TRAV12-3, TRAJ18)
CAMIRADRGSTLGRLYF

SEQ ID NO: 391856 - protein, 14 aa, Homo sapiens
  CDR3 for beta chain variable domain of TCR clone 195928 (TRBV5-7, TRBJ1-6)
CASTPWPADSALYF

SEQ ID NO: 391857 - protein, 16 aa, Homo sapiens
  CDR3 for alpha chain variable domain of TCR clone 195929 (TRAV3, TRAJ37)
CAVRPHDSGNTGKLIF

SEQ ID NO: 391858 - protein, 17 aa, Homo sapiens
  CDR3 for beta chain variable domain of TCR clone 195929 (TRBV20-1, TRBJ2-1)
CSASSSGLAGSYNEQFF

SEQ ID NO: 391859 - protein, 12 aa, Homo sapiens
  CDR3 for alpha chain variable domain of TCR clone 195930 (TRAV21, TRAJ31)
CVLAGNNARLMF

SEQ ID NO: 391860 - protein, 14 aa, Homo sapiens
  CDR3 for beta chain variable domain of TCR clone 195930 (TRBV7-9, TRBJ2-7)
CASSLSRGSYEQYF

SEQ ID NO: 391861 - protein, 13 aa, Homo sapiens
  CDR3 for alpha chain variable domain of TCR clone 195931 (TRAV29/DV5, TRAJ49)
CAASTNTCNQFYF

SEQ ID NO: 391862 - protein, 13 aa, Homo sapiens
  CDR3 for beta chain variable domain of TCR clone 195931 (TRBV7-2, TRBJ1-4)
CASSLAGLEKLFF

SEQ ID NO: 391863 - protein, 14 aa, Homo sapiens
  CDR3 for alpha chain variable domain of TCR clone 195932 (TRAV17, TRAJ12)
CAILPMDSSYKLIF

SEQ ID NO: 391864 - protein, 14 aa, Homo sapiens
  CDR3 for beta chain variable domain of TCR clone 195932 (TRBV7-9, TRBJ2-2)
CASSGLADTGELFF

SEQ ID NO: 391865 - protein, 12 aa, Homo sapiens
  CDR3 for alpha chain variable domain of TCR clone 195933 (TRAV12-3, TRAJ17)
CAMTLTGNKLTF

SEQ ID NO: 391866 - protein, 15 aa, Homo sapiens
  CDR3 for beta chain variable domain of TCR clone 195933 (TRBV3-1, TRBJ2-2)
CASSQDWTRAGELFF

SEQ ID NO: 391867 - protein, 13 aa, Homo sapiens
  CDR3 for alpha chain variable domain of TCR clone 195934 (TRAV2, TRAJ15)
CAVASQAGTALIF

SEQ ID NO: 391868 - protein, 14 aa, Homo sapiens
  CDR3 for beta chain variable domain of TCR clone 195934 (TRBV5-4, TRBJ2-4)
CASSLRREPGVQYF

SEQ ID NO: 391869 - protein, 11 aa, Homo sapiens
  CDR3 for alpha chain variable domain of TCR clone 195935 (TRAV2, TRAJ33)
CAVDVNYQLIW

SEQ ID NO: 391870 - protein, 15 aa, Homo sapiens
  CDR3 for beta chain variable domain of TCR clone 195935 (TRBV19, TRBJ1-2)
CASSVGQVLNYGLTF

SEQ ID NO: 391871 - protein, 17 aa, Homo sapiens
  CDR3 for alpha chain variable domain of TCR clone 195936 (TRAV4, TRAJ18)
CLVGERSVGSTLGRLYF

SEQ ID NO: 391872 - protein, 13 aa, Homo sapiens
  CDR3 for beta chain variable domain of TCR clone 195936 (TRBV7-2, TRBJ1-1)
CASNLKGAKVAFF

SEQ ID NO: 391873 - protein, 14 aa, Homo sapiens
  CDR3 for alpha chain variable domain of TCR clone 195937 (TRAV8-4, TRAJ39)
CAVSLNNEGNMLTF

SEQ ID NO: 391874 - protein, 16 aa, Homo sapiens
  CDR3 for beta chain variable domain of TCR clone 195937 (TRBV13, TRBJ2-7)
CASSSRESGRTYEQYF

SEQ ID NO: 391875 - protein, 18 aa, Homo sapiens
  CDR3 for alpha chain variable domain of TCR clone 195938 (TRAV12-3, TRAJ52)
CAMSVGGAGGTSYGKMTF

SEQ ID NO: 391876 - protein, 16 aa, Homo sapiens
  CDR3 for beta chain variable domain of TCR clone 195938 (TRBV7-9, TRBJ1-2)
CASSISLDRGGYGYTF

SEQ ID NO: 391877 - protein, 14 aa, Homo sapiens
  CDR3 for alpha chain variable domain of TCR clone 195939 (TRAV2, TRAJ9)
CAEDPNTGGFKTIF

SEQ ID NO: 391878 - protein, 13 aa, Homo sapiens
  CDR3 for beta chain variable domain of TCR clone 195939 (TRBV20-1, TRBJ2-1)
CSASTGTSNEQFF

SEQ ID NO: 391879 - protein, 13 aa, Homo sapiens
  CDR3 for alpha chain variable domain of TCR clone 195940 (TRAV12-3, TRAJ33)
CAMSVNSNYQLIW

SEQ ID NO: 391880 - protein, 11 aa, Homo sapiens
  CDR3 for beta chain variable domain of TCR clone 195940 (TRBV7-3, TRBJ2-5)
CACSLSETQYF

SEQ ID NO: 391881 - protein, 17 aa, Homo sapiens
  CDR3 for alpha chain variable domain of TCR clone 195941 (TRAV3, TRAJ42)
CAVRDRDYGGSQGNLIF

SEQ ID NO: 391882 - protein, 12 aa, Homo sapiens
  CDR3 for beta chain variable domain of TCR clone 195941 (TRBV11-2, TRBJ2-1)
CASSPGNSEQFF

SEQ ID NO: 391883 - protein, 16 aa, Homo sapiens
  CDR3 for alpha chain variable domain of TCR clone 195942 (TRAV3, TRAJ27)
CAVRDPQGTNSGKSTF

SEQ ID NO: 391884 - protein, 17 aa, Homo sapiens
  CDR3 for beta chain variable domain of TCR clone 195942 (TRBV4-1, TRBJ2-7)
CASSQGRGLQTSYEQYF

SEQ ID NO: 391885 - protein, 14 aa, Homo sapiens
  CDR3 for alpha chain variable domain of TCR clone 195943 (TRAV13-1, TRAJ35)
CAASKGGFGNVLHC

SEQ ID NO: 391886 - protein, 13 aa, Homo sapiens
  CDR3 for beta chain variable domain of TCR clone 195943 (TRBV7-3, TRBJ1-1)
CASSQDWGDEAFF

SEQ ID NO: 391887 - protein, 21 aa, Homo sapiens
  CDR3 for alpha chain variable domain of TCR clone 195944 (TRAV8-4, TRAJ47)
HLTKPSAHMSDAAERGNKLVF

SEQ ID NO: 391888 - protein, 13 aa, Homo sapiens
  CDR3 for beta chain variable domain of TCR clone 195944 (TRBV2, TRBJ2-5)
CASGTPYQETQYF

SEQ ID NO: 391889 - protein, 11 aa, Homo sapiens
  CDR3 for alpha chain variable domain of TCR clone 195945 (TRAV13-1, TRAJ15)
CAATPETALIF

SEQ ID NO: 391890 - protein, 17 aa, Homo sapiens
  CDR3 for beta chain variable domain of TCR clone 195945 (TRBV13, TRBJ2-3)
CASSLSRVAGGRNTQYF

SEQ ID NO: 391891 - protein, 13 aa, Homo sapiens
  CDR3 for alpha chain variable domain of TCR clone 195946 (TRAV3, TRAJ8)
CAVRFTGFQKLVF

SEQ ID NO: 391892 - protein, 15 aa, Homo sapiens
  CDR3 for beta chain variable domain of TCR clone 195946 (TRBV20-1, TRBJ2-7)
CSARDRVSGMDEQNF

SEQ ID NO: 391893 - protein, 15 aa, Homo sapiens
  CDR3 for alpha chain variable domain of TCR clone 195947 (TRAV14/DV4, TRAJ12)
CAMREERDSSYKLIF

SEQ ID NO: 391894 - protein, 13 aa, Homo sapiens
  CDR3 for beta chain variable domain of TCR clone 195947 (TRBV10-3, TRBJ2-7)
CASKLAVNYEQYF

SEQ ID NO: 391895 - protein, 12 aa, Homo sapiens
  CDR3 for alpha chain variable domain of TCR clone 195948 (TRAV21, TRAJ11)
CSVRGGNSNLTF

SEQ ID NO: 391896 - protein, 15 aa, Homo sapiens
  CDR3 for beta chain variable domain of TCR clone 195948 (TRBV6-1, TRBJ2-7)
CASSEPIAATTEQYF

SEQ ID NO: 391897 - protein, 15 aa, Homo sapiens
  CDR3 for alpha chain variable domain of TCR clone 195949 (TRAV29/DV5, TRAJ53)
CAASASGGSNYKLTF

SEQ ID NO: 391898 - protein, 19 aa, Homo sapiens
  CDR3 for beta chain variable domain of TCR clone 195949 (TRBV5-1, TRBJ2-3)
CASSFWLAGGITTTDTQYF

SEQ ID NO: 391899 - protein, 11 aa, Homo sapiens
  CDR3 for alpha chain variable domain of TCR clone 195950 (TRAV23/DV6, TRAJ17)
CKWAAGNKLTV

SEQ ID NO: 391900 - protein, 14 aa, Homo sapiens
  CDR3 for beta chain variable domain of TCR clone 195950 (TRBV6-1, TRBJ2-7)
CASSGGSYLYEQYF

SEQ ID NO: 391901 - protein, 14 aa, Homo sapiens
  CDR3 for alpha chain variable domain of TCR clone 195951 (TRAV21, TRAJ3)
CAVMGYSSASKIIF

SEQ ID NO: 391902 - protein, 11 aa, Homo sapiens
  CDR3 for beta chain variable domain of TCR clone 195951 (TRBV29-1, TRBJ2-5)
CSEDRTGTQYF

SEQ ID NO: 391903 - protein, 13 aa, Homo sapiens
  CDR3 for alpha chain variable domain of TCR clone 195952 (TRAV22, TRAJ12)
CAGRMDSSYKLIF

SEQ ID NO: 391904 - protein, 16 aa, Homo sapiens
  CDR3 for beta chain variable domain of TCR clone 195952 (TRBV7-2, TRBJ2-5)
CASSPFPTGGEETQYF

SEQ ID NO: 391905 - protein, 14 aa, Homo sapiens
  CDR3 for alpha chain variable domain of TCR clone 195953 (TRAV14/DV4, TRAJ58)
CALRARTSGSRLTF

SEQ ID NO: 391906 - protein, 18 aa, Homo sapiens
  CDR3 for beta chain variable domain of TCR clone 195953 (TRBV12-4, TRBJ1-5)
CASSLFLVGVGAYQPQHF

SEQ ID NO: 391907 - protein, 14 aa, Homo sapiens
  CDR3 for alpha chain variable domain of TCR clone 195954 (TRAV12-1, TRAJ6)
CVVASIRRKLHTYI

SEQ ID NO: 391908 - protein, 15 aa, Homo sapiens
  CDR3 for beta chain variable domain of TCR clone 195954 (TRBV7-3, TRBJ2-1)
CASSLKASEYNERFF

SEQ ID NO: 391909 - protein, 15 aa, Homo sapiens
  CDR3 for alpha chain variable domain of TCR clone 195955 (TRAV36/DV7, TRAJ21)
CALKFYFGSGTNLNV

SEQ ID NO: 391910 - protein, 13 aa, Homo sapiens
  CDR3 for beta chain variable domain of TCR clone 195955 (TRBV11-3, TRBJ2-5)
CASSSGLQETQYF

SEQ ID NO: 391911 - protein, 14 aa, Homo sapiens
  CDR3 for alpha chain variable domain of TCR clone 195956 (TRAV1-2, TRAJ8)
CAVREDTGFQKLVF

SEQ ID NO: 391912 - protein, 15 aa, Homo sapiens
  CDR3 for beta chain variable domain of TCR clone 195956 (TRBV3-1, TRBJ2-1)
CASSQVVDDGEEQFF

SEQ ID NO: 391913 - protein, 17 aa, Homo sapiens
  CDR3 for alpha chain variable domain of TCR clone 195957 (TRAV36/DV7, TRAJ44)
CAVEQIPALPVHSPLGL

SEQ ID NO: 391914 - protein, 15 aa, Homo sapiens
  CDR3 for beta chain variable domain of TCR clone 195957 (TRBV12-4, TRBJ2-5)
CASSPPTGLQETQYF

SEQ ID NO: 391915 - protein, 14 aa, Homo sapiens
  CDR3 for alpha chain variable domain of TCR clone 195958 (TRAV3, TRAJ6)
CAVRSRGGSYIPTF

SEQ ID NO: 391916 - protein, 16 aa, Homo sapiens
  CDR3 for beta chain variable domain of TCR clone 195958 (TRBV5-7, TRBJ2-5)
CASSLRASGRGETQYF

SEQ ID NO: 391917 - protein, 12 aa, Homo sapiens
  CDR3 for alpha chain variable domain of TCR clone 195959 (TRAV2, TRAJ31)
CAVEDNNARLMF

SEQ ID NO: 391918 - protein, 13 aa, Homo sapiens
  CDR3 for beta chain variable domain of TCR clone 195959 (TRBV11-2, TRBJ1-1)
CASSLETSTEAFF

SEQ ID NO: 391919 - protein, 15 aa, Homo sapiens
  CDR3 for alpha chain variable domain of TCR clone 195960 (TRAV8-3, TRAJ45)
CASSYSGGGADGLTL

SEQ ID NO: 391920 - protein, 16 aa, Homo sapiens
  CDR3 for beta chain variable domain of TCR clone 195960 (TRBV7-9, TRBJ2-2)
CASSGFGGANTGELFF

SEQ ID NO: 391921 - protein, 14 aa, Homo sapiens
  CDR3 for alpha chain variable domain of TCR clone 195961 (TRAV2, TRAJ37)
CAVDFTINTGKLIF

SEQ ID NO: 391922 - protein, 15 aa, Homo sapiens
  CDR3 for beta chain variable domain of TCR clone 195961 (TRBV3-1, TRBJ2-2)
CASSQGSGTFGELFF

SEQ ID NO: 391923 - protein, 14 aa, Homo sapiens
  CDR3 for alpha chain variable domain of TCR clone 195962 (TRAV12-2, TRAJ45)
CAVYSGGGADGLTF

SEQ ID NO: 391924 - protein, 16 aa, Homo sapiens
  CDR3 for beta chain variable domain of TCR clone 195962 (TRBV19, TRBJ2-7)
CASSLIAGTYFYEQYF

SEQ ID NO: 391925 - protein, 13 aa, Homo sapiens
  CDR3 for alpha chain variable domain of TCR clone 195963 (TRAV20, TRAJ37)
CAGCSSNTGKLIF

SEQ ID NO: 391926 - protein, 13 aa, Homo sapiens
  CDR3 for beta chain variable domain of TCR clone 195963 (TRBV7-6, TRBJ1-2)
CASSLVADYGYTF

SEQ ID NO: 391927 - protein, 14 aa, Homo sapiens
  CDR3 for alpha chain variable domain of TCR clone 195964 (TRAV13-1, TRAJ44)
CAAKATGTASKLTF

SEQ ID NO: 391928 - protein, 13 aa, Homo sapiens
  CDR3 for beta chain variable domain of TCR clone 195964 (TRBV15, TRBJ2-5)
CATSQIGEETQYF

SEQ ID NO: 391929 - protein, 14 aa, Homo sapiens
  CDR3 for alpha chain variable domain of TCR clone 195965 (TRAV30, TRAJ33)
CGTVAPRSNYQLIW

SEQ ID NO: 391930 - protein, 15 aa, Homo sapiens
  CDR3 for beta chain variable domain of TCR clone 195965 (TRBV3-1, TRBJ2-5)
CSSPGQFNGFGTQYF

SEQ ID NO: 391931 - protein, 13 aa, Homo sapiens
  CDR3 for alpha chain variable domain of TCR clone 195966 (TRAV12-2, TRAJ10)
CAAPTGGGNKLTF

SEQ ID NO: 391932 - protein, 16 aa, Homo sapiens
  CDR3 for beta chain variable domain of TCR clone 195966 (TRBV20-1, TRBJ1-4)
CSAPGQGLLTNEKLFF

SEQ ID NO: 391933 - protein, 10 aa, Homo sapiens
  CDR3 for alpha chain variable domain of TCR clone 195967 (TRAV1-2, TRAJ20)
CACNDYKLSF

SEQ ID NO: 391934 - protein, 20 aa, Homo sapiens
  CDR3 for beta chain variable domain of TCR clone 195967 (TRBV7-8, TRBJ2-2)
CASSHLFPGPTIHITGELFF

SEQ ID NO: 391935 - protein, 16 aa, Homo sapiens
  CDR3 for alpha chain variable domain of TCR clone 195968 (TRAV3, TRAJ21)
CAVRDIERGNFNKFYF

SEQ ID NO: 391936 - protein, 13 aa, Homo sapiens
  CDR3 for beta chain variable domain of TCR clone 195968 (TRBV7-2, TRBJ2-7)
CASSFGQEKEQYF

SEQ ID NO: 391937 - protein, 11 aa, Homo sapiens
  CDR3 for alpha chain variable domain of TCR clone 195969 (TRAV20, TRAJ21)
CLKGNFNKFYF

SEQ ID NO: 391938 - protein, 16 aa, Homo sapiens
  CDR3 for beta chain variable domain of TCR clone 195969 (TRBV12-5, TRBJ2-5)
CASGPRTSGNQETQYF

SEQ ID NO: 391939 - protein, 17 aa, Homo sapiens
  CDR3 for alpha chain variable domain of TCR clone 195970 (TRAV3, TRAJ42)
CAVRDRDYGGSQGNLIF

SEQ ID NO: 391940 - protein, 18 aa, Homo sapiens
  CDR3 for beta chain variable domain of TCR clone 195970 (TRBV20-1, TRBJ2-3)
CSASGLAGGPGPTDTQYF

SEQ ID NO: 391941 - protein, 14 aa, Homo sapiens
  CDR3 for alpha chain variable domain of TCR clone 195971 (TRAV16, TRAJ57)
CVLPTQGGSEKLVF

SEQ ID NO: 391942 - protein, 23 aa, Homo sapiens
  CDR3 for beta chain variable domain of TCR clone 195971 (TRBV28, TRBJ1-3)
CASWGGASLWKHHIFWRGKLAHC

SEQ ID NO: 391943 - protein, 15 aa, Homo sapiens
  CDR3 for alpha chain variable domain of TCR clone 195972 (TRAV17, TRAJ57)
CATGPSQGGSEKLVF

SEQ ID NO: 391944 - protein, 16 aa, Homo sapiens
  CDR3 for beta chain variable domain of TCR clone 195972 (TRBV12-4, TRBJ1-5)
CASSPPVGGSNQPQHF

SEQ ID NO: 391945 - protein, 13 aa, Homo sapiens
  CDR3 for alpha chain variable domain of TCR clone 195973 (TRAV27, TRAJ49)
CAPRPYTGNQFYF

SEQ ID NO: 391946 - protein, 15 aa, Homo sapiens
  CDR3 for beta chain variable domain of TCR clone 195973 (TRBV12-4, TRBJ1-2)
CASSLAHRDGQAYTV

SEQ ID NO: 391947 - protein, 15 aa, Homo sapiens
  CDR3 for alpha chain variable domain of TCR clone 195974 (TRAV12-3, TRAJ5)
CAMSGLGTGRRALTF

SEQ ID NO: 391948 - protein, 16 aa, Homo sapiens
  CDR3 for beta chain variable domain of TCR clone 195974 (TRBV20-1, TRBJ2-3)
CSARLHSTGAIDTQYF

SEQ ID NO: 391949 - protein, 12 aa, Homo sapiens
  CDR3 for alpha chain variable domain of TCR clone 195975 (TRAV13-1, TRAJ21)
CSAKEGFNKFYF

SEQ ID NO: 391950 - protein, 16 aa, Homo sapiens
  CDR3 for beta chain variable domain of TCR clone 195975 (TRBV25-1, TRBJ2-7)
CASSELTGGGIYEQYF

SEQ ID NO: 391951 - protein, 16 aa, Homo sapiens
  CDR3 for alpha chain variable domain of TCR clone 195976 (TRAV27, TRAJ52)
CAGAPAGGTSYGKLTF

SEQ ID NO: 391952 - protein, 14 aa, Homo sapiens
  CDR3 for beta chain variable domain of TCR clone 195976 (TRBV18, TRBJ2-5)
CASSPGVSQETQYF

SEQ ID NO: 391953 - protein, 14 aa, Homo sapiens
  CDR3 for alpha chain variable domain of TCR clone 195977 (TRAV13-1, TRAJ35)
CAASKGVFGNVLHC

SEQ ID NO: 391954 - protein, 14 aa, Homo sapiens
  CDR3 for beta chain variable domain of TCR clone 195977 (TRBV4-1, TRBJ2-2)
CASSQAVNTGELFF

SEQ ID NO: 391955 - protein, 13 aa, Homo sapiens
  CDR3 for alpha chain variable domain of TCR clone 195978 (TRAV26-1, TRAJ31)
CIVRVDGNARLMF

SEQ ID NO: 391956 - protein, 17 aa, Homo sapiens
  CDR3 for beta chain variable domain of TCR clone 195978 (TRBV11-2, TRBJ2-1)
CASRLYPPGVEYNEQFF

SEQ ID NO: 391957 - protein, 18 aa, Homo sapiens
  CDR3 for alpha chain variable domain of TCR clone 195979 (TRAV12-1, TRAJ26)
SSVIQPPTSVPYGQNFVF

SEQ ID NO: 391958 - protein, 16 aa, Homo sapiens
  CDR3 for beta chain variable domain of TCR clone 195979 (TRBV28, TRBJ2-5)
CASSFSPAGGWETQYF

SEQ ID NO: 391959 - protein, 17 aa, Homo sapiens
  CDR3 for alpha chain variable domain of TCR clone 195980 (TRAV13-1, TRAJ23)
CAASKRFHRLRKAYLRT

SEQ ID NO: 391960 - protein, 14 aa, Homo sapiens
  CDR3 for beta chain variable domain of TCR clone 195980 (TRBV12-5, TRBJ2-5)
CASGSWTHQETQYF

SEQ ID NO: 391961 - protein, 13 aa, Homo sapiens
  CDR3 for alpha chain variable domain of TCR clone 195981 (TRAV17, TRAJ21)
CATDGGNCNKFYF

SEQ ID NO: 391962 - protein, 13 aa, Homo sapiens
  CDR3 for beta chain variable domain of TCR clone 195981 (TRBV11-3, TRBJ1-1)
CASTGSLNTEAFF

SEQ ID NO: 391963 - protein, 14 aa, Homo sapiens
  CDR3 for alpha chain variable domain of TCR clone 195982 (TRAV12-1, TRAJ5)
CVVNERTGRRALTF

SEQ ID NO: 391964 - protein, 15 aa, Homo sapiens
  CDR3 for beta chain variable domain of TCR clone 195982 (TRBV7-3, TRBJ2-3)
CASSLTSGVGDTQYF

SEQ ID NO: 391965 - protein, 14 aa, Homo sapiens
  CDR3 for alpha chain variable domain of TCR clone 195983 (TRAV23/DV6, TRAJ17)
YAASVQAAGNKLTF

SEQ ID NO: 391966 - protein, 18 aa, Homo sapiens
  CDR3 for beta chain variable domain of TCR clone 195983 (TRBV20-1, TRBJ2-7)
CSAGLPPRGRGSPYEQYF

SEQ ID NO: 391967 - protein, 14 aa, Homo sapiens
  CDR3 for alpha chain variable domain of TCR clone 195984 (TRAV35, TRAJ22)
CAGLRPGSARQLTF

SEQ ID NO: 391968 - protein, 15 aa, Homo sapiens
  CDR3 for beta chain variable domain of TCR clone 195984 (TRBV12-4, TRBJ2-5)
CASSPPTVLQGTQYF

SEQ ID NO: 391969 - protein, 19 aa, Homo sapiens
  CDR3 for alpha chain variable domain of TCR clone 195985 (TRAV23/DV6, TRAJ49)
CAATPGTVCRSFQISRTLT

SEQ ID NO: 391970 - protein, 14 aa, Homo sapiens
  CDR3 for beta chain variable domain of TCR clone 195985 (TRBV7-3, TRBJ1-1)
CASSLKGGNTEAFF

SEQ ID NO: 391971 - protein, 11 aa, Homo sapiens
  CDR3 for alpha chain variable domain of TCR clone 195986 (TRAV8-6, TRAJ42)
CAVRGRKPRRS

SEQ ID NO: 391972 - protein, 12 aa, Homo sapiens
  CDR3 for beta chain variable domain of TCR clone 195986 (TRBV11-2, TRBJ2-1)
CASSPGNNEQFF

SEQ ID NO: 391973 - protein, 14 aa, Homo sapiens
  CDR3 for alpha chain variable domain of TCR clone 195987 (TRAV8-4, TRAJ39)
CAVSLNNAGNMLTL

SEQ ID NO: 391974 - protein, 16 aa, Homo sapiens
  CDR3 for beta chain variable domain of TCR clone 195987 (TRBV13, TRBJ2-7)
WASSSRESGRTYKQYF

SEQ ID NO: 391975 - protein, 16 aa, Homo sapiens
  CDR3 for alpha chain variable domain of TCR clone 195988 (TRAV13-1, TRAJ39)
CAASIVMQATCSPLEG

SEQ ID NO: 391976 - protein, 16 aa, Homo sapiens
  CDR3 for beta chain variable domain of TCR clone 195988 (TRBV12-4, TRBJ2-5)
CASSWRPSGDLETQYF

SEQ ID NO: 391977 - protein, 14 aa, Homo sapiens
  CDR3 for alpha chain variable domain of TCR clone 195989 (TRAV12-2, TRAJ13)
CAVKKTGGYQKVTF

SEQ ID NO: 391978 - protein, 16 aa, Homo sapiens
  CDR3 for beta chain variable domain of TCR clone 195989 (TRBV2, TRBJ2-1)
CASRSPAGGKYNEQFL

SEQ ID NO: 391979 - protein, 14 aa, Homo sapiens
  CDR3 for alpha chain variable domain of TCR clone 195990 (TRAV1-2, TRAJ8)
CAVREDTGFQKLVF

SEQ ID NO: 391980 - protein, 15 aa, Homo sapiens
  CDR3 for beta chain variable domain of TCR clone 195990 (TRBV20-1, TRBJ2-7)
CSAREGRDSLYEQYL

SEQ ID NO: 391981 - protein, 15 aa, Homo sapiens
  CDR3 for alpha chain variable domain of TCR clone 195991 (TRAV8-6, TRAJ10)
CAVSDQAGGANKLTF

SEQ ID NO: 391982 - protein, 15 aa, Homo sapiens
  CDR3 for beta chain variable domain of TCR clone 195991 (TRBV3-1, TRBJ2-5)
CASSANLGGPETQYF

SEQ ID NO: 391983 - protein, 13 aa, Homo sapiens
  CDR3 for alpha chain variable domain of TCR clone 195992 (TRAV25, TRAJ26)
CAGMDNYGQNFVF

SEQ ID NO: 391984 - protein, 15 aa, Homo sapiens
  CDR3 for beta chain variable domain of TCR clone 195992 (TRBV10-3, TRBJ2-1)
CAIRNGTSGHNELFF

SEQ ID NO: 391985 - protein, 16 aa, Homo sapiens
  CDR3 for alpha chain variable domain of TCR clone 195993 (TRAV30, TRAJ24)
CGTEIVDADSWGKFQF

SEQ ID NO: 391986 - protein, 13 aa, Homo sapiens
  CDR3 for beta chain variable domain of TCR clone 195993 (TRBV11-1, TRBJ1-1)
CASSKQGRTEAFF

SEQ ID NO: 391987 - protein, 13 aa, Homo sapiens
  CDR3 for alpha chain variable domain of TCR clone 195994 (TRAV22, TRAJ29)
CAVGGSGNTPLVF

SEQ ID NO: 391988 - protein, 13 aa, Homo sapiens
  CDR3 for beta chain variable domain of TCR clone 195994 (TRBV19, TRBJ2-7)
CASRKAGGSEQDF

SEQ ID NO: 391989 - protein, 13 aa, Homo sapiens
  CDR3 for alpha chain variable domain of TCR clone 195995 (TRAV29/DV5, TRAJ31)
CSASRNNNARLMF

SEQ ID NO: 391990 - protein, 13 aa, Homo sapiens
  CDR3 for beta chain variable domain of TCR clone 195995 (TRBV10-3, TRBJ2-7)
CASKLAVNYEQYF

SEQ ID NO: 391991 - protein, 15 aa, Homo sapiens
  CDR3 for alpha chain variable domain of TCR clone 195996 (TRAV26-1, TRAJ29)
CIVRVEGSGNTPLVF

SEQ ID NO: 391992 - protein, 12 aa, Homo sapiens
  CDR3 for beta chain variable domain of TCR clone 195996 (TRBV6-5, TRBJ2-3)
CASSDTTDTQYF

SEQ ID NO: 391993 - protein, 13 aa, Homo sapiens
  CDR3 for alpha chain variable domain of TCR clone 195997 (TRAV30, TRAJ6)
CGFIEGGSYIPTF

SEQ ID NO: 391994 - protein, 17 aa, Homo sapiens
  CDR3 for beta chain variable domain of TCR clone 195997 (TRBV13, TRBJ2-3)
CASSLSRVAGGRNTQYF

SEQ ID NO: 391995 - protein, 17 aa, Homo sapiens
  CDR3 for alpha chain variable domain of TCR clone 195998 (TRAV3, TRAJ38)
CAGRDCLNAGNNRKLIW

SEQ ID NO: 391996 - protein, 13 aa, Homo sapiens
  CDR3 for beta chain variable domain of TCR clone 195998 (TRBV7-2, TRBJ2-7)
CASSSPSGSEQYF

SEQ ID NO: 391997 - protein, 15 aa, Homo sapiens
  CDR3 for alpha chain variable domain of TCR clone 195999 (TRAV26-1, TRAJ44)
CIVRANTGTASKLTF

SEQ ID NO: 391998 - protein, 16 aa, Homo sapiens
  CDR3 for beta chain variable domain of TCR clone 195999 (TRBV7-7, TRBJ2-1)
CASSLASGPPTMSSSS

SEQ ID NO: 391999 - protein, 13 aa, Homo sapiens
  CDR3 for alpha chain variable domain of TCR clone 196000 (TRAV12-1, TRAJ37)
CVVNAGNTGKLIF

SEQ ID NO: 392000 - protein, 14 aa, Homo sapiens
  CDR3 for beta chain variable domain of TCR clone 196000 (TRBV7-2, TRBJ2-3)
CASRRGLAADTRYF

SEQ ID NO: 392001 - protein, 14 aa, Homo sapiens
  CDR3 for alpha chain variable domain of TCR clone 196001 (TRAV9-2, TRAJ39)
CALYIYNAGNMLTF

SEQ ID NO: 392002 - protein, 15 aa, Homo sapiens
  CDR3 for beta chain variable domain of TCR clone 196001 (TRBV7-9, TRBJ2-7)
CASSLALAEAYEQYF

SEQ ID NO: 392003 - protein, 11 aa, Homo sapiens
  CDR3 for alpha chain variable domain of TCR clone 196002 (TRAV17, TRAJ9)
CATTGGFKTIF

SEQ ID NO: 392004 - protein, 16 aa, Homo sapiens
  CDR3 for beta chain variable domain of TCR clone 196002 (TRBV6-1, TRBJ2-1)
CASILRQGSSYNEQFF

SEQ ID NO: 392005 - protein, 14 aa, Homo sapiens
  CDR3 for alpha chain variable domain of TCR clone 196003 (TRAV9-2, TRAJ39)
CALYIYNAGNMLTF

SEQ ID NO: 392006 - protein, 15 aa, Homo sapiens
  CDR3 for beta chain variable domain of TCR clone 196003 (TRBV7-2, TRBJ2-1)
CASSLNRGAYNEQFF

SEQ ID NO: 392007 - protein, 13 aa, Homo sapiens
  CDR3 for alpha chain variable domain of TCR clone 196004 (TRAV13-2, TRAJ48)
CAEMDFGNEKLTF

SEQ ID NO: 392008 - protein, 15 aa, Homo sapiens
  CDR3 for beta chain variable domain of TCR clone 196004 (TRBV7-9, TRBJ1-6)
CASSPPGRGNSPLHF

SEQ ID NO: 392009 - protein, 16 aa, Homo sapiens
  CDR3 for alpha chain variable domain of TCR clone 196005 (TRAV13-1, TRAJ22)
CAAKGGRSGSARQLTF

SEQ ID NO: 392010 - protein, 15 aa, Homo sapiens
  CDR3 for beta chain variable domain of TCR clone 196005 (TRBV9, TRBJ1-6)
CASSAAGTGDSPLHF

SEQ ID NO: 392011 - protein, 16 aa, Homo sapiens
  CDR3 for alpha chain variable domain of TCR clone 196006 (TRAV23/DV6, )
CAEPDIQNPDPAVFQL

SEQ ID NO: 392012 - protein, 15 aa, Homo sapiens
  CDR3 for beta chain variable domain of TCR clone 196006 (TRBV12-4, TRBJ2-5)
CASTLNSGRGETQYF

SEQ ID NO: 392013 - protein, 13 aa, Homo sapiens
  CDR3 for alpha chain variable domain of TCR clone 196007 (TRAV30, TRAJ24)
CGTVTDSWGKLQF

SEQ ID NO: 392014 - protein, 16 aa, Homo sapiens
  CDR3 for beta chain variable domain of TCR clone 196007 (TRBV19, TRBJ2-1)
CASSKSGPSSYNEQFF

SEQ ID NO: 392015 - protein, 15 aa, Homo sapiens
  CDR3 for alpha chain variable domain of TCR clone 196008 (TRAV35, TRAJ38)
CAGFSNAGNNRKLIW

SEQ ID NO: 392016 - protein, 14 aa, Homo sapiens
  CDR3 for beta chain variable domain of TCR clone 196008 (TRBV7-3, TRBJ1-1)
CASSLKGGNTEAFF

SEQ ID NO: 392017 - protein, 15 aa, Homo sapiens
  CDR3 for alpha chain variable domain of TCR clone 196009 (TRAV1-2, TRAJ24)
CAVRGSTDSWGKFQF

SEQ ID NO: 392018 - protein, 16 aa, Homo sapiens
  CDR3 for beta chain variable domain of TCR clone 196009 (TRBV20-1, TRBJ2-1)
CSAATQGPASYNEQFF

SEQ ID NO: 392019 - protein, 12 aa, Homo sapiens
  CDR3 for alpha chain variable domain of TCR clone 196010 (TRAV12-3, TRAJ17)
CAMTLTGNKLTF

SEQ ID NO: 392020 - protein, 15 aa, Homo sapiens
  CDR3 for beta chain variable domain of TCR clone 196010 (TRBV20-1, TRBJ2-7)
RSSRDRVSGMDEQYF

SEQ ID NO: 392021 - protein, 15 aa, Homo sapiens
  CDR3 for alpha chain variable domain of TCR clone 196011 (TRAV12-2, TRAJ52)
CAVRGGGTSYGKLTF

SEQ ID NO: 392022 - protein, 15 aa, Homo sapiens
  CDR3 for beta chain variable domain of TCR clone 196011 (TRBV18, TRBJ1-5)
CASSPSDRSNQPQHF

SEQ ID NO: 392023 - protein, 12 aa, Homo sapiens
  CDR3 for alpha chain variable domain of TCR clone 196012 (TRAV12-3, TRAJ40)
CAMSSGTYKYIV

SEQ ID NO: 392024 - protein, 15 aa, Homo sapiens
  CDR3 for beta chain variable domain of TCR clone 196012 (TRBV7-3, TRBJ2-2)
CASSETGQGTGELFF

SEQ ID NO: 392025 - protein, 14 aa, Homo sapiens
  CDR3 for alpha chain variable domain of TCR clone 196013 (TRAV38-2/DV8, TRAJ23)
CAYRSQNQGGKLIC

SEQ ID NO: 392026 - protein, 18 aa, Homo sapiens
  CDR3 for beta chain variable domain of TCR clone 196013 (TRBV4-2, TRBJ1-2)
CASSQDKVGHTVNYGYTF

SEQ ID NO: 392027 - protein, 12 aa, Homo sapiens
  CDR3 for alpha chain variable domain of TCR clone 196014 (TRAV12-3, TRAJ20)
CAMVRGDYKLNF

SEQ ID NO: 392028 - protein, 14 aa, Homo sapiens
  CDR3 for beta chain variable domain of TCR clone 196014 (TRBV5-5, TRBJ1-5)
CASSGQGVDQPQHF

SEQ ID NO: 392029 - protein, 17 aa, Homo sapiens
  CDR3 for alpha chain variable domain of TCR clone 196015 (TRAV1-1, TRAJ28)
CAVDPASSGAGSYQLTF

SEQ ID NO: 392030 - protein, 14 aa, Homo sapiens
  CDR3 for beta chain variable domain of TCR clone 196015 (TRBV19, TRBJ2-1)
CASPTFVLSGEQFF

SEQ ID NO: 392031 - protein, 15 aa, Homo sapiens
  CDR3 for alpha chain variable domain of TCR clone 196016 (TRAV25, TRAJ10)
CAGPLLTGGGNKVTF

SEQ ID NO: 392032 - protein, 15 aa, Homo sapiens
  CDR3 for beta chain variable domain of TCR clone 196016 (TRBV12-5, TRBJ2-2)
CASGRLGGNTGELFF

SEQ ID NO: 392033 - protein, 13 aa, Homo sapiens
  CDR3 for alpha chain variable domain of TCR clone 196017 (TRAV21, TRAJ20)
CAVVLRVDYKLSF

SEQ ID NO: 392034 - protein, 14 aa, Homo sapiens
  CDR3 for beta chain variable domain of TCR clone 196017 (TRBV19, TRBJ2-1)
CASPTFVLSGEQFF

SEQ ID NO: 392035 - protein, 14 aa, Homo sapiens
  CDR3 for alpha chain variable domain of TCR clone 196018 (TRAV12-2, TRAJ44)
CAVNPAGTASKLAF

SEQ ID NO: 392036 - protein, 18 aa, Homo sapiens
  CDR3 for beta chain variable domain of TCR clone 196018 (TRBV12-4, TRBJ2-2)
CASSLVAGTRGRTGELFF

SEQ ID NO: 392037 - protein, 15 aa, Homo sapiens
  CDR3 for alpha chain variable domain of TCR clone 196019 (TRAV8-6, TRAJ6)
CAVRPPSGGSYIPTF

SEQ ID NO: 392038 - protein, 13 aa, Homo sapiens
  CDR3 for beta chain variable domain of TCR clone 196019 (TRBV12-4, TRBJ1-2)
CASSSGLTVISTF

SEQ ID NO: 392039 - protein, 19 aa, Homo sapiens
  CDR3 for alpha chain variable domain of TCR clone 196020 (TRAV16, )
CALSGDIQNPDPAVYQLRD

SEQ ID NO: 392040 - protein, 16 aa, Homo sapiens
  CDR3 for beta chain variable domain of TCR clone 196020 (TRBV12-5, TRBJ2-5)
CASGPRTSGNQETLYF

SEQ ID NO: 392041 - protein, 15 aa, Homo sapiens
  CDR3 for alpha chain variable domain of TCR clone 196021 (TRAV12-1, TRAJ10)
CVVNKLTGGGNKLTF

SEQ ID NO: 392042 - protein, 16 aa, Homo sapiens
  CDR3 for beta chain variable domain of TCR clone 196021 (TRBV11-2, TRBJ2-7)
CASSPTTGGVSYEQYF

SEQ ID NO: 392043 - protein, 15 aa, Homo sapiens
  CDR3 for alpha chain variable domain of TCR clone 196022 (TRAV26-1, TRAJ23)
CIVRVLHNQGGKLIF

SEQ ID NO: 392044 - protein, 15 aa, Homo sapiens
  CDR3 for beta chain variable domain of TCR clone 196022 (TRBV7-3, TRBJ2-1)
CASSFGQSNYNEQFF

SEQ ID NO: 392045 - protein, 14 aa, Homo sapiens
  CDR3 for alpha chain variable domain of TCR clone 196023 (TRAV8-2, TRAJ37)
RVVSISGNTGKLIF

SEQ ID NO: 392046 - protein, 17 aa, Homo sapiens
  CDR3 for beta chain variable domain of TCR clone 196023 (TRBV7-9, TRBJ2-3)
CASSPTVAGDLTDTQYF

SEQ ID NO: 392047 - protein, 17 aa, Homo sapiens
  CDR3 for alpha chain variable domain of TCR clone 196024 (TRAV13-1, TRAJ28)
CAASPPYSGAGSYQLTF

SEQ ID NO: 392048 - protein, 13 aa, Homo sapiens
  CDR3 for beta chain variable domain of TCR clone 196024 (TRBV12-4, TRBJ1-2)
CASSLRQGKGYTF

SEQ ID NO: 392049 - protein, 16 aa, Homo sapiens
  CDR3 for alpha chain variable domain of TCR clone 196025 (TRAV12-1, TRAJ4)
CVVRRLPAGGYNKLIF

SEQ ID NO: 392050 - protein, 12 aa, Homo sapiens
  CDR3 for beta chain variable domain of TCR clone 196025 (TRBV11-2, TRBJ2-2)
CASSLGGGELFF

SEQ ID NO: 392051 - protein, 14 aa, Homo sapiens
  CDR3 for alpha chain variable domain of TCR clone 196026 (TRAV8-4, TRAJ8)
CALSLNTGFQKLVF

SEQ ID NO: 392052 - protein, 13 aa, Homo sapiens
  CDR3 for beta chain variable domain of TCR clone 196026 (TRBV7-9, TRBJ2-3)
CASSPGSTDTQYF

SEQ ID NO: 392053 - protein, 13 aa, Homo sapiens
  CDR3 for alpha chain variable domain of TCR clone 196027 (TRAV1-1, TRAJ9)
CAAKNTGGFKTIF

SEQ ID NO: 392054 - protein, 16 aa, Homo sapiens
  CDR3 for beta chain variable domain of TCR clone 196027 (TRBV10-3, TRBJ2-6)
CAISTSGDLGANVLTF

SEQ ID NO: 392055 - protein, 13 aa, Homo sapiens
  CDR3 for alpha chain variable domain of TCR clone 196028 (TRAV1-1, TRAJ13)
CAVNSGGYQKVTF

SEQ ID NO: 392056 - protein, 12 aa, Homo sapiens
  CDR3 for beta chain variable domain of TCR clone 196028 (TRBV28, TRBJ2-1)
CASSGQINEQFF

SEQ ID NO: 392057 - protein, 14 aa, Homo sapiens
  CDR3 for alpha chain variable domain of TCR clone 196029 (TRAV1-2, TRAJ8)
CAVREDTGFQKLVF

SEQ ID NO: 392058 - protein, 16 aa, Homo sapiens
  CDR3 for beta chain variable domain of TCR clone 196029 (TRBV27, TRBJ2-2)
CASSCRGLVRTGELFF

SEQ ID NO: 392059 - protein, 12 aa, Homo sapiens
  CDR3 for alpha chain variable domain of TCR clone 196030 (TRAV12-3, TRAJ17)
CAMTLTGNKLTF

SEQ ID NO: 392060 - protein, 15 aa, Homo sapiens
  CDR3 for beta chain variable domain of TCR clone 196030 (TRBV6-1, TRBJ1-5)
CASSVWVADGQPQHF

SEQ ID NO: 392061 - protein, 13 aa, Homo sapiens
  CDR3 for alpha chain variable domain of TCR clone 196031 (TRAV12-1, TRAJ26)
CVVRRNYGQNFVF

SEQ ID NO: 392062 - protein, 14 aa, Homo sapiens
  CDR3 for beta chain variable domain of TCR clone 196031 (TRBV28, TRBJ2-1)
CASSLNGRNNEQFF

SEQ ID NO: 392063 - protein, 14 aa, Homo sapiens
  CDR3 for alpha chain variable domain of TCR clone 196032 (TRAV8-3, TRAJ4)
CAVGASGGYNTLIF

SEQ ID NO: 392064 - protein, 16 aa, Homo sapiens
  CDR3 for beta chain variable domain of TCR clone 196032 (TRBV4-3, TRBJ2-2)
CASSRLQGSGTGELFF

SEQ ID NO: 392065 - protein, 14 aa, Homo sapiens
  CDR3 for alpha chain variable domain of TCR clone 196033 (TRAV12-3, TRAJ10)
SHLPLTGGGNKLTF

SEQ ID NO: 392066 - protein, 19 aa, Homo sapiens
  CDR3 for beta chain variable domain of TCR clone 196033 (TRBV4-1, TRBJ1-1)
CASSRIILTPRGVNTEAVF

SEQ ID NO: 392067 - protein, 13 aa, Homo sapiens
  CDR3 for alpha chain variable domain of TCR clone 196034 (TRAV12-3, TRAJ7)
CAMTPYGNNRLAF

SEQ ID NO: 392068 - protein, 14 aa, Homo sapiens
  CDR3 for beta chain variable domain of TCR clone 196034 (TRBV7-9, TRBJ2-1)
CASSPRDSLYEQFF

SEQ ID NO: 392069 - protein, 12 aa, Homo sapiens
  CDR3 for alpha chain variable domain of TCR clone 196035 (TRAV1-1, TRAJ9)
CAVDTGGSKTIF

SEQ ID NO: 392070 - protein, 14 aa, Homo sapiens
  CDR3 for beta chain variable domain of TCR clone 196035 (TRBV7-8, TRBJ2-5)
CASSATGAQETQYF

SEQ ID NO: 392071 - protein, 16 aa, Homo sapiens
  CDR3 for alpha chain variable domain of TCR clone 196036 (TRAV4, TRAJ5)
CLVGPDHGHGQESTYF

SEQ ID NO: 392072 - protein, 13 aa, Homo sapiens
  CDR3 for beta chain variable domain of TCR clone 196036 (TRBV7-9, TRBJ2-1)
CASSLGTVNEQFF

SEQ ID NO: 392073 - protein, 16 aa, Homo sapiens
  CDR3 for alpha chain variable domain of TCR clone 196037 (TRAV39, TRAJ45)
CAVDRSAGGGADGLTV

SEQ ID NO: 392074 - protein, 14 aa, Homo sapiens
  CDR3 for beta chain variable domain of TCR clone 196037 (TRBV28, TRBJ1-3)
CASSFRDRVNTIYF

SEQ ID NO: 392075 - protein, 14 aa, Homo sapiens
  CDR3 for alpha chain variable domain of TCR clone 196038 (TRAV38-1, TRAJ45)
CASHSGGGADGLTF

SEQ ID NO: 392076 - protein, 15 aa, Homo sapiens
  CDR3 for beta chain variable domain of TCR clone 196038 (TRBV28, TRBJ2-3)
CASSPDRQGANTQYF

SEQ ID NO: 392077 - protein, 14 aa, Homo sapiens
  CDR3 for alpha chain variable domain of TCR clone 196039 (TRAV1-2, TRAJ16)
CAVNRFSDGQKLLF

SEQ ID NO: 392078 - protein, 17 aa, Homo sapiens
  CDR3 for beta chain variable domain of TCR clone 196039 (TRBV7-9, TRBJ1-6)
CPAAPRDVEIHPSTLGT

SEQ ID NO: 392079 - protein, 15 aa, Homo sapiens
  CDR3 for alpha chain variable domain of TCR clone 196040 (TRAV13-1, TRAJ17)
CAASIERTAGNKLTF

SEQ ID NO: 392080 - protein, 13 aa, Homo sapiens
  CDR3 for beta chain variable domain of TCR clone 196040 (TRBV7-7, TRBJ2-3)
CASSLSRADTQYF

SEQ ID NO: 392081 - protein, 10 aa, Homo sapiens
  CDR3 for alpha chain variable domain of TCR clone 196041 (TRAV36/DV7, TRAJ48)
CAVGNEKLTF

SEQ ID NO: 392082 - protein, 17 aa, Homo sapiens
  CDR3 for beta chain variable domain of TCR clone 196041 (TRBV7-3, TRBJ2-3)
CASSLMKRMRGADTQYF

SEQ ID NO: 392083 - protein, 14 aa, Homo sapiens
  CDR3 for alpha chain variable domain of TCR clone 196042 (TRAV20, TRAJ22)
CAVALGGSARQLTF

SEQ ID NO: 392084 - protein, 11 aa, Homo sapiens
  CDR3 for beta chain variable domain of TCR clone 196042 (TRBV11-2, TRBJ2-2)
CASSLPGELFF

SEQ ID NO: 392085 - protein, 15 aa, Homo sapiens
  CDR3 for alpha chain variable domain of TCR clone 196043 (TRAV20, TRAJ4)
CAVQVLSGGYNKLIF

SEQ ID NO: 392086 - protein, 14 aa, Homo sapiens
  CDR3 for beta chain variable domain of TCR clone 196043 (TRBV7-6, TRBJ2-3)
CASNSGGDANTHYF

SEQ ID NO: 392087 - protein, 13 aa, Homo sapiens
  CDR3 for alpha chain variable domain of TCR clone 196044 (TRAV26-2, TRAJ37)
CIRGSSNTGKLIF

SEQ ID NO: 392088 - protein, 16 aa, Homo sapiens
  CDR3 for beta chain variable domain of TCR clone 196044 (TRBV7-2, TRBJ2-5)
CASSPGGARRGEIQYF

SEQ ID NO: 392089 - protein, 16 aa, Homo sapiens
  CDR3 for alpha chain variable domain of TCR clone 196045 (TRAV3, TRAJ37)
CAVRGKGSGNTGKLIF

SEQ ID NO: 392090 - protein, 11 aa, Homo sapiens
  CDR3 for beta chain variable domain of TCR clone 196045 (TRBV27, TRBJ2-7)
CASSLGYEQYF

SEQ ID NO: 392091 - protein, 16 aa, Homo sapiens
  CDR3 for alpha chain variable domain of TCR clone 196046 (TRAV3, TRAJ21)
RAVREIERGNFNKFYF

SEQ ID NO: 392092 - protein, 13 aa, Homo sapiens
  CDR3 for beta chain variable domain of TCR clone 196046 (TRBV27, TRBJ2-7)
CASSLTTGYEQYF

SEQ ID NO: 392093 - protein, 14 aa, Homo sapiens
  CDR3 for alpha chain variable domain of TCR clone 196047 (TRAV8-6, TRAJ30)
CAVRPVNREDKIIF

SEQ ID NO: 392094 - protein, 15 aa, Homo sapiens
  CDR3 for beta chain variable domain of TCR clone 196047 (TRBV7-9, TRBJ1-1)
CASSPELGGGTEAFF

SEQ ID NO: 392095 - protein, 17 aa, Homo sapiens
  CDR3 for alpha chain variable domain of TCR clone 196048 (TRAV38-2/DV8, TRAJ38)
CAYRSARGAGNNRKLIW

SEQ ID NO: 392096 - protein, 13 aa, Homo sapiens
  CDR3 for beta chain variable domain of TCR clone 196048 (TRBV6-5, TRBJ2-1)
CASRGGVGNEQFF

SEQ ID NO: 392097 - protein, 14 aa, Homo sapiens
  CDR3 for alpha chain variable domain of TCR clone 196049 (TRAV34, TRAJ44)
CGADGTGTASKLTF

SEQ ID NO: 392098 - protein, 14 aa, Homo sapiens
  CDR3 for beta chain variable domain of TCR clone 196049 (TRBV7-3, TRBJ2-1)
CVSSLAGGTNEQFF

SEQ ID NO: 392099 - protein, 14 aa, Homo sapiens
  CDR3 for alpha chain variable domain of TCR clone 196050 (TRAV26-1, TRAJ22)
CIVRVYGSARQLTF

SEQ ID NO: 392100 - protein, 17 aa, Homo sapiens
  CDR3 for beta chain variable domain of TCR clone 196050 (TRBV7-3, TRBJ2-3)
CASSPGGLAGVGDTQYF

SEQ ID NO: 392101 - protein, 13 aa, Homo sapiens
  CDR3 for alpha chain variable domain of TCR clone 196051 (TRAV12-1, TRAJ16)
CVVNGPDGQKLLF

SEQ ID NO: 392102 - protein, 17 aa, Homo sapiens
  CDR3 for beta chain variable domain of TCR clone 196051 (TRBV5-7, TRBJ2-4)
CASSPGTGHLAKNIQYF

SEQ ID NO: 392103 - protein, 16 aa, Homo sapiens
  CDR3 for alpha chain variable domain of TCR clone 196052 (TRAV21, TRAJ52)
FAVTNAGGTSYGKLTF

SEQ ID NO: 392104 - protein, 13 aa, Homo sapiens
  CDR3 for beta chain variable domain of TCR clone 196052 (TRBV20-1, TRBJ2-3)
CSARLAGTDTQYF

SEQ ID NO: 392105 - protein, 15 aa, Homo sapiens
  CDR3 for alpha chain variable domain of TCR clone 196053 (TRAV23/DV6, TRAJ18)
CAARYRGSTLGRLYF

SEQ ID NO: 392106 - protein, 16 aa, Homo sapiens
  CDR3 for beta chain variable domain of TCR clone 196053 (TRBV2, TRBJ2-4)
CASSEAPGGEQNIQYF

SEQ ID NO: 392107 - protein, 16 aa, Homo sapiens
  CDR3 for alpha chain variable domain of TCR clone 196054 (TRAV38-1, TRAJ56)
CAFMKRQTGANSNLTL

SEQ ID NO: 392108 - protein, 15 aa, Homo sapiens
  CDR3 for beta chain variable domain of TCR clone 196054 (TRBV20-1, TRBJ2-7)
CSARDRVSGMDEQYF

SEQ ID NO: 392109 - protein, 16 aa, Homo sapiens
  CDR3 for alpha chain variable domain of TCR clone 196055 (TRAV13-1, TRAJ40)
CAASMTQEPTNTPLEQ

SEQ ID NO: 392110 - protein, 15 aa, Homo sapiens
  CDR3 for beta chain variable domain of TCR clone 196055 (TRBV7-3, TRBJ2-1)
CASSPTGGGEVEQFF

SEQ ID NO: 392111 - protein, 11 aa, Homo sapiens
  CDR3 for alpha chain variable domain of TCR clone 196056 (TRAV12-2, TRAJ33)
CAGGSNYQLIW

SEQ ID NO: 392112 - protein, 14 aa, Homo sapiens
  CDR3 for beta chain variable domain of TCR clone 196056 (TRBV6-1, TRBJ2-2)
CASVEHIESGELFF

SEQ ID NO: 392113 - protein, 18 aa, Homo sapiens
  CDR3 for alpha chain variable domain of TCR clone 196057 (TRAV1-2, TRAJ32)
CAVRVSMNYGGATNKLIC

SEQ ID NO: 392114 - protein, 15 aa, Homo sapiens
  CDR3 for beta chain variable domain of TCR clone 196057 (TRBV6-5, TRBJ2-1)
CASSYDAGAGNEQFF

SEQ ID NO: 392115 - protein, 14 aa, Homo sapiens
  CDR3 for alpha chain variable domain of TCR clone 196058 (TRAV12-3, TRAJ15)
CAMIPPQAGTALIF

SEQ ID NO: 392116 - protein, 12 aa, Homo sapiens
  CDR3 for beta chain variable domain of TCR clone 196058 (TRBV11-2, TRBJ2-2)
CASSFGGGELFF

SEQ ID NO: 392117 - protein, 14 aa, Homo sapiens
  CDR3 for alpha chain variable domain of TCR clone 196059 (TRAV21, TRAJ32)
CAVWDGGATNKLIF

SEQ ID NO: 392118 - protein, 17 aa, Homo sapiens
  CDR3 for beta chain variable domain of TCR clone 196059 (TRBV13, TRBJ2-3)
CASSLSRVAGGRNTQYF

SEQ ID NO: 392119 - protein, 11 aa, Homo sapiens
  CDR3 for alpha chain variable domain of TCR clone 196060 (TRAV3, TRAJ21)
CAVGTFNKFYF

SEQ ID NO: 392120 - protein, 16 aa, Homo sapiens
  CDR3 for beta chain variable domain of TCR clone 196060 (TRBV19, TRBJ2-1)
CASSKAGTSSYNEQFF

SEQ ID NO: 392121 - protein, 14 aa, Homo sapiens
  CDR3 for alpha chain variable domain of TCR clone 196061 (TRAV23/DV6, TRAJ22)
CAASVSGSARQLTF

SEQ ID NO: 392122 - protein, 11 aa, Homo sapiens
  CDR3 for beta chain variable domain of TCR clone 196061 (TRBV29-1, TRBJ2-5)
CSEDRAGTQYF

SEQ ID NO: 392123 - protein, 13 aa, Homo sapiens
  CDR3 for alpha chain variable domain of TCR clone 196062 (TRAV3, TRAJ9)
CCEGNTGGFKTIF

SEQ ID NO: 392124 - protein, 14 aa, Homo sapiens
  CDR3 for beta chain variable domain of TCR clone 196062 (TRBV19, TRBJ2-1)
CASPTFVLSGEQFF

SEQ ID NO: 392125 - protein, 15 aa, Homo sapiens
  CDR3 for alpha chain variable domain of TCR clone 196063 (TRAV12-2, TRAJ43)
CAFDMRFGAGTRLTV

SEQ ID NO: 392126 - protein, 18 aa, Homo sapiens
  CDR3 for beta chain variable domain of TCR clone 196063 (TRBV20-1, TRBJ2-3)
CSASGLAGGPATTDTRYF

SEQ ID NO: 392127 - protein, 13 aa, Homo sapiens
  CDR3 for alpha chain variable domain of TCR clone 196064 (TRAV25, TRAJ26)
CAAPWDYGQNFVF

SEQ ID NO: 392128 - protein, 14 aa, Homo sapiens
  CDR3 for beta chain variable domain of TCR clone 196064 (TRBV7-2, TRBJ2-7)
CASSPKTSFYEQYF

SEQ ID NO: 392129 - protein, 14 aa, Homo sapiens
  CDR3 for alpha chain variable domain of TCR clone 196065 (TRAV12-3, TRAJ10)
SHLPLTGGGNKLTF

SEQ ID NO: 392130 - protein, 13 aa, Homo sapiens
  CDR3 for beta chain variable domain of TCR clone 196065 (TRBV20-1, TRBJ2-1)
CSDSTGTSNEQFF

SEQ ID NO: 392131 - protein, 11 aa, Homo sapiens
  CDR3 for alpha chain variable domain of TCR clone 196066 (TRAV2, TRAJ13)
CASGGYPKVTF

SEQ ID NO: 392132 - protein, 14 aa, Homo sapiens
  CDR3 for beta chain variable domain of TCR clone 196066 (TRBV5-7, TRBJ1-2)
CASSLVRGDYGYTF

SEQ ID NO: 392133 - protein, 13 aa, Homo sapiens
  CDR3 for alpha chain variable domain of TCR clone 196067 (TRAV2, TRAJ21)
CAVEDLNFNKFYF

SEQ ID NO: 392134 - protein, 15 aa, Homo sapiens
  CDR3 for beta chain variable domain of TCR clone 196067 (TRBV28, TRBJ2-5)
CVSSPGQGSIETQYF

SEQ ID NO: 392135 - protein, 13 aa, Homo sapiens
  CDR3 for alpha chain variable domain of TCR clone 196068 (TRAV26-1, )
CIVSHRVEGFCNQ

SEQ ID NO: 392136 - protein, 14 aa, Homo sapiens
  CDR3 for beta chain variable domain of TCR clone 196068 (TRBV20-1, TRBJ2-7)
CSAWTALSSYEQYF

SEQ ID NO: 392137 - protein, 15 aa, Homo sapiens
  CDR3 for alpha chain variable domain of TCR clone 196069 (TRAV21, TRAJ24)
CAARSSTDSWGKLQF

SEQ ID NO: 392138 - protein, 16 aa, Homo sapiens
  CDR3 for beta chain variable domain of TCR clone 196069 (TRBV19, TRBJ2-2)
CASRSPGTGATGELFF

SEQ ID NO: 392139 - protein, 13 aa, Homo sapiens
  CDR3 for alpha chain variable domain of TCR clone 196070 (TRAV35, TRAJ48)
CWGLNFGNEKLTF

SEQ ID NO: 392140 - protein, 17 aa, Homo sapiens
  CDR3 for beta chain variable domain of TCR clone 196070 (TRBV7-8, TRBJ2-1)
CASSPPTGTLAYNEQFF

SEQ ID NO: 392141 - protein, 16 aa, Homo sapiens
  CDR3 for alpha chain variable domain of TCR clone 196071 (TRAV17, TRAJ53)
CATDALSGGSNYKLTF

SEQ ID NO: 392142 - protein, 12 aa, Homo sapiens
  CDR3 for beta chain variable domain of TCR clone 196071 (TRBV5-1, TRBJ2-7)
CASSFGGYEQYF

SEQ ID NO: 392143 - protein, 14 aa, Homo sapiens
  CDR3 for alpha chain variable domain of TCR clone 196072 (TRAV3, TRAJ7)
GAVREEEREQQTRF

SEQ ID NO: 392144 - protein, 15 aa, Homo sapiens
  CDR3 for beta chain variable domain of TCR clone 196072 (TRBV12-4, TRBJ2-5)
CASSPPTGLQETQYF

SEQ ID NO: 392145 - protein, 14 aa, Homo sapiens
  CDR3 for alpha chain variable domain of TCR clone 196073 (TRAV12-2, TRAJ13)
CALKKTGGYQKVTF

SEQ ID NO: 392146 - protein, 13 aa, Homo sapiens
  CDR3 for beta chain variable domain of TCR clone 196073 (TRBV7-9, TRBJ1-2)
CASSLKQNYGYTF

SEQ ID NO: 392147 - protein, 14 aa, Homo sapiens
  CDR3 for alpha chain variable domain of TCR clone 196074 (TRAV38-1, TRAJ40)
FALRPTSGTYKYIS

SEQ ID NO: 392148 - protein, 16 aa, Homo sapiens
  CDR3 for beta chain variable domain of TCR clone 196074 (TRBV6-1, TRBJ1-2)
CASSGAWQGRSHGYTF

SEQ ID NO: 392149 - protein, 12 aa, Homo sapiens
  CDR3 for alpha chain variable domain of TCR clone 196075 (TRAV1-2, TRAJ26)
FAVRYYGQNFVF

SEQ ID NO: 392150 - protein, 14 aa, Homo sapiens
  CDR3 for beta chain variable domain of TCR clone 196075 (TRBV11-1, TRBJ2-7)
CASSFRQGSYEQYF

SEQ ID NO: 392151 - protein, 13 aa, Homo sapiens
  CDR3 for alpha chain variable domain of TCR clone 196076 (TRAV17, TRAJ37)
CATDPGNTGKLIF

SEQ ID NO: 392152 - protein, 13 aa, Homo sapiens
  CDR3 for beta chain variable domain of TCR clone 196076 (TRBV5-5, TRBJ2-5)
CASSSVGQETQYF

SEQ ID NO: 392153 - protein, 16 aa, Homo sapiens
  CDR3 for alpha chain variable domain of TCR clone 196077 (TRAV20, TRAJ52)
CAVLPDGGTSYGKLTF

SEQ ID NO: 392154 - protein, 12 aa, Homo sapiens
  CDR3 for beta chain variable domain of TCR clone 196077 (TRBV19, TRBJ2-1)
CASSQICNEQFF

SEQ ID NO: 392155 - protein, 15 aa, Homo sapiens
  CDR3 for alpha chain variable domain of TCR clone 196078 (TRAV3, TRAJ5)
CAVRDLDTGRRALTF

SEQ ID NO: 392156 - protein, 13 aa, Homo sapiens
  CDR3 for beta chain variable domain of TCR clone 196078 (TRBV6-1, TRBJ1-1)
CASSRQGNTEAFF

SEQ ID NO: 392157 - protein, 14 aa, Homo sapiens
  CDR3 for alpha chain variable domain of TCR clone 196079 (TRAV4, TRAJ30)
CLVGDMTRDDKIIF

SEQ ID NO: 392158 - protein, 16 aa, Homo sapiens
  CDR3 for beta chain variable domain of TCR clone 196079 (TRBV20-1, TRBJ1-4)
CSAPGQGLLTNEKLFF

SEQ ID NO: 392159 - protein, 12 aa, Homo sapiens
  CDR3 for alpha chain variable domain of TCR clone 196080 (TRAV2, TRAJ10)
CASPGGGNKLTF

SEQ ID NO: 392160 - protein, 13 aa, Homo sapiens
  CDR3 for beta chain variable domain of TCR clone 196080 (TRBV19, TRBJ1-5)
CASSMRGYQPQHF

SEQ ID NO: 392161 - protein, 14 aa, Homo sapiens
  CDR3 for alpha chain variable domain of TCR clone 196081 (TRAV12-2, TRAJ13)
CAVKKTGGNQKVTF

SEQ ID NO: 392162 - protein, 16 aa, Homo sapiens
  CDR3 for beta chain variable domain of TCR clone 196081 (TRBV2, TRBJ2-1)
CASRSPAGGKYNEQFF

SEQ ID NO: 392163 - protein, 12 aa, Homo sapiens
  CDR3 for alpha chain variable domain of TCR clone 196082 (TRAV29/DV5, TRAJ49)
CAATDTGNQFYF

SEQ ID NO: 392164 - protein, 16 aa, Homo sapiens
  CDR3 for beta chain variable domain of TCR clone 196082 (TRBV29-1, TRBJ2-7)
CSVEDAEDGTAYEQYF

SEQ ID NO: 392165 - protein, 14 aa, Homo sapiens
  CDR3 for alpha chain variable domain of TCR clone 196083 (TRAV2, TRAJ37)
CAVDFTSNTGKLIF

SEQ ID NO: 392166 - protein, 19 aa, Homo sapiens
  CDR3 for beta chain variable domain of TCR clone 196083 (TRBV4-2, TRBJ2-5)
CASSQEEIRLAGLQETQYF

SEQ ID NO: 392167 - protein, 15 aa, Homo sapiens
  CDR3 for alpha chain variable domain of TCR clone 196084 (TRAV12-2, TRAJ43)
CAFDMRFGAGTRLTV

SEQ ID NO: 392168 - protein, 15 aa, Homo sapiens
  CDR3 for beta chain variable domain of TCR clone 196084 (TRBV4-1, TRBJ2-1)
CASSQGGELYNEQFF

SEQ ID NO: 392169 - protein, 13 aa, Homo sapiens
  CDR3 for alpha chain variable domain of TCR clone 196085 (TRAV12-2, TRAJ7)
CAGLIYGNNRLAF

SEQ ID NO: 392170 - protein, 13 aa, Homo sapiens
  CDR3 for beta chain variable domain of TCR clone 196085 (TRBV2, TRBJ1-4)
CASNRGTNEKLFF

SEQ ID NO: 392171 - protein, 14 aa, Homo sapiens
  CDR3 for alpha chain variable domain of TCR clone 196086 (TRAV12-3, TRAJ10)
SNLPLTGGGNKITF

SEQ ID NO: 392172 - protein, 12 aa, Homo sapiens
  CDR3 for beta chain variable domain of TCR clone 196086 (TRBV7-3, TRBJ2-5)
CASSSPGGTQYF

SEQ ID NO: 392173 - protein, 12 aa, Homo sapiens
  CDR3 for alpha chain variable domain of TCR clone 196087 (TRAV16, TRAJ27)
CALNNQCRQINL

SEQ ID NO: 392174 - protein, 17 aa, Homo sapiens
  CDR3 for beta chain variable domain of TCR clone 196087 (TRBV4-1, TRBJ2-7)
CASSRDPLGVRGGEQYF

SEQ ID NO: 392175 - protein, 12 aa, Homo sapiens
  CDR3 for alpha chain variable domain of TCR clone 196088 (TRAV3, TRAJ31)
CAVRDGNARLMF

SEQ ID NO: 392176 - protein, 18 aa, Homo sapiens
  CDR3 for beta chain variable domain of TCR clone 196088 (TRBV7-2, TRBJ2-3)
CASGLRREGSGITDTQYF

SEQ ID NO: 392177 - protein, 14 aa, Homo sapiens
  CDR3 for alpha chain variable domain of TCR clone 196089 (TRAV1-2, TRAJ16)
CAVNRFSDGPKLLF

SEQ ID NO: 392178 - protein, 12 aa, Homo sapiens
  CDR3 for beta chain variable domain of TCR clone 196089 (TRBV11-2, TRBJ2-2)
CASSLGGGELFF

SEQ ID NO: 392179 - protein, 14 aa, Homo sapiens
  CDR3 for alpha chain variable domain of TCR clone 196090 (TRAV1-2, TRAJ16)
CAVNRFSDGQQLLF

SEQ ID NO: 392180 - protein, 16 aa, Homo sapiens
  CDR3 for beta chain variable domain of TCR clone 196090 (TRBV12-4, TRBJ1-5)
CASSRPVGGSNQPQHF

SEQ ID NO: 392181 - protein, 14 aa, Homo sapiens
  CDR3 for alpha chain variable domain of TCR clone 196091 (TRAV21, TRAJ45)
CAVSSGGGADGLTF

SEQ ID NO: 392182 - protein, 16 aa, Homo sapiens
  CDR3 for beta chain variable domain of TCR clone 196091 (TRBV2, TRBJ2-5)
CASSARGLGGRETQYF

SEQ ID NO: 392183 - protein, 15 aa, Homo sapiens
  CDR3 for alpha chain variable domain of TCR clone 196092 (TRAV2, TRAJ3)
CAVPPGYSSASKIIF

SEQ ID NO: 392184 - protein, 14 aa, Homo sapiens
  CDR3 for beta chain variable domain of TCR clone 196092 (TRBV11-2, TRBJ2-3)
CASSRLARTDTQYF

SEQ ID NO: 392185 - protein, 12 aa, Homo sapiens
  CDR3 for alpha chain variable domain of TCR clone 196093 (TRAV12-1, TRAJ29)
CVADSGNTPLVF

SEQ ID NO: 392186 - protein, 16 aa, Homo sapiens
  CDR3 for beta chain variable domain of TCR clone 196093 (TRBV12-4, TRBJ1-5)
CASSRPVGGSNQPQHF

SEQ ID NO: 392187 - protein, 12 aa, Homo sapiens
  CDR3 for alpha chain variable domain of TCR clone 196094 (TRAV8-2, TRAJ45)
CVQGGGADGLTF

SEQ ID NO: 392188 - protein, 15 aa, Homo sapiens
  CDR3 for beta chain variable domain of TCR clone 196094 (TRBV19, TRBJ1-1)
CASSIRRQMNTEAFL

SEQ ID NO: 392189 - protein, 14 aa, Homo sapiens
  CDR3 for alpha chain variable domain of TCR clone 196095 (TRAV16, TRAJ15)
CALSFNQAGTALIF

SEQ ID NO: 392190 - protein, 16 aa, Homo sapiens
  CDR3 for beta chain variable domain of TCR clone 196095 (TRBV9, TRBJ2-7)
CVSSAGPDRSPYEQYF

SEQ ID NO: 392191 - protein, 12 aa, Homo sapiens
  CDR3 for alpha chain variable domain of TCR clone 196096 (TRAV8-3, TRAJ20)
CAVGANHYKLSF

SEQ ID NO: 392192 - protein, 16 aa, Homo sapiens
  CDR3 for beta chain variable domain of TCR clone 196096 (TRBV19, TRBJ2-2)
CASRSPGTGATGELVF

SEQ ID NO: 392193 - protein, 16 aa, Homo sapiens
  CDR3 for alpha chain variable domain of TCR clone 196097 (TRAV17, TRAJ36)
CATVSLNWGKQPLLWD

SEQ ID NO: 392194 - protein, 13 aa, Homo sapiens
  CDR3 for beta chain variable domain of TCR clone 196097 (TRBV4-1, TRBJ1-1)
CARSQLGTGEAFF

SEQ ID NO: 392195 - protein, 13 aa, Homo sapiens
  CDR3 for alpha chain variable domain of TCR clone 196098 (TRAV8-6, TRAJ48)
CAVSAIGNEKLTF

SEQ ID NO: 392196 - protein, 14 aa, Homo sapiens
  CDR3 for beta chain variable domain of TCR clone 196098 (TRBV25-1, TRBJ1-1)
CASTHLGGNAEAFF

SEQ ID NO: 392197 - protein, 16 aa, Homo sapiens
  CDR3 for alpha chain variable domain of TCR clone 196099 (TRAV12-1, TRAJ37)
CAVRTAGSSNTGKLIF

SEQ ID NO: 392198 - protein, 13 aa, Homo sapiens
  CDR3 for beta chain variable domain of TCR clone 196099 (TRBV7-9, TRBJ2-5)
CASLPSGRETQYF

SEQ ID NO: 392199 - protein, 14 aa, Homo sapiens
  CDR3 for alpha chain variable domain of TCR clone 196100 (TRAV26-1, TRAJ49)
CIVRLTNTGNQFYF

SEQ ID NO: 392200 - protein, 17 aa, Homo sapiens
  CDR3 for beta chain variable domain of TCR clone 196100 (TRBV20-1, TRBJ2-1)
CSARDPLAGVWDNEQFF

SEQ ID NO: 392201 - protein, 14 aa, Homo sapiens
  CDR3 for alpha chain variable domain of TCR clone 196101 (TRAV38-2/DV8, TRAJ32)
CAYRSGRATNKLIF

SEQ ID NO: 392202 - protein, 15 aa, Homo sapiens
  CDR3 for beta chain variable domain of TCR clone 196101 (TRBV6-3, TRBJ2-1)
CASSYASDSYNEQFF

SEQ ID NO: 392203 - protein, 13 aa, Homo sapiens
  CDR3 for alpha chain variable domain of TCR clone 196102 (TRAV13-1, TRAJ5)
CAAKHTGRRALTF

SEQ ID NO: 392204 - protein, 15 aa, Homo sapiens
  CDR3 for beta chain variable domain of TCR clone 196102 (TRBV9, TRBJ1-6)
CASSVAGTGDSPLHF

SEQ ID NO: 392205 - protein, 11 aa, Homo sapiens
  CDR3 for alpha chain variable domain of TCR clone 196103 (TRAV21, TRAJ34)
CAVTNTDKPIF

SEQ ID NO: 392206 - protein, 17 aa, Homo sapiens
  CDR3 for beta chain variable domain of TCR clone 196103 (TRBV20-1, TRBJ2-1)
CSARSPSGGHPTMSSSS

SEQ ID NO: 392207 - protein, 13 aa, Homo sapiens
  CDR3 for alpha chain variable domain of TCR clone 196104 (TRAV2, TRAJ15)
CAVASQAGTALIF

SEQ ID NO: 392208 - protein, 18 aa, Homo sapiens
  CDR3 for beta chain variable domain of TCR clone 196104 (TRBV23-1, TRBJ2-3)
CISAPAVNRPASTDTQYF

SEQ ID NO: 392209 - protein, 14 aa, Homo sapiens
  CDR3 for alpha chain variable domain of TCR clone 196105 (TRAV3, TRAJ6)
CAVRDWGGSYIPTF

SEQ ID NO: 392210 - protein, 17 aa, Homo sapiens
  CDR3 for beta chain variable domain of TCR clone 196105 (TRBV6-5, TRBJ2-1)
CASRLSGRFEAYNEQFF

SEQ ID NO: 392211 - protein, 15 aa, Homo sapiens
  CDR3 for alpha chain variable domain of TCR clone 196106 (TRAV38-1, TRAJ37)
CAFLFGSVNTGKLIF

SEQ ID NO: 392212 - protein, 12 aa, Homo sapiens
  CDR3 for beta chain variable domain of TCR clone 196106 (TRBV7-9, TRBJ2-7)
CASSLEGYEQYF

SEQ ID NO: 392213 - protein, 13 aa, Homo sapiens
  CDR3 for alpha chain variable domain of TCR clone 196107 (TRAV3, TRAJ4)
CAVRDGGCNKLIF

SEQ ID NO: 392214 - protein, 14 aa, Homo sapiens
  CDR3 for beta chain variable domain of TCR clone 196107 (TRBV12-4, TRBJ1-2)
CASSSSAAGSSYTF

SEQ ID NO: 392215 - protein, 14 aa, Homo sapiens
  CDR3 for alpha chain variable domain of TCR clone 196108 (TRAV2, TRAJ3)
CAVEDNSSASKIIF

SEQ ID NO: 392216 - protein, 14 aa, Homo sapiens
  CDR3 for beta chain variable domain of TCR clone 196108 (TRBV6-3, TRBJ2-7)
CAGRISGGPGEQYF

SEQ ID NO: 392217 - protein, 14 aa, Homo sapiens
  CDR3 for alpha chain variable domain of TCR clone 196109 (TRAV27, TRAJ22)
CAGLPSGSARQLTF

SEQ ID NO: 392218 - protein, 15 aa, Homo sapiens
  CDR3 for beta chain variable domain of TCR clone 196109 (TRBV6-1, TRBJ2-3)
CASSERGGITDTQYF

SEQ ID NO: 392219 - protein, 14 aa, Homo sapiens
  CDR3 for alpha chain variable domain of TCR clone 196110 (TRAV13-1, TRAJ26)
CAASRGNYGQNFVF

SEQ ID NO: 392220 - protein, 13 aa, Homo sapiens
  CDR3 for beta chain variable domain of TCR clone 196110 (TRBV11-2, TRBJ2-5)
CASSSTGEETQYF

SEQ ID NO: 392221 - protein, 13 aa, Homo sapiens
  CDR3 for alpha chain variable domain of TCR clone 196111 (TRAV13-2, TRAJ48)
CAEMDFGNEKLTF

SEQ ID NO: 392222 - protein, 13 aa, Homo sapiens
  CDR3 for beta chain variable domain of TCR clone 196111 (TRBV28, TRBJ2-5)
CASSFAGGETQYF

SEQ ID NO: 392223 - protein, 14 aa, Homo sapiens
  CDR3 for alpha chain variable domain of TCR clone 196112 (TRAV2, TRAJ9)
CAVEDRSGGFKTIF

SEQ ID NO: 392224 - protein, 14 aa, Homo sapiens
  CDR3 for beta chain variable domain of TCR clone 196112 (TRBV19, TRBJ2-3)
CASSAPRGTDTQYF

SEQ ID NO: 392225 - protein, 11 aa, Homo sapiens
  CDR3 for alpha chain variable domain of TCR clone 196113 (TRAV21, TRAJ11)
CAVNGYSTLTF

SEQ ID NO: 392226 - protein, 15 aa, Homo sapiens
  CDR3 for beta chain variable domain of TCR clone 196113 (TRBV6-3, TRBJ2-7)
CASSSPGTVFYEQYC

SEQ ID NO: 392227 - protein, 17 aa, Homo sapiens
  CDR3 for alpha chain variable domain of TCR clone 196114 (TRAV13-1, TRAJ28)
CAASPPYSGAGSYQLTF

SEQ ID NO: 392228 - protein, 13 aa, Homo sapiens
  CDR3 for beta chain variable domain of TCR clone 196114 (TRBV19, TRBJ1-5)
CASSMRGYQPQHF

SEQ ID NO: 392229 - protein, 14 aa, Homo sapiens
  CDR3 for alpha chain variable domain of TCR clone 196115 (TRAV12-2, TRAJ32)
CAHPESGATNKLIF

SEQ ID NO: 392230 - protein, 14 aa, Homo sapiens
  CDR3 for beta chain variable domain of TCR clone 196115 (TRBV4-2, TRBJ2-3)
CASREPRAPGMQYF

SEQ ID NO: 392231 - protein, 14 aa, Homo sapiens
  CDR3 for alpha chain variable domain of TCR clone 196116 (TRAV1-2, TRAJ16)
CAVNRFSDGQKLLF

SEQ ID NO: 392232 - protein, 12 aa, Homo sapiens
  CDR3 for beta chain variable domain of TCR clone 196116 (TRBV28, TRBJ2-6)
CAIQAGANVLTV

SEQ ID NO: 392233 - protein, 13 aa, Homo sapiens
  CDR3 for alpha chain variable domain of TCR clone 196117 (TRAV2, TRAJ29)
CAAGNSGNTPLVF

SEQ ID NO: 392234 - protein, 15 aa, Homo sapiens
  CDR3 for beta chain variable domain of TCR clone 196117 (TRBV7-9, TRBJ1-2)
CQQPRRGAINYGNTF

SEQ ID NO: 392235 - protein, 10 aa, Homo sapiens
  CDR3 for alpha chain variable domain of TCR clone 196118 (TRAV12-1, TRAJ43)
CVVHNNDMRF

SEQ ID NO: 392236 - protein, 13 aa, Homo sapiens
  CDR3 for beta chain variable domain of TCR clone 196118 (TRBV12-4, TRBJ1-2)
CASSSGLTVIYTF

SEQ ID NO: 392237 - protein, 13 aa, Homo sapiens
  CDR3 for alpha chain variable domain of TCR clone 196119 (TRAV8-3, TRAJ21)
CAVGAYNFNKFYF

SEQ ID NO: 392238 - protein, 16 aa, Homo sapiens
  CDR3 for beta chain variable domain of TCR clone 196119 (TRBV19, TRBJ2-1)
CASSRGGGSAYNEQFF

SEQ ID NO: 392239 - protein, 17 aa, Homo sapiens
  CDR3 for alpha chain variable domain of TCR clone 196120 (TRAV16, TRAJ37)
CAFCPKNGSSNTGKLIF

SEQ ID NO: 392240 - protein, 12 aa, Homo sapiens
  CDR3 for beta chain variable domain of TCR clone 196120 (TRBV28, TRBJ2-6)
CAIQAGANVLTF

SEQ ID NO: 392241 - protein, 14 aa, Homo sapiens
  CDR3 for alpha chain variable domain of TCR clone 196121 (TRAV20, TRAJ18)
CAVGRGSTLGRLYF

SEQ ID NO: 392242 - protein, 18 aa, Homo sapiens
  CDR3 for beta chain variable domain of TCR clone 196121 (TRBV7-9, TRBJ2-6)
CASSFPGAGISGANVLTF

SEQ ID NO: 392243 - protein, 16 aa, Homo sapiens
  CDR3 for alpha chain variable domain of TCR clone 196122 (TRAV16, TRAJ52)
CAISAAGGTSYGKLTF

SEQ ID NO: 392244 - protein, 16 aa, Homo sapiens
  CDR3 for beta chain variable domain of TCR clone 196122 (TRBV12-4, TRBJ1-5)
CASSRPVGGSNQHQHF

SEQ ID NO: 392245 - protein, 14 aa, Homo sapiens
  CDR3 for alpha chain variable domain of TCR clone 196123 (TRAV2, TRAJ9)
CAVVPNTGGFKTIF

SEQ ID NO: 392246 - protein, 16 aa, Homo sapiens
  CDR3 for beta chain variable domain of TCR clone 196123 (TRBV28, TRBJ1-2)
CASSLYGQEANYGYTF

SEQ ID NO: 392247 - protein, 16 aa, Homo sapiens
  CDR3 for alpha chain variable domain of TCR clone 196124 (TRAV3, TRAJ37)
CAVRPHGSGNTVKLIF

SEQ ID NO: 392248 - protein, 17 aa, Homo sapiens
  CDR3 for beta chain variable domain of TCR clone 196124 (TRBV20-1, TRBJ2-1)
CSASSSGLAGSYNEQFF

SEQ ID NO: 392249 - protein, 16 aa, Homo sapiens
  CDR3 for alpha chain variable domain of TCR clone 196125 (TRAV30, TRAJ24)
CGTEIVDADSWGKFQF

SEQ ID NO: 392250 - protein, 18 aa, Homo sapiens
  CDR3 for beta chain variable domain of TCR clone 196125 (TRBV7-9, TRBJ2-7)
WASSLTTSGSRTWYEQSF

SEQ ID NO: 392251 - protein, 16 aa, Homo sapiens
  CDR3 for alpha chain variable domain of TCR clone 196126 (TRAV38-1, TRAJ32)
CAFMKGGGGATNKLMF

SEQ ID NO: 392252 - protein, 13 aa, Homo sapiens
  CDR3 for beta chain variable domain of TCR clone 196126 (TRBV20-1, TRBJ2-5)
CSAREAFQETQYF

SEQ ID NO: 392253 - protein, 18 aa, Homo sapiens
  CDR3 for alpha chain variable domain of TCR clone 196127 (TRAV12-3, TRAJ52)
CAMSRTNAGGTSYGKWTF

SEQ ID NO: 392254 - protein, 17 aa, Homo sapiens
  CDR3 for beta chain variable domain of TCR clone 196127 (TRBV7-3, TRBJ2-3)
CASSLMKRMRGADTQYF

SEQ ID NO: 392255 - protein, 16 aa, Homo sapiens
  CDR3 for alpha chain variable domain of TCR clone 196128 (TRAV26-1, TRAJ53)
CTVRVAMGGSNYKLTF

SEQ ID NO: 392256 - protein, 12 aa, Homo sapiens
  CDR3 for beta chain variable domain of TCR clone 196128 (TRBV7-9, TRBJ1-5)
CASSPQGQPQHF

SEQ ID NO: 392257 - protein, 11 aa, Homo sapiens
  CDR3 for alpha chain variable domain of TCR clone 196129 (TRAV12-1, TRAJ37)
CVVNTPGKLIF

SEQ ID NO: 392258 - protein, 13 aa, Homo sapiens
  CDR3 for beta chain variable domain of TCR clone 196129 (TRBV12-4, TRBJ1-5)
SASSPDRAQPQHF

SEQ ID NO: 392259 - protein, 15 aa, Homo sapiens
  CDR3 for alpha chain variable domain of TCR clone 196130 (TRAV29/DV5, TRAJ29)
CAASERSSGNTPLVF

SEQ ID NO: 392260 - protein, 17 aa, Homo sapiens
  CDR3 for beta chain variable domain of TCR clone 196130 (TRBV18, TRBJ2-2)
CASSQRSSGQGPGELFF

SEQ ID NO: 392261 - protein, 14 aa, Homo sapiens
  CDR3 for alpha chain variable domain of TCR clone 196131 (TRAV2, TRAJ37)
CPVAFTSNTGKLIF

SEQ ID NO: 392262 - protein, 15 aa, Homo sapiens
  CDR3 for beta chain variable domain of TCR clone 196131 (TRBV20-1, TRBJ1-1)
CSASRGVTGNTEAFF

SEQ ID NO: 392263 - protein, 15 aa, Homo sapiens
  CDR3 for alpha chain variable domain of TCR clone 196132 (TRAV8-4, TRAJ34)
CAVSHLSYNTDKLIF

SEQ ID NO: 392264 - protein, 15 aa, Homo sapiens
  CDR3 for beta chain variable domain of TCR clone 196132 (TRBV7-9, TRBJ1-6)
CASSSPGRGNSPLHF

SEQ ID NO: 392265 - protein, 13 aa, Homo sapiens
  CDR3 for alpha chain variable domain of TCR clone 196133 (TRAV21, TRAJ27)
CAQWGGNAGKSTF

SEQ ID NO: 392266 - protein, 14 aa, Homo sapiens
  CDR3 for beta chain variable domain of TCR clone 196133 (TRBV2, TRBJ2-3)
CAVGGTISKDTQYF

SEQ ID NO: 392267 - protein, 19 aa, Homo sapiens
  CDR3 for alpha chain variable domain of TCR clone 196134 (TRAV1-2, TRAJ26)
CLSPLCCERPDNYGQNFVF

SEQ ID NO: 392268 - protein, 15 aa, Homo sapiens
  CDR3 for beta chain variable domain of TCR clone 196134 (TRBV28, TRBJ1-2)
CASSLWQPTNYGYAF

SEQ ID NO: 392269 - protein, 11 aa, Homo sapiens
  CDR3 for alpha chain variable domain of TCR clone 196135 (TRAV4, TRAJ23)
CLVAPGGQLIF

SEQ ID NO: 392270 - protein, 13 aa, Homo sapiens
  CDR3 for beta chain variable domain of TCR clone 196135 (TRBV7-9, TRBJ1-2)
CASSLKQNYGYTF

SEQ ID NO: 392271 - protein, 16 aa, Homo sapiens
  CDR3 for alpha chain variable domain of TCR clone 196136 (TRAV30, TRAJ24)
CGTEIVDADSWGKFKF

SEQ ID NO: 392272 - protein, 15 aa, Homo sapiens
  CDR3 for beta chain variable domain of TCR clone 196136 (TRBV20-1, TRBJ2-7)
CSARVPAAYFYEQYF

SEQ ID NO: 392273 - protein, 14 aa, Homo sapiens
  CDR3 for alpha chain variable domain of TCR clone 196137 (TRAV8-3, TRAJ27)
CAVGAGTNAGKSTF

SEQ ID NO: 392274 - protein, 17 aa, Homo sapiens
  CDR3 for beta chain variable domain of TCR clone 196137 (TRBV13, TRBJ2-3)
CASSLSRVAGGRNTQYF

SEQ ID NO: 392275 - protein, 14 aa, Homo sapiens
  CDR3 for alpha chain variable domain of TCR clone 196138 (TRAV1-1, TRAJ27)
CAVIYNTNAGKSTF

SEQ ID NO: 392276 - protein, 15 aa, Homo sapiens
  CDR3 for beta chain variable domain of TCR clone 196138 (TRBV28, TRBJ2-1)
CASSIIAGGRSEQFF

SEQ ID NO: 392277 - protein, 15 aa, Homo sapiens
  CDR3 for alpha chain variable domain of TCR clone 196139 (TRAV8-2, TRAJ16)
CVVSDGSSDGQKLLF

SEQ ID NO: 392278 - protein, 15 aa, Homo sapiens
  CDR3 for beta chain variable domain of TCR clone 196139 (TRBV12-4, TRBJ2-5)
CASSPPTGLQETQYF

SEQ ID NO: 392279 - protein, 14 aa, Homo sapiens
  CDR3 for alpha chain variable domain of TCR clone 196140 (TRAV2, TRAJ9)
CAVEDRSGGFKTIF

SEQ ID NO: 392280 - protein, 13 aa, Homo sapiens
  CDR3 for beta chain variable domain of TCR clone 196140 (TRBV5-7, TRBJ2-3)
CASSLGRTDTQYF

SEQ ID NO: 392281 - protein, 16 aa, Homo sapiens
  CDR3 for alpha chain variable domain of TCR clone 196141 (TRAV30, TRAJ24)
CGTEIVDADSWGKFRF

SEQ ID NO: 392282 - protein, 14 aa, Homo sapiens
  CDR3 for beta chain variable domain of TCR clone 196141 (TRBV12-5, TRBJ2-5)
CASGSRTRQETQYF

SEQ ID NO: 392283 - protein, 18 aa, Homo sapiens
  CDR3 for alpha chain variable domain of TCR clone 196142 (TRAV21, TRAJ52)
CAVRPSPAGGTSYGRLTF

SEQ ID NO: 392284 - protein, 14 aa, Homo sapiens
  CDR3 for beta chain variable domain of TCR clone 196142 (TRBV7-8, TRBJ2-3)
CASSLEAGTDTQYF

SEQ ID NO: 392285 - protein, 13 aa, Homo sapiens
  CDR3 for alpha chain variable domain of TCR clone 196143 (TRAV12-1, TRAJ6)
CVVYPGGSYIPTF

SEQ ID NO: 392286 - protein, 14 aa, Homo sapiens
  CDR3 for beta chain variable domain of TCR clone 196143 (TRBV7-9, TRBJ2-5)
CASSLVGGEETQYF

SEQ ID NO: 392287 - protein, 13 aa, Homo sapiens
  CDR3 for alpha chain variable domain of TCR clone 196144 (TRAV13-2, TRAJ48)
CAEMDFGNEKLTF

SEQ ID NO: 392288 - protein, 15 aa, Homo sapiens
  CDR3 for beta chain variable domain of TCR clone 196144 (TRBV7-6, TRBJ2-5)
CASSKPTGPQETQYF

SEQ ID NO: 392289 - protein, 17 aa, Homo sapiens
  CDR3 for alpha chain variable domain of TCR clone 196145 (TRAV3, TRAJ42)
CAVRDRDYGGSQGNLIF

SEQ ID NO: 392290 - protein, 15 aa, Homo sapiens
  CDR3 for beta chain variable domain of TCR clone 196145 (TRBV27, TRBJ1-6)
CASSFDRGLGSALHF

SEQ ID NO: 392291 - protein, 14 aa, Homo sapiens
  CDR3 for alpha chain variable domain of TCR clone 196146 (TRAV8-6, TRAJ8)
CAANENTGFQKLVF

SEQ ID NO: 392292 - protein, 15 aa, Homo sapiens
  CDR3 for beta chain variable domain of TCR clone 196146 (TRBV27, TRBJ2-3)
CASSSLAGVIDTQYF

SEQ ID NO: 392293 - protein, 16 aa, Homo sapiens
  CDR3 for alpha chain variable domain of TCR clone 196147 (TRAV14/DV4, TRAJ53)
CAMREGGGGSNYKLTF

SEQ ID NO: 392294 - protein, 17 aa, Homo sapiens
  CDR3 for beta chain variable domain of TCR clone 196147 (TRBV13, TRBJ2-3)
CASNLSRVAGGRNTQYF

SEQ ID NO: 392295 - protein, 13 aa, Homo sapiens
  CDR3 for alpha chain variable domain of TCR clone 196148 (TRAV21, TRAJ58)
CAVKVSSGSRLTF

SEQ ID NO: 392296 - protein, 17 aa, Homo sapiens
  CDR3 for beta chain variable domain of TCR clone 196148 (TRBV5-1, TRBJ2-3)
CASSLAGWGSVVDTQYF

SEQ ID NO: 392297 - protein, 13 aa, Homo sapiens
  CDR3 for alpha chain variable domain of TCR clone 196149 (TRAV26-2, TRAJ45)
CIPYRRRCLRTHL

SEQ ID NO: 392298 - protein, 20 aa, Homo sapiens
  CDR3 for beta chain variable domain of TCR clone 196149 (TRBV28, TRBJ2-1)
CASTPIGRSPGLAGGNEQFF

SEQ ID NO: 392299 - protein, 14 aa, Homo sapiens
  CDR3 for alpha chain variable domain of TCR clone 196150 (TRAV26-1, TRAJ21)
CIVRPPYNFNKFYF

SEQ ID NO: 392300 - protein, 11 aa, Homo sapiens
  CDR3 for beta chain variable domain of TCR clone 196150 (TRBV10-3, TRBJ2-7)
CAISEGIEQYF

SEQ ID NO: 392301 - protein, 11 aa, Homo sapiens
  CDR3 for alpha chain variable domain of TCR clone 196151 (TRAV3, TRAJ21)
CAVGNFNKFYF

SEQ ID NO: 392302 - protein, 15 aa, Homo sapiens
  CDR3 for beta chain variable domain of TCR clone 196151 (TRBV29-1, TRBJ2-7)
CSVEFFDRGSYEQYF

SEQ ID NO: 392303 - protein, 17 aa, Homo sapiens
  CDR3 for alpha chain variable domain of TCR clone 196152 (TRAV3, TRAJ6)
CAVSDGPRAGGSYIPTF

SEQ ID NO: 392304 - protein, 16 aa, Homo sapiens
  CDR3 for beta chain variable domain of TCR clone 196152 (TRBV9, TRBJ2-3)
CASSGTSGKDTDTQYF

SEQ ID NO: 392305 - protein, 17 aa, Homo sapiens
  CDR3 for alpha chain variable domain of TCR clone 196153 (TRAV8-6, TRAJ58)
CAVSSWVGETSGSRLTF

SEQ ID NO: 392306 - protein, 13 aa, Homo sapiens
  CDR3 for beta chain variable domain of TCR clone 196153 (TRBV14, TRBJ2-7)
CGSSQDRRYEQYF

SEQ ID NO: 392307 - protein, 14 aa, Homo sapiens
  CDR3 for alpha chain variable domain of TCR clone 196154 (TRAV1-2, TRAJ8)
CAVREETGFQKLVF

SEQ ID NO: 392308 - protein, 15 aa, Homo sapiens
  CDR3 for beta chain variable domain of TCR clone 196154 (TRBV27, TRBJ2-1)
CASSNGGGSSNEQFF

SEQ ID NO: 392309 - protein, 11 aa, Homo sapiens
  CDR3 for alpha chain variable domain of TCR clone 196155 (TRAV3, TRAJ32)
CAMREGIMVVL

SEQ ID NO: 392310 - protein, 14 aa, Homo sapiens
  CDR3 for beta chain variable domain of TCR clone 196155 (TRBV7-2, TRBJ2-7)
CASRSQGAAYEQYF

SEQ ID NO: 392311 - protein, 17 aa, Homo sapiens
  CDR3 for alpha chain variable domain of TCR clone 196156 (TRAV3, TRAJ42)
CAVRDRDYGGSEGNLIF

SEQ ID NO: 392312 - protein, 15 aa, Homo sapiens
  CDR3 for beta chain variable domain of TCR clone 196156 (TRBV11-3, TRBJ2-7)
CASSPGPASSYEQYF

SEQ ID NO: 392313 - protein, 12 aa, Homo sapiens
  CDR3 for alpha chain variable domain of TCR clone 196157 (TRAV20, TRAJ54)
CAVQEGALKLVF

SEQ ID NO: 392314 - protein, 17 aa, Homo sapiens
  CDR3 for beta chain variable domain of TCR clone 196157 (TRBV13, TRBJ2-3)
CASSLSRVAGGRNTQYF

SEQ ID NO: 392315 - protein, 13 aa, Homo sapiens
  CDR3 for alpha chain variable domain of TCR clone 196158 (TRAV12-1, TRAJ39)
CVALNDAGNMLTF

SEQ ID NO: 392316 - protein, 17 aa, Homo sapiens
  CDR3 for beta chain variable domain of TCR clone 196158 (TRBV6-1, TRBJ2-3)
CASSEFVTGGPTDTQYF

SEQ ID NO: 392317 - protein, 15 aa, Homo sapiens
  CDR3 for alpha chain variable domain of TCR clone 196159 (TRAV2, TRAJ22)
CAVPSRGGSARQLTF

SEQ ID NO: 392318 - protein, 14 aa, Homo sapiens
  CDR3 for beta chain variable domain of TCR clone 196159 (TRBV7-2, TRBJ1-2)
CASSRGGTNYGYTF

SEQ ID NO: 392319 - protein, 14 aa, Homo sapiens
  CDR3 for alpha chain variable domain of TCR clone 196160 (TRAV21, TRAJ45)
CAVSSGGGADGLTF

SEQ ID NO: 392320 - protein, 16 aa, Homo sapiens
  CDR3 for beta chain variable domain of TCR clone 196160 (TRBV6-1, TRBJ1-3)
CASVQGGVETPCILER

SEQ ID NO: 392321 - protein, 12 aa, Homo sapiens
  CDR3 for alpha chain variable domain of TCR clone 196161 (TRAV13-1, TRAJ27)
CAAHTNAGKSTF

SEQ ID NO: 392322 - protein, 15 aa, Homo sapiens
  CDR3 for beta chain variable domain of TCR clone 196161 (TRBV19, TRBJ1-1)
CASTSGQIQNTEAFF

SEQ ID NO: 392323 - protein, 14 aa, Homo sapiens
  CDR3 for alpha chain variable domain of TCR clone 196162 (TRAV27, TRAJ22)
CAGLPSGSARQLTF

SEQ ID NO: 392324 - protein, 16 aa, Homo sapiens
  CDR3 for beta chain variable domain of TCR clone 196162 (TRBV7-3, TRBJ2-2)
CANSLKRGTLSGELFF

SEQ ID NO: 392325 - protein, 15 aa, Homo sapiens
  CDR3 for alpha chain variable domain of TCR clone 196163 (TRAV20, TRAJ32)
CAVQAKRGATNKLIF

SEQ ID NO: 392326 - protein, 18 aa, Homo sapiens
  CDR3 for beta chain variable domain of TCR clone 196163 (TRBV7-9, TRBJ2-7)
CASSLTTSGSRTWYEQYL

SEQ ID NO: 392327 - protein, 12 aa, Homo sapiens
  CDR3 for alpha chain variable domain of TCR clone 196164 (TRAV8-4, TRAJ31)
CAVSDSNARLMF

SEQ ID NO: 392328 - protein, 13 aa, Homo sapiens
  CDR3 for beta chain variable domain of TCR clone 196164 (TRBV19, TRBJ2-2)
CASSIWSTGELFS

SEQ ID NO: 392329 - protein, 15 aa, Homo sapiens
  CDR3 for alpha chain variable domain of TCR clone 196165 (TRAV17, TRAJ23)
CATDAEDNQVGKLIF

SEQ ID NO: 392330 - protein, 14 aa, Homo sapiens
  CDR3 for beta chain variable domain of TCR clone 196165 (TRBV10-3, TRBJ2-2)
CAASSRVNTGELFF

SEQ ID NO: 392331 - protein, 14 aa, Homo sapiens
  CDR3 for alpha chain variable domain of TCR clone 196166 (TRAV1-2, TRAJ16)
CAVNRFSDGQKQLF

SEQ ID NO: 392332 - protein, 14 aa, Homo sapiens
  CDR3 for beta chain variable domain of TCR clone 196166 (TRBV7-2, TRBJ1-1)
CASSFLTGTTEAFF

SEQ ID NO: 392333 - protein, 11 aa, Homo sapiens
  CDR3 for alpha chain variable domain of TCR clone 196167 (TRAV12-1, TRAJ33)
CVVNMNYQLIW

SEQ ID NO: 392334 - protein, 14 aa, Homo sapiens
  CDR3 for beta chain variable domain of TCR clone 196167 (TRBV12-5, TRBJ2-5)
CASGSRTHQETQYF

SEQ ID NO: 392335 - protein, 17 aa, Homo sapiens
  CDR3 for alpha chain variable domain of TCR clone 196168 (TRAV13-1, TRAJ52)
CAASSGAGRTSYGKLTF

SEQ ID NO: 392336 - protein, 15 aa, Homo sapiens
  CDR3 for beta chain variable domain of TCR clone 196168 (TRBV2, TRBJ2-1)
CASSELAGSYNEQFF

SEQ ID NO: 392337 - protein, 12 aa, Homo sapiens
  CDR3 for alpha chain variable domain of TCR clone 196169 (TRAV2, TRAJ31)
CAVEEGNARLVF

SEQ ID NO: 392338 - protein, 18 aa, Homo sapiens
  CDR3 for beta chain variable domain of TCR clone 196169 (TRBV7-9, TRBJ2-3)
CASSLDLAELATPDTQYF

SEQ ID NO: 392339 - protein, 16 aa, Homo sapiens
  CDR3 for alpha chain variable domain of TCR clone 196170 (TRAV27, TRAJ18)
CAGAGNRGSTLGRLYF

SEQ ID NO: 392340 - protein, 15 aa, Homo sapiens
  CDR3 for beta chain variable domain of TCR clone 196170 (TRBV5-1, TRBJ2-5)
CASSRLGTVQETQYF

SEQ ID NO: 392341 - protein, 16 aa, Homo sapiens
  CDR3 for alpha chain variable domain of TCR clone 196171 (TRAV13-1, TRAJ45)
CAASWESGGGADGLTF

SEQ ID NO: 392342 - protein, 16 aa, Homo sapiens
  CDR3 for beta chain variable domain of TCR clone 196171 (TRBV12-4, TRBJ1-5)
CASSRPVGGSNQPQHF

SEQ ID NO: 392343 - protein, 12 aa, Homo sapiens
  CDR3 for alpha chain variable domain of TCR clone 196172 (TRAV8-3, TRAJ16)
CAVGAPGQKLLF

SEQ ID NO: 392344 - protein, 16 aa, Homo sapiens
  CDR3 for beta chain variable domain of TCR clone 196172 (TRBV7-2, TRBJ1-1)
CAISLSGTHAGTEAFF

SEQ ID NO: 392345 - protein, 14 aa, Homo sapiens
  CDR3 for alpha chain variable domain of TCR clone 196173 (TRAV16, TRAJ17)
CALSEGAAGNKLTF

SEQ ID NO: 392346 - protein, 13 aa, Homo sapiens
  CDR3 for beta chain variable domain of TCR clone 196173 (TRBV12-4, TRBJ2-2)
CASSITGSGELFF

SEQ ID NO: 392347 - protein, 14 aa, Homo sapiens
  CDR3 for alpha chain variable domain of TCR clone 196174 (TRAV13-2, TRAJ10)
CAENFTGGGNKLTF

SEQ ID NO: 392348 - protein, 16 aa, Homo sapiens
  CDR3 for beta chain variable domain of TCR clone 196174 (TRBV18, TRBJ2-7)
CASSPRSQGISYEQYV

SEQ ID NO: 392349 - protein, 13 aa, Homo sapiens
  CDR3 for alpha chain variable domain of TCR clone 196175 (TRAV29/DV5, TRAJ31)
CAASRNTNARLML

SEQ ID NO: 392350 - protein, 14 aa, Homo sapiens
  CDR3 for beta chain variable domain of TCR clone 196175 (TRBV18, TRBJ2-5)
CASSPPGHQETQYF

SEQ ID NO: 392351 - protein, 13 aa, Homo sapiens
  CDR3 for alpha chain variable domain of TCR clone 196176 (TRAV13-2, TRAJ15)
CAERPQAGTAMIF

SEQ ID NO: 392352 - protein, 15 aa, Homo sapiens
  CDR3 for beta chain variable domain of TCR clone 196176 (TRBV9, TRBJ2-3)
CASSAYEAGTDTQYF

SEQ ID NO: 392353 - protein, 14 aa, Homo sapiens
  CDR3 for alpha chain variable domain of TCR clone 196177 (TRAV1-2, TRAJ8)
CAVRDPPGFQKLVF

SEQ ID NO: 392354 - protein, 12 aa, Homo sapiens
  CDR3 for beta chain variable domain of TCR clone 196177 (TRBV7-9, TRBJ2-7)
CATRTDAYEQYF

SEQ ID NO: 392355 - protein, 13 aa, Homo sapiens
  CDR3 for alpha chain variable domain of TCR clone 196178 (TRAV23/DV6, TRAJ58)
CSARLIRGSRLTF

SEQ ID NO: 392356 - protein, 13 aa, Homo sapiens
  CDR3 for beta chain variable domain of TCR clone 196178 (TRBV2, TRBJ1-6)
CADSGSYNSPLHF

SEQ ID NO: 392357 - protein, 15 aa, Homo sapiens
  CDR3 for alpha chain variable domain of TCR clone 196179 (TRAV8-4, TRAJ8)
CAVSELNTGFQKLVF

SEQ ID NO: 392358 - protein, 14 aa, Homo sapiens
  CDR3 for beta chain variable domain of TCR clone 196179 (TRBV7-2, TRBJ2-3)
CASSQTGSSYTQYF

SEQ ID NO: 392359 - protein, 15 aa, Homo sapiens
  CDR3 for alpha chain variable domain of TCR clone 196180 (TRAV3, TRAJ5)
CAVRDLNTGRRALTF

SEQ ID NO: 392360 - protein, 16 aa, Homo sapiens
  CDR3 for beta chain variable domain of TCR clone 196180 (TRBV7-2, TRBJ2-5)
CASSSKWLSGQETQYF

SEQ ID NO: 392361 - protein, 14 aa, Homo sapiens
  CDR3 for alpha chain variable domain of TCR clone 196181 (TRAV12-1, TRAJ26)
CVVKGSIYGQNFVF

SEQ ID NO: 392362 - protein, 17 aa, Homo sapiens
  CDR3 for beta chain variable domain of TCR clone 196181 (TRBV11-2, TRBJ2-6)
CASSQRDIFSGANVLTF

SEQ ID NO: 392363 - protein, 12 aa, Homo sapiens
  CDR3 for alpha chain variable domain of TCR clone 196182 (TRAV16, TRAJ13)
CITLRGYQKVTF

SEQ ID NO: 392364 - protein, 17 aa, Homo sapiens
  CDR3 for beta chain variable domain of TCR clone 196182 (TRBV28, TRBJ2-5)
GASSRQGGLAGAETQYF

SEQ ID NO: 392365 - protein, 16 aa, Homo sapiens
  CDR3 for alpha chain variable domain of TCR clone 196183 (TRAV8-3, TRAJ13)
CAVGAYPSGGYQKVTF

SEQ ID NO: 392366 - protein, 16 aa, Homo sapiens
  CDR3 for beta chain variable domain of TCR clone 196183 (TRBV15, TRBJ2-1)
CATSRERLAGAYEQFF

SEQ ID NO: 392367 - protein, 14 aa, Homo sapiens
  CDR3 for alpha chain variable domain of TCR clone 196184 (TRAV1-2, TRAJ16)
CDVNRFSDGQKLLF

SEQ ID NO: 392368 - protein, 14 aa, Homo sapiens
  CDR3 for beta chain variable domain of TCR clone 196184 (TRBV19, TRBJ2-1)
CASPTFVLSGEQFF

SEQ ID NO: 392369 - protein, 14 aa, Homo sapiens
  CDR3 for alpha chain variable domain of TCR clone 196185 (TRAV1-2, TRAJ16)
CAVNRFSDGQKLRF

SEQ ID NO: 392370 - protein, 16 aa, Homo sapiens
  CDR3 for beta chain variable domain of TCR clone 196185 (TRBV20-1, TRBJ1-4)
CSAPGQGLLTNEKLFF

SEQ ID NO: 392371 - protein, 10 aa, Homo sapiens
  CDR3 for alpha chain variable domain of TCR clone 196186 (TRAV12-3, TRAJ49)
CAMNDDQFYF

SEQ ID NO: 392372 - protein, 15 aa, Homo sapiens
  CDR3 for beta chain variable domain of TCR clone 196186 (TRBV2, TRBJ2-2)
CASSRETVGTGELFF

SEQ ID NO: 392373 - protein, 13 aa, Homo sapiens
  CDR3 for alpha chain variable domain of TCR clone 196187 (TRAV12-2, TRAJ52)
CAVSGTSYGKLTF

SEQ ID NO: 392374 - protein, 13 aa, Homo sapiens
  CDR3 for beta chain variable domain of TCR clone 196187 (TRBV6-5, TRBJ2-5)
CASSPQGGETQYF

SEQ ID NO: 392375 - protein, 13 aa, Homo sapiens
  CDR3 for alpha chain variable domain of TCR clone 196188 (TRAV8-6, TRAJ36)
CAVIGPGANNLFF

SEQ ID NO: 392376 - protein, 17 aa, Homo sapiens
  CDR3 for beta chain variable domain of TCR clone 196188 (TRBV7-3, TRBJ2-3)
CASSLMKRMRGADTQYF

SEQ ID NO: 392377 - protein, 13 aa, Homo sapiens
  CDR3 for alpha chain variable domain of TCR clone 196189 (TRAV12-3, TRAJ33)
CAMSVNSNYQLIW

SEQ ID NO: 392378 - protein, 15 aa, Homo sapiens
  CDR3 for beta chain variable domain of TCR clone 196189 (TRBV5-1, TRBJ1-4)
FAPAAWKDGNEKLFF

SEQ ID NO: 392379 - protein, 14 aa, Homo sapiens
  CDR3 for alpha chain variable domain of TCR clone 196190 (TRAV12-2, TRAJ40)
CAVQIPSGTYKYIF

SEQ ID NO: 392380 - protein, 14 aa, Homo sapiens
  CDR3 for beta chain variable domain of TCR clone 196190 (TRBV11-2, TRBJ1-5)
CASSLDRGRQPQHF

SEQ ID NO: 392381 - protein, 13 aa, Homo sapiens
  CDR3 for alpha chain variable domain of TCR clone 196191 (TRAV2, TRAJ11)
CAVEDSGYSTLTF

SEQ ID NO: 392382 - protein, 13 aa, Homo sapiens
  CDR3 for beta chain variable domain of TCR clone 196191 (TRBV2, TRBJ2-1)
CASSGSSSGEQFF

SEQ ID NO: 392383 - protein, 16 aa, Homo sapiens
  CDR3 for alpha chain variable domain of TCR clone 196192 (TRAV3, TRAJ37)
CAVSGKGSGNTGKLIF

SEQ ID NO: 392384 - protein, 15 aa, Homo sapiens
  CDR3 for beta chain variable domain of TCR clone 196192 (TRBV9, TRBJ1-6)
CASSVAGTGDSPLHF

SEQ ID NO: 392385 - protein, 17 aa, Homo sapiens
  CDR3 for alpha chain variable domain of TCR clone 196193 (TRAV26-2, TRAJ42)
CILRDVGYGGSQGNLIF

SEQ ID NO: 392386 - protein, 16 aa, Homo sapiens
  CDR3 for beta chain variable domain of TCR clone 196193 (TRBV12-4, TRBJ2-7)
CASSLIVGTGTYDQYF

SEQ ID NO: 392387 - protein, 14 aa, Homo sapiens
  CDR3 for alpha chain variable domain of TCR clone 196194 (TRAV12-1, TRAJ9)
CVVNRRTGGFKTIF

SEQ ID NO: 392388 - protein, 16 aa, Homo sapiens
  CDR3 for beta chain variable domain of TCR clone 196194 (TRBV4-1, TRBJ2-3)
CASSQPTSGAEDTQYF

SEQ ID NO: 392389 - protein, 15 aa, Homo sapiens
  CDR3 for alpha chain variable domain of TCR clone 196195 (TRAV26-1, TRAJ48)
CIAPWSWFGNEKLTF

SEQ ID NO: 392390 - protein, 12 aa, Homo sapiens
  CDR3 for beta chain variable domain of TCR clone 196195 (TRBV19, TRBJ2-5)
CASSISEETQYF

SEQ ID NO: 392391 - protein, 15 aa, Homo sapiens
  CDR3 for alpha chain variable domain of TCR clone 196196 (TRAV3, TRAJ17)
CAVSPKEAAGNKLTF

SEQ ID NO: 392392 - protein, 14 aa, Homo sapiens
  CDR3 for beta chain variable domain of TCR clone 196196 (TRBV11-2, TRBJ2-5)
CASRPLAGRETQYF

SEQ ID NO: 392393 - protein, 16 aa, Homo sapiens
  CDR3 for alpha chain variable domain of TCR clone 196197 (TRAV30, TRAJ24)
CGTEIVDADSWGKFQF

SEQ ID NO: 392394 - protein, 12 aa, Homo sapiens
  CDR3 for beta chain variable domain of TCR clone 196197 (TRBV7-8, TRBJ2-7)
CASSLGDREQYI

SEQ ID NO: 392395 - protein, 13 aa, Homo sapiens
  CDR3 for alpha chain variable domain of TCR clone 196198 (TRAV2, TRAJ15)
CAVASQAGTVLIF

SEQ ID NO: 392396 - protein, 16 aa, Homo sapiens
  CDR3 for beta chain variable domain of TCR clone 196198 (TRBV20-1, TRBJ1-4)
CSAPGQGLLTNEELFF

SEQ ID NO: 392397 - protein, 12 aa, Homo sapiens
  CDR3 for alpha chain variable domain of TCR clone 196199 (TRAV21, TRAJ33)
CAGQDSNYQLIW

SEQ ID NO: 392398 - protein, 14 aa, Homo sapiens
  CDR3 for beta chain variable domain of TCR clone 196199 (TRBV28, TRBJ2-1)
CASSPGEGGNEQFF

SEQ ID NO: 392399 - protein, 15 aa, Homo sapiens
  CDR3 for alpha chain variable domain of TCR clone 196200 (TRAV21, TRAJ53)
CATLNSGGSNYKLTF

SEQ ID NO: 392400 - protein, 16 aa, Homo sapiens
  CDR3 for beta chain variable domain of TCR clone 196200 (TRBV9, TRBJ2-1)
GASSVGGGGNYNEQFF

SEQ ID NO: 392401 - protein, 15 aa, Homo sapiens
  CDR3 for alpha chain variable domain of TCR clone 196201 (TRAV13-1, TRAJ44)
CAASRNTGTASKLTF

SEQ ID NO: 392402 - protein, 17 aa, Homo sapiens
  CDR3 for beta chain variable domain of TCR clone 196201 (TRBV11-2, TRBJ2-1)
CASSLYPPGVEYNEQFF

SEQ ID NO: 392403 - protein, 16 aa, Homo sapiens
  CDR3 for alpha chain variable domain of TCR clone 196202 (TRAV30, TRAJ24)
CGTESVDADSWGKFQF

SEQ ID NO: 392404 - protein, 14 aa, Homo sapiens
  CDR3 for beta chain variable domain of TCR clone 196202 (TRBV12-5, TRBJ2-5)
CASGSRTHQENQYF

SEQ ID NO: 392405 - protein, 13 aa, Homo sapiens
  CDR3 for alpha chain variable domain of TCR clone 196203 (TRAV12-3, TRAJ40)
CAMSARGTYKYIF

SEQ ID NO: 392406 - protein, 15 aa, Homo sapiens
  CDR3 for beta chain variable domain of TCR clone 196203 (TRBV9, TRBJ1-6)
CASSVAGTGDSPLYF

SEQ ID NO: 392407 - protein, 13 aa, Homo sapiens
  CDR3 for alpha chain variable domain of TCR clone 196204 (TRAV8-3, TRAJ43)
CAVVPSNNNEMRF

SEQ ID NO: 392408 - protein, 16 aa, Homo sapiens
  CDR3 for beta chain variable domain of TCR clone 196204 (TRBV7-2, TRBJ2-5)
CASSPFPTGGEETQYF

SEQ ID NO: 392409 - protein, 14 aa, Homo sapiens
  CDR3 for alpha chain variable domain of TCR clone 196205 (TRAV12-2, TRAJ40)
CGVKIPSGTYKYIF

SEQ ID NO: 392410 - protein, 14 aa, Homo sapiens
  CDR3 for beta chain variable domain of TCR clone 196205 (TRBV20-1, TRBJ1-1)
CSAQTRIGGTEAFF

SEQ ID NO: 392411 - protein, 10 aa, Homo sapiens
  CDR3 for alpha chain variable domain of TCR clone 196206 (TRAV3, TRAJ42)
CAVRDRDYGG

SEQ ID NO: 392412 - protein, 15 aa, Homo sapiens
  CDR3 for beta chain variable domain of TCR clone 196206 (TRBV6-6, TRBJ2-7)
CASSYSYGGSYEQYI

SEQ ID NO: 392413 - protein, 14 aa, Homo sapiens
  CDR3 for alpha chain variable domain of TCR clone 196207 (TRAV2, TRAJ9)
CAVEDRSGGFKTIF

SEQ ID NO: 392414 - protein, 18 aa, Homo sapiens
  CDR3 for beta chain variable domain of TCR clone 196207 (TRBV20-1, TRBJ2-5)
CSQTGDSGRVGGKETQYF

SEQ ID NO: 392415 - protein, 12 aa, Homo sapiens
  CDR3 for alpha chain variable domain of TCR clone 196208 (TRAV12-3, TRAJ5)
CAMDTGRRALTF

SEQ ID NO: 392416 - protein, 13 aa, Homo sapiens
  CDR3 for beta chain variable domain of TCR clone 196208 (TRBV7-7, TRBJ2-2)
FASSLTSAGELFF

SEQ ID NO: 392417 - protein, 15 aa, Homo sapiens
  CDR3 for alpha chain variable domain of TCR clone 196209 (TRAV8-3, TRAJ45)
CASSYSGGGADGLTF

SEQ ID NO: 392418 - protein, 15 aa, Homo sapiens
  CDR3 for beta chain variable domain of TCR clone 196209 (TRBV27, TRBJ1-5)
CASSLGTGFDQPQHF

SEQ ID NO: 392419 - protein, 16 aa, Homo sapiens
  CDR3 for alpha chain variable domain of TCR clone 196210 (TRAV26-1, TRAJ48)
IASSDLSNFGNEKLTL

SEQ ID NO: 392420 - protein, 14 aa, Homo sapiens
  CDR3 for beta chain variable domain of TCR clone 196210 (TRBV13, TRBJ2-7)
CASSLKGASYEQYF

SEQ ID NO: 392421 - protein, 13 aa, Homo sapiens
  CDR3 for alpha chain variable domain of TCR clone 196211 (TRAV1-1, TRAJ30)
CAVRSDRDDKIIF

SEQ ID NO: 392422 - protein, 12 aa, Homo sapiens
  CDR3 for beta chain variable domain of TCR clone 196211 (TRBV7-8, TRBJ2-7)
CASSLGDREQYF

SEQ ID NO: 392423 - protein, 12 aa, Homo sapiens
  CDR3 for alpha chain variable domain of TCR clone 196212 (TRAV2, TRAJ9)
CAVGAGGFKPIF

SEQ ID NO: 392424 - protein, 16 aa, Homo sapiens
  CDR3 for beta chain variable domain of TCR clone 196212 (TRBV13, TRBJ2-2)
CSSSPRTGEHTGELFF

SEQ ID NO: 392425 - protein, 14 aa, Homo sapiens
  CDR3 for alpha chain variable domain of TCR clone 196213 (TRAV2, TRAJ22)
CAPLPGGFCKATDL

SEQ ID NO: 392426 - protein, 11 aa, Homo sapiens
  CDR3 for beta chain variable domain of TCR clone 196213 (TRBV27, TRBJ2-3)
CASSLGDTQYF

SEQ ID NO: 392427 - protein, 13 aa, Homo sapiens
  CDR3 for alpha chain variable domain of TCR clone 196214 (TRAV1-2, TRAJ9)
CAVLNTGGFKTIF

SEQ ID NO: 392428 - protein, 13 aa, Homo sapiens
  CDR3 for beta chain variable domain of TCR clone 196214 (TRBV19, TRBJ1-2)
CASSVRGQDGYTF

SEQ ID NO: 392429 - protein, 14 aa, Homo sapiens
  CDR3 for alpha chain variable domain of TCR clone 196215 (TRAV6, TRAJ37)
CPLGSQGKTGKLIF

SEQ ID NO: 392430 - protein, 15 aa, Homo sapiens
  CDR3 for beta chain variable domain of TCR clone 196215 (TRBV2, TRBJ2-1)
CASSEEREGDNEQFF

SEQ ID NO: 392431 - protein, 12 aa, Homo sapiens
  CDR3 for alpha chain variable domain of TCR clone 196216 (TRAV12-1, TRAJ40)
CVVYSGTYKYIF

SEQ ID NO: 392432 - protein, 17 aa, Homo sapiens
  CDR3 for beta chain variable domain of TCR clone 196216 (TRBV11-2, TRBJ2-3)
CQQRRGASRGAPNTQYF

SEQ ID NO: 392433 - protein, 13 aa, Homo sapiens
  CDR3 for alpha chain variable domain of TCR clone 196217 (TRAV35, TRAJ40)
CAGQLSGTYKYIF

SEQ ID NO: 392434 - protein, 14 aa, Homo sapiens
  CDR3 for beta chain variable domain of TCR clone 196217 (TRBV3-1, TRBJ2-5)
CASSLQLAGETQFF

SEQ ID NO: 392435 - protein, 14 aa, Homo sapiens
  CDR3 for alpha chain variable domain of TCR clone 196218 (TRAV12-1, TRAJ8)
CAVNSNTGFKKLVF

SEQ ID NO: 392436 - protein, 17 aa, Homo sapiens
  CDR3 for beta chain variable domain of TCR clone 196218 (TRBV7-8, TRBJ2-6)
CASSAGTGGAGANVLTF

SEQ ID NO: 392437 - protein, 11 aa, Homo sapiens
  CDR3 for alpha chain variable domain of TCR clone 196219 (TRAV13-1, TRAJ40)
CAVTGTYKYIF

SEQ ID NO: 392438 - protein, 13 aa, Homo sapiens
  CDR3 for beta chain variable domain of TCR clone 196219 (TRBV19, TRBJ1-5)
CASSIGGNQPQHF

SEQ ID NO: 392439 - protein, 13 aa, Homo sapiens
  CDR3 for alpha chain variable domain of TCR clone 196220 (TRAV20, TRAJ20)
CAVRDFNDYKLSF

SEQ ID NO: 392440 - protein, 11 aa, Homo sapiens
  CDR3 for beta chain variable domain of TCR clone 196220 (TRBV29-1, TRBJ2-5)
CSEDRTGTQYF

SEQ ID NO: 392441 - protein, 14 aa, Homo sapiens
  CDR3 for alpha chain variable domain of TCR clone 196221 (TRAV16, TRAJ54)
CALLLIQGAQKLVF

SEQ ID NO: 392442 - protein, 17 aa, Homo sapiens
  CDR3 for beta chain variable domain of TCR clone 196221 (TRBV11-2, TRBJ2-4)
CASSSVGPGGHRNMQYF

SEQ ID NO: 392443 - protein, 14 aa, Homo sapiens
  CDR3 for alpha chain variable domain of TCR clone 196222 (TRAV12-2, TRAJ40)
CAVKIPSGTYKYIF

SEQ ID NO: 392444 - protein, 15 aa, Homo sapiens
  CDR3 for beta chain variable domain of TCR clone 196222 (TRBV18, TRBJ2-7)
CASSPSSTGNYEQYF

SEQ ID NO: 392445 - protein, 13 aa, Homo sapiens
  CDR3 for alpha chain variable domain of TCR clone 196223 (TRAV13-1, TRAJ39)
CAASIWAGNMLTF

SEQ ID NO: 392446 - protein, 15 aa, Homo sapiens
  CDR3 for beta chain variable domain of TCR clone 196223 (TRBV7-9, TRBJ1-1)
CASSLFEQGGTEAFF

SEQ ID NO: 392447 - protein, 13 aa, Homo sapiens
  CDR3 for alpha chain variable domain of TCR clone 196224 (TRAV12-2, TRAJ6)
CAVNVSRKLHTYI

SEQ ID NO: 392448 - protein, 15 aa, Homo sapiens
  CDR3 for beta chain variable domain of TCR clone 196224 (TRBV7-2, TRBJ1-2)
CASSPRAGWNYGYTF

SEQ ID NO: 392449 - protein, 13 aa, Homo sapiens
  CDR3 for alpha chain variable domain of TCR clone 196225 (TRAV13-1, TRAJ5)
CAAEHTGRRALTF

SEQ ID NO: 392450 - protein, 12 aa, Homo sapiens
  CDR3 for beta chain variable domain of TCR clone 196225 (TRBV11-2, TRBJ2-1)
CASSPGNNEQFF

SEQ ID NO: 392451 - protein, 17 aa, Homo sapiens
  CDR3 for alpha chain variable domain of TCR clone 196226 (TRAV26-1, TRAJ53)
CIVRVDDSGGSNYKLTF

SEQ ID NO: 392452 - protein, 16 aa, Homo sapiens
  CDR3 for beta chain variable domain of TCR clone 196226 (TRBV13, TRBJ2-2)
CASSLGRGYGTGELFF

SEQ ID NO: 392453 - protein, 19 aa, Homo sapiens
  CDR3 for alpha chain variable domain of TCR clone 196227 (TRAV26-1, TRAJ28)
CIVRVAHAYSGAVSYQLTF

SEQ ID NO: 392454 - protein, 17 aa, Homo sapiens
  CDR3 for beta chain variable domain of TCR clone 196227 (TRBV4-1, TRBJ1-4)
CASSQEGPRGVEEKLFF

SEQ ID NO: 392455 - protein, 13 aa, Homo sapiens
  CDR3 for alpha chain variable domain of TCR clone 196228 (TRAV23/DV6, TRAJ15)
CSALPAGRNCSVL

SEQ ID NO: 392456 - protein, 14 aa, Homo sapiens
  CDR3 for beta chain variable domain of TCR clone 196228 (TRBV7-9, TRBJ1-2)
CASSRQGANYGYTF

SEQ ID NO: 392457 - protein, 14 aa, Homo sapiens
  CDR3 for alpha chain variable domain of TCR clone 196229 (TRAV13-1, TRAJ39)
CAAPPNNGGNMPTF

SEQ ID NO: 392458 - protein, 14 aa, Homo sapiens
  CDR3 for beta chain variable domain of TCR clone 196229 (TRBV12-4, TRBJ1-1)
CASNSGDLNTEAFF

SEQ ID NO: 392459 - protein, 18 aa, Homo sapiens
  CDR3 for alpha chain variable domain of TCR clone 196230 (TRAV21, TRAJ52)
CAVRPSPAGGTSYGKLTF

SEQ ID NO: 392460 - protein, 16 aa, Homo sapiens
  CDR3 for beta chain variable domain of TCR clone 196230 (TRBV5-7, TRBJ2-5)
CASTLAPAGGRETQYF

SEQ ID NO: 392461 - protein, 13 aa, Homo sapiens
  CDR3 for alpha chain variable domain of TCR clone 196231 (TRAV36/DV7, TRAJ38)
CVANAGNNRKLIW

SEQ ID NO: 392462 - protein, 12 aa, Homo sapiens
  CDR3 for beta chain variable domain of TCR clone 196231 (TRBV11-2, TRBJ2-1)
CASSPGNNEQFF

SEQ ID NO: 392463 - protein, 13 aa, Homo sapiens
  CDR3 for alpha chain variable domain of TCR clone 196232 (TRAV14/DV4, TRAJ16)
CAMREGSGQKLLF

SEQ ID NO: 392464 - protein, 15 aa, Homo sapiens
  CDR3 for beta chain variable domain of TCR clone 196232 (TRBV7-9, TRBJ2-7)
CASSLDLDRGYERYF

SEQ ID NO: 392465 - protein, 17 aa, Homo sapiens
  CDR3 for alpha chain variable domain of TCR clone 196233 (TRAV3, TRAJ42)
CAVRDRDYGGSQGNLIF

SEQ ID NO: 392466 - protein, 14 aa, Homo sapiens
  CDR3 for beta chain variable domain of TCR clone 196233 (TRBV10-3, TRBJ2-5)
CATSRDRDRETQYF

SEQ ID NO: 392467 - protein, 14 aa, Homo sapiens
  CDR3 for alpha chain variable domain of TCR clone 196234 (TRAV8-3, TRAJ7)
CVAIELYGNNRLAF

SEQ ID NO: 392468 - protein, 15 aa, Homo sapiens
  CDR3 for beta chain variable domain of TCR clone 196234 (TRBV3-1, TRBJ2-1)
CASSTGDTNYNEQFF

SEQ ID NO: 392469 - protein, 13 aa, Homo sapiens
  CDR3 for alpha chain variable domain of TCR clone 196235 (TRAV12-2, TRAJ9)
CAGGNTGGFKNIF

SEQ ID NO: 392470 - protein, 17 aa, Homo sapiens
  CDR3 for beta chain variable domain of TCR clone 196235 (TRBV4-1, TRBJ2-1)
CASSQGRGGGLYNEQFF

SEQ ID NO: 392471 - protein, 15 aa, Homo sapiens
  CDR3 for alpha chain variable domain of TCR clone 196236 (TRAV41, TRAJ45)
FAASYSGGGADGLTF

SEQ ID NO: 392472 - protein, 14 aa, Homo sapiens
  CDR3 for beta chain variable domain of TCR clone 196236 (TRBV12-5, TRBJ2-5)
CASGSRTHQETQYF

SEQ ID NO: 392473 - protein, 13 aa, Homo sapiens
  CDR3 for alpha chain variable domain of TCR clone 196237 (TRAV13-1, TRAJ5)
CAARVTGRRALTF

SEQ ID NO: 392474 - protein, 12 aa, Homo sapiens
  CDR3 for beta chain variable domain of TCR clone 196237 (TRBV7-9, TRBJ2-7)
CASSIKREEQYF

SEQ ID NO: 392475 - protein, 14 aa, Homo sapiens
  CDR3 for alpha chain variable domain of TCR clone 196238 (TRAV12-3, TRAJ10)
SHLPLTGGGNKLTF

SEQ ID NO: 392476 - protein, 15 aa, Homo sapiens
  CDR3 for beta chain variable domain of TCR clone 196238 (TRBV29-1, TRBJ2-6)
CSVGHRGSGANVLTF

SEQ ID NO: 392477 - protein, 17 aa, Homo sapiens
  CDR3 for alpha chain variable domain of TCR clone 196239 (TRAV23/DV6, TRAJ57)
CAASSTLSQGGSEKPVF

SEQ ID NO: 392478 - protein, 14 aa, Homo sapiens
  CDR3 for beta chain variable domain of TCR clone 196239 (TRBV25-1, TRBJ1-1)
CASTHLGGNTEAFF

SEQ ID NO: 392479 - protein, 11 aa, Homo sapiens
  CDR3 for alpha chain variable domain of TCR clone 196240 (TRAV2, TRAJ13)
CASGGYQKVTF

SEQ ID NO: 392480 - protein, 13 aa, Homo sapiens
  CDR3 for beta chain variable domain of TCR clone 196240 (TRBV14, TRBJ2-7)
CASSQDRRYEQYF

SEQ ID NO: 392481 - protein, 13 aa, Homo sapiens
  CDR3 for alpha chain variable domain of TCR clone 196241 (TRAV35, TRAJ42)
CAGFPGSQGNLIF

SEQ ID NO: 392482 - protein, 12 aa, Homo sapiens
  CDR3 for beta chain variable domain of TCR clone 196241 (TRBV28, TRBJ2-3)
CASSLYRDTQYF

SEQ ID NO: 392483 - protein, 15 aa, Homo sapiens
  CDR3 for alpha chain variable domain of TCR clone 196242 (TRAV8-3, TRAJ45)
CASPYSGGGADGPTF

SEQ ID NO: 392484 - protein, 15 aa, Homo sapiens
  CDR3 for beta chain variable domain of TCR clone 196242 (TRBV18, TRBJ1-1)
CASSPRQGENTEAFF

SEQ ID NO: 392485 - protein, 16 aa, Homo sapiens
  CDR3 for alpha chain variable domain of TCR clone 196243 (TRAV3, TRAJ40)
CAVRDRIASGTYKYIF

SEQ ID NO: 392486 - protein, 12 aa, Homo sapiens
  CDR3 for beta chain variable domain of TCR clone 196243 (TRBV19, TRBJ1-4)
CASKDWPGGLFF

SEQ ID NO: 392487 - protein, 17 aa, Homo sapiens
  CDR3 for alpha chain variable domain of TCR clone 196244 (TRAV3, TRAJ6)
CAVSDGPRAGGSYIPTF

SEQ ID NO: 392488 - protein, 16 aa, Homo sapiens
  CDR3 for beta chain variable domain of TCR clone 196244 (TRBV12-4, TRBJ2-7)
CASSLIGGTGTYEQYF

SEQ ID NO: 392489 - protein, 14 aa, Homo sapiens
  CDR3 for alpha chain variable domain of TCR clone 196245 (TRAV1-2, TRAJ16)
CAVNRFSDGQKLLF

SEQ ID NO: 392490 - protein, 16 aa, Homo sapiens
  CDR3 for beta chain variable domain of TCR clone 196245 (TRBV24-1, TRBJ1-5)
CATSESTGGSNQPQHF

SEQ ID NO: 392491 - protein, 13 aa, Homo sapiens
  CDR3 for alpha chain variable domain of TCR clone 196246 (TRAV12-3, TRAJ9)
CAMRDTGGFKTIF

SEQ ID NO: 392492 - protein, 14 aa, Homo sapiens
  CDR3 for beta chain variable domain of TCR clone 196246 (TRBV11-2, TRBJ2-7)
CASSATGEGYEQYF

SEQ ID NO: 392493 - protein, 13 aa, Homo sapiens
  CDR3 for alpha chain variable domain of TCR clone 196247 (TRAV1-2, TRAJ9)
CAALNTGGFKTIF

SEQ ID NO: 392494 - protein, 14 aa, Homo sapiens
  CDR3 for beta chain variable domain of TCR clone 196247 (TRBV7-9, TRBJ2-2)
CASSLVQDTGELFF

SEQ ID NO: 392495 - protein, 12 aa, Homo sapiens
  CDR3 for alpha chain variable domain of TCR clone 196248 (TRAV21, TRAJ31)
CAVWGNNARLMF

SEQ ID NO: 392496 - protein, 16 aa, Homo sapiens
  CDR3 for beta chain variable domain of TCR clone 196248 (TRBV27, TRBJ2-5)
CASSYGPGGEKETQYF

SEQ ID NO: 392497 - protein, 14 aa, Homo sapiens
  CDR3 for alpha chain variable domain of TCR clone 196249 (TRAV12-2, TRAJ13)
CAVKKTGGYQKVTF

SEQ ID NO: 392498 - protein, 14 aa, Homo sapiens
  CDR3 for beta chain variable domain of TCR clone 196249 (TRBV18, TRBJ2-7)
CANSPRGGAYEQYF

SEQ ID NO: 392499 - protein, 14 aa, Homo sapiens
  CDR3 for alpha chain variable domain of TCR clone 196250 (TRAV12-1, TRAJ17)
CVGNYKAAGNKLTF

SEQ ID NO: 392500 - protein, 17 aa, Homo sapiens
  CDR3 for beta chain variable domain of TCR clone 196250 (TRBV20-1, TRBJ2-1)
CSASSSGRAGSYNEQFF

SEQ ID NO: 392501 - protein, 13 aa, Homo sapiens
  CDR3 for alpha chain variable domain of TCR clone 196251 (TRAV8-6, TRAJ50)
CAVIKTSYDKVIF

SEQ ID NO: 392502 - protein, 15 aa, Homo sapiens
  CDR3 for beta chain variable domain of TCR clone 196251 (TRBV7-2, TRBJ2-2)
CASRRPGLNTGELFF

SEQ ID NO: 392503 - protein, 11 aa, Homo sapiens
  CDR3 for alpha chain variable domain of TCR clone 196252 (TRAV12-3, TRAJ43)
CAMSVSNDMRF

SEQ ID NO: 392504 - protein, 16 aa, Homo sapiens
  CDR3 for beta chain variable domain of TCR clone 196252 (TRBV20-1, TRBJ1-4)
CSAPGQGLLTNEKLFF

SEQ ID NO: 392505 - protein, 11 aa, Homo sapiens
  CDR3 for alpha chain variable domain of TCR clone 196253 (TRAV27, TRAJ47)
SIVEYENKLVF

SEQ ID NO: 392506 - protein, 18 aa, Homo sapiens
  CDR3 for beta chain variable domain of TCR clone 196253 (TRBV2, TRBJ2-1)
CASRGLAGGPRTYNEQFF

SEQ ID NO: 392507 - protein, 16 aa, Homo sapiens
  CDR3 for alpha chain variable domain of TCR clone 196254 (TRAV17, TRAJ53)
CTTDAPSGGSNYKLTF

SEQ ID NO: 392508 - protein, 12 aa, Homo sapiens
  CDR3 for beta chain variable domain of TCR clone 196254 (TRBV5-1, TRBJ2-7)
CASSFRGYEQYF

SEQ ID NO: 392509 - protein, 14 aa, Homo sapiens
  CDR3 for alpha chain variable domain of TCR clone 196255 (TRAV20, TRAJ20)
CAVRRGYNDYKLSF

SEQ ID NO: 392510 - protein, 12 aa, Homo sapiens
  CDR3 for beta chain variable domain of TCR clone 196255 (TRBV7-8, TRBJ2-7)
CASSLGDREQYF

SEQ ID NO: 392511 - protein, 14 aa, Homo sapiens
  CDR3 for alpha chain variable domain of TCR clone 196256 (TRAV8-3, TRAJ12)
CAVGARDSSYKLIF

SEQ ID NO: 392512 - protein, 16 aa, Homo sapiens
  CDR3 for beta chain variable domain of TCR clone 196256 (TRBV5-1, TRBJ1-2)
CASSLDVNRGSYGYTF

SEQ ID NO: 392513 - protein, 14 aa, Homo sapiens
  CDR3 for alpha chain variable domain of TCR clone 196257 (TRAV3, TRAJ5)
CCERQETGRRALTF

SEQ ID NO: 392514 - protein, 15 aa, Homo sapiens
  CDR3 for beta chain variable domain of TCR clone 196257 (TRBV7-8, TRBJ2-1)
CTSSLADSLYNKQFF

SEQ ID NO: 392515 - protein, 14 aa, Homo sapiens
  CDR3 for alpha chain variable domain of TCR clone 196258 (TRAV9-2, TRAJ39)
CALYIYNAGNMLTF

SEQ ID NO: 392516 - protein, 15 aa, Homo sapiens
  CDR3 for beta chain variable domain of TCR clone 196258 (TRBV29-1, TRBJ2-6)
CSVGDRGSGANDLTF

SEQ ID NO: 392517 - protein, 14 aa, Homo sapiens
  CDR3 for alpha chain variable domain of TCR clone 196259 (TRAV12-2, TRAJ33)
CAGKRARSNYQLTW

SEQ ID NO: 392518 - protein, 15 aa, Homo sapiens
  CDR3 for beta chain variable domain of TCR clone 196259 (TRBV20-1, TRBJ2-7)
CSARDRVSGMDEQYF

SEQ ID NO: 392519 - protein, 18 aa, Homo sapiens
  CDR3 for alpha chain variable domain of TCR clone 196260 (TRAV26-1, TRAJ5)
CIVRVVPPRDTGRRALTF

SEQ ID NO: 392520 - protein, 15 aa, Homo sapiens
  CDR3 for beta chain variable domain of TCR clone 196260 (TRBV7-9, TRBJ2-7)
CASSLPMGKANEQYF

SEQ ID NO: 392521 - protein, 12 aa, Homo sapiens
  CDR3 for alpha chain variable domain of TCR clone 196261 (TRAV23/DV6, TRAJ30)
CAESKGDDKIIF

SEQ ID NO: 392522 - protein, 18 aa, Homo sapiens
  CDR3 for beta chain variable domain of TCR clone 196261 (TRBV10-3, TRBJ2-3)
CAISESRVGPMRGDTQYF

SEQ ID NO: 392523 - protein, 11 aa, Homo sapiens
  CDR3 for alpha chain variable domain of TCR clone 196262 (TRAV21, TRAJ20)
CAVRADYKLSF

SEQ ID NO: 392524 - protein, 14 aa, Homo sapiens
  CDR3 for beta chain variable domain of TCR clone 196262 (TRBV12-4, TRBJ1-1)
CASSFSQMNTEAFF

SEQ ID NO: 392525 - protein, 16 aa, Homo sapiens
  CDR3 for alpha chain variable domain of TCR clone 196263 (TRAV12-1, TRAJ43)
CVVNPHRFGAGTRLTV

SEQ ID NO: 392526 - protein, 14 aa, Homo sapiens
  CDR3 for beta chain variable domain of TCR clone 196263 (TRBV5-1, TRBJ2-7)
CASSRGESLYEQYF

SEQ ID NO: 392527 - protein, 15 aa, Homo sapiens
  CDR3 for alpha chain variable domain of TCR clone 196264 (TRAV8-4, TRAJ40)
CAVGDDTSGTYKYIF

SEQ ID NO: 392528 - protein, 11 aa, Homo sapiens
  CDR3 for beta chain variable domain of TCR clone 196264 (TRBV19, TRBJ1-2)
CASSISSGYTF

SEQ ID NO: 392529 - protein, 15 aa, Homo sapiens
  CDR3 for alpha chain variable domain of TCR clone 196265 (TRAV12-2, TRAJ53)
CAVNGGGGSNYKLTL

SEQ ID NO: 392530 - protein, 15 aa, Homo sapiens
  CDR3 for beta chain variable domain of TCR clone 196265 (TRBV6-3, TRBJ2-7)
CASSSPGTVFYEQYF

SEQ ID NO: 392531 - protein, 12 aa, Homo sapiens
  CDR3 for alpha chain variable domain of TCR clone 196266 (TRAV21, TRAJ31)
CAVWGNNARLMF

SEQ ID NO: 392532 - protein, 15 aa, Homo sapiens
  CDR3 for beta chain variable domain of TCR clone 196266 (TRBV7-2, TRBJ2-2)
CASSLYRGTTGELFF

SEQ ID NO: 392533 - protein, 13 aa, Homo sapiens
  CDR3 for alpha chain variable domain of TCR clone 196267 (TRAV4, TRAJ22)
CLGGSGSARQLTF

SEQ ID NO: 392534 - protein, 15 aa, Homo sapiens
  CDR3 for beta chain variable domain of TCR clone 196267 (TRBV7-9, TRBJ1-6)
CASSAPGRGNSPRHF

SEQ ID NO: 392535 - protein, 12 aa, Homo sapiens
  CDR3 for alpha chain variable domain of TCR clone 196268 (TRAV25, TRAJ11)
CAGYSGYSTLTF

SEQ ID NO: 392536 - protein, 12 aa, Homo sapiens
  CDR3 for beta chain variable domain of TCR clone 196268 (TRBV28, TRBJ2-3)
CASSLYRDTQYF

SEQ ID NO: 392537 - protein, 12 aa, Homo sapiens
  CDR3 for alpha chain variable domain of TCR clone 196269 (TRAV1-1, TRAJ43)
CAPRVSSNDMSF

SEQ ID NO: 392538 - protein, 15 aa, Homo sapiens
  CDR3 for beta chain variable domain of TCR clone 196269 (TRBV5-1, TRBJ2-7)
CASSLGDFTTYEQYF

SEQ ID NO: 392539 - protein, 15 aa, Homo sapiens
  CDR3 for alpha chain variable domain of TCR clone 196270 (TRAV12-2, TRAJ53)
CAGNGGGGSNYKLTF

SEQ ID NO: 392540 - protein, 12 aa, Homo sapiens
  CDR3 for beta chain variable domain of TCR clone 196270 (TRBV11-2, TRBJ2-1)
CASSPGNNEQFL

SEQ ID NO: 392541 - protein, 11 aa, Homo sapiens
  CDR3 for alpha chain variable domain of TCR clone 196271 (TRAV13-2, TRAJ26)
CAEIPGQNFVF

SEQ ID NO: 392542 - protein, 19 aa, Homo sapiens
  CDR3 for beta chain variable domain of TCR clone 196271 (TRBV19, TRBJ2-2)
CASTRTGLAGGRVTGELFF

SEQ ID NO: 392543 - protein, 13 aa, Homo sapiens
  CDR3 for alpha chain variable domain of TCR clone 196272 (TRAV16, TRAJ53)
CALRGGSNYKLTF

SEQ ID NO: 392544 - protein, 11 aa, Homo sapiens
  CDR3 for beta chain variable domain of TCR clone 196272 (TRBV2, TRBJ2-4)
LQGGSKKIQYF

SEQ ID NO: 392545 - protein, 15 aa, Homo sapiens
  CDR3 for alpha chain variable domain of TCR clone 196273 (TRAV21, TRAJ34)
CAVRGPAYNTDKLIF

SEQ ID NO: 392546 - protein, 14 aa, Homo sapiens
  CDR3 for beta chain variable domain of TCR clone 196273 (TRBV5-5, TRBJ1-5)
CASSGQGVDQPQHF

SEQ ID NO: 392547 - protein, 17 aa, Homo sapiens
  CDR3 for alpha chain variable domain of TCR clone 196274 (TRAV26-1, TRAJ28)
CIVRVPGSGAGSYQLTF

SEQ ID NO: 392548 - protein, 17 aa, Homo sapiens
  CDR3 for beta chain variable domain of TCR clone 196274 (TRBV28, TRBJ2-7)
CASSPLPAGGKSYEQYF

SEQ ID NO: 392549 - protein, 13 aa, Homo sapiens
  CDR3 for alpha chain variable domain of TCR clone 196275 (TRAV3, TRAJ4)
CAVRDGGYDKLIF

SEQ ID NO: 392550 - protein, 14 aa, Homo sapiens
  CDR3 for beta chain variable domain of TCR clone 196275 (TRBV12-4, TRBJ1-2)
CASSSSAVGSSYTF

SEQ ID NO: 392551 - protein, 16 aa, Homo sapiens
  CDR3 for alpha chain variable domain of TCR clone 196276 (TRAV1-2, TRAJ10)
CAVRGVLTGGGNKLTF

SEQ ID NO: 392552 - protein, 16 aa, Homo sapiens
  CDR3 for beta chain variable domain of TCR clone 196276 (TRBV27, TRBJ2-7)
CASSWLGGRGSYEQYF

SEQ ID NO: 392553 - protein, 13 aa, Homo sapiens
  CDR3 for alpha chain variable domain of TCR clone 196277 (TRAV8-6, TRAJ49)
CAVITNTGNQFYF

SEQ ID NO: 392554 - protein, 14 aa, Homo sapiens
  CDR3 for beta chain variable domain of TCR clone 196277 (TRBV19, TRBJ2-7)
CASSIFAGTYEQYF

SEQ ID NO: 392555 - protein, 15 aa, Homo sapiens
  CDR3 for alpha chain variable domain of TCR clone 196278 (TRAV12-3, TRAJ42)
CAMITSVGSQGNLIF

SEQ ID NO: 392556 - protein, 16 aa, Homo sapiens
  CDR3 for beta chain variable domain of TCR clone 196278 (TRBV19, TRBJ2-1)
CASSKAGPSSYNEQFF

SEQ ID NO: 392557 - protein, 12 aa, Homo sapiens
  CDR3 for alpha chain variable domain of TCR clone 196279 (TRAV12-3, TRAJ17)
CAMTLTGNKLTF

SEQ ID NO: 392558 - protein, 15 aa, Homo sapiens
  CDR3 for beta chain variable domain of TCR clone 196279 (TRBV9, TRBJ1-6)
CASSVAGTGDSPLHV

SEQ ID NO: 392559 - protein, 10 aa, Homo sapiens
  CDR3 for alpha chain variable domain of TCR clone 196280 (TRAV8-4, TRAJ43)
CAVSADDMRF

SEQ ID NO: 392560 - protein, 15 aa, Homo sapiens
  CDR3 for beta chain variable domain of TCR clone 196280 (TRBV4-1, TRBJ1-4)
CASSDTGGTNEKLFF

SEQ ID NO: 392561 - protein, 18 aa, Homo sapiens
  CDR3 for alpha chain variable domain of TCR clone 196281 (TRAV12-3, TRAJ52)
FAMSVGGAGGTSYGKLTF

SEQ ID NO: 392562 - protein, 14 aa, Homo sapiens
  CDR3 for beta chain variable domain of TCR clone 196281 (TRBV7-2, TRBJ2-7)
CASRSQGAAYEQYF

SEQ ID NO: 392563 - protein, 12 aa, Homo sapiens
  CDR3 for alpha chain variable domain of TCR clone 196282 (TRAV12-3, TRAJ20)
CAMVRGDYKLSF

SEQ ID NO: 392564 - protein, 14 aa, Homo sapiens
  CDR3 for beta chain variable domain of TCR clone 196282 (TRBV7-3, TRBJ2-2)
CASSLNSNTGELFF

SEQ ID NO: 392565 - protein, 17 aa, Homo sapiens
  CDR3 for alpha chain variable domain of TCR clone 196283 (TRAV27, TRAJ52)
CAGAGWAGGTSYGKLTF

SEQ ID NO: 392566 - protein, 14 aa, Homo sapiens
  CDR3 for beta chain variable domain of TCR clone 196283 (TRBV19, TRBJ2-3)
CASSAPRGTDTQYF

SEQ ID NO: 392567 - protein, 16 aa, Homo sapiens
  CDR3 for alpha chain variable domain of TCR clone 196284 (TRAV3, TRAJ37)
CAVRPHGSGNTGKLIF

SEQ ID NO: 392568 - protein, 16 aa, Homo sapiens
  CDR3 for beta chain variable domain of TCR clone 196284 (TRBV9, TRBJ1-2)
CASSVEEKVSPYGQTF

SEQ ID NO: 392569 - protein, 15 aa, Homo sapiens
  CDR3 for alpha chain variable domain of TCR clone 196285 (TRAV26-2, TRAJ13)
CILRELSGGYQKVTF

SEQ ID NO: 392570 - protein, 11 aa, Homo sapiens
  CDR3 for beta chain variable domain of TCR clone 196285 (TRBV7-9, TRBJ2-3)
CASSYTDTQYF

SEQ ID NO: 392571 - protein, 14 aa, Homo sapiens
  CDR3 for alpha chain variable domain of TCR clone 196286 (TRAV8-3, TRAJ39)
CAVGANNAGHMLTF

SEQ ID NO: 392572 - protein, 12 aa, Homo sapiens
  CDR3 for beta chain variable domain of TCR clone 196286 (TRBV28, TRBJ1-3)
CASVSSGNTIYF

SEQ ID NO: 392573 - protein, 13 aa, Homo sapiens
  CDR3 for alpha chain variable domain of TCR clone 196287 (TRAV1-2, TRAJ9)
CAALNTGGFKPIF

SEQ ID NO: 392574 - protein, 13 aa, Homo sapiens
  CDR3 for beta chain variable domain of TCR clone 196287 (TRBV19, TRBJ1-2)
CASSVPGQDGCTF

SEQ ID NO: 392575 - protein, 11 aa, Homo sapiens
  CDR3 for alpha chain variable domain of TCR clone 196288 (TRAV2, TRAJ13)
CASGGYQKGTF

SEQ ID NO: 392576 - protein, 15 aa, Homo sapiens
  CDR3 for beta chain variable domain of TCR clone 196288 (TRBV5-4, TRBJ2-7)
CASSRFGTGSYEQYF

SEQ ID NO: 392577 - protein, 10 aa, Homo sapiens
  CDR3 for alpha chain variable domain of TCR clone 196289 (TRAV27, TRAJ37)
CAGGVGKLIF

SEQ ID NO: 392578 - protein, 13 aa, Homo sapiens
  CDR3 for beta chain variable domain of TCR clone 196289 (TRBV10-3, TRBJ2-7)
CASKLAVNYEQHF

SEQ ID NO: 392579 - protein, 10 aa, Homo sapiens
  CDR3 for alpha chain variable domain of TCR clone 196290 (TRAV13-1, TRAJ43)
CAASKNDMRV

SEQ ID NO: 392580 - protein, 13 aa, Homo sapiens
  CDR3 for beta chain variable domain of TCR clone 196290 (TRBV20-1, TRBJ1-5)
CSARTGVNQPQHF

SEQ ID NO: 392581 - protein, 14 aa, Homo sapiens
  CDR3 for alpha chain variable domain of TCR clone 196291 (TRAV12-3, TRAJ10)
SHLPLTGGGIKLTF

SEQ ID NO: 392582 - protein, 12 aa, Homo sapiens
  CDR3 for beta chain variable domain of TCR clone 196291 (TRBV7-9, TRBJ2-7)
CASSIKREEQYF

SEQ ID NO: 392583 - protein, 15 aa, Homo sapiens
  CDR3 for alpha chain variable domain of TCR clone 196292 (TRAV25, TRAJ52)
CAGRPGGTSYGKLTF

SEQ ID NO: 392584 - protein, 17 aa, Homo sapiens
  CDR3 for beta chain variable domain of TCR clone 196292 (TRBV7-3, TRBJ2-3)
CASSPGGLAGFGDTQYF

SEQ ID NO: 392585 - protein, 13 aa, Homo sapiens
  CDR3 for alpha chain variable domain of TCR clone 196293 (TRAV12-3, TRAJ53)
CAMRGGSNYKLTF

SEQ ID NO: 392586 - protein, 15 aa, Homo sapiens
  CDR3 for beta chain variable domain of TCR clone 196293 (TRBV6-3, TRBJ2-2)
CASSVDRANTGELFF

SEQ ID NO: 392587 - protein, 14 aa, Homo sapiens
  CDR3 for alpha chain variable domain of TCR clone 196294 (TRAV3, TRAJ16)
CCERLKSDGQKLLF

SEQ ID NO: 392588 - protein, 15 aa, Homo sapiens
  CDR3 for beta chain variable domain of TCR clone 196294 (TRBV28, TRBJ2-7)
CASSPGGRGFYEQYV

SEQ ID NO: 392589 - protein, 19 aa, Homo sapiens
  CDR3 for alpha chain variable domain of TCR clone 196295 (TRAV38-1, TRAJ53)
CAFMKHGLESGGSNFKLTF

SEQ ID NO: 392590 - protein, 13 aa, Homo sapiens
  CDR3 for beta chain variable domain of TCR clone 196295 (TRBV19, TRBJ2-7)
CASSPRQSYEQYF

SEQ ID NO: 392591 - protein, 12 aa, Homo sapiens
  CDR3 for alpha chain variable domain of TCR clone 196296 (TRAV21, TRAJ49)
CAVSWTGNQFYF

SEQ ID NO: 392592 - protein, 16 aa, Homo sapiens
  CDR3 for beta chain variable domain of TCR clone 196296 (TRBV19, TRBJ2-2)
CASRSPGTGATGELFF

SEQ ID NO: 392593 - protein, 15 aa, Homo sapiens
  CDR3 for alpha chain variable domain of TCR clone 196297 (TRAV26-1, TRAJ12)
IASSELMDSSYKLIF

SEQ ID NO: 392594 - protein, 13 aa, Homo sapiens
  CDR3 for beta chain variable domain of TCR clone 196297 (TRBV12-4, TRBJ1-2)
CASSLRQGKGYTF

SEQ ID NO: 392595 - protein, 14 aa, Homo sapiens
  CDR3 for alpha chain variable domain of TCR clone 196298 (TRAV17, TRAJ49)
CATDSRDTGNQFYF

SEQ ID NO: 392596 - protein, 14 aa, Homo sapiens
  CDR3 for beta chain variable domain of TCR clone 196298 (TRBV5-5, TRBJ1-2)
CASSFGQINYGYTL

SEQ ID NO: 392597 - protein, 13 aa, Homo sapiens
  CDR3 for alpha chain variable domain of TCR clone 196299 (TRAV12-2, TRAJ24)
CAVSTDSWGKLQF

SEQ ID NO: 392598 - protein, 14 aa, Homo sapiens
  CDR3 for beta chain variable domain of TCR clone 196299 (TRBV7-3, TRBJ2-1)
CASSLAGGTNEQFF

SEQ ID NO: 392599 - protein, 13 aa, Homo sapiens
  CDR3 for alpha chain variable domain of TCR clone 196300 (TRAV35, TRAJ42)
CAGFPGSQGNLIF

SEQ ID NO: 392600 - protein, 13 aa, Homo sapiens
  CDR3 for beta chain variable domain of TCR clone 196300 (TRBV10-3, TRBJ2-7)
CAAKLAVNYEQYF

SEQ ID NO: 392601 - protein, 13 aa, Homo sapiens
  CDR3 for alpha chain variable domain of TCR clone 196301 (TRAV1-1, TRAJ9)
CAAKNTGGFKTIF

SEQ ID NO: 392602 - protein, 17 aa, Homo sapiens
  CDR3 for beta chain variable domain of TCR clone 196301 (TRBV28, TRBJ2-5)
CASSTPEGDALQETQYF

SEQ ID NO: 392603 - protein, 16 aa, Homo sapiens
  CDR3 for alpha chain variable domain of TCR clone 196302 (TRAV3, TRAJ37)
CAVRPHGSGNTGKLIF

SEQ ID NO: 392604 - protein, 14 aa, Homo sapiens
  CDR3 for beta chain variable domain of TCR clone 196302 (TRBV25-1, TRBJ1-1)
CASTHLGGYTEAFF

SEQ ID NO: 392605 - protein, 13 aa, Homo sapiens
  CDR3 for alpha chain variable domain of TCR clone 196303 (TRAV8-3, TRAJ31)
CAVGARNNARRMF

SEQ ID NO: 392606 - protein, 17 aa, Homo sapiens
  CDR3 for beta chain variable domain of TCR clone 196303 (TRBV11-2, TRBJ2-1)
CASSLYPPGVEYNEQFF

SEQ ID NO: 392607 - protein, 10 aa, Homo sapiens
  CDR3 for alpha chain variable domain of TCR clone 196304 (TRAV12-2, TRAJ43)
CAVKVLSMRF

SEQ ID NO: 392608 - protein, 15 aa, Homo sapiens
  CDR3 for beta chain variable domain of TCR clone 196304 (TRBV5-1, TRBJ2-3)
CASSVTSGSTDTQYF

SEQ ID NO: 392609 - protein, 14 aa, Homo sapiens
  CDR3 for alpha chain variable domain of TCR clone 196305 (TRAV13-1, TRAJ9)
CAASALTGCFKTIF

SEQ ID NO: 392610 - protein, 16 aa, Homo sapiens
  CDR3 for beta chain variable domain of TCR clone 196305 (TRBV7-8, TRBJ2-4)
CASSAERTLAKNIQYF

SEQ ID NO: 392611 - protein, 13 aa, Homo sapiens
  CDR3 for alpha chain variable domain of TCR clone 196306 (TRAV13-1, TRAJ39)
CSKYSNAGNMLTF

SEQ ID NO: 392612 - protein, 14 aa, Homo sapiens
  CDR3 for beta chain variable domain of TCR clone 196306 (TRBV28, TRBJ2-4)
CASTQVTGVNIQYF

SEQ ID NO: 392613 - protein, 13 aa, Homo sapiens
  CDR3 for alpha chain variable domain of TCR clone 196307 (TRAV13-1, TRAJ43)
CAARLSNNNDMRF

SEQ ID NO: 392614 - protein, 14 aa, Homo sapiens
  CDR3 for beta chain variable domain of TCR clone 196307 (TRBV5-1, TRBJ2-5)
CASSLAGKQETQYF

SEQ ID NO: 392615 - protein, 15 aa, Homo sapiens
  CDR3 for alpha chain variable domain of TCR clone 196308 (TRAV3, TRAJ22)
CAVRDRGGSARQLTF

SEQ ID NO: 392616 - protein, 17 aa, Homo sapiens
  CDR3 for beta chain variable domain of TCR clone 196308 (TRBV24-1, TRBJ2-4)
CATSDAEARGVRNIQYF

SEQ ID NO: 392617 - protein, 11 aa, Homo sapiens
  CDR3 for alpha chain variable domain of TCR clone 196309 (TRAV12-1, TRAJ30)
CVVNGQGKIIF

SEQ ID NO: 392618 - protein, 12 aa, Homo sapiens
  CDR3 for beta chain variable domain of TCR clone 196309 (TRBV27, TRBJ2-2)
CASKLFTRELFF

SEQ ID NO: 392619 - protein, 14 aa, Homo sapiens
  CDR3 for alpha chain variable domain of TCR clone 196310 (TRAV12-3, TRAJ35)
CAMSLIGFGNGLHC

SEQ ID NO: 392620 - protein, 12 aa, Homo sapiens
  CDR3 for beta chain variable domain of TCR clone 196310 (TRBV12-4, TRBJ1-1)
CASSLAGLEAFF

SEQ ID NO: 392621 - protein, 16 aa, Homo sapiens
  CDR3 for alpha chain variable domain of TCR clone 196311 (TRAV12-3, TRAJ45)
CAMGWGSGGGADGLTF

SEQ ID NO: 392622 - protein, 13 aa, Homo sapiens
  CDR3 for beta chain variable domain of TCR clone 196311 (TRBV11-2, TRBJ1-1)
CASSLGNGAEAFF

SEQ ID NO: 392623 - protein, 12 aa, Homo sapiens
  CDR3 for alpha chain variable domain of TCR clone 196312 (TRAV13-2, TRAJ23)
CAERHRGGKLIF

SEQ ID NO: 392624 - protein, 13 aa, Homo sapiens
  CDR3 for beta chain variable domain of TCR clone 196312 (TRBV7-3, TRBJ2-5)
CASRFRGGETQYF

SEQ ID NO: 392625 - protein, 14 aa, Homo sapiens
  CDR3 for alpha chain variable domain of TCR clone 196313 (TRAV21, TRAJ35)
CAVMPIGFGNVLHC

SEQ ID NO: 392626 - protein, 14 aa, Homo sapiens
  CDR3 for beta chain variable domain of TCR clone 196313 (TRBV7-9, TRBJ2-7)
CASRSQGEAYEQYF

SEQ ID NO: 392627 - protein, 15 aa, Homo sapiens
  CDR3 for alpha chain variable domain of TCR clone 196314 (TRAV17, TRAJ42)
CATDHYGGSQGNLIF

SEQ ID NO: 392628 - protein, 13 aa, Homo sapiens
  CDR3 for beta chain variable domain of TCR clone 196314 (TRBV7-2, TRBJ1-5)
CASSFARDQPQHF

SEQ ID NO: 392629 - protein, 14 aa, Homo sapiens
  CDR3 for alpha chain variable domain of TCR clone 196315 (TRAV35, TRAJ42)
CCVPYGGSQGNLIF

SEQ ID NO: 392630 - protein, 18 aa, Homo sapiens
  CDR3 for beta chain variable domain of TCR clone 196315 (TRBV13, TRBJ2-6)
CAGSPMTSGGSGANVLTF

SEQ ID NO: 392631 - protein, 11 aa, Homo sapiens
  CDR3 for alpha chain variable domain of TCR clone 196316 (TRAV2, TRAJ33)
CAVDSNYQLIW

SEQ ID NO: 392632 - protein, 16 aa, Homo sapiens
  CDR3 for beta chain variable domain of TCR clone 196316 (TRBV5-4, TRBJ2-3)
CASQQPGAGGADTQYF

SEQ ID NO: 392633 - protein, 11 aa, Homo sapiens
  CDR3 for alpha chain variable domain of TCR clone 196317 (TRAV12-3, TRAJ27)
CAMANAGKSTF

SEQ ID NO: 392634 - protein, 16 aa, Homo sapiens
  CDR3 for beta chain variable domain of TCR clone 196317 (TRBV6-6, TRBJ2-7)
CASRASGRARSYEQYF

SEQ ID NO: 392635 - protein, 15 aa, Homo sapiens
  CDR3 for alpha chain variable domain of TCR clone 196318 (TRAV25, TRAJ23)
CAGVPIYNQGGKLIF

SEQ ID NO: 392636 - protein, 16 aa, Homo sapiens
  CDR3 for beta chain variable domain of TCR clone 196318 (TRBV7-9, TRBJ2-1)
CASSLVSGPSYNEQFF

SEQ ID NO: 392637 - protein, 12 aa, Homo sapiens
  CDR3 for alpha chain variable domain of TCR clone 196319 (TRAV12-3, TRAJ17)
CAMTLTGNKRTF

SEQ ID NO: 392638 - protein, 16 aa, Homo sapiens
  CDR3 for beta chain variable domain of TCR clone 196319 (TRBV20-1, TRBJ1-4)
CSAPGQGLLTNEKLFF

SEQ ID NO: 392639 - protein, 11 aa, Homo sapiens
  CDR3 for alpha chain variable domain of TCR clone 196320 (TRAV4, TRAJ23)
CHVAPGGKLIF

SEQ ID NO: 392640 - protein, 15 aa, Homo sapiens
  CDR3 for beta chain variable domain of TCR clone 196320 (TRBV7-2, TRBJ2-1)
CASSFQADEYNEQFF

SEQ ID NO: 392641 - protein, 16 aa, Homo sapiens
  CDR3 for alpha chain variable domain of TCR clone 196321 (TRAV3, TRAJ10)
CAVREMRAGGGNKLTF

SEQ ID NO: 392642 - protein, 15 aa, Homo sapiens
  CDR3 for beta chain variable domain of TCR clone 196321 (TRBV11-2, TRBJ1-6)
CASTGSGTAVSPLHF

SEQ ID NO: 392643 - protein, 12 aa, Homo sapiens
  CDR3 for alpha chain variable domain of TCR clone 196322 (TRAV22, TRAJ22)
CAPGGSARQLTL

SEQ ID NO: 392644 - protein, 15 aa, Homo sapiens
  CDR3 for beta chain variable domain of TCR clone 196322 (TRBV15, TRBJ1-6)
CATSGALIHPSTLGT

SEQ ID NO: 392645 - protein, 13 aa, Homo sapiens
  CDR3 for alpha chain variable domain of TCR clone 196323 (TRAV8-3, TRAJ44)
CAVVPGTASKLTF

SEQ ID NO: 392646 - protein, 15 aa, Homo sapiens
  CDR3 for beta chain variable domain of TCR clone 196323 (TRBV10-3, TRBJ2-7)
CATREQGLRSYEQYF

SEQ ID NO: 392647 - protein, 12 aa, Homo sapiens
  CDR3 for alpha chain variable domain of TCR clone 196324 (TRAV12-2, TRAJ21)
CAVRYNFNNLYF

SEQ ID NO: 392648 - protein, 14 aa, Homo sapiens
  CDR3 for beta chain variable domain of TCR clone 196324 (TRBV28, TRBJ2-1)
CASSYYTAYNEQFF

SEQ ID NO: 392649 - protein, 15 aa, Homo sapiens
  CDR3 for alpha chain variable domain of TCR clone 196325 (TRAV3, TRAJ29)
CAVRDLYSGNTPLVF

SEQ ID NO: 392650 - protein, 17 aa, Homo sapiens
  CDR3 for beta chain variable domain of TCR clone 196325 (TRBV20-1, TRBJ2-1)
GSARDPLAGVWDNEQFF

SEQ ID NO: 392651 - protein, 12 aa, Homo sapiens
  CDR3 for alpha chain variable domain of TCR clone 196326 (TRAV25, TRAJ7)
CAGSYGNNSLAF

SEQ ID NO: 392652 - protein, 12 aa, Homo sapiens
  CDR3 for beta chain variable domain of TCR clone 196326 (TRBV5-1, TRBJ1-2)
CASSQDTYGYTF

SEQ ID NO: 392653 - protein, 12 aa, Homo sapiens
  CDR3 for alpha chain variable domain of TCR clone 196327 (TRAV20, TRAJ39)
CAVGNAGNMLTF

SEQ ID NO: 392654 - protein, 15 aa, Homo sapiens
  CDR3 for beta chain variable domain of TCR clone 196327 (TRBV7-2, TRBJ2-1)
CASSSGLAGGNEQFF

SEQ ID NO: 392655 - protein, 14 aa, Homo sapiens
  CDR3 for alpha chain variable domain of TCR clone 196328 (TRAV20, TRAJ42)
CAVQAGGSQGNSIF

SEQ ID NO: 392656 - protein, 14 aa, Homo sapiens
  CDR3 for beta chain variable domain of TCR clone 196328 (TRBV28, TRBJ1-2)
CASRIQGANYGYTF

SEQ ID NO: 392657 - protein, 14 aa, Homo sapiens
  CDR3 for alpha chain variable domain of TCR clone 196329 (TRAV12-3, TRAJ10)
SHLPLTGGGNKLTF

SEQ ID NO: 392658 - protein, 15 aa, Homo sapiens
  CDR3 for beta chain variable domain of TCR clone 196329 (TRBV19, TRBJ2-1)
CASSMGSSSYNEQFF

SEQ ID NO: 392659 - protein, 13 aa, Homo sapiens
  CDR3 for alpha chain variable domain of TCR clone 196330 (TRAV27, TRAJ45)
CRSSRGGADGLTF

SEQ ID NO: 392660 - protein, 11 aa, Homo sapiens
  CDR3 for beta chain variable domain of TCR clone 196330 (TRBV19, TRBJ1-1)
CASSIGSEAFF

SEQ ID NO: 392661 - protein, 10 aa, Homo sapiens
  CDR3 for alpha chain variable domain of TCR clone 196331 (TRAV1-2, TRAJ31)
CVSEDARLMF

SEQ ID NO: 392662 - protein, 14 aa, Homo sapiens
  CDR3 for beta chain variable domain of TCR clone 196331 (TRBV19, TRBJ2-1)
CVSPTFVLSGEQFF

SEQ ID NO: 392663 - protein, 13 aa, Homo sapiens
  CDR3 for alpha chain variable domain of TCR clone 196332 (TRAV20, TRAJ37)
CAGCASNTGKLIF

SEQ ID NO: 392664 - protein, 17 aa, Homo sapiens
  CDR3 for beta chain variable domain of TCR clone 196332 (TRBV11-2, TRBJ2-1)
CASSLYPPGVEYNEQFF

SEQ ID NO: 392665 - protein, 14 aa, Homo sapiens
  CDR3 for alpha chain variable domain of TCR clone 196333 (TRAV1-1, TRAJ27)
FAVIYNTNAGKSTF

SEQ ID NO: 392666 - protein, 15 aa, Homo sapiens
  CDR3 for beta chain variable domain of TCR clone 196333 (TRBV7-2, TRBJ2-1)
CASSSELAGGNEQFF

SEQ ID NO: 392667 - protein, 14 aa, Homo sapiens
  CDR3 for alpha chain variable domain of TCR clone 196334 (TRAV12-3, TRAJ10)
SHVPLTGGGNKLTF

SEQ ID NO: 392668 - protein, 12 aa, Homo sapiens
  CDR3 for beta chain variable domain of TCR clone 196334 (TRBV7-9, TRBJ2-7)
CASSIKREAQYF

SEQ ID NO: 392669 - protein, 14 aa, Homo sapiens
  CDR3 for alpha chain variable domain of TCR clone 196335 (TRAV2, TRAJ37)
CAVDFTSNTGKLIF

SEQ ID NO: 392670 - protein, 14 aa, Homo sapiens
  CDR3 for beta chain variable domain of TCR clone 196335 (TRBV19, TRBJ2-1)
CASGKSTQYNEQFF

SEQ ID NO: 392671 - protein, 15 aa, Homo sapiens
  CDR3 for alpha chain variable domain of TCR clone 196336 (TRAV8-2, TRAJ24)
CVLSDRTDSWGKLQF

SEQ ID NO: 392672 - protein, 11 aa, Homo sapiens
  CDR3 for beta chain variable domain of TCR clone 196336 (TRBV20-1, TRBJ1-2)
CSVQGAGGYTL

SEQ ID NO: 392673 - protein, 12 aa, Homo sapiens
  CDR3 for alpha chain variable domain of TCR clone 196337 (TRAV2, TRAJ33)
CAVEDSNYQLIW

SEQ ID NO: 392674 - protein, 14 aa, Homo sapiens
  CDR3 for beta chain variable domain of TCR clone 196337 (TRBV19, TRBJ1-6)
CASSINRGGEKLFF

SEQ ID NO: 392675 - protein, 13 aa, Homo sapiens
  CDR3 for alpha chain variable domain of TCR clone 196338 (TRAV1-1, )
RAVRDRWLATTIS

SEQ ID NO: 392676 - protein, 12 aa, Homo sapiens
  CDR3 for beta chain variable domain of TCR clone 196338 (TRBV14, TRBJ1-1)
CASRPYETEAFF

SEQ ID NO: 392677 - protein, 14 aa, Homo sapiens
  CDR3 for alpha chain variable domain of TCR clone 196339 (TRAV12-2, TRAJ15)
CAPHTGPAGTALIF

SEQ ID NO: 392678 - protein, 14 aa, Homo sapiens
  CDR3 for beta chain variable domain of TCR clone 196339 (TRBV12-5, TRBJ2-5)
CASGSRTHQETQYF

SEQ ID NO: 392679 - protein, 15 aa, Homo sapiens
  CDR3 for alpha chain variable domain of TCR clone 196340 (TRAV26-1, TRAJ44)
FIVRANTGTASKHTF

SEQ ID NO: 392680 - protein, 16 aa, Homo sapiens
  CDR3 for beta chain variable domain of TCR clone 196340 (TRBV7-7, TRBJ2-1)
CASSLASGTSYNEQFF

SEQ ID NO: 392681 - protein, 13 aa, Homo sapiens
  CDR3 for alpha chain variable domain of TCR clone 196341 (TRAV12-1, TRAJ11)
CVVTRGGYCTLTF

SEQ ID NO: 392682 - protein, 13 aa, Homo sapiens
  CDR3 for beta chain variable domain of TCR clone 196341 (TRBV20-1, TRBJ1-2)
CSARDQGAYGYTF

SEQ ID NO: 392683 - protein, 11 aa, Homo sapiens
  CDR3 for alpha chain variable domain of TCR clone 196342 (TRAV26-2, TRAJ8)
CILTGFQKLEF

SEQ ID NO: 392684 - protein, 12 aa, Homo sapiens
  CDR3 for beta chain variable domain of TCR clone 196342 (TRBV12-4, TRBJ2-7)
CASSLGGYEQYF

SEQ ID NO: 392685 - protein, 15 aa, Homo sapiens
  CDR3 for alpha chain variable domain of TCR clone 196343 (TRAV26-1, TRAJ29)
CIVRVEGSGNTPLVF

SEQ ID NO: 392686 - protein, 15 aa, Homo sapiens
  CDR3 for beta chain variable domain of TCR clone 196343 (TRBV7-9, TRBJ1-5)
CASIQCHQPNQPQHF

SEQ ID NO: 392687 - protein, 16 aa, Homo sapiens
  CDR3 for alpha chain variable domain of TCR clone 196344 (TRAV12-1, TRAJ18)
CVVNPRGGSTLGRLYF

SEQ ID NO: 392688 - protein, 14 aa, Homo sapiens
  CDR3 for beta chain variable domain of TCR clone 196344 (TRBV27, TRBJ2-1)
CASRPMGQGGEQFF

SEQ ID NO: 392689 - protein, 14 aa, Homo sapiens
  CDR3 for alpha chain variable domain of TCR clone 196345 (TRAV1-2, TRAJ8)
CAVREDTGFQKRVF

SEQ ID NO: 392690 - protein, 16 aa, Homo sapiens
  CDR3 for beta chain variable domain of TCR clone 196345 (TRBV20-1, TRBJ2-4)
CSARAILAGQGDIQYF

SEQ ID NO: 392691 - protein, 14 aa, Homo sapiens
  CDR3 for alpha chain variable domain of TCR clone 196346 (TRAV12-3, TRAJ10)
SHLPLTGGGNKLTF

SEQ ID NO: 392692 - protein, 16 aa, Homo sapiens
  CDR3 for beta chain variable domain of TCR clone 196346 (TRBV19, TRBJ2-1)
CASSKAGPRSYNEQFF

SEQ ID NO: 392693 - protein, 12 aa, Homo sapiens
  CDR3 for alpha chain variable domain of TCR clone 196347 (TRAV3, TRAJ26)
CAVRLWSEFFLW

SEQ ID NO: 392694 - protein, 16 aa, Homo sapiens
  CDR3 for beta chain variable domain of TCR clone 196347 (TRBV11-2, TRBJ1-2)
CASSPSGREANYGYTF

SEQ ID NO: 392695 - protein, 13 aa, Homo sapiens
  CDR3 for alpha chain variable domain of TCR clone 196348 (TRAV2, TRAJ40)
CAVVTSGNYKCIF

SEQ ID NO: 392696 - protein, 14 aa, Homo sapiens
  CDR3 for beta chain variable domain of TCR clone 196348 (TRBV19, TRBJ2-1)
CASPTFVLSGEQFF

SEQ ID NO: 392697 - protein, 15 aa, Homo sapiens
  CDR3 for alpha chain variable domain of TCR clone 196349 (TRAV23/DV6, )
CAADIQNPDPAVYQL

SEQ ID NO: 392698 - protein, 14 aa, Homo sapiens
  CDR3 for beta chain variable domain of TCR clone 196349 (TRBV5-7, TRBJ1-6)
CASSFALHNSPLHF

SEQ ID NO: 392699 - protein, 14 aa, Homo sapiens
  CDR3 for alpha chain variable domain of TCR clone 196350 (TRAV12-1, TRAJ38)
CVVNDAGNNRKLIW

SEQ ID NO: 392700 - protein, 20 aa, Homo sapiens
  CDR3 for beta chain variable domain of TCR clone 196350 (TRBV7-8, TRBJ2-2)
CASSHLFPGPTIHITGELFF

SEQ ID NO: 392701 - protein, 12 aa, Homo sapiens
  CDR3 for alpha chain variable domain of TCR clone 196351 (TRAV27, TRAJ35)
CAGADCGNVLHF

SEQ ID NO: 392702 - protein, 16 aa, Homo sapiens
  CDR3 for beta chain variable domain of TCR clone 196351 (TRBV6-1, TRBJ2-1)
CASISRQGSSYNEQFF

SEQ ID NO: 392703 - protein, 12 aa, Homo sapiens
  CDR3 for alpha chain variable domain of TCR clone 196352 (TRAV21, TRAJ13)
PGPSAGYQKVTF

SEQ ID NO: 392704 - protein, 15 aa, Homo sapiens
  CDR3 for beta chain variable domain of TCR clone 196352 (TRBV27, TRBJ2-1)
CASSNGGGSSNEQFF

SEQ ID NO: 392705 - protein, 16 aa, Homo sapiens
  CDR3 for alpha chain variable domain of TCR clone 196353 (TRAV30, TRAJ24)
CGTEIVGAESWGKFQF

SEQ ID NO: 392706 - protein, 14 aa, Homo sapiens
  CDR3 for beta chain variable domain of TCR clone 196353 (TRBV12-5, TRBJ2-5)
CASGSRTRQETQYF

SEQ ID NO: 392707 - protein, 14 aa, Homo sapiens
  CDR3 for alpha chain variable domain of TCR clone 196354 (TRAV1-2, TRAJ8)
CAVREDTGFQKLVF

SEQ ID NO: 392708 - protein, 13 aa, Homo sapiens
  CDR3 for beta chain variable domain of TCR clone 196354 (TRBV20-1, TRBJ1-2)
CSARDQGAYGYTF

SEQ ID NO: 392709 - protein, 16 aa, Homo sapiens
  CDR3 for alpha chain variable domain of TCR clone 196355 (TRAV26-1, TRAJ58)
IASSESGETSGSRLTF

SEQ ID NO: 392710 - protein, 17 aa, Homo sapiens
  CDR3 for beta chain variable domain of TCR clone 196355 (TRBV13, TRBJ2-3)
CASSLSRVAGGRNTQYF

SEQ ID NO: 392711 - protein, 13 aa, Homo sapiens
  CDR3 for alpha chain variable domain of TCR clone 196356 (TRAV12-3, TRAJ40)
CAMSDSGTYKYIF

SEQ ID NO: 392712 - protein, 14 aa, Homo sapiens
  CDR3 for beta chain variable domain of TCR clone 196356 (TRBV7-2, TRBJ1-5)
CASSTQGAGQPQHI

SEQ ID NO: 392713 - protein, 12 aa, Homo sapiens
  CDR3 for alpha chain variable domain of TCR clone 196357 (TRAV21, TRAJ13)
PRPSGGYQKVTF

SEQ ID NO: 392714 - protein, 15 aa, Homo sapiens
  CDR3 for beta chain variable domain of TCR clone 196357 (TRBV7-9, TRBJ1-6)
CASSSPGRGNSPLHF

SEQ ID NO: 392715 - protein, 13 aa, Homo sapiens
  CDR3 for alpha chain variable domain of TCR clone 196358 (TRAV13-1, TRAJ6)
CAATSGGSYIPTF

SEQ ID NO: 392716 - protein, 15 aa, Homo sapiens
  CDR3 for beta chain variable domain of TCR clone 196358 (TRBV12-4, TRBJ2-5)
CASSPPTGLQETQYF

SEQ ID NO: 392717 - protein, 12 aa, Homo sapiens
  CDR3 for alpha chain variable domain of TCR clone 196359 (TRAV21, TRAJ49)
CAVTNTGNQFYF

SEQ ID NO: 392718 - protein, 16 aa, Homo sapiens
  CDR3 for beta chain variable domain of TCR clone 196359 (TRBV19, TRBJ2-1)
CASSKAGPSSYNEQFF

SEQ ID NO: 392719 - protein, 13 aa, Homo sapiens
  CDR3 for alpha chain variable domain of TCR clone 196360 (TRAV38-1, TRAJ42)
CARWGGSQGNLIF

SEQ ID NO: 392720 - protein, 10 aa, Homo sapiens
  CDR3 for beta chain variable domain of TCR clone 196360 (TRBV2, TRBJ2-5)
WASSAATQYF

SEQ ID NO: 392721 - protein, 13 aa, Homo sapiens
  CDR3 for alpha chain variable domain of TCR clone 196361 (TRAV21, TRAJ10)
CAVRPGGGNKLTF

SEQ ID NO: 392722 - protein, 11 aa, Homo sapiens
  CDR3 for beta chain variable domain of TCR clone 196361 (TRBV2, TRBJ2-2)
CASSPYGELFF

SEQ ID NO: 392723 - protein, 10 aa, Homo sapiens
  CDR3 for alpha chain variable domain of TCR clone 196362 (TRAV23/DV6, TRAJ57)
CAASSTVSRG

SEQ ID NO: 392724 - protein, 14 aa, Homo sapiens
  CDR3 for beta chain variable domain of TCR clone 196362 (TRBV25-1, TRBJ1-1)
CASTHLGGNTEAFF

SEQ ID NO: 392725 - protein, 10 aa, Homo sapiens
  CDR3 for alpha chain variable domain of TCR clone 196363 (TRAV8-3, TRAJ43)
CAVALADMRF

SEQ ID NO: 392726 - protein, 13 aa, Homo sapiens
  CDR3 for beta chain variable domain of TCR clone 196363 (TRBV10-3, TRBJ2-7)
CASKLAVNYEQYF

SEQ ID NO: 392727 - protein, 14 aa, Homo sapiens
  CDR3 for alpha chain variable domain of TCR clone 196364 (TRAV12-3, TRAJ43)
CAMRLGGAGTRLTV

SEQ ID NO: 392728 - protein, 13 aa, Homo sapiens
  CDR3 for beta chain variable domain of TCR clone 196364 (TRBV7-9, TRBJ1-2)
CASSLKQNYGYTF

SEQ ID NO: 392729 - protein, 11 aa, Homo sapiens
  CDR3 for alpha chain variable domain of TCR clone 196365 (TRAV23/DV6, TRAJ58)
CAARLLRGETS

SEQ ID NO: 392730 - protein, 17 aa, Homo sapiens
  CDR3 for beta chain variable domain of TCR clone 196365 (TRBV19, TRBJ1-1)
ISVPVVGGGALNTEAFF

SEQ ID NO: 392731 - protein, 14 aa, Homo sapiens
  CDR3 for alpha chain variable domain of TCR clone 196366 (TRAV2, TRAJ9)
CAVEDRSGGFKTII

SEQ ID NO: 392732 - protein, 17 aa, Homo sapiens
  CDR3 for beta chain variable domain of TCR clone 196366 (TRBV20-1, TRBJ2-7)
CSATRAGGVAGVEEQYF

SEQ ID NO: 392733 - protein, 14 aa, Homo sapiens
  CDR3 for alpha chain variable domain of TCR clone 196367 (TRAV8-3, TRAJ46)
CAVGAGSSGDKLTF

SEQ ID NO: 392734 - protein, 13 aa, Homo sapiens
  CDR3 for beta chain variable domain of TCR clone 196367 (TRBV11-2, TRBJ2-7)
CASSFQGVYEQYF

SEQ ID NO: 392735 - protein, 15 aa, Homo sapiens
  CDR3 for alpha chain variable domain of TCR clone 196368 (TRAV26-1, TRAJ29)
CIVRVEGSGNTPLVF

SEQ ID NO: 392736 - protein, 15 aa, Homo sapiens
  CDR3 for beta chain variable domain of TCR clone 196368 (TRBV7-9, TRBJ1-5)
CASSQGYQPNQPQNF

SEQ ID NO: 392737 - protein, 11 aa, Homo sapiens
  CDR3 for alpha chain variable domain of TCR clone 196369 (TRAV12-2, TRAJ18)
CAVTTDRGSTL

SEQ ID NO: 392738 - protein, 14 aa, Homo sapiens
  CDR3 for beta chain variable domain of TCR clone 196369 (TRBV4-2, TRBJ1-5)
CASSQDSINQPQHF

SEQ ID NO: 392739 - protein, 12 aa, Homo sapiens
  CDR3 for alpha chain variable domain of TCR clone 196370 (TRAV4, TRAJ26)
CLVGDYGQNFVF

SEQ ID NO: 392740 - protein, 16 aa, Homo sapiens
  CDR3 for beta chain variable domain of TCR clone 196370 (TRBV7-2, TRBJ1-2)
CASRSNQDRRGHGYTF

SEQ ID NO: 392741 - protein, 14 aa, Homo sapiens
  CDR3 for alpha chain variable domain of TCR clone 196371 (TRAV23/DV6, TRAJ4)
CAANLSGGYNKLIF

SEQ ID NO: 392742 - protein, 14 aa, Homo sapiens
  CDR3 for beta chain variable domain of TCR clone 196371 (TRBV7-2, TRBJ2-7)
CASSPKTSFYEQYF

SEQ ID NO: 392743 - protein, 14 aa, Homo sapiens
  CDR3 for alpha chain variable domain of TCR clone 196372 (TRAV12-1, TRAJ3)
CVVNTGSSASKIIF

SEQ ID NO: 392744 - protein, 18 aa, Homo sapiens
  CDR3 for beta chain variable domain of TCR clone 196372 (TRBV4-2, TRBJ1-2)
CASSQDKVGHTVNYGYTF

SEQ ID NO: 392745 - protein, 13 aa, Homo sapiens
  CDR3 for alpha chain variable domain of TCR clone 196373 (TRAV2, TRAJ23)
FAVMGNQGGKLIF

SEQ ID NO: 392746 - protein, 14 aa, Homo sapiens
  CDR3 for beta chain variable domain of TCR clone 196373 (TRBV11-2, TRBJ2-1)
CASSRATSYNEQFF

SEQ ID NO: 392747 - protein, 14 aa, Homo sapiens
  CDR3 for alpha chain variable domain of TCR clone 196374 (TRAV14/DV4, TRAJ7)
CAMRETYGNNRLAF

SEQ ID NO: 392748 - protein, 15 aa, Homo sapiens
  CDR3 for beta chain variable domain of TCR clone 196374 (TRBV19, TRBJ2-1)
CASSINREPSHEQFF

SEQ ID NO: 392749 - protein, 13 aa, Homo sapiens
  CDR3 for alpha chain variable domain of TCR clone 196375 (TRAV27, TRAJ57)
CRSAQGGSEKLVF

SEQ ID NO: 392750 - protein, 11 aa, Homo sapiens
  CDR3 for beta chain variable domain of TCR clone 196375 (TRBV11-2, TRBJ1-1)
YASSINTEAFF

SEQ ID NO: 392751 - protein, 13 aa, Homo sapiens
  CDR3 for alpha chain variable domain of TCR clone 196376 (TRAV29/DV5, TRAJ44)
CAASTGTASKLTF

SEQ ID NO: 392752 - protein, 15 aa, Homo sapiens
  CDR3 for beta chain variable domain of TCR clone 196376 (TRBV9, TRBJ2-1)
CASSLAGSSYNEQFF

SEQ ID NO: 392753 - protein, 14 aa, Homo sapiens
  CDR3 for alpha chain variable domain of TCR clone 196377 (TRAV1-2, TRAJ8)
CAVREDTGFQKLVF

SEQ ID NO: 392754 - protein, 13 aa, Homo sapiens
  CDR3 for beta chain variable domain of TCR clone 196377 (TRBV7-9, TRBJ1-4)
CASSLPGIEKLFF

SEQ ID NO: 392755 - protein, 19 aa, Homo sapiens
  CDR3 for alpha chain variable domain of TCR clone 196378 (TRAV8-3, TRAJ45)
LSTSVLWVRSGGGADGLTF

SEQ ID NO: 392756 - protein, 14 aa, Homo sapiens
  CDR3 for beta chain variable domain of TCR clone 196378 (TRBV4-1, TRBJ2-2)
CASSQAVNTGELFF

SEQ ID NO: 392757 - protein, 18 aa, Homo sapiens
  CDR3 for alpha chain variable domain of TCR clone 196379 (TRAV26-1, TRAJ23)
CIVRVGLEVWIQGGKLIF

SEQ ID NO: 392758 - protein, 15 aa, Homo sapiens
  CDR3 for beta chain variable domain of TCR clone 196379 (TRBV10-3, TRBJ2-3)
CAISDWDRDTDTQYF

SEQ ID NO: 392759 - protein, 12 aa, Homo sapiens
  CDR3 for alpha chain variable domain of TCR clone 196380 (TRAV21, TRAJ33)
CAKMDSNNQLIW

SEQ ID NO: 392760 - protein, 14 aa, Homo sapiens
  CDR3 for beta chain variable domain of TCR clone 196380 (TRBV2, TRBJ2-7)
CASSLTSGCYEQYF

SEQ ID NO: 392761 - protein, 14 aa, Homo sapiens
  CDR3 for alpha chain variable domain of TCR clone 196381 (TRAV21, TRAJ35)
CAVMPIGFGNVLHC

SEQ ID NO: 392762 - protein, 12 aa, Homo sapiens
  CDR3 for beta chain variable domain of TCR clone 196381 (TRBV7-9, TRBJ2-7)
CASCIKREEQYF

SEQ ID NO: 392763 - protein, 14 aa, Homo sapiens
  CDR3 for alpha chain variable domain of TCR clone 196382 (TRAV8-4, TRAJ37)
CAVSDSSNTGKLIF

SEQ ID NO: 392764 - protein, 14 aa, Homo sapiens
  CDR3 for beta chain variable domain of TCR clone 196382 (TRBV19, TRBJ2-1)
CASPTFVLSGEQFF

SEQ ID NO: 392765 - protein, 15 aa, Homo sapiens
  CDR3 for alpha chain variable domain of TCR clone 196383 (TRAV26-1, TRAJ29)
CIVRVEGSGNKPLGF

SEQ ID NO: 392766 - protein, 15 aa, Homo sapiens
  CDR3 for beta chain variable domain of TCR clone 196383 (TRBV7-9, TRBJ1-5)
CASSQGHQPNQPQHF

SEQ ID NO: 392767 - protein, 14 aa, Homo sapiens
  CDR3 for alpha chain variable domain of TCR clone 196384 (TRAV1-2, TRAJ8)
CAVREDTGFQELVF

SEQ ID NO: 392768 - protein, 16 aa, Homo sapiens
  CDR3 for beta chain variable domain of TCR clone 196384 (TRBV13, TRBJ2-2)
CASSPRTGEHTGELFF

SEQ ID NO: 392769 - protein, 14 aa, Homo sapiens
  CDR3 for alpha chain variable domain of TCR clone 196385 (TRAV12-1, TRAJ12)
CVVNRPDSSDKLIF

SEQ ID NO: 392770 - protein, 15 aa, Homo sapiens
  CDR3 for beta chain variable domain of TCR clone 196385 (TRBV5-1, TRBJ1-1)
CASSLGMGTSTEAFF

SEQ ID NO: 392771 - protein, 12 aa, Homo sapiens
  CDR3 for alpha chain variable domain of TCR clone 196386 (TRAV1-2, TRAJ33)
CAALDSNYQLIW

SEQ ID NO: 392772 - protein, 15 aa, Homo sapiens
  CDR3 for beta chain variable domain of TCR clone 196386 (TRBV7-9, TRBJ2-2)
CASGPLDTFPGELFF

SEQ ID NO: 392773 - protein, 15 aa, Homo sapiens
  CDR3 for alpha chain variable domain of TCR clone 196387 (TRAV20, TRAJ4)
CAVQIFSGGYNKLIF

SEQ ID NO: 392774 - protein, 14 aa, Homo sapiens
  CDR3 for beta chain variable domain of TCR clone 196387 (TRBV7-6, TRBJ2-3)
CASNSGGDANTQYF

SEQ ID NO: 392775 - protein, 12 aa, Homo sapiens
  CDR3 for alpha chain variable domain of TCR clone 196388 (TRAV5, TRAJ37)
CAETPHTGKLIF

SEQ ID NO: 392776 - protein, 17 aa, Homo sapiens
  CDR3 for beta chain variable domain of TCR clone 196388 (TRBV29-1, TRBJ2-3)
CSVNAIRASGGVDTQYF

SEQ ID NO: 392777 - protein, 16 aa, Homo sapiens
  CDR3 for alpha chain variable domain of TCR clone 196389 (TRAV21, TRAJ45)
CAVSWGSGGGADGLTF

SEQ ID NO: 392778 - protein, 14 aa, Homo sapiens
  CDR3 for beta chain variable domain of TCR clone 196389 (TRBV4-2, TRBJ1-2)
CASSSGGSNYGYTF

SEQ ID NO: 392779 - protein, 14 aa, Homo sapiens
  CDR3 for alpha chain variable domain of TCR clone 196390 (TRAV12-2, TRAJ44)
CAVNPAGTASKPTF

SEQ ID NO: 392780 - protein, 16 aa, Homo sapiens
  CDR3 for beta chain variable domain of TCR clone 196390 (TRBV2, TRBJ2-6)
CASSEVGGAGANVLTF

SEQ ID NO: 392781 - protein, 12 aa, Homo sapiens
  CDR3 for alpha chain variable domain of TCR clone 196391 (TRAV27, TRAJ34)
CAGAKNTDKLIF

SEQ ID NO: 392782 - protein, 17 aa, Homo sapiens
  CDR3 for beta chain variable domain of TCR clone 196391 (TRBV7-8, TRBJ2-6)
CASSAGTGGAGANVLTF

SEQ ID NO: 392783 - protein, 14 aa, Homo sapiens
  CDR3 for alpha chain variable domain of TCR clone 196392 (TRAV12-3, TRAJ10)
SHLPLTRGGNKLTF

SEQ ID NO: 392784 - protein, 15 aa, Homo sapiens
  CDR3 for beta chain variable domain of TCR clone 196392 (TRBV27, TRBJ1-5)
CASSLGTGFDQPQHF

SEQ ID NO: 392785 - protein, 17 aa, Homo sapiens
  CDR3 for alpha chain variable domain of TCR clone 196393 (TRAV26-1, TRAJ57)
CIVRPRFTQGGSEKLAF

SEQ ID NO: 392786 - protein, 16 aa, Homo sapiens
  CDR3 for beta chain variable domain of TCR clone 196393 (TRBV13, TRBJ2-2)
CASSEVFGANTGELFF

SEQ ID NO: 392787 - protein, 18 aa, Homo sapiens
  CDR3 for alpha chain variable domain of TCR clone 196394 (TRAV26-1, TRAJ5)
CIVRVVPPRDTGRRALTF

SEQ ID NO: 392788 - protein, 15 aa, Homo sapiens
  CDR3 for beta chain variable domain of TCR clone 196394 (TRBV7-9, TRBJ2-7)
CASSLQMGQANEQYF

SEQ ID NO: 392789 - protein, 12 aa, Homo sapiens
  CDR3 for alpha chain variable domain of TCR clone 196395 (TRAV21, TRAJ27)
CASNTNAGKSTF

SEQ ID NO: 392790 - protein, 15 aa, Homo sapiens
  CDR3 for beta chain variable domain of TCR clone 196395 (TRBV6-3, TRBJ2-7)
CASSSPGTVFCEQYF

SEQ ID NO: 392791 - protein, 12 aa, Homo sapiens
  CDR3 for alpha chain variable domain of TCR clone 196396 (TRAV29/DV5, TRAJ41)
CAAISSGYALNF

SEQ ID NO: 392792 - protein, 17 aa, Homo sapiens
  CDR3 for beta chain variable domain of TCR clone 196396 (TRBV18, TRBJ2-1)
CASSKGLSGGADNGQFF

SEQ ID NO: 392793 - protein, 13 aa, Homo sapiens
  CDR3 for alpha chain variable domain of TCR clone 196397 (TRAV27, TRAJ49)
CTPRPYTGNQFYF

SEQ ID NO: 392794 - protein, 16 aa, Homo sapiens
  CDR3 for beta chain variable domain of TCR clone 196397 (TRBV4-1, TRBJ1-2)
CASSQDAGQVLYGYTF

SEQ ID NO: 392795 - protein, 16 aa, Homo sapiens
  CDR3 for alpha chain variable domain of TCR clone 196398 (TRAV3, TRAJ37)
CAVRVRGSGNTGKLIF

SEQ ID NO: 392796 - protein, 11 aa, Homo sapiens
  CDR3 for beta chain variable domain of TCR clone 196398 (TRBV11-2, TRBJ2-2)
CASSLPGELCF

SEQ ID NO: 392797 - protein, 16 aa, Homo sapiens
  CDR3 for alpha chain variable domain of TCR clone 196399 (TRAV8-3, TRAJ13)
CAVGAYPPGGYQKVTF

SEQ ID NO: 392798 - protein, 15 aa, Homo sapiens
  CDR3 for beta chain variable domain of TCR clone 196399 (TRBV19, TRBJ1-5)
CASSIVWADKQPQHF

SEQ ID NO: 392799 - protein, 14 aa, Homo sapiens
  CDR3 for alpha chain variable domain of TCR clone 196400 (TRAV13-1, TRAJ35)
CAASKGGIGNVLHC

SEQ ID NO: 392800 - protein, 15 aa, Homo sapiens
  CDR3 for beta chain variable domain of TCR clone 196400 (TRBV2, TRBJ2-7)
CASTLLGSGATEQYF

SEQ ID NO: 392801 - protein, 13 aa, Homo sapiens
  CDR3 for alpha chain variable domain of TCR clone 196401 (TRAV38-1, TRAJ42)
CARWGGSQGNLIF

SEQ ID NO: 392802 - protein, 15 aa, Homo sapiens
  CDR3 for beta chain variable domain of TCR clone 196401 (TRBV10-2, TRBJ2-5)
CASSEPDRVQETQYF

SEQ ID NO: 392803 - protein, 15 aa, Homo sapiens
  CDR3 for alpha chain variable domain of TCR clone 196402 (TRAV12-2, TRAJ53)
CAVNGGGGSNYKLTC

SEQ ID NO: 392804 - protein, 14 aa, Homo sapiens
  CDR3 for beta chain variable domain of TCR clone 196402 (TRBV12-5, TRBJ2-5)
CASGSRTHQETQYF

SEQ ID NO: 392805 - protein, 19 aa, Homo sapiens
  CDR3 for alpha chain variable domain of TCR clone 196403 (TRAV2, TRAJ20)
ILQVRGADAAVYRDCKLSF

SEQ ID NO: 392806 - protein, 16 aa, Homo sapiens
  CDR3 for beta chain variable domain of TCR clone 196403 (TRBV19, TRBJ2-1)
CASSKAGPSSYNEQFF

SEQ ID NO: 392807 - protein, 14 aa, Homo sapiens
  CDR3 for alpha chain variable domain of TCR clone 196404 (TRAV1-2, TRAJ8)
CAMREDTGFQKLVF

SEQ ID NO: 392808 - protein, 14 aa, Homo sapiens
  CDR3 for beta chain variable domain of TCR clone 196404 (TRBV6-1, TRBJ1-3)
CASVQGGGGNTVYF

SEQ ID NO: 392809 - protein, 13 aa, Homo sapiens
  CDR3 for alpha chain variable domain of TCR clone 196405 (TRAV21, TRAJ58)
CAVPRTSGSRLTF

SEQ ID NO: 392810 - protein, 14 aa, Homo sapiens
  CDR3 for beta chain variable domain of TCR clone 196405 (TRBV19, TRBJ2-2)
CASSTLHRSGELFF

SEQ ID NO: 392811 - protein, 13 aa, Homo sapiens
  CDR3 for alpha chain variable domain of TCR clone 196406 (TRAV1-2, TRAJ9)
CAALNTGGFKTIF

SEQ ID NO: 392812 - protein, 14 aa, Homo sapiens
  CDR3 for beta chain variable domain of TCR clone 196406 (TRBV11-2, TRBJ1-3)
CASSLAVPGNTIYF

SEQ ID NO: 392813 - protein, 15 aa, Homo sapiens
  CDR3 for alpha chain variable domain of TCR clone 196407 (TRAV38-1, TRAJ45)
CAFMKGGGGADVLTF

SEQ ID NO: 392814 - protein, 13 aa, Homo sapiens
  CDR3 for beta chain variable domain of TCR clone 196407 (TRBV7-9, TRBJ1-2)
CASSLKQNYGYTF

SEQ ID NO: 392815 - protein, 15 aa, Homo sapiens
  CDR3 for alpha chain variable domain of TCR clone 196408 (TRAV23/DV6, TRAJ44)
CAARTLTGTASKLTF

SEQ ID NO: 392816 - protein, 17 aa, Homo sapiens
  CDR3 for beta chain variable domain of TCR clone 196408 (TRBV24-1, TRBJ2-1)
CATSDVSTSGAYNEQFF

SEQ ID NO: 392817 - protein, 14 aa, Homo sapiens
  CDR3 for alpha chain variable domain of TCR clone 196409 (TRAV21, TRAJ28)
YAVGSGAGSYQLTF

SEQ ID NO: 392818 - protein, 14 aa, Homo sapiens
  CDR3 for beta chain variable domain of TCR clone 196409 (TRBV18, TRBJ1-4)
CASSPGPNGEKLFF

SEQ ID NO: 392819 - protein, 14 aa, Homo sapiens
  CDR3 for alpha chain variable domain of TCR clone 196410 (TRAV13-1, TRAJ35)
CAASKGGFGNVLHC

SEQ ID NO: 392820 - protein, 16 aa, Homo sapiens
  CDR3 for beta chain variable domain of TCR clone 196410 (TRBV5-1, TRBJ2-3)
CASSLGLAVYTDTQYF

SEQ ID NO: 392821 - protein, 17 aa, Homo sapiens
  CDR3 for alpha chain variable domain of TCR clone 196411 (TRAV4, TRAJ18)
CLVGERSVGSTLGRLYF

SEQ ID NO: 392822 - protein, 15 aa, Homo sapiens
  CDR3 for beta chain variable domain of TCR clone 196411 (TRBV19, TRBJ2-7)
CASSIGGGLVNEQYF

SEQ ID NO: 392823 - protein, 15 aa, Homo sapiens
  CDR3 for alpha chain variable domain of TCR clone 196412 (TRAV1-1, TRAJ24)
CALSGGTDSWGKFQV

SEQ ID NO: 392824 - protein, 16 aa, Homo sapiens
  CDR3 for beta chain variable domain of TCR clone 196412 (TRBV2, TRBJ2-7)
CASSEPWTGPSYEQYF

SEQ ID NO: 392825 - protein, 10 aa, Homo sapiens
  CDR3 for alpha chain variable domain of TCR clone 196413 (TRAV17, TRAJ31)
CATDEARLMF

SEQ ID NO: 392826 - protein, 13 aa, Homo sapiens
  CDR3 for beta chain variable domain of TCR clone 196413 (TRBV14, TRBJ1-6)
CASSQSIYSPLHF

SEQ ID NO: 392827 - protein, 13 aa, Homo sapiens
  CDR3 for alpha chain variable domain of TCR clone 196414 (TRAV26-2, TRAJ53)
CILSGGSNYKLTF

SEQ ID NO: 392828 - protein, 13 aa, Homo sapiens
  CDR3 for beta chain variable domain of TCR clone 196414 (TRBV10-3, TRBJ2-7)
CASKLAVNYEQYF

SEQ ID NO: 392829 - protein, 16 aa, Homo sapiens
  CDR3 for alpha chain variable domain of TCR clone 196415 (TRAV12-2, TRAJ10)
CDVNRVLTGGGNKLTF

SEQ ID NO: 392830 - protein, 12 aa, Homo sapiens
  CDR3 for beta chain variable domain of TCR clone 196415 (TRBV28, TRBJ2-7)
CASSFSSYGQYF

SEQ ID NO: 392831 - protein, 15 aa, Homo sapiens
  CDR3 for alpha chain variable domain of TCR clone 196416 (TRAV3, TRAJ3)
CAVRDMSSSASKIIF

SEQ ID NO: 392832 - protein, 16 aa, Homo sapiens
  CDR3 for beta chain variable domain of TCR clone 196416 (TRBV19, TRBJ2-2)
CASSFPGQGLAGELFF

SEQ ID NO: 392833 - protein, 14 aa, Homo sapiens
  CDR3 for alpha chain variable domain of TCR clone 196417 (TRAV1-2, TRAJ8)
CAVREDTGFQKLVF

SEQ ID NO: 392834 - protein, 18 aa, Homo sapiens
  CDR3 for beta chain variable domain of TCR clone 196417 (TRBV11-2, TRBJ2-3)
CASSLEGASRGAPNTQYF

SEQ ID NO: 392835 - protein, 18 aa, Homo sapiens
  CDR3 for alpha chain variable domain of TCR clone 196418 (TRAV13-1, TRAJ52)
CAAKNHNAGGTSYRKLTF

SEQ ID NO: 392836 - protein, 16 aa, Homo sapiens
  CDR3 for beta chain variable domain of TCR clone 196418 (TRBV27, TRBJ2-2)
CASSFRGLVRTGELFF

SEQ ID NO: 392837 - protein, 12 aa, Homo sapiens
  CDR3 for alpha chain variable domain of TCR clone 196419 (TRAV12-3, TRAJ32)
CAGGGATNKLIF

SEQ ID NO: 392838 - protein, 14 aa, Homo sapiens
  CDR3 for beta chain variable domain of TCR clone 196419 (TRBV7-9, TRBJ2-2)
CASSGLADTGELFF

SEQ ID NO: 392839 - protein, 13 aa, Homo sapiens
  CDR3 for alpha chain variable domain of TCR clone 196420 (TRAV38-1, TRAJ42)
CARWGGSQGIPTF

SEQ ID NO: 392840 - protein, 17 aa, Homo sapiens
  CDR3 for beta chain variable domain of TCR clone 196420 (TRBV20-1, TRBJ2-1)
CSARDPLAGVWDNEQFF

SEQ ID NO: 392841 - protein, 16 aa, Homo sapiens
  CDR3 for alpha chain variable domain of TCR clone 196421 (TRAV4, TRAJ18)
CCVLLIGGSTLGRLYF

SEQ ID NO: 392842 - protein, 15 aa, Homo sapiens
  CDR3 for beta chain variable domain of TCR clone 196421 (TRBV7-6, TRBJ1-2)
CASSSGGRGGYGYTF

SEQ ID NO: 392843 - protein, 15 aa, Homo sapiens
  CDR3 for alpha chain variable domain of TCR clone 196422 (TRAV12-3, TRAJ49)
CAMAVTPNTGNQFYS

SEQ ID NO: 392844 - protein, 18 aa, Homo sapiens
  CDR3 for beta chain variable domain of TCR clone 196422 (TRBV4-1, TRBJ1-5)
CASSQDPRGQGLNQPQHF

SEQ ID NO: 392845 - protein, 19 aa, Homo sapiens
  CDR3 for alpha chain variable domain of TCR clone 196423 (TRAV1-2, TRAJ26)
CLLPLCCERHDNYGQNFVF

SEQ ID NO: 392846 - protein, 15 aa, Homo sapiens
  CDR3 for beta chain variable domain of TCR clone 196423 (TRBV9, TRBJ1-6)
CASSVAGTGDSPLHF

SEQ ID NO: 392847 - protein, 14 aa, Homo sapiens
  CDR3 for alpha chain variable domain of TCR clone 196424 (TRAV12-2, TRAJ44)
CAVNKAGTASKLTF

SEQ ID NO: 392848 - protein, 15 aa, Homo sapiens
  CDR3 for beta chain variable domain of TCR clone 196424 (TRBV10-3, TRBJ2-3)
CAISLTSGGTDTQYF

SEQ ID NO: 392849 - protein, 12 aa, Homo sapiens
  CDR3 for alpha chain variable domain of TCR clone 196425 (TRAV21, TRAJ29)
CAVTSGNTPLVF

SEQ ID NO: 392850 - protein, 15 aa, Homo sapiens
  CDR3 for beta chain variable domain of TCR clone 196425 (TRBV10-2, TRBJ2-6)
CVSSEQGTGANVLTF

SEQ ID NO: 392851 - protein, 15 aa, Homo sapiens
  CDR3 for alpha chain variable domain of TCR clone 196426 (TRAV26-2, TRAJ21)
CIFSNTTSTNFTLDL

SEQ ID NO: 392852 - protein, 16 aa, Homo sapiens
  CDR3 for beta chain variable domain of TCR clone 196426 (TRBV4-2, TRBJ2-6)
CASSQARSSGANDLTF

SEQ ID NO: 392853 - protein, 14 aa, Homo sapiens
  CDR3 for alpha chain variable domain of TCR clone 196427 (TRAV17, TRAJ31)
CATVLWNNNARLMF

SEQ ID NO: 392854 - protein, 14 aa, Homo sapiens
  CDR3 for beta chain variable domain of TCR clone 196427 (TRBV12-4, TRBJ2-5)
CASSLWQKQETQYF

SEQ ID NO: 392855 - protein, 15 aa, Homo sapiens
  CDR3 for alpha chain variable domain of TCR clone 196428 (TRAV8-3, TRAJ32)
CAVGPYGGATNKLIF

SEQ ID NO: 392856 - protein, 13 aa, Homo sapiens
  CDR3 for beta chain variable domain of TCR clone 196428 (TRBV7-9, TRBJ1-2)
CASSLKQNYGYTF

SEQ ID NO: 392857 - protein, 15 aa, Homo sapiens
  CDR3 for alpha chain variable domain of TCR clone 196429 (TRAV26-1, TRAJ44)
CTARVPFGPASKLTF

SEQ ID NO: 392858 - protein, 15 aa, Homo sapiens
  CDR3 for beta chain variable domain of TCR clone 196429 (TRBV20-1, TRBJ1-1)
CSASRGVTGNTEAFF

SEQ ID NO: 392859 - protein, 15 aa, Homo sapiens
  CDR3 for alpha chain variable domain of TCR clone 196430 (TRAV8-4, TRAJ47)
CAVRDLLGHGNKLVF

SEQ ID NO: 392860 - protein, 16 aa, Homo sapiens
  CDR3 for beta chain variable domain of TCR clone 196430 (TRBV19, TRBJ2-2)
CASSPSGGLNTGELFF

SEQ ID NO: 392861 - protein, 14 aa, Homo sapiens
  CDR3 for alpha chain variable domain of TCR clone 196431 (TRAV27, TRAJ22)
CAGLPSGSAGQLTF

SEQ ID NO: 392862 - protein, 15 aa, Homo sapiens
  CDR3 for beta chain variable domain of TCR clone 196431 (TRBV7-6, TRBJ1-2)
CASSSGGRGGYGYTF

SEQ ID NO: 392863 - protein, 14 aa, Homo sapiens
  CDR3 for alpha chain variable domain of TCR clone 196432 (TRAV23/DV6, TRAJ39)
CAASMSGAGNMLTF

SEQ ID NO: 392864 - protein, 14 aa, Homo sapiens
  CDR3 for beta chain variable domain of TCR clone 196432 (TRBV10-3, TRBJ2-3)
CAISVTRSRDTQYF

SEQ ID NO: 392865 - protein, 15 aa, Homo sapiens
  CDR3 for alpha chain variable domain of TCR clone 196433 (TRAV1-2, TRAJ15)
CAVDVMGSTRTALIF

SEQ ID NO: 392866 - protein, 13 aa, Homo sapiens
  CDR3 for beta chain variable domain of TCR clone 196433 (TRBV7-2, TRBJ2-5)
CASSQTSVETQYF

SEQ ID NO: 392867 - protein, 14 aa, Homo sapiens
  CDR3 for alpha chain variable domain of TCR clone 196434 (TRAV13-1, TRAJ35)
CAASKGGFGNGLHC

SEQ ID NO: 392868 - protein, 15 aa, Homo sapiens
  CDR3 for beta chain variable domain of TCR clone 196434 (TRBV15, TRBJ2-1)
CATSRADRGHNEQFF

SEQ ID NO: 392869 - protein, 15 aa, Homo sapiens
  CDR3 for alpha chain variable domain of TCR clone 196435 (TRAV26-1, TRAJ39)
CIVRDGSNAGNMLTF

SEQ ID NO: 392870 - protein, 16 aa, Homo sapiens
  CDR3 for beta chain variable domain of TCR clone 196435 (TRBV7-2, TRBJ1-3)
CASSSLEASSGNTIYF

SEQ ID NO: 392871 - protein, 13 aa, Homo sapiens
  CDR3 for alpha chain variable domain of TCR clone 196436 (TRAV8-6, TRAJ49)
CAVIMNTGNQFYF

SEQ ID NO: 392872 - protein, 14 aa, Homo sapiens
  CDR3 for beta chain variable domain of TCR clone 196436 (TRBV19, TRBJ2-1)
CASPTFVLSGEQFF

SEQ ID NO: 392873 - protein, 12 aa, Homo sapiens
  CDR3 for alpha chain variable domain of TCR clone 196437 (TRAV2, TRAJ34)
CAVERNTDKLIF

SEQ ID NO: 392874 - protein, 13 aa, Homo sapiens
  CDR3 for beta chain variable domain of TCR clone 196437 (TRBV29-1, TRBJ1-1)
CSVGDSRNTEAFF

SEQ ID NO: 392875 - protein, 15 aa, Homo sapiens
  CDR3 for alpha chain variable domain of TCR clone 196438 (TRAV27, TRAJ38)
CAARRNAGNNRKLIL

SEQ ID NO: 392876 - protein, 13 aa, Homo sapiens
  CDR3 for beta chain variable domain of TCR clone 196438 (TRBV12-5, TRBJ2-3)
CASGDRQSDTQYL

SEQ ID NO: 392877 - protein, 13 aa, Homo sapiens
  CDR3 for alpha chain variable domain of TCR clone 196439 (TRAV27, TRAJ29)
CAGAHSGNTPLVF

SEQ ID NO: 392878 - protein, 15 aa, Homo sapiens
  CDR3 for beta chain variable domain of TCR clone 196439 (TRBV15, TRBJ1-4)
CATSRDMGCYEKLFF

SEQ ID NO: 392879 - protein, 13 aa, Homo sapiens
  CDR3 for alpha chain variable domain of TCR clone 196440 (TRAV13-1, TRAJ40)
CAARSSGTYKYIF

SEQ ID NO: 392880 - protein, 15 aa, Homo sapiens
  CDR3 for beta chain variable domain of TCR clone 196440 (TRBV6-3, TRBJ2-7)
CASSSPGTVFYEQYF

SEQ ID NO: 392881 - protein, 15 aa, Homo sapiens
  CDR3 for alpha chain variable domain of TCR clone 196441 (TRAV21, TRAJ53)
CATLNSGGSNDKLTF

SEQ ID NO: 392882 - protein, 13 aa, Homo sapiens
  CDR3 for beta chain variable domain of TCR clone 196441 (TRBV12-4, TRBJ2-5)
CASSPGTEETQYF

SEQ ID NO: 392883 - protein, 17 aa, Homo sapiens
  CDR3 for alpha chain variable domain of TCR clone 196442 (TRAV2, TRAJ36)
CAVEDRGNWGKQPLLWD

SEQ ID NO: 392884 - protein, 14 aa, Homo sapiens
  CDR3 for beta chain variable domain of TCR clone 196442 (TRBV7-2, TRBJ2-7)
CASSPKTSFYEQYF

SEQ ID NO: 392885 - protein, 15 aa, Homo sapiens
  CDR3 for alpha chain variable domain of TCR clone 196443 (TRAV3, TRAJ22)
CAVRDRGGSARQLTF

SEQ ID NO: 392886 - protein, 13 aa, Homo sapiens
  CDR3 for beta chain variable domain of TCR clone 196443 (TRBV11-2, TRBJ2-5)
CASSRGPSETQYF

SEQ ID NO: 392887 - protein, 15 aa, Homo sapiens
  CDR3 for alpha chain variable domain of TCR clone 196444 (TRAV20, TRAJ53)
CAVQASGGSNYKLTF

SEQ ID NO: 392888 - protein, 12 aa, Homo sapiens
  CDR3 for beta chain variable domain of TCR clone 196444 (TRBV7-6, TRBJ2-5)
CASSVGQETQYF

SEQ ID NO: 392889 - protein, 22 aa, Homo sapiens
  CDR3 for alpha chain variable domain of TCR clone 196445 (TRAV26-1, TRAJ30)
CIVRVRTEMTRSSLEKGHDFIF

SEQ ID NO: 392890 - protein, 18 aa, Homo sapiens
  CDR3 for beta chain variable domain of TCR clone 196445 (TRBV4-1, TRBJ1-5)
CASSHDPRGQGLNQPQHF

SEQ ID NO: 392891 - protein, 13 aa, Homo sapiens
  CDR3 for alpha chain variable domain of TCR clone 196446 (TRAV21, TRAJ15)
CAVRNHAGTALIF

SEQ ID NO: 392892 - protein, 16 aa, Homo sapiens
  CDR3 for beta chain variable domain of TCR clone 196446 (TRBV20-1, TRBJ2-5)
CSPGGTSGGYMETQYF

SEQ ID NO: 392893 - protein, 14 aa, Homo sapiens
  CDR3 for alpha chain variable domain of TCR clone 196447 (TRAV17, TRAJ22)
CATSPSGSARQLTF

SEQ ID NO: 392894 - protein, 11 aa, Homo sapiens
  CDR3 for beta chain variable domain of TCR clone 196447 (TRBV29-1, TRBJ2-5)
CSEDRTGTQYF

SEQ ID NO: 392895 - protein, 14 aa, Homo sapiens
  CDR3 for alpha chain variable domain of TCR clone 196448 (TRAV1-2, TRAJ8)
CAAREDTGFQKLVF

SEQ ID NO: 392896 - protein, 15 aa, Homo sapiens
  CDR3 for beta chain variable domain of TCR clone 196448 (TRBV6-3, TRBJ2-7)
CASSSPVTVFYEQYF

SEQ ID NO: 392897 - protein, 14 aa, Homo sapiens
  CDR3 for alpha chain variable domain of TCR clone 196449 (TRAV6, TRAJ37)
CARGSQGNTGKLIF

SEQ ID NO: 392898 - protein, 15 aa, Homo sapiens
  CDR3 for beta chain variable domain of TCR clone 196449 (TRBV2, TRBJ2-1)
CASSEEREGDNEQFF

SEQ ID NO: 392899 - protein, 23 aa, Homo sapiens
  CDR3 for alpha chain variable domain of TCR clone 196450 (TRAV3, TRAJ38)
CAVSDCLNAGNNHIQNPDPAVYH

SEQ ID NO: 392900 - protein, 13 aa, Homo sapiens
  CDR3 for beta chain variable domain of TCR clone 196450 (TRBV12-4, TRBJ1-2)
CASSLRQVKGYTF

SEQ ID NO: 392901 - protein, 13 aa, Homo sapiens
  CDR3 for alpha chain variable domain of TCR clone 196451 (TRAV13-1, TRAJ6)
CAPRRGGSYIPTF

SEQ ID NO: 392902 - protein, 16 aa, Homo sapiens
  CDR3 for beta chain variable domain of TCR clone 196451 (TRBV7-9, TRBJ2-2)
CASSLATGVGTGELFF

SEQ ID NO: 392903 - protein, 13 aa, Homo sapiens
  CDR3 for alpha chain variable domain of TCR clone 196452 (TRAV13-1, TRAJ11)
CAAVLAGYSTLTF

SEQ ID NO: 392904 - protein, 16 aa, Homo sapiens
  CDR3 for beta chain variable domain of TCR clone 196452 (TRBV6-1, TRBJ2-5)
CASSETLDRGAETQYF

SEQ ID NO: 392905 - protein, 16 aa, Homo sapiens
  CDR3 for alpha chain variable domain of TCR clone 196453 (TRAV27, TRAJ53)
CAAPEGSGGSNYKLTF

SEQ ID NO: 392906 - protein, 14 aa, Homo sapiens
  CDR3 for beta chain variable domain of TCR clone 196453 (TRBV4-3, TRBJ1-5)
CASSQGGQGWPQDF

SEQ ID NO: 392907 - protein, 14 aa, Homo sapiens
  CDR3 for alpha chain variable domain of TCR clone 196454 (TRAV12-2, TRAJ40)
CAVKIPSGTYKYIF

SEQ ID NO: 392908 - protein, 12 aa, Homo sapiens
  CDR3 for beta chain variable domain of TCR clone 196454 (TRBV7-3, TRBJ2-1)
CASSFINNEQFF

SEQ ID NO: 392909 - protein, 15 aa, Homo sapiens
  CDR3 for alpha chain variable domain of TCR clone 196455 (TRAV16, TRAJ10)
CALEGLTGGGNKVTV

SEQ ID NO: 392910 - protein, 14 aa, Homo sapiens
  CDR3 for beta chain variable domain of TCR clone 196455 (TRBV7-6, TRBJ2-3)
CASSLGTVTDTQYF

SEQ ID NO: 392911 - protein, 14 aa, Homo sapiens
  CDR3 for alpha chain variable domain of TCR clone 196456 (TRAV14/DV4, TRAJ15)
CAMRRDQAGTALIF

SEQ ID NO: 392912 - protein, 16 aa, Homo sapiens
  CDR3 for beta chain variable domain of TCR clone 196456 (TRBV12-5, TRBJ2-5)
CASGPRTSGNQETQYS

SEQ ID NO: 392913 - protein, 12 aa, Homo sapiens
  CDR3 for alpha chain variable domain of TCR clone 196457 (TRAV12-3, TRAJ17)
CAMMPTGNKLTF

SEQ ID NO: 392914 - protein, 15 aa, Homo sapiens
  CDR3 for beta chain variable domain of TCR clone 196457 (TRBV20-1, TRBJ2-7)
CSARDRVSGMDEQYF

SEQ ID NO: 392915 - protein, 12 aa, Homo sapiens
  CDR3 for alpha chain variable domain of TCR clone 196458 (TRAV12-1, TRAJ30)
CVVNPRDDKIIF

SEQ ID NO: 392916 - protein, 17 aa, Homo sapiens
  CDR3 for beta chain variable domain of TCR clone 196458 (TRBV20-1, TRBJ2-2)
CSASGSGQGGLTGELFF

SEQ ID NO: 392917 - protein, 14 aa, Homo sapiens
  CDR3 for alpha chain variable domain of TCR clone 196459 (TRAV12-1, TRAJ26)
CVVKGSNYGQNFVF

SEQ ID NO: 392918 - protein, 16 aa, Homo sapiens
  CDR3 for beta chain variable domain of TCR clone 196459 (TRBV12-5, TRBJ2-5)
CASGPRTSGNQETQCF

SEQ ID NO: 392919 - protein, 15 aa, Homo sapiens
  CDR3 for alpha chain variable domain of TCR clone 196460 (TRAV17, TRAJ22)
CATVAPSGSARQLTF

SEQ ID NO: 392920 - protein, 16 aa, Homo sapiens
  CDR3 for beta chain variable domain of TCR clone 196460 (TRBV10-3, TRBJ2-7)
CAISADSADRPYEQYF

SEQ ID NO: 392921 - protein, 14 aa, Homo sapiens
  CDR3 for alpha chain variable domain of TCR clone 196461 (TRAV12-1, TRAJ17)
RVVNYKAAGNKLTF

SEQ ID NO: 392922 - protein, 15 aa, Homo sapiens
  CDR3 for beta chain variable domain of TCR clone 196461 (TRBV20-1, TRBJ2-7)
CSARDRVSGMDEQYF

SEQ ID NO: 392923 - protein, 18 aa, Homo sapiens
  CDR3 for alpha chain variable domain of TCR clone 196462 (TRAV12-3, TRAJ52)
CAMSVGGAGGTSYGKLTF

SEQ ID NO: 392924 - protein, 13 aa, Homo sapiens
  CDR3 for beta chain variable domain of TCR clone 196462 (TRBV7-9, TRBJ2-2)
CASSLDPTGELFF

SEQ ID NO: 392925 - protein, 15 aa, Homo sapiens
  CDR3 for alpha chain variable domain of TCR clone 196463 (TRAV3, TRAJ5)
CAVRGLDTGRRALTF

SEQ ID NO: 392926 - protein, 13 aa, Homo sapiens
  CDR3 for beta chain variable domain of TCR clone 196463 (TRBV12-4, TRBJ2-7)
CASGPTETYEQYF

SEQ ID NO: 392927 - protein, 17 aa, Homo sapiens
  CDR3 for alpha chain variable domain of TCR clone 196464 (TRAV3, TRAJ6)
CAVRDGPRAGGSYIPTF

SEQ ID NO: 392928 - protein, 13 aa, Homo sapiens
  CDR3 for beta chain variable domain of TCR clone 196464 (TRBV7-9, TRBJ1-2)
CASSLKQNYGYTL

SEQ ID NO: 392929 - protein, 14 aa, Homo sapiens
  CDR3 for alpha chain variable domain of TCR clone 196465 (TRAV12-1, TRAJ38)
CVVNDAGNNRKLIW

SEQ ID NO: 392930 - protein, 13 aa, Homo sapiens
  CDR3 for beta chain variable domain of TCR clone 196465 (TRBV7-9, TRBJ2-7)
CASSLKAGQEQYF

SEQ ID NO: 392931 - protein, 14 aa, Homo sapiens
  CDR3 for alpha chain variable domain of TCR clone 196466 (TRAV21, TRAJ35)
CAVMPIGFGNVLHC

SEQ ID NO: 392932 - protein, 12 aa, Homo sapiens
  CDR3 for beta chain variable domain of TCR clone 196466 (TRBV7-9, TRBJ2-7)
CASSIKREEQYS

SEQ ID NO: 392933 - protein, 14 aa, Homo sapiens
  CDR3 for alpha chain variable domain of TCR clone 196467 (TRAV9-2, TRAJ39)
CALYIYTSGNMLTF

SEQ ID NO: 392934 - protein, 14 aa, Homo sapiens
  CDR3 for beta chain variable domain of TCR clone 196467 (TRBV7-9, TRBJ2-1)
CASSPRDSLYEQFF

SEQ ID NO: 392935 - protein, 12 aa, Homo sapiens
  CDR3 for alpha chain variable domain of TCR clone 196468 (TRAV12-3, TRAJ17)
CAMTLTGNKLTF

SEQ ID NO: 392936 - protein, 17 aa, Homo sapiens
  CDR3 for beta chain variable domain of TCR clone 196468 (TRBV28, TRBJ2-7)
CASSPLPAGGKSYEQYF

SEQ ID NO: 392937 - protein, 15 aa, Homo sapiens
  CDR3 for alpha chain variable domain of TCR clone 196469 (TRAV8-3, TRAJ20)
CAVEAQGSNDYKLSF

SEQ ID NO: 392938 - protein, 15 aa, Homo sapiens
  CDR3 for beta chain variable domain of TCR clone 196469 (TRBV28, TRBJ2-5)
CASSSGRTIQETQYF

SEQ ID NO: 392939 - protein, 11 aa, Homo sapiens
  CDR3 for alpha chain variable domain of TCR clone 196470 (TRAV13-1, TRAJ5)
CAPKGRRALTF

SEQ ID NO: 392940 - protein, 13 aa, Homo sapiens
  CDR3 for beta chain variable domain of TCR clone 196470 (TRBV7-9, TRBJ1-2)
CASSLKQNYGYTF

SEQ ID NO: 392941 - protein, 12 aa, Homo sapiens
  CDR3 for alpha chain variable domain of TCR clone 196471 (TRAV3, TRAJ43)
CAVRDPNNDMRF

SEQ ID NO: 392942 - protein, 14 aa, Homo sapiens
  CDR3 for beta chain variable domain of TCR clone 196471 (TRBV11-2, TRBJ2-7)
CASSLGAGAYEQYF

SEQ ID NO: 392943 - protein, 14 aa, Homo sapiens
  CDR3 for alpha chain variable domain of TCR clone 196472 (TRAV12-2, TRAJ18)
CAVKRGSTLGRLYF

SEQ ID NO: 392944 - protein, 14 aa, Homo sapiens
  CDR3 for beta chain variable domain of TCR clone 196472 (TRBV20-1, TRBJ2-1)
CSAQIGGSANEQFF

SEQ ID NO: 392945 - protein, 12 aa, Homo sapiens
  CDR3 for alpha chain variable domain of TCR clone 196473 (TRAV30, TRAJ43)
CGTEERGNDMRF

SEQ ID NO: 392946 - protein, 13 aa, Homo sapiens
  CDR3 for beta chain variable domain of TCR clone 196473 (TRBV12-4, TRBJ1-2)
CASSSGSKDGYIF

SEQ ID NO: 392947 - protein, 16 aa, Homo sapiens
  CDR3 for alpha chain variable domain of TCR clone 196474 (TRAV1-1, TRAJ29)
CAVSSTRKSGNTPLVF

SEQ ID NO: 392948 - protein, 15 aa, Homo sapiens
  CDR3 for beta chain variable domain of TCR clone 196474 (TRBV29-1, TRBJ2-1)
CSVGRHALFYNEQFF

SEQ ID NO: 392949 - protein, 16 aa, Homo sapiens
  CDR3 for alpha chain variable domain of TCR clone 196475 (TRAV3, TRAJ37)
CAVRPHGSGNTGKLIF

SEQ ID NO: 392950 - protein, 13 aa, Homo sapiens
  CDR3 for beta chain variable domain of TCR clone 196475 (TRBV19, TRBJ1-2)
CASSLPGQDGYTF

SEQ ID NO: 392951 - protein, 14 aa, Homo sapiens
  CDR3 for alpha chain variable domain of TCR clone 196476 (TRAV23/DV6, TRAJ4)
WAAPSSGGYNKLIF

SEQ ID NO: 392952 - protein, 16 aa, Homo sapiens
  CDR3 for beta chain variable domain of TCR clone 196476 (TRBV19, TRBJ1-1)
CGSRFGGPVTGTEAFF

SEQ ID NO: 392953 - protein, 12 aa, Homo sapiens
  CDR3 for alpha chain variable domain of TCR clone 196477 (TRAV29/DV5, TRAJ26)
CAAIPSGQNFVF

SEQ ID NO: 392954 - protein, 14 aa, Homo sapiens
  CDR3 for beta chain variable domain of TCR clone 196477 (TRBV20-1, TRBJ1-1)
CSAQTRIGGTEAFF

SEQ ID NO: 392955 - protein, 15 aa, Homo sapiens
  CDR3 for alpha chain variable domain of TCR clone 196478 (TRAV2, TRAJ9)
CAVEDRGTGGLKTIF

SEQ ID NO: 392956 - protein, 13 aa, Homo sapiens
  CDR3 for beta chain variable domain of TCR clone 196478 (TRBV19, TRBJ1-2)
CASSVPGQDGYTF

SEQ ID NO: 392957 - protein, 15 aa, Homo sapiens
  CDR3 for alpha chain variable domain of TCR clone 196479 (TRAV9-2, TRAJ49)
FALSPPDHTGNQFYF

SEQ ID NO: 392958 - protein, 14 aa, Homo sapiens
  CDR3 for beta chain variable domain of TCR clone 196479 (TRBV12-4, TRBJ1-1)
CASSLGTGGTEAFF

SEQ ID NO: 392959 - protein, 14 aa, Homo sapiens
  CDR3 for alpha chain variable domain of TCR clone 196480 (TRAV1-2, TRAJ8)
CAVREDTGSQKLVF

SEQ ID NO: 392960 - protein, 20 aa, Homo sapiens
  CDR3 for beta chain variable domain of TCR clone 196480 (TRBV28, TRBJ2-1)
GASTPIGRSPGLAGGNEQFF

SEQ ID NO: 392961 - protein, 13 aa, Homo sapiens
  CDR3 for alpha chain variable domain of TCR clone 196481 (TRAV8-3, TRAJ47)
CAVSMGYGNKLVF

SEQ ID NO: 392962 - protein, 14 aa, Homo sapiens
  CDR3 for beta chain variable domain of TCR clone 196481 (TRBV2, TRBJ1-5)
CASSGTGFNQPQHF

SEQ ID NO: 392963 - protein, 17 aa, Homo sapiens
  CDR3 for alpha chain variable domain of TCR clone 196482 (TRAV12-3, TRAJ26)
CAMSGGRWDNYGQNFVF

SEQ ID NO: 392964 - protein, 12 aa, Homo sapiens
  CDR3 for beta chain variable domain of TCR clone 196482 (TRBV19, TRBJ1-5)
CASSIAQQPQHF

SEQ ID NO: 392965 - protein, 15 aa, Homo sapiens
  CDR3 for alpha chain variable domain of TCR clone 196483 (TRAV17, TRAJ16)
CATALRFSDGHKLLF

SEQ ID NO: 392966 - protein, 15 aa, Homo sapiens
  CDR3 for beta chain variable domain of TCR clone 196483 (TRBV13, TRBJ1-5)
CASSFGQGGVQPQHF

SEQ ID NO: 392967 - protein, 15 aa, Homo sapiens
  CDR3 for alpha chain variable domain of TCR clone 196484 (TRAV21, TRAJ45)
CAVSYSVGCADGLTF

SEQ ID NO: 392968 - protein, 13 aa, Homo sapiens
  CDR3 for beta chain variable domain of TCR clone 196484 (TRBV20-1, TRBJ2-5)
CSAATELQETQYF

SEQ ID NO: 392969 - protein, 10 aa, Homo sapiens
  CDR3 for alpha chain variable domain of TCR clone 196485 (TRAV8-4, TRAJ43)
CAVSADVMRF

SEQ ID NO: 392970 - protein, 15 aa, Homo sapiens
  CDR3 for beta chain variable domain of TCR clone 196485 (TRBV5-1, TRBJ2-3)
CASSVTSGSTDTQYF

SEQ ID NO: 392971 - protein, 17 aa, Homo sapiens
  CDR3 for alpha chain variable domain of TCR clone 196486 (TRAV13-1, TRAJ52)
CAAGRNAGGTSYGKLTF

SEQ ID NO: 392972 - protein, 13 aa, Homo sapiens
  CDR3 for beta chain variable domain of TCR clone 196486 (TRBV7-2, TRBJ1-1)
CGSNLKGAKVAFF

SEQ ID NO: 392973 - protein, 14 aa, Homo sapiens
  CDR3 for alpha chain variable domain of TCR clone 196487 (TRAV26-1, TRAJ15)
FIVRANQAGTALIF

SEQ ID NO: 392974 - protein, 16 aa, Homo sapiens
  CDR3 for beta chain variable domain of TCR clone 196487 (TRBV20-1, TRBJ1-4)
CSAIGGPRGANEKLFF

SEQ ID NO: 392975 - protein, 14 aa, Homo sapiens
  CDR3 for alpha chain variable domain of TCR clone 196488 (TRAV17, TRAJ57)
CATDPQGGSEKLVF

SEQ ID NO: 392976 - protein, 15 aa, Homo sapiens
  CDR3 for beta chain variable domain of TCR clone 196488 (TRBV7-9, TRBJ2-5)
CASSFKAGREETQYF

SEQ ID NO: 392977 - protein, 14 aa, Homo sapiens
  CDR3 for alpha chain variable domain of TCR clone 196489 (TRAV17, TRAJ16)
CTTADFSDGQKLLF

SEQ ID NO: 392978 - protein, 12 aa, Homo sapiens
  CDR3 for beta chain variable domain of TCR clone 196489 (TRBV24-1, TRBJ1-1)
CATLYPDTEAFF

SEQ ID NO: 392979 - protein, 11 aa, Homo sapiens
  CDR3 for alpha chain variable domain of TCR clone 196490 (TRAV1-2, TRAJ20)
CAVANDYKLSF

SEQ ID NO: 392980 - protein, 14 aa, Homo sapiens
  CDR3 for beta chain variable domain of TCR clone 196490 (TRBV7-9, TRBJ1-1)
CASTTLQSYTEAFF

SEQ ID NO: 392981 - protein, 15 aa, Homo sapiens
  CDR3 for alpha chain variable domain of TCR clone 196491 (TRAV8-3, TRAJ11)
CAVGLLNSGYSTLTF

SEQ ID NO: 392982 - protein, 15 aa, Homo sapiens
  CDR3 for beta chain variable domain of TCR clone 196491 (TRBV6-5, TRBJ2-3)
CASSRSGGARDTQYF

SEQ ID NO: 392983 - protein, 16 aa, Homo sapiens
  CDR3 for alpha chain variable domain of TCR clone 196492 (TRAV30, TRAJ24)
CGTEMVDADSGGKFQF

SEQ ID NO: 392984 - protein, 17 aa, Homo sapiens
  CDR3 for beta chain variable domain of TCR clone 196492 (TRBV20-1, TRBJ2-1)
CSAPPRLAGTRYNEQFF

SEQ ID NO: 392985 - protein, 14 aa, Homo sapiens
  CDR3 for alpha chain variable domain of TCR clone 196493 (TRAV9-2, TRAJ39)
CAPYIYNAGNMLTF

SEQ ID NO: 392986 - protein, 14 aa, Homo sapiens
  CDR3 for beta chain variable domain of TCR clone 196493 (TRBV11-2, TRBJ2-1)
CASTTGQGNNEQFF

SEQ ID NO: 392987 - protein, 14 aa, Homo sapiens
  CDR3 for alpha chain variable domain of TCR clone 196494 (TRAV16, TRAJ44)
CALSTTGPASKLTF

SEQ ID NO: 392988 - protein, 14 aa, Homo sapiens
  CDR3 for beta chain variable domain of TCR clone 196494 (TRBV20-1, TRBJ2-7)
CSAISREASYEQYF

SEQ ID NO: 392989 - protein, 16 aa, Homo sapiens
  CDR3 for alpha chain variable domain of TCR clone 196495 (TRAV26-1, TRAJ41)
CIVRVAVANSGYALNF

SEQ ID NO: 392990 - protein, 15 aa, Homo sapiens
  CDR3 for beta chain variable domain of TCR clone 196495 (TRBV6-1, TRBJ1-1)
CASSEYPRMNTEAVF

SEQ ID NO: 392991 - protein, 13 aa, Homo sapiens
  CDR3 for alpha chain variable domain of TCR clone 196496 (TRAV13-1, TRAJ6)
CARGSGGSYIPTF

SEQ ID NO: 392992 - protein, 13 aa, Homo sapiens
  CDR3 for beta chain variable domain of TCR clone 196496 (TRBV20-1, TRBJ2-1)
CSARELVSNEQFF

SEQ ID NO: 392993 - protein, 15 aa, Homo sapiens
  CDR3 for alpha chain variable domain of TCR clone 196497 (TRAV21, TRAJ53)
CATLNSGGSNYKLTF

SEQ ID NO: 392994 - protein, 19 aa, Homo sapiens
  CDR3 for beta chain variable domain of TCR clone 196497 (TRBV6-3, TRBJ1-2)
CASSYSKGRTGPPNYGYTF

SEQ ID NO: 392995 - protein, 13 aa, Homo sapiens
  CDR3 for alpha chain variable domain of TCR clone 196498 (TRAV3, TRAJ15)
CAVRDQAGTALIF

SEQ ID NO: 392996 - protein, 15 aa, Homo sapiens
  CDR3 for beta chain variable domain of TCR clone 196498 (TRBV5-1, TRBJ2-2)
CASSSQGGNTGELFF

SEQ ID NO: 392997 - protein, 16 aa, Homo sapiens
  CDR3 for alpha chain variable domain of TCR clone 196499 (TRAV12-2, TRAJ32)
CAVNLGQGGATNKLIF

SEQ ID NO: 392998 - protein, 13 aa, Homo sapiens
  CDR3 for beta chain variable domain of TCR clone 196499 (TRBV29-1, TRBJ2-3)
SAALQGGADTQYF

SEQ ID NO: 392999 - protein, 14 aa, Homo sapiens
  CDR3 for alpha chain variable domain of TCR clone 196500 (TRAV17, TRAJ16)
CATADFSDGQKLLF

SEQ ID NO: 393000 - protein, 15 aa, Homo sapiens
  CDR3 for beta chain variable domain of TCR clone 196500 (TRBV18, TRBJ2-1)
CVSSPPSASYNEQFF

SEQ ID NO: 393001 - protein, 14 aa, Homo sapiens
  CDR3 for alpha chain variable domain of TCR clone 196501 (TRAV12-2, TRAJ53)
CAVKGGGSNYKLTF

SEQ ID NO: 393002 - protein, 13 aa, Homo sapiens
  CDR3 for beta chain variable domain of TCR clone 196501 (TRBV12-4, TRBJ1-5)
CASSPDRAQPQHF

SEQ ID NO: 393003 - protein, 16 aa, Homo sapiens
  CDR3 for alpha chain variable domain of TCR clone 196502 (TRAV30, TRAJ24)
CGTEIVDADSWGKFQF

SEQ ID NO: 393004 - protein, 18 aa, Homo sapiens
  CDR3 for beta chain variable domain of TCR clone 196502 (TRBV7-9, TRBJ2-1)
CASSKTGFTTTGNNEQFF

SEQ ID NO: 393005 - protein, 16 aa, Homo sapiens
  CDR3 for alpha chain variable domain of TCR clone 196503 (TRAV1-1, TRAJ28)
CAVRDDSGAGSYQLNF

SEQ ID NO: 393006 - protein, 12 aa, Homo sapiens
  CDR3 for beta chain variable domain of TCR clone 196503 (TRBV11-2, TRBJ2-5)
CASSLDTQTQYF

SEQ ID NO: 393007 - protein, 12 aa, Homo sapiens
  CDR3 for alpha chain variable domain of TCR clone 196504 (TRAV12-2, TRAJ7)
CAVMRGNNRLAF

SEQ ID NO: 393008 - protein, 17 aa, Homo sapiens
  CDR3 for beta chain variable domain of TCR clone 196504 (TRBV7-9, TRBJ2-3)
CASSPTIAGDLTDTQYF

SEQ ID NO: 393009 - protein, 12 aa, Homo sapiens
  CDR3 for alpha chain variable domain of TCR clone 196505 (TRAV38-1, TRAJ32)
CAPLGATNKLIF

SEQ ID NO: 393010 - protein, 14 aa, Homo sapiens
  CDR3 for beta chain variable domain of TCR clone 196505 (TRBV29-1, TRBJ2-5)
CSVETSGSGETQFF

SEQ ID NO: 393011 - protein, 16 aa, Homo sapiens
  CDR3 for alpha chain variable domain of TCR clone 196506 (TRAV3, TRAJ21)
CAVRDIERGNFNKFYF

SEQ ID NO: 393012 - protein, 14 aa, Homo sapiens
  CDR3 for beta chain variable domain of TCR clone 196506 (TRBV20-1, TRBJ1-1)
CSAQTRIGGTEAFF

SEQ ID NO: 393013 - protein, 13 aa, Homo sapiens
  CDR3 for alpha chain variable domain of TCR clone 196507 (TRAV8-3, TRAJ28)
CAVGAVGSYQLTF

SEQ ID NO: 393014 - protein, 14 aa, Homo sapiens
  CDR3 for beta chain variable domain of TCR clone 196507 (TRBV5-1, TRBJ2-3)
CASSLFGPTDTQYF

SEQ ID NO: 393015 - protein, 13 aa, Homo sapiens
  CDR3 for alpha chain variable domain of TCR clone 196508 (TRAV13-1, TRAJ5)
CAASDTGRRALTF

SEQ ID NO: 393016 - protein, 12 aa, Homo sapiens
  CDR3 for beta chain variable domain of TCR clone 196508 (TRBV28, TRBJ2-3)
CAISLYRDTQYF

SEQ ID NO: 393017 - protein, 14 aa, Homo sapiens
  CDR3 for alpha chain variable domain of TCR clone 196509 (TRAV17, TRAJ32)
CATAPGGATNKLIF

SEQ ID NO: 393018 - protein, 14 aa, Homo sapiens
  CDR3 for beta chain variable domain of TCR clone 196509 (TRBV2, TRBJ1-5)
CASSENRGGQPQHF

SEQ ID NO: 393019 - protein, 13 aa, Homo sapiens
  CDR3 for alpha chain variable domain of TCR clone 196510 (TRAV25, TRAJ40)
CSGSASGTYKYIF

SEQ ID NO: 393020 - protein, 14 aa, Homo sapiens
  CDR3 for beta chain variable domain of TCR clone 196510 (TRBV7-2, TRBJ2-7)
CASRSQGAAYEQYF

SEQ ID NO: 393021 - protein, 17 aa, Homo sapiens
  CDR3 for alpha chain variable domain of TCR clone 196511 (TRAV13-1, TRAJ29)
CAATTPLAFGKGTRLSV

SEQ ID NO: 393022 - protein, 16 aa, Homo sapiens
  CDR3 for beta chain variable domain of TCR clone 196511 (TRBV4-1, TRBJ2-7)
CASSQEWTSGPLEQYF

SEQ ID NO: 393023 - protein, 14 aa, Homo sapiens
  CDR3 for alpha chain variable domain of TCR clone 196512 (TRAV12-3, TRAJ10)
SHLPLTGGGNKLTF

SEQ ID NO: 393024 - protein, 17 aa, Homo sapiens
  CDR3 for beta chain variable domain of TCR clone 196512 (TRBV4-1, TRBJ2-5)
CASSQDPAGGPRETQYF

SEQ ID NO: 393025 - protein, 16 aa, Homo sapiens
  CDR3 for alpha chain variable domain of TCR clone 196513 (TRAV12-1, TRAJ13)
CVVNLEVSGGFQKVTF

SEQ ID NO: 393026 - protein, 16 aa, Homo sapiens
  CDR3 for beta chain variable domain of TCR clone 196513 (TRBV24-1, TRBJ2-6)
CATSDRRASGANVLTF

SEQ ID NO: 393027 - protein, 14 aa, Homo sapiens
  CDR3 for alpha chain variable domain of TCR clone 196514 (TRAV2, TRAJ9)
CAVDQNTGGFKTIF

SEQ ID NO: 393028 - protein, 13 aa, Homo sapiens
  CDR3 for beta chain variable domain of TCR clone 196514 (TRBV3-1, TRBJ2-7)
CASSLRDGYEQYF

SEQ ID NO: 393029 - protein, 12 aa, Homo sapiens
  CDR3 for alpha chain variable domain of TCR clone 196515 (TRAV12-3, TRAJ17)
CAMTLTGNKLTL

SEQ ID NO: 393030 - protein, 15 aa, Homo sapiens
  CDR3 for beta chain variable domain of TCR clone 196515 (TRBV20-1, TRBJ2-7)
CSARYRVSGMDEQYF

SEQ ID NO: 393031 - protein, 14 aa, Homo sapiens
  CDR3 for alpha chain variable domain of TCR clone 196516 (TRAV26-1, TRAJ38)
CIADNAVNNRKLIW

SEQ ID NO: 393032 - protein, 15 aa, Homo sapiens
  CDR3 for beta chain variable domain of TCR clone 196516 (TRBV20-1, TRBJ1-1)
CSASRGVTGNTEAFF

SEQ ID NO: 393033 - protein, 18 aa, Homo sapiens
  CDR3 for alpha chain variable domain of TCR clone 196517 (TRAV16, TRAJ22)
CSRGRLSHVAGSARQLTF

SEQ ID NO: 393034 - protein, 18 aa, Homo sapiens
  CDR3 for beta chain variable domain of TCR clone 196517 (TRBV7-2, TRBJ2-3)
CASSLETSRGRKADTQYF

SEQ ID NO: 393035 - protein, 13 aa, Homo sapiens
  CDR3 for alpha chain variable domain of TCR clone 196518 (TRAV2, TRAJ40)
CAVVTSGTYKYIF

SEQ ID NO: 393036 - protein, 16 aa, Homo sapiens
  CDR3 for beta chain variable domain of TCR clone 196518 (TRBV6-1, TRBJ1-2)
CASSGAWQGRSHGYTF

SEQ ID NO: 393037 - protein, 13 aa, Homo sapiens
  CDR3 for alpha chain variable domain of TCR clone 196519 (TRAV12-2, TRAJ47)
CAVFMEDGNKLVF

SEQ ID NO: 393038 - protein, 14 aa, Homo sapiens
  CDR3 for beta chain variable domain of TCR clone 196519 (TRBV4-1, TRBJ1-5)
CASSQGPTNQPQHF

SEQ ID NO: 393039 - protein, 13 aa, Homo sapiens
  CDR3 for alpha chain variable domain of TCR clone 196520 (TRAV8-3, TRAJ36)
CAVGATGANNLFI

SEQ ID NO: 393040 - protein, 15 aa, Homo sapiens
  CDR3 for beta chain variable domain of TCR clone 196520 (TRBV7-2, TRBJ1-2)
CASSPMAGWNYGYTF

SEQ ID NO: 393041 - protein, 14 aa, Homo sapiens
  CDR3 for alpha chain variable domain of TCR clone 196521 (TRAV17, TRAJ39)
CATDPVRAGNMLTF

SEQ ID NO: 393042 - protein, 14 aa, Homo sapiens
  CDR3 for beta chain variable domain of TCR clone 196521 (TRBV25-1, TRBJ1-1)
CASTHLGGNTEAFF

SEQ ID NO: 393043 - protein, 20 aa, Homo sapiens
  CDR3 for alpha chain variable domain of TCR clone 196522 (TRAV21, TRAJ22)
SLVTQPPTLKSSGSARHLTF

SEQ ID NO: 393044 - protein, 16 aa, Homo sapiens
  CDR3 for beta chain variable domain of TCR clone 196522 (TRBV7-3, TRBJ2-2)
CASSLKRGTLSGELFF

SEQ ID NO: 393045 - protein, 13 aa, Homo sapiens
  CDR3 for alpha chain variable domain of TCR clone 196523 (TRAV23/DV6, TRAJ43)
CAASMGGNNDIRF

SEQ ID NO: 393046 - protein, 14 aa, Homo sapiens
  CDR3 for beta chain variable domain of TCR clone 196523 (TRBV3-1, TRBJ2-3)
CASSWSGVGDTQYF

SEQ ID NO: 393047 - protein, 13 aa, Homo sapiens
  CDR3 for alpha chain variable domain of TCR clone 196524 (TRAV16, TRAJ39)
CALKDNAGNMLTF

SEQ ID NO: 393048 - protein, 20 aa, Homo sapiens
  CDR3 for beta chain variable domain of TCR clone 196524 (TRBV7-8, TRBJ2-2)
CASSHLFPGPTIHITGELFF

SEQ ID NO: 393049 - protein, 10 aa, Homo sapiens
  CDR3 for alpha chain variable domain of TCR clone 196525 (TRAV21, TRAJ43)
WAVRIGDMRF

SEQ ID NO: 393050 - protein, 13 aa, Homo sapiens
  CDR3 for beta chain variable domain of TCR clone 196525 (TRBV20-1, TRBJ2-7)
CSAPGLADYEQYF

SEQ ID NO: 393051 - protein, 13 aa, Homo sapiens
  CDR3 for alpha chain variable domain of TCR clone 196526 (TRAV16, TRAJ27)
YSLRRTNAGKSTF

SEQ ID NO: 393052 - protein, 15 aa, Homo sapiens
  CDR3 for beta chain variable domain of TCR clone 196526 (TRBV18, TRBJ2-1)
CASSPPSASYNEQFF

SEQ ID NO: 393053 - protein, 14 aa, Homo sapiens
  CDR3 for alpha chain variable domain of TCR clone 196527 (TRAV35, TRAJ22)
CAVLRPGSARQLTF

SEQ ID NO: 393054 - protein, 15 aa, Homo sapiens
  CDR3 for beta chain variable domain of TCR clone 196527 (TRBV20-1, TRBJ2-7)
CSARDRVSGMDEQYF

SEQ ID NO: 393055 - protein, 12 aa, Homo sapiens
  CDR3 for alpha chain variable domain of TCR clone 196528 (TRAV36/DV7, TRAJ54)
CAVVRGAQKLVF

SEQ ID NO: 393056 - protein, 15 aa, Homo sapiens
  CDR3 for beta chain variable domain of TCR clone 196528 (TRBV4-1, TRBJ2-3)
CASSQDRLPPDTQYF

SEQ ID NO: 393057 - protein, 10 aa, Homo sapiens
  CDR3 for alpha chain variable domain of TCR clone 196529 (TRAV17, TRAJ52)
SATSYGKLTF

SEQ ID NO: 393058 - protein, 14 aa, Homo sapiens
  CDR3 for beta chain variable domain of TCR clone 196529 (TRBV12-5, TRBJ2-5)
CASGSRTHQETQYF

SEQ ID NO: 393059 - protein, 16 aa, Homo sapiens
  CDR3 for alpha chain variable domain of TCR clone 196530 (TRAV3, TRAJ37)
CAVRPHGSGNTGKLIF

SEQ ID NO: 393060 - protein, 18 aa, Homo sapiens
  CDR3 for beta chain variable domain of TCR clone 196530 (TRBV12-4, TRBJ2-2)
CASSLVAGTRGRTGELFF

SEQ ID NO: 393061 - protein, 14 aa, Homo sapiens
  CDR3 for alpha chain variable domain of TCR clone 196531 (TRAV26-1, TRAJ38)
CIADNAGNNRKLIW

SEQ ID NO: 393062 - protein, 11 aa, Homo sapiens
  CDR3 for beta chain variable domain of TCR clone 196531 (TRBV29-1, TRBJ2-5)
CSEDRTGTQYF

SEQ ID NO: 393063 - protein, 14 aa, Homo sapiens
  CDR3 for alpha chain variable domain of TCR clone 196532 (TRAV1-1, TRAJ27)
CAFSETPMQANRPL

SEQ ID NO: 393064 - protein, 17 aa, Homo sapiens
  CDR3 for beta chain variable domain of TCR clone 196532 (TRBV20-1, TRBJ2-3)
CSARDPKGVSATDTQYF

SEQ ID NO: 393065 - protein, 17 aa, Homo sapiens
  CDR3 for alpha chain variable domain of TCR clone 196533 (TRAV8-3, TRAJ57)
CAASSTLSQGGSEKLVF

SEQ ID NO: 393066 - protein, 14 aa, Homo sapiens
  CDR3 for beta chain variable domain of TCR clone 196533 (TRBV25-1, TRBJ1-1)
CASTHLGGNTEAFF

SEQ ID NO: 393067 - protein, 13 aa, Homo sapiens
  CDR3 for alpha chain variable domain of TCR clone 196534 (TRAV2, TRAJ15)
CAVASQAGTALIF

SEQ ID NO: 393068 - protein, 13 aa, Homo sapiens
  CDR3 for beta chain variable domain of TCR clone 196534 (TRBV7-9, TRBJ1-2)
CASSLKQNYGNTF

SEQ ID NO: 393069 - protein, 13 aa, Homo sapiens
  CDR3 for alpha chain variable domain of TCR clone 196535 (TRAV29/DV5, TRAJ44)
CAASTGTASKLTF

SEQ ID NO: 393070 - protein, 14 aa, Homo sapiens
  CDR3 for beta chain variable domain of TCR clone 196535 (TRBV9, TRBJ2-7)
CASSVGVGSYEQYF

SEQ ID NO: 393071 - protein, 16 aa, Homo sapiens
  CDR3 for alpha chain variable domain of TCR clone 196536 (TRAV30, TRAJ24)
CGTEIVDADCWGKFQF

SEQ ID NO: 393072 - protein, 16 aa, Homo sapiens
  CDR3 for beta chain variable domain of TCR clone 196536 (TRBV6-1, TRBJ2-1)
CASILRQGSSYNEQFC

SEQ ID NO: 393073 - protein, 13 aa, Homo sapiens
  CDR3 for alpha chain variable domain of TCR clone 196537 (TRAV13-1, TRAJ21)
CAASIYNFNKFYF

SEQ ID NO: 393074 - protein, 20 aa, Homo sapiens
  CDR3 for beta chain variable domain of TCR clone 196537 (TRBV7-8, TRBJ2-2)
CASSHLFPRPTIHITGELFF

SEQ ID NO: 393075 - protein, 18 aa, Homo sapiens
  CDR3 for alpha chain variable domain of TCR clone 196538 (TRAV21, TRAJ52)
CAARPSPSGGTSYGKLTF

SEQ ID NO: 393076 - protein, 17 aa, Homo sapiens
  CDR3 for beta chain variable domain of TCR clone 196538 (TRBV13, TRBJ2-3)
CASSLSRVAGGRNTQYF

SEQ ID NO: 393077 - protein, 14 aa, Homo sapiens
  CDR3 for alpha chain variable domain of TCR clone 196539 (TRAV8-3, TRAJ4)
CAVGASGGYNKLIF

SEQ ID NO: 393078 - protein, 16 aa, Homo sapiens
  CDR3 for beta chain variable domain of TCR clone 196539 (TRBV4-3, TRBJ2-2)
CAISHLQGSGTGELFF

SEQ ID NO: 393079 - protein, 13 aa, Homo sapiens
  CDR3 for alpha chain variable domain of TCR clone 196540 (TRAV13-2, TRAJ48)
CAEMDFGSEKLTF

SEQ ID NO: 393080 - protein, 12 aa, Homo sapiens
  CDR3 for beta chain variable domain of TCR clone 196540 (TRBV5-1, TRBJ1-2)
CASSQDTYGYTL

SEQ ID NO: 393081 - protein, 14 aa, Homo sapiens
  CDR3 for alpha chain variable domain of TCR clone 196541 (TRAV8-3, TRAJ4)
FAVGAAGGYNKLIF

SEQ ID NO: 393082 - protein, 16 aa, Homo sapiens
  CDR3 for beta chain variable domain of TCR clone 196541 (TRBV13, TRBJ2-2)
CASSPRTGEHTGELFF

SEQ ID NO: 393083 - protein, 14 aa, Homo sapiens
  CDR3 for alpha chain variable domain of TCR clone 196542 (TRAV12-2, TRAJ40)
CAGKSPSGTYKYIF

SEQ ID NO: 393084 - protein, 14 aa, Homo sapiens
  CDR3 for beta chain variable domain of TCR clone 196542 (TRBV20-1, TRBJ1-1)
CSAQTRIGGTEAFF

SEQ ID NO: 393085 - protein, 11 aa, Homo sapiens
  CDR3 for alpha chain variable domain of TCR clone 196543 (TRAV26-1, TRAJ37)
CIVRVGRKLIF

SEQ ID NO: 393086 - protein, 13 aa, Homo sapiens
  CDR3 for beta chain variable domain of TCR clone 196543 (TRBV14, TRBJ1-2)
CASSEDRRYVDTF

SEQ ID NO: 393087 - protein, 14 aa, Homo sapiens
  CDR3 for alpha chain variable domain of TCR clone 196544 (TRAV38-1, TRAJ45)
CASHSGGGADGLTL

SEQ ID NO: 393088 - protein, 14 aa, Homo sapiens
  CDR3 for beta chain variable domain of TCR clone 196544 (TRBV20-1, TRBJ1-1)
CSAQTRIGGTEAFF

SEQ ID NO: 393089 - protein, 15 aa, Homo sapiens
  CDR3 for alpha chain variable domain of TCR clone 196545 (TRAV27, TRAJ38)
CAARRNAGNNRNLSW

SEQ ID NO: 393090 - protein, 14 aa, Homo sapiens
  CDR3 for beta chain variable domain of TCR clone 196545 (TRBV6-1, TRBJ1-3)
CASVQGGGGNTIYF

SEQ ID NO: 393091 - protein, 12 aa, Homo sapiens
  CDR3 for alpha chain variable domain of TCR clone 196546 (TRAV36/DV7, TRAJ54)
CAVVRGAQKLVF

SEQ ID NO: 393092 - protein, 19 aa, Homo sapiens
  CDR3 for beta chain variable domain of TCR clone 196546 (TRBV25-1, TRBJ2-2)
CAILVYRVDRGRKTGELFF

SEQ ID NO: 393093 - protein, 12 aa, Homo sapiens
  CDR3 for alpha chain variable domain of TCR clone 196547 (TRAV25, TRAJ5)
CAGGGGGRALTF

SEQ ID NO: 393094 - protein, 15 aa, Homo sapiens
  CDR3 for beta chain variable domain of TCR clone 196547 (TRBV19, TRBJ2-4)
CASRGPRRGENIQYF

SEQ ID NO: 393095 - protein, 15 aa, Homo sapiens
  CDR3 for alpha chain variable domain of TCR clone 196548 (TRAV13-1, TRAJ10)
CAATILTGGGNKLTF

SEQ ID NO: 393096 - protein, 15 aa, Homo sapiens
  CDR3 for beta chain variable domain of TCR clone 196548 (TRBV2, TRBJ2-7)
CASTLLGSGATEQYL

SEQ ID NO: 393097 - protein, 13 aa, Homo sapiens
  CDR3 for alpha chain variable domain of TCR clone 196549 (TRAV8-3, TRAJ48)
CAVVPCGNVKLTF

SEQ ID NO: 393098 - protein, 15 aa, Homo sapiens
  CDR3 for beta chain variable domain of TCR clone 196549 (TRBV11-2, TRBJ2-1)
CASSSPSTRYNEQFF

SEQ ID NO: 393099 - protein, 13 aa, Homo sapiens
  CDR3 for alpha chain variable domain of TCR clone 196550 (TRAV3, TRAJ20)
CAVRLSNDYKLSF

SEQ ID NO: 393100 - protein, 14 aa, Homo sapiens
  CDR3 for beta chain variable domain of TCR clone 196550 (TRBV19, TRBJ1-1)
CASSTGGVDTEAFF

SEQ ID NO: 393101 - protein, 15 aa, Homo sapiens
  CDR3 for alpha chain variable domain of TCR clone 196551 (TRAV17, TRAJ35)
CATAFVIGFGNVLHC

SEQ ID NO: 393102 - protein, 13 aa, Homo sapiens
  CDR3 for beta chain variable domain of TCR clone 196551 (TRBV7-9, TRBJ1-2)
CASSLKQNYGYTF

SEQ ID NO: 393103 - protein, 14 aa, Homo sapiens
  CDR3 for alpha chain variable domain of TCR clone 196552 (TRAV1-2, TRAJ8)
CAVREDTGFQKLVL

SEQ ID NO: 393104 - protein, 16 aa, Homo sapiens
  CDR3 for beta chain variable domain of TCR clone 196552 (TRBV7-3, TRBJ2-2)
CASSLKRGTLSGELFF

SEQ ID NO: 393105 - protein, 13 aa, Homo sapiens
  CDR3 for alpha chain variable domain of TCR clone 196553 (TRAV14/DV4, TRAJ20)
CAMRESNDYKLSF

SEQ ID NO: 393106 - protein, 15 aa, Homo sapiens
  CDR3 for beta chain variable domain of TCR clone 196553 (TRBV7-9, TRBJ1-1)
CASSRPGTSNTEAFF

SEQ ID NO: 393107 - protein, 13 aa, Homo sapiens
  CDR3 for alpha chain variable domain of TCR clone 196554 (TRAV17, TRAJ9)
CATDYTGGFKTIF

SEQ ID NO: 393108 - protein, 12 aa, Homo sapiens
  CDR3 for beta chain variable domain of TCR clone 196554 (TRBV2, TRBJ2-1)
CASRPGPREQFF

SEQ ID NO: 393109 - protein, 16 aa, Homo sapiens
  CDR3 for alpha chain variable domain of TCR clone 196555 (TRAV26-2, TRAJ57)
CILRDVGSGGSEKLIF

SEQ ID NO: 393110 - protein, 13 aa, Homo sapiens
  CDR3 for beta chain variable domain of TCR clone 196555 (TRBV18, TRBJ2-3)
CASSPGVTDTQYF

SEQ ID NO: 393111 - protein, 13 aa, Homo sapiens
  CDR3 for alpha chain variable domain of TCR clone 196556 (TRAV3, TRAJ21)
FAVREPDFNKFYF

SEQ ID NO: 393112 - protein, 12 aa, Homo sapiens
  CDR3 for beta chain variable domain of TCR clone 196556 (TRBV28, TRBJ2-6)
CAIQAGANVLTF

SEQ ID NO: 393113 - protein, 13 aa, Homo sapiens
  CDR3 for alpha chain variable domain of TCR clone 196557 (TRAV35, TRAJ47)
CAGAFGLSDSYVI

SEQ ID NO: 393114 - protein, 11 aa, Homo sapiens
  CDR3 for beta chain variable domain of TCR clone 196557 (TRBV29-1, TRBJ1-1)
CSVEVGTRTFF

SEQ ID NO: 393115 - protein, 14 aa, Homo sapiens
  CDR3 for alpha chain variable domain of TCR clone 196558 (TRAV12-1, TRAJ3)
CVVILYSSASKIIF

SEQ ID NO: 393116 - protein, 13 aa, Homo sapiens
  CDR3 for beta chain variable domain of TCR clone 196558 (TRBV7-9, TRBJ1-2)
CASSLKQNYGDTF

SEQ ID NO: 393117 - protein, 14 aa, Homo sapiens
  CDR3 for alpha chain variable domain of TCR clone 196559 (TRAV12-2, TRAJ44)
CAVNKAGTASKLTF

SEQ ID NO: 393118 - protein, 13 aa, Homo sapiens
  CDR3 for beta chain variable domain of TCR clone 196559 (TRBV11-2, TRBJ2-5)
CASSSTGEETQYF

SEQ ID NO: 393119 - protein, 17 aa, Homo sapiens
  CDR3 for alpha chain variable domain of TCR clone 196560 (TRAV3, TRAJ12)
CAVRDGGRMDSSYRLIF

SEQ ID NO: 393120 - protein, 13 aa, Homo sapiens
  CDR3 for beta chain variable domain of TCR clone 196560 (TRBV20-1, TRBJ1-1)
CSAPLGGGTEAFF

SEQ ID NO: 393121 - protein, 11 aa, Homo sapiens
  CDR3 for alpha chain variable domain of TCR clone 196561 (TRAV21, TRAJ39)
LLVNAGNMLTF

SEQ ID NO: 393122 - protein, 16 aa, Homo sapiens
  CDR3 for beta chain variable domain of TCR clone 196561 (TRBV7-3, TRBJ2-2)
CASSLKQGTLSGELFF

SEQ ID NO: 393123 - protein, 15 aa, Homo sapiens
  CDR3 for alpha chain variable domain of TCR clone 196562 (TRAV13-1, TRAJ10)
CAASNPAGGGNKLTF

SEQ ID NO: 393124 - protein, 13 aa, Homo sapiens
  CDR3 for beta chain variable domain of TCR clone 196562 (TRBV7-9, TRBJ2-5)
CASTPVGQETQYF

SEQ ID NO: 393125 - protein, 13 aa, Homo sapiens
  CDR3 for alpha chain variable domain of TCR clone 196563 (TRAV21, TRAJ27)
CSARPGNAGKSTF

SEQ ID NO: 393126 - protein, 14 aa, Homo sapiens
  CDR3 for beta chain variable domain of TCR clone 196563 (TRBV7-9, TRBJ2-5)
CASSLDTAQETQYF

SEQ ID NO: 393127 - protein, 16 aa, Homo sapiens
  CDR3 for alpha chain variable domain of TCR clone 196564 (TRAV3, TRAJ10)
CAVRDMRAGDGNKLTF

SEQ ID NO: 393128 - protein, 15 aa, Homo sapiens
  CDR3 for beta chain variable domain of TCR clone 196564 (TRBV11-2, TRBJ1-6)
CASTGFGTAVSPLHF

SEQ ID NO: 393129 - protein, 14 aa, Homo sapiens
  CDR3 for alpha chain variable domain of TCR clone 196565 (TRAV13-2, TRAJ10)
CAETLPGGGNKLTF

SEQ ID NO: 393130 - protein, 14 aa, Homo sapiens
  CDR3 for beta chain variable domain of TCR clone 196565 (TRBV28, TRBJ2-3)
CASSFVSGTDTQYF

SEQ ID NO: 393131 - protein, 16 aa, Homo sapiens
  CDR3 for alpha chain variable domain of TCR clone 196566 (TRAV30, TRAJ24)
CGTGIVDADSWGKLQF

SEQ ID NO: 393132 - protein, 14 aa, Homo sapiens
  CDR3 for beta chain variable domain of TCR clone 196566 (TRBV12-5, TRBJ2-5)
CASGSRTHQETQYF

SEQ ID NO: 393133 - protein, 13 aa, Homo sapiens
  CDR3 for alpha chain variable domain of TCR clone 196567 (TRAV13-1, TRAJ6)
CAARRGGSYIPTF

SEQ ID NO: 393134 - protein, 16 aa, Homo sapiens
  CDR3 for beta chain variable domain of TCR clone 196567 (TRBV7-9, TRBJ2-2)
CASSLATGVGAGELFF

SEQ ID NO: 393135 - protein, 14 aa, Homo sapiens
  CDR3 for alpha chain variable domain of TCR clone 196568 (TRAV29/DV5, TRAJ36)
CAARRKTGANNLFF

SEQ ID NO: 393136 - protein, 13 aa, Homo sapiens
  CDR3 for beta chain variable domain of TCR clone 196568 (TRBV7-2, TRBJ2-5)
CASSQTSAETQYF

SEQ ID NO: 393137 - protein, 13 aa, Homo sapiens
  CDR3 for alpha chain variable domain of TCR clone 196569 (TRAV12-2, TRAJ52)
CAVSGTSYGKLTF

SEQ ID NO: 393138 - protein, 15 aa, Homo sapiens
  CDR3 for beta chain variable domain of TCR clone 196569 (TRBV7-9, TRBJ1-6)
CASSSPGRGNSPLHF

SEQ ID NO: 393139 - protein, 14 aa, Homo sapiens
  CDR3 for alpha chain variable domain of TCR clone 196570 (TRAV9-2, TRAJ39)
CALYTYNAGNMLTF

SEQ ID NO: 393140 - protein, 13 aa, Homo sapiens
  CDR3 for beta chain variable domain of TCR clone 196570 (TRBV20-1, TRBJ1-1)
CSAGTVGNTEAFF

SEQ ID NO: 393141 - protein, 15 aa, Homo sapiens
  CDR3 for alpha chain variable domain of TCR clone 196571 (TRAV26-2, TRAJ39)
CSLRGNNNAGNMLTF

SEQ ID NO: 393142 - protein, 15 aa, Homo sapiens
  CDR3 for beta chain variable domain of TCR clone 196571 (TRBV5-4, TRBJ1-1)
CASSSLGWANTDAFF

SEQ ID NO: 393143 - protein, 12 aa, Homo sapiens
  CDR3 for alpha chain variable domain of TCR clone 196572 (TRAV12-3, TRAJ17)
CAMTLTGNKLTS

SEQ ID NO: 393144 - protein, 15 aa, Homo sapiens
  CDR3 for beta chain variable domain of TCR clone 196572 (TRBV9, TRBJ1-6)
CASSVAGTGDSPLHF

SEQ ID NO: 393145 - protein, 14 aa, Homo sapiens
  CDR3 for alpha chain variable domain of TCR clone 196573 (TRAV12-2, TRAJ40)
CAVKIPSGTYKYIF

SEQ ID NO: 393146 - protein, 16 aa, Homo sapiens
  CDR3 for beta chain variable domain of TCR clone 196573 (TRBV4-1, TRBJ2-5)
CASSQAIAASSATQYF

SEQ ID NO: 393147 - protein, 15 aa, Homo sapiens
  CDR3 for alpha chain variable domain of TCR clone 196574 (TRAV2, TRAJ15)
CAVEDRNKAGTALIF

SEQ ID NO: 393148 - protein, 13 aa, Homo sapiens
  CDR3 for beta chain variable domain of TCR clone 196574 (TRBV10-2, TRBJ2-7)
CASSESGVYEQYF

SEQ ID NO: 393149 - protein, 16 aa, Homo sapiens
  CDR3 for alpha chain variable domain of TCR clone 196575 (TRAV30, TRAJ24)
CGTEIVDADSWGKFKF

SEQ ID NO: 393150 - protein, 18 aa, Homo sapiens
  CDR3 for beta chain variable domain of TCR clone 196575 (TRBV11-2, TRBJ2-6)
CASSLNPFLGTGANVLTF

SEQ ID NO: 393151 - protein, 13 aa, Homo sapiens
  CDR3 for alpha chain variable domain of TCR clone 196576 (TRAV29/DV5, TRAJ31)
CAASRNNNARPMF

SEQ ID NO: 393152 - protein, 16 aa, Homo sapiens
  CDR3 for beta chain variable domain of TCR clone 196576 (TRBV7-3, TRBJ2-2)
CASSLKLGTLSGELFF

SEQ ID NO: 393153 - protein, 18 aa, Homo sapiens
  CDR3 for alpha chain variable domain of TCR clone 196577 (TRAV21, TRAJ52)
CAVRHSPAGGTSSGKLTF

SEQ ID NO: 393154 - protein, 13 aa, Homo sapiens
  CDR3 for beta chain variable domain of TCR clone 196577 (TRBV19, TRBJ1-2)
CASSQGQVYGYTF

SEQ ID NO: 393155 - protein, 16 aa, Homo sapiens
  CDR3 for alpha chain variable domain of TCR clone 196578 (TRAV3, TRAJ10)
CAARDMNAGGGNKLTF

SEQ ID NO: 393156 - protein, 15 aa, Homo sapiens
  CDR3 for beta chain variable domain of TCR clone 196578 (TRBV2, TRBJ2-1)
CASSELAGSYNEQFF

SEQ ID NO: 393157 - protein, 14 aa, Homo sapiens
  CDR3 for alpha chain variable domain of TCR clone 196579 (TRAV12-2, TRAJ9)
CAVSFGTGGFKTIF

SEQ ID NO: 393158 - protein, 14 aa, Homo sapiens
  CDR3 for beta chain variable domain of TCR clone 196579 (TRBV7-2, TRBJ2-7)
CASSPKTSFYEQYF

SEQ ID NO: 393159 - protein, 12 aa, Homo sapiens
  CDR3 for alpha chain variable domain of TCR clone 196580 (TRAV17, TRAJ30)
CGPERRDDKIIC

SEQ ID NO: 393160 - protein, 14 aa, Homo sapiens
  CDR3 for beta chain variable domain of TCR clone 196580 (TRBV7-7, TRBJ2-2)
CASSRDRSTGELFF

SEQ ID NO: 393161 - protein, 13 aa, Homo sapiens
  CDR3 for alpha chain variable domain of TCR clone 196581 (TRAV3, TRAJ20)
CAARDTPLYKLSF

SEQ ID NO: 393162 - protein, 16 aa, Homo sapiens
  CDR3 for beta chain variable domain of TCR clone 196581 (TRBV20-1, TRBJ2-7)
CSARAPGLALSYEQYF

SEQ ID NO: 393163 - protein, 14 aa, Homo sapiens
  CDR3 for alpha chain variable domain of TCR clone 196582 (TRAV38-1, TRAJ45)
CAYYSGGGADGFPF

SEQ ID NO: 393164 - protein, 20 aa, Homo sapiens
  CDR3 for beta chain variable domain of TCR clone 196582 (TRBV28, TRBJ2-1)
CASTPIGRSPGLAGGNEQFF

SEQ ID NO: 393165 - protein, 18 aa, Homo sapiens
  CDR3 for alpha chain variable domain of TCR clone 196583 (TRAV13-1, TRAJ52)
CAASKRSAGRTSYGKLTF

SEQ ID NO: 393166 - protein, 15 aa, Homo sapiens
  CDR3 for beta chain variable domain of TCR clone 196583 (TRBV6-3, TRBJ2-7)
CASSSPGTVFYEQYF

SEQ ID NO: 393167 - protein, 12 aa, Homo sapiens
  CDR3 for alpha chain variable domain of TCR clone 196584 (TRAV12-1, TRAJ30)
CGVNPRDDKIIF

SEQ ID NO: 393168 - protein, 18 aa, Homo sapiens
  CDR3 for beta chain variable domain of TCR clone 196584 (TRBV5-1, TRBJ2-7)
CASSLAGFGGMSSYEQYF

SEQ ID NO: 393169 - protein, 10 aa, Homo sapiens
  CDR3 for alpha chain variable domain of TCR clone 196585 (TRAV23/DV6, TRAJ57)
CAASSTLSQS

SEQ ID NO: 393170 - protein, 16 aa, Homo sapiens
  CDR3 for beta chain variable domain of TCR clone 196585 (TRBV12-4, TRBJ1-5)
CASSRPVGGSNQPQHF

SEQ ID NO: 393171 - protein, 12 aa, Homo sapiens
  CDR3 for alpha chain variable domain of TCR clone 196586 (TRAV38-1, TRAJ20)
CAFIWNDYTLSF

SEQ ID NO: 393172 - protein, 14 aa, Homo sapiens
  CDR3 for beta chain variable domain of TCR clone 196586 (TRBV27, TRBJ1-1)
CASSPQGKRAEAFF

SEQ ID NO: 393173 - protein, 16 aa, Homo sapiens
  CDR3 for alpha chain variable domain of TCR clone 196587 (TRAV12-2, TRAJ10)
CAVNRVLTGGGNKLTF

SEQ ID NO: 393174 - protein, 16 aa, Homo sapiens
  CDR3 for beta chain variable domain of TCR clone 196587 (TRBV28, TRBJ2-1)
CASSSPEYPRDNEQFF

SEQ ID NO: 393175 - protein, 15 aa, Homo sapiens
  CDR3 for alpha chain variable domain of TCR clone 196588 (TRAV26-1, TRAJ44)
CIARVPFGTASKLTF

SEQ ID NO: 393176 - protein, 15 aa, Homo sapiens
  CDR3 for beta chain variable domain of TCR clone 196588 (TRBV20-1, TRBJ1-1)
CSAGRGVTGNTEAFF

SEQ ID NO: 393177 - protein, 11 aa, Homo sapiens
  CDR3 for alpha chain variable domain of TCR clone 196589 (TRAV12-2, TRAJ31)
CAVSNNARLMF

SEQ ID NO: 393178 - protein, 14 aa, Homo sapiens
  CDR3 for beta chain variable domain of TCR clone 196589 (TRBV20-1, TRBJ1-1)
CSAQTRIGGTEAFF

SEQ ID NO: 393179 - protein, 12 aa, Homo sapiens
  CDR3 for alpha chain variable domain of TCR clone 196590 (TRAV12-3, TRAJ17)
CAMTLTGNKLTF

SEQ ID NO: 393180 - protein, 16 aa, Homo sapiens
  CDR3 for beta chain variable domain of TCR clone 196590 (TRBV6-1, TRBJ1-3)
CASVQGGGGNTIYLER

SEQ ID NO: 393181 - protein, 14 aa, Homo sapiens
  CDR3 for alpha chain variable domain of TCR clone 196591 (TRAV13-1, TRAJ44)
CAAKATGTASKLTF

SEQ ID NO: 393182 - protein, 15 aa, Homo sapiens
  CDR3 for beta chain variable domain of TCR clone 196591 (TRBV4-1, TRBJ2-7)
CASSQNTGRLYEQYF

SEQ ID NO: 393183 - protein, 12 aa, Homo sapiens
  CDR3 for alpha chain variable domain of TCR clone 196592 (TRAV27, TRAJ40)
CADRPGTYKYIF

SEQ ID NO: 393184 - protein, 15 aa, Homo sapiens
  CDR3 for beta chain variable domain of TCR clone 196592 (TRBV20-1, TRBJ2-7)
CSARDRVSGMDEQYF

SEQ ID NO: 393185 - protein, 15 aa, Homo sapiens
  CDR3 for alpha chain variable domain of TCR clone 196593 (TRAV12-3, TRAJ6)
CAMSATTGGSYIPTL

SEQ ID NO: 393186 - protein, 17 aa, Homo sapiens
  CDR3 for beta chain variable domain of TCR clone 196593 (TRBV11-3, TRBJ2-3)
CASSLGLTGGGTDTQYF

SEQ ID NO: 393187 - protein, 13 aa, Homo sapiens
  CDR3 for alpha chain variable domain of TCR clone 196594 (TRAV12-3, TRAJ21)
CAPGPHNFNKFYF

SEQ ID NO: 393188 - protein, 13 aa, Homo sapiens
  CDR3 for beta chain variable domain of TCR clone 196594 (TRBV4-2, TRBJ1-1)
CASSQAGNTEAVF

SEQ ID NO: 393189 - protein, 12 aa, Homo sapiens
  CDR3 for alpha chain variable domain of TCR clone 196595 (TRAV21, TRAJ33)
CAKMDSNYQLIC

SEQ ID NO: 393190 - protein, 15 aa, Homo sapiens
  CDR3 for beta chain variable domain of TCR clone 196595 (TRBV12-4, TRBJ2-5)
CASSPPTGLQETQYF

SEQ ID NO: 393191 - protein, 15 aa, Homo sapiens
  CDR3 for alpha chain variable domain of TCR clone 196596 (TRAV26-1, TRAJ29)
CIVRVTNSGNTPLVF

SEQ ID NO: 393192 - protein, 12 aa, Homo sapiens
  CDR3 for beta chain variable domain of TCR clone 196596 (TRBV20-1, TRBJ1-2)
CSASWQGYGCTF

SEQ ID NO: 393193 - protein, 16 aa, Homo sapiens
  CDR3 for alpha chain variable domain of TCR clone 196597 (TRAV13-1, TRAJ18)
CAASRMRGSTLGGLYF

SEQ ID NO: 393194 - protein, 16 aa, Homo sapiens
  CDR3 for beta chain variable domain of TCR clone 196597 (TRBV27, TRBJ1-1)
CASSSRGRTGYTEAFF

SEQ ID NO: 393195 - protein, 13 aa, Homo sapiens
  CDR3 for alpha chain variable domain of TCR clone 196598 (TRAV12-1, TRAJ29)
CVGRNSGNTPLVF

SEQ ID NO: 393196 - protein, 13 aa, Homo sapiens
  CDR3 for beta chain variable domain of TCR clone 196598 (TRBV24-1, TRBJ2-2)
CATSDWSTGELFF

SEQ ID NO: 393197 - protein, 11 aa, Homo sapiens
  CDR3 for alpha chain variable domain of TCR clone 196599 (TRAV29/DV5, TRAJ47)
CAATYGNKLAF

SEQ ID NO: 393198 - protein, 17 aa, Homo sapiens
  CDR3 for beta chain variable domain of TCR clone 196599 (TRBV7-9, TRBJ2-1)
CASSLVASYPSYNEQFF

SEQ ID NO: 393199 - protein, 15 aa, Homo sapiens
  CDR3 for alpha chain variable domain of TCR clone 196600 (TRAV26-1, TRAJ28)
CIVRVAGAGSYQLTF

SEQ ID NO: 393200 - protein, 14 aa, Homo sapiens
  CDR3 for beta chain variable domain of TCR clone 196600 (TRBV7-9, TRBJ2-1)
CASSPRDSLYEQFF

SEQ ID NO: 393201 - protein, 13 aa, Homo sapiens
  CDR3 for alpha chain variable domain of TCR clone 196601 (TRAV12-3, TRAJ7)
CAMSASGNNRLAF

SEQ ID NO: 393202 - protein, 15 aa, Homo sapiens
  CDR3 for beta chain variable domain of TCR clone 196601 (TRBV27, TRBJ2-1)
CASSNGGGSSNEQFF

SEQ ID NO: 393203 - protein, 15 aa, Homo sapiens
  CDR3 for alpha chain variable domain of TCR clone 196602 (TRAV3, TRAJ9)
CAVRARNTGGFKIIF

SEQ ID NO: 393204 - protein, 15 aa, Homo sapiens
  CDR3 for beta chain variable domain of TCR clone 196602 (TRBV27, TRBJ1-1)
CASSPYADPYTEAFF

SEQ ID NO: 393205 - protein, 13 aa, Homo sapiens
  CDR3 for alpha chain variable domain of TCR clone 196603 (TRAV35, TRAJ42)
CAGFPGSQGNLIF

SEQ ID NO: 393206 - protein, 19 aa, Homo sapiens
  CDR3 for beta chain variable domain of TCR clone 196603 (TRBV29-1, TRBJ2-1)
TVSNMSPEDSSPGNNEQFF

SEQ ID NO: 393207 - protein, 19 aa, Homo sapiens
  CDR3 for alpha chain variable domain of TCR clone 196604 (TRAV38-1, TRAJ53)
CAFMKHGLESGGSNYKLTF

SEQ ID NO: 393208 - protein, 12 aa, Homo sapiens
  CDR3 for beta chain variable domain of TCR clone 196604 (TRBV11-2, TRBJ2-2)
CASSLPTGELFF

SEQ ID NO: 393209 - protein, 11 aa, Homo sapiens
  CDR3 for alpha chain variable domain of TCR clone 196605 (TRAV23/DV6, TRAJ48)
CAHRWGEKLTF

SEQ ID NO: 393210 - protein, 13 aa, Homo sapiens
  CDR3 for beta chain variable domain of TCR clone 196605 (TRBV12-4, TRBJ2-5)
CASSPGTEETQYF

SEQ ID NO: 393211 - protein, 13 aa, Homo sapiens
  CDR3 for alpha chain variable domain of TCR clone 196606 (TRAV20, TRAJ54)
CALTFEGAQKLVF

SEQ ID NO: 393212 - protein, 12 aa, Homo sapiens
  CDR3 for beta chain variable domain of TCR clone 196606 (TRBV5-1, TRBJ2-5)
CDSSFSWETQYF

SEQ ID NO: 393213 - protein, 21 aa, Homo sapiens
  CDR3 for alpha chain variable domain of TCR clone 196607 (TRAV12-1, TRAJ37)
CVVNAGLWQHRQTNLWARDNF

SEQ ID NO: 393214 - protein, 12 aa, Homo sapiens
  CDR3 for beta chain variable domain of TCR clone 196607 (TRBV20-1, TRBJ1-2)
CSAPGFNYGYTF

SEQ ID NO: 393215 - protein, 16 aa, Homo sapiens
  CDR3 for alpha chain variable domain of TCR clone 196608 (TRAV16, TRAJ4)
CALSRTFSGVYNKLIF

SEQ ID NO: 393216 - protein, 16 aa, Homo sapiens
  CDR3 for beta chain variable domain of TCR clone 196608 (TRBV24-1, TRBJ2-3)
CATSDPGTGATDTQYF

SEQ ID NO: 393217 - protein, 11 aa, Homo sapiens
  CDR3 for alpha chain variable domain of TCR clone 196609 (TRAV2, TRAJ33)
CAVESNYQLIW

SEQ ID NO: 393218 - protein, 12 aa, Homo sapiens
  CDR3 for beta chain variable domain of TCR clone 196609 (TRBV11-2, TRBJ2-2)
CASSLGGGELVF

SEQ ID NO: 393219 - protein, 12 aa, Homo sapiens
  CDR3 for alpha chain variable domain of TCR clone 196610 (TRAV8-3, TRAJ22)
FGGQSSARQLPF

SEQ ID NO: 393220 - protein, 15 aa, Homo sapiens
  CDR3 for beta chain variable domain of TCR clone 196610 (TRBV20-1, TRBJ1-1)
CSASRGVTGNTEAFF

SEQ ID NO: 393221 - protein, 15 aa, Homo sapiens
  CDR3 for alpha chain variable domain of TCR clone 196611 (TRAV8-3, TRAJ45)
CASSYSGGGADGLTF

SEQ ID NO: 393222 - protein, 17 aa, Homo sapiens
  CDR3 for beta chain variable domain of TCR clone 196611 (TRBV10-3, TRBJ2-7)
CASKLAELRAVLRAGHQ

SEQ ID NO: 393223 - protein, 18 aa, Homo sapiens
  CDR3 for alpha chain variable domain of TCR clone 196612 (TRAV21, TRAJ52)
CAVRPSPAGGTSYGKLTF

SEQ ID NO: 393224 - protein, 14 aa, Homo sapiens
  CDR3 for beta chain variable domain of TCR clone 196612 (TRBV4-1, TRBJ2-2)
CASSQEVNTGELFF

SEQ ID NO: 393225 - protein, 17 aa, Homo sapiens
  CDR3 for alpha chain variable domain of TCR clone 196613 (TRAV3, TRAJ6)
CAVRDGSRAGGSYIPTF

SEQ ID NO: 393226 - protein, 13 aa, Homo sapiens
  CDR3 for beta chain variable domain of TCR clone 196613 (TRBV19, TRBJ1-2)
CASSVPGQDGYTF

SEQ ID NO: 393227 - protein, 14 aa, Homo sapiens
  CDR3 for alpha chain variable domain of TCR clone 196614 (TRAV23/DV6, TRAJ4)
CAANLSGGYNKLIF

SEQ ID NO: 393228 - protein, 11 aa, Homo sapiens
  CDR3 for beta chain variable domain of TCR clone 196614 (TRBV7-9, TRBJ2-3)
GASSPTDTQYF

SEQ ID NO: 393229 - protein, 13 aa, Homo sapiens
  CDR3 for alpha chain variable domain of TCR clone 196615 (TRAV21, TRAJ20)
CAVGLRVDYKLSF

SEQ ID NO: 393230 - protein, 18 aa, Homo sapiens
  CDR3 for beta chain variable domain of TCR clone 196615 (TRBV12-4, TRBJ2-2)
CASSLVAGTRGRTGELFF

SEQ ID NO: 393231 - protein, 15 aa, Homo sapiens
  CDR3 for alpha chain variable domain of TCR clone 196616 (TRAV12-1, TRAJ10)
CVVNKLTGGGNKLTF

SEQ ID NO: 393232 - protein, 17 aa, Homo sapiens
  CDR3 for beta chain variable domain of TCR clone 196616 (TRBV5-1, TRBJ1-6)
CASSTSLQGSDNSPLHF

SEQ ID NO: 393233 - protein, 14 aa, Homo sapiens
  CDR3 for alpha chain variable domain of TCR clone 196617 (TRAV1-2, TRAJ16)
CAVNRFSDGKKLLF

SEQ ID NO: 393234 - protein, 15 aa, Homo sapiens
  CDR3 for beta chain variable domain of TCR clone 196617 (TRBV29-1, TRBJ2-7)
CSVELFDRGSYEQYF

SEQ ID NO: 393235 - protein, 11 aa, Homo sapiens
  CDR3 for alpha chain variable domain of TCR clone 196618 (TRAV21, TRAJ4)
HVSGGYNKLIF

SEQ ID NO: 393236 - protein, 12 aa, Homo sapiens
  CDR3 for beta chain variable domain of TCR clone 196618 (TRBV7-3, TRBJ2-7)
CASSIKREEQYF

SEQ ID NO: 393237 - protein, 14 aa, Homo sapiens
  CDR3 for alpha chain variable domain of TCR clone 196619 (TRAV1-2, TRAJ16)
FAVNRFSDGQKLLF

SEQ ID NO: 393238 - protein, 16 aa, Homo sapiens
  CDR3 for beta chain variable domain of TCR clone 196619 (TRBV19, TRBJ2-1)
CASSKAGPSSYNEQFF

SEQ ID NO: 393239 - protein, 11 aa, Homo sapiens
  CDR3 for alpha chain variable domain of TCR clone 196620 (TRAV1-1, TRAJ23)
CAVRQGGKLIF

SEQ ID NO: 393240 - protein, 20 aa, Homo sapiens
  CDR3 for beta chain variable domain of TCR clone 196620 (TRBV7-8, TRBJ2-2)
CAGNHLFPGPTIHITGELFF

SEQ ID NO: 393241 - protein, 14 aa, Homo sapiens
  CDR3 for alpha chain variable domain of TCR clone 196621 (TRAV12-2, TRAJ13)
CAVKKPGGYQKVTF

SEQ ID NO: 393242 - protein, 14 aa, Homo sapiens
  CDR3 for beta chain variable domain of TCR clone 196621 (TRBV19, TRBJ2-1)
CASPTFVLSGEQFF

SEQ ID NO: 393243 - protein, 14 aa, Homo sapiens
  CDR3 for alpha chain variable domain of TCR clone 196622 (TRAV8-1, TRAJ22)
CGAPSSGSARQLTF

SEQ ID NO: 393244 - protein, 14 aa, Homo sapiens
  CDR3 for beta chain variable domain of TCR clone 196622 (TRBV9, TRBJ2-2)
CASSVGQGAGELFF

SEQ ID NO: 393245 - protein, 15 aa, Homo sapiens
  CDR3 for alpha chain variable domain of TCR clone 196623 (TRAV26-1, TRAJ22)
CIVRVSFWFCKATDL

SEQ ID NO: 393246 - protein, 14 aa, Homo sapiens
  CDR3 for beta chain variable domain of TCR clone 196623 (TRBV11-3, TRBJ2-7)
CASSPDRNTYEQYF

SEQ ID NO: 393247 - protein, 12 aa, Homo sapiens
  CDR3 for alpha chain variable domain of TCR clone 196624 (TRAV8-3, TRAJ26)
CAGDNCGQKFVF

SEQ ID NO: 393248 - protein, 15 aa, Homo sapiens
  CDR3 for beta chain variable domain of TCR clone 196624 (TRBV11-2, TRBJ2-1)
CASSLGTSGLNEQFF

SEQ ID NO: 393249 - protein, 12 aa, Homo sapiens
  CDR3 for alpha chain variable domain of TCR clone 196625 (TRAV17, TRAJ20)
CATQSNAYKLSF

SEQ ID NO: 393250 - protein, 13 aa, Homo sapiens
  CDR3 for beta chain variable domain of TCR clone 196625 (TRBV10-3, TRBJ1-1)
CAIIPEGGTEAFF

SEQ ID NO: 393251 - protein, 15 aa, Homo sapiens
  CDR3 for alpha chain variable domain of TCR clone 196626 (TRAV8-3, TRAJ27)
CAVGPSRTTAGKSTF

SEQ ID NO: 393252 - protein, 15 aa, Homo sapiens
  CDR3 for beta chain variable domain of TCR clone 196626 (TRBV7-2, TRBJ2-1)
CASSSGLAGGNEQFF

SEQ ID NO: 393253 - protein, 15 aa, Homo sapiens
  CDR3 for alpha chain variable domain of TCR clone 196627 (TRAV8-4, TRAJ12)
CAVSDRVDSSYKLIF

SEQ ID NO: 393254 - protein, 13 aa, Homo sapiens
  CDR3 for beta chain variable domain of TCR clone 196627 (TRBV7-8, TRBJ2-7)
CASSFAGLYERYF

SEQ ID NO: 393255 - protein, 12 aa, Homo sapiens
  CDR3 for alpha chain variable domain of TCR clone 196628 (TRAV12-3, TRAJ20)
WAMVRGVYKLSF

SEQ ID NO: 393256 - protein, 13 aa, Homo sapiens
  CDR3 for beta chain variable domain of TCR clone 196628 (TRBV23-1, TRBJ1-4)
CASRGKFNEKLFF

SEQ ID NO: 393257 - protein, 23 aa, Homo sapiens
  CDR3 for alpha chain variable domain of TCR clone 196629 (TRAV3, TRAJ38)
CAVRDCLNAGNNHIQNPDPAVYP

SEQ ID NO: 393258 - protein, 14 aa, Homo sapiens
  CDR3 for beta chain variable domain of TCR clone 196629 (TRBV5-5, TRBJ1-5)
CASSGQGVDQPQHF

SEQ ID NO: 393259 - protein, 12 aa, Homo sapiens
  CDR3 for alpha chain variable domain of TCR clone 196630 (TRAV13-1, TRAJ48)
CAANFGNEKLTF

SEQ ID NO: 393260 - protein, 13 aa, Homo sapiens
  CDR3 for beta chain variable domain of TCR clone 196630 (TRBV7-9, TRBJ1-2)
CASSLKQNFGYTF

SEQ ID NO: 393261 - protein, 16 aa, Homo sapiens
  CDR3 for alpha chain variable domain of TCR clone 196631 (TRAV23/DV6, TRAJ52)
CAARPSGGTSYVKLTF

SEQ ID NO: 393262 - protein, 13 aa, Homo sapiens
  CDR3 for beta chain variable domain of TCR clone 196631 (TRBV7-9, TRBJ1-1)
CASSLSGETEAFF

SEQ ID NO: 393263 - protein, 12 aa, Homo sapiens
  CDR3 for alpha chain variable domain of TCR clone 196632 (TRAV12-1, TRAJ31)
CVVNRNNARLMF

SEQ ID NO: 393264 - protein, 15 aa, Homo sapiens
  CDR3 for beta chain variable domain of TCR clone 196632 (TRBV10-3, TRBJ2-3)
CAISEALSSTDTQYF

SEQ ID NO: 393265 - protein, 13 aa, Homo sapiens
  CDR3 for alpha chain variable domain of TCR clone 196633 (TRAV13-1, TRAJ43)
CAASLSNNNYIRF

SEQ ID NO: 393266 - protein, 15 aa, Homo sapiens
  CDR3 for beta chain variable domain of TCR clone 196633 (TRBV5-1, TRBJ2-1)
CASSQAGYWWNEQFF

SEQ ID NO: 393267 - protein, 15 aa, Homo sapiens
  CDR3 for alpha chain variable domain of TCR clone 196634 (TRAV12-3, TRAJ27)
CAMRAYNTYAGKSTF

SEQ ID NO: 393268 - protein, 13 aa, Homo sapiens
  CDR3 for beta chain variable domain of TCR clone 196634 (TRBV11-2, TRBJ2-5)
CASSRGPSETQYF

SEQ ID NO: 393269 - protein, 14 aa, Homo sapiens
  CDR3 for alpha chain variable domain of TCR clone 196635 (TRAV12-2, TRAJ52)
CAGPPSTSYGKLTF

SEQ ID NO: 393270 - protein, 15 aa, Homo sapiens
  CDR3 for beta chain variable domain of TCR clone 196635 (TRBV18, TRBJ2-1)
CASSPPGASYNEQFF

SEQ ID NO: 393271 - protein, 16 aa, Homo sapiens
  CDR3 for alpha chain variable domain of TCR clone 196636 (TRAV3, TRAJ37)
CAVRPHGSGNAGKLIF

SEQ ID NO: 393272 - protein, 16 aa, Homo sapiens
  CDR3 for beta chain variable domain of TCR clone 196636 (TRBV4-2, TRBJ1-2)
CASSQEIGGASYGYTF

SEQ ID NO: 393273 - protein, 15 aa, Homo sapiens
  CDR3 for alpha chain variable domain of TCR clone 196637 (TRAV1-2, TRAJ10)
CVVRGFTGGGNKLTF

SEQ ID NO: 393274 - protein, 14 aa, Homo sapiens
  CDR3 for beta chain variable domain of TCR clone 196637 (TRBV7-2, TRBJ1-1)
CASSFLTGTTEAFF

SEQ ID NO: 393275 - protein, 15 aa, Homo sapiens
  CDR3 for alpha chain variable domain of TCR clone 196638 (TRAV27, TRAJ38)
CAAHRNAGNNRKPIW

SEQ ID NO: 393276 - protein, 15 aa, Homo sapiens
  CDR3 for beta chain variable domain of TCR clone 196638 (TRBV5-1, TRBJ2-1)
CASSPPRAPYNEQFF

SEQ ID NO: 393277 - protein, 12 aa, Homo sapiens
  CDR3 for alpha chain variable domain of TCR clone 196639 (TRAV13-2, TRAJ23)
CAERHRGGKLIL

SEQ ID NO: 393278 - protein, 13 aa, Homo sapiens
  CDR3 for beta chain variable domain of TCR clone 196639 (TRBV7-9, TRBJ2-3)
CASSPGSTDTQYF

SEQ ID NO: 393279 - protein, 12 aa, Homo sapiens
  CDR3 for alpha chain variable domain of TCR clone 196640 (TRAV1-2, TRAJ33)
CAALDSNYQLIW

SEQ ID NO: 393280 - protein, 16 aa, Homo sapiens
  CDR3 for beta chain variable domain of TCR clone 196640 (TRBV7-3, TRBJ2-1)
CASSKPLAGGYNEQFF

SEQ ID NO: 393281 - protein, 11 aa, Homo sapiens
  CDR3 for alpha chain variable domain of TCR clone 196641 (TRAV8-3, TRAJ49)
CAVGGGNQFYF

SEQ ID NO: 393282 - protein, 14 aa, Homo sapiens
  CDR3 for beta chain variable domain of TCR clone 196641 (TRBV4-2, TRBJ1-5)
CASSQDSINQPQHF

SEQ ID NO: 393283 - protein, 14 aa, Homo sapiens
  CDR3 for alpha chain variable domain of TCR clone 196642 (TRAV8-3, TRAJ10)
CAVGNAGGGNKLTF

SEQ ID NO: 393284 - protein, 14 aa, Homo sapiens
  CDR3 for beta chain variable domain of TCR clone 196642 (TRBV5-4, TRBJ2-5)
CASSQGAGKETQYF

SEQ ID NO: 393285 - protein, 14 aa, Homo sapiens
  CDR3 for alpha chain variable domain of TCR clone 196643 (TRAV1-2, TRAJ8)
CAVREDTGFQKLVF

SEQ ID NO: 393286 - protein, 13 aa, Homo sapiens
  CDR3 for beta chain variable domain of TCR clone 196643 (TRBV7-3, TRBJ1-1)
CASSQEWGAEAFF

SEQ ID NO: 393287 - protein, 13 aa, Homo sapiens
  CDR3 for alpha chain variable domain of TCR clone 196644 (TRAV17, TRAJ11)
CATRNSGYSTLTF

SEQ ID NO: 393288 - protein, 15 aa, Homo sapiens
  CDR3 for beta chain variable domain of TCR clone 196644 (TRBV7-9, TRBJ1-6)
CASSSPGRGNSPLHF

SEQ ID NO: 393289 - protein, 13 aa, Homo sapiens
  CDR3 for alpha chain variable domain of TCR clone 196645 (TRAV17, TRAJ29)
CATFGSGNTPLVF

SEQ ID NO: 393290 - protein, 12 aa, Homo sapiens
  CDR3 for beta chain variable domain of TCR clone 196645 (TRBV19, TRBJ1-1)
CASSIGTEEAFF

SEQ ID NO: 393291 - protein, 12 aa, Homo sapiens
  CDR3 for alpha chain variable domain of TCR clone 196646 (TRAV12-3, TRAJ17)
CAMTLTGNKLTF

SEQ ID NO: 393292 - protein, 15 aa, Homo sapiens
  CDR3 for beta chain variable domain of TCR clone 196646 (TRBV20-1, TRBJ2-7)
GSARDRVSGRDEQYF

SEQ ID NO: 393293 - protein, 14 aa, Homo sapiens
  CDR3 for alpha chain variable domain of TCR clone 196647 (TRAV26-1, TRAJ38)
CIADNAGNNRKLIW

SEQ ID NO: 393294 - protein, 17 aa, Homo sapiens
  CDR3 for beta chain variable domain of TCR clone 196647 (TRBV15, TRBJ1-1)
CATSGVGGADGDTEAFF

SEQ ID NO: 393295 - protein, 15 aa, Homo sapiens
  CDR3 for alpha chain variable domain of TCR clone 196648 (TRAV17, TRAJ56)
CTTDANTGANSKLTF

SEQ ID NO: 393296 - protein, 16 aa, Homo sapiens
  CDR3 for beta chain variable domain of TCR clone 196648 (TRBV7-3, TRBJ2-2)
CASSLKRGTLSGELFF

SEQ ID NO: 393297 - protein, 13 aa, Homo sapiens
  CDR3 for alpha chain variable domain of TCR clone 196649 (TRAV3, TRAJ27)
CAVRPLCAGKSTF

SEQ ID NO: 393298 - protein, 12 aa, Homo sapiens
  CDR3 for beta chain variable domain of TCR clone 196649 (TRBV7-9, TRBJ2-7)
CATRTDAYEQYF

SEQ ID NO: 393299 - protein, 13 aa, Homo sapiens
  CDR3 for alpha chain variable domain of TCR clone 196650 (TRAV8-6, TRAJ49)
CAVLTNTGNQFYF

SEQ ID NO: 393300 - protein, 17 aa, Homo sapiens
  CDR3 for beta chain variable domain of TCR clone 196650 (TRBV11-2, TRBJ2-1)
CASSLYPPGVEYNEQFF

SEQ ID NO: 393301 - protein, 15 aa, Homo sapiens
  CDR3 for alpha chain variable domain of TCR clone 196651 (TRAV23/DV6, TRAJ13)
CAAWPGGGGYQKVTL

SEQ ID NO: 393302 - protein, 17 aa, Homo sapiens
  CDR3 for beta chain variable domain of TCR clone 196651 (TRBV19, TRBJ2-7)
CASSISFYGSYPYEQYF

SEQ ID NO: 393303 - protein, 13 aa, Homo sapiens
  CDR3 for alpha chain variable domain of TCR clone 196652 (TRAV12-1, TRAJ33)
CGGAPDSNYQLIW

SEQ ID NO: 393304 - protein, 15 aa, Homo sapiens
  CDR3 for beta chain variable domain of TCR clone 196652 (TRBV27, TRBJ2-1)
CASSNGGGSSNEQFF

SEQ ID NO: 393305 - protein, 14 aa, Homo sapiens
  CDR3 for alpha chain variable domain of TCR clone 196653 (TRAV12-2, TRAJ40)
CAVKIPSGTYKYIF

SEQ ID NO: 393306 - protein, 13 aa, Homo sapiens
  CDR3 for beta chain variable domain of TCR clone 196653 (TRBV11-2, TRBJ2-1)
CASSLRLTHEQFF

SEQ ID NO: 393307 - protein, 14 aa, Homo sapiens
  CDR3 for alpha chain variable domain of TCR clone 196654 (TRAV36/DV7, TRAJ40)
CAVETTSGTYKYIF

SEQ ID NO: 393308 - protein, 14 aa, Homo sapiens
  CDR3 for beta chain variable domain of TCR clone 196654 (TRBV7-8, TRBJ2-7)
CASSPGLADYEQYF

SEQ ID NO: 393309 - protein, 14 aa, Homo sapiens
  CDR3 for alpha chain variable domain of TCR clone 196655 (TRAV29/DV5, TRAJ30)
CAARLMNRDDKIIF

SEQ ID NO: 393310 - protein, 17 aa, Homo sapiens
  CDR3 for beta chain variable domain of TCR clone 196655 (TRBV12-4, TRBJ2-3)
CASSGPDLAGGADTQYF

SEQ ID NO: 393311 - protein, 13 aa, Homo sapiens
  CDR3 for alpha chain variable domain of TCR clone 196656 (TRAV12-2, TRAJ52)
CAVRGTSYGKLTF

SEQ ID NO: 393312 - protein, 17 aa, Homo sapiens
  CDR3 for beta chain variable domain of TCR clone 196656 (TRBV11-2, TRBJ2-7)
CASSLYPPGVEYNEQFF

SEQ ID NO: 393313 - protein, 12 aa, Homo sapiens
  CDR3 for alpha chain variable domain of TCR clone 196657 (TRAV3, TRAJ31)
CGVRPRGPRLMF

SEQ ID NO: 393314 - protein, 17 aa, Homo sapiens
  CDR3 for beta chain variable domain of TCR clone 196657 (TRBV7-9, TRBJ1-5)
CASSASQGGYSNQPQHF

SEQ ID NO: 393315 - protein, 14 aa, Homo sapiens
  CDR3 for alpha chain variable domain of TCR clone 196658 (TRAV1-2, TRAJ8)
CAVSEDTGFQKLVF

SEQ ID NO: 393316 - protein, 15 aa, Homo sapiens
  CDR3 for beta chain variable domain of TCR clone 196658 (TRBV5-7, TRBJ2-3)
CASSPGLATTDTQYF

SEQ ID NO: 393317 - protein, 10 aa, Homo sapiens
  CDR3 for alpha chain variable domain of TCR clone 196659 (TRAV1-2, TRAJ20)
CALNDYKLSF

SEQ ID NO: 393318 - protein, 12 aa, Homo sapiens
  CDR3 for beta chain variable domain of TCR clone 196659 (TRBV7-3, TRBJ2-5)
CASSSPGGTQYF

SEQ ID NO: 393319 - protein, 13 aa, Homo sapiens
  CDR3 for alpha chain variable domain of TCR clone 196660 (TRAV3, TRAJ7)
CAVSSYGNNRLAF

SEQ ID NO: 393320 - protein, 15 aa, Homo sapiens
  CDR3 for beta chain variable domain of TCR clone 196660 (TRBV9, TRBJ2-3)
CASSLEGGLTDTQYF

SEQ ID NO: 393321 - protein, 12 aa, Homo sapiens
  CDR3 for alpha chain variable domain of TCR clone 196661 (TRAV13-2, TRAJ42)
CAEGGSQGNLIF

SEQ ID NO: 393322 - protein, 13 aa, Homo sapiens
  CDR3 for beta chain variable domain of TCR clone 196661 (TRBV5-5, TRBJ1-2)
CASSFWRGEDYTF

SEQ ID NO: 393323 - protein, 13 aa, Homo sapiens
  CDR3 for alpha chain variable domain of TCR clone 196662 (TRAV21, TRAJ37)
CAVSSGNTGKLIF

SEQ ID NO: 393324 - protein, 14 aa, Homo sapiens
  CDR3 for beta chain variable domain of TCR clone 196662 (TRBV12-4, TRBJ2-2)
CASNQGANTGELFF

SEQ ID NO: 393325 - protein, 14 aa, Homo sapiens
  CDR3 for alpha chain variable domain of TCR clone 196663 (TRAV12-3, TRAJ12)
CAMSALDSSYKLIF

SEQ ID NO: 393326 - protein, 16 aa, Homo sapiens
  CDR3 for beta chain variable domain of TCR clone 196663 (TRBV7-9, TRBJ2-3)
SASSLQGNPGTDTQYF

SEQ ID NO: 393327 - protein, 13 aa, Homo sapiens
  CDR3 for alpha chain variable domain of TCR clone 196664 (TRAV12-3, TRAJ46)
CAVKKSSGDKLTF

SEQ ID NO: 393328 - protein, 16 aa, Homo sapiens
  CDR3 for beta chain variable domain of TCR clone 196664 (TRBV7-2, TRBJ2-5)
CASSSKWLSGQETQYF

SEQ ID NO: 393329 - protein, 14 aa, Homo sapiens
  CDR3 for alpha chain variable domain of TCR clone 196665 (TRAV30, TRAJ26)
CDTEIVSYGQNFVF

SEQ ID NO: 393330 - protein, 13 aa, Homo sapiens
  CDR3 for beta chain variable domain of TCR clone 196665 (TRBV19, TRBJ1-3)
CASRLSLGNTMYF

SEQ ID NO: 393331 - protein, 14 aa, Homo sapiens
  CDR3 for alpha chain variable domain of TCR clone 196666 (TRAV9-2, TRAJ39)
CALYIYNAGNMLTF

SEQ ID NO: 393332 - protein, 13 aa, Homo sapiens
  CDR3 for beta chain variable domain of TCR clone 196666 (TRBV12-5, TRBJ2-3)
CASGDRHSDTQYF

SEQ ID NO: 393333 - protein, 13 aa, Homo sapiens
  CDR3 for alpha chain variable domain of TCR clone 196667 (TRAV12-1, TRAJ16)
CVVNGPDGQKLLF

SEQ ID NO: 393334 - protein, 13 aa, Homo sapiens
  CDR3 for beta chain variable domain of TCR clone 196667 (TRBV2, TRBJ1-1)
CARNPTGRFHAFF

SEQ ID NO: 393335 - protein, 14 aa, Homo sapiens
  CDR3 for alpha chain variable domain of TCR clone 196668 (TRAV16, TRAJ15)
CALSGPQAGTALIF

SEQ ID NO: 393336 - protein, 12 aa, Homo sapiens
  CDR3 for beta chain variable domain of TCR clone 196668 (TRBV18, TRBJ2-5)
WASSPSKETQYF

SEQ ID NO: 393337 - protein, 13 aa, Homo sapiens
  CDR3 for alpha chain variable domain of TCR clone 196669 (TRAV27, TRAJ45)
CRSSGGGADGLTF

SEQ ID NO: 393338 - protein, 15 aa, Homo sapiens
  CDR3 for beta chain variable domain of TCR clone 196669 (TRBV19, TRBJ2-1)
CASSINREPSHEQFF

SEQ ID NO: 393339 - protein, 15 aa, Homo sapiens
  CDR3 for alpha chain variable domain of TCR clone 196670 (TRAV12-2, TRAJ53)
CAVNGGGGSNYKLTF

SEQ ID NO: 393340 - protein, 15 aa, Homo sapiens
  CDR3 for beta chain variable domain of TCR clone 196670 (TRBV9, TRBJ1-6)
CAGSVAGTGDSPLHF

SEQ ID NO: 393341 - protein, 15 aa, Homo sapiens
  CDR3 for alpha chain variable domain of TCR clone 196671 (TRAV12-2, TRAJ53)
CAVNGGGGSKHKLTF

SEQ ID NO: 393342 - protein, 13 aa, Homo sapiens
  CDR3 for beta chain variable domain of TCR clone 196671 (TRBV3-1, TRBJ1-1)
RASSPGVITEAFF

SEQ ID NO: 393343 - protein, 15 aa, Homo sapiens
  CDR3 for alpha chain variable domain of TCR clone 196672 (TRAV26-1, TRAJ18)
CIVRVMSSTLGRLYF

SEQ ID NO: 393344 - protein, 13 aa, Homo sapiens
  CDR3 for beta chain variable domain of TCR clone 196672 (TRBV28, TRBJ2-7)
CASSPSGTYEQYF

SEQ ID NO: 393345 - protein, 14 aa, Homo sapiens
  CDR3 for alpha chain variable domain of TCR clone 196673 (TRAV8-1, TRAJ24)
CAVNAADSLGKLQF

SEQ ID NO: 393346 - protein, 16 aa, Homo sapiens
  CDR3 for beta chain variable domain of TCR clone 196673 (TRBV4-3, TRBJ2-1)
CASSPALDRGVNEQFF

SEQ ID NO: 393347 - protein, 19 aa, Homo sapiens
  CDR3 for alpha chain variable domain of TCR clone 196674 (TRAV26-1, TRAJ22)
CCVLLHRWVFSGSARQLTF

SEQ ID NO: 393348 - protein, 17 aa, Homo sapiens
  CDR3 for beta chain variable domain of TCR clone 196674 (TRBV7-3, TRBJ2-3)
CASSRGLAGEVPDTQYF

SEQ ID NO: 393349 - protein, 11 aa, Homo sapiens
  CDR3 for alpha chain variable domain of TCR clone 196675 (TRAV3, TRAJ21)
CAVGNLNKFYF

SEQ ID NO: 393350 - protein, 17 aa, Homo sapiens
  CDR3 for beta chain variable domain of TCR clone 196675 (TRBV5-1, TRBJ2-5)
CASAVTRQFGNKETQYF

SEQ ID NO: 393351 - protein, 14 aa, Homo sapiens
  CDR3 for alpha chain variable domain of TCR clone 196676 (TRAV12-3, TRAJ10)
SHLPLTGGGNKLTF

SEQ ID NO: 393352 - protein, 15 aa, Homo sapiens
  CDR3 for beta chain variable domain of TCR clone 196676 (TRBV24-1, TRBJ2-4)
CATSDPRDRANIQYF

SEQ ID NO: 393353 - protein, 14 aa, Homo sapiens
  CDR3 for alpha chain variable domain of TCR clone 196677 (TRAV12-1, TRAJ42)
CVMIYGGSHGNLIF

SEQ ID NO: 393354 - protein, 13 aa, Homo sapiens
  CDR3 for beta chain variable domain of TCR clone 196677 (TRBV18, TRBJ2-5)
CASSPPGKETQYF

SEQ ID NO: 393355 - protein, 18 aa, Homo sapiens
  CDR3 for alpha chain variable domain of TCR clone 196678 (TRAV26-1, TRAJ22)
CIVRVALISSGSARQLTF

SEQ ID NO: 393356 - protein, 12 aa, Homo sapiens
  CDR3 for beta chain variable domain of TCR clone 196678 (TRBV13, TRBJ2-5)
CQQPRGGGDQYF

SEQ ID NO: 393357 - protein, 14 aa, Homo sapiens
  CDR3 for alpha chain variable domain of TCR clone 196679 (TRAV12-3, TRAJ54)
CAMRIIQGAQKLVF

SEQ ID NO: 393358 - protein, 12 aa, Homo sapiens
  CDR3 for beta chain variable domain of TCR clone 196679 (TRBV11-2, TRBJ2-2)
CANSLPTGELFF

SEQ ID NO: 393359 - protein, 17 aa, Homo sapiens
  CDR3 for alpha chain variable domain of TCR clone 196680 (TRAV26-1, TRAJ27)
CIVRTPWINTNAGKSTF

SEQ ID NO: 393360 - protein, 16 aa, Homo sapiens
  CDR3 for beta chain variable domain of TCR clone 196680 (TRBV7-9, TRBJ2-1)
CASSLDPGLAIDEQFF

SEQ ID NO: 393361 - protein, 14 aa, Homo sapiens
  CDR3 for alpha chain variable domain of TCR clone 196681 (TRAV26-1, TRAJ21)
CIVRPQYNFNKFYF

SEQ ID NO: 393362 - protein, 14 aa, Homo sapiens
  CDR3 for beta chain variable domain of TCR clone 196681 (TRBV4-1, TRBJ2-2)
CASSQAVNTGELFF

SEQ ID NO: 393363 - protein, 15 aa, Homo sapiens
  CDR3 for alpha chain variable domain of TCR clone 196682 (TRAV8-4, TRAJ42)
CAVSDDRGSQGTLIF

SEQ ID NO: 393364 - protein, 17 aa, Homo sapiens
  CDR3 for beta chain variable domain of TCR clone 196682 (TRBV11-2, TRBJ2-1)
CASSLYPPGVEYDEQFF

SEQ ID NO: 393365 - protein, 14 aa, Homo sapiens
  CDR3 for alpha chain variable domain of TCR clone 196683 (TRAV12-2, TRAJ13)
CAVKKTGGSQKVTF

SEQ ID NO: 393366 - protein, 15 aa, Homo sapiens
  CDR3 for beta chain variable domain of TCR clone 196683 (TRBV20-1, TRBJ2-7)
CSARDRVSGMDEQYF

SEQ ID NO: 393367 - protein, 12 aa, Homo sapiens
  CDR3 for alpha chain variable domain of TCR clone 196684 (TRAV12-1, TRAJ40)
CVVKVRTYKYIF

SEQ ID NO: 393368 - protein, 13 aa, Homo sapiens
  CDR3 for beta chain variable domain of TCR clone 196684 (TRBV7-9, TRBJ1-2)
CASSLKQNYGYTF
